United States Patent Application Publication US 2007/0048756 A1 - sequence listing, part 17

SEQ ID NO: 581203 - DNA, 33 bp, Homo sapien
aaaagagaatattaaacggacagatgtggtgat

SEQ ID NO: 581204 - DNA, 33 bp, Homo sapien
aaaagagaatattaaatggacagatgtggtgat

SEQ ID NO: 581205 - DNA, 33 bp, Homo sapien
gtattcattatgtacacggtgttttgaagaata

SEQ ID NO: 581206 - DNA, 33 bp, Homo sapien
gtattcattatgtacatggtgttttgaagaata

SEQ ID NO: 581207 - DNA, 33 bp, Homo sapien
cctctcagtatctcagaaagtttagcagccctt

SEQ ID NO: 581208 - DNA, 33 bp, Homo sapien
cctctcagtatctcagcaagtttagcagccctt

SEQ ID NO: 581209 - DNA, 33 bp, Homo sapien
cttacttcttaagttaccaggagtctgggcaga

SEQ ID NO: 581210 - DNA, 33 bp, Homo sapien
cttacttcttaagttatcaggagtctgggcaga

SEQ ID NO: 581211 - DNA, 33 bp, Homo sapien
ccagtagtcaccagaaagttttaacaccagcaa

SEQ ID NO: 581212 - DNA, 33 bp, Homo sapien
ccagtagtcaccagaaggttttaacaccagcaa

SEQ ID NO: 581213 - DNA, 33 bp, Homo sapien
cactaatatgtactgacagcctccagcctgagg

SEQ ID NO: 581214 - DNA, 33 bp, Homo sapien
cactaatatgtactgatagcctccagcctgagg

SEQ ID NO: 581215 - DNA, 33 bp, Homo sapien
ttcatttaatctataacatctgagtcagttgct

SEQ ID NO: 581216 - DNA, 33 bp, Homo sapien
ttcatttaatctataagatctgagtcagttgct

SEQ ID NO: 581217 - DNA, 33 bp, Homo sapien
ttgatcacagtagtgaaaataatgctaacaggc

SEQ ID NO: 581218 - DNA, 33 bp, Homo sapien
ttgatcacagtagtgacaataatgctaacaggc

SEQ ID NO: 581219 - DNA, 33 bp, Homo sapien; identical to SEQ ID NO: 581217

SEQ ID NO: 581220 - DNA, 33 bp, Homo sapien; identical to SEQ ID NO: 581218

SEQ ID NO: 581221 - DNA, 33 bp, Homo sapien
tgattgtaactttcaacggaccacacatgaatt

SEQ ID NO: 581222 - DNA, 33 bp, Homo sapien
tgattgtaactttcaatggaccacacatgaatt

SEQ ID NO: 581223 - DNA, 33 bp, Homo sapien
tgttcctcctccttgacgtctcttctaagcata

SEQ ID NO: 581224 - DNA, 33 bp, Homo sapien
tgttcctcctccttgatgtctcttctaagcata

SEQ ID NO: 581225 - DNA, 33 bp, Homo sapien
tgatataacatagaaccaataacgttgtgttca

SEQ ID NO: 581226 - DNA, 33 bp, Homo sapien
tgatataacatagaacgaataacgttgtgttca

SEQ ID NO: 581227 - DNA, 33 bp, Homo sapien
aagacaggtgactataaaactgcaatgtaaagt

SEQ ID NO: 581228 - DNA, 33 bp, Homo sapien
aagacaggtgactatacaactgcaatgtaaagt

SEQ ID NO: 581229 - DNA, 33 bp, Homo sapien
ctctgtgtgattgtcaactttgattaaccaagt

SEQ ID NO: 581230 - DNA, 33 bp, Homo sapien
ctctgtgtgattgtcacctttgattaaccaagt

SEQ ID NO: 581231 - DNA, 33 bp, Homo sapien
ttgaatttgaattatcactgaaaaatttggata

SEQ ID NO: 581232 - DNA, 33 bp, Homo sapien
ttgaatttgaattatcgctgaaaaatttggata

SEQ ID NO: 581233 - DNA, 33 bp, Homo sapien
actataaagtattttcaactgcaaggaattttg

SEQ ID NO: 581234 - DNA, 33 bp, Homo sapien
actataaagtattttcgactgcaaggaattttg

SEQ ID NO: 581235 - DNA, 33 bp, Homo sapien
aagtcaggttgcagcagctaaacccttactgtc

SEQ ID NO: 581236 - DNA, 33 bp, Homo sapien
aagtcaggttgcagcatctaaacccttactgtc

SEQ ID NO: 581237 - DNA, 33 bp, Homo sapien
tcatagtttagtgttacccaaacctctcatgtc

SEQ ID NO: 581238 - DNA, 33 bp, Homo sapien
tcatagtttagtgttatccaaacctctcatgtc

SEQ ID NO: 581239 - DNA, 33 bp, Homo sapien
agatgttaaaggtagaataattcagctttctca

SEQ ID NO: 581240 - DNA, 33 bp, Homo sapien
agatgttaaaggtagattaattcagctttctca

SEQ ID NO: 581241 - DNA, 33 bp, Homo sapien
caagtctggttggcaagctaagaatgtttttta

SEQ ID NO: 581242 - DNA, 33 bp, Homo sapien
caagtctggttggcaatctaagaatgtttttta

SEQ ID NO: 581243 - DNA, 33 bp, Homo sapien
cattactttgatgaaaatcccagatctattttt

SEQ ID NO: 581244 - DNA, 33 bp, Homo sapien
cattactttgatgaaattcccagatctattttt

SEQ ID NO: 581245 - DNA, 33 bp, Homo sapien
ggaacatattgtaaaactactaggtcttaggaa

SEQ ID NO: 581246 - DNA, 33 bp, Homo sapien
ggaacatattgtaaaagtactaggtcttaggaa

SEQ ID NO: 581247 - DNA, 33 bp, Homo sapien
agggctaaacgtcccaaagtctttgaacatctt

SEQ ID NO: 581248 - DNA, 33 bp, Homo sapien
agggctaaacgtcccatagtctttgaacatctt

SEQ ID NO: 581249 - DNA, 33 bp, Homo sapien
agaataaagctctctacgtagtacaacaccttt

SEQ ID NO: 581250 - DNA, 33 bp, Homo sapien
agaataaagctctctatgtagtacaacaccttt

SEQ ID NO: 581251 - DNA, 33 bp, Homo sapien
tttcaggccagggccaaccataggagaaacgat

SEQ ID NO: 581252 - DNA, 33 bp, Homo sapien
tttcaggccagggccacccataggagaaacgat

SEQ ID NO: 581253 - DNA, 33 bp, Homo sapien
ccatacccacttctcaaaatatccaaccatgat

SEQ ID NO: 581254 - DNA, 33 bp, Homo sapien
ccatacccacttctcagaatatccaaccatgat

SEQ ID NO: 581255 - DNA, 33 bp, Homo sapien
ctggaaggggcttcacaagacaatgaggatgcc

SEQ ID NO: 581256 - DNA, 33 bp, Homo sapien
ctggaaggggcttcacgagacaatgaggatgcc

SEQ ID NO: 581257 - DNA, 33 bp, Homo sapien
ccattgtgtggaattacaaaaagtctttttagt

SEQ ID NO: 581258 - DNA, 33 bp, Homo sapien
ccattgtgtggaattagaaaaagtctttttagt

SEQ ID NO: 581259 - DNA, 33 bp, Homo sapien
gaattagatgatagccccttgaaacctggccta

SEQ ID NO: 581260 - DNA, 33 bp, Homo sapien
gaattagatgatagcctcttgaaacctggccta

SEQ ID NO: 581261 - DNA, 33 bp, Homo sapien
aaacctggcctaagaaaggtgctataatgcaat

SEQ ID NO: 581262 - DNA, 33 bp, Homo sapien
aaacctggcctaagaatggtgctataatgcaat

SEQ ID NO: 581263 - DNA, 33 bp, Homo sapien
tataatgcaatgagaacttcacaagactcatgg

SEQ ID NO: 581264 - DNA, 33 bp, Homo sapien
tataatgcaatgagaatttcacaagactcatgg

SEQ ID NO: 581265 - DNA, 33 bp, Homo sapien
attttacctgaaatacacttcattcttctaaat

SEQ ID NO: 581266 - DNA, 33 bp, Homo sapien
attttacctgaaatacccttcattcttctaaat

SEQ ID NO: 581267 - DNA, 33 bp, Homo sapien
cttatgggatatacaaaaacactctttttctca

SEQ ID NO: 581268 - DNA, 33 bp, Homo sapien
cttatgggatatacaagaacactctttttctca

SEQ ID NO: 581269 - DNA, 33 bp, Homo sapien
ctcttttataagtacactcattcctaaatgagg

SEQ ID NO: 581270 - DNA, 33 bp, Homo sapien
ctcttttataagtacattcattcctaaatgagg

SEQ ID NO: 581271 - DNA, 33 bp, Homo sapien
attccaggtaagaataagatttgtaccccagtt

SEQ ID NO: 581272 - DNA, 33 bp, Homo sapien
attccaggtaagaataggatttgtaccccagtt

SEQ ID NO: 581273 - DNA, 33 bp, Homo sapien
ggtggtttaccgcacacaacaacccagcaccta

SEQ ID NO: 581274 - DNA, 33 bp, Homo sapien
ggtggtttaccgcacagaacaacccagcaccta

SEQ ID NO: 581275 - DNA, 33 bp, Homo sapien
tagcaaagacatggtaacgacctaaatgcccat

SEQ ID NO: 581276 - DNA, 33 bp, Homo sapien
tagcaaagacatggtatcgacctaaatgcccat

SEQ ID NO: 581277 - DNA, 33 bp, Homo sapien
tatctctgtatcgctaacttctggagaaatctc

SEQ ID NO: 581278 - DNA, 33 bp, Homo sapien
tatctctgtatcgctagcttctggagaaatctc

SEQ ID NO: 581279 - DNA, 33 bp, Homo sapien
taagtagtgaaaaacagtgttgcatgggtacag

SEQ ID NO: 581280 - DNA, 33 bp, Homo sapien
taagtagtgaaaaacattgttgcatgggtacag

SEQ ID NO: 581281 - DNA, 33 bp, Homo sapien
ccgtattgccatgaggccacatctcaacattaa

SEQ ID NO: 581282 - DNA, 33 bp, Homo sapien
ccgtattgccatgaggtcacatctcaacattaa

SEQ ID NO: 581283 - DNA, 33 bp, Homo sapien
agagagagagaacatgcactaaagagaaattaa

SEQ ID NO: 581284 - DNA, 33 bp, Homo sapien
agagagagagaacatgtactaaagagaaattaa

SEQ ID NO: 581285 - DNA, 33 bp, Homo sapien
catgaaagagtgaatgcagaagcataaaatgtg

SEQ ID NO: 581286 - DNA, 33 bp, Homo sapien
catgaaagagtgaatgtagaagcataaaatgtg

SEQ ID NO: 581287 - DNA, 33 bp, Homo sapien
taagagaattcatccaatatttatttttctgtg

SEQ ID NO: 581288 - DNA, 33 bp, Homo sapien
taagagaattcatccagtatttatttttctgtg

SEQ ID NO: 581289 - DNA, 33 bp, Homo sapien
tgtccccataatgctacaccatctaaatgttat

SEQ ID NO: 581290 - DNA, 33 bp, Homo sapien
tgtccccataatgctataccatctaaatgttat

SEQ ID NO: 581291 - DNA, 33 bp, Homo sapien
tcaggaaagtcctcagaaagggaatggtatatc

SEQ ID NO: 581292 - DNA, 33 bp, Homo sapien
tcaggaaagtcctcaggaagggaatggtatatc

SEQ ID NO: 581293 - DNA, 33 bp, Homo sapien
ctgtctgcttgctgcaatacttcacttttcaaa

SEQ ID NO: 581294 - DNA, 33 bp, Homo sapien
ctgtctgcttgctgcagtacttcacttttcaaa

SEQ ID NO: 581295 - DNA, 33 bp, Homo sapien
acatttaaatgcaaagccaaataaaatgcagcc

SEQ ID NO: 581296 - DNA, 33 bp, Homo sapien
acatttaaatgcaaagtcaaataaaatgcagcc

SEQ ID NO: 581297 - DNA, 33 bp, Homo sapien
ttaatgtgtaacacacagagatttgccacccag

SEQ ID NO: 581298 - DNA, 33 bp, Homo sapien
ttaatgtgtaacacacggagatttgccacccag

SEQ ID NO: 581299 - DNA, 33 bp, Homo sapien
ttaaggagatgctaacaattaaggagaagctaa

SEQ ID NO: 581300 - DNA, 33 bp, Homo sapien
ttaaggagatgctaacgattaaggagaagctaa

SEQ ID NO: 581301 - DNA, 33 bp, Homo sapien
tgttccctgttcttaactgaaaagtagatataa

SEQ ID NO: 581302 - DNA, 33 bp, Homo sapien
tgttccctgttcttaattgaaaagtagatataa

SEQ ID NO: 581303 - DNA, 33 bp, Homo sapien
agcaagcatcagtaaacgagagtgagcctctcc

SEQ ID NO: 581304 - DNA, 33 bp, Homo sapien
agcaagcatcagtaaaggagagtgagcctctcc

SEQ ID NO: 581305 - DNA, 33 bp, Homo sapien
tacctacggagtcagccaaatctgatatgcaca

SEQ ID NO: 581306 - DNA, 33 bp, Homo sapien
tacctacggagtcagctaaatctgatatgcaca

SEQ ID NO: 581307 - DNA, 33 bp, Homo sapien
aggggagatgctgagaaggtcagctgccggttc

SEQ ID NO: 581308 - DNA, 33 bp, Homo sapien
aggggagatgctgagagggtcagctgccggttc

SEQ ID NO: 581309 - DNA, 33 bp, Homo sapien
atcctgtatttgttgaaaagttcctgccggctt

SEQ ID NO: 581310 - DNA, 33 bp, Homo sapien
atcctgtatttgttgagaagttcctgccggctt

SEQ ID NO: 581311 - DNA, 33 bp, Homo sapien
ctatcaggagtatgttcaaaagaaggagtaggg

SEQ ID NO: 581312 - DNA, 33 bp, Homo sapien
ctatcaggagtatgttgaaaagaaggagtaggg

SEQ ID NO: 581313 - DNA, 33 bp, Homo sapien
taagggagtagagaacaatgcaacaaaatggtt

SEQ ID NO: 581314 - DNA, 33 bp, Homo sapien
taagggagtagagaacgatgcaacaaaatggtt

SEQ ID NO: 581315 - DNA, 33 bp, Homo sapien
ccacctaaacataaaagcttaccttgcattatt

SEQ ID NO: 581316 - DNA, 33 bp, Homo sapien
ccacctaaacataaaatcttaccttgcattatt

SEQ ID NO: 581317 - DNA, 33 bp, Homo sapien
acctgttaattagaagaacagtagtcaccacat

SEQ ID NO: 581318 - DNA, 33 bp, Homo sapien
acctgttaattagaagtacagtagtcaccacat

SEQ ID NO: 581319 - DNA, 33 bp, Homo sapien
aatgcctgttccagcaacaattctagtttagag

SEQ ID NO: 581320 - DNA, 33 bp, Homo sapien
aatgcctgttccagcagcaattctagtttagag

SEQ ID NO: 581321 - DNA, 33 bp, Homo sapien
aaaactgttccaataacatccaatgtacaattc

SEQ ID NO: 581322 - DNA, 33 bp, Homo sapien
aaaactgttccaataatatccaatgtacaattc

SEQ ID NO: 581323 - DNA, 33 bp, Homo sapien
ttttctcaatcacaggaattcagcctgagtggc

SEQ ID NO: 581324 - DNA, 33 bp, Homo sapien
ttttctcaatcacagggattcagcctgagtggc

SEQ ID NO: 581325 - DNA, 33 bp, Homo sapien
cgacaggacagttctacaacaggttcaacagga

SEQ ID NO: 581326 - DNA, 33 bp, Homo sapien
cgacaggacagttctataacaggttcaacagga

SEQ ID NO: 581327 - DNA, 33 bp, Homo sapien
ttccattttctgtgtgcagcattctctatcaca

SEQ ID NO: 581328 - DNA, 33 bp, Homo sapien
ttccattttctgtgtggagcattctctatcaca

SEQ ID NO: 581329 - DNA, 33 bp, Homo sapien
tggattctacaattcactgaaaattgatcagaa

SEQ ID NO: 581330 - DNA, 33 bp, Homo sapien
tggattctacaattcagtgaaaattgatcagaa

SEQ ID NO: 581331 - DNA, 33 bp, Homo sapien
atcctaggctaggtatcaacgggacttacaggt

SEQ ID NO: 581332 - DNA, 33 bp, Homo sapien
atcctaggctaggtattaacgggacttacaggt

SEQ ID NO: 581333 - DNA, 33 bp, Homo sapien
gctttaaaacttgatccgaatttagaagcaaaa

SEQ ID NO: 581334 - DNA, 33 bp, Homo sapien
gctttaaaacttgatctgaatttagaagcaaaa

SEQ ID NO: 581335 - DNA, 33 bp, Homo sapien
tacacagtagaaataaagtggtgatcaagatga

SEQ ID NO: 581336 - DNA, 33 bp, Homo sapien
tacacagtagaaataatgtggtgatcaagatga

SEQ ID NO: 581337 - DNA, 33 bp, Homo sapien
atgagtgattgagtaaatgtgtactagggcagc

SEQ ID NO: 581338 - DNA, 33 bp, Homo sapien
atgagtgattgagtaagtgtgtactagggcagc

SEQ ID NO: 581339 - DNA, 33 bp, Homo sapien
tatcaaataccgtaaccgagggcaatgtttact

SEQ ID NO: 581340 - DNA, 33 bp, Homo sapien
tatcaaataccgtaactgagggcaatgtttact

SEQ ID NO: 581341 - DNA, 33 bp, Homo sapien
gatgtgattttaagtaagataactgcttcaaag

SEQ ID NO: 581342 - DNA, 33 bp, Homo sapien
gatgtgattttaagtatgataactgcttcaaag

SEQ ID NO: 581343 - DNA, 33 bp, Homo sapien
gtgggtgccttgaaaacagattatcttacagtt

SEQ ID NO: 581344 - DNA, 33 bp, Homo sapien
gtgggtgccttgaaaatagattatcttacagtt

SEQ ID NO: 581345 - DNA, 33 bp, Homo sapien
gaaaacaagtgctaaaaggaaaagaaaagttat

SEQ ID NO: 581346 - DNA, 33 bp, Homo sapien
gaaaacaagtgctaaagggaaaagaaaagttat

SEQ ID NO: 581347 - DNA, 33 bp, Homo sapien
acgcaaactcaaaatacgctaagctgtgacttc

SEQ ID NO: 581348 - DNA, 33 bp, Homo sapien
acgcaaactcaaaatatgctaagctgtgacttc

SEQ ID NO: 581349 - DNA, 33 bp, Homo sapien
aaacttcgtgagggatcatatgaacatataact

SEQ ID NO: 581350 - DNA, 33 bp, Homo sapien
aaacttcgtgagggatgatatgaacatataact

SEQ ID NO: 581351 - DNA, 33 bp, Homo sapien
ttccgttctaacaatacgtggtaccagtaagaa

SEQ ID NO: 581352 - DNA, 33 bp, Homo sapien
ttccgttctaacaatatgtggtaccagtaagaa

SEQ ID NO: 581353 - DNA, 33 bp, Homo sapien
atactttctttcaaccaactttaacatcttatc

SEQ ID NO: 581354 - DNA, 33 bp, Homo sapien
atactttctttcaaccgactttaacatcttatc

SEQ ID NO: 581355 - DNA, 33 bp, Homo sapien
aattcagtggcttcaaataacaggcattttatg

SEQ ID NO: 581356 - DNA, 33 bp, Homo sapien
aattcagtggcttcaagtaacaggcattttatg

SEQ ID NO: 581357 - DNA, 33 bp, Homo sapien
gaagatatactcatctagccacaggtatgctgg

SEQ ID NO: 581358 - DNA, 33 bp, Homo sapien
gaagatatactcatctcgccacaggtatgctgg

SEQ ID NO: 581359 - DNA, 33 bp, Homo sapien
tacttctttcattgtacgctaccaaaactcaca

SEQ ID NO: 581360 - DNA, 33 bp, Homo sapien
tacttctttcattgtatgctaccaaaactcaca

SEQ ID NO: 581361 - DNA, 33 bp, Homo sapien
ttttaactatataaccacatgagaatcatagca

SEQ ID NO: 581362 - DNA, 33 bp, Homo sapien
ttttaactatataaccgcatgagaatcatagca

SEQ ID NO: 581363 - DNA, 33 bp, Homo sapien
ttggctgagtgagagacatgagtccaagccttt

SEQ ID NO: 581364 - DNA, 33 bp, Homo sapien
ttggctgagtgagagatatgagtccaagccttt

SEQ ID NO: 581365 - DNA, 33 bp, Homo sapien
accccactcttgctacagctaccactccaaatc

SEQ ID NO: 581366 - DNA, 33 bp, Homo sapien
accccactcttgctacggctaccactccaaatc

SEQ ID NO: 581367 - DNA, 33 bp, Homo sapien
taactagttctagatacaagatgacaattttaa

SEQ ID NO: 581368 - DNA, 33 bp, Homo sapien
taactagttctagatataagatgacaattttaa

SEQ ID NO: 581369 - DNA, 33 bp, Homo sapien
aagaaattaaattgcaggagggcaaacaactat

SEQ ID NO: 581370 - DNA, 33 bp, Homo sapien
aagaaattaaattgcatgagggcaaacaactat

SEQ ID NO: 581371 - DNA, 33 bp, Homo sapien
agcatctttacttcccaccaagcagtgacctag

SEQ ID NO: 581372 - DNA, 33 bp, Homo sapien
agcatctttacttcccgccaagcagtgacctag

SEQ ID NO: 581373 - DNA, 33 bp, Homo sapien
aaattcttgctttaaaacttagaagtctggttt

SEQ ID NO: 581374 - DNA, 33 bp, Homo sapien
aaattcttgctttaaatcttagaagtctggttt

SEQ ID NO: 581375 - DNA, 33 bp, Homo sapien
gctttcagtcagaataacctaacctgcaatatg

SEQ ID NO: 581376 - DNA, 33 bp, Homo sapien
gctttcagtcagaatagcctaacctgcaatatg

SEQ ID NO: 581377 - DNA, 33 bp, Homo sapien
tttctttttaattacaccggctctataaataat

SEQ ID NO: 581378 - DNA, 33 bp, Homo sapien
tttctttttaattacatcggctctataaataat

SEQ ID NO: 581379 - DNA, 33 bp, Homo sapien
gaaaatccccagttccaagaacactgctcagta

SEQ ID NO: 581380 - DNA, 33 bp, Homo sapien
gaaaatccccagttcccagaacactgctcagta

SEQ ID NO: 581381 - DNA, 33 bp, Homo sapien
acaaacacacacagctaacacaatagaatatcc

SEQ ID NO: 581382 - DNA, 33 bp, Homo sapien
acaaacacacacagctgacacaatagaatatcc

SEQ ID NO: 581383 - DNA, 33 bp, Homo sapien
ttttaaagttgtccagccctggttgcttgtgtt

SEQ ID NO: 581384 - DNA, 33 bp, Homo sapien
ttttaaagttgtccaggcctggttgcttgtgtt

SEQ ID NO: 581385 - DNA, 33 bp, Homo sapien
tggttgcttgtgttacaaactcagaaagtaaaa

SEQ ID NO: 581386 - DNA, 33 bp, Homo sapien
tggttgcttgtgttacgaactcagaaagtaaaa

SEQ ID NO: 581387 - DNA, 33 bp, Homo sapien
actcagaataaaacacactgttcacagccacaa

SEQ ID NO: 581388 - DNA, 33 bp, Homo sapien
actcagaataaaacactctgttcacagccacaa

SEQ ID NO: 581389 - DNA, 33 bp, Homo sapien
gaatagaaacctggacaactgaaggaagaaatt

SEQ ID NO: 581390 - DNA, 33 bp, Homo sapien
gaatagaaacctggacgactgaaggaagaaatt

SEQ ID NO: 581391 - DNA, 33 bp, Homo sapien
ccagccggggtggcaaatcagcaaaaggcgtta

SEQ ID NO: 581392 - DNA, 33 bp, Homo sapien
ccagccggggtggcaagtcagcaaaaggcgtta

SEQ ID NO: 581393 - DNA, 33 bp, Homo sapien
ttctggtgactgtaaaaaatggaatgaggccat

SEQ ID NO: 581394 - DNA, 33 bp, Homo sapien
ttctggtgactgtaaacaatggaatgaggccat

SEQ ID NO: 581395 - DNA, 33 bp, Homo sapien
cttcatactatactctcagaatttgtgaaagga

SEQ ID NO: 581396 - DNA, 33 bp, Homo sapien
cttcatactatactcttagaatttgtgaaagga

SEQ ID NO: 581397 - DNA, 33 bp, Homo sapien
cagaattcaaaatgctcaagagaaagccatcca

SEQ ID NO: 581398 - DNA, 33 bp, Homo sapien
cagaattcaaaatgctgaagagaaagccatcca

SEQ ID NO: 581399 - DNA, 33 bp, Homo sapien
gaagtcatatcctgaccgaaggaggaagtggca

SEQ ID NO: 581400 - DNA, 33 bp, Homo sapien
gaagtcatatcctgactgaaggaggaagtggca

SEQ ID NO: 581401 - DNA, 33 bp, Homo sapien
acaaatcataaaattcaaagcatagatagaagg

SEQ ID NO: 581402 - DNA, 33 bp, Homo sapien
acaaatcataaaattcgaagcatagatagaagg

SEQ ID NO: 581403 - DNA, 33 bp, Homo sapien
tgccatcaggttgaagaatacaattagatagta

SEQ ID NO: 581404 - DNA, 33 bp, Homo sapien
tgccatcaggttgaaggatacaattagatagta

SEQ ID NO: 581405 - DNA, 33 bp, Homo sapien
ctagttttgccaactacattccttcacattttt

SEQ ID NO: 581406 - DNA, 33 bp, Homo sapien
ctagttttgccaactatattccttcacattttt

SEQ ID NO: 581407 - DNA, 33 bp, Homo sapien
cttcccgcagatggaaaagcttgagcaaaatcc

SEQ ID NO: 581408 - DNA, 33 bp, Homo sapien
cttcccgcagatggaagagcttgagcaaaatcc

SEQ ID NO: 581409 - DNA, 33 bp, Homo sapien
gtgccttttatctaaccacaaatctaactgtgt

SEQ ID NO: 581410 - DNA, 33 bp, Homo sapien
gtgccttttatctaactacaaatctaactgtgt

SEQ ID NO: 581411 - DNA, 33 bp, Homo sapien
ctttgtgtttctttggccagttcccattttatg

SEQ ID NO: 581412 - DNA, 33 bp, Homo sapien
ctttgtgtttctttggtcagttcccattttatg

SEQ ID NO: 581413 - DNA, 33 bp, Homo sapien
tcttctactagctctaggaattaggcaaagcat

SEQ ID NO: 581414 - DNA, 33 bp, Homo sapien
tcttctactagctctatgaattaggcaaagcat

SEQ ID NO: 581415 - DNA, 33 bp, Homo sapien
agttatagaattgttacggaaaccaagaatccc

SEQ ID NO: 581416 - DNA, 33 bp, Homo sapien
agttatagaattgttatggaaaccaagaatccc

SEQ ID NO: 581417 - DNA, 33 bp, Homo sapien
tcacaatggtgacaaaccgtgtggatgatggaa

SEQ ID NO: 581418 - DNA, 33 bp, Homo sapien
tcacaatggtgacaaatcgtgtggatgatggaa

SEQ ID NO: 581419 - DNA, 33 bp, Homo sapien
tcagtttcatcagttcgaagtctgttatcagat

SEQ ID NO: 581420 - DNA, 33 bp, Homo sapien
tcagtttcatcagttctaagtctgttatcagat

SEQ ID NO: 581421 - DNA, 33 bp, Homo sapien
gctccctggatacacaaaattgtcccattcatt

SEQ ID NO: 581422 - DNA, 33 bp, Homo sapien
gctccctggatacacagaattgtcccattcatt

SEQ ID NO: 581423 - DNA, 33 bp, Homo sapien
atccagcactttaaataactgcaacttggaaga

SEQ ID NO: 581424 - DNA, 33 bp, Homo sapien
atccagcactttaaatgactgcaacttggaaga

SEQ ID NO: 581425 - DNA, 33 bp, Homo sapien
actttctagtagcaaagtatttctggacaacct

SEQ ID NO: 581426 - DNA, 33 bp, Homo sapien
actttctagtagcaaattatttctggacaacct

SEQ ID NO: 581427 - DNA, 33 bp, Homo sapien
catgagtatgccataaaaggaaatcaagtaatt

SEQ ID NO: 581428 - DNA, 33 bp, Homo sapien
catgagtatgccataacaggaaatcaagtaatt

SEQ ID NO: 581429 - DNA, 33 bp, Homo sapien
gtgcttaatatcaccaacactgaaggtaataaa

SEQ ID NO: 581430 - DNA, 33 bp, Homo sapien
gtgcttaatatcaccagcactgaaggtaataaa

SEQ ID NO: 581431 - DNA, 33 bp, Homo sapien
tgaatgctgccagagaagaacaaacaagaacaa

SEQ ID NO: 581432 - DNA, 33 bp, Homo sapien
tgaatgctgccagagaggaacaaacaagaacaa

SEQ ID NO: 581433 - DNA, 33 bp, Homo sapien
taaatggactcatttacgatcaagcatatagtg

SEQ ID NO: 581434 - DNA, 33 bp, Homo sapien
taaatggactcatttaggatcaagcatatagtg

SEQ ID NO: 581435 - DNA, 33 bp, Homo sapien
tgtggctatgaagattaaagaagataataagtg

SEQ ID NO: 581436 - DNA, 33 bp, Homo sapien
tgtggctatgaagattgaagaagataataagtg

SEQ ID NO: 581437 - DNA, 33 bp, Homo sapien
attgaatgctgccaacaatcactgagtaaaatt

SEQ ID NO: 581438 - DNA, 33 bp, Homo sapien
attgaatgctgccaacgatcactgagtaaaatt

SEQ ID NO: 581439 - DNA, 33 bp, Homo sapien
aataatttgcaatcaacgcttcttatctaaaag

SEQ ID NO: 581440 - DNA, 33 bp, Homo sapien
aataatttgcaatcaatgcttcttatctaaaag

SEQ ID NO: 581441 - DNA, 33 bp, Homo sapien
aaagacaccgttcccaatctgagagcagaaata

SEQ ID NO: 581442 - DNA, 33 bp, Homo sapien
aaagacaccgttcccagtctgagagcagaaata

SEQ ID NO: 581443 - DNA, 33 bp, Homo sapien
taacacactgagacaccggttggggcagccaag

SEQ ID NO: 581444 - DNA, 33 bp, Homo sapien
taacacactgagacactggttggggcagccaag

SEQ ID NO: 581445 - DNA, 33 bp, Homo sapien
agcggaaacagcaaatcatattggccaaatgtt

SEQ ID NO: 581446 - DNA, 33 bp, Homo sapien
agcggaaacagcaaattatattggccaaatgtt

SEQ ID NO: 581447 - DNA, 33 bp, Homo sapien
taaagatcactgctaaagaaagaatgaaagagt

SEQ ID NO: 581448 - DNA, 33 bp, Homo sapien
taaagatcactgctaacgaaagaatgaaagagt

SEQ ID NO: 581449 - DNA, 33 bp, Homo sapien
taagttttgaaattaaggacttttgcatattgt

SEQ ID NO: 581450 - DNA, 33 bp, Homo sapien
taagttttgaaattaatgacttttgcatattgt

SEQ ID NO: 581451 - DNA, 33 bp, Homo sapien
gaaataagcgagaaacagagagataaacactgc

SEQ ID NO: 581452 - DNA, 33 bp, Homo sapien
gaaataagcgagaaacggagagataaacactgc

SEQ ID NO: 581453 - DNA, 33 bp, Homo sapien
tcacacagttgctttcaaacactggaaacagac

SEQ ID NO: 581454 - DNA, 33 bp, Homo sapien
tcacacagttgctttcgaacactggaaacagac

SEQ ID NO: 581455 - DNA, 33 bp, Homo sapien
ctatgactaactgaaaattggactatggcagaa

SEQ ID NO: 581456 - DNA, 33 bp, Homo sapien
ctatgactaactgaaacttggactatggcagaa

SEQ ID NO: 581457 - DNA, 33 bp, Homo sapien
tagaagcttgtcaaataattactgtcagaacaa

SEQ ID NO: 581458 - DNA, 33 bp, Homo sapien
tagaagcttgtcaaattattactgtcagaacaa

SEQ ID NO: 581459 - DNA, 33 bp, Homo sapien
ataggagtactgggataacaacaaccatcacac

SEQ ID NO: 581460 - DNA, 33 bp, Homo sapien
ataggagtactgggatgacaacaaccatcacac

SEQ ID NO: 581461 - DNA, 33 bp, Homo sapien
caaaagtaattctccactcatactttctgaaaa

SEQ ID NO: 581462 - DNA, 33 bp, Homo sapien
caaaagtaattctccattcatactttctgaaaa

SEQ ID NO: 581463 - DNA, 33 bp, Homo sapien
atttatgtgagtttaacgttgtctttttctcag

SEQ ID NO: 581464 - DNA, 33 bp, Homo sapien
atttatgtgagtttaatgttgtctttttctcag

SEQ ID NO: 581465 - DNA, 33 bp, Homo sapien
tttttcttcatctaaaataccatatgttaatct

SEQ ID NO: 581466 - DNA, 33 bp, Homo sapien
tttttcttcatctaaagtaccatatgttaatct

SEQ ID NO: 581467 - DNA, 33 bp, Homo sapien
gatattcatcttgaataaattccaggcctgttt

SEQ ID NO: 581468 - DNA, 33 bp, Homo sapien
gatattcatcttgaatgaattccaggcctgttt

SEQ ID NO: 581469 - DNA, 33 bp, Homo sapien
tggtgaagagtccaaaatacaaggagaagcaac

SEQ ID NO: 581470 - DNA, 33 bp, Homo sapien
tggtgaagagtccaaactacaaggagaagcaac

SEQ ID NO: 581471 - DNA, 33 bp, Homo sapien
tctgcaactcaatatacagtaaaatccagcata

SEQ ID NO: 581472 - DNA, 33 bp, Homo sapien
tctgcaactcaatatatagtaaaatccagcata

SEQ ID NO: 581473 - DNA, 33 bp, Homo sapien
tctcattaacagtttccaagcagggctgatatt

SEQ ID NO: 581474 - DNA, 33 bp, Homo sapien
tctcattaacagtttctaagcagggctgatatt

SEQ ID NO: 581475 - DNA, 33 bp, Homo sapien
gattctgtgtatgtgaagaaagttagtgttata

SEQ ID NO: 581476 - DNA, 33 bp, Homo sapien
gattctgtgtatgtgaggaaagttagtgttata

SEQ ID NO: 581477 - DNA, 33 bp, Homo sapien
ttatagaggaaataaactggtcataactcatgg

SEQ ID NO: 581478 - DNA, 33 bp, Homo sapien
ttatagaggaaataaattggtcataactcatgg

SEQ ID NO: 581479 - DNA, 33 bp, Homo sapien
ttctctaggttcttagaccaaacatacttttga

SEQ ID NO: 581480 - DNA, 33 bp, Homo sapien
ttctctaggttcttagcccaaacatacttttga

SEQ ID NO: 581481 - DNA, 33 bp, Homo sapien
aactatttctactttaggaacatgacaagtaat

SEQ ID NO: 581482 - DNA, 33 bp, Homo sapien
aactatttctactttatgaacatgacaagtaat

SEQ ID NO: 581483 - DNA, 33 bp, Homo sapien
ttcaggtgtaaggatgaaggggaccgccataga

SEQ ID NO: 581484 - DNA, 33 bp, Homo sapien
ttcaggtgtaaggatgcaggggaccgccataga

SEQ ID NO: 581485 - DNA, 33 bp, Homo sapien
gctcatttttatggaacggaacaaatgtgtttg

SEQ ID NO: 581486 - DNA, 33 bp, Homo sapien
gctcatttttatggaatggaacaaatgtgtttg

SEQ ID NO: 581487 - DNA, 33 bp, Homo sapien
tgaatcgtccttataaacctcatcagcgacatt

SEQ ID NO: 581488 - DNA, 33 bp, Homo sapien
tgaatcgtccttataagcctcatcagcgacatt

SEQ ID NO: 581489 - DNA, 33 bp, Homo sapien
aatggttaagcacaaacagttgatctctgaatt

SEQ ID NO: 581490 - DNA, 33 bp, Homo sapien
aatggttaagcacaaatagttgatctctgaatt

SEQ ID NO: 581491 - DNA, 33 bp, Homo sapien
tgtaataagtggtgtgaaactttgagtatacct

SEQ ID NO: 581492 - DNA, 33 bp, Homo sapien
tgtaataagtggtgtggaactttgagtatacct

SEQ ID NO: 581493 - DNA, 33 bp, Homo sapien
tttcctttaggcacttcaaaaatatcagacttc

SEQ ID NO: 581494 - DNA, 33 bp, Homo sapien
tttcctttaggcacttgaaaaatatcagacttc

SEQ ID NO: 581495 - DNA, 33 bp, Homo sapien
accacaagccacaccacagaactgaagataaaa

SEQ ID NO: 581496 - DNA, 33 bp, Homo sapien
accacaagccacaccatagaactgaagataaaa

SEQ ID NO: 581497 - DNA, 33 bp, Homo sapien
tacgttgataagctaaatccaaataaaattagc

SEQ ID NO: 581498 - DNA, 33 bp, Homo sapien
tacgttgataagctaagtccaaataaaattagc

SEQ ID NO: 581499 - DNA, 33 bp, Homo sapien
gaggaccaggagcctcacccaaacagacttgaa

SEQ ID NO: 581500 - DNA, 33 bp, Homo sapien
gaggaccaggagcctcgcccaaacagacttgaa

SEQ ID NO: 581501 - DNA, 33 bp, Homo sapien
agaagctgaagtttaggagcaactttatttctc

SEQ ID NO: 581502 - DNA, 33 bp, Homo sapien
agaagctgaagtttagtagcaactttatttctc

SEQ ID NO: 581503 - DNA, 33 bp, Homo sapien
ccctaaaggcaaaacacgtggccttttagacga

SEQ ID NO: 581504 - DNA, 33 bp, Homo sapien
ccctaaaggcaaaacatgtggccttttagacga

SEQ ID NO: 581505 - DNA, 33 bp, Homo sapien
tactgtttcagtttaagtcatcaaacacttaat

SEQ ID NO: 581506 - DNA, 33 bp, Homo sapien
tactgtttcagtttaattcatcaaacacttaat

SEQ ID NO: 581507 - DNA, 33 bp, Homo sapien
tttgatctgtaatgtaaaatttgagatatgtgt

SEQ ID NO: 581508 - DNA, 33 bp, Homo sapien
tttgatctgtaatgtagaatttgagatatgtgt

SEQ ID NO: 581509 - DNA, 33 bp, Homo sapien
attgtgctttatgtgacgacattaagcaaaaac

SEQ ID NO: 581510 - DNA, 33 bp, Homo sapien
attgtgctttatgtgatgacattaagcaaaaac

SEQ ID NO: 581511 - DNA, 33 bp, Homo sapien
cagaggaattcactacaatctgttcatcttcct

SEQ ID NO: 581512 - DNA, 33 bp, Homo sapien
cagaggaattcactactatctgttcatcttcct

SEQ ID NO: 581513 - DNA, 33 bp, Homo sapien
ctctgtagtgaaacaaacatagacagaagtgtt

SEQ ID NO: 581514 - DNA, 33 bp, Homo sapien
ctctgtagtgaaacaagcatagacagaagtgtt

SEQ ID NO: 581515 - DNA, 33 bp, Homo sapien
tagtgcaggttgtatgcataattaaatgtacaa

SEQ ID NO: 581516 - DNA, 33 bp, Homo sapien
tagtgcaggttgtatgtataattaaatgtacaa

SEQ ID NO: 581517 - DNA, 33 bp, Homo sapien
tgcaacatcttaattgaagtctggaattcatat

SEQ ID NO: 581518 - DNA, 33 bp, Homo sapien
tgcaacatcttaattggagtctggaattcatat

SEQ ID NO: 581519 - DNA, 33 bp, Homo sapien
gctccaagtgaggcaaaacagagactagtccct

SEQ ID NO: 581520 - DNA, 33 bp, Homo sapien
gctccaagtgaggcaagacagagactagtccct

SEQ ID NO: 581521 - DNA, 33 bp, Homo sapien
atcaagagaagatgcacaactcaaggcttctcc

SEQ ID NO: 581522 - DNA, 33 bp, Homo sapien
atcaagagaagatgcataactcaaggcttctcc

SEQ ID NO: 581523 - DNA, 33 bp, Homo sapien
gtgagtcaaaaagctacgagacagctaaaaagc

SEQ ID NO: 581524 - DNA, 33 bp, Homo sapien
gtgagtcaaaaagctatgagacagctaaaaagc

SEQ ID NO: 581525 - DNA, 33 bp, Homo sapien
ccattcagccactataacagtcttttaatcgag

SEQ ID NO: 581526 - DNA, 33 bp, Homo sapien
ccattcagccactatatcagtcttttaatcgag

SEQ ID NO: 581527 - DNA, 33 bp, Homo sapien
ctgtcttttttgactacaatttgtgtggattat

SEQ ID NO: 581528 - DNA, 33 bp, Homo sapien
ctgtcttttttgactataatttgtgtggattat

SEQ ID NO: 581529 - DNA, 33 bp, Homo sapien
ctctctgtgtccttaaaccatgtgctcttagcc

SEQ ID NO: 581530 - DNA, 33 bp, Homo sapien
ctctctgtgtccttaagccatgtgctcttagcc

SEQ ID NO: 581531 - DNA, 33 bp, Homo sapien
cttctagtttttggaaatctagtctactgttgc

SEQ ID NO: 581532 - DNA, 33 bp, Homo sapien
cttctagtttttggaattctagtctactgttgc

SEQ ID NO: 581533 - DNA, 33 bp, Homo sapien
atatctgattttgccacggtcatgtgggaaaag

SEQ ID NO: 581534 - DNA, 33 bp, Homo sapien
atatctgattttgccatggtcatgtgggaaaag

SEQ ID NO: 581535 - DNA, 33 bp, Homo sapien
ttgtgtgtggtgtcaaatgagggtcgaatttca

SEQ ID NO: 581536 - DNA, 33 bp, Homo sapien
ttgtgtgtggtgtcaagtgagggtcgaatttca

SEQ ID NO: 581537 - DNA, 33 bp, Homo sapien
gcaacttaagttcaaaatcagaaatacgtgtgg

SEQ ID NO: 581538 - DNA, 33 bp, Homo sapien
gcaacttaagttcaaagtcagaaatacgtgtgg

SEQ ID NO: 581539 - DNA, 33 bp, Homo sapien
acggatttcttcctaactaaccttagctcttag

SEQ ID NO: 581540 - DNA, 33 bp, Homo sapien
acggatttcttcctaattaaccttagctcttag

SEQ ID NO: 581541 - DNA, 33 bp, Homo sapien
tcctcctaaatccaaaaaagttgaacataataa

SEQ ID NO: 581542 - DNA, 33 bp, Homo sapien
tcctcctaaatccaaataagttgaacataataa

SEQ ID NO: 581543 - DNA, 33 bp, Homo sapien
gaatcaaccttactgacgttatttcagacttcc

SEQ ID NO: 581544 - DNA, 33 bp, Homo sapien
gaatcaaccttactgatgttatttcagacttcc

SEQ ID NO: 581545 - DNA, 33 bp, Homo sapien
aaagtgagtacaagaagagttttccctccgcaa

SEQ ID NO: 581546 - DNA, 33 bp, Homo sapien
aaagtgagtacaagaatagttttccctccgcaa

SEQ ID NO: 581547 - DNA, 33 bp, Homo sapien
gaagtggcttgagaaacgaccttagattccagg

SEQ ID NO: 581548 - DNA, 33 bp, Homo sapien
gaagtggcttgagaaatgaccttagattccagg

SEQ ID NO: 581549 - DNA, 33 bp, Homo sapien
gagagcttcccccctaaacaaatgacctgtttg

SEQ ID NO: 581550 - DNA, 33 bp, Homo sapien
gagagcttcccccctatacaaatgacctgtttg

SEQ ID NO: 581551 - DNA, 33 bp, Homo sapien
caggaactgttaaaaacgtacctagcacttctc

SEQ ID NO: 581552 - DNA, 33 bp, Homo sapien
caggaactgttaaaaatgtacctagcacttctc

SEQ ID NO: 581553 - DNA, 33 bp, Homo sapien
taactctccagtaaaactgtatcaaaccaaagt

SEQ ID NO: 581554 - DNA, 33 bp, Homo sapien
taactctccagtaaaattgtatcaaaccaaagt

SEQ ID NO: 581555 - DNA, 33 bp, Homo sapien
tgagtatgtatgtgtaagagagagacagaccca

SEQ ID NO: 581556 - DNA, 33 bp, Homo sapien
tgagtatgtatgtgtaggagagagacagaccca

SEQ ID NO: 581557 - DNA, 33 bp, Homo sapien
gaagtgatacaagaaagcttcctactcttgcac

SEQ ID NO: 581558 - DNA, 33 bp, Homo sapien
gaagtgatacaagaaatcttcctactcttgcac

SEQ ID NO: 581559 - DNA, 33 bp, Homo sapien
ggcactggcttcataggcctaaactaaatcctt

SEQ ID NO: 581560 - DNA, 33 bp, Homo sapien
ggcactggcttcatagtcctaaactaaatcctt

SEQ ID NO: 581561 - DNA, 33 bp, Homo sapien
aaagagaatgttttgcactaacaactgaaacat

SEQ ID NO: 581562 - DNA, 33 bp, Homo sapien
aaagagaatgttttgcgctaacaactgaaacat

SEQ ID NO: 581563 - DNA, 33 bp, Homo sapien
tctctctatgcgtatactaagcaaggcataagc

SEQ ID NO: 581564 - DNA, 33 bp, Homo sapien
tctctctatgcgtatattaagcaaggcataagc

SEQ ID NO: 581565 - DNA, 33 bp, Homo sapien
acatttttcctcttgtaaatctttcaggcaaca

SEQ ID NO: 581566 - DNA, 33 bp, Homo sapien
acatttttcctcttgtgaatctttcaggcaaca

SEQ ID NO: 581567 - DNA, 33 bp, Homo sapien
gcaaatatttgagatacgctttacaatgttaaa

SEQ ID NO: 581568 - DNA, 33 bp, Homo sapien
gcaaatatttgagatatgctttacaatgttaaa

SEQ ID NO: 581569 - DNA, 33 bp, Homo sapien
tgattttcaacctacaatcccatacctagccaa

SEQ ID NO: 581570 - DNA, 33 bp, Homo sapien
tgattttcaacctacagtcccatacctagccaa

SEQ ID NO: 581571 - DNA, 33 bp, Homo sapien
aatgccaagaattctccgacaatctacaattct

SEQ ID NO: 581572 - DNA, 33 bp, Homo sapien
aatgccaagaattctctgacaatctacaattct

SEQ ID NO: 581573 - DNA, 33 bp, Homo sapien
aaccatattaagttgaggtaaaattgttaaaga

SEQ ID NO: 581574 - DNA, 33 bp, Homo sapien
aaccatattaagttgatgtaaaattgttaaaga

SEQ ID NO: 581575 - DNA, 33 bp, Homo sapien
tgataatgttaaacacaaaatcgtaattactaa

SEQ ID NO: 581576 - DNA, 33 bp, Homo sapien
tgataatgttaaacactaaatcgtaattactaa

SEQ ID NO: 581577 - DNA, 33 bp, Homo sapien
agcatttggtattgcaaagggctgagaaacaca

SEQ ID NO: 581578 - DNA, 33 bp, Homo sapien
agcatttggtattgcagagggctgagaaacaca

SEQ ID NO: 581579 - DNA, 33 bp, Homo sapien
cttcagtcacgtaacactctctgcctaaaatac

SEQ ID NO: 581580 - DNA, 33 bp, Homo sapien
cttcagtcacgtaacattctctgcctaaaatac

SEQ ID NO: 581581 - DNA, 33 bp, Homo sapien
gtacaattctgtcacgcatatgtgccctttgta

SEQ ID NO: 581582 - DNA, 33 bp, Homo sapien
gtacaattctgtcacgtatatgtgccctttgta

SEQ ID NO: 581583 - DNA, 33 bp, Homo sapien
caaataaaggcatcataaattctgcaactctca

SEQ ID NO: 581584 - DNA, 33 bp, Homo sapien
caaataaaggcatcatgaattctgcaactctca

SEQ ID NO: 581585 - DNA, 33 bp, Homo sapien
gttgtgaacatagataacttttggggcattagg

SEQ ID NO: 581586 - DNA, 33 bp, Homo sapien
gttgtgaacatagataccttttggggcattagg

SEQ ID NO: 581587 - DNA, 33 bp, Homo sapien
agataatgctctctcacaattccaagcttttga

SEQ ID NO: 581588 - DNA, 33 bp, Homo sapien
agataatgctctctcataattccaagcttttga

SEQ ID NO: 581589 - DNA, 33 bp, Homo sapien
ggtagcttcattttccaagttgacagacatact

SEQ ID NO: 581590 - DNA, 33 bp, Homo sapien
ggtagcttcattttccgagttgacagacatact

SEQ ID NO: 581591 - DNA, 33 bp, Homo sapien
tgggtctgtatctgacgatgagtggcaggtgcc

SEQ ID NO: 581592 - DNA, 33 bp, Homo sapien
tgggtctgtatctgactatgagtggcaggtgcc

SEQ ID NO: 581593 - DNA, 33 bp, Homo sapien
tattttttagaatgaacgtctggttttagagac

SEQ ID NO: 581594 - DNA, 33 bp, Homo sapien
tattttttagaatgaatgtctggttttagagac

SEQ ID NO: 581595 - DNA, 33 bp, Homo sapien
agacctcaggagaatgaaacaacactgggaacc

SEQ ID NO: 581596 - DNA, 33 bp, Homo sapien
agacctcaggagaatggaacaacactgggaacc

SEQ ID NO: 581597 - DNA, 33 bp, Homo sapien
ggggaaaatgggcaaggaaataagctacctatt

SEQ ID NO: 581598 - DNA, 33 bp, Homo sapien
ggggaaaatgggcaagtaaataagctacctatt

SEQ ID NO: 581599 - DNA, 33 bp, Homo sapien
tacttcttcttaaataaactctgatggctcctg

SEQ ID NO: 581600 - DNA, 33 bp, Homo sapien
tacttcttcttaaatacactctgatggctcctg

SEQ ID NO: 581601 - DNA, 33 bp, Homo sapien
aacaataggatagaggaatcaatacgcttattg

SEQ ID NO: 581602 - DNA, 33 bp, Homo sapien
aacaataggatagaggcatcaatacgcttattg

SEQ ID NO: 581603 - DNA, 33 bp, Homo sapien
agagccttccaaaccacagaaaggaattcagac

SEQ ID NO: 581604 - DNA, 33 bp, Homo sapien
agagccttccaaaccatagaaaggaattcagac

SEQ ID NO: 581605 - DNA, 33 bp, Homo sapien
tgtaggaaataatcccagatttctggtgtgtgt

SEQ ID NO: 581606 - DNA, 33 bp, Homo sapien
tgtaggaaataatcccggatttctggtgtgtgt

SEQ ID NO: 581607 - DNA, 33 bp, Homo sapien
cttacttaattactgcaaacttcagaactgtct

SEQ ID NO: 581608 - DNA, 33 bp, Homo sapien
cttacttaattactgcgaacttcagaactgtct

SEQ ID NO: 581609 - DNA, 33 bp, Homo sapien
ccacatttccttgtcaacttcactggtcataat

SEQ ID NO: 581610 - DNA, 33 bp, Homo sapien
ccacatttccttgtcagcttcactggtcataat

SEQ ID NO: 581611 - DNA, 33 bp, Homo sapien
tatgatcgtatgattgaaatactgaaagtggat

SEQ ID NO: 581612 - DNA, 33 bp, Homo sapien
tatgatcgtatgattgcaatactgaaagtggat

SEQ ID NO: 581613 - DNA, 33 bp, Homo sapien
tgttaggtagaggcagcatcgattagaaaatac

SEQ ID NO: 581614 - DNA, 33 bp, Homo sapien
tgttaggtagaggcaggatcgattagaaaatac

SEQ ID NO: 581615 - DNA, 33 bp, Homo sapien
tagcatacctcatagaccacatatggatatgcc

SEQ ID NO: 581616 - DNA, 33 bp, Homo sapien
tagcatacctcatagatcacatatggatatgcc

SEQ ID NO: 581617 - DNA, 33 bp, Homo sapien
aatgataatgcaaagaaagaatttcgcaaatgg

SEQ ID NO: 581618 - DNA, 33 bp, Homo sapien
aatgataatgcaaagagagaatttcgcaaatgg

SEQ ID NO: 581619 - DNA, 33 bp, Homo sapien
gccctaagttctattcaccctgatactcaatac

SEQ ID NO: 581620 - DNA, 33 bp, Homo sapien
gccctaagttctattcgccctgatactcaatac

SEQ ID NO: 581621 - DNA, 33 bp, Homo sapien
ctcactttcgaagtaacgctgatactgaagcaa

SEQ ID NO: 581622 - DNA, 33 bp, Homo sapien
ctcactttcgaagtaatgctgatactgaagcaa

SEQ ID NO: 581623 - DNA, 33 bp, Homo sapien
gtatcgcgggggaaaactgtggttgtacatact

SEQ ID NO: 581624 - DNA, 33 bp, Homo sapien
gtatcgcgggggaaaattgtggttgtacatact

SEQ ID NO: 581625 - DNA, 33 bp, Homo sapien
gcagttaccttattagccacagtcccttagcct

SEQ ID NO: 581626 - DNA, 33 bp, Homo sapien
gcagttaccttattagtcacagtcccttagcct

SEQ ID NO: 581627 - DNA, 33 bp, Homo sapien
ttccattccatgtacaagttaccatagccaaaa

SEQ ID NO: 581628 - DNA, 33 bp, Homo sapien
ttccattccatgtacaggttaccatagccaaaa

SEQ ID NO: 581629 - DNA, 33 bp, Homo sapien
cataaattaagacttgcaatattgtaacagcat

SEQ ID NO: 581630 - DNA, 33 bp, Homo sapien
cataaattaagacttgtaatattgtaacagcat

SEQ ID NO: 581631 - DNA, 33 bp, Homo sapien
gtacttgtaggcaccagtaaataattagtgaaa

SEQ ID NO: 581632 - DNA, 33 bp, Homo sapien
gtacttgtaggcaccattaaataattagtgaaa

SEQ ID NO: 581633 - DNA, 33 bp, Homo sapien
tatttccctttcgggaagttttgttgattctca

SEQ ID NO: 581634 - DNA, 33 bp, Homo sapien
tatttccctttcgggaggttttgttgattctca

SEQ ID NO: 581635 - DNA, 33 bp, Homo sapien
attagtcaagtcaccaaaaacagagttagtaat

SEQ ID NO: 581636 - DNA, 33 bp, Homo sapien
attagtcaagtcaccagaaacagagttagtaat

SEQ ID NO: 581637 - DNA, 33 bp, Homo sapien
atgaaacaggctgaaaatcatgataaaagttat

SEQ ID NO: 581638 - DNA, 33 bp, Homo sapien
atgaaacaggctgaaagtcatgataaaagttat

SEQ ID NO: 581639 - DNA, 33 bp, Homo sapien
atacattaactaccacaaagtattataaacaaa

SEQ ID NO: 581640 - DNA, 33 bp, Homo sapien
atacattaactaccacgaagtattataaacaaa

SEQ ID NO: 581641 - DNA, 33 bp, Homo sapien
attaaactgtagctaaagaaatgaattttatgg

SEQ ID NO: 581642 - DNA, 33 bp, Homo sapien
attaaactgtagctaatgaaatgaattttatgg

SEQ ID NO: 581643 - DNA, 33 bp, Homo sapien
tgaaaatgtaaactggacaatttagaagtcctc

SEQ ID NO: 581644 - DNA, 33 bp, Homo sapien
tgaaaatgtaaactgggcaatttagaagtcctc

SEQ ID NO: 581645 - DNA, 33 bp, Homo sapien
tgactttttcaagttcgaggatttgtttatgtg

SEQ ID NO: 581646 - DNA, 33 bp, Homo sapien
tgactttttcaagttctaggatttgtttatgtg

SEQ ID NO: 581647 - DNA, 33 bp, Homo sapien
atagttactctttagaagcatgtgattcattat

SEQ ID NO: 581648 - DNA, 33 bp, Homo sapien
atagttactctttagaggcatgtgattcattat

SEQ ID NO: 581649 - DNA, 33 bp, Homo sapien
acatggcaatactttcaaatgtaatctttgtca

SEQ ID NO: 581650 - DNA, 33 bp, Homo sapien
acatggcaatactttcgaatgtaatctttgtca

SEQ ID NO: 581651 - DNA, 33 bp, Homo sapien
tatccgatttaacccaacttatcaatacagttt

SEQ ID NO: 581652 - DNA, 33 bp, Homo sapien
tatccgatttaacccagcttatcaatacagttt

SEQ ID NO: 581653 - DNA, 33 bp, Homo sapien
aaatacattgaataccaaatacctgtaaatcta

SEQ ID NO: 581654 - DNA, 33 bp, Homo sapien
aaatacattgaatacctaatacctgtaaatcta

SEQ ID NO: 581655 - DNA, 33 bp, Homo sapien
ctcactgccttatctaaaagcttacatctcaaa

SEQ ID NO: 581656 - DNA, 33 bp, Homo sapien
ctcactgccttatctagaagcttacatctcaaa

SEQ ID NO: 581657 - DNA, 33 bp, Homo sapien
agctgtgtttgtggcaatgactttcagctgaga

SEQ ID NO: 581658 - DNA, 33 bp, Homo sapien
agctgtgtttgtggcagtgactttcagctgaga

SEQ ID NO: 581659 - DNA, 33 bp, Homo sapien
gggcactagcctagtacctatcctctcagctga

SEQ ID NO: 581660 - DNA, 33 bp, Homo sapien
gggcactagcctagtatctatcctctcagctga

SEQ ID NO: 581661 - DNA, 33 bp, Homo sapien
attttcaccatgcttacggcttgttcctgcttt

SEQ ID NO: 581662 - DNA, 33 bp, Homo sapien
attttcaccatgcttatggcttgttcctgcttt

SEQ ID NO: 581663 - DNA, 33 bp, Homo sapien
cttttgtgtgatgttaagttcattcatgacaag

SEQ ID NO: 581664 - DNA, 33 bp, Homo sapien
cttttgtgtgatgttaggttcattcatgacaag

SEQ ID NO: 581665 - DNA, 33 bp, Homo sapien
gagtccaggaagttcaataagcgcaaatgctct

SEQ ID NO: 581666 - DNA, 33 bp, Homo sapien
gagtccaggaagttcagtaagcgcaaatgctct

SEQ ID NO: 581667 - DNA, 33 bp, Homo sapien
aagttctgtaaaggtaagtcatagctctggtcc

SEQ ID NO: 581668 - DNA, 33 bp, Homo sapien
aagttctgtaaaggtaggtcatagctctggtcc

SEQ ID NO: 581669 - DNA, 33 bp, Homo sapien
agtttaaacgagtcccaaactataatttcttga

SEQ ID NO: 581670 - DNA, 33 bp, Homo sapien
agtttaaacgagtccccaactataatttcttga

SEQ ID NO: 581671 - DNA, 33 bp, Homo sapien
atttctaaggaataaccatgctccaagcagaca

SEQ ID NO: 581672 - DNA, 33 bp, Homo sapien
atttctaaggaataactatgctccaagcagaca

SEQ ID NO: 581673 - DNA, 33 bp, Homo sapien
atttggaaattacataagctgtagggttggggg

SEQ ID NO: 581674 - DNA, 33 bp, Homo sapien
atttggaaattacatatgctgtagggttggggg

SEQ ID NO: 581675 - DNA, 33 bp, Homo sapien
gaaaatataaaaagcacgaacatcaaacctggg

SEQ ID NO: 581676 - DNA, 33 bp, Homo sapien
gaaaatataaaaagcatgaacatcaaacctggg

SEQ ID NO: 581677 - DNA, 33 bp, Homo sapien
aaaataacccaagcaaactcattaaaaagttgg

SEQ ID NO: 581678 - DNA, 33 bp, Homo sapien
aaaataacccaagcaacctcattaaaaagttgg

SEQ ID NO: 581679 - DNA, 33 bp, Homo sapien; identical to SEQ ID NO: 581677

SEQ ID NO: 581680 - DNA, 33 bp, Homo sapien; identical to SEQ ID NO: 581678

SEQ ID NO: 581681 - DNA, 33 bp, Homo sapien
acaatatgacctgaatcatactcaaaaactgat

SEQ ID NO: 581682 - DNA, 33 bp, Homo sapien
acaatatgacctgaatgatactcaaaaactgat

SEQ ID NO: 581683 - DNA, 33 bp, Homo sapien
cagaataactcaataaatattagcagcaatgac

SEQ ID NO: 581684 - DNA, 33 bp, Homo sapien
cagaataactcaataactattagcagcaatgac

SEQ ID NO: 581685 - DNA, 33 bp, Homo sapien
gtgatggaattactaacgattaggaagctaaga

SEQ ID NO: 581686 - DNA, 33 bp, Homo sapien
gtgatggaattactaatgattaggaagctaaga

SEQ ID NO: 581687 - DNA, 33 bp, Homo sapien
ggataatttccaacaacattaatgtcaaattta

SEQ ID NO: 581688 - DNA, 33 bp, Homo sapien
ggataatttccaacaatattaatgtcaaattta

SEQ ID NO: 581689 - DNA, 33 bp, Homo sapien
aagctgagaagaaagcacctttgaaaatattta

SEQ ID NO: 581690 - DNA, 33 bp, Homo sapien
aagctgagaagaaagcccctttgaaaatattta

SEQ ID NO: 581691 - DNA, 33 bp, Homo sapien
gtgtaatgggtttagacgtgatttcatagagac

SEQ ID NO: 581692 - DNA, 33 bp, Homo sapien
gtgtaatgggtttagatgtgatttcatagagac

SEQ ID NO: 581693 - DNA, 33 bp, Homo sapien
aggagatgcagacttcaagaagagtgaagctgg

SEQ ID NO: 581694 - DNA, 33 bp, Homo sapien
aggagatgcagacttccagaagagtgaagctgg

SEQ ID NO: 581695 - DNA, 33 bp, Homo sapien
acagtccattctaaaccgcaagctactagtaag

SEQ ID NO: 581696 - DNA, 33 bp, Homo sapien
acagtccattctaaactgcaagctactagtaag

SEQ ID NO: 581697 - DNA, 33 bp, Homo sapien
gttcaattaactaaccaagaattccaagtctaa

SEQ ID NO: 581698 - DNA, 33 bp, Homo sapien
gttcaattaactaaccgagaattccaagtctaa

SEQ ID NO: 581699 - DNA, 33 bp, Homo sapien
gtttaggaatccacgaagaaacagaaactccag

SEQ ID NO: 581700 - DNA, 33 bp, Homo sapien
gtttaggaatccacgatgaaacagaaactccag

SEQ ID NO: 581701 - DNA, 33 bp, Homo sapien
acttctagttgtaaggacacaaagtggctccat

SEQ ID NO: 581702 - DNA, 33 bp, Homo sapien
acttctagttgtaagggcacaaagtggctccat

SEQ ID NO: 581703 - DNA, 33 bp, Homo sapien
caaggtcgagacaccagcagattcggtatctgg

SEQ ID NO: 581704 - DNA, 33 bp, Homo sapien
caaggtcgagacaccatcagattcggtatctgg

SEQ ID NO: 581705 - DNA, 33 bp, Homo sapien
ctaggttttcatcttcaattggcccaagacaac

SEQ ID NO: 581706 - DNA, 33 bp, Homo sapien
ctaggttttcatcttcgattggcccaagacaac

SEQ ID NO: 581707 - DNA, 33 bp, Homo sapien
aggtgcttagtcattacaatgtccacctagtcg

SEQ ID NO: 581708 - DNA, 33 bp, Homo sapien
aggtgcttagtcattagaatgtccacctagtcg

SEQ ID NO: 581709 - DNA, 33 bp, Homo sapien
gcagaaatcaaaaacagattcttgtacaggtaa

SEQ ID NO: 581710 - DNA, 33 bp, Homo sapien
gcagaaatcaaaaacatattcttgtacaggtaa

SEQ ID NO: 581711 - DNA, 33 bp, Homo sapien
tattgcatattcattaaattaccaaaccaaata

SEQ ID NO: 581712 - DNA, 33 bp, Homo sapien
tattgcatattcattatattaccaaaccaaata

SEQ ID NO: 581713 - DNA, 33 bp, Homo sapien
cttgcctccagcttaccccaaacatagagactg

SEQ ID NO: 581714 - DNA, 33 bp, Homo sapien
cttgcctccagcttactccaaacatagagactg

SEQ ID NO: 581715 - DNA, 33 bp, Homo sapien
tgaggttagttttacacgagcaactcagggaaa

SEQ ID NO: 581716 - DNA, 33 bp, Homo sapien
tgaggttagttttacatgagcaactcagggaaa

SEQ ID NO: 581717 - DNA, 33 bp, Homo sapien
tgaacttctgtaaaaccgtgacttcacttctta

SEQ ID NO: 581718 - DNA, 33 bp, Homo sapien
tgaacttctgtaaaactgtgacttcacttctta

SEQ ID NO: 581719 - DNA, 33 bp, Homo sapien
tgaaagccaagtgttcaagagaagaaagcaaag

SEQ ID NO: 581720 - DNA, 33 bp, Homo sapien
tgaaagccaagtgttcgagagaagaaagcaaag

SEQ ID NO: 581721 - DNA, 33 bp, Homo sapien
catggatgctataaaaatataaatcgaagcggg

SEQ ID NO: 581722 - DNA, 33 bp, Homo sapien
catggatgctataaaagtataaatcgaagcggg

SEQ ID NO: 581723 - DNA, 33 bp, Homo sapien
aaaaaatctcaaagacaaatagagaccctatgc

SEQ ID NO: 581724 - DNA, 33 bp, Homo sapien
aaaaaatctcaaagaccaatagagaccctatgc

SEQ ID NO: 581725 - DNA, 33 bp, Homo sapien
tgggcaggtaatgtaaacagagaaagcagagta

SEQ ID NO: 581726 - DNA, 33 bp, Homo sapien
tgggcaggtaatgtaagcagagaaagcagagta

SEQ ID NO: 581727 - DNA, 33 bp, Homo sapien
ccttcatacatgggagcaattggccagagctag

SEQ ID NO: 581728 - DNA, 33 bp, Homo sapien
ccttcatacatgggagtaattggccagagctag

SEQ ID NO: 581729 - DNA, 33 bp, Homo sapien
atttttataaatgccaataattcagagaaagta

SEQ ID NO: 581730 - DNA, 33 bp, Homo sapien
atttttataaatgccagtaattcagagaaagta

SEQ ID NO: 581731 - DNA, 33 bp, Homo sapien
agacaacagaaatacaactcgactattatactg

SEQ ID NO: 581732 - DNA, 33 bp, Homo sapien
agacaacagaaatacatctcgactattatactg

SEQ ID NO: 581733 - DNA, 33 bp, Homo sapien
attacagattgacaacacaatacccgaagatgt

SEQ ID NO: 581734 - DNA, 33 bp, Homo sapien
attacagattgacaacgcaatacccgaagatgt

SEQ ID NO: 581735 - DNA, 33 bp, Homo sapien
agaatgagatgagaaccctttgcttttgtgttt

SEQ ID NO: 581736 - DNA, 33 bp, Homo sapien
agaatgagatgagaactctttgcttttgtgttt

SEQ ID NO: 581737 - DNA, 33 bp, Homo sapien
gatagcttttcaccataagaagaactccctcat

SEQ ID NO: 581738 - DNA, 33 bp, Homo sapien
gatagcttttcaccatgagaagaactccctcat

SEQ ID NO: 581739 - DNA, 33 bp, Homo sapien
cttctgaggagaagaaaaatttctcatatcttt

SEQ ID NO: 581740 - DNA, 33 bp, Homo sapien
cttctgaggagaagaacaatttctcatatcttt

SEQ ID NO: 581741 - DNA, 33 bp, Homo sapien
ctgaaaccaaggaacactggaatggaaagcact

SEQ ID NO: 581742 - DNA, 33 bp, Homo sapien
ctgaaaccaaggaacattggaatggaaagcact

SEQ ID NO: 581743 - DNA, 33 bp, Homo sapien
gtgcacaactccttacaagaatattcagagtac

SEQ ID NO: 581744 - DNA, 33 bp, Homo sapien
gtgcacaactccttacgagaatattcagagtac

SEQ ID NO: 581745 - DNA, 33 bp, Homo sapien
agactcgggcatatcaatataactctggaggag

SEQ ID NO: 581746 - DNA, 33 bp, Homo sapien
agactcgggcatatcagtataactctggaggag

SEQ ID NO: 581747 - DNA, 33 bp, Homo sapien
tctccctttagccacaaatgacattctcatcac

SEQ ID NO: 581748 - DNA, 33 bp, Homo sapien
tctccctttagccacagatgacattctcatcac

SEQ ID NO: 581749 - DNA, 33 bp, Homo sapien
gcagctatgaatagtaaaagatgagaatccaga

SEQ ID NO: 581750 - DNA, 33 bp, Homo sapien
gcagctatgaatagtagaagatgagaatccaga

SEQ ID NO: 581751 - DNA, 33 bp, Homo sapien
tttttcactgttttgaaaaattcttccatatta

SEQ ID NO: 581752 - DNA, 33 bp, Homo sapien
tttttcactgttttgagaaattcttccatatta

SEQ ID NO: 581753 - DNA, 33 bp, Homo sapien
tttacttttctgagcaaggtacatacacaaaat

SEQ ID NO: 581754 - DNA, 33 bp, Homo sapien
tttacttttctgagcagggtacatacacaaaat

SEQ ID NO: 581755 - DNA, 33 bp, Homo sapien
aacttctgattatggtaaagtttccttgattca

SEQ ID NO: 581756 - DNA, 33 bp, Homo sapien
aacttctgattatggttaagtttccttgattca

SEQ ID NO: 581757 - DNA, 33 bp, Homo sapien
taattcactgagagtacatggatctccccagca

SEQ ID NO: 581758 - DNA, 33 bp, Homo sapien
taattcactgagagtatatggatctccccagca

SEQ ID NO: 581759 - DNA, 33 bp, Homo sapien
ggtgattttaacctgaaaagttgtcaacattgt

SEQ ID NO: 581760 - DNA, 33 bp, Homo sapien
ggtgattttaacctgagaagttgtcaacattgt

SEQ ID NO: 581761 - DNA, 33 bp, Homo sapien
gtctattgaatactaccagcagatggaccaaat

SEQ ID NO: 581762 - DNA, 33 bp, Homo sapien
gtctattgaatactactagcagatggaccaaat

SEQ ID NO: 581763 - DNA, 33 bp, Homo sapien
tgtactaccattaaccagagttgaccgaaaatc

SEQ ID NO: 581764 - DNA, 33 bp, Homo sapien
tgtactaccattaacccgagttgaccgaaaatc

SEQ ID NO: 581765 - DNA, 33 bp, Homo sapien
catattaggtcatcagcctatttcactggatcc

SEQ ID NO: 581766 - DNA, 33 bp, Homo sapien
catattaggtcatcagtctatttcactggatcc

SEQ ID NO: 581767 - DNA, 33 bp, Homo sapien
tcttgctaaaataatgccaaagatgagaaagac

SEQ ID NO: 581768 - DNA, 33 bp, Homo sapien
tcttgctaaaataatggcaaagatgagaaagac

SEQ ID NO: 581769 - DNA, 33 bp, Homo sapien
tgtgcccaggtgtagaagttgctcttgctaaga

SEQ ID NO: 581770 - DNA, 33 bp, Homo sapien
tgtgcccaggtgtagatgttgctcttgctaaga

SEQ ID NO: 581771 - DNA, 33 bp, Homo sapien
ctgcatgggaaactacaatatgattactgggtt

SEQ ID NO: 581772 - DNA, 33 bp, Homo sapien
ctgcatgggaaactaccatatgattactgggtt

SEQ ID NO: 581773 - DNA, 33 bp, Homo sapien
acatggtcatatctaacatcaaccgggtgtaga

SEQ ID NO: 581774 - DNA, 33 bp, Homo sapien
acatggtcatatctaatatcaaccgggtgtaga

SEQ ID NO: 581775 - DNA, 33 bp, Homo sapien
tatagtctctgttgtaccttgtcaattctgttg

SEQ ID NO: 581776 - DNA, 33 bp, Homo sapien
tatagtctctgttgtagcttgtcaattctgttg

SEQ ID NO: 581777 - DNA, 33 bp, Homo sapien
ggttcagttttatacaactttaactagcatctc

SEQ ID NO: 581778 - DNA, 33 bp, Homo sapien
ggttcagttttatacatctttaactagcatctc

SEQ ID NO: 581779 - DNA, 33 bp, Homo sapien
aggcctagtaaaggcaccgtgagttcccacttt

SEQ ID NO: 581780 - DNA, 33 bp, Homo sapien
aggcctagtaaaggcatcgtgagttcccacttt

SEQ ID NO: 581781 - DNA, 33 bp, Homo sapien
gactcagcacttttaaagattttctatgtacct

SEQ ID NO: 581782 - DNA, 33 bp, Homo sapien
gactcagcacttttaatgattttctatgtacct

SEQ ID NO: 581783 - DNA, 33 bp, Homo sapien
cattgattgaaatgcacggatcaagtcaaattg

SEQ ID NO: 581784 - DNA, 33 bp, Homo sapien
cattgattgaaatgcatggatcaagtcaaattg

SEQ ID NO: 581785 - DNA, 33 bp, Homo sapien
agtccatctaaacttacaggaagaaatttcctg

SEQ ID NO: 581786 - DNA, 33 bp, Homo sapien
agtccatctaaacttataggaagaaatttcctg

SEQ ID NO: 581787 - DNA, 33 bp, Homo sapien
accaagtgtgagaaaactatatttcagttgtat

SEQ ID NO: 581788 - DNA, 33 bp, Homo sapien
accaagtgtgagaaaattatatttcagttgtat

SEQ ID NO: 581789 - DNA, 33 bp, Homo sapien
attgagaacatcgttacgttgtcatgttcgagg

SEQ ID NO: 581790 - DNA, 33 bp, Homo sapien
attgagaacatcgttatgttgtcatgttcgagg

SEQ ID NO: 581791 - DNA, 33 bp, Homo sapien
aattttcaaggcaaaaatgacagaattagaaat

SEQ ID NO: 581792 - DNA, 33 bp, Homo sapien
aattttcaaggcaaaactgacagaattagaaat

SEQ ID NO: 581793 - DNA, 33 bp, Homo sapien
aaaaataacttaatgcacttcctgttttataga

SEQ ID NO: 581794 - DNA, 33 bp, Homo sapien
aaaaataacttaatgcgcttcctgttttataga

SEQ ID NO: 581795 - DNA, 33 bp, Homo sapien
tctgcttgagtttgaagagttagtgcaggtaag

SEQ ID NO: 581796 - DNA, 33 bp, Homo sapien
tctgcttgagtttgaatagttagtgcaggtaag

SEQ ID NO: 581797 - DNA, 33 bp, Homo sapien
ctttcacaacagcatacagtttctaaaaaacag

SEQ ID NO: 581798 - DNA, 33 bp, Homo sapien
ctttcacaacagcatatagtttctaaaaaacag

SEQ ID NO: 581799 - DNA, 33 bp, Homo sapien
aaagagtaggaggcacagataagacaccattgt

SEQ ID NO: 581800 - DNA, 33 bp, Homo sapien
aaagagtaggaggcacggataagacaccattgt

SEQ ID NO: 581801 - DNA, 33 bp, Homo sapien
agatgctctcattcaacataaattttacagagc

SEQ ID NO: 581802 - DNA, 33 bp, Homo sapien
agatgctctcattcaagataaattttacagagc

SEQ ID NO: 581803 - DNA, 33 bp, Homo sapien
ccagtgaacatacaaacaaatgactggcatcca

SEQ ID NO: 581804 - DNA, 33 bp, Homo sapien
ccagtgaacatacaaagaaatgactggcatcca

SEQ ID NO: 581805 - DNA, 33 bp, Homo sapien
tgtcatggataaaaggccaatttcctggatgca

SEQ ID NO: 581806 - DNA, 33 bp, Homo sapien
tgtcatggataaaaggtcaatttcctggatgca

SEQ ID NO: 581807 - DNA, 33 bp, Homo sapien
agctcagcagagggtacggtgcaggaaaaatat

SEQ ID NO: 581808 - DNA, 33 bp, Homo sapien
agctcagcagagggtatggtgcaggaaaaatat

SEQ ID NO: 581809 - DNA, 33 bp, Homo sapien
ttctcggttatctacaccaaaaaattccccttt

SEQ ID NO: 581810 - DNA, 33 bp, Homo sapien
ttctcggttatctacatcaaaaaattccccttt

SEQ ID NO: 581811 - DNA, 33 bp, Homo sapien
acatttatcatcatcacagattcatgtgggctg

SEQ ID NO: 581812 - DNA, 33 bp, Homo sapien
acatttatcatcatcatagattcatgtgggctg

SEQ ID NO: 581813 - DNA, 33 bp, Homo sapien
caaatgggctcaaagaaatcatacaagactgag

SEQ ID NO: 581814 - DNA, 33 bp, Homo sapien
caaatgggctcaaagacatcatacaagactgag

SEQ ID NO: 581815 - DNA, 33 bp, Homo sapien
agcctaatatctatgccgaattcatgtattgat

SEQ ID NO: 581816 - DNA, 33 bp, Homo sapien
agcctaatatctatgctgaattcatgtattgat

SEQ ID NO: 581817 - DNA, 33 bp, Homo sapien
agcaattcattctatgcatcctcaaaacacaca

SEQ ID NO: 581818 - DNA, 33 bp, Homo sapien
agcaattcattctatgtatcctcaaaacacaca

SEQ ID NO: 581819 - DNA, 33 bp, Homo sapien
tccacatatagtggtacgtattgattggctgag

SEQ ID NO: 581820 - DNA, 33 bp, Homo sapien
tccacatatagtggtatgtattgattggctgag

SEQ ID NO: 581821 - DNA, 33 bp, Homo sapien
gtctgctccttcagctcacttggggatgtgaaa

SEQ ID NO: 581822 - DNA, 33 bp, Homo sapien
gtctgctccttcagcttacttggggatgtgaaa

SEQ ID NO: 581823 - DNA, 33 bp, Homo sapien
gacactgaactaagcaatccattaatacataca

SEQ ID NO: 581824 - DNA, 33 bp, Homo sapien
gacactgaactaagcagtccattaatacataca

SEQ ID NO: 581825 - DNA, 33 bp, Homo sapien
gcagctgaacaaactgaatttcagagaattaag

SEQ ID NO: 581826 - DNA, 33 bp, Homo sapien
gcagctgaacaaactgtatttcagagaattaag

SEQ ID NO: 581827 - DNA, 33 bp, Homo sapien
gagattgaatgagtccaaagaacagccaatgtc

SEQ ID NO: 581828 - DNA, 33 bp, Homo sapien
gagattgaatgagtcccaagaacagccaatgtc

SEQ ID NO: 581829 - DNA, 33 bp, Homo sapien
ctcatgtgtcctggcaaatggtattatgtcccc

SEQ ID NO: 581830 - DNA, 33 bp, Homo sapien
ctcatgtgtcctggcatatggtattatgtcccc

SEQ ID NO: 581831 - DNA, 33 bp, Homo sapien
aaaacagggactttgacattactccgccaaggg

SEQ ID NO: 581832 - DNA, 33 bp, Homo sapien
aaaacagggactttgagattactccgccaaggg

SEQ ID NO: 581833 - DNA, 33 bp, Homo sapien
ttactaagtgatattccctccagtgttatagat

SEQ ID NO: 581834 - DNA, 33 bp, Homo sapien
ttactaagtgatattctctccagtgttatagat

SEQ ID NO: 581835 - DNA, 33 bp, Homo sapien
tcttttgggctagtcaacagaaaatgatacccc

SEQ ID NO: 581836 - DNA, 33 bp, Homo sapien
tcttttgggctagtcagcagaaaatgatacccc

SEQ ID NO: 581837 - DNA, 33 bp, Homo sapien
agctctttgtgatatcccatcttagtgtgacag

SEQ ID NO: 581838 - DNA, 33 bp, Homo sapien
agctctttgtgatatctcatcttagtgtgacag

SEQ ID NO: 581839 - DNA, 33 bp, Homo sapien
aagagagggtattgcactgattaataaacagag

SEQ ID NO: 581840 - DNA, 33 bp, Homo sapien
aagagagggtattgcattgattaataaacagag

SEQ ID NO: 581841 - DNA, 33 bp, Homo sapien
ccatgtctgattcatactatctccatgtgtcta

SEQ ID NO: 581842 - DNA, 33 bp, Homo sapien
ccatgtctgattcatattatctccatgtgtcta

SEQ ID NO: 581843 - DNA, 33 bp, Homo sapien
tggtcattaactccgggatttcataactttcca

SEQ ID NO: 581844 - DNA, 33 bp, Homo sapien
tggtcattaactccggtatttcataactttcca

SEQ ID NO: 581845 - DNA, 33 bp, Homo sapien
ggaaaattgaggataaaagtttagattgcttgg

SEQ ID NO: 581846 - DNA, 33 bp, Homo sapien
ggaaaattgaggataagagtttagattgcttgg

SEQ ID NO: 581847 - DNA, 33 bp, Homo sapien
aagcaatttatgaccactattttatcagtgctt

SEQ ID NO: 581848 - DNA, 33 bp, Homo sapien
aagcaatttatgaccattattttatcagtgctt

SEQ ID NO: 581849 - DNA, 33 bp, Homo sapien
cttatgcataagaagacaaaagggcattttttt

SEQ ID NO: 581850 - DNA, 33 bp, Homo sapien
cttatgcataagaagagaaaagggcattttttt

SEQ ID NO: 581851 - DNA, 33 bp, Homo sapien
ccttgttttatctgaaattcaaatgtattcaag

SEQ ID NO: 581852 - DNA, 33 bp, Homo sapien
ccttgttttatctgaagttcaaatgtattcaag

SEQ ID NO: 581853 - DNA, 33 bp, Homo sapien
tctcagagttgcactacagaggtaaaatgcaat

SEQ ID NO: 581854 - DNA, 33 bp, Homo sapien
tctcagagttgcactatagaggtaaaatgcaat

SEQ ID NO: 581855 - DNA, 33 bp, Homo sapien
gatccaatctatagataacccattagctaaaca

SEQ ID NO: 581856 - DNA, 33 bp, Homo sapien
gatccaatctatagatgacccattagctaaaca

SEQ ID NO: 581857 - DNA, 33 bp, Homo sapien
cacaagaccctgtatgaaattgctctgactcct

SEQ ID NO: 581858 - DNA, 33 bp, Homo sapien
cacaagaccctgtatgtaattgctctgactcct

SEQ ID NO: 581859 - DNA, 33 bp, Homo sapien
caaggaggcataattacacaacatatcaaacat

SEQ ID NO: 581860 - DNA, 33 bp, Homo sapien
caaggaggcataattatacaacatatcaaacat

SEQ ID NO: 581861 - DNA, 33 bp, Homo sapien
ttatttgatgggatcaagagacaaaactagaga

SEQ ID NO: 581862 - DNA, 33 bp, Homo sapien
ttatttgatgggatcatgagacaaaactagaga

SEQ ID NO: 581863 - DNA, 33 bp, Homo sapien
taattcagatgccaacactgcgtataacccata

SEQ ID NO: 581864 - DNA, 33 bp, Homo sapien
taattcagatgccaacgctgcgtataacccata

SEQ ID NO: 581865 - DNA, 33 bp, Homo sapien
ttataagaaggcttgcggaaaactttaatttcc

SEQ ID NO: 581866 - DNA, 33 bp, Homo sapien
ttataagaaggcttgctgaaaactttaatttcc

SEQ ID NO: 581867 - DNA, 33 bp, Homo sapien
tataaacaccatcaacaaacttctcttttccag

SEQ ID NO: 581868 - DNA, 33 bp, Homo sapien
tataaacaccatcaacgaacttctcttttccag

SEQ ID NO: 581869 - DNA, 33 bp, Homo sapien
attaggaaaattcataaaaacatgaaaacaaca

SEQ ID NO: 581870 - DNA, 33 bp, Homo sapien
attaggaaaattcatagaaacatgaaaacaaca

SEQ ID NO: 581871 - DNA, 33 bp, Homo sapien
tctatgggaagtaagaaaatgaaactttgacat

SEQ ID NO: 581872 - DNA, 33 bp, Homo sapien
tctatgggaagtaagacaatgaaactttgacat

SEQ ID NO: 581873 - DNA, 33 bp, Homo sapien
gcttctactggttcctcaaactctagaggtggt

SEQ ID NO: 581874 - DNA, 33 bp, Homo sapien
gcttctactggttcctgaaactctagaggtggt

SEQ ID NO: 581875 - DNA, 33 bp, Homo sapien
tgctcttagaataagaactaattcactcaatat

SEQ ID NO: 581876 - DNA, 33 bp, Homo sapien
tgctcttagaataagagctaattcactcaatat

SEQ ID NO: 581877 - DNA, 33 bp, Homo sapien
caatgagggccttacaaagtaatcactggagaa

SEQ ID NO: 581878 - DNA, 33 bp, Homo sapien
caatgagggccttacagagtaatcactggagaa

SEQ ID NO: 581879 - DNA, 33 bp, Homo sapien
tgactggactattcagaagtgtgatggagggag

SEQ ID NO: 581880 - DNA, 33 bp, Homo sapien
tgactggactattcagtagtgtgatggagggag

SEQ ID NO: 581881 - DNA, 33 bp, Homo sapien
tgtttaagaacttgtcaaccatatgatctctgt

SEQ ID NO: 581882 - DNA, 33 bp, Homo sapien
tgtttaagaacttgtccaccatatgatctctgt

SEQ ID NO: 581883 - DNA, 33 bp, Homo sapien
tgtttttcagtaaccaaagagaacatggagaga

SEQ ID NO: 581884 - DNA, 33 bp, Homo sapien
tgtttttcagtaaccagagagaacatggagaga

SEQ ID NO: 581885 - DNA, 33 bp, Homo sapien
agcatgacttgatgacactcatacagtaccttt

SEQ ID NO: 581886 - DNA, 33 bp, Homo sapien
agcatgacttgatgacgctcatacagtaccttt

SEQ ID NO: 581887 - DNA, 33 bp, Homo sapien
cattgcttttggaggacgcaaattcccctcaca

SEQ ID NO: 581888 - DNA, 33 bp, Homo sapien
cattgcttttggaggatgcaaattcccctcaca

SEQ ID NO: 581889 - DNA, 33 bp, Homo sapien
accaatttaaatctgcaaacaaatcttaataaa

SEQ ID NO: 581890 - DNA, 33 bp, Homo sapien
accaatttaaatctgctaacaaatcttaataaa

SEQ ID NO: 581891 - DNA, 33 bp, Homo sapien
ctagtggacctgagcaaatcttccaactattag

SEQ ID NO: 581892 - DNA, 33 bp, Homo sapien
ctagtggacctgagcagatcttccaactattag

SEQ ID NO: 581893 - DNA, 33 bp, Homo sapien
aactgacaaaggcaaaacaatagcagagaaggc

SEQ ID NO: 581894 - DNA, 33 bp, Homo sapien
aactgacaaaggcaaatcaatagcagagaaggc

SEQ ID NO: 581895 - DNA, 33 bp, Homo sapien
cctgtgaagaaaagacaaaggcaaagtggtgaa

SEQ ID NO: 581896 - DNA, 33 bp, Homo sapien
cctgtgaagaaaagacgaaggcaaagtggtgaa

SEQ ID NO: 581897 - DNA, 33 bp, Homo sapien
gggctctgttttgtcagactgaaccttgactca

SEQ ID NO: 581898 - DNA, 33 bp, Homo sapien
gggctctgttttgtcatactgaaccttgactca

SEQ ID NO: 581899 - DNA, 33 bp, Homo sapien
cagtattttcacacaggaccatccatctagcaa

SEQ ID NO: 581900 - DNA, 33 bp, Homo sapien
cagtattttcacacagtaccatccatctagcaa

SEQ ID NO: 581901 - DNA, 33 bp, Homo sapien
cactgtactctgaaataaccagaataaaattgt

SEQ ID NO: 581902 - DNA, 33 bp, Homo sapien
cactgtactctgaaatcaccagaataaaattgt

SEQ ID NO: 581903 - DNA, 33 bp, Homo sapien
aagaagagagattagacacaaaatcctgataaa

SEQ ID NO: 581904 - DNA, 33 bp, Homo sapien
aagaagagagattagatacaaaatcctgataaa

SEQ ID NO: 581905 - DNA, 33 bp, Homo sapien
tcattttcttgactaaaaactcagttctataaa

SEQ ID NO: 581906 - DNA, 33 bp, Homo sapien
tcattttcttgactaacaactcagttctataaa

SEQ ID NO: 581907 - DNA, 33 bp, Homo sapien
tggcaaaactgtgtgaagaataacaaccagaca

SEQ ID NO: 581908 - DNA, 33 bp, Homo sapien
tggcaaaactgtgtgaggaataacaaccagaca

SEQ ID NO: 581909 - DNA, 33 bp, Homo sapien
tggtaaaatttgccacagccaggtcttatagta

SEQ ID NO: 581910 - DNA, 33 bp, Homo sapien
tggtaaaatttgccacggccaggtcttatagta

SEQ ID NO: 581911 - DNA, 33 bp, Homo sapien
tatttacctagcagtagtacaaattaaaagaat

SEQ ID NO: 581912 - DNA, 33 bp, Homo sapien
tatttacctagcagtattacaaattaaaagaat

SEQ ID NO: 581913 - DNA, 33 bp, Homo sapien
gtgggcagacaccatccaatcagctaagggcct

SEQ ID NO: 581914 - DNA, 33 bp, Homo sapien
gtgggcagacaccatcgaatcagctaagggcct

SEQ ID NO: 581915 - DNA, 33 bp, Homo sapien
cacagtgaatttaggaaaacaggtattcttcgt

SEQ ID NO: 581916 - DNA, 33 bp, Homo sapien
cacagtgaatttaggagaacaggtattcttcgt

SEQ ID NO: 581917 - DNA, 33 bp, Homo sapien
gatgtttgtgaaatacggccctcaatagaaagt

SEQ ID NO: 581918 - DNA, 33 bp, Homo sapien
gatgtttgtgaaatactgccctcaatagaaagt

SEQ ID NO: 581919 - DNA, 33 bp, Homo sapien
cacatccgtcaatacaagtaagatttacattgg

SEQ ID NO: 581920 - DNA, 33 bp, Homo sapien
cacatccgtcaatacaggtaagatttacattgg

SEQ ID NO: 581921 - DNA, 33 bp, Homo sapien
caattcatggtcttgaacaaagtgaggaggaag

SEQ ID NO: 581922 - DNA, 33 bp, Homo sapien
caattcatggtcttgagcaaagtgaggaggaag

SEQ ID NO: 581923 - DNA, 33 bp, Homo sapien
tgttggaaagcatggaaatggttcataatattt

SEQ ID NO: 581924 - DNA, 33 bp, Homo sapien
tgttggaaagcatggatatggttcataatattt

SEQ ID NO: 581925 - DNA, 33 bp, Homo sapien
aaagatagtttaaccacgtagtttttatcttgg

SEQ ID NO: 581926 - DNA, 33 bp, Homo sapien
aaagatagtttaaccatgtagtttttatcttgg

SEQ ID NO: 581927 - DNA, 33 bp, Homo sapien
cttatgtgcaaaatgaagtgcatacaaagacat

SEQ ID NO: 581928 - DNA, 33 bp, Homo sapien
cttatgtgcaaaatgacgtgcatacaaagacat

SEQ ID NO: 581929 - DNA, 33 bp, Homo sapien
aaagttcttgggagtgcaaagtgttaagtaatt

SEQ ID NO: 581930 - DNA, 33 bp, Homo sapien
aaagttcttgggagtgtaaagtgttaagtaatt

SEQ ID NO: 581931 - DNA, 33 bp, Homo sapien
cttggagtttgtgatacaaagaataatgtacag

SEQ ID NO: 581932 - DNA, 33 bp, Homo sapien
cttggagtttgtgatataaagaataatgtacag

SEQ ID NO: 581933 - DNA, 33 bp, Homo sapien
ttcagtacatttcacacaggatcacataggcaa

SEQ ID NO: 581934 - DNA, 33 bp, Homo sapien
ttcagtacatttcacagaggatcacataggcaa

SEQ ID NO: 581935 - DNA, 33 bp, Homo sapien
ttgatgttgaaagaaacaagaaaggattacatg

SEQ ID NO: 581936 - DNA, 33 bp, Homo sapien
ttgatgttgaaagaaagaagaaaggattacatg

SEQ ID NO: 581937 - DNA, 33 bp, Homo sapien
gctgcgtttgagataaaatcaccagcttctcag

SEQ ID NO: 581938 - DNA, 33 bp, Homo sapien
gctgcgtttgagataacatcaccagcttctcag

SEQ ID NO: 581939 - DNA, 33 bp, Homo sapien
taacctaaaaatgctactaacactttgatccag

SEQ ID NO: 581940 - DNA, 33 bp, Homo sapien
taacctaaaaatgctattaacactttgatccag

SEQ ID NO: 581941 - DNA, 33 bp, Homo sapien
cctgggttactgcaaccgcttttaggttttttg

SEQ ID NO: 581942 - DNA, 33 bp, Homo sapien
cctgggttactgcaactgcttttaggttttttg

SEQ ID NO: 581943 - DNA, 33 bp, Homo sapien
tcctaaagccttcagtcaattgaatgatgccca

SEQ ID NO: 581944 - DNA, 33 bp, Homo sapien
tcctaaagccttcagttaattgaatgatgccca

SEQ ID NO: 581945 - DNA, 33 bp, Homo sapien
atagctgcatacttcaaaacacaaagatattat

SEQ ID NO: 581946 - DNA, 33 bp, Homo sapien
atagctgcatacttcacaacacaaagatattat

SEQ ID NO: 581947 - DNA, 33 bp, Homo sapien
taagcaaaagtgattcaacagatacagatggag

SEQ ID NO: 581948 - DNA, 33 bp, Homo sapien
taagcaaaagtgattcgacagatacagatggag

SEQ ID NO: 581949 - DNA, 33 bp, Homo sapien
cttctgggagcatgagaagaatcttccaaagtg

SEQ ID NO: 581950 - DNA, 33 bp, Homo sapien
cttctgggagcatgaggagaatcttccaaagtg

SEQ ID NO: 581951 - DNA, 33 bp, Homo sapien
agagagcttgtttgaacacagaaaagaaagggg

SEQ ID NO: 581952 - DNA, 33 bp, Homo sapien
agagagcttgtttgaatacagaaaagaaagggg

SEQ ID NO: 581953 - DNA, 33 bp, Homo sapien
actccccacaacagagcattgtccagctcaaaa

SEQ ID NO: 581954 - DNA, 33 bp, Homo sapien
actccccacaacagagtattgtccagctcaaaa

SEQ ID NO: 581955 - DNA, 33 bp, Homo sapien
ttgatggcgaatgttaaaagcagttttactagt

SEQ ID NO: 581956 - DNA, 33 bp, Homo sapien
ttgatggcgaatgttacaagcagttttactagt

SEQ ID NO: 581957 - DNA, 33 bp, Homo sapien
ttctctggattcaaacagtcccgaaatctaaga

SEQ ID NO: 581958 - DNA, 33 bp, Homo sapien
ttctctggattcaaacggtcccgaaatctaaga

SEQ ID NO: 581959 - DNA, 33 bp, Homo sapien
tggtttcacagtggctcaacatgcttcttcaga

SEQ ID NO: 581960 - DNA, 33 bp, Homo sapien
tggtttcacagtggcttaacatgcttcttcaga

SEQ ID NO: 581961 - DNA, 33 bp, Homo sapien
taatttggaaattacactgagtagaccgaaaat

SEQ ID NO: 581962 - DNA, 33 bp, Homo sapien
taatttggaaattacattgagtagaccgaaaat

SEQ ID NO: 581963 - DNA, 33 bp, Homo sapien
acgacttatttttctacgatgggcccatttctc

SEQ ID NO: 581964 - DNA, 33 bp, Homo sapien
acgacttatttttctatgatgggcccatttctc

SEQ ID NO: 581965 - DNA, 33 bp, Homo sapien
acaacatagagtaatgcagcagtttagaagtta

SEQ ID NO: 581966 - DNA, 33 bp, Homo sapien
acaacatagagtaatgtagcagtttagaagtta

SEQ ID NO: 581967 - DNA, 33 bp, Homo sapien
gtcattaagtgcttctaaaggttctttcaaagc

SEQ ID NO: 581968 - DNA, 33 bp, Homo sapien
gtcattaagtgcttctgaaggttctttcaaagc

SEQ ID NO: 581969 - DNA, 33 bp, Homo sapien
ccaggggtggatgcacacaggtctggaggctgt

SEQ ID NO: 581970 - DNA, 33 bp, Homo sapien
ccaggggtggatgcacgcaggtctggaggctgt

SEQ ID NO: 581971 - DNA, 33 bp, Homo sapien
tgatattaaggcaactaacaggttatttggttc

SEQ ID NO: 581972 - DNA, 33 bp, Homo sapien
tgatattaaggcaactgacaggttatttggttc

SEQ ID NO: 581973 - DNA, 33 bp, Homo sapien
aatgataattctcaacaatttcacacaaattat

SEQ ID NO: 581974 - DNA, 33 bp, Homo sapien
aatgataattctcaaccatttcacacaaattat

SEQ ID NO: 581975 - DNA, 33 bp, Homo sapien
ttctgttgtgctgtatcaaagcatagagtattt

SEQ ID NO: 581976 - DNA, 33 bp, Homo sapien
ttctgttgtgctgtattaaagcatagagtattt

SEQ ID NO: 581977 - DNA, 33 bp, Homo sapien
gatgatcaaaaatataagcccagtagtgcccag

SEQ ID NO: 581978 - DNA, 33 bp, Homo sapien
gatgatcaaaaatatatgcccagtagtgcccag

SEQ ID NO: 581979 - DNA, 33 bp, Homo sapien
aaatatgttaactctgaaaatttggagagatga

SEQ ID NO: 581980 - DNA, 33 bp, Homo sapien
aaatatgttaactctgtaaatttggagagatga

SEQ ID NO: 581981 - DNA, 33 bp, Homo sapien
aatcaaaagcacactaatagagtgactcaaata

SEQ ID NO: 581982 - DNA, 33 bp, Homo sapien
aatcaaaagcacactattagagtgactcaaata

SEQ ID NO: 581983 - DNA, 33 bp, Homo sapien
tggctacttttgggtacggacagactgtagtga

SEQ ID NO: 581984 - DNA, 33 bp, Homo sapien
tggctacttttgggtatggacagactgtagtga

SEQ ID NO: 581985 - DNA, 33 bp, Homo sapien
aggtagttaccttatacgccaaactagctaagg

SEQ ID NO: 581986 - DNA, 33 bp, Homo sapien
aggtagttaccttatatgccaaactagctaagg

SEQ ID NO: 581987 - DNA, 33 bp, Homo sapien
cgggagctaaacgataagaacatattggactca

SEQ ID NO: 581988 - DNA, 33 bp, Homo sapien
cgggagctaaacgataggaacatattggactca

SEQ ID NO: 581989 - DNA, 33 bp, Homo sapien
taatctctggagtacacggagagtcaaggagaa

SEQ ID NO: 581990 - DNA, 33 bp, Homo sapien
taatctctggagtacagggagagtcaaggagaa

SEQ ID NO: 581991 - DNA, 33 bp, Homo sapien
ggggtgaaaagatataaggtgatcaaaaaatct

SEQ ID NO: 581992 - DNA, 33 bp, Homo sapien
ggggtgaaaagatatagggtgatcaaaaaatct

SEQ ID NO: 581993 - DNA, 33 bp, Homo sapien
tctctttgcaaactgaccatgtaaagctgatga

SEQ ID NO: 581994 - DNA, 33 bp, Homo sapien
tctctttgcaaactgatcatgtaaagctgatga

SEQ ID NO: 581995 - DNA, 33 bp, Homo sapien
tttttcaccacattctcaaagccataagagaca

SEQ ID NO: 581996 - DNA, 33 bp, Homo sapien
tttttcaccacattctgaaagccataagagaca

SEQ ID NO: 581997 - DNA, 33 bp, Homo sapien
acatgctctcaagatagaggctgaatccagggg

SEQ ID NO: 581998 - DNA, 33 bp, Homo sapien
acatgctctcaagatataggctgaatccagggg

SEQ ID NO: 581999 - DNA, 33 bp, Homo sapien
aggggctctccagaccggacagttgcaaagatc

SEQ ID NO: 582000 - DNA, 33 bp, Homo sapien
aggggctctccagacctgacagttgcaaagatc

SEQ ID NO: 582001 - DNA, 33 bp, Homo sapien
taattcataataaaaaatttgatagcttggtct

SEQ ID NO: 582002 - DNA, 33 bp, Homo sapien
taattcataataaaaagtttgatagcttggtct

SEQ ID NO: 582003 - DNA, 33 bp, Homo sapien
ttcagaaaggaagtgggagccaatggaatggca

SEQ ID NO: 582004 - DNA, 33 bp, Homo sapien
ttcagaaaggaagtggtagccaatggaatggca

SEQ ID NO: 582005 - DNA, 33 bp, Homo sapien
ttcatgtaccattaaaagtgttggcttttcaag

SEQ ID NO: 582006 - DNA, 33 bp, Homo sapien
ttcatgtaccattaaaggtgttggcttttcaag

SEQ ID NO: 582007 - DNA, 33 bp, Homo sapien
ttctacagtatctagaatagttttttgcataga

SEQ ID NO: 582008 - DNA, 33 bp, Homo sapien
ttctacagtatctagagtagttttttgcataga

SEQ ID NO: 582009 - DNA, 33 bp, Homo sapien
tatttcattgtcaaaaagattgatttttcccat

SEQ ID NO: 582010 - DNA, 33 bp, Homo sapien
tatttcattgtcaaaaggattgatttttcccat

SEQ ID NO: 582011 - DNA, 33 bp, Homo sapien
gcgtgaaggataggacactagcctagaactcag

SEQ ID NO: 582012 - DNA, 33 bp, Homo sapien
gcgtgaaggataggacgctagcctagaactcag

SEQ ID NO: 582013 - DNA, 33 bp, Homo sapien
tcttagctgtaaagagaaccaactttaacattc

SEQ ID NO: 582014 - DNA, 33 bp, Homo sapien
tcttagctgtaaagaggaccaactttaacattc

SEQ ID NO: 582015 - DNA, 33 bp, Homo sapien
taaggggaaattattacagctgcaatttgaaaa

SEQ ID NO: 582016 - DNA, 33 bp, Homo sapien
taaggggaaattattatagctgcaatttgaaaa

SEQ ID NO: 582017 - DNA, 33 bp, Homo sapien
ttatattaggtgcaaacggtagagtggaaaaac

SEQ ID NO: 582018 - DNA, 33 bp, Homo sapien
ttatattaggtgcaaatggtagagtggaaaaac

SEQ ID NO: 582019 - DNA, 33 bp, Homo sapien
gtatcagcaaaactcaataaattttctaaatcc

SEQ ID NO: 582020 - DNA, 33 bp, Homo sapien
gtatcagcaaaactcagtaaattttctaaatcc

SEQ ID NO: 582021 - DNA, 33 bp, Homo sapien
agaacaggagtaaaaaaaaagtgccagactaca

SEQ ID NO: 582022 - DNA, 33 bp, Homo sapien
agaacaggagtaaaaagaaagtgccagactaca

SEQ ID NO: 582023 - DNA, 33 bp, Homo sapien
agtctttcaaccattgcaaataagagcaaacac

SEQ ID NO: 582024 - DNA, 33 bp, Homo sapien
agtctttcaaccattggaaataagagcaaacac

SEQ ID NO: 582025 - DNA, 33 bp, Homo sapien
tgattgagatagtttcactttgagggctatttt

SEQ ID NO: 582026 - DNA, 33 bp, Homo sapien
tgattgagatagtttctctttgagggctatttt

SEQ ID NO: 582027 - DNA, 33 bp, Homo sapien
tagctgattaatgtgaatattgaaagcataaat

SEQ ID NO: 582028 - DNA, 33 bp, Homo sapien
tagctgattaatgtgagtattgaaagcataaat

SEQ ID NO: 582029 - DNA, 33 bp, Homo sapien
atttacttgattccaccgaacgcagtctgttct

SEQ ID NO: 582030 - DNA, 33 bp, Homo sapien
atttacttgattccactgaacgcagtctgttct

SEQ ID NO: 582031 - DNA, 33 bp, Homo sapien
aaatgagatttagcgcacagtagggtctgtgat

SEQ ID NO: 582032 - DNA, 33 bp, Homo sapien
aaatgagatttagcgcccagtagggtctgtgat

SEQ ID NO: 582033 - DNA, 33 bp, Homo sapien
aataaaatcattagcccacaaggacaaataaga

SEQ ID NO: 582034 - DNA, 33 bp, Homo sapien
aataaaatcattagcctacaaggacaaataaga

SEQ ID NO: 582035 - DNA, 33 bp, Homo sapien
acatctatagttgaaaagtgagcaaattcattt

SEQ ID NO: 582036 - DNA, 33 bp, Homo sapien
acatctatagttgaaatgtgagcaaattcattt

SEQ ID NO: 582037 - DNA, 33 bp, Homo sapien
ctaggcataacgcttacgttctgagaaacactg

SEQ ID NO: 582038 - DNA, 33 bp, Homo sapien
ctaggcataacgcttatgttctgagaaacactg

SEQ ID NO: 582039 - DNA, 33 bp, Homo sapien
tgtcttaaggctaggtaaacttaatccaggatg

SEQ ID NO: 582040 - DNA, 33 bp, Homo sapien
tgtcttaaggctaggtgaacttaatccaggatg

SEQ ID NO: 582041 - DNA, 33 bp, Homo sapien
actgttgctcgaataaagcacatctttgccttg

SEQ ID NO: 582042 - DNA, 33 bp, Homo sapien
actgttgctcgaataaggcacatctttgccttg

SEQ ID NO: 582043 - DNA, 33 bp, Homo sapien
cgtgatgatttggagacatttcacagaagagga

SEQ ID NO: 582044 - DNA, 33 bp, Homo sapien
cgtgatgatttggagagatttcacagaagagga

SEQ ID NO: 582045 - DNA, 33 bp, Homo sapien
tgagaactaagtctgaccttcaagccagagtcg

SEQ ID NO: 582046 - DNA, 33 bp, Homo sapien
tgagaactaagtctgatcttcaagccagagtcg

SEQ ID NO: 582047 - DNA, 33 bp, Homo sapien
ctatgattaccttggcaaattaacatttttagc

SEQ ID NO: 582048 - DNA, 33 bp, Homo sapien
ctatgattaccttggctaattaacatttttagc

SEQ ID NO: 582049 - DNA, 33 bp, Homo sapien
tacacacagagacaaacaaaagttagacacaga

SEQ ID NO: 582050 - DNA, 33 bp, Homo sapien
tacacacagagacaaataaaagttagacacaga

SEQ ID NO: 582051 - DNA, 33 bp, Homo sapien
tgggatcaatttcctgcaagacaacttttccat

SEQ ID NO: 582052 - DNA, 33 bp, Homo sapien
tgggatcaatttcctggaagacaacttttccat

SEQ ID NO: 582053 - DNA, 33 bp, Homo sapien
agcttttttactcttgaatcaacacttagctta

SEQ ID NO: 582054 - DNA, 33 bp, Homo sapien
agcttttttactcttgtatcaacacttagctta

SEQ ID NO: 582055 - DNA, 33 bp, Homo sapien
agatggctatgaactgacagtaaataattaact

SEQ ID NO: 582056 - DNA, 33 bp, Homo sapien
agatggctatgaactggcagtaaataattaact

SEQ ID NO: 582057 - DNA, 33 bp, Homo sapien
aaagcagtagcttaagaaagaatgctacaatag

SEQ ID NO: 582058 - DNA, 33 bp, Homo sapien
aaagcagtagcttaaggaagaatgctacaatag

SEQ ID NO: 582059 - DNA, 33 bp, Homo sapien
ctagagcataggtcaacgagttctttaaaagtt

SEQ ID NO: 582060 - DNA, 33 bp, Homo sapien
ctagagcataggtcaatgagttctttaaaagtt

SEQ ID NO: 582061 - DNA, 33 bp, Homo sapien
caacaatgacgtctacaatatttatgcaccacc

SEQ ID NO: 582062 - DNA, 33 bp, Homo sapien
caacaatgacgtctactatatttatgcaccacc

SEQ ID NO: 582063 - DNA, 33 bp, Homo sapien
aagctgcttggactcactaagcctcagtttttt

SEQ ID NO: 582064 - DNA, 33 bp, Homo sapien
aagctgcttggactcattaagcctcagtttttt

SEQ ID NO: 582065 - DNA, 33 bp, Homo sapien
cttttcactatctgctcaaggaagccctggttt

SEQ ID NO: 582066 - DNA, 33 bp, Homo sapien
cttttcactatctgctgaaggaagccctggttt

SEQ ID NO: 582067 - DNA, 33 bp, Homo sapien
aggaagaaaatgaaacagaggtatacacttaaa

SEQ ID NO: 582068 - DNA, 33 bp, Homo sapien
aggaagaaaatgaaacggaggtatacacttaaa

SEQ ID NO: 582069 - DNA, 33 bp, Homo sapien
tcctgtatgatagggaacatggctttgtgaatt

SEQ ID NO: 582070 - DNA, 33 bp, Homo sapien
tcctgtatgatagggatcatggctttgtgaatt

SEQ ID NO: 582071 - DNA, 33 bp, Homo sapien
gaatgggatttaaccagcaagaagtgaatagta

SEQ ID NO: 582072 - DNA, 33 bp, Homo sapien
gaatgggatttaaccatcaagaagtgaatagta

SEQ ID NO: 582073 - DNA, 33 bp, Homo sapien
gtgattctgttatggacgttttatatattgaaa

SEQ ID NO: 582074 - DNA, 33 bp, Homo sapien
gtgattctgttatggatgttttatatattgaaa

SEQ ID NO: 582075 - DNA, 33 bp, Homo sapien
tttttcaaacctatcaatgactctctattgtat

SEQ ID NO: 582076 - DNA, 33 bp, Homo sapien
tttttcaaacctatcagtgactctctattgtat

SEQ ID NO: 582077 - DNA, 33 bp, Homo sapien
atctgcaatttttgccaaagaaaaacatttcta

SEQ ID NO: 582078 - DNA, 33 bp, Homo sapien
atctgcaatttttgccgaagaaaaacatttcta

SEQ ID NO: 582079 - DNA, 33 bp, Homo sapien
acatatattttgatgacctagcattcaaattta

SEQ ID NO: 582080 - DNA, 33 bp, Homo sapien
acatatattttgatgatctagcattcaaattta

SEQ ID NO: 582081 - DNA, 33 bp, Homo sapien
cccactcaactaaaccgaccctttgctgatgct

SEQ ID NO: 582082 - DNA, 33 bp, Homo sapien
cccactcaactaaacctaccctttgctgatgct

SEQ ID NO: 582083 - DNA, 33 bp, Homo sapien
tacattccaaccaacaaagaatatttaaagaat

SEQ ID NO: 582084 - DNA, 33 bp, Homo sapien
tacattccaaccaacagagaatatttaaagaat

SEQ ID NO: 582085 - DNA, 33 bp, Homo sapien
tgtatgtgtatagtatcaatgtcccttttctac

SEQ ID NO: 582086 - DNA, 33 bp, Homo sapien
tgtatgtgtatagtattaatgtcccttttctac

SEQ ID NO: 582087 - DNA, 33 bp, Homo sapien
ggctgactttctttaacatctttgaagccaggg

SEQ ID NO: 582088 - DNA, 33 bp, Homo sapien
ggctgactttctttaatatctttgaagccaggg

SEQ ID NO: 582089 - DNA, 33 bp, Homo sapien
tgttatatataaagtacggactggggaccttct

SEQ ID NO: 582090 - DNA, 33 bp, Homo sapien
tgttatatataaagtatggactggggaccttct

SEQ ID NO: 582091 - DNA, 33 bp, Homo sapien
ctctagtatttttataacatcatggcttaactc

SEQ ID NO: 582092 - DNA, 33 bp, Homo sapien
ctctagtatttttataccatcatggcttaactc

SEQ ID NO: 582093 - DNA, 33 bp, Homo sapien
ttaggaagagggcaaacgaccaaaataagctgc

SEQ ID NO: 582094 - DNA, 33 bp, Homo sapien
ttaggaagagggcaaatgaccaaaataagctgc

SEQ ID NO: 582095 - DNA, 33 bp, Homo sapien
tatagtgacattagagacataaaatcaatgggt

SEQ ID NO: 582096 - DNA, 33 bp, Homo sapien
tatagtgacattagaggcataaaatcaatgggt

SEQ ID NO: 582097 - DNA, 33 bp, Homo sapien
cttgatggcactggtaaaagaggttcttcttga

SEQ ID NO: 582098 - DNA, 33 bp, Homo sapien
cttgatggcactggtagaagaggttcttcttga

SEQ ID NO: 582099 - DNA, 33 bp, Homo sapien
ttcatttaactctataatagcaaagacatttaa

SEQ ID NO: 582100 - DNA, 33 bp, Homo sapien
ttcatttaactctatagtagcaaagacatttaa

SEQ ID NO: 582101 - DNA, 33 bp, Homo sapien
aaaatgatcattaacaactaaacttctataaaa

SEQ ID NO: 582102 - DNA, 33 bp, Homo sapien
aaaatgatcattaacagctaaacttctataaaa

SEQ ID NO: 582103 - DNA, 33 bp, Homo sapien
aatgtcttctctcttcaagggggactgaaattc

SEQ ID NO: 582104 - DNA, 33 bp, Homo sapien
aatgtcttctctcttccagggggactgaaattc

SEQ ID NO: 582105 - DNA, 33 bp, Homo sapien
catcttgaagacggatcaagtgaagctggattt

SEQ ID NO: 582106 - DNA, 33 bp, Homo sapien
catcttgaagacggatgaagtgaagctggattt

SEQ ID NO: 582107 - DNA, 33 bp, Homo sapien
cctatccttggaagacaataaatcattgaaatc

SEQ ID NO: 582108 - DNA, 33 bp, Homo sapien
cctatccttggaagacgataaatcattgaaatc

SEQ ID NO: 582109 - DNA, 33 bp, Homo sapien
caagcttactattagacacggtagccttataaa

SEQ ID NO: 582110 - DNA, 33 bp, Homo sapien
caagcttactattagatacggtagccttataaa

SEQ ID NO: 582111 - DNA, 33 bp, Homo sapien
aaggctgatgacggcaacctaatactcttacat

SEQ ID NO: 582112 - DNA, 33 bp, Homo sapien
aaggctgatgacggcaccctaatactcttacat

SEQ ID NO: 582113 - DNA, 33 bp, Homo sapien
gcctttgtaaataagtaaaatcaactgaaggac

SEQ ID NO: 582114 - DNA, 33 bp, Homo sapien
gcctttgtaaataagttaaatcaactgaaggac

SEQ ID NO: 582115 - DNA, 33 bp, Homo sapien
tgaatcaactgtgacaaatgcaaaaacccatct

SEQ ID NO: 582116 - DNA, 33 bp, Homo sapien
tgaatcaactgtgacatatgcaaaaacccatct

SEQ ID NO: 582117 - DNA, 33 bp, Homo sapien
atacatattcttaccaactagagttaaccatca

SEQ ID NO: 582118 - DNA, 33 bp, Homo sapien
atacatattcttaccatctagagttaaccatca

SEQ ID NO: 582119 - DNA, 33 bp, Homo sapien
tatttgtgctcgaaaaagaagtaattgtgtgtg

SEQ ID NO: 582120 - DNA, 33 bp, Homo sapien
tatttgtgctcgaaaaggaagtaattgtgtgtg

SEQ ID NO: 582121 - DNA, 33 bp, Homo sapien
tcaatattgcctaataacaaggagaatcagtaa

SEQ ID NO: 582122 - DNA, 33 bp, Homo sapien
tcaatattgcctaatatcaaggagaatcagtaa

SEQ ID NO: 582123 - DNA, 33 bp, Homo sapien
ccctcctcctaatgaaagtattgtacatctcac

SEQ ID NO: 582124 - DNA, 33 bp, Homo sapien
ccctcctcctaatgaaggtattgtacatctcac

SEQ ID NO: 582125 - DNA, 33 bp, Homo sapien
cataggtattatagcacagcattaaacactagc

SEQ ID NO: 582126 - DNA, 33 bp, Homo sapien
cataggtattatagcagagcattaaacactagc

SEQ ID NO: 582127 - DNA, 33 bp, Homo sapien
tagttcttgacttggacctgctatttggctgta

SEQ ID NO: 582128 - DNA, 33 bp, Homo sapien
tagttcttgacttggatctgctatttggctgta

SEQ ID NO: 582129 - DNA, 33 bp, Homo sapien
attgatcacaggaagaagtaaaccaaagagtaa

SEQ ID NO: 582130 - DNA, 33 bp, Homo sapien
attgatcacaggaagacgtaaaccaaagagtaa

SEQ ID NO: 582131 - DNA, 33 bp, Homo sapien
cagaaagctcaagtaaaaaacacgaaccctgct

SEQ ID NO: 582132 - DNA, 33 bp, Homo sapien
cagaaagctcaagtaagaaacacgaaccctgct

SEQ ID NO: 582133 - DNA, 33 bp, Homo sapien
tagagcctctcacatccatgaattcctacaacc

SEQ ID NO: 582134 - DNA, 33 bp, Homo sapien
tagagcctctcacatctatgaattcctacaacc

SEQ ID NO: 582135 - DNA, 33 bp, Homo sapien
atgaaaatgattgctccatgcttatcctgtgta

SEQ ID NO: 582136 - DNA, 33 bp, Homo sapien
atgaaaatgattgctctatgcttatcctgtgta

SEQ ID NO: 582137 - DNA, 33 bp, Homo sapien
gaattaggatctggaaaatttttgactcacagt

SEQ ID NO: 582138 - DNA, 33 bp, Homo sapien
gaattaggatctggaatatttttgactcacagt

SEQ ID NO: 582139 - DNA, 33 bp, Homo sapien
gaaaggagtttcccgccaaccatgttggagact

SEQ ID NO: 582140 - DNA, 33 bp, Homo sapien
gaaaggagtttcccgctaaccatgttggagact

SEQ ID NO: 582141 - DNA, 33 bp, Homo sapien
gcaaaatatcatcacaaaagaacaagctagtta

SEQ ID NO: 582142 - DNA, 33 bp, Homo sapien
gcaaaatatcatcacagaagaacaagctagtta

SEQ ID NO: 582143 - DNA, 33 bp, Homo sapien
tgagagtaatgagttgcaagtaatggttgggag

SEQ ID NO: 582144 - DNA, 33 bp, Homo sapien
tgagagtaatgagttggaagtaatggttgggag

SEQ ID NO: 582145 - DNA, 33 bp, Homo sapien
gtgcactaaaaggtcaataagttcagaggcttt

SEQ ID NO: 582146 - DNA, 33 bp, Homo sapien
gtgcactaaaaggtcagtaagttcagaggcttt

SEQ ID NO: 582147 - DNA, 33 bp, Homo sapien
acgatctctgctcatacaatctgacagtttgta

SEQ ID NO: 582148 - DNA, 33 bp, Homo sapien
acgatctctgctcatagaatctgacagtttgta

SEQ ID NO: 582149 - DNA, 33 bp, Homo sapien
caatgtccttattgtgcaaaagcctagctcctc

SEQ ID NO: 582150 - DNA, 33 bp, Homo sapien
caatgtccttattgtggaaaagcctagctcctc

SEQ ID NO: 582151 - DNA, 33 bp, Homo sapien
acctttttgttcaaggacatccttcctacattg

SEQ ID NO: 582152 - DNA, 33 bp, Homo sapien
acctttttgttcaaggtcatccttcctacattg

SEQ ID NO: 582153 - DNA, 33 bp, Homo sapien
atctcagcttccactccaactctccacagagtt

SEQ ID NO: 582154 - DNA, 33 bp, Homo sapien
atctcagcttccactctaactctccacagagtt

SEQ ID NO: 582155 - DNA, 33 bp, Homo sapien
aggcaaccttgaatgacctaaattatatcattc

SEQ ID NO: 582156 - DNA, 33 bp, Homo sapien
aggcaaccttgaatgagctaaattatatcattc

SEQ ID NO: 582157 - DNA, 33 bp, Homo sapien
ccagaattcagtcattaaatgaagtgtttaata

SEQ ID NO: 582158 - DNA, 33 bp, Homo sapien
ccagaattcagtcatttaatgaagtgtttaata

SEQ ID NO: 582159 - DNA, 33 bp, Homo sapien
agggtcattcatcccgcaatcagtcttgctagt

SEQ ID NO: 582160 - DNA, 33 bp, Homo sapien
agggtcattcatcccggaatcagtcttgctagt

SEQ ID NO: 582161 - DNA, 33 bp, Homo sapien
tatgtcactgatttaactgtagatcacttaatc

SEQ ID NO: 582162 - DNA, 33 bp, Homo sapien
tatgtcactgatttaattgtagatcacttaatc

SEQ ID NO: 582163 - DNA, 33 bp, Homo sapien
tctggacatggtgaatcagtagctgaatctgcc

SEQ ID NO: 582164 - DNA, 33 bp, Homo sapien
tctggacatggtgaatgagtagctgaatctgcc

SEQ ID NO: 582165 - DNA, 33 bp, Homo sapien
aatccagattcgagaacgtactgatatccccaa

SEQ ID NO: 582166 - DNA, 33 bp, Homo sapien
aatccagattcgagaatgtactgatatccccaa

SEQ ID NO: 582167 - DNA, 33 bp, Homo sapien
aaaaatgattgtgcaaactttaatagcatgaag

SEQ ID NO: 582168 - DNA, 33 bp, Homo sapien
aaaaatgattgtgcaagctttaatagcatgaag

SEQ ID NO: 582169 - DNA, 33 bp, Homo sapien
ccagttctagctctgacgtgttaaaaaaataaa

SEQ ID NO: 582170 - DNA, 33 bp, Homo sapien
ccagttctagctctgatgtgttaaaaaaataaa

SEQ ID NO: 582171 - DNA, 33 bp, Homo sapien
tctcacactaattgcaactattttagactacat

SEQ ID NO: 582172 - DNA, 33 bp, Homo sapien
tctcacactaattgcagctattttagactacat

SEQ ID NO: 582173 - DNA, 33 bp, Homo sapien
caattttgtgcttagaatagacctatgcattta

SEQ ID NO: 582174 - DNA, 33 bp, Homo sapien
caattttgtgcttagagtagacctatgcattta

SEQ ID NO: 582175 - DNA, 33 bp, Homo sapien
ttcttgaaaatattgaacaagagccattaactc

SEQ ID NO: 582176 - DNA, 33 bp, Homo sapien
ttcttgaaaatattgagcaagagccattaactc

SEQ ID NO: 582177 - DNA, 33 bp, Homo sapien
taatatgttttgagaaagatacctctgaacaat

SEQ ID NO: 582178 - DNA, 33 bp, Homo sapien
taatatgttttgagaatgatacctctgaacaat

SEQ ID NO: 582179 - DNA, 33 bp, Homo sapien
ttctcaagtggatgataagaattgccagtcatg

SEQ ID NO: 582180 - DNA, 33 bp, Homo sapien
ttctcaagtggatgatcagaattgccagtcatg

SEQ ID NO: 582181 - DNA, 33 bp, Homo sapien
cacttgcatgattaagaaatgtaataaatatga

SEQ ID NO: 582182 - DNA, 33 bp, Homo sapien
cacttgcatgattaaggaatgtaataaatatga

SEQ ID NO: 582183 - DNA, 33 bp, Homo sapien
tatatcagacatttgacggaatagcttgtccaa

SEQ ID NO: 582184 - DNA, 33 bp, Homo sapien
tatatcagacatttgatggaatagcttgtccaa

SEQ ID NO: 582185 - DNA, 33 bp, Homo sapien
aaaataactggataacactcttgataaatatca

SEQ ID NO: 582186 - DNA, 33 bp, Homo sapien
aaaataactggataacgctcttgataaatatca

SEQ ID NO: 582187 - DNA, 33 bp, Homo sapien
atgctgtcgaggcatcaaaatgtacatattcac

SEQ ID NO: 582188 - DNA, 33 bp, Homo sapien
atgctgtcgaggcatccaaatgtacatattcac

SEQ ID NO: 582189 - DNA, 33 bp, Homo sapien
cagaaacaatcagcaacttagtagattatctct

SEQ ID NO: 582190 - DNA, 33 bp, Homo sapien
cagaaacaatcagcaatttagtagattatctct

SEQ ID NO: 582191 - DNA, 33 bp, Homo sapien
ttcctacaaaactgcaaccagactatcactaat

SEQ ID NO: 582192 - DNA, 33 bp, Homo sapien
ttcctacaaaactgcatccagactatcactaat

SEQ ID NO: 582193 - DNA, 33 bp, Homo sapien; identical to SEQ ID NO: 582191

SEQ ID NO: 582194 - DNA, 33 bp, Homo sapien; identical to SEQ ID NO: 582192

SEQ ID NO: 582195 - DNA, 33 bp, Homo sapien
caactcaacttcacaactctgggctggccctca

SEQ ID NO: 582196 - DNA, 33 bp, Homo sapien
caactcaacttcacaattctgggctggccctca

SEQ ID NO: 582197 - DNA, 33 bp, Homo sapien
ccccaatcaccaatctcagatatttttacaagg

SEQ ID NO: 582198 - DNA, 33 bp, Homo sapien
ccccaatcaccaatctgagatatttttacaagg

SEQ ID NO: 582199 - DNA, 33 bp, Homo sapien
caggatattttaaaagcacttccatttaggtat

SEQ ID NO: 582200 - DNA, 33 bp, Homo sapien
caggatattttaaaaggacttccatttaggtat

SEQ ID NO: 582201 - DNA, 33 bp, Homo sapien
gccttaccattctggaatatcacatttgtccac

SEQ ID NO: 582202 - DNA, 33 bp, Homo sapien
gccttaccattctggactatcacatttgtccac

SEQ ID NO: 582203 - DNA, 33 bp, Homo sapien
gagaaatgatatatgacggcgaacagtagttta

SEQ ID NO: 582204 - DNA, 33 bp, Homo sapien
gagaaatgatatatgatggcgaacagtagttta

SEQ ID NO: 582205 - DNA, 33 bp, Homo sapien
attcaatgtccattcacgatgtaattgaatagg

SEQ ID NO: 582206 - DNA, 33 bp, Homo sapien
attcaatgtccattcatgatgtaattgaatagg

SEQ ID NO: 582207 - DNA, 33 bp, Homo sapien
cacctcactcaagtgcagaaggttaacatcttc

SEQ ID NO: 582208 - DNA, 33 bp, Homo sapien
cacctcactcaagtgctgaaggttaacatcttc

SEQ ID NO: 582209 - DNA, 33 bp, Homo sapien
ttttccttatatcaccactctctaagcttttta

SEQ ID NO: 582210 - DNA, 33 bp, Homo sapien
ttttccttatatcaccgctctctaagcttttta

SEQ ID NO: 582211 - DNA, 33 bp, Homo sapien
taaactttttcataaacggtgctagaactactg

SEQ ID NO: 582212 - DNA, 33 bp, Homo sapien
taaactttttcataaatggtgctagaactactg

SEQ ID NO: 582213 - DNA, 33 bp, Homo sapien
catcatcacttcatggaatgcaaaaattttttc

SEQ ID NO: 582214 - DNA, 33 bp, Homo sapien
catcatcacttcatgggatgcaaaaattttttc

SEQ ID NO: 582215 - DNA, 33 bp, Homo sapien
aaaataactaaaaaaaatgtatatgctctaact

SEQ ID NO: 582216 - DNA, 33 bp, Homo sapien
aaaataactaaaaaaattgtatatgctctaact

SEQ ID NO: 582217 - DNA, 33 bp, Homo sapien
tacagatatcatgagacagcacataatccccaa

SEQ ID NO: 582218 - DNA, 33 bp, Homo sapien
tacagatatcatgagagagcacataatccccaa

SEQ ID NO: 582219 - DNA, 33 bp, Homo sapien
tttcagtctccacatcccctccaaaggttgaaa

SEQ ID NO: 582220 - DNA, 33 bp, Homo sapien
tttcagtctccacatctcctccaaaggttgaaa

SEQ ID NO: 582221 - DNA, 33 bp, Homo sapien
aaaagaacctagctcactatttactatctcact

SEQ ID NO: 582222 - DNA, 33 bp, Homo sapien
aaaagaacctagctcattatttactatctcact

SEQ ID NO: 582223 - DNA, 33 bp, Homo sapien
atttttctcacaatgaacaaactagtgagttat

SEQ ID NO: 582224 - DNA, 33 bp, Homo sapien
atttttctcacaatgagcaaactagtgagttat

SEQ ID NO: 582225 - DNA, 33 bp, Homo sapien
cttgtacagaagatacagactacctccaaaata

SEQ ID NO: 582226 - DNA, 33 bp, Homo sapien
cttgtacagaagatacggactacctccaaaata

SEQ ID NO: 582227 - DNA, 33 bp, Homo sapien
ttgtctccacggcaaacaatggacctcatttgt

SEQ ID NO: 582228 - DNA, 33 bp, Homo sapien
ttgtctccacggcaaagaatggacctcatttgt

SEQ ID NO: 582229 - DNA, 33 bp, Homo sapien
ctttatgatttttcaacgcatctataaatggaa

SEQ ID NO: 582230 - DNA, 33 bp, Homo sapien
ctttatgatttttcaatgcatctataaatggaa

SEQ ID NO: 582231 - DNA, 33 bp, Homo sapien
tgatactcaataaacaatgatgtaatcagctgg

SEQ ID NO: 582232 - DNA, 33 bp, Homo sapien
tgatactcaataaacagtgatgtaatcagctgg

SEQ ID NO: 582233 - DNA, 33 bp, Homo sapien
ctaaaaattctcagacaactaggaacacaggtg

SEQ ID NO: 582234 - DNA, 33 bp, Homo sapien
ctaaaaattctcagaccactaggaacacaggtg

SEQ ID NO: 582235 - DNA, 33 bp, Homo sapien
cgccttgttactgccaaatatggatagaagtag

SEQ ID NO: 582236 - DNA, 33 bp, Homo sapien
cgccttgttactgccagatatggatagaagtag

SEQ ID NO: 582237 - DNA, 33 bp, Homo sapien
ctgatatcttcctggcaagaaaaaatggagtag

SEQ ID NO: 582238 - DNA, 33 bp, Homo sapien
ctgatatcttcctggcgagaaaaaatggagtag

SEQ ID NO: 582239 - DNA, 33 bp, Homo sapien
atcactataatttgtaataaatctaagcccctt

SEQ ID NO: 582240 - DNA, 33 bp, Homo sapien
atcactataatttgtagtaaatctaagcccctt

SEQ ID NO: 582241 - DNA, 33 bp, Homo sapien
taactctgggaccatacgatcctgtattacaga

SEQ ID NO: 582242 - DNA, 33 bp, Homo sapien
taactctgggaccatatgatcctgtattacaga

SEQ ID NO: 582243 - DNA, 33 bp, Homo sapien
atataatcacagaacaaccttgtgtgacaaaga

SEQ ID NO: 582244 - DNA, 33 bp, Homo sapien
atataatcacagaacatccttgtgtgacaaaga

SEQ ID NO: 582245 - DNA, 33 bp, Homo sapien
tccgggttactaaagaatagaaataagcaacaa

SEQ ID NO: 582246 - DNA, 33 bp, Homo sapien
tccgggttactaaagagtagaaataagcaacaa

SEQ ID NO: 582247 - DNA, 33 bp, Homo sapien
acaatactttggataaattaatgtcatgacctc

SEQ ID NO: 582248 - DNA, 33 bp, Homo sapien
acaatactttggataagttaatgtcatgacctc

SEQ ID NO: 582249 - DNA, 33 bp, Homo sapien
acagtgtaaaaattgacatatcttcataaaatg

SEQ ID NO: 582250 - DNA, 33 bp, Homo sapien
acagtgtaaaaattgagatatcttcataaaatg

SEQ ID NO: 582251 - DNA, 33 bp, Homo sapien
ctagagccaatgatgactaaaaagtacttaatt

SEQ ID NO: 582252 - DNA, 33 bp, Homo sapien
ctagagccaatgatgagtaaaaagtacttaatt

SEQ ID NO: 582253 - DNA, 33 bp, Homo sapien
aggttgtacacatagaccattttcaaaataaaa

SEQ ID NO: 582254 - DNA, 33 bp, Homo sapien
aggttgtacacatagagcattttcaaaataaaa

SEQ ID NO: 582255 - DNA, 33 bp, Homo sapien
ttaagcttctaggtgacatacactaaaaatttt

SEQ ID NO: 582256 - DNA, 33 bp, Homo sapien
ttaagcttctaggtgatatacactaaaaatttt

SEQ ID NO: 582257 - DNA, 33 bp, Homo sapien
actgcaatacacatgaagaactatcaaacaggg

SEQ ID NO: 582258 - DNA, 33 bp, Homo sapien
actgcaatacacatgaggaactatcaaacaggg

SEQ ID NO: 582259 - DNA, 33 bp, Homo sapien
tataaaagggaactataaggaatctgtgatgaa

SEQ ID NO: 582260 - DNA, 33 bp, Homo sapien
tataaaagggaactatgaggaatctgtgatgaa

SEQ ID NO: 582261 - DNA, 33 bp, Homo sapien
tgttctcattattcccagacagatgcacagact

SEQ ID NO: 582262 - DNA, 33 bp, Homo sapien
tgttctcattattcccggacagatgcacagact

SEQ ID NO: 582263 - DNA, 33 bp, Homo sapien
ggtttcaattgtaatacagaagaaatctggacc

SEQ ID NO: 582264 - DNA, 33 bp, Homo sapien
ggtttcaattgtaatagagaagaaatctggacc

SEQ ID NO: 582265 - DNA, 33 bp, Homo sapien
gatgacatttgagctacagtactaatcttgatc

SEQ ID NO: 582266 - DNA, 33 bp, Homo sapien
gatgacatttgagctagagtactaatcttgatc

SEQ ID NO: 582267 - DNA, 33 bp, Homo sapien
ttcagaaatagtgtgccgagagaaataagccaa

SEQ ID NO: 582268 - DNA, 33 bp, Homo sapien
ttcagaaatagtgtgctgagagaaataagccaa

SEQ ID NO: 582269 - DNA, 33 bp, Homo sapien
atttctgtacttgtgacagactatggccctcaa

SEQ ID NO: 582270 - DNA, 33 bp, Homo sapien
atttctgtacttgtgagagactatggccctcaa

SEQ ID NO: 582271 - DNA, 33 bp, Homo sapien
gtacagaaatctgacactggagctggaagacag

SEQ ID NO: 582272 - DNA, 33 bp, Homo sapien
gtacagaaatctgacattggagctggaagacag

SEQ ID NO: 582273 - DNA, 33 bp, Homo sapien
ataagaaacaagccaccgattatgagtaatcat

SEQ ID NO: 582274 - DNA, 33 bp, Homo sapien
ataagaaacaagccactgattatgagtaatcat

SEQ ID NO: 582275 - DNA, 33 bp, Homo sapien
tcaggcagaaaaaataagagttcattcattaaa

SEQ ID NO: 582276 - DNA, 33 bp, Homo sapien
tcaggcagaaaaaatatgagttcattcattaaa

SEQ ID NO: 582277 - DNA, 33 bp, Homo sapien
aacagtagatgctgacaagaccagatatcaagt

SEQ ID NO: 582278 - DNA, 33 bp, Homo sapien
aacagtagatgctgacgagaccagatatcaagt

SEQ ID NO: 582279 - DNA, 33 bp, Homo sapien
aatttctatgcaggaaaggatatagcatcaaca

SEQ ID NO: 582280 - DNA, 33 bp, Homo sapien
aatttctatgcaggaagggatatagcatcaaca

SEQ ID NO: 582281 - DNA, 33 bp, Homo sapien
cccttggctatagtcacggctactactacctgg

SEQ ID NO: 582282 - DNA, 33 bp, Homo sapien
cccttggctatagtcatggctactactacctgg

SEQ ID NO: 582283 - DNA, 33 bp, Homo sapien
ttcattagtcaaccacaaaaacagctagtaagt

SEQ ID NO: 582284 - DNA, 33 bp, Homo sapien
ttcattagtcaaccacgaaaacagctagtaagt

SEQ ID NO: 582285 - DNA, 33 bp, Homo sapien
atggacttgaatgtgaagtgggcttgtacggga

SEQ ID NO: 582286 - DNA, 33 bp, Homo sapien
atggacttgaatgtgaggtgggcttgtacggga

SEQ ID NO: 582287 - DNA, 33 bp, Homo sapien
caataagctgcactaacggaaccatacaaaccc

SEQ ID NO: 582288 - DNA, 33 bp, Homo sapien
caataagctgcactaatggaaccatacaaaccc

SEQ ID NO: 582289 - DNA, 33 bp, Homo sapien
catttatgtatctctacactgtaatgaattgac

SEQ ID NO: 582290 - DNA, 33 bp, Homo sapien
catttatgtatctctagactgtaatgaattgac

SEQ ID NO: 582291 - DNA, 33 bp, Homo sapien
tattctctgtttgagacatcttcaaggagataa

SEQ ID NO: 582292 - DNA, 33 bp, Homo sapien
tattctctgtttgagagatcttcaaggagataa

SEQ ID NO: 582293 - DNA, 33 bp, Homo sapien
caaggatgataccaccggaaggtttctcagaga

SEQ ID NO: 582294 - DNA, 33 bp, Homo sapien
caaggatgataccacctgaaggtttctcagaga

SEQ ID NO: 582295 - DNA, 33 bp, Homo sapien
taaatagtcttcacataaaatctgtagttagat

SEQ ID NO: 582296 - DNA, 33 bp, Homo sapien
taaatagtcttcacatgaaatctgtagttagat

SEQ ID NO: 582297 - DNA, 33 bp, Homo sapien
ttgctttcattcataactgcccttcattgctat

SEQ ID NO: 582298 - DNA, 33 bp, Homo sapien
ttgctttcattcataagtgcccttcattgctat

SEQ ID NO: 582299 - DNA, 33 bp, Homo sapien
aaaagtggcttttttcactcaacataatatcca

SEQ ID NO: 582300 - DNA, 33 bp, Homo sapien
aaaagtggcttttttcgctcaacataatatcca

SEQ ID NO: 582301 - DNA, 33 bp, Homo sapien
ataatagaccaaaaacaatagacatgtattgct

SEQ ID NO: 582302 - DNA, 33 bp, Homo sapien
ataatagaccaaaaacgatagacatgtattgct

SEQ ID NO: 582303 - DNA, 33 bp, Homo sapien
gaacatcatatttctacatctaagctgactttt

SEQ ID NO: 582304 - DNA, 33 bp, Homo sapien
gaacatcatatttctagatctaagctgactttt

SEQ ID NO: 582305 - DNA, 33 bp, Homo sapien
ctcacacctcatggcacaccgcggaggaaggga

SEQ ID NO: 582306 - DNA, 33 bp, Homo sapien
ctcacacctcatggcataccgcggaggaaggga

SEQ ID NO: 582307 - DNA, 33 bp, Homo sapien
attgcattcaactaaaagatggatgagaataaa

SEQ ID NO: 582308 - DNA, 33 bp, Homo sapien
attgcattcaactaaatgatggatgagaataaa

SEQ ID NO: 582309 - DNA, 33 bp, Homo sapien
tgcacaaatgagccacagtggagtctttggtaa

SEQ ID NO: 582310 - DNA, 33 bp, Homo sapien
tgcacaaatgagccacggtggagtctttggtaa

SEQ ID NO: 582311 - DNA, 33 bp, Homo sapien
aagtgttacactaaacaaggtaattctcatata

SEQ ID NO: 582312 - DNA, 33 bp, Homo sapien
aagtgttacactaaaccaggtaattctcatata

SEQ ID NO: 582313 - DNA, 33 bp, Homo sapien
aaatgaaaattctcctcaaattgatccatagat

SEQ ID NO: 582314 - DNA, 33 bp, Homo sapien
aaatgaaaattctccttaaattgatccatagat

SEQ ID NO: 582315 - DNA, 33 bp, Homo sapien
acatctgccaccatcccaaataaatattcatac

SEQ ID NO: 582316 - DNA, 33 bp, Homo sapien
acatctgccaccatccgaaataaatattcatac

SEQ ID NO: 582317 - DNA, 33 bp, Homo sapien
atggcttcacttgcagaaggtgataaaacaaca

SEQ ID NO: 582318 - DNA, 33 bp, Homo sapien
atggcttcacttgcaggaggtgataaaacaaca

SEQ ID NO: 582319 - DNA, 33 bp, Homo sapien
tacattcgaattcctaagtggcacctatttctc

SEQ ID NO: 582320 - DNA, 33 bp, Homo sapien
tacattcgaattcctacgtggcacctatttctc

SEQ ID NO: 582321 - DNA, 33 bp, Homo sapien
cgtccattatattctaagcaccataatctcagt

SEQ ID NO: 582322 - DNA, 33 bp, Homo sapien
cgtccattatattctaggcaccataatctcagt

SEQ ID NO: 582323 - DNA, 33 bp, Homo sapien
tcgagacttctcatccacaacgatctctcttca

SEQ ID NO: 582324 - DNA, 33 bp, Homo sapien
tcgagacttctcatccgcaacgatctctcttca

SEQ ID NO: 582325 - DNA, 33 bp, Homo sapien
ctatcctatgtcaacactgcagttctttaagac

SEQ ID NO: 582326 - DNA, 33 bp, Homo sapien
ctatcctatgtcaacattgcagttctttaagac

SEQ ID NO: 582327 - DNA, 33 bp, Homo sapien
cttcagagaaagttgacgtcttagtcccagaag

SEQ ID NO: 582328 - DNA, 33 bp, Homo sapien
cttcagagaaagttgatgtcttagtcccagaag

SEQ ID NO: 582329 - DNA, 33 bp, Homo sapien
actgcagttcaaacagcccttccacttggaaca

SEQ ID NO: 582330 - DNA, 33 bp, Homo sapien
actgcagttcaaacagtccttccacttggaaca

SEQ ID NO: 582331 - DNA, 33 bp, Homo sapien
aagacatgaagcttcaaaatggggatcaagtat

SEQ ID NO: 582332 - DNA, 33 bp, Homo sapien
aagacatgaagcttcataatggggatcaagtat

SEQ ID NO: 582333 - DNA, 33 bp, Homo sapien
ttcagctcgacagcaactcacaaagcttttgca

SEQ ID NO: 582334 - DNA, 33 bp, Homo sapien
ttcagctcgacagcaattcacaaagcttttgca

SEQ ID NO: 582335 - DNA, 33 bp, Homo sapien
ttgaggaaaggactcccgcacattgcatctctt

SEQ ID NO: 582336 - DNA, 33 bp, Homo sapien
ttgaggaaaggactcctgcacattgcatctctt

SEQ ID NO: 582337 - DNA, 33 bp, Homo sapien
tctagatgaatgtttacgctcttgtttcaatct

SEQ ID NO: 582338 - DNA, 33 bp, Homo sapien
tctagatgaatgtttatgctcttgtttcaatct

SEQ ID NO: 582339 - DNA, 33 bp, Homo sapien
agagcatatgtagcaacaactaataattcttat

SEQ ID NO: 582340 - DNA, 33 bp, Homo sapien
agagcatatgtagcaagaactaataattcttat

SEQ ID NO: 582341 - DNA, 33 bp, Homo sapien
actgccagtatcaaaaagacttagactgagtaa

SEQ ID NO: 582342 - DNA, 33 bp, Homo sapien
actgccagtatcaaaaggacttagactgagtaa

SEQ ID NO: 582343 - DNA, 33 bp, Homo sapien
attttgtccaagaggacgtatctttgactcaat

SEQ ID NO: 582344 - DNA, 33 bp, Homo sapien
attttgtccaagaggatgtatctttgactcaat

SEQ ID NO: 582345 - DNA, 33 bp, Homo sapien
ctaggtaaattcccaaccataggctggtcctcc

SEQ ID NO: 582346 - DNA, 33 bp, Homo sapien
ctaggtaaattcccaatcataggctggtcctcc

SEQ ID NO: 582347 - DNA, 33 bp, Homo sapien
tccacagagagaaaaaatgttacttgctttatt

SEQ ID NO: 582348 - DNA, 33 bp, Homo sapien
tccacagagagaaaaattgttacttgctttatt

SEQ ID NO: 582349 - DNA, 33 bp, Homo sapien
tcagtctcaaagaaagaaagttccataacaaaa

SEQ ID NO: 582350 - DNA, 33 bp, Homo sapien
tcagtctcaaagaaagtaagttccataacaaaa

SEQ ID NO: 582351 - DNA, 33 bp, Homo sapien
aaactcagacaacaacagactctaaaagcaaga

SEQ ID NO: 582352 - DNA, 33 bp, Homo sapien
aaactcagacaacaactgactctaaaagcaaga

SEQ ID NO: 582353 - DNA, 33 bp, Homo sapien
ctgattaaccagcagaacacctagcatgatgcc

SEQ ID NO: 582354 - DNA, 33 bp, Homo sapien
ctgattaaccagcagagcacctagcatgatgcc

SEQ ID NO: 582355 - DNA, 33 bp, Homo sapien
gccagttccatagatactagcagaagacatgac

SEQ ID NO: 582356 - DNA, 33 bp, Homo sapien
gccagttccatagatattagcagaagacatgac

SEQ ID NO: 582357 - DNA, 33 bp, Homo sapien
aaattgtcaccctaagaagtttagcattgcact

SEQ ID NO: 582358 - DNA, 33 bp, Homo sapien
aaattgtcaccctaagcagtttagcattgcact

SEQ ID NO: 582359 - DNA, 33 bp, Homo sapien
tcactaggtgcttggacaaagagtcactaacag

SEQ ID NO: 582360 - DNA, 33 bp, Homo sapien
tcactaggtgcttggagaaagagtcactaacag

SEQ ID NO: 582361 - DNA, 33 bp, Homo sapien
tgaagaacaatgagagcaagttgtttggccagg

SEQ ID NO: 582362 - DNA, 33 bp, Homo sapien
tgaagaacaatgagagtaagttgtttggccagg

SEQ ID NO: 582363 - DNA, 33 bp, Homo sapien
tgtaatgaggtcacaactggtaatgtcatttca

SEQ ID NO: 582364 - DNA, 33 bp, Homo sapien
tgtaatgaggtcacaattggtaatgtcatttca

SEQ ID NO: 582365 - DNA, 33 bp, Homo sapien
gtggcattataattagccaaatcaaattactag

SEQ ID NO: 582366 - DNA, 33 bp, Homo sapien
gtggcattataattagtcaaatcaaattactag

SEQ ID NO: 582367 - DNA, 33 bp, Homo sapien
aacacgatctaggaagaagagtagctaattagt

SEQ ID NO: 582368 - DNA, 33 bp, Homo sapien
aacacgatctaggaaggagagtagctaattagt

SEQ ID NO: 582369 - DNA, 33 bp, Homo sapien
catatatgtgtaaagaccaaatcaacataattg

SEQ ID NO: 582370 - DNA, 33 bp, Homo sapien
catatatgtgtaaagatcaaatcaacataattg

SEQ ID NO: 582371 - DNA, 33 bp, Homo sapien
taatgcacacatgtcccagacttttaagcagtt

SEQ ID NO: 582372 - DNA, 33 bp, Homo sapien
taatgcacacatgtccgagacttttaagcagtt

SEQ ID NO: 582373 - DNA, 33 bp, Homo sapien
tcaggaaaaggcattggattatagaatctattt

SEQ ID NO: 582374 - DNA, 33 bp, Homo sapien
tcaggaaaaggcattgtattatagaatctattt

SEQ ID NO: 582375 - DNA, 33 bp, Homo sapien
gaaattaccttagcaaggaggtaaagtggatgg

SEQ ID NO: 582376 - DNA, 33 bp, Homo sapien
gaaattaccttagcaatgaggtaaagtggatgg

SEQ ID NO: 582377 - DNA, 33 bp, Homo sapien
ttagattctgtagctgaattcaacattagtaat

SEQ ID NO: 582378 - DNA, 33 bp, Homo sapien
ttagattctgtagctgcattcaacattagtaat

SEQ ID NO: 582379 - DNA, 33 bp, Homo sapien
actttgcttgaaacaaatacacatacacacaga

SEQ ID NO: 582380 - DNA, 33 bp, Homo sapien
actttgcttgaaacaagtacacatacacacaga

SEQ ID NO: 582381 - DNA, 33 bp, Homo sapien
tggaaatatgcactctcaaagcatacggaaacc

SEQ ID NO: 582382 - DNA, 33 bp, Homo sapien
tggaaatatgcactctgaaagcatacggaaacc

SEQ ID NO: 582383 - DNA, 33 bp, Homo sapien
atttctgagtctaaaggcctatcttaggatttc

SEQ ID NO: 582384 - DNA, 33 bp, Homo sapien
atttctgagtctaaagtcctatcttaggatttc

SEQ ID NO: 582385 - DNA, 33 bp, Homo sapien
tgttggtagtaatagaatagaactttgatcata

SEQ ID NO: 582386 - DNA, 33 bp, Homo sapien
tgttggtagtaatagattagaactttgatcata

SEQ ID NO: 582387 - DNA, 33 bp, Homo sapien
tagctatctgagtcaaagtaattttctatatta

SEQ ID NO: 582388 - DNA, 33 bp, Homo sapien
tagctatctgagtcaatgtaattttctatatta

SEQ ID NO: 582389 - DNA, 33 bp, Homo sapien
agagaaaatacttgaactctgctgcctgaacat

SEQ ID NO: 582390 - DNA, 33 bp, Homo sapien
agagaaaatacttgaagtctgctgcctgaacat

SEQ ID NO: 582391 - DNA, 33 bp, Homo sapien
tatgactcatgaagcacatctcaataaatgtaa

SEQ ID NO: 582392 - DNA, 33 bp, Homo sapien
tatgactcatgaagcatatctcaataaatgtaa

SEQ ID NO: 582393 - DNA, 33 bp, Homo sapien
tgaaaataagtgcagacaatctccatttcatga

SEQ ID NO: 582394 - DNA, 33 bp, Homo sapien
tgaaaataagtgcagataatctccatttcatga

SEQ ID NO: 582395 - DNA, 33 bp, Homo sapien
caatcaaaatgatgaacgagcgagagtatttta

SEQ ID NO: 582396 - DNA, 33 bp, Homo sapien
caatcaaaatgatgaatgagcgagagtatttta

SEQ ID NO: 582397 - DNA, 33 bp, Homo sapien
agaatgtagaaagcacaaacatcaaggctagag

SEQ ID NO: 582398 - DNA, 33 bp, Homo sapien
agaatgtagaaagcaccaacatcaaggctagag

SEQ ID NO: 582399 - DNA, 33 bp, Homo sapien
caatttgtgcatataactgcttttaatccataa

SEQ ID NO: 582400 - DNA, 33 bp, Homo sapien
caatttgtgcatataattgcttttaatccataa

SEQ ID NO: 582401 - DNA, 33 bp, Homo sapien
tttaaatcgttaaacaacatattacttgcaatg

SEQ ID NO: 582402 - DNA, 33 bp, Homo sapien
tttaaatcgttaaacagcatattacttgcaatg

SEQ ID NO: 582403 - DNA, 33 bp, Homo sapien
atccattcattcattcaattattcgttgattga

SEQ ID NO: 582404 - DNA, 33 bp, Homo sapien
atccattcattcattcgattattcgttgattga

SEQ ID NO: 582405 - DNA, 33 bp, Homo sapien
gaggtcattcttatcaccccacatagagacttg

SEQ ID NO: 582406 - DNA, 33 bp, Homo sapien
gaggtcattcttatcatcccacatagagacttg

SEQ ID NO: 582407 - DNA, 33 bp, Homo sapien
gaagtctgtgggaaaacgaccctcattcaagtc

SEQ ID NO: 582408 - DNA, 33 bp, Homo sapien
gaagtctgtgggaaaatgaccctcattcaagtc

SEQ ID NO: 582409 - DNA, 33 bp, Homo sapien
tgccaaatgtgaattacctcctcaaatacacac

SEQ ID NO: 582410 - DNA, 33 bp, Homo sapien
tgccaaatgtgaattatctcctcaaatacacac

SEQ ID NO: 582411 - DNA, 33 bp, Homo sapien
agatactgtaatttggaaaagataatgtaatcc

SEQ ID NO: 582412 - DNA, 33 bp, Homo sapien
agatactgtaatttgggaaagataatgtaatcc

SEQ ID NO: 582413 - DNA, 33 bp, Homo sapien
gattaactgtgacctacggaatgttagcagaag

SEQ ID NO: 582414 - DNA, 33 bp, Homo sapien
gattaactgtgacctatggaatgttagcagaag

SEQ ID NO: 582415 - DNA, 33 bp, Homo sapien
gcagaggggaaagagaacaagtagccatcaggc

SEQ ID NO: 582416 - DNA, 33 bp, Homo sapien
gcagaggggaaagagagcaagtagccatcaggc

SEQ ID NO: 582417 - DNA, 33 bp, Homo sapien
ttttccaggatatagaagctttattaattttca

SEQ ID NO: 582418 - DNA, 33 bp, Homo sapien
ttttccaggatatagatgctttattaattttca

SEQ ID NO: 582419 - DNA, 33 bp, Homo sapien
taagtagtgaggctagaaagacagcgatttagg

SEQ ID NO: 582420 - DNA, 33 bp, Homo sapien
taagtagtgaggctagcaagacagcgatttagg

SEQ ID NO: 582421 - DNA, 33 bp, Homo sapien
cttacatatctcacaaatgtgctgtggttttga

SEQ ID NO: 582422 - DNA, 33 bp, Homo sapien
cttacatatctcacaattgtgctgtggttttga

SEQ ID NO: 582423 - DNA, 33 bp, Homo sapien
gatagtataatacaacacaaaatttaaggacag

SEQ ID NO: 582424 - DNA, 33 bp, Homo sapien
gatagtataatacaacgcaaaatttaaggacag

SEQ ID NO: 582425 - DNA, 33 bp, Homo sapien
catttacaaagcaggcaaaataaaaacagaaga

SEQ ID NO: 582426 - DNA, 33 bp, Homo sapien
catttacaaagcaggccaaataaaaacagaaga

SEQ ID NO: 582427 - DNA, 33 bp, Homo sapien
aaccacacttgtgagaagagttggattatagat

SEQ ID NO: 582428 - DNA, 33 bp, Homo sapien
aaccacacttgtgagaggagttggattatagat

SEQ ID NO: 582429 - DNA, 33 bp, Homo sapien
gagaggttctacaagaagggttagcggcttgta

SEQ ID NO: 582430 - DNA, 33 bp, Homo sapien
gagaggttctacaagatgggttagcggcttgta

SEQ ID NO: 582431 - DNA, 33 bp, Homo sapien
ggctgaggaaacacaggcatggtgccactgatt

SEQ ID NO: 582432 - DNA, 33 bp, Homo sapien
ggctgaggaaacacagtcatggtgccactgatt

SEQ ID NO: 582433 - DNA, 33 bp, Homo sapien
tgtgctcctggcaatacggtgaagagaatctct

SEQ ID NO: 582434 - DNA, 33 bp, Homo sapien
tgtgctcctggcaatatggtgaagagaatctct

SEQ ID NO: 582435 - DNA, 33 bp, Homo sapien
gatttttgtgctaatgacaacaataagtataaa

SEQ ID NO: 582436 - DNA, 33 bp, Homo sapien
gatttttgtgctaatggcaacaataagtataaa

SEQ ID NO: 582437 - DNA, 33 bp, Homo sapien
ctcaccttgatgtgtcaactaatcctaaactat

SEQ ID NO: 582438 - DNA, 33 bp, Homo sapien
ctcaccttgatgtgtctactaatcctaaactat

SEQ ID NO: 582439 - DNA, 33 bp, Homo sapien
ttgctgattatcttcacagtaaaatgtcacttt

SEQ ID NO: 582440 - DNA, 33 bp, Homo sapien
ttgctgattatcttcagagtaaaatgtcacttt

SEQ ID NO: 582441 - DNA, 33 bp, Homo sapien
tttgtgtgaacatggaaaaagctggacgttatt

SEQ ID NO: 582442 - DNA, 33 bp, Homo sapien
tttgtgtgaacatggataaagctggacgttatt

SEQ ID NO: 582443 - DNA, 33 bp, Homo sapien
aagttaaattgtaataccttcagttgaagcatg

SEQ ID NO: 582444 - DNA, 33 bp, Homo sapien
aagttaaattgtaatatcttcagttgaagcatg

SEQ ID NO: 582445 - DNA, 33 bp, Homo sapien
acaaacatctcgtttacaatttaccttacattt

SEQ ID NO: 582446 - DNA, 33 bp, Homo sapien
acaaacatctcgtttataatttaccttacattt

SEQ ID NO: 582447 - DNA, 33 bp, Homo sapien
gtctattgtgccatcaatgacttgagatattgc

SEQ ID NO: 582448 - DNA, 33 bp, Homo sapien
gtctattgtgccatcagtgacttgagatattgc

SEQ ID NO: 582449 - DNA, 33 bp, Homo sapien
tacctttcttgaccaacgcatcagcttttggga

SEQ ID NO: 582450 - DNA, 33 bp, Homo sapien
tacctttcttgaccaatgcatcagcttttggga

SEQ ID NO: 582451 - DNA, 33 bp, Homo sapien
tctgcagaagaataaactacacaatgcaagcta

SEQ ID NO: 582452 - DNA, 33 bp, Homo sapien
tctgcagaagaataaagtacacaatgcaagcta

SEQ ID NO: 582453 - DNA, 33 bp, Homo sapien
gtcttcaagcataatcaaaatcctagatatatt

SEQ ID NO: 582454 - DNA, 33 bp, Homo sapien
gtcttcaagcataatcgaaatcctagatatatt

SEQ ID NO: 582455 - DNA, 33 bp, Homo sapien
atcacctctggggacaactgcaaatccctgcct

SEQ ID NO: 582456 - DNA, 33 bp, Homo sapien
atcacctctggggacacctgcaaatccctgcct

SEQ ID NO: 582457 - DNA, 33 bp, Homo sapien
attttaaaaacactagacagtatcctgggcaag

SEQ ID NO: 582458 - DNA, 33 bp, Homo sapien
attttaaaaacactaggcagtatcctgggcaag

SEQ ID NO: 582459 - DNA, 33 bp, Homo sapien
taaggttttaggaaataataatcgccattcttt

SEQ ID NO: 582460 - DNA, 33 bp, Homo sapien
taaggttttaggaaatgataatcgccattcttt

SEQ ID NO: 582461 - DNA, 33 bp, Homo sapien
agctaaggcctgtatcaaaggacttacaactct

SEQ ID NO: 582462 - DNA, 33 bp, Homo sapien
agctaaggcctgtatcgaaggacttacaactct

SEQ ID NO: 582463 - DNA, 33 bp, Homo sapien
tagaggggccctaatacgaactgaacagaaaaa

SEQ ID NO: 582464 - DNA, 33 bp, Homo sapien
tagaggggccctaatatgaactgaacagaaaaa

SEQ ID NO: 582465 - DNA, 33 bp, Homo sapien
aatcctagctataacaatcggacaaaagaaaga

SEQ ID NO: 582466 - DNA, 33 bp, Homo sapien
aatcctagctataacagtcggacaaaagaaaga

SEQ ID NO: 582467 - DNA, 33 bp, Homo sapien
tgaggaagctaaaggaataatctgatttcattt

SEQ ID NO: 582468 - DNA, 33 bp, Homo sapien
tgaggaagctaaaggactaatctgatttcattt

SEQ ID NO: 582469 - DNA, 33 bp, Homo sapien
gcatgtatttggcagcacttgtaacagaatgct

SEQ ID NO: 582470 - DNA, 33 bp, Homo sapien
gcatgtatttggcagcgcttgtaacagaatgct

SEQ ID NO: 582471 - DNA, 33 bp, Homo sapien
tacagtgggaaaagcacagcatagtttccgtaa

SEQ ID NO: 582472 - DNA, 33 bp, Homo sapien
tacagtgggaaaagcatagcatagtttccgtaa

SEQ ID NO: 582473 - DNA, 33 bp, Homo sapien
agcaatctataaaatgaaattgtgaaaataaag

SEQ ID NO: 582474 - DNA, 33 bp, Homo sapien
agcaatctataaaatgcaattgtgaaaataaag

SEQ ID NO: 582475 - DNA, 33 bp, Homo sapien
aggactcatccagtcgcccatcttctactggtc

SEQ ID NO: 582476 - DNA, 33 bp, Homo sapien
aggactcatccagtcgtccatcttctactggtc

SEQ ID NO: 582477 - DNA, 33 bp, Homo sapien
ccattctgatgcatggacaaacctaaaagggag

SEQ ID NO: 582478 - DNA, 33 bp, Homo sapien
ccattctgatgcatgggcaaacctaaaagggag

SEQ ID NO: 582479 - DNA, 33 bp, Homo sapien
aaactattagctgtgaaaataatggtccaatta

SEQ ID NO: 582480 - DNA, 33 bp, Homo sapien
aaactattagctgtgagaataatggtccaatta

SEQ ID NO: 582481 - DNA, 33 bp, Homo sapien
cacaatggagtagaaacgagggtcagaaaatat

SEQ ID NO: 582482 - DNA, 33 bp, Homo sapien
cacaatggagtagaaatgagggtcagaaaatat

SEQ ID NO: 582483 - DNA, 33 bp, Homo sapien
tgccatggtcgtcttcaaatcattcaccttcaa

SEQ ID NO: 582484 - DNA, 33 bp, Homo sapien
tgccatggtcgtcttccaatcattcaccttcaa

SEQ ID NO: 582485 - DNA, 33 bp, Homo sapien
cctaacttgaccttgaagtcttcagatggcttc

SEQ ID NO: 582486 - DNA, 33 bp, Homo sapien
cctaacttgaccttgaggtcttcagatggcttc

SEQ ID NO: 582487 - DNA, 33 bp, Homo sapien
tgagtggtggaggttacggtagactccccgaca

SEQ ID NO: 582488 - DNA, 33 bp, Homo sapien
tgagtggtggaggttatggtagactccccgaca

SEQ ID NO: 582489 - DNA, 33 bp, Homo sapien
gtcacttaccctcatcaaggaaggatatagcat

SEQ ID NO: 582490 - DNA, 33 bp, Homo sapien
gtcacttaccctcatcgaggaaggatatagcat

SEQ ID NO: 582491 - DNA, 33 bp, Homo sapien
ctagcattcttctctcccagtcaagctgaatta

SEQ ID NO: 582492 - DNA, 33 bp, Homo sapien
ctagcattcttctctctcagtcaagctgaatta

SEQ ID NO: 582493 - DNA, 33 bp, Homo sapien
tgaaaatgtctgaaaaaagtcggaaaatgtgtg

SEQ ID NO: 582494 - DNA, 33 bp, Homo sapien
tgaaaatgtctgaaaagagtcggaaaatgtgtg

SEQ ID NO: 582495 - DNA, 33 bp, Homo sapien
ataaaactactttcacaccatagaaagcaatcg

SEQ ID NO: 582496 - DNA, 33 bp, Homo sapien
ataaaactactttcacgccatagaaagcaatcg

SEQ ID NO: 582497 - DNA, 33 bp, Homo sapien
ccctttccaaattaggacatgatacattgcata

SEQ ID NO: 582498 - DNA, 33 bp, Homo sapien
ccctttccaaattagggcatgatacattgcata

SEQ ID NO: 582499 - DNA, 33 bp, Homo sapien
acagattccctttcgcagcaggtagctcagtct

SEQ ID NO: 582500 - DNA, 33 bp, Homo sapien
acagattccctttcgcggcaggtagctcagtct

SEQ ID NO: 582501 - DNA, 33 bp, Homo sapien
caccctagcaaatcccccagttggaattaatct

SEQ ID NO: 582502 - DNA, 33 bp, Homo sapien
caccctagcaaatccctcagttggaattaatct

SEQ ID NO: 582503 - DNA, 33 bp, Homo sapien
ctacaaaaatctccaaacctaccttctgttgct

SEQ ID NO: 582504 - DNA, 33 bp, Homo sapien
ctacaaaaatctccaaccctaccttctgttgct

SEQ ID NO: 582505 - DNA, 33 bp, Homo sapien
aaaaattctctatcaccgaaaaggaaaagacat

SEQ ID NO: 582506 - DNA, 33 bp, Homo sapien
aaaaattctctatcactgaaaaggaaaagacat

SEQ ID NO: 582507 - DNA, 33 bp, Homo sapien
caaaactatggacaaacacagccacaaatttat

SEQ ID NO: 582508 - DNA, 33 bp, Homo sapien
caaaactatggacaaagacagccacaaatttat

SEQ ID NO: 582509 - DNA, 33 bp, Homo sapien
taggcacttttacccaaacattctagttctaga

SEQ ID NO: 582510 - DNA, 33 bp, Homo sapien
taggcacttttacccagacattctagttctaga

SEQ ID NO: 582511 - DNA, 33 bp, Homo sapien
agtgcctatacgggtcacaagcccctggtaacc

SEQ ID NO: 582512 - DNA, 33 bp, Homo sapien
agtgcctatacgggtcgcaagcccctggtaacc

SEQ ID NO: 582513 - DNA, 33 bp, Homo sapien
tgcctaaggatctttaactttaatcaaattctc

SEQ ID NO: 582514 - DNA, 33 bp, Homo sapien
tgcctaaggatctttagctttaatcaaattctc

SEQ ID NO: 582515 - DNA, 33 bp, Homo sapien
gtagcaggagtggtaaatcagcaagaataggat

SEQ ID NO: 582516 - DNA, 33 bp, Homo sapien
gtagcaggagtggtaattcagcaagaataggat

SEQ ID NO: 582517 - DNA, 33 bp, Homo sapien
aaagaagaaaaataagcctaggtgcctgtagtc

SEQ ID NO: 582518 - DNA, 33 bp, Homo sapien
aaagaagaaaaataaggctaggtgcctgtagtc

SEQ ID NO: 582519 - DNA, 33 bp, Homo sapien
accaaaatgcccaggcaaaaatatgaatatctt

SEQ ID NO: 582520 - DNA, 33 bp, Homo sapien
accaaaatgcccaggcgaaaatatgaatatctt

SEQ ID NO: 582521 - DNA, 33 bp, Homo sapien
attaccctggcacaaaacaaagtcaaaagtttg

SEQ ID NO: 582522 - DNA, 33 bp, Homo sapien
attaccctggcacaaatcaaagtcaaaagtttg

SEQ ID NO: 582523 - DNA, 33 bp, Homo sapien
tgaccacagtgcttgaaagatgtgagcaaagac

SEQ ID NO: 582524 - DNA, 33 bp, Homo sapien
tgaccacagtgcttgagagatgtgagcaaagac

SEQ ID NO: 582525 - DNA, 33 bp, Homo sapien
ttctagcccattgatcaatcaaccaacaagaag

SEQ ID NO: 582526 - DNA, 33 bp, Homo sapien
ttctagcccattgatctatcaaccaacaagaag

SEQ ID NO: 582527 - DNA, 33 bp, Homo sapien
gaagtgtctctaagaactccagtgatcttttgc

SEQ ID NO: 582528 - DNA, 33 bp, Homo sapien
gaagtgtctctaagaattccagtgatcttttgc

SEQ ID NO: 582529 - DNA, 33 bp, Homo sapien
aaatactgtattcacaagcattctgtaagctta

SEQ ID NO: 582530 - DNA, 33 bp, Homo sapien
aaatactgtattcacacgcattctgtaagctta

SEQ ID NO: 582531 - DNA, 33 bp, Homo sapien
cttttgccaagtcacaaaacaaagatgcagacc

SEQ ID NO: 582532 - DNA, 33 bp, Homo sapien
cttttgccaagtcacacaacaaagatgcagacc

SEQ ID NO: 582533 - DNA, 33 bp, Homo sapien
gcagggaagtgattgccgaagagaagtagggac

SEQ ID NO: 582534 - DNA, 33 bp, Homo sapien
gcagggaagtgattgctgaagagaagtagggac

SEQ ID NO: 582535 - DNA, 33 bp, Homo sapien
agtagggacgactggaactctgatctggacgag

SEQ ID NO: 582536 - DNA, 33 bp, Homo sapien
agtagggacgactggagctctgatctggacgag

SEQ ID NO: 582537 - DNA, 33 bp, Homo sapien
gatggctacttccttaaaacctcctgagaatcc

SEQ ID NO: 582538 - DNA, 33 bp, Homo sapien
gatggctacttccttacaacctcctgagaatcc

SEQ ID NO: 582539 - DNA, 33 bp, Homo sapien
caatctgattttgataaaccacacacttgctcc

SEQ ID NO: 582540 - DNA, 33 bp, Homo sapien
caatctgattttgatagaccacacacttgctcc

SEQ ID NO: 582541 - DNA, 33 bp, Homo sapien
gaaacacctggaatataacctcagatttccttt

SEQ ID NO: 582542 - DNA, 33 bp, Homo sapien
gaaacacctggaatatgacctcagatttccttt

SEQ ID NO: 582543 - DNA, 33 bp, Homo sapien
tggtggctaaagtataataagagttggctcttt

SEQ ID NO: 582544 - DNA, 33 bp, Homo sapien
tggtggctaaagtatagtaagagttggctcttt

SEQ ID NO: 582545 - DNA, 33 bp, Homo sapien
agaaaacccgtgtgacactaactagaaagttac

SEQ ID NO: 582546 - DNA, 33 bp, Homo sapien
agaaaacccgtgtgacgctaactagaaagttac

SEQ ID NO: 582547 - DNA, 33 bp, Homo sapien
acctattttattccccactagatggaagaaaca

SEQ ID NO: 582548 - DNA, 33 bp, Homo sapien
acctattttattcccccctagatggaagaaaca

SEQ ID NO: 582549 - DNA, 33 bp, Homo sapien
taaagtagcatcaacagcccattctggtttttc

SEQ ID NO: 582550 - DNA, 33 bp, Homo sapien
taaagtagcatcaacatcccattctggtttttc

SEQ ID NO: 582551 - DNA, 33 bp, Homo sapien
tgctgataatgatacaaactttcaaggaatcga

SEQ ID NO: 582552 - DNA, 33 bp, Homo sapien
tgctgataatgatacagactttcaaggaatcga

SEQ ID NO: 582553 - DNA, 33 bp, Homo sapien
ctttttcacttgacaaacagatgtgaagttaac

SEQ ID NO: 582554 - DNA, 33 bp, Homo sapien
ctttttcacttgacaagcagatgtgaagttaac

SEQ ID NO: 582555 - DNA, 33 bp, Homo sapien
catcatgaccaatccaatcactgttaacttttt

SEQ ID NO: 582556 - DNA, 33 bp, Homo sapien
catcatgaccaatccattcactgttaacttttt

SEQ ID NO: 582557 - DNA, 33 bp, Homo sapien
agcgctctgatcactacctttacttctgtctgc

SEQ ID NO: 582558 - DNA, 33 bp, Homo sapien
agcgctctgatcactagctttacttctgtctgc

SEQ ID NO: 582559 - DNA, 33 bp, Homo sapien
tccttagcttcacttccgaacattcaaagaatt

SEQ ID NO: 582560 - DNA, 33 bp, Homo sapien
tccttagcttcacttctgaacattcaaagaatt

SEQ ID NO: 582561 - DNA, 33 bp, Homo sapien
catacatacatacataagggttgatatttaggg

SEQ ID NO: 582562 - DNA, 33 bp, Homo sapien
catacatacatacatacgggttgatatttaggg

SEQ ID NO: 582563 - DNA, 33 bp, Homo sapien
aatgaaatcctatgtaaggttcaaatcatatca

SEQ ID NO: 582564 - DNA, 33 bp, Homo sapien
aatgaaatcctatgtagggttcaaatcatatca

SEQ ID NO: 582565 - DNA, 33 bp, Homo sapien
taatctagcttctacaggaaaagtgttagtggt

SEQ ID NO: 582566 - DNA, 33 bp, Homo sapien
taatctagcttctacatgaaaagtgttagtggt

SEQ ID NO: 582567 - DNA, 33 bp, Homo sapien
tgctaataaatcattgaatggccatggctattc

SEQ ID NO: 582568 - DNA, 33 bp, Homo sapien
tgctaataaatcattggatggccatggctattc

SEQ ID NO: 582569 - DNA, 33 bp, Homo sapien
ttctagcacctttgagaatttactttatggagc

SEQ ID NO: 582570 - DNA, 33 bp, Homo sapien
ttctagcacctttgagcatttactttatggagc

SEQ ID NO: 582571 - DNA, 33 bp, Homo sapien
tttttaatgtatttagacctgacaataggagtg

SEQ ID NO: 582572 - DNA, 33 bp, Homo sapien
tttttaatgtatttagccctgacaataggagtg

SEQ ID NO: 582573 - DNA, 33 bp, Homo sapien
tgaatttaatcataaacgccgtaatatctattc

SEQ ID NO: 582574 - DNA, 33 bp, Homo sapien
tgaatttaatcataaatgccgtaatatctattc

SEQ ID NO: 582575 - DNA, 33 bp, Homo sapien
gcttacctgataaatactaggattagtgctgaa

SEQ ID NO: 582576 - DNA, 33 bp, Homo sapien
gcttacctgataaatagtaggattagtgctgaa

SEQ ID NO: 582577 - DNA, 33 bp, Homo sapien
actgtctgacctttaaatatttacttgacagtg

SEQ ID NO: 582578 - DNA, 33 bp, Homo sapien
actgtctgacctttaagtatttacttgacagtg

SEQ ID NO: 582579 - DNA, 33 bp, Homo sapien
acttcctttctgccacggggctcttgcaagtac

SEQ ID NO: 582580 - DNA, 33 bp, Homo sapien
acttcctttctgccactgggctcttgcaagtac

SEQ ID NO: 582581 - DNA, 33 bp, Homo sapien
gtaaatgtaccttataaagcagagtacaaaaga

SEQ ID NO: 582582 - DNA, 33 bp, Homo sapien
gtaaatgtaccttatacagcagagtacaaaaga

SEQ ID NO: 582583 - DNA, 33 bp, Homo sapien
gtaccatattcaaaaaatacaggcaagaacctg

SEQ ID NO: 582584 - DNA, 33 bp, Homo sapien
gtaccatattcaaaaagtacaggcaagaacctg

SEQ ID NO: 582585 - DNA, 33 bp, Homo sapien
tgtttgcattgacaaagatctaaaacagaaaat

SEQ ID NO: 582586 - DNA, 33 bp, Homo sapien
tgtttgcattgacaaatatctaaaacagaaaat

SEQ ID NO: 582587 - DNA, 33 bp, Homo sapien
acaacgtgagactagccctgaagttttcattag

SEQ ID NO: 582588 - DNA, 33 bp, Homo sapien
acaacgtgagactagctctgaagttttcattag

SEQ ID NO: 582589 - DNA, 33 bp, Homo sapien
gagtgtacaagtaggcacatagccagagtagtt

SEQ ID NO: 582590 - DNA, 33 bp, Homo sapien
gagtgtacaagtaggcccatagccagagtagtt

SEQ ID NO: 582591 - DNA, 33 bp, Homo sapien
agtgggactacctgaaccaagtagcaacaaaac

SEQ ID NO: 582592 - DNA, 33 bp, Homo sapien
agtgggactacctgaagcaagtagcaacaaaac

SEQ ID NO: 582593 - DNA, 33 bp, Homo sapien
tggaaaggggagaaccagatgagcttgttgcaa

SEQ ID NO: 582594 - DNA, 33 bp, Homo sapien
tggaaaggggagaaccggatgagcttgttgcaa

SEQ ID NO: 582595 - DNA, 33 bp, Homo sapien
tgatgaactacattaacaaatcaccatcactgt

SEQ ID NO: 582596 - DNA, 33 bp, Homo sapien
tgatgaactacattaataaatcaccatcactgt

SEQ ID NO: 582597 - DNA, 33 bp, Homo sapien
atttatttatatgtaaatcctgcaaatatggag

SEQ ID NO: 582598 - DNA, 33 bp, Homo sapien
atttatttatatgtaactcctgcaaatatggag

SEQ ID NO: 582599 - DNA, 33 bp, Homo sapien
tacaaatactttttaacgccacctggccaattc

SEQ ID NO: 582600 - DNA, 33 bp, Homo sapien
tacaaatactttttaatgccacctggccaattc

SEQ ID NO: 582601 - DNA, 33 bp, Homo sapien
tttcgattaacaagaaaaaccgtgagtactagg

SEQ ID NO: 582602 - DNA, 33 bp, Homo sapien
tttcgattaacaagaagaaccgtgagtactagg

SEQ ID NO: 582603 - DNA, 33 bp, Homo sapien
ggggaggctaagtcccaggaaaattaatcaaga

SEQ ID NO: 582604 - DNA, 33 bp, Homo sapien
ggggaggctaagtcccgggaaaattaatcaaga

SEQ ID NO: 582605 - DNA, 33 bp, Homo sapien
aaaagatatccactcaaaaaatccaaatataaa

SEQ ID NO: 582606 - DNA, 33 bp, Homo sapien
aaaagatatccactcagaaaatccaaatataaa

SEQ ID NO: 582607 - DNA, 33 bp, Homo sapien
catctgtattataaaactcccttcacagaggta

SEQ ID NO: 582608 - DNA, 33 bp, Homo sapien
catctgtattataaaattcccttcacagaggta

SEQ ID NO: 582609 - DNA, 33 bp, Homo sapien
gcaattaacttttgcactaaacctcatacatac

SEQ ID NO: 582610 - DNA, 33 bp, Homo sapien
gcaattaacttttgcattaaacctcatacatac

SEQ ID NO: 582611 - DNA, 33 bp, Homo sapien
agggtgagtccattaaagcaatttgcacaagaa

SEQ ID NO: 582612 - DNA, 33 bp, Homo sapien
agggtgagtccattaaggcaatttgcacaagaa

SEQ ID NO: 582613 - DNA, 33 bp, Homo sapien
ggccattggtcactcacatttacctgagaatac

SEQ ID NO: 582614 - DNA, 33 bp, Homo sapien
ggccattggtcactcatatttacctgagaatac

SEQ ID NO: 582615 - DNA, 33 bp, Homo sapien
ctacataacaagaccaacttttctagccaggcc

SEQ ID NO: 582616 - DNA, 33 bp, Homo sapien
ctacataacaagaccaccttttctagccaggcc

SEQ ID NO: 582617 - DNA, 33 bp, Homo sapien
tgtaggtgaaaattcacagctggcagccctcca

SEQ ID NO: 582618 - DNA, 33 bp, Homo sapien
tgtaggtgaaaattcatagctggcagccctcca

SEQ ID NO: 582619 - DNA, 33 bp, Homo sapien
tccagttatattgttcccaggaagaaagaggag

SEQ ID NO: 582620 - DNA, 33 bp, Homo sapien
tccagttatattgttctcaggaagaaagaggag

SEQ ID NO: 582621 - DNA, 33 bp, Homo sapien
gcagctgtgatattgaccgtggacatacctgag

SEQ ID NO: 582622 - DNA, 33 bp, Homo sapien
gcagctgtgatattgatcgtggacatacctgag

SEQ ID NO: 582623 - DNA, 33 bp, Homo sapien
tgacccctcaaagtgacaagcatatgtatggtg

SEQ ID NO: 582624 - DNA, 33 bp, Homo sapien
tgacccctcaaagtgataagcatatgtatggtg

SEQ ID NO: 582625 - DNA, 33 bp, Homo sapien
agcccagagtgaaatcagaaattgctgacccct

SEQ ID NO: 582626 - DNA, 33 bp, Homo sapien
agcccagagtgaaatcggaaattgctgacccct

SEQ ID NO: 582627 - DNA, 33 bp, Homo sapien
atgagacacttaataaatatttgttgaggcact

SEQ ID NO: 582628 - DNA, 33 bp, Homo sapien
atgagacacttaataagtatttgttgaggcact

SEQ ID NO: 582629 - DNA, 33 bp, Homo sapien
ttttactaacagggtaaaaggatgatttaatta

SEQ ID NO: 582630 - DNA, 33 bp, Homo sapien
ttttactaacagggtacaaggatgatttaatta

SEQ ID NO: 582631 - DNA, 33 bp, Homo sapien
agagcaatcaacttgcaatattgacacagtgac

SEQ ID NO: 582632 - DNA, 33 bp, Homo sapien
agagcaatcaacttgcgatattgacacagtgac

SEQ ID NO: 582633 - DNA, 33 bp, Homo sapien
gttcttgagcaggaaaactttgataatttgaca

SEQ ID NO: 582634 - DNA, 33 bp, Homo sapien
gttcttgagcaggaaatctttgataatttgaca

SEQ ID NO: 582635 - DNA, 33 bp, Homo sapien
aacctcaatcaatgccacatggagtggaaaaat

SEQ ID NO: 582636 - DNA, 33 bp, Homo sapien
aacctcaatcaatgccgcatggagtggaaaaat

SEQ ID NO: 582637 - DNA, 33 bp, Homo sapien
gcaatgtagtctttcccaactcatgtcctagcc

SEQ ID NO: 582638 - DNA, 33 bp, Homo sapien
gcaatgtagtctttccgaactcatgtcctagcc

SEQ ID NO: 582639 - DNA, 33 bp, Homo sapien
ccacgttgctggcccacctcgtgagactagagg

SEQ ID NO: 582640 - DNA, 33 bp, Homo sapien
ccacgttgctggcccatctcgtgagactagagg

SEQ ID NO: 582641 - DNA, 33 bp, Homo sapien
aaaggcagtgtgaatacagaagggctattctag

SEQ ID NO: 582642 - DNA, 33 bp, Homo sapien
aaaggcagtgtgaatagagaagggctattctag

SEQ ID NO: 582643 - DNA, 33 bp, Homo sapien
atgaattaatgttatgcacggagtgggttagtt

SEQ ID NO: 582644 - DNA, 33 bp, Homo sapien
atgaattaatgttatggacggagtgggttagtt

SEQ ID NO: 582645 - DNA, 33 bp, Homo sapien
catagatgattttctacgtcaaaatttgtcaca

SEQ ID NO: 582646 - DNA, 33 bp, Homo sapien
catagatgattttctatgtcaaaatttgtcaca

SEQ ID NO: 582647 - DNA, 33 bp, Homo sapien
ggactgatcatcaccaatcaacatacctatgga

SEQ ID NO: 582648 - DNA, 33 bp, Homo sapien
ggactgatcatcaccagtcaacatacctatgga

SEQ ID NO: 582649 - DNA, 33 bp, Homo sapien
tcctgccctacactgcaaaatgagcaaagtaaa

SEQ ID NO: 582650 - DNA, 33 bp, Homo sapien
tcctgccctacactgcgaaatgagcaaagtaaa

SEQ ID NO: 582651 - DNA, 33 bp, Homo sapien
ccataattggcatagaataggtctctatggaga

SEQ ID NO: 582652 - DNA, 33 bp, Homo sapien
ccataattggcatagactaggtctctatggaga

SEQ ID NO: 582653 - DNA, 33 bp, Homo sapien
ctaatttgctaccacactgcaactcattcaacc

SEQ ID NO: 582654 - DNA, 33 bp, Homo sapien
ctaatttgctaccacattgcaactcattcaacc

SEQ ID NO: 582655 - DNA, 33 bp, Homo sapien
aatatatcaatgactaaatagctggcttagatt

SEQ ID NO: 582656 - DNA, 33 bp, Homo sapien
aatatatcaatgactagatagctggcttagatt

SEQ ID NO: 582657 - DNA, 33 bp, Homo sapien
cagtttccactgataacataaagggctggtata

SEQ ID NO: 582658 - DNA, 33 bp, Homo sapien
cagtttccactgataatataaagggctggtata

SEQ ID NO: 582659 - DNA, 33 bp, Homo sapien
tccccttctgctttacccttcttcaaatgttgt

SEQ ID NO: 582660 - DNA, 33 bp, Homo sapien
tccccttctgctttactcttcttcaaatgttgt

SEQ ID NO: 582661 - DNA, 33 bp, Homo sapien
attgcatctgacaggaaagaaactatatataaa

SEQ ID NO: 582662 - DNA, 33 bp, Homo sapien
attgcatctgacaggagagaaactatatataaa

SEQ ID NO: 582663 - DNA, 33 bp, Homo sapien
tctatactgaagtctcacaaacttgcctctgaa

SEQ ID NO: 582664 - DNA, 33 bp, Homo sapien
tctatactgaagtctcgcaaacttgcctctgaa

SEQ ID NO: 582665 - DNA, 33 bp, Homo sapien
aaataaagtttgggcactgatccagaagaaata

SEQ ID NO: 582666 - DNA, 33 bp, Homo sapien
aaataaagtttgggcattgatccagaagaaata

SEQ ID NO: 582667 - DNA, 33 bp, Homo sapien
aggtactggagatataacaataaactagggaaa

SEQ ID NO: 582668 - DNA, 33 bp, Homo sapien
aggtactggagatatagcaataaactagggaaa

SEQ ID NO: 582669 - DNA, 33 bp, Homo sapien
tctggttctctattaacctttgagctttcatac

SEQ ID NO: 582670 - DNA, 33 bp, Homo sapien
tctggttctctattaatctttgagctttcatac

SEQ ID NO: 582671 - DNA, 33 bp, Homo sapien
ctagtttcctaaagcaaaaatcttgtagtcatt

SEQ ID NO: 582672 - DNA, 33 bp, Homo sapien
ctagtttcctaaagcagaaatcttgtagtcatt

SEQ ID NO: 582673 - DNA, 33 bp, Homo sapien
cccagtcactggggcaaagggtgtacaaaacca

SEQ ID NO: 582674 - DNA, 33 bp, Homo sapien
cccagtcactggggcagagggtgtacaaaacca

SEQ ID NO: 582675 - DNA, 33 bp, Homo sapien
tcatcttgtctaggcaccttcgtttcgtcagag

SEQ ID NO: 582676 - DNA, 33 bp, Homo sapien
tcatcttgtctaggcagcttcgtttcgtcagag

SEQ ID NO: 582677 - DNA, 33 bp, Homo sapien
atgacaggtctacccaatcaactttccgggtct

SEQ ID NO: 582678 - DNA, 33 bp, Homo sapien
atgacaggtctacccagtcaactttccgggtct

SEQ ID NO: 582679 - DNA, 33 bp, Homo sapien
atcccaaacagtctcaaggttatcaaagtgcct

SEQ ID NO: 582680 - DNA, 33 bp, Homo sapien
atcccaaacagtctcagggttatcaaagtgcct

SEQ ID NO: 582681 - DNA, 33 bp, Homo sapien
aatatgaaatgttttacactgtgacaattcttt

SEQ ID NO: 582682 - DNA, 33 bp, Homo sapien
aatatgaaatgttttagactgtgacaattcttt

SEQ ID NO: 582683 - DNA, 33 bp, Homo sapien
gaaacatacttagtgacgttccttgacggagta

SEQ ID NO: 582684 - DNA, 33 bp, Homo sapien
gaaacatacttagtgatgttccttgacggagta

SEQ ID NO: 582685 - DNA, 33 bp, Homo sapien
gatttggggacacttacagacagaaggaataac

SEQ ID NO: 582686 - DNA, 33 bp, Homo sapien
gatttggggacacttatagacagaaggaataac

SEQ ID NO: 582687 - DNA, 33 bp, Homo sapien
cactagcatcttggccacaattagtatgttatt

SEQ ID NO: 582688 - DNA, 33 bp, Homo sapien
cactagcatcttggccgcaattagtatgttatt

SEQ ID NO: 582689 - DNA, 33 bp, Homo sapien
agagaggactctgggacaccaaaagagaatgga

SEQ ID NO: 582690 - DNA, 33 bp, Homo sapien
agagaggactctgggataccaaaagagaatgga

SEQ ID NO: 582691 - DNA, 33 bp, Homo sapien
atcacatcacagtccaatctgaggcactgggag

SEQ ID NO: 582692 - DNA, 33 bp, Homo sapien
atcacatcacagtccagtctgaggcactgggag

SEQ ID NO: 582693 - DNA, 33 bp, Homo sapien
agtgtccttgtttttagacagtgatcaggttca

SEQ ID NO: 582694 - DNA, 33 bp, Homo sapien
agtgtccttgtttttatacagtgatcaggttca

SEQ ID NO: 582695 - DNA, 33 bp, Homo sapien
cataaactggaatacacacagtcgattgaatag

SEQ ID NO: 582696 - DNA, 33 bp, Homo sapien
cataaactggaatacagacagtcgattgaatag

SEQ ID NO: 582697 - DNA, 33 bp, Homo sapien
cccatatttctaaaaactcacagaagtattcaa

SEQ ID NO: 582698 - DNA, 33 bp, Homo sapien
cccatatttctaaaaattcacagaagtattcaa

SEQ ID NO: 582699 - DNA, 33 bp, Homo sapien
tgggtgggtcattgaccgaatggcctagtggtg

SEQ ID NO: 582700 - DNA, 33 bp, Homo sapien
tgggtgggtcattgactgaatggcctagtggtg

SEQ ID NO: 582701 - DNA, 33 bp, Homo sapien
tatatctctaatgactaaagcattgttaggtta

SEQ ID NO: 582702 - DNA, 33 bp, Homo sapien
tatatctctaatgactgaagcattgttaggtta

SEQ ID NO: 582703 - DNA, 33 bp, Homo sapien
agtttagcttcaagaacggcagaactacacaca

SEQ ID NO: 582704 - DNA, 33 bp, Homo sapien
agtttagcttcaagaatggcagaactacacaca

SEQ ID NO: 582705 - DNA, 33 bp, Homo sapien
gtctaattgttcatcacctcctttagagtttag

SEQ ID NO: 582706 - DNA, 33 bp, Homo sapien
gtctaattgttcatcatctcctttagagtttag

SEQ ID NO: 582707 - DNA, 33 bp, Homo sapien
caagatgggttgataaatctggtttggaactca

SEQ ID NO: 582708 - DNA, 33 bp, Homo sapien
caagatgggttgataagtctggtttggaactca

SEQ ID NO: 582709 - DNA, 33 bp, Homo sapien
actccaagagaccctcacgttcctcaacatcct

SEQ ID NO: 582710 - DNA, 33 bp, Homo sapien
actccaagagaccctcgcgttcctcaacatcct

SEQ ID NO: 582711 - DNA, 33 bp, Homo sapien
gtgaaagctgtgtgaaggcagaaaagagagctg

SEQ ID NO: 582712 - DNA, 33 bp, Homo sapien
gtgaaagctgtgtgaatgcagaaaagagagctg

SEQ ID NO: 582713 - DNA, 33 bp, Homo sapien
gagggaagagattccacgctgaagccattccag

SEQ ID NO: 582714 - DNA, 33 bp, Homo sapien
gagggaagagattccatgctgaagccattccag

SEQ ID NO: 582715 - DNA, 33 bp, Homo sapien
cattcagatcataacaacactagccattaaaca

SEQ ID NO: 582716 - DNA, 33 bp, Homo sapien
cattcagatcataacagcactagccattaaaca

SEQ ID NO: 582717 - DNA, 33 bp, Homo sapien
acattctttcaaaaaccggaacacctggaaaca

SEQ ID NO: 582718 - DNA, 33 bp, Homo sapien
acattctttcaaaaactggaacacctggaaaca

SEQ ID NO: 582719 - DNA, 33 bp, Homo sapien
tgacttgggggacagaaagcatggtcagagtga

SEQ ID NO: 582720 - DNA, 33 bp, Homo sapien
tgacttgggggacagagagcatggtcagagtga

SEQ ID NO: 582721 - DNA, 33 bp, Homo sapien
atgttgactattttcaaatgcacataatctctt

SEQ ID NO: 582722 - DNA, 33 bp, Homo sapien
atgttgactattttcagatgcacataatctctt

SEQ ID NO: 582723 - DNA, 33 bp, Homo sapien
ttttcagatccgaggaagatttttttcagttct

SEQ ID NO: 582724 - DNA, 33 bp, Homo sapien
ttttcagatccgaggaggatttttttcagttct

SEQ ID NO: 582725 - DNA, 33 bp, Homo sapien
agaaaaggaaaagatcaagaacagattctgaaa

SEQ ID NO: 582726 - DNA, 33 bp, Homo sapien
agaaaaggaaaagatccagaacagattctgaaa

SEQ ID NO: 582727 - DNA, 33 bp, Homo sapien
taatagggtatgattaagtactctgaatacatt

SEQ ID NO: 582728 - DNA, 33 bp, Homo sapien
taatagggtatgattatgtactctgaatacatt

SEQ ID NO: 582729 - DNA, 33 bp, Homo sapien
aaaggccattattatacgtgctgtgagatacca

SEQ ID NO: 582730 - DNA, 33 bp, Homo sapien
aaaggccattattatatgtgctgtgagatacca

SEQ ID NO: 582731 - DNA, 33 bp, Homo sapien
catggtttggatttgaagaaaggaggagtgcaa

SEQ ID NO: 582732 - DNA, 33 bp, Homo sapien
catggtttggatttgaggaaaggaggagtgcaa

SEQ ID NO: 582733 - DNA, 33 bp, Homo sapien
ctaggcaaaaggcagacggcctaaggatgaagg

SEQ ID NO: 582734 - DNA, 33 bp, Homo sapien
ctaggcaaaaggcagatggcctaaggatgaagg

SEQ ID NO: 582735 - DNA, 33 bp, Homo sapien
ttctacagttaaaagacattcagtaatacaacc

SEQ ID NO: 582736 - DNA, 33 bp, Homo sapien
ttctacagttaaaagatattcagtaatacaacc

SEQ ID NO: 582737 - DNA, 33 bp, Homo sapien
atacacctttaggacactgaagcttataatcta

SEQ ID NO: 582738 - DNA, 33 bp, Homo sapien
atacacctttaggacattgaagcttataatcta

SEQ ID NO: 582739 - DNA, 33 bp, Homo sapien
aaatattgcatttcctaaattcctgctgtggtc

SEQ ID NO: 582740 - DNA, 33 bp, Homo sapien
aaatattgcatttcctgaattcctgctgtggtc

SEQ ID NO: 582741 - DNA, 33 bp, Homo sapien
tatggaaaacatatgaatagaaacaaagtagtt

SEQ ID NO: 582742 - DNA, 33 bp, Homo sapien
tatggaaaacatatgagtagaaacaaagtagtt

SEQ ID NO: 582743 - DNA, 33 bp, Homo sapien
ttgtcatagagtcacaaggtcatgggataatga

SEQ ID NO: 582744 - DNA, 33 bp, Homo sapien
ttgtcatagagtcacagggtcatgggataatga

SEQ ID NO: 582745 - DNA, 33 bp, Homo sapien
atagtgggatggtgccaaaaataggtgcctgga

SEQ ID NO: 582746 - DNA, 33 bp, Homo sapien
atagtgggatggtgccgaaaataggtgcctgga

SEQ ID NO: 582747 - DNA, 33 bp, Homo sapien
aatggaaggaaattaaaggtgttcaaattgcaa

SEQ ID NO: 582748 - DNA, 33 bp, Homo sapien
aatggaaggaaattaacggtgttcaaattgcaa

SEQ ID NO: 582749 - DNA, 33 bp, Homo sapien
gaagcacagaaggagaggaaagtgaaatagcca

SEQ ID NO: 582750 - DNA, 33 bp, Homo sapien
gaagcacagaaggagatgaaagtgaaatagcca

SEQ ID NO: 582751 - DNA, 33 bp, Homo sapien
taaactgggccacatagctaatcagctgtttat

SEQ ID NO: 582752 - DNA, 33 bp, Homo sapien
taaactgggccacatatctaatcagctgtttat

SEQ ID NO: 582753 - DNA, 33 bp, Homo sapien
gttagaactaagagaaaatggaaggaaattaga

SEQ ID NO: 582754 - DNA, 33 bp, Homo sapien
gttagaactaagagaatatggaaggaaattaga

SEQ ID NO: 582755 - DNA, 33 bp, Homo sapien
gtaaagaacagccgaacattattggccaagaca

SEQ ID NO: 582756 - DNA, 33 bp, Homo sapien
gtaaagaacagccgaatattattggccaagaca

SEQ ID NO: 582757 - DNA, 33 bp, Homo sapien
acaatggggatacagacattaagtaaatgctcc

SEQ ID NO: 582758 - DNA, 33 bp, Homo sapien
acaatggggatacagatattaagtaaatgctcc

SEQ ID NO: 582759 - DNA, 33 bp, Homo sapien
caaagatatttacatcaaatgcctggagcctgt

SEQ ID NO: 582760 - DNA, 33 bp, Homo sapien
caaagatatttacatcgaatgcctggagcctgt

SEQ ID NO: 582761 - DNA, 33 bp, Homo sapien
gacttttctaggaggaggatactcaatacaaca

SEQ ID NO: 582762 - DNA, 33 bp, Homo sapien
gacttttctaggaggatgatactcaatacaaca

SEQ ID NO: 582763 - DNA, 33 bp, Homo sapien
gccgtcacctttaagagaactgctttccaggtt

SEQ ID NO: 582764 - DNA, 33 bp, Homo sapien
gccgtcacctttaagataactgctttccaggtt

SEQ ID NO: 582765 - DNA, 33 bp, Homo sapien
ttccaaattcgaggaacactgcaaattattgat

SEQ ID NO: 582766 - DNA, 33 bp, Homo sapien
ttccaaattcgaggaagactgcaaattattgat

SEQ ID NO: 582767 - DNA, 33 bp, Homo sapien
gtctgtcagccaagtaagaattaccaaatatgc

SEQ ID NO: 582768 - DNA, 33 bp, Homo sapien
gtctgtcagccaagtaggaattaccaaatatgc

SEQ ID NO: 582769 - DNA, 33 bp, Homo sapien
catgtaaatcaaacaaaagtagacaataaatta

SEQ ID NO: 582770 - DNA, 33 bp, Homo sapien
catgtaaatcaaacaacagtagacaataaatta

SEQ ID NO: 582771 - DNA, 33 bp, Homo sapien
gtaaacttggagtaaacttaggctagcttgcaa

SEQ ID NO: 582772 - DNA, 33 bp, Homo sapien
gtaaacttggagtaaatttaggctagcttgcaa

SEQ ID NO: 582773 - DNA, 33 bp, Homo sapien
gagagaatagaaccaacgatgactcccaggttt

SEQ ID NO: 582774 - DNA, 33 bp, Homo sapien
gagagaatagaaccaatgatgactcccaggttt

SEQ ID NO: 582775 - DNA, 33 bp, Homo sapien
ttatgaacatattctagaaaatttctactctcc

SEQ ID NO: 582776 - DNA, 33 bp, Homo sapien
ttatgaacatattctataaaatttctactctcc

SEQ ID NO: 582777 - DNA, 33 bp, Homo sapien
cattctaattgaaacactatgacaaaaagagac

SEQ ID NO: 582778 - DNA, 33 bp, Homo sapien
cattctaattgaaacattatgacaaaaagagac

SEQ ID NO: 582779 - DNA, 33 bp, Homo sapien
ctgcaaattgagaatgaacagcaaagtgtaaaa

SEQ ID NO: 582780 - DNA, 33 bp, Homo sapien
ctgcaaattgagaatgcacagcaaagtgtaaaa

SEQ ID NO: 582781 - DNA, 33 bp, Homo sapien
cactgatcgcttcgtaccaatttttgcctcctt

SEQ ID NO: 582782 - DNA, 33 bp, Homo sapien
cactgatcgcttcgtatcaatttttgcctcctt

SEQ ID NO: 582783 - DNA, 33 bp, Homo sapien
ataactaggagaacaactaaattggcaaaggaa

SEQ ID NO: 582784 - DNA, 33 bp, Homo sapien
ataactaggagaacaattaaattggcaaaggaa

SEQ ID NO: 582785 - DNA, 33 bp, Homo sapien
ttgttcgagggtattaagaaatgcatctaaaaa

SEQ ID NO: 582786 - DNA, 33 bp, Homo sapien
ttgttcgagggtattaggaaatgcatctaaaaa

SEQ ID NO: 582787 - DNA, 33 bp, Homo sapien
tactacaaatatcacaaccgtcttcaaatatca

SEQ ID NO: 582788 - DNA, 33 bp, Homo sapien
tactacaaatatcacatccgtcttcaaatatca

SEQ ID NO: 582789 - DNA, 33 bp, Homo sapien
gcttcagatttaagacaggaatttaggagaaga

SEQ ID NO: 582790 - DNA, 33 bp, Homo sapien
gcttcagatttaagacgggaatttaggagaaga

SEQ ID NO: 582791 - DNA, 33 bp, Homo sapien
aacagatattattgcaaatacatcgacttttga

SEQ ID NO: 582792 - DNA, 33 bp, Homo sapien
aacagatattattgcagatacatcgacttttga

SEQ ID NO: 582793 - DNA, 33 bp, Homo sapien
ttagtctaaaatccaacctaagcctaatgctta

SEQ ID NO: 582794 - DNA, 33 bp, Homo sapien
ttagtctaaaatccaatctaagcctaatgctta

SEQ ID NO: 582795 - DNA, 33 bp, Homo sapien
ttatagcaatgaaagtaactcccttgcttctgc

SEQ ID NO: 582796 - DNA, 33 bp, Homo sapien
ttatagcaatgaaagtgactcccttgcttctgc

SEQ ID NO: 582797 - DNA, 33 bp, Homo sapien
tagtaacatcaaattgaaaatcatacaatggat

SEQ ID NO: 582798 - DNA, 33 bp, Homo sapien
tagtaacatcaaattgcaaatcatacaatggat

SEQ ID NO: 582799 - DNA, 33 bp, Homo sapien
cccactttatttaagcacatccaaagtaactac

SEQ ID NO: 582800 - DNA, 33 bp, Homo sapien
cccactttatttaagcgcatccaaagtaactac

SEQ ID NO: 582801 - DNA, 33 bp, Homo sapien
tgatattaaaacaatcagagtttgactcctgat

SEQ ID NO: 582802 - DNA, 33 bp, Homo sapien
tgatattaaaacaatcggagtttgactcctgat

SEQ ID NO: 582803 - DNA, 33 bp, Homo sapien
ttttgtgtgtcctttaagtatagaggatgtaaa

SEQ ID NO: 582804 - DNA, 33 bp, Homo sapien
ttttgtgtgtcctttaggtatagaggatgtaaa

SEQ ID NO: 582805 - DNA, 33 bp, Homo sapien
tttggcaactagagtacacccatgagataggct

SEQ ID NO: 582806 - DNA, 33 bp, Homo sapien
tttggcaactagagtagacccatgagataggct

SEQ ID NO: 582807 - DNA, 33 bp, Homo sapien
atgagaatatatgatgcaggtttggactatggg

SEQ ID NO: 582808 - DNA, 33 bp, Homo sapien
atgagaatatatgatgtaggtttggactatggg

SEQ ID NO: 582809 - DNA, 33 bp, Homo sapien
gtgagtgaaaactcaacagaagtctgtcattct

SEQ ID NO: 582810 - DNA, 33 bp, Homo sapien
gtgagtgaaaactcaatagaagtctgtcattct

SEQ ID NO: 582811 - DNA, 33 bp, Homo sapien
attttaccattgctaccaatatatcttagctta

SEQ ID NO: 582812 - DNA, 33 bp, Homo sapien
attttaccattgctacgaatatatcttagctta

SEQ ID NO: 582813 - DNA, 33 bp, Homo sapien
ctcctagagtaaacatcaatttccacctgagtt

SEQ ID NO: 582814 - DNA, 33 bp, Homo sapien
ctcctagagtaaacatgaatttccacctgagtt

SEQ ID NO: 582815 - DNA, 33 bp, Homo sapien
ctcctatcagtgcttccgaaacctagaaaatgt

SEQ ID NO: 582816 - DNA, 33 bp, Homo sapien
ctcctatcagtgcttctgaaacctagaaaatgt

SEQ ID NO: 582817 - DNA, 33 bp, Homo sapien
gacatagagttggtcactgaagccatgagaaga

SEQ ID NO: 582818 - DNA, 33 bp, Homo sapien
gacatagagttggtcagtgaagccatgagaaga

SEQ ID NO: 582819 - DNA, 33 bp, Homo sapien
gatagtggaacaccgccataacctgatcaggtt

SEQ ID NO: 582820 - DNA, 33 bp, Homo sapien
gatagtggaacaccgctataacctgatcaggtt

SEQ ID NO: 582821 - DNA, 33 bp, Homo sapien
tatcatctaatcataaatcactcttccaataaa

SEQ ID NO: 582822 - DNA, 33 bp, Homo sapien
tatcatctaatcataagtcactcttccaataaa

SEQ ID NO: 582823 - DNA, 33 bp, Homo sapien
catcactgttcaagatgacaggatttatttgat

SEQ ID NO: 582824 - DNA, 33 bp, Homo sapien
catcactgttcaagattacaggatttatttgat

SEQ ID NO: 582825 - DNA, 33 bp, Homo sapien
cagcctagggctatggaaagcagactttgtagt

SEQ ID NO: 582826 - DNA, 33 bp, Homo sapien
cagcctagggctatgggaagcagactttgtagt

SEQ ID NO: 582827 - DNA, 33 bp, Homo sapien
accagacatacaataactgaaactggacttacg

SEQ ID NO: 582828 - DNA, 33 bp, Homo sapien
accagacatacaataagtgaaactggacttacg

SEQ ID NO: 582829 - DNA, 33 bp, Homo sapien
ttcagtcacccattcaataaatattttctgatc

SEQ ID NO: 582830 - DNA, 33 bp, Homo sapien
ttcagtcacccattcagtaaatattttctgatc

SEQ ID NO: 582831 - DNA, 33 bp, Homo sapien
ctgatattttcccaccagagcatcatggatttt

SEQ ID NO: 582832 - DNA, 33 bp, Homo sapien
ctgatattttcccaccggagcatcatggatttt

SEQ ID NO: 582833 - DNA, 33 bp, Homo sapien
tatatgtaagcaataccgtatgccaggaacaag

SEQ ID NO: 582834 - DNA, 33 bp, Homo sapien
tatatgtaagcaatactgtatgccaggaacaag

SEQ ID NO: 582835 - DNA, 33 bp, Homo sapien
acatttcaatagccaaagcaagtcttttttttt

SEQ ID NO: 582836 - DNA, 33 bp, Homo sapien
acatttcaatagccaacgcaagtcttttttttt

SEQ ID NO: 582837 - DNA, 33 bp, Homo sapien
tatacacgttggggccaaaagaatcttaagtgt

SEQ ID NO: 582838 - DNA, 33 bp, Homo sapien
tatacacgttggggccgaaagaatcttaagtgt

SEQ ID NO: 582839 - DNA, 33 bp, Homo sapien
tagtttttgttaggagccatattatataatctg

SEQ ID NO: 582840 - DNA, 33 bp, Homo sapien
tagtttttgttaggaggcatattatataatctg

SEQ ID NO: 582841 - DNA, 33 bp, Homo sapien
attcaggataatggacaagaattacaacacagt

SEQ ID NO: 582842 - DNA, 33 bp, Homo sapien
attcaggataatggacgagaattacaacacagt

SEQ ID NO: 582843 - DNA, 33 bp, Homo sapien
aacctatatgtgaaaagatgacctgataggcat

SEQ ID NO: 582844 - DNA, 33 bp, Homo sapien
aacctatatgtgaaaatatgacctgataggcat

SEQ ID NO: 582845 - DNA, 33 bp, Homo sapien
agcttgatatcctgtcaagtgtttatgaaatat

SEQ ID NO: 582846 - DNA, 33 bp, Homo sapien
agcttgatatcctgtctagtgtttatgaaatat

SEQ ID NO: 582847 - DNA, 33 bp, Homo sapien
tccttttatgttttaacagcctgaaataagatg

SEQ ID NO: 582848 - DNA, 33 bp, Homo sapien
tccttttatgttttaatagcctgaaataagatg

SEQ ID NO: 582849 - DNA, 33 bp, Homo sapien
tctttttttagaaatgcatacagtacaacccat

SEQ ID NO: 582850 - DNA, 33 bp, Homo sapien
tctttttttagaaatggatacagtacaacccat

SEQ ID NO: 582851 - DNA, 33 bp, Homo sapien
aacacttttcatataacgaaggaatcatggaga

SEQ ID NO: 582852 - DNA, 33 bp, Homo sapien
aacacttttcatataaggaaggaatcatggaga

SEQ ID NO: 582853 - DNA, 33 bp, Homo sapien
tggagtctaatagttacaggctggcaacacaaa

SEQ ID NO: 582854 - DNA, 33 bp, Homo sapien
tggagtctaatagttataggctggcaacacaaa

SEQ ID NO: 582855 - DNA, 33 bp, Homo sapien
cctgtttcttccacgacgattgccatgaaacaa

SEQ ID NO: 582856 - DNA, 33 bp, Homo sapien
cctgtttcttccacgatgattgccatgaaacaa

SEQ ID NO: 582857 - DNA, 33 bp, Homo sapien
cactgttatcagaatacgtaatctcatttcttt

SEQ ID NO: 582858 - DNA, 33 bp, Homo sapien
cactgttatcagaatatgtaatctcatttcttt

SEQ ID NO: 582859 - DNA, 33 bp, Homo sapien
tttgttttgaggaagaaatagctaggaccaaaa

SEQ ID NO: 582860 - DNA, 33 bp, Homo sapien
tttgttttgaggaagatatagctaggaccaaaa

SEQ ID NO: 582861 - DNA, 33 bp, Homo sapien
gttagcaaatgtactacaatgcaaaccatcttt

SEQ ID NO: 582862 - DNA, 33 bp, Homo sapien
gttagcaaatgtactataatgcaaaccatcttt

SEQ ID NO: 582863 - DNA, 33 bp, Homo sapien
aagagtcccttggaataaggaaggagacatact

SEQ ID NO: 582864 - DNA, 33 bp, Homo sapien
aagagtcccttggaattaggaaggagacatact

SEQ ID NO: 582865 - DNA, 33 bp, Homo sapien
ttagagagcctcaatacataaaagcagaaaaat

SEQ ID NO: 582866 - DNA, 33 bp, Homo sapien
ttagagagcctcaatatataaaagcagaaaaat

SEQ ID NO: 582867 - DNA, 33 bp, Homo sapien
cacaataacaaatatgaaagttgggtgtccata

SEQ ID NO: 582868 - DNA, 33 bp, Homo sapien
cacaataacaaatatggaagttgggtgtccata

SEQ ID NO: 582869 - DNA, 33 bp, Homo sapien
ataaaatatgactttgcaaaaaccattattgcg

SEQ ID NO: 582870 - DNA, 33 bp, Homo sapien
ataaaatatgactttgtaaaaaccattattgcg

SEQ ID NO: 582871 - DNA, 33 bp, Homo sapien
gactatgtaattaaaacacattttatgctactg

SEQ ID NO: 582872 - DNA, 33 bp, Homo sapien
gactatgtaattaaaagacattttatgctactg

SEQ ID NO: 582873 - DNA, 33 bp, Homo sapien
ttgatcatgacaacccagacaaatttagaatta

SEQ ID NO: 582874 - DNA, 33 bp, Homo sapien
ttgatcatgacaacccggacaaatttagaatta

SEQ ID NO: 582875 - DNA, 33 bp, Homo sapien
aaatatggaacaaactaaaccatattataaaat

SEQ ID NO: 582876 - DNA, 33 bp, Homo sapien
aaatatggaacaaactgaaccatattataaaat

SEQ ID NO: 582877 - DNA, 33 bp, Homo sapien
tagctgcaaagaaaaaattcattatatagactc

SEQ ID NO: 582878 - DNA, 33 bp, Homo sapien
tagctgcaaagaaaaagttcattatatagactc

SEQ ID NO: 582879 - DNA, 33 bp, Homo sapien
ttccccagagcacctgccaactgctcaagatcc

SEQ ID NO: 582880 - DNA, 33 bp, Homo sapien
ttccccagagcacctgtcaactgctcaagatcc

SEQ ID NO: 582881 - DNA, 33 bp, Homo sapien
gttcttatttaaaccacgcagacaaagatgtct

SEQ ID NO: 582882 - DNA, 33 bp, Homo sapien
gttcttatttaaaccatgcagacaaagatgtct

SEQ ID NO: 582883 - DNA, 33 bp, Homo sapien
gtaagcattgaagaaaataggagataagacaga

SEQ ID NO: 582884 - DNA, 33 bp, Homo sapien
gtaagcattgaagaaactaggagataagacaga

SEQ ID NO: 582885 - DNA, 33 bp, Homo sapien
aatggtagtaatcctagcttcttaacagtttcc

SEQ ID NO: 582886 - DNA, 33 bp, Homo sapien
aatggtagtaatcctatcttcttaacagtttcc

SEQ ID NO: 582887 - DNA, 33 bp, Homo sapien
gttttttagtacctgaagattgttccacatttc

SEQ ID NO: 582888 - DNA, 33 bp, Homo sapien
gttttttagtacctgaggattgttccacatttc

SEQ ID NO: 582889 - DNA, 33 bp, Homo sapien
gattttcttccggtaaacaaataggttgtatgt

SEQ ID NO: 582890 - DNA, 33 bp, Homo sapien
gattttcttccggtaagcaaataggttgtatgt

SEQ ID NO: 582891 - DNA, 33 bp, Homo sapien
gccctttatacatctggaagtgacttggacttt

SEQ ID NO: 582892 - DNA, 33 bp, Homo sapien
gccctttatacatctgtaagtgacttggacttt

SEQ ID NO: 582893 - DNA, 33 bp, Homo sapien
tcccattgtaaaattacgatgaggattaaatga

SEQ ID NO: 582894 - DNA, 33 bp, Homo sapien
tcccattgtaaaattatgatgaggattaaatga

SEQ ID NO: 582895 - DNA, 33 bp, Homo sapien
ttatatcaacttccaaccttgtgtttccctgta

SEQ ID NO: 582896 - DNA, 33 bp, Homo sapien
ttatatcaacttccaatcttgtgtttccctgta

SEQ ID NO: 582897 - DNA, 33 bp, Homo sapien
ctaaccaaagtcaatactactaacctacccttg

SEQ ID NO: 582898 - DNA, 33 bp, Homo sapien
ctaaccaaagtcaatattactaacctacccttg

SEQ ID NO: 582899 - DNA, 33 bp, Homo sapien
agtagtctgtatttctcaccatgccccaaatac

SEQ ID NO: 582900 - DNA, 33 bp, Homo sapien
agtagtctgtatttcttaccatgccccaaatac

SEQ ID NO: 582901 - DNA, 33 bp, Homo sapien
tccagaagcaaatatgcagtcacgtgggtgggc

SEQ ID NO: 582902 - DNA, 33 bp, Homo sapien
tccagaagcaaatatggagtcacgtgggtgggc

SEQ ID NO: 582903 - DNA, 33 bp, Homo sapien
gaatggaaaacaaataggaaaccttggttgatg

SEQ ID NO: 582904 - DNA, 33 bp, Homo sapien
gaatggaaaacaaatatgaaaccttggttgatg

SEQ ID NO: 582905 - DNA, 33 bp, Homo sapien
caatgcttttgcctaccgcgattcatgcaagaa

SEQ ID NO: 582906 - DNA, 33 bp, Homo sapien
caatgcttttgcctactgcgattcatgcaagaa

SEQ ID NO: 582907 - DNA, 33 bp, Homo sapien
atagatatccttatgaacttcctacagatgagg

SEQ ID NO: 582908 - DNA, 33 bp, Homo sapien
atagatatccttatgagcttcctacagatgagg

SEQ ID NO: 582909 - DNA, 33 bp, Homo sapien
caaccttgctatatcaaccttgaatttggcaaa

SEQ ID NO: 582910 - DNA, 33 bp, Homo sapien
caaccttgctatatcagccttgaatttggcaaa

SEQ ID NO: 582911 - DNA, 33 bp, Homo sapien
agatccttgggtaaataaagaccaactgtcaga

SEQ ID NO: 582912 - DNA, 33 bp, Homo sapien
agatccttgggtaaatgaagaccaactgtcaga

SEQ ID NO: 582913 - DNA, 33 bp, Homo sapien
ctgaattcagtcaggaaaaaagggagcttcctc

SEQ ID NO: 582914 - DNA, 33 bp, Homo sapien
ctgaattcagtcaggagaaaagggagcttcctc

SEQ ID NO: 582915 - DNA, 33 bp, Homo sapien
atcaaagccaatcttccctaccgatggtggacc

SEQ ID NO: 582916 - DNA, 33 bp, Homo sapien
atcaaagccaatcttctctaccgatggtggacc

SEQ ID NO: 582917 - DNA, 33 bp, Homo sapien
gccacttgttccaccccgagattttcaaatgct

SEQ ID NO: 582918 - DNA, 33 bp, Homo sapien
gccacttgttccaccctgagattttcaaatgct

SEQ ID NO: 582919 - DNA, 33 bp, Homo sapien
tggatagaagagattcaatggcaaatcatccca

SEQ ID NO: 582920 - DNA, 33 bp, Homo sapien
tggatagaagagattcgatggcaaatcatccca

SEQ ID NO: 582921 - DNA, 33 bp, Homo sapien
tttcatagcttactgaaatcactatgtaaaaaa

SEQ ID NO: 582922 - DNA, 33 bp, Homo sapien
tttcatagcttactgatatcactatgtaaaaaa

SEQ ID NO: 582923 - DNA, 33 bp, Homo sapien
ctcatttagtaacatacgcttggtttaaaatgg

SEQ ID NO: 582924 - DNA, 33 bp, Homo sapien
ctcatttagtaacatatgcttggtttaaaatgg

SEQ ID NO: 582925 - DNA, 33 bp, Homo sapien
aaaagaggaataagggcacatttataggagaca

SEQ ID NO: 582926 - DNA, 33 bp, Homo sapien
aaaagaggaataaggggacatttataggagaca

SEQ ID NO: 582927 - DNA, 33 bp, Homo sapien
cagctcccacaagtgacgttacaataaagtctc

SEQ ID NO: 582928 - DNA, 33 bp, Homo sapien
cagctcccacaagtgatgttacaataaagtctc

SEQ ID NO: 582929 - DNA, 33 bp, Homo sapien
aacgcaatgtataagaagaggatttgttggagc

SEQ ID NO: 582930 - DNA, 33 bp, Homo sapien
aacgcaatgtataagaggaggatttgttggagc

SEQ ID NO: 582931 - DNA, 33 bp, Homo sapien
tacttaaagatgagtaggtaggatgttaatgag

SEQ ID NO: 582932 - DNA, 33 bp, Homo sapien
tacttaaagatgagtatgtaggatgttaatgag

SEQ ID NO: 582933 - DNA, 33 bp, Homo sapien
gcctgataaaatagatcagttactctctgcata

SEQ ID NO: 582934 - DNA, 33 bp, Homo sapien
gcctgataaaatagatgagttactctctgcata

SEQ ID NO: 582935 - DNA, 33 bp, Homo sapien
atattattttctaaaagtcaacatcacaggaaa

SEQ ID NO: 582936 - DNA, 33 bp, Homo sapien
atattattttctaaaattcaacatcacaggaaa

SEQ ID NO: 582937 - DNA, 33 bp, Homo sapien
gctgaataagtggtaggcataagatattctcat

SEQ ID NO: 582938 - DNA, 33 bp, Homo sapien
gctgaataagtggtagtcataagatattctcat

SEQ ID NO: 582939 - DNA, 33 bp, Homo sapien
ggctgcactccaaatcaaaataaaaaataaagg

SEQ ID NO: 582940 - DNA, 33 bp, Homo sapien
ggctgcactccaaatcgaaataaaaaataaagg

SEQ ID NO: 582941 - DNA, 33 bp, Homo sapien
gtagaaaaattctccaaagatgctggaataacg

SEQ ID NO: 582942 - DNA, 33 bp, Homo sapien
gtagaaaaattctccagagatgctggaataacg

SEQ ID NO: 582943 - DNA, 33 bp, Homo sapien
actcttcagggtaagcaaatggtttggtctatt

SEQ ID NO: 582944 - DNA, 33 bp, Homo sapien
actcttcagggtaagccaatggtttggtctatt

SEQ ID NO: 582945 - DNA, 33 bp, Homo sapien
ttagtagccctcaatgccagctctattatatcc

SEQ ID NO: 582946 - DNA, 33 bp, Homo sapien
ttagtagccctcaatgtcagctctattatatcc

SEQ ID NO: 582947 - DNA, 33 bp, Homo sapien
attttttatctttatccgaaatggctttccttg

SEQ ID NO: 582948 - DNA, 33 bp, Homo sapien
attttttatctttatctgaaatggctttccttg

SEQ ID NO: 582949 - DNA, 33 bp, Homo sapien
tatttaaggagtgagacatgaagatggagagac

SEQ ID NO: 582950 - DNA, 33 bp, Homo sapien
tatttaaggagtgagatatgaagatggagagac

SEQ ID NO: 582951 - DNA, 33 bp, Homo sapien
ttaagtacataagcgaacaaatgaatggatgac

SEQ ID NO: 582952 - DNA, 33 bp, Homo sapien
ttaagtacataagcgagcaaatgaatggatgac

SEQ ID NO: 582953 - DNA, 33 bp, Homo sapien
aacatttatttaactccatgttgacaggataaa

SEQ ID NO: 582954 - DNA, 33 bp, Homo sapien
aacatttatttaactctatgttgacaggataaa

SEQ ID NO: 582955 - DNA, 33 bp, Homo sapien
cttcagttttccagtacctctttaatatatgtt

SEQ ID NO: 582956 - DNA, 33 bp, Homo sapien
cttcagttttccagtatctctttaatatatgtt

SEQ ID NO: 582957 - DNA, 33 bp, Homo sapien
gttatttagaatgctggagaaaatagataacct

SEQ ID NO: 582958 - DNA, 33 bp, Homo sapien
gttatttagaatgctgtagaaaatagataacct

SEQ ID NO: 582959 - DNA, 33 bp, Homo sapien
aagaatttgccaattacatctcagaataacatg

SEQ ID NO: 582960 - DNA, 33 bp, Homo sapien
aagaatttgccaattagatctcagaataacatg

SEQ ID NO: 582961 - DNA, 33 bp, Homo sapien
tctttttttaaaacaacctgactgatgatgata

SEQ ID NO: 582962 - DNA, 33 bp, Homo sapien
tctttttttaaaacaagctgactgatgatgata

SEQ ID NO: 582963 - DNA, 33 bp, Homo sapien
tttacaatatgctgcaaatagtttgtgaattta

SEQ ID NO: 582964 - DNA, 33 bp, Homo sapien
tttacaatatgctgcagatagtttgtgaattta

SEQ ID NO: 582965 - DNA, 33 bp, Homo sapien
gttagtagggcatgaaatgtatgtactcttgaa

SEQ ID NO: 582966 - DNA, 33 bp, Homo sapien
gttagtagggcatgaagtgtatgtactcttgaa

SEQ ID NO: 582967 - DNA, 33 bp, Homo sapien
tgacctttggcattcccaaattaaaacactggt

SEQ ID NO: 582968 - DNA, 33 bp, Homo sapien
tgacctttggcattcctaaattaaaacactggt

SEQ ID NO: 582969 - DNA, 33 bp, Homo sapien
gattagaagaaagcaacaacaactagtaagtta

SEQ ID NO: 582970 - DNA, 33 bp, Homo sapien
gattagaagaaagcaagaacaactagtaagtta

SEQ ID NO: 582971 - DNA, 33 bp, Homo sapien
gtagattttgggctacacaattaacactgcatg

SEQ ID NO: 582972 - DNA, 33 bp, Homo sapien
gtagattttgggctacgcaattaacactgcatg

SEQ ID NO: 582973 - DNA, 33 bp, Homo sapien
actgattttttcaggccaaatagaattgatacg

SEQ ID NO: 582974 - DNA, 33 bp, Homo sapien
actgattttttcaggcgaaatagaattgatacg

SEQ ID NO: 582975 - DNA, 33 bp, Homo sapien
ggcaaactagccccgaataaatagtgcagagaa

SEQ ID NO: 582976 - DNA, 33 bp, Homo sapien
ggcaaactagccccgattaaatagtgcagagaa

SEQ ID NO: 582977 - DNA, 33 bp, Homo sapien
taccttccttgtcttacagcttgaaaaaattac

SEQ ID NO: 582978 - DNA, 33 bp, Homo sapien
taccttccttgtcttagagcttgaaaaaattac

SEQ ID NO: 582979 - DNA, 33 bp, Homo sapien
actcagcatttgcttagaattcatttattttcg

SEQ ID NO: 582980 - DNA, 33 bp, Homo sapien
actcagcatttgcttataattcatttattttcg

SEQ ID NO: 582981 - DNA, 33 bp, Homo sapien
tatttcctttcctctcgttctaatggcaaagta

SEQ ID NO: 582982 - DNA, 33 bp, Homo sapien
tatttcctttcctctctttctaatggcaaagta

SEQ ID NO: 582983 - DNA, 33 bp, Homo sapien
ccagttaggtagtaaacaaattttaatcaccaa

SEQ ID NO: 582984 - DNA, 33 bp, Homo sapien
ccagttaggtagtaaagaaattttaatcaccaa

SEQ ID NO: 582985 - DNA, 33 bp, Homo sapien
tgagattatgtcatgtgaactgtatatgcacca

SEQ ID NO: 582986 - DNA, 33 bp, Homo sapien
tgagattatgtcatgttaactgtatatgcacca

SEQ ID NO: 582987 - DNA, 33 bp, Homo sapien
cagggggaaatgttaacaggaagatggtatgag

SEQ ID NO: 582988 - DNA, 33 bp, Homo sapien
cagggggaaatgttaataggaagatggtatgag

SEQ ID NO: 582989 - DNA, 33 bp, Homo sapien
agtggcattttgtgaacgtatttataatctgag

SEQ ID NO: 582990 - DNA, 33 bp, Homo sapien
agtggcattttgtgaatgtatttataatctgag

SEQ ID NO: 582991 - DNA, 33 bp, Homo sapien
ttcattgtgctatgaaacaaatacaaattacag

SEQ ID NO: 582992 - DNA, 33 bp, Homo sapien
ttcattgtgctatgaagcaaatacaaattacag

SEQ ID NO: 582993 - DNA, 33 bp, Homo sapien
gctgaatccatttaggaactatatagcacattc

SEQ ID NO: 582994 - DNA, 33 bp, Homo sapien
gctgaatccatttagggactatatagcacattc

SEQ ID NO: 582995 - DNA, 33 bp, Homo sapien
gcaaaatgggtctggaataacaaaatacatctt

SEQ ID NO: 582996 - DNA, 33 bp, Homo sapien
gcaaaatgggtctggagtaacaaaatacatctt

SEQ ID NO: 582997 - DNA, 33 bp, Homo sapien
tctagaccattttcatgaactcctcagttatag

SEQ ID NO: 582998 - DNA, 33 bp, Homo sapien
tctagaccattttcattaactcctcagttatag

SEQ ID NO: 582999 - DNA, 33 bp, Homo sapien
gagttgcgttgttttaactaccagaagaaatcc

SEQ ID NO: 583000 - DNA, 33 bp, Homo sapien
gagttgcgttgttttagctaccagaagaaatcc

SEQ ID NO: 583001 - DNA, 33 bp, Homo sapien
catgatatttgggaaactggtaattgttttatt

SEQ ID NO: 583002 - DNA, 33 bp, Homo sapien
catgatatttgggaaagtggtaattgttttatt

SEQ ID NO: 583003 - DNA, 33 bp, Homo sapien
aattggagatcagaaactcatagttctagggag

SEQ ID NO: 583004 - DNA, 33 bp, Homo sapien
aattggagatcagaaattcatagttctagggag

SEQ ID NO: 583005 - DNA, 33 bp, Homo sapien
atcaataaagtactcacgcatttggtgaattcc

SEQ ID NO: 583006 - DNA, 33 bp, Homo sapien
atcaataaagtactcatgcatttggtgaattcc

SEQ ID NO: 583007 - DNA, 33 bp, Homo sapien
cataaccaatgagaagcattagattaagcaaag

SEQ ID NO: 583008 - DNA, 33 bp, Homo sapien
cataaccaatgagaagtattagattaagcaaag

SEQ ID NO: 583009 - DNA, 33 bp, Homo sapien
gtctctgaagaagttgcaaggtagaaagttcgt

SEQ ID NO: 583010 - DNA, 33 bp, Homo sapien
gtctctgaagaagttgtaaggtagaaagttcgt

SEQ ID NO: 583011 - DNA, 33 bp, Homo sapien
ctatgtgactctccccaagtagactaaaacttc

SEQ ID NO: 583012 - DNA, 33 bp, Homo sapien
ctatgtgactctcccctagtagactaaaacttc

SEQ ID NO: 583013 - DNA, 33 bp, Homo sapien
tgctggtctctcatacaatgctaatacgtcaaa

SEQ ID NO: 583014 - DNA, 33 bp, Homo sapien
tgctggtctctcatacgatgctaatacgtcaaa

SEQ ID NO: 583015 - DNA, 33 bp, Homo sapien
caagtgtaacaaataccctgttttcatcagttc

SEQ ID NO: 583016 - DNA, 33 bp, Homo sapien
caagtgtaacaaatacgctgttttcatcagttc

SEQ ID NO: 583017 - DNA, 33 bp, Homo sapien
tatgatacatgtaagcaagagttcttaaggact

SEQ ID NO: 583018 - DNA, 33 bp, Homo sapien
tatgatacatgtaagcgagagttcttaaggact

SEQ ID NO: 583019 - DNA, 33 bp, Homo sapien
aacagcaacttaaatacccatttgagaaattct

SEQ ID NO: 583020 - DNA, 33 bp, Homo sapien
aacagcaacttaaatatccatttgagaaattct

SEQ ID NO: 583021 - DNA, 33 bp, Homo sapien
acctccactgtatgaacgctgagccagaaagta

SEQ ID NO: 583022 - DNA, 33 bp, Homo sapien
acctccactgtatgaatgctgagccagaaagta

SEQ ID NO: 583023 - DNA, 33 bp, Homo sapien
gggaaaaaaaactgaactcagccatgaataata

SEQ ID NO: 583024 - DNA, 33 bp, Homo sapien
gggaaaaaaaactgaagtcagccatgaataata

SEQ ID NO: 583025 - DNA, 33 bp, Homo sapien
gaactgactctgaagaactgacaaagcaataac

SEQ ID NO: 583026 - DNA, 33 bp, Homo sapien
gaactgactctgaagagctgacaaagcaataac

SEQ ID NO: 583027 - DNA, 33 bp, Homo sapien
ttaatagtttagttcaactggtataaaattgac

SEQ ID NO: 583028 - DNA, 33 bp, Homo sapien
ttaatagtttagttcatctggtataaaattgac

SEQ ID NO: 583029 - DNA, 33 bp, Homo sapien
tttatagagttataggcattgattgtatcctga

SEQ ID NO: 583030 - DNA, 33 bp, Homo sapien
tttatagagttataggtattgattgtatcctga

SEQ ID NO: 583031 - DNA, 33 bp, Homo sapien
aggaagggggtaggtaataatcagtcattggag

SEQ ID NO: 583032 - DNA, 33 bp, Homo sapien
aggaagggggtaggtagtaatcagtcattggag

SEQ ID NO: 583033 - DNA, 33 bp, Homo sapien
aagaaggtaagagctgcaagtataaatttgatt

SEQ ID NO: 583034 - DNA, 33 bp, Homo sapien
aagaaggtaagagctggaagtataaatttgatt

SEQ ID NO: 583035 - DNA, 33 bp, Homo sapien
tatgtatctatcttaaaaaccataacacagtct

SEQ ID NO: 583036 - DNA, 33 bp, Homo sapien
tatgtatctatcttaacaaccataacacagtct

SEQ ID NO: 583037 - DNA, 33 bp, Homo sapien
ggttccttaaagaaagcctattcagttgacaat

SEQ ID NO: 583038 - DNA, 33 bp, Homo sapien
ggttccttaaagaaagtctattcagttgacaat

SEQ ID NO: 583039 - DNA, 33 bp, Homo sapien
ctctcgactttgaactaagtgacttggtttgtg

SEQ ID NO: 583040 - DNA, 33 bp, Homo sapien
ctctcgactttgaactcagtgacttggtttgtg

SEQ ID NO: 583041 - DNA, 33 bp, Homo sapien
cattggtgctagccaaacatcccactctatcac

SEQ ID NO: 583042 - DNA, 33 bp, Homo sapien
cattggtgctagccaatcatcccactctatcac

SEQ ID NO: 583043 - DNA, 33 bp, Homo sapien
gttctcttatagaaccaccatattctttcaaga

SEQ ID NO: 583044 - DNA, 33 bp, Homo sapien
gttctcttatagaacccccatattctttcaaga

SEQ ID NO: 583045 - DNA, 33 bp, Homo sapien
tgggtccaagccttccacatagcatctttgatt

SEQ ID NO: 583046 - DNA, 33 bp, Homo sapien
tgggtccaagccttcctcatagcatctttgatt

SEQ ID NO: 583047 - DNA, 33 bp, Homo sapien
ggctgtcctagtcagaataaacccttgctcacc

SEQ ID NO: 583048 - DNA, 33 bp, Homo sapien
ggctgtcctagtcagattaaacccttgctcacc

SEQ ID NO: 583049 - DNA, 33 bp, Homo sapien
tgaggtcatctctacagctttaataccctaagc

SEQ ID NO: 583050 - DNA, 33 bp, Homo sapien
tgaggtcatctctacatctttaataccctaagc

SEQ ID NO: 583051 - DNA, 33 bp, Homo sapien
actgcattaagtggaaaacagattggtcatttc

SEQ ID NO: 583052 - DNA, 33 bp, Homo sapien
actgcattaagtggaagacagattggtcatttc

SEQ ID NO: 583053 - DNA, 33 bp, Homo sapien
aatgtatgaatggaaacattaagaaaggcttcg

SEQ ID NO: 583054 - DNA, 33 bp, Homo sapien
aatgtatgaatggaaatattaagaaaggcttcg

SEQ ID NO: 583055 - DNA, 33 bp, Homo sapien
tgtaccagggaaattgaatgtaagattccgtcg

SEQ ID NO: 583056 - DNA, 33 bp, Homo sapien
tgtaccagggaaattgcatgtaagattccgtcg

SEQ ID NO: 583057 - DNA, 33 bp, Homo sapien
gggaagcaaactctcaatgaaaatgtaccaggg

SEQ ID NO: 583058 - DNA, 33 bp, Homo sapien
gggaagcaaactctcagtgaaaatgtaccaggg

SEQ ID NO: 583059 - DNA, 33 bp, Homo sapien
aaaaatacaaaagccaatctgtcaaaacgtatt

SEQ ID NO: 583060 - DNA, 33 bp, Homo sapien
aaaaatacaaaagccagtctgtcaaaacgtatt

SEQ ID NO: 583061 - DNA, 33 bp, Homo sapien
aaatatgatgatcaaaagtgcatttatgccttg

SEQ ID NO: 583062 - DNA, 33 bp, Homo sapien
aaatatgatgatcaaacgtgcatttatgccttg

SEQ ID NO: 583063 - DNA, 33 bp, Homo sapien
agtgccttataggtaaagtggcttaattcacag

SEQ ID NO: 583064 - DNA, 33 bp, Homo sapien
agtgccttataggtaacgtggcttaattcacag

SEQ ID NO: 583065 - DNA, 33 bp, Homo sapien
cttgtgtgaaaggtccactacagttaagggctg

SEQ ID NO: 583066 - DNA, 33 bp, Homo sapien
cttgtgtgaaaggtccgctacagttaagggctg

SEQ ID NO: 583067 - DNA, 33 bp, Homo sapien
tagtcactacgttccacatctaatccatgtgat

SEQ ID NO: 583068 - DNA, 33 bp, Homo sapien
tagtcactacgttccagatctaatccatgtgat

SEQ ID NO: 583069 - DNA, 33 bp, Homo sapien
tgttcacaggtagcaaagtactcttagcaggcc

SEQ ID NO: 583070 - DNA, 33 bp, Homo sapien
tgttcacaggtagcaaggtactcttagcaggcc

SEQ ID NO: 583071 - DNA, 33 bp, Homo sapien
ttatactgaaagcccaagtttcaccagtatgca

SEQ ID NO: 583072 - DNA, 33 bp, Homo sapien
ttatactgaaagcccaggtttcaccagtatgca

SEQ ID NO: 583073 - DNA, 33 bp, Homo sapien
tctccaggcacataaaacaaaaaattgaaggca

SEQ ID NO: 583074 - DNA, 33 bp, Homo sapien
tctccaggcacataaagcaaaaaattgaaggca

SEQ ID NO: 583075 - DNA, 33 bp, Homo sapien
gaaagagagccctttcaacaggatgattccaat

SEQ ID NO: 583076 - DNA, 33 bp, Homo sapien
gaaagagagccctttcgacaggatgattccaat

SEQ ID NO: 583077 - DNA, 33 bp, Homo sapien
ctatagatcacgtataacttttcccagtggaaa

SEQ ID NO: 583078 - DNA, 33 bp, Homo sapien
ctatagatcacgtataccttttcccagtggaaa

SEQ ID NO: 583079 - DNA, 33 bp, Homo sapien
acatcaagattgctctaacctgaggacaggatt

SEQ ID NO: 583080 - DNA, 33 bp, Homo sapien
acatcaagattgctctgacctgaggacaggatt

SEQ ID NO: 583081 - DNA, 33 bp, Homo sapien
aataacagaaagctaacgtcctacaaaattatt

SEQ ID NO: 583082 - DNA, 33 bp, Homo sapien
aataacagaaagctaatgtcctacaaaattatt

SEQ ID NO: 583083 - DNA, 33 bp, Homo sapien
acagtaaacatgttccgaacacttacattagcc

SEQ ID NO: 583084 - DNA, 33 bp, Homo sapien
acagtaaacatgttcctaacacttacattagcc

SEQ ID NO: 583085 - DNA, 33 bp, Homo sapien
agaggggaagatgccaataggtagactgaagga

SEQ ID NO: 583086 - DNA, 33 bp, Homo sapien
agaggggaagatgccagtaggtagactgaagga

SEQ ID NO: 583087 - DNA, 33 bp, Homo sapien
tggaagcccaagtgagaaaatgtgagaatgaga

SEQ ID NO: 583088 - DNA, 33 bp, Homo sapien
tggaagcccaagtgaggaaatgtgagaatgaga

SEQ ID NO: 583089 - DNA, 33 bp, Homo sapien
tgagagtcctttgcaacagatgcctaaaagtct

SEQ ID NO: 583090 - DNA, 33 bp, Homo sapien
tgagagtcctttgcaatagatgcctaaaagtct

SEQ ID NO: 583091 - DNA, 33 bp, Homo sapien
aaattgttgtccaagacgaactagaataaatca

SEQ ID NO: 583092 - DNA, 33 bp, Homo sapien
aaattgttgtccaagatgaactagaataaatca

SEQ ID NO: 583093 - DNA, 33 bp, Homo sapien
agacatgtctggaactaagaagaaaatgagatt

SEQ ID NO: 583094 - DNA, 33 bp, Homo sapien
agacatgtctggaactgagaagaaaatgagatt

SEQ ID NO: 583095 - DNA, 33 bp, Homo sapien
tacattttatagaaagcctatgatatggtttgg

SEQ ID NO: 583096 - DNA, 33 bp, Homo sapien
tacattttatagaaaggctatgatatggtttgg

SEQ ID NO: 583097 - DNA, 33 bp, Homo sapien
gccatgttctacattagctttccagaacttatt

SEQ ID NO: 583098 - DNA, 33 bp, Homo sapien
gccatgttctacattatctttccagaacttatt

SEQ ID NO: 583099 - DNA, 33 bp, Homo sapien
tagtgttcagagataacaggaatcagatcagta

SEQ ID NO: 583100 - DNA, 33 bp, Homo sapien
tagtgttcagagataataggaatcagatcagta

SEQ ID NO: 583101 - DNA, 33 bp, Homo sapien
tgaaatatgtgaggtcaataaacacatataaag

SEQ ID NO: 583102 - DNA, 33 bp, Homo sapien
tgaaatatgtgaggtcgataaacacatataaag

SEQ ID NO: 583103 - DNA, 33 bp, Homo sapien
acaggatatgtgcaaaggttgctaaggatgttt

SEQ ID NO: 583104 - DNA, 33 bp, Homo sapien
acaggatatgtgcaaatgttgctaaggatgttt

SEQ ID NO: 583105 - DNA, 33 bp, Homo sapien
gccatttaattttgaaagtatcatcacataaat

SEQ ID NO: 583106 - DNA, 33 bp, Homo sapien
gccatttaattttgaatgtatcatcacataaat

SEQ ID NO: 583107 - DNA, 33 bp, Homo sapien
catgcgcaggttgagcacaattttatacttatt

SEQ ID NO: 583108 - DNA, 33 bp, Homo sapien
catgcgcaggttgagcgcaattttatacttatt

SEQ ID NO: 583109 - DNA, 33 bp, Homo sapien
ctgaatttcagggcaacgatcggggtggagata

SEQ ID NO: 583110 - DNA, 33 bp, Homo sapien
ctgaatttcagggcaatgatcggggtggagata

SEQ ID NO: 583111 - DNA, 33 bp, Homo sapien
tgaagcacttgcttacaattttgatatttgtgg

SEQ ID NO: 583112 - DNA, 33 bp, Homo sapien
tgaagcacttgcttacgattttgatatttgtgg

SEQ ID NO: 583113 - DNA, 33 bp, Homo sapien
gagagactaccataaaaggcacatattgaccaa

SEQ ID NO: 583114 - DNA, 33 bp, Homo sapien
gagagactaccataaagggcacatattgaccaa

SEQ ID NO: 583115 - DNA, 33 bp, Homo sapien
atattactgaagaataactctacttggccaaat

SEQ ID NO: 583116 - DNA, 33 bp, Homo sapien
atattactgaagaatatctctacttggccaaat

SEQ ID NO: 583117 - DNA, 33 bp, Homo sapien
gctgggagcctcaggaaagagaaacttcccagc

SEQ ID NO: 583118 - DNA, 33 bp, Homo sapien
gctgggagcctcaggagagagaaacttcccagc

SEQ ID NO: 583119 - DNA, 33 bp, Homo sapien
acaatcatatggactccatacggcttcctatac

SEQ ID NO: 583120 - DNA, 33 bp, Homo sapien
acaatcatatggactctatacggcttcctatac

SEQ ID NO: 583121 - DNA, 33 bp, Homo sapien
tatacttgaattttcacgcccccagacagcatg

SEQ ID NO: 583122 - DNA, 33 bp, Homo sapien
tatacttgaattttcatgcccccagacagcatg

SEQ ID NO: 583123 - DNA, 33 bp, Homo sapien
tctctattgatgaaaacgtgaatagtttcaaac

SEQ ID NO: 583124 - DNA, 33 bp, Homo sapien
tctctattgatgaaaatgtgaatagtttcaaac

SEQ ID NO: 583125 - DNA, 33 bp, Homo sapien
gaaatgcgcattcaggaaaaaaacagtatttgt

SEQ ID NO: 583126 - DNA, 33 bp, Homo sapien
gaaatgcgcattcaggcaaaaaacagtatttgt

SEQ ID NO: 583127 - DNA, 33 bp, Homo sapien
tcctctctatctcttcaagcttacttacccttg

SEQ ID NO: 583128 - DNA, 33 bp, Homo sapien
tcctctctatctcttcgagcttacttacccttg

SEQ ID NO: 583129 - DNA, 33 bp, Homo sapien
caaaccagttgttaagactaaaatgagacacaa

SEQ ID NO: 583130 - DNA, 33 bp, Homo sapien
caaaccagttgttaaggctaaaatgagacacaa

SEQ ID NO: 583131 - DNA, 33 bp, Homo sapien
aacaaacccattattcaacttctgagatatgtg

SEQ ID NO: 583132 - DNA, 33 bp, Homo sapien
aacaaacccattattccacttctgagatatgtg

SEQ ID NO: 583133 - DNA, 33 bp, Homo sapien
gagtgggaagaacacaacatgaagtcagacgtc

SEQ ID NO: 583134 - DNA, 33 bp, Homo sapien
gagtgggaagaacacagcatgaagtcagacgtc

SEQ ID NO: 583135 - DNA, 33 bp, Homo sapien
aaaatgtgatcatgaaaaggtttcaaagttatc

SEQ ID NO: 583136 - DNA, 33 bp, Homo sapien
aaaatgtgatcatgaagaggtttcaaagttatc

SEQ ID NO: 583137 - DNA, 33 bp, Homo sapien
catataaaaatccccaaacttagccaggctcaa

SEQ ID NO: 583138 - DNA, 33 bp, Homo sapien
catataaaaatccccagacttagccaggctcaa

SEQ ID NO: 583139 - DNA, 33 bp, Homo sapien
aaatcatccctgtaccaaaggaagagtgtccag

SEQ ID NO: 583140 - DNA, 33 bp, Homo sapien
aaatcatccctgtaccgaaggaagagtgtccag

SEQ ID NO: 583141 - DNA, 33 bp, Homo sapien
gtgtcattataaaaaggcaagtttggccctctg

SEQ ID NO: 583142 - DNA, 33 bp, Homo sapien
gtgtcattataaaaagtcaagtttggccctctg

SEQ ID NO: 583143 - DNA, 33 bp, Homo sapien
aacctccctggccaaactccgcgtcattccacc

SEQ ID NO: 583144 - DNA, 33 bp, Homo sapien
aacctccctggccaaattccgcgtcattccacc

SEQ ID NO: 583145 - DNA, 33 bp, Homo sapien
atggcagagatggaacaaatttatgaacaactg

SEQ ID NO: 583146 - DNA, 33 bp, Homo sapien
atggcagagatggaacgaatttatgaacaactg

SEQ ID NO: 583147 - DNA, 33 bp, Homo sapien
caacttctgcctagcacgtatcaaaattccgga

SEQ ID NO: 583148 - DNA, 33 bp, Homo sapien
caacttctgcctagcatgtatcaaaattccgga

SEQ ID NO: 583149 - DNA, 33 bp, Homo sapien
caatgttcttggctcaatgaagtataaaccaaa

SEQ ID NO: 583150 - DNA, 33 bp, Homo sapien
caatgttcttggctcagtgaagtataaaccaaa

SEQ ID NO: 583151 - DNA, 33 bp, Homo sapien
ggccatttgtgcttccactgaatccaacgctct

SEQ ID NO: 583152 - DNA, 33 bp, Homo sapien
ggccatttgtgcttccgctgaatccaacgctct

SEQ ID NO: 583153 - DNA, 33 bp, Homo sapien
ctagatgttacaaaagcatccaaatttaagtga

SEQ ID NO: 583154 - DNA, 33 bp, Homo sapien
ctagatgttacaaaagtatccaaatttaagtga

SEQ ID NO: 583155 - DNA, 33 bp, Homo sapien
aatacacttgcaaaaactggaaaagtcaataat

SEQ ID NO: 583156 - DNA, 33 bp, Homo sapien
aatacacttgcaaaaattggaaaagtcaataat

SEQ ID NO: 583157 - DNA, 33 bp, Homo sapien
gtatcatcagacaaacagtgcataataatctca

SEQ ID NO: 583158 - DNA, 33 bp, Homo sapien
gtatcatcagacaaacggtgcataataatctca

SEQ ID NO: 583159 - DNA, 33 bp, Homo sapien
tgaccatcactatgtcaagttcagcacttccct

SEQ ID NO: 583160 - DNA, 33 bp, Homo sapien
tgaccatcactatgtcgagttcagcacttccct

SEQ ID NO: 583161 - DNA, 33 bp, Homo sapien
aacacaatttgcaaaagaagagttgagaagtga

SEQ ID NO: 583162 - DNA, 33 bp, Homo sapien
aacacaatttgcaaaataagagttgagaagtga

SEQ ID NO: 583163 - DNA, 33 bp, Homo sapien
aggcagtgcattatagaatcaaccatatcttac

SEQ ID NO: 583164 - DNA, 33 bp, Homo sapien
aggcagtgcattatagcatcaaccatatcttac

SEQ ID NO: 583165 - DNA, 33 bp, Homo sapien
ggtaaaattttgagagaaataagacactggagt

SEQ ID NO: 583166 - DNA, 33 bp, Homo sapien
ggtaaaattttgagaggaataagacactggagt

SEQ ID NO: 583167 - DNA, 33 bp, Homo sapien
tttctttgactattccaactccagtgattacag

SEQ ID NO: 583168 - DNA, 33 bp, Homo sapien
tttctttgactattccgactccagtgattacag

SEQ ID NO: 583169 - DNA, 33 bp, Homo sapien
tgcaagttaccatgaacctaattacatctgccc

SEQ ID NO: 583170 - DNA, 33 bp, Homo sapien
tgcaagttaccatgaagctaattacatctgccc

SEQ ID NO: 583171 - DNA, 33 bp, Homo sapien
aagaaaacaaaatgacagaggtgtgttgacaaa

SEQ ID NO: 583172 - DNA, 33 bp, Homo sapien
aagaaaacaaaatgaccgaggtgtgttgacaaa

SEQ ID NO: 583173 - DNA, 33 bp, Homo sapien
acaaaagataagtggaacaatatttctgccttc

SEQ ID NO: 583174 - DNA, 33 bp, Homo sapien
acaaaagataagtggagcaatatttctgccttc

SEQ ID NO: 583175 - DNA, 33 bp, Homo sapien
aacttcttgtaaaatacgcattctcttcaatta

SEQ ID NO: 583176 - DNA, 33 bp, Homo sapien
aacttcttgtaaaatatgcattctcttcaatta

SEQ ID NO: 583177 - DNA, 33 bp, Homo sapien
tgcctgctaatcgtcaaagcatggatattgaac

SEQ ID NO: 583178 - DNA, 33 bp, Homo sapien
tgcctgctaatcgtcagagcatggatattgaac

SEQ ID NO: 583179 - DNA, 33 bp, Homo sapien
gtcaagataaaattccaatacaacagaatagat

SEQ ID NO: 583180 - DNA, 33 bp, Homo sapien
gtcaagataaaattccgatacaacagaatagat

SEQ ID NO: 583181 - DNA, 33 bp, Homo sapien
tctgctttctgattcaaccatgaaaaaatgtgt

SEQ ID NO: 583182 - DNA, 33 bp, Homo sapien
tctgctttctgattcatccatgaaaaaatgtgt

SEQ ID NO: 583183 - DNA, 33 bp, Homo sapien
acttatcctcgctctaaagcttactgcttctct

SEQ ID NO: 583184 - DNA, 33 bp, Homo sapien
acttatcctcgctctagagcttactgcttctct

SEQ ID NO: 583185 - DNA, 33 bp, Homo sapien
tggtaaattgctcctcccaatcctatgagttat

SEQ ID NO: 583186 - DNA, 33 bp, Homo sapien
tggtaaattgctcctctcaatcctatgagttat

SEQ ID NO: 583187 - DNA, 33 bp, Homo sapien
tctaatatccagcatcgataaagaacttacaca

SEQ ID NO: 583188 - DNA, 33 bp, Homo sapien
tctaatatccagcatctataaagaacttacaca

SEQ ID NO: 583189 - DNA, 33 bp, Homo sapien
caagctatggatctgacgtaggtctaatatcca

SEQ ID NO: 583190 - DNA, 33 bp, Homo sapien
caagctatggatctgatgtaggtctaatatcca

SEQ ID NO: 583191 - DNA, 33 bp, Homo sapien
agatctacttatttaaaactgtgtagcacctcc

SEQ ID NO: 583192 - DNA, 33 bp, Homo sapien
agatctacttatttaacactgtgtagcacctcc

SEQ ID NO: 583193 - DNA, 33 bp, Homo sapien
catagactcgcattcaaaagtgaccgctttgac

SEQ ID NO: 583194 - DNA, 33 bp, Homo sapien
catagactcgcattcagaagtgaccgctttgac

SEQ ID NO: 583195 - DNA, 33 bp, Homo sapien
aacctggattgcatacaacggtaacacattaat

SEQ ID NO: 583196 - DNA, 33 bp, Homo sapien
aacctggattgcatacgacggtaacacattaat

SEQ ID NO: 583197 - DNA, 33 bp, Homo sapien
tctagcacttcagataccttctttaccaggaag

SEQ ID NO: 583198 - DNA, 33 bp, Homo sapien
tctagcacttcagatatcttctttaccaggaag

SEQ ID NO: 583199 - DNA, 33 bp, Homo sapien
aacagtttctgacatacagttggtgtgtttatg

SEQ ID NO: 583200 - DNA, 33 bp, Homo sapien
aacagtttctgacatatagttggtgtgtttatg

SEQ ID NO: 583201 - DNA, 33 bp, Homo sapien
gcaggactggacacaacatagtcaatagaggtg

SEQ ID NO: 583202 - DNA, 33 bp, Homo sapien
gcaggactggacacaatatagtcaatagaggtg

SEQ ID NO: 583203 - DNA, 33 bp, Homo sapien
cattattctgcttataccactcaataaaatatt

SEQ ID NO: 583204 - DNA, 33 bp, Homo sapien
cattattctgcttatatcactcaataaaatatt

SEQ ID NO: 583205 - DNA, 33 bp, Homo sapien
acaaacaaccagaaagaaagaaatgcaagcatc

SEQ ID NO: 583206 - DNA, 33 bp, Homo sapien
acaaacaaccagaaaggaagaaatgcaagcatc

SEQ ID NO: 583207 - DNA, 33 bp, Homo sapien
catttacatgagctcaacacaggactcagtgtc

SEQ ID NO: 583208 - DNA, 33 bp, Homo sapien
catttacatgagctcagcacaggactcagtgtc

SEQ ID NO: 583209 - DNA, 33 bp, Homo sapien
tcagagtggacattgacaataggtgggtataat

SEQ ID NO: 583210 - DNA, 33 bp, Homo sapien
tcagagtggacattgataataggtgggtataat

SEQ ID NO: 583211 - DNA, 33 bp, Homo sapien
aatgatgtggtaggaccgtacttaaaagatatt

SEQ ID NO: 583212 - DNA, 33 bp, Homo sapien
aatgatgtggtaggactgtacttaaaagatatt

SEQ ID NO: 583213 - DNA, 33 bp, Homo sapien
accatatgcttatctcaagatttctcagtaaac

SEQ ID NO: 583214 - DNA, 33 bp, Homo sapien
accatatgcttatctcgagatttctcagtaaac

SEQ ID NO: 583215 - DNA, 33 bp, Homo sapien
ggccacagagaagcccactccctcaaagagaca

SEQ ID NO: 583216 - DNA, 33 bp, Homo sapien
ggccacagagaagcccgctccctcaaagagaca

SEQ ID NO: 583217 - DNA, 33 bp, Homo sapien
attcaggaaggtttaagaaatttggctcagggc

SEQ ID NO: 583218 - DNA, 33 bp, Homo sapien
attcaggaaggtttaataaatttggctcagggc

SEQ ID NO: 583219 - DNA, 33 bp, Homo sapien
agaaagggtgaaggtaacattaacagtattcat

SEQ ID NO: 583220 - DNA, 33 bp, Homo sapien
agaaagggtgaaggtagcattaacagtattcat

SEQ ID NO: 583221 - DNA, 33 bp, Homo sapien
ccccagtagctaaaacacaaaatgaaagaaagg

SEQ ID NO: 583222 - DNA, 33 bp, Homo sapien
ccccagtagctaaaacgcaaaatgaaagaaagg

SEQ ID NO: 583223 - DNA, 33 bp, Homo sapien
aaggcaccaaaagcacgcggatcttggtgtatc

SEQ ID NO: 583224 - DNA, 33 bp, Homo sapien
aaggcaccaaaagcactcggatcttggtgtatc

SEQ ID NO: 583225 - DNA, 33 bp, Homo sapien
acagaacaggcaaaaccataaaggcagaaagta

SEQ ID NO: 583226 - DNA, 33 bp, Homo sapien
acagaacaggcaaaactataaaggcagaaagta

SEQ ID NO: 583227 - DNA, 33 bp, Homo sapien
aaaatctgtagcaggaacaagataaagctaatt

SEQ ID NO: 583228 - DNA, 33 bp, Homo sapien
aaaatctgtagcaggatcaagataaagctaatt

SEQ ID NO: 583229 - DNA, 33 bp, Homo sapien
atatctattcagtaagacattcatacgttaagc

SEQ ID NO: 583230 - DNA, 33 bp, Homo sapien
atatctattcagtaagtcattcatacgttaagc

SEQ ID NO: 583231 - DNA, 33 bp, Homo sapien
tgcttctctctttccaaactgaactttgttcac

SEQ ID NO: 583232 - DNA, 33 bp, Homo sapien
tgcttctctctttccatactgaactttgttcac

SEQ ID NO: 583233 - DNA, 33 bp, Homo sapien
ttcctgtcttaccttacaatcatgtatggccac

SEQ ID NO: 583234 - DNA, 33 bp, Homo sapien
ttcctgtcttaccttataatcatgtatggccac

SEQ ID NO: 583235 - DNA, 33 bp, Homo sapien
atgactttgagcattacgtgttgagataggcaa

SEQ ID NO: 583236 - DNA, 33 bp, Homo sapien
atgactttgagcattatgtgttgagataggcaa

SEQ ID NO: 583237 - DNA, 33 bp, Homo sapien
acttgttatgaacacacattctcagatctttct

SEQ ID NO: 583238 - DNA, 33 bp, Homo sapien
acttgttatgaacacatattctcagatctttct

SEQ ID NO: 583239 - DNA, 33 bp, Homo sapien
gaagtactctgctgtacgcaaatggttctcaaa

SEQ ID NO: 583240 - DNA, 33 bp, Homo sapien
gaagtactctgctgtatgcaaatggttctcaaa

SEQ ID NO: 583241 - DNA, 33 bp, Homo sapien
tcaatatggaacttcacgtaatataaaatggat

SEQ ID NO: 583242 - DNA, 33 bp, Homo sapien
tcaatatggaacttcatgtaatataaaatggat

SEQ ID NO: 583243 - DNA, 33 bp, Homo sapien
cactaatgaaaatctcacattcaaggttcagtt

SEQ ID NO: 583244 - DNA, 33 bp, Homo sapien
cactaatgaaaatctctcattcaaggttcagtt

SEQ ID NO: 583245 - DNA, 33 bp, Homo sapien
acactggttctgaagcaaatgagctctaggtat

SEQ ID NO: 583246 - DNA, 33 bp, Homo sapien
acactggttctgaagcgaatgagctctaggtat

SEQ ID NO: 583247 - DNA, 33 bp, Homo sapien
tcctttcaatattgtaagcctttctagatacat

SEQ ID NO: 583248 - DNA, 33 bp, Homo sapien
tcctttcaatattgtaggcctttctagatacat

SEQ ID NO: 583249 - DNA, 33 bp, Homo sapien
agctgctatttactcaatatcttaccatttgtg

SEQ ID NO: 583250 - DNA, 33 bp, Homo sapien
agctgctatttactcagtatcttaccatttgtg

SEQ ID NO: 583251 - DNA, 33 bp, Homo sapien
ttcaggccacagaaccaaatctgcaagtttata

SEQ ID NO: 583252 - DNA, 33 bp, Homo sapien
ttcaggccacagaaccgaatctgcaagtttata

SEQ ID NO: 583253 - DNA, 33 bp, Homo sapien
cgacacttttgatgacgcagatcccaatattgc

SEQ ID NO: 583254 - DNA, 33 bp, Homo sapien
cgacacttttgatgactcagatcccaatattgc

SEQ ID NO: 583255 - DNA, 33 bp, Homo sapien
ttgtatctaaataagtcaaacataattctttca

SEQ ID NO: 583256 - DNA, 33 bp, Homo sapien
ttgtatctaaataagtgaaacataattctttca

SEQ ID NO: 583257 - DNA, 33 bp, Homo sapien
ctcatacgtagagccactcagcaattatcacta

SEQ ID NO: 583258 - DNA, 33 bp, Homo sapien
ctcatacgtagagccattcagcaattatcacta

SEQ ID NO: 583259 - DNA, 33 bp, Homo sapien
ctatgatgtaatgaccgaggcacctttgaactt

SEQ ID NO: 583260 - DNA, 33 bp, Homo sapien
ctatgatgtaatgacctaggcacctttgaactt

SEQ ID NO: 583261 - DNA, 33 bp, Homo sapien
agagaaaaaaattcaacctcactggcttcacat

SEQ ID NO: 583262 - DNA, 33 bp, Homo sapien
agagaaaaaaattcaatctcactggcttcacat

SEQ ID NO: 583263 - DNA, 33 bp, Homo sapien
ctttgacctctggccacgtaactcctgagcaga

SEQ ID NO: 583264 - DNA, 33 bp, Homo sapien
ctttgacctctggccatgtaactcctgagcaga

SEQ ID NO: 583265 - DNA, 33 bp, Homo sapien
tgaaagtattattcaactcaaggcgctgtgtct

SEQ ID NO: 583266 - DNA, 33 bp, Homo sapien
tgaaagtattattcaattcaaggcgctgtgtct

SEQ ID NO: 583267 - DNA, 33 bp, Homo sapien
tagcttggaaccaggaagtcaaaagctggggga

SEQ ID NO: 583268 - DNA, 33 bp, Homo sapien
tagcttggaaccaggaggtcaaaagctggggga

SEQ ID NO: 583269 - DNA, 33 bp, Homo sapien
ttttgtaacggtaaagaagcactgagttatgag

SEQ ID NO: 583270 - DNA, 33 bp, Homo sapien
ttttgtaacggtaaagcagcactgagttatgag

SEQ ID NO: 583271 - DNA, 33 bp, Homo sapien
tgttcatcaacttagacggcagtagaaatgatg

SEQ ID NO: 583272 - DNA, 33 bp, Homo sapien
tgttcatcaacttagatggcagtagaaatgatg

SEQ ID NO: 583273 - DNA, 33 bp, Homo sapien
aacagttctaccaattaaatgattctcaaatat

SEQ ID NO: 583274 - DNA, 33 bp, Homo sapien
aacagttctaccaatttaatgattctcaaatat

SEQ ID NO: 583275 - DNA, 33 bp, Homo sapien
ctataaatggacttcgaaacctaaaatcatgga

SEQ ID NO: 583276 - DNA, 33 bp, Homo sapien
ctataaatggacttcggaacctaaaatcatgga

SEQ ID NO: 583277 - DNA, 33 bp, Homo sapien
cttatgagtagactgaaatctccaagcttgaaa

SEQ ID NO: 583278 - DNA, 33 bp, Homo sapien
cttatgagtagactgacatctccaagcttgaaa

SEQ ID NO: 583279 - DNA, 33 bp, Homo sapien
gtgacacctgggactccactaacttatggctca

SEQ ID NO: 583280 - DNA, 33 bp, Homo sapien
gtgacacctgggactctactaacttatggctca

SEQ ID NO: 583281 - DNA, 33 bp, Homo sapien
tcgtttccctcctttaactgctctttgctctga

SEQ ID NO: 583282 - DNA, 33 bp, Homo sapien
tcgtttccctcctttatctgctctttgctctga

SEQ ID NO: 583283 - DNA, 33 bp, Homo sapien
tttcatgttctgaaagacaagaaacagaatttc

SEQ ID NO: 583284 - DNA, 33 bp, Homo sapien
tttcatgttctgaaagtcaagaaacagaatttc

SEQ ID NO: 583285 - DNA, 33 bp, Homo sapien
gtacacataagcattcaaatcagctgtacaata

SEQ ID NO: 583286 - DNA, 33 bp, Homo sapien
gtacacataagcattccaatcagctgtacaata

SEQ ID NO: 583287 - DNA, 33 bp, Homo sapien
agacacaacagtcataagatacagatctagtga

SEQ ID NO: 583288 - DNA, 33 bp, Homo sapien
agacacaacagtcataggatacagatctagtga

SEQ ID NO: 583289 - DNA, 33 bp, Homo sapien
gcttcacagtgttaagcaactgtaaagctagca

SEQ ID NO: 583290 - DNA, 33 bp, Homo sapien
gcttcacagtgttaagtaactgtaaagctagca

SEQ ID NO: 583291 - DNA, 33 bp, Homo sapien
tatatttaccaatttcacataaatgctgctttc

SEQ ID NO: 583292 - DNA, 33 bp, Homo sapien
tatatttaccaatttcgcataaatgctgctttc

SEQ ID NO: 583293 - DNA, 33 bp, Homo sapien
actccggaattgagaaaagtgaacagattctgg

SEQ ID NO: 583294 - DNA, 33 bp, Homo sapien
actccggaattgagaagagtgaacagattctgg

SEQ ID NO: 583295 - DNA, 33 bp, Homo sapien
ttgtttcccaacccaaagcatttaaagaaagat

SEQ ID NO: 583296 - DNA, 33 bp, Homo sapien
ttgtttcccaacccaaggcatttaaagaaagat

SEQ ID NO: 583297 - DNA, 33 bp, Homo sapien
tactttacttgaattaaaaatggatacttagcc

SEQ ID NO: 583298 - DNA, 33 bp, Homo sapien
tactttacttgaattagaaatggatacttagcc

SEQ ID NO: 583299 - DNA, 33 bp, Homo sapien
aagtaaattgatgatacgtgaggtgtgtacttg

SEQ ID NO: 583300 - DNA, 33 bp, Homo sapien
aagtaaattgatgatatgtgaggtgtgtacttg

SEQ ID NO: 583301 - DNA, 33 bp, Homo sapien
agtctacatttcaaccgggtgttaactctggtc

SEQ ID NO: 583302 - DNA, 33 bp, Homo sapien
agtctacatttcaacctggtgttaactctggtc

SEQ ID NO: 583303 - DNA, 33 bp, Homo sapien
atctaaaagcatcttacgaatggaaagaatatg

SEQ ID NO: 583304 - DNA, 33 bp, Homo sapien
atctaaaagcatcttatgaatggaaagaatatg

SEQ ID NO: 583305 - DNA, 33 bp, Homo sapien
atgatacaaatatccaaaagtgtttatgagtgt

SEQ ID NO: 583306 - DNA, 33 bp, Homo sapien
atgatacaaatatccagaagtgtttatgagtgt

SEQ ID NO: 583307 - DNA, 33 bp, Homo sapien
ggctgtagttttctgggcaagtatctccaatct

SEQ ID NO: 583308 - DNA, 33 bp, Homo sapien
ggctgtagttttctggtcaagtatctccaatct

SEQ ID NO: 583309 - DNA, 33 bp, Homo sapien
atgattataggctcctaactaccttttcctgag

SEQ ID NO: 583310 - DNA, 33 bp, Homo sapien
atgattataggctcctgactaccttttcctgag

SEQ ID NO: 583311 - DNA, 33 bp, Homo sapien
tgatcctgcctcatgaatatagccacaaggtac

SEQ ID NO: 583312 - DNA, 33 bp, Homo sapien
tgatcctgcctcatgagtatagccacaaggtac

SEQ ID NO: 583313 - DNA, 33 bp, Homo sapien
ggtacagaatgaggtacgcctgcaaaggagatg

SEQ ID NO: 583314 - DNA, 33 bp, Homo sapien
ggtacagaatgaggtatgcctgcaaaggagatg

SEQ ID NO: 583315 - DNA, 33 bp, Homo sapien
aatcaaactttgttaaaataattcctcttttcc

SEQ ID NO: 583316 - DNA, 33 bp, Homo sapien
aatcaaactttgttaagataattcctcttttcc

SEQ ID NO: 583317 - DNA, 33 bp, Homo sapien
cagatagaggtgggtccctggtgaaacaccacc

SEQ ID NO: 583318 - DNA, 33 bp, Homo sapien
cagatagaggtgggtctctggtgaaacaccacc

SEQ ID NO: 583319 - DNA, 33 bp, Homo sapien
cagttgtagtggccacaggatccatgctggagc

SEQ ID NO: 583320 - DNA, 33 bp, Homo sapien
cagttgtagtggccacgggatccatgctggagc

SEQ ID NO: 583321 - DNA, 33 bp, Homo sapien
attggcctccagctgaaaaagcagcaccaaaaa

SEQ ID NO: 583322 - DNA, 33 bp, Homo sapien
attggcctccagctgacaaagcagcaccaaaaa

SEQ ID NO: 583323 - DNA, 33 bp, Homo sapien
ttctaacactgtcacaaagatgaagtcagagcg

SEQ ID NO: 583324 - DNA, 33 bp, Homo sapien
ttctaacactgtcacagagatgaagtcagagcg

SEQ ID NO: 583325 - DNA, 33 bp, Homo sapien
tttttccatttcctacacagacatgaataatat

SEQ ID NO: 583326 - DNA, 33 bp, Homo sapien
tttttccatttcctactcagacatgaataatat

SEQ ID NO: 583327 - DNA, 33 bp, Homo sapien
atgtagtaaatttagaagaagttgtataaacat

SEQ ID NO: 583328 - DNA, 33 bp, Homo sapien
atgtagtaaatttagaggaagttgtataaacat

SEQ ID NO: 583329 - DNA, 33 bp, Homo sapien
acaagtggttgcttcacaccctgcttgaattcc

SEQ ID NO: 583330 - DNA, 33 bp, Homo sapien
acaagtggttgcttcataccctgcttgaattcc

SEQ ID NO: 583331 - DNA, 33 bp, Homo sapien
gaattgtttgcattgacattctcttttgttctg

SEQ ID NO: 583332 - DNA, 33 bp, Homo sapien
gaattgtttgcattgagattctcttttgttctg

SEQ ID NO: 583333 - DNA, 33 bp, Homo sapien
aaaagaaagtctttcaaagtgcttcacagccac

SEQ ID NO: 583334 - DNA, 33 bp, Homo sapien
aaaagaaagtctttcagagtgcttcacagccac

SEQ ID NO: 583335 - DNA, 33 bp, Homo sapien
tcatttcaactgatgcagaaaagcatttgacat

SEQ ID NO: 583336 - DNA, 33 bp, Homo sapien
tcatttcaactgatgcggaaaagcatttgacat

SEQ ID NO: 583337 - DNA, 33 bp, Homo sapien
gagtactcaaaactcacgtaaatgacaaactgt

SEQ ID NO: 583338 - DNA, 33 bp, Homo sapien
gagtactcaaaactcatgtaaatgacaaactgt

SEQ ID NO: 583339 - DNA, 33 bp, Homo sapien
agaagaaaggatcatacgctctttttttatatt

SEQ ID NO: 583340 - DNA, 33 bp, Homo sapien
agaagaaaggatcatatgctctttttttatatt

SEQ ID NO: 583341 - DNA, 33 bp, Homo sapien
gcatgaaatatataccacagggtcacctcacat

SEQ ID NO: 583342 - DNA, 33 bp, Homo sapien
gcatgaaatatataccgcagggtcacctcacat

SEQ ID NO: 583343 - DNA, 33 bp, Homo sapien
aatctcacttccatcagtccaggcttcattata

SEQ ID NO: 583344 - DNA, 33 bp, Homo sapien
aatctcacttccatcattccaggcttcattata

SEQ ID NO: 583345 - DNA, 33 bp, Homo sapien
aaagtcagcacaataaataataggactgatctt

SEQ ID NO: 583346 - DNA, 33 bp, Homo sapien
aaagtcagcacaataattaataggactgatctt

SEQ ID NO: 583347 - DNA, 33 bp, Homo sapien
tatgatcgcttaatataagaggaaggagtttag

SEQ ID NO: 583348 - DNA, 33 bp, Homo sapien
tatgatcgcttaatattagaggaaggagtttag

SEQ ID NO: 583349 - DNA, 33 bp, Homo sapien
aaaagatcaaacatcacggtgaatatttatgaa

SEQ ID NO: 583350 - DNA, 33 bp, Homo sapien
aaaagatcaaacatcagggtgaatatttatgaa

SEQ ID NO: 583351 - DNA, 33 bp, Homo sapien
ttcaagcaaggttcacaatggaagggaacaaag

SEQ ID NO: 583352 - DNA, 33 bp, Homo sapien
ttcaagcaaggttcacgatggaagggaacaaag

SEQ ID NO: 583353 - DNA, 33 bp, Homo sapien
ttggcaatttttgagacgatcggaggatggaat

SEQ ID NO: 583354 - DNA, 33 bp, Homo sapien
ttggcaatttttgagatgatcggaggatggaat

SEQ ID NO: 583355 - DNA, 33 bp, Homo sapien
tgacaaaagttaaaaggcctctatattcacatc

SEQ ID NO: 583356 - DNA, 33 bp, Homo sapien
tgacaaaagttaaaagtcctctatattcacatc

SEQ ID NO: 583357 - DNA, 33 bp, Homo sapien
ctgggccagttcatcaacctctttcctttactt

SEQ ID NO: 583358 - DNA, 33 bp, Homo sapien
ctgggccagttcatcagcctctttcctttactt

SEQ ID NO: 583359 - DNA, 33 bp, Homo sapien
gatcagaagtgtaacactgaattcaaaatttta

SEQ ID NO: 583360 - DNA, 33 bp, Homo sapien
gatcagaagtgtaacattgaattcaaaatttta

SEQ ID NO: 583361 - DNA, 33 bp, Homo sapien
ttctaatgttccatagaatggcagagtgactgt

SEQ ID NO: 583362 - DNA, 33 bp, Homo sapien
ttctaatgttccatagcatggcagagtgactgt

SEQ ID NO: 583363 - DNA, 33 bp, Homo sapien
gctattcttagcagacagaaatacaggttttcc

SEQ ID NO: 583364 - DNA, 33 bp, Homo sapien
gctattcttagcagacggaaatacaggttttcc

SEQ ID NO: 583365 - DNA, 33 bp, Homo sapien
atgcatgtaaagtatgcaaatcagtctacttct

SEQ ID NO: 583366 - DNA, 33 bp, Homo sapien
atgcatgtaaagtatgtaaatcagtctacttct

SEQ ID NO: 583367 - DNA, 33 bp, Homo sapien
caaatgagggaagataaaacatatgcagaggta

SEQ ID NO: 583368 - DNA, 33 bp, Homo sapien
caaatgagggaagatacaacatatgcagaggta

SEQ ID NO: 583369 - DNA, 33 bp, Homo sapien
atcggtcatctaaatccctgttgctgttttatc

SEQ ID NO: 583370 - DNA, 33 bp, Homo sapien
atcggtcatctaaatcgctgttgctgttttatc

SEQ ID NO: 583371 - DNA, 33 bp, Homo sapien
aggcatacctgtgaaaataaatgtattagcctg

SEQ ID NO: 583372 - DNA, 33 bp, Homo sapien
aggcatacctgtgaaagtaaatgtattagcctg

SEQ ID NO: 583373 - DNA, 33 bp, Homo sapien
tatcatttaaaagacaaaactggcatcgcggga

SEQ ID NO: 583374 - DNA, 33 bp, Homo sapien
tatcatttaaaagacagaactggcatcgcggga

SEQ ID NO: 583375 - DNA, 33 bp, Homo sapien
gtattttgggcttccaagtattactgaagatgg

SEQ ID NO: 583376 - DNA, 33 bp, Homo sapien
gtattttgggcttccatgtattactgaagatgg

SEQ ID NO: 583377 - DNA, 33 bp, Homo sapien
ggcatctcaaatgaacaggtctataattgaact

SEQ ID NO: 583378 - DNA, 33 bp, Homo sapien
ggcatctcaaatgaacgggtctataattgaact

SEQ ID NO: 583379 - DNA, 33 bp, Homo sapien
catgctcaccttaatacggatacagatggttac

SEQ ID NO: 583380 - DNA, 33 bp, Homo sapien
catgctcaccttaatatggatacagatggttac

SEQ ID NO: 583381 - DNA, 33 bp, Homo sapien
gtatctaggtgttcaacgaactgaattgaaaac

SEQ ID NO: 583382 - DNA, 33 bp, Homo sapien
gtatctaggtgttcaatgaactgaattgaaaac

SEQ ID NO: 583383 - DNA, 33 bp, Homo sapien
taggtaagttgccttcgctaaaataaagttgtc

SEQ ID NO: 583384 - DNA, 33 bp, Homo sapien
taggtaagttgccttctctaaaataaagttgtc

SEQ ID NO: 583385 - DNA, 33 bp, Homo sapien
ttcatgttttggtttacattctaagacttacat

SEQ ID NO: 583386 - DNA, 33 bp, Homo sapien
ttcatgttttggtttatattctaagacttacat

SEQ ID NO: 583387 - DNA, 33 bp, Homo sapien
ttcactataaaaaaaaactgctgcaatttcttc

SEQ ID NO: 583388 - DNA, 33 bp, Homo sapien
ttcactataaaaaaaacctgctgcaatttcttc

SEQ ID NO: 583389 - DNA, 33 bp, Homo sapien
cgtggcctgggctacagactacctgttccagtc

SEQ ID NO: 583390 - DNA, 33 bp, Homo sapien
cgtggcctgggctacatactacctgttccagtc

SEQ ID NO: 583391 - DNA, 33 bp, Homo sapien
accatatatccaggcaataactatacagtcaaa

SEQ ID NO: 583392 - DNA, 33 bp, Homo sapien
accatatatccaggcagtaactatacagtcaaa

SEQ ID NO: 583393 - DNA, 33 bp, Homo sapien
attctcaatctagtgcagactctggagcttaag

SEQ ID NO: 583394 - DNA, 33 bp, Homo sapien
attctcaatctagtgccgactctggagcttaag

SEQ ID NO: 583395 - DNA, 33 bp, Homo sapien
cagtgtccttggctaacactaattctcaatcta

SEQ ID NO: 583396 - DNA, 33 bp, Homo sapien
cagtgtccttggctaagactaattctcaatcta

SEQ ID NO: 583397 - DNA, 33 bp, Homo sapien
aaaaagtattgaacagaaatatcaactataaac

SEQ ID NO: 583398 - DNA, 33 bp, Homo sapien
aaaaagtattgaacaggaatatcaactataaac

SEQ ID NO: 583399 - DNA, 33 bp, Homo sapien
tttagactaataacaaggctagcttttccaaca

SEQ ID NO: 583400 - DNA, 33 bp, Homo sapien
tttagactaataacaatgctagcttttccaaca

SEQ ID NO: 583401 - DNA, 33 bp, Homo sapien
ggattttcagtaggtacatctgctagtaagtga

SEQ ID NO: 583402 - DNA, 33 bp, Homo sapien
ggattttcagtaggtatatctgctagtaagtga

SEQ ID NO: 583403 - DNA, 33 bp, Homo sapien
ttcagtctatagtgcacaggaacactgagagag

SEQ ID NO: 583404 - DNA, 33 bp, Homo sapien
ttcagtctatagtgcataggaacactgagagag

SEQ ID NO: 583405 - DNA, 33 bp, Homo sapien
gcctctgcacgttggaaaaaatatcagttttga

SEQ ID NO: 583406 - DNA, 33 bp, Homo sapien
gcctctgcacgttggagaaaatatcagttttga

SEQ ID NO: 583407 - DNA, 33 bp, Homo sapien
tcttcctctagagctacgcatggtctttcttaa

SEQ ID NO: 583408 - DNA, 33 bp, Homo sapien
tcttcctctagagctatgcatggtctttcttaa

SEQ ID NO: 583409 - DNA, 33 bp, Homo sapien
aagagaacaagaagtaccgtatgtttgttattc

SEQ ID NO: 583410 - DNA, 33 bp, Homo sapien
aagagaacaagaagtatcgtatgtttgttattc

SEQ ID NO: 583411 - DNA, 33 bp, Homo sapien
attctccatattattaagcctatgcgtaagctt

SEQ ID NO: 583412 - DNA, 33 bp, Homo sapien
attctccatattattaggcctatgcgtaagctt

SEQ ID NO: 583413 - DNA, 33 bp, Homo sapien
agcactcagggcacaacacattgatccaaaaat

SEQ ID NO: 583414 - DNA, 33 bp, Homo sapien
agcactcagggcacaatacattgatccaaaaat

SEQ ID NO: 583415 - DNA, 33 bp, Homo sapien
acattctttgaggttacaaaagctgatgtactc

SEQ ID NO: 583416 - DNA, 33 bp, Homo sapien
acattctttgaggttataaaagctgatgtactc

SEQ ID NO: 583417 - DNA, 33 bp, Homo sapien
acctttgacaaaaattaaacaatctgatagtat

SEQ ID NO: 583418 - DNA, 33 bp, Homo sapien
acctttgacaaaaattcaacaatctgatagtat

SEQ ID NO: 583419 - DNA, 33 bp, Homo sapien
agacattatcaaaaccaaagagtaaaactaaga

SEQ ID NO: 583420 - DNA, 33 bp, Homo sapien
agacattatcaaaaccgaagagtaaaactaaga

SEQ ID NO: 583421 - DNA, 33 bp, Homo sapien
aaaaggttttcttctgaatattggcctataaga

SEQ ID NO: 583422 - DNA, 33 bp, Homo sapien
aaaaggttttcttctgcatattggcctataaga

SEQ ID NO: 583423 - DNA, 33 bp, Homo sapien
cagtgcaactttgcacagtcctttactttatga

SEQ ID NO: 583424 - DNA, 33 bp, Homo sapien
cagtgcaactttgcacggtcctttactttatga

SEQ ID NO: 583425 - DNA, 33 bp, Homo sapien
caacttcaatgtcacaaataaaaattagtacct

SEQ ID NO: 583426 - DNA, 33 bp, Homo sapien
caacttcaatgtcacagataaaaattagtacct

SEQ ID NO: 583427 - DNA, 33 bp, Homo sapien
gatgggactagtaaaaaagacaatataggtgag

SEQ ID NO: 583428 - DNA, 33 bp, Homo sapien
gatgggactagtaaaagagacaatataggtgag

SEQ ID NO: 583429 - DNA, 33 bp, Homo sapien
gatctagaagtggtcacagaatttcagcagagt

SEQ ID NO: 583430 - DNA, 33 bp, Homo sapien
gatctagaagtggtcatagaatttcagcagagt

SEQ ID NO: 583431 - DNA, 33 bp, Homo sapien
tttgtcattccttataagatcaccttcatattt

SEQ ID NO: 583432 - DNA, 33 bp, Homo sapien
tttgtcattccttataggatcaccttcatattt

SEQ ID NO: 583433 - DNA, 33 bp, Homo sapien
tgtttgtatcaccccaaaattcatactttgaat

SEQ ID NO: 583434 - DNA, 33 bp, Homo sapien
tgtttgtatcaccccagaattcatactttgaat

SEQ ID NO: 583435 - DNA, 33 bp, Homo sapien
atattgagctctaaaaagttatgcgaacaaaat

SEQ ID NO: 583436 - DNA, 33 bp, Homo sapien
atattgagctctaaaatgttatgcgaacaaaat

SEQ ID NO: 583437 - DNA, 33 bp, Homo sapien
tgattgaaatgcctctcaagtatgacccagtgt

SEQ ID NO: 583438 - DNA, 33 bp, Homo sapien
tgattgaaatgcctcttaagtatgacccagtgt

SEQ ID NO: 583439 - DNA, 33 bp, Homo sapien
caagttcagtgtggtaaaactttaaaaaatcac

SEQ ID NO: 583440 - DNA, 33 bp, Homo sapien
caagttcagtgtggtagaactttaaaaaatcac

SEQ ID NO: 583441 - DNA, 33 bp, Homo sapien
ataacttcagattgccccatcttctacagacat

SEQ ID NO: 583442 - DNA, 33 bp, Homo sapien
ataacttcagattgccgcatcttctacagacat

SEQ ID NO: 583443 - DNA, 33 bp, Homo sapien
catttcttgagagctaaattttcagtgcaaaaa

SEQ ID NO: 583444 - DNA, 33 bp, Homo sapien
catttcttgagagctacattttcagtgcaaaaa

SEQ ID NO: 583445 - DNA, 33 bp, Homo sapien
catgctgtcttccctgaattacatcaactgtgc

SEQ ID NO: 583446 - DNA, 33 bp, Homo sapien
catgctgtcttccctggattacatcaactgtgc

SEQ ID NO: 583447 - DNA, 33 bp, Homo sapien
aaacttacctggagtcacgaaaggagtaggctg

SEQ ID NO: 583448 - DNA, 33 bp, Homo sapien
aaacttacctggagtcgcgaaaggagtaggctg

SEQ ID NO: 583449 - DNA, 33 bp, Homo sapien
ctagagctccctgttacataagtcaaaaagtca

SEQ ID NO: 583450 - DNA, 33 bp, Homo sapien
ctagagctccctgttatataagtcaaaaagtca

SEQ ID NO: 583451 - DNA, 33 bp, Homo sapien
ttatttgtaatcctcacaataatcacttagaca

SEQ ID NO: 583452 - DNA, 33 bp, Homo sapien
ttatttgtaatcctcataataatcacttagaca

SEQ ID NO: 583453 - DNA, 33 bp, Homo sapien
tcatatatcagtggaaacctcagatgcaaacga

SEQ ID NO: 583454 - DNA, 33 bp, Homo sapien
tcatatatcagtggaaccctcagatgcaaacga

SEQ ID NO: 583455 - DNA, 33 bp, Homo sapien
acttgcctcaagaacacagagtcaaattgcact

SEQ ID NO: 583456 - DNA, 33 bp, Homo sapien
acttgcctcaagaacatagagtcaaattgcact

SEQ ID NO: 583457 - DNA, 33 bp, Homo sapien
aagtcataggtacaggcatattgccgagtcaga

SEQ ID NO: 583458 - DNA, 33 bp, Homo sapien
aagtcataggtacaggtatattgccgagtcaga

SEQ ID NO: 583459 - DNA, 33 bp, Homo sapien
gagtaacctgggcaataataaggctcacatcat

SEQ ID NO: 583460 - DNA, 33 bp, Homo sapien
gagtaacctgggcaatgataaggctcacatcat

SEQ ID NO: 583461 - DNA, 33 bp, Homo sapien
aataatttaaagctgcaaatgaataattaattg

SEQ ID NO: 583462 - DNA, 33 bp, Homo sapien
aataatttaaagctgcgaatgaataattaattg

SEQ ID NO: 583463 - DNA, 33 bp, Homo sapien
attagaaagtgccacaactacaaatatctttaa

SEQ ID NO: 583464 - DNA, 33 bp, Homo sapien
attagaaagtgccacatctacaaatatctttaa

SEQ ID NO: 583465 - DNA, 33 bp, Homo sapien
ttatattaatcaagaagcctatgtatttgtttt

SEQ ID NO: 583466 - DNA, 33 bp, Homo sapien
ttatattaatcaagaatcctatgtatttgtttt

SEQ ID NO: 583467 - DNA, 33 bp, Homo sapien
agcatttttgagtgcacaggtaggcaggaaaga

SEQ ID NO: 583468 - DNA, 33 bp, Homo sapien
agcatttttgagtgcagaggtaggcaggaaaga

SEQ ID NO: 583469 - DNA, 33 bp, Homo sapien
aataggatctgtttatcagctgcaaggaaagtc

SEQ ID NO: 583470 - DNA, 33 bp, Homo sapien
aataggatctgtttattagctgcaaggaaagtc

SEQ ID NO: 583471 - DNA, 33 bp, Homo sapien
aatactatccctaacaaagccattatttagaaa

SEQ ID NO: 583472 - DNA, 33 bp, Homo sapien
aatactatccctaacagagccattatttagaaa

SEQ ID NO: 583473 - DNA, 33 bp, Homo sapien
ttcataatatattccaacttctcaaaaacagag

SEQ ID NO: 583474 - DNA, 33 bp, Homo sapien
ttcataatatattccaccttctcaaaaacagag

SEQ ID NO: 583475 - DNA, 33 bp, Homo sapien
actcagaactcttgacaaatcatgtagttttct

SEQ ID NO: 583476 - DNA, 33 bp, Homo sapien
actcagaactcttgactaatcatgtagttttct

SEQ ID NO: 583477 - DNA, 33 bp, Homo sapien
caattcttgtagtataagtttcagctctgtaag

SEQ ID NO: 583478 - DNA, 33 bp, Homo sapien
caattcttgtagtatatgtttcagctctgtaag

SEQ ID NO: 583479 - DNA, 33 bp, Homo sapien
gcccgagaaataaacaactttccaaattctcag

SEQ ID NO: 583480 - DNA, 33 bp, Homo sapien
gcccgagaaataaacagctttccaaattctcag

SEQ ID NO: 583481 - DNA, 33 bp, Homo sapien
taacacatcaattatgaaaaggcagataatgca

SEQ ID NO: 583482 - DNA, 33 bp, Homo sapien
taacacatcaattatgcaaaggcagataatgca

SEQ ID NO: 583483 - DNA, 33 bp, Homo sapien
acatattctttattaacctactgaaggacatct

SEQ ID NO: 583484 - DNA, 33 bp, Homo sapien
acatattctttattaatctactgaaggacatct

SEQ ID NO: 583485 - DNA, 33 bp, Homo sapien
atgtcagcagattacacaattatggctcccagt

SEQ ID NO: 583486 - DNA, 33 bp, Homo sapien
atgtcagcagattacagaattatggctcccagt

SEQ ID NO: 583487 - DNA, 33 bp, Homo sapien
agattagctgttgtcaacccttaaaaaatctgg

SEQ ID NO: 583488 - DNA, 33 bp, Homo sapien
agattagctgttgtcagcccttaaaaaatctgg

SEQ ID NO: 583489 - DNA, 33 bp, Homo sapien
cattaacagccttcaaatatttccttcacttac

SEQ ID NO: 583490 - DNA, 33 bp, Homo sapien
cattaacagccttcaagtatttccttcacttac

SEQ ID NO: 583491 - DNA, 33 bp, Homo sapien
cagatgaaacctcacaaatagcagttcttagag

SEQ ID NO: 583492 - DNA, 33 bp, Homo sapien
cagatgaaacctcacagatagcagttcttagag

SEQ ID NO: 583493 - DNA, 33 bp, Homo sapien
acaggtgtaaggcaaacgaagatgagttcaatt

SEQ ID NO: 583494 - DNA, 33 bp, Homo sapien
acaggtgtaaggcaaatgaagatgagttcaatt

SEQ ID NO: 583495 - DNA, 33 bp, Homo sapien
gagaaatgaagctttaccaaatgtgtctaccct

SEQ ID NO: 583496 - DNA, 33 bp, Homo sapien
gagaaatgaagctttatcaaatgtgtctaccct

SEQ ID NO: 583497 - DNA, 33 bp, Homo sapien
tgctgtgagaagtagacgagtattcaaggtcaa

SEQ ID NO: 583498 - DNA, 33 bp, Homo sapien
tgctgtgagaagtagatgagtattcaaggtcaa

SEQ ID NO: 583499 - DNA, 33 bp, Homo sapien
catttctccagtaaaacgacaaaagatcttcaa

SEQ ID NO: 583500 - DNA, 33 bp, Homo sapien
catttctccagtaaaaggacaaaagatcttcaa

SEQ ID NO: 583501 - DNA, 33 bp, Homo sapien
agtgattgtcaatagaaggaaaaactggcaatg

SEQ ID NO: 583502 - DNA, 33 bp, Homo sapien
agtgattgtcaatagagggaaaaactggcaatg

SEQ ID NO: 583503 - DNA, 33 bp, Homo sapien
aaccccacaactaccaccagaattaatggtgcg

SEQ ID NO: 583504 - DNA, 33 bp, Homo sapien
aaccccacaactaccatcagaattaatggtgcg

SEQ ID NO: 583505 - DNA, 33 bp, Homo sapien
agattcacttttgcaaatatgaatcttactgtg

SEQ ID NO: 583506 - DNA, 33 bp, Homo sapien
agattcacttttgcaagtatgaatcttactgtg

SEQ ID NO: 583507 - DNA, 33 bp, Homo sapien
actttaacttaaggttctcaatcggtgtacagt

SEQ ID NO: 583508 - DNA, 33 bp, Homo sapien
actttaacttaaggttttcaatcggtgtacagt

SEQ ID NO: 583509 - DNA, 33 bp, Homo sapien
tgccctctgcggtgacactgtgactaaatgtgc

SEQ ID NO: 583510 - DNA, 33 bp, Homo sapien
tgccctctgcggtgacgctgtgactaaatgtgc

SEQ ID NO: 583511 - DNA, 33 bp, Homo sapien
tgatgcctgccagaccactagatgatggcccat

SEQ ID NO: 583512 - DNA, 33 bp, Homo sapien
tgatgcctgccagaccgctagatgatggcccat

SEQ ID NO: 583513 - DNA, 33 bp, Homo sapien
aacattaaatgcaggtaacaatctaacatatac

SEQ ID NO: 583514 - DNA, 33 bp, Homo sapien
aacattaaatgcaggtcacaatctaacatatac

SEQ ID NO: 583515 - DNA, 33 bp, Homo sapien
tctactgtttgctatgcaattacctgggttaaa

SEQ ID NO: 583516 - DNA, 33 bp, Homo sapien
tctactgtttgctatgtaattacctgggttaaa

SEQ ID NO: 583517 - DNA, 33 bp, Homo sapien
cttttacactctatgacgtttttgaatgctttt

SEQ ID NO: 583518 - DNA, 33 bp, Homo sapien
cttttacactctatgatgtttttgaatgctttt

SEQ ID NO: 583519 - DNA, 33 bp, Homo sapien
ggattttttctccaaaatttatgatgtcatttg

SEQ ID NO: 583520 - DNA, 33 bp, Homo sapien
ggattttttctccaaactttatgatgtcatttg

SEQ ID NO: 583521 - DNA, 33 bp, Homo sapien
ttcattaactgatagcaaaatagccaaacttgt

SEQ ID NO: 583522 - DNA, 33 bp, Homo sapien
ttcattaactgatagcgaaatagccaaacttgt

SEQ ID NO: 583523 - DNA, 33 bp, Homo sapien
gttaaaggcttgagaccggaagtgctttgaatt

SEQ ID NO: 583524 - DNA, 33 bp, Homo sapien
gttaaaggcttgagactggaagtgctttgaatt

SEQ ID NO: 583525 - DNA, 33 bp, Homo sapien
gaaatgagttacttaaaatgccatatgccatag

SEQ ID NO: 583526 - DNA, 33 bp, Homo sapien
gaaatgagttacttaagatgccatatgccatag

SEQ ID NO: 583527 - DNA, 33 bp, Homo sapien
tgtcctgggtgtcacaaatttctgcccaaatgt

SEQ ID NO: 583528 - DNA, 33 bp, Homo sapien
tgtcctgggtgtcacagatttctgcccaaatgt

SEQ ID NO: 583529 - DNA, 33 bp, Homo sapien
agctaaacaaagaatgaaacagaagaaataatg

SEQ ID NO: 583530 - DNA, 33 bp, Homo sapien
agctaaacaaagaatgtaacagaagaaataatg

SEQ ID NO: 583531 - DNA, 33 bp, Homo sapien
gaatgtaagagatgaaaaaaaggccaagaaatt

SEQ ID NO: 583532 - DNA, 33 bp, Homo sapien
gaatgtaagagatgaagaaaaggccaagaaatt

SEQ ID NO: 583533 - DNA, 33 bp, Homo sapien
ggcaaggtagctaacaatacaaacctctcaagg

SEQ ID NO: 583534 - DNA, 33 bp, Homo sapien
ggcaaggtagctaacagtacaaacctctcaagg

SEQ ID NO: 583535 - DNA, 33 bp, Homo sapien
aacaaatcattcttgaaccttagatagtgggga

SEQ ID NO: 583536 - DNA, 33 bp, Homo sapien
aacaaatcattcttgagccttagatagtgggga

SEQ ID NO: 583537 - DNA, 33 bp, Homo sapien
ttctcatgttctgcaacatggaaccaagatcag

SEQ ID NO: 583538 - DNA, 33 bp, Homo sapien
ttctcatgttctgcaatatggaaccaagatcag

SEQ ID NO: 583539 - DNA, 33 bp, Homo sapien
aacaggtctaaagatacgggtaaattatgtgat

SEQ ID NO: 583540 - DNA, 33 bp, Homo sapien
aacaggtctaaagatatgggtaaattatgtgat

SEQ ID NO: 583541 - DNA, 33 bp, Homo sapien
ctttacaaaaaagggcaagagtacctatacagt

SEQ ID NO: 583542 - DNA, 33 bp, Homo sapien
ctttacaaaaaagggcgagagtacctatacagt

SEQ ID NO: 583543 - DNA, 33 bp, Homo sapien
attatcaaatttcaagacaaattcacaattgag

SEQ ID NO: 583544 - DNA, 33 bp, Homo sapien
attatcaaatttcaagtcaaattcacaattgag

SEQ ID NO: 583545 - DNA, 33 bp, Homo sapien
ggccagctgtgagtagaatttagatggtcataa

SEQ ID NO: 583546 - DNA, 33 bp, Homo sapien
ggccagctgtgagtagcatttagatggtcataa

SEQ ID NO: 583547 - DNA, 33 bp, Homo sapien
agaactcactgattaccatgaggatggcactaa

SEQ ID NO: 583548 - DNA, 33 bp, Homo sapien
agaactcactgattactatgaggatggcactaa

SEQ ID NO: 583549 - DNA, 33 bp, Homo sapien
tgagttctttctccatcagttcctgcgaaagct

SEQ ID NO: 583550 - DNA, 33 bp, Homo sapien
tgagttctttctccattagttcctgcgaaagct

SEQ ID NO: 583551 - DNA, 33 bp, Homo sapien
aatgattcgacctttcacaagctgggaataagc

SEQ ID NO: 583552 - DNA, 33 bp, Homo sapien
aatgattcgacctttcgcaagctgggaataagc

SEQ ID NO: 583553 - DNA, 33 bp, Homo sapien
tcttctgtcagtaccaatatgctaaatcatttg

SEQ ID NO: 583554 - DNA, 33 bp, Homo sapien
tcttctgtcagtaccagtatgctaaatcatttg

SEQ ID NO: 583555 - DNA, 33 bp, Homo sapien
aacagacactttcattaaaaaagatagacattt

SEQ ID NO: 583556 - DNA, 33 bp, Homo sapien
aacagacactttcatttaaaaagatagacattt

SEQ ID NO: 583557 - DNA, 33 bp, Homo sapien
aaacaaaactatacaaatgccatacaacccagc

SEQ ID NO: 583558 - DNA, 33 bp, Homo sapien
aaacaaaactatacaattgccatacaacccagc

SEQ ID NO: 583559 - DNA, 33 bp, Homo sapien
ttttttattctgttgacctaatgcttcgtattt

SEQ ID NO: 583560 - DNA, 33 bp, Homo sapien
ttttttattctgttgatctaatgcttcgtattt

SEQ ID NO: 583561 - DNA, 33 bp, Homo sapien
aacagatagatgatacacaaaaggttacattct

SEQ ID NO: 583562 - DNA, 33 bp, Homo sapien
aacagatagatgatacgcaaaaggttacattct

SEQ ID NO: 583563 - DNA, 33 bp, Homo sapien
tacccctaaaagttctaaattctccagaaagta

SEQ ID NO: 583564 - DNA, 33 bp, Homo sapien
tacccctaaaagttctgaattctccagaaagta

SEQ ID NO: 583565 - DNA, 33 bp, Homo sapien
taaagcttaatatcacaggattaaaaatgcaac

SEQ ID NO: 583566 - DNA, 33 bp, Homo sapien
taaagcttaatatcaccggattaaaaatgcaac

SEQ ID NO: 583567 - DNA, 33 bp, Homo sapien
tttgtgttgtagttaacggtattttatcaatgc

SEQ ID NO: 583568 - DNA, 33 bp, Homo sapien
tttgtgttgtagttaatggtattttatcaatgc

SEQ ID NO: 583569 - DNA, 33 bp, Homo sapien
tgcaaatttttcaagacagcagagtgttgtgtg

SEQ ID NO: 583570 - DNA, 33 bp, Homo sapien
tgcaaatttttcaagagagcagagtgttgtgtg

SEQ ID NO: 583571 - DNA, 33 bp, Homo sapien
aacttggaaatgttacaccaaaattgtcacact

SEQ ID NO: 583572 - DNA, 33 bp, Homo sapien
aacttggaaatgttacgccaaaattgtcacact

SEQ ID NO: 583573 - DNA, 33 bp, Homo sapien
tattctgtgaagacacgcagtagaatggttaga

SEQ ID NO: 583574 - DNA, 33 bp, Homo sapien
tattctgtgaagacactcagtagaatggttaga

SEQ ID NO: 583575 - DNA, 33 bp, Homo sapien
agtcttgagaagtctacgcctcttataaggcaa

SEQ ID NO: 583576 - DNA, 33 bp, Homo sapien
agtcttgagaagtctatgcctcttataaggcaa

SEQ ID NO: 583577 - DNA, 33 bp, Homo sapien
ctcaataaacaggatgaaccaactttattaagg

SEQ ID NO: 583578 - DNA, 33 bp, Homo sapien
ctcaataaacaggatggaccaactttattaagg

SEQ ID NO: 583579 - DNA, 33 bp, Homo sapien
atgagggaataaattgcatatgactttgatctc

SEQ ID NO: 583580 - DNA, 33 bp, Homo sapien
atgagggaataaattgtatatgactttgatctc

SEQ ID NO: 583581 - DNA, 33 bp, Homo sapien
ggaaagacaagagaagaaaattgaaaagtaaca

SEQ ID NO: 583582 - DNA, 33 bp, Homo sapien
ggaaagacaagagaaggaaattgaaaagtaaca

SEQ ID NO: 583583 - DNA, 33 bp, Homo sapien
gtttaggattgcactccctaatgaaatggcaac

SEQ ID NO: 583584 - DNA, 33 bp, Homo sapien
gtttaggattgcactctctaatgaaatggcaac

SEQ ID NO: 583585 - DNA, 33 bp, Homo sapien
actgatgggggataaacagcctatgaggttaat

SEQ ID NO: 583586 - DNA, 33 bp, Homo sapien
actgatgggggataaatagcctatgaggttaat

SEQ ID NO: 583587 - DNA, 33 bp, Homo sapien
ttttggtcagtttcaacccctggcatagtagca

SEQ ID NO: 583588 - DNA, 33 bp, Homo sapien
ttttggtcagtttcaatccctggcatagtagca

SEQ ID NO: 583589 - DNA, 33 bp, Homo sapien
accatgctcatcaagtcactgtatcaaatgctg

SEQ ID NO: 583590 - DNA, 33 bp, Homo sapien
accatgctcatcaagttactgtatcaaatgctg

SEQ ID NO: 583591 - DNA, 33 bp, Homo sapien
catataccttctagtacgatgatacaggctatg

SEQ ID NO: 583592 - DNA, 33 bp, Homo sapien
catataccttctagtatgatgatacaggctatg

SEQ ID NO: 583593 - DNA, 33 bp, Homo sapien
ctaggctaggaatgtcaatgcttacaagggcat

SEQ ID NO: 583594 - DNA, 33 bp, Homo sapien
ctaggctaggaatgtcgatgcttacaagggcat

SEQ ID NO: 583595 - DNA, 33 bp, Homo sapien
ataccttcgatgtaaaatatattgtgctttgag

SEQ ID NO: 583596 - DNA, 33 bp, Homo sapien
ataccttcgatgtaaattatattgtgctttgag

SEQ ID NO: 583597 - DNA, 33 bp, Homo sapien
aacctgtaaatctcaaactacttactgcaatgt

SEQ ID NO: 583598 - DNA, 33 bp, Homo sapien
aacctgtaaatctcaatctacttactgcaatgt

SEQ ID NO: 583599 - DNA, 33 bp, Homo sapien
ttaccctgaaaggcaaattaaggccaggaaatc

SEQ ID NO: 583600 - DNA, 33 bp, Homo sapien
ttaccctgaaaggcaagttaaggccaggaaatc

SEQ ID NO: 583601 - DNA, 33 bp, Homo sapien
tttttatggttcacataaggagatgaaagagtt

SEQ ID NO: 583602 - DNA, 33 bp, Homo sapien
tttttatggttcacatgaggagatgaaagagtt

SEQ ID NO: 583603 - DNA, 33 bp, Homo sapien
attagcagggaggtagaaaagatgccagaccaa

SEQ ID NO: 583604 - DNA, 33 bp, Homo sapien
attagcagggaggtaggaaagatgccagaccaa

SEQ ID NO: 583605 - DNA, 33 bp, Homo sapien
ctgtaaactgttcttgcaaatatatctgatatg

SEQ ID NO: 583606 - DNA, 33 bp, Homo sapien
ctgtaaactgttcttgtaaatatatctgatatg

SEQ ID NO: 583607 - DNA, 33 bp, Homo sapien
caatgtaggctgcaaaacattaaagggtcaagc

SEQ ID NO: 583608 - DNA, 33 bp, Homo sapien
caatgtaggctgcaaagcattaaagggtcaagc

SEQ ID NO: 583609 - DNA, 33 bp, Homo sapien
tctctgctgcctaacaatcccatgtctttggct

SEQ ID NO: 583610 - DNA, 33 bp, Homo sapien
tctctgctgcctaacattcccatgtctttggct

SEQ ID NO: 583611 - DNA, 33 bp, Homo sapien
gtaaacaccgtaagaacctgtgatggcctgatt

SEQ ID NO: 583612 - DNA, 33 bp, Homo sapien
gtaaacaccgtaagaatctgtgatggcctgatt

SEQ ID NO: 583613 - DNA, 33 bp, Homo sapien
gaccttattaaattaccgaaaactcgctctata

SEQ ID NO: 583614 - DNA, 33 bp, Homo sapien
gaccttattaaattactgaaaactcgctctata

SEQ ID NO: 583615 - DNA, 33 bp, Homo sapien
ctatggttggtaatcacgtgcatccagctatat

SEQ ID NO: 583616 - DNA, 33 bp, Homo sapien
ctatggttggtaatcatgtgcatccagctatat

SEQ ID NO: 583617 - DNA, 33 bp, Homo sapien
ctgatgaagatttcaaaacctggagaatatttt

SEQ ID NO: 583618 - DNA, 33 bp, Homo sapien
ctgatgaagatttcaacacctggagaatatttt

SEQ ID NO: 583619 - DNA, 33 bp, Homo sapien
gtacaccacagtcctaaaaattgcagactataa

SEQ ID NO: 583620 - DNA, 33 bp, Homo sapien
gtacaccacagtcctataaattgcagactataa

SEQ ID NO: 583621 - DNA, 33 bp, Homo sapien
gcaatatcaaacaacaatatttcagtgacttaa

SEQ ID NO: 583622 - DNA, 33 bp, Homo sapien
gcaatatcaaacaacagtatttcagtgacttaa

SEQ ID NO: 583623 - DNA, 33 bp, Homo sapien
atcctcagcaatataccagatgagctcaaaata

SEQ ID NO: 583624 - DNA, 33 bp, Homo sapien
atcctcagcaatatactagatgagctcaaaata

SEQ ID NO: 583625 - DNA, 33 bp, Homo sapien
tagtatgcacactgtaccttgaaacagaacaaa

SEQ ID NO: 583626 - DNA, 33 bp, Homo sapien
tagtatgcacactgtatcttgaaacagaacaaa

SEQ ID NO: 583627 - DNA, 33 bp, Homo sapien
atggggtctattcaccacctttcctaccatctg

SEQ ID NO: 583628 - DNA, 33 bp, Homo sapien
atggggtctattcaccgcctttcctaccatctg

SEQ ID NO: 583629 - DNA, 33 bp, Homo sapien
tctagtggaaagaagacaggtaacagatggtag

SEQ ID NO: 583630 - DNA, 33 bp, Homo sapien
tctagtggaaagaagataggtaacagatggtag

SEQ ID NO: 583631 - DNA, 33 bp, Homo sapien
ggctgtgtgtaagtgacaaatttgggaatgttt

SEQ ID NO: 583632 - DNA, 33 bp, Homo sapien
ggctgtgtgtaagtgagaaatttgggaatgttt

SEQ ID NO: 583633 - DNA, 33 bp, Homo sapien
gtagccaacttattaccgaaggagagcaaagtt

SEQ ID NO: 583634 - DNA, 33 bp, Homo sapien
gtagccaacttattactgaaggagagcaaagtt

SEQ ID NO: 583635 - DNA, 33 bp, Homo sapien
tagctcttataatatgccaggtacagttctaaa

SEQ ID NO: 583636 - DNA, 33 bp, Homo sapien
tagctcttataatatgtcaggtacagttctaaa

SEQ ID NO: 583637 - DNA, 33 bp, Homo sapien
tcacattttttctccacagatcttatcaagaag

SEQ ID NO: 583638 - DNA, 33 bp, Homo sapien
tcacattttttctccatagatcttatcaagaag

SEQ ID NO: 583639 - DNA, 33 bp, Homo sapien
ttgtcagaccttgatgccagttggccctgggca

SEQ ID NO: 583640 - DNA, 33 bp, Homo sapien
ttgtcagaccttgatgtcagttggccctgggca

SEQ ID NO: 583641 - DNA, 33 bp, Homo sapien
aacttagcctgctatacagacctaagagacttg

SEQ ID NO: 583642 - DNA, 33 bp, Homo sapien
aacttagcctgctatatagacctaagagacttg

SEQ ID NO: 583643 - DNA, 33 bp, Homo sapien
gtgtttagcatagttcaatgaataaagaagccc

SEQ ID NO: 583644 - DNA, 33 bp, Homo sapien
gtgtttagcatagttcgatgaataaagaagccc

SEQ ID NO: 583645 - DNA, 33 bp, Homo sapien
ttgattattactgtgacccatgtactcttgtag

SEQ ID NO: 583646 - DNA, 33 bp, Homo sapien
ttgattattactgtgatccatgtactcttgtag

SEQ ID NO: 583647 - DNA, 33 bp, Homo sapien
acacaaaaaagtatagaagctgatgaagaatca

SEQ ID NO: 583648 - DNA, 33 bp, Homo sapien
acacaaaaaagtataggagctgatgaagaatca

SEQ ID NO: 583649 - DNA, 33 bp, Homo sapien
gatcagattagtgttacggaattttaggcagaa

SEQ ID NO: 583650 - DNA, 33 bp, Homo sapien
gatcagattagtgttatggaattttaggcagaa

SEQ ID NO: 583651 - DNA, 33 bp, Homo sapien
tgggattagacagctcccactggattatactgg

SEQ ID NO: 583652 - DNA, 33 bp, Homo sapien
tgggattagacagctctcactggattatactgg

SEQ ID NO: 583653 - DNA, 33 bp, Homo sapien
catggacattttttaaacaagtcatcatttata

SEQ ID NO: 583654 - DNA, 33 bp, Homo sapien
catggacattttttaagcaagtcatcatttata

SEQ ID NO: 583655 - DNA, 33 bp, Homo sapien
atagaaaggctcatccacatacagttaagtgcg

SEQ ID NO: 583656 - DNA, 33 bp, Homo sapien
atagaaaggctcatccgcatacagttaagtgcg

SEQ ID NO: 583657 - DNA, 33 bp, Homo sapien
tgtttgcacctagaaacagtaagacctcaataa

SEQ ID NO: 583658 - DNA, 33 bp, Homo sapien
tgtttgcacctagaaagagtaagacctcaataa

SEQ ID NO: 583659 - DNA, 33 bp, Homo sapien
ccagggtttatatgaaagcaatataattctggc

SEQ ID NO: 583660 - DNA, 33 bp, Homo sapien
ccagggtttatatgaacgcaatataattctggc

SEQ ID NO: 583661 - DNA, 33 bp, Homo sapien
atagcaaaataccacaaactgaatgacttaaac

SEQ ID NO: 583662 - DNA, 33 bp, Homo sapien
atagcaaaataccacagactgaatgacttaaac

SEQ ID NO: 583663 - DNA, 33 bp, Homo sapien
ctttttaccaacctgcaaattggccagttcctg

SEQ ID NO: 583664 - DNA, 33 bp, Homo sapien
ctttttaccaacctgcgaattggccagttcctg

SEQ ID NO: 583665 - DNA, 33 bp, Homo sapien
atcaattgattttcaacaaggttgccaagaaaa

SEQ ID NO: 583666 - DNA, 33 bp, Homo sapien
atcaattgattttcaagaaggttgccaagaaaa

SEQ ID NO: 583667 - DNA, 33 bp, Homo sapien
attccacatttgatgagattggatgtctatggg

SEQ ID NO: 583668 - DNA, 33 bp, Homo sapien
attccacatttgatgatattggatgtctatggg

SEQ ID NO: 583669 - DNA, 33 bp, Homo sapien
gtaattcaggcaaatacgagaccatgaaaggct

SEQ ID NO: 583670 - DNA, 33 bp, Homo sapien
gtaattcaggcaaatatgagaccatgaaaggct

SEQ ID NO: 583671 - DNA, 33 bp, Homo sapien
taagaggtgtgcattaccatcacaaagcctgga

SEQ ID NO: 583672 - DNA, 33 bp, Homo sapien
taagaggtgtgcattatcatcacaaagcctgga

SEQ ID NO: 583673 - DNA, 33 bp, Homo sapien
acttgtttattcttcaatgaaataccgaaactt

SEQ ID NO: 583674 - DNA, 33 bp, Homo sapien
acttgtttattcttcagtgaaataccgaaactt

SEQ ID NO: 583675 - DNA, 33 bp, Homo sapien
gcctattacctaagtccaacatgtccttgacag

SEQ ID NO: 583676 - DNA, 33 bp, Homo sapien
gcctattacctaagtctaacatgtccttgacag

SEQ ID NO: 583677 - DNA, 33 bp, Homo sapien
gattaggaagtggaacaagctcaacaaggatat

SEQ ID NO: 583678 - DNA, 33 bp, Homo sapien
gattaggaagtggaacgagctcaacaaggatat

SEQ ID NO: 583679 - DNA, 33 bp, Homo sapien
tcttatcaatagcagactcaaggctaattttgg

SEQ ID NO: 583680 - DNA, 33 bp, Homo sapien
tcttatcaatagcagattcaaggctaattttgg

SEQ ID NO: 583681 - DNA, 33 bp, Homo sapien
cccagaatgatctaccacaaattatggtaataa

SEQ ID NO: 583682 - DNA, 33 bp, Homo sapien
cccagaatgatctaccgcaaattatggtaataa

SEQ ID NO: 583683 - DNA, 33 bp, Homo sapien
aacatagtattttgtaagtagaaggaaatatgc

SEQ ID NO: 583684 - DNA, 33 bp, Homo sapien
aacatagtattttgtatgtagaaggaaatatgc

SEQ ID NO: 583685 - DNA, 33 bp, Homo sapien
tgccatcatagaaaataatgacgactccagtat

SEQ ID NO: 583686 - DNA, 33 bp, Homo sapien
tgccatcatagaaaatcatgacgactccagtat

SEQ ID NO: 583687 - DNA, 33 bp, Homo sapien
gtatgataaggcctggaaaaatgtaaaaacagt

SEQ ID NO: 583688 - DNA, 33 bp, Homo sapien
gtatgataaggcctggcaaaatgtaaaaacagt

SEQ ID NO: 583689 - DNA, 33 bp, Homo sapien
aaaggtaccttcttctaaacgatagattgatat

SEQ ID NO: 583690 - DNA, 33 bp, Homo sapien
aaaggtaccttcttctgaacgatagattgatat

SEQ ID NO: 583691 - DNA, 33 bp, Homo sapien
ctgtcatgcattcataaggaagtagatttcatt

SEQ ID NO: 583692 - DNA, 33 bp, Homo sapien
ctgtcatgcattcatagggaagtagatttcatt

SEQ ID NO: 583693 - DNA, 33 bp, Homo sapien
atttctctcctgtgaacgtagcacaatggtgac

SEQ ID NO: 583694 - DNA, 33 bp, Homo sapien
atttctctcctgtgaatgtagcacaatggtgac

SEQ ID NO: 583695 - DNA, 33 bp, Homo sapien
aggcataagctgcatgacatattatttgtattc

SEQ ID NO: 583696 - DNA, 33 bp, Homo sapien
aggcataagctgcatggcatattatttgtattc

SEQ ID NO: 583697 - DNA, 33 bp, Homo sapien
ggctttgctcctataccggccatggtagcttaa

SEQ ID NO: 583698 - DNA, 33 bp, Homo sapien
ggctttgctcctatactggccatggtagcttaa

SEQ ID NO: 583699 - DNA, 33 bp, Homo sapien
caacaaagtactaactaaccaaatccaataaca

SEQ ID NO: 583700 - DNA, 33 bp, Homo sapien
caacaaagtactaacttaccaaatccaataaca

SEQ ID NO: 583701 - DNA, 33 bp, Homo sapien
aggaaggataactgaactggctcaaagacatcc

SEQ ID NO: 583702 - DNA, 33 bp, Homo sapien
aggaaggataactgaattggctcaaagacatcc

SEQ ID NO: 583703 - DNA, 33 bp, Homo sapien
cagatacgttacaaagccgtcaagaaattttta

SEQ ID NO: 583704 - DNA, 33 bp, Homo sapien
cagatacgttacaaaggcgtcaagaaattttta

SEQ ID NO: 583705 - DNA, 33 bp, Homo sapien
ttatattctttctacccatattcaacaattact

SEQ ID NO: 583706 - DNA, 33 bp, Homo sapien
ttatattctttctacctatattcaacaattact

SEQ ID NO: 583707 - DNA, 33 bp, Homo sapien
atttttggctaattgaagagcgtctgggacgcc

SEQ ID NO: 583708 - DNA, 33 bp, Homo sapien
atttttggctaattgacgagcgtctgggacgcc

SEQ ID NO: 583709 - DNA, 33 bp, Homo sapien
tccctctgtaccaagaacactggcgtcccagac

SEQ ID NO: 583710 - DNA, 33 bp, Homo sapien
tccctctgtaccaagagcactggcgtcccagac

SEQ ID NO: 583711 - DNA, 33 bp, Homo sapien
tgaccctccaggaatgcatatttgtctatcttc

SEQ ID NO: 583712 - DNA, 33 bp, Homo sapien
tgaccctccaggaatgtatatttgtctatcttc

SEQ ID NO: 583713 - DNA, 33 bp, Homo sapien
ctatgatttttattacaagtattttcagacaca

SEQ ID NO: 583714 - DNA, 33 bp, Homo sapien
ctatgatttttattacgagtattttcagacaca

SEQ ID NO: 583715 - DNA, 33 bp, Homo sapien
tgactgagattgcaagaccctctagtgaaatga

SEQ ID NO: 583716 - DNA, 33 bp, Homo sapien
tgactgagattgcaaggccctctagtgaaatga

SEQ ID NO: 583717 - DNA, 33 bp, Homo sapien
atcccatcatattttaacaccattggtaggtgc

SEQ ID NO: 583718 - DNA, 33 bp, Homo sapien
atcccatcatattttagcaccattggtaggtgc

SEQ ID NO: 583719 - DNA, 33 bp, Homo sapien
agaaatatgagcctcacaagatacgacagattt

SEQ ID NO: 583720 - DNA, 33 bp, Homo sapien
agaaatatgagcctcagaagatacgacagattt

SEQ ID NO: 583721 - DNA, 33 bp, Homo sapien
tcctctatgtcaactacctcttctgttctcaga

SEQ ID NO: 583722 - DNA, 33 bp, Homo sapien
tcctctatgtcaactatctcttctgttctcaga

SEQ ID NO: 583723 - DNA, 33 bp, Homo sapien
ccacagtggacagaagacctgaaagagggttgc

SEQ ID NO: 583724 - DNA, 33 bp, Homo sapien
ccacagtggacagaaggcctgaaagagggttgc

SEQ ID NO: 583725 - DNA, 33 bp, Homo sapien
gagaaaagtttcttgaaagcaggaaattatatg

SEQ ID NO: 583726 - DNA, 33 bp, Homo sapien
gagaaaagtttcttgagagcaggaaattatatg

SEQ ID NO: 583727 - DNA, 33 bp, Homo sapien
cactagaccagcactacaagaattgcctaaagg

SEQ ID NO: 583728 - DNA, 33 bp, Homo sapien
cactagaccagcactataagaattgcctaaagg

SEQ ID NO: 583729 - DNA, 33 bp, Homo sapien
tttaaatgatattttgcattggttcattctaac

SEQ ID NO: 583730 - DNA, 33 bp, Homo sapien
tttaaatgatattttgtattggttcattctaac

SEQ ID NO: 583731 - DNA, 33 bp, Homo sapien
caaacagtttttactagcttggacttttatgag

SEQ ID NO: 583732 - DNA, 33 bp, Homo sapien
caaacagtttttactatcttggacttttatgag

SEQ ID NO: 583733 - DNA, 33 bp, Homo sapien
ccgaggaaatacagccaagaatatgatcttcag

SEQ ID NO: 583734 - DNA, 33 bp, Homo sapien
ccgaggaaatacagccgagaatatgatcttcag

SEQ ID NO: 583735 - DNA, 33 bp, Homo sapien
ttattctgaacttagcaaggtcaacagaataca

SEQ ID NO: 583736 - DNA, 33 bp, Homo sapien
ttattctgaacttagcgaggtcaacagaataca

SEQ ID NO: 583737 - DNA, 33 bp, Homo sapien
ctggccgtactgtatacgttgcctcaacaatgt

SEQ ID NO: 583738 - DNA, 33 bp, Homo sapien
ctggccgtactgtatatgttgcctcaacaatgt

SEQ ID NO: 583739 - DNA, 33 bp, Homo sapien
agacaaaatcgcaggaaaagaaatccctcaaca

SEQ ID NO: 583740 - DNA, 33 bp, Homo sapien
agacaaaatcgcaggacaagaaatccctcaaca

SEQ ID NO: 583741 - DNA, 33 bp, Homo sapien
acaagtgtcatctcaacatatgttctagtgatt

SEQ ID NO: 583742 - DNA, 33 bp, Homo sapien
acaagtgtcatctcaatatatgttctagtgatt

SEQ ID NO: 583743 - DNA, 33 bp, Homo sapien
tctctctccgtctacccctgacattcaaggaaa

SEQ ID NO: 583744 - DNA, 33 bp, Homo sapien
tctctctccgtctacctctgacattcaaggaaa

SEQ ID NO: 583745 - DNA, 33 bp, Homo sapien
ggctgaatcccacgaaatgtgaatgtaaatgtc

SEQ ID NO: 583746 - DNA, 33 bp, Homo sapien
ggctgaatcccacgaattgtgaatgtaaatgtc

SEQ ID NO: 583747 - DNA, 33 bp, Homo sapien
aaatctggccatctaccaaccaagaagtaggcc

SEQ ID NO: 583748 - DNA, 33 bp, Homo sapien
aaatctggccatctacgaaccaagaagtaggcc

SEQ ID NO: 583749 - DNA, 33 bp, Homo sapien
agaaactcctaacagtaacccatgtgcttcagt

SEQ ID NO: 583750 - DNA, 33 bp, Homo sapien
agaaactcctaacagtgacccatgtgcttcagt

SEQ ID NO: 583751 - DNA, 33 bp, Homo sapien
taagcctccaaaaaaaacaaatgtcaggcgttt

SEQ ID NO: 583752 - DNA, 33 bp, Homo sapien
taagcctccaaaaaaaccaaatgtcaggcgttt

SEQ ID NO: 583753 - DNA, 33 bp, Homo sapien
ggaagcttttattcacagagaaaggcaaggggg

SEQ ID NO: 583754 - DNA, 33 bp, Homo sapien
ggaagcttttattcacggagaaaggcaaggggg

SEQ ID NO: 583755 - DNA, 33 bp, Homo sapien
gtttcagtacaactaaatagcaaggattatgtt

SEQ ID NO: 583756 - DNA, 33 bp, Homo sapien
gtttcagtacaactaattagcaaggattatgtt

SEQ ID NO: 583757 - DNA, 33 bp, Homo sapien
ccttagtttattcatacgttccaggtgctttta

SEQ ID NO: 583758 - DNA, 33 bp, Homo sapien
ccttagtttattcatatgttccaggtgctttta

SEQ ID NO: 583759 - DNA, 33 bp, Homo sapien
ctgctctcatagccagaagcttaatatttccaa

SEQ ID NO: 583760 - DNA, 33 bp, Homo sapien
ctgctctcatagccaggagcttaatatttccaa

SEQ ID NO: 583761 - DNA, 33 bp, Homo sapien
tacaagtcatattgtcacttgagtagattggtg

SEQ ID NO: 583762 - DNA, 33 bp, Homo sapien
tacaagtcatattgtcgcttgagtagattggtg

SEQ ID NO: 583763 - DNA, 33 bp, Homo sapien
cagtgtaagacaataaagaaagactcagctggc

SEQ ID NO: 583764 - DNA, 33 bp, Homo sapien
cagtgtaagacaataaggaaagactcagctggc

SEQ ID NO: 583765 - DNA, 33 bp, Homo sapien
tttgtagatgacagccaatgacagtaaagtatg

SEQ ID NO: 583766 - DNA, 33 bp, Homo sapien
tttgtagatgacagccgatgacagtaaagtatg

SEQ ID NO: 583767 - DNA, 33 bp, Homo sapien
taacctaatccagagaatagccagaaatggtag

SEQ ID NO: 583768 - DNA, 33 bp, Homo sapien
taacctaatccagagagtagccagaaatggtag

SEQ ID NO: 583769 - DNA, 33 bp, Homo sapien
tgtgcaggtgttccaacaagttgactgccactt

SEQ ID NO: 583770 - DNA, 33 bp, Homo sapien
tgtgcaggtgttccaataagttgactgccactt

SEQ ID NO: 583771 - DNA, 33 bp, Homo sapien
atgtttctgactgacaactttaaacttaatttg

SEQ ID NO: 583772 - DNA, 33 bp, Homo sapien
atgtttctgactgacatctttaaacttaatttg

SEQ ID NO: 583773 - DNA, 33 bp, Homo sapien
catgtacattccacaacttcatttgaaaatatt

SEQ ID NO: 583774 - DNA, 33 bp, Homo sapien
catgtacattccacaatttcatttgaaaatatt

SEQ ID NO: 583775 - DNA, 33 bp, Homo sapien
tgtaaactttataaataattgatcagatgtgag

SEQ ID NO: 583776 - DNA, 33 bp, Homo sapien
tgtaaactttataaattattgatcagatgtgag

SEQ ID NO: 583777 - DNA, 33 bp, Homo sapien
aaatcaaacagtcattaaaaacatatggtcaga

SEQ ID NO: 583778 - DNA, 33 bp, Homo sapien
aaatcaaacagtcattgaaaacatatggtcaga

SEQ ID NO: 583779 - DNA, 33 bp, Homo sapien
gaattctccttcagacagatggctatttcattt

SEQ ID NO: 583780 - DNA, 33 bp, Homo sapien
gaattctccttcagactgatggctatttcattt

SEQ ID NO: 583781 - DNA, 33 bp, Homo sapien
ctatagctcatcagaaactcccatttgccttca

SEQ ID NO: 583782 - DNA, 33 bp, Homo sapien
ctatagctcatcagaagctcccatttgccttca

SEQ ID NO: 583783 - DNA, 33 bp, Homo sapien
tcaagatgaactcatagattttttgagagcatg

SEQ ID NO: 583784 - DNA, 33 bp, Homo sapien
tcaagatgaactcatatattttttgagagcatg

SEQ ID NO: 583785 - DNA, 33 bp, Homo sapien
ctgctgtgtccttacaaggtatttttgtgtgtg

SEQ ID NO: 583786 - DNA, 33 bp, Homo sapien
ctgctgtgtccttacatggtatttttgtgtgtg

SEQ ID NO: 583787 - DNA, 33 bp, Homo sapien
tatttgtacttcatggaaaaacattaacaaaga

SEQ ID NO: 583788 - DNA, 33 bp, Homo sapien
tatttgtacttcatggcaaaacattaacaaaga

SEQ ID NO: 583789 - DNA, 33 bp, Homo sapien
gtagattctcagttcaataagtcatcaatgcat

SEQ ID NO: 583790 - DNA, 33 bp, Homo sapien
gtagattctcagttcagtaagtcatcaatgcat

SEQ ID NO: 583791 - DNA, 33 bp, Homo sapien
ccagttataaacacaaaaagcatgatagagctg

SEQ ID NO: 583792 - DNA, 33 bp, Homo sapien
ccagttataaacacaagaagcatgatagagctg

SEQ ID NO: 583793 - DNA, 33 bp, Homo sapien
agagcccctgttgggaatacggcaaagaggtcg

SEQ ID NO: 583794 - DNA, 33 bp, Homo sapien
agagcccctgttgggagtacggcaaagaggtcg

SEQ ID NO: 583795 - DNA, 33 bp, Homo sapien
taacaaattctagttgaacaagaacattctcga

SEQ ID NO: 583796 - DNA, 33 bp, Homo sapien
taacaaattctagttggacaagaacattctcga

SEQ ID NO: 583797 - DNA, 33 bp, Homo sapien
atcctgagaagataaagttgttctttccattta

SEQ ID NO: 583798 - DNA, 33 bp, Homo sapien
atcctgagaagataaatttgttctttccattta

SEQ ID NO: 583799 - DNA, 33 bp, Homo sapien
aataacaacattatcaatcttctctactttcaa

SEQ ID NO: 583800 - DNA, 33 bp, Homo sapien
aataacaacattatcagtcttctctactttcaa

SEQ ID NO: 583801 - DNA, 33 bp, Homo sapien
aataatgggaataatgaagatcacctagcacaa

SEQ ID NO: 583802 - DNA, 33 bp, Homo sapien
aataatgggaataatggagatcacctagcacaa

SEQ ID NO: 583803 - DNA, 33 bp, Homo sapien
gttaggaaccttgaaaaatgtatttcctttcgg

SEQ ID NO: 583804 - DNA, 33 bp, Homo sapien
gttaggaaccttgaaagatgtatttcctttcgg

SEQ ID NO: 583805 - DNA, 33 bp, Homo sapien
tagtcagcatatactacgaaaagccagcagagt

SEQ ID NO: 583806 - DNA, 33 bp, Homo sapien
tagtcagcatatactaggaaaagccagcagagt

SEQ ID NO: 583807 - DNA, 33 bp, Homo sapien
gtgctcaaaatgcttacattaccagttaggcaa

SEQ ID NO: 583808 - DNA, 33 bp, Homo sapien
gtgctcaaaatgcttatattaccagttaggcaa

SEQ ID NO: 583809 - DNA, 33 bp, Homo sapien
ctggaatcaatttatgaaccccttctttcaaag

SEQ ID NO: 583810 - DNA, 33 bp, Homo sapien
ctggaatcaatttatgtaccccttctttcaaag

SEQ ID NO: 583811 - DNA, 33 bp, Homo sapien
gaagcccttacagttgcacaaagcaagaaagaa

SEQ ID NO: 583812 - DNA, 33 bp, Homo sapien
gaagcccttacagttggacaaagcaagaaagaa

SEQ ID NO: 583813 - DNA, 33 bp, Homo sapien
gttatggagactgaaagtctgaaataaaggtag

SEQ ID NO: 583814 - DNA, 33 bp, Homo sapien
gttatggagactgaaattctgaaataaaggtag

SEQ ID NO: 583815 - DNA, 33 bp, Homo sapien
ctttacctgatctgcaatagagctttttaaaca

SEQ ID NO: 583816 - DNA, 33 bp, Homo sapien
ctttacctgatctgcactagagctttttaaaca

SEQ ID NO: 583817 - DNA, 33 bp, Homo sapien
tctatatgaatgatccacactattttgagttat

SEQ ID NO: 583818 - DNA, 33 bp, Homo sapien
tctatatgaatgatccgcactattttgagttat

SEQ ID NO: 583819 - DNA, 33 bp, Homo sapien
agtttgcctgaactacccactaagacgttaaat

SEQ ID NO: 583820 - DNA, 33 bp, Homo sapien
agtttgcctgaactacgcactaagacgttaaat

SEQ ID NO: 583821 - DNA, 33 bp, Homo sapien
cattttaaaacagaaactatcactcctgatgaa

SEQ ID NO: 583822 - DNA, 33 bp, Homo sapien
cattttaaaacagaaattatcactcctgatgaa

SEQ ID NO: 583823 - DNA, 33 bp, Homo sapien
tcctgatgaagatcacacatcttaactgtatcc

SEQ ID NO: 583824 - DNA, 33 bp, Homo sapien
tcctgatgaagatcacgcatcttaactgtatcc

SEQ ID NO: 583825 - DNA, 33 bp, Homo sapien
aaaagagttgtccacacatagtatccccttttg

SEQ ID NO: 583826 - DNA, 33 bp, Homo sapien
aaaagagttgtccacatatagtatccccttttg

SEQ ID NO: 583827 - DNA, 33 bp, Homo sapien
cacacatatataacaactcatgagaagataatt

SEQ ID NO: 583828 - DNA, 33 bp, Homo sapien
cacacatatataacaagtcatgagaagataatt

SEQ ID NO: 583829 - DNA, 33 bp, Homo sapien
aataattctggtcatacacctctagtactgcta

SEQ ID NO: 583830 - DNA, 33 bp, Homo sapien
aataattctggtcatatacctctagtactgcta

SEQ ID NO: 583831 - DNA, 33 bp, Homo sapien
gttccagtggcacaacactttgatagtttactt

SEQ ID NO: 583832 - DNA, 33 bp, Homo sapien
gttccagtggcacaacgctttgatagtttactt

SEQ ID NO: 583833 - DNA, 33 bp, Homo sapien
tgaagatcggttctaactcaccttcctctatta

SEQ ID NO: 583834 - DNA, 33 bp, Homo sapien
tgaagatcggttctaattcaccttcctctatta

SEQ ID NO: 583835 - DNA, 33 bp, Homo sapien
caaaaataattgctccaaaggaaattacatcat

SEQ ID NO: 583836 - DNA, 33 bp, Homo sapien
caaaaataattgctccgaaggaaattacatcat

SEQ ID NO: 583837 - DNA, 33 bp, Homo sapien
tctccccacagcaaaaataatctggcagccaac

SEQ ID NO: 583838 - DNA, 33 bp, Homo sapien
tctccccacagcaaaagtaatctggcagccaac

SEQ ID NO: 583839 - DNA, 33 bp, Homo sapien
ctctactttggattcacgcctttttcctacctg

SEQ ID NO: 583840 - DNA, 33 bp, Homo sapien
ctctactttggattcatgcctttttcctacctg

SEQ ID NO: 583841 - DNA, 33 bp, Homo sapien
taagcccacaatgagaaggactctttccaggtc

SEQ ID NO: 583842 - DNA, 33 bp, Homo sapien
taagcccacaatgagatggactctttccaggtc

SEQ ID NO: 583843 - DNA, 33 bp, Homo sapien
actgaaaattttaataaacagttgcaatagcag

SEQ ID NO: 583844 - DNA, 33 bp, Homo sapien
actgaaaattttaatagacagttgcaatagcag

SEQ ID NO: 583845 - DNA, 33 bp, Homo sapien
tacattaaaacagctcgcacccttgcttggaca

SEQ ID NO: 583846 - DNA, 33 bp, Homo sapien
tacattaaaacagctctcacccttgcttggaca

SEQ ID NO: 583847 - DNA, 33 bp, Homo sapien
tcttctgtgtaatggaaaaggcaagatgatcta

SEQ ID NO: 583848 - DNA, 33 bp, Homo sapien
tcttctgtgtaatggataaggcaagatgatcta

SEQ ID NO: 583849 - DNA, 33 bp, Homo sapien
tttgagtaattgctgtaaaaaaggtgaaaagta

SEQ ID NO: 583850 - DNA, 33 bp, Homo sapien
tttgagtaattgctgtgaaaaaggtgaaaagta

SEQ ID NO: 583851 - DNA, 33 bp, Homo sapien
ctcctattgtcaccaaatgtaatagttcctaaa

SEQ ID NO: 583852 - DNA, 33 bp, Homo sapien
ctcctattgtcaccaagtgtaatagttcctaaa

SEQ ID NO: 583853 - DNA, 33 bp, Homo sapien
aaaatagtcaatgttacgcaaattattttaact

SEQ ID NO: 583854 - DNA, 33 bp, Homo sapien
aaaatagtcaatgttatgcaaattattttaact

SEQ ID NO: 583855 - DNA, 33 bp, Homo sapien
ggggatttcaactacccacttacagtgttaaac

SEQ ID NO: 583856 - DNA, 33 bp, Homo sapien
ggggatttcaactacctacttacagtgttaaac

SEQ ID NO: 583857 - DNA, 33 bp, Homo sapien
aagccaaagaatcctacgcaacatactccacag

SEQ ID NO: 583858 - DNA, 33 bp, Homo sapien
aagccaaagaatcctatgcaacatactccacag

SEQ ID NO: 583859 - DNA, 33 bp, Homo sapien
tccccactgcggtctacgggagctatgagaaga

SEQ ID NO: 583860 - DNA, 33 bp, Homo sapien
tccccactgcggtctaggggagctatgagaaga

SEQ ID NO: 583861 - DNA, 33 bp, Homo sapien
agttattacctggagacaaattcttgatgaaat

SEQ ID NO: 583862 - DNA, 33 bp, Homo sapien
agttattacctggagataaattcttgatgaaat

SEQ ID NO: 583863 - DNA, 33 bp, Homo sapien
atattacaacgattcacacttctaccaacagca

SEQ ID NO: 583864 - DNA, 33 bp, Homo sapien
atattacaacgattcatacttctaccaacagca

SEQ ID NO: 583865 - DNA, 33 bp, Homo sapien
tgtaaatagcagtcccaatgttatttcagcaca

SEQ ID NO: 583866 - DNA, 33 bp, Homo sapien
tgtaaatagcagtcccgatgttatttcagcaca

SEQ ID NO: 583867 - DNA, 33 bp, Homo sapien
tactcagatctgccaccgaatgaagtgtaagct

SEQ ID NO: 583868 - DNA, 33 bp, Homo sapien
tactcagatctgccactgaatgaagtgtaagct

SEQ ID NO: 583869 - DNA, 33 bp, Homo sapien
gaatgtttactgtacaaagatctgcaagagaac

SEQ ID NO: 583870 - DNA, 33 bp, Homo sapien
gaatgtttactgtacacagatctgcaagagaac

SEQ ID NO: 583871 - DNA, 33 bp, Homo sapien
ggggatagaccaaaaaagttgtgtaggtcatct

SEQ ID NO: 583872 - DNA, 33 bp, Homo sapien
ggggatagaccaaaaaggttgtgtaggtcatct

SEQ ID NO: 583873 - DNA, 33 bp, Homo sapien
tgggaattcatgtctgccaaaaggactctgctt

SEQ ID NO: 583874 - DNA, 33 bp, Homo sapien
tgggaattcatgtctggcaaaaggactctgctt

SEQ ID NO: 583875 - DNA, 33 bp, Homo sapien
tattaaaactctgacactagttaatatacaaat

SEQ ID NO: 583876 - DNA, 33 bp, Homo sapien
tattaaaactctgacagtagttaatatacaaat

SEQ ID NO: 583877 - DNA, 33 bp, Homo sapien
tctacggagaactacccaggtggatctgcaagt

SEQ ID NO: 583878 - DNA, 33 bp, Homo sapien
tctacggagaactacctaggtggatctgcaagt

SEQ ID NO: 583879 - DNA, 33 bp, Homo sapien
atgcttgtggagaagaccatgggaagctcttcc

SEQ ID NO: 583880 - DNA, 33 bp, Homo sapien
atgcttgtggagaagatcatgggaagctcttcc

SEQ ID NO: 583881 - DNA, 33 bp, Homo sapien
ctaatgctccaatttcaaaaatagttactagtg

SEQ ID NO: 583882 - DNA, 33 bp, Homo sapien
ctaatgctccaatttcgaaaatagttactagtg

SEQ ID NO: 583883 - DNA, 33 bp, Homo sapien
aagaaagctcggggcgcacatggaaatcaagct

SEQ ID NO: 583884 - DNA, 33 bp, Homo sapien
aagaaagctcggggcgtacatggaaatcaagct

SEQ ID NO: 583885 - DNA, 33 bp, Homo sapien
gggtctaaaggacttgcaagaaagtatgacaaa

SEQ ID NO: 583886 - DNA, 33 bp, Homo sapien
gggtctaaaggacttgtaagaaagtatgacaaa

SEQ ID NO: 583887 - DNA, 33 bp, Homo sapien
ttcaattataaaaagacatcagaggataaagct

SEQ ID NO: 583888 - DNA, 33 bp, Homo sapien
ttcaattataaaaagagatcagaggataaagct

SEQ ID NO: 583889 - DNA, 33 bp, Homo sapien
caggcctgaaaaatgaacgtatagctataaatc

SEQ ID NO: 583890 - DNA, 33 bp, Homo sapien
caggcctgaaaaatgagcgtatagctataaatc

SEQ ID NO: 583891 - DNA, 33 bp, Homo sapien
gaatccctttttagtccagtaggatttggtctg

SEQ ID NO: 583892 - DNA, 33 bp, Homo sapien
gaatccctttttagtctagtaggatttggtctg

SEQ ID NO: 583893 - DNA, 33 bp, Homo sapien
ccatgttatacattccaagaaatgaagaggctg

SEQ ID NO: 583894 - DNA, 33 bp, Homo sapien
ccatgttatacattccgagaaatgaagaggctg

SEQ ID NO: 583895 - DNA, 33 bp, Homo sapien
ttaagacactgttaaggatcaacgaagaaataa

SEQ ID NO: 583896 - DNA, 33 bp, Homo sapien
ttaagacactgttaagtatcaacgaagaaataa

SEQ ID NO: 583897 - DNA, 33 bp, Homo sapien
cagattggtgttgtaaatctggcaatggaacta

SEQ ID NO: 583898 - DNA, 33 bp, Homo sapien
cagattggtgttgtaagtctggcaatggaacta

SEQ ID NO: 583899 - DNA, 33 bp, Homo sapien
gaggtgctcaaaggtaaaatcagtagcctgatt

SEQ ID NO: 583900 - DNA, 33 bp, Homo sapien
gaggtgctcaaaggtagaatcagtagcctgatt

SEQ ID NO: 583901 - DNA, 33 bp, Homo sapien
caaggtagcttccttcagaaagaatggagacca

SEQ ID NO: 583902 - DNA, 33 bp, Homo sapien
caaggtagcttccttccgaaagaatggagacca

SEQ ID NO: 583903 - DNA, 33 bp, Homo sapien
tcagtcattgtggaacagagctgagtcctctct

SEQ ID NO: 583904 - DNA, 33 bp, Homo sapien
tcagtcattgtggaaccgagctgagtcctctct

SEQ ID NO: 583905 - DNA, 33 bp, Homo sapien
ttcaagtctctatggaacatcgcgcttcgttcc

SEQ ID NO: 583906 - DNA, 33 bp, Homo sapien
ttcaagtctctatggagcatcgcgcttcgttcc

SEQ ID NO: 583907 - DNA, 33 bp, Homo sapien
aactcctatattccagaaaaacattgctttatt

SEQ ID NO: 583908 - DNA, 33 bp, Homo sapien
aactcctatattccaggaaaacattgctttatt

SEQ ID NO: 583909 - DNA, 33 bp, Homo sapien
gaagttactgaagtgaatcaagatgctaaattc

SEQ ID NO: 583910 - DNA, 33 bp, Homo sapien
gaagttactgaagtgactcaagatgctaaattc

SEQ ID NO: 583911 - DNA, 33 bp, Homo sapien
taccaatattggagcaatcacctatggactgcc

SEQ ID NO: 583912 - DNA, 33 bp, Homo sapien
taccaatattggagcattcacctatggactgcc

SEQ ID NO: 583913 - DNA, 33 bp, Homo sapien
tttcagaggttatatcaaaacacctggatgtcc

SEQ ID NO: 583914 - DNA, 33 bp, Homo sapien
tttcagaggttatatcgaaacacctggatgtcc

SEQ ID NO: 583915 - DNA, 33 bp, Homo sapien
tacataatcatttctcacaaaaatatgaaaata

SEQ ID NO: 583916 - DNA, 33 bp, Homo sapien
tacataatcatttctcgcaaaaatatgaaaata

SEQ ID NO: 583917 - DNA, 33 bp, Homo sapien
gatcatctgaaatctaaacaaaggcccccaagc

SEQ ID NO: 583918 - DNA, 33 bp, Homo sapien
gatcatctgaaatctacacaaaggcccccaagc

SEQ ID NO: 583919 - DNA, 33 bp, Homo sapien
ctgtagtggtgtataacagataaaagactatgg

SEQ ID NO: 583920 - DNA, 33 bp, Homo sapien
ctgtagtggtgtataatagataaaagactatgg

SEQ ID NO: 583921 - DNA, 33 bp, Homo sapien
gtcatttgggctactacgaaaaacatttattct

SEQ ID NO: 583922 - DNA, 33 bp, Homo sapien
gtcatttgggctactatgaaaaacatttattct

SEQ ID NO: 583923 - DNA, 33 bp, Homo sapien
ggtaagcagtttcatacgaagactcagagacaa

SEQ ID NO: 583924 - DNA, 33 bp, Homo sapien
ggtaagcagtttcataggaagactcagagacaa

SEQ ID NO: 583925 - DNA, 33 bp, Homo sapien
tagcaggttccccaaacggattgagactcagca

SEQ ID NO: 583926 - DNA, 33 bp, Homo sapien
tagcaggttccccaaatggattgagactcagca

SEQ ID NO: 583927 - DNA, 33 bp, Homo sapien
caggaaggagctacacactccagatctcctgag

SEQ ID NO: 583928 - DNA, 33 bp, Homo sapien
caggaaggagctacactctccagatctcctgag

SEQ ID NO: 583929 - DNA, 33 bp, Homo sapien
aacattggcaaggatacgtaagattcttcctct

SEQ ID NO: 583930 - DNA, 33 bp, Homo sapien
aacattggcaaggatatgtaagattcttcctct

SEQ ID NO: 583931 - DNA, 33 bp, Homo sapien
tttacccaacccagaaaacatctcagagtataa

SEQ ID NO: 583932 - DNA, 33 bp, Homo sapien
tttacccaacccagaagacatctcagagtataa

SEQ ID NO: 583933 - DNA, 33 bp, Homo sapien
aatgctgactcaataaaatacaaccaaaacaac

SEQ ID NO: 583934 - DNA, 33 bp, Homo sapien
aatgctgactcaataagatacaaccaaaacaac

SEQ ID NO: 583935 - DNA, 33 bp, Homo sapien
ttcttgcccaagaagaatacaattgcaaatgac

SEQ ID NO: 583936 - DNA, 33 bp, Homo sapien
ttcttgcccaagaagattacaattgcaaatgac

SEQ ID NO: 583937 - DNA, 33 bp, Homo sapien
atcagtgttctttccaatgaataattctcctcc

SEQ ID NO: 583938 - DNA, 33 bp, Homo sapien
atcagtgttctttccattgaataattctcctcc

SEQ ID NO: 583939 - DNA, 33 bp, Homo sapien
catcctcttcatcatcaaaaggacaataaggat

SEQ ID NO: 583940 - DNA, 33 bp, Homo sapien
catcctcttcatcatccaaaggacaataaggat

SEQ ID NO: 583941 - DNA, 33 bp, Homo sapien
ctgtaaaaaatgcctccacttatgaaagaaaag

SEQ ID NO: 583942 - DNA, 33 bp, Homo sapien
ctgtaaaaaatgcctctacttatgaaagaaaag

SEQ ID NO: 583943 - DNA, 33 bp, Homo sapien
ttgtagcctgaccttagggcaaaggaagaataa

SEQ ID NO: 583944 - DNA, 33 bp, Homo sapien
ttgtagcctgaccttatggcaaaggaagaataa

SEQ ID NO: 583945 - DNA, 33 bp, Homo sapien
aaataaatgcatacatcaaaattggccagctta

SEQ ID NO: 583946 - DNA, 33 bp, Homo sapien
aaataaatgcatacatgaaaattggccagctta

SEQ ID NO: 583947 - DNA, 33 bp, Homo sapien
tcacatcttaaggtacaacaagcagcaagttta

SEQ ID NO: 583948 - DNA, 33 bp, Homo sapien
tcacatcttaaggtacgacaagcagcaagttta

SEQ ID NO: 583949 - DNA, 33 bp, Homo sapien
ttaaaaatttgatgaaactaggaagctgtttcc

SEQ ID NO: 583950 - DNA, 33 bp, Homo sapien
ttaaaaatttgatgaacctaggaagctgtttcc

SEQ ID NO: 583951 - DNA, 33 bp, Homo sapien
gaacagtatgcctaaactaggtgactcatattg

SEQ ID NO: 583952 - DNA, 33 bp, Homo sapien
gaacagtatgcctaaagtaggtgactcatattg

SEQ ID NO: 583953 - DNA, 33 bp, Homo sapien
aatttgaagacagtatcaattaaaacatgcatc

SEQ ID NO: 583954 - DNA, 33 bp, Homo sapien
aatttgaagacagtatgaattaaaacatgcatc

SEQ ID NO: 583955 - DNA, 33 bp, Homo sapien
tatgcaccttgtttcacgatggtccctggtaaa

SEQ ID NO: 583956 - DNA, 33 bp, Homo sapien
tatgcaccttgtttcatgatggtccctggtaaa

SEQ ID NO: 583957 - DNA, 33 bp, Homo sapien
gaaggaaactcatccaaatatgttttgaccctt

SEQ ID NO: 583958 - DNA, 33 bp, Homo sapien
gaaggaaactcatccagatatgttttgaccctt

SEQ ID NO: 583959 - DNA, 33 bp, Homo sapien
cttgaagttacagaaaagatagaggtgcagcaa

SEQ ID NO: 583960 - DNA, 33 bp, Homo sapien
cttgaagttacagaaaggatagaggtgcagcaa

SEQ ID NO: 583961 - DNA, 33 bp, Homo sapien
ggcttactctggaaaagccttgtattagtcagc

SEQ ID NO: 583962 - DNA, 33 bp, Homo sapien
ggcttactctggaaaatccttgtattagtcagc

SEQ ID NO: 583963 - DNA, 33 bp, Homo sapien
tggactggcagttctccagctctggtgtgatgg

SEQ ID NO: 583964 - DNA, 33 bp, Homo sapien
tggactggcagttctctagctctggtgtgatgg

SEQ ID NO: 583965 - DNA, 33 bp, Homo sapien
tgagaaacttgctcaacaaaatgctgatattct

SEQ ID NO: 583966 - DNA, 33 bp, Homo sapien
tgagaaacttgctcaagaaaatgctgatattct

SEQ ID NO: 583967 - DNA, 33 bp, Homo sapien
ttctctaattagaccaatgacaagtgggcatcc

SEQ ID NO: 583968 - DNA, 33 bp, Homo sapien
ttctctaattagaccagtgacaagtgggcatcc

SEQ ID NO: 583969 - DNA, 33 bp, Homo sapien
ctatattaaacttgtacgtcatggaaatagaca

SEQ ID NO: 583970 - DNA, 33 bp, Homo sapien
ctatattaaacttgtatgtcatggaaatagaca

SEQ ID NO: 583971 - DNA, 33 bp, Homo sapien
tctgtggggaaactcccgagaactagatggttg

SEQ ID NO: 583972 - DNA, 33 bp, Homo sapien
tctgtggggaaactcctgagaactagatggttg

SEQ ID NO: 583973 - DNA, 33 bp, Homo sapien
ataacacactagaaaaacattaggagatatacc

SEQ ID NO: 583974 - DNA, 33 bp, Homo sapien
ataacacactagaaaagcattaggagatatacc

SEQ ID NO: 583975 - DNA, 33 bp, Homo sapien
cctttgcttgactatgcatcctttctagtacag

SEQ ID NO: 583976 - DNA, 33 bp, Homo sapien
cctttgcttgactatgtatcctttctagtacag

SEQ ID NO: 583977 - DNA, 33 bp, Homo sapien
tattatcctgatgacacagaataaatataaaaa

SEQ ID NO: 583978 - DNA, 33 bp, Homo sapien
tattatcctgatgacatagaataaatataaaaa

SEQ ID NO: 583979 - DNA, 33 bp, Homo sapien
tattgctttggcttccaattaagtaattctatt

SEQ ID NO: 583980 - DNA, 33 bp, Homo sapien
tattgctttggcttccgattaagtaattctatt

SEQ ID NO: 583981 - DNA, 33 bp, Homo sapien
gctcattgacctttccaataatcctagggacct

SEQ ID NO: 583982 - DNA, 33 bp, Homo sapien
gctcattgacctttccgataatcctagggacct

SEQ ID NO: 583983 - DNA, 33 bp, Homo sapien
caaatttattattccacctatttgacccctcaa

SEQ ID NO: 583984 - DNA, 33 bp, Homo sapien
caaatttattattccatctatttgacccctcaa

SEQ ID NO: 583985 - DNA, 33 bp, Homo sapien
aggagcagaaaaggaagtgttcactttcaggtt

SEQ ID NO: 583986 - DNA, 33 bp, Homo sapien
aggagcagaaaaggaattgttcactttcaggtt

SEQ ID NO: 583987 - DNA, 33 bp, Homo sapien
atttggaaatttttaaacaactctggctcagtt

SEQ ID NO: 583988 - DNA, 33 bp, Homo sapien
atttggaaatttttaagcaactctggctcagtt

SEQ ID NO: 583989 - DNA, 33 bp, Homo sapien
cctctatgtgatcaaaagttaaacaggttcaag

SEQ ID NO: 583990 - DNA, 33 bp, Homo sapien
cctctatgtgatcaaacgttaaacaggttcaag

SEQ ID NO: 583991 - DNA, 33 bp, Homo sapien
tgctttactcaccacacgttaggaaccctgcat

SEQ ID NO: 583992 - DNA, 33 bp, Homo sapien
tgctttactcaccacaggttaggaaccctgcat

SEQ ID NO: 583993 - DNA, 33 bp, Homo sapien
ttccctttaagaaaccaagctcaacttacagag

SEQ ID NO: 583994 - DNA, 33 bp, Homo sapien
ttccctttaagaaaccgagctcaacttacagag

SEQ ID NO: 583995 - DNA, 33 bp, Homo sapien; identical to SEQ ID NO: 583993

SEQ ID NO: 583996 - DNA, 33 bp, Homo sapien; identical to SEQ ID NO: 583994

SEQ ID NO: 583997 - DNA, 33 bp, Homo sapien
attgtactgatgcaaacgactatactgccgtaa

SEQ ID NO: 583998 - DNA, 33 bp, Homo sapien
attgtactgatgcaaatgactatactgccgtaa

SEQ ID NO: 583999 - DNA, 33 bp, Homo sapien
ttagaaaatgaagaacaagtcaagaactagaaa

SEQ ID NO: 584000 - DNA, 33 bp, Homo sapien
ttagaaaatgaagaaccagtcaagaactagaaa

SEQ ID NO: 584001 - DNA, 33 bp, Homo sapien
tccaattttctgttgaataaaatggacacaatc

SEQ ID NO: 584002 - DNA, 33 bp, Homo sapien
tccaattttctgttgattaaaatggacacaatc

SEQ ID NO: 584003 - DNA, 33 bp, Homo sapien
tatttaccattttctggatcattgttcctctct

SEQ ID NO: 584004 - DNA, 33 bp, Homo sapien
tatttaccattttctgtatcattgttcctctct

SEQ ID NO: 584005 - DNA, 33 bp, Homo sapien
gacttaggtttacgtaaaagattgtaatgttac

SEQ ID NO: 584006 - DNA, 33 bp, Homo sapien
gacttaggtttacgtacaagattgtaatgttac

SEQ ID NO: 584007 - DNA, 33 bp, Homo sapien
atgtatttttatctacaagaatatgcattcttt

SEQ ID NO: 584008 - DNA, 33 bp, Homo sapien
atgtatttttatctacgagaatatgcattcttt

SEQ ID NO: 584009 - DNA, 33 bp, Homo sapien
attctgtattgttttcacgtacagcactgttat

SEQ ID NO: 584010 - DNA, 33 bp, Homo sapien
attctgtattgttttcgcgtacagcactgttat

SEQ ID NO: 584011 - DNA, 33 bp, Homo sapien
cagactttcacatgaaatagccttcttcttgta

SEQ ID NO: 584012 - DNA, 33 bp, Homo sapien
cagactttcacatgaagtagccttcttcttgta

SEQ ID NO: 584013 - DNA, 33 bp, Homo sapien
tcccctcatatcttacagcattttctctttgtc

SEQ ID NO: 584014 - DNA, 33 bp, Homo sapien
tcccctcatatcttacggcattttctctttgtc

SEQ ID NO: 584015 - DNA, 33 bp, Homo sapien
gagacacacttccaacactatttgtagaattat

SEQ ID NO: 584016 - DNA, 33 bp, Homo sapien
gagacacacttccaacgctatttgtagaattat

SEQ ID NO: 584017 - DNA, 33 bp, Homo sapien
agttgcaggaggttaacgagataacaatacatg

SEQ ID NO: 584018 - DNA, 33 bp, Homo sapien
agttgcaggaggttaatgagataacaatacatg

SEQ ID NO: 584019 - DNA, 33 bp, Homo sapien
agtattgtgaggttataaaaggaataacaacca

SEQ ID NO: 584020 - DNA, 33 bp, Homo sapien
agtattgtgaggttatcaaaggaataacaacca

SEQ ID NO: 584021 - DNA, 33 bp, Homo sapien
aggctgtaactgtaaacgaattaaggcagaaac

SEQ ID NO: 584022 - DNA, 33 bp, Homo sapien
aggctgtaactgtaaatgaattaaggcagaaac

SEQ ID NO: 584023 - DNA, 33 bp, Homo sapien
ccaatatacacgtaacaaggcacacttttcaaa

SEQ ID NO: 584024 - DNA, 33 bp, Homo sapien
ccaatatacacgtaacgaggcacacttttcaaa

SEQ ID NO: 584025 - DNA, 33 bp, Homo sapien
gcagtaggagtgaaaaattataaatcatcacgg

SEQ ID NO: 584026 - DNA, 33 bp, Homo sapien
gcagtaggagtgaaaacttataaatcatcacgg

SEQ ID NO: 584027 - DNA, 33 bp, Homo sapien
caaaaaaagtgcatagaacaatgaaaattgtta

SEQ ID NO: 584028 - DNA, 33 bp, Homo sapien
caaaaaaagtgcataggacaatgaaaattgtta

SEQ ID NO: 584029 - DNA, 33 bp, Homo sapien
aacaaatgtaccattcaaataccatgaagacac

SEQ ID NO: 584030 - DNA, 33 bp, Homo sapien
aacaaatgtaccattcgaataccatgaagacac

SEQ ID NO: 584031 - DNA, 33 bp, Homo sapien
tatttaccataatttggatgcaagaaagcagca

SEQ ID NO: 584032 - DNA, 33 bp, Homo sapien
tatttaccataatttgtatgcaagaaagcagca

SEQ ID NO: 584033 - DNA, 33 bp, Homo sapien
ctactgaaaaaggaacaaggccgacaccagagg

SEQ ID NO: 584034 - DNA, 33 bp, Homo sapien
ctactgaaaaaggaacgaggccgacaccagagg

SEQ ID NO: 584035 - DNA, 33 bp, Homo sapien
gcctggtgtagttaaaactggaaagcttaatca

SEQ ID NO: 584036 - DNA, 33 bp, Homo sapien
gcctggtgtagttaaatctggaaagcttaatca

SEQ ID NO: 584037 - DNA, 33 bp, Homo sapien
cccttctgcttttggaactatacctttctgatc

SEQ ID NO: 584038 - DNA, 33 bp, Homo sapien
cccttctgcttttggatctatacctttctgatc

SEQ ID NO: 584039 - DNA, 33 bp, Homo sapien
tgtcatgagagtaatgccacgtatttctagctt

SEQ ID NO: 584040 - DNA, 33 bp, Homo sapien
tgtcatgagagtaatgtcacgtatttctagctt

SEQ ID NO: 584041 - DNA, 33 bp, Homo sapien
ctattagtctgataggaattcccttatgtttga

SEQ ID NO: 584042 - DNA, 33 bp, Homo sapien
ctattagtctgatagggattcccttatgtttga

SEQ ID NO: 584043 - DNA, 33 bp, Homo sapien
taaaacatttttctgccacaggtataaacagaa

SEQ ID NO: 584044 - DNA, 33 bp, Homo sapien
taaaacatttttctgctacaggtataaacagaa

SEQ ID NO: 584045 - DNA, 33 bp, Homo sapien
ctgaagcgcagagatactaagtgacatgcttaa

SEQ ID NO: 584046 - DNA, 33 bp, Homo sapien
ctgaagcgcagagatattaagtgacatgcttaa

SEQ ID NO: 584047 - DNA, 33 bp, Homo sapien
tcttttaactataaggcaaacataagctacttc

SEQ ID NO: 584048 - DNA, 33 bp, Homo sapien
tcttttaactataagggaaacataagctacttc

SEQ ID NO: 584049 - DNA, 33 bp, Homo sapien
tttcttggacccatgaactttttaggcaccaat

SEQ ID NO: 584050 - DNA, 33 bp, Homo sapien
tttcttggacccatgacctttttaggcaccaat

SEQ ID NO: 584051 - DNA, 33 bp, Homo sapien
gtcttggtgaagaaaaatgtaatatccccttag

SEQ ID NO: 584052 - DNA, 33 bp, Homo sapien
gtcttggtgaagaaaagtgtaatatccccttag

SEQ ID NO: 584053 - DNA, 33 bp, Homo sapien
ttctttgcaatcattacatatctcaaaattagt

SEQ ID NO: 584054 - DNA, 33 bp, Homo sapien
ttctttgcaatcattatatatctcaaaattagt

SEQ ID NO: 584055 - DNA, 33 bp, Homo sapien
tctgaatttatcattgcagaggctaagtgtgtt

SEQ ID NO: 584056 - DNA, 33 bp, Homo sapien
tctgaatttatcattgtagaggctaagtgtgtt

SEQ ID NO: 584057 - DNA, 33 bp, Homo sapien
tcgtgtttgacctacaatagaatgcttttcaaa

SEQ ID NO: 584058 - DNA, 33 bp, Homo sapien
tcgtgtttgacctacagtagaatgcttttcaaa

SEQ ID NO: 584059 - DNA, 33 bp, Homo sapien
gataaaattgagtcaacggtgattgttatgttt

SEQ ID NO: 584060 - DNA, 33 bp, Homo sapien
gataaaattgagtcaatggtgattgttatgttt

SEQ ID NO: 584061 - DNA, 33 bp, Homo sapien
tgctcctttctttgtgacaaatatatccatatt

SEQ ID NO: 584062 - DNA, 33 bp, Homo sapien
tgctcctttctttgtgtcaaatatatccatatt

SEQ ID NO: 584063 - DNA, 33 bp, Homo sapien
acaagtgtattattaccgatgcttggatggtaa

SEQ ID NO: 584064 - DNA, 33 bp, Homo sapien
acaagtgtattattactgatgcttggatggtaa

SEQ ID NO: 584065 - DNA, 33 bp, Homo sapien
aatctgattgaaacaacgcagtcaaaatgagtc

SEQ ID NO: 584066 - DNA, 33 bp, Homo sapien
aatctgattgaaacaatgcagtcaaaatgagtc

SEQ ID NO: 584067 - DNA, 33 bp, Homo sapien
cacaggcaataaaatcagaaggccaatagctca

SEQ ID NO: 584068 - DNA, 33 bp, Homo sapien
cacaggcaataaaatcggaaggccaatagctca

SEQ ID NO: 584069 - DNA, 33 bp, Homo sapien
cttctggcaattacaacaacatttgctggtgct

SEQ ID NO: 584070 - DNA, 33 bp, Homo sapien
cttctggcaattacaataacatttgctggtgct

SEQ ID NO: 584071 - DNA, 33 bp, Homo sapien
gaaagaaagaaagaaaacatgtgctgttagcaa

SEQ ID NO: 584072 - DNA, 33 bp, Homo sapien
gaaagaaagaaagaaaccatgtgctgttagcaa

SEQ ID NO: 584073 - DNA, 33 bp, Homo sapien
caggaaaggtaaatgaggggagagaaagagaat

SEQ ID NO: 584074 - DNA, 33 bp, Homo sapien
caggaaaggtaaatgatgggagagaaagagaat

SEQ ID NO: 584075 - DNA, 33 bp, Homo sapien
aagagtgacagtagaaagccaggatttgcattt

SEQ ID NO: 584076 - DNA, 33 bp, Homo sapien
aagagtgacagtagaaggccaggatttgcattt

SEQ ID NO: 584077 - DNA, 33 bp, Homo sapien
ctctgtgtgaggaatacgaaggccgctaaaaca

SEQ ID NO: 584078 - DNA, 33 bp, Homo sapien
ctctgtgtgaggaatatgaaggccgctaaaaca

SEQ ID NO: 584079 - DNA, 33 bp, Homo sapien
ggaaaggtgattcaaacggttacaattctaaga

SEQ ID NO: 584080 - DNA, 33 bp, Homo sapien
ggaaaggtgattcaaatggttacaattctaaga

SEQ ID NO: 584081 - DNA, 33 bp, Homo sapien
agtgctgtgtaaattcagaaaggtgattaaaac

SEQ ID NO: 584082 - DNA, 33 bp, Homo sapien
agtgctgtgtaaattcggaaaggtgattaaaac

SEQ ID NO: 584083 - DNA, 33 bp, Homo sapien
taagttgttggatcacaagagataataaggtta

SEQ ID NO: 584084 - DNA, 33 bp, Homo sapien
taagttgttggatcacgagagataataaggtta

SEQ ID NO: 584085 - DNA, 33 bp, Homo sapien
ccctatcattaccctacacctaaaaagtctcct

SEQ ID NO: 584086 - DNA, 33 bp, Homo sapien
ccctatcattaccctatacctaaaaagtctcct

SEQ ID NO: 584087 - DNA, 33 bp, Homo sapien
gattgagaagaaaataagtaagcaggtctgctc

SEQ ID NO: 584088 - DNA, 33 bp, Homo sapien
gattgagaagaaaataggtaagcaggtctgctc

SEQ ID NO: 584089 - DNA, 33 bp, Homo sapien
gaaaaaagcactagaacgtccaaaaacagtcta

SEQ ID NO: 584090 - DNA, 33 bp, Homo sapien
gaaaaaagcactagaatgtccaaaaacagtcta

SEQ ID NO: 584091 - DNA, 33 bp, Homo sapien
attaattataatgatactaaatccacagggtta

SEQ ID NO: 584092 - DNA, 33 bp, Homo sapien
attaattataatgatagtaaatccacagggtta

SEQ ID NO: 584093 - DNA, 33 bp, Homo sapien
tcatcaccaggtattagaacttacctgtggcaa

SEQ ID NO: 584094 - DNA, 33 bp, Homo sapien
tcatcaccaggtattataacttacctgtggcaa

SEQ ID NO: 584095 - DNA, 33 bp, Homo sapien
acttctttacctataacatgaagaacacagtta

SEQ ID NO: 584096 - DNA, 33 bp, Homo sapien
acttctttacctataatatgaagaacacagtta

SEQ ID NO: 584097 - DNA, 33 bp, Homo sapien
aactaaagatggcaagaattatggatattcaaa

SEQ ID NO: 584098 - DNA, 33 bp, Homo sapien
aactaaagatggcaaggattatggatattcaaa

SEQ ID NO: 584099 - DNA, 33 bp, Homo sapien
aaatacatctgtcctcaccatttctattcaatg

SEQ ID NO: 584100 - DNA, 33 bp, Homo sapien
aaatacatctgtcctcgccatttctattcaatg

SEQ ID NO: 584101 - DNA, 33 bp, Homo sapien
gaggaaacagaagtacaaaggttcaaataccta

SEQ ID NO: 584102 - DNA, 33 bp, Homo sapien
gaggaaacagaagtacgaaggttcaaataccta

SEQ ID NO: 584103 - DNA, 33 bp, Homo sapien
actttcagaattgaggccaaatatccaaacatc

SEQ ID NO: 584104 - DNA, 33 bp, Homo sapien
actttcagaattgaggtcaaatatccaaacatc

SEQ ID NO: 584105 - DNA, 33 bp, Homo sapien
tttgatagaagcaaagcctgctcaaggagcaaa

SEQ ID NO: 584106 - DNA, 33 bp, Homo sapien
tttgatagaagcaaaggctgctcaaggagcaaa

SEQ ID NO: 584107 - DNA, 33 bp, Homo sapien
gcaacatggctggaaccgaaatataagaggcca

SEQ ID NO: 584108 - DNA, 33 bp, Homo sapien
gcaacatggctggaactgaaatataagaggcca

SEQ ID NO: 584109 - DNA, 33 bp, Homo sapien
tttcttaaaaacctacagccatatacacaatta

SEQ ID NO: 584110 - DNA, 33 bp, Homo sapien
tttcttaaaaacctacggccatatacacaatta

SEQ ID NO: 584111 - DNA, 33 bp, Homo sapien
acagctcactgaaagacacttcatgaaagctag

SEQ ID NO: 584112 - DNA, 33 bp, Homo sapien
acagctcactgaaagatacttcatgaaagctag

SEQ ID NO: 584113 - DNA, 33 bp, Homo sapien
aagcatttccgtctcaagatggttaatgaactt

SEQ ID NO: 584114 - DNA, 33 bp, Homo sapien
aagcatttccgtctcaggatggttaatgaactt

SEQ ID NO: 584115 - DNA, 33 bp, Homo sapien
ttttcctaatctaacaatatttgctgcctttga

SEQ ID NO: 584116 - DNA, 33 bp, Homo sapien
ttttcctaatctaacagtatttgctgcctttga

SEQ ID NO: 584117 - DNA, 33 bp, Homo sapien
aaaaattgttatgacagcatttgacttctagtt

SEQ ID NO: 584118 - DNA, 33 bp, Homo sapien
aaaaattgttatgacatcatttgacttctagtt

SEQ ID NO: 584119 - DNA, 33 bp, Homo sapien
gcatggtgtctgcaacaggaaggatttcattgc

SEQ ID NO: 584120 - DNA, 33 bp, Homo sapien
gcatggtgtctgcaaccggaaggatttcattgc

SEQ ID NO: 584121 - DNA, 33 bp, Homo sapien
aaaaaaatgaagtgacaactgctttcaaaagat

SEQ ID NO: 584122 - DNA, 33 bp, Homo sapien
aaaaaaatgaagtgacgactgctttcaaaagat

SEQ ID NO: 584123 - DNA, 33 bp, Homo sapien
agtgtcaccttcctgccaatatcctacactcat

SEQ ID NO: 584124 - DNA, 33 bp, Homo sapien
agtgtcaccttcctgctaatatcctacactcat

SEQ ID NO: 584125 - DNA, 33 bp, Homo sapien
ctgttcctcagatataaatgctagaggagatgg

SEQ ID NO: 584126 - DNA, 33 bp, Homo sapien
ctgttcctcagatatagatgctagaggagatgg

SEQ ID NO: 584127 - DNA, 33 bp, Homo sapien
gaaggtggaagaaaaacgtccttactagtatgc

SEQ ID NO: 584128 - DNA, 33 bp, Homo sapien
gaaggtggaagaaaaatgtccttactagtatgc

SEQ ID NO: 584129 - DNA, 33 bp, Homo sapien
tgtgatttaatttgcccgaaggaagaagaaagg

SEQ ID NO: 584130 - DNA, 33 bp, Homo sapien
tgtgatttaatttgcctgaaggaagaagaaagg

SEQ ID NO: 584131 - DNA, 33 bp, Homo sapien
ttatacagttgtttctaaaaaagattagcattt

SEQ ID NO: 584132 - DNA, 33 bp, Homo sapien
ttatacagttgtttcttaaaaagattagcattt

SEQ ID NO: 584133 - DNA, 33 bp, Homo sapien
gattcatggaacataacagagtccagaaataga

SEQ ID NO: 584134 - DNA, 33 bp, Homo sapien
gattcatggaacataatagagtccagaaataga

SEQ ID NO: 584135 - DNA, 33 bp, Homo sapien
gttattgcctgagatacggaagacctgagaaaa

SEQ ID NO: 584136 - DNA, 33 bp, Homo sapien
gttattgcctgagatatggaagacctgagaaaa

SEQ ID NO: 584137 - DNA, 33 bp, Homo sapien
ataaatgctcaggaaaatatgatagttttattg

SEQ ID NO: 584138 - DNA, 33 bp, Homo sapien
ataaatgctcaggaaattatgatagttttattg

SEQ ID NO: 584139 - DNA, 33 bp, Homo sapien
tggaggttggaggctaaaactcaccagggaaag

SEQ ID NO: 584140 - DNA, 33 bp, Homo sapien
tggaggttggaggctacaactcaccagggaaag

SEQ ID NO: 584141 - DNA, 33 bp, Homo sapien
aataaatgatttggaaataaatagaactatgac

SEQ ID NO: 584142 - DNA, 33 bp, Homo sapien
aataaatgatttggaattaaatagaactatgac

SEQ ID NO: 584143 - DNA, 33 bp, Homo sapien
aagtctttttttaacacgattttgagacccatc

SEQ ID NO: 584144 - DNA, 33 bp, Homo sapien
aagtctttttttaacatgattttgagacccatc

SEQ ID NO: 584145 - DNA, 33 bp, Homo sapien
gccaggactctagtccaattcaaatctgtctga

SEQ ID NO: 584146 - DNA, 33 bp, Homo sapien
gccaggactctagtccgattcaaatctgtctga

SEQ ID NO: 584147 - DNA, 33 bp, Homo sapien
gtggtatggtgtgttacgattgtgatcaaatat

SEQ ID NO: 584148 - DNA, 33 bp, Homo sapien
gtggtatggtgtgttatgattgtgatcaaatat

SEQ ID NO: 584149 - DNA, 33 bp, Homo sapien
attattttagagtgtaccttttctacttgttaa

SEQ ID NO: 584150 - DNA, 33 bp, Homo sapien
attattttagagtgtatcttttctacttgttaa

SEQ ID NO: 584151 - DNA, 33 bp, Homo sapien
ttaattaacacactgacatacaactatgacatt

SEQ ID NO: 584152 - DNA, 33 bp, Homo sapien
ttaattaacacactgagatacaactatgacatt

SEQ ID NO: 584153 - DNA, 33 bp, Homo sapien
gtattttcaaagaaaactgtatcagggatttct

SEQ ID NO: 584154 - DNA, 33 bp, Homo sapien
gtattttcaaagaaaattgtatcagggatttct

SEQ ID NO: 584155 - DNA, 33 bp, Homo sapien
gagtactgtatataccgactgataaacggactc

SEQ ID NO: 584156 - DNA, 33 bp, Homo sapien
gagtactgtatatacctactgataaacggactc

SEQ ID NO: 584157 - DNA, 33 bp, Homo sapien
atgatcattaccttaccagaaatgcctgaccaa

SEQ ID NO: 584158 - DNA, 33 bp, Homo sapien
atgatcattaccttacgagaaatgcctgaccaa

SEQ ID NO: 584159 - DNA, 33 bp, Homo sapien
ttactgagttaatgaaagcttgaatgaagtcaa

SEQ ID NO: 584160 - DNA, 33 bp, Homo sapien
ttactgagttaatgaatgcttgaatgaagtcaa

SEQ ID NO: 584161 - DNA, 33 bp, Homo sapien
aacgtccaactctgccaaagtgcttaaagatta

SEQ ID NO: 584162 - DNA, 33 bp, Homo sapien
aacgtccaactctgccgaagtgcttaaagatta

SEQ ID NO: 584163 - DNA, 33 bp, Homo sapien
tcttttgttttgtttgcaagttgcttgataaca

SEQ ID NO: 584164 - DNA, 33 bp, Homo sapien
tcttttgttttgtttgtaagttgcttgataaca

SEQ ID NO: 584165 - DNA, 33 bp, Homo sapien
ctggctataatataaaaagctcctgcaactgat

SEQ ID NO: 584166 - DNA, 33 bp, Homo sapien
ctggctataatataaagagctcctgcaactgat

SEQ ID NO: 584167 - DNA, 33 bp, Homo sapien
gttaagtgctcctagcaaatagtacagaaacta

SEQ ID NO: 584168 - DNA, 33 bp, Homo sapien
gttaagtgctcctagcgaatagtacagaaacta

SEQ ID NO: 584169 - DNA, 33 bp, Homo sapien
caattacattactgaagatgaggattaaggaat

SEQ ID NO: 584170 - DNA, 33 bp, Homo sapien
caattacattactgaatatgaggattaaggaat

SEQ ID NO: 584171 - DNA, 33 bp, Homo sapien
gtttatccaacatggaagattcacgcttgagta

SEQ ID NO: 584172 - DNA, 33 bp, Homo sapien
gtttatccaacatggaggattcacgcttgagta

SEQ ID NO: 584173 - DNA, 33 bp, Homo sapien
ctttatctgtaaaacacagatgattgccttcat

SEQ ID NO: 584174 - DNA, 33 bp, Homo sapien
ctttatctgtaaaacatagatgattgccttcat

SEQ ID NO: 584175 - DNA, 33 bp, Homo sapien
tagcagattactttacacaatcagtgaatgcag

SEQ ID NO: 584176 - DNA, 33 bp, Homo sapien
tagcagattactttacgcaatcagtgaatgcag

SEQ ID NO: 584177 - DNA, 33 bp, Homo sapien
ggaaggaactatatagaagaagcaactttggag

SEQ ID NO: 584178 - DNA, 33 bp, Homo sapien
ggaaggaactatataggagaagcaactttggag

SEQ ID NO: 584179 - DNA, 33 bp, Homo sapien
ttaggatcacaaactcgcgtagcttaaaattcc

SEQ ID NO: 584180 - DNA, 33 bp, Homo sapien
ttaggatcacaaactctcgtagcttaaaattcc

SEQ ID NO: 584181 - DNA, 33 bp, Homo sapien
ccaactgcatcctccaaacggaaatcaattgat

SEQ ID NO: 584182 - DNA, 33 bp, Homo sapien
ccaactgcatcctccagacggaaatcaattgat

SEQ ID NO: 584183 - DNA, 33 bp, Homo sapien
acaactctaagtgtctaaagggaaatgatgctg

SEQ ID NO: 584184 - DNA, 33 bp, Homo sapien
acaactctaagtgtcttaagggaaatgatgctg

SEQ ID NO: 584185 - DNA, 33 bp, Homo sapien
ttgcttaggcaacagagataccactaatttgac

SEQ ID NO: 584186 - DNA, 33 bp, Homo sapien
ttgcttaggcaacagatataccactaatttgac

SEQ ID NO: 584187 - DNA, 33 bp, Homo sapien
tctttctgattaactaaacttaatttcttcaag

SEQ ID NO: 584188 - DNA, 33 bp, Homo sapien
tctttctgattaactacacttaatttcttcaag

SEQ ID NO: 584189 - DNA, 33 bp, Homo sapien
aagcagtagaaacaaagggttgaaagttgaagg

SEQ ID NO: 584190 - DNA, 33 bp, Homo sapien
aagcagtagaaacaaatggttgaaagttgaagg

SEQ ID NO: 584191 - DNA, 33 bp, Homo sapien
gtctgaaaagaacatcaaaacacacaatatttg

SEQ ID NO: 584192 - DNA, 33 bp, Homo sapien
gtctgaaaagaacatctaaacacacaatatttg

SEQ ID NO: 584193 - DNA, 33 bp, Homo sapien
gaagtgcacgtcaggacgaattcacaggataaa

SEQ ID NO: 584194 - DNA, 33 bp, Homo sapien
gaagtgcacgtcaggatgaattcacaggataaa

SEQ ID NO: 584195 - DNA, 33 bp, Homo sapien
ctaaactgaccaaactaaaagcatctagtctca

SEQ ID NO: 584196 - DNA, 33 bp, Homo sapien
ctaaactgaccaaactgaaagcatctagtctca

SEQ ID NO: 584197 - DNA, 33 bp, Homo sapien
ttcaattacttttcaacaaccagctgttactgc

SEQ ID NO: 584198 - DNA, 33 bp, Homo sapien
ttcaattacttttcaataaccagctgttactgc

SEQ ID NO: 584199 - DNA, 33 bp, Homo sapien
attagagttcacagcacatttgaggtggccagt

SEQ ID NO: 584200 - DNA, 33 bp, Homo sapien
attagagttcacagcatatttgaggtggccagt

SEQ ID NO: 584201 - DNA, 33 bp, Homo sapien
tacctgttatacatgacatggctttgacttgtg

SEQ ID NO: 584202 - DNA, 33 bp, Homo sapien
tacctgttatacatgatatggctttgacttgtg

SEQ ID NO: 584203 - DNA, 33 bp, Homo sapien
taattttcttggaataagttgcttttactaaag

SEQ ID NO: 584204 - DNA, 33 bp, Homo sapien
taattttcttggaataggttgcttttactaaag

SEQ ID NO: 584205 - DNA, 33 bp, Homo sapien
ttgataattgctcttacaatcttagcaaaatta

SEQ ID NO: 584206 - DNA, 33 bp, Homo sapien
ttgataattgctcttataatcttagcaaaatta

SEQ ID NO: 584207 - DNA, 33 bp, Homo sapien
ctttctatggactgaaatgcccgcctcctcact

SEQ ID NO: 584208 - DNA, 33 bp, Homo sapien
ctttctatggactgaactgcccgcctcctcact

SEQ ID NO: 584209 - DNA, 33 bp, Homo sapien
tacaacatgataaaagcttgcttatttaagatg

SEQ ID NO: 584210 - DNA, 33 bp, Homo sapien
tacaacatgataaaaggttgcttatttaagatg

SEQ ID NO: 584211 - DNA, 33 bp, Homo sapien
agtcctgtggatattacgggctcatggatacat

SEQ ID NO: 584212 - DNA, 33 bp, Homo sapien
agtcctgtggatattatgggctcatggatacat

SEQ ID NO: 584213 - DNA, 33 bp, Homo sapien
cacacaatatttctgaaagcaaatgaaaattta

SEQ ID NO: 584214 - DNA, 33 bp, Homo sapien
cacacaatatttctgagagcaaatgaaaattta

SEQ ID NO: 584215 - DNA, 33 bp, Homo sapien
atttaaaatcacagtacagtttcagtgttagga

SEQ ID NO: 584216 - DNA, 33 bp, Homo sapien
atttaaaatcacagtatagtttcagtgttagga

SEQ ID NO: 584217 - DNA, 33 bp, Homo sapien
taatatgtgattgtaacaaaaccccctacacct

SEQ ID NO: 584218 - DNA, 33 bp, Homo sapien
taatatgtgattgtaagaaaaccccctacacct

SEQ ID NO: 584219 - DNA, 33 bp, Homo sapien
tacatatcttgaatcaaattaaagttgtacagc

SEQ ID NO: 584220 - DNA, 33 bp, Homo sapien
tacatatcttgaatcagattaaagttgtacagc

SEQ ID NO: 584221 - DNA, 33 bp, Homo sapien
caatgttttagtcaaacggcaggtaatggatac

SEQ ID NO: 584222 - DNA, 33 bp, Homo sapien
caatgttttagtcaaatggcaggtaatggatac

SEQ ID NO: 584223 - DNA, 33 bp, Homo sapien
tccctgatcatcagcccccttctattacatact

SEQ ID NO: 584224 - DNA, 33 bp, Homo sapien
tccctgatcatcagcctccttctattacatact

SEQ ID NO: 584225 - DNA, 33 bp, Homo sapien
gagattagaatagtaccacggcgagtgttgttg

SEQ ID NO: 584226 - DNA, 33 bp, Homo sapien
gagattagaatagtacgacggcgagtgttgttg

SEQ ID NO: 584227 - DNA, 33 bp, Homo sapien
attcctatctatcttacacatcacaatcagtca

SEQ ID NO: 584228 - DNA, 33 bp, Homo sapien
attcctatctatcttatacatcacaatcagtca

SEQ ID NO: 584229 - DNA, 33 bp, Homo sapien
cctcccgtggattaaactcctataaaacactca

SEQ ID NO: 584230 - DNA, 33 bp, Homo sapien
cctcccgtggattaaattcctataaaacactca

SEQ ID NO: 584231 - DNA, 33 bp, Homo sapien
atgagttgcatgacacaggttcgtatttatgag

SEQ ID NO: 584232 - DNA, 33 bp, Homo sapien
atgagttgcatgacacgggttcgtatttatgag

SEQ ID NO: 584233 - DNA, 33 bp, Homo sapien
taacttccctgtatttcttggtttcagtattaa

SEQ ID NO: 584234 - DNA, 33 bp, Homo sapien
taacttccctgtatttgttggtttcagtattaa

SEQ ID NO: 584235 - DNA, 33 bp, Homo sapien
caaaacctgcattcacaaatcaaaaacaaactg

SEQ ID NO: 584236 - DNA, 33 bp, Homo sapien
caaaacctgcattcacgaatcaaaaacaaactg

SEQ ID NO: 584237 - DNA, 33 bp, Homo sapien
aaatcctacataaatcagaagtgtagagatcat

SEQ ID NO: 584238 - DNA, 33 bp, Homo sapien
aaatcctacataaatcggaagtgtagagatcat

SEQ ID NO: 584239 - DNA, 33 bp, Homo sapien
gttttgctatttcgtgcaaaaatgaagatatta

SEQ ID NO: 584240 - DNA, 33 bp, Homo sapien
gttttgctatttcgtgtaaaaatgaagatatta

SEQ ID NO: 584241 - DNA, 33 bp, Homo sapien
acttttattcagataaatgctcttgaagtaaag

SEQ ID NO: 584242 - DNA, 33 bp, Homo sapien
acttttattcagataagtgctcttgaagtaaag

SEQ ID NO: 584243 - DNA, 33 bp, Homo sapien
acagtgctacttttaacatgatctcaatatatc

SEQ ID NO: 584244 - DNA, 33 bp, Homo sapien
acagtgctacttttaatatgatctcaatatatc

SEQ ID NO: 584245 - DNA, 33 bp, Homo sapien
agtaatgcagaataaaaatcaatattgaccttt

SEQ ID NO: 584246 - DNA, 33 bp, Homo sapien
agtaatgcagaataaacatcaatattgaccttt

SEQ ID NO: 584247 - DNA, 33 bp, Homo sapien
atactttcatacaaaacaagaatggctaaaatc

SEQ ID NO: 584248 - DNA, 33 bp, Homo sapien
atactttcatacaaaagaagaatggctaaaatc

SEQ ID NO: 584249 - DNA, 33 bp, Homo sapien
aaagggctactatgccgagattgattatctcct

SEQ ID NO: 584250 - DNA, 33 bp, Homo sapien
aaagggctactatgcctagattgattatctcct

SEQ ID NO: 584251 - DNA, 33 bp, Homo sapien
gctatcagggtgatataacttccaaacctcagc

SEQ ID NO: 584252 - DNA, 33 bp, Homo sapien
gctatcagggtgatatgacttccaaacctcagc

SEQ ID NO: 584253 - DNA, 33 bp, Homo sapien
agattagcgatgctggaaaattgttgtaattgt

SEQ ID NO: 584254 - DNA, 33 bp, Homo sapien
agattagcgatgctggcaaattgttgtaattgt

SEQ ID NO: 584255 - DNA, 33 bp, Homo sapien
ttaattcagtgactaaataattctcatttgccg

SEQ ID NO: 584256 - DNA, 33 bp, Homo sapien
ttaattcagtgactaagtaattctcatttgccg

SEQ ID NO: 584257 - DNA, 33 bp, Homo sapien
aaaagaccatttggtacaatgttaatgttaata

SEQ ID NO: 584258 - DNA, 33 bp, Homo sapien
aaaagaccatttggtagaatgttaatgttaata

SEQ ID NO: 584259 - DNA, 33 bp, Homo sapien
aagtgtactgggattcaagctcatttatttttc

SEQ ID NO: 584260 - DNA, 33 bp, Homo sapien
aagtgtactgggattcgagctcatttatttttc

SEQ ID NO: 584261 - DNA, 33 bp, Homo sapien
agagtaaatgaggcaactgtttgtcaaaatagt

SEQ ID NO: 584262 - DNA, 33 bp, Homo sapien
agagtaaatgaggcaattgtttgtcaaaatagt

SEQ ID NO: 584263 - DNA, 33 bp, Homo sapien
tctagctagaacatccagaatagaacacatagt

SEQ ID NO: 584264 - DNA, 33 bp, Homo sapien
tctagctagaacatccggaatagaacacatagt

SEQ ID NO: 584265 - DNA, 33 bp, Homo sapien
tataaaatcaacccaactcaattcaaagaatta

SEQ ID NO: 584266 - DNA, 33 bp, Homo sapien
tataaaatcaacccaagtcaattcaaagaatta

SEQ ID NO: 584267 - DNA, 33 bp, Homo sapien
aaattacaaatgttgacgttgttgtggagaaaa

SEQ ID NO: 584268 - DNA, 33 bp, Homo sapien
aaattacaaatgttgatgttgttgtggagaaaa

SEQ ID NO: 584269 - DNA, 33 bp, Homo sapien
cctgaggttccatttaccgttggggcctaggaa

SEQ ID NO: 584270 - DNA, 33 bp, Homo sapien
cctgaggttccatttatcgttggggcctaggaa

SEQ ID NO: 584271 - DNA, 33 bp, Homo sapien
tgttaacactgtggaaaacacaactacaacatt

SEQ ID NO: 584272 - DNA, 33 bp, Homo sapien
tgttaacactgtggaagacacaactacaacatt

SEQ ID NO: 584273 - DNA, 33 bp, Homo sapien
tcttgtttctgtaacccggtcaactttttatca

SEQ ID NO: 584274 - DNA, 33 bp, Homo sapien
tcttgtttctgtaacctggtcaactttttatca

SEQ ID NO: 584275 - DNA, 33 bp, Homo sapien
gaagcctgtcttgggcaataccagtggtgcatt

SEQ ID NO: 584276 - DNA, 33 bp, Homo sapien
gaagcctgtcttgggcgataccagtggtgcatt

SEQ ID NO: 584277 - DNA, 33 bp, Homo sapien
agtttttaggcaaaatgactcattagcatttaa

SEQ ID NO: 584278 - DNA, 33 bp, Homo sapien
agtttttaggcaaaattactcattagcatttaa

SEQ ID NO: 584279 - DNA, 33 bp, Homo sapien
agaccaccaaactttccctctaccagcaataag

SEQ ID NO: 584280 - DNA, 33 bp, Homo sapien
agaccaccaaactttctctctaccagcaataag

SEQ ID NO: 584281 - DNA, 33 bp, Homo sapien
ctaacaactggaggcacctgctcaaaaaaacag

SEQ ID NO: 584282 - DNA, 33 bp, Homo sapien
ctaacaactggaggcatctgctcaaaaaaacag

SEQ ID NO: 584283 - DNA, 33 bp, Homo sapien
tccccaactgaaacaccgtatccgttgaacact

SEQ ID NO: 584284 - DNA, 33 bp, Homo sapien
tccccaactgaaacactgtatccgttgaacact

SEQ ID NO: 584285 - DNA, 33 bp, Homo sapien
gtaaaattcagtggtacaggtaattcacatttt

SEQ ID NO: 584286 - DNA, 33 bp, Homo sapien
gtaaaattcagtggtataggtaattcacatttt

SEQ ID NO: 584287 - DNA, 33 bp, Homo sapien
gaatggtcatggctcaagaaaattaactttaca

SEQ ID NO: 584288 - DNA, 33 bp, Homo sapien
gaatggtcatggctcacgaaaattaactttaca

SEQ ID NO: 584289 - DNA, 33 bp, Homo sapien
aattcacacagaggcaatgataacttaaggact

SEQ ID NO: 584290 - DNA, 33 bp, Homo sapien
aattcacacagaggcagtgataacttaaggact

SEQ ID NO: 584291 - DNA, 33 bp, Homo sapien
tggtacacagaagtgaagaattggggtttggga

SEQ ID NO: 584292 - DNA, 33 bp, Homo sapien
tggtacacagaagtgacgaattggggtttggga

SEQ ID NO: 584293 - DNA, 33 bp, Homo sapien
tagttttataaaaagccagtattgatgcatccg

SEQ ID NO: 584294 - DNA, 33 bp, Homo sapien
tagttttataaaaagctagtattgatgcatccg

SEQ ID NO: 584295 - DNA, 33 bp, Homo sapien
gtaagcagtggaaatacattcaaatgtaagtca

SEQ ID NO: 584296 - DNA, 33 bp, Homo sapien
gtaagcagtggaaatatattcaaatgtaagtca

SEQ ID NO: 584297 - DNA, 33 bp, Homo sapien
aaacagaagttcaataaacaaataatcattgtg

SEQ ID NO: 584298 - DNA, 33 bp, Homo sapien
aaacagaagttcaatagacaaataatcattgtg

SEQ ID NO: 584299 - DNA, 33 bp, Homo sapien
tcttaccatttacccaaattatctgaggatgtt

SEQ ID NO: 584300 - DNA, 33 bp, Homo sapien
tcttaccatttacccagattatctgaggatgtt

SEQ ID NO: 584301 - DNA, 33 bp, Homo sapien
aatccttagttattacactgcattgctttggtg

SEQ ID NO: 584302 - DNA, 33 bp, Homo sapien
aatccttagttattacgctgcattgctttggtg

SEQ ID NO: 584303 - DNA, 33 bp, Homo sapien
cctttatgttaaaaaccgtcaactgactaagta

SEQ ID NO: 584304 - DNA, 33 bp, Homo sapien
cctttatgttaaaaactgtcaactgactaagta

SEQ ID NO: 584305 - DNA, 33 bp, Homo sapien
acagttgagaatctcaatactaagctctaaagc

SEQ ID NO: 584306 - DNA, 33 bp, Homo sapien
acagttgagaatctcagtactaagctctaaagc

SEQ ID NO: 584307 - DNA, 33 bp, Homo sapien
tcaagattcagagatagaacgttggctttacta

SEQ ID NO: 584308 - DNA, 33 bp, Homo sapien
tcaagattcagagatataacgttggctttacta

SEQ ID NO: 584309 - DNA, 33 bp, Homo sapien
gtaaagagagaatgtgaaattacgtccatgtat

SEQ ID NO: 584310 - DNA, 33 bp, Homo sapien
gtaaagagagaatgtggaattacgtccatgtat

SEQ ID NO: 584311 - DNA, 33 bp, Homo sapien
tttcaaagacacagaaatctaatagaagtttcc

SEQ ID NO: 584312 - DNA, 33 bp, Homo sapien
tttcaaagacacagaagtctaatagaagtttcc

SEQ ID NO: 584313 - DNA, 33 bp, Homo sapien
ttgcaattttcaataaaataatctgtgcaataa

SEQ ID NO: 584314 - DNA, 33 bp, Homo sapien
ttgcaattttcaataagataatctgtgcaataa

SEQ ID NO: 584315 - DNA, 33 bp, Homo sapien
tggtgctagcagctaccggtgattattgcacag

SEQ ID NO: 584316 - DNA, 33 bp, Homo sapien
tggtgctagcagctactggtgattattgcacag

SEQ ID NO: 584317 - DNA, 33 bp, Homo sapien
agaggatacaaatggcagaattggctctggtga

SEQ ID NO: 584318 - DNA, 33 bp, Homo sapien
agaggatacaaatggcggaattggctctggtga

SEQ ID NO: 584319 - DNA, 33 bp, Homo sapien
ctctgtctctcctttagctctgctagtctttca

SEQ ID NO: 584320 - DNA, 33 bp, Homo sapien
ctctgtctctcctttatctctgctagtctttca

SEQ ID NO: 584321 - DNA, 33 bp, Homo sapien
aagttgatgtaatcacccaaggcattgaattca

SEQ ID NO: 584322 - DNA, 33 bp, Homo sapien
aagttgatgtaatcactcaaggcattgaattca

SEQ ID NO: 584323 - DNA, 33 bp, Homo sapien
ggcattcacctctacaagaaagaagacagatgg

SEQ ID NO: 584324 - DNA, 33 bp, Homo sapien
ggcattcacctctacaggaaagaagacagatgg

SEQ ID NO: 584325 - DNA, 33 bp, Homo sapien
tcaaagaccaatgtcaatagagagggcaaaagg

SEQ ID NO: 584326 - DNA, 33 bp, Homo sapien
tcaaagaccaatgtcagtagagagggcaaaagg

SEQ ID NO: 584327 - DNA, 33 bp, Homo sapien
agagtttaagagtgagccgaaaaagggaatgac

SEQ ID NO: 584328 - DNA, 33 bp, Homo sapien
agagtttaagagtgagtcgaaaaagggaatgac

SEQ ID NO: 584329 - DNA, 33 bp, Homo sapien
ttctgtcagggatccacgcctcatgatacttct

SEQ ID NO: 584330 - DNA, 33 bp, Homo sapien
ttctgtcagggatccaggcctcatgatacttct

SEQ ID NO: 584331 - DNA, 33 bp, Homo sapien
taaattgtttgtgccaaaatcacagatgcattg

SEQ ID NO: 584332 - DNA, 33 bp, Homo sapien
taaattgtttgtgccagaatcacagatgcattg

SEQ ID NO: 584333 - DNA, 33 bp, Homo sapien
ggaagatactcagatgaacagattacttcaggg

SEQ ID NO: 584334 - DNA, 33 bp, Homo sapien
ggaagatactcagatggacagattacttcaggg

SEQ ID NO: 584335 - DNA, 33 bp, Homo sapien
taaaaattttgaacagacattaggcgaagcact

SEQ ID NO: 584336 - DNA, 33 bp, Homo sapien
taaaaattttgaacagccattaggcgaagcact

SEQ ID NO: 584337 - DNA, 33 bp, Homo sapien
tctattcacacagttacgaccacttctgtatac

SEQ ID NO: 584338 - DNA, 33 bp, Homo sapien
tctattcacacagttatgaccacttctgtatac

SEQ ID NO: 584339 - DNA, 33 bp, Homo sapien
tcagtgactgagagtacatcaagtttttttctg

SEQ ID NO: 584340 - DNA, 33 bp, Homo sapien
tcagtgactgagagtatatcaagtttttttctg

SEQ ID NO: 584341 - DNA, 33 bp, Homo sapien
aaagcttggctacagccctgaattgaggtcttc

SEQ ID NO: 584342 - DNA, 33 bp, Homo sapien
aaagcttggctacagctctgaattgaggtcttc

SEQ ID NO: 584343 - DNA, 33 bp, Homo sapien
tttactctgccctaaaaatggtccatccaatag

SEQ ID NO: 584344 - DNA, 33 bp, Homo sapien
tttactctgccctaaatatggtccatccaatag

SEQ ID NO: 584345 - DNA, 33 bp, Homo sapien
gtccctgacttcaagacaattgttgttaattat

SEQ ID NO: 584346 - DNA, 33 bp, Homo sapien
gtccctgacttcaagataattgttgttaattat

SEQ ID NO: 584347 - DNA, 33 bp, Homo sapien
caaaataggaagtggcaaaataggcagatcata

SEQ ID NO: 584348 - DNA, 33 bp, Homo sapien
caaaataggaagtggcgaaataggcagatcata

SEQ ID NO: 584349 - DNA, 33 bp, Homo sapien
aggctcttcacaatacaactccacttatgttcc

SEQ ID NO: 584350 - DNA, 33 bp, Homo sapien
aggctcttcacaatacgactccacttatgttcc

SEQ ID NO: 584351 - DNA, 33 bp, Homo sapien
agcaaggtactatcccagaaagctgagagcagc

SEQ ID NO: 584352 - DNA, 33 bp, Homo sapien
agcaaggtactatcccggaaagctgagagcagc

SEQ ID NO: 584353 - DNA, 33 bp, Homo sapien
actttggctataggcacgttaatgtatgagtgt

SEQ ID NO: 584354 - DNA, 33 bp, Homo sapien
actttggctataggcatgttaatgtatgagtgt

SEQ ID NO: 584355 - DNA, 33 bp, Homo sapien
aatacaaatctcactccaagtactacgctgaac

SEQ ID NO: 584356 - DNA, 33 bp, Homo sapien
aatacaaatctcactctaagtactacgctgaac

SEQ ID NO: 584357 - DNA, 33 bp, Homo sapien
ctccattgagtattagacattctgtgaggtact

SEQ ID NO: 584358 - DNA, 33 bp, Homo sapien
ctccattgagtattaggcattctgtgaggtact

SEQ ID NO: 584359 - DNA, 33 bp, Homo sapien
gagtggtagtcacataagttaatgtctgaatta

SEQ ID NO: 584360 - DNA, 33 bp, Homo sapien
gagtggtagtcacatatgttaatgtctgaatta

SEQ ID NO: 584361 - DNA, 33 bp, Homo sapien
caggccatgctttactaagataacatattcaca

SEQ ID NO: 584362 - DNA, 33 bp, Homo sapien
caggccatgctttactgagataacatattcaca

SEQ ID NO: 584363 - DNA, 33 bp, Homo sapien
tcatttctctgtgctaagattgaagatgtatac

SEQ ID NO: 584364 - DNA, 33 bp, Homo sapien
tcatttctctgtgctaggattgaagatgtatac

SEQ ID NO: 584365 - DNA, 33 bp, Homo sapien
tttgactacattacacggctatcaaatttcatg

SEQ ID NO: 584366 - DNA, 33 bp, Homo sapien
tttgactacattacactgctatcaaatttcatg

SEQ ID NO: 584367 - DNA, 33 bp, Homo sapien
agaatggatggagaagaccagttgctgagaaca

SEQ ID NO: 584368 - DNA, 33 bp, Homo sapien
agaatggatggagaaggccagttgctgagaaca

SEQ ID NO: 584369 - DNA, 33 bp, Homo sapien
tagggagatacagaaaattggaaggaatactgt

SEQ ID NO: 584370 - DNA, 33 bp, Homo sapien
tagggagatacagaaagttggaaggaatactgt

SEQ ID NO: 584371 - DNA, 33 bp, Homo sapien
ttccattgtcagtggacgcaaagttaaacagtt

SEQ ID NO: 584372 - DNA, 33 bp, Homo sapien
ttccattgtcagtggatgcaaagttaaacagtt

SEQ ID NO: 584373 - DNA, 33 bp, Homo sapien
aaggattttatgtgtcccccaaatcaatttttt

SEQ ID NO: 584374 - DNA, 33 bp, Homo sapien
aaggattttatgtgtctcccaaatcaatttttt

SEQ ID NO: 584375 - DNA, 33 bp, Homo sapien
ccaatatcttgtcctaccagaaatgctattcat

SEQ ID NO: 584376 - DNA, 33 bp, Homo sapien
ccaatatcttgtcctatcagaaatgctattcat

SEQ ID NO: 584377 - DNA, 33 bp, Homo sapien
ggtggcgatagtcacgaatattattgaatatat

SEQ ID NO: 584378 - DNA, 33 bp, Homo sapien
ggtggcgatagtcacgcatattattgaatatat

SEQ ID NO: 584379 - DNA, 33 bp, Homo sapien
agggattgccgttataaatatttccagcattct

SEQ ID NO: 584380 - DNA, 33 bp, Homo sapien
agggattgccgttatatatatttccagcattct

SEQ ID NO: 584381 - DNA, 33 bp, Homo sapien
ttaaaaagcagtgcaaaattttactgaacatca

SEQ ID NO: 584382 - DNA, 33 bp, Homo sapien
ttaaaaagcagtgcaagattttactgaacatca

SEQ ID NO: 584383 - DNA, 33 bp, Homo sapien
ctgcacccatagacttgaagcaaatggcacaca

SEQ ID NO: 584384 - DNA, 33 bp, Homo sapien
ctgcacccatagactttaagcaaatggcacaca

SEQ ID NO: 584385 - DNA, 33 bp, Homo sapien
gcctttatttcccagacgtttgctgtataaaga

SEQ ID NO: 584386 - DNA, 33 bp, Homo sapien
gcctttatttcccagatgtttgctgtataaaga

SEQ ID NO: 584387 - DNA, 33 bp, Homo sapien
gaccttcaattgagggaaatatctatgaagaga

SEQ ID NO: 584388 - DNA, 33 bp, Homo sapien
gaccttcaattgaggggaatatctatgaagaga

SEQ ID NO: 584389 - DNA, 33 bp, Homo sapien
ccccctcagccctttaagagcaaattctgatat

SEQ ID NO: 584390 - DNA, 33 bp, Homo sapien
ccccctcagccctttaggagcaaattctgatat

SEQ ID NO: 584391 - DNA, 33 bp, Homo sapien
ataataacctgatagacgaaaattatggaatgg

SEQ ID NO: 584392 - DNA, 33 bp, Homo sapien
ataataacctgatagatgaaaattatggaatgg

SEQ ID NO: 584393 - DNA, 33 bp, Homo sapien
gagagcagcagtgacaatgaattaattgcacag

SEQ ID NO: 584394 - DNA, 33 bp, Homo sapien
gagagcagcagtgacactgaattaattgcacag

SEQ ID NO: 584395 - DNA, 33 bp, Homo sapien
aatccactgtgccgaacgtggcgatacagaggg

SEQ ID NO: 584396 - DNA, 33 bp, Homo sapien
aatccactgtgccgaatgtggcgatacagaggg

SEQ ID NO: 584397 - DNA, 33 bp, Homo sapien
ataaagacctagaaggaagaaaggaaagtacag

SEQ ID NO: 584398 - DNA, 33 bp, Homo sapien
ataaagacctagaaggtagaaaggaaagtacag

SEQ ID NO: 584399 - DNA, 33 bp, Homo sapien
cacagctacagtctgaactatggtataagtaga

SEQ ID NO: 584400 - DNA, 33 bp, Homo sapien
cacagctacagtctgagctatggtataagtaga

SEQ ID NO: 584401 - DNA, 33 bp, Homo sapien
gctgtggtacaacatgcagcacatgcagacaag

SEQ ID NO: 584402 - DNA, 33 bp, Homo sapien
gctgtggtacaacatggagcacatgcagacaag

SEQ ID NO: 584403 - DNA, 33 bp, Homo sapien
gtgtgtgttttttcccgctacgtgtccatgtgt

SEQ ID NO: 584404 - DNA, 33 bp, Homo sapien
gtgtgtgttttttccctctacgtgtccatgtgt

SEQ ID NO: 584405 - DNA, 33 bp, Homo sapien
ctgagaaagcataacaacctaaagttccttgat

SEQ ID NO: 584406 - DNA, 33 bp, Homo sapien
ctgagaaagcataacatcctaaagttccttgat

SEQ ID NO: 584407 - DNA, 33 bp, Homo sapien
tttaactgctgaagaacaagatcaccacaatca

SEQ ID NO: 584408 - DNA, 33 bp, Homo sapien
tttaactgctgaagaataagatcaccacaatca

SEQ ID NO: 584409 - DNA, 33 bp, Homo sapien
ctctgtcaagaggttccatggtaatatgatttg

SEQ ID NO: 584410 - DNA, 33 bp, Homo sapien
ctctgtcaagaggttctatggtaatatgatttg

SEQ ID NO: 584411 - DNA, 33 bp, Homo sapien
ctagtgaatcaacagaaaggagattactttagt

SEQ ID NO: 584412 - DNA, 33 bp, Homo sapien
ctagtgaatcaacagagaggagattactttagt

SEQ ID NO: 584413 - DNA, 33 bp, Homo sapien
cctgttcaaagggccacgaagcaagagcacacc

SEQ ID NO: 584414 - DNA, 33 bp, Homo sapien
cctgttcaaagggccatgaagcaagagcacacc

SEQ ID NO: 584415 - DNA, 33 bp, Homo sapien
tcctatgtttgtgaaactgaccatattgatagt

SEQ ID NO: 584416 - DNA, 33 bp, Homo sapien
tcctatgtttgtgaaattgaccatattgatagt

SEQ ID NO: 584417 - DNA, 33 bp, Homo sapien
tcagaaatgaattgaaatgtaaagtctgtgact

SEQ ID NO: 584418 - DNA, 33 bp, Homo sapien
tcagaaatgaattgaagtgtaaagtctgtgact

SEQ ID NO: 584419 - DNA, 33 bp, Homo sapien
taatagttccacctaaaatacctgcctatttca

SEQ ID NO: 584420 - DNA, 33 bp, Homo sapien
taatagttccacctaagatacctgcctatttca

SEQ ID NO: 584421 - DNA, 33 bp, Homo sapien
gtagctgtactgagaaattaggtctcacattca

SEQ ID NO: 584422 - DNA, 33 bp, Homo sapien
gtagctgtactgagaagttaggtctcacattca

SEQ ID NO: 584423 - DNA, 33 bp, Homo sapien
gagggtgagtggatacagaattactaagagaaa

SEQ ID NO: 584424 - DNA, 33 bp, Homo sapien
gagggtgagtggatacggaattactaagagaaa

SEQ ID NO: 584425 - DNA, 33 bp, Homo sapien
tacaccctggatatcagaaacaattgcatttca

SEQ ID NO: 584426 - DNA, 33 bp, Homo sapien
tacaccctggatatcataaacaattgcatttca

SEQ ID NO: 584427 - DNA, 33 bp, Homo sapien
acatttaaaatcttacagaggagtgcgtctttg

SEQ ID NO: 584428 - DNA, 33 bp, Homo sapien
acatttaaaatcttacggaggagtgcgtctttg

SEQ ID NO: 584429 - DNA, 33 bp, Homo sapien
tcaaatacaacaagagccattatgccagcaggt

SEQ ID NO: 584430 - DNA, 33 bp, Homo sapien
tcaaatacaacaagaggcattatgccagcaggt

SEQ ID NO: 584431 - DNA, 33 bp, Homo sapien
gtatttataaaatacactatgcaaaattgtgaa

SEQ ID NO: 584432 - DNA, 33 bp, Homo sapien
gtatttataaaatacagtatgcaaaattgtgaa

SEQ ID NO: 584433 - DNA, 33 bp, Homo sapien
ttgtaactgccctgacaatacatatttatattt

SEQ ID NO: 584434 - DNA, 33 bp, Homo sapien
ttgtaactgccctgactatacatatttatattt

SEQ ID NO: 584435 - DNA, 33 bp, Homo sapien
gtacaatattattacacggttatgctctgtcaa

SEQ ID NO: 584436 - DNA, 33 bp, Homo sapien
gtacaatattattacatggttatgctctgtcaa

SEQ ID NO: 584437 - DNA, 33 bp, Homo sapien
aaaatgtccaaaaagacagccagttggtgagtt

SEQ ID NO: 584438 - DNA, 33 bp, Homo sapien
aaaatgtccaaaaagagagccagttggtgagtt

SEQ ID NO: 584439 - DNA, 33 bp, Homo sapien
tttacttgcagattgtaaagagttttagcaagt

SEQ ID NO: 584440 - DNA, 33 bp, Homo sapien
tttacttgcagattgtgaagagttttagcaagt

SEQ ID NO: 584441 - DNA, 33 bp, Homo sapien
cttaggatttgtctgccatagtgatattctaag

SEQ ID NO: 584442 - DNA, 33 bp, Homo sapien
cttaggatttgtctgctatagtgatattctaag

SEQ ID NO: 584443 - DNA, 33 bp, Homo sapien
aaatacagttaaatacaagcaataagttctaat

SEQ ID NO: 584444 - DNA, 33 bp, Homo sapien
aaatacagttaaataccagcaataagttctaat

SEQ ID NO: 584445 - DNA, 33 bp, Homo sapien
gtttggtatcaactgaagtgtccaatagcaaat

SEQ ID NO: 584446 - DNA, 33 bp, Homo sapien
gtttggtatcaactgaggtgtccaatagcaaat

SEQ ID NO: 584447 - DNA, 33 bp, Homo sapien
agcattactgcacccacagaagaattcagagat

SEQ ID NO: 584448 - DNA, 33 bp, Homo sapien
agcattactgcacccatagaagaattcagagat

SEQ ID NO: 584449 - DNA, 33 bp, Homo sapien
tgacatttcattctccagatggaagagtaaatc

SEQ ID NO: 584450 - DNA, 33 bp, Homo sapien
tgacatttcattctcccgatggaagagtaaatc

SEQ ID NO: 584451 - DNA, 33 bp, Homo sapien
agagtttcttgaaataataatcctttgcaagtg

SEQ ID NO: 584452 - DNA, 33 bp, Homo sapien
agagtttcttgaaatattaatcctttgcaagtg

SEQ ID NO: 584453 - DNA, 33 bp, Homo sapien
gcagagtctatgagagaaagtgtccctacaaaa

SEQ ID NO: 584454 - DNA, 33 bp, Homo sapien
gcagagtctatgagaggaagtgtccctacaaaa

SEQ ID NO: 584455 - DNA, 33 bp, Homo sapien
ttcattccgagagataatacaggcttaaggagt

SEQ ID NO: 584456 - DNA, 33 bp, Homo sapien
ttcattccgagagatactacaggcttaaggagt

SEQ ID NO: 584457 - DNA, 33 bp, Homo sapien
atcttaagtgaccaaaaatctggcagaatagaa

SEQ ID NO: 584458 - DNA, 33 bp, Homo sapien
atcttaagtgaccaaagatctggcagaatagaa

SEQ ID NO: 584459 - DNA, 33 bp, Homo sapien
cattttgcttatctcacggtatttctaattcat

SEQ ID NO: 584460 - DNA, 33 bp, Homo sapien
cattttgcttatctcatggtatttctaattcat

SEQ ID NO: 584461 - DNA, 33 bp, Homo sapien
attcattggtaccttacaatacactggtacttt

SEQ ID NO: 584462 - DNA, 33 bp, Homo sapien
attcattggtaccttagaatacactggtacttt

SEQ ID NO: 584463 - DNA, 33 bp, Homo sapien
gaagagtcaggggttacataagtaccagataca

SEQ ID NO: 584464 - DNA, 33 bp, Homo sapien
gaagagtcaggggttatataagtaccagataca

SEQ ID NO: 584465 - DNA, 33 bp, Homo sapien
agatgtaaagctgcaacaatttgtttccagcat

SEQ ID NO: 584466 - DNA, 33 bp, Homo sapien
agatgtaaagctgcaataatttgtttccagcat

SEQ ID NO: 584467 - DNA, 33 bp, Homo sapien
agtgcctttctcctcccgccacgattctgaggc

SEQ ID NO: 584468 - DNA, 33 bp, Homo sapien
agtgcctttctcctccggccacgattctgaggc

SEQ ID NO: 584469 - DNA, 33 bp, Homo sapien
cccatgagattgcaccaacattgaatacttgca

SEQ ID NO: 584470 - DNA, 33 bp, Homo sapien
cccatgagattgcacccacattgaatacttgca

SEQ ID NO: 584471 - DNA, 33 bp, Homo sapien
ctgccctcactatttcacaaggcatcggtcaag

SEQ ID NO: 584472 - DNA, 33 bp, Homo sapien
ctgccctcactatttcgcaaggcatcggtcaag

SEQ ID NO: 584473 - DNA, 33 bp, Homo sapien
taagacagttatcaggaaaattaataaatgacc

SEQ ID NO: 584474 - DNA, 33 bp, Homo sapien
taagacagttatcagggaaattaataaatgacc

SEQ ID NO: 584475 - DNA, 33 bp, Homo sapien
cttaagactttgaaaaataactgaatttccaat

SEQ ID NO: 584476 - DNA, 33 bp, Homo sapien
cttaagactttgaaaagtaactgaatttccaat

SEQ ID NO: 584477 - DNA, 33 bp, Homo sapien
ggtggtggtacccatcactacatggacataagc

SEQ ID NO: 584478 - DNA, 33 bp, Homo sapien
ggtggtggtacccatcgctacatggacataagc

SEQ ID NO: 584479 - DNA, 33 bp, Homo sapien
aaacaagtctgcataagaatcaattaacatcat

SEQ ID NO: 584480 - DNA, 33 bp, Homo sapien
aaacaagtctgcataataatcaattaacatcat

SEQ ID NO: 584481 - DNA, 33 bp, Homo sapien
gaaggaacataaggaacgttaagtccaaaaaga

SEQ ID NO: 584482 - DNA, 33 bp, Homo sapien
gaaggaacataaggaatgttaagtccaaaaaga

SEQ ID NO: 584483 - DNA, 33 bp, Homo sapien
cctgggttctacatccactggcttgctgcccct

SEQ ID NO: 584484 - DNA, 33 bp, Homo sapien
cctgggttctacatccgctggcttgctgcccct

SEQ ID NO: 584485 - DNA, 33 bp, Homo sapien
tagccacttggtatgaacaaaacttacaaaaaa

SEQ ID NO: 584486 - DNA, 33 bp, Homo sapien
tagccacttggtatgatcaaaacttacaaaaaa

SEQ ID NO: 584487 - DNA, 33 bp, Homo sapien
ctttctgccatgtgagaataatatgaaaagagg

SEQ ID NO: 584488 - DNA, 33 bp, Homo sapien
ctttctgccatgtgagtataatatgaaaagagg

SEQ ID NO: 584489 - DNA, 33 bp, Homo sapien
agaggattttcgatgaagtgaatggcaggaata

SEQ ID NO: 584490 - DNA, 33 bp, Homo sapien
agaggattttcgatgatgtgaatggcaggaata

SEQ ID NO: 584491 - DNA, 33 bp, Homo sapien
cagaataaaaagttcacggagatagaaaataaa

SEQ ID NO: 584492 - DNA, 33 bp, Homo sapien
cagaataaaaagttcagggagatagaaaataaa

SEQ ID NO: 584493 - DNA, 33 bp, Homo sapien
gttcaccagaatggacaacttgtaaaagagctg

SEQ ID NO: 584494 - DNA, 33 bp, Homo sapien
gttcaccagaatggacgacttgtaaaagagctg

SEQ ID NO: 584495 - DNA, 33 bp, Homo sapien
tcttttttattctatccgacaatctgcctttta

SEQ ID NO: 584496 - DNA, 33 bp, Homo sapien
tcttttttattctatctgacaatctgcctttta

SEQ ID NO: 584497 - DNA, 33 bp, Homo sapien
aaattggcagagaataagctgttaaagctatct

SEQ ID NO: 584498 - DNA, 33 bp, Homo sapien
aaattggcagagaatatgctgttaaagctatct

SEQ ID NO: 584499 - DNA, 33 bp, Homo sapien
tgtgcacatatattaggagtcattaaatggtat

SEQ ID NO: 584500 - DNA, 33 bp, Homo sapien
tgtgcacatatattagtagtcattaaatggtat

SEQ ID NO: 584501 - DNA, 33 bp, Homo sapien
gattgagtggtcattacagtaatctacacatat

SEQ ID NO: 584502 - DNA, 33 bp, Homo sapien
gattgagtggtcattatagtaatctacacatat

SEQ ID NO: 584503 - DNA, 33 bp, Homo sapien
tcgaaaagagccaaaacaagtatgtgaatcttt

SEQ ID NO: 584504 - DNA, 33 bp, Homo sapien
tcgaaaagagccaaaataagtatgtgaatcttt

SEQ ID NO: 584505 - DNA, 33 bp, Homo sapien
ataagcttggttatcaagaacccagacatttca

SEQ ID NO: 584506 - DNA, 33 bp, Homo sapien
ataagcttggttatcaggaacccagacatttca

SEQ ID NO: 584507 - DNA, 33 bp, Homo sapien
atcatatactgagaacaagcctgtaagcttcac

SEQ ID NO: 584508 - DNA, 33 bp, Homo sapien
atcatatactgagaacgagcctgtaagcttcac

SEQ ID NO: 584509 - DNA, 33 bp, Homo sapien
tcaaagtcatattttcaatccaaccatttttct

SEQ ID NO: 584510 - DNA, 33 bp, Homo sapien
tcaaagtcatattttcgatccaaccatttttct

SEQ ID NO: 584511 - DNA, 33 bp, Homo sapien
agctgttctcagaggaaatagcaagcaaagact

SEQ ID NO: 584512 - DNA, 33 bp, Homo sapien
agctgttctcagaggacatagcaagcaaagact

SEQ ID NO: 584513 - DNA, 33 bp, Homo sapien
acctagtcccactttccaagcgagagatttttc

SEQ ID NO: 584514 - DNA, 33 bp, Homo sapien
acctagtcccactttctaagcgagagatttttc

SEQ ID NO: 584515 - DNA, 33 bp, Homo sapien
tgaatcccagctcaacgagcagaagccacaaaa

SEQ ID NO: 584516 - DNA, 33 bp, Homo sapien
tgaatcccagctcaactagcagaagccacaaaa

SEQ ID NO: 584517 - DNA, 33 bp, Homo sapien
aaatgtttgaaaaccacgatgaacaacaaaaaa

SEQ ID NO: 584518 - DNA, 33 bp, Homo sapien
aaatgtttgaaaaccatgatgaacaacaaaaaa

SEQ ID NO: 584519 - DNA, 33 bp, Homo sapien
agtaaattattctggccattcatacagagaaag

SEQ ID NO: 584520 - DNA, 33 bp, Homo sapien
agtaaattattctggctattcatacagagaaag

SEQ ID NO: 584521 - DNA, 33 bp, Homo sapien
gtgggtttgttacagacggttgttattattttg

SEQ ID NO: 584522 - DNA, 33 bp, Homo sapien
gtgggtttgttacagatggttgttattattttg

SEQ ID NO: 584523 - DNA, 33 bp, Homo sapien
attatgcagccactaaagtctctggtcaggttt

SEQ ID NO: 584524 - DNA, 33 bp, Homo sapien
attatgcagccactaaggtctctggtcaggttt

SEQ ID NO: 584525 - DNA, 33 bp, Homo sapien
aagacctaaggcatacacaacattaaaatgcat

SEQ ID NO: 584526 - DNA, 33 bp, Homo sapien
aagacctaaggcatacccaacattaaaatgcat

SEQ ID NO: 584527 - DNA, 33 bp, Homo sapien
ctgcctttcatgtcgtaaagatgcatataagac

SEQ ID NO: 584528 - DNA, 33 bp, Homo sapien
ctgcctttcatgtcgtgaagatgcatataagac

SEQ ID NO: 584529 - DNA, 33 bp, Homo sapien
agacctaacgtgatcaatactggagaatattct

SEQ ID NO: 584530 - DNA, 33 bp, Homo sapien
agacctaacgtgatcagtactggagaatattct

SEQ ID NO: 584531 - DNA, 33 bp, Homo sapien
aatagcactttatagaagaaggactatgtttta

SEQ ID NO: 584532 - DNA, 33 bp, Homo sapien
aatagcactttatagaggaaggactatgtttta

SEQ ID NO: 584533 - DNA, 33 bp, Homo sapien
tagcgcaatgataaaaatcacctaatgacgcac

SEQ ID NO: 584534 - DNA, 33 bp, Homo sapien
tagcgcaatgataaaagtcacctaatgacgcac

SEQ ID NO: 584535 - DNA, 33 bp, Homo sapien
tgagagactgaactaaactgtaatggactaatt

SEQ ID NO: 584536 - DNA, 33 bp, Homo sapien
tgagagactgaactaagctgtaatggactaatt

SEQ ID NO: 584537 - DNA, 33 bp, Homo sapien
catggcaggaacctgaagattattgtttgctct

SEQ ID NO: 584538 - DNA, 33 bp, Homo sapien
catggcaggaacctgaggattattgtttgctct

SEQ ID NO: 584539 - DNA, 33 bp, Homo sapien
ctctttttgcgaataacctgcatttttaccatt

SEQ ID NO: 584540 - DNA, 33 bp, Homo sapien
ctctttttgcgaataatctgcatttttaccatt

SEQ ID NO: 584541 - DNA, 33 bp, Homo sapien
agaataaaagatgtgaacacacgaaattacagc

SEQ ID NO: 584542 - DNA, 33 bp, Homo sapien
agaataaaagatgtgagcacacgaaattacagc

SEQ ID NO: 584543 - DNA, 33 bp, Homo sapien
gtgtggagtatggggacgtacctgttatgcaac

SEQ ID NO: 584544 - DNA, 33 bp, Homo sapien
gtgtggagtatggggatgtacctgttatgcaac

SEQ ID NO: 584545 - DNA, 33 bp, Homo sapien
gtttcatgctcttagacgtttataggcccatca

SEQ ID NO: 584546 - DNA, 33 bp, Homo sapien
gtttcatgctcttagatgtttataggcccatca

SEQ ID NO: 584547 - DNA, 33 bp, Homo sapien
ggtcagttagtttttacgctaacatatgtcctc

SEQ ID NO: 584548 - DNA, 33 bp, Homo sapien
ggtcagttagtttttatgctaacatatgtcctc

SEQ ID NO: 584549 - DNA, 33 bp, Homo sapien
gatacttaatactcgcaatgattattactattg

SEQ ID NO: 584550 - DNA, 33 bp, Homo sapien
gatacttaatactcgcgatgattattactattg

SEQ ID NO: 584551 - DNA, 33 bp, Homo sapien
atagtatgttaaacaactggtaactcatttaac

SEQ ID NO: 584552 - DNA, 33 bp, Homo sapien
atagtatgttaaacaagtggtaactcatttaac

SEQ ID NO: 584553 - DNA, 33 bp, Homo sapien
tgttggtagccatgtgaaactaacatactacat

SEQ ID NO: 584554 - DNA, 33 bp, Homo sapien
tgttggtagccatgtggaactaacatactacat

SEQ ID NO: 584555 - DNA, 33 bp, Homo sapien
gttatggacaatgtgacatgaggcaagtttaaa

SEQ ID NO: 584556 - DNA, 33 bp, Homo sapien
gttatggacaatgtgatatgaggcaagtttaaa

SEQ ID NO: 584557 - DNA, 33 bp, Homo sapien
acaaacagttaatcatgaaggcctcaaatttac

SEQ ID NO: 584558 - DNA, 33 bp, Homo sapien
acaaacagttaatcattaaggcctcaaatttac

SEQ ID NO: 584559 - DNA, 33 bp, Homo sapien
tgcataattacagtacagaatagctcttgtaaa

SEQ ID NO: 584560 - DNA, 33 bp, Homo sapien
tgcataattacagtaccgaatagctcttgtaaa

SEQ ID NO: 584561 - DNA, 33 bp, Homo sapien
tgtatactcaatcctgcattttatggcataatt

SEQ ID NO: 584562 - DNA, 33 bp, Homo sapien
tgtatactcaatcctgtattttatggcataatt

SEQ ID NO: 584563 - DNA, 33 bp, Homo sapien
ataggctgtgaaaaatcaggcatgtatattata

SEQ ID NO: 584564 - DNA, 33 bp, Homo sapien
ataggctgtgaaaaattaggcatgtatattata

SEQ ID NO: 584565 - DNA, 33 bp, Homo sapien
ttttcttgttttgagaaattgctatagccaatc

SEQ ID NO: 584566 - DNA, 33 bp, Homo sapien
ttttcttgttttgagagattgctatagccaatc

SEQ ID NO: 584567 - DNA, 33 bp, Homo sapien
accatatttgctttgcccaatctgcctttgatg

SEQ ID NO: 584568 - DNA, 33 bp, Homo sapien
accatatttgctttgctcaatctgcctttgatg

SEQ ID NO: 584569 - DNA, 33 bp, Homo sapien
ctctatgtatcttctactacctgagattaataa

SEQ ID NO: 584570 - DNA, 33 bp, Homo sapien
ctctatgtatcttctattacctgagattaataa

SEQ ID NO: 584571 - DNA, 33 bp, Homo sapien
ttaagattacctatcaaacaatttgcagccaaa

SEQ ID NO: 584572 - DNA, 33 bp, Homo sapien
ttaagattacctatcagacaatttgcagccaaa

SEQ ID NO: 584573 - DNA, 33 bp, Homo sapien
agacaaaattcattcacgagtgctattataaaa

SEQ ID NO: 584574 - DNA, 33 bp, Homo sapien
agacaaaattcattcatgagtgctattataaaa

SEQ ID NO: 584575 - DNA, 33 bp, Homo sapien
ttaaccagtcatctccactgcgatgctatgaat

SEQ ID NO: 584576 - DNA, 33 bp, Homo sapien
ttaaccagtcatctccgctgcgatgctatgaat

SEQ ID NO: 584577 - DNA, 33 bp, Homo sapien
ttttaagccaccgaaactcagagtttgtatatt

SEQ ID NO: 584578 - DNA, 33 bp, Homo sapien
ttttaagccaccgaaattcagagtttgtatatt

SEQ ID NO: 584579 - DNA, 33 bp, Homo sapien
gaggctgattgatcaaaagtgcatttggagaaa

SEQ ID NO: 584580 - DNA, 33 bp, Homo sapien
gaggctgattgatcaacagtgcatttggagaaa

SEQ ID NO: 584581 - DNA, 33 bp, Homo sapien
tcctctgttcttgcaacctgtctttaaaatttt

SEQ ID NO: 584582 - DNA, 33 bp, Homo sapien
tcctctgttcttgcaatctgtctttaaaatttt

SEQ ID NO: 584583 - DNA, 33 bp, Homo sapien
ctcgttctgaaatgataaaatttactgtgactt

SEQ ID NO: 584584 - DNA, 33 bp, Homo sapien
ctcgttctgaaatgatcaaatttactgtgactt

SEQ ID NO: 584585 - DNA, 33 bp, Homo sapien
cgtcataatgtttggacacagtgccttttaaaa

SEQ ID NO: 584586 - DNA, 33 bp, Homo sapien
cgtcataatgtttggagacagtgccttttaaaa

SEQ ID NO: 584587 - DNA, 33 bp, Homo sapien
aatttcataggaagttcaaagcaaagcaagttt

SEQ ID NO: 584588 - DNA, 33 bp, Homo sapien
aatttcataggaagttgaaagcaaagcaagttt

SEQ ID NO: 584589 - DNA, 33 bp, Homo sapien
actttaccagcatatcaacagggttacaatata

SEQ ID NO: 584590 - DNA, 33 bp, Homo sapien
actttaccagcatatccacagggttacaatata

SEQ ID NO: 584591 - DNA, 33 bp, Homo sapien
atggagtagtaagtcacatagagtcatgaaaca

SEQ ID NO: 584592 - DNA, 33 bp, Homo sapien
atggagtagtaagtcatatagagtcatgaaaca

SEQ ID NO: 584593 - DNA, 33 bp, Homo sapien
atggacgaataaaaacaacgacgataaatctca

SEQ ID NO: 584594 - DNA, 33 bp, Homo sapien
atggacgaataaaaacgacgacgataaatctca

SEQ ID NO: 584595 - DNA, 33 bp, Homo sapien
agagaatacagtgcaccctggagactattatta

SEQ ID NO: 584596 - DNA, 33 bp, Homo sapien
agagaatacagtgcactctggagactattatta

SEQ ID NO: 584597 - DNA, 33 bp, Homo sapien
taagtgttctagaaaaacttgacattattactg

SEQ ID NO: 584598 - DNA, 33 bp, Homo sapien
taagtgttctagaaaaccttgacattattactg

SEQ ID NO: 584599 - DNA, 33 bp, Homo sapien
cctaactggtaaaatacatgatctattgcctta

SEQ ID NO: 584600 - DNA, 33 bp, Homo sapien
cctaactggtaaaatatatgatctattgcctta

SEQ ID NO: 584601 - DNA, 33 bp, Homo sapien
gtgcattaattgtaagaatataactggtaaaca

SEQ ID NO: 584602 - DNA, 33 bp, Homo sapien
gtgcattaattgtaagtatataactggtaaaca

SEQ ID NO: 584603 - DNA, 33 bp, Homo sapien
aaggatatttggataacgaagggtgagaagtga

SEQ ID NO: 584604 - DNA, 33 bp, Homo sapien
aaggatatttggataatgaagggtgagaagtga

SEQ ID NO: 584605 - DNA, 33 bp, Homo sapien
ttatgaatggagcaaacgtaaaattttataatt

SEQ ID NO: 584606 - DNA, 33 bp, Homo sapien
ttatgaatggagcaaatgtaaaattttataatt

SEQ ID NO: 584607 - DNA, 33 bp, Homo sapien
tatacaaatgttaaacactggcgaacacaatct

SEQ ID NO: 584608 - DNA, 33 bp, Homo sapien
tatacaaatgttaaaccctggcgaacacaatct

SEQ ID NO: 584609 - DNA, 33 bp, Homo sapien
tctaaactacttgtaaggcacctatattcttat

SEQ ID NO: 584610 - DNA, 33 bp, Homo sapien
tctaaactacttgtaatgcacctatattcttat

SEQ ID NO: 584611 - DNA, 33 bp, Homo sapien
aaatgaagtaaagagaaatgttaggtgaatact

SEQ ID NO: 584612 - DNA, 33 bp, Homo sapien
aaatgaagtaaagagagatgttaggtgaatact

SEQ ID NO: 584613 - DNA, 33 bp, Homo sapien
agaaatctgttaaccacaaaaaaatcaggataa

SEQ ID NO: 584614 - DNA, 33 bp, Homo sapien
agaaatctgttaaccataaaaaaatcaggataa

SEQ ID NO: 584615 - DNA, 33 bp, Homo sapien
acaaacaatctaattacgctcttttagttattt

SEQ ID NO: 584616 - DNA, 33 bp, Homo sapien
acaaacaatctaattatgctcttttagttattt

SEQ ID NO: 584617 - DNA, 33 bp, Homo sapien
tttttctgcaaaattacgtgattcacaactaca

SEQ ID NO: 584618 - DNA, 33 bp, Homo sapien
tttttctgcaaaattatgtgattcacaactaca

SEQ ID NO: 584619 - DNA, 33 bp, Homo sapien
taagaaaacagaagccgatcactacattaatct

SEQ ID NO: 584620 - DNA, 33 bp, Homo sapien
taagaaaacagaagcctatcactacattaatct

SEQ ID NO: 584621 - DNA, 33 bp, Homo sapien
aaattgtaaacgtctacgcatctaaggacacaa

SEQ ID NO: 584622 - DNA, 33 bp, Homo sapien
aaattgtaaacgtctatgcatctaaggacacaa

SEQ ID NO: 584623 - DNA, 33 bp, Homo sapien
attttgggacaattaaacattcacttctgattt

SEQ ID NO: 584624 - DNA, 33 bp, Homo sapien
attttgggacaattaagcattcacttctgattt

SEQ ID NO: 584625 - DNA, 33 bp, Homo sapien
taactatttcattctcaaaacaaatctaaagtt

SEQ ID NO: 584626 - DNA, 33 bp, Homo sapien
taactatttcattctccaaacaaatctaaagtt

SEQ ID NO: 584627 - DNA, 33 bp, Homo sapien
taaccttcatggtaataacactagaaactgggg

SEQ ID NO: 584628 - DNA, 33 bp, Homo sapien
taaccttcatggtaatgacactagaaactgggg

SEQ ID NO: 584629 - DNA, 33 bp, Homo sapien
aaaacaaaaagaaatacaaatgtgcaacagaga

SEQ ID NO: 584630 - DNA, 33 bp, Homo sapien
aaaacaaaaagaaatataaatgtgcaacagaga

SEQ ID NO: 584631 - DNA, 33 bp, Homo sapien
ttaattaagattgccaccacaaaatatgtttca

SEQ ID NO: 584632 - DNA, 33 bp, Homo sapien
ttaattaagattgccagcacaaaatatgtttca

SEQ ID NO: 584633 - DNA, 33 bp, Homo sapien
gcttttctctctagcccattagactggttgcct

SEQ ID NO: 584634 - DNA, 33 bp, Homo sapien
gcttttctctctagcctattagactggttgcct

SEQ ID NO: 584635 - DNA, 33 bp, Homo sapien
ataggaatttgtctataaagaaatcactgtata

SEQ ID NO: 584636 - DNA, 33 bp, Homo sapien
ataggaatttgtctatgaagaaatcactgtata

SEQ ID NO: 584637 - DNA, 33 bp, Homo sapien; identical to SEQ ID NO: 584635

SEQ ID NO: 584638 - DNA, 33 bp, Homo sapien; identical to SEQ ID NO: 584636

SEQ ID NO: 584639 - DNA, 33 bp, Homo sapien
gagcaaaataatgcaacgctagaggaggcaaaa

SEQ ID NO: 584640 - DNA, 33 bp, Homo sapien
gagcaaaataatgcaatgctagaggaggcaaaa

SEQ ID NO: 584641 - DNA, 33 bp, Homo sapien
agaaatgagactcctacggggtaacgggtgtat

SEQ ID NO: 584642 - DNA, 33 bp, Homo sapien
agaaatgagactcctatggggtaacgggtgtat

SEQ ID NO: 584643 - DNA, 33 bp, Homo sapien
caagacctctaaataaaaagaggacaaagatgg

SEQ ID NO: 584644 - DNA, 33 bp, Homo sapien
caagacctctaaataagaagaggacaaagatgg

SEQ ID NO: 584645 - DNA, 33 bp, Homo sapien
atgagcaacacctaccacaactaatggttttgc

SEQ ID NO: 584646 - DNA, 33 bp, Homo sapien
atgagcaacacctaccgcaactaatggttttgc

SEQ ID NO: 584647 - DNA, 33 bp, Homo sapien
tcactgatcaattgacaaaagatccttaccaaa

SEQ ID NO: 584648 - DNA, 33 bp, Homo sapien
tcactgatcaattgacgaaagatccttaccaaa

SEQ ID NO: 584649 - DNA, 33 bp, Homo sapien
ctgattgatgataaaaatagagagttaaaattt

SEQ ID NO: 584650 - DNA, 33 bp, Homo sapien
ctgattgatgataaaactagagagttaaaattt

SEQ ID NO: 584651 - DNA, 33 bp, Homo sapien
ctttcctttgcctgtcactccattctgtgatat

SEQ ID NO: 584652 - DNA, 33 bp, Homo sapien
ctttcctttgcctgtcgctccattctgtgatat

SEQ ID NO: 584653 - DNA, 33 bp, Homo sapien
ttgttaaagtttgtaacaatgaaatagagaaaa

SEQ ID NO: 584654 - DNA, 33 bp, Homo sapien
ttgttaaagtttgtaataatgaaatagagaaaa

SEQ ID NO: 584655 - DNA, 33 bp, Homo sapien
cttattcactcaaatgcagctaagtgtattgct

SEQ ID NO: 584656 - DNA, 33 bp, Homo sapien
cttattcactcaaatggagctaagtgtattgct

SEQ ID NO: 584657 - DNA, 33 bp, Homo sapien
gccaagttgtgttccaacagagagatcaacatt

SEQ ID NO: 584658 - DNA, 33 bp, Homo sapien
gccaagttgtgttccagcagagagatcaacatt

SEQ ID NO: 584659 - DNA, 33 bp, Homo sapien
tatacagaagagtacagtaagtgcatcattttt

SEQ ID NO: 584660 - DNA, 33 bp, Homo sapien
tatacagaagagtacattaagtgcatcattttt

SEQ ID NO: 584661 - DNA, 33 bp, Homo sapien
agcacagaaaactgaacgtggccaagaggtaca

SEQ ID NO: 584662 - DNA, 33 bp, Homo sapien
agcacagaaaactgaatgtggccaagaggtaca

SEQ ID NO: 584663 - DNA, 33 bp, Homo sapien
gtctttcatcagacaaatagacgttattaaaag

SEQ ID NO: 584664 - DNA, 33 bp, Homo sapien
gtctttcatcagacaagtagacgttattaaaag

SEQ ID NO: 584665 - DNA, 33 bp, Homo sapien
atatgtctgcaatatactaaggactgatataaa

SEQ ID NO: 584666 - DNA, 33 bp, Homo sapien
atatgtctgcaatatagtaaggactgatataaa

SEQ ID NO: 584667 - DNA, 33 bp, Homo sapien
gagtttggaacaaaaacgtgtcgtgaggggggt

SEQ ID NO: 584668 - DNA, 33 bp, Homo sapien
gagtttggaacaaaaatgtgtcgtgaggggggt

SEQ ID NO: 584669 - DNA, 33 bp, Homo sapien
ggagcccaaaagcataagataacacaagcacat

SEQ ID NO: 584670 - DNA, 33 bp, Homo sapien
ggagcccaaaagcatacgataacacaagcacat

SEQ ID NO: 584671 - DNA, 33 bp, Homo sapien
ctcacagctgctgttagccaggaatcagttgta

SEQ ID NO: 584672 - DNA, 33 bp, Homo sapien
ctcacagctgctgttatccaggaatcagttgta

SEQ ID NO: 584673 - DNA, 33 bp, Homo sapien
tgtttgtttctatatccatgctgaaatctggct

SEQ ID NO: 584674 - DNA, 33 bp, Homo sapien
tgtttgtttctatatctatgctgaaatctggct

SEQ ID NO: 584675 - DNA, 33 bp, Homo sapien
ctgaaactgagactaacggtcttccttataaag

SEQ ID NO: 584676 - DNA, 33 bp, Homo sapien
ctgaaactgagactaatggtcttccttataaag

SEQ ID NO: 584677 - DNA, 33 bp, Homo sapien
attaagtgcttagtgacctctatgacagaaaag

SEQ ID NO: 584678 - DNA, 33 bp, Homo sapien
attaagtgcttagtgatctctatgacagaaaag

SEQ ID NO: 584679 - DNA, 33 bp, Homo sapien
aaaacattgactaagagctctataaatgttact

SEQ ID NO: 584680 - DNA, 33 bp, Homo sapien
aaaacattgactaagatctctataaatgttact

SEQ ID NO: 584681 - DNA, 33 bp, Homo sapien
agaatttctagcaaaaccgtgggcaatattatc

SEQ ID NO: 584682 - DNA, 33 bp, Homo sapien
agaatttctagcaaaatcgtgggcaatattatc

SEQ ID NO: 584683 - DNA, 33 bp, Homo sapien
tgtagttgtcactgtagagacctttaatctccc

SEQ ID NO: 584684 - DNA, 33 bp, Homo sapien
tgtagttgtcactgtatagacctttaatctccc

SEQ ID NO: 584685 - DNA, 33 bp, Homo sapien
aaattaatgaaggagacgatttcaggataacat

SEQ ID NO: 584686 - DNA, 33 bp, Homo sapien
aaattaatgaaggagatgatttcaggataacat

SEQ ID NO: 584687 - DNA, 33 bp, Homo sapien
gtgttctgggtcattacatattatgttactatt

SEQ ID NO: 584688 - DNA, 33 bp, Homo sapien
gtgttctgggtcattatatattatgttactatt

SEQ ID NO: 584689 - DNA, 33 bp, Homo sapien
atcatcataatttagaacttttttgtgtgtgtt

SEQ ID NO: 584690 - DNA, 33 bp, Homo sapien
atcatcataatttagaccttttttgtgtgtgtt

SEQ ID NO: 584691 - DNA, 33 bp, Homo sapien
tctttcaatatattgacggtcaatgtttcctat

SEQ ID NO: 584692 - DNA, 33 bp, Homo sapien
tctttcaatatattgatggtcaatgtttcctat

SEQ ID NO: 584693 - DNA, 33 bp, Homo sapien
agtagccgtaaaataacgtgggtgtgaaataat

SEQ ID NO: 584694 - DNA, 33 bp, Homo sapien
agtagccgtaaaataatgtgggtgtgaaataat

SEQ ID NO: 584695 - DNA, 33 bp, Homo sapien
atgtgcatattggcagccattgattacagtggt

SEQ ID NO: 584696 - DNA, 33 bp, Homo sapien
atgtgcatattggcagtcattgattacagtggt

SEQ ID NO: 584697 - DNA, 33 bp, Homo sapien
cttgtattcttcttgacaaaattgttcagaaaa

SEQ ID NO: 584698 - DNA, 33 bp, Homo sapien
cttgtattcttcttgataaaattgttcagaaaa

SEQ ID NO: 584699 - DNA, 33 bp, Homo sapien
ggtaaaatggcaagtacagaaacagaaactccg

SEQ ID NO: 584700 - DNA, 33 bp, Homo sapien
ggtaaaatggcaagtatagaaacagaaactccg

SEQ ID NO: 584701 - DNA, 33 bp, Homo sapien
gatgtgaaaaacagaactgaagattttggttaa

SEQ ID NO: 584702 - DNA, 33 bp, Homo sapien
gatgtgaaaaacagaattgaagattttggttaa

SEQ ID NO: 584703 - DNA, 33 bp, Homo sapien
tcaatttatagtttccaaaaatagttgcacatt

SEQ ID NO: 584704 - DNA, 33 bp, Homo sapien
tcaatttatagtttccgaaaatagttgcacatt

SEQ ID NO: 584705 - DNA, 33 bp, Homo sapien
ccatcaggtagttacaatatgcctccttttaat

SEQ ID NO: 584706 - DNA, 33 bp, Homo sapien
ccatcaggtagttacagtatgcctccttttaat

SEQ ID NO: 584707 - DNA, 33 bp, Homo sapien
gaagaacggaacgtaaatatatcaattctgccg

SEQ ID NO: 584708 - DNA, 33 bp, Homo sapien
gaagaacggaacgtaactatatcaattctgccg

SEQ ID NO: 584709 - DNA, 33 bp, Homo sapien
gttagaggtagagccaatggaatcaaagaatgg

SEQ ID NO: 584710 - DNA, 33 bp, Homo sapien
gttagaggtagagccagtggaatcaaagaatgg

SEQ ID NO: 584711 - DNA, 33 bp, Homo sapien
tattattgacccaaaggcttgcatatatacagt

SEQ ID NO: 584712 - DNA, 33 bp, Homo sapien
tattattgacccaaagtcttgcatatatacagt

SEQ ID NO: 584713 - DNA, 33 bp, Homo sapien
ttagaattccctattaacttgcttttattcttt

SEQ ID NO: 584714 - DNA, 33 bp, Homo sapien
ttagaattccctattaccttgcttttattcttt

SEQ ID NO: 584715 - DNA, 33 bp, Homo sapien
aaaggacacaatcttacggtttcttatggctgc

SEQ ID NO: 584716 - DNA, 33 bp, Homo sapien
aaaggacacaatcttatggtttcttatggctgc

SEQ ID NO: 584717 - DNA, 33 bp, Homo sapien
agtcatttgctgatgaaaagattcttgagtgct

SEQ ID NO: 584718 - DNA, 33 bp, Homo sapien
agtcatttgctgatgataagattcttgagtgct

SEQ ID NO: 584719 - DNA, 33 bp, Homo sapien
aggcaataccttgatgcactccatgcttccacc

SEQ ID NO: 584720 - DNA, 33 bp, Homo sapien
aggcaataccttgatgtactccatgcttccacc

SEQ ID NO: 584721 - DNA, 33 bp, Homo sapien
tagatctttctgggtacggttaaacatggaagt

SEQ ID NO: 584722 - DNA, 33 bp, Homo sapien
tagatctttctgggtatggttaaacatggaagt

SEQ ID NO: 584723 - DNA, 33 bp, Homo sapien
agtgacagagacacccaagttttatttctcttg

SEQ ID NO: 584724 - DNA, 33 bp, Homo sapien
agtgacagagacacccgagttttatttctcttg

SEQ ID NO: 584725 - DNA, 33 bp, Homo sapien
tctctgtcactctaaacagcctgtaggagccac

SEQ ID NO: 584726 - DNA, 33 bp, Homo sapien
tctctgtcactctaaatagcctgtaggagccac

SEQ ID NO: 584727 - DNA, 33 bp, Homo sapien
cacatcttcattcataccttttaactattagag

SEQ ID NO: 584728 - DNA, 33 bp, Homo sapien
cacatcttcattcatagcttttaactattagag

SEQ ID NO: 584729 - DNA, 33 bp, Homo sapien
ccattaccttgagtagcaacatagaaattcata

SEQ ID NO: 584730 - DNA, 33 bp, Homo sapien
ccattaccttgagtagtaacatagaaattcata

SEQ ID NO: 584731 - DNA, 33 bp, Homo sapien
tttgtggtaatattaacggcaatgaggcacact

SEQ ID NO: 584732 - DNA, 33 bp, Homo sapien
tttgtggtaatattaatggcaatgaggcacact

SEQ ID NO: 584733 - DNA, 33 bp, Homo sapien
ataattgatagtacgaatagaccaaaatcagtc

SEQ ID NO: 584734 - DNA, 33 bp, Homo sapien
ataattgatagtacgagtagaccaaaatcagtc

SEQ ID NO: 584735 - DNA, 33 bp, Homo sapien
tatctacctcaaaagcagatctccaaagagcaa

SEQ ID NO: 584736 - DNA, 33 bp, Homo sapien
tatctacctcaaaagcggatctccaaagagcaa

SEQ ID NO: 584737 - DNA, 33 bp, Homo sapien
tttcaaacatattgtcaaccatataaaaggtta

SEQ ID NO: 584738 - DNA, 33 bp, Homo sapien
tttcaaacatattgtcgaccatataaaaggtta

SEQ ID NO: 584739 - DNA, 33 bp, Homo sapien
tgattatctggaaatacgtggtgtacaaatggc

SEQ ID NO: 584740 - DNA, 33 bp, Homo sapien
tgattatctggaaatatgtggtgtacaaatggc

SEQ ID NO: 584741 - DNA, 33 bp, Homo sapien
ctattctcccacagtaactcctcataaaggtat

SEQ ID NO: 584742 - DNA, 33 bp, Homo sapien
ctattctcccacagtatctcctcataaaggtat

SEQ ID NO: 584743 - DNA, 33 bp, Homo sapien
gaagccaaaggtactaaacatcaaaaaacaaga

SEQ ID NO: 584744 - DNA, 33 bp, Homo sapien
gaagccaaaggtactatacatcaaaaaacaaga

SEQ ID NO: 584745 - DNA, 33 bp, Homo sapien
atgtgtagatttgagaagtaggtaaattatgtg

SEQ ID NO: 584746 - DNA, 33 bp, Homo sapien
atgtgtagatttgagatgtaggtaaattatgtg

SEQ ID NO: 584747 - DNA, 33 bp, Homo sapien
aaaaatggtgaacaacagtatgcctttaataag

SEQ ID NO: 584748 - DNA, 33 bp, Homo sapien
aaaaatggtgaacaacggtatgcctttaataag

SEQ ID NO: 584749 - DNA, 33 bp, Homo sapien
atcacttaggctgaatcaatatcatatagtact

SEQ ID NO: 584750 - DNA, 33 bp, Homo sapien
atcacttaggctgaatgaatatcatatagtact

SEQ ID NO: 584751 - DNA, 33 bp, Homo sapien
tttaatgaaatcctataaacaacataatggata

SEQ ID NO: 584752 - DNA, 33 bp, Homo sapien
tttaatgaaatcctatgaacaacataatggata

SEQ ID NO: 584753 - DNA, 33 bp, Homo sapien
attgccagagataacaacccggagatgagagat

SEQ ID NO: 584754 - DNA, 33 bp, Homo sapien
attgccagagataacagcccggagatgagagat

SEQ ID NO: 584755 - DNA, 33 bp, Homo sapien
tagaagcttttctcataagagatgttcaagaaa

SEQ ID NO: 584756 - DNA, 33 bp, Homo sapien
tagaagcttttctcatgagagatgttcaagaaa

SEQ ID NO: 584757 - DNA, 33 bp, Homo sapien
tgtaaggtagaatgcaaaagtgatccaatacca

SEQ ID NO: 584758 - DNA, 33 bp, Homo sapien
tgtaaggtagaatgcagaagtgatccaatacca

SEQ ID NO: 584759 - DNA, 33 bp, Homo sapien
tctgataacatcacaaaatattcaaaattttag

SEQ ID NO: 584760 - DNA, 33 bp, Homo sapien
tctgataacatcacaacatattcaaaattttag

SEQ ID NO: 584761 - DNA, 33 bp, Homo sapien
tgctgcgacagttcagactcagcagtactactt

SEQ ID NO: 584762 - DNA, 33 bp, Homo sapien
tgctgcgacagttcaggctcagcagtactactt

SEQ ID NO: 584763 - DNA, 33 bp, Homo sapien
caggaacacaagggtgaaatgaatcttattagg

SEQ ID NO: 584764 - DNA, 33 bp, Homo sapien
caggaacacaagggtggaatgaatcttattagg

SEQ ID NO: 584765 - DNA, 33 bp, Homo sapien
tcttacacatagcaaaatatcaatgctactttt

SEQ ID NO: 584766 - DNA, 33 bp, Homo sapien
tcttacacatagcaaattatcaatgctactttt

SEQ ID NO: 584767 - DNA, 33 bp, Homo sapien
cacctatattcacttgcagttaacgaagcctac

SEQ ID NO: 584768 - DNA, 33 bp, Homo sapien
cacctatattcacttgtagttaacgaagcctac

SEQ ID NO: 584769 - DNA, 33 bp, Homo sapien
gatattagatttttcacggagctattggaaaag

SEQ ID NO: 584770 - DNA, 33 bp, Homo sapien
gatattagatttttcatggagctattggaaaag

SEQ ID NO: 584771 - DNA, 33 bp, Homo sapien
atgtaaaagttttcaactgttctattacacatt

SEQ ID NO: 584772 - DNA, 33 bp, Homo sapien
atgtaaaagttttcaattgttctattacacatt

SEQ ID NO: 584773 - DNA, 33 bp, Homo sapien
atgacagacatactaaccctctcttcaaaacag

SEQ ID NO: 584774 - DNA, 33 bp, Homo sapien
atgacagacatactaatcctctcttcaaaacag

SEQ ID NO: 584775 - DNA, 33 bp, Homo sapien
gcagtaagctgagaaacggaaatgtttgataat

SEQ ID NO: 584776 - DNA, 33 bp, Homo sapien
gcagtaagctgagaaatggaaatgtttgataat

SEQ ID NO: 584777 - DNA, 33 bp, Homo sapien
ttagaattttgctttacagtcaagaggagctca

SEQ ID NO: 584778 - DNA, 33 bp, Homo sapien
ttagaattttgctttatagtcaagaggagctca

SEQ ID NO: 584779 - DNA, 33 bp, Homo sapien
taaatcagaaagcctaaaagaaacttcacatat

SEQ ID NO: 584780 - DNA, 33 bp, Homo sapien
taaatcagaaagcctagaagaaacttcacatat

SEQ ID NO: 584781 - DNA, 33 bp, Homo sapien
caaaatacaatcgaaaactttatcagtaaaaca

SEQ ID NO: 584782 - DNA, 33 bp, Homo sapien
caaaatacaatcgaaagctttatcagtaaaaca

SEQ ID NO: 584783 - DNA, 33 bp, Homo sapien
agatattacaatattacggacaatttggtgaaa

SEQ ID NO: 584784 - DNA, 33 bp, Homo sapien
agatattacaatattatggacaatttggtgaaa

SEQ ID NO: 584785 - DNA, 33 bp, Homo sapien
agacaaacctcattatgagaaaacacgtatcag

SEQ ID NO: 584786 - DNA, 33 bp, Homo sapien
agacaaacctcattattagaaaacacgtatcag

SEQ ID NO: 584787 - DNA, 33 bp, Homo sapien
atattaatgtctattcacatttacagtggttta

SEQ ID NO: 584788 - DNA, 33 bp, Homo sapien
atattaatgtctattcgcatttacagtggttta

SEQ ID NO: 584789 - DNA, 33 bp, Homo sapien
tgttataaagcaagtaacaaaatactccagatt

SEQ ID NO: 584790 - DNA, 33 bp, Homo sapien
tgttataaagcaagtaccaaaatactccagatt

SEQ ID NO: 584791 - DNA, 33 bp, Homo sapien
aagtaaatctgggttcaacattcaatattgttt

SEQ ID NO: 584792 - DNA, 33 bp, Homo sapien
aagtaaatctgggttcgacattcaatattgttt

SEQ ID NO: 584793 - DNA, 33 bp, Homo sapien
tatcttgtgtatgctgaaggtagtataaatttg

SEQ ID NO: 584794 - DNA, 33 bp, Homo sapien
tatcttgtgtatgctggaggtagtataaatttg

SEQ ID NO: 584795 - DNA, 33 bp, Homo sapien
gtggaaatttttatcactcaggttgttctctca

SEQ ID NO: 584796 - DNA, 33 bp, Homo sapien
gtggaaatttttatcattcaggttgttctctca

SEQ ID NO: 584797 - DNA, 33 bp, Homo sapien
agccacagcagttttacctaggaggaaaaggac

SEQ ID NO: 584798 - DNA, 33 bp, Homo sapien
agccacagcagttttatctaggaggaaaaggac

SEQ ID NO: 584799 - DNA, 33 bp, Homo sapien
atacatgggagtcccaaaaaagtatgagattca

SEQ ID NO: 584800 - DNA, 33 bp, Homo sapien
atacatgggagtcccacaaaagtatgagattca

SEQ ID NO: 584801 - DNA, 33 bp, Homo sapien
atacagataaagccccccaaaagaaatgtatga

SEQ ID NO: 584802 - DNA, 33 bp, Homo sapien
atacagataaagcccctcaaaagaaatgtatga

SEQ ID NO: 584803 - DNA, 33 bp, Homo sapien
ttttttcttcatagcaatgatttccacaaggat

SEQ ID NO: 584804 - DNA, 33 bp, Homo sapien
ttttttcttcatagcagtgatttccacaaggat

SEQ ID NO: 584805 - DNA, 33 bp, Homo sapien
cactaccaagcaactacagttcatgcatagcac

SEQ ID NO: 584806 - DNA, 33 bp, Homo sapien
cactaccaagcaactagagttcatgcatagcac

SEQ ID NO: 584807 - DNA, 33 bp, Homo sapien
atgttaccttacatggaaaaatagattctccag

SEQ ID NO: 584808 - DNA, 33 bp, Homo sapien
atgttaccttacatggcaaaatagattctccag

SEQ ID NO: 584809 - DNA, 33 bp, Homo sapien
gtgtgcaccaaactcactcctgattactgctgt

SEQ ID NO: 584810 - DNA, 33 bp, Homo sapien
gtgtgcaccaaactcattcctgattactgctgt

SEQ ID NO: 584811 - DNA, 33 bp, Homo sapien
tccgatatgatccaaacaatgtgcaataaagag

SEQ ID NO: 584812 - DNA, 33 bp, Homo sapien
tccgatatgatccaaataatgtgcaataaagag

SEQ ID NO: 584813 - DNA, 33 bp, Homo sapien
caaccaagagagcaataaaaagccagaaaagca

SEQ ID NO: 584814 - DNA, 33 bp, Homo sapien
caaccaagagagcaatgaaaagccagaaaagca

SEQ ID NO: 584815 - DNA, 33 bp, Homo sapien
tcttagctcaaaggcacgaaaatacaggccaga

SEQ ID NO: 584816 - DNA, 33 bp, Homo sapien
tcttagctcaaaggcatgaaaatacaggccaga

SEQ ID NO: 584817 - DNA, 33 bp, Homo sapien
aaaacacaaaattttaactctacgatttcagaa

SEQ ID NO: 584818 - DNA, 33 bp, Homo sapien
aaaacacaaaattttatctctacgatttcagaa

SEQ ID NO: 584819 - DNA, 33 bp, Homo sapien
aacttggagaagggcagagatctcccagaaaca

SEQ ID NO: 584820 - DNA, 33 bp, Homo sapien
aacttggagaagggcatagatctcccagaaaca

SEQ ID NO: 584821 - DNA, 33 bp, Homo sapien
agaatgctgtgggagaataagtgtgatgagaag

SEQ ID NO: 584822 - DNA, 33 bp, Homo sapien
agaatgctgtgggagagtaagtgtgatgagaag

SEQ ID NO: 584823 - DNA, 33 bp, Homo sapien
tccatgaaaaagccaacagcgtgtggttgatga

SEQ ID NO: 584824 - DNA, 33 bp, Homo sapien
tccatgaaaaagccaatagcgtgtggttgatga

SEQ ID NO: 584825 - DNA, 33 bp, Homo sapien
attgaaatcaatagaaaccagtggcatagccga

SEQ ID NO: 584826 - DNA, 33 bp, Homo sapien
attgaaatcaatagaacccagtggcatagccga

SEQ ID NO: 584827 - DNA, 33 bp, Homo sapien
gccttcctcagaaaaacgctctaagtccatctg

SEQ ID NO: 584828 - DNA, 33 bp, Homo sapien
gccttcctcagaaaaatgctctaagtccatctg

SEQ ID NO: 584829 - DNA, 33 bp, Homo sapien
agaattccaatttatcacgtaatatgaacgttt

SEQ ID NO: 584830 - DNA, 33 bp, Homo sapien
agaattccaatttatcgcgtaatatgaacgttt

SEQ ID NO: 584831 - DNA, 33 bp, Homo sapien
gtaattgatttgatgtcacaaaagtataaagcg

SEQ ID NO: 584832 - DNA, 33 bp, Homo sapien
gtaattgatttgatgttacaaaagtataaagcg

SEQ ID NO: 584833 - DNA, 33 bp, Homo sapien
ccaataaacatattttaaaaagcttgacatcac

SEQ ID NO: 584834 - DNA, 33 bp, Homo sapien
ccaataaacatattttgaaaagcttgacatcac

SEQ ID NO: 584835 - DNA, 33 bp, Homo sapien
tgtgcagctgatgaatcaagggtgctgtaaaat

SEQ ID NO: 584836 - DNA, 33 bp, Homo sapien
tgtgcagctgatgaatgaagggtgctgtaaaat

SEQ ID NO: 584837 - DNA, 33 bp, Homo sapien
tatacttcatgccaaaaacaaattaaaacaaat

SEQ ID NO: 584838 - DNA, 33 bp, Homo sapien
tatacttcatgccaaagacaaattaaaacaaat

SEQ ID NO: 584839 - DNA, 33 bp, Homo sapien
atctgatgaatgggaacaaaattgaggctgaat

SEQ ID NO: 584840 - DNA, 33 bp, Homo sapien
atctgatgaatgggaagaaaattgaggctgaat

SEQ ID NO: 584841 - DNA, 33 bp, Homo sapien
aaaagaggcctaggtcaagatactgcaagacat

SEQ ID NO: 584842 - DNA, 33 bp, Homo sapien
aaaagaggcctaggtcgagatactgcaagacat

SEQ ID NO: 584843 - DNA, 33 bp, Homo sapien
atgtcgtccaaacaaacactgacatgaatatga

SEQ ID NO: 584844 - DNA, 33 bp, Homo sapien
atgtcgtccaaacaaatactgacatgaatatga

SEQ ID NO: 584845 - DNA, 33 bp, Homo sapien
ttgtcataattgtccaatgaatctctatgcttc

SEQ ID NO: 584846 - DNA, 33 bp, Homo sapien
ttgtcataattgtccagtgaatctctatgcttc

SEQ ID NO: 584847 - DNA, 33 bp, Homo sapien
atgtgctgttacttataaaatatcacagggaag

SEQ ID NO: 584848 - DNA, 33 bp, Homo sapien
atgtgctgttacttatgaaatatcacagggaag

SEQ ID NO: 584849 - DNA, 33 bp, Homo sapien
caactgaaatgcaagacaactgctttctactta

SEQ ID NO: 584850 - DNA, 33 bp, Homo sapien
caactgaaatgcaagagaactgctttctactta

SEQ ID NO: 584851 - DNA, 33 bp, Homo sapien
tactaaatgtgcctgacgtacttataaaaaatt

SEQ ID NO: 584852 - DNA, 33 bp, Homo sapien
tactaaatgtgcctgatgtacttataaaaaatt

SEQ ID NO: 584853 - DNA, 33 bp, Homo sapien
aagacaacattttcacaggttctggagattaag

SEQ ID NO: 584854 - DNA, 33 bp, Homo sapien
aagacaacattttcacgggttctggagattaag

SEQ ID NO: 584855 - DNA, 33 bp, Homo sapien
atagttaatttcttccactgagcacttgcgata

SEQ ID NO: 584856 - DNA, 33 bp, Homo sapien
atagttaatttcttccgctgagcacttgcgata

SEQ ID NO: 584857 - DNA, 33 bp, Homo sapien
gaaaacggcaatactagtagagaacaactgcga

SEQ ID NO: 584858 - DNA, 33 bp, Homo sapien
gaaaacggcaatactattagagaacaactgcga

SEQ ID NO: 584859 - DNA, 33 bp, Homo sapien
gctacttagaaatgcaatcctcaaaaaattaaa

SEQ ID NO: 584860 - DNA, 33 bp, Homo sapien
gctacttagaaatgcactcctcaaaaaattaaa

SEQ ID NO: 584861 - DNA, 33 bp, Homo sapien
acaaagaggaaagtgtaaagtagtgtaaatagt

SEQ ID NO: 584862 - DNA, 33 bp, Homo sapien
acaaagaggaaagtgtgaagtagtgtaaatagt

SEQ ID NO: 584863 - DNA, 33 bp, Homo sapien
gtttttgcattgtttcaaattttctttttcatt

SEQ ID NO: 584864 - DNA, 33 bp, Homo sapien
gtttttgcattgtttcgaattttctttttcatt

SEQ ID NO: 584865 - DNA, 33 bp, Homo sapien
gtgttataccaactgcactatgaacaacaaacc

SEQ ID NO: 584866 - DNA, 33 bp, Homo sapien
gtgttataccaactgcgctatgaacaacaaacc

SEQ ID NO: 584867 - DNA, 33 bp, Homo sapien
taaaggctaatgtatacgtttttatccactgga

SEQ ID NO: 584868 - DNA, 33 bp, Homo sapien
taaaggctaatgtataggtttttatccactgga

SEQ ID NO: 584869 - DNA, 33 bp, Homo sapien
ttgtaaatgaatgttacgttttatgcatcaaac

SEQ ID NO: 584870 - DNA, 33 bp, Homo sapien
ttgtaaatgaatgttatgttttatgcatcaaac

SEQ ID NO: 584871 - DNA, 33 bp, Homo sapien
acatttttatacatccaaagagtggaagataac

SEQ ID NO: 584872 - DNA, 33 bp, Homo sapien
acatttttatacatccgaagagtggaagataac

SEQ ID NO: 584873 - DNA, 33 bp, Homo sapien
tttggttctaagggtaagtggtaggctagcgag

SEQ ID NO: 584874 - DNA, 33 bp, Homo sapien
tttggttctaagggtacgtggtaggctagcgag

SEQ ID NO: 584875 - DNA, 33 bp, Homo sapien
gcatagtaacataacactactgatcggagttct

SEQ ID NO: 584876 - DNA, 33 bp, Homo sapien
gcatagtaacataacattactgatcggagttct

SEQ ID NO: 584877 - DNA, 33 bp, Homo sapien
gggaaaatcacatggagaattcttgaaataaca

SEQ ID NO: 584878 - DNA, 33 bp, Homo sapien
gggaaaatcacatggataattcttgaaataaca

SEQ ID NO: 584879 - DNA, 33 bp, Homo sapien
ttggttaagagatagcggccagcaagtataaaa

SEQ ID NO: 584880 - DNA, 33 bp, Homo sapien
ttggttaagagatagctgccagcaagtataaaa

SEQ ID NO: 584881 - DNA, 33 bp, Homo sapien
ttaagaaattagaatacgaaggcaagtatttta

SEQ ID NO: 584882 - DNA, 33 bp, Homo sapien
ttaagaaattagaataggaaggcaagtatttta

SEQ ID NO: 584883 - DNA, 33 bp, Homo sapien
tttctagaggttaattcaaattttggactatgg

SEQ ID NO: 584884 - DNA, 33 bp, Homo sapien
tttctagaggttaattgaaattttggactatgg

SEQ ID NO: 584885 - DNA, 33 bp, Homo sapien
ttgtgagaggtttcatcaaagccaatttaggaa

SEQ ID NO: 584886 - DNA, 33 bp, Homo sapien
ttgtgagaggtttcattaaagccaatttaggaa

SEQ ID NO: 584887 - DNA, 33 bp, Homo sapien
acatattatttttggacagaaccgctaaataat

SEQ ID NO: 584888 - DNA, 33 bp, Homo sapien
acatattatttttggatagaaccgctaaataat

SEQ ID NO: 584889 - DNA, 33 bp, Homo sapien
aagctgtggttccagaatatgatcaaataattg

SEQ ID NO: 584890 - DNA, 33 bp, Homo sapien
aagctgtggttccagagtatgatcaaataattg

SEQ ID NO: 584891 - DNA, 33 bp, Homo sapien
gaagacaaaggtgaaaaatggccatagaatttg

SEQ ID NO: 584892 - DNA, 33 bp, Homo sapien
gaagacaaaggtgaaacatggccatagaatttg

SEQ ID NO: 584893 - DNA, 33 bp, Homo sapien
taacgcaatcatcacaagttcctgaggtgacat

SEQ ID NO: 584894 - DNA, 33 bp, Homo sapien
taacgcaatcatcacaggttcctgaggtgacat

SEQ ID NO: 584895 - DNA, 33 bp, Homo sapien
atcatttcaatccatcaattgtgctaagagcat

SEQ ID NO: 584896 - DNA, 33 bp, Homo sapien
atcatttcaatccatcgattgtgctaagagcat

SEQ ID NO: 584897 - DNA, 33 bp, Homo sapien
ttaatgggcccaggggcagcttatacacatgac

SEQ ID NO: 584898 - DNA, 33 bp, Homo sapien
ttaatgggcccaggggtagcttatacacatgac

SEQ ID NO: 584899 - DNA, 33 bp, Homo sapien
cagggtgttcttgccaaattggatgacaacaag

SEQ ID NO: 584900 - DNA, 33 bp, Homo sapien
cagggtgttcttgccagattggatgacaacaag

SEQ ID NO: 584901 - DNA, 33 bp, Homo sapien
aaatagaagattctagaacccaataaggaaagc

SEQ ID NO: 584902 - DNA, 33 bp, Homo sapien
aaatagaagattctaggacccaataaggaaagc

SEQ ID NO: 584903 - DNA, 33 bp, Homo sapien
gtaagaaaatcttggccaattacagtagctgag

SEQ ID NO: 584904 - DNA, 33 bp, Homo sapien
gtaagaaaatcttggctaattacagtagctgag

SEQ ID NO: 584905 - DNA, 33 bp, Homo sapien
agtagctgggactacaaataattgctatttctt

SEQ ID NO: 584906 - DNA, 33 bp, Homo sapien
agtagctgggactacagataattgctatttctt

SEQ ID NO: 584907 - DNA, 33 bp, Homo sapien
ccgattgtgttacttccatttcccttgcaagag

SEQ ID NO: 584908 - DNA, 33 bp, Homo sapien
ccgattgtgttacttctatttcccttgcaagag

SEQ ID NO: 584909 - DNA, 33 bp, Homo sapien
aaaagatctgaacttcaaaatctatgcagacat

SEQ ID NO: 584910 - DNA, 33 bp, Homo sapien
aaaagatctgaacttcgaaatctatgcagacat

SEQ ID NO: 584911 - DNA, 33 bp, Homo sapien
ggtaattaaagttaggaatagtttgcaaatttg

SEQ ID NO: 584912 - DNA, 33 bp, Homo sapien
ggtaattaaagttagggatagtttgcaaatttg

SEQ ID NO: 584913 - DNA, 33 bp, Homo sapien
tttttgtctatttctaaccaatgtttaacttcc

SEQ ID NO: 584914 - DNA, 33 bp, Homo sapien
tttttgtctatttctacccaatgtttaacttcc

SEQ ID NO: 584915 - DNA, 33 bp, Homo sapien
ataaatctgcagtcggccaggatgctttttatt

SEQ ID NO: 584916 - DNA, 33 bp, Homo sapien
ataaatctgcagtcggtcaggatgctttttatt

SEQ ID NO: 584917 - DNA, 33 bp, Homo sapien
tatgcctttagtctacagccaattaaagaaatt

SEQ ID NO: 584918 - DNA, 33 bp, Homo sapien
tatgcctttagtctacggccaattaaagaaatt

SEQ ID NO: 584919 - DNA, 33 bp, Homo sapien
cctctgatcttggtgactaaggtatcctgcaga

SEQ ID NO: 584920 - DNA, 33 bp, Homo sapien
cctctgatcttggtgattaaggtatcctgcaga

SEQ ID NO: 584921 - DNA, 33 bp, Homo sapien
tgtgtgtgagtgataacagaaatcttaataata

SEQ ID NO: 584922 - DNA, 33 bp, Homo sapien
tgtgtgtgagtgataagagaaatcttaataata

SEQ ID NO: 584923 - DNA, 33 bp, Homo sapien
tcactcaaaggccaaactgaaccccatgactaa

SEQ ID NO: 584924 - DNA, 33 bp, Homo sapien
tcactcaaaggccaaagtgaaccccatgactaa

SEQ ID NO: 584925 - DNA, 33 bp, Homo sapien
atattggagtgtggtgaaactctttaaacagct

SEQ ID NO: 584926 - DNA, 33 bp, Homo sapien
atattggagtgtggtggaactctttaaacagct

SEQ ID NO: 584927 - DNA, 33 bp, Homo sapien
gatgtgagtaatgtaacgaactaccagaatatt

SEQ ID NO: 584928 - DNA, 33 bp, Homo sapien
gatgtgagtaatgtaatgaactaccagaatatt

SEQ ID NO: 584929 - DNA, 33 bp, Homo sapien
tggttcaataacaagacactaggtagatagatg

SEQ ID NO: 584930 - DNA, 33 bp, Homo sapien
tggttcaataacaagatactaggtagatagatg

SEQ ID NO: 584931 - DNA, 33 bp, Homo sapien
tgtaatatctttgagagcattataagcacactt

SEQ ID NO: 584932 - DNA, 33 bp, Homo sapien
tgtaatatctttgagatcattataagcacactt

SEQ ID NO: 584933 - DNA, 33 bp, Homo sapien
aaaagggagtggaatacacatacaaggagagaa

SEQ ID NO: 584934 - DNA, 33 bp, Homo sapien
aaaagggagtggaatatacatacaaggagagaa

SEQ ID NO: 584935 - DNA, 33 bp, Homo sapien
agacacacattgcttcaatttatagcctactgg

SEQ ID NO: 584936 - DNA, 33 bp, Homo sapien
agacacacattgcttccatttatagcctactgg

SEQ ID NO: 584937 - DNA, 33 bp, Homo sapien
gtatctacctcaaatacgaacaagtgtagctaa

SEQ ID NO: 584938 - DNA, 33 bp, Homo sapien
gtatctacctcaaatatgaacaagtgtagctaa

SEQ ID NO: 584939 - DNA, 33 bp, Homo sapien
ctaagaagtcatccaaagagcaaatcttccact

SEQ ID NO: 584940 - DNA, 33 bp, Homo sapien
ctaagaagtcatccaaggagcaaatcttccact

SEQ ID NO: 584941 - DNA, 33 bp, Homo sapien
cacagaaactatcgtgcataggacaatggagta

SEQ ID NO: 584942 - DNA, 33 bp, Homo sapien
cacagaaactatcgtggataggacaatggagta

SEQ ID NO: 584943 - DNA, 33 bp, Homo sapien
ctgcattgtttcacaaaaaattaataggaatta

SEQ ID NO: 584944 - DNA, 33 bp, Homo sapien
ctgcattgtttcacaagaaattaataggaatta

SEQ ID NO: 584945 - DNA, 33 bp, Homo sapien
ttttctaatacatccccctacatcttaaaaaat

SEQ ID NO: 584946 - DNA, 33 bp, Homo sapien
ttttctaatacatccctctacatcttaaaaaat

SEQ ID NO: 584947 - DNA, 33 bp, Homo sapien
tttattttggaaaccacgatttaatgaccaagt

SEQ ID NO: 584948 - DNA, 33 bp, Homo sapien
tttattttggaaaccatgatttaatgaccaagt

SEQ ID NO: 584949 - DNA, 33 bp, Homo sapien
cagctttgcattaaataacccctgcatctgact

SEQ ID NO: 584950 - DNA, 33 bp, Homo sapien
cagctttgcattaaatgacccctgcatctgact

SEQ ID NO: 584951 - DNA, 33 bp, Homo sapien
ctctttgaagtgactccaacttttatgcctgtg

SEQ ID NO: 584952 - DNA, 33 bp, Homo sapien
ctctttgaagtgactctaacttttatgcctgtg

SEQ ID NO: 584953 - DNA, 33 bp, Homo sapien
atacattacaatgttaacgatttttacttttgt

SEQ ID NO: 584954 - DNA, 33 bp, Homo sapien
atacattacaatgttatcgatttttacttttgt

SEQ ID NO: 584955 - DNA, 33 bp, Homo sapien
gttagtcgtaaagaaaatgcaaattaaatattt

SEQ ID NO: 584956 - DNA, 33 bp, Homo sapien
gttagtcgtaaagaaagtgcaaattaaatattt

SEQ ID NO: 584957 - DNA, 33 bp, Homo sapien
acggtagggccagaaactggatactgtagagtg

SEQ ID NO: 584958 - DNA, 33 bp, Homo sapien
acggtagggccagaaattggatactgtagagtg

SEQ ID NO: 584959 - DNA, 33 bp, Homo sapien
actccattagacaaaaagttatggccgcagatc

SEQ ID NO: 584960 - DNA, 33 bp, Homo sapien
actccattagacaaaatgttatggccgcagatc

SEQ ID NO: 584961 - DNA, 33 bp, Homo sapien
tttcctcataagtgcaagtgaaaaattttgtaa

SEQ ID NO: 584962 - DNA, 33 bp, Homo sapien
tttcctcataagtgcaggtgaaaaattttgtaa

SEQ ID NO: 584963 - DNA, 33 bp, Homo sapien
ttgttcatgccagctacattgtcctttttgcta

SEQ ID NO: 584964 - DNA, 33 bp, Homo sapien
ttgttcatgccagctatattgtcctttttgcta

SEQ ID NO: 584965 - DNA, 33 bp, Homo sapien
aaaatcttacaatctacgacgggaagcacatac

SEQ ID NO: 584966 - DNA, 33 bp, Homo sapien
aaaatcttacaatctaggacgggaagcacatac

SEQ ID NO: 584967 - DNA, 33 bp, Homo sapien
taatggatgagacataacaattgaatgcaatgt

SEQ ID NO: 584968 - DNA, 33 bp, Homo sapien
taatggatgagacatatcaattgaatgcaatgt

SEQ ID NO: 584969 - DNA, 33 bp, Homo sapien
cctgccatgtgaaaccactgtctattttaaatt

SEQ ID NO: 584970 - DNA, 33 bp, Homo sapien
cctgccatgtgaaacctctgtctattttaaatt

SEQ ID NO: 584971 - DNA, 33 bp, Homo sapien
ataaactgagatatccaaaagaatcatgttaca

SEQ ID NO: 584972 - DNA, 33 bp, Homo sapien
ataaactgagatatccgaaagaatcatgttaca

SEQ ID NO: 584973 - DNA, 33 bp, Homo sapien
ttgtcaccaagagcacactttattctgtgataa

SEQ ID NO: 584974 - DNA, 33 bp, Homo sapien
ttgtcaccaagagcacgctttattctgtgataa

SEQ ID NO: 584975 - DNA, 33 bp, Homo sapien
cccattccacaagggaaacgttggccaaaccaa

SEQ ID NO: 584976 - DNA, 33 bp, Homo sapien
cccattccacaagggagacgttggccaaaccaa

SEQ ID NO: 584977 - DNA, 33 bp, Homo sapien
tgaatttacagaatcactcagaagctgagattt

SEQ ID NO: 584978 - DNA, 33 bp, Homo sapien
tgaatttacagaatcattcagaagctgagattt

SEQ ID NO: 584979 - DNA, 33 bp, Homo sapien
ccatatcactatactacgcaaattctcctcttc

SEQ ID NO: 584980 - DNA, 33 bp, Homo sapien
ccatatcactatactatgcaaattctcctcttc

SEQ ID NO: 584981 - DNA, 33 bp, Homo sapien
atattgcaattttttcaaacactgccaaaatat

SEQ ID NO: 584982 - DNA, 33 bp, Homo sapien
atattgcaattttttcgaacactgccaaaatat

SEQ ID NO: 584983 - DNA, 33 bp, Homo sapien
agaataagagaaataaagcatgagggaaatgaa

SEQ ID NO: 584984 - DNA, 33 bp, Homo sapien
agaataagagaaataacgcatgagggaaatgaa

SEQ ID NO: 584985 - DNA, 33 bp, Homo sapien
cacacacagagtaccccggcaaaatctggtgga

SEQ ID NO: 584986 - DNA, 33 bp, Homo sapien
cacacacagagtaccctggcaaaatctggtgga

SEQ ID NO: 584987 - DNA, 33 bp, Homo sapien
caacacttctcattgtcaatttgtttgtttaga

SEQ ID NO: 584988 - DNA, 33 bp, Homo sapien
caacacttctcattgtgaatttgtttgtttaga

SEQ ID NO: 584989 - DNA, 33 bp, Homo sapien
ttaaacaatggataaaaatctgggccgagcacg

SEQ ID NO: 584990 - DNA, 33 bp, Homo sapien
ttaaacaatggataaatatctgggccgagcacg

SEQ ID NO: 584991 - DNA, 33 bp, Homo sapien
aatctttttgctgcatcactatacttagccaga

SEQ ID NO: 584992 - DNA, 33 bp, Homo sapien
aatctttttgctgcattactatacttagccaga

SEQ ID NO: 584993 - DNA, 33 bp, Homo sapien
caatattgagctttccaaaagtcatccaaatca

SEQ ID NO: 584994 - DNA, 33 bp, Homo sapien
caatattgagctttccgaaagtcatccaaatca

SEQ ID NO: 584995 - DNA, 33 bp, Homo sapien
tgcataattgaaggtaagactcagtcatcattt

SEQ ID NO: 584996 - DNA, 33 bp, Homo sapien
tgcataattgaaggtacgactcagtcatcattt

SEQ ID NO: 584997 - DNA, 33 bp, Homo sapien
actccatatgcaaataagtttcagcaaatccac

SEQ ID NO: 584998 - DNA, 33 bp, Homo sapien
actccatatgcaaataggtttcagcaaatccac

SEQ ID NO: 584999 - DNA, 33 bp, Homo sapien
gtctgttgtatggggaagaaaaattgggatttg

SEQ ID NO: 585000 - DNA, 33 bp, Homo sapien
gtctgttgtatggggaggaaaaattgggatttg

SEQ ID NO: 585001 - DNA, 33 bp, Homo sapien
gaggtcaattaccaaaacccacagataacatca

SEQ ID NO: 585002 - DNA, 33 bp, Homo sapien
gaggtcaattaccaaatcccacagataacatca

SEQ ID NO: 585003 - DNA, 33 bp, Homo sapien
tgtctaaagaaagtgacgtttatctaagaaaca

SEQ ID NO: 585004 - DNA, 33 bp, Homo sapien
tgtctaaagaaagtgaggtttatctaagaaaca

SEQ ID NO: 585005 - DNA, 33 bp, Homo sapien
gtgatcactttacacaccggatttcctttaatc

SEQ ID NO: 585006 - DNA, 33 bp, Homo sapien
gtgatcactttacacagcggatttcctttaatc

SEQ ID NO: 585007 - DNA, 33 bp, Homo sapien
cttagttactagatgaacttaggtaactcttaa

SEQ ID NO: 585008 - DNA, 33 bp, Homo sapien
cttagttactagatgatcttaggtaactcttaa

SEQ ID NO: 585009 - DNA, 33 bp, Homo sapien
aaattattttggagtgaaaattactttaaactc

SEQ ID NO: 585010 - DNA, 33 bp, Homo sapien
aaattattttggagtggaaattactttaaactc

SEQ ID NO: 585011 - DNA, 33 bp, Homo sapien
acaatggcatcttaaaacactaagaaagaaaat

SEQ ID NO: 585012 - DNA, 33 bp, Homo sapien
acaatggcatcttaaagcactaagaaagaaaat

SEQ ID NO: 585013 - DNA, 33 bp, Homo sapien
agggcctgtgactcaacagaaaatgttcaaaat

SEQ ID NO: 585014 - DNA, 33 bp, Homo sapien
agggcctgtgactcaagagaaaatgttcaaaat

SEQ ID NO: 585015 - DNA, 33 bp, Homo sapien
agaggagattcaccggacccttgaagaatgtca

SEQ ID NO: 585016 - DNA, 33 bp, Homo sapien
agaggagattcaccgggcccttgaagaatgtca

SEQ ID NO: 585017 - DNA, 33 bp, Homo sapien
ttttatgtactgtgaaacttactaagcagtgaa

SEQ ID NO: 585018 - DNA, 33 bp, Homo sapien
ttttatgtactgtgaagcttactaagcagtgaa

SEQ ID NO: 585019 - DNA, 33 bp, Homo sapien
actaggaaatatttgcacttatttatgagtact

SEQ ID NO: 585020 - DNA, 33 bp, Homo sapien
actaggaaatatttgcgcttatttatgagtact

SEQ ID NO: 585021 - DNA, 33 bp, Homo sapien
tgtaagatactcattacgtaagatacagtttgg

SEQ ID NO: 585022 - DNA, 33 bp, Homo sapien
tgtaagatactcattatgtaagatacagtttgg

SEQ ID NO: 585023 - DNA, 33 bp, Homo sapien
aaactcttcttgctcagatggaaaatttattga

SEQ ID NO: 585024 - DNA, 33 bp, Homo sapien
aaactcttcttgctcatatggaaaatttattga

SEQ ID NO: 585025 - DNA, 33 bp, Homo sapien
ctagctatgttttcccacttcctttgatctatt

SEQ ID NO: 585026 - DNA, 33 bp, Homo sapien
ctagctatgttttcccgcttcctttgatctatt

SEQ ID NO: 585027 - DNA, 33 bp, Homo sapien
ttgtggtctgttcttacgcatattttaaattga

SEQ ID NO: 585028 - DNA, 33 bp, Homo sapien
ttgtggtctgttcttatgcatattttaaattga

SEQ ID NO: 585029 - DNA, 33 bp, Homo sapien
aaaaactaatttctaggcaacattcctgcaggc

SEQ ID NO: 585030 - DNA, 33 bp, Homo sapien
aaaaactaatttctagtcaacattcctgcaggc

SEQ ID NO: 585031 - DNA, 33 bp, Homo sapien
acattaaaacatccaaatagctcattgtagaat

SEQ ID NO: 585032 - DNA, 33 bp, Homo sapien
acattaaaacatccaagtagctcattgtagaat

SEQ ID NO: 585033 - DNA, 33 bp, Homo sapien
aaaatatcaaaaactgcagaccttatctctctt

SEQ ID NO: 585034 - DNA, 33 bp, Homo sapien
aaaatatcaaaaactggagaccttatctctctt

SEQ ID NO: 585035 - DNA, 33 bp, Homo sapien
aatctttttagctttcaatcacaggagactatc

SEQ ID NO: 585036 - DNA, 33 bp, Homo sapien
aatctttttagctttcgatcacaggagactatc

SEQ ID NO: 585037 - DNA, 33 bp, Homo sapien
gatgctgcactgttgtaaagaatcatctgttga

SEQ ID NO: 585038 - DNA, 33 bp, Homo sapien
gatgctgcactgttgtcaagaatcatctgttga

SEQ ID NO: 585039 - DNA, 33 bp, Homo sapien
tctgtcatggagctaaaagtttcacctggaaaa

SEQ ID NO: 585040 - DNA, 33 bp, Homo sapien
tctgtcatggagctaagagtttcacctggaaaa

SEQ ID NO: 585041 - DNA, 33 bp, Homo sapien; identical to SEQ ID NO: 585039

SEQ ID NO: 585042 - DNA, 33 bp, Homo sapien; identical to SEQ ID NO: 585040

SEQ ID NO: 585043 - DNA, 33 bp, Homo sapien
agggtacaattgacaaacactcttgtaagggga

SEQ ID NO: 585044 - DNA, 33 bp, Homo sapien
agggtacaattgacaagcactcttgtaagggga

SEQ ID NO: 585045 - DNA, 33 bp, Homo sapien
acccataaaattgtagacatttttcctcatcga

SEQ ID NO: 585046 - DNA, 33 bp, Homo sapien
acccataaaattgtaggcatttttcctcatcga

SEQ ID NO: 585047 - DNA, 33 bp, Homo sapien
gctacaaaactttgataaaggaaattgaagagg

SEQ ID NO: 585048 - DNA, 33 bp, Homo sapien
gctacaaaactttgatgaaggaaattgaagagg

SEQ ID NO: 585049 - DNA, 33 bp, Homo sapien
atgtgttttgtttgtaaccttgtcaaaaattag

SEQ ID NO: 585050 - DNA, 33 bp, Homo sapien
atgtgttttgtttgtacccttgtcaaaaattag

SEQ ID NO: 585051 - DNA, 33 bp, Homo sapien
ccctggggaggatagaaattagctcagatggaa

SEQ ID NO: 585052 - DNA, 33 bp, Homo sapien
ccctggggaggatagacattagctcagatggaa

SEQ ID NO: 585053 - DNA, 33 bp, Homo sapien
aatctactgagattaccaggtggctcttttcat

SEQ ID NO: 585054 - DNA, 33 bp, Homo sapien
aatctactgagattactaggtggctcttttcat

SEQ ID NO: 585055 - DNA, 33 bp, Homo sapien
gataaacattcttattaaagtcagaaacaagca

SEQ ID NO: 585056 - DNA, 33 bp, Homo sapien
gataaacattcttattgaagtcagaaacaagca

SEQ ID NO: 585057 - DNA, 33 bp, Homo sapien
catttttatcagaaaacatacttggtgtgatta

SEQ ID NO: 585058 - DNA, 33 bp, Homo sapien
catttttatcagaaaatatacttggtgtgatta

SEQ ID NO: 585059 - DNA, 33 bp, Homo sapien
atagaatgaatgtaccaaagcacaataaagtcc

SEQ ID NO: 585060 - DNA, 33 bp, Homo sapien
atagaatgaatgtaccgaagcacaataaagtcc

SEQ ID NO: 585061 - DNA, 33 bp, Homo sapien
aaaagaaaagaaatcaacctccttgaaataata

SEQ ID NO: 585062 - DNA, 33 bp, Homo sapien
aaaagaaaagaaatcaccctccttgaaataata

SEQ ID NO: 585063 - DNA, 33 bp, Homo sapien
ctagttggttgcccaggcacattgtattgaaca

SEQ ID NO: 585064 - DNA, 33 bp, Homo sapien
ctagttggttgcccagtcacattgtattgaaca

SEQ ID NO: 585065 - DNA, 33 bp, Homo sapien
ctgagtctaagtttccaaaaagaccaagtctat

SEQ ID NO: 585066 - DNA, 33 bp, Homo sapien
ctgagtctaagtttccgaaaagaccaagtctat

SEQ ID NO: 585067 - DNA, 33 bp, Homo sapien
ttagactttaaacataagattgacacacattct

SEQ ID NO: 585068 - DNA, 33 bp, Homo sapien
ttagactttaaacataggattgacacacattct

SEQ ID NO: 585069 - DNA, 33 bp, Homo sapien
caatgtttctgaagagccctgtattattatggc

SEQ ID NO: 585070 - DNA, 33 bp, Homo sapien
caatgtttctgaagaggcctgtattattatggc

SEQ ID NO: 585071 - DNA, 33 bp, Homo sapien
ctagacaaagacaaaaattctcaaatccctcct

SEQ ID NO: 585072 - DNA, 33 bp, Homo sapien
ctagacaaagacaaaagttctcaaatccctcct

SEQ ID NO: 585073 - DNA, 33 bp, Homo sapien
attacttcaaatagcaaaaatgtggttttcttt

SEQ ID NO: 585074 - DNA, 33 bp, Homo sapien
attacttcaaatagcagaaatgtggttttcttt

SEQ ID NO: 585075 - DNA, 33 bp, Homo sapien
aggatgcacaaatgagcattaatgaaagcagga

SEQ ID NO: 585076 - DNA, 33 bp, Homo sapien
aggatgcacaaatgagtattaatgaaagcagga

SEQ ID NO: 585077 - DNA, 33 bp, Homo sapien
aaatatcaaaatatacaaaaatgttcactggat

SEQ ID NO: 585078 - DNA, 33 bp, Homo sapien
aaatatcaaaatatacgaaaatgttcactggat

SEQ ID NO: 585079 - DNA, 33 bp, Homo sapien
atctgtacaattggagaaaactaccaatacatg

SEQ ID NO: 585080 - DNA, 33 bp, Homo sapien
atctgtacaattggagcaaactaccaatacatg

SEQ ID NO: 585081 - DNA, 33 bp, Homo sapien
aggtatactcatttccaatcatttccttttgga

SEQ ID NO: 585082 - DNA, 33 bp, Homo sapien
aggtatactcatttccgatcatttccttttgga

SEQ ID NO: 585083 - DNA, 33 bp, Homo sapien
ctggagattcattgcaaaacaatgtaaatgtac

SEQ ID NO: 585084 - DNA, 33 bp, Homo sapien
ctggagattcattgcacaacaatgtaaatgtac

SEQ ID NO: 585085 - DNA, 33 bp, Homo sapien
aagatagtatgaccttaaagaggaattgcaaat

SEQ ID NO: 585086 - DNA, 33 bp, Homo sapien
aagatagtatgaccttgaagaggaattgcaaat

SEQ ID NO: 585087 - DNA, 33 bp, Homo sapien
ataaaatcaaatctaccctgccacttttatatc

SEQ ID NO: 585088 - DNA, 33 bp, Homo sapien
ataaaatcaaatctacgctgccacttttatatc

SEQ ID NO: 585089 - DNA, 33 bp, Homo sapien
atcggggaaatggtgccgacctaaagtactgaa

SEQ ID NO: 585090 - DNA, 33 bp, Homo sapien
atcggggaaatggtgctgacctaaagtactgaa

SEQ ID NO: 585091 - DNA, 33 bp, Homo sapien
tcattagaaatgttaaacttaggtcaagatata

SEQ ID NO: 585092 - DNA, 33 bp, Homo sapien
tcattagaaatgttaagcttaggtcaagatata

SEQ ID NO: 585093 - DNA, 33 bp, Homo sapien
cctgaactgtatttgacgcattctggtgaggga

SEQ ID NO: 585094 - DNA, 33 bp, Homo sapien
cctgaactgtatttgatgcattctggtgaggga

SEQ ID NO: 585095 - DNA, 33 bp, Homo sapien
tctagctatactcttacgtaatggatcatgtgg

SEQ ID NO: 585096 - DNA, 33 bp, Homo sapien
tctagctatactcttatgtaatggatcatgtgg

SEQ ID NO: 585097 - DNA, 33 bp, Homo sapien
aggtcatgaatggtctcaccaagcacaggtatt

SEQ ID NO: 585098 - DNA, 33 bp, Homo sapien
aggtcatgaatggtcttaccaagcacaggtatt

SEQ ID NO: 585099 - DNA, 33 bp, Homo sapien
tatcccaaatcagtgccgacattgttttcccag

SEQ ID NO: 585100 - DNA, 33 bp, Homo sapien
tatcccaaatcagtgctgacattgttttcccag

SEQ ID NO: 585101 - DNA, 33 bp, Homo sapien
tgaatctctggggccactagtttgttctccagg

SEQ ID NO: 585102 - DNA, 33 bp, Homo sapien
tgaatctctggggccattagtttgttctccagg

SEQ ID NO: 585103 - DNA, 33 bp, Homo sapien
tggtttgagaaaattcacttctgtattagttta

SEQ ID NO: 585104 - DNA, 33 bp, Homo sapien
tggtttgagaaaattcgcttctgtattagttta

SEQ ID NO: 585105 - DNA, 33 bp, Homo sapien
attgtcagggttcaaacgttgctgtcaccactg

SEQ ID NO: 585106 - DNA, 33 bp, Homo sapien
attgtcagggttcaaatgttgctgtcaccactg

SEQ ID NO: 585107 - DNA, 33 bp, Homo sapien
ggatgaagtgagataacggcaggatagatatag

SEQ ID NO: 585108 - DNA, 33 bp, Homo sapien
ggatgaagtgagataatggcaggatagatatag

SEQ ID NO: 585109 - DNA, 33 bp, Homo sapien
ggttagaactgtgtccaatgcataattgtggaa

SEQ ID NO: 585110 - DNA, 33 bp, Homo sapien
ggttagaactgtgtccgatgcataattgtggaa

SEQ ID NO: 585111 - DNA, 33 bp, Homo sapien
atttttgaaatagaacaactaaagcaattgctt

SEQ ID NO: 585112 - DNA, 33 bp, Homo sapien
atttttgaaatagaacgactaaagcaattgctt

SEQ ID NO: 585113 - DNA, 33 bp, Homo sapien
ttggaaattggtttccaaatagaaaatgtaact

SEQ ID NO: 585114 - DNA, 33 bp, Homo sapien
ttggaaattggtttccgaatagaaaatgtaact

SEQ ID NO: 585115 - DNA, 33 bp, Homo sapien
ctcgtaattttcataacgctttttggaattatt

SEQ ID NO: 585116 - DNA, 33 bp, Homo sapien
ctcgtaattttcataatgctttttggaattatt

SEQ ID NO: 585117 - DNA, 33 bp, Homo sapien
accctaatgactggaaagaccatacttatttta

SEQ ID NO: 585118 - DNA, 33 bp, Homo sapien
accctaatgactggaacgaccatacttatttta

SEQ ID NO: 585119 - DNA, 33 bp, Homo sapien
ggtttgctttattcagacagcattctctctgac

SEQ ID NO: 585120 - DNA, 33 bp, Homo sapien
ggtttgctttattcaggcagcattctctctgac

SEQ ID NO: 585121 - DNA, 33 bp, Homo sapien
ttatatatcttttttgaaggatctggatactta

SEQ ID NO: 585122 - DNA, 33 bp, Homo sapien
ttatatatcttttttggaggatctggatactta

SEQ ID NO: 585123 - DNA, 33 bp, Homo sapien
gaggtttataccttgacgtagagtgtggaataa

SEQ ID NO: 585124 - DNA, 33 bp, Homo sapien
gaggtttataccttgatgtagagtgtggaataa

SEQ ID NO: 585125 - DNA, 33 bp, Homo sapien
tttgagaaaggatgaaggaaatttcccacagtg

SEQ ID NO: 585126 - DNA, 33 bp, Homo sapien
tttgagaaaggatgaatgaaatttcccacagtg

SEQ ID NO: 585127 - DNA, 33 bp, Homo sapien
taaaggtttaaaagccaggataggagtaaataa

SEQ ID NO: 585128 - DNA, 33 bp, Homo sapien
taaaggtttaaaagccgggataggagtaaataa

SEQ ID NO: 585129 - DNA, 33 bp, Homo sapien
atgttattaaatcccgcaatgatgtttttctgc

SEQ ID NO: 585130 - DNA, 33 bp, Homo sapien
atgttattaaatcccgtaatgatgtttttctgc

SEQ ID NO: 585131 - DNA, 33 bp, Homo sapien
agagaggactgacctaagattgtcaaatgtttg

SEQ ID NO: 585132 - DNA, 33 bp, Homo sapien
agagaggactgacctacgattgtcaaatgtttg

SEQ ID NO: 585133 - DNA, 33 bp, Homo sapien
aaatttgaaataagaaataagccatagaacaag

SEQ ID NO: 585134 - DNA, 33 bp, Homo sapien
aaatttgaaataagaattaagccatagaacaag

SEQ ID NO: 585135 - DNA, 33 bp, Homo sapien
taagttatctctaaaacctggcactatatctac

SEQ ID NO: 585136 - DNA, 33 bp, Homo sapien
taagttatctctaaaagctggcactatatctac

SEQ ID NO: 585137 - DNA, 33 bp, Homo sapien
atgtccagaaggaatgcaatcctgctaacacct

SEQ ID NO: 585138 - DNA, 33 bp, Homo sapien
atgtccagaaggaatgtaatcctgctaacacct

SEQ ID NO: 585139 - DNA, 33 bp, Homo sapien
atgaattacatttaagcatatggctttttaact

SEQ ID NO: 585140 - DNA, 33 bp, Homo sapien
atgaattacatttaagtatatggctttttaact

SEQ ID NO: 585141 - DNA, 33 bp, Homo sapien
tctataagttacaaaaattcacagctgtcaaat

SEQ ID NO: 585142 - DNA, 33 bp, Homo sapien
tctataagttacaaaacttcacagctgtcaaat

SEQ ID NO: 585143 - DNA, 33 bp, Homo sapien
ttattttgtccagataaaggtttatgaaatgct

SEQ ID NO: 585144 - DNA, 33 bp, Homo sapien
ttattttgtccagatacaggtttatgaaatgct

SEQ ID NO: 585145 - DNA, 33 bp, Homo sapien
tagaagaaattagctaaagaatgactagaaaaa

SEQ ID NO: 585146 - DNA, 33 bp, Homo sapien
tagaagaaattagctacagaatgactagaaaaa

SEQ ID NO: 585147 - DNA, 33 bp, Homo sapien
gtttctgtaatacctcaattagaaagcatgatt

SEQ ID NO: 585148 - DNA, 33 bp, Homo sapien
gtttctgtaatacctcgattagaaagcatgatt

SEQ ID NO: 585149 - DNA, 33 bp, Homo sapien
aaaacagagaaaactcaaagccaataaattggg

SEQ ID NO: 585150 - DNA, 33 bp, Homo sapien
aaaacagagaaaactcgaagccaataaattggg

SEQ ID NO: 585151 - DNA, 33 bp, Homo sapien
aatttttcattaggcacaagaatatggttcact

SEQ ID NO: 585152 - DNA, 33 bp, Homo sapien
aatttttcattaggcagaagaatatggttcact

SEQ ID NO: 585153 - DNA, 33 bp, Homo sapien
gaatatggttcactaaatatgctgaaatttact

SEQ ID NO: 585154 - DNA, 33 bp, Homo sapien
gaatatggttcactaagtatgctgaaatttact

SEQ ID NO: 585155 - DNA, 33 bp, Homo sapien
aaatgccaatcaggacacaaattctttacacgc

SEQ ID NO: 585156 - DNA, 33 bp, Homo sapien
aaatgccaatcaggactcaaattctttacacgc

SEQ ID NO: 585157 - DNA, 33 bp, Homo sapien
gttttcctcatttatcgaaacagtgtcaacatg

SEQ ID NO: 585158 - DNA, 33 bp, Homo sapien
gttttcctcatttatctaaacagtgtcaacatg

SEQ ID NO: 585159 - DNA, 33 bp, Homo sapien
tgggcaggtccaaggaaagaacgctgtgtcctc

SEQ ID NO: 585160 - DNA, 33 bp, Homo sapien
tgggcaggtccaaggagagaacgctgtgtcctc

SEQ ID NO: 585161 - DNA, 33 bp, Homo sapien
tttagttgcctgaataccagtctgtgaaatatt

SEQ ID NO: 585162 - DNA, 33 bp, Homo sapien
tttagttgcctgaatagcagtctgtgaaatatt

SEQ ID NO: 585163 - DNA, 33 bp, Homo sapien
ctttcactgaaattgaagggcagtgtctaggaa

SEQ ID NO: 585164 - DNA, 33 bp, Homo sapien
ctttcactgaaattgatgggcagtgtctaggaa

SEQ ID NO: 585165 - DNA, 33 bp, Homo sapien
ttgtactcgaaggacacataagcctttccgtat

SEQ ID NO: 585166 - DNA, 33 bp, Homo sapien
ttgtactcgaaggacatataagcctttccgtat

SEQ ID NO: 585167 - DNA, 33 bp, Homo sapien
gaacaagaacctggaaagtgctgaattgaggaa

SEQ ID NO: 585168 - DNA, 33 bp, Homo sapien
gaacaagaacctggaacgtgctgaattgaggaa

SEQ ID NO: 585169 - DNA, 33 bp, Homo sapien
atcccatgcagcaaaaccactgttccttcttgt

SEQ ID NO: 585170 - DNA, 33 bp, Homo sapien
atcccatgcagcaaaatcactgttccttcttgt

SEQ ID NO: 585171 - DNA, 33 bp, Homo sapien
gttggatatgagagcactgaattgtggagctta

SEQ ID NO: 585172 - DNA, 33 bp, Homo sapien
gttggatatgagagcattgaattgtggagctta

SEQ ID NO: 585173 - DNA, 33 bp, Homo sapien
ctgattgtctaataggaaacacacaaatcagag

SEQ ID NO: 585174 - DNA, 33 bp, Homo sapien
ctgattgtctaatagggaacacacaaatcagag

SEQ ID NO: 585175 - DNA, 33 bp, Homo sapien
cattttagaactgcacaccacttacaaaggtaa

SEQ ID NO: 585176 - DNA, 33 bp, Homo sapien
cattttagaactgcactccacttacaaaggtaa

SEQ ID NO: 585177 - DNA, 33 bp, Homo sapien
agctttctctttcaccaaccccatgtgaaacat

SEQ ID NO: 585178 - DNA, 33 bp, Homo sapien
agctttctctttcaccgaccccatgtgaaacat

SEQ ID NO: 585179 - DNA, 33 bp, Homo sapien
aagccaatctgaacaggctatctcctgtatact

SEQ ID NO: 585180 - DNA, 33 bp, Homo sapien
aagccaatctgaacagtctatctcctgtatact

SEQ ID NO: 585181 - DNA, 33 bp, Homo sapien
gtatccattacaaaaaagtcaattgcaaatggt

SEQ ID NO: 585182 - DNA, 33 bp, Homo sapien
gtatccattacaaaaacgtcaattgcaaatggt

SEQ ID NO: 585183 - DNA, 33 bp, Homo sapien
gaaaaaaaaatggctacgatggacagtggaagg

SEQ ID NO: 585184 - DNA, 33 bp, Homo sapien
gaaaaaaaaatggctatgatggacagtggaagg

SEQ ID NO: 585185 - DNA, 33 bp, Homo sapien
gagagaacctatacaacggaggtgcgacataat

SEQ ID NO: 585186 - DNA, 33 bp, Homo sapien
gagagaacctatacaatggaggtgcgacataat

SEQ ID NO: 585187 - DNA, 33 bp, Homo sapien
actgtgtttttagaagccacgccctttctgtat

SEQ ID NO: 585188 - DNA, 33 bp, Homo sapien
actgtgtttttagaagtcacgccctttctgtat

SEQ ID NO: 585189 - DNA, 33 bp, Homo sapien
aacaattaaaatgacaactatcaaaacaaacaa

SEQ ID NO: 585190 - DNA, 33 bp, Homo sapien
aacaattaaaatgacagctatcaaaacaaacaa

SEQ ID NO: 585191 - DNA, 33 bp, Homo sapien
ccttcagtttgattgaaaatttaacactgtaaa

SEQ ID NO: 585192 - DNA, 33 bp, Homo sapien
ccttcagtttgattgagaatttaacactgtaaa

SEQ ID NO: 585193 - DNA, 33 bp, Homo sapien
ttagagcttgaaactacgaattttgagtggatg

SEQ ID NO: 585194 - DNA, 33 bp, Homo sapien
ttagagcttgaaactatgaattttgagtggatg

SEQ ID NO: 585195 - DNA, 33 bp, Homo sapien
agagattaccgtggccaatcttctatgagtgca

SEQ ID NO: 585196 - DNA, 33 bp, Homo sapien
agagattaccgtggccgatcttctatgagtgca

SEQ ID NO: 585197 - DNA, 33 bp, Homo sapien
tttgacctattggcctcaaataatagaacggag

SEQ ID NO: 585198 - DNA, 33 bp, Homo sapien
tttgacctattggccttaaataatagaacggag

SEQ ID NO: 585199 - DNA, 33 bp, Homo sapien
taaaatttaatgagtacgtgggccattataaca

SEQ ID NO: 585200 - DNA, 33 bp, Homo sapien
taaaatttaatgagtatgtgggccattataaca

SEQ ID NO: 585201 - DNA, 33 bp, Homo sapien
ctcttcttgagaagaacgactgtcgactgtgaa

SEQ ID NO: 585202 - DNA, 33 bp, Homo sapien
ctcttcttgagaagaatgactgtcgactgtgaa

SEQ ID NO: 585203 - DNA, 33 bp, Homo sapien
aattttggaaatgatgaagaatgagattgcctt

SEQ ID NO: 585204 - DNA, 33 bp, Homo sapien
aattttggaaatgatgcagaatgagattgcctt

SEQ ID NO: 585205 - DNA, 33 bp, Homo sapien
taagttattcaaacaacccagttaaatttatca

SEQ ID NO: 585206 - DNA, 33 bp, Homo sapien
taagttattcaaacaatccagttaaatttatca

SEQ ID NO: 585207 - DNA, 33 bp, Homo sapien
aattatattttcaactaacaatttatgcataac

SEQ ID NO: 585208 - DNA, 33 bp, Homo sapien
aattatattttcaacttacaatttatgcataac

SEQ ID NO: 585209 - DNA, 33 bp, Homo sapien
tttctttgagagacaccgggagtgaacagcaag

SEQ ID NO: 585210 - DNA, 33 bp, Homo sapien
tttctttgagagacactgggagtgaacagcaag

SEQ ID NO: 585211 - DNA, 33 bp, Homo sapien
agtagactgcacaaaacgccataacagaaatta

SEQ ID NO: 585212 - DNA, 33 bp, Homo sapien
agtagactgcacaaaatgccataacagaaatta

SEQ ID NO: 585213 - DNA, 33 bp, Homo sapien
ggcctagtgcaggtagaagctgggctaaagttt

SEQ ID NO: 585214 - DNA, 33 bp, Homo sapien
ggcctagtgcaggtagcagctgggctaaagttt

SEQ ID NO: 585215 - DNA, 33 bp, Homo sapien
ttatatttggcaattcaattctcctaaatctct

SEQ ID NO: 585216 - DNA, 33 bp, Homo sapien
ttatatttggcaattccattctcctaaatctct

SEQ ID NO: 585217 - DNA, 33 bp, Homo sapien
ttactcccatctttcagggatcaatgtttttta

SEQ ID NO: 585218 - DNA, 33 bp, Homo sapien
ttactcccatctttcatggatcaatgtttttta

SEQ ID NO: 585219 - DNA, 33 bp, Homo sapien
aggacacaaagaccaaacgaatttggacatcca

SEQ ID NO: 585220 - DNA, 33 bp, Homo sapien
aggacacaaagaccaaccgaatttggacatcca

SEQ ID NO: 585221 - DNA, 33 bp, Homo sapien
tactacagtttaacacaggctttcaaatcgtag

SEQ ID NO: 585222 - DNA, 33 bp, Homo sapien
tactacagtttaacactggctttcaaatcgtag

SEQ ID NO: 585223 - DNA, 33 bp, Homo sapien
tgcttatttttgttgcaatcagataatgcgtta

SEQ ID NO: 585224 - DNA, 33 bp, Homo sapien
tgcttatttttgttgctatcagataatgcgtta

SEQ ID NO: 585225 - DNA, 33 bp, Homo sapien
atgaggattttagtgcaccctccccaccagaat

SEQ ID NO: 585226 - DNA, 33 bp, Homo sapien
atgaggattttagtgcgccctccccaccagaat

SEQ ID NO: 585227 - DNA, 33 bp, Homo sapien
agctcaggtagagcccacgtggtcagctgcctg

SEQ ID NO: 585228 - DNA, 33 bp, Homo sapien
agctcaggtagagcccgcgtggtcagctgcctg

SEQ ID NO: 585229 - DNA, 33 bp, Homo sapien
aaaacatctatagcacacagcatcaagttccac

SEQ ID NO: 585230 - DNA, 33 bp, Homo sapien
aaaacatctatagcacgcagcatcaagttccac

SEQ ID NO: 585231 - DNA, 33 bp, Homo sapien
ttccatagtgaaatataaaattgcaatgtgggt

SEQ ID NO: 585232 - DNA, 33 bp, Homo sapien
ttccatagtgaaatatgaaattgcaatgtgggt

SEQ ID NO: 585233 - DNA, 33 bp, Homo sapien
ctgcctgtcatttggccgaatctgtttgttcca

SEQ ID NO: 585234 - DNA, 33 bp, Homo sapien
ctgcctgtcatttggctgaatctgtttgttcca

SEQ ID NO: 585235 - DNA, 33 bp, Homo sapien
cctggaattgcggttgaacgagtacttttaagt

SEQ ID NO: 585236 - DNA, 33 bp, Homo sapien
cctggaattgcggttggacgagtacttttaagt

SEQ ID NO: 585237 - DNA, 33 bp, Homo sapien
ctagacagtactttcccgcaaactagaaagaga

SEQ ID NO: 585238 - DNA, 33 bp, Homo sapien
ctagacagtactttcctgcaaactagaaagaga

SEQ ID NO: 585239 - DNA, 33 bp, Homo sapien
tggacactacaattgcagaatttggtttagata

SEQ ID NO: 585240 - DNA, 33 bp, Homo sapien
tggacactacaattgcggaatttggtttagata

SEQ ID NO: 585241 - DNA, 33 bp, Homo sapien
tatataacattcctgaagtaaaaagtttataaa

SEQ ID NO: 585242 - DNA, 33 bp, Homo sapien
tatataacattcctgaggtaaaaagtttataaa

SEQ ID NO: 585243 - DNA, 33 bp, Homo sapien
aactacctgctgacaactagtcacttatctttt

SEQ ID NO: 585244 - DNA, 33 bp, Homo sapien
aactacctgctgacaagtagtcacttatctttt

SEQ ID NO: 585245 - DNA, 33 bp, Homo sapien
tatttatatcaggttaaggcactaaagaacctt

SEQ ID NO: 585246 - DNA, 33 bp, Homo sapien
tatttatatcaggttacggcactaaagaacctt

SEQ ID NO: 585247 - DNA, 33 bp, Homo sapien
catgttacaagcttgcaaaaatggatatggatt

SEQ ID NO: 585248 - DNA, 33 bp, Homo sapien
catgttacaagcttgcgaaaatggatatggatt

SEQ ID NO: 585249 - DNA, 33 bp, Homo sapien
atctacgttgactatccacgtctaacacatagc

SEQ ID NO: 585250 - DNA, 33 bp, Homo sapien
atctacgttgactatctacgtctaacacatagc

SEQ ID NO: 585251 - DNA, 33 bp, Homo sapien
cacaaaacacagaataacaatgccctctgaagg

SEQ ID NO: 585252 - DNA, 33 bp, Homo sapien
cacaaaacacagaatagcaatgccctctgaagg

SEQ ID NO: 585253 - DNA, 33 bp, Homo sapien
gaaatgagaaacctacacatttattccctattt

SEQ ID NO: 585254 - DNA, 33 bp, Homo sapien
gaaatgagaaacctacgcatttattccctattt

SEQ ID NO: 585255 - DNA, 33 bp, Homo sapien
accaaatcctgaattgcatcttacccatttgat

SEQ ID NO: 585256 - DNA, 33 bp, Homo sapien
accaaatcctgaattgtatcttacccatttgat

SEQ ID NO: 585257 - DNA, 33 bp, Homo sapien
tttggtagaagtgttacatctggtgtcagacat

SEQ ID NO: 585258 - DNA, 33 bp, Homo sapien
tttggtagaagtgttatatctggtgtcagacat

SEQ ID NO: 585259 - DNA, 33 bp, Homo sapien
gccaactggtcagggcactatttattaccagtc

SEQ ID NO: 585260 - DNA, 33 bp, Homo sapien
gccaactggtcagggcgctatttattaccagtc

SEQ ID NO: 585261 - DNA, 33 bp, Homo sapien
aattaaagattagaaaaatccaggaaaataaag

SEQ ID NO: 585262 - DNA, 33 bp, Homo sapien
aattaaagattagaaagatccaggaaaataaag

SEQ ID NO: 585263 - DNA, 33 bp, Homo sapien
taaccagaagaaagcaataaaaaattagtcagg

SEQ ID NO: 585264 - DNA, 33 bp, Homo sapien
taaccagaagaaagcactaaaaaattagtcagg

SEQ ID NO: 585265 - DNA, 33 bp, Homo sapien
tagtcttggtgagtaaacacaggttattatgtc

SEQ ID NO: 585266 - DNA, 33 bp, Homo sapien
tagtcttggtgagtaagcacaggttattatgtc

SEQ ID NO: 585267 - DNA, 33 bp, Homo sapien
gagagttttgctcaacaacccaggattccacat

SEQ ID NO: 585268 - DNA, 33 bp, Homo sapien
gagagttttgctcaactacccaggattccacat

SEQ ID NO: 585269 - DNA, 33 bp, Homo sapien
ttagcggctctgctcacgtaggtggtatgacta

SEQ ID NO: 585270 - DNA, 33 bp, Homo sapien
ttagcggctctgctcatgtaggtggtatgacta

SEQ ID NO: 585271 - DNA, 33 bp, Homo sapien
ccaggcaggtgatgagcatcaaaaatggcttca

SEQ ID NO: 585272 - DNA, 33 bp, Homo sapien
ccaggcaggtgatgagtatcaaaaatggcttca

SEQ ID NO: 585273 - DNA, 33 bp, Homo sapien
caaaatggtctttactaactaaaatatgtgcaa

SEQ ID NO: 585274 - DNA, 33 bp, Homo sapien
caaaatggtctttacttactaaaatatgtgcaa

SEQ ID NO: 585275 - DNA, 33 bp, Homo sapien
ctgtatagaaactgcaaaactcatcacccaaag

SEQ ID NO: 585276 - DNA, 33 bp, Homo sapien
ctgtatagaaactgcagaactcatcacccaaag

SEQ ID NO: 585277 - DNA, 33 bp, Homo sapien
aaaataatttcaggtacggatacattttatgca

SEQ ID NO: 585278 - DNA, 33 bp, Homo sapien
aaaataatttcaggtatggatacattttatgca

SEQ ID NO: 585279 - DNA, 33 bp, Homo sapien
aagaaaagccatattaaaatgtgtaccttatgc

SEQ ID NO: 585280 - DNA, 33 bp, Homo sapien
aagaaaagccatattacaatgtgtaccttatgc

SEQ ID NO: 585281 - DNA, 33 bp, Homo sapien
aaaaacaaattccacaatggttaaagtatactc

SEQ ID NO: 585282 - DNA, 33 bp, Homo sapien
aaaaacaaattccacattggttaaagtatactc

SEQ ID NO: 585283 - DNA, 33 bp, Homo sapien
tagttctaaatttggccatttgttccaataaaa

SEQ ID NO: 585284 - DNA, 33 bp, Homo sapien
tagttctaaatttggctatttgttccaataaaa

SEQ ID NO: 585285 - DNA, 33 bp, Homo sapien
tcgtactcttattagcaaatctgtgcagtcaaa

SEQ ID NO: 585286 - DNA, 33 bp, Homo sapien
tcgtactcttattagccaatctgtgcagtcaaa

SEQ ID NO: 585287 - DNA, 33 bp, Homo sapien
gcaataatagagaaacacttgtctgataggttt

SEQ ID NO: 585288 - DNA, 33 bp, Homo sapien
gcaataatagagaaactcttgtctgataggttt

SEQ ID NO: 585289 - DNA, 33 bp, Homo sapien
tccctttgggtatatgaacagtggtgagattgc

SEQ ID NO: 585290 - DNA, 33 bp, Homo sapien
tccctttgggtatatgcacagtggtgagattgc

SEQ ID NO: 585291 - DNA, 33 bp, Homo sapien
gtgtcaaaataagaatcaatcttgtaagcaagg

SEQ ID NO: 585292 - DNA, 33 bp, Homo sapien
gtgtcaaaataagaatgaatcttgtaagcaagg

SEQ ID NO: 585293 - DNA, 33 bp, Homo sapien
gccattaagttcattaaggtagaattagaagag

SEQ ID NO: 585294 - DNA, 33 bp, Homo sapien
gccattaagttcattatggtagaattagaagag

SEQ ID NO: 585295 - DNA, 33 bp, Homo sapien
cagaaaatgaatttaaatagcagctcaacagag

SEQ ID NO: 585296 - DNA, 33 bp, Homo sapien
cagaaaatgaatttaagtagcagctcaacagag

SEQ ID NO: 585297 - DNA, 33 bp, Homo sapien
agatattgtgtgttagcaagcacagagtacaat

SEQ ID NO: 585298 - DNA, 33 bp, Homo sapien
agatattgtgtgttaggaagcacagagtacaat

SEQ ID NO: 585299 - DNA, 33 bp, Homo sapien
ttcaattcattcaggcagataaatgggaggaaa

SEQ ID NO: 585300 - DNA, 33 bp, Homo sapien
ttcaattcattcaggcggataaatgggaggaaa

SEQ ID NO: 585301 - DNA, 33 bp, Homo sapien
tgagtggttccacaataatacaatttcatcttg

SEQ ID NO: 585302 - DNA, 33 bp, Homo sapien
tgagtggttccacaatgatacaatttcatcttg

SEQ ID NO: 585303 - DNA, 33 bp, Homo sapien
gtatccttgagttctgacaacaataataacacc

SEQ ID NO: 585304 - DNA, 33 bp, Homo sapien
gtatccttgagttctggcaacaataataacacc

SEQ ID NO: 585305 - DNA, 33 bp, Homo sapien
ttgacttggttggcaaagttatgaagctacatt

SEQ ID NO: 585306 - DNA, 33 bp, Homo sapien
ttgacttggttggcaatgttatgaagctacatt

SEQ ID NO: 585307 - DNA, 33 bp, Homo sapien
caatgaagtgaaaatcaaaacatgataagccct

SEQ ID NO: 585308 - DNA, 33 bp, Homo sapien
caatgaagtgaaaatctaaacatgataagccct

SEQ ID NO: 585309 - DNA, 33 bp, Homo sapien
cttcctgcctcttgtaaaaatgttgaaattctc

SEQ ID NO: 585310 - DNA, 33 bp, Homo sapien
cttcctgcctcttgtacaaatgttgaaattctc

SEQ ID NO: 585311 - DNA, 33 bp, Homo sapien
tgttctacggaagtcaatactgaaggaaagatt

SEQ ID NO: 585312 - DNA, 33 bp, Homo sapien
tgttctacggaagtcagtactgaaggaaagatt

SEQ ID NO: 585313 - DNA, 33 bp, Homo sapien
aaagaaaaagaggctacgtagagaccttgatgg

SEQ ID NO: 585314 - DNA, 33 bp, Homo sapien
aaagaaaaagaggctatgtagagaccttgatgg

SEQ ID NO: 585315 - DNA, 33 bp, Homo sapien
tttctgactggccataccagggaactgtagggg

SEQ ID NO: 585316 - DNA, 33 bp, Homo sapien
tttctgactggccatatcagggaactgtagggg

SEQ ID NO: 585317 - DNA, 33 bp, Homo sapien
gtttccctggtactgtgaaagagtcacaatatt

SEQ ID NO: 585318 - DNA, 33 bp, Homo sapien
gtttccctggtactgttaaagagtcacaatatt

SEQ ID NO: 585319 - DNA, 33 bp, Homo sapien
gctttggcaatataaacgtggttcaaattttag

SEQ ID NO: 585320 - DNA, 33 bp, Homo sapien
gctttggcaatataaaggtggttcaaattttag

SEQ ID NO: 585321 - DNA, 33 bp, Homo sapien
aggtaaaatctcttaactgtactcagtctgcag

SEQ ID NO: 585322 - DNA, 33 bp, Homo sapien
aggtaaaatctcttaattgtactcagtctgcag

SEQ ID NO: 585323 - DNA, 33 bp, Homo sapien
agctgtaggagaatacactttgagagtcaactt

SEQ ID NO: 585324 - DNA, 33 bp, Homo sapien
agctgtaggagaatacgctttgagagtcaactt

SEQ ID NO: 585325 - DNA, 33 bp, Homo sapien
caagttgttgttcacaatgataaacatctatca

SEQ ID NO: 585326 - DNA, 33 bp, Homo sapien
caagttgttgttcacagtgataaacatctatca

SEQ ID NO: 585327 - DNA, 33 bp, Homo sapien
tgattgtgtcacctaacgcaggttaacctaggt

SEQ ID NO: 585328 - DNA, 33 bp, Homo sapien
tgattgtgtcacctaatgcaggttaacctaggt

SEQ ID NO: 585329 - DNA, 33 bp, Homo sapien
agttactttgacttacaaaacagtccacatgga

SEQ ID NO: 585330 - DNA, 33 bp, Homo sapien
agttactttgacttaccaaacagtccacatgga

SEQ ID NO: 585331 - DNA, 33 bp, Homo sapien
aaacctcagcagaaaaatttgagaagagcgctt

SEQ ID NO: 585332 - DNA, 33 bp, Homo sapien
aaacctcagcagaaaagtttgagaagagcgctt

SEQ ID NO: 585333 - DNA, 33 bp, Homo sapien
ctcataactaggtcacactgatgtaagagatgg

SEQ ID NO: 585334 - DNA, 33 bp, Homo sapien
ctcataactaggtcacgctgatgtaagagatgg

SEQ ID NO: 585335 - DNA, 33 bp, Homo sapien
attatgttctggtcctaaaagtaagcaagcctt

SEQ ID NO: 585336 - DNA, 33 bp, Homo sapien
attatgttctggtcctgaaagtaagcaagcctt

SEQ ID NO: 585337 - DNA, 33 bp, Homo sapien
ctgttgcatgaactgaaatcaacttcaactttg

SEQ ID NO: 585338 - DNA, 33 bp, Homo sapien
ctgttgcatgaactgagatcaacttcaactttg

SEQ ID NO: 585339 - DNA, 33 bp, Homo sapien
taggtagaaggaaaaccatgcattctccacctg

SEQ ID NO: 585340 - DNA, 33 bp, Homo sapien
taggtagaaggaaaactatgcattctccacctg

SEQ ID NO: 585341 - DNA, 33 bp, Homo sapien
ccagagtgaccactaaagcaagtcttcaaaaat

SEQ ID NO: 585342 - DNA, 33 bp, Homo sapien
ccagagtgaccactaaggcaagtcttcaaaaat

SEQ ID NO: 585343 - DNA, 33 bp, Homo sapien
gtttattggttccttacacatcttaggaaatct

SEQ ID NO: 585344 - DNA, 33 bp, Homo sapien
gtttattggttccttagacatcttaggaaatct

SEQ ID NO: 585345 - DNA, 33 bp, Homo sapien
tctctggtggccaacagatagtggatctctgcg

SEQ ID NO: 585346 - DNA, 33 bp, Homo sapien
tctctggtggccaacatatagtggatctctgcg

SEQ ID NO: 585347 - DNA, 33 bp, Homo sapien
cacagagcaggttacacaagcaactttataaga

SEQ ID NO: 585348 - DNA, 33 bp, Homo sapien
cacagagcaggttacagaagcaactttataaga

SEQ ID NO: 585349 - DNA, 33 bp, Homo sapien
aaatcactgtgaaaaaagatgtgtttctgtagc

SEQ ID NO: 585350 - DNA, 33 bp, Homo sapien
aaatcactgtgaaaaaggatgtgtttctgtagc

SEQ ID NO: 585351 - DNA, 33 bp, Homo sapien
aacactcctgaattgacgcaagtctttgcttaa

SEQ ID NO: 585352 - DNA, 33 bp, Homo sapien
aacactcctgaattgatgcaagtctttgcttaa

SEQ ID NO: 585353 - DNA, 33 bp, Homo sapien
gccccacacatggcaaatgtgaaggagaagcaa

SEQ ID NO: 585354 - DNA, 33 bp, Homo sapien
gccccacacatggcaagtgtgaaggagaagcaa

SEQ ID NO: 585355 - DNA, 33 bp, Homo sapien
agggttaatgacctcaaggttccatgtggatgg

SEQ ID NO: 585356 - DNA, 33 bp, Homo sapien
agggttaatgacctcacggttccatgtggatgg

SEQ ID NO: 585357 - DNA, 33 bp, Homo sapien
agagtagtaaattgcaaaactaagctttgaatt

SEQ ID NO: 585358 - DNA, 33 bp, Homo sapien
agagtagtaaattgcagaactaagctttgaatt

SEQ ID NO: 585359 - DNA, 33 bp, Homo sapien
actctggggccttaacgggacttcatgttcact

SEQ ID NO: 585360 - DNA, 33 bp, Homo sapien
actctggggccttaactggacttcatgttcact

SEQ ID NO: 585361 - DNA, 33 bp, Homo sapien
tttccaaacaccttgacagggtttcaacataca

SEQ ID NO: 585362 - DNA, 33 bp, Homo sapien
tttccaaacaccttgatagggtttcaacataca

SEQ ID NO: 585363 - DNA, 33 bp, Homo sapien
agtcattgttttttctcaaagagcttaaagtag

SEQ ID NO: 585364 - DNA, 33 bp, Homo sapien
agtcattgttttttctgaaagagcttaaagtag

SEQ ID NO: 585365 - DNA, 33 bp, Homo sapien
gaataaaattatgagaacagctccaaactatgt

SEQ ID NO: 585366 - DNA, 33 bp, Homo sapien
gaataaaattatgagatcagctccaaactatgt

SEQ ID NO: 585367 - DNA, 33 bp, Homo sapien
ctcattctttcctgtagctttccagaaaacaat

SEQ ID NO: 585368 - DNA, 33 bp, Homo sapien
ctcattctttcctgtatctttccagaaaacaat

SEQ ID NO: 585369 - DNA, 33 bp, Homo sapien
ctcaggtcttacccaaactatcaacattctatt

SEQ ID NO: 585370 - DNA, 33 bp, Homo sapien
ctcaggtcttacccaatctatcaacattctatt

SEQ ID NO: 585371 - DNA, 33 bp, Homo sapien
attgattcttgtttgaactctcatatttccaat

SEQ ID NO: 585372 - DNA, 33 bp, Homo sapien
attgattcttgtttgagctctcatatttccaat

SEQ ID NO: 585373 - DNA, 33 bp, Homo sapien
tgggtattcacttggaaccaatgatcttgctta

SEQ ID NO: 585374 - DNA, 33 bp, Homo sapien
tgggtattcacttggagccaatgatcttgctta

SEQ ID NO: 585375 - DNA, 33 bp, Homo sapien
tcctcctggggtcaccgatttgccaaacccaac

SEQ ID NO: 585376 - DNA, 33 bp, Homo sapien
tcctcctggggtcacctatttgccaaacccaac

SEQ ID NO: 585377 - DNA, 33 bp, Homo sapien
ttaatttagtcctaacacaaggatatacattgt

SEQ ID NO: 585378 - DNA, 33 bp, Homo sapien
ttaatttagtcctaacgcaaggatatacattgt

SEQ ID NO: 585379 - DNA, 33 bp, Homo sapien
ccatgaatggttaatccagtaagtctgcctgtg

SEQ ID NO: 585380 - DNA, 33 bp, Homo sapien
ccatgaatggttaatctagtaagtctgcctgtg

SEQ ID NO: 585381 - DNA, 33 bp, Homo sapien
cagtagtcttaaaaaacagtcccccatagaaat

SEQ ID NO: 585382 - DNA, 33 bp, Homo sapien
cagtagtcttaaaaaagagtcccccatagaaat

SEQ ID NO: 585383 - DNA, 33 bp, Homo sapien
tatttttcaactttccaaagaaaatcattatta

SEQ ID NO: 585384 - DNA, 33 bp, Homo sapien
tatttttcaactttccgaagaaaatcattatta

SEQ ID NO: 585385 - DNA, 33 bp, Homo sapien
taagagaaatgtaaaccaagagctgcatacaat

SEQ ID NO: 585386 - DNA, 33 bp, Homo sapien
taagagaaatgtaaactaagagctgcatacaat

SEQ ID NO: 585387 - DNA, 33 bp, Homo sapien
gaaaattcacttctaacagcagataaagagatt

SEQ ID NO: 585388 - DNA, 33 bp, Homo sapien
gaaaattcacttctaagagcagataaagagatt

SEQ ID NO: 585389 - DNA, 33 bp, Homo sapien
tgacttgagttggttcactaggatcatgagtag

SEQ ID NO: 585390 - DNA, 33 bp, Homo sapien
tgacttgagttggttcgctaggatcatgagtag

SEQ ID NO: 585391 - DNA, 33 bp, Homo sapien
tactgattcttcataaagcatttcatccatccc

SEQ ID NO: 585392 - DNA, 33 bp, Homo sapien
tactgattcttcataaggcatttcatccatccc

SEQ ID NO: 585393 - DNA, 33 bp, Homo sapien
ggtcctgtcagcatagactaaaaagcaatggta

SEQ ID NO: 585394 - DNA, 33 bp, Homo sapien
ggtcctgtcagcataggctaaaaagcaatggta

SEQ ID NO: 585395 - DNA, 33 bp, Homo sapien
aacactaggtagaaacggctcataaaaccagtg

SEQ ID NO: 585396 - DNA, 33 bp, Homo sapien
aacactaggtagaaactgctcataaaaccagtg

SEQ ID NO: 585397 - DNA, 33 bp, Homo sapien
aaggatattcaaaagtcaagacacataggaatt

SEQ ID NO: 585398 - DNA, 33 bp, Homo sapien
aaggatattcaaaagtgaagacacataggaatt

SEQ ID NO: 585399 - DNA, 33 bp, Homo sapien
ggcagttcatcctctcaagagtcacaaaaatac

SEQ ID NO: 585400 - DNA, 33 bp, Homo sapien
ggcagttcatcctctcgagagtcacaaaaatac

SEQ ID NO: 585401 - DNA, 33 bp, Homo sapien
ttaagttcactagctacgtaactttgggcaatt

SEQ ID NO: 585402 - DNA, 33 bp, Homo sapien
ttaagttcactagctatgtaactttgggcaatt

SEQ ID NO: 585403 - DNA, 33 bp, Homo sapien
gctccagtttatcttacctggaattctagcaat

SEQ ID NO: 585404 - DNA, 33 bp, Homo sapien
gctccagtttatcttatctggaattctagcaat

SEQ ID NO: 585405 - DNA, 33 bp, Homo sapien
aggcattaattggacaaattataccagagggcc

SEQ ID NO: 585406 - DNA, 33 bp, Homo sapien
aggcattaattggacacattataccagagggcc

SEQ ID NO: 585407 - DNA, 33 bp, Homo sapien
gcagcactacatttagcactagaccaaacacag

SEQ ID NO: 585408 - DNA, 33 bp, Homo sapien
gcagcactacatttaggactagaccaaacacag

SEQ ID NO: 585409 - DNA, 33 bp, Homo sapien
gagtcaatcacaataaagttctacaagaatctc

SEQ ID NO: 585410 - DNA, 33 bp, Homo sapien
gagtcaatcacaataatgttctacaagaatctc

SEQ ID NO: 585411 - DNA, 33 bp, Homo sapien
atattccataggaataaatgtcagtgtatgtat

SEQ ID NO: 585412 - DNA, 33 bp, Homo sapien
atattccataggaatagatgtcagtgtatgtat

SEQ ID NO: 585413 - DNA, 33 bp, Homo sapien
ttcactttggtagcctcaagtctttatgaaagc

SEQ ID NO: 585414 - DNA, 33 bp, Homo sapien
ttcactttggtagcctgaagtctttatgaaagc

SEQ ID NO: 585415 - DNA, 33 bp, Homo sapien
cctatcttgcttaccccattttgtttttcttca

SEQ ID NO: 585416 - DNA, 33 bp, Homo sapien
cctatcttgcttaccctattttgtttttcttca

SEQ ID NO: 585417 - DNA, 33 bp, Homo sapien
atcaataacgagtaataagattgaagcagtact

SEQ ID NO: 585418 - DNA, 33 bp, Homo sapien
atcaataacgagtaatgagattgaagcagtact

SEQ ID NO: 585419 - DNA, 33 bp, Homo sapien
catgtctgaaacttaaccatcaaggaagataga

SEQ ID NO: 585420 - DNA, 33 bp, Homo sapien
catgtctgaaacttaatcatcaaggaagataga

SEQ ID NO: 585421 - DNA, 33 bp, Homo sapien
acaattagcaaacactcaaagactaagaccccc

SEQ ID NO: 585422 - DNA, 33 bp, Homo sapien
acaattagcaaacactgaaagactaagaccccc

SEQ ID NO: 585423 - DNA, 33 bp, Homo sapien
gaatttgagcatgaaaatcaaatagtcgaatga

SEQ ID NO: 585424 - DNA, 33 bp, Homo sapien
gaatttgagcatgaaagtcaaatagtcgaatga

SEQ ID NO: 585425 - DNA, 33 bp, Homo sapien
ataacttctgaagtcagtaatctttgtttatta

SEQ ID NO: 585426 - DNA, 33 bp, Homo sapien
ataacttctgaagtcattaatctttgtttatta

SEQ ID NO: 585427 - DNA, 33 bp, Homo sapien
ttgaagcttttcataacggttggacagttgaaa

SEQ ID NO: 585428 - DNA, 33 bp, Homo sapien
ttgaagcttttcataatggttggacagttgaaa

SEQ ID NO: 585429 - DNA, 33 bp, Homo sapien
ggcatgtatctgtgtacgtgcttttacttgtta

SEQ ID NO: 585430 - DNA, 33 bp, Homo sapien
ggcatgtatctgtgtatgtgcttttacttgtta

SEQ ID NO: 585431 - DNA, 33 bp, Homo sapien
atacaatctcgtaaaactccagtcgattttact

SEQ ID NO: 585432 - DNA, 33 bp, Homo sapien
atacaatctcgtaaaattccagtcgattttact

SEQ ID NO: 585433 - DNA, 33 bp, Homo sapien
agactcagtgaagtaactaagacagaaaattaa

SEQ ID NO: 585434 - DNA, 33 bp, Homo sapien
agactcagtgaagtaagtaagacagaaaattaa

SEQ ID NO: 585435 - DNA, 33 bp, Homo sapien
gatttgagcatccatacctaagaattaatcttt

SEQ ID NO: 585436 - DNA, 33 bp, Homo sapien
gatttgagcatccatagctaagaattaatcttt

SEQ ID NO: 585437 - DNA, 33 bp, Homo sapien
ttggtatctagcttcaagaaagaaattgtctct

SEQ ID NO: 585438 - DNA, 33 bp, Homo sapien
ttggtatctagcttcaggaaagaaattgtctct

SEQ ID NO: 585439 - DNA, 33 bp, Homo sapien
ggttagtcttgtggaaaaggaaaatgtataaat

SEQ ID NO: 585440 - DNA, 33 bp, Homo sapien
ggttagtcttgtggaagaggaaaatgtataaat

SEQ ID NO: 585441 - DNA, 33 bp, Homo sapien
taaaataatctgaaacaatccaacaaacaaaaa

SEQ ID NO: 585442 - DNA, 33 bp, Homo sapien
taaaataatctgaaaccatccaacaaacaaaaa

SEQ ID NO: 585443 - DNA, 33 bp, Homo sapien
taacatagtcacttaacaattgtcttcatattc

SEQ ID NO: 585444 - DNA, 33 bp, Homo sapien
taacatagtcacttaataattgtcttcatattc

SEQ ID NO: 585445 - DNA, 33 bp, Homo sapien
cttggagataacataccgaaaccaggtgtagct

SEQ ID NO: 585446 - DNA, 33 bp, Homo sapien
cttggagataacatactgaaaccaggtgtagct

SEQ ID NO: 585447 - DNA, 33 bp, Homo sapien
ttctccatataccttcactagaaccttgtccca

SEQ ID NO: 585448 - DNA, 33 bp, Homo sapien
ttctccatataccttcgctagaaccttgtccca

SEQ ID NO: 585449 - DNA, 33 bp, Homo sapien
cagcacttagaaattgaaattaccagaccagac

SEQ ID NO: 585450 - DNA, 33 bp, Homo sapien
cagcacttagaaattggaattaccagaccagac

SEQ ID NO: 585451 - DNA, 33 bp, Homo sapien
attaattttttagttcaattttctcatacttat

SEQ ID NO: 585452 - DNA, 33 bp, Homo sapien
attaattttttagttccattttctcatacttat

SEQ ID NO: 585453 - DNA, 33 bp, Homo sapien
aagacagaattactcaacttacttctttgagct

SEQ ID NO: 585454 - DNA, 33 bp, Homo sapien
aagacagaattactcagcttacttctttgagct

SEQ ID NO: 585455 - DNA, 33 bp, Homo sapien
tggaaatgacaaagaacgtctattagattatat

SEQ ID NO: 585456 - DNA, 33 bp, Homo sapien
tggaaatgacaaagaaggtctattagattatat

SEQ ID NO: 585457 - DNA, 33 bp, Homo sapien
gaaacctgacggaatcaatactgctgactagta

SEQ ID NO: 585458 - DNA, 33 bp, Homo sapien
gaaacctgacggaatcgatactgctgactagta

SEQ ID NO: 585459 - DNA, 33 bp, Homo sapien
attttcaaataattcaaaacgtgatgtcatcca

SEQ ID NO: 585460 - DNA, 33 bp, Homo sapien
attttcaaataattcataacgtgatgtcatcca

SEQ ID NO: 585461 - DNA, 33 bp, Homo sapien
gcaatggcaaaatgacccaggagtgtatttctc

SEQ ID NO: 585462 - DNA, 33 bp, Homo sapien
gcaatggcaaaatgactcaggagtgtatttctc

SEQ ID NO: 585463 - DNA, 33 bp, Homo sapien
gtgagtgaatgaaaagccctaggatactactgt

SEQ ID NO: 585464 - DNA, 33 bp, Homo sapien
gtgagtgaatgaaaaggcctaggatactactgt

SEQ ID NO: 585465 - DNA, 33 bp, Homo sapien
ctgaagcttcagataaccattagcatgttttag

SEQ ID NO: 585466 - DNA, 33 bp, Homo sapien
ctgaagcttcagataatcattagcatgttttag

SEQ ID NO: 585467 - DNA, 33 bp, Homo sapien
acaaaaatgtacaaaacctcatcttccatcgaa

SEQ ID NO: 585468 - DNA, 33 bp, Homo sapien
acaaaaatgtacaaaatctcatcttccatcgaa

SEQ ID NO: 585469 - DNA, 33 bp, Homo sapien
agggtcagaactggtacatttgaagtcattttt

SEQ ID NO: 585470 - DNA, 33 bp, Homo sapien
agggtcagaactggtatatttgaagtcattttt

SEQ ID NO: 585471 - DNA, 33 bp, Homo sapien
ttagactggataaaacaaccgttgcaaatctgt

SEQ ID NO: 585472 - DNA, 33 bp, Homo sapien
ttagactggataaaacgaccgttgcaaatctgt

SEQ ID NO: 585473 - DNA, 33 bp, Homo sapien
ctttctgggtgtatcaatgagaaaaatgctgat

SEQ ID NO: 585474 - DNA, 33 bp, Homo sapien
ctttctgggtgtatcagtgagaaaaatgctgat

SEQ ID NO: 585475 - DNA, 33 bp, Homo sapien
ttattgaacttctaggaattttgtgtccttatt

SEQ ID NO: 585476 - DNA, 33 bp, Homo sapien
ttattgaacttctaggcattttgtgtccttatt

SEQ ID NO: 585477 - DNA, 33 bp, Homo sapien
acagattctaatcatgaatgcacgtgaccaata

SEQ ID NO: 585478 - DNA, 33 bp, Homo sapien
acagattctaatcatggatgcacgtgaccaata

SEQ ID NO: 585479 - DNA, 33 bp, Homo sapien
ttaagtgggaaatgtaagattcaatcaatatct

SEQ ID NO: 585480 - DNA, 33 bp, Homo sapien
ttaagtgggaaatgtaggattcaatcaatatct

SEQ ID NO: 585481 - DNA, 33 bp, Homo sapien
tgttgataatatcagcactcataactactaaac

SEQ ID NO: 585482 - DNA, 33 bp, Homo sapien
tgttgataatatcagcgctcataactactaaac

SEQ ID NO: 585483 - DNA, 33 bp, Homo sapien
attatcaacacataaaagagtatcaaggaaatc

SEQ ID NO: 585484 - DNA, 33 bp, Homo sapien
attatcaacacataaaggagtatcaaggaaatc

SEQ ID NO: 585485 - DNA, 33 bp, Homo sapien
actgagttgccataatcagaacataatatttga

SEQ ID NO: 585486 - DNA, 33 bp, Homo sapien
actgagttgccataatgagaacataatatttga

SEQ ID NO: 585487 - DNA, 33 bp, Homo sapien
gtcatttatactgaaacagttttccctttcttc

SEQ ID NO: 585488 - DNA, 33 bp, Homo sapien
gtcatttatactgaaatagttttccctttcttc

SEQ ID NO: 585489 - DNA, 33 bp, Homo sapien
agtaaaaccgggtcacaatggtgaaagtgttag

SEQ ID NO: 585490 - DNA, 33 bp, Homo sapien
agtaaaaccgggtcacgatggtgaaagtgttag

SEQ ID NO: 585491 - DNA, 33 bp, Homo sapien
tagaaatgttttctcccgagtcaaaagatttac

SEQ ID NO: 585492 - DNA, 33 bp, Homo sapien
tagaaatgttttctcctgagtcaaaagatttac

SEQ ID NO: 585493 - DNA, 33 bp, Homo sapien
agtttgctgcttaaccgatacgaatacctaata

SEQ ID NO: 585494 - DNA, 33 bp, Homo sapien
agtttgctgcttaacctatacgaatacctaata

SEQ ID NO: 585495 - DNA, 33 bp, Homo sapien
aatcgtgtcctgttacagaataaaacagtttct

SEQ ID NO: 585496 - DNA, 33 bp, Homo sapien
aatcgtgtcctgttaccgaataaaacagtttct

SEQ ID NO: 585497 - DNA, 33 bp, Homo sapien
agatctgatgtcaacacactttctgtaaaaggc

SEQ ID NO: 585498 - DNA, 33 bp, Homo sapien
agatctgatgtcaacatactttctgtaaaaggc

SEQ ID NO: 585499 - DNA, 33 bp, Homo sapien
gaaatgttggacgtgaaatatatattaaaccca

SEQ ID NO: 585500 - DNA, 33 bp, Homo sapien
gaaatgttggacgtgatatatatattaaaccca

SEQ ID NO: 585501 - DNA, 33 bp, Homo sapien
aagattcataacaatgccacatacttactgcat

SEQ ID NO: 585502 - DNA, 33 bp, Homo sapien
aagattcataacaatgtcacatacttactgcat

SEQ ID NO: 585503 - DNA, 33 bp, Homo sapien
atactgaatccaggcactagctacaaaaggaaa

SEQ ID NO: 585504 - DNA, 33 bp, Homo sapien
atactgaatccaggcattagctacaaaaggaaa

SEQ ID NO: 585505 - DNA, 33 bp, Homo sapien
ttacataatatacttgcaaatacttgtaatata

SEQ ID NO: 585506 - DNA, 33 bp, Homo sapien
ttacataatatacttggaaatacttgtaatata

SEQ ID NO: 585507 - DNA, 33 bp, Homo sapien
cattcattattctctcccctattctacatgggc

SEQ ID NO: 585508 - DNA, 33 bp, Homo sapien
cattcattattctctctcctattctacatgggc

SEQ ID NO: 585509 - DNA, 33 bp, Homo sapien
agcaccagaataaacaataaagggcaatcaatc

SEQ ID NO: 585510 - DNA, 33 bp, Homo sapien
agcaccagaataaacagtaaagggcaatcaatc

SEQ ID NO: 585511 - DNA, 33 bp, Homo sapien
atagcaaacagactataaggatgcagtgaaagc

SEQ ID NO: 585512 - DNA, 33 bp, Homo sapien
atagcaaacagactatgaggatgcagtgaaagc

SEQ ID NO: 585513 - DNA, 33 bp, Homo sapien
ctgggtttgactagcaataaaaaacaaaatcct

SEQ ID NO: 585514 - DNA, 33 bp, Homo sapien
ctgggtttgactagcagtaaaaaacaaaatcct

SEQ ID NO: 585515 - DNA, 33 bp, Homo sapien
gtgtggggtgccagcaatgaaggtagatgtaga

SEQ ID NO: 585516 - DNA, 33 bp, Homo sapien
gtgtggggtgccagcagtgaaggtagatgtaga

SEQ ID NO: 585517 - DNA, 33 bp, Homo sapien
tataatatattagccccgatatatggtttgaaa

SEQ ID NO: 585518 - DNA, 33 bp, Homo sapien
tataatatattagccctgatatatggtttgaaa

SEQ ID NO: 585519 - DNA, 33 bp, Homo sapien
ataattcattgaagagactatcattttcccatt

SEQ ID NO: 585520 - DNA, 33 bp, Homo sapien
ataattcattgaagaggctatcattttcccatt

SEQ ID NO: 585521 - DNA, 33 bp, Homo sapien
agtagccacgttatatcagtagactccttaaaa

SEQ ID NO: 585522 - DNA, 33 bp, Homo sapien
agtagccacgttatatgagtagactccttaaaa

SEQ ID NO: 585523 - DNA, 33 bp, Homo sapien
acaaacatatttttaaaaagtccagcatcacta

SEQ ID NO: 585524 - DNA, 33 bp, Homo sapien
acaaacatatttttaagaagtccagcatcacta

SEQ ID NO: 585525 - DNA, 33 bp, Homo sapien
aatagatgaattcacaaagaaaggcttaagttt

SEQ ID NO: 585526 - DNA, 33 bp, Homo sapien
aatagatgaattcacagagaaaggcttaagttt

SEQ ID NO: 585527 - DNA, 33 bp, Homo sapien
attgacacataatagtcactacaagtccataat

SEQ ID NO: 585528 - DNA, 33 bp, Homo sapien
attgacacataatagttactacaagtccataat

SEQ ID NO: 585529 - DNA, 33 bp, Homo sapien
ctgcagtgtctgttgcgcctccgtttaggtccg

SEQ ID NO: 585530 - DNA, 33 bp, Homo sapien
ctgcagtgtctgttgctcctccgtttaggtccg

SEQ ID NO: 585531 - DNA, 33 bp, Homo sapien
tttttatggaatatgacgtccctctatgcaaat

SEQ ID NO: 585532 - DNA, 33 bp, Homo sapien
tttttatggaatatgatgtccctctatgcaaat

SEQ ID NO: 585533 - DNA, 33 bp, Homo sapien
tgtgtgctcaccaggaagtatcattctgaatac

SEQ ID NO: 585534 - DNA, 33 bp, Homo sapien
tgtgtgctcaccaggacgtatcattctgaatac

SEQ ID NO: 585535 - DNA, 33 bp, Homo sapien
taaacattgctaagaaaccaaccagtcaagtga

SEQ ID NO: 585536 - DNA, 33 bp, Homo sapien
taaacattgctaagaacccaaccagtcaagtga

SEQ ID NO: 585537 - DNA, 33 bp, Homo sapien
caacatttagcctacactgatgcacaacgacca

SEQ ID NO: 585538 - DNA, 33 bp, Homo sapien
caacatttagcctacattgatgcacaacgacca

SEQ ID NO: 585539 - DNA, 33 bp, Homo sapien
ttttcaagtagtggtacactccataggtgaaag

SEQ ID NO: 585540 - DNA, 33 bp, Homo sapien
ttttcaagtagtggtagactccataggtgaaag

SEQ ID NO: 585541 - DNA, 33 bp, Homo sapien
ggctcaaaactccttagcaagccatgaacgagc

SEQ ID NO: 585542 - DNA, 33 bp, Homo sapien
ggctcaaaactccttatcaagccatgaacgagc

SEQ ID NO: 585543 - DNA, 33 bp, Homo sapien
acatcttttcggctgcagattatttttgacact

SEQ ID NO: 585544 - DNA, 33 bp, Homo sapien
acatcttttcggctgcggattatttttgacact

SEQ ID NO: 585545 - DNA, 33 bp, Homo sapien
gaaagaaaatgcagtcaagggaagagtactttg

SEQ ID NO: 585546 - DNA, 33 bp, Homo sapien
gaaagaaaatgcagtcgagggaagagtactttg

SEQ ID NO: 585547 - DNA, 33 bp, Homo sapien
gtgagaaactgatagcaatgtgctgcactgaga

SEQ ID NO: 585548 - DNA, 33 bp, Homo sapien
gtgagaaactgatagcgatgtgctgcactgaga

SEQ ID NO: 585549 - DNA, 33 bp, Homo sapien
gaaggagaagaagtcaatcatccaaattatttt

SEQ ID NO: 585550 - DNA, 33 bp, Homo sapien
gaaggagaagaagtcagtcatccaaattatttt

SEQ ID NO: 585551 - DNA, 33 bp, Homo sapien
aaactatagcagtaaagttgttgttgttgttgc

SEQ ID NO: 585552 - DNA, 33 bp, Homo sapien
aaactatagcagtaaatttgttgttgttgttgc

SEQ ID NO: 585553 - DNA, 33 bp, Homo sapien
caatgattgtggctaccggcaaggaatattaac

SEQ ID NO: 585554 - DNA, 33 bp, Homo sapien
caatgattgtggctactggcaaggaatattaac

SEQ ID NO: 585555 - DNA, 33 bp, Homo sapien
gccaattaaaaaactacgtgagatacaaccaca

SEQ ID NO: 585556 - DNA, 33 bp, Homo sapien
gccaattaaaaaactatgtgagatacaaccaca

SEQ ID NO: 585557 - DNA, 33 bp, Homo sapien
gtttccaggttttatccatgtgtttcttagctt

SEQ ID NO: 585558 - DNA, 33 bp, Homo sapien
gtttccaggttttatctatgtgtttcttagctt

SEQ ID NO: 585559 - DNA, 33 bp, Homo sapien
gggaaattgagacatcaacttttcctatgagat

SEQ ID NO: 585560 - DNA, 33 bp, Homo sapien
gggaaattgagacatcgacttttcctatgagat

SEQ ID NO: 585561 - DNA, 33 bp, Homo sapien
ataatcatcaccaaaaagatggagaagtagaag

SEQ ID NO: 585562 - DNA, 33 bp, Homo sapien
ataatcatcaccaaaaggatggagaagtagaag

SEQ ID NO: 585563 - DNA, 33 bp, Homo sapien
tgattactttcttcttcggtgccaattagaatc

SEQ ID NO: 585564 - DNA, 33 bp, Homo sapien
tgattactttcttctttggtgccaattagaatc

SEQ ID NO: 585565 - DNA, 33 bp, Homo sapien
tcaggcatatagcttacaaagacaaattttaat

SEQ ID NO: 585566 - DNA, 33 bp, Homo sapien
tcaggcatatagcttataaagacaaattttaat

SEQ ID NO: 585567 - DNA, 33 bp, Homo sapien
tgacagatcggataaacaaaacatagtacatat

SEQ ID NO: 585568 - DNA, 33 bp, Homo sapien
tgacagatcggataaagaaaacatagtacatat

SEQ ID NO: 585569 - DNA, 33 bp, Homo sapien
cttgggtcactagtgtcaatcataaagaaagga

SEQ ID NO: 585570 - DNA, 33 bp, Homo sapien
cttgggtcactagtgtgaatcataaagaaagga

SEQ ID NO: 585571 - DNA, 33 bp, Homo sapien
cccaggacttatcacagacgttctgaataggaa

SEQ ID NO: 585572 - DNA, 33 bp, Homo sapien
cccaggacttatcacatacgttctgaataggaa

SEQ ID NO: 585573 - DNA, 33 bp, Homo sapien
ggatagttaagagtaacgcaaatttcacctgga

SEQ ID NO: 585574 - DNA, 33 bp, Homo sapien
ggatagttaagagtaatgcaaatttcacctgga

SEQ ID NO: 585575 - DNA, 33 bp, Homo sapien
acacaatactgcagaaaaacaaaggaaggggat

SEQ ID NO: 585576 - DNA, 33 bp, Homo sapien
acacaatactgcagaacaacaaaggaaggggat

SEQ ID NO: 585577 - DNA, 33 bp, Homo sapien
ttacttaagtaacatgaactcaaagacattaca

SEQ ID NO: 585578 - DNA, 33 bp, Homo sapien
ttacttaagtaacatggactcaaagacattaca

SEQ ID NO: 585579 - DNA, 33 bp, Homo sapien
acagtcccccaaagtaataacccatttcagcat

SEQ ID NO: 585580 - DNA, 33 bp, Homo sapien
acagtcccccaaagtagtaacccatttcagcat

SEQ ID NO: 585581 - DNA, 33 bp, Homo sapien
aaagtcatatccaagacgaggcaaatcccttct

SEQ ID NO: 585582 - DNA, 33 bp, Homo sapien
aaagtcatatccaagatgaggcaaatcccttct

SEQ ID NO: 585583 - DNA, 33 bp, Homo sapien
aagaagatgtttgttacgtaggaagtaggatta

SEQ ID NO: 585584 - DNA, 33 bp, Homo sapien
aagaagatgtttgttatgtaggaagtaggatta

SEQ ID NO: 585585 - DNA, 33 bp, Homo sapien
attttatacctgatgaaactgttggatccagga

SEQ ID NO: 585586 - DNA, 33 bp, Homo sapien
attttatacctgatgagactgttggatccagga

SEQ ID NO: 585587 - DNA, 33 bp, Homo sapien
ctcagaagcagaataacgaaacgttttgcttat

SEQ ID NO: 585588 - DNA, 33 bp, Homo sapien
ctcagaagcagaataatgaaacgttttgcttat

SEQ ID NO: 585589 - DNA, 33 bp, Homo sapien
gccacgacctagaagtaaaacatatagtgttaa

SEQ ID NO: 585590 - DNA, 33 bp, Homo sapien
gccacgacctagaagttaaacatatagtgttaa

SEQ ID NO: 585591 - DNA, 33 bp, Homo sapien
atctgtcatgctgtaaacaggtcctaattgaga

SEQ ID NO: 585592 - DNA, 33 bp, Homo sapien
atctgtcatgctgtaatcaggtcctaattgaga

SEQ ID NO: 585593 - DNA, 33 bp, Homo sapien
atgtattatggctcaggcattttactttatctt

SEQ ID NO: 585594 - DNA, 33 bp, Homo sapien
atgtattatggctcagtcattttactttatctt

SEQ ID NO: 585595 - DNA, 33 bp, Homo sapien
tcttcacaaaagacacaaattcaattttctccc

SEQ ID NO: 585596 - DNA, 33 bp, Homo sapien
tcttcacaaaagacaccaattcaattttctccc

SEQ ID NO: 585597 - DNA, 33 bp, Homo sapien
atattcaaactctcaacgacaacaataataaat

SEQ ID NO: 585598 - DNA, 33 bp, Homo sapien
atattcaaactctcaatgacaacaataataaat

SEQ ID NO: 585599 - DNA, 33 bp, Homo sapien
ggaatgtcgaaaaaaaatctcttatattcaacc

SEQ ID NO: 585600 - DNA, 33 bp, Homo sapien
ggaatgtcgaaaaaaattctcttatattcaacc

SEQ ID NO: 585601 - DNA, 33 bp, Homo sapien
tttgacaaacatgatgaaaacaagaaatcggga

SEQ ID NO: 585602 - DNA, 33 bp, Homo sapien
tttgacaaacatgatgtaaacaagaaatcggga

SEQ ID NO: 585603 - DNA, 33 bp, Homo sapien
gatggcaaagcaagaccctgcctttaattgtat

SEQ ID NO: 585604 - DNA, 33 bp, Homo sapien
gatggcaaagcaagacgctgcctttaattgtat

SEQ ID NO: 585605 - DNA, 33 bp, Homo sapien
atagaaagtggctgaaatcattggttacattct

SEQ ID NO: 585606 - DNA, 33 bp, Homo sapien
atagaaagtggctgaagtcattggttacattct

SEQ ID NO: 585607 - DNA, 33 bp, Homo sapien
ctgcttcatggcaaacaattgtattgggagaca

SEQ ID NO: 585608 - DNA, 33 bp, Homo sapien
ctgcttcatggcaaacgattgtattgggagaca

SEQ ID NO: 585609 - DNA, 33 bp, Homo sapien
tataatcacattgagaaagagctattattataa

SEQ ID NO: 585610 - DNA, 33 bp, Homo sapien
tataatcacattgagatagagctattattataa

SEQ ID NO: 585611 - DNA, 33 bp, Homo sapien
tcattaccacactacaactttgacagcttaaca

SEQ ID NO: 585612 - DNA, 33 bp, Homo sapien
tcattaccacactacacctttgacagcttaaca

SEQ ID NO: 585613 - DNA, 33 bp, Homo sapien
aagaatttcaaagtaaacctggaaacttctaaa

SEQ ID NO: 585614 - DNA, 33 bp, Homo sapien
aagaatttcaaagtaatcctggaaacttctaaa

SEQ ID NO: 585615 - DNA, 33 bp, Homo sapien
atgagcaagtaggtaaatagaagagaggagaga

SEQ ID NO: 585616 - DNA, 33 bp, Homo sapien
atgagcaagtaggtaagtagaagagaggagaga

SEQ ID NO: 585617 - DNA, 33 bp, Homo sapien
atataaggtacaggcagaattcacaaaaagtca

SEQ ID NO: 585618 - DNA, 33 bp, Homo sapien
atataaggtacaggcataattcacaaaaagtca

SEQ ID NO: 585619 - DNA, 33 bp, Homo sapien
agctacttgctacttaccaagacattaggagaa

SEQ ID NO: 585620 - DNA, 33 bp, Homo sapien
agctacttgctacttatcaagacattaggagaa

SEQ ID NO: 585621 - DNA, 33 bp, Homo sapien
tttacatagcctggctaagaattttccaaatct

SEQ ID NO: 585622 - DNA, 33 bp, Homo sapien
tttacatagcctggctgagaattttccaaatct

SEQ ID NO: 585623 - DNA, 33 bp, Homo sapien
agaaatgatttagagacaagctttgtaatgaaa

SEQ ID NO: 585624 - DNA, 33 bp, Homo sapien
agaaatgatttagagataagctttgtaatgaaa

SEQ ID NO: 585625 - DNA, 33 bp, Homo sapien
aaggaggagccagagaaagaatagtaggatata

SEQ ID NO: 585626 - DNA, 33 bp, Homo sapien
aaggaggagccagagagagaatagtaggatata

SEQ ID NO: 585627 - DNA, 33 bp, Homo sapien
atgctgaactacacgcaacttcccagcaaagag

SEQ ID NO: 585628 - DNA, 33 bp, Homo sapien
atgctgaactacacgccacttcccagcaaagag

SEQ ID NO: 585629 - DNA, 33 bp, Homo sapien
cctggaaaacagtaaacgagatttgctaagtat

SEQ ID NO: 585630 - DNA, 33 bp, Homo sapien
cctggaaaacagtaaatgagatttgctaagtat

SEQ ID NO: 585631 - DNA, 33 bp, Homo sapien
ctttttaattcttttggaacactctttcattta

SEQ ID NO: 585632 - DNA, 33 bp, Homo sapien
ctttttaattcttttgtaacactctttcattta

SEQ ID NO: 585633 - DNA, 33 bp, Homo sapien
aaagtggaagaagggcaagttcttaatctctct

SEQ ID NO: 585634 - DNA, 33 bp, Homo sapien
aaagtggaagaagggcgagttcttaatctctct

SEQ ID NO: 585635 - DNA, 33 bp, Homo sapien
aagagattagcttttgaatccatacactgagga

SEQ ID NO: 585636 - DNA, 33 bp, Homo sapien
aagagattagcttttgtatccatacactgagga

SEQ ID NO: 585637 - DNA, 33 bp, Homo sapien
gtgtgaacatgggcaaactgctttacttctgta

SEQ ID NO: 585638 - DNA, 33 bp, Homo sapien
gtgtgaacatgggcaagctgctttacttctgta

SEQ ID NO: 585639 - DNA, 33 bp, Homo sapien
tttgtctgtctattccccctttaatgctttctt

SEQ ID NO: 585640 - DNA, 33 bp, Homo sapien
tttgtctgtctattcctcctttaatgctttctt

SEQ ID NO: 585641 - DNA, 33 bp, Homo sapien
caaggccactgtcaacacctggtcaataatcct

SEQ ID NO: 585642 - DNA, 33 bp, Homo sapien
caaggccactgtcaacgcctggtcaataatcct

SEQ ID NO: 585643 - DNA, 33 bp, Homo sapien
cagcatttccttgatactaaagcccaaggtacc

SEQ ID NO: 585644 - DNA, 33 bp, Homo sapien
cagcatttccttgatattaaagcccaaggtacc

SEQ ID NO: 585645 - DNA, 33 bp, Homo sapien
tatatttctgaaaaaaaaatgtcatcagtacat

SEQ ID NO: 585646 - DNA, 33 bp, Homo sapien
tatatttctgaaaaaacaatgtcatcagtacat

SEQ ID NO: 585647 - DNA, 33 bp, Homo sapien
tttatagtttatgtaaatactatcggtcaggtt

SEQ ID NO: 585648 - DNA, 33 bp, Homo sapien
tttatagtttatgtaactactatcggtcaggtt

SEQ ID NO: 585649 - DNA, 33 bp, Homo sapien
aataattcaatattgacagccaaccttaaattg

SEQ ID NO: 585650 - DNA, 33 bp, Homo sapien
aataattcaatattgagagccaaccttaaattg

SEQ ID NO: 585651 - DNA, 33 bp, Homo sapien
ccatttcatggtgatacgattgggacagatttt

SEQ ID NO: 585652 - DNA, 33 bp, Homo sapien
ccatttcatggtgatatgattgggacagatttt

SEQ ID NO: 585653 - DNA, 33 bp, Homo sapien
tatatttaatgagagaccacaaacaatgtattt

SEQ ID NO: 585654 - DNA, 33 bp, Homo sapien
tatatttaatgagagatcacaaacaatgtattt

SEQ ID NO: 585655 - DNA, 33 bp, Homo sapien
ggaatcacttttccaactcaatctagagggaag

SEQ ID NO: 585656 - DNA, 33 bp, Homo sapien
ggaatcacttttccaattcaatctagagggaag

SEQ ID NO: 585657 - DNA, 33 bp, Homo sapien
tagatttttttctagcacatccatagacaataa

SEQ ID NO: 585658 - DNA, 33 bp, Homo sapien
tagatttttttctagcgcatccatagacaataa

SEQ ID NO: 585659 - DNA, 33 bp, Homo sapien
tataaacaagctcataaatttgtggaggaatcc

SEQ ID NO: 585660 - DNA, 33 bp, Homo sapien
tataaacaagctcatacatttgtggaggaatcc

SEQ ID NO: 585661 - DNA, 33 bp, Homo sapien
tggaattgagatgctacagttttgaaggtgagg

SEQ ID NO: 585662 - DNA, 33 bp, Homo sapien
tggaattgagatgctatagttttgaaggtgagg

SEQ ID NO: 585663 - DNA, 33 bp, Homo sapien
ctataataggcaacttcaaagtcttcatgatat

SEQ ID NO: 585664 - DNA, 33 bp, Homo sapien
ctataataggcaacttgaaagtcttcatgatat

SEQ ID NO: 585665 - DNA, 33 bp, Homo sapien
gaggtgattgaagaaacgtttacagtgcatttt

SEQ ID NO: 585666 - DNA, 33 bp, Homo sapien
gaggtgattgaagaaatgtttacagtgcatttt

SEQ ID NO: 585667 - DNA, 33 bp, Homo sapien
ctgcacgcagtgaaaaacatcttttaagacaca

SEQ ID NO: 585668 - DNA, 33 bp, Homo sapien
ctgcacgcagtgaaaagcatcttttaagacaca

SEQ ID NO: 585669 - DNA, 33 bp, Homo sapien
aaatcaaaatgccaaaccattatttataaatgt

SEQ ID NO: 585670 - DNA, 33 bp, Homo sapien
aaatcaaaatgccaaatcattatttataaatgt

SEQ ID NO: 585671 - DNA, 33 bp, Homo sapien
agctgtggtgcctgtgcaaatggcggaacccca

SEQ ID NO: 585672 - DNA, 33 bp, Homo sapien
agctgtggtgcctgtgtaaatggcggaacccca

SEQ ID NO: 585673 - DNA, 33 bp, Homo sapien
cacacatgttcaaaaacgtggaagagttcacag

SEQ ID NO: 585674 - DNA, 33 bp, Homo sapien
cacacatgttcaaaaatgtggaagagttcacag

SEQ ID NO: 585675 - DNA, 33 bp, Homo sapien
acagatggtagtggacccaaaggtgccagtatt

SEQ ID NO: 585676 - DNA, 33 bp, Homo sapien
acagatggtagtggactcaaaggtgccagtatt

SEQ ID NO: 585677 - DNA, 33 bp, Homo sapien
tcaaggaaagtgacaaaaaggcttattctaact

SEQ ID NO: 585678 - DNA, 33 bp, Homo sapien
tcaaggaaagtgacaagaaggcttattctaact

SEQ ID NO: 585679 - DNA, 33 bp, Homo sapien
gattcatgctatcagacactgcacagacaagca

SEQ ID NO: 585680 - DNA, 33 bp, Homo sapien
gattcatgctatcagatactgcacagacaagca

SEQ ID NO: 585681 - DNA, 33 bp, Homo sapien
aagattcctgcgtaaacgctgcatagtgaagat

SEQ ID NO: 585682 - DNA, 33 bp, Homo sapien
aagattcctgcgtaaatgctgcatagtgaagat

SEQ ID NO: 585683 - DNA, 33 bp, Homo sapien
aattaaatgtttgatcagaaataaattgtataa

SEQ ID NO: 585684 - DNA, 33 bp, Homo sapien
aattaaatgtttgatcggaaataaattgtataa

SEQ ID NO: 585685 - DNA, 33 bp, Homo sapien
catttattgaagtcaccgggaatcatctaacag

SEQ ID NO: 585686 - DNA, 33 bp, Homo sapien
catttattgaagtcactgggaatcatctaacag

SEQ ID NO: 585687 - DNA, 33 bp, Homo sapien
ggttaatgtattaaggacctcacatagaacaag

SEQ ID NO: 585688 - DNA, 33 bp, Homo sapien
ggttaatgtattaagggcctcacatagaacaag

SEQ ID NO: 585689 - DNA, 33 bp, Homo sapien
acacatcaaaatcaaactgctgaataccagcat

SEQ ID NO: 585690 - DNA, 33 bp, Homo sapien
acacatcaaaatcaaattgctgaataccagcat

SEQ ID NO: 585691 - DNA, 33 bp, Homo sapien
ctagaacctggagaaagctcttcaacagccttc

SEQ ID NO: 585692 - DNA, 33 bp, Homo sapien
ctagaacctggagaaatctcttcaacagccttc

SEQ ID NO: 585693 - DNA, 33 bp, Homo sapien
caagcctatatacaaaaaacagataaccttctc

SEQ ID NO: 585694 - DNA, 33 bp, Homo sapien
caagcctatatacaaataacagataaccttctc

SEQ ID NO: 585695 - DNA, 33 bp, Homo sapien
tacgtagaaggctgtccctttttatcatttatt

SEQ ID NO: 585696 - DNA, 33 bp, Homo sapien
tacgtagaaggctgtctctttttatcatttatt

SEQ ID NO: 585697 - DNA, 33 bp, Homo sapien
gtctggagacaatcaaatagtttattccagagt

SEQ ID NO: 585698 - DNA, 33 bp, Homo sapien
gtctggagacaatcaagtagtttattccagagt

SEQ ID NO: 585699 - DNA, 33 bp, Homo sapien
aaacttgttttctttcactttctccggctttat

SEQ ID NO: 585700 - DNA, 33 bp, Homo sapien
aaacttgttttctttcgctttctccggctttat

SEQ ID NO: 585701 - DNA, 33 bp, Homo sapien
tttttataaaatcatcccatcctattgctggtt

SEQ ID NO: 585702 - DNA, 33 bp, Homo sapien
tttttataaaatcatctcatcctattgctggtt

SEQ ID NO: 585703 - DNA, 33 bp, Homo sapien
tgagaggcaggctttgcagaatcaagagactga

SEQ ID NO: 585704 - DNA, 33 bp, Homo sapien
tgagaggcaggctttgtagaatcaagagactga

SEQ ID NO: 585705 - DNA, 33 bp, Homo sapien
tgtacatacaactcataaaatctacatacatta

SEQ ID NO: 585706 - DNA, 33 bp, Homo sapien
tgtacatacaactcatgaaatctacatacatta

SEQ ID NO: 585707 - DNA, 33 bp, Homo sapien
tctgtttcccacaggcaaccgtagctctaaggc

SEQ ID NO: 585708 - DNA, 33 bp, Homo sapien
tctgtttcccacaggccaccgtagctctaaggc

SEQ ID NO: 585709 - DNA, 33 bp, Homo sapien
aagttgctgtatttaacaattagctaaccctgg

SEQ ID NO: 585710 - DNA, 33 bp, Homo sapien
aagttgctgtatttaagaattagctaaccctgg

SEQ ID NO: 585711 - DNA, 33 bp, Homo sapien
atcccaatacagactccgactaaggcttccctt

SEQ ID NO: 585712 - DNA, 33 bp, Homo sapien
atcccaatacagactctgactaaggcttccctt

SEQ ID NO: 585713 - DNA, 33 bp, Homo sapien
tattaacttaaacaccaatttgctcaaatttct

SEQ ID NO: 585714 - DNA, 33 bp, Homo sapien
tattaacttaaacaccgatttgctcaaatttct

SEQ ID NO: 585715 - DNA, 33 bp, Homo sapien
attccagctccaataaaatatagtgtttaaatc

SEQ ID NO: 585716 - DNA, 33 bp, Homo sapien
attccagctccaataagatatagtgtttaaatc

SEQ ID NO: 585717 - DNA, 33 bp, Homo sapien
acacggtattgagttacgcattaacataaataa

SEQ ID NO: 585718 - DNA, 33 bp, Homo sapien
acacggtattgagttaggcattaacataaataa

SEQ ID NO: 585719 - DNA, 33 bp, Homo sapien
taggtagtgaaccgtaagtctgttatatagtct

SEQ ID NO: 585720 - DNA, 33 bp, Homo sapien
taggtagtgaaccgtaggtctgttatatagtct

SEQ ID NO: 585721 - DNA, 33 bp, Homo sapien
gggtctccctaactaactgcagtctctggagct

SEQ ID NO: 585722 - DNA, 33 bp, Homo sapien
gggtctccctaactaagtgcagtctctggagct

SEQ ID NO: 585723 - DNA, 33 bp, Homo sapien
atagacaaatgtattccaggaactatgagacac

SEQ ID NO: 585724 - DNA, 33 bp, Homo sapien
atagacaaatgtattctaggaactatgagacac

SEQ ID NO: 585725 - DNA, 33 bp, Homo sapien
acatttgtcctcatggccaatcttcttcataaa

SEQ ID NO: 585726 - DNA, 33 bp, Homo sapien
acatttgtcctcatggtcaatcttcttcataaa

SEQ ID NO: 585727 - DNA, 33 bp, Homo sapien
ttttcttactaatggaaccctcaatcttgtacg

SEQ ID NO: 585728 - DNA, 33 bp, Homo sapien
ttttcttactaatggatccctcaatcttgtacg

SEQ ID NO: 585729 - DNA, 33 bp, Homo sapien
taccacaacacacctactaaaagctggactgga

SEQ ID NO: 585730 - DNA, 33 bp, Homo sapien
taccacaacacacctattaaaagctggactgga

SEQ ID NO: 585731 - DNA, 33 bp, Homo sapien
ggaaaagggccttagaaagcaataggagatgat

SEQ ID NO: 585732 - DNA, 33 bp, Homo sapien
ggaaaagggccttagagagcaataggagatgat

SEQ ID NO: 585733 - DNA, 33 bp, Homo sapien
acctgttggaatgttaagcaatatagatcagaa

SEQ ID NO: 585734 - DNA, 33 bp, Homo sapien
acctgttggaatgttaggcaatatagatcagaa

SEQ ID NO: 585735 - DNA, 33 bp, Homo sapien
gagagcagagtggaagcaagctgttatgtgtct

SEQ ID NO: 585736 - DNA, 33 bp, Homo sapien
gagagcagagtggaagtaagctgttatgtgtct

SEQ ID NO: 585737 - DNA, 33 bp, Homo sapien
ttaatctagctaggaaaacatataaatctcctt

SEQ ID NO: 585738 - DNA, 33 bp, Homo sapien
ttaatctagctaggaagacatataaatctcctt

SEQ ID NO: 585739 - DNA, 33 bp, Homo sapien
agttctcagggcagaacgaagtaggttttgaat

SEQ ID NO: 585740 - DNA, 33 bp, Homo sapien
agttctcagggcagaatgaagtaggttttgaat

SEQ ID NO: 585741 - DNA, 33 bp, Homo sapien
acaaaaagactgtgtagaaagcattgcaaagag

SEQ ID NO: 585742 - DNA, 33 bp, Homo sapien
acaaaaagactgtgtataaagcattgcaaagag

SEQ ID NO: 585743 - DNA, 33 bp, Homo sapien
ccttagattcagccaaataaaacaaagcaagag

SEQ ID NO: 585744 - DNA, 33 bp, Homo sapien
ccttagattcagccaattaaaacaaagcaagag

SEQ ID NO: 585745 - DNA, 33 bp, Homo sapien
aaaactgatcaatgatgaaaacaatatggcaaa

SEQ ID NO: 585746 - DNA, 33 bp, Homo sapien
aaaactgatcaatgattaaaacaatatggcaaa

SEQ ID NO: 585747 - DNA, 33 bp, Homo sapien
tgagttagccttaacccggtggattgtcaaccc

SEQ ID NO: 585748 - DNA, 33 bp, Homo sapien
tgagttagccttaaccgggtggattgtcaaccc

SEQ ID NO: 585749 - DNA, 33 bp, Homo sapien
atagaaatgaatgagacgatctgttggtagttg

SEQ ID NO: 585750 - DNA, 33 bp, Homo sapien
atagaaatgaatgagatgatctgttggtagttg

SEQ ID NO: 585751 - DNA, 33 bp, Homo sapien
ttttcttaaacttacaatcaactatagcagaag

SEQ ID NO: 585752 - DNA, 33 bp, Homo sapien
ttttcttaaacttacattcaactatagcagaag

SEQ ID NO: 585753 - DNA, 33 bp, Homo sapien
gtctctgacacatttaaagaattcaagaagcct

SEQ ID NO: 585754 - DNA, 33 bp, Homo sapien
gtctctgacacatttacagaattcaagaagcct

SEQ ID NO: 585755 - DNA, 33 bp, Homo sapien
gggagctttaatttaaactggagtcattctgaa

SEQ ID NO: 585756 - DNA, 33 bp, Homo sapien
gggagctttaatttaagctggagtcattctgaa

SEQ ID NO: 585757 - DNA, 33 bp, Homo sapien
aacatactgaaattcactcttcttcttgtaaga

SEQ ID NO: 585758 - DNA, 33 bp, Homo sapien
aacatactgaaattcattcttcttcttgtaaga

SEQ ID NO: 585759 - DNA, 33 bp, Homo sapien
tcactccaatactttcaagtagctttctctcaa

SEQ ID NO: 585760 - DNA, 33 bp, Homo sapien
tcactccaatactttccagtagctttctctcaa

SEQ ID NO: 585761 - DNA, 33 bp, Homo sapien
tgtcctattaccacctcaatagcaactcctaga

SEQ ID NO: 585762 - DNA, 33 bp, Homo sapien
tgtcctattaccaccttaatagcaactcctaga

SEQ ID NO: 585763 - DNA, 33 bp, Homo sapien
gttccacaattgttaccgattaaccttaataaa

SEQ ID NO: 585764 - DNA, 33 bp, Homo sapien
gttccacaattgttactgattaaccttaataaa

SEQ ID NO: 585765 - DNA, 33 bp, Homo sapien
cttcatgcactacacaaaatttaaaatgtcctt

SEQ ID NO: 585766 - DNA, 33 bp, Homo sapien
cttcatgcactacacagaatttaaaatgtcctt

SEQ ID NO: 585767 - DNA, 33 bp, Homo sapien
tctgactttgggacacaggatgcactgttttta

SEQ ID NO: 585768 - DNA, 33 bp, Homo sapien
tctgactttgggacacgggatgcactgttttta

SEQ ID NO: 585769 - DNA, 33 bp, Homo sapien
tattttcatgactaacaaagagtaacaggtttc

SEQ ID NO: 585770 - DNA, 33 bp, Homo sapien
tattttcatgactaacgaagagtaacaggtttc

SEQ ID NO: 585771 - DNA, 33 bp, Homo sapien
gggtcacaattgtatgccaattatgaaggacta

SEQ ID NO: 585772 - DNA, 33 bp, Homo sapien
gggtcacaattgtatggcaattatgaaggacta

SEQ ID NO: 585773 - DNA, 33 bp, Homo sapien
tgtatttatgtcttcaatatgccctgagatgct

SEQ ID NO: 585774 - DNA, 33 bp, Homo sapien
tgtatttatgtcttcagtatgccctgagatgct

SEQ ID NO: 585775 - DNA, 33 bp, Homo sapien
cagcatctatgctgacagatttgtgaggaagtg

SEQ ID NO: 585776 - DNA, 33 bp, Homo sapien
cagcatctatgctgacggatttgtgaggaagtg

SEQ ID NO: 585777 - DNA, 33 bp, Homo sapien
attaatgccttctttgcatgattgtaatagtag

SEQ ID NO: 585778 - DNA, 33 bp, Homo sapien
attaatgccttctttgtatgattgtaatagtag

SEQ ID NO: 585779 - DNA, 33 bp, Homo sapien
ctgatactacgtcctcaagttctcagtccacag

SEQ ID NO: 585780 - DNA, 33 bp, Homo sapien
ctgatactacgtcctcgagttctcagtccacag

SEQ ID NO: 585781 - DNA, 33 bp, Homo sapien
tttcacctatgatacacagcctacaaaaaaaaa

SEQ ID NO: 585782 - DNA, 33 bp, Homo sapien
tttcacctatgatacagagcctacaaaaaaaaa

SEQ ID NO: 585783 - DNA, 33 bp, Homo sapien
tgccttatacaagattaaagctactataaggca

SEQ ID NO: 585784 - DNA, 33 bp, Homo sapien
tgccttatacaagattgaagctactataaggca

SEQ ID NO: 585785 - DNA, 33 bp, Homo sapien
cttgactaaaaacttaaaagtagacaggcttgg

SEQ ID NO: 585786 - DNA, 33 bp, Homo sapien
cttgactaaaaacttagaagtagacaggcttgg

SEQ ID NO: 585787 - DNA, 33 bp, Homo sapien
gtcgtgcctcatttgccgaattacaccaagcct

SEQ ID NO: 585788 - DNA, 33 bp, Homo sapien
gtcgtgcctcatttgctgaattacaccaagcct

SEQ ID NO: 585789 - DNA, 33 bp, Homo sapien
tttttggtaccaggaactggtttcatggaaggc

SEQ ID NO: 585790 - DNA, 33 bp, Homo sapien
tttttggtaccaggaagtggtttcatggaaggc

SEQ ID NO: 585791 - DNA, 33 bp, Homo sapien
gttcgatattggagtaactattgggtgactttc

SEQ ID NO: 585792 - DNA, 33 bp, Homo sapien
gttcgatattggagtatctattgggtgactttc

SEQ ID NO: 585793 - DNA, 33 bp, Homo sapien
ctccacccagtcacaaacagggatagagaaagt

SEQ ID NO: 585794 - DNA, 33 bp, Homo sapien
ctccacccagtcacaagcagggatagagaaagt

SEQ ID NO: 585795 - DNA, 33 bp, Homo sapien
actcttatgtagtctacgctcgcaccattcatt

SEQ ID NO: 585796 - DNA, 33 bp, Homo sapien
actcttatgtagtctatgctcgcaccattcatt

SEQ ID NO: 585797 - DNA, 33 bp, Homo sapien
aaactgttctaggagcaattattccattgatca

SEQ ID NO: 585798 - DNA, 33 bp, Homo sapien
aaactgttctaggagcgattattccattgatca

SEQ ID NO: 585799 - DNA, 33 bp, Homo sapien
ctgtatgaaagcatagaccttctgaacaaatat

SEQ ID NO: 585800 - DNA, 33 bp, Homo sapien
ctgtatgaaagcataggccttctgaacaaatat

SEQ ID NO: 585801 - DNA, 33 bp, Homo sapien
cagtgcttggtctttccatttaccatacttatg

SEQ ID NO: 585802 - DNA, 33 bp, Homo sapien
cagtgcttggtctttctatttaccatacttatg

SEQ ID NO: 585803 - DNA, 33 bp, Homo sapien
aatatggaacccgactaaaagcccataaatcaa

SEQ ID NO: 585804 - DNA, 33 bp, Homo sapien
aatatggaacccgactgaaagcccataaatcaa

SEQ ID NO: 585805 - DNA, 33 bp, Homo sapien
acatgaaaactctccccccaacatagccatgcg

SEQ ID NO: 585806 - DNA, 33 bp, Homo sapien
acatgaaaactctccctccaacatagccatgcg

SEQ ID NO: 585807 - DNA, 33 bp, Homo sapien
gtctgattctatttcaatatactttggcaactc

SEQ ID NO: 585808 - DNA, 33 bp, Homo sapien
gtctgattctatttcagtatactttggcaactc

SEQ ID NO: 585809 - DNA, 33 bp, Homo sapien
tcttcttcagaacacaactgtcactatcacatg

SEQ ID NO: 585810 - DNA, 33 bp, Homo sapien
tcttcttcagaacacatctgtcactatcacatg

SEQ ID NO: 585811 - DNA, 33 bp, Homo sapien
tctctgatatctgacccatatttgaactcatgt

SEQ ID NO: 585812 - DNA, 33 bp, Homo sapien
tctctgatatctgacctatatttgaactcatgt

SEQ ID NO: 585813 - DNA, 33 bp, Homo sapien
aaagccatttacgaaccgattttatttgcttgc

SEQ ID NO: 585814 - DNA, 33 bp, Homo sapien
aaagccatttacgaactgattttatttgcttgc

SEQ ID NO: 585815 - DNA, 33 bp, Homo sapien
aaatgtttggcattggcaaccttgtaatatgtt

SEQ ID NO: 585816 - DNA, 33 bp, Homo sapien
aaatgtttggcattggtaaccttgtaatatgtt

SEQ ID NO: 585817 - DNA, 33 bp, Homo sapien
gcatgggtcgaaaaaaatctactagccaggaat

SEQ ID NO: 585818 - DNA, 33 bp, Homo sapien
gcatgggtcgaaaaaattctactagccaggaat

SEQ ID NO: 585819 - DNA, 33 bp, Homo sapien
tcagagtttgaacctgaaaatttgtaagaaatg

SEQ ID NO: 585820 - DNA, 33 bp, Homo sapien
tcagagtttgaacctggaaatttgtaagaaatg

SEQ ID NO: 585821 - DNA, 33 bp, Homo sapien
attctgatgctagtgactagaaatccaaattgt

SEQ ID NO: 585822 - DNA, 33 bp, Homo sapien
attctgatgctagtgattagaaatccaaattgt

SEQ ID NO: 585823 - DNA, 33 bp, Homo sapien
tacctatagtgctagagacctaaatattgtcag

SEQ ID NO: 585824 - DNA, 33 bp, Homo sapien
tacctatagtgctagatacctaaatattgtcag

SEQ ID NO: 585825 - DNA, 33 bp, Homo sapien
tgtgtttcagtgtcagcaactgctttctttact

SEQ ID NO: 585826 - DNA, 33 bp, Homo sapien
tgtgtttcagtgtcagtaactgctttctttact

SEQ ID NO: 585827 - DNA, 33 bp, Homo sapien
gagactgcagagaaaagatgatacctacatact

SEQ ID NO: 585828 - DNA, 33 bp, Homo sapien
gagactgcagagaaaatatgatacctacatact

SEQ ID NO: 585829 - DNA, 33 bp, Homo sapien
ctaagtatcaaataacagtagatggaatatggg

SEQ ID NO: 585830 - DNA, 33 bp, Homo sapien
ctaagtatcaaataaccgtagatggaatatggg

SEQ ID NO: 585831 - DNA, 33 bp, Homo sapien
ggggaagagattagacaatgagagcgctgtcct

SEQ ID NO: 585832 - DNA, 33 bp, Homo sapien
ggggaagagattagaccatgagagcgctgtcct

SEQ ID NO: 585833 - DNA, 33 bp, Homo sapien
tttagtctatcaatcaaggccatagattttatt

SEQ ID NO: 585834 - DNA, 33 bp, Homo sapien
tttagtctatcaatcagggccatagattttatt

SEQ ID NO: 585835 - DNA, 33 bp, Homo sapien
atctatatcctgaacaacattcacccattggct

SEQ ID NO: 585836 - DNA, 33 bp, Homo sapien
atctatatcctgaacatcattcacccattggct

SEQ ID NO: 585837 - DNA, 33 bp, Homo sapien
ttaagaccaaatcttacctcatggggtcaaaat

SEQ ID NO: 585838 - DNA, 33 bp, Homo sapien
ttaagaccaaatcttatctcatggggtcaaaat

SEQ ID NO: 585839 - DNA, 33 bp, Homo sapien
gtaatagccattgtgacagtgttaagaggtgga

SEQ ID NO: 585840 - DNA, 33 bp, Homo sapien
gtaatagccattgtgatagtgttaagaggtgga

SEQ ID NO: 585841 - DNA, 33 bp, Homo sapien
cagacttacattcttaccagagaagtttagtta

SEQ ID NO: 585842 - DNA, 33 bp, Homo sapien
cagacttacattcttagcagagaagtttagtta

SEQ ID NO: 585843 - DNA, 33 bp, Homo sapien
ctacctccacagagaaaaggaaacaaaaattca

SEQ ID NO: 585844 - DNA, 33 bp, Homo sapien
ctacctccacagagaagaggaaacaaaaattca

SEQ ID NO: 585845 - DNA, 33 bp, Homo sapien
atctaactcagaggataagctcttaatgctata

SEQ ID NO: 585846 - DNA, 33 bp, Homo sapien
atctaactcagaggatgagctcttaatgctata

SEQ ID NO: 585847 - DNA, 33 bp, Homo sapien
tactagttagcaggaaaaagttaaattaggaga

SEQ ID NO: 585848 - DNA, 33 bp, Homo sapien
tactagttagcaggaagaagttaaattaggaga

SEQ ID NO: 585849 - DNA, 33 bp, Homo sapien
cagttcctacaataaaccagtgcattgacaggg

SEQ ID NO: 585850 - DNA, 33 bp, Homo sapien
cagttcctacaataaagcagtgcattgacaggg

SEQ ID NO: 585851 - DNA, 33 bp, Homo sapien
caaatataggttatggaaccatgcaatttcaga

SEQ ID NO: 585852 - DNA, 33 bp, Homo sapien
caaatataggttatgggaccatgcaatttcaga

SEQ ID NO: 585853 - DNA, 33 bp, Homo sapien
aagggaaaactggtaaattaaatgctgatggga

SEQ ID NO: 585854 - DNA, 33 bp, Homo sapien
aagggaaaactggtaagttaaatgctgatggga

SEQ ID NO: 585855 - DNA, 33 bp, Homo sapien
tatgattaatatgtaaaagtctctaatgagaaa

SEQ ID NO: 585856 - DNA, 33 bp, Homo sapien
tatgattaatatgtaagagtctctaatgagaaa

SEQ ID NO: 585857 - DNA, 33 bp, Homo sapien
ggtgaagaaaagttaacccagttggagaccaga

SEQ ID NO: 585858 - DNA, 33 bp, Homo sapien
ggtgaagaaaagttaatccagttggagaccaga

SEQ ID NO: 585859 - DNA, 33 bp, Homo sapien
cttggaccactgcaaaccataaatcttgatggc

SEQ ID NO: 585860 - DNA, 33 bp, Homo sapien
cttggaccactgcaaatcataaatcttgatggc

SEQ ID NO: 585861 - DNA, 33 bp, Homo sapien
aacaatttcagtgtacgctagattgtaggggtt

SEQ ID NO: 585862 - DNA, 33 bp, Homo sapien
aacaatttcagtgtactctagattgtaggggtt

SEQ ID NO: 585863 - DNA, 33 bp, Homo sapien
agttagctaaatcctacagatagcaaacaactc

SEQ ID NO: 585864 - DNA, 33 bp, Homo sapien
agttagctaaatcctagagatagcaaacaactc

SEQ ID NO: 585865 - DNA, 33 bp, Homo sapien
gtgggcttcctgacaccggaggagactgttccc

SEQ ID NO: 585866 - DNA, 33 bp, Homo sapien
gtgggcttcctgacactggaggagactgttccc

SEQ ID NO: 585867 - DNA, 33 bp, Homo sapien
attaggctggtgaatgaaagcccttatatctgt

SEQ ID NO: 585868 - DNA, 33 bp, Homo sapien
attaggctggtgaatgcaagcccttatatctgt

SEQ ID NO: 585869 - DNA, 33 bp, Homo sapien
gggactcttgtaggcaccaggtgttgttccaga

SEQ ID NO: 585870 - DNA, 33 bp, Homo sapien
gggactcttgtaggcatcaggtgttgttccaga

SEQ ID NO: 585871 - DNA, 33 bp, Homo sapien
ttcttttttatagtgaacaaatgtctcctttat

SEQ ID NO: 585872 - DNA, 33 bp, Homo sapien
ttcttttttatagtgagcaaatgtctcctttat

SEQ ID NO: 585873 - DNA, 33 bp, Homo sapien
caggaaaacactgatcaagcaaaactaaacttt

SEQ ID NO: 585874 - DNA, 33 bp, Homo sapien
caggaaaacactgatcgagcaaaactaaacttt

SEQ ID NO: 585875 - DNA, 33 bp, Homo sapien
aaatcataaaacctgaactctttcttggagata

SEQ ID NO: 585876 - DNA, 33 bp, Homo sapien
aaatcataaaacctgagctctttcttggagata

SEQ ID NO: 585877 - DNA, 33 bp, Homo sapien
acatctcaatcctttacaattctggttcactaa

SEQ ID NO: 585878 - DNA, 33 bp, Homo sapien
acatctcaatcctttataattctggttcactaa

SEQ ID NO: 585879 - DNA, 33 bp, Homo sapien
ctgtaaatgtacttacaccattgcattgtacaa

SEQ ID NO: 585880 - DNA, 33 bp, Homo sapien
ctgtaaatgtacttacgccattgcattgtacaa

SEQ ID NO: 585881 - DNA, 33 bp, Homo sapien
attaatctgtccaatgaaggaaggatatttaaa

SEQ ID NO: 585882 - DNA, 33 bp, Homo sapien
attaatctgtccaatggaggaaggatatttaaa

SEQ ID NO: 585883 - DNA, 33 bp, Homo sapien
gtcttcacctttagagaaacatgactgatcttg

SEQ ID NO: 585884 - DNA, 33 bp, Homo sapien
gtcttcacctttagagtaacatgactgatcttg

SEQ ID NO: 585885 - DNA, 33 bp, Homo sapien
aacatgatgagggtcaagtgtttcctacttaca

SEQ ID NO: 585886 - DNA, 33 bp, Homo sapien
aacatgatgagggtcaggtgtttcctacttaca

SEQ ID NO: 585887 - DNA, 33 bp, Homo sapien
aaatgatcttcctatcccccggtcacaggggaa

SEQ ID NO: 585888 - DNA, 33 bp, Homo sapien
aaatgatcttcctatcgcccggtcacaggggaa

SEQ ID NO: 585889 - DNA, 33 bp, Homo sapien
attaaaatattttgtcaacccctagctaattct

SEQ ID NO: 585890 - DNA, 33 bp, Homo sapien
attaaaatattttgtcgacccctagctaattct

SEQ ID NO: 585891 - DNA, 33 bp, Homo sapien
ttcaaacttagcccgacgtttgctgtacaaggc

SEQ ID NO: 585892 - DNA, 33 bp, Homo sapien
ttcaaacttagcccgatgtttgctgtacaaggc

SEQ ID NO: 585893 - DNA, 33 bp, Homo sapien
tttccaaattcaaagaaagtggttgaaagattg

SEQ ID NO: 585894 - DNA, 33 bp, Homo sapien
tttccaaattcaaagagagtggttgaaagattg

SEQ ID NO: 585895 - DNA, 33 bp, Homo sapien
tgctgtatatttgacaatgaatgactgtcatct

SEQ ID NO: 585896 - DNA, 33 bp, Homo sapien
tgctgtatatttgacactgaatgactgtcatct

SEQ ID NO: 585897 - DNA, 33 bp, Homo sapien
tttggtaactttaaagactaactggatcatgta

SEQ ID NO: 585898 - DNA, 33 bp, Homo sapien
tttggtaactttaaaggctaactggatcatgta

SEQ ID NO: 585899 - DNA, 33 bp, Homo sapien
ccttagagaagtggcaaaactcagaaattaggt

SEQ ID NO: 585900 - DNA, 33 bp, Homo sapien
ccttagagaagtggcagaactcagaaattaggt

SEQ ID NO: 585901 - DNA, 33 bp, Homo sapien
ttatctgataagataaaaaggtaaaagatcata

SEQ ID NO: 585902 - DNA, 33 bp, Homo sapien
ttatctgataagataacaaggtaaaagatcata

SEQ ID NO: 585903 - DNA, 33 bp, Homo sapien
gaagtagctgtacacaaatttcggcctgaagag

SEQ ID NO: 585904 - DNA, 33 bp, Homo sapien
gaagtagctgtacacagatttcggcctgaagag

SEQ ID NO: 585905 - DNA, 33 bp, Homo sapien
tggctgtcacgatttaagtggagctatttaaac

SEQ ID NO: 585906 - DNA, 33 bp, Homo sapien
tggctgtcacgatttatgtggagctatttaaac

SEQ ID NO: 585907 - DNA, 33 bp, Homo sapien
agcagtatgttccccaagccttgagtatctcca

SEQ ID NO: 585908 - DNA, 33 bp, Homo sapien
agcagtatgttccccaggccttgagtatctcca

SEQ ID NO: 585909 - DNA, 33 bp, Homo sapien
ggaaactgaggttctacgaggttaacataagca

SEQ ID NO: 585910 - DNA, 33 bp, Homo sapien
ggaaactgaggttctatgaggttaacataagca

SEQ ID NO: 585911 - DNA, 33 bp, Homo sapien
ttgccagtaccctctacgagatgttgctccagt

SEQ ID NO: 585912 - DNA, 33 bp, Homo sapien
ttgccagtaccctctatgagatgttgctccagt

SEQ ID NO: 585913 - DNA, 33 bp, Homo sapien
cattgagtaaaggcaaccccttgagtgtgagtt

SEQ ID NO: 585914 - DNA, 33 bp, Homo sapien
cattgagtaaaggcaatcccttgagtgtgagtt

SEQ ID NO: 585915 - DNA, 33 bp, Homo sapien
ttgttttcaaatgactaaggggaatgatgccag

SEQ ID NO: 585916 - DNA, 33 bp, Homo sapien
ttgttttcaaatgactgaggggaatgatgccag

SEQ ID NO: 585917 - DNA, 33 bp, Homo sapien
cataattaacagaaaccagtatggatcttgtat

SEQ ID NO: 585918 - DNA, 33 bp, Homo sapien
cataattaacagaaactagtatggatcttgtat

SEQ ID NO: 585919 - DNA, 33 bp, Homo sapien
tattctataaaggttacgcaggtagaaacaaga

SEQ ID NO: 585920 - DNA, 33 bp, Homo sapien
tattctataaaggttatgcaggtagaaacaaga

SEQ ID NO: 585921 - DNA, 33 bp, Homo sapien
gaaattgagacatcaccgtaaattgtgtgctta

SEQ ID NO: 585922 - DNA, 33 bp, Homo sapien
gaaattgagacatcactgtaaattgtgtgctta

SEQ ID NO: 585923 - DNA, 33 bp, Homo sapien
gtatctagtgtggggaacatcatgtgtactctg

SEQ ID NO: 585924 - DNA, 33 bp, Homo sapien
gtatctagtgtggggatcatcatgtgtactctg

SEQ ID NO: 585925 - DNA, 33 bp, Homo sapien
gtactttctttacccaatctgttaccacttatt

SEQ ID NO: 585926 - DNA, 33 bp, Homo sapien
gtactttctttacccagtctgttaccacttatt

SEQ ID NO: 585927 - DNA, 33 bp, Homo sapien
accaatgtttcttccactacagaaccaaattaa

SEQ ID NO: 585928 - DNA, 33 bp, Homo sapien
accaatgtttcttccattacagaaccaaattaa

SEQ ID NO: 585929 - DNA, 33 bp, Homo sapien
tcatatggactagactaacaaaatgaagattag

SEQ ID NO: 585930 - DNA, 33 bp, Homo sapien
tcatatggactagactgacaaaatgaagattag

SEQ ID NO: 585931 - DNA, 33 bp, Homo sapien
tcagggaagttggtgactaaattatcccaataa

SEQ ID NO: 585932 - DNA, 33 bp, Homo sapien
tcagggaagttggtgattaaattatcccaataa

SEQ ID NO: 585933 - DNA, 33 bp, Homo sapien
attcctaaacactacgccataaaacttgaaata

SEQ ID NO: 585934 - DNA, 33 bp, Homo sapien
attcctaaacactacggcataaaacttgaaata

SEQ ID NO: 585935 - DNA, 33 bp, Homo sapien
aacgagaagggtgatcactgaagacatgggaat

SEQ ID NO: 585936 - DNA, 33 bp, Homo sapien
aacgagaagggtgatctctgaagacatgggaat

SEQ ID NO: 585937 - DNA, 33 bp, Homo sapien
atagatgtatgcaacaatcaaattcctatgttt

SEQ ID NO: 585938 - DNA, 33 bp, Homo sapien
atagatgtatgcaacagtcaaattcctatgttt

SEQ ID NO: 585939 - DNA, 33 bp, Homo sapien
tggtacagtgggctagaactcaagctttaatgc

SEQ ID NO: 585940 - DNA, 33 bp, Homo sapien
tggtacagtgggctaggactcaagctttaatgc

SEQ ID NO: 585941 - DNA, 33 bp, Homo sapien
acagaacagagtttgccaattcctgttgttggt

SEQ ID NO: 585942 - DNA, 33 bp, Homo sapien
acagaacagagtttgctaattcctgttgttggt

SEQ ID NO: 585943 - DNA, 33 bp, Homo sapien
cttggtaaaaatttctaaagactgtcccactga

SEQ ID NO: 585944 - DNA, 33 bp, Homo sapien
cttggtaaaaatttctgaagactgtcccactga

SEQ ID NO: 585945 - DNA, 33 bp, Homo sapien
tctcgttcaaagaggcagaaatatcaaatgtgg

SEQ ID NO: 585946 - DNA, 33 bp, Homo sapien
tctcgttcaaagaggcggaaatatcaaatgtgg

SEQ ID NO: 585947 - DNA, 33 bp, Homo sapien
aaagaagcaactacaaaaatggcatgaaagccc

SEQ ID NO: 585948 - DNA, 33 bp, Homo sapien
aaagaagcaactacaagaatggcatgaaagccc

SEQ ID NO: 585949 - DNA, 33 bp, Homo sapien
aggttattgacttctaaaggctgcaaataggag

SEQ ID NO: 585950 - DNA, 33 bp, Homo sapien
aggttattgacttctagaggctgcaaataggag

SEQ ID NO: 585951 - DNA, 33 bp, Homo sapien
tagtcaataagactgacggacatttataaagat

SEQ ID NO: 585952 - DNA, 33 bp, Homo sapien
tagtcaataagactgatggacatttataaagat

SEQ ID NO: 585953 - DNA, 33 bp, Homo sapien
ccatgacactgtacacagaggagaagaactgac

SEQ ID NO: 585954 - DNA, 33 bp, Homo sapien
ccatgacactgtacacggaggagaagaactgac

SEQ ID NO: 585955 - DNA, 33 bp, Homo sapien
gcttcaccctttagcaacttgactcagccttat

SEQ ID NO: 585956 - DNA, 33 bp, Homo sapien
gcttcaccctttagcagcttgactcagccttat

SEQ ID NO: 585957 - DNA, 33 bp, Homo sapien
tcaaacctactgagataaatacatccatataag

SEQ ID NO: 585958 - DNA, 33 bp, Homo sapien
tcaaacctactgagatcaatacatccatataag

SEQ ID NO: 585959 - DNA, 33 bp, Homo sapien
cactggctgcaagagaaagtttttagtccattt

SEQ ID NO: 585960 - DNA, 33 bp, Homo sapien
cactggctgcaagagatagtttttagtccattt

SEQ ID NO: 585961 - DNA, 33 bp, Homo sapien
atcagggtaaaagggaaaatggaaatggtcatt

SEQ ID NO: 585962 - DNA, 33 bp, Homo sapien
atcagggtaaaagggacaatggaaatggtcatt

SEQ ID NO: 585963 - DNA, 33 bp, Homo sapien
tcagctgtaggcacaacatgatgtctccagaaa

SEQ ID NO: 585964 - DNA, 33 bp, Homo sapien
tcagctgtaggcacaagatgatgtctccagaaa

SEQ ID NO: 585965 - DNA, 33 bp, Homo sapien
gattttgatgaggaaactatcttgcattcctgg

SEQ ID NO: 585966 - DNA, 33 bp, Homo sapien
gattttgatgaggaaattatcttgcattcctgg

SEQ ID NO: 585967 - DNA, 33 bp, Homo sapien
ataagccctatttggcaaggatacatattttaa

SEQ ID NO: 585968 - DNA, 33 bp, Homo sapien
ataagccctatttggccaggatacatattttaa

SEQ ID NO: 585969 - DNA, 33 bp, Homo sapien
gagtgataccagtctcagaaaaagagttttaaa

SEQ ID NO: 585970 - DNA, 33 bp, Homo sapien
gagtgataccagtctcggaaaaagagttttaaa

SEQ ID NO: 585971 - DNA, 33 bp, Homo sapien
tgatttagcttcctgaagtaatattacctttct

SEQ ID NO: 585972 - DNA, 33 bp, Homo sapien
tgatttagcttcctgaggtaatattacctttct

SEQ ID NO: 585973 - DNA, 33 bp, Homo sapien
gtgatgttctggagtaagcaaaagttagtacag

SEQ ID NO: 585974 - DNA, 33 bp, Homo sapien
gtgatgttctggagtaggcaaaagttagtacag

SEQ ID NO: 585975 - DNA, 33 bp, Homo sapien
aaataagtgatcaaaccgaaaggattttatatc

SEQ ID NO: 585976 - DNA, 33 bp, Homo sapien
aaataagtgatcaaactgaaaggattttatatc

SEQ ID NO: 585977 - DNA, 33 bp, Homo sapien
ctaaaggtcattcacacgtagtatttctctaaa

SEQ ID NO: 585978 - DNA, 33 bp, Homo sapien
ctaaaggtcattcacatgtagtatttctctaaa

SEQ ID NO: 585979 - DNA, 33 bp, Homo sapien
tcttaggcaggagctacgcaatattctttttca

SEQ ID NO: 585980 - DNA, 33 bp, Homo sapien
tcttaggcaggagctatgcaatattctttttca

SEQ ID NO: 585981 - DNA, 33 bp, Homo sapien
agaagtagtctttctacatgtttttcctaatta

SEQ ID NO: 585982 - DNA, 33 bp, Homo sapien
agaagtagtctttctagatgtttttcctaatta

SEQ ID NO: 585983 - DNA, 33 bp, Homo sapien
agaagtcaggtggagacacaagagtggcaaata

SEQ ID NO: 585984 - DNA, 33 bp, Homo sapien
agaagtcaggtggagatacaagagtggcaaata

SEQ ID NO: 585985 - DNA, 33 bp, Homo sapien
tgctcacatttttcagaccatgactccaaattc

SEQ ID NO: 585986 - DNA, 33 bp, Homo sapien
tgctcacatttttcaggccatgactccaaattc

SEQ ID NO: 585987 - DNA, 33 bp, Homo sapien
agcaaaatcaaaggtccaaaattgtgctgaatg

SEQ ID NO: 585988 - DNA, 33 bp, Homo sapien
agcaaaatcaaaggtctaaaattgtgctgaatg

SEQ ID NO: 585989 - DNA, 33 bp, Homo sapien
ctgttctacacccttacgcagtttgatatagga

SEQ ID NO: 585990 - DNA, 33 bp, Homo sapien
ctgttctacacccttatgcagtttgatatagga

SEQ ID NO: 585991 - DNA, 33 bp, Homo sapien
aagctatttttgaccacaaattcccattatcta

SEQ ID NO: 585992 - DNA, 33 bp, Homo sapien
aagctatttttgaccataaattcccattatcta

SEQ ID NO: 585993 - DNA, 33 bp, Homo sapien
ccctgtacctcattaaactcattccctacctct

SEQ ID NO: 585994 - DNA, 33 bp, Homo sapien
ccctgtacctcattaagctcattccctacctct

SEQ ID NO: 585995 - DNA, 33 bp, Homo sapien
ggtctggacagataaaatagctcaagttcgaca

SEQ ID NO: 585996 - DNA, 33 bp, Homo sapien
ggtctggacagataaagtagctcaagttcgaca

SEQ ID NO: 585997 - DNA, 33 bp, Homo sapien
gtttggctgtttttcaactttggcctacttgtt

SEQ ID NO: 585998 - DNA, 33 bp, Homo sapien
gtttggctgtttttcatctttggcctacttgtt

SEQ ID NO: 585999 - DNA, 33 bp, Homo sapien
tggctaatgggatatagaacattctgtgcctcc

SEQ ID NO: 586000 - DNA, 33 bp, Homo sapien
tggctaatgggatatataacattctgtgcctcc

SEQ ID NO: 586001 - DNA, 33 bp, Homo sapien
tgtcagaatcaatggaactttaaaggatgacta

SEQ ID NO: 586002 - DNA, 33 bp, Homo sapien
tgtcagaatcaatggagctttaaaggatgacta

SEQ ID NO: 586003 - DNA, 33 bp, Homo sapien
aaccactaagttatacggcctcttataaaggaa

SEQ ID NO: 586004 - DNA, 33 bp, Homo sapien
aaccactaagttatactgcctcttataaaggaa

SEQ ID NO: 586005 - DNA, 33 bp, Homo sapien
tggccataatctaccaacctataactgctgcct

SEQ ID NO: 586006 - DNA, 33 bp, Homo sapien
tggccataatctaccagcctataactgctgcct

SEQ ID NO: 586007 - DNA, 33 bp, Homo sapien
ttttctgagccgtgaaaccttttctccctttgt

SEQ ID NO: 586008 - DNA, 33 bp, Homo sapien
ttttctgagccgtgaacccttttctccctttgt

SEQ ID NO: 586009 - DNA, 33 bp, Homo sapien
atcttgtgttaactggacattgagaggaaaagc

SEQ ID NO: 586010 - DNA, 33 bp, Homo sapien
atcttgtgttaactggccattgagaggaaaagc

SEQ ID NO: 586011 - DNA, 33 bp, Homo sapien
agaacaaggtacgagaaaaattcaatatgagaa

SEQ ID NO: 586012 - DNA, 33 bp, Homo sapien
agaacaaggtacgagacaaattcaatatgagaa

SEQ ID NO: 586013 - DNA, 33 bp, Homo sapien
ctggtaccttaccatgaacctctgacttttgtt

SEQ ID NO: 586014 - DNA, 33 bp, Homo sapien
ctggtaccttaccatggacctctgacttttgtt

SEQ ID NO: 586015 - DNA, 33 bp, Homo sapien
aatgtctggtttctcacgggtataacacaccta

SEQ ID NO: 586016 - DNA, 33 bp, Homo sapien
aatgtctggtttctcatgggtataacacaccta

SEQ ID NO: 586017 - DNA, 33 bp, Homo sapien
ttaattccgtaaaatcagatattagattgcaat

SEQ ID NO: 586018 - DNA, 33 bp, Homo sapien
ttaattccgtaaaatcggatattagattgcaat

SEQ ID NO: 586019 - DNA, 33 bp, Homo sapien
taccaatggaataatcacttctgttcgactact

SEQ ID NO: 586020 - DNA, 33 bp, Homo sapien
taccaatggaataatcgcttctgttcgactact

SEQ ID NO: 586021 - DNA, 33 bp, Homo sapien
aagacagtagaatcgaaaacttttggataaaat

SEQ ID NO: 586022 - DNA, 33 bp, Homo sapien
aagacagtagaatcgataacttttggataaaat

SEQ ID NO: 586023 - DNA, 33 bp, Homo sapien
gctagtttttgctaccagccatgtctcaatgga

SEQ ID NO: 586024 - DNA, 33 bp, Homo sapien
gctagtttttgctaccggccatgtctcaatgga

SEQ ID NO: 586025 - DNA, 33 bp, Homo sapien
tgaatggtagagaaagacaaagtaatgttggaa

SEQ ID NO: 586026 - DNA, 33 bp, Homo sapien
tgaatggtagagaaagtcaaagtaatgttggaa

SEQ ID NO: 586027 - DNA, 33 bp, Homo sapien
gatgcaaacctgagaaatccaccagagacataa

SEQ ID NO: 586028 - DNA, 33 bp, Homo sapien
gatgcaaacctgagaagtccaccagagacataa

SEQ ID NO: 586029 - DNA, 33 bp, Homo sapien
ttcactcattgactcaaggaaatacgagaaagg

SEQ ID NO: 586030 - DNA, 33 bp, Homo sapien
ttcactcattgactcagggaaatacgagaaagg

SEQ ID NO: 586031 - DNA, 33 bp, Homo sapien
aaattagaaaagggtcaaaaggatgcaggaagc

SEQ ID NO: 586032 - DNA, 33 bp, Homo sapien
aaattagaaaagggtcgaaaggatgcaggaagc

SEQ ID NO: 586033 - DNA, 33 bp, Homo sapien
attcctgacttagctacgtactgtttgtataaa

SEQ ID NO: 586034 - DNA, 33 bp, Homo sapien
attcctgacttagctatgtactgtttgtataaa

SEQ ID NO: 586035 - DNA, 33 bp, Homo sapien
caaaactcaatgccaactggttgaacgcttagc

SEQ ID NO: 586036 - DNA, 33 bp, Homo sapien
caaaactcaatgccaagtggttgaacgcttagc

SEQ ID NO: 586037 - DNA, 33 bp, Homo sapien
tttgtcagctttatacccttgtgagccatttcc

SEQ ID NO: 586038 - DNA, 33 bp, Homo sapien
tttgtcagctttatactcttgtgagccatttcc

SEQ ID NO: 586039 - DNA, 33 bp, Homo sapien
cgcttcaggtcttcaacgaaccaaaccatgtgg

SEQ ID NO: 586040 - DNA, 33 bp, Homo sapien
cgcttcaggtcttcaatgaaccaaaccatgtgg

SEQ ID NO: 586041 - DNA, 33 bp, Homo sapien
ggaatgggaactaacaactacagcacaccacca

SEQ ID NO: 586042 - DNA, 33 bp, Homo sapien
ggaatgggaactaacatctacagcacaccacca

SEQ ID NO: 586043 - DNA, 33 bp, Homo sapien
aggaggaacaggcagagaaaaatatgtatagag

SEQ ID NO: 586044 - DNA, 33 bp, Homo sapien
aggaggaacaggcagataaaaatatgtatagag

SEQ ID NO: 586045 - DNA, 33 bp, Homo sapien
atagagaaagtagggcacattgacaaattttgt

SEQ ID NO: 586046 - DNA, 33 bp, Homo sapien
atagagaaagtagggcgcattgacaaattttgt

SEQ ID NO: 586047 - DNA, 33 bp, Homo sapien
aaattattgtgttgtgcaccaagttgatgtttt

SEQ ID NO: 586048 - DNA, 33 bp, Homo sapien
aaattattgtgttgtgtaccaagttgatgtttt

SEQ ID NO: 586049 - DNA, 33 bp, Homo sapien
aaaaaaaatagcatgacgcccaataagcaccat

SEQ ID NO: 586050 - DNA, 33 bp, Homo sapien
aaaaaaaatagcatgatgcccaataagcaccat

SEQ ID NO: 586051 - DNA, 33 bp, Homo sapien
aggctcatttgggctgcaacacccaagatggct

SEQ ID NO: 586052 - DNA, 33 bp, Homo sapien
aggctcatttgggctggaacacccaagatggct

SEQ ID NO: 586053 - DNA, 33 bp, Homo sapien
gactagaaaacaaaacactcaatatctccagct

SEQ ID NO: 586054 - DNA, 33 bp, Homo sapien
gactagaaaacaaaacgctcaatatctccagct

SEQ ID NO: 586055 - DNA, 33 bp, Homo sapien
gaaaatgaagatttaccagaatacagccacact

SEQ ID NO: 586056 - DNA, 33 bp, Homo sapien
gaaaatgaagatttactagaatacagccacact

SEQ ID NO: 586057 - DNA, 33 bp, Homo sapien
atggaatgttaatggaggaaggcatttaaagta

SEQ ID NO: 586058 - DNA, 33 bp, Homo sapien
atggaatgttaatggatgaaggcatttaaagta

SEQ ID NO: 586059 - DNA, 33 bp, Homo sapien
ttccaattgttttggacattggcacttggcttt

SEQ ID NO: 586060 - DNA, 33 bp, Homo sapien
ttccaattgttttggatattggcacttggcttt

SEQ ID NO: 586061 - DNA, 33 bp, Homo sapien
gtaagaaggtgcttaacgctctgaaaaattaaa

SEQ ID NO: 586062 - DNA, 33 bp, Homo sapien
gtaagaaggtgcttaatgctctgaaaaattaaa

SEQ ID NO: 586063 - DNA, 33 bp, Homo sapien
gttttgttacaaaagacagtaatgctgtaatgg

SEQ ID NO: 586064 - DNA, 33 bp, Homo sapien
gttttgttacaaaagatagtaatgctgtaatgg

SEQ ID NO: 586065 - DNA, 33 bp, Homo sapien
ctttaataatatgcagcctatcctggatttgct

SEQ ID NO: 586066 - DNA, 33 bp, Homo sapien
ctttaataatatgcagtctatcctggatttgct

SEQ ID NO: 586067 - DNA, 33 bp, Homo sapien
agttagtctgtaagcaacttcggccttctatga

SEQ ID NO: 586068 - DNA, 33 bp, Homo sapien
agttagtctgtaagcatcttcggccttctatga

SEQ ID NO: 586069 - DNA, 33 bp, Homo sapien
cagggctcaggtcaccactgttgccagtatggg

SEQ ID NO: 586070 - DNA, 33 bp, Homo sapien
cagggctcaggtcaccgctgttgccagtatggg

SEQ ID NO: 586071 - DNA, 33 bp, Homo sapien
ataacaggtgcccgaacgataaagtagaaggtg

SEQ ID NO: 586072 - DNA, 33 bp, Homo sapien
ataacaggtgcccgaatgataaagtagaaggtg

SEQ ID NO: 586073 - DNA, 33 bp, Homo sapien
tctctaaatgcacacaatgaggaaattccacat

SEQ ID NO: 586074 - DNA, 33 bp, Homo sapien
tctctaaatgcacacactgaggaaattccacat

SEQ ID NO: 586075 - DNA, 33 bp, Homo sapien
acttactttggacatacaggatataaattcact

SEQ ID NO: 586076 - DNA, 33 bp, Homo sapien
acttactttggacatagaggatataaattcact

SEQ ID NO: 586077 - DNA, 33 bp, Homo sapien
ctattattttgtttcactagatgatcttgtgta

SEQ ID NO: 586078 - DNA, 33 bp, Homo sapien
ctattattttgtttcagtagatgatcttgtgta

SEQ ID NO: 586079 - DNA, 33 bp, Homo sapien
aaccacagagctgccactcaacctccctacatc

SEQ ID NO: 586080 - DNA, 33 bp, Homo sapien
aaccacagagctgccagtcaacctccctacatc

SEQ ID NO: 586081 - DNA, 33 bp, Homo sapien
ttgaaaggatcgcctacgtaccaagcagaataa

SEQ ID NO: 586082 - DNA, 33 bp, Homo sapien
ttgaaaggatcgcctatgtaccaagcagaataa

SEQ ID NO: 586083 - DNA, 33 bp, Homo sapien
ttaaaaggcattccagaaagtcttaccaatacg

SEQ ID NO: 586084 - DNA, 33 bp, Homo sapien
ttaaaaggcattccaggaagtcttaccaatacg

SEQ ID NO: 586085 - DNA, 33 bp, Homo sapien
gtataaaatcaagtccagaattatatctatacc

SEQ ID NO: 586086 - DNA, 33 bp, Homo sapien
gtataaaatcaagtccggaattatatctatacc

SEQ ID NO: 586087 - DNA, 33 bp, Homo sapien
gaaaaaagtgaagtccaattcataaaaacagga

SEQ ID NO: 586088 - DNA, 33 bp, Homo sapien
gaaaaaagtgaagtccgattcataaaaacagga

SEQ ID NO: 586089 - DNA, 33 bp, Homo sapien
ttcatctgtgcctttacctatactgacagaatt

SEQ ID NO: 586090 - DNA, 33 bp, Homo sapien
ttcatctgtgcctttagctatactgacagaatt

SEQ ID NO: 586091 - DNA, 33 bp, Homo sapien
cctaagaattgtgaaaatttactgattagaatt

SEQ ID NO: 586092 - DNA, 33 bp, Homo sapien
cctaagaattgtgaaagtttactgattagaatt

SEQ ID NO: 586093 - DNA, 33 bp, Homo sapien
ctagaactgatttttgaaggtgtgtattaatat

SEQ ID NO: 586094 - DNA, 33 bp, Homo sapien
ctagaactgatttttgtaggtgtgtattaatat

SEQ ID NO: 586095 - DNA, 33 bp, Homo sapien
attagatgttctgcaagtacacagctactcaca

SEQ ID NO: 586096 - DNA, 33 bp, Homo sapien
attagatgttctgcaattacacagctactcaca

SEQ ID NO: 586097 - DNA, 33 bp, Homo sapien
tcctctgtagtcctaacgcctatcatatcgcag

SEQ ID NO: 586098 - DNA, 33 bp, Homo sapien
tcctctgtagtcctaatgcctatcatatcgcag

SEQ ID NO: 586099 - DNA, 33 bp, Homo sapien
gcaggcaagtgtcaaaactaagagacaaggaat

SEQ ID NO: 586100 - DNA, 33 bp, Homo sapien
gcaggcaagtgtcaaagctaagagacaaggaat

SEQ ID NO: 586101 - DNA, 33 bp, Homo sapien
gactcatattttagaactgtggtgtccaatatg

SEQ ID NO: 586102 - DNA, 33 bp, Homo sapien
gactcatattttagaattgtggtgtccaatatg

SEQ ID NO: 586103 - DNA, 33 bp, Homo sapien
gaactcactgtgctcacgctgaagtttttgttt

SEQ ID NO: 586104 - DNA, 33 bp, Homo sapien
gaactcactgtgctcaggctgaagtttttgttt

SEQ ID NO: 586105 - DNA, 33 bp, Homo sapien
gagtaaaaatgcataacctggtctgtcttcttt

SEQ ID NO: 586106 - DNA, 33 bp, Homo sapien
gagtaaaaatgcataatctggtctgtcttcttt

SEQ ID NO: 586107 - DNA, 33 bp, Homo sapien
agatttggggtcttcaaggctaaaggaactatg

SEQ ID NO: 586108 - DNA, 33 bp, Homo sapien
agatttggggtcttcagggctaaaggaactatg

SEQ ID NO: 586109 - DNA, 33 bp, Homo sapien
cattatggtcacattacgttagctgtataagac

SEQ ID NO: 586110 - DNA, 33 bp, Homo sapien
cattatggtcacattatgttagctgtataagac

SEQ ID NO: 586111 - DNA, 33 bp, Homo sapien
ggtccctgctcagcaaatatatagcaaccactc

SEQ ID NO: 586112 - DNA, 33 bp, Homo sapien
ggtccctgctcagcaagtatatagcaaccactc

SEQ ID NO: 586113 - DNA, 33 bp, Homo sapien
tcttctagtgtactcacgtataagcatttatga

SEQ ID NO: 586114 - DNA, 33 bp, Homo sapien
tcttctagtgtactcatgtataagcatttatga

SEQ ID NO: 586115 - DNA, 33 bp, Homo sapien
ttttgacaccgaataactcaaaaactatcctta

SEQ ID NO: 586116 - DNA, 33 bp, Homo sapien
ttttgacaccgaataattcaaaaactatcctta

SEQ ID NO: 586117 - DNA, 33 bp, Homo sapien
gaagtagatttgaccaaggatgggagccatgag

SEQ ID NO: 586118 - DNA, 33 bp, Homo sapien
gaagtagatttgaccagggatgggagccatgag

SEQ ID NO: 586119 - DNA, 33 bp, Homo sapien
tgccctcaaatcagtaaaaggcattatgagaaa

SEQ ID NO: 586120 - DNA, 33 bp, Homo sapien
tgccctcaaatcagtacaaggcattatgagaaa

SEQ ID NO: 586121 - DNA, 33 bp, Homo sapien
aatattatagacttacagcaaaattaagttact

SEQ ID NO: 586122 - DNA, 33 bp, Homo sapien
aatattatagacttacggcaaaattaagttact

SEQ ID NO: 586123 - DNA, 33 bp, Homo sapien
ctttttgtgttatgtaagattttgatgattttt

SEQ ID NO: 586124 - DNA, 33 bp, Homo sapien
ctttttgtgttatgtatgattttgatgattttt

SEQ ID NO: 586125 - DNA, 33 bp, Homo sapien
aatagttctgtagagcagaagtccaacaagaag

SEQ ID NO: 586126 - DNA, 33 bp, Homo sapien
aatagttctgtagagcggaagtccaacaagaag

SEQ ID NO: 586127 - DNA, 33 bp, Homo sapien
acttaaataagtgctacgttgactataaatgtc

SEQ ID NO: 586128 - DNA, 33 bp, Homo sapien
acttaaataagtgctatgttgactataaatgtc

SEQ ID NO: 586129 - DNA, 33 bp, Homo sapien
acccttctttggcagaaaactttctatggctat

SEQ ID NO: 586130 - DNA, 33 bp, Homo sapien
acccttctttggcagataactttctatggctat

SEQ ID NO: 586131 - DNA, 33 bp, Homo sapien
tgaatatctctgtctcactgcactgcaccactc

SEQ ID NO: 586132 - DNA, 33 bp, Homo sapien
tgaatatctctgtctcgctgcactgcaccactc

SEQ ID NO: 586133 - DNA, 33 bp, Homo sapien
ggggctctgaggaagacgaagccttggttaaga

SEQ ID NO: 586134 - DNA, 33 bp, Homo sapien
ggggctctgaggaagatgaagccttggttaaga

SEQ ID NO: 586135 - DNA, 33 bp, Homo sapien
aggaatatagtaataagcaagataagcagcaag

SEQ ID NO: 586136 - DNA, 33 bp, Homo sapien
aggaatatagtaataatcaagataagcagcaag

SEQ ID NO: 586137 - DNA, 33 bp, Homo sapien
actccaagagggctgccaatgattcttaaattc

SEQ ID NO: 586138 - DNA, 33 bp, Homo sapien
actccaagagggctgctaatgattcttaaattc

SEQ ID NO: 586139 - DNA, 33 bp, Homo sapien
atagtctaggttaggcaacagattggtaattaa

SEQ ID NO: 586140 - DNA, 33 bp, Homo sapien
atagtctaggttaggcgacagattggtaattaa

SEQ ID NO: 586141 - DNA, 33 bp, Homo sapien
ctgtagcattacagaactgtttttgattgatga

SEQ ID NO: 586142 - DNA, 33 bp, Homo sapien
ctgtagcattacagaattgtttttgattgatga

SEQ ID NO: 586143 - DNA, 33 bp, Homo sapien
ctgaaaataaggagacagatttaaagtagatgg

SEQ ID NO: 586144 - DNA, 33 bp, Homo sapien
ctgaaaataaggagactgatttaaagtagatgg

SEQ ID NO: 586145 - DNA, 33 bp, Homo sapien
tctctaagactctagtaaaacaacagtaaagga

SEQ ID NO: 586146 - DNA, 33 bp, Homo sapien
tctctaagactctagtgaaacaacagtaaagga

SEQ ID NO: 586147 - DNA, 33 bp, Homo sapien
tttagtgtatgtccaaattcagacaataaatta

SEQ ID NO: 586148 - DNA, 33 bp, Homo sapien
tttagtgtatgtccaagttcagacaataaatta

SEQ ID NO: 586149 - DNA, 33 bp, Homo sapien
atttccaggaagctaggcagtcttagtcacagg

SEQ ID NO: 586150 - DNA, 33 bp, Homo sapien
atttccaggaagctagtcagtcttagtcacagg

SEQ ID NO: 586151 - DNA, 33 bp, Homo sapien
acccagttgacagagacacttgagtctggagct

SEQ ID NO: 586152 - DNA, 33 bp, Homo sapien
acccagttgacagagatacttgagtctggagct

SEQ ID NO: 586153 - DNA, 33 bp, Homo sapien
atcgctgcatagcccccctggtattgaagcagg

SEQ ID NO: 586154 - DNA, 33 bp, Homo sapien
atcgctgcatagcccctctggtattgaagcagg

SEQ ID NO: 586155 - DNA, 33 bp, Homo sapien
agattttcccctaagacacagttttgccgggcc

SEQ ID NO: 586156 - DNA, 33 bp, Homo sapien
agattttcccctaagatacagttttgccgggcc

SEQ ID NO: 586157 - DNA, 33 bp, Homo sapien
gtgaatattgacgataggccttgatccatagta

SEQ ID NO: 586158 - DNA, 33 bp, Homo sapien
gtgaatattgacgatatgccttgatccatagta

SEQ ID NO: 586159 - DNA, 33 bp, Homo sapien
acccccagttcaagtacatgtgaatttatttga

SEQ ID NO: 586160 - DNA, 33 bp, Homo sapien
acccccagttcaagtagatgtgaatttatttga

SEQ ID NO: 586161 - DNA, 33 bp, Homo sapien
gaaattctaaccactaaggtgacggtattacaa

SEQ ID NO: 586162 - DNA, 33 bp, Homo sapien
gaaattctaaccactacggtgacggtattacaa

SEQ ID NO: 586163 - DNA, 33 bp, Homo sapien
tctttacttttacgtacagtgagggcattgaga

SEQ ID NO: 586164 - DNA, 33 bp, Homo sapien
tctttacttttacgtatagtgagggcattgaga

SEQ ID NO: 586165 - DNA, 33 bp, Homo sapien
tgtggcatttgtgacacgattatgaactccagg

SEQ ID NO: 586166 - DNA, 33 bp, Homo sapien
tgtggcatttgtgacatgattatgaactccagg

SEQ ID NO: 586167 - DNA, 33 bp, Homo sapien
cttaggtctctctttacatttcaccatgggaat

SEQ ID NO: 586168 - DNA, 33 bp, Homo sapien
cttaggtctctctttatatttcaccatgggaat

SEQ ID NO: 586169 - DNA, 33 bp, Homo sapien
caatcatgaattgtaccaacaaaacactggctt

SEQ ID NO: 586170 - DNA, 33 bp, Homo sapien
caatcatgaattgtacgaacaaaacactggctt

SEQ ID NO: 586171 - DNA, 33 bp, Homo sapien
agcagttggcagagacgcatggaaatccaggca

SEQ ID NO: 586172 - DNA, 33 bp, Homo sapien
agcagttggcagagactcatggaaatccaggca

SEQ ID NO: 586173 - DNA, 33 bp, Homo sapien
gagcagcccattctagcaaatatccctttgaag

SEQ ID NO: 586174 - DNA, 33 bp, Homo sapien
gagcagcccattctaggaaatatccctttgaag

SEQ ID NO: 586175 - DNA, 33 bp, Homo sapien
gtctatggataaaggaagagcaccaagtaaggg

SEQ ID NO: 586176 - DNA, 33 bp, Homo sapien
gtctatggataaaggaggagcaccaagtaaggg

SEQ ID NO: 586177 - DNA, 33 bp, Homo sapien
ttactctggatacagtaaaggactaaatggttc

SEQ ID NO: 586178 - DNA, 33 bp, Homo sapien
ttactctggatacagtgaaggactaaatggttc

SEQ ID NO: 586179 - DNA, 33 bp, Homo sapien
tataggatgtgaaaaacttttcctctcacagat

SEQ ID NO: 586180 - DNA, 33 bp, Homo sapien
tataggatgtgaaaaagttttcctctcacagat

SEQ ID NO: 586181 - DNA, 33 bp, Homo sapien
aaccttcattaatcagaaaccctacttcagtaa

SEQ ID NO: 586182 - DNA, 33 bp, Homo sapien
aaccttcattaatcagtaaccctacttcagtaa

SEQ ID NO: 586183 - DNA, 33 bp, Homo sapien
cctcctttcattagtaggatcgtgcctttccag

SEQ ID NO: 586184 - DNA, 33 bp, Homo sapien
cctcctttcattagtatgatcgtgcctttccag

SEQ ID NO: 586185 - DNA, 33 bp, Homo sapien
ctttgttagtgagcaggaatattttgaaatgag

SEQ ID NO: 586186 - DNA, 33 bp, Homo sapien
ctttgttagtgagcagtaatattttgaaatgag

SEQ ID NO: 586187 - DNA, 33 bp, Homo sapien
aatgtggaagggaggactaggcttgctctgtgt

SEQ ID NO: 586188 - DNA, 33 bp, Homo sapien
aatgtggaagggaggattaggcttgctctgtgt

SEQ ID NO: 586189 - DNA, 33 bp, Homo sapien
gcccccacatgaacaaaaggctctgtccactca

SEQ ID NO: 586190 - DNA, 33 bp, Homo sapien
gcccccacatgaacaacaggctctgtccactca

SEQ ID NO: 586191 - DNA, 33 bp, Homo sapien
agtagggaccattgtaataacagtggtgatttg

SEQ ID NO: 586192 - DNA, 33 bp, Homo sapien
agtagggaccattgtagtaacagtggtgatttg

SEQ ID NO: 586193 - DNA, 33 bp, Homo sapien
acaaaacctaaatgaacggctaggctgaaatga

SEQ ID NO: 586194 - DNA, 33 bp, Homo sapien
acaaaacctaaatgaatggctaggctgaaatga

SEQ ID NO: 586195 - DNA, 33 bp, Homo sapien
gcagatttgacaggcaacaaagtagtcttcact

SEQ ID NO: 586196 - DNA, 33 bp, Homo sapien
gcagatttgacaggcaccaaagtagtcttcact

SEQ ID NO: 586197 - DNA, 33 bp, Homo sapien
cattccataggactaacggtgattaagtcagct

SEQ ID NO: 586198 - DNA, 33 bp, Homo sapien
cattccataggactaatggtgattaagtcagct

SEQ ID NO: 586199 - DNA, 33 bp, Homo sapien
aagatcatacctctacactctcttccatgtcct

SEQ ID NO: 586200 - DNA, 33 bp, Homo sapien
aagatcatacctctacgctctcttccatgtcct

SEQ ID NO: 586201 - DNA, 33 bp, Homo sapien
atgtttttttcaaagcacctgtggagttctgct

SEQ ID NO: 586202 - DNA, 33 bp, Homo sapien
atgtttttttcaaagcgcctgtggagttctgct

SEQ ID NO: 586203 - DNA, 33 bp, Homo sapien
gcccttaatcatattacagaagacacagaaaca

SEQ ID NO: 586204 - DNA, 33 bp, Homo sapien
gcccttaatcatattagagaagacacagaaaca

SEQ ID NO: 586205 - DNA, 33 bp, Homo sapien
tgaattgcagctgttaaatttttgtgaattaat

SEQ ID NO: 586206 - DNA, 33 bp, Homo sapien
tgaattgcagctgttatatttttgtgaattaat

SEQ ID NO: 586207 - DNA, 33 bp, Homo sapien
ttcagctcgttcagccacatgatttcataggct

SEQ ID NO: 586208 - DNA, 33 bp, Homo sapien
ttcagctcgttcagccgcatgatttcataggct

SEQ ID NO: 586209 - DNA, 33 bp, Homo sapien
gcccttatacctgtgacgtgtctggcaatgaca

SEQ ID NO: 586210 - DNA, 33 bp, Homo sapien
gcccttatacctgtgatgtgtctggcaatgaca

SEQ ID NO: 586211 - DNA, 33 bp, Homo sapien
gagaagtttgcaataacgaaccctgtacactat

SEQ ID NO: 586212 - DNA, 33 bp, Homo sapien
gagaagtttgcaataatgaaccctgtacactat

SEQ ID NO: 586213 - DNA, 33 bp, Homo sapien
tttatttggcactatactactgaaaacattagc

SEQ ID NO: 586214 - DNA, 33 bp, Homo sapien
tttatttggcactatattactgaaaacattagc

SEQ ID NO: 586215 - DNA, 33 bp, Homo sapien
gggtacatccatctacaacatcctgggtgctct

SEQ ID NO: 586216 - DNA, 33 bp, Homo sapien
gggtacatccatctacgacatcctgggtgctct

SEQ ID NO: 586217 - DNA, 33 bp, Homo sapien
ttgttccatcttacaaatgaaaaagctcaaact

SEQ ID NO: 586218 - DNA, 33 bp, Homo sapien
ttgttccatcttacaagtgaaaaagctcaaact

SEQ ID NO: 586219 - DNA, 33 bp, Homo sapien
caattgctaaggctagaaagctagttccagcct

SEQ ID NO: 586220 - DNA, 33 bp, Homo sapien
caattgctaaggctagtaagctagttccagcct

SEQ ID NO: 586221 - DNA, 33 bp, Homo sapien
gtttgaggaatatggaagttaatagaacagctt

SEQ ID NO: 586222 - DNA, 33 bp, Homo sapien
gtttgaggaatatggatgttaatagaacagctt

SEQ ID NO: 586223 - DNA, 33 bp, Homo sapien
tccggtcatgtgaacgcactgtgagtcaccttt

SEQ ID NO: 586224 - DNA, 33 bp, Homo sapien
tccggtcatgtgaacgtactgtgagtcaccttt

SEQ ID NO: 586225 - DNA, 33 bp, Homo sapien
atgcaaataggtcttcacaggatgctattaaaa

SEQ ID NO: 586226 - DNA, 33 bp, Homo sapien
atgcaaataggtcttcccaggatgctattaaaa

SEQ ID NO: 586227 - DNA, 33 bp, Homo sapien
aatgggaggtttgtcacaggtaaacaggtgatg

SEQ ID NO: 586228 - DNA, 33 bp, Homo sapien
aatgggaggtttgtcagaggtaaacaggtgatg

SEQ ID NO: 586229 - DNA, 33 bp, Homo sapien
gccttctcactagaacaagcttcctctctaaac

SEQ ID NO: 586230 - DNA, 33 bp, Homo sapien
gccttctcactagaacgagcttcctctctaaac

SEQ ID NO: 586231 - DNA, 33 bp, Homo sapien
acagtgcacagaaagccatgaggagccgttaaa

SEQ ID NO: 586232 - DNA, 33 bp, Homo sapien
acagtgcacagaaagctatgaggagccgttaaa

SEQ ID NO: 586233 - DNA, 33 bp, Homo sapien
cagttcttctcactcaatcttggctggaattgt

SEQ ID NO: 586234 - DNA, 33 bp, Homo sapien
cagttcttctcactcagtcttggctggaattgt

SEQ ID NO: 586235 - DNA, 33 bp, Homo sapien
aaatctaaaaatgcaaagctcaaaaggatcaaa

SEQ ID NO: 586236 - DNA, 33 bp, Homo sapien
aaatctaaaaatgcaacgctcaaaaggatcaaa

SEQ ID NO: 586237 - DNA, 33 bp, Homo sapien
tcaactatgtgacagaaaaaagctcaagaatat

SEQ ID NO: 586238 - DNA, 33 bp, Homo sapien
tcaactatgtgacagacaaaagctcaagaatat

SEQ ID NO: 586239 - DNA, 33 bp, Homo sapien
tataataactgtattccataggttcaaaagtta

SEQ ID NO: 586240 - DNA, 33 bp, Homo sapien
tataataactgtattctataggttcaaaagtta

SEQ ID NO: 586241 - DNA, 33 bp, Homo sapien
aacatttgaatttaaaatcatcagttcatcctt

SEQ ID NO: 586242 - DNA, 33 bp, Homo sapien
aacatttgaatttaaagtcatcagttcatcctt

SEQ ID NO: 586243 - DNA, 33 bp, Homo sapien
tggtctttttttaccccgagaactgacagtcat

SEQ ID NO: 586244 - DNA, 33 bp, Homo sapien
tggtctttttttaccctgagaactgacagtcat

SEQ ID NO: 586245 - DNA, 33 bp, Homo sapien
tttcagcaaagtataacgaaaggagtactgtac

SEQ ID NO: 586246 - DNA, 33 bp, Homo sapien
tttcagcaaagtataatgaaaggagtactgtac

SEQ ID NO: 586247 - DNA, 33 bp, Homo sapien
taatcactatggttcaactcagttttaagtctc

SEQ ID NO: 586248 - DNA, 33 bp, Homo sapien
taatcactatggttcagctcagttttaagtctc

SEQ ID NO: 586249 - DNA, 33 bp, Homo sapien
aagttcccaacttgaaatgaacatggtatttag

SEQ ID NO: 586250 - DNA, 33 bp, Homo sapien
aagttcccaacttgaattgaacatggtatttag

SEQ ID NO: 586251 - DNA, 33 bp, Homo sapien
agaggagccatttataacaagaaaatacagttt

SEQ ID NO: 586252 - DNA, 33 bp, Homo sapien
agaggagccatttatagcaagaaaatacagttt

SEQ ID NO: 586253 - DNA, 33 bp, Homo sapien
acactatcaatgcatcacatggacataaggtaa

SEQ ID NO: 586254 - DNA, 33 bp, Homo sapien
acactatcaatgcatcgcatggacataaggtaa

SEQ ID NO: 586255 - DNA, 33 bp, Homo sapien
ccaagttccatccccaagttccaagtttgttgc

SEQ ID NO: 586256 - DNA, 33 bp, Homo sapien
ccaagttccatccccaggttccaagtttgttgc

SEQ ID NO: 586257 - DNA, 33 bp, Homo sapien
gtccttgatcagatcacaaaaccaatacaggag

SEQ ID NO: 586258 - DNA, 33 bp, Homo sapien
gtccttgatcagatcagaaaaccaatacaggag

SEQ ID NO: 586259 - DNA, 33 bp, Homo sapien
ttaggccttacaggtcacatacaatctctgtca

SEQ ID NO: 586260 - DNA, 33 bp, Homo sapien
ttaggccttacaggtcgcatacaatctctgtca

SEQ ID NO: 586261 - DNA, 33 bp, Homo sapien
agcagattgactaagggcagataaaacaagatg

SEQ ID NO: 586262 - DNA, 33 bp, Homo sapien
agcagattgactaaggtcagataaaacaagatg

SEQ ID NO: 586263 - DNA, 33 bp, Homo sapien
accaactggcttagcacggtttatattttctct

SEQ ID NO: 586264 - DNA, 33 bp, Homo sapien
accaactggcttagcatggtttatattttctct

SEQ ID NO: 586265 - DNA, 33 bp, Homo sapien
tagtgcccagaacaaacttgctcaataaattat

SEQ ID NO: 586266 - DNA, 33 bp, Homo sapien
tagtgcccagaacaaagttgctcaataaattat

SEQ ID NO: 586267 - DNA, 33 bp, Homo sapien
gtagggactccaccccactgtgttgattgctgt

SEQ ID NO: 586268 - DNA, 33 bp, Homo sapien
gtagggactccaccccgctgtgttgattgctgt

SEQ ID NO: 586269 - DNA, 33 bp, Homo sapien
aaatagaatgtgttcaccaggagtcatgttttg

SEQ ID NO: 586270 - DNA, 33 bp, Homo sapien
aaatagaatgtgttcagcaggagtcatgttttg

SEQ ID NO: 586271 - DNA, 33 bp, Homo sapien
ctggcagggaaatgaaatgaaggcagtgaagcc

SEQ ID NO: 586272 - DNA, 33 bp, Homo sapien
ctggcagggaaatgaactgaaggcagtgaagcc

SEQ ID NO: 586273 - DNA, 33 bp, Homo sapien
tgggacctatacatgcactgtgatgagaatgat

SEQ ID NO: 586274 - DNA, 33 bp, Homo sapien
tgggacctatacatgcgctgtgatgagaatgat

SEQ ID NO: 586275 - DNA, 33 bp, Homo sapien
gctcttcatggtgtaacagatccactgttgaaa

SEQ ID NO: 586276 - DNA, 33 bp, Homo sapien
gctcttcatggtgtaatagatccactgttgaaa

SEQ ID NO: 586277 - DNA, 33 bp, Homo sapien
aatttcaggtccaatggaaaaggaccagtgatt

SEQ ID NO: 586278 - DNA, 33 bp, Homo sapien
aatttcaggtccaatgtaaaaggaccagtgatt

SEQ ID NO: 586279 - DNA, 33 bp, Homo sapien
gtaaaatgattcaacacgccaagtacctacagg

SEQ ID NO: 586280 - DNA, 33 bp, Homo sapien
gtaaaatgattcaacaggccaagtacctacagg

SEQ ID NO: 586281 - DNA, 33 bp, Homo sapien
cgatacacggaatttcactcacaattgtccatg

SEQ ID NO: 586282 - DNA, 33 bp, Homo sapien
cgatacacggaatttcgctcacaattgtccatg

SEQ ID NO: 586283 - DNA, 33 bp, Homo sapien
gagggtttcctaagtaccagacatcactgcaaa

SEQ ID NO: 586284 - DNA, 33 bp, Homo sapien
gagggtttcctaagtatcagacatcactgcaaa

SEQ ID NO: 586285 - DNA, 33 bp, Homo sapien
tgctttgcagtatacacgttggtgcatagctta

SEQ ID NO: 586286 - DNA, 33 bp, Homo sapien
tgctttgcagtatacatgttggtgcatagctta

SEQ ID NO: 586287 - DNA, 33 bp, Homo sapien
aatctgttcattacaacgtctaaggaaagcgtt

SEQ ID NO: 586288 - DNA, 33 bp, Homo sapien
aatctgttcattacaatgtctaaggaaagcgtt

SEQ ID NO: 586289 - DNA, 33 bp, Homo sapien
ataacttgattacggccctataactgtctcatg

SEQ ID NO: 586290 - DNA, 33 bp, Homo sapien
ataacttgattacggcgctataactgtctcatg

SEQ ID NO: 586291 - DNA, 33 bp, Homo sapien
gaatctggaaaccctacgcctacagttgctaca

SEQ ID NO: 586292 - DNA, 33 bp, Homo sapien
gaatctggaaaccctatgcctacagttgctaca

SEQ ID NO: 586293 - DNA, 33 bp, Homo sapien
gttgacccactcggaacgtagagcatgggcaaa

SEQ ID NO: 586294 - DNA, 33 bp, Homo sapien
gttgacccactcggaatgtagagcatgggcaaa

SEQ ID NO: 586295 - DNA, 33 bp, Homo sapien
tgtatttgaccgtgggacacttccattgtgaca

SEQ ID NO: 586296 - DNA, 33 bp, Homo sapien
tgtatttgaccgtgggccacttccattgtgaca

SEQ ID NO: 586297 - DNA, 33 bp, Homo sapien
tgtgacacatttaacacgcttggaactgaattt

SEQ ID NO: 586298 - DNA, 33 bp, Homo sapien
tgtgacacatttaacatgcttggaactgaattt

SEQ ID NO: 586299 - DNA, 33 bp, Homo sapien
ttttaggcctttggaaacactccttcattctaa

SEQ ID NO: 586300 - DNA, 33 bp, Homo sapien
ttttaggcctttggaagcactccttcattctaa

SEQ ID NO: 586301 - DNA, 33 bp, Homo sapien
acagctgacaaactaaccttccaaaaagaaagg

SEQ ID NO: 586302 - DNA, 33 bp, Homo sapien
acagctgacaaactaatcttccaaaaagaaagg

SEQ ID NO: 586303 - DNA, 33 bp, Homo sapien
agaaaggaatagatggccattcacacgaaggtt

SEQ ID NO: 586304 - DNA, 33 bp, Homo sapien
agaaaggaatagatggtcattcacacgaaggtt

SEQ ID NO: 586305 - DNA, 33 bp, Homo sapien
gtgacattggggagataaagatctgggatgatg

SEQ ID NO: 586306 - DNA, 33 bp, Homo sapien
gtgacattggggagatgaagatctgggatgatg

SEQ ID NO: 586307 - DNA, 33 bp, Homo sapien
ctttgaatttgttaaaaatgaattggcttcctg

SEQ ID NO: 586308 - DNA, 33 bp, Homo sapien
ctttgaatttgttaaatatgaattggcttcctg

SEQ ID NO: 586309 - DNA, 33 bp, Homo sapien
gcaagatggaagaataagaaacagtatccagaa

SEQ ID NO: 586310 - DNA, 33 bp, Homo sapien
gcaagatggaagaataggaaacagtatccagaa

SEQ ID NO: 586311 - DNA, 33 bp, Homo sapien
ctagcaaaggaatctcaagaatgttggttcggg

SEQ ID NO: 586312 - DNA, 33 bp, Homo sapien
ctagcaaaggaatctcgagaatgttggttcggg

SEQ ID NO: 586313 - DNA, 33 bp, Homo sapien
agcttttatattgaccacctgttgaaataacat

SEQ ID NO: 586314 - DNA, 33 bp, Homo sapien
agcttttatattgaccccctgttgaaataacat

SEQ ID NO: 586315 - DNA, 33 bp, Homo sapien
cccccgatagccaaggccccattatcattgccc

SEQ ID NO: 586316 - DNA, 33 bp, Homo sapien
cccccgatagccaaggtcccattatcattgccc

SEQ ID NO: 586317 - DNA, 33 bp, Homo sapien
atgaggagttagcacacggttctgggaggaaag

SEQ ID NO: 586318 - DNA, 33 bp, Homo sapien
atgaggagttagcacatggttctgggaggaaag

SEQ ID NO: 586319 - DNA, 33 bp, Homo sapien
acattttatggatgcactagtgaagtaaagacc

SEQ ID NO: 586320 - DNA, 33 bp, Homo sapien
acattttatggatgcattagtgaagtaaagacc

SEQ ID NO: 586321 - DNA, 33 bp, Homo sapien
taaataaaagcaactcaaggttagcatcatatc

SEQ ID NO: 586322 - DNA, 33 bp, Homo sapien
taaataaaagcaactcgaggttagcatcatatc

SEQ ID NO: 586323 - DNA, 33 bp, Homo sapien
aaaaccctgccccaaaatgtacatgggatgtca

SEQ ID NO: 586324 - DNA, 33 bp, Homo sapien
aaaaccctgccccaaagtgtacatgggatgtca

SEQ ID NO: 586325 - DNA, 33 bp, Homo sapien
ccttcaataccagcagacactcttcagcccttc

SEQ ID NO: 586326 - DNA, 33 bp, Homo sapien
ccttcaataccagcagccactcttcagcccttc

SEQ ID NO: 586327 - DNA, 33 bp, Homo sapien
tgaaatgtctcataaaatatacatggagagcaa

SEQ ID NO: 586328 - DNA, 33 bp, Homo sapien
tgaaatgtctcataaagtatacatggagagcaa

SEQ ID NO: 586329 - DNA, 33 bp, Homo sapien
agacctagctccctaaaccttttcctcgttttg

SEQ ID NO: 586330 - DNA, 33 bp, Homo sapien
agacctagctccctaatccttttcctcgttttg

SEQ ID NO: 586331 - DNA, 33 bp, Homo sapien
aagacatacctgagaacgggcaattaacgaaag

SEQ ID NO: 586332 - DNA, 33 bp, Homo sapien
aagacatacctgagaatgggcaattaacgaaag

SEQ ID NO: 586333 - DNA, 33 bp, Homo sapien
gtaattttgctgcatagaacaactggatttctg

SEQ ID NO: 586334 - DNA, 33 bp, Homo sapien
gtaattttgctgcatataacaactggatttctg

SEQ ID NO: 586335 - DNA, 33 bp, Homo sapien
tagaagcagtgatagaatctataaaatgtagaa

SEQ ID NO: 586336 - DNA, 33 bp, Homo sapien
tagaagcagtgatagactctataaaatgtagaa

SEQ ID NO: 586337 - DNA, 33 bp, Homo sapien
aaagcaattgaaaaaacggtgaatggtaattac

SEQ ID NO: 586338 - DNA, 33 bp, Homo sapien
aaagcaattgaaaaaatggtgaatggtaattac

SEQ ID NO: 586339 - DNA, 33 bp, Homo sapien
cagtatgtgaacgtcacatgggtcttgatgtta

SEQ ID NO: 586340 - DNA, 33 bp, Homo sapien
cagtatgtgaacgtcatatgggtcttgatgtta

SEQ ID NO: 586341 - DNA, 33 bp, Homo sapien
tacttctgcatctgtacaattggcgtcataata

SEQ ID NO: 586342 - DNA, 33 bp, Homo sapien
tacttctgcatctgtataattggcgtcataata

SEQ ID NO: 586343 - DNA, 33 bp, Homo sapien
aggacttagaattcaacgagagaaaacctgagt

SEQ ID NO: 586344 - DNA, 33 bp, Homo sapien
aggacttagaattcaatgagagaaaacctgagt

SEQ ID NO: 586345 - DNA, 33 bp, Homo sapien
gataaaacaatagtcacatgagtagcaaaaggc

SEQ ID NO: 586346 - DNA, 33 bp, Homo sapien
gataaaacaatagtcatatgagtagcaaaaggc

SEQ ID NO: 586347 - DNA, 33 bp, Homo sapien
tgctgatatagtgaaacgtgatttacagcacaa

SEQ ID NO: 586348 - DNA, 33 bp, Homo sapien
tgctgatatagtgaaatgtgatttacagcacaa

SEQ ID NO: 586349 - DNA, 33 bp, Homo sapien
ttccacctgggaattccatactgaaccatacta

SEQ ID NO: 586350 - DNA, 33 bp, Homo sapien
ttccacctgggaattctatactgaaccatacta

SEQ ID NO: 586351 - DNA, 33 bp, Homo sapien
tttcccattaagcttccatccttattccagagc

SEQ ID NO: 586352 - DNA, 33 bp, Homo sapien
tttcccattaagcttctatccttattccagagc

SEQ ID NO: 586353 - DNA, 33 bp, Homo sapien
gtcctggtgtctttaaagaaaataatggctata

SEQ ID NO: 586354 - DNA, 33 bp, Homo sapien
gtcctggtgtctttaaggaaaataatggctata

SEQ ID NO: 586355 - DNA, 33 bp, Homo sapien
tttcttttctaaccctaacttgctttgcagtat

SEQ ID NO: 586356 - DNA, 33 bp, Homo sapien
tttcttttctaaccctgacttgctttgcagtat

SEQ ID NO: 586357 - DNA, 33 bp, Homo sapien
tacagcagtaggtttgcaaatcaaaatgccagc

SEQ ID NO: 586358 - DNA, 33 bp, Homo sapien
tacagcagtaggtttgtaaatcaaaatgccagc

SEQ ID NO: 586359 - DNA, 33 bp, Homo sapien
attattttacaacaagcccatataccctattta

SEQ ID NO: 586360 - DNA, 33 bp, Homo sapien
attattttacaacaagtccatataccctattta

SEQ ID NO: 586361 - DNA, 33 bp, Homo sapien
ggcatatgaattttcaaaaatattgccaaatta

SEQ ID NO: 586362 - DNA, 33 bp, Homo sapien
ggcatatgaattttcagaaatattgccaaatta

SEQ ID NO: 586363 - DNA, 33 bp, Homo sapien
agaaaaagaaaataaaaatgatggattgccctc

SEQ ID NO: 586364 - DNA, 33 bp, Homo sapien
agaaaaagaaaataaacatgatggattgccctc

SEQ ID NO: 586365 - DNA, 33 bp, Homo sapien
ccagttagattcaggccacaaattccaactgac

SEQ ID NO: 586366 - DNA, 33 bp, Homo sapien
ccagttagattcaggctacaaattccaactgac

SEQ ID NO: 586367 - DNA, 33 bp, Homo sapien
tggcttgttccagtgacgatttcagccctacaa

SEQ ID NO: 586368 - DNA, 33 bp, Homo sapien
tggcttgttccagtgatgatttcagccctacaa

SEQ ID NO: 586369 - DNA, 33 bp, Homo sapien
tgagtattttttctgaacacaatggcataaaac

SEQ ID NO: 586370 - DNA, 33 bp, Homo sapien
tgagtattttttctgaccacaatggcataaaac

SEQ ID NO: 586371 - DNA, 33 bp, Homo sapien
gcatttcaataaggccagaatggcaaggactgt

SEQ ID NO: 586372 - DNA, 33 bp, Homo sapien
gcatttcaataaggccggaatggcaaggactgt

SEQ ID NO: 586373 - DNA, 33 bp, Homo sapien
gaaggtgaaacatggaagaaggagtgaggagaa

SEQ ID NO: 586374 - DNA, 33 bp, Homo sapien
gaaggtgaaacatggacgaaggagtgaggagaa

SEQ ID NO: 586375 - DNA, 33 bp, Homo sapien
gtcagagactagaaatgatgagaagcctgtgag

SEQ ID NO: 586376 - DNA, 33 bp, Homo sapien
gtcagagactagaaattatgagaagcctgtgag

SEQ ID NO: 586377 - DNA, 33 bp, Homo sapien
aactacatttaaaggaagaggacatagatactg

SEQ ID NO: 586378 - DNA, 33 bp, Homo sapien
aactacatttaaaggacgaggacatagatactg

SEQ ID NO: 586379 - DNA, 33 bp, Homo sapien
cacattttggctttaacaccatcagaatgatct

SEQ ID NO: 586380 - DNA, 33 bp, Homo sapien
cacattttggctttaataccatcagaatgatct

SEQ ID NO: 586381 - DNA, 33 bp, Homo sapien
atgcttttaaccactacatactatctccttatg

SEQ ID NO: 586382 - DNA, 33 bp, Homo sapien
atgcttttaaccactatatactatctccttatg

SEQ ID NO: 586383 - DNA, 33 bp, Homo sapien
aggacactaagaaaaaaaaatgacagaactgtg

SEQ ID NO: 586384 - DNA, 33 bp, Homo sapien
aggacactaagaaaaataaatgacagaactgtg

SEQ ID NO: 586385 - DNA, 33 bp, Homo sapien
ttgttaaggtattgaaataatgactgaattctc

SEQ ID NO: 586386 - DNA, 33 bp, Homo sapien
ttgttaaggtattgaactaatgactgaattctc

SEQ ID NO: 586387 - DNA, 33 bp, Homo sapien
gtgttgggccctttagcatgtacaaatgaaatc

SEQ ID NO: 586388 - DNA, 33 bp, Homo sapien
gtgttgggccctttagtatgtacaaatgaaatc

SEQ ID NO: 586389 - DNA, 33 bp, Homo sapien
tgagtaaaagaggcagaatgaaaattgagtagt

SEQ ID NO: 586390 - DNA, 33 bp, Homo sapien
tgagtaaaagaggcaggatgaaaattgagtagt

SEQ ID NO: 586391 - DNA, 33 bp, Homo sapien
atacactaatgcctgacagaatcgttttctcat

SEQ ID NO: 586392 - DNA, 33 bp, Homo sapien
atacactaatgcctgatagaatcgttttctcat

SEQ ID NO: 586393 - DNA, 33 bp, Homo sapien
tagatactgtgattgcaccaactgtggaagtgg

SEQ ID NO: 586394 - DNA, 33 bp, Homo sapien
tagatactgtgattgcgccaactgtggaagtgg

SEQ ID NO: 586395 - DNA, 33 bp, Homo sapien
caaaaatttattgttcaaaaatatctgatatgg

SEQ ID NO: 586396 - DNA, 33 bp, Homo sapien
caaaaatttattgttcgaaaatatctgatatgg

SEQ ID NO: 586397 - DNA, 33 bp, Homo sapien
atatgtatgtaaaggaaaatcttcagcattctt

SEQ ID NO: 586398 - DNA, 33 bp, Homo sapien
atatgtatgtaaaggagaatcttcagcattctt

SEQ ID NO: 586399 - DNA, 33 bp, Homo sapien
ctgcactgatagccataagattcatgctgttgt

SEQ ID NO: 586400 - DNA, 33 bp, Homo sapien
ctgcactgatagccatgagattcatgctgttgt

SEQ ID NO: 586401 - DNA, 33 bp, Homo sapien
ttgcctgaccttagagaaattttgcagacggac

SEQ ID NO: 586402 - DNA, 33 bp, Homo sapien
ttgcctgaccttagaggaattttgcagacggac

SEQ ID NO: 586403 - DNA, 33 bp, Homo sapien
ctacctcatgagctcaccaaagcaaagtagctt

SEQ ID NO: 586404 - DNA, 33 bp, Homo sapien
ctacctcatgagctcatcaaagcaaagtagctt

SEQ ID NO: 586405 - DNA, 33 bp, Homo sapien
tttcaaaatagctagaagaaaagaatggtaatg

SEQ ID NO: 586406 - DNA, 33 bp, Homo sapien
tttcaaaatagctagacgaaaagaatggtaatg

SEQ ID NO: 586407 - DNA, 33 bp, Homo sapien
aggattaaataaagaaagaaaagccagaagcaa

SEQ ID NO: 586408 - DNA, 33 bp, Homo sapien
aggattaaataaagaaggaaaagccagaagcaa

SEQ ID NO: 586409 - DNA, 33 bp, Homo sapien
gcagtggagatgaacacactggatagcttgttt

SEQ ID NO: 586410 - DNA, 33 bp, Homo sapien
gcagtggagatgaacatactggatagcttgttt

SEQ ID NO: 586411 - DNA, 33 bp, Homo sapien
ggggcacagtttgaagaagcagcccctatctca

SEQ ID NO: 586412 - DNA, 33 bp, Homo sapien
ggggcacagtttgaaggagcagcccctatctca

SEQ ID NO: 586413 - DNA, 33 bp, Homo sapien
ttgctctacttttagcaaccctacttttagaca

SEQ ID NO: 586414 - DNA, 33 bp, Homo sapien
ttgctctacttttagcgaccctacttttagaca

SEQ ID NO: 586415 - DNA, 33 bp, Homo sapien
gactattaaattatggaaatttgaaatgtgtat

SEQ ID NO: 586416 - DNA, 33 bp, Homo sapien
gactattaaattatggcaatttgaaatgtgtat

SEQ ID NO: 586417 - DNA, 33 bp, Homo sapien
ctcttattaccatcaactccactctatttttta

SEQ ID NO: 586418 - DNA, 33 bp, Homo sapien
ctcttattaccatcaattccactctatttttta

SEQ ID NO: 586419 - DNA, 33 bp, Homo sapien
atctgcagaaccagccaacggtgggcagtgata

SEQ ID NO: 586420 - DNA, 33 bp, Homo sapien
atctgcagaaccagccgacggtgggcagtgata

SEQ ID NO: 586421 - DNA, 33 bp, Homo sapien
gaggaaatattcacgccgattatatcttgctct

SEQ ID NO: 586422 - DNA, 33 bp, Homo sapien
gaggaaatattcacgctgattatatcttgctct

SEQ ID NO: 586423 - DNA, 33 bp, Homo sapien
tttttcactgcttcaacgatacattctagcaag

SEQ ID NO: 586424 - DNA, 33 bp, Homo sapien
tttttcactgcttcaatgatacattctagcaag

SEQ ID NO: 586425 - DNA, 33 bp, Homo sapien
tgacctctgcctgaaaaatctgcttttatgtag

SEQ ID NO: 586426 - DNA, 33 bp, Homo sapien
tgacctctgcctgaaagatctgcttttatgtag

SEQ ID NO: 586427 - DNA, 33 bp, Homo sapien
tgtgcatgtttatgccaggaaaaaaaaactagc

SEQ ID NO: 586428 - DNA, 33 bp, Homo sapien
tgtgcatgtttatgccgggaaaaaaaaactagc

SEQ ID NO: 586429 - DNA, 33 bp, Homo sapien
taaatttgtgcctgagaccgattaccgcttcct

SEQ ID NO: 586430 - DNA, 33 bp, Homo sapien
taaatttgtgcctgaggccgattaccgcttcct

SEQ ID NO: 586431 - DNA, 33 bp, Homo sapien
gctgagcacatagcaggccctcagcaaggagtc

SEQ ID NO: 586432 - DNA, 33 bp, Homo sapien
gctgagcacatagcagtccctcagcaaggagtc

SEQ ID NO: 586433 - DNA, 33 bp, Homo sapien
tcagggtgctcggtatcaaagcatttttcacac

SEQ ID NO: 586434 - DNA, 33 bp, Homo sapien
tcagggtgctcggtattaaagcatttttcacac

SEQ ID NO: 586435 - DNA, 33 bp, Homo sapien
ctttttcaatgcagaaaccataacaggaaaata

SEQ ID NO: 586436 - DNA, 33 bp, Homo sapien
ctttttcaatgcagaagccataacaggaaaata

SEQ ID NO: 586437 - DNA, 33 bp, Homo sapien
gaagagctgttgtataagcaagtagaatgtgtt

SEQ ID NO: 586438 - DNA, 33 bp, Homo sapien
gaagagctgttgtataggcaagtagaatgtgtt

SEQ ID NO: 586439 - DNA, 33 bp, Homo sapien
atcatttgcaatacgacgaatagggcagatgtg

SEQ ID NO: 586440 - DNA, 33 bp, Homo sapien
atcatttgcaatacgatgaatagggcagatgtg

SEQ ID NO: 586441 - DNA, 33 bp, Homo sapien
catgtctagattcaaacgctgtcaggaatttat

SEQ ID NO: 586442 - DNA, 33 bp, Homo sapien
catgtctagattcaaatgctgtcaggaatttat

SEQ ID NO: 586443 - DNA, 33 bp, Homo sapien
agatatgtgctcaagaaagtgctcttccctgaa

SEQ ID NO: 586444 - DNA, 33 bp, Homo sapien
agatatgtgctcaagagagtgctcttccctgaa

SEQ ID NO: 586445 - DNA, 33 bp, Homo sapien
ttccctgaatccctcacgtcatattgttagtgc

SEQ ID NO: 586446 - DNA, 33 bp, Homo sapien
ttccctgaatccctcatgtcatattgttagtgc

SEQ ID NO: 586447 - DNA, 33 bp, Homo sapien
tcaaatccaacctctacgatgactggtcttgtg

SEQ ID NO: 586448 - DNA, 33 bp, Homo sapien
tcaaatccaacctctatgatgactggtcttgtg

SEQ ID NO: 586449 - DNA, 33 bp, Homo sapien
ttaaaactcagctcaaacctcaaaagctcctag

SEQ ID NO: 586450 - DNA, 33 bp, Homo sapien
ttaaaactcagctcaagcctcaaaagctcctag

SEQ ID NO: 586451 - DNA, 33 bp, Homo sapien
tgaaacaagtcagtaaactatctctgaggtctc

SEQ ID NO: 586452 - DNA, 33 bp, Homo sapien
tgaaacaagtcagtaatctatctctgaggtctc

SEQ ID NO: 586453 - DNA, 33 bp, Homo sapien
ataggaatcacaaaacagagtctccctttctta

SEQ ID NO: 586454 - DNA, 33 bp, Homo sapien
ataggaatcacaaaaccgagtctccctttctta

SEQ ID NO: 586455 - DNA, 33 bp, Homo sapien
tggaagacgtaggatccgacgttggttctgccc

SEQ ID NO: 586456 - DNA, 33 bp, Homo sapien
tggaagacgtaggatctgacgttggttctgccc

SEQ ID NO: 586457 - DNA, 33 bp, Homo sapien
ttaataagtagtgaaacggtgcaaatgtgcaaa

SEQ ID NO: 586458 - DNA, 33 bp, Homo sapien
ttaataagtagtgaaatggtgcaaatgtgcaaa

SEQ ID NO: 586459 - DNA, 33 bp, Homo sapien
actgatttcactggctcacaaaactctgaaaga

SEQ ID NO: 586460 - DNA, 33 bp, Homo sapien
actgatttcactggctgacaaaactctgaaaga

SEQ ID NO: 586461 - DNA, 33 bp, Homo sapien
ccccaataatcctatcacactcttcaatttatc

SEQ ID NO: 586462 - DNA, 33 bp, Homo sapien
ccccaataatcctatcgcactcttcaatttatc

SEQ ID NO: 586463 - DNA, 33 bp, Homo sapien
tgtgcatgaaagtgtacaatccacagagtaaaa

SEQ ID NO: 586464 - DNA, 33 bp, Homo sapien
tgtgcatgaaagtgtataatccacagagtaaaa

SEQ ID NO: 586465 - DNA, 33 bp, Homo sapien
gaatcgaggatgactccgaattggaagcatgga

SEQ ID NO: 586466 - DNA, 33 bp, Homo sapien
gaatcgaggatgactctgaattggaagcatgga

SEQ ID NO: 586467 - DNA, 33 bp, Homo sapien
agaaatacttttgccacgtcgtttccaggaagc

SEQ ID NO: 586468 - DNA, 33 bp, Homo sapien
agaaatacttttgccatgtcgtttccaggaagc

SEQ ID NO: 586469 - DNA, 33 bp, Homo sapien
ttatctgtgccagaaggctgttattttgtttta

SEQ ID NO: 586470 - DNA, 33 bp, Homo sapien
ttatctgtgccagaagtctgttattttgtttta

SEQ ID NO: 586471 - DNA, 33 bp, Homo sapien
attcatggacttgttcaaaacatccttcttcta

SEQ ID NO: 586472 - DNA, 33 bp, Homo sapien
attcatggacttgttcgaaacatccttcttcta

SEQ ID NO: 586473 - DNA, 33 bp, Homo sapien
tttggtcatgttgaaaattgctggtttatactt

SEQ ID NO: 586474 - DNA, 33 bp, Homo sapien
tttggtcatgttgaaagttgctggtttatactt

SEQ ID NO: 586475 - DNA, 33 bp, Homo sapien
gtgtaccaacaatcacagatgtgacattgctga

SEQ ID NO: 586476 - DNA, 33 bp, Homo sapien
gtgtaccaacaatcacggatgtgacattgctga

SEQ ID NO: 586477 - DNA, 33 bp, Homo sapien
tgagattcaaatccaactctgactaacttcaaa

SEQ ID NO: 586478 - DNA, 33 bp, Homo sapien
tgagattcaaatccaattctgactaacttcaaa

SEQ ID NO: 586479 - DNA, 33 bp, Homo sapien
tcgtagaagaggaaaaataaccaagaccatctt

SEQ ID NO: 586480 - DNA, 33 bp, Homo sapien
tcgtagaagaggaaaactaaccaagaccatctt

SEQ ID NO: 586481 - DNA, 33 bp, Homo sapien
ggttagagttttgccaacattctccaagcacaa

SEQ ID NO: 586482 - DNA, 33 bp, Homo sapien
ggttagagttttgccagcattctccaagcacaa

SEQ ID NO: 586483 - DNA, 33 bp, Homo sapien
atgactaatggtaccaacgctgtcaccccaggc

SEQ ID NO: 586484 - DNA, 33 bp, Homo sapien
atgactaatggtaccatcgctgtcaccccaggc

SEQ ID NO: 586485 - DNA, 33 bp, Homo sapien
tacacagtacaaaaaaagtttaatgtcaatggt

SEQ ID NO: 586486 - DNA, 33 bp, Homo sapien
tacacagtacaaaaaaggtttaatgtcaatggt

SEQ ID NO: 586487 - DNA, 33 bp, Homo sapien
caattatattctcctcagaaacccgggacattt

SEQ ID NO: 586488 - DNA, 33 bp, Homo sapien
caattatattctcctctgaaacccgggacattt

SEQ ID NO: 586489 - DNA, 33 bp, Homo sapien
ttactaaaataagatgccatagttttcacgtta

SEQ ID NO: 586490 - DNA, 33 bp, Homo sapien
ttactaaaataagatggcatagttttcacgtta

SEQ ID NO: 586491 - DNA, 33 bp, Homo sapien
tgtctcctccattagactctaagctctttgaga

SEQ ID NO: 586492 - DNA, 33 bp, Homo sapien
tgtctcctccattagattctaagctctttgaga

SEQ ID NO: 586493 - DNA, 33 bp, Homo sapien
agttcctttctagtcaatagggaagatgatatg

SEQ ID NO: 586494 - DNA, 33 bp, Homo sapien
agttcctttctagtcagtagggaagatgatatg

SEQ ID NO: 586495 - DNA, 33 bp, Homo sapien
tttaggcaatgtagaaaataataccttccctct

SEQ ID NO: 586496 - DNA, 33 bp, Homo sapien
tttaggcaatgtagaagataataccttccctct

SEQ ID NO: 586497 - DNA, 33 bp, Homo sapien
tttggtggtgggaacaagattatgaaaaaacag

SEQ ID NO: 586498 - DNA, 33 bp, Homo sapien
tttggtggtgggaacatgattatgaaaaaacag

SEQ ID NO: 586499 - DNA, 33 bp, Homo sapien
agaacagaacatgtgccaatgggcgatcttgcc

SEQ ID NO: 586500 - DNA, 33 bp, Homo sapien
agaacagaacatgtgctaatgggcgatcttgcc

SEQ ID NO: 586501 - DNA, 33 bp, Homo sapien
aaatattggttaggccaaattatctaaatgtgg

SEQ ID NO: 586502 - DNA, 33 bp, Homo sapien
aaatattggttaggccgaattatctaaatgtgg

SEQ ID NO: 586503 - DNA, 33 bp, Homo sapien
atctgacatctactttaaaaggttcactctggc

SEQ ID NO: 586504 - DNA, 33 bp, Homo sapien
atctgacatctactttgaaaggttcactctggc

SEQ ID NO: 586505 - DNA, 33 bp, Homo sapien
taaatactattccaaaaacaatgcccgcaattg

SEQ ID NO: 586506 - DNA, 33 bp, Homo sapien
taaatactattccaaagacaatgcccgcaattg

SEQ ID NO: 586507 - DNA, 33 bp, Homo sapien
tagctttttcatactcaaacatagtaaaatagc

SEQ ID NO: 586508 - DNA, 33 bp, Homo sapien
tagctttttcatactcgaacatagtaaaatagc

SEQ ID NO: 586509 - DNA, 33 bp, Homo sapien
gaatgagtttccagaaagaagaatacagaaaat

SEQ ID NO: 586510 - DNA, 33 bp, Homo sapien
gaatgagtttccagaaggaagaatacagaaaat

SEQ ID NO: 586511 - DNA, 33 bp, Homo sapien
ttgaactttctggatcgattctctaactctttt

SEQ ID NO: 586512 - DNA, 33 bp, Homo sapien
ttgaactttctggatctattctctaactctttt

SEQ ID NO: 586513 - DNA, 33 bp, Homo sapien
tgagcaagcagtccataatatggctataacaca

SEQ ID NO: 586514 - DNA, 33 bp, Homo sapien
tgagcaagcagtccatgatatggctataacaca

SEQ ID NO: 586515 - DNA, 33 bp, Homo sapien
caactttatttgtcaaaccaaaatgccctacaa

SEQ ID NO: 586516 - DNA, 33 bp, Homo sapien
caactttatttgtcaagccaaaatgccctacaa

SEQ ID NO: 586517 - DNA, 33 bp, Homo sapien
aattactgggatgtacaataaatgtatgtttga

SEQ ID NO: 586518 - DNA, 33 bp, Homo sapien
aattactgggatgtacgataaatgtatgtttga

SEQ ID NO: 586519 - DNA, 33 bp, Homo sapien
gtacccatcaaatccactctccatgttaccctt

SEQ ID NO: 586520 - DNA, 33 bp, Homo sapien
gtacccatcaaatccattctccatgttaccctt

SEQ ID NO: 586521 - DNA, 33 bp, Homo sapien
agtaagagatctagtagaccaaatttaccttaa

SEQ ID NO: 586522 - DNA, 33 bp, Homo sapien
agtaagagatctagtataccaaatttaccttaa

SEQ ID NO: 586523 - DNA, 33 bp, Homo sapien
aatttctattgagacaaagctcttaagcagctt

SEQ ID NO: 586524 - DNA, 33 bp, Homo sapien
aatttctattgagacagagctcttaagcagctt

SEQ ID NO: 586525 - DNA, 33 bp, Homo sapien
cacaaaagactcagaactgaaaactggaattga

SEQ ID NO: 586526 - DNA, 33 bp, Homo sapien
cacaaaagactcagaattgaaaactggaattga

SEQ ID NO: 586527 - DNA, 33 bp, Homo sapien
ttaatcttaccctggacacctgacccaggtgcc

SEQ ID NO: 586528 - DNA, 33 bp, Homo sapien
ttaatcttaccctggatacctgacccaggtgcc

SEQ ID NO: 586529 - DNA, 33 bp, Homo sapien
agggactgaatgtgaacgatactcctaagttgt

SEQ ID NO: 586530 - DNA, 33 bp, Homo sapien
agggactgaatgtgaatgatactcctaagttgt

SEQ ID NO: 586531 - DNA, 33 bp, Homo sapien
tccagattgtgaaaaacgttaaacgcttggcta

SEQ ID NO: 586532 - DNA, 33 bp, Homo sapien
tccagattgtgaaaaatgttaaacgcttggcta

SEQ ID NO: 586533 - DNA, 33 bp, Homo sapien
gaaggccagagatccaaagcaattccctagggc

SEQ ID NO: 586534 - DNA, 33 bp, Homo sapien
gaaggccagagatccacagcaattccctagggc

SEQ ID NO: 586535 - DNA, 33 bp, Homo sapien
attagagctcgaaccacgtaggtatatgtattt

SEQ ID NO: 586536 - DNA, 33 bp, Homo sapien
attagagctcgaaccatgtaggtatatgtattt

SEQ ID NO: 586537 - DNA, 33 bp, Homo sapien
atcttccaattcattaaatctctctacagatct

SEQ ID NO: 586538 - DNA, 33 bp, Homo sapien
atcttccaattcattacatctctctacagatct

SEQ ID NO: 586539 - DNA, 33 bp, Homo sapien
ggaagaggtgaatatcaaagacatttttaatat

SEQ ID NO: 586540 - DNA, 33 bp, Homo sapien
ggaagaggtgaatatcgaagacatttttaatat

SEQ ID NO: 586541 - DNA, 33 bp, Homo sapien
gatggagggaggtagacggtggagagtctggct

SEQ ID NO: 586542 - DNA, 33 bp, Homo sapien
gatggagggaggtagatggtggagagtctggct

SEQ ID NO: 586543 - DNA, 33 bp, Homo sapien
tgctagcctgttctaacatctggttcatttcag

SEQ ID NO: 586544 - DNA, 33 bp, Homo sapien
tgctagcctgttctaatatctggttcatttcag

SEQ ID NO: 586545 - DNA, 33 bp, Homo sapien
aatgtttcagaacacagtaaatgacaacatttc

SEQ ID NO: 586546 - DNA, 33 bp, Homo sapien
aatgtttcagaacacattaaatgacaacatttc

SEQ ID NO: 586547 - DNA, 33 bp, Homo sapien
gttaaattattgctagccattccaatataggaa

SEQ ID NO: 586548 - DNA, 33 bp, Homo sapien
gttaaattattgctaggcattccaatataggaa

SEQ ID NO: 586549 - DNA, 33 bp, Homo sapien
ttattaatgcgcatggaagagaatcatagagtg

SEQ ID NO: 586550 - DNA, 33 bp, Homo sapien
ttattaatgcgcatgggagagaatcatagagtg

SEQ ID NO: 586551 - DNA, 33 bp, Homo sapien
ttaaataatacgtcaaccaacagtataaatgtc

SEQ ID NO: 586552 - DNA, 33 bp, Homo sapien
ttaaataatacgtcaatcaacagtataaatgtc

SEQ ID NO: 586553 - DNA, 33 bp, Homo sapien
ggccccaccaggacaaacgtatctgaacacaac

SEQ ID NO: 586554 - DNA, 33 bp, Homo sapien
ggccccaccaggacaatcgtatctgaacacaac

SEQ ID NO: 586555 - DNA, 33 bp, Homo sapien
gtaacaagaagtcaaagcttatggtatagtgaa

SEQ ID NO: 586556 - DNA, 33 bp, Homo sapien
gtaacaagaagtcaaatcttatggtatagtgaa

SEQ ID NO: 586557 - DNA, 33 bp, Homo sapien
cactacttctctaagacatatgagcaaagtcat

SEQ ID NO: 586558 - DNA, 33 bp, Homo sapien
cactacttctctaagatatatgagcaaagtcat

SEQ ID NO: 586559 - DNA, 33 bp, Homo sapien
agcagctggaagcttgcagataccaagaactgc

SEQ ID NO: 586560 - DNA, 33 bp, Homo sapien
agcagctggaagcttgtagataccaagaactgc

SEQ ID NO: 586561 - DNA, 33 bp, Homo sapien
taagccttataattcaggttctagaaggaagca

SEQ ID NO: 586562 - DNA, 33 bp, Homo sapien
taagccttataattcatgttctagaaggaagca

SEQ ID NO: 586563 - DNA, 33 bp, Homo sapien
aaatgttgctctgttacggatttctgactgtag

SEQ ID NO: 586564 - DNA, 33 bp, Homo sapien
aaatgttgctctgttatggatttctgactgtag

SEQ ID NO: 586565 - DNA, 33 bp, Homo sapien
gagatcagactaatacagaagaggctacaacac

SEQ ID NO: 586566 - DNA, 33 bp, Homo sapien
gagatcagactaatacggaagaggctacaacac

SEQ ID NO: 586567 - DNA, 33 bp, Homo sapien
cacagaactacatctgcataatctccatagcac

SEQ ID NO: 586568 - DNA, 33 bp, Homo sapien
cacagaactacatctggataatctccatagcac

SEQ ID NO: 586569 - DNA, 33 bp, Homo sapien
atgacaaaatatcgaacgcatcaataaaatccc

SEQ ID NO: 586570 - DNA, 33 bp, Homo sapien
atgacaaaatatcgaatgcatcaataaaatccc

SEQ ID NO: 586571 - DNA, 33 bp, Homo sapien
agcacacttgccacaaatagaacacattatttt

SEQ ID NO: 586572 - DNA, 33 bp, Homo sapien
agcacacttgccacaagtagaacacattatttt

SEQ ID NO: 586573 - DNA, 33 bp, Homo sapien
agtcttccttttgagagagttacactttgttct

SEQ ID NO: 586574 - DNA, 33 bp, Homo sapien
agtcttccttttgagatagttacactttgttct

SEQ ID NO: 586575 - DNA, 33 bp, Homo sapien
atgaattgcctgtaacaattaccacttgaaaat

SEQ ID NO: 586576 - DNA, 33 bp, Homo sapien
atgaattgcctgtaactattaccacttgaaaat

SEQ ID NO: 586577 - DNA, 33 bp, Homo sapien
gagttaaaatgatgtgaaaggaactgttcaatg

SEQ ID NO: 586578 - DNA, 33 bp, Homo sapien
gagttaaaatgatgtgcaaggaactgttcaatg

SEQ ID NO: 586579 - DNA, 33 bp, Homo sapien
acgacacactacatcacgaagcttttctaaatg

SEQ ID NO: 586580 - DNA, 33 bp, Homo sapien
acgacacactacatcatgaagcttttctaaatg

SEQ ID NO: 586581 - DNA, 33 bp, Homo sapien
gaatccagaggataagaaatccatgatgtagca

SEQ ID NO: 586582 - DNA, 33 bp, Homo sapien
gaatccagaggataaggaatccatgatgtagca

SEQ ID NO: 586583 - DNA, 33 bp, Homo sapien
tgtgtgtgtaggcatgacagacaaggttatagt

SEQ ID NO: 586584 - DNA, 33 bp, Homo sapien
tgtgtgtgtaggcatggcagacaaggttatagt

SEQ ID NO: 586585 - DNA, 33 bp, Homo sapien
ttgtattcaactgggacggggcaaccgacgacc

SEQ ID NO: 586586 - DNA, 33 bp, Homo sapien
ttgtattcaactgggagggggcaaccgacgacc

SEQ ID NO: 586587 - DNA, 33 bp, Homo sapien
atctcaggaaatcaaccgttaagcctcaagttc

SEQ ID NO: 586588 - DNA, 33 bp, Homo sapien
atctcaggaaatcaactgttaagcctcaagttc

SEQ ID NO: 586589 - DNA, 33 bp, Homo sapien
tagaaatgttggagcaaggccaagatggccacc

SEQ ID NO: 586590 - DNA, 33 bp, Homo sapien
tagaaatgttggagcagggccaagatggccacc

SEQ ID NO: 586591 - DNA, 33 bp, Homo sapien
aaagacttcccagcacagtcaaagtagagggaa

SEQ ID NO: 586592 - DNA, 33 bp, Homo sapien
aaagacttcccagcacggtcaaagtagagggaa

SEQ ID NO: 586593 - DNA, 33 bp, Homo sapien
agcttagaatgctgaaaggttcataactagctt

SEQ ID NO: 586594 - DNA, 33 bp, Homo sapien
agcttagaatgctgaagggttcataactagctt

SEQ ID NO: 586595 - DNA, 33 bp, Homo sapien
tcacgtggctaatgggccatgagaggaagtgac

SEQ ID NO: 586596 - DNA, 33 bp, Homo sapien
tcacgtggctaatggggcatgagaggaagtgac

SEQ ID NO: 586597 - DNA, 33 bp, Homo sapien
gaccccagggattctacgattacaatgagggag

SEQ ID NO: 586598 - DNA, 33 bp, Homo sapien
gaccccagggattctatgattacaatgagggag

SEQ ID NO: 586599 - DNA, 33 bp, Homo sapien
cttaaacataattcaagctacttcccacaatgt

SEQ ID NO: 586600 - DNA, 33 bp, Homo sapien
cttaaacataattcaatctacttcccacaatgt

SEQ ID NO: 586601 - DNA, 33 bp, Homo sapien
gcccaggagattcaacagtaccataatttactc

SEQ ID NO: 586602 - DNA, 33 bp, Homo sapien
gcccaggagattcaacggtaccataatttactc

SEQ ID NO: 586603 - DNA, 33 bp, Homo sapien
ttaatgttctagatgaaatgttaccagtaaaat

SEQ ID NO: 586604 - DNA, 33 bp, Homo sapien
ttaatgttctagatgagatgttaccagtaaaat

SEQ ID NO: 586605 - DNA, 33 bp, Homo sapien
gcttaattgcttacaaattaatgattcataata

SEQ ID NO: 586606 - DNA, 33 bp, Homo sapien
gcttaattgcttacaatttaatgattcataata

SEQ ID NO: 586607 - DNA, 33 bp, Homo sapien
tctgcaaaggaagacacctaaattgatatgctt

SEQ ID NO: 586608 - DNA, 33 bp, Homo sapien
tctgcaaaggaagacatctaaattgatatgctt

SEQ ID NO: 586609 - DNA, 33 bp, Homo sapien
acaagctggtatgagcaaatctgaaataaacaa

SEQ ID NO: 586610 - DNA, 33 bp, Homo sapien
acaagctggtatgagcgaatctgaaataaacaa

SEQ ID NO: 586611 - DNA, 33 bp, Homo sapien
gcaaactctgcaactaagaaaaggagacagaac

SEQ ID NO: 586612 - DNA, 33 bp, Homo sapien
gcaaactctgcaactaggaaaaggagacagaac

SEQ ID NO: 586613 - DNA, 33 bp, Homo sapien
gtgtcttgccaaatacccaattctcaaccattt

SEQ ID NO: 586614 - DNA, 33 bp, Homo sapien
gtgtcttgccaaatacgcaattctcaaccattt

SEQ ID NO: 586615 - DNA, 33 bp, Homo sapien
cagtttcagatttcaaattcaataaatccatta

SEQ ID NO: 586616 - DNA, 33 bp, Homo sapien
cagtttcagatttcaagttcaataaatccatta

SEQ ID NO: 586617 - DNA, 33 bp, Homo sapien
atctccaagaatcttcactatcaattatcaggt

SEQ ID NO: 586618 - DNA, 33 bp, Homo sapien
atctccaagaatcttccctatcaattatcaggt

SEQ ID NO: 586619 - DNA, 33 bp, Homo sapien
tacccagtctcaagtaagtccgtttagcaatgt

SEQ ID NO: 586620 - DNA, 33 bp, Homo sapien
tacccagtctcaagtatgtccgtttagcaatgt

SEQ ID NO: 586621 - DNA, 33 bp, Homo sapien
tagtctcaaggaagacaataacctaagtgtttt

SEQ ID NO: 586622 - DNA, 33 bp, Homo sapien
tagtctcaaggaagaccataacctaagtgtttt

SEQ ID NO: 586623 - DNA, 33 bp, Homo sapien
ttgagactacaaaactcaccatgtttcccctgc

SEQ ID NO: 586624 - DNA, 33 bp, Homo sapien
ttgagactacaaaactgaccatgtttcccctgc

SEQ ID NO: 586625 - DNA, 33 bp, Homo sapien
gtgttccatgaggggaagctttttgaggatcat

SEQ ID NO: 586626 - DNA, 33 bp, Homo sapien
gtgttccatgaggggacgctttttgaggatcat

SEQ ID NO: 586627 - DNA, 33 bp, Homo sapien
gatgagtctaccttgcactacaaagtctgtcat

SEQ ID NO: 586628 - DNA, 33 bp, Homo sapien
gatgagtctaccttgcgctacaaagtctgtcat

SEQ ID NO: 586629 - DNA, 33 bp, Homo sapien
gagagccaagagacaagctgtgcatatattaag

SEQ ID NO: 586630 - DNA, 33 bp, Homo sapien
gagagccaagagacaatctgtgcatatattaag

SEQ ID NO: 586631 - DNA, 33 bp, Homo sapien
aaccagaagcactaaaatccaagggcaaaagag

SEQ ID NO: 586632 - DNA, 33 bp, Homo sapien
aaccagaagcactaaagtccaagggcaaaagag

SEQ ID NO: 586633 - DNA, 33 bp, Homo sapien
tgtcatcattttctcaatctgatgttctacata

SEQ ID NO: 586634 - DNA, 33 bp, Homo sapien
tgtcatcattttctcattctgatgttctacata

SEQ ID NO: 586635 - DNA, 33 bp, Homo sapien
gaaatgagagcctatgaaaatatatgcctacat

SEQ ID NO: 586636 - DNA, 33 bp, Homo sapien
gaaatgagagcctatggaaatatatgcctacat

SEQ ID NO: 586637 - DNA, 33 bp, Homo sapien
tgtgaataaactagaaaatagcaaagggagaat

SEQ ID NO: 586638 - DNA, 33 bp, Homo sapien
tgtgaataaactagaagatagcaaagggagaat

SEQ ID NO: 586639 - DNA, 33 bp, Homo sapien
atcaagaatacagtccccttcacaatagctaaa

SEQ ID NO: 586640 - DNA, 33 bp, Homo sapien
atcaagaatacagtccgcttcacaatagctaaa

SEQ ID NO: 586641 - DNA, 33 bp, Homo sapien
tactcagattagacaaacacctctttatctgct

SEQ ID NO: 586642 - DNA, 33 bp, Homo sapien
tactcagattagacaagcacctctttatctgct

SEQ ID NO: 586643 - DNA, 33 bp, Homo sapien
gttcctgcactagttcacgcaggataatggcct

SEQ ID NO: 586644 - DNA, 33 bp, Homo sapien
gttcctgcactagttcgcgcaggataatggcct

SEQ ID NO: 586645 - DNA, 33 bp, Homo sapien
cctaccaaaacaggataagaggtatgacacatc

SEQ ID NO: 586646 - DNA, 33 bp, Homo sapien
cctaccaaaacaggatgagaggtatgacacatc

SEQ ID NO: 586647 - DNA, 33 bp, Homo sapien
cccttaaggaagaaagaccaatggtagttattg

SEQ ID NO: 586648 - DNA, 33 bp, Homo sapien
cccttaaggaagaaagtccaatggtagttattg

SEQ ID NO: 586649 - DNA, 33 bp, Homo sapien
cagagcagggatttacacttgcttttgtggagg

SEQ ID NO: 586650 - DNA, 33 bp, Homo sapien
cagagcagggatttacgcttgcttttgtggagg

SEQ ID NO: 586651 - DNA, 33 bp, Homo sapien
agtggctgcactacacacacataggattggcca

SEQ ID NO: 586652 - DNA, 33 bp, Homo sapien
agtggctgcactacacgcacataggattggcca

SEQ ID NO: 586653 - DNA, 33 bp, Homo sapien
atcactgtgaagaatacgaatgtacaatatcca

SEQ ID NO: 586654 - DNA, 33 bp, Homo sapien
atcactgtgaagaatatgaatgtacaatatcca

SEQ ID NO: 586655 - DNA, 33 bp, Homo sapien
acattgggttacttacagatgataacagcaaga

SEQ ID NO: 586656 - DNA, 33 bp, Homo sapien
acattgggttacttacggatgataacagcaaga

SEQ ID NO: 586657 - DNA, 33 bp, Homo sapien
gctggccttggagttacatggcttgcccacgag

SEQ ID NO: 586658 - DNA, 33 bp, Homo sapien
gctggccttggagttatatggcttgcccacgag

SEQ ID NO: 586659 - DNA, 33 bp, Homo sapien
taagaaacttgatttccaaggaagattttttcc

SEQ ID NO: 586660 - DNA, 33 bp, Homo sapien
taagaaacttgatttctaaggaagattttttcc

SEQ ID NO: 586661 - DNA, 33 bp, Homo sapien
gttaagtactcgataacaggaagataattttgg

SEQ ID NO: 586662 - DNA, 33 bp, Homo sapien
gttaagtactcgataataggaagataattttgg

SEQ ID NO: 586663 - DNA, 33 bp, Homo sapien
gtcagtaagattcaaaagtggtgcctgaattct

SEQ ID NO: 586664 - DNA, 33 bp, Homo sapien
gtcagtaagattcaaatgtggtgcctgaattct

SEQ ID NO: 586665 - DNA, 33 bp, Homo sapien
tgtttcacttgtttcactcgtttcactatttag

SEQ ID NO: 586666 - DNA, 33 bp, Homo sapien
tgtttcacttgtttcattcgtttcactatttag

SEQ ID NO: 586667 - DNA, 33 bp, Homo sapien
gcccagactatttttaagctaattctccaaaac

SEQ ID NO: 586668 - DNA, 33 bp, Homo sapien
gcccagactatttttaggctaattctccaaaac

SEQ ID NO: 586669 - DNA, 33 bp, Homo sapien
tggaactttgccttaaccagaatacaagcctgg

SEQ ID NO: 586670 - DNA, 33 bp, Homo sapien
tggaactttgccttaatcagaatacaagcctgg

SEQ ID NO: 586671 - DNA, 33 bp, Homo sapien
aaactgtaaggcaaagaattaaagtttgggaag

SEQ ID NO: 586672 - DNA, 33 bp, Homo sapien
aaactgtaaggcaaaggattaaagtttgggaag

SEQ ID NO: 586673 - DNA, 33 bp, Homo sapien
gtacttattatggggaaaaggcattacatagag

SEQ ID NO: 586674 - DNA, 33 bp, Homo sapien
gtacttattatggggagaaggcattacatagag

SEQ ID NO: 586675 - DNA, 33 bp, Homo sapien
ttcccacactccagataatctagaactcagagt

SEQ ID NO: 586676 - DNA, 33 bp, Homo sapien
ttcccacactccagatcatctagaactcagagt

SEQ ID NO: 586677 - DNA, 33 bp, Homo sapien
gtgcttttccacactgaaatggtgagggataca

SEQ ID NO: 586678 - DNA, 33 bp, Homo sapien
gtgcttttccacactggaatggtgagggataca

SEQ ID NO: 586679 - DNA, 33 bp, Homo sapien
agaatgcggaaatggaggtagggatgcctattt

SEQ ID NO: 586680 - DNA, 33 bp, Homo sapien
agaatgcggaaatggatgtagggatgcctattt

SEQ ID NO: 586681 - DNA, 33 bp, Homo sapien
cttgatataataatgacatttacagtgagaaga

SEQ ID NO: 586682 - DNA, 33 bp, Homo sapien
cttgatataataatgatatttacagtgagaaga

SEQ ID NO: 586683 - DNA, 33 bp, Homo sapien
agtgtcacaaacttaaccgcttacaacaacaca

SEQ ID NO: 586684 - DNA, 33 bp, Homo sapien
agtgtcacaaacttaatcgcttacaacaacaca

SEQ ID NO: 586685 - DNA, 33 bp, Homo sapien
gaaatctcaatttctggcaagctttcaaagcta

SEQ ID NO: 586686 - DNA, 33 bp, Homo sapien
gaaatctcaatttctgtcaagctttcaaagcta

SEQ ID NO: 586687 - DNA, 33 bp, Homo sapien
gggatttcctgttaaccgcatgacaaattgtgc

SEQ ID NO: 586688 - DNA, 33 bp, Homo sapien
gggatttcctgttaactgcatgacaaattgtgc

SEQ ID NO: 586689 - DNA, 33 bp, Homo sapien
catttcgctccagaaaatttccgtgaaactaag

SEQ ID NO: 586690 - DNA, 33 bp, Homo sapien
catttcgctccagaaactttccgtgaaactaag

SEQ ID NO: 586691 - DNA, 33 bp, Homo sapien
tgtgtcagtaactcaacgggtgagcccaagtac

SEQ ID NO: 586692 - DNA, 33 bp, Homo sapien
tgtgtcagtaactcaaggggtgagcccaagtac

SEQ ID NO: 586693 - DNA, 33 bp, Homo sapien
ttcctggttctcataaaagctctcaagttgcag

SEQ ID NO: 586694 - DNA, 33 bp, Homo sapien
ttcctggttctcataacagctctcaagttgcag

SEQ ID NO: 586695 - DNA, 33 bp, Homo sapien
ggtcctttttccagcactaagccattttgcttg

SEQ ID NO: 586696 - DNA, 33 bp, Homo sapien
ggtcctttttccagcattaagccattttgcttg

SEQ ID NO: 586697 - DNA, 33 bp, Homo sapien
aggattgtggtgatgactacttgggcaaaaatc

SEQ ID NO: 586698 - DNA, 33 bp, Homo sapien
aggattgtggtgatgagtacttgggcaaaaatc

SEQ ID NO: 586699 - DNA, 33 bp, Homo sapien
gataagatcatctatacagcctaacaaccatct

SEQ ID NO: 586700 - DNA, 33 bp, Homo sapien
gataagatcatctatatagcctaacaaccatct

SEQ ID NO: 586701 - DNA, 33 bp, Homo sapien
gtggaagattttgcaacggataaaggagattat

SEQ ID NO: 586702 - DNA, 33 bp, Homo sapien
gtggaagattttgcaatggataaaggagattat

SEQ ID NO: 586703 - DNA, 33 bp, Homo sapien
agtatgtacaccattaagtactttgctgtcttc

SEQ ID NO: 586704 - DNA, 33 bp, Homo sapien
agtatgtacaccattaggtactttgctgtcttc

SEQ ID NO: 586705 - DNA, 33 bp, Homo sapien
attgaccacaccctcaccccaagtcaaatcact

SEQ ID NO: 586706 - DNA, 33 bp, Homo sapien
attgaccacaccctcatcccaagtcaaatcact

SEQ ID NO: 586707 - DNA, 33 bp, Homo sapien
agtggctgagcaagaacggatcacatggatcag

SEQ ID NO: 586708 - DNA, 33 bp, Homo sapien
agtggctgagcaagaatggatcacatggatcag

SEQ ID NO: 586709 - DNA, 33 bp, Homo sapien
atatctcttctcttccaagagtatgccagaggt

SEQ ID NO: 586710 - DNA, 33 bp, Homo sapien
atatctcttctcttcccagagtatgccagaggt

SEQ ID NO: 586711 - DNA, 33 bp, Homo sapien
ctatgtagaggataaaaccaaaatctgcagaca

SEQ ID NO: 586712 - DNA, 33 bp, Homo sapien
ctatgtagaggataaagccaaaatctgcagaca

SEQ ID NO: 586713 - DNA, 33 bp, Homo sapien
tacgtgttttctcaacaaagtaaattatgcttt

SEQ ID NO: 586714 - DNA, 33 bp, Homo sapien
tacgtgttttctcaacgaagtaaattatgcttt

SEQ ID NO: 586715 - DNA, 33 bp, Homo sapien
tgcatttacctcccacggcatcccacaacacac

SEQ ID NO: 586716 - DNA, 33 bp, Homo sapien
tgcatttacctcccactgcatcccacaacacac

SEQ ID NO: 586717 - DNA, 33 bp, Homo sapien
gactagaggtcgttaccaagcccttcagaagta

SEQ ID NO: 586718 - DNA, 33 bp, Homo sapien
gactagaggtcgttactaagcccttcagaagta

SEQ ID NO: 586719 - DNA, 33 bp, Homo sapien
acttgggcaattacaacggttagtagctcagaa

SEQ ID NO: 586720 - DNA, 33 bp, Homo sapien
acttgggcaattacaatggttagtagctcagaa

SEQ ID NO: 586721 - DNA, 33 bp, Homo sapien
atgaggaattggctcaaacgattataaggctga

SEQ ID NO: 586722 - DNA, 33 bp, Homo sapien
atgaggaattggctcagacgattataaggctga

SEQ ID NO: 586723 - DNA, 33 bp, Homo sapien
gacgctaagaaagagacgacttatgttcttctg

SEQ ID NO: 586724 - DNA, 33 bp, Homo sapien
gacgctaagaaagagatgacttatgttcttctg

SEQ ID NO: 586725 - DNA, 33 bp, Homo sapien; identical to SEQ ID NO: 586723

SEQ ID NO: 586726 - DNA, 33 bp, Homo sapien; identical to SEQ ID NO: 586724

SEQ ID NO: 586727 - DNA, 33 bp, Homo sapien
ctgactgtcctaggaaacctcggatagtgacag

SEQ ID NO: 586728 - DNA, 33 bp, Homo sapien
ctgactgtcctaggaaccctcggatagtgacag

SEQ ID NO: 586729 - DNA, 33 bp, Homo sapien
tttcgcattgctcttgcatatcaacttcagaaa

SEQ ID NO: 586730 - DNA, 33 bp, Homo sapien
tttcgcattgctcttgtatatcaacttcagaaa

SEQ ID NO: 586731 - DNA, 33 bp, Homo sapien
tgactaaacatttttccatcaatgccacaaatg

SEQ ID NO: 586732 - DNA, 33 bp, Homo sapien
tgactaaacatttttctatcaatgccacaaatg

SEQ ID NO: 586733 - DNA, 33 bp, Homo sapien
agagaccaaggtggaaactaccagcccacttat

SEQ ID NO: 586734 - DNA, 33 bp, Homo sapien
agagaccaaggtggaagctaccagcccacttat

SEQ ID NO: 586735 - DNA, 33 bp, Homo sapien
taacaaacttggatacgcaaaagacttgctcac

SEQ ID NO: 586736 - DNA, 33 bp, Homo sapien
taacaaacttggatactcaaaagacttgctcac

SEQ ID NO: 586737 - DNA, 33 bp, Homo sapien
tccttcagcaggtgaacgaataaataagctgtg

SEQ ID NO: 586738 - DNA, 33 bp, Homo sapien
tccttcagcaggtgaatgaataaataagctgtg

SEQ ID NO: 586739 - DNA, 33 bp, Homo sapien
ctgcacaacaatccacaatggataaatcatcaa

SEQ ID NO: 586740 - DNA, 33 bp, Homo sapien
ctgcacaacaatccacgatggataaatcatcaa

SEQ ID NO: 586741 - DNA, 33 bp, Homo sapien
tgctgctactattctactacacacatacacaca

SEQ ID NO: 586742 - DNA, 33 bp, Homo sapien
tgctgctactattctattacacacatacacaca

SEQ ID NO: 586743 - DNA, 33 bp, Homo sapien
aactagaaatttgtaactggtcagcattatata

SEQ ID NO: 586744 - DNA, 33 bp, Homo sapien
aactagaaatttgtaattggtcagcattatata

SEQ ID NO: 586745 - DNA, 33 bp, Homo sapien
ctgcagataagaagtcgcagtattgtaattaac

SEQ ID NO: 586746 - DNA, 33 bp, Homo sapien
ctgcagataagaagtctcagtattgtaattaac

SEQ ID NO: 586747 - DNA, 33 bp, Homo sapien
aagcgatcaagtataaaataagcaaactgcaga

SEQ ID NO: 586748 - DNA, 33 bp, Homo sapien
aagcgatcaagtataagataagcaaactgcaga

SEQ ID NO: 586749 - DNA, 33 bp, Homo sapien
ttagccaaaaggctgaaaagcgatcaagtataa

SEQ ID NO: 586750 - DNA, 33 bp, Homo sapien
ttagccaaaaggctgagaagcgatcaagtataa

SEQ ID NO: 586751 - DNA, 33 bp, Homo sapien
cttcttacaaagtggccaagggttctaagaata

SEQ ID NO: 586752 - DNA, 33 bp, Homo sapien
cttcttacaaagtggctaagggttctaagaata

SEQ ID NO: 586753 - DNA, 33 bp, Homo sapien
atgttaggcctataagaagaatgaacaagatta

SEQ ID NO: 586754 - DNA, 33 bp, Homo sapien
atgttaggcctataagcagaatgaacaagatta

SEQ ID NO: 586755 - DNA, 33 bp, Homo sapien
ggagtttgttggaatcagattcatccttagatc

SEQ ID NO: 586756 - DNA, 33 bp, Homo sapien
ggagtttgttggaatcggattcatccttagatc

SEQ ID NO: 586757 - DNA, 33 bp, Homo sapien
cagagacatcatcaaccatttcctgaacccttt

SEQ ID NO: 586758 - DNA, 33 bp, Homo sapien
cagagacatcatcaactatttcctgaacccttt

SEQ ID NO: 586759 - DNA, 33 bp, Homo sapien
tattgaggtgctaacacctttcgtgaccgactg

SEQ ID NO: 586760 - DNA, 33 bp, Homo sapien
tattgaggtgctaacatctttcgtgaccgactg

SEQ ID NO: 586761 - DNA, 33 bp, Homo sapien
ttgtgacttggaaaaaatagtgttaatgtgatg

SEQ ID NO: 586762 - DNA, 33 bp, Homo sapien
ttgtgacttggaaaaattagtgttaatgtgatg

SEQ ID NO: 586763 - DNA, 33 bp, Homo sapien
ttaatgtgatgtaaaaaacctattatcataggc

SEQ ID NO: 586764 - DNA, 33 bp, Homo sapien
ttaatgtgatgtaaaagacctattatcataggc

SEQ ID NO: 586765 - DNA, 33 bp, Homo sapien
ctggaggattcagcaccgatgcagtcgtggtga

SEQ ID NO: 586766 - DNA, 33 bp, Homo sapien
ctggaggattcagcactgatgcagtcgtggtga

SEQ ID NO: 586767 - DNA, 33 bp, Homo sapien
ctgtgaggaatgctagaatggaaatgctaatta

SEQ ID NO: 586768 - DNA, 33 bp, Homo sapien
ctgtgaggaatgctaggatggaaatgctaatta

SEQ ID NO: 586769 - DNA, 33 bp, Homo sapien
tcattcacatgctaaaaatccaagtgtgtttcc

SEQ ID NO: 586770 - DNA, 33 bp, Homo sapien
tcattcacatgctaaagatccaagtgtgtttcc

SEQ ID NO: 586771 - DNA, 33 bp, Homo sapien
tacatttacggtagccaccatctggggaggtga

SEQ ID NO: 586772 - DNA, 33 bp, Homo sapien
tacatttacggtagcctccatctggggaggtga

SEQ ID NO: 586773 - DNA, 33 bp, Homo sapien
catgtttttgaagtgcaagaaagtgcattctgg

SEQ ID NO: 586774 - DNA, 33 bp, Homo sapien
catgtttttgaagtgcgagaaagtgcattctgg

SEQ ID NO: 586775 - DNA, 33 bp, Homo sapien
gctttagactcttgcaaaattgataaaggagga

SEQ ID NO: 586776 - DNA, 33 bp, Homo sapien
gctttagactcttgcagaattgataaaggagga

SEQ ID NO: 586777 - DNA, 33 bp, Homo sapien
gacggaattactgtacagcctacattcagtgcc

SEQ ID NO: 586778 - DNA, 33 bp, Homo sapien
gacggaattactgtacggcctacattcagtgcc

SEQ ID NO: 586779 - DNA, 33 bp, Homo sapien
aagagggccatctaccactcctgcagtctcatg

SEQ ID NO: 586780 - DNA, 33 bp, Homo sapien
aagagggccatctaccgctcctgcagtctcatg

SEQ ID NO: 586781 - DNA, 33 bp, Homo sapien
attcagtgaaaatataactgtatctgtgacaaa

SEQ ID NO: 586782 - DNA, 33 bp, Homo sapien
attcagtgaaaatatacctgtatctgtgacaaa

SEQ ID NO: 586783 - DNA, 33 bp, Homo sapien
aagacataatttacaacggtccgtagaaaccaa

SEQ ID NO: 586784 - DNA, 33 bp, Homo sapien
aagacataatttacaatggtccgtagaaaccaa

SEQ ID NO: 586785 - DNA, 33 bp, Homo sapien
gagctaaagtaacttacgactgctccggggaaa

SEQ ID NO: 586786 - DNA, 33 bp, Homo sapien
gagctaaagtaacttatgactgctccggggaaa

SEQ ID NO: 586787 - DNA, 33 bp, Homo sapien
attcatcgtagtctgaaatttgatctggatctt

SEQ ID NO: 586788 - DNA, 33 bp, Homo sapien
attcatcgtagtctgatatttgatctggatctt

SEQ ID NO: 586789 - DNA, 33 bp, Homo sapien
ggcgtggcattccttcaaacacctttagtggaa

SEQ ID NO: 586790 - DNA, 33 bp, Homo sapien
ggcgtggcattccttccaacacctttagtggaa

SEQ ID NO: 586791 - DNA, 33 bp, Homo sapien
aattcacaatattgccccagtaaaacagaattc

SEQ ID NO: 586792 - DNA, 33 bp, Homo sapien
aattcacaatattgccgcagtaaaacagaattc

SEQ ID NO: 586793 - DNA, 33 bp, Homo sapien
ctagtcctaaatgagcccaatttttgctaaatt

SEQ ID NO: 586794 - DNA, 33 bp, Homo sapien
ctagtcctaaatgagctcaatttttgctaaatt

SEQ ID NO: 586795 - DNA, 33 bp, Homo sapien
ttaattggaactgttaggccaacctttacgatg

SEQ ID NO: 586796 - DNA, 33 bp, Homo sapien
ttaattggaactgttatgccaacctttacgatg

SEQ ID NO: 586797 - DNA, 33 bp, Homo sapien
tttcaacaatctgtaaccattgtgtaattatct

SEQ ID NO: 586798 - DNA, 33 bp, Homo sapien
tttcaacaatctgtaatcattgtgtaattatct

SEQ ID NO: 586799 - DNA, 33 bp, Homo sapien
ctggatactggataccaagcctgacaagtcaga

SEQ ID NO: 586800 - DNA, 33 bp, Homo sapien
ctggatactggataccgagcctgacaagtcaga

SEQ ID NO: 586801 - DNA, 33 bp, Homo sapien
aagcgtgtatgtatgcccttagctacctgcttt

SEQ ID NO: 586802 - DNA, 33 bp, Homo sapien
aagcgtgtatgtatgctcttagctacctgcttt

SEQ ID NO: 586803 - DNA, 33 bp, Homo sapien
accccaatacagagaaccagctttttgtatcca

SEQ ID NO: 586804 - DNA, 33 bp, Homo sapien
accccaatacagagaagcagctttttgtatcca

SEQ ID NO: 586805 - DNA, 33 bp, Homo sapien
gagttaacaacagacacgtgaaaattttggttt

SEQ ID NO: 586806 - DNA, 33 bp, Homo sapien
gagttaacaacagacaggtgaaaattttggttt

SEQ ID NO: 586807 - DNA, 33 bp, Homo sapien
gtcttatctctttagcagcgcatggttctcaca

SEQ ID NO: 586808 - DNA, 33 bp, Homo sapien
gtcttatctctttagcggcgcatggttctcaca

SEQ ID NO: 586809 - DNA, 33 bp, Homo sapien
gcattagctatgaagaagaataacacaaaaacc

SEQ ID NO: 586810 - DNA, 33 bp, Homo sapien
gcattagctatgaagacgaataacacaaaaacc

SEQ ID NO: 586811 - DNA, 33 bp, Homo sapien
ttttttccatgaaaccagacctgtaatttattt

SEQ ID NO: 586812 - DNA, 33 bp, Homo sapien
ttttttccatgaaaccggacctgtaatttattt

SEQ ID NO: 586813 - DNA, 33 bp, Homo sapien
gaaggcaaagactacaataagctgataggaaca

SEQ ID NO: 586814 - DNA, 33 bp, Homo sapien
gaaggcaaagactacagtaagctgataggaaca

SEQ ID NO: 586815 - DNA, 33 bp, Homo sapien
tttctgcagggaggcaatcataaaacaggatga

SEQ ID NO: 586816 - DNA, 33 bp, Homo sapien
tttctgcagggaggcagtcataaaacaggatga

SEQ ID NO: 586817 - DNA, 33 bp, Homo sapien
gttaactcttcatttcacacgaactatatttgt

SEQ ID NO: 586818 - DNA, 33 bp, Homo sapien
gttaactcttcatttcccacgaactatatttgt

SEQ ID NO: 586819 - DNA, 33 bp, Homo sapien
ggaagtgttgtgtgtaccttctggaacaagtca

SEQ ID NO: 586820 - DNA, 33 bp, Homo sapien
ggaagtgttgtgtgtatcttctggaacaagtca

SEQ ID NO: 586821 - DNA, 33 bp, Homo sapien
aaagtctgttgatcagaaggagacacagtcctg

SEQ ID NO: 586822 - DNA, 33 bp, Homo sapien
aaagtctgttgatcagcaggagacacagtcctg

SEQ ID NO: 586823 - DNA, 33 bp, Homo sapien
ccaagcttgttggtgacatacagctactacttg

SEQ ID NO: 586824 - DNA, 33 bp, Homo sapien
ccaagcttgttggtgagatacagctactacttg

SEQ ID NO: 586825 - DNA, 33 bp, Homo sapien
ttgtttcagaacttcaaagagaggcaaaaagca

SEQ ID NO: 586826 - DNA, 33 bp, Homo sapien
ttgtttcagaacttcagagagaggcaaaaagca

SEQ ID NO: 586827 - DNA, 33 bp, Homo sapien
agaaaatggtttagtccgaaggcttgagattta

SEQ ID NO: 586828 - DNA, 33 bp, Homo sapien
agaaaatggtttagtctgaaggcttgagattta

SEQ ID NO: 586829 - DNA, 33 bp, Homo sapien
ttctatagttacatcccccattttgtcattttt

SEQ ID NO: 586830 - DNA, 33 bp, Homo sapien
ttctatagttacatcctccattttgtcattttt

SEQ ID NO: 586831 - DNA, 33 bp, Homo sapien
catacataaaattggaatcaccacaagagaaga

SEQ ID NO: 586832 - DNA, 33 bp, Homo sapien
catacataaaattggagtcaccacaagagaaga

SEQ ID NO: 586833 - DNA, 33 bp, Homo sapien
catcctctaatactacaatgaaaatctgataac

SEQ ID NO: 586834 - DNA, 33 bp, Homo sapien
catcctctaatactaccatgaaaatctgataac

SEQ ID NO: 586835 - DNA, 33 bp, Homo sapien
gggctagcatatggcactgattttgacttgggt

SEQ ID NO: 586836 - DNA, 33 bp, Homo sapien
gggctagcatatggcattgattttgacttgggt

SEQ ID NO: 586837 - DNA, 33 bp, Homo sapien
tttatgatatttttaccggggcaatgttgagat

SEQ ID NO: 586838 - DNA, 33 bp, Homo sapien
tttatgatatttttactggggcaatgttgagat

SEQ ID NO: 586839 - DNA, 33 bp, Homo sapien
tgccacaaaacgattgcaaactctgttcacggg

SEQ ID NO: 586840 - DNA, 33 bp, Homo sapien
tgccacaaaacgattgtaaactctgttcacggg

SEQ ID NO: 586841 - DNA, 33 bp, Homo sapien
aattaaagtctacacagggaatggcaagaccac

SEQ ID NO: 586842 - DNA, 33 bp, Homo sapien
aattaaagtctacacatggaatggcaagaccac

SEQ ID NO: 586843 - DNA, 33 bp, Homo sapien
acttactcttgtcagacgcattcaaaccagagt

SEQ ID NO: 586844 - DNA, 33 bp, Homo sapien
acttactcttgtcagaggcattcaaaccagagt

SEQ ID NO: 586845 - DNA, 33 bp, Homo sapien
ttgtgatcatttggaggagaagaggtcctctgg

SEQ ID NO: 586846 - DNA, 33 bp, Homo sapien
ttgtgatcatttggagtagaagaggtcctctgg

SEQ ID NO: 586847 - DNA, 33 bp, Homo sapien
ttcctgaccatccagaaaaaccattgactacag

SEQ ID NO: 586848 - DNA, 33 bp, Homo sapien
ttcctgaccatccagacaaaccattgactacag

SEQ ID NO: 586849 - DNA, 33 bp, Homo sapien
aggtgaatgatgaagcaaaaaagatatctgtct

SEQ ID NO: 586850 - DNA, 33 bp, Homo sapien
aggtgaatgatgaagcgaaaaagatatctgtct

SEQ ID NO: 586851 - DNA, 33 bp, Homo sapien
tcactgccagagaaaagtcactgtacttgaaaa

SEQ ID NO: 586852 - DNA, 33 bp, Homo sapien
tcactgccagagaaaattcactgtacttgaaaa

SEQ ID NO: 586853 - DNA, 33 bp, Homo sapien
aatggtaaacaggatacggaatgtggataaatg

SEQ ID NO: 586854 - DNA, 33 bp, Homo sapien
aatggtaaacaggatatggaatgtggataaatg

SEQ ID NO: 586855 - DNA, 33 bp, Homo sapien
atcaccctgttagttccaaaccatttatccaca

SEQ ID NO: 586856 - DNA, 33 bp, Homo sapien
atcaccctgttagttctaaaccatttatccaca

SEQ ID NO: 586857 - DNA, 33 bp, Homo sapien
tcagaatcttcagtaccggattgccttgggcat

SEQ ID NO: 586858 - DNA, 33 bp, Homo sapien
tcagaatcttcagtacgggattgccttgggcat

SEQ ID NO: 586859 - DNA, 33 bp, Homo sapien
ctgaagattctgaagccgcctgaatccctaaga

SEQ ID NO: 586860 - DNA, 33 bp, Homo sapien
ctgaagattctgaagctgcctgaatccctaaga

SEQ ID NO: 586861 - DNA, 33 bp, Homo sapien
gcttctgttctgttcacgctcttagggattcag

SEQ ID NO: 586862 - DNA, 33 bp, Homo sapien
gcttctgttctgttcatgctcttagggattcag

SEQ ID NO: 586863 - DNA, 33 bp, Homo sapien
ccctaagctgtatagacgtggttatatgcagca

SEQ ID NO: 586864 - DNA, 33 bp, Homo sapien
ccctaagctgtatagatgtggttatatgcagca

SEQ ID NO: 586865 - DNA, 33 bp, Homo sapien
ataaaaacctaaaatacatggcagtggcttggc

SEQ ID NO: 586866 - DNA, 33 bp, Homo sapien
ataaaaacctaaaatatatggcagtggcttggc

SEQ ID NO: 586867 - DNA, 33 bp, Homo sapien
tactctaggctaggaacgcacttttgtttttct

SEQ ID NO: 586868 - DNA, 33 bp, Homo sapien
tactctaggctaggaatgcacttttgtttttct

SEQ ID NO: 586869 - DNA, 33 bp, Homo sapien
tcattgttcctctggccactttttacatttatt

SEQ ID NO: 586870 - DNA, 33 bp, Homo sapien
tcattgttcctctggctactttttacatttatt

SEQ ID NO: 586871 - DNA, 33 bp, Homo sapien
ttacacagatgttagaccttattaatgttccag

SEQ ID NO: 586872 - DNA, 33 bp, Homo sapien
ttacacagatgttagagcttattaatgttccag

SEQ ID NO: 586873 - DNA, 33 bp, Homo sapien
actaaaatatgcaacaaaacatgaaaaaggtac

SEQ ID NO: 586874 - DNA, 33 bp, Homo sapien
actaaaatatgcaacagaacatgaaaaaggtac

SEQ ID NO: 586875 - DNA, 33 bp, Homo sapien
ttactgttggtcaaaactttgtacagtatctca

SEQ ID NO: 586876 - DNA, 33 bp, Homo sapien
ttactgttggtcaaaattttgtacagtatctca

SEQ ID NO: 586877 - DNA, 33 bp, Homo sapien
actcttctcaagataaaatacagactctttcat

SEQ ID NO: 586878 - DNA, 33 bp, Homo sapien
actcttctcaagataagatacagactctttcat

SEQ ID NO: 586879 - DNA, 33 bp, Homo sapien
tgcttagtctttcccaatgcatctcaaattcta

SEQ ID NO: 586880 - DNA, 33 bp, Homo sapien
tgcttagtctttcccagtgcatctcaaattcta

SEQ ID NO: 586881 - DNA, 33 bp, Homo sapien
gtagttctttatcaccaaattctgagtattgga

SEQ ID NO: 586882 - DNA, 33 bp, Homo sapien
gtagttctttatcaccgaattctgagtattgga

SEQ ID NO: 586883 - DNA, 33 bp, Homo sapien
ttctaaaacataggataagagttaggtaaaaga

SEQ ID NO: 586884 - DNA, 33 bp, Homo sapien
ttctaaaacataggatgagagttaggtaaaaga

SEQ ID NO: 586885 - DNA, 33 bp, Homo sapien
gtcatttccctcctcaatcacctttttgagact

SEQ ID NO: 586886 - DNA, 33 bp, Homo sapien
gtcatttccctcctcagtcacctttttgagact

SEQ ID NO: 586887 - DNA, 33 bp, Homo sapien
tacagttgaggagaccaatatcctgaaaaggct

SEQ ID NO: 586888 - DNA, 33 bp, Homo sapien
tacagttgaggagaccgatatcctgaaaaggct

SEQ ID NO: 586889 - DNA, 33 bp, Homo sapien
atctggttacttaacccactcctccatggatga

SEQ ID NO: 586890 - DNA, 33 bp, Homo sapien
atctggttacttaacctactcctccatggatga

SEQ ID NO: 586891 - DNA, 33 bp, Homo sapien
cagaagcattaacaacaattggggcaagctttc

SEQ ID NO: 586892 - DNA, 33 bp, Homo sapien
cagaagcattaacaaccattggggcaagctttc

SEQ ID NO: 586893 - DNA, 33 bp, Homo sapien
ggttccctactacagacggcataaccttgctgc

SEQ ID NO: 586894 - DNA, 33 bp, Homo sapien
ggttccctactacagatggcataaccttgctgc

SEQ ID NO: 586895 - DNA, 33 bp, Homo sapien
caagtgacaataacacaatttgtttctattctt

SEQ ID NO: 586896 - DNA, 33 bp, Homo sapien
caagtgacaataacacgatttgtttctattctt

SEQ ID NO: 586897 - DNA, 33 bp, Homo sapien
aaatgagaaattaacaaggtgatgttagtattg

SEQ ID NO: 586898 - DNA, 33 bp, Homo sapien
aaatgagaaattaacacggtgatgttagtattg

SEQ ID NO: 586899 - DNA, 33 bp, Homo sapien
tgtcaagacttgggacaaatgcattcagttata

SEQ ID NO: 586900 - DNA, 33 bp, Homo sapien
tgtcaagacttgggaccaatgcattcagttata

SEQ ID NO: 586901 - DNA, 33 bp, Homo sapien
tgtgaagcatcttatcaaatagtttaaggaaga

SEQ ID NO: 586902 - DNA, 33 bp, Homo sapien
tgtgaagcatcttatcgaatagtttaaggaaga

SEQ ID NO: 586903 - DNA, 33 bp, Homo sapien
agtaggcacgagtgaaaggaacatcctacaaga

SEQ ID NO: 586904 - DNA, 33 bp, Homo sapien
agtaggcacgagtgaagggaacatcctacaaga

SEQ ID NO: 586905 - DNA, 33 bp, Homo sapien
atcagtccatggaatccctcctaaattcattaa

SEQ ID NO: 586906 - DNA, 33 bp, Homo sapien
atcagtccatggaatcgctcctaaattcattaa

SEQ ID NO: 586907 - DNA, 33 bp, Homo sapien
gatgttgtaataggtaacaaagacaagacataa

SEQ ID NO: 586908 - DNA, 33 bp, Homo sapien
gatgttgtaataggtagcaaagacaagacataa

SEQ ID NO: 586909 - DNA, 33 bp, Homo sapien
ttaattcttatctgttcaatgtgactagtagaa

SEQ ID NO: 586910 - DNA, 33 bp, Homo sapien
ttaattcttatctgtttaatgtgactagtagaa

SEQ ID NO: 586911 - DNA, 33 bp, Homo sapien
tagagagagaatcttcaaaaagggaaataaggt

SEQ ID NO: 586912 - DNA, 33 bp, Homo sapien
tagagagagaatcttcgaaaagggaaataaggt

SEQ ID NO: 586913 - DNA, 33 bp, Homo sapien
ttaaggtatcagccaacttggacatttatctgg

SEQ ID NO: 586914 - DNA, 33 bp, Homo sapien
ttaaggtatcagccaagttggacatttatctgg

SEQ ID NO: 586915 - DNA, 33 bp, Homo sapien
gacagccattccaagaaaacaagaactagaatt

SEQ ID NO: 586916 - DNA, 33 bp, Homo sapien
gacagccattccaagagaacaagaactagaatt

SEQ ID NO: 586917 - DNA, 33 bp, Homo sapien
gtttaaccagatctccaaggatcagaaggattc

SEQ ID NO: 586918 - DNA, 33 bp, Homo sapien
gtttaaccagatctccgaggatcagaaggattc

SEQ ID NO: 586919 - DNA, 33 bp, Homo sapien
gaaaagccagaaccaacagttgactccccatcc

SEQ ID NO: 586920 - DNA, 33 bp, Homo sapien
gaaaagccagaaccaatagttgactccccatcc

SEQ ID NO: 586921 - DNA, 33 bp, Homo sapien
acactgtttttctcctaaagaacttgcttaaac

SEQ ID NO: 586922 - DNA, 33 bp, Homo sapien
acactgtttttctcctgaagaacttgcttaaac

SEQ ID NO: 586923 - DNA, 33 bp, Homo sapien
gttctgtctgttttaacataattgtggctggag

SEQ ID NO: 586924 - DNA, 33 bp, Homo sapien
gttctgtctgttttaatataattgtggctggag

SEQ ID NO: 586925 - DNA, 33 bp, Homo sapien
aatcacactcatcctcaaaagattgaagagtag

SEQ ID NO: 586926 - DNA, 33 bp, Homo sapien
aatcacactcatcctcgaaagattgaagagtag

SEQ ID NO: 586927 - DNA, 33 bp, Homo sapien
acacattgtttattaacgtttttcgtgcttttc

SEQ ID NO: 586928 - DNA, 33 bp, Homo sapien
acacattgtttattaatgtttttcgtgcttttc

SEQ ID NO: 586929 - DNA, 33 bp, Homo sapien
acttagtaatgattcaaatgactgtgattatta

SEQ ID NO: 586930 - DNA, 33 bp, Homo sapien
acttagtaatgattcagatgactgtgattatta

SEQ ID NO: 586931 - DNA, 33 bp, Homo sapien
ttccaaagagtgttagaaacataggcaaatggg

SEQ ID NO: 586932 - DNA, 33 bp, Homo sapien
ttccaaagagtgttaggaacataggcaaatggg

SEQ ID NO: 586933 - DNA, 33 bp, Homo sapien
tttaatatgtaagttcacattcacattaaaaag

SEQ ID NO: 586934 - DNA, 33 bp, Homo sapien
tttaatatgtaagttcccattcacattaaaaag

SEQ ID NO: 586935 - DNA, 33 bp, Homo sapien
aatcacaaaataatacggaactaacctatcctc

SEQ ID NO: 586936 - DNA, 33 bp, Homo sapien
aatcacaaaataatactgaactaacctatcctc

SEQ ID NO: 586937 - DNA, 33 bp, Homo sapien
ggcaaaggacatgaacagatgacttttcaaaag

SEQ ID NO: 586938 - DNA, 33 bp, Homo sapien
ggcaaaggacatgaacggatgacttttcaaaag

SEQ ID NO: 586939 - DNA, 33 bp, Homo sapien
acactgggaacaatacagccaatcttttgaatc

SEQ ID NO: 586940 - DNA, 33 bp, Homo sapien
acactgggaacaatacggccaatcttttgaatc

SEQ ID NO: 586941 - DNA, 33 bp, Homo sapien
ccaaagcagacagaaaatagaacagaaatggcc

SEQ ID NO: 586942 - DNA, 33 bp, Homo sapien
ccaaagcagacagaaactagaacagaaatggcc

SEQ ID NO: 586943 - DNA, 33 bp, Homo sapien
aattccttctgccttcacagtgatcaggtaaag

SEQ ID NO: 586944 - DNA, 33 bp, Homo sapien
aattccttctgccttcccagtgatcaggtaaag

SEQ ID NO: 586945 - DNA, 33 bp, Homo sapien
ttttttcttccagttacggcaattccttctgcc

SEQ ID NO: 586946 - DNA, 33 bp, Homo sapien
ttttttcttccagttatggcaattccttctgcc

SEQ ID NO: 586947 - DNA, 33 bp, Homo sapien
cttctatatttatgaaagatcaaatacataaac

SEQ ID NO: 586948 - DNA, 33 bp, Homo sapien
cttctatatttatgaaggatcaaatacataaac

SEQ ID NO: 586949 - DNA, 33 bp, Homo sapien
ttttaaagtatatcatcagattgaattattctc

SEQ ID NO: 586950 - DNA, 33 bp, Homo sapien
ttttaaagtatatcatgagattgaattattctc

SEQ ID NO: 586951 - DNA, 33 bp, Homo sapien
tggtggtctgtaactgcagagattttcttatag

SEQ ID NO: 586952 - DNA, 33 bp, Homo sapien
tggtggtctgtaactggagagattttcttatag

SEQ ID NO: 586953 - DNA, 33 bp, Homo sapien
ctcttgatttgactcacgcatttacttgttgaa

SEQ ID NO: 586954 - DNA, 33 bp, Homo sapien
ctcttgatttgactcatgcatttacttgttgaa

SEQ ID NO: 586955 - DNA, 33 bp, Homo sapien
attttggccattgtagacattatgactcacttt

SEQ ID NO: 586956 - DNA, 33 bp, Homo sapien
attttggccattgtaggcattatgactcacttt

SEQ ID NO: 586957 - DNA, 33 bp, Homo sapien
gcactttatccattgtaaagatttgaatcattt

SEQ ID NO: 586958 - DNA, 33 bp, Homo sapien
gcactttatccattgtgaagatttgaatcattt

SEQ ID NO: 586959 - DNA, 33 bp, Homo sapien
gggtttgagtctcgtaacactaattaaaatttt

SEQ ID NO: 586960 - DNA, 33 bp, Homo sapien
gggtttgagtctcgtagcactaattaaaatttt

SEQ ID NO: 586961 - DNA, 33 bp, Homo sapien
agaatccatcagtataagattttggctctatct

SEQ ID NO: 586962 - DNA, 33 bp, Homo sapien
agaatccatcagtatatgattttggctctatct

SEQ ID NO: 586963 - DNA, 33 bp, Homo sapien
aatgctaaaggacgaacgctattacagcacatc

SEQ ID NO: 586964 - DNA, 33 bp, Homo sapien
aatgctaaaggacgaatgctattacagcacatc

SEQ ID NO: 586965 - DNA, 33 bp, Homo sapien
attgtatctcctatttaaaacttctcttccata

SEQ ID NO: 586966 - DNA, 33 bp, Homo sapien
attgtatctcctatttgaaacttctcttccata

SEQ ID NO: 586967 - DNA, 33 bp, Homo sapien
tctcactaacaaaaaaataagctatggaagaga

SEQ ID NO: 586968 - DNA, 33 bp, Homo sapien
tctcactaacaaaaaactaagctatggaagaga

SEQ ID NO: 586969 - DNA, 33 bp, Homo sapien
attatgcacttaacaaatgaaagagctatttgg

SEQ ID NO: 586970 - DNA, 33 bp, Homo sapien
attatgcacttaacaagtgaaagagctatttgg

SEQ ID NO: 586971 - DNA, 33 bp, Homo sapien
ctttaattcccaatcacagaccaaaataaacca

SEQ ID NO: 586972 - DNA, 33 bp, Homo sapien
ctttaattcccaatcagagaccaaaataaacca

SEQ ID NO: 586973 - DNA, 33 bp, Homo sapien
agtttttcagatctacggcacaacattgtgttt

SEQ ID NO: 586974 - DNA, 33 bp, Homo sapien
agtttttcagatctactgcacaacattgtgttt

SEQ ID NO: 586975 - DNA, 33 bp, Homo sapien
agaaatgaaattcagacgtagaagagactttaa

SEQ ID NO: 586976 - DNA, 33 bp, Homo sapien
agaaatgaaattcagatgtagaagagactttaa

SEQ ID NO: 586977 - DNA, 33 bp, Homo sapien
gttcttatcattcctcagaaggtatatcataat

SEQ ID NO: 586978 - DNA, 33 bp, Homo sapien
gttcttatcattcctcggaaggtatatcataat

SEQ ID NO: 586979 - DNA, 33 bp, Homo sapien
attgtgatgtggtgtacgtcttcttacttctct

SEQ ID NO: 586980 - DNA, 33 bp, Homo sapien
attgtgatgtggtgtatgtcttcttacttctct

SEQ ID NO: 586981 - DNA, 33 bp, Homo sapien
ttcagctcagagagaaggacctagacatacaga

SEQ ID NO: 586982 - DNA, 33 bp, Homo sapien
ttcagctcagagagaatgacctagacatacaga

SEQ ID NO: 586983 - DNA, 33 bp, Homo sapien
attgcctgtacataaaccttgacctctctgctt

SEQ ID NO: 586984 - DNA, 33 bp, Homo sapien
attgcctgtacataaatcttgacctctctgctt

SEQ ID NO: 586985 - DNA, 33 bp, Homo sapien
tcacttttaggtccaacgtaccttgaattcatt

SEQ ID NO: 586986 - DNA, 33 bp, Homo sapien
tcacttttaggtccaatgtaccttgaattcatt

SEQ ID NO: 586987 - DNA, 33 bp, Homo sapien
tccactatacaataccaaattccattttcctac

SEQ ID NO: 586988 - DNA, 33 bp, Homo sapien
tccactatacaatacctaattccattttcctac

SEQ ID NO: 586989 - DNA, 33 bp, Homo sapien
taacaactagaaagtacgtgtaagcgtgtatgt

SEQ ID NO: 586990 - DNA, 33 bp, Homo sapien
taacaactagaaagtatgtgtaagcgtgtatgt

SEQ ID NO: 586991 - DNA, 33 bp, Homo sapien
aaactgctgagattcaataaaaaacagaattgt

SEQ ID NO: 586992 - DNA, 33 bp, Homo sapien
aaactgctgagattcattaaaaaacagaattgt

SEQ ID NO: 586993 - DNA, 33 bp, Homo sapien
ctgcgtggtgactacactgactacaacctcaaa

SEQ ID NO: 586994 - DNA, 33 bp, Homo sapien
ctgcgtggtgactacagtgactacaacctcaaa

SEQ ID NO: 586995 - DNA, 33 bp, Homo sapien
aatgaaatacacaggacgatatggaagaatctc

SEQ ID NO: 586996 - DNA, 33 bp, Homo sapien
aatgaaatacacaggatgatatggaagaatctc

SEQ ID NO: 586997 - DNA, 33 bp, Homo sapien
gtttatgaaaattcaaccagctgaaaatttaca

SEQ ID NO: 586998 - DNA, 33 bp, Homo sapien
gtttatgaaaattcaagcagctgaaaatttaca

SEQ ID NO: 586999 - DNA, 33 bp, Homo sapien
cttggaccaggattcaacattaactcaagagca

SEQ ID NO: 587000 - DNA, 33 bp, Homo sapien
cttggaccaggattcagcattaactcaagagca

SEQ ID NO: 587001 - DNA, 33 bp, Homo sapien
gtaagctgatatgcaccgtctcctctttttatc

SEQ ID NO: 587002 - DNA, 33 bp, Homo sapien
gtaagctgatatgcactgtctcctctttttatc

SEQ ID NO: 587003 - DNA, 33 bp, Homo sapien
catgccaggtaatacacccagagaaggaataga

SEQ ID NO: 587004 - DNA, 33 bp, Homo sapien
catgccaggtaatacatccagagaaggaataga

SEQ ID NO: 587005 - DNA, 33 bp, Homo sapien
aataaaatagtcgcaactgcagctggaccatta

SEQ ID NO: 587006 - DNA, 33 bp, Homo sapien
aataaaatagtcgcaattgcagctggaccatta

SEQ ID NO: 587007 - DNA, 33 bp, Homo sapien
aaagaaagatggcttactaacagaaggaaagtg

SEQ ID NO: 587008 - DNA, 33 bp, Homo sapien
aaagaaagatggcttattaacagaaggaaagtg

SEQ ID NO: 587009 - DNA, 33 bp, Homo sapien
gatgatgtttaacacactgacaaaaagaaaata

SEQ ID NO: 587010 - DNA, 33 bp, Homo sapien
gatgatgtttaacacattgacaaaaagaaaata

SEQ ID NO: 587011 - DNA, 33 bp, Homo sapien
ctcttttagaatgaagaagcttagggtcaggga

SEQ ID NO: 587012 - DNA, 33 bp, Homo sapien
ctcttttagaatgaagcagcttagggtcaggga

SEQ ID NO: 587013 - DNA, 33 bp, Homo sapien
gtgcctttatcgctgaataatatttaatcatct

SEQ ID NO: 587014 - DNA, 33 bp, Homo sapien
gtgcctttatcgctgagtaatatttaatcatct

SEQ ID NO: 587015 - DNA, 33 bp, Homo sapien
gcctacatttattccactgactaaagcacatca

SEQ ID NO: 587016 - DNA, 33 bp, Homo sapien
gcctacatttattccattgactaaagcacatca

SEQ ID NO: 587017 - DNA, 33 bp, Homo sapien
ttccttgggaatgctacgaattattgatatact

SEQ ID NO: 587018 - DNA, 33 bp, Homo sapien
ttccttgggaatgctaggaattattgatatact

SEQ ID NO: 587019 - DNA, 33 bp, Homo sapien
tgaatttatacttccaccaacagtgtataagca

SEQ ID NO: 587020 - DNA, 33 bp, Homo sapien
tgaatttatacttccagcaacagtgtataagca

SEQ ID NO: 587021 - DNA, 33 bp, Homo sapien
ataagattgttgagtcaaacggtagttctgtct

SEQ ID NO: 587022 - DNA, 33 bp, Homo sapien
ataagattgttgagtctaacggtagttctgtct

SEQ ID NO: 587023 - DNA, 33 bp, Homo sapien
gggattgttttaccaactatttcatcacccaga

SEQ ID NO: 587024 - DNA, 33 bp, Homo sapien
gggattgttttaccaagtatttcatcacccaga

SEQ ID NO: 587025 - DNA, 33 bp, Homo sapien
gcagtagaaagcattaacacaggcctaggacaa

SEQ ID NO: 587026 - DNA, 33 bp, Homo sapien
gcagtagaaagcattagcacaggcctaggacaa

SEQ ID NO: 587027 - DNA, 33 bp, Homo sapien
ttatagatagccagaaacgcactgtttagcaga

SEQ ID NO: 587028 - DNA, 33 bp, Homo sapien
ttatagatagccagaatcgcactgtttagcaga

SEQ ID NO: 587029 - DNA, 33 bp, Homo sapien
gtccacaaaatgtgagaatttgtcatcggatta

SEQ ID NO: 587030 - DNA, 33 bp, Homo sapien
gtccacaaaatgtgagtatttgtcatcggatta

SEQ ID NO: 587031 - DNA, 33 bp, Homo sapien
attagacaagaagaggccactttaggagttcta

SEQ ID NO: 587032 - DNA, 33 bp, Homo sapien
attagacaagaagaggtcactttaggagttcta

SEQ ID NO: 587033 - DNA, 33 bp, Homo sapien
catagtcaaatatttaaatggtcaaatgaataa

SEQ ID NO: 587034 - DNA, 33 bp, Homo sapien
catagtcaaatatttagatggtcaaatgaataa

SEQ ID NO: 587035 - DNA, 33 bp, Homo sapien
tcaacatccagcaacacgaatcataaaaggaaa

SEQ ID NO: 587036 - DNA, 33 bp, Homo sapien
tcaacatccagcaacatgaatcataaaaggaaa

SEQ ID NO: 587037 - DNA, 33 bp, Homo sapien
tcttaaggtgccatatcagagactgacagttga

SEQ ID NO: 587038 - DNA, 33 bp, Homo sapien
tcttaaggtgccatattagagactgacagttga

SEQ ID NO: 587039 - DNA, 33 bp, Homo sapien
agtaaaattcccaataacttagcaactgagatc

SEQ ID NO: 587040 - DNA, 33 bp, Homo sapien
agtaaaattcccaataccttagcaactgagatc

SEQ ID NO: 587041 - DNA, 33 bp, Homo sapien
aatttctatttgcatacctagcatcttaaaaaa

SEQ ID NO: 587042 - DNA, 33 bp, Homo sapien
aatttctatttgcatatctagcatcttaaaaaa

SEQ ID NO: 587043 - DNA, 33 bp, Homo sapien
ggtggatactctccagaatcaactcttccttct

SEQ ID NO: 587044 - DNA, 33 bp, Homo sapien
ggtggatactctccaggatcaactcttccttct

SEQ ID NO: 587045 - DNA, 33 bp, Homo sapien; identical to SEQ ID NO: 587043

SEQ ID NO: 587046 - DNA, 33 bp, Homo sapien; identical to SEQ ID NO: 587044

SEQ ID NO: 587047 - DNA, 33 bp, Homo sapien
gtcttagcacccactacagaactggctcagcag

SEQ ID NO: 587048 - DNA, 33 bp, Homo sapien
gtcttagcacccactagagaactggctcagcag

SEQ ID NO: 587049 - DNA, 33 bp, Homo sapien; identical to SEQ ID NO: 587047

SEQ ID NO: 587050 - DNA, 33 bp, Homo sapien; identical to SEQ ID NO: 587048

SEQ ID NO: 587051 - DNA, 33 bp, Homo sapien
atcaggttcaggttacaatgaaagcagccatgc

SEQ ID NO: 587052 - DNA, 33 bp, Homo sapien
atcaggttcaggttaccatgaaagcagccatgc

SEQ ID NO: 587053 - DNA, 33 bp, Homo sapien
gctatcatgtcagcaacaggacttttgtagact

SEQ ID NO: 587054 - DNA, 33 bp, Homo sapien
gctatcatgtcagcaataggacttttgtagact

SEQ ID NO: 587055 - DNA, 33 bp, Homo sapien
catttatgtagaaggaaatgatgtttaaggaca

SEQ ID NO: 587056 - DNA, 33 bp, Homo sapien
catttatgtagaaggagatgatgtttaaggaca

SEQ ID NO: 587057 - DNA, 33 bp, Homo sapien
aagcaaggaaagcaaaagtgaagaaatgaggga

SEQ ID NO: 587058 - DNA, 33 bp, Homo sapien
aagcaaggaaagcaaacgtgaagaaatgaggga

SEQ ID NO: 587059 - DNA, 33 bp, Homo sapien
tactaagccttttaacggactgaatcaggccca

SEQ ID NO: 587060 - DNA, 33 bp, Homo sapien
tactaagccttttaactgactgaatcaggccca

SEQ ID NO: 587061 - DNA, 33 bp, Homo sapien
cctgactctgttccagcatgtggctacaactac

SEQ ID NO: 587062 - DNA, 33 bp, Homo sapien
cctgactctgttccaggatgtggctacaactac

SEQ ID NO: 587063 - DNA, 33 bp, Homo sapien
gcatatttcagctcaacttacaagcattcaatt

SEQ ID NO: 587064 - DNA, 33 bp, Homo sapien
gcatatttcagctcaatttacaagcattcaatt

SEQ ID NO: 587065 - DNA, 33 bp, Homo sapien
accaggattgagactgcaaatataaacctagag

SEQ ID NO: 587066 - DNA, 33 bp, Homo sapien
accaggattgagactggaaatataaacctagag

SEQ ID NO: 587067 - DNA, 33 bp, Homo sapien
gaagggtattcagtcaagaatgccaccagtttt

SEQ ID NO: 587068 - DNA, 33 bp, Homo sapien
gaagggtattcagtcaggaatgccaccagtttt

SEQ ID NO: 587069 - DNA, 33 bp, Homo sapien
tggtctggcactatcaatccctttcacatatgt

SEQ ID NO: 587070 - DNA, 33 bp, Homo sapien
tggtctggcactatcagtccctttcacatatgt

SEQ ID NO: 587071 - DNA, 33 bp, Homo sapien
agtctagccaagttaaaacattacaaagtcatc

SEQ ID NO: 587072 - DNA, 33 bp, Homo sapien
agtctagccaagttaacacattacaaagtcatc

SEQ ID NO: 587073 - DNA, 33 bp, Homo sapien
catcaaatcactgaaacaagcctatttggaaaa

SEQ ID NO: 587074 - DNA, 33 bp, Homo sapien
catcaaatcactgaaataagcctatttggaaaa

SEQ ID NO: 587075 - DNA, 33 bp, Homo sapien
ggatgcttggggagtacaaaaatgagcaaagaa

SEQ ID NO: 587076 - DNA, 33 bp, Homo sapien
ggatgcttggggagtataaaaatgagcaaagaa

SEQ ID NO: 587077 - DNA, 33 bp, Homo sapien
gaatgatgtgatgaaccgtgtatatagagagct

SEQ ID NO: 587078 - DNA, 33 bp, Homo sapien
gaatgatgtgatgaactgtgtatatagagagct

SEQ ID NO: 587079 - DNA, 33 bp, Homo sapien
ggaggacatggtatccaatacaatgcaatgaga

SEQ ID NO: 587080 - DNA, 33 bp, Homo sapien
ggaggacatggtatccgatacaatgcaatgaga

SEQ ID NO: 587081 - DNA, 33 bp, Homo sapien
acttggccaatacaaaccccggccacagtgccc

SEQ ID NO: 587082 - DNA, 33 bp, Homo sapien
acttggccaatacaaatcccggccacagtgccc

SEQ ID NO: 587083 - DNA, 33 bp, Homo sapien
cttcttattagactatcactgaacatttgccca

SEQ ID NO: 587084 - DNA, 33 bp, Homo sapien
cttcttattagactatgactgaacatttgccca

SEQ ID NO: 587085 - DNA, 33 bp, Homo sapien
ccccaccagagctatacacacatgtcaatttat

SEQ ID NO: 587086 - DNA, 33 bp, Homo sapien
ccccaccagagctatatacacatgtcaatttat

SEQ ID NO: 587087 - DNA, 33 bp, Homo sapien
gatttcagttttcttcaacaaagtttattctta

SEQ ID NO: 587088 - DNA, 33 bp, Homo sapien
gatttcagttttcttctacaaagtttattctta

SEQ ID NO: 587089 - DNA, 33 bp, Homo sapien
tgaacttaagcatttcacaaaaaaaaagttgtg

SEQ ID NO: 587090 - DNA, 33 bp, Homo sapien
tgaacttaagcatttcgcaaaaaaaaagttgtg

SEQ ID NO: 587091 - DNA, 33 bp, Homo sapien
tatttagaaatgaatacgttgcctttcaaaatg

SEQ ID NO: 587092 - DNA, 33 bp, Homo sapien
tatttagaaatgaatatgttgcctttcaaaatg

SEQ ID NO: 587093 - DNA, 33 bp, Homo sapien
caggctctgataaccacggttttgctctctact

SEQ ID NO: 587094 - DNA, 33 bp, Homo sapien
caggctctgataaccatggttttgctctctact

SEQ ID NO: 587095 - DNA, 33 bp, Homo sapien
tgttgtgagtagtgccacaatagtggattggtt

SEQ ID NO: 587096 - DNA, 33 bp, Homo sapien
tgttgtgagtagtgccgcaatagtggattggtt

SEQ ID NO: 587097 - DNA, 33 bp, Homo sapien
cgctcataacagaacaaaatcttaatgagacca

SEQ ID NO: 587098 - DNA, 33 bp, Homo sapien
cgctcataacagaacagaatcttaatgagacca

SEQ ID NO: 587099 - DNA, 33 bp, Homo sapien
caattagcctacaggcagacgtaacaaaaacca

SEQ ID NO: 587100 - DNA, 33 bp, Homo sapien
caattagcctacaggccgacgtaacaaaaacca

SEQ ID NO: 587101 - DNA, 33 bp, Homo sapien
gtggatgccaaaacctaactgaaataaggtcaa

SEQ ID NO: 587102 - DNA, 33 bp, Homo sapien
gtggatgccaaaacctgactgaaataaggtcaa

SEQ ID NO: 587103 - DNA, 33 bp, Homo sapien
tggccattgaatttggaaactttgatatcattc

SEQ ID NO: 587104 - DNA, 33 bp, Homo sapien
tggccattgaatttggcaactttgatatcattc

SEQ ID NO: 587105 - DNA, 33 bp, Homo sapien
agcggctctggagataccttacctcttcttcca

SEQ ID NO: 587106 - DNA, 33 bp, Homo sapien
agcggctctggagatatcttacctcttcttcca

SEQ ID NO: 587107 - DNA, 33 bp, Homo sapien
atgttatggcacttacactaataaagccactgc

SEQ ID NO: 587108 - DNA, 33 bp, Homo sapien
atgttatggcacttacgctaataaagccactgc

SEQ ID NO: 587109 - DNA, 33 bp, Homo sapien
agacccaaggataagacctcacaaccttttgcc

SEQ ID NO: 587110 - DNA, 33 bp, Homo sapien
agacccaaggataagagctcacaaccttttgcc

SEQ ID NO: 587111 - DNA, 33 bp, Homo sapien
ttcatactgacaaatacagatgttgcctcagtt

SEQ ID NO: 587112 - DNA, 33 bp, Homo sapien
ttcatactgacaaatatagatgttgcctcagtt

SEQ ID NO: 587113 - DNA, 33 bp, Homo sapien
atattgagaaggattacactgtctagtcaataa

SEQ ID NO: 587114 - DNA, 33 bp, Homo sapien
atattgagaaggattatactgtctagtcaataa

SEQ ID NO: 587115 - DNA, 33 bp, Homo sapien
gttggatgatttatcaaccacttgtcaagaaca

SEQ ID NO: 587116 - DNA, 33 bp, Homo sapien
gttggatgatttatcacccacttgtcaagaaca

SEQ ID NO: 587117 - DNA, 33 bp, Homo sapien
aggattcactattgccggctagttaccctcaat

SEQ ID NO: 587118 - DNA, 33 bp, Homo sapien
aggattcactattgcctgctagttaccctcaat

SEQ ID NO: 587119 - DNA, 33 bp, Homo sapien
cagacagttcaacttacctttccagggtcaatc

SEQ ID NO: 587120 - DNA, 33 bp, Homo sapien
cagacagttcaacttatctttccagggtcaatc

SEQ ID NO: 587121 - DNA, 33 bp, Homo sapien
cctttgtgaaagttgcactctacagggtgttca

SEQ ID NO: 587122 - DNA, 33 bp, Homo sapien
cctttgtgaaagttgctctctacagggtgttca

SEQ ID NO: 587123 - DNA, 33 bp, Homo sapien
ttcatccagaaaaaccagagataaaatgtcatc

SEQ ID NO: 587124 - DNA, 33 bp, Homo sapien
ttcatccagaaaaaccggagataaaatgtcatc

SEQ ID NO: 587125 - DNA, 33 bp, Homo sapien
tgtggtgtgtgggtcacgtagactacttgaggt

SEQ ID NO: 587126 - DNA, 33 bp, Homo sapien
tgtggtgtgtgggtcatgtagactacttgaggt

SEQ ID NO: 587127 - DNA, 33 bp, Homo sapien
aaaatcagtggaggtacggcttccttctcctaa

SEQ ID NO: 587128 - DNA, 33 bp, Homo sapien
aaaatcagtggaggtatggcttccttctcctaa

SEQ ID NO: 587129 - DNA, 33 bp, Homo sapien
aaacttataatacgtcaaaaaattgtgttattg

SEQ ID NO: 587130 - DNA, 33 bp, Homo sapien
aaacttataatacgtcgaaaaattgtgttattg

SEQ ID NO: 587131 - DNA, 33 bp, Homo sapien
agtataaactggaagagctgttaaatgaatgtc

SEQ ID NO: 587132 - DNA, 33 bp, Homo sapien
agtataaactggaagatctgttaaatgaatgtc

SEQ ID NO: 587133 - DNA, 33 bp, Homo sapien
ttgtttttttaaatgaagcatatctgaaaatac

SEQ ID NO: 587134 - DNA, 33 bp, Homo sapien
ttgtttttttaaatgaggcatatctgaaaatac

SEQ ID NO: 587135 - DNA, 33 bp, Homo sapien
ttttttgtgtgaataactgagttgtttttataa

SEQ ID NO: 587136 - DNA, 33 bp, Homo sapien
ttttttgtgtgaataattgagttgtttttataa

SEQ ID NO: 587137 - DNA, 33 bp, Homo sapien
gccaatgatgggcatccaatagcctattattta

SEQ ID NO: 587138 - DNA, 33 bp, Homo sapien
gccaatgatgggcatctaatagcctattattta

SEQ ID NO: 587139 - DNA, 33 bp, Homo sapien
caaatacctttaatacgcataagtaccattatt

SEQ ID NO: 587140 - DNA, 33 bp, Homo sapien
caaatacctttaatactcataagtaccattatt

SEQ ID NO: 587141 - DNA, 33 bp, Homo sapien
ctggatatgagacttgaaatgaaaggagatcat

SEQ ID NO: 587142 - DNA, 33 bp, Homo sapien
ctggatatgagacttggaatgaaaggagatcat

SEQ ID NO: 587143 - DNA, 33 bp, Homo sapien
ccatctcaaactaacaactccctgaatttcacc

SEQ ID NO: 587144 - DNA, 33 bp, Homo sapien
ccatctcaaactaacagctccctgaatttcacc

SEQ ID NO: 587145 - DNA, 33 bp, Homo sapien
aaacttttgtatgttccacactttatatcacgc

SEQ ID NO: 587146 - DNA, 33 bp, Homo sapien
aaacttttgtatgttctacactttatatcacgc

SEQ ID NO: 587147 - DNA, 33 bp, Homo sapien
tcttgcctttccagaacgatctatactgtttta

SEQ ID NO: 587148 - DNA, 33 bp, Homo sapien
tcttgcctttccagaatgatctatactgtttta

SEQ ID NO: 587149 - DNA, 33 bp, Homo sapien
agagatagaaatagagaaataggtagagacaga

SEQ ID NO: 587150 - DNA, 33 bp, Homo sapien
agagatagaaatagaggaataggtagagacaga

SEQ ID NO: 587151 - DNA, 33 bp, Homo sapien
tcgagattgaggtagaagtagacagaaatagag

SEQ ID NO: 587152 - DNA, 33 bp, Homo sapien
tcgagattgaggtagaggtagacagaaatagag

SEQ ID NO: 587153 - DNA, 33 bp, Homo sapien
tccatgagtatgcctcacttttaagtatgtaat

SEQ ID NO: 587154 - DNA, 33 bp, Homo sapien
tccatgagtatgcctcgcttttaagtatgtaat

SEQ ID NO: 587155 - DNA, 33 bp, Homo sapien
tggcagaagcaaattgccaaataatagtttgtc

SEQ ID NO: 587156 - DNA, 33 bp, Homo sapien
tggcagaagcaaattgtcaaataatagtttgtc

SEQ ID NO: 587157 - DNA, 33 bp, Homo sapien
tccagagtatttggaactgatttagctgtacct

SEQ ID NO: 587158 - DNA, 33 bp, Homo sapien
tccagagtatttggaattgatttagctgtacct

SEQ ID NO: 587159 - DNA, 33 bp, Homo sapien
actagaaaggataggacgttgcttaaatcaaga

SEQ ID NO: 587160 - DNA, 33 bp, Homo sapien
actagaaaggataggatgttgcttaaatcaaga

SEQ ID NO: 587161 - DNA, 33 bp, Homo sapien
aacaaggacagtctggaaggaggagaactggaa

SEQ ID NO: 587162 - DNA, 33 bp, Homo sapien
aacaaggacagtctgggaggaggagaactggaa

SEQ ID NO: 587163 - DNA, 33 bp, Homo sapien
ctttggaaagtacagaaattttagtgatattga

SEQ ID NO: 587164 - DNA, 33 bp, Homo sapien
ctttggaaagtacagacattttagtgatattga

SEQ ID NO: 587165 - DNA, 33 bp, Homo sapien
tggtaatgaataaaaaacttaccttgctaataa

SEQ ID NO: 587166 - DNA, 33 bp, Homo sapien
tggtaatgaataaaaatcttaccttgctaataa

SEQ ID NO: 587167 - DNA, 33 bp, Homo sapien
tttatcagtgataaaaagaaacacacttctgat

SEQ ID NO: 587168 - DNA, 33 bp, Homo sapien
tttatcagtgataaaaggaaacacacttctgat

SEQ ID NO: 587169 - DNA, 33 bp, Homo sapien
ccctttttcctaacaccgcttccgtcaatctct

SEQ ID NO: 587170 - DNA, 33 bp, Homo sapien
ccctttttcctaacactgcttccgtcaatctct

SEQ ID NO: 587171 - DNA, 33 bp, Homo sapien
ttatgtcactgttttcaagacactagcatatct

SEQ ID NO: 587172 - DNA, 33 bp, Homo sapien
ttatgtcactgttttccagacactagcatatct

SEQ ID NO: 587173 - DNA, 33 bp, Homo sapien
gtatttcatacttacaaatatctactcatcatc

SEQ ID NO: 587174 - DNA, 33 bp, Homo sapien
gtatttcatacttacagatatctactcatcatc

SEQ ID NO: 587175 - DNA, 33 bp, Homo sapien
ccttagaacctttcctcagatacctcctttttt

SEQ ID NO: 587176 - DNA, 33 bp, Homo sapien
ccttagaacctttcctgagatacctcctttttt

SEQ ID NO: 587177 - DNA, 33 bp, Homo sapien
aagacagtaatagttacgcagtatctgcaaggc

SEQ ID NO: 587178 - DNA, 33 bp, Homo sapien
aagacagtaatagttatgcagtatctgcaaggc

SEQ ID NO: 587179 - DNA, 33 bp, Homo sapien
gtgtaattaagtgcaacgctcaaatgaatggtt

SEQ ID NO: 587180 - DNA, 33 bp, Homo sapien
gtgtaattaagtgcaatgctcaaatgaatggtt

SEQ ID NO: 587181 - DNA, 33 bp, Homo sapien
gactgaggtactgtataaacatcaatgaaatca

SEQ ID NO: 587182 - DNA, 33 bp, Homo sapien
gactgaggtactgtatgaacatcaatgaaatca

SEQ ID NO: 587183 - DNA, 33 bp, Homo sapien
agttccagttccaagacggcacagtgcggtaga

SEQ ID NO: 587184 - DNA, 33 bp, Homo sapien
agttccagttccaagatggcacagtgcggtaga

SEQ ID NO: 587185 - DNA, 33 bp, Homo sapien
aaaacaatagccactccgaaaatattctaaacc

SEQ ID NO: 587186 - DNA, 33 bp, Homo sapien
aaaacaatagccactctgaaaatattctaaacc

SEQ ID NO: 587187 - DNA, 33 bp, Homo sapien
agagagaagtgtgtgacagcgcaggaaaagcta

SEQ ID NO: 587188 - DNA, 33 bp, Homo sapien
agagagaagtgtgtgagagcgcaggaaaagcta

SEQ ID NO: 587189 - DNA, 33 bp, Homo sapien
gctgacattatccttaaccacatcaaaataaaa

SEQ ID NO: 587190 - DNA, 33 bp, Homo sapien
gctgacattatccttagccacatcaaaataaaa

SEQ ID NO: 587191 - DNA, 33 bp, Homo sapien
acccagctgaactacagaatcaaagacaaatat

SEQ ID NO: 587192 - DNA, 33 bp, Homo sapien
acccagctgaactacataatcaaagacaaatat

SEQ ID NO: 587193 - DNA, 33 bp, Homo sapien
ttgaactagccttccacacctgaaataaatcat

SEQ ID NO: 587194 - DNA, 33 bp, Homo sapien
ttgaactagccttccatacctgaaataaatcat

SEQ ID NO: 587195 - DNA, 33 bp, Homo sapien
ccttcaaagtttgcccagaaatagaaacttctc

SEQ ID NO: 587196 - DNA, 33 bp, Homo sapien
ccttcaaagtttgcccggaaatagaaacttctc

SEQ ID NO: 587197 - DNA, 33 bp, Homo sapien
gcatgggggagatgaccgaattgagaaagaaaa

SEQ ID NO: 587198 - DNA, 33 bp, Homo sapien
gcatgggggagatgactgaattgagaaagaaaa

SEQ ID NO: 587199 - DNA, 33 bp, Homo sapien
atatattttaggtaaacgaaagctgagaagata

SEQ ID NO: 587200 - DNA, 33 bp, Homo sapien
atatattttaggtaaatgaaagctgagaagata

SEQ ID NO: 587201 - DNA, 33 bp, Homo sapien
catattttgtttccataacttcgacatggtctt

SEQ ID NO: 587202 - DNA, 33 bp, Homo sapien
catattttgtttccatgacttcgacatggtctt

SEQ ID NO: 587203 - DNA, 33 bp, Homo sapien
actttactttctttcactcctgttctaaagctt

SEQ ID NO: 587204 - DNA, 33 bp, Homo sapien
actttactttctttcattcctgttctaaagctt

SEQ ID NO: 587205 - DNA, 33 bp, Homo sapien
tatgccattttgtgaactgtagtgcttactata

SEQ ID NO: 587206 - DNA, 33 bp, Homo sapien
tatgccattttgtgaattgtagtgcttactata

SEQ ID NO: 587207 - DNA, 33 bp, Homo sapien
atggcatagccaaaaagtcaatggtagaagtaa

SEQ ID NO: 587208 - DNA, 33 bp, Homo sapien
atggcatagccaaaaattcaatggtagaagtaa

SEQ ID NO: 587209 - DNA, 33 bp, Homo sapien
gggctaactacattggaaaaccagaaagaattt

SEQ ID NO: 587210 - DNA, 33 bp, Homo sapien
gggctaactacattgggaaaccagaaagaattt

SEQ ID NO: 587211 - DNA, 33 bp, Homo sapien
gcagaaactgcagatacgaagggccaactaagg

SEQ ID NO: 587212 - DNA, 33 bp, Homo sapien
gcagaaactgcagatatgaagggccaactaagg

SEQ ID NO: 587213 - DNA, 33 bp, Homo sapien
tttactttgtcgactacaatttatagctagagt

SEQ ID NO: 587214 - DNA, 33 bp, Homo sapien
tttactttgtcgactagaatttatagctagagt

SEQ ID NO: 587215 - DNA, 33 bp, Homo sapien
atattttgcaaaagacaaatcctgtaactacaa

SEQ ID NO: 587216 - DNA, 33 bp, Homo sapien
atattttgcaaaagaccaatcctgtaactacaa

SEQ ID NO: 587217 - DNA, 33 bp, Homo sapien
cactgctttctgtggacggcggcggagctaaaa

SEQ ID NO: 587218 - DNA, 33 bp, Homo sapien
cactgctttctgtggatggcggcggagctaaaa

SEQ ID NO: 587219 - DNA, 33 bp, Homo sapien
agtgcatgtgagactacaaagatggacaggaca

SEQ ID NO: 587220 - DNA, 33 bp, Homo sapien
agtgcatgtgagactataaagatggacaggaca

SEQ ID NO: 587221 - DNA, 33 bp, Homo sapien
actttgttcatcttaaagatagcagagcaattc

SEQ ID NO: 587222 - DNA, 33 bp, Homo sapien
actttgttcatcttaatgatagcagagcaattc

SEQ ID NO: 587223 - DNA, 33 bp, Homo sapien
gcaaaccaccattgtacgtgtatgcctatataa

SEQ ID NO: 587224 - DNA, 33 bp, Homo sapien
gcaaaccaccattgtatgtgtatgcctatataa

SEQ ID NO: 587225 - DNA, 33 bp, Homo sapien
taagaagttttaggacagatggtaaaaatgaga

SEQ ID NO: 587226 - DNA, 33 bp, Homo sapien
taagaagttttaggacggatggtaaaaatgaga

SEQ ID NO: 587227 - DNA, 33 bp, Homo sapien
atgagatcacaccgaacgtccatggaaatgttg

SEQ ID NO: 587228 - DNA, 33 bp, Homo sapien
atgagatcacaccgaatgtccatggaaatgttg

SEQ ID NO: 587229 - DNA, 33 bp, Homo sapien
tttcggggatggaagcaaacatatattcatgaa

SEQ ID NO: 587230 - DNA, 33 bp, Homo sapien
tttcggggatggaagcgaacatatattcatgaa

SEQ ID NO: 587231 - DNA, 33 bp, Homo sapien
ctacagaactctccaccgcaaaacaacagaata

SEQ ID NO: 587232 - DNA, 33 bp, Homo sapien
ctacagaactctccactgcaaaacaacagaata

SEQ ID NO: 587233 - DNA, 33 bp, Homo sapien
catgacaacatggaaacagaacaacctgctcct

SEQ ID NO: 587234 - DNA, 33 bp, Homo sapien
catgacaacatggaaagagaacaacctgctcct

SEQ ID NO: 587235 - DNA, 33 bp, Homo sapien
aagttaacagtcattgaaatgaagattcagata

SEQ ID NO: 587236 - DNA, 33 bp, Homo sapien
aagttaacagtcattggaatgaagattcagata

SEQ ID NO: 587237 - DNA, 33 bp, Homo sapien
acaaacgttgcactggaacaaacagtgactgtc

SEQ ID NO: 587238 - DNA, 33 bp, Homo sapien
acaaacgttgcactgggacaaacagtgactgtc

SEQ ID NO: 587239 - DNA, 33 bp, Homo sapien
ggcaaagaatttctggccatgtcttcaaaagta

SEQ ID NO: 587240 - DNA, 33 bp, Homo sapien
ggcaaagaatttctggtcatgtcttcaaaagta

SEQ ID NO: 587241 - DNA, 33 bp, Homo sapien
aactctctattgggtacgatgctcactactggg

SEQ ID NO: 587242 - DNA, 33 bp, Homo sapien
aactctctattgggtatgatgctcactactggg

SEQ ID NO: 587243 - DNA, 33 bp, Homo sapien
ctttttctgacagtacaaattccaagtgtacag

SEQ ID NO: 587244 - DNA, 33 bp, Homo sapien
ctttttctgacagtacgaattccaagtgtacag

SEQ ID NO: 587245 - DNA, 33 bp, Homo sapien
tgacttggagagaagacaataaagtcaagttag

SEQ ID NO: 587246 - DNA, 33 bp, Homo sapien
tgacttggagagaagataataaagtcaagttag

SEQ ID NO: 587247 - DNA, 33 bp, Homo sapien
gtgggaaactatctcaacttactctacctcaaa

SEQ ID NO: 587248 - DNA, 33 bp, Homo sapien
gtgggaaactatctcagcttactctacctcaaa

SEQ ID NO: 587249 - DNA, 33 bp, Homo sapien
tcatatacagacctcacgaagtcaatctccctg

SEQ ID NO: 587250 - DNA, 33 bp, Homo sapien
tcatatacagacctcatgaagtcaatctccctg

SEQ ID NO: 587251 - DNA, 33 bp, Homo sapien
aatcaatcttagtttaaatcaaccaatgaatgg

SEQ ID NO: 587252 - DNA, 33 bp, Homo sapien
aatcaatcttagtttacatcaaccaatgaatgg

SEQ ID NO: 587253 - DNA, 33 bp, Homo sapien
cacaaggatgagaaagaagttttacagtcttac

SEQ ID NO: 587254 - DNA, 33 bp, Homo sapien
cacaaggatgagaaaggagttttacagtcttac

SEQ ID NO: 587255 - DNA, 33 bp, Homo sapien
tgctcacaagaaatcacgttgttagcatcagct

SEQ ID NO: 587256 - DNA, 33 bp, Homo sapien
tgctcacaagaaatcatgttgttagcatcagct

SEQ ID NO: 587257 - DNA, 33 bp, Homo sapien
acaaaacatacagtgaaaacaaaattgtacaag

SEQ ID NO: 587258 - DNA, 33 bp, Homo sapien
acaaaacatacagtgacaacaaaattgtacaag

SEQ ID NO: 587259 - DNA, 33 bp, Homo sapien; identical to SEQ ID NO: 587257

SEQ ID NO: 587260 - DNA, 33 bp, Homo sapien; identical to SEQ ID NO: 587258

SEQ ID NO: 587261 - DNA, 33 bp, Homo sapien
gttagggcaaataatacggtagctggaaaactt

SEQ ID NO: 587262 - DNA, 33 bp, Homo sapien
gttagggcaaataatatggtagctggaaaactt

SEQ ID NO: 587263 - DNA, 33 bp, Homo sapien; identical to SEQ ID NO: 587261

SEQ ID NO: 587264 - DNA, 33 bp, Homo sapien; identical to SEQ ID NO: 587262

SEQ ID NO: 587265 - DNA, 33 bp, Homo sapien
tttcagggtaactgtacaacttgagacagggtg

SEQ ID NO: 587266 - DNA, 33 bp, Homo sapien
tttcagggtaactgtagaacttgagacagggtg

SEQ ID NO: 587267 - DNA, 33 bp, Homo sapien; identical to SEQ ID NO: 587265

SEQ ID NO: 587268 - DNA, 33 bp, Homo sapien; identical to SEQ ID NO: 587266

SEQ ID NO: 587269 - DNA, 33 bp, Homo sapien
tcccaaaggcttttgactatgagaattggtgga

SEQ ID NO: 587270 - DNA, 33 bp, Homo sapien
tcccaaaggcttttgagtatgagaattggtgga

SEQ ID NO: 587271 - DNA, 33 bp, Homo sapien
attcagaaggtgggaactcttttattatctagt

SEQ ID NO: 587272 - DNA, 33 bp, Homo sapien
attcagaaggtgggaagtcttttattatctagt

SEQ ID NO: 587273 - DNA, 33 bp, Homo sapien
tggtcaatatacctctcactcaaatcaacaaac

SEQ ID NO: 587274 - DNA, 33 bp, Homo sapien
tggtcaatatacctcttactcaaatcaacaaac

SEQ ID NO: 587275 - DNA, 33 bp, Homo sapien
agataattaaattctaccttgtgctaaaactgg

SEQ ID NO: 587276 - DNA, 33 bp, Homo sapien
agataattaaattctatcttgtgctaaaactgg

SEQ ID NO: 587277 - DNA, 33 bp, Homo sapien
aactcctgtcactaataagtagtatagcacatt

SEQ ID NO: 587278 - DNA, 33 bp, Homo sapien
aactcctgtcactaatgagtagtatagcacatt

SEQ ID NO: 587279 - DNA, 33 bp, Homo sapien
tttacttgttcacaaactcaatgccaggaaatt

SEQ ID NO: 587280 - DNA, 33 bp, Homo sapien
tttacttgttcacaaattcaatgccaggaaatt

SEQ ID NO: 587281 - DNA, 33 bp, Homo sapien
cacatgaatacacataaaaaatcatacgccttc

SEQ ID NO: 587282 - DNA, 33 bp, Homo sapien
cacatgaatacacatacaaaatcatacgccttc

SEQ ID NO: 587283 - DNA, 33 bp, Homo sapien
aacaaagcaataagaggcaatgaatggcaatac

SEQ ID NO: 587284 - DNA, 33 bp, Homo sapien
aacaaagcaataagagtcaatgaatggcaatac

SEQ ID NO: 587285 - DNA, 33 bp, Homo sapien
tagaaccatctttggagtatttatcatcacttc

SEQ ID NO: 587286 - DNA, 33 bp, Homo sapien
tagaaccatctttggattatttatcatcacttc

SEQ ID NO: 587287 - DNA, 33 bp, Homo sapien
tttgcacatagtaagcgagtccagaatctgacc

SEQ ID NO: 587288 - DNA, 33 bp, Homo sapien
tttgcacatagtaagctagtccagaatctgacc

SEQ ID NO: 587289 - DNA, 33 bp, Homo sapien
aaccaattgggaacaacgttagcaaatatttcc

SEQ ID NO: 587290 - DNA, 33 bp, Homo sapien
aaccaattgggaacaatgttagcaaatatttcc

SEQ ID NO: 587291 - DNA, 33 bp, Homo sapien; identical to SEQ ID NO: 587289

SEQ ID NO: 587292 - DNA, 33 bp, Homo sapien; identical to SEQ ID NO: 587290

SEQ ID NO: 587293 - DNA, 33 bp, Homo sapien
ccatctcttatactcacgttgaaataaattagg

SEQ ID NO: 587294 - DNA, 33 bp, Homo sapien
ccatctcttatactcatgttgaaataaattagg

SEQ ID NO: 587295 - DNA, 33 bp, Homo sapien; identical to SEQ ID NO: 587293

SEQ ID NO: 587296 - DNA, 33 bp, Homo sapien; identical to SEQ ID NO: 587294

SEQ ID NO: 587297 - DNA, 33 bp, Homo sapien
tgtataataatccagccagttttataaatattt

SEQ ID NO: 587298 - DNA, 33 bp, Homo sapien
tgtataataatccagcgagttttataaatattt

SEQ ID NO: 587299 - DNA, 33 bp, Homo sapien
cattaagtctataaccagaaacttatgcttgat

SEQ ID NO: 587300 - DNA, 33 bp, Homo sapien
cattaagtctataaccggaaacttatgcttgat

SEQ ID NO: 587301 - DNA, 33 bp, Homo sapien
atgtaggttcttcaaacgaagttacacccagtc

SEQ ID NO: 587302 - DNA, 33 bp, Homo sapien
atgtaggttcttcaaatgaagttacacccagtc

SEQ ID NO: 587303 - DNA, 33 bp, Homo sapien
ttattttccagtacaaccttcctgcaacttttt

SEQ ID NO: 587304 - DNA, 33 bp, Homo sapien
ttattttccagtacaatcttcctgcaacttttt

SEQ ID NO: 587305 - DNA, 33 bp, Homo sapien
tccaggtcactaggatcacaaaggatagtgaat

SEQ ID NO: 587306 - DNA, 33 bp, Homo sapien
tccaggtcactaggattacaaaggatagtgaat

SEQ ID NO: 587307 - DNA, 33 bp, Homo sapien
caggttctaccttcaaaatagatatttatggaa

SEQ ID NO: 587308 - DNA, 33 bp, Homo sapien
caggttctaccttcaacatagatatttatggaa

SEQ ID NO: 587309 - DNA, 33 bp, Homo sapien; identical to SEQ ID NO: 587307

SEQ ID NO: 587310 - DNA, 33 bp, Homo sapien; identical to SEQ ID NO: 587308

SEQ ID NO: 587311 - DNA, 33 bp, Homo sapien
tggatttcatacaggccaagaaaaaacaaaaac

SEQ ID NO: 587312 - DNA, 33 bp, Homo sapien
tggatttcatacaggctaagaaaaaacaaaaac

SEQ ID NO: 587313 - DNA, 33 bp, Homo sapien; identical to SEQ ID NO: 587311

SEQ ID NO: 587314 - DNA, 33 bp, Homo sapien; identical to SEQ ID NO: 587312

SEQ ID NO: 587315 - DNA, 33 bp, Homo sapien
gaagttatgaaattcaaagcctataaaggcatg

SEQ ID NO: 587316 - DNA, 33 bp, Homo sapien
gaagttatgaaattcagagcctataaaggcatg

SEQ ID NO: 587317 - DNA, 33 bp, Homo sapien
acccattcattcataccgcccattcaggatcat

SEQ ID NO: 587318 - DNA, 33 bp, Homo sapien
acccattcattcatactgcccattcaggatcat

SEQ ID NO: 587319 - DNA, 33 bp, Homo sapien
gtaggaaaggataagagtaaggcgtgaaataat

SEQ ID NO: 587320 - DNA, 33 bp, Homo sapien
gtaggaaaggataagattaaggcgtgaaataat

SEQ ID NO: 587321 - DNA, 33 bp, Homo sapien
cctatagacgtttttacgaatttggattttata

SEQ ID NO: 587322 - DNA, 33 bp, Homo sapien
cctatagacgtttttaggaatttggattttata

SEQ ID NO: 587323 - DNA, 33 bp, Homo sapien; identical to SEQ ID NO: 587321

SEQ ID NO: 587324 - DNA, 33 bp, Homo sapien; identical to SEQ ID NO: 587322

SEQ ID NO: 587325 - DNA, 33 bp, Homo sapien
atgtggatccaaaataaaggtaaatgattcacc

SEQ ID NO: 587326 - DNA, 33 bp, Homo sapien
atgtggatccaaaatagaggtaaatgattcacc

SEQ ID NO: 587327 - DNA, 33 bp, Homo sapien
acataagacactattaccaccacattgatttta

SEQ ID NO: 587328 - DNA, 33 bp, Homo sapien
acataagacactattatcaccacattgatttta

SEQ ID NO: 587329 - DNA, 33 bp, Homo sapien
gacagaagaaaaccacagtattatatacacaat

SEQ ID NO: 587330 - DNA, 33 bp, Homo sapien
gacagaagaaaaccacggtattatatacacaat

SEQ ID NO: 587331 - DNA, 33 bp, Homo sapien
gttactaaaattaaaaacttcagccctgtgaaa

SEQ ID NO: 587332 - DNA, 33 bp, Homo sapien
gttactaaaattaaaagcttcagccctgtgaaa

SEQ ID NO: 587333 - DNA, 33 bp, Homo sapien
taatgtacgcaaatttaaaaagaaacatatagt

SEQ ID NO: 587334 - DNA, 33 bp, Homo sapien
taatgtacgcaaatttgaaaagaaacatatagt

SEQ ID NO: 587335 - DNA, 33 bp, Homo sapien
tactgtgatgcaaatgaagaaagtaaaatgtgg

SEQ ID NO: 587336 - DNA, 33 bp, Homo sapien
tactgtgatgcaaatgcagaaagtaaaatgtgg

SEQ ID NO: 587337 - DNA, 33 bp, Homo sapien
ttcttgtggtgaagatcagtataatgtctcggt

SEQ ID NO: 587338 - DNA, 33 bp, Homo sapien
ttcttgtggtgaagattagtataatgtctcggt

SEQ ID NO: 587339 - DNA, 33 bp, Homo sapien
tctgctgacattaacgaattacccattatataa

SEQ ID NO: 587340 - DNA, 33 bp, Homo sapien
tctgctgacattaacgcattacccattatataa

SEQ ID NO: 587341 - DNA, 33 bp, Homo sapien; identical to SEQ ID NO: 587339

SEQ ID NO: 587342 - DNA, 33 bp, Homo sapien; identical to SEQ ID NO: 587340

SEQ ID NO: 587343 - DNA, 33 bp, Homo sapien
tggaattgtgaacttaagggagatgatgtaagg

SEQ ID NO: 587344 - DNA, 33 bp, Homo sapien
tggaattgtgaacttaggggagatgatgtaagg

SEQ ID NO: 587345 - DNA, 33 bp, Homo sapien; identical to SEQ ID NO: 587343

SEQ ID NO: 587346 - DNA, 33 bp, Homo sapien; identical to SEQ ID NO: 587344

SEQ ID NO: 587347 - DNA, 33 bp, Homo sapien
tttcaacaactgcatacgtaaagcctttaaaga

SEQ ID NO: 587348 - DNA, 33 bp, Homo sapien
tttcaacaactgcatatgtaaagcctttaaaga

SEQ ID NO: 587349 - DNA, 33 bp, Homo sapien
ttctttaaaaagccataatgattcaacagttta

SEQ ID NO: 587350 - DNA, 33 bp, Homo sapien
ttctttaaaaagccatgatgattcaacagttta

SEQ ID NO: 587351 - DNA, 33 bp, Homo sapien
cagcatttctaatttcaccctagtccagtgatc

SEQ ID NO: 587352 - DNA, 33 bp, Homo sapien
cagcatttctaatttcgccctagtccagtgatc

SEQ ID NO: 587353 - DNA, 33 bp, Homo sapien; identical to SEQ ID NO: 587351

SEQ ID NO: 587354 - DNA, 33 bp, Homo sapien; identical to SEQ ID NO: 587352

SEQ ID NO: 587355 - DNA, 33 bp, Homo sapien
gactcacacttgtgcacagcataaaatctgatt

SEQ ID NO: 587356 - DNA, 33 bp, Homo sapien
gactcacacttgtgcatagcataaaatctgatt

SEQ ID NO: 587357 - DNA, 33 bp, Homo sapien
tgttggtgcttctagtaaattctttaggaataa

SEQ ID NO: 587358 - DNA, 33 bp, Homo sapien
tgttggtgcttctagtcaattctttaggaataa

SEQ ID NO: 587359 - DNA, 33 bp, Homo sapien
gtacatggagaaattaaggaccgcattttaaag

SEQ ID NO: 587360 - DNA, 33 bp, Homo sapien
gtacatggagaaattatggaccgcattttaaag

SEQ ID NO: 587361 - DNA, 33 bp, Homo sapien
ctgggttctgctctcaaatagctcggaggagga

SEQ ID NO: 587362 - DNA, 33 bp, Homo sapien
ctgggttctgctctcacatagctcggaggagga

SEQ ID NO: 587363 - DNA, 33 bp, Homo sapien
attcaccttttctatcaccggtcatgtcttttt

SEQ ID NO: 587364 - DNA, 33 bp, Homo sapien
attcaccttttctatcgccggtcatgtcttttt

SEQ ID NO: 587365 - DNA, 33 bp, Homo sapien
tattatattcaacaaggctcaaattttttgata

SEQ ID NO: 587366 - DNA, 33 bp, Homo sapien
tattatattcaacaagtctcaaattttttgata

SEQ ID NO: 587367 - DNA, 33 bp, Homo sapien
aatgaccacaataacactaacttgaagtggatg

SEQ ID NO: 587368 - DNA, 33 bp, Homo sapien
aatgaccacaataacattaacttgaagtggatg

SEQ ID NO: 587369 - DNA, 33 bp, Homo sapien
gaaattacaagaagagaagttctttttcacttg

SEQ ID NO: 587370 - DNA, 33 bp, Homo sapien
gaaattacaagaagagtagttctttttcacttg

SEQ ID NO: 587371 - DNA, 33 bp, Homo sapien
aactgctaaggatacactaatgcttagatatgc

SEQ ID NO: 587372 - DNA, 33 bp, Homo sapien
aactgctaaggatacagtaatgcttagatatgc

SEQ ID NO: 587373 - DNA, 33 bp, Homo sapien
tgtgttttggcattcaatcgcagttccaacaac

SEQ ID NO: 587374 - DNA, 33 bp, Homo sapien
tgtgttttggcattcagtcgcagttccaacaac

SEQ ID NO: 587375 - DNA, 33 bp, Homo sapien
atttcactgttcttcaatataaagactccgaat

SEQ ID NO: 587376 - DNA, 33 bp, Homo sapien
atttcactgttcttcagtataaagactccgaat

SEQ ID NO: 587377 - DNA, 33 bp, Homo sapien
agaaaatctgtgcaaaatagacatagtgagtca

SEQ ID NO: 587378 - DNA, 33 bp, Homo sapien
agaaaatctgtgcaaagtagacatagtgagtca

SEQ ID NO: 587379 - DNA, 33 bp, Homo sapien
cctcgaccaatacccaatcctgagattataata

SEQ ID NO: 587380 - DNA, 33 bp, Homo sapien
cctcgaccaatacccagtcctgagattataata

SEQ ID NO: 587381 - DNA, 33 bp, Homo sapien
ataaatcttgctaacaataactcattatggtca

SEQ ID NO: 587382 - DNA, 33 bp, Homo sapien
ataaatcttgctaacactaactcattatggtca

SEQ ID NO: 587383 - DNA, 33 bp, Homo sapien
ataaattctaggaatgccagaagttcctgtcct

SEQ ID NO: 587384 - DNA, 33 bp, Homo sapien
ataaattctaggaatgtcagaagttcctgtcct

SEQ ID NO: 587385 - DNA, 33 bp, Homo sapien
tgttcctttcaatacaaactgacagtgtttctc

SEQ ID NO: 587386 - DNA, 33 bp, Homo sapien
tgttcctttcaatacagactgacagtgtttctc

SEQ ID NO: 587387 - DNA, 33 bp, Homo sapien
tcatattcctatctaaccttggaccaactctca

SEQ ID NO: 587388 - DNA, 33 bp, Homo sapien
tcatattcctatctaagcttggaccaactctca

SEQ ID NO: 587389 - DNA, 33 bp, Homo sapien
acagatcttcattgaccaatcactgacagactt

SEQ ID NO: 587390 - DNA, 33 bp, Homo sapien
acagatcttcattgactaatcactgacagactt

SEQ ID NO: 587391 - DNA, 33 bp, Homo sapien
aagcatgaataaaagcaatgtctaacaaatgtc

SEQ ID NO: 587392 - DNA, 33 bp, Homo sapien
aagcatgaataaaagcgatgtctaacaaatgtc

SEQ ID NO: 587393 - DNA, 33 bp, Homo sapien
tcacggacaaggagtaccttatcagaacctagg

SEQ ID NO: 587394 - DNA, 33 bp, Homo sapien
tcacggacaaggagtatcttatcagaacctagg

SEQ ID NO: 587395 - DNA, 33 bp, Homo sapien
acagaacaacgaaacaaaaggtattctgatcct

SEQ ID NO: 587396 - DNA, 33 bp, Homo sapien
acagaacaacgaaacagaaggtattctgatcct

SEQ ID NO: 587397 - DNA, 33 bp, Homo sapien
aagcataggcttggaccacagactgttcagaaa

SEQ ID NO: 587398 - DNA, 33 bp, Homo sapien
aagcataggcttggactacagactgttcagaaa

SEQ ID NO: 587399 - DNA, 33 bp, Homo sapien
atgaaatttatttaaactcacaggaatattatt

SEQ ID NO: 587400 - DNA, 33 bp, Homo sapien
atgaaatttatttaaagtcacaggaatattatt

SEQ ID NO: 587401 - DNA, 33 bp, Homo sapien
attgtgttttctagaaagggaaatcatggttta

SEQ ID NO: 587402 - DNA, 33 bp, Homo sapien
attgtgttttctagaaggggaaatcatggttta

SEQ ID NO: 587403 - DNA, 33 bp, Homo sapien
tttacatttcttcttaacacaggtaatcaacat

SEQ ID NO: 587404 - DNA, 33 bp, Homo sapien
tttacatttcttcttagcacaggtaatcaacat

SEQ ID NO: 587405 - DNA, 33 bp, Homo sapien
gtattttgacgatgaccgtaactcagtgagcag

SEQ ID NO: 587406 - DNA, 33 bp, Homo sapien
gtattttgacgatgactgtaactcagtgagcag

SEQ ID NO: 587407 - DNA, 33 bp, Homo sapien
cattgtagaaacaagcactctcttctgactcgt

SEQ ID NO: 587408 - DNA, 33 bp, Homo sapien
cattgtagaaacaagcgctctcttctgactcgt

SEQ ID NO: 587409 - DNA, 33 bp, Homo sapien
caggttgagtatggcacaaagtctcatgcatca

SEQ ID NO: 587410 - DNA, 33 bp, Homo sapien
caggttgagtatggcagaaagtctcatgcatca

SEQ ID NO: 587411 - DNA, 33 bp, Homo sapien
gcccaatgtgtgagtaagtaacaactaatcaag

SEQ ID NO: 587412 - DNA, 33 bp, Homo sapien
gcccaatgtgtgagtaggtaacaactaatcaag

SEQ ID NO: 587413 - DNA, 33 bp, Homo sapien
tctgcactgaactacaataaatgtttagtctag

SEQ ID NO: 587414 - DNA, 33 bp, Homo sapien
tctgcactgaactacagtaaatgtttagtctag

SEQ ID NO: 587415 - DNA, 33 bp, Homo sapien
ccttatttcagcataacgtttgatgggatcttt

SEQ ID NO: 587416 - DNA, 33 bp, Homo sapien
ccttatttcagcataatgtttgatgggatcttt

SEQ ID NO: 587417 - DNA, 33 bp, Homo sapien
aaccccaataacataacgcacatagcactttcc

SEQ ID NO: 587418 - DNA, 33 bp, Homo sapien
aaccccaataacataaggcacatagcactttcc

SEQ ID NO: 587419 - DNA, 33 bp, Homo sapien
atcaaacttgggcacaatgtgatagaatgaaag

SEQ ID NO: 587420 - DNA, 33 bp, Homo sapien
atcaaacttgggcacagtgtgatagaatgaaag

SEQ ID NO: 587421 - DNA, 33 bp, Homo sapien
ataaatttgtctgttacattaatcgctgataaa

SEQ ID NO: 587422 - DNA, 33 bp, Homo sapien
ataaatttgtctgttatattaatcgctgataaa

SEQ ID NO: 587423 - DNA, 33 bp, Homo sapien
tggctttcatttttccgataatccatggtgtcc

SEQ ID NO: 587424 - DNA, 33 bp, Homo sapien
tggctttcatttttcctataatccatggtgtcc

SEQ ID NO: 587425 - DNA, 33 bp, Homo sapien
tgttatatggaataagaaagatctggaagtggt

SEQ ID NO: 587426 - DNA, 33 bp, Homo sapien
tgttatatggaataaggaagatctggaagtggt

SEQ ID NO: 587427 - DNA, 33 bp, Homo sapien
gtcataataggcgacaagtattccttaaaaaga

SEQ ID NO: 587428 - DNA, 33 bp, Homo sapien
gtcataataggcgacaggtattccttaaaaaga

SEQ ID NO: 587429 - DNA, 33 bp, Homo sapien
cacacaactagcaaaaaatgaatcagcactcca

SEQ ID NO: 587430 - DNA, 33 bp, Homo sapien
cacacaactagcaaaagatgaatcagcactcca

SEQ ID NO: 587431 - DNA, 33 bp, Homo sapien
aaagacagacactatgaaacccgttgttttttt

SEQ ID NO: 587432 - DNA, 33 bp, Homo sapien
aaagacagacactatgcaacccgttgttttttt

SEQ ID NO: 587433 - DNA, 33 bp, Homo sapien
gggcaacctcatctagcccttaaagagtcctgt

SEQ ID NO: 587434 - DNA, 33 bp, Homo sapien
gggcaacctcatctagtccttaaagagtcctgt

SEQ ID NO: 587435 - DNA, 33 bp, Homo sapien
attgtatgatgcactaagatgttaggagtctaa

SEQ ID NO: 587436 - DNA, 33 bp, Homo sapien
attgtatgatgcactaggatgttaggagtctaa

SEQ ID NO: 587437 - DNA, 33 bp, Homo sapien
tacctcaattagcaaacaactcttggaagatac

SEQ ID NO: 587438 - DNA, 33 bp, Homo sapien
tacctcaattagcaaagaactcttggaagatac

SEQ ID NO: 587439 - DNA, 33 bp, Homo sapien
ggtttgtcatgttggcacattcttgtacattgt

SEQ ID NO: 587440 - DNA, 33 bp, Homo sapien
ggtttgtcatgttggcgcattcttgtacattgt

SEQ ID NO: 587441 - DNA, 33 bp, Homo sapien
gatgcacttccaacagaaaaagaatattgcatt

SEQ ID NO: 587442 - DNA, 33 bp, Homo sapien
gatgcacttccaacaggaaaagaatattgcatt

SEQ ID NO: 587443 - DNA, 33 bp, Homo sapien
gtgctttggctttttgcatttcaattgcatcta

SEQ ID NO: 587444 - DNA, 33 bp, Homo sapien
gtgctttggctttttgtatttcaattgcatcta

SEQ ID NO: 587445 - DNA, 33 bp, Homo sapien
ctaatctctgacctcaataatttaagaacaaaa

SEQ ID NO: 587446 - DNA, 33 bp, Homo sapien
ctaatctctgacctcagtaatttaagaacaaaa

SEQ ID NO: 587447 - DNA, 33 bp, Homo sapien
tctttcttttgttcctcagagctaccctgtgag

SEQ ID NO: 587448 - DNA, 33 bp, Homo sapien
tctttcttttgttccttagagctaccctgtgag

SEQ ID NO: 587449 - DNA, 33 bp, Homo sapien
agtggatgtacctggacactgaactagcacaaa

SEQ ID NO: 587450 - DNA, 33 bp, Homo sapien
agtggatgtacctggagactgaactagcacaaa

SEQ ID NO: 587451 - DNA, 33 bp, Homo sapien
gaacagacactaactaaccatctcaccacaaga

SEQ ID NO: 587452 - DNA, 33 bp, Homo sapien
gaacagacactaactagccatctcaccacaaga

SEQ ID NO: 587453 - DNA, 33 bp, Homo sapien
agaaagaacattattgaaatcagaacatatata

SEQ ID NO: 587454 - DNA, 33 bp, Homo sapien
agaaagaacattattggaatcagaacatatata

SEQ ID NO: 587455 - DNA, 33 bp, Homo sapien
agtatatttgagtctaagcctcaggacattttc

SEQ ID NO: 587456 - DNA, 33 bp, Homo sapien
agtatatttgagtctaggcctcaggacattttc

SEQ ID NO: 587457 - DNA, 33 bp, Homo sapien
atctcagaataaagccacaagagttcttcctac

SEQ ID NO: 587458 - DNA, 33 bp, Homo sapien
atctcagaataaagcctcaagagttcttcctac

SEQ ID NO: 587459 - DNA, 33 bp, Homo sapien
gatagatccttatttaagcatcgaagtttagtc

SEQ ID NO: 587460 - DNA, 33 bp, Homo sapien
gatagatccttatttatgcatcgaagtttagtc

SEQ ID NO: 587461 - DNA, 33 bp, Homo sapien
acccaagcctatgacactaaaattgacctccat

SEQ ID NO: 587462 - DNA, 33 bp, Homo sapien
acccaagcctatgacattaaaattgacctccat

SEQ ID NO: 587463 - DNA, 33 bp, Homo sapien
gttagaatgtcaaaataaatctgttcaaaacag

SEQ ID NO: 587464 - DNA, 33 bp, Homo sapien
gttagaatgtcaaaatcaatctgttcaaaacag

SEQ ID NO: 587465 - DNA, 33 bp, Homo sapien
gttagaggtgatttgaaagcttggtatcccttg

SEQ ID NO: 587466 - DNA, 33 bp, Homo sapien
gttagaggtgatttgagagcttggtatcccttg

SEQ ID NO: 587467 - DNA, 33 bp, Homo sapien
tacttagcctgaatacacatgtaaatatggaca

SEQ ID NO: 587468 - DNA, 33 bp, Homo sapien
tacttagcctgaatacgcatgtaaatatggaca

SEQ ID NO: 587469 - DNA, 33 bp, Homo sapien
accgcttgaaactgcacggggaaattgattcat

SEQ ID NO: 587470 - DNA, 33 bp, Homo sapien
accgcttgaaactgcatggggaaattgattcat

SEQ ID NO: 587471 - DNA, 33 bp, Homo sapien
tttcaagattctctaagggggaaggctcacaca

SEQ ID NO: 587472 - DNA, 33 bp, Homo sapien
tttcaagattctctaatggggaaggctcacaca

SEQ ID NO: 587473 - DNA, 33 bp, Homo sapien
tgaaatcattaaaggacgttactgagtcaacag

SEQ ID NO: 587474 - DNA, 33 bp, Homo sapien
tgaaatcattaaaggatgttactgagtcaacag

SEQ ID NO: 587475 - DNA, 33 bp, Homo sapien
cacatcaaccctttcaagtgccgttcacatcgg

SEQ ID NO: 587476 - DNA, 33 bp, Homo sapien
cacatcaaccctttcaggtgccgttcacatcgg

SEQ ID NO: 587477 - DNA, 33 bp, Homo sapien
aagtcttcttctgccaatctgtgctactctgac

SEQ ID NO: 587478 - DNA, 33 bp, Homo sapien
aagtcttcttctgccagtctgtgctactctgac

SEQ ID NO: 587479 - DNA, 33 bp, Homo sapien
atcctggactgttgacaaaactaagaaaaagag

SEQ ID NO: 587480 - DNA, 33 bp, Homo sapien
atcctggactgttgacgaaactaagaaaaagag

SEQ ID NO: 587481 - DNA, 33 bp, Homo sapien
ttatggccatactagacgttcagatagcttgaa

SEQ ID NO: 587482 - DNA, 33 bp, Homo sapien
ttatggccatactagatgttcagatagcttgaa

SEQ ID NO: 587483 - DNA, 33 bp, Homo sapien
gtggtggcaagactgcacataattcactgcatt

SEQ ID NO: 587484 - DNA, 33 bp, Homo sapien
gtggtggcaagactgcgcataattcactgcatt

SEQ ID NO: 587485 - DNA, 33 bp, Homo sapien
gctcccataaatacataagaacacgcaaaattt

SEQ ID NO: 587486 - DNA, 33 bp, Homo sapien
gctcccataaatacatgagaacacgcaaaattt

SEQ ID NO: 587487 - DNA, 33 bp, Homo sapien
cttcacctgtaaagacacaagtagactgaaaat

SEQ ID NO: 587488 - DNA, 33 bp, Homo sapien
cttcacctgtaaagacccaagtagactgaaaat

SEQ ID NO: 587489 - DNA, 33 bp, Homo sapien
ttttatttgcaagctccatggtaactgcaaatc

SEQ ID NO: 587490 - DNA, 33 bp, Homo sapien
ttttatttgcaagctctatggtaactgcaaatc

SEQ ID NO: 587491 - DNA, 33 bp, Homo sapien
gtgtatcttctttcaagaaatgtctattcattt

SEQ ID NO: 587492 - DNA, 33 bp, Homo sapien
gtgtatcttctttcaataaatgtctattcattt

SEQ ID NO: 587493 - DNA, 33 bp, Homo sapien
atccagaatctgtaagaaactcaaacaccaaga

SEQ ID NO: 587494 - DNA, 33 bp, Homo sapien
atccagaatctgtaaggaactcaaacaccaaga

SEQ ID NO: 587495 - DNA, 33 bp, Homo sapien
gcttggtaagccagacaaagtagcatgggtgtt

SEQ ID NO: 587496 - DNA, 33 bp, Homo sapien
gcttggtaagccagactaagtagcatgggtgtt

SEQ ID NO: 587497 - DNA, 33 bp, Homo sapien
ctgcagaggagcagggaaagacacatctttggg

SEQ ID NO: 587498 - DNA, 33 bp, Homo sapien
ctgcagaggagcaggggaagacacatctttggg

SEQ ID NO: 587499 - DNA, 33 bp, Homo sapien
ggcatgtcaccctttcaagatcacacaaaaaag

SEQ ID NO: 587500 - DNA, 33 bp, Homo sapien
ggcatgtcaccctttcgagatcacacaaaaaag

SEQ ID NO: 587501 - DNA, 33 bp, Homo sapien
gagaactggaggccaaataagattttgtatcat

SEQ ID NO: 587502 - DNA, 33 bp, Homo sapien
gagaactggaggccaagtaagattttgtatcat

SEQ ID NO: 587503 - DNA, 33 bp, Homo sapien
ctcaggacaatttgggaagaagtttggagaaaa

SEQ ID NO: 587504 - DNA, 33 bp, Homo sapien
ctcaggacaatttgggtagaagtttggagaaaa

SEQ ID NO: 587505 - DNA, 33 bp, Homo sapien
aaaaaaagtcttgacaatggttatattttctca

SEQ ID NO: 587506 - DNA, 33 bp, Homo sapien
aaaaaaagtcttgacagtggttatattttctca

SEQ ID NO: 587507 - DNA, 33 bp, Homo sapien
tggagatagagaacagaataaaggttaccacag

SEQ ID NO: 587508 - DNA, 33 bp, Homo sapien
tggagatagagaacagtataaaggttaccacag

SEQ ID NO: 587509 - DNA, 33 bp, Homo sapien
tggcaaattagttttgcagaagagtttaagttt

SEQ ID NO: 587510 - DNA, 33 bp, Homo sapien
tggcaaattagttttgtagaagagtttaagttt

SEQ ID NO: 587511 - DNA, 33 bp, Homo sapien
ttatttaggagtaagcaaaagaggaagccaagt

SEQ ID NO: 587512 - DNA, 33 bp, Homo sapien
ttatttaggagtaagcgaaagaggaagccaagt

SEQ ID NO: 587513 - DNA, 33 bp, Homo sapien
ctaaataaattccacacagaaggctgtttttaa

SEQ ID NO: 587514 - DNA, 33 bp, Homo sapien
ctaaataaattccacatagaaggctgtttttaa

SEQ ID NO: 587515 - DNA, 33 bp, Homo sapien
tgacctcaattatttcaatcgattatttggcac

SEQ ID NO: 587516 - DNA, 33 bp, Homo sapien
tgacctcaattatttctatcgattatttggcac

SEQ ID NO: 587517 - DNA, 33 bp, Homo sapien
ccagtctcatgatgtcagaaaggttctagattc

SEQ ID NO: 587518 - DNA, 33 bp, Homo sapien
ccagtctcatgatgtcggaaaggttctagattc

SEQ ID NO: 587519 - DNA, 33 bp, Homo sapien
agttaaaagtcactaaaccagttaaatgagatt

SEQ ID NO: 587520 - DNA, 33 bp, Homo sapien
agttaaaagtcactaagccagttaaatgagatt

SEQ ID NO: 587521 - DNA, 33 bp, Homo sapien
tgttaacaacctaatacacaaattgtgctctct

SEQ ID NO: 587522 - DNA, 33 bp, Homo sapien
tgttaacaacctaatatacaaattgtgctctct

SEQ ID NO: 587523 - DNA, 33 bp, Homo sapien
cgtaagggctttgcagacataggcgaggcacct

SEQ ID NO: 587524 - DNA, 33 bp, Homo sapien
cgtaagggctttgcaggcataggcgaggcacct

SEQ ID NO: 587525 - DNA, 33 bp, Homo sapien
gactatgtactgaagcaaggcagggatgtaaag

SEQ ID NO: 587526 - DNA, 33 bp, Homo sapien
gactatgtactgaagccaggcagggatgtaaag

SEQ ID NO: 587527 - DNA, 33 bp, Homo sapien
tgggcaaccagaagccacatgtgaaattgacaa

SEQ ID NO: 587528 - DNA, 33 bp, Homo sapien
tgggcaaccagaagccccatgtgaaattgacaa

SEQ ID NO: 587529 - DNA, 33 bp, Homo sapien
cccagctattagtgcaaatttctataggtgtca

SEQ ID NO: 587530 - DNA, 33 bp, Homo sapien
cccagctattagtgcacatttctataggtgtca

SEQ ID NO: 587531 - DNA, 33 bp, Homo sapien
tgtaaatactgtctaccctttgacctcatttga

SEQ ID NO: 587532 - DNA, 33 bp, Homo sapien
tgtaaatactgtctactctttgacctcatttga

SEQ ID NO: 587533 - DNA, 33 bp, Homo sapien
ctctcaggtgaaatagaagaattaatataaatc

SEQ ID NO: 587534 - DNA, 33 bp, Homo sapien
ctctcaggtgaaatagcagaattaatataaatc

SEQ ID NO: 587535 - DNA, 33 bp, Homo sapien
agtgtcaaatgcactgaagatgtcctgtagaat

SEQ ID NO: 587536 - DNA, 33 bp, Homo sapien
agtgtcaaatgcactggagatgtcctgtagaat

SEQ ID NO: 587537 - DNA, 33 bp, Homo sapien
gagctggttcggcccaagttaaaagttgatgat

SEQ ID NO: 587538 - DNA, 33 bp, Homo sapien
gagctggttcggcccatgttaaaagttgatgat

SEQ ID NO: 587539 - DNA, 33 bp, Homo sapien
atgaaaccataaaccaagacttgaataaatgtt

SEQ ID NO: 587540 - DNA, 33 bp, Homo sapien
atgaaaccataaaccatgacttgaataaatgtt

SEQ ID NO: 587541 - DNA, 33 bp, Homo sapien
taatatcattcttcaccggtcagttctctgctt

SEQ ID NO: 587542 - DNA, 33 bp, Homo sapien
taatatcattcttcactggtcagttctctgctt

SEQ ID NO: 587543 - DNA, 33 bp, Homo sapien
ctctatacccgtctaactgtagctatacattac

SEQ ID NO: 587544 - DNA, 33 bp, Homo sapien
ctctatacccgtctaattgtagctatacattac

SEQ ID NO: 587545 - DNA, 33 bp, Homo sapien
catagatgttggtgaaaatacttattcatttaa

SEQ ID NO: 587546 - DNA, 33 bp, Homo sapien
catagatgttggtgaagatacttattcatttaa

SEQ ID NO: 587547 - DNA, 33 bp, Homo sapien
tgaaagatgcatgagacacttatttacaaggtt

SEQ ID NO: 587548 - DNA, 33 bp, Homo sapien
tgaaagatgcatgagagacttatttacaaggtt

SEQ ID NO: 587549 - DNA, 33 bp, Homo sapien
cctaacttcttgttcaaattgactcacagaaaa

SEQ ID NO: 587550 - DNA, 33 bp, Homo sapien
cctaacttcttgttcagattgactcacagaaaa

SEQ ID NO: 587551 - DNA, 33 bp, Homo sapien
cctcctaatcccttacaccattattgacactat

SEQ ID NO: 587552 - DNA, 33 bp, Homo sapien
cctcctaatcccttaccccattattgacactat

SEQ ID NO: 587553 - DNA, 33 bp, Homo sapien
acttttaggaaacctacatctcagaggtgaaga

SEQ ID NO: 587554 - DNA, 33 bp, Homo sapien
acttttaggaaacctatatctcagaggtgaaga

SEQ ID NO: 587555 - DNA, 33 bp, Homo sapien
gttgcttcttaaactccgagtctttaacaccga

SEQ ID NO: 587556 - DNA, 33 bp, Homo sapien
gttgcttcttaaactctgagtctttaacaccga

SEQ ID NO: 587557 - DNA, 33 bp, Homo sapien
cacctctgatgaattaaaacggaatgaccaagc

SEQ ID NO: 587558 - DNA, 33 bp, Homo sapien
cacctctgatgaattagaacggaatgaccaagc

SEQ ID NO: 587559 - DNA, 33 bp, Homo sapien
gagagaaagaatgagacacaagtgaggaatttt

SEQ ID NO: 587560 - DNA, 33 bp, Homo sapien
gagagaaagaatgagatacaagtgaggaatttt

SEQ ID NO: 587561 - DNA, 33 bp, Homo sapien
atgtttcttcaattcaaagaaattctcaactat

SEQ ID NO: 587562 - DNA, 33 bp, Homo sapien
atgtttcttcaattcagagaaattctcaactat

SEQ ID NO: 587563 - DNA, 33 bp, Homo sapien
gtttagatgagcaaaaacaggataaagacactt

SEQ ID NO: 587564 - DNA, 33 bp, Homo sapien
gtttagatgagcaaaagcaggataaagacactt

SEQ ID NO: 587565 - DNA, 33 bp, Homo sapien
tacaccagagactatgaatgactggtgatgtaa

SEQ ID NO: 587566 - DNA, 33 bp, Homo sapien
tacaccagagactatggatgactggtgatgtaa

SEQ ID NO: 587567 - DNA, 33 bp, Homo sapien
ttttcaggaattggtcactctttcagccaactc

SEQ ID NO: 587568 - DNA, 33 bp, Homo sapien
ttttcaggaattggtctctctttcagccaactc

SEQ ID NO: 587569 - DNA, 33 bp, Homo sapien
ttcttcctgctgtttgcatcattcttttgaaga

SEQ ID NO: 587570 - DNA, 33 bp, Homo sapien
ttcttcctgctgtttgtatcattcttttgaaga

SEQ ID NO: 587571 - DNA, 33 bp, Homo sapien
acatgaaaccaatcaaaaccatattgatgtcat

SEQ ID NO: 587572 - DNA, 33 bp, Homo sapien
acatgaaaccaatcaacaccatattgatgtcat

SEQ ID NO: 587573 - DNA, 33 bp, Homo sapien
gtgttaagggcatgacaatgtatttttcacaag

SEQ ID NO: 587574 - DNA, 33 bp, Homo sapien
gtgttaagggcatgacgatgtatttttcacaag

SEQ ID NO: 587575 - DNA, 33 bp, Homo sapien
aattgcctatcaacaaaaactgtgtactgaaac

SEQ ID NO: 587576 - DNA, 33 bp, Homo sapien
aattgcctatcaacaataactgtgtactgaaac

SEQ ID NO: 587577 - DNA, 33 bp, Homo sapien
tattatgtatgactagcactgtacaaaatatag

SEQ ID NO: 587578 - DNA, 33 bp, Homo sapien
tattatgtatgactaggactgtacaaaatatag

SEQ ID NO: 587579 - DNA, 33 bp, Homo sapien
atatgccaaactcttacattcttcttttgttgt

SEQ ID NO: 587580 - DNA, 33 bp, Homo sapien
atatgccaaactcttatattcttcttttgttgt

SEQ ID NO: 587581 - DNA, 33 bp, Homo sapien
atcccaggtcctagaagcagggttctctgctct

SEQ ID NO: 587582 - DNA, 33 bp, Homo sapien
atcccaggtcctagaatcagggttctctgctct

SEQ ID NO: 587583 - DNA, 33 bp, Homo sapien
taaataagtacatgcaaaaaactttgtaattca

SEQ ID NO: 587584 - DNA, 33 bp, Homo sapien
taaataagtacatgcagaaaactttgtaattca

SEQ ID NO: 587585 - DNA, 33 bp, Homo sapien
tgtctagtctgttggggatataaacacctggcc

SEQ ID NO: 587586 - DNA, 33 bp, Homo sapien
tgtctagtctgttgggtatataaacacctggcc

SEQ ID NO: 587587 - DNA, 33 bp, Homo sapien
taggctggccttgtgacgtatgctattccagct

SEQ ID NO: 587588 - DNA, 33 bp, Homo sapien
taggctggccttgtgatgtatgctattccagct

SEQ ID NO: 587589 - DNA, 33 bp, Homo sapien
atacattacctagggaacgagtagatttgtttc

SEQ ID NO: 587590 - DNA, 33 bp, Homo sapien
atacattacctagggatcgagtagatttgtttc

SEQ ID NO: 587591 - DNA, 33 bp, Homo sapien
tccggaaagggctataacttcaccaagctcccg

SEQ ID NO: 587592 - DNA, 33 bp, Homo sapien
tccggaaagggctatatcttcaccaagctcccg

SEQ ID NO: 587593 - DNA, 33 bp, Homo sapien
aattgggaaggctatcaccatgcatgatttggg

SEQ ID NO: 587594 - DNA, 33 bp, Homo sapien
aattgggaaggctatctccatgcatgatttggg

SEQ ID NO: 587595 - DNA, 33 bp, Homo sapien
gcaagttcaacaattacgtgtgttaacgcagga

SEQ ID NO: 587596 - DNA, 33 bp, Homo sapien
gcaagttcaacaattatgtgtgttaacgcagga

SEQ ID NO: 587597 - DNA, 33 bp, Homo sapien
gtactactttgcaatgacagccctaggaaacta

SEQ ID NO: 587598 - DNA, 33 bp, Homo sapien
gtactactttgcaatggcagccctaggaaacta

SEQ ID NO: 587599 - DNA, 33 bp, Homo sapien
cattctaactggaaaccatgtgatcccgacatt

SEQ ID NO: 587600 - DNA, 33 bp, Homo sapien
cattctaactggaaacgatgtgatcccgacatt

SEQ ID NO: 587601 - DNA, 33 bp, Homo sapien
aagagcattcttttcacgtgatacttcagataa

SEQ ID NO: 587602 - DNA, 33 bp, Homo sapien
aagagcattcttttcatgtgatacttcagataa

SEQ ID NO: 587603 - DNA, 33 bp, Homo sapien
atgaatttgataaaacggtgaccttactcacat

SEQ ID NO: 587604 - DNA, 33 bp, Homo sapien
atgaatttgataaaactgtgaccttactcacat

SEQ ID NO: 587605 - DNA, 33 bp, Homo sapien
actacaaatcggttaaaacagagaactaaaatt

SEQ ID NO: 587606 - DNA, 33 bp, Homo sapien
actacaaatcggttaacacagagaactaaaatt

SEQ ID NO: 587607 - DNA, 33 bp, Homo sapien
ggaatgaaaactctctcacaaagaataggaatt

SEQ ID NO: 587608 - DNA, 33 bp, Homo sapien
ggaatgaaaactctctgacaaagaataggaatt

SEQ ID NO: 587609 - DNA, 33 bp, Homo sapien
cttattccaaggccaactaagagaagataattc

SEQ ID NO: 587610 - DNA, 33 bp, Homo sapien
cttattccaaggccaagtaagagaagataattc

SEQ ID NO: 587611 - DNA, 33 bp, Homo sapien
ggtgtgtacccggataacctcatgactggagtt

SEQ ID NO: 587612 - DNA, 33 bp, Homo sapien
ggtgtgtacccggatagcctcatgactggagtt

SEQ ID NO: 587613 - DNA, 33 bp, Homo sapien
agctacagcaggaacaaaggattatacaggaat

SEQ ID NO: 587614 - DNA, 33 bp, Homo sapien
agctacagcaggaacagaggattatacaggaat

SEQ ID NO: 587615 - DNA, 33 bp, Homo sapien
tgtgattatagcgtgaagtagagaggaccatac

SEQ ID NO: 587616 - DNA, 33 bp, Homo sapien
tgtgattatagcgtgaggtagagaggaccatac

SEQ ID NO: 587617 - DNA, 33 bp, Homo sapien
agtagttgttcaataaatgtttggtactttgta

SEQ ID NO: 587618 - DNA, 33 bp, Homo sapien
agtagttgttcaataagtgtttggtactttgta

SEQ ID NO: 587619 - DNA, 33 bp, Homo sapien
ctcttggtgttaaatcagactaacaaatatgca

SEQ ID NO: 587620 - DNA, 33 bp, Homo sapien
ctcttggtgttaaatcggactaacaaatatgca

SEQ ID NO: 587621 - DNA, 33 bp, Homo sapien
aagccatcctataacgacatgcctctgagtttc

SEQ ID NO: 587622 - DNA, 33 bp, Homo sapien
aagccatcctataacgccatgcctctgagtttc

SEQ ID NO: 587623 - DNA, 33 bp, Homo sapien
atttcaacgtatgaaacgtgagagggtgcaaac

SEQ ID NO: 587624 - DNA, 33 bp, Homo sapien
atttcaacgtatgaaatgtgagagggtgcaaac

SEQ ID NO: 587625 - DNA, 33 bp, Homo sapien
atgtatggaggctggacgtgccaataacaggtt

SEQ ID NO: 587626 - DNA, 33 bp, Homo sapien
atgtatggaggctggatgtgccaataacaggtt

SEQ ID NO: 587627 - DNA, 33 bp, Homo sapien
agagagtaacacagataagtcttagctccatgt

SEQ ID NO: 587628 - DNA, 33 bp, Homo sapien
agagagtaacacagattagtcttagctccatgt

SEQ ID NO: 587629 - DNA, 33 bp, Homo sapien
tactcctccataataacaaatctcagttaatgg

SEQ ID NO: 587630 - DNA, 33 bp, Homo sapien
tactcctccataataataaatctcagttaatgg

SEQ ID NO: 587631 - DNA, 33 bp, Homo sapien
ttgctgaatgaaaaataaaacttgttactcacc

SEQ ID NO: 587632 - DNA, 33 bp, Homo sapien
ttgctgaatgaaaaatcaaacttgttactcacc

SEQ ID NO: 587633 - DNA, 33 bp, Homo sapien
ctttcaatatatttgaaactcagcattaatatc

SEQ ID NO: 587634 - DNA, 33 bp, Homo sapien
ctttcaatatatttgagactcagcattaatatc

SEQ ID NO: 587635 - DNA, 33 bp, Homo sapien
gcatgacatgctaagaatatgttattttgtgct

SEQ ID NO: 587636 - DNA, 33 bp, Homo sapien
gcatgacatgctaagattatgttattttgtgct

SEQ ID NO: 587637 - DNA, 33 bp, Homo sapien
ttcagtccttttgtaacaaaaatgcagtctctc

SEQ ID NO: 587638 - DNA, 33 bp, Homo sapien
ttcagtccttttgtaataaaaatgcagtctctc

SEQ ID NO: 587639 - DNA, 33 bp, Homo sapien
cagaagattggggtaaatcctttgaccttctat

SEQ ID NO: 587640 - DNA, 33 bp, Homo sapien
cagaagattggggtaattcctttgaccttctat

SEQ ID NO: 587641 - DNA, 33 bp, Homo sapien
ggctggaacttgagataagctgattgtttacca

SEQ ID NO: 587642 - DNA, 33 bp, Homo sapien
ggctggaacttgagatgagctgattgtttacca

SEQ ID NO: 587643 - DNA, 33 bp, Homo sapien
agaatagcaatgtagccctaactatcttcctga

SEQ ID NO: 587644 - DNA, 33 bp, Homo sapien
agaatagcaatgtagctctaactatcttcctga

SEQ ID NO: 587645 - DNA, 33 bp, Homo sapien
tgcctgtcctgcatcaatattgcttgtttaaca

SEQ ID NO: 587646 - DNA, 33 bp, Homo sapien
tgcctgtcctgcatcagtattgcttgtttaaca

SEQ ID NO: 587647 - DNA, 33 bp, Homo sapien
tgcactagcaacaaaaccagatattattgagaa

SEQ ID NO: 587648 - DNA, 33 bp, Homo sapien
tgcactagcaacaaaatcagatattattgagaa

SEQ ID NO: 587649 - DNA, 33 bp, Homo sapien
cacattttgagcctaacatacctttaaaatacc

SEQ ID NO: 587650 - DNA, 33 bp, Homo sapien
cacattttgagcctaatatacctttaaaatacc

SEQ ID NO: 587651 - DNA, 33 bp, Homo sapien
gcatcttgaaatctaacagaaatgtggaaaaag

SEQ ID NO: 587652 - DNA, 33 bp, Homo sapien
gcatcttgaaatctaagagaaatgtggaaaaag

SEQ ID NO: 587653 - DNA, 33 bp, Homo sapien
gctgtagccacctaaaaaagtttttatcatggc

SEQ ID NO: 587654 - DNA, 33 bp, Homo sapien
gctgtagccacctaaagaagtttttatcatggc

SEQ ID NO: 587655 - DNA, 33 bp, Homo sapien
ttagccatgtgtggtaccttttacatctccaga

SEQ ID NO: 587656 - DNA, 33 bp, Homo sapien
ttagccatgtgtggtatcttttacatctccaga

SEQ ID NO: 587657 - DNA, 33 bp, Homo sapien
aacctggtgtttataacgtgtttagaagactca

SEQ ID NO: 587658 - DNA, 33 bp, Homo sapien
aacctggtgtttataatgtgtttagaagactca

SEQ ID NO: 587659 - DNA, 33 bp, Homo sapien
gctgaaacaaacagtacatccttgtgacagcct

SEQ ID NO: 587660 - DNA, 33 bp, Homo sapien
gctgaaacaaacagtatatccttgtgacagcct

SEQ ID NO: 587661 - DNA, 33 bp, Homo sapien
tagcaactattcattagcaagaaagcataaaag

SEQ ID NO: 587662 - DNA, 33 bp, Homo sapien
tagcaactattcattatcaagaaagcataaaag

SEQ ID NO: 587663 - DNA, 33 bp, Homo sapien
attgaatgtactctcaatgaatgggcaatgtac

SEQ ID NO: 587664 - DNA, 33 bp, Homo sapien
attgaatgtactctcagtgaatgggcaatgtac

SEQ ID NO: 587665 - DNA, 33 bp, Homo sapien
tgtacattatgaacctcagcatccactataaag

SEQ ID NO: 587666 - DNA, 33 bp, Homo sapien
tgtacattatgaacctgagcatccactataaag

SEQ ID NO: 587667 - DNA, 33 bp, Homo sapien
ggtagtctactatttagggcaagtatgtaccgt

SEQ ID NO: 587668 - DNA, 33 bp, Homo sapien
ggtagtctactatttatggcaagtatgtaccgt

SEQ ID NO: 587669 - DNA, 33 bp, Homo sapien
tccaagattaaaccagaaataaactgaatctct

SEQ ID NO: 587670 - DNA, 33 bp, Homo sapien
tccaagattaaaccaggaataaactgaatctct

SEQ ID NO: 587671 - DNA, 33 bp, Homo sapien
ggagcctacctgagggaaagagactaggaggag

SEQ ID NO: 587672 - DNA, 33 bp, Homo sapien
ggagcctacctgagggcaagagactaggaggag

SEQ ID NO: 587673 - DNA, 33 bp, Homo sapien
tcatgagaggaactaaccatcttttatctgctc

SEQ ID NO: 587674 - DNA, 33 bp, Homo sapien
tcatgagaggaactaagcatcttttatctgctc

SEQ ID NO: 587675 - DNA, 33 bp, Homo sapien
tagaaacatgacctccaagctactgtttatata

SEQ ID NO: 587676 - DNA, 33 bp, Homo sapien
tagaaacatgacctcccagctactgtttatata

SEQ ID NO: 587677 - DNA, 33 bp, Homo sapien
caccatctgggtgagaaacaagtgattagggtg

SEQ ID NO: 587678 - DNA, 33 bp, Homo sapien
caccatctgggtgagacacaagtgattagggtg

SEQ ID NO: 587679 - DNA, 33 bp, Homo sapien
actgcagaaaaagcaacgcttgtactttcaaga

SEQ ID NO: 587680 - DNA, 33 bp, Homo sapien
actgcagaaaaagcaaggcttgtactttcaaga

SEQ ID NO: 587681 - DNA, 33 bp, Homo sapien
tgtgatggtattaggacaatgaaggcctttggg

SEQ ID NO: 587682 - DNA, 33 bp, Homo sapien
tgtgatggtattaggagaatgaaggcctttggg

SEQ ID NO: 587683 - DNA, 33 bp, Homo sapien
aaacagacacttcttaaaatgaggtatacaagt

SEQ ID NO: 587684 - DNA, 33 bp, Homo sapien
aaacagacacttcttacaatgaggtatacaagt

SEQ ID NO: 587685 - DNA, 33 bp, Homo sapien
agatcagatgattgtacgcaggaggctttattt

SEQ ID NO: 587686 - DNA, 33 bp, Homo sapien
agatcagatgattgtaggcaggaggctttattt

SEQ ID NO: 587687 - DNA, 33 bp, Homo sapien
ctttcttagtttctcacggtggagcccatcaaa

SEQ ID NO: 587688 - DNA, 33 bp, Homo sapien
ctttcttagtttctcagggtggagcccatcaaa

SEQ ID NO: 587689 - DNA, 33 bp, Homo sapien
tgtctggtgtttctccagctccagttgagtgct

SEQ ID NO: 587690 - DNA, 33 bp, Homo sapien
tgtctggtgtttctccggctccagttgagtgct

SEQ ID NO: 587691 - DNA, 33 bp, Homo sapien
ttgttttttaaccagacgctacatttgggttcc

SEQ ID NO: 587692 - DNA, 33 bp, Homo sapien
ttgttttttaaccagatgctacatttgggttcc

SEQ ID NO: 587693 - DNA, 33 bp, Homo sapien
gtactgagtgtacataaagagatttagggaaaa

SEQ ID NO: 587694 - DNA, 33 bp, Homo sapien
gtactgagtgtacatagagagatttagggaaaa

SEQ ID NO: 587695 - DNA, 33 bp, Homo sapien
tagtttatttgggagaaaacctcagaaagcaca

SEQ ID NO: 587696 - DNA, 33 bp, Homo sapien
tagtttatttgggagataacctcagaaagcaca

SEQ ID NO: 587697 - DNA, 33 bp, Homo sapien
tttacttagttcacaactgatcaaaacaataca

SEQ ID NO: 587698 - DNA, 33 bp, Homo sapien
tttacttagttcacaattgatcaaaacaataca

SEQ ID NO: 587699 - DNA, 33 bp, Homo sapien
gatggaagtaggaacacgaaaagggcaagtgtg

SEQ ID NO: 587700 - DNA, 33 bp, Homo sapien
gatggaagtaggaacatgaaaagggcaagtgtg

SEQ ID NO: 587701 - DNA, 33 bp, Homo sapien
cttgtagctaccagacacatttgcatgatccaa

SEQ ID NO: 587702 - DNA, 33 bp, Homo sapien
cttgtagctaccagacccatttgcatgatccaa

SEQ ID NO: 587703 - DNA, 33 bp, Homo sapien
ttgagtaaaatagaaaagcatggatttgctgtt

SEQ ID NO: 587704 - DNA, 33 bp, Homo sapien
ttgagtaaaatagaaaggcatggatttgctgtt

SEQ ID NO: 587705 - DNA, 33 bp, Homo sapien
gatgaaagtgttcggcaattaaccatgaatgac

SEQ ID NO: 587706 - DNA, 33 bp, Homo sapien
gatgaaagtgttcggcgattaaccatgaatgac

SEQ ID NO: 587707 - DNA, 33 bp, Homo sapien
tgtgtagagtcacagacaattcaattttttcaa

SEQ ID NO: 587708 - DNA, 33 bp, Homo sapien
tgtgtagagtcacagataattcaattttttcaa

SEQ ID NO: 587709 - DNA, 33 bp, Homo sapien
accataaactaaatgccgaccacttttttctca

SEQ ID NO: 587710 - DNA, 33 bp, Homo sapien
accataaactaaatgcggaccacttttttctca

SEQ ID NO: 587711 - DNA, 33 bp, Homo sapien
ttcctttgagggttgaatagaactattttgttt

SEQ ID NO: 587712 - DNA, 33 bp, Homo sapien
ttcctttgagggttgactagaactattttgttt

SEQ ID NO: 587713 - DNA, 33 bp, Homo sapien
atgaacataaagatggaaacgatgctgaggact

SEQ ID NO: 587714 - DNA, 33 bp, Homo sapien
atgaacataaagatggtaacgatgctgaggact

SEQ ID NO: 587715 - DNA, 33 bp, Homo sapien
gtaccacctgaatctaaaatgaacattgaaaaa

SEQ ID NO: 587716 - DNA, 33 bp, Homo sapien
gtaccacctgaatctacaatgaacattgaaaaa

SEQ ID NO: 587717 - DNA, 33 bp, Homo sapien
taaataaacatggtagattggagtaagttcttt

SEQ ID NO: 587718 - DNA, 33 bp, Homo sapien
taaataaacatggtaggttggagtaagttcttt

SEQ ID NO: 587719 - DNA, 33 bp, Homo sapien
tgaccttaagtgcttcacccatcttggccttcc

SEQ ID NO: 587720 - DNA, 33 bp, Homo sapien
tgaccttaagtgcttcgcccatcttggccttcc

SEQ ID NO: 587721 - DNA, 33 bp, Homo sapien
agccatttacaaatctcagagttagccatatac

SEQ ID NO: 587722 - DNA, 33 bp, Homo sapien
agccatttacaaatctgagagttagccatatac

SEQ ID NO: 587723 - DNA, 33 bp, Homo sapien
tatcatttctgtgaaactgccaaagccacaaga

SEQ ID NO: 587724 - DNA, 33 bp, Homo sapien
tatcatttctgtgaaattgccaaagccacaaga

SEQ ID NO: 587725 - DNA, 33 bp, Homo sapien
ggttcacctgctataaataagaaaggagaattt

SEQ ID NO: 587726 - DNA, 33 bp, Homo sapien
ggttcacctgctataattaagaaaggagaattt

SEQ ID NO: 587727 - DNA, 33 bp, Homo sapien
ttgcaatgaatgatagaacaaaagttattaagt

SEQ ID NO: 587728 - DNA, 33 bp, Homo sapien
ttgcaatgaatgataggacaaaagttattaagt

SEQ ID NO: 587729 - DNA, 33 bp, Homo sapien
taagtgattcaaactaaatgacaggaatgaaga

SEQ ID NO: 587730 - DNA, 33 bp, Homo sapien
taagtgattcaaactacatgacaggaatgaaga

SEQ ID NO: 587731 - DNA, 33 bp, Homo sapien
catctacactagaatactaaggtgtcagcaaat

SEQ ID NO: 587732 - DNA, 33 bp, Homo sapien
catctacactagaatattaaggtgtcagcaaat

SEQ ID NO: 587733 - DNA, 33 bp, Homo sapien
cagggatttccttttcaatcatccttctcaccc

SEQ ID NO: 587734 - DNA, 33 bp, Homo sapien
cagggatttccttttccatcatccttctcaccc

SEQ ID NO: 587735 - DNA, 33 bp, Homo sapien
aaaaataatcatatacagggccataaaagaagt

SEQ ID NO: 587736 - DNA, 33 bp, Homo sapien
aaaaataatcatatactgggccataaaagaagt

SEQ ID NO: 587737 - DNA, 33 bp, Homo sapien
cagcaaattgaaaagacgaagattggaatgaaa

SEQ ID NO: 587738 - DNA, 33 bp, Homo sapien
cagcaaattgaaaagatgaagattggaatgaaa

SEQ ID NO: 587739 - DNA, 33 bp, Homo sapien
ctcattaggaataaaacctctaccattgtgtat

SEQ ID NO: 587740 - DNA, 33 bp, Homo sapien
ctcattaggaataaaatctctaccattgtgtat

SEQ ID NO: 587741 - DNA, 33 bp, Homo sapien
aacctgcagaaattcacacaagaagagaggaat

SEQ ID NO: 587742 - DNA, 33 bp, Homo sapien
aacctgcagaaattcatacaagaagagaggaat

SEQ ID NO: 587743 - DNA, 33 bp, Homo sapien
cagtgatttttggtgaccctttcaaccccaaca

SEQ ID NO: 587744 - DNA, 33 bp, Homo sapien
cagtgatttttggtgatcctttcaaccccaaca

SEQ ID NO: 587745 - DNA, 33 bp, Homo sapien
cctgcaataataaacccgctgcagtgatagcaa

SEQ ID NO: 587746 - DNA, 33 bp, Homo sapien
cctgcaataataaacctgctgcagtgatagcaa

SEQ ID NO: 587747 - DNA, 33 bp, Homo sapien
ttgtcctgctgacacaactcccagacttggata

SEQ ID NO: 587748 - DNA, 33 bp, Homo sapien
ttgtcctgctgacacagctcccagacttggata

SEQ ID NO: 587749 - DNA, 33 bp, Homo sapien
agcctgtatttcaaaaaggcaatgacaaatcca

SEQ ID NO: 587750 - DNA, 33 bp, Homo sapien
agcctgtatttcaaaagggcaatgacaaatcca

SEQ ID NO: 587751 - DNA, 33 bp, Homo sapien
catgaaacatcctctcacagtcacctgtctcat

SEQ ID NO: 587752 - DNA, 33 bp, Homo sapien
catgaaacatcctctcgcagtcacctgtctcat

SEQ ID NO: 587753 - DNA, 33 bp, Homo sapien
atggacccgaataactaacaatcacgttggagg

SEQ ID NO: 587754 - DNA, 33 bp, Homo sapien
atggacccgaataactgacaatcacgttggagg

SEQ ID NO: 587755 - DNA, 33 bp, Homo sapien
gcaatgaccttcaatccatcaagaaactggagg

SEQ ID NO: 587756 - DNA, 33 bp, Homo sapien
gcaatgaccttcaatctatcaagaaactggagg

SEQ ID NO: 587757 - DNA, 33 bp, Homo sapien
gggagaggaaaatatgccaactaaaccaaaccc

SEQ ID NO: 587758 - DNA, 33 bp, Homo sapien
gggagaggaaaatatggcaactaaaccaaaccc

SEQ ID NO: 587759 - DNA, 33 bp, Homo sapien
aaaactgacattcaaaaaatctcctgagaaata

SEQ ID NO: 587760 - DNA, 33 bp, Homo sapien
aaaactgacattcaaagaatctcctgagaaata

SEQ ID NO: 587761 - DNA, 33 bp, Homo sapien
cccatgggcttcagtaataaaacctatgtttca

SEQ ID NO: 587762 - DNA, 33 bp, Homo sapien
cccatgggcttcagtactaaaacctatgtttca

SEQ ID NO: 587763 - DNA, 33 bp, Homo sapien
agtctttgttggtcaacgagactcttcctgcta

SEQ ID NO: 587764 - DNA, 33 bp, Homo sapien
agtctttgttggtcaatgagactcttcctgcta

SEQ ID NO: 587765 - DNA, 33 bp, Homo sapien
ccaccataatagtgaaataaagctttgctcact

SEQ ID NO: 587766 - DNA, 33 bp, Homo sapien
ccaccataatagtgaactaaagctttgctcact

SEQ ID NO: 587767 - DNA, 33 bp, Homo sapien
gggttgaaataaaatacaagtgcagaagaactg

SEQ ID NO: 587768 - DNA, 33 bp, Homo sapien
gggttgaaataaaatagaagtgcagaagaactg

SEQ ID NO: 587769 - DNA, 33 bp, Homo sapien
gaggggatatgagggaaagttatgaaatgttat

SEQ ID NO: 587770 - DNA, 33 bp, Homo sapien
gaggggatatgagggacagttatgaaatgttat

SEQ ID NO: 587771 - DNA, 33 bp, Homo sapien
tctgtttcttacaaccacaagagcagggcacag

SEQ ID NO: 587772 - DNA, 33 bp, Homo sapien
tctgtttcttacaaccgcaagagcagggcacag

SEQ ID NO: 587773 - DNA, 33 bp, Homo sapien
gcagcatcgtgagaacagtagggagaaagggtg

SEQ ID NO: 587774 - DNA, 33 bp, Homo sapien
gcagcatcgtgagaacggtagggagaaagggtg

SEQ ID NO: 587775 - DNA, 33 bp, Homo sapien
agatggttagtctccaaagcttgaggttttagg

SEQ ID NO: 587776 - DNA, 33 bp, Homo sapien
agatggttagtctccacagcttgaggttttagg

SEQ ID NO: 587777 - DNA, 33 bp, Homo sapien
agcacaaccaaagcagaactttgaattcattgc

SEQ ID NO: 587778 - DNA, 33 bp, Homo sapien
agcacaaccaaagcaggactttgaattcattgc

SEQ ID NO: 587779 - DNA, 33 bp, Homo sapien
ttaaagaaaaacccggaagtcatcctaattcct

SEQ ID NO: 587780 - DNA, 33 bp, Homo sapien
ttaaagaaaaacccgggagtcatcctaattcct

SEQ ID NO: 587781 - DNA, 33 bp, Homo sapien
tttaaagtttacatggaatctctgtttccactg

SEQ ID NO: 587782 - DNA, 33 bp, Homo sapien
tttaaagtttacatgggatctctgtttccactg

SEQ ID NO: 587783 - DNA, 33 bp, Homo sapien
gaatatccatctctgtaaagaaaccgactcagc

SEQ ID NO: 587784 - DNA, 33 bp, Homo sapien
gaatatccatctctgtgaagaaaccgactcagc

SEQ ID NO: 587785 - DNA, 33 bp, Homo sapien
agagggtagacccagacgatacctggaaattat

SEQ ID NO: 587786 - DNA, 33 bp, Homo sapien
agagggtagacccagatgatacctggaaattat

SEQ ID NO: 587787 - DNA, 33 bp, Homo sapien
aactccatgttccttccaccactatcccacact

SEQ ID NO: 587788 - DNA, 33 bp, Homo sapien
aactccatgttccttctaccactatcccacact

SEQ ID NO: 587789 - DNA, 33 bp, Homo sapien
caacagaaatctgatacaaaatgcttaaatgac

SEQ ID NO: 587790 - DNA, 33 bp, Homo sapien
caacagaaatctgatataaaatgcttaaatgac

SEQ ID NO: 587791 - DNA, 33 bp, Homo sapien
atggctaataaacataagaaaatttcaaccata

SEQ ID NO: 587792 - DNA, 33 bp, Homo sapien
atggctaataaacatatgaaaatttcaaccata

SEQ ID NO: 587793 - DNA, 33 bp, Homo sapien
ttggtgaagatatggcactacagaaactcatat

SEQ ID NO: 587794 - DNA, 33 bp, Homo sapien
ttggtgaagatatggcgctacagaaactcatat

SEQ ID NO: 587795 - DNA, 33 bp, Homo sapien
tacagaaactcatatacactactggcaagtaaa

SEQ ID NO: 587796 - DNA, 33 bp, Homo sapien
tacagaaactcatatatactactggcaagtaaa

SEQ ID NO: 587797 - DNA, 33 bp, Homo sapien
tactatgagtaataaaattccttgtctctgacc

SEQ ID NO: 587798 - DNA, 33 bp, Homo sapien
tactatgagtaataaagttccttgtctctgacc

SEQ ID NO: 587799 - DNA, 33 bp, Homo sapien
tgtttttcataaaaccagaacaaatgaccaaga

SEQ ID NO: 587800 - DNA, 33 bp, Homo sapien
tgtttttcataaaaccggaacaaatgaccaaga

SEQ ID NO: 587801 - DNA, 33 bp, Homo sapien
tagctatgaaagagaaaggtgacaggcacaagc

SEQ ID NO: 587802 - DNA, 33 bp, Homo sapien
tagctatgaaagagaagggtgacaggcacaagc

SEQ ID NO: 587803 - DNA, 33 bp, Homo sapien
ttctctttcatagctagctgttttatagattgg

SEQ ID NO: 587804 - DNA, 33 bp, Homo sapien
ttctctttcatagctatctgttttatagattgg

SEQ ID NO: 587805 - DNA, 33 bp, Homo sapien
gctgctgctatcacagactactctgattttact

SEQ ID NO: 587806 - DNA, 33 bp, Homo sapien
gctgctgctatcacagtctactctgattttact

SEQ ID NO: 587807 - DNA, 33 bp, Homo sapien
gaaaatgaaataagaaagcaaactctaattctg

SEQ ID NO: 587808 - DNA, 33 bp, Homo sapien
gaaaatgaaataagaaggcaaactctaattctg

SEQ ID NO: 587809 - DNA, 33 bp, Homo sapien
gatgattggcttcaaaatgcctcatagttccat

SEQ ID NO: 587810 - DNA, 33 bp, Homo sapien
gatgattggcttcaaactgcctcatagttccat

SEQ ID NO: 587811 - DNA, 33 bp, Homo sapien
taggagctccttgtgcaaaggaatgatgtcttt

SEQ ID NO: 587812 - DNA, 33 bp, Homo sapien
taggagctccttgtgcgaaggaatgatgtcttt

SEQ ID NO: 587813 - DNA, 33 bp, Homo sapien
ttgatggcatttagggaaatttttagcactgaa

SEQ ID NO: 587814 - DNA, 33 bp, Homo sapien
ttgatggcatttaggggaatttttagcactgaa

SEQ ID NO: 587815 - DNA, 33 bp, Homo sapien
gtaaattttaaaatacaccgtatgttgcttata

SEQ ID NO: 587816 - DNA, 33 bp, Homo sapien
gtaaattttaaaatacgccgtatgttgcttata

SEQ ID NO: 587817 - DNA, 33 bp, Homo sapien
atgctgttacaggaaaacttaaattacatatat

SEQ ID NO: 587818 - DNA, 33 bp, Homo sapien
atgctgttacaggaaagcttaaattacatatat

SEQ ID NO: 587819 - DNA, 33 bp, Homo sapien
aaaaaaatatctggacaaatgcctaaggaatag

SEQ ID NO: 587820 - DNA, 33 bp, Homo sapien
aaaaaaatatctggacgaatgcctaaggaatag

SEQ ID NO: 587821 - DNA, 33 bp, Homo sapien
tggagcaaataacgtcaccttcatcaggacact

SEQ ID NO: 587822 - DNA, 33 bp, Homo sapien
tggagcaaataacgtcgccttcatcaggacact

SEQ ID NO: 587823 - DNA, 33 bp, Homo sapien
tgccgagctcgcttgaacagcacatactgagcc

SEQ ID NO: 587824 - DNA, 33 bp, Homo sapien
tgccgagctcgcttgaccagcacatactgagcc

SEQ ID NO: 587825 - DNA, 33 bp, Homo sapien
ataactctggtccaggaagctgcactagctaga

SEQ ID NO: 587826 - DNA, 33 bp, Homo sapien
ataactctggtccagggagctgcactagctaga

SEQ ID NO: 587827 - DNA, 33 bp, Homo sapien
aagaaatcttaggaaactaaacaggatccgaaa

SEQ ID NO: 587828 - DNA, 33 bp, Homo sapien
aagaaatcttaggaaattaaacaggatccgaaa

SEQ ID NO: 587829 - DNA, 33 bp, Homo sapien
catatatgtttttttcaacactgaactctaagg

SEQ ID NO: 587830 - DNA, 33 bp, Homo sapien
catatatgtttttttccacactgaactctaagg

SEQ ID NO: 587831 - DNA, 33 bp, Homo sapien
acattgagagtgaaaacctgggaaataaccaag

SEQ ID NO: 587832 - DNA, 33 bp, Homo sapien
acattgagagtgaaaatctgggaaataaccaag

SEQ ID NO: 587833 - DNA, 33 bp, Homo sapien
aattgctgcattataccatctgaaattcttttt

SEQ ID NO: 587834 - DNA, 33 bp, Homo sapien
aattgctgcattatactatctgaaattcttttt

SEQ ID NO: 587835 - DNA, 33 bp, Homo sapien
gttgcctacaatgaacaagggaaactattttta

SEQ ID NO: 587836 - DNA, 33 bp, Homo sapien
gttgcctacaatgaactagggaaactattttta

SEQ ID NO: 587837 - DNA, 33 bp, Homo sapien
ctagaacagcatcttgcagagaaaaggcaccca

SEQ ID NO: 587838 - DNA, 33 bp, Homo sapien
ctagaacagcatcttgtagagaaaaggcaccca

SEQ ID NO: 587839 - DNA, 33 bp, Homo sapien
tgataaagctctagtacctagaatctacaagga

SEQ ID NO: 587840 - DNA, 33 bp, Homo sapien
tgataaagctctagtatctagaatctacaagga

SEQ ID NO: 587841 - DNA, 33 bp, Homo sapien
tggggatggatttcccacgggtgctagtctcgt

SEQ ID NO: 587842 - DNA, 33 bp, Homo sapien
tggggatggatttcccgcgggtgctagtctcgt

SEQ ID NO: 587843 - DNA, 33 bp, Homo sapien
gaaagtaagttgcagacattttgatgctttacc

SEQ ID NO: 587844 - DNA, 33 bp, Homo sapien
gaaagtaagttgcagatattttgatgctttacc

SEQ ID NO: 587845 - DNA, 33 bp, Homo sapien
actagtcatagcgtaactacaacagttaagttc

SEQ ID NO: 587846 - DNA, 33 bp, Homo sapien
actagtcatagcgtaattacaacagttaagttc

SEQ ID NO: 587847 - DNA, 33 bp, Homo sapien
gcaaaagaaattatccacaaagcatcatggaga

SEQ ID NO: 587848 - DNA, 33 bp, Homo sapien
gcaaaagaaattatccgcaaagcatcatggaga

SEQ ID NO: 587849 - DNA, 33 bp, Homo sapien
aaggtctggttgaacacagttgaagaatataaa

SEQ ID NO: 587850 - DNA, 33 bp, Homo sapien
aaggtctggttgaacatagttgaagaatataaa

SEQ ID NO: 587851 - DNA, 33 bp, Homo sapien
tctctttctaatacaaccaaatgtgtagctccc

SEQ ID NO: 587852 - DNA, 33 bp, Homo sapien
tctctttctaatacaatcaaatgtgtagctccc

SEQ ID NO: 587853 - DNA, 33 bp, Homo sapien
aaacaaatccttaacacgagttacaatgaaaca

SEQ ID NO: 587854 - DNA, 33 bp, Homo sapien
aaacaaatccttaacatgagttacaatgaaaca

SEQ ID NO: 587855 - DNA, 33 bp, Homo sapien
tctgaaaggtcccaccactcaactctattgctt

SEQ ID NO: 587856 - DNA, 33 bp, Homo sapien
tctgaaaggtcccaccgctcaactctattgctt

SEQ ID NO: 587857 - DNA, 33 bp, Homo sapien
agtaccttaaagccccagagtcattcttccgtg

SEQ ID NO: 587858 - DNA, 33 bp, Homo sapien
agtaccttaaagccccggagtcattcttccgtg

SEQ ID NO: 587859 - DNA, 33 bp, Homo sapien
aaagtatatatttagcggcaatggaaacacgac

SEQ ID NO: 587860 - DNA, 33 bp, Homo sapien
aaagtatatatttagctgcaatggaaacacgac

SEQ ID NO: 587861 - DNA, 33 bp, Homo sapien
tccctctttttagtacaattggcatcttacttt

SEQ ID NO: 587862 - DNA, 33 bp, Homo sapien
tccctctttttagtacgattggcatcttacttt

SEQ ID NO: 587863 - DNA, 33 bp, Homo sapien
agcagtccttactccacggatcatttagtttac

SEQ ID NO: 587864 - DNA, 33 bp, Homo sapien
agcagtccttactccatggatcatttagtttac

SEQ ID NO: 587865 - DNA, 33 bp, Homo sapien
gacaatggctctacgacgtgctgggtgttcttc

SEQ ID NO: 587866 - DNA, 33 bp, Homo sapien
gacaatggctctacgatgtgctgggtgttcttc

SEQ ID NO: 587867 - DNA, 33 bp, Homo sapien
atcagagttcttagccaagattttaaacgcgtt

SEQ ID NO: 587868 - DNA, 33 bp, Homo sapien
atcagagttcttagccgagattttaaacgcgtt

SEQ ID NO: 587869 - DNA, 33 bp, Homo sapien
agaaatggcttactgactaatgttataatattg

SEQ ID NO: 587870 - DNA, 33 bp, Homo sapien
agaaatggcttactgattaatgttataatattg

SEQ ID NO: 587871 - DNA, 33 bp, Homo sapien
cttgaagtatggctagcatgaccaagaaactaa

SEQ ID NO: 587872 - DNA, 33 bp, Homo sapien
cttgaagtatggctagtatgaccaagaaactaa

SEQ ID NO: 587873 - DNA, 33 bp, Homo sapien
tctacacagcaccagcaagtcagttccctttct

SEQ ID NO: 587874 - DNA, 33 bp, Homo sapien
tctacacagcaccagcgagtcagttccctttct

SEQ ID NO: 587875 - DNA, 33 bp, Homo sapien
tccttctgtaacatacagccaaatggtaaacat

SEQ ID NO: 587876 - DNA, 33 bp, Homo sapien
tccttctgtaacatacggccaaatggtaaacat

SEQ ID NO: 587877 - DNA, 33 bp, Homo sapien
ttggaatcacacacagaaaaggctgggtatttg

SEQ ID NO: 587878 - DNA, 33 bp, Homo sapien
ttggaatcacacacaggaaaggctgggtatttg

SEQ ID NO: 587879 - DNA, 33 bp, Homo sapien
gcaacacagtattcacaaaaagctcaggaatgg

SEQ ID NO: 587880 - DNA, 33 bp, Homo sapien
gcaacacagtattcaccaaaagctcaggaatgg

SEQ ID NO: 587881 - DNA, 33 bp, Homo sapien
ttagattaatttggcaactggtgaaatatcact

SEQ ID NO: 587882 - DNA, 33 bp, Homo sapien
ttagattaatttggcacctggtgaaatatcact

SEQ ID NO: 587883 - DNA, 33 bp, Homo sapien
taaacacctcttccaactggttcatgagactgc

SEQ ID NO: 587884 - DNA, 33 bp, Homo sapien
taaacacctcttccaattggttcatgagactgc

SEQ ID NO: 587885 - DNA, 33 bp, Homo sapien
ctactccagctatcaaatcatcatttaattaat

SEQ ID NO: 587886 - DNA, 33 bp, Homo sapien
ctactccagctatcaagtcatcatttaattaat

SEQ ID NO: 587887 - DNA, 33 bp, Homo sapien
tcaatatctttttacacggaccagttcaatcct

SEQ ID NO: 587888 - DNA, 33 bp, Homo sapien
tcaatatctttttacatggaccagttcaatcct

SEQ ID NO: 587889 - DNA, 33 bp, Homo sapien
cccacacttctggctaaatcaacagacttcagc

SEQ ID NO: 587890 - DNA, 33 bp, Homo sapien
cccacacttctggctagatcaacagacttcagc

SEQ ID NO: 587891 - DNA, 33 bp, Homo sapien
gtgagctcctagtcaagggccaagagagttcaa

SEQ ID NO: 587892 - DNA, 33 bp, Homo sapien
gtgagctcctagtcaatggccaagagagttcaa

SEQ ID NO: 587893 - DNA, 33 bp, Homo sapien
gcagagttcatgttataagagaaagctcaaagc

SEQ ID NO: 587894 - DNA, 33 bp, Homo sapien
gcagagttcatgttatgagagaaagctcaaagc

SEQ ID NO: 587895 - DNA, 33 bp, Homo sapien
atatacagtacacatacagatacagcacagata

SEQ ID NO: 587896 - DNA, 33 bp, Homo sapien
atatacagtacacatatagatacagcacagata

SEQ ID NO: 587897 - DNA, 33 bp, Homo sapien
gggctctggcgctccccaacaaagctgtgaatt

SEQ ID NO: 587898 - DNA, 33 bp, Homo sapien
gggctctggcgctccctaacaaagctgtgaatt

SEQ ID NO: 587899 - DNA, 33 bp, Homo sapien
tctctgcagagtttaacactaaatcactaaccc

SEQ ID NO: 587900 - DNA, 33 bp, Homo sapien
tctctgcagagtttaatactaaatcactaaccc

SEQ ID NO: 587901 - DNA, 33 bp, Homo sapien
ctgcgttgtatagtaaaccagatacgatggcag

SEQ ID NO: 587902 - DNA, 33 bp, Homo sapien
ctgcgttgtatagtaatccagatacgatggcag

SEQ ID NO: 587903 - DNA, 33 bp, Homo sapien
gccaagctagaggcaaaataatcagctacactt

SEQ ID NO: 587904 - DNA, 33 bp, Homo sapien
gccaagctagaggcaacataatcagctacactt

SEQ ID NO: 587905 - DNA, 33 bp, Homo sapien
gctagatgcaaagagagacgctaactaaggtat

SEQ ID NO: 587906 - DNA, 33 bp, Homo sapien
gctagatgcaaagagatacgctaactaaggtat

SEQ ID NO: 587907 - DNA, 33 bp, Homo sapien
acgcctcttaagacaaattctcccaaacttgat

SEQ ID NO: 587908 - DNA, 33 bp, Homo sapien
acgcctcttaagacaatttctcccaaacttgat

SEQ ID NO: 587909 - DNA, 33 bp, Homo sapien
ctctctttctccatccaacagatatgatttaaa

SEQ ID NO: 587910 - DNA, 33 bp, Homo sapien
ctctctttctccatccgacagatatgatttaaa

SEQ ID NO: 587911 - DNA, 33 bp, Homo sapien
tatgaccaatgatgtacgagaggtttgttatat

SEQ ID NO: 587912 - DNA, 33 bp, Homo sapien
tatgaccaatgatgtatgagaggtttgttatat

SEQ ID NO: 587913 - DNA, 33 bp, Homo sapien
atgtgccaaggtttaactatgaattgctaatgg

SEQ ID NO: 587914 - DNA, 33 bp, Homo sapien
atgtgccaaggtttaattatgaattgctaatgg

SEQ ID NO: 587915 - DNA, 33 bp, Homo sapien
aaagatcttcagtccacgtgtagatttaataaa

SEQ ID NO: 587916 - DNA, 33 bp, Homo sapien
aaagatcttcagtccatgtgtagatttaataaa

SEQ ID NO: 587917 - DNA, 33 bp, Homo sapien
tcagtgaacttgtaacgattgttttgttttgga

SEQ ID NO: 587918 - DNA, 33 bp, Homo sapien
tcagtgaacttgtaactattgttttgttttgga

SEQ ID NO: 587919 - DNA, 33 bp, Homo sapien
gcctattcacccttaagctgctttaacatttga

SEQ ID NO: 587920 - DNA, 33 bp, Homo sapien
gcctattcacccttaatctgctttaacatttga

SEQ ID NO: 587921 - DNA, 33 bp, Homo sapien
tttagtagagcaattaaagaatataatgtgagt

SEQ ID NO: 587922 - DNA, 33 bp, Homo sapien
tttagtagagcaattacagaatataatgtgagt

SEQ ID NO: 587923 - DNA, 33 bp, Homo sapien
ccccattaaatgtctgaaaatctgaatcagaag

SEQ ID NO: 587924 - DNA, 33 bp, Homo sapien
ccccattaaatgtctggaaatctgaatcagaag

SEQ ID NO: 587925 - DNA, 33 bp, Homo sapien
aactaatgcagtctcacgaaagcaagaactcac

SEQ ID NO: 587926 - DNA, 33 bp, Homo sapien
aactaatgcagtctcatgaaagcaagaactcac

SEQ ID NO: 587927 - DNA, 33 bp, Homo sapien
gtgcaaatattactgcaaggatacaaattaccc

SEQ ID NO: 587928 - DNA, 33 bp, Homo sapien
gtgcaaatattactgcgaggatacaaattaccc

SEQ ID NO: 587929 - DNA, 33 bp, Homo sapien
tccctttctggtcatacgtattttatctaattt

SEQ ID NO: 587930 - DNA, 33 bp, Homo sapien
tccctttctggtcataggtattttatctaattt

SEQ ID NO: 587931 - DNA, 33 bp, Homo sapien
agtatttttggatgcgaataacgattgaatcgg

SEQ ID NO: 587932 - DNA, 33 bp, Homo sapien
agtatttttggatgcggataacgattgaatcgg

SEQ ID NO: 587933 - DNA, 33 bp, Homo sapien
gtcttgagcctgccaactgggtctctagccaag

SEQ ID NO: 587934 - DNA, 33 bp, Homo sapien
gtcttgagcctgccaagtgggtctctagccaag

SEQ ID NO: 587935 - DNA, 33 bp, Homo sapien
ttctagatcgaaacaaagtacatcttacatgta

SEQ ID NO: 587936 - DNA, 33 bp, Homo sapien
ttctagatcgaaacaatgtacatcttacatgta

SEQ ID NO: 587937 - DNA, 33 bp, Homo sapien
tgtaaaaagacaaagacaaagcaagaatcttga

SEQ ID NO: 587938 - DNA, 33 bp, Homo sapien
tgtaaaaagacaaagagaaagcaagaatcttga

SEQ ID NO: 587939 - DNA, 33 bp, Homo sapien
gaaaagccctgagaacagatattttcagtgaac

SEQ ID NO: 587940 - DNA, 33 bp, Homo sapien
gaaaagccctgagaacggatattttcagtgaac

SEQ ID NO: 587941 - DNA, 33 bp, Homo sapien
tccaatgtggtggccactactaaatgaatattt

SEQ ID NO: 587942 - DNA, 33 bp, Homo sapien
tccaatgtggtggccattactaaatgaatattt

SEQ ID NO: 587943 - DNA, 33 bp, Homo sapien
caaagcacaattatcaagtaatgaaactggttt

SEQ ID NO: 587944 - DNA, 33 bp, Homo sapien
caaagcacaattatcaggtaatgaaactggttt

SEQ ID NO: 587945 - DNA, 33 bp, Homo sapien
atttatgcgcctttgcaattacaaaattcctcc

SEQ ID NO: 587946 - DNA, 33 bp, Homo sapien
atttatgcgcctttgcgattacaaaattcctcc

SEQ ID NO: 587947 - DNA, 33 bp, Homo sapien
aatggagaagatgcatcaagagataagtcatgg

SEQ ID NO: 587948 - DNA, 33 bp, Homo sapien
aatggagaagatgcattaagagataagtcatgg

SEQ ID NO: 587949 - DNA, 33 bp, Homo sapien
tgagatctgacatggaaagctagagctgaatcc

SEQ ID NO: 587950 - DNA, 33 bp, Homo sapien
tgagatctgacatggagagctagagctgaatcc

SEQ ID NO: 587951 - DNA, 33 bp, Homo sapien
tgcctggacattaaaactcagctgtattgctaa

SEQ ID NO: 587952 - DNA, 33 bp, Homo sapien
tgcctggacattaaaagtcagctgtattgctaa

SEQ ID NO: 587953 - DNA, 33 bp, Homo sapien
aaacacaatccttttcaactgaatgatctacac

SEQ ID NO: 587954 - DNA, 33 bp, Homo sapien
aaacacaatccttttcgactgaatgatctacac

SEQ ID NO: 587955 - DNA, 33 bp, Homo sapien
ccttgaccaggggtgcaaagaagttggtggtac

SEQ ID NO: 587956 - DNA, 33 bp, Homo sapien
ccttgaccaggggtgcgaagaagttggtggtac

SEQ ID NO: 587957 - DNA, 33 bp, Homo sapien
cacatatgaacataaaacatctgaactctttat

SEQ ID NO: 587958 - DNA, 33 bp, Homo sapien
cacatatgaacataaaccatctgaactctttat

SEQ ID NO: 587959 - DNA, 33 bp, Homo sapien
caactggagaagggaaaggctaggatttgaacc

SEQ ID NO: 587960 - DNA, 33 bp, Homo sapien
caactggagaagggaagggctaggatttgaacc

SEQ ID NO: 587961 - DNA, 33 bp, Homo sapien
catgagatcacaaacaaacactttcaaccacca

SEQ ID NO: 587962 - DNA, 33 bp, Homo sapien
catgagatcacaaacagacactttcaaccacca

SEQ ID NO: 587963 - DNA, 33 bp, Homo sapien
caccctagggctaaccaaagtagggagatacca

SEQ ID NO: 587964 - DNA, 33 bp, Homo sapien
caccctagggctaaccgaagtagggagatacca

SEQ ID NO: 587965 - DNA, 33 bp, Homo sapien
cccaactcacatgaacacatacttaactttcag

SEQ ID NO: 587966 - DNA, 33 bp, Homo sapien
cccaactcacatgaacgcatacttaactttcag

SEQ ID NO: 587967 - DNA, 33 bp, Homo sapien
aagtaaggacataaagacttctccagaaactgc

SEQ ID NO: 587968 - DNA, 33 bp, Homo sapien
aagtaaggacataaaggcttctccagaaactgc

SEQ ID NO: 587969 - DNA, 33 bp, Homo sapien
taattagaatgctctacgtaagacgtgtccatc

SEQ ID NO: 587970 - DNA, 33 bp, Homo sapien
taattagaatgctctatgtaagacgtgtccatc

SEQ ID NO: 587971 - DNA, 33 bp, Homo sapien
cacattaatccatagtaacataaagcaaattat

SEQ ID NO: 587972 - DNA, 33 bp, Homo sapien
cacattaatccatagtgacataaagcaaattat

SEQ ID NO: 587973 - DNA, 33 bp, Homo sapien
agcatttttccaggcaagagctgatgatggctt

SEQ ID NO: 587974 - DNA, 33 bp, Homo sapien
agcatttttccaggcaggagctgatgatggctt

SEQ ID NO: 587975 - DNA, 33 bp, Homo sapien
taaagtgagaggcaaacggaaccaactccagta

SEQ ID NO: 587976 - DNA, 33 bp, Homo sapien
taaagtgagaggcaaatggaaccaactccagta

SEQ ID NO: 587977 - DNA, 33 bp, Homo sapien
taacaaaacttttaagcagaaacttgcacattt

SEQ ID NO: 587978 - DNA, 33 bp, Homo sapien
taacaaaacttttaagtagaaacttgcacattt

SEQ ID NO: 587979 - DNA, 33 bp, Homo sapien
gatttcacttatacgaagtagacagaacagtca

SEQ ID NO: 587980 - DNA, 33 bp, Homo sapien
gatttcacttatacgaggtagacagaacagtca

SEQ ID NO: 587981 - DNA, 33 bp, Homo sapien
gttcataaaatagtgaacaatgatcatgtgaat

SEQ ID NO: 587982 - DNA, 33 bp, Homo sapien
gttcataaaatagtgagcaatgatcatgtgaat

SEQ ID NO: 587983 - DNA, 33 bp, Homo sapien
caatgtcagccagatcaataccctgggtgggta

SEQ ID NO: 587984 - DNA, 33 bp, Homo sapien
caatgtcagccagatcgataccctgggtgggta

SEQ ID NO: 587985 - DNA, 33 bp, Homo sapien
cgagttgtgagttacaaaacactggggcatctt

SEQ ID NO: 587986 - DNA, 33 bp, Homo sapien
cgagttgtgagttacagaacactggggcatctt

SEQ ID NO: 587987 - DNA, 33 bp, Homo sapien
acatttccccttccaacaagctgtttctggtac

SEQ ID NO: 587988 - DNA, 33 bp, Homo sapien
acatttccccttccaataagctgtttctggtac

SEQ ID NO: 587989 - DNA, 33 bp, Homo sapien
tccctcagcttctgtacctgagggtaaatctca

SEQ ID NO: 587990 - DNA, 33 bp, Homo sapien
tccctcagcttctgtatctgagggtaaatctca

SEQ ID NO: 587991 - DNA, 33 bp, Homo sapien
gagataccagtaagaaaccacggctgtagtcag

SEQ ID NO: 587992 - DNA, 33 bp, Homo sapien
gagataccagtaagaagccacggctgtagtcag

SEQ ID NO: 587993 - DNA, 33 bp, Homo sapien
gaagcctgttcgattggacaaaggcctgtggcc

SEQ ID NO: 587994 - DNA, 33 bp, Homo sapien
gaagcctgttcgattgtacaaaggcctgtggcc

SEQ ID NO: 587995 - DNA, 33 bp, Homo sapien
tgttttaaaaggtcaaagagcattggatacaga

SEQ ID NO: 587996 - DNA, 33 bp, Homo sapien
tgttttaaaaggtcaacgagcattggatacaga

SEQ ID NO: 587997 - DNA, 33 bp, Homo sapien
aagtcacacatggcaacagtacggagaaaagca

SEQ ID NO: 587998 - DNA, 33 bp, Homo sapien
aagtcacacatggcaatagtacggagaaaagca

SEQ ID NO: 587999 - DNA, 33 bp, Homo sapien
acaccttcgtactataacacacacaagcccgct

SEQ ID NO: 588000 - DNA, 33 bp, Homo sapien
acaccttcgtactataccacacacaagcccgct

SEQ ID NO: 588001 - DNA, 33 bp, Homo sapien
ttgtggaatggagaaaacaacttaattctttct

SEQ ID NO: 588002 - DNA, 33 bp, Homo sapien
ttgtggaatggagaaagcaacttaattctttct

SEQ ID NO: 588003 - DNA, 33 bp, Homo sapien
agcagaaaaacatgtaccagttaccaatgccag

SEQ ID NO: 588004 - DNA, 33 bp, Homo sapien
agcagaaaaacatgtatcagttaccaatgccag

SEQ ID NO: 588005 - DNA, 33 bp, Homo sapien
taatttataacagaaacaggtgaaattgactca

SEQ ID NO: 588006 - DNA, 33 bp, Homo sapien
taatttataacagaaagaggtgaaattgactca

SEQ ID NO: 588007 - DNA, 33 bp, Homo sapien
ggctaagatttccacaaagagcaaataagataa

SEQ ID NO: 588008 - DNA, 33 bp, Homo sapien
ggctaagatttccacagagagcaaataagataa

SEQ ID NO: 588009 - DNA, 33 bp, Homo sapien
tttttagttcagaaataatgttgatttgagcat

SEQ ID NO: 588010 - DNA, 33 bp, Homo sapien
tttttagttcagaaatgatgttgatttgagcat

SEQ ID NO: 588011 - DNA, 33 bp, Homo sapien
ttttctggatagactcaccctttttttcccctt

SEQ ID NO: 588012 - DNA, 33 bp, Homo sapien
ttttctggatagactcgccctttttttcccctt

SEQ ID NO: 588013 - DNA, 33 bp, Homo sapien
tggtcaattgcaactaccttccaaatagacttt

SEQ ID NO: 588014 - DNA, 33 bp, Homo sapien
tggtcaattgcaactatcttccaaatagacttt

SEQ ID NO: 588015 - DNA, 33 bp, Homo sapien
ttttgtttttttgccaatatggttgacaagtgt

SEQ ID NO: 588016 - DNA, 33 bp, Homo sapien
ttttgtttttttgccagtatggttgacaagtgt

SEQ ID NO: 588017 - DNA, 33 bp, Homo sapien
taggccacctcaattcaaagtatgatgaaataa

SEQ ID NO: 588018 - DNA, 33 bp, Homo sapien
taggccacctcaattcgaagtatgatgaaataa

SEQ ID NO: 588019 - DNA, 33 bp, Homo sapien
atggaaaagaaatgcaaaaaatacaggagatgg

SEQ ID NO: 588020 - DNA, 33 bp, Homo sapien
atggaaaagaaatgcagaaaatacaggagatgg

SEQ ID NO: 588021 - DNA, 33 bp, Homo sapien
aattttggaaggatacaattcaattcatagccc

SEQ ID NO: 588022 - DNA, 33 bp, Homo sapien
aattttggaaggatacgattcaattcatagccc

SEQ ID NO: 588023 - DNA, 33 bp, Homo sapien
taaaggagtcagaaaccgaagctagcagaatgg

SEQ ID NO: 588024 - DNA, 33 bp, Homo sapien
taaaggagtcagaaactgaagctagcagaatgg

SEQ ID NO: 588025 - DNA, 33 bp, Homo sapien
ggagcaggggaagaaccagtctgactgagtaca

SEQ ID NO: 588026 - DNA, 33 bp, Homo sapien
ggagcaggggaagaactagtctgactgagtaca

SEQ ID NO: 588027 - DNA, 33 bp, Homo sapien
tctaaagaaccataaaaaggtcattggtttgca

SEQ ID NO: 588028 - DNA, 33 bp, Homo sapien
tctaaagaaccataaagaggtcattggtttgca

SEQ ID NO: 588029 - DNA, 33 bp, Homo sapien
acaaacatcaggtcagacattagaaagcggcgc

SEQ ID NO: 588030 - DNA, 33 bp, Homo sapien
acaaacatcaggtcaggcattagaaagcggcgc

SEQ ID NO: 588031 - DNA, 33 bp, Homo sapien
gtgcctaccgcctcaaacacagtgccttctcct

SEQ ID NO: 588032 - DNA, 33 bp, Homo sapien
gtgcctaccgcctcaagcacagtgccttctcct

SEQ ID NO: 588033 - DNA, 33 bp, Homo sapien
ccaaaagatccaccaaatcaagaagagcttgga

SEQ ID NO: 588034 - DNA, 33 bp, Homo sapien
ccaaaagatccaccaactcaagaagagcttgga

SEQ ID NO: 588035 - DNA, 33 bp, Homo sapien
tggagtatttcagacagtctaaggagctcctaa

SEQ ID NO: 588036 - DNA, 33 bp, Homo sapien
tggagtatttcagacattctaaggagctcctaa

SEQ ID NO: 588037 - DNA, 33 bp, Homo sapien
gaagacacccagttataacgcataaatctggag

SEQ ID NO: 588038 - DNA, 33 bp, Homo sapien
gaagacacccagttatgacgcataaatctggag

SEQ ID NO: 588039 - DNA, 33 bp, Homo sapien
gggtggataaagcttcaagaacattattcaatg

SEQ ID NO: 588040 - DNA, 33 bp, Homo sapien
gggtggataaagcttcgagaacattattcaatg

SEQ ID NO: 588041 - DNA, 33 bp, Homo sapien
agtcacctgacattcccgatgggcacagaggag

SEQ ID NO: 588042 - DNA, 33 bp, Homo sapien
agtcacctgacattcctgatgggcacagaggag

SEQ ID NO: 588043 - DNA, 33 bp, Homo sapien
gtcaataatgatcaaactcaatgatcaacttca

SEQ ID NO: 588044 - DNA, 33 bp, Homo sapien
gtcaataatgatcaaagtcaatgatcaacttca

SEQ ID NO: 588045 - DNA, 33 bp, Homo sapien
tcagggaagttctctacagcagtgtgaaaatgg

SEQ ID NO: 588046 - DNA, 33 bp, Homo sapien
tcagggaagttctctatagcagtgtgaaaatgg

SEQ ID NO: 588047 - DNA, 33 bp, Homo sapien
atgggcttgttaagagaatgaaaatcaaaatga

SEQ ID NO: 588048 - DNA, 33 bp, Homo sapien
atgggcttgttaagaggatgaaaatcaaaatga

SEQ ID NO: 588049 - DNA, 33 bp, Homo sapien
cagtcccttgttggcgcatctagaggtctagga

SEQ ID NO: 588050 - DNA, 33 bp, Homo sapien
cagtcccttgttggcgtatctagaggtctagga

SEQ ID NO: 588051 - DNA, 33 bp, Homo sapien
taatccttatcttgggaagttagacataaatta

SEQ ID NO: 588052 - DNA, 33 bp, Homo sapien
taatccttatcttgggcagttagacataaatta

SEQ ID NO: 588053 - DNA, 33 bp, Homo sapien
ttctgtgtctctttcccgcttgaaaaaaagaat

SEQ ID NO: 588054 - DNA, 33 bp, Homo sapien
ttctgtgtctctttcctgcttgaaaaaaagaat

SEQ ID NO: 588055 - DNA, 33 bp, Homo sapien
gccttaggtaattccaaaggatttgaggcaaag

SEQ ID NO: 588056 - DNA, 33 bp, Homo sapien
gccttaggtaattccagaggatttgaggcaaag

SEQ ID NO: 588057 - DNA, 33 bp, Homo sapien
caaaatgttatgaggaatatcagttagcttttc

SEQ ID NO: 588058 - DNA, 33 bp, Homo sapien
caaaatgttatgaggattatcagttagcttttc

SEQ ID NO: 588059 - DNA, 33 bp, Homo sapien
cattgctgtagaactcagagaaaatggagtggg

SEQ ID NO: 588060 - DNA, 33 bp, Homo sapien
cattgctgtagaactcggagaaaatggagtggg

SEQ ID NO: 588061 - DNA, 33 bp, Homo sapien
aaactcttcacatttcaaagaaggtttggccct

SEQ ID NO: 588062 - DNA, 33 bp, Homo sapien
aaactcttcacatttcgaagaaggtttggccct

SEQ ID NO: 588063 - DNA, 33 bp, Homo sapien
ctctcttggactttgaaaatggaaaccaagact

SEQ ID NO: 588064 - DNA, 33 bp, Homo sapien
ctctcttggactttgagaatggaaaccaagact

SEQ ID NO: 588065 - DNA, 33 bp, Homo sapien
ctcactcataccttaaaatcatataacatgtta

SEQ ID NO: 588066 - DNA, 33 bp, Homo sapien
ctcactcataccttaagatcatataacatgtta

SEQ ID NO: 588067 - DNA, 33 bp, Homo sapien
ccagaacaatccattaactccatgtgtacctgg

SEQ ID NO: 588068 - DNA, 33 bp, Homo sapien
ccagaacaatccattatctccatgtgtacctgg

SEQ ID NO: 588069 - DNA, 33 bp, Homo sapien
aagtcatttcccccaccgagatgatccaaacat

SEQ ID NO: 588070 - DNA, 33 bp, Homo sapien
aagtcatttcccccactgagatgatccaaacat

SEQ ID NO: 588071 - DNA, 33 bp, Homo sapien
tgaaaacatgacattaacaaacacgggaaaaag

SEQ ID NO: 588072 - DNA, 33 bp, Homo sapien
tgaaaacatgacattagcaaacacgggaaaaag

SEQ ID NO: 588073 - DNA, 33 bp, Homo sapien
ttaaggtcaagaacaagtctacttctgtaaaat

SEQ ID NO: 588074 - DNA, 33 bp, Homo sapien
ttaaggtcaagaacaattctacttctgtaaaat

SEQ ID NO: 588075 - DNA, 33 bp, Homo sapien
aggacaggaaagttcaatcctatattttgaagg

SEQ ID NO: 588076 - DNA, 33 bp, Homo sapien
aggacaggaaagttcactcctatattttgaagg

SEQ ID NO: 588077 - DNA, 33 bp, Homo sapien
ttagtattttcatcaggagaagttattggaaat

SEQ ID NO: 588078 - DNA, 33 bp, Homo sapien
ttagtattttcatcagtagaagttattggaaat

SEQ ID NO: 588079 - DNA, 33 bp, Homo sapien
gcaagaaggtagctgtaaatcttctagcccaat

SEQ ID NO: 588080 - DNA, 33 bp, Homo sapien
gcaagaaggtagctgtgaatcttctagcccaat

SEQ ID NO: 588081 - DNA, 33 bp, Homo sapien
atcattctgcaggaaagttatttggaggacata

SEQ ID NO: 588082 - DNA, 33 bp, Homo sapien
atcattctgcaggaaatttatttggaggacata

SEQ ID NO: 588083 - DNA, 33 bp, Homo sapien
tccatgttagttagaaatatttagaaatggctt

SEQ ID NO: 588084 - DNA, 33 bp, Homo sapien
tccatgttagttagaattatttagaaatggctt

SEQ ID NO: 588085 - DNA, 33 bp, Homo sapien
taactacctggttcaacgccacgtgctagagac

SEQ ID NO: 588086 - DNA, 33 bp, Homo sapien
taactacctggttcaatgccacgtgctagagac

SEQ ID NO: 588087 - DNA, 33 bp, Homo sapien
ccaccttgcaggtagacctataataatgctata

SEQ ID NO: 588088 - DNA, 33 bp, Homo sapien
ccaccttgcaggtagagctataataatgctata

SEQ ID NO: 588089 - DNA, 33 bp, Homo sapien
agagtggctttgggaacaatcgattgcttgatt

SEQ ID NO: 588090 - DNA, 33 bp, Homo sapien
agagtggctttgggaataatcgattgcttgatt

SEQ ID NO: 588091 - DNA, 33 bp, Homo sapien
actaatttgtaggtagaatgaatccattatgta

SEQ ID NO: 588092 - DNA, 33 bp, Homo sapien
actaatttgtaggtagcatgaatccattatgta

SEQ ID NO: 588093 - DNA, 33 bp, Homo sapien
ctgcttacaatattgaacttctccaagtcattc

SEQ ID NO: 588094 - DNA, 33 bp, Homo sapien
ctgcttacaatattgaccttctccaagtcattc

SEQ ID NO: 588095 - DNA, 33 bp, Homo sapien
caaatatgaacacaggaatagcacaattcctcc

SEQ ID NO: 588096 - DNA, 33 bp, Homo sapien
caaatatgaacacagggatagcacaattcctcc

SEQ ID NO: 588097 - DNA, 33 bp, Homo sapien
ttctttttatgtgttacagtacttgggcaacat

SEQ ID NO: 588098 - DNA, 33 bp, Homo sapien
ttctttttatgtgttatagtacttgggcaacat

SEQ ID NO: 588099 - DNA, 33 bp, Homo sapien
agacaagacaagacaacacaagaaacaacagag

SEQ ID NO: 588100 - DNA, 33 bp, Homo sapien
agacaagacaagacaagacaagaaacaacagag

SEQ ID NO: 588101 - DNA, 33 bp, Homo sapien
acaatatattaaaaaccattttcccatagcaat

SEQ ID NO: 588102 - DNA, 33 bp, Homo sapien
acaatatattaaaaactattttcccatagcaat

SEQ ID NO: 588103 - DNA, 33 bp, Homo sapien
ttttaatatattgtagacaagggagatctgctg

SEQ ID NO: 588104 - DNA, 33 bp, Homo sapien
ttttaatatattgtaggcaagggagatctgctg

SEQ ID NO: 588105 - DNA, 33 bp, Homo sapien
tcccgtcagtcctggaagcatttacgctgatct

SEQ ID NO: 588106 - DNA, 33 bp, Homo sapien
tcccgtcagtcctggaggcatttacgctgatct

SEQ ID NO: 588107 - DNA, 33 bp, Homo sapien
atcttttaagagcatcactttattaactttttg

SEQ ID NO: 588108 - DNA, 33 bp, Homo sapien
atcttttaagagcatcgctttattaactttttg

SEQ ID NO: 588109 - DNA, 33 bp, Homo sapien
atgtcaaatgccacagaacaatggaaaggatat

SEQ ID NO: 588110 - DNA, 33 bp, Homo sapien
atgtcaaatgccacaggacaatggaaaggatat

SEQ ID NO: 588111 - DNA, 33 bp, Homo sapien
gatatttgtcattgtacagtactctgtggacct

SEQ ID NO: 588112 - DNA, 33 bp, Homo sapien
gatatttgtcattgtatagtactctgtggacct

SEQ ID NO: 588113 - DNA, 33 bp, Homo sapien
ccacacgtgaggatatcaattcgagatgagatt

SEQ ID NO: 588114 - DNA, 33 bp, Homo sapien
ccacacgtgaggatatgaattcgagatgagatt

SEQ ID NO: 588115 - DNA, 33 bp, Homo sapien
tattggagtaagattgcagttagattaacacct

SEQ ID NO: 588116 - DNA, 33 bp, Homo sapien
tattggagtaagattgtagttagattaacacct

SEQ ID NO: 588117 - DNA, 33 bp, Homo sapien
gcctcactctcctatcaaaacctatggccctgg

SEQ ID NO: 588118 - DNA, 33 bp, Homo sapien
gcctcactctcctatcgaaacctatggccctgg

SEQ ID NO: 588119 - DNA, 33 bp, Homo sapien
tctgggtcatgctttacgtctcaactcaagcac

SEQ ID NO: 588120 - DNA, 33 bp, Homo sapien
tctgggtcatgctttatgtctcaactcaagcac

SEQ ID NO: 588121 - DNA, 33 bp, Homo sapien
tttcaccttcttatgcaacttaagtacaagtga

SEQ ID NO: 588122 - DNA, 33 bp, Homo sapien
tttcaccttcttatgcgacttaagtacaagtga

SEQ ID NO: 588123 - DNA, 33 bp, Homo sapien
actcttcacttgagaactaaatgtctgtatccc

SEQ ID NO: 588124 - DNA, 33 bp, Homo sapien
actcttcacttgagaagtaaatgtctgtatccc

SEQ ID NO: 588125 - DNA, 33 bp, Homo sapien
atatcgataaggagtcacggggcttagaacagg

SEQ ID NO: 588126 - DNA, 33 bp, Homo sapien
atatcgataaggagtcccggggcttagaacagg

SEQ ID NO: 588127 - DNA, 33 bp, Homo sapien
aagatatctatccctgaaaataccccatactct

SEQ ID NO: 588128 - DNA, 33 bp, Homo sapien
aagatatctatccctgcaaataccccatactct

SEQ ID NO: 588129 - DNA, 33 bp, Homo sapien
tttatttttgtgagaactgtagaattgcaaggt

SEQ ID NO: 588130 - DNA, 33 bp, Homo sapien
tttatttttgtgagaattgtagaattgcaaggt

SEQ ID NO: 588131 - DNA, 33 bp, Homo sapien
gtgtagaagcagcacaactttatggttaacggc

SEQ ID NO: 588132 - DNA, 33 bp, Homo sapien
gtgtagaagcagcacagctttatggttaacggc

SEQ ID NO: 588133 - DNA, 33 bp, Homo sapien
tactcttgcagactggaaccattatgaagtata

SEQ ID NO: 588134 - DNA, 33 bp, Homo sapien
tactcttgcagactgggaccattatgaagtata

SEQ ID NO: 588135 - DNA, 33 bp, Homo sapien
agttacagaaatcagaaatctaaaatcatgttg

SEQ ID NO: 588136 - DNA, 33 bp, Homo sapien
agttacagaaatcagagatctaaaatcatgttg

SEQ ID NO: 588137 - DNA, 33 bp, Homo sapien
gaagaacttccaaatactacagttatttaattc

SEQ ID NO: 588138 - DNA, 33 bp, Homo sapien
gaagaacttccaaatagtacagttatttaattc

SEQ ID NO: 588139 - DNA, 33 bp, Homo sapien
tctcctgcagaccatacctctaaggagagaagc

SEQ ID NO: 588140 - DNA, 33 bp, Homo sapien
tctcctgcagaccatatctctaaggagagaagc

SEQ ID NO: 588141 - DNA, 33 bp, Homo sapien
agaggattcttggtcacgtgtatgcatggaagc

SEQ ID NO: 588142 - DNA, 33 bp, Homo sapien
agaggattcttggtcatgtgtatgcatggaagc

SEQ ID NO: 588143 - DNA, 33 bp, Homo sapien
tacggtacgtgttcagaataaaatggcccctga

SEQ ID NO: 588144 - DNA, 33 bp, Homo sapien
tacggtacgtgttcagtataaaatggcccctga

SEQ ID NO: 588145 - DNA, 33 bp, Homo sapien
gattattagtctagaacgaaaactggataagcc

SEQ ID NO: 588146 - DNA, 33 bp, Homo sapien
gattattagtctagaatgaaaactggataagcc

SEQ ID NO: 588147 - DNA, 33 bp, Homo sapien
gaagacactaaagagacggcttatccagttttc

SEQ ID NO: 588148 - DNA, 33 bp, Homo sapien
gaagacactaaagagatggcttatccagttttc

SEQ ID NO: 588149 - DNA, 33 bp, Homo sapien
ccgctgtaccagctagacatttcttgagagtgc

SEQ ID NO: 588150 - DNA, 33 bp, Homo sapien
ccgctgtaccagctaggcatttcttgagagtgc

SEQ ID NO: 588151 - DNA, 33 bp, Homo sapien
tatctagcaaagagaaatctcatcagcaaatca

SEQ ID NO: 588152 - DNA, 33 bp, Homo sapien
tatctagcaaagagaagtctcatcagcaaatca

SEQ ID NO: 588153 - DNA, 33 bp, Homo sapien
taaggttctacagcaaccaccctcccattctac

SEQ ID NO: 588154 - DNA, 33 bp, Homo sapien
taaggttctacagcaatcaccctcccattctac

SEQ ID NO: 588155 - DNA, 33 bp, Homo sapien
tgtcttcatacaccacggtcactgttttccagt

SEQ ID NO: 588156 - DNA, 33 bp, Homo sapien
tgtcttcatacaccactgtcactgttttccagt

SEQ ID NO: 588157 - DNA, 33 bp, Homo sapien
tatttcttcagttaccagatgcaggtttgcttt

SEQ ID NO: 588158 - DNA, 33 bp, Homo sapien
tatttcttcagttacctgatgcaggtttgcttt

SEQ ID NO: 588159 - DNA, 33 bp, Homo sapien
taataaagtcatttcaacaggaacattacagat

SEQ ID NO: 588160 - DNA, 33 bp, Homo sapien
taataaagtcatttcagcaggaacattacagat

SEQ ID NO: 588161 - DNA, 33 bp, Homo sapien
gagtgttattgcaacagctccaagggcagatct

SEQ ID NO: 588162 - DNA, 33 bp, Homo sapien
gagtgttattgcaacatctccaagggcagatct

SEQ ID NO: 588163 - DNA, 33 bp, Homo sapien
tgaccaagacgaggaacgatgcaggaggtactt

SEQ ID NO: 588164 - DNA, 33 bp, Homo sapien
tgaccaagacgaggaatgatgcaggaggtactt

SEQ ID NO: 588165 - DNA, 33 bp, Homo sapien
atggtctgtatgtctacgaaaaacagcatcttt

SEQ ID NO: 588166 - DNA, 33 bp, Homo sapien
atggtctgtatgtctatgaaaaacagcatcttt

SEQ ID NO: 588167 - DNA, 33 bp, Homo sapien
caagtgctataagaataaggatgtgagagttag

SEQ ID NO: 588168 - DNA, 33 bp, Homo sapien
caagtgctataagaatgaggatgtgagagttag

SEQ ID NO: 588169 - DNA, 33 bp, Homo sapien
gagaggtttggatgaactgacttcagtgaggtt

SEQ ID NO: 588170 - DNA, 33 bp, Homo sapien
gagaggtttggatgaattgacttcagtgaggtt

SEQ ID NO: 588171 - DNA, 33 bp, Homo sapien
tgtctatttaaggtaactgtgattctctacttt

SEQ ID NO: 588172 - DNA, 33 bp, Homo sapien
tgtctatttaaggtaattgtgattctctacttt

SEQ ID NO: 588173 - DNA, 33 bp, Homo sapien
ttcacagctcatacaacgccaagattcaaattt

SEQ ID NO: 588174 - DNA, 33 bp, Homo sapien
ttcacagctcatacaatgccaagattcaaattt

SEQ ID NO: 588175 - DNA, 33 bp, Homo sapien
tggttcagggtcagccaaagagcattctttccc

SEQ ID NO: 588176 - DNA, 33 bp, Homo sapien
tggttcagggtcagccgaagagcattctttccc

SEQ ID NO: 588177 - DNA, 33 bp, Homo sapien
gagaaagacgatacaacgatgcattactgagct

SEQ ID NO: 588178 - DNA, 33 bp, Homo sapien
gagaaagacgatacaatgatgcattactgagct

SEQ ID NO: 588179 - DNA, 33 bp, Homo sapien
cacaggggcttgcatgcattttgtggaaaaatc

SEQ ID NO: 588180 - DNA, 33 bp, Homo sapien
cacaggggcttgcatgtattttgtggaaaaatc

SEQ ID NO: 588181 - DNA, 33 bp, Homo sapien
atgaatgtagtttaaagtgccttagtttatgac

SEQ ID NO: 588182 - DNA, 33 bp, Homo sapien
atgaatgtagtttaaattgccttagtttatgac

SEQ ID NO: 588183 - DNA, 33 bp, Homo sapien
tacaaaaatggttgtcactttggggattaaaag

SEQ ID NO: 588184 - DNA, 33 bp, Homo sapien
tacaaaaatggttgtcgctttggggattaaaag

SEQ ID NO: 588185 - DNA, 33 bp, Homo sapien
acgcagcttaccataacgcagaaatcagtgaaa

SEQ ID NO: 588186 - DNA, 33 bp, Homo sapien
acgcagcttaccataatgcagaaatcagtgaaa

SEQ ID NO: 588187 - DNA, 33 bp, Homo sapien
cacaggtctcaggtaaggtttaacatagccact

SEQ ID NO: 588188 - DNA, 33 bp, Homo sapien
cacaggtctcaggtaatgtttaacatagccact

SEQ ID NO: 588189 - DNA, 33 bp, Homo sapien
accaagagttgggcatcatccaggaacagaaag

SEQ ID NO: 588190 - DNA, 33 bp, Homo sapien
accaagagttgggcatgatccaggaacagaaag

SEQ ID NO: 588191 - DNA, 33 bp, Homo sapien
atgtcactattttctactaccctgtgtcaatta

SEQ ID NO: 588192 - DNA, 33 bp, Homo sapien
atgtcactattttctattaccctgtgtcaatta

SEQ ID NO: 588193 - DNA, 33 bp, Homo sapien
tcataagaggcttctccgaacttcttctgcaaa

SEQ ID NO: 588194 - DNA, 33 bp, Homo sapien
tcataagaggcttctctgaacttcttctgcaaa

SEQ ID NO: 588195 - DNA, 33 bp, Homo sapien
tccagataacttataagggatttgctgtcatgt

SEQ ID NO: 588196 - DNA, 33 bp, Homo sapien
tccagataacttataatggatttgctgtcatgt

SEQ ID NO: 588197 - DNA, 33 bp, Homo sapien
aaacttgcctcactaagtgcaatcttatttgaa

SEQ ID NO: 588198 - DNA, 33 bp, Homo sapien
aaacttgcctcactaattgcaatcttatttgaa

SEQ ID NO: 588199 - DNA, 33 bp, Homo sapien
gttgcttagaaggacacaagaatcagaccaaag

SEQ ID NO: 588200 - DNA, 33 bp, Homo sapien
gttgcttagaaggacagaagaatcagaccaaag

SEQ ID NO: 588201 - DNA, 33 bp, Homo sapien
taatgagttacttccaatagtgatagctacatg

SEQ ID NO: 588202 - DNA, 33 bp, Homo sapien
taatgagttacttccagtagtgatagctacatg

SEQ ID NO: 588203 - DNA, 33 bp, Homo sapien
ccatccactacgtactaaacactgaggccacgg

SEQ ID NO: 588204 - DNA, 33 bp, Homo sapien
ccatccactacgtacttaacactgaggccacgg

SEQ ID NO: 588205 - DNA, 33 bp, Homo sapien
cagttaccttggaccacgtcacctatagaataa

SEQ ID NO: 588206 - DNA, 33 bp, Homo sapien
cagttaccttggaccatgtcacctatagaataa

SEQ ID NO: 588207 - DNA, 33 bp, Homo sapien
cagtgatgttgaagcaccttatccaggatcaca

SEQ ID NO: 588208 - DNA, 33 bp, Homo sapien
cagtgatgttgaagcagcttatccaggatcaca

SEQ ID NO: 588209 - DNA, 33 bp, Homo sapien
ctccctgaccaatagaaggaagcagaatatgca

SEQ ID NO: 588210 - DNA, 33 bp, Homo sapien
ctccctgaccaatagagggaagcagaatatgca

SEQ ID NO: 588211 - DNA, 33 bp, Homo sapien
gactattacagttagaagagctgagttaaaagg

SEQ ID NO: 588212 - DNA, 33 bp, Homo sapien
gactattacagttagaggagctgagttaaaagg

SEQ ID NO: 588213 - DNA, 33 bp, Homo sapien
caaacattaattcaacaaatgttcattgagctc

SEQ ID NO: 588214 - DNA, 33 bp, Homo sapien
caaacattaattcaacgaatgttcattgagctc

SEQ ID NO: 588215 - DNA, 33 bp, Homo sapien
tttccaaccatggaaaagtatgaatcaagaaca

SEQ ID NO: 588216 - DNA, 33 bp, Homo sapien
tttccaaccatggaaatgtatgaatcaagaaca

SEQ ID NO: 588217 - DNA, 33 bp, Homo sapien
aaagtcctaacataacaggtcttgtttctttgt

SEQ ID NO: 588218 - DNA, 33 bp, Homo sapien
aaagtcctaacataactggtcttgtttctttgt

SEQ ID NO: 588219 - DNA, 33 bp, Homo sapien
cttgaaatatctcacaaaacaaaatagaaaaga

SEQ ID NO: 588220 - DNA, 33 bp, Homo sapien
cttgaaatatctcacagaacaaaatagaaaaga

SEQ ID NO: 588221 - DNA, 33 bp, Homo sapien
aagatgtttgacttgacgtagtaaagagacaac

SEQ ID NO: 588222 - DNA, 33 bp, Homo sapien
aagatgtttgacttgatgtagtaaagagacaac

SEQ ID NO: 588223 - DNA, 33 bp, Homo sapien
tactactagttaattaaggctaagtaaagcaat

SEQ ID NO: 588224 - DNA, 33 bp, Homo sapien
tactactagttaattacggctaagtaaagcaat

SEQ ID NO: 588225 - DNA, 33 bp, Homo sapien
ctagtagtagcatttacactctctcagttaccc

SEQ ID NO: 588226 - DNA, 33 bp, Homo sapien
ctagtagtagcatttatactctctcagttaccc

SEQ ID NO: 588227 - DNA, 33 bp, Homo sapien
gactttgccttggcaacgactttatctgtacgc

SEQ ID NO: 588228 - DNA, 33 bp, Homo sapien
gactttgccttggcaatgactttatctgtacgc

SEQ ID NO: 588229 - DNA, 33 bp, Homo sapien
atcgtttgttgtccatcagttcttaagtatgtg

SEQ ID NO: 588230 - DNA, 33 bp, Homo sapien
atcgtttgttgtccattagttcttaagtatgtg

SEQ ID NO: 588231 - DNA, 33 bp, Homo sapien
tttagaagaacaaggaagactgacatctgctaa

SEQ ID NO: 588232 - DNA, 33 bp, Homo sapien
tttagaagaacaaggatgactgacatctgctaa

SEQ ID NO: 588233 - DNA, 33 bp, Homo sapien
aatttagaagcattgaagaccacttagcttgcc

SEQ ID NO: 588234 - DNA, 33 bp, Homo sapien
aatttagaagcattgaggaccacttagcttgcc

SEQ ID NO: 588235 - DNA, 33 bp, Homo sapien
ataatgctaacaaaggaaagataaaggcaatat

SEQ ID NO: 588236 - DNA, 33 bp, Homo sapien
ataatgctaacaaagggaagataaaggcaatat

SEQ ID NO: 588237 - DNA, 33 bp, Homo sapien
gaaaaagctaagtgaaatatgaagaagctctga

SEQ ID NO: 588238 - DNA, 33 bp, Homo sapien
gaaaaagctaagtgaagtatgaagaagctctga

SEQ ID NO: 588239 - DNA, 33 bp, Homo sapien
tctgtcaacctccacaatagaaccagaattata

SEQ ID NO: 588240 - DNA, 33 bp, Homo sapien
tctgtcaacctccacagtagaaccagaattata

SEQ ID NO: 588241 - DNA, 33 bp, Homo sapien
acttacaagtggttcacagtactttaaatcatt

SEQ ID NO: 588242 - DNA, 33 bp, Homo sapien
acttacaagtggttcagagtactttaaatcatt

SEQ ID NO: 588243 - DNA, 33 bp, Homo sapien
ggagaaataaggcaaaactatactaagagggaa

SEQ ID NO: 588244 - DNA, 33 bp, Homo sapien
ggagaaataaggcaaagctatactaagagggaa

SEQ ID NO: 588245 - DNA, 33 bp, Homo sapien
agtgtcttattccatgcaagggtcagattcatc

SEQ ID NO: 588246 - DNA, 33 bp, Homo sapien
agtgtcttattccatggaagggtcagattcatc

SEQ ID NO: 588247 - DNA, 33 bp, Homo sapien
atcaaattcacagaaccgaaatgagggtccttg

SEQ ID NO: 588248 - DNA, 33 bp, Homo sapien
atcaaattcacagaactgaaatgagggtccttg

SEQ ID NO: 588249 - DNA, 33 bp, Homo sapien
gtcaagaggaagaacaagttggttgtatttttt

SEQ ID NO: 588250 - DNA, 33 bp, Homo sapien
gtcaagaggaagaacaggttggttgtatttttt

SEQ ID NO: 588251 - DNA, 33 bp, Homo sapien
atctccaccttcaagacgagacaacggagattt

SEQ ID NO: 588252 - DNA, 33 bp, Homo sapien
atctccaccttcaagatgagacaacggagattt

SEQ ID NO: 588253 - DNA, 33 bp, Homo sapien
aaatgccaaacacttacctgtcataaaaagtga

SEQ ID NO: 588254 - DNA, 33 bp, Homo sapien
aaatgccaaacacttatctgtcataaaaagtga

SEQ ID NO: 588255 - DNA, 33 bp, Homo sapien
cattcagtatcatcgagaatctcacgcaaatat

SEQ ID NO: 588256 - DNA, 33 bp, Homo sapien
cattcagtatcatcgataatctcacgcaaatat

SEQ ID NO: 588257 - DNA, 33 bp, Homo sapien
actttagcctgaaagcaatgagatgcaattaaa

SEQ ID NO: 588258 - DNA, 33 bp, Homo sapien
actttagcctgaaagccatgagatgcaattaaa

SEQ ID NO: 588259 - DNA, 33 bp, Homo sapien
caggacagtatcatcactagtatggattttgga

SEQ ID NO: 588260 - DNA, 33 bp, Homo sapien
caggacagtatcatcattagtatggattttgga

SEQ ID NO: 588261 - DNA, 33 bp, Homo sapien
acaatagagaagaaaacgctgctgagtctaata

SEQ ID NO: 588262 - DNA, 33 bp, Homo sapien
acaatagagaagaaaatgctgctgagtctaata

SEQ ID NO: 588263 - DNA, 33 bp, Homo sapien
aattgcatttcaaatgacaaaactacatcaaaa

SEQ ID NO: 588264 - DNA, 33 bp, Homo sapien
aattgcatttcaaatgtcaaaactacatcaaaa

SEQ ID NO: 588265 - DNA, 33 bp, Homo sapien
caatgaagtgagaaacaagggtaactaattatg

SEQ ID NO: 588266 - DNA, 33 bp, Homo sapien
caatgaagtgagaaaccagggtaactaattatg

SEQ ID NO: 588267 - DNA, 33 bp, Homo sapien
tcagtcttgttttatacacttggcccaatcaca

SEQ ID NO: 588268 - DNA, 33 bp, Homo sapien
tcagtcttgttttatatacttggcccaatcaca

SEQ ID NO: 588269 - DNA, 33 bp, Homo sapien
atcccctctttgtttacctgtggatcctgaaaa

SEQ ID NO: 588270 - DNA, 33 bp, Homo sapien
atcccctctttgtttatctgtggatcctgaaaa

SEQ ID NO: 588271 - DNA, 33 bp, Homo sapien
ccattgaactgagtataaaaccctattggtctg

SEQ ID NO: 588272 - DNA, 33 bp, Homo sapien
ccattgaactgagtatgaaaccctattggtctg

SEQ ID NO: 588273 - DNA, 33 bp, Homo sapien
tcatggaaaggcacacagatgtgaattaaatga

SEQ ID NO: 588274 - DNA, 33 bp, Homo sapien
tcatggaaaggcacacggatgtgaattaaatga

SEQ ID NO: 588275 - DNA, 33 bp, Homo sapien
ctcagatggtatgaacagaagccacataccacg

SEQ ID NO: 588276 - DNA, 33 bp, Homo sapien
ctcagatggtatgaacggaagccacataccacg

SEQ ID NO: 588277 - DNA, 33 bp, Homo sapien
gctaccctgtgcattgcatgatgtctagtagca

SEQ ID NO: 588278 - DNA, 33 bp, Homo sapien
gctaccctgtgcattgtatgatgtctagtagca

SEQ ID NO: 588279 - DNA, 33 bp, Homo sapien
atttgtgagaaaatagacagtatgatatcacaa

SEQ ID NO: 588280 - DNA, 33 bp, Homo sapien
atttgtgagaaaataggcagtatgatatcacaa

SEQ ID NO: 588281 - DNA, 33 bp, Homo sapien
ccttgcccagttattcaaaatgcaataataact

SEQ ID NO: 588282 - DNA, 33 bp, Homo sapien
ccttgcccagttattcgaaatgcaataataact

SEQ ID NO: 588283 - DNA, 33 bp, Homo sapien
gcatggcataccttcaatcttgaggaagataac

SEQ ID NO: 588284 - DNA, 33 bp, Homo sapien
gcatggcataccttcagtcttgaggaagataac

SEQ ID NO: 588285 - DNA, 33 bp, Homo sapien
gtactaagtggaaatcaaatataagaaattacc

SEQ ID NO: 588286 - DNA, 33 bp, Homo sapien
gtactaagtggaaatcgaatataagaaattacc

SEQ ID NO: 588287 - DNA, 33 bp, Homo sapien
catgttaggacaaatacagtgtatactaagctg

SEQ ID NO: 588288 - DNA, 33 bp, Homo sapien
catgttaggacaaatatagtgtatactaagctg

SEQ ID NO: 588289 - DNA, 33 bp, Homo sapien
tatgccaagtacacacagtataagtgtgtgttc

SEQ ID NO: 588290 - DNA, 33 bp, Homo sapien
tatgccaagtacacacggtataagtgtgtgttc

SEQ ID NO: 588291 - DNA, 33 bp, Homo sapien
gatgccaaacctggaacaaactcagaggagagt

SEQ ID NO: 588292 - DNA, 33 bp, Homo sapien
gatgccaaacctggaagaaactcagaggagagt

SEQ ID NO: 588293 - DNA, 33 bp, Homo sapien
atttactagatacatcaatgagtgagtgagggt

SEQ ID NO: 588294 - DNA, 33 bp, Homo sapien
atttactagatacatcgatgagtgagtgagggt

SEQ ID NO: 588295 - DNA, 33 bp, Homo sapien
atgtgttttgttgtcaagagccttaaattgaaa

SEQ ID NO: 588296 - DNA, 33 bp, Homo sapien
atgtgttttgttgtcaggagccttaaattgaaa

SEQ ID NO: 588297 - DNA, 33 bp, Homo sapien
aagcagacacgcagacaaggatttgagtgttgt

SEQ ID NO: 588298 - DNA, 33 bp, Homo sapien
aagcagacacgcagacgaggatttgagtgttgt

SEQ ID NO: 588299 - DNA, 33 bp, Homo sapien
tttttattgtgtcctccacccgactgccacaga

SEQ ID NO: 588300 - DNA, 33 bp, Homo sapien
tttttattgtgtcctctacccgactgccacaga

SEQ ID NO: 588301 - DNA, 33 bp, Homo sapien
taagaaattgaacaaaatttgtgatatcctagc

SEQ ID NO: 588302 - DNA, 33 bp, Homo sapien
taagaaattgaacaaactttgtgatatcctagc

SEQ ID NO: 588303 - DNA, 33 bp, Homo sapien
ttaatcaaatgctcgacagaagtagaccacgtt

SEQ ID NO: 588304 - DNA, 33 bp, Homo sapien
ttaatcaaatgctcgatagaagtagaccacgtt

SEQ ID NO: 588305 - DNA, 33 bp, Homo sapien
tgttgttggctagacacagtttatagagtcctc

SEQ ID NO: 588306 - DNA, 33 bp, Homo sapien
tgttgttggctagacagagtttatagagtcctc

SEQ ID NO: 588307 - DNA, 33 bp, Homo sapien
ggattatgtactgaaacaggtagaatgcagatg

SEQ ID NO: 588308 - DNA, 33 bp, Homo sapien
ggattatgtactgaaataggtagaatgcagatg

SEQ ID NO: 588309 - DNA, 33 bp, Homo sapien
gacaaagaattttgaaagacgaacttcttttgc

SEQ ID NO: 588310 - DNA, 33 bp, Homo sapien
gacaaagaattttgaaggacgaacttcttttgc

SEQ ID NO: 588311 - DNA, 33 bp, Homo sapien
aaggtgagacacattacggaatatgaaattttt

SEQ ID NO: 588312 - DNA, 33 bp, Homo sapien
aaggtgagacacattatggaatatgaaattttt

SEQ ID NO: 588313 - DNA, 33 bp, Homo sapien
aacaacatcaacaacaaaaagaagtgttccaaa

SEQ ID NO: 588314 - DNA, 33 bp, Homo sapien
aacaacatcaacaacacaaagaagtgttccaaa

SEQ ID NO: 588315 - DNA, 33 bp, Homo sapien
cattagaattgctaccaggctagtggttttgga

SEQ ID NO: 588316 - DNA, 33 bp, Homo sapien
cattagaattgctaccgggctagtggttttgga

SEQ ID NO: 588317 - DNA, 33 bp, Homo sapien
cattcatattcatgcaagatttttctcagccac

SEQ ID NO: 588318 - DNA, 33 bp, Homo sapien
cattcatattcatgcaggatttttctcagccac

SEQ ID NO: 588319 - DNA, 33 bp, Homo sapien
ccctttacagaaaaaactctcggatttaagtgg

SEQ ID NO: 588320 - DNA, 33 bp, Homo sapien
ccctttacagaaaaaattctcggatttaagtgg

SEQ ID NO: 588321 - DNA, 33 bp, Homo sapien
atttttagatgaaagcgcagtttaaagaagtca

SEQ ID NO: 588322 - DNA, 33 bp, Homo sapien
atttttagatgaaagctcagtttaaagaagtca

SEQ ID NO: 588323 - DNA, 33 bp, Homo sapien
tccaacccagcaagaacgggctctgtttctgtc

SEQ ID NO: 588324 - DNA, 33 bp, Homo sapien
tccaacccagcaagaatgggctctgtttctgtc

SEQ ID NO: 588325 - DNA, 33 bp, Homo sapien
tcagatctcagttatacatggaaagaagtgaat

SEQ ID NO: 588326 - DNA, 33 bp, Homo sapien
tcagatctcagttatagatggaaagaagtgaat

SEQ ID NO: 588327 - DNA, 33 bp, Homo sapien
tcttttccatgcttcaataatgcagagatacgt

SEQ ID NO: 588328 - DNA, 33 bp, Homo sapien
tcttttccatgcttcagtaatgcagagatacgt

SEQ ID NO: 588329 - DNA, 33 bp, Homo sapien
tgtcaacatgagaatgaattttgaagcatatac

SEQ ID NO: 588330 - DNA, 33 bp, Homo sapien
tgtcaacatgagaatgcattttgaagcatatac

SEQ ID NO: 588331 - DNA, 33 bp, Homo sapien
ggctcgcagtaagtagcatttgaatattagaca

SEQ ID NO: 588332 - DNA, 33 bp, Homo sapien
ggctcgcagtaagtagtatttgaatattagaca

SEQ ID NO: 588333 - DNA, 33 bp, Homo sapien
taggcgctgtggagtacataaagattgtcccta

SEQ ID NO: 588334 - DNA, 33 bp, Homo sapien
taggcgctgtggagtatataaagattgtcccta

SEQ ID NO: 588335 - DNA, 33 bp, Homo sapien
ttcatagtctacctaaatgattccccagaatta

SEQ ID NO: 588336 - DNA, 33 bp, Homo sapien
ttcatagtctacctaattgattccccagaatta

SEQ ID NO: 588337 - DNA, 33 bp, Homo sapien
tgtggcctacatcaaacagtttctgtcagaaac

SEQ ID NO: 588338 - DNA, 33 bp, Homo sapien
tgtggcctacatcaaagagtttctgtcagaaac

SEQ ID NO: 588339 - DNA, 33 bp, Homo sapien
ctgttgcttcacaggccgcacttagaatattga

SEQ ID NO: 588340 - DNA, 33 bp, Homo sapien
ctgttgcttcacaggctgcacttagaatattga

SEQ ID NO: 588341 - DNA, 33 bp, Homo sapien
gttcctgacttagaaacttgaagtaggtatagt

SEQ ID NO: 588342 - DNA, 33 bp, Homo sapien
gttcctgacttagaaatttgaagtaggtatagt

SEQ ID NO: 588343 - DNA, 33 bp, Homo sapien
tattgctgaaaagacacagcttgcagtttgagt

SEQ ID NO: 588344 - DNA, 33 bp, Homo sapien
tattgctgaaaagacagagcttgcagtttgagt

SEQ ID NO: 588345 - DNA, 33 bp, Homo sapien
ggtctcttctgccttaccccaatcttgagcact

SEQ ID NO: 588346 - DNA, 33 bp, Homo sapien
ggtctcttctgccttatcccaatcttgagcact

SEQ ID NO: 588347 - DNA, 33 bp, Homo sapien
ctgggacaaaagatggcattgaagtgaagacac

SEQ ID NO: 588348 - DNA, 33 bp, Homo sapien
ctgggacaaaagatggtattgaagtgaagacac

SEQ ID NO: 588349 - DNA, 33 bp, Homo sapien
gatcactgaaagctagaaagtatatggacctct

SEQ ID NO: 588350 - DNA, 33 bp, Homo sapien
gatcactgaaagctaggaagtatatggacctct

SEQ ID NO: 588351 - DNA, 33 bp, Homo sapien
tttaacttgcaaggtcacaaactctggaagaga

SEQ ID NO: 588352 - DNA, 33 bp, Homo sapien
tttaacttgcaaggtctcaaactctggaagaga

SEQ ID NO: 588353 - DNA, 33 bp, Homo sapien
ttctcaacctatcttaaatatttgtttcccaac

SEQ ID NO: 588354 - DNA, 33 bp, Homo sapien
ttctcaacctatcttagatatttgtttcccaac

SEQ ID NO: 588355 - DNA, 33 bp, Homo sapien
ttatttatataaaggcactgaattggttgggaa

SEQ ID NO: 588356 - DNA, 33 bp, Homo sapien
ttatttatataaaggcgctgaattggttgggaa

SEQ ID NO: 588357 - DNA, 33 bp, Homo sapien
tacttatacattgaaaagtactataagtgtcac

SEQ ID NO: 588358 - DNA, 33 bp, Homo sapien
tacttatacattgaaaggtactataagtgtcac

SEQ ID NO: 588359 - DNA, 33 bp, Homo sapien
atctctgccctgaagcactttataaaacagtag

SEQ ID NO: 588360 - DNA, 33 bp, Homo sapien
atctctgccctgaagccctttataaaacagtag

SEQ ID NO: 588361 - DNA, 33 bp, Homo sapien
agatttgaagatagaacttaaagcaaatgcaag

SEQ ID NO: 588362 - DNA, 33 bp, Homo sapien
agatttgaagatagaatttaaagcaaatgcaag

SEQ ID NO: 588363 - DNA, 33 bp, Homo sapien
ttgggaaaatcagaaaacagtgcttatcccaga

SEQ ID NO: 588364 - DNA, 33 bp, Homo sapien
ttgggaaaatcagaaagcagtgcttatcccaga

SEQ ID NO: 588365 - DNA, 33 bp, Homo sapien
agcataaaattaatcacagaaacctggccagaa

SEQ ID NO: 588366 - DNA, 33 bp, Homo sapien
agcataaaattaatcatagaaacctggccagaa

SEQ ID NO: 588367 - DNA, 33 bp, Homo sapien
ctttggtaactctacacaaaaatgagactgaag

SEQ ID NO: 588368 - DNA, 33 bp, Homo sapien
ctttggtaactctacagaaaaatgagactgaag

SEQ ID NO: 588369 - DNA, 33 bp, Homo sapien
ggctaaccttgccagaaaatcacattgcttcag

SEQ ID NO: 588370 - DNA, 33 bp, Homo sapien
ggctaaccttgccagagaatcacattgcttcag

SEQ ID NO: 588371 - DNA, 33 bp, Homo sapien
aacaagcaattattgaacaattagttaggcagt

SEQ ID NO: 588372 - DNA, 33 bp, Homo sapien
aacaagcaattattgagcaattagttaggcagt

SEQ ID NO: 588373 - DNA, 33 bp, Homo sapien
acagatggataatagacgtcagtgatttcaaat

SEQ ID NO: 588374 - DNA, 33 bp, Homo sapien
acagatggataatagaggtcagtgatttcaaat

SEQ ID NO: 588375 - DNA, 33 bp, Homo sapien
atctaaatacaaggaacctgaaacaaataaata

SEQ ID NO: 588376 - DNA, 33 bp, Homo sapien
atctaaatacaaggaatctgaaacaaataaata

SEQ ID NO: 588377 - DNA, 33 bp, Homo sapien
ttctattgtggattgccaattacagagctgaaa

SEQ ID NO: 588378 - DNA, 33 bp, Homo sapien
ttctattgtggattgctaattacagagctgaaa

SEQ ID NO: 588379 - DNA, 33 bp, Homo sapien
agaaatgaataacttgaaaaacataaataacgt

SEQ ID NO: 588380 - DNA, 33 bp, Homo sapien
agaaatgaataacttggaaaacataaataacgt

SEQ ID NO: 588381 - DNA, 33 bp, Homo sapien
ggtaggtaatgctgtgaagacataggtgaggtg

SEQ ID NO: 588382 - DNA, 33 bp, Homo sapien
ggtaggtaatgctgtgcagacataggtgaggtg

SEQ ID NO: 588383 - DNA, 33 bp, Homo sapien
agaacttacggcctgacaggaggtaggtaatgc

SEQ ID NO: 588384 - DNA, 33 bp, Homo sapien
agaacttacggcctgataggaggtaggtaatgc

SEQ ID NO: 588385 - DNA, 33 bp, Homo sapien
accacaaaaccttgtgaaatcaaactctgtaca

SEQ ID NO: 588386 - DNA, 33 bp, Homo sapien
accacaaaaccttgtggaatcaaactctgtaca

SEQ ID NO: 588387 - DNA, 33 bp, Homo sapien
ctgataaaacaatattgaaactgcaacctgaag

SEQ ID NO: 588388 - DNA, 33 bp, Homo sapien
ctgataaaacaatatttaaactgcaacctgaag

SEQ ID NO: 588389 - DNA, 33 bp, Homo sapien
gcaaagagagtttgggccaaatgcaagtggaag

SEQ ID NO: 588390 - DNA, 33 bp, Homo sapien
gcaaagagagtttgggtcaaatgcaagtggaag

SEQ ID NO: 588391 - DNA, 33 bp, Homo sapien
atagctaaagatgggacgaggcaccaggttttt

SEQ ID NO: 588392 - DNA, 33 bp, Homo sapien
atagctaaagatgggaggaggcaccaggttttt

SEQ ID NO: 588393 - DNA, 33 bp, Homo sapien
taaatgtgagctcgaactagctgtctctagttg

SEQ ID NO: 588394 - DNA, 33 bp, Homo sapien
taaatgtgagctcgaattagctgtctctagttg

SEQ ID NO: 588395 - DNA, 33 bp, Homo sapien
tgaagatatgagcttacagtctaatgggaaaaa

SEQ ID NO: 588396 - DNA, 33 bp, Homo sapien
tgaagatatgagcttatagtctaatgggaaaaa

SEQ ID NO: 588397 - DNA, 33 bp, Homo sapien
tacatactattataaacgtggttctgaggccac

SEQ ID NO: 588398 - DNA, 33 bp, Homo sapien
tacatactattataaatgtggttctgaggccac

SEQ ID NO: 588399 - DNA, 33 bp, Homo sapien
cttgagaacacacgtacctctggcaaccaataa

SEQ ID NO: 588400 - DNA, 33 bp, Homo sapien
cttgagaacacacgtagctctggcaaccaataa

SEQ ID NO: 588401 - DNA, 33 bp, Homo sapien
atgagcagatagtaaaagtggaaagttgtagaa

SEQ ID NO: 588402 - DNA, 33 bp, Homo sapien
atgagcagatagtaaaggtggaaagttgtagaa

SEQ ID NO: 588403 - DNA, 33 bp, Homo sapien
tggatttcttctccaaggtgctcagttattttt

SEQ ID NO: 588404 - DNA, 33 bp, Homo sapien
tggatttcttctccaatgtgctcagttattttt

SEQ ID NO: 588405 - DNA, 33 bp, Homo sapien
cattatcagtctcataaaagatttaataacaat

SEQ ID NO: 588406 - DNA, 33 bp, Homo sapien
cattatcagtctcatacaagatttaataacaat

SEQ ID NO: 588407 - DNA, 33 bp, Homo sapien
atatttgatgtctctaataaagtactggaaatc

SEQ ID NO: 588408 - DNA, 33 bp, Homo sapien
atatttgatgtctctactaaagtactggaaatc

SEQ ID NO: 588409 - DNA, 33 bp, Homo sapien
aggtcattcagtatcacgacctagtctgtaatt

SEQ ID NO: 588410 - DNA, 33 bp, Homo sapien
aggtcattcagtatcaggacctagtctgtaatt

SEQ ID NO: 588411 - DNA, 33 bp, Homo sapien
tgtcaaaaaccagtgacctctagatatcaattg

SEQ ID NO: 588412 - DNA, 33 bp, Homo sapien
tgtcaaaaaccagtgatctctagatatcaattg

SEQ ID NO: 588413 - DNA, 33 bp, Homo sapien
tctcatacttaactgcacttcaagtccgcacaa

SEQ ID NO: 588414 - DNA, 33 bp, Homo sapien
tctcatacttaactgcgcttcaagtccgcacaa

SEQ ID NO: 588415 - DNA, 33 bp, Homo sapien
atcttcaactgaaacaaacttcaaatctatgat

SEQ ID NO: 588416 - DNA, 33 bp, Homo sapien
atcttcaactgaaacagacttcaaatctatgat

SEQ ID NO: 588417 - DNA, 33 bp, Homo sapien
aactcttagtaggatacctatcaggcattggaa

SEQ ID NO: 588418 - DNA, 33 bp, Homo sapien
aactcttagtaggatatctatcaggcattggaa

SEQ ID NO: 588419 - DNA, 33 bp, Homo sapien
ctaggcaaattctggagggtatagaagccttga

SEQ ID NO: 588420 - DNA, 33 bp, Homo sapien
ctaggcaaattctggatggtatagaagccttga

SEQ ID NO: 588421 - DNA, 33 bp, Homo sapien
aaggtagttggcattccattctctttttactat

SEQ ID NO: 588422 - DNA, 33 bp, Homo sapien
aaggtagttggcattctattctctttttactat

SEQ ID NO: 588423 - DNA, 33 bp, Homo sapien
attaaaaatgggttaacgctcatggcttcttta

SEQ ID NO: 588424 - DNA, 33 bp, Homo sapien
attaaaaatgggttaatgctcatggcttcttta

SEQ ID NO: 588425 - DNA, 33 bp, Homo sapien
gaaatgtctataaataacagcatccagcctaaa

SEQ ID NO: 588426 - DNA, 33 bp, Homo sapien
gaaatgtctataaataccagcatccagcctaaa

SEQ ID NO: 588427 - DNA, 33 bp, Homo sapien
atgaggttgtgttccaatattgtgtttatttcc

SEQ ID NO: 588428 - DNA, 33 bp, Homo sapien
atgaggttgtgttccagtattgtgtttatttcc

SEQ ID NO: 588429 - DNA, 33 bp, Homo sapien
cacttgtgtaatcagaacttgtcagcaacagga

SEQ ID NO: 588430 - DNA, 33 bp, Homo sapien
cacttgtgtaatcagatcttgtcagcaacagga

SEQ ID NO: 588431 - DNA, 33 bp, Homo sapien
ttaataccttgtcagacggataattccttgtca

SEQ ID NO: 588432 - DNA, 33 bp, Homo sapien
ttaataccttgtcagatggataattccttgtca

SEQ ID NO: 588433 - DNA, 33 bp, Homo sapien
cctatgagccaggagaaggtagagaattaaagt

SEQ ID NO: 588434 - DNA, 33 bp, Homo sapien
cctatgagccaggagagggtagagaattaaagt

SEQ ID NO: 588435 - DNA, 33 bp, Homo sapien
aaaaaaaataggattcaatgttgtgttttatgc

SEQ ID NO: 588436 - DNA, 33 bp, Homo sapien
aaaaaaaataggattcgatgttgtgttttatgc

SEQ ID NO: 588437 - DNA, 33 bp, Homo sapien
tatcttaccatagagcagatcatgtctacattg

SEQ ID NO: 588438 - DNA, 33 bp, Homo sapien
tatcttaccatagagcggatcatgtctacattg

SEQ ID NO: 588439 - DNA, 33 bp, Homo sapien
caaatattccatgatccgaacaaatctgaaatc

SEQ ID NO: 588440 - DNA, 33 bp, Homo sapien
caaatattccatgatctgaacaaatctgaaatc

SEQ ID NO: 588441 - DNA, 33 bp, Homo sapien
ggtgggtagccagaaacgtacgggctgattcta

SEQ ID NO: 588442 - DNA, 33 bp, Homo sapien
ggtgggtagccagaaatgtacgggctgattcta

SEQ ID NO: 588443 - DNA, 33 bp, Homo sapien
ttcacctagagacagacggtgctagaccactgg

SEQ ID NO: 588444 - DNA, 33 bp, Homo sapien
ttcacctagagacagatggtgctagaccactgg

SEQ ID NO: 588445 - DNA, 33 bp, Homo sapien
atatcccctcctgataggaagatccagagataa

SEQ ID NO: 588446 - DNA, 33 bp, Homo sapien
atatcccctcctgatatgaagatccagagataa

SEQ ID NO: 588447 - DNA, 33 bp, Homo sapien
ttgataagctttctcaccagctgttgaaaatag

SEQ ID NO: 588448 - DNA, 33 bp, Homo sapien
ttgataagctttctcatcagctgttgaaaatag

SEQ ID NO: 588449 - DNA, 33 bp, Homo sapien
gacagtgtgattatcacctacctttcctgatga

SEQ ID NO: 588450 - DNA, 33 bp, Homo sapien
gacagtgtgattatcagctacctttcctgatga

SEQ ID NO: 588451 - DNA, 33 bp, Homo sapien
ctcagtttgactaccacgtgtttctgtaactta

SEQ ID NO: 588452 - DNA, 33 bp, Homo sapien
ctcagtttgactaccatgtgtttctgtaactta

SEQ ID NO: 588453 - DNA, 33 bp, Homo sapien
ggatagcaggtcctggacacaaaattcagtgat

SEQ ID NO: 588454 - DNA, 33 bp, Homo sapien
ggatagcaggtcctgggcacaaaattcagtgat

SEQ ID NO: 588455 - DNA, 33 bp, Homo sapien
atgacagagtctgaaggaaggctttcattcaga

SEQ ID NO: 588456 - DNA, 33 bp, Homo sapien
atgacagagtctgaagtaaggctttcattcaga

SEQ ID NO: 588457 - DNA, 33 bp, Homo sapien
ttttgttcttgtcaaacgtatatcatcttggcc

SEQ ID NO: 588458 - DNA, 33 bp, Homo sapien
ttttgttcttgtcaaatgtatatcatcttggcc

SEQ ID NO: 588459 - DNA, 33 bp, Homo sapien
atgttccactcttcaaagcaaggatggtgaagt

SEQ ID NO: 588460 - DNA, 33 bp, Homo sapien
atgttccactcttcaaggcaaggatggtgaagt

SEQ ID NO: 588461 - DNA, 33 bp, Homo sapien
ttttgtttttgagataaagattcgctcttgtcg

SEQ ID NO: 588462 - DNA, 33 bp, Homo sapien
ttttgtttttgagatagagattcgctcttgtcg

SEQ ID NO: 588463 - DNA, 33 bp, Homo sapien
tcctttggattcaagtaaagaacctgtatctga

SEQ ID NO: 588464 - DNA, 33 bp, Homo sapien
tcctttggattcaagtgaagaacctgtatctga

SEQ ID NO: 588465 - DNA, 33 bp, Homo sapien
tcatgtgccatatacaaaaagtgctactagtga

SEQ ID NO: 588466 - DNA, 33 bp, Homo sapien
tcatgtgccatatacagaaagtgctactagtga

SEQ ID NO: 588467 - DNA, 33 bp, Homo sapien
atacagatgtcacaaaatcaaaatatccaggag

SEQ ID NO: 588468 - DNA, 33 bp, Homo sapien
atacagatgtcacaaattcaaaatatccaggag

SEQ ID NO: 588469 - DNA, 33 bp, Homo sapien
acacagaaataaccaacgtcaattgcttgcaag

SEQ ID NO: 588470 - DNA, 33 bp, Homo sapien
acacagaaataaccaatgtcaattgcttgcaag

SEQ ID NO: 588471 - DNA, 33 bp, Homo sapien
tgaaaacaagataaaaaatgcgagagaagcagc

SEQ ID NO: 588472 - DNA, 33 bp, Homo sapien
tgaaaacaagataaaacatgcgagagaagcagc

SEQ ID NO: 588473 - DNA, 33 bp, Homo sapien
agtattttaggtcagacgatttgtacctgatgt

SEQ ID NO: 588474 - DNA, 33 bp, Homo sapien
agtattttaggtcagatgatttgtacctgatgt

SEQ ID NO: 588475 - DNA, 33 bp, Homo sapien
tcttcttccatagcctaaagtgttttcctcttc

SEQ ID NO: 588476 - DNA, 33 bp, Homo sapien
tcttcttccatagcctgaagtgttttcctcttc

SEQ ID NO: 588477 - DNA, 33 bp, Homo sapien
tgacagcatgtgtgtgaattaaatgcaaatact

SEQ ID NO: 588478 - DNA, 33 bp, Homo sapien
tgacagcatgtgtgtggattaaatgcaaatact

SEQ ID NO: 588479 - DNA, 33 bp, Homo sapien
tgtgttttctagggacgaattataaggaaaaat

SEQ ID NO: 588480 - DNA, 33 bp, Homo sapien
tgtgttttctagggactaattataaggaaaaat

SEQ ID NO: 588481 - DNA, 33 bp, Homo sapien
tgaagatctgtattcacagaagtgctagtactt

SEQ ID NO: 588482 - DNA, 33 bp, Homo sapien
tgaagatctgtattcatagaagtgctagtactt

SEQ ID NO: 588483 - DNA, 33 bp, Homo sapien
attggtcagactaatcagagtggtcagtggaat

SEQ ID NO: 588484 - DNA, 33 bp, Homo sapien
attggtcagactaatcggagtggtcagtggaat

SEQ ID NO: 588485 - DNA, 33 bp, Homo sapien
ttgcttatatagctcacgggggtattttgagta

SEQ ID NO: 588486 - DNA, 33 bp, Homo sapien
ttgcttatatagctcatgggggtattttgagta

SEQ ID NO: 588487 - DNA, 33 bp, Homo sapien
atgagctatataataaacagcttttgcccctga

SEQ ID NO: 588488 - DNA, 33 bp, Homo sapien
atgagctatataataagcagcttttgcccctga

SEQ ID NO: 588489 - DNA, 33 bp, Homo sapien
attatcagtagcattaagtttgccatagattca

SEQ ID NO: 588490 - DNA, 33 bp, Homo sapien
attatcagtagcattaggtttgccatagattca

SEQ ID NO: 588491 - DNA, 33 bp, Homo sapien
attaagaaacttaaaccctgtctagttgaagta

SEQ ID NO: 588492 - DNA, 33 bp, Homo sapien
attaagaaacttaaacgctgtctagttgaagta

SEQ ID NO: 588493 - DNA, 33 bp, Homo sapien
atcataagaccatagaatcagatgtttgaaatt

SEQ ID NO: 588494 - DNA, 33 bp, Homo sapien
atcataagaccatagagtcagatgtttgaaatt

SEQ ID NO: 588495 - DNA, 33 bp, Homo sapien
actttctgattggcacactgtcctttcgcaggg

SEQ ID NO: 588496 - DNA, 33 bp, Homo sapien
actttctgattggcacgctgtcctttcgcaggg

SEQ ID NO: 588497 - DNA, 33 bp, Homo sapien
ggtttagtgtgccaaggagctgcatgaggcctg

SEQ ID NO: 588498 - DNA, 33 bp, Homo sapien
ggtttagtgtgccaagtagctgcatgaggcctg

SEQ ID NO: 588499 - DNA, 33 bp, Homo sapien
tggtttattactatggaatgacgtaggctagga

SEQ ID NO: 588500 - DNA, 33 bp, Homo sapien
tggtttattactatgggatgacgtaggctagga

SEQ ID NO: 588501 - DNA, 33 bp, Homo sapien
tactcttgctactaaaagggtgaacaattccct

SEQ ID NO: 588502 - DNA, 33 bp, Homo sapien
tactcttgctactaaaggggtgaacaattccct

SEQ ID NO: 588503 - DNA, 33 bp, Homo sapien
cctacaaattcttaccagcaatgtactcccaac

SEQ ID NO: 588504 - DNA, 33 bp, Homo sapien
cctacaaattcttaccggcaatgtactcccaac

SEQ ID NO: 588505 - DNA, 33 bp, Homo sapien
ccttcttcaaattgcactattccagataaatag

SEQ ID NO: 588506 - DNA, 33 bp, Homo sapien
ccttcttcaaattgcagtattccagataaatag

SEQ ID NO: 588507 - DNA, 33 bp, Homo sapien
gcagcttacctggaccgctctttgtatttaaaa

SEQ ID NO: 588508 - DNA, 33 bp, Homo sapien
gcagcttacctggacctctctttgtatttaaaa

SEQ ID NO: 588509 - DNA, 33 bp, Homo sapien
agtacatcccttgcaaatcctccacagtgtgtg

SEQ ID NO: 588510 - DNA, 33 bp, Homo sapien
agtacatcccttgcaattcctccacagtgtgtg

SEQ ID NO: 588511 - DNA, 33 bp, Homo sapien
tctagtggaaggtaaagagtttgtaaggatcaa

SEQ ID NO: 588512 - DNA, 33 bp, Homo sapien
tctagtggaaggtaaatagtttgtaaggatcaa

SEQ ID NO: 588513 - DNA, 33 bp, Homo sapien
ttatttaaccatactacaaaatcaaacctagga

SEQ ID NO: 588514 - DNA, 33 bp, Homo sapien
ttatttaaccatactagaaaatcaaacctagga

SEQ ID NO: 588515 - DNA, 33 bp, Homo sapien
tgcttattgcgtgtaaccttcccagacttctcc

SEQ ID NO: 588516 - DNA, 33 bp, Homo sapien
tgcttattgcgtgtaatcttcccagacttctcc

SEQ ID NO: 588517 - DNA, 33 bp, Homo sapien
ccacgaaaggattacactagctctgcagcaatg

SEQ ID NO: 588518 - DNA, 33 bp, Homo sapien
ccacgaaaggattacattagctctgcagcaatg

SEQ ID NO: 588519 - DNA, 33 bp, Homo sapien
aaaataacaacttaaaacatagctacaatttga

SEQ ID NO: 588520 - DNA, 33 bp, Homo sapien
aaaataacaacttaaagcatagctacaatttga

SEQ ID NO: 588521 - DNA, 33 bp, Homo sapien
agattgggttagacgcccctcttaataaaaggc

SEQ ID NO: 588522 - DNA, 33 bp, Homo sapien
agattgggttagacgctcctcttaataaaaggc

SEQ ID NO: 588523 - DNA, 33 bp, Homo sapien
gttactcattaatttcacagtctgccagaagtt

SEQ ID NO: 588524 - DNA, 33 bp, Homo sapien
gttactcattaatttcgcagtctgccagaagtt

SEQ ID NO: 588525 - DNA, 33 bp, Homo sapien
gacaacaagactaggaagtaatttataaggtaa

SEQ ID NO: 588526 - DNA, 33 bp, Homo sapien
gacaacaagactaggatgtaatttataaggtaa

SEQ ID NO: 588527 - DNA, 33 bp, Homo sapien
taagtaacctttagtgcaagcatacagtttacc

SEQ ID NO: 588528 - DNA, 33 bp, Homo sapien
taagtaacctttagtgtaagcatacagtttacc

SEQ ID NO: 588529 - DNA, 33 bp, Homo sapien
tggagttttgagactagactagcatactcttaa

SEQ ID NO: 588530 - DNA, 33 bp, Homo sapien
tggagttttgagactatactagcatactcttaa

SEQ ID NO: 588531 - DNA, 33 bp, Homo sapien
tcctatttacactccaatctgtgaaggatcctt

SEQ ID NO: 588532 - DNA, 33 bp, Homo sapien
tcctatttacactccagtctgtgaaggatcctt

SEQ ID NO: 588533 - DNA, 33 bp, Homo sapien
tctcactttcttagccaatgggccctctactca

SEQ ID NO: 588534 - DNA, 33 bp, Homo sapien
tctcactttcttagcctatgggccctctactca

SEQ ID NO: 588535 - DNA, 33 bp, Homo sapien
tggctggaactgtaaacctgatgtaacgtctgt

SEQ ID NO: 588536 - DNA, 33 bp, Homo sapien
tggctggaactgtaaatctgatgtaacgtctgt

SEQ ID NO: 588537 - DNA, 33 bp, Homo sapien
ttatctgttccattcccattttcctcctcaatg

SEQ ID NO: 588538 - DNA, 33 bp, Homo sapien
ttatctgttccattcctattttcctcctcaatg

SEQ ID NO: 588539 - DNA, 33 bp, Homo sapien
tgtggaaaatgaatgcaacttaagatgccattt

SEQ ID NO: 588540 - DNA, 33 bp, Homo sapien
tgtggaaaatgaatgcgacttaagatgccattt

SEQ ID NO: 588541 - DNA, 33 bp, Homo sapien
gacctcagagataccacgtgaaaggaggtttcc

SEQ ID NO: 588542 - DNA, 33 bp, Homo sapien
gacctcagagataccatgtgaaaggaggtttcc

SEQ ID NO: 588543 - DNA, 33 bp, Homo sapien
aatagtttgaggaaaaaaatgtcatactttaaa

SEQ ID NO: 588544 - DNA, 33 bp, Homo sapien
aatagtttgaggaaaacaatgtcatactttaaa

SEQ ID NO: 588545 - DNA, 33 bp, Homo sapien
ctgtcatctccatagcaaattggtagctatttt

SEQ ID NO: 588546 - DNA, 33 bp, Homo sapien
ctgtcatctccatagccaattggtagctatttt

SEQ ID NO: 588547 - DNA, 33 bp, Homo sapien
gatttcaggtgacggactccgaaagtaaaaaga

SEQ ID NO: 588548 - DNA, 33 bp, Homo sapien
gatttcaggtgacggattccgaaagtaaaaaga

SEQ ID NO: 588549 - DNA, 33 bp, Homo sapien
acaaatgcgaaacttcaatagtacaataaacac

SEQ ID NO: 588550 - DNA, 33 bp, Homo sapien
acaaatgcgaaacttctatagtacaataaacac

SEQ ID NO: 588551 - DNA, 33 bp, Homo sapien
tttccagtttttaacaacagcttcaaaagatct

SEQ ID NO: 588552 - DNA, 33 bp, Homo sapien
tttccagtttttaacaccagcttcaaaagatct

SEQ ID NO: 588553 - DNA, 33 bp, Homo sapien
tttgttaagtggaagcaactcatcataaaggtc

SEQ ID NO: 588554 - DNA, 33 bp, Homo sapien
tttgttaagtggaagcgactcatcataaaggtc

SEQ ID NO: 588555 - DNA, 33 bp, Homo sapien
agcacaaaatataccactacgtaaattcagagt

SEQ ID NO: 588556 - DNA, 33 bp, Homo sapien
agcacaaaatataccagtacgtaaattcagagt

SEQ ID NO: 588557 - DNA, 33 bp, Homo sapien
aaacagcttgattgaaatctcatcaatgcattt

SEQ ID NO: 588558 - DNA, 33 bp, Homo sapien
aaacagcttgattgaagtctcatcaatgcattt

SEQ ID NO: 588559 - DNA, 33 bp, Homo sapien
aacttcatcaactacaataatttgccttttcca

SEQ ID NO: 588560 - DNA, 33 bp, Homo sapien
aacttcatcaactacagtaatttgccttttcca

SEQ ID NO: 588561 - DNA, 33 bp, Homo sapien
tagttttcaggtaacacgttctaagggatgaca

SEQ ID NO: 588562 - DNA, 33 bp, Homo sapien
tagttttcaggtaacatgttctaagggatgaca

SEQ ID NO: 588563 - DNA, 33 bp, Homo sapien
tctgtagagaagaaacactttaccgtcttttat

SEQ ID NO: 588564 - DNA, 33 bp, Homo sapien
tctgtagagaagaaacgctttaccgtcttttat

SEQ ID NO: 588565 - DNA, 33 bp, Homo sapien
attctgttttatagataagccactttaacttgt

SEQ ID NO: 588566 - DNA, 33 bp, Homo sapien
attctgttttatagatgagccactttaacttgt

SEQ ID NO: 588567 - DNA, 33 bp, Homo sapien
agtttttagggtctacacacattgaatgtcttt

SEQ ID NO: 588568 - DNA, 33 bp, Homo sapien
agtttttagggtctactcacattgaatgtcttt

SEQ ID NO: 588569 - DNA, 33 bp, Homo sapien
gataacattgatgggacgaagaacagtggaaag

SEQ ID NO: 588570 - DNA, 33 bp, Homo sapien
gataacattgatgggatgaagaacagtggaaag

SEQ ID NO: 588571 - DNA, 33 bp, Homo sapien
aaataagctgaagaacaacagtcaaaaggatgt

SEQ ID NO: 588572 - DNA, 33 bp, Homo sapien
aaataagctgaagaacgacagtcaaaaggatgt

SEQ ID NO: 588573 - DNA, 33 bp, Homo sapien
ggacacattcaaatcacggcacctacatttcag

SEQ ID NO: 588574 - DNA, 33 bp, Homo sapien
ggacacattcaaatcatggcacctacatttcag

SEQ ID NO: 588575 - DNA, 33 bp, Homo sapien
tctgaaatatgaaaccaaacggcctcatacact

SEQ ID NO: 588576 - DNA, 33 bp, Homo sapien
tctgaaatatgaaaccgaacggcctcatacact

SEQ ID NO: 588577 - DNA, 33 bp, Homo sapien
ctttggagttttgagcaaatactggaatgagtt

SEQ ID NO: 588578 - DNA, 33 bp, Homo sapien
ctttggagttttgagcgaatactggaatgagtt

SEQ ID NO: 588579 - DNA, 33 bp, Homo sapien
actctaggctgtattaagcaactataatgcatg

SEQ ID NO: 588580 - DNA, 33 bp, Homo sapien
actctaggctgtattaggcaactataatgcatg

SEQ ID NO: 588581 - DNA, 33 bp, Homo sapien
ggcaggagcaagaagacagaggtttcagatctt

SEQ ID NO: 588582 - DNA, 33 bp, Homo sapien
ggcaggagcaagaagagagaggtttcagatctt

SEQ ID NO: 588583 - DNA, 33 bp, Homo sapien
ctacatagcagcaaagaaacattacaactgcag

SEQ ID NO: 588584 - DNA, 33 bp, Homo sapien
ctacatagcagcaaaggaacattacaactgcag

SEQ ID NO: 588585 - DNA, 33 bp, Homo sapien
ggctgctgaatcacataaaaactggattgcata

SEQ ID NO: 588586 - DNA, 33 bp, Homo sapien
ggctgctgaatcacatgaaaactggattgcata

SEQ ID NO: 588587 - DNA, 33 bp, Homo sapien
tatgcactaaaacttacgctggcctctcaggct

SEQ ID NO: 588588 - DNA, 33 bp, Homo sapien
tatgcactaaaacttatgctggcctctcaggct

SEQ ID NO: 588589 - DNA, 33 bp, Homo sapien
acatttacgtgtactcaagtaaacttttgcggc

SEQ ID NO: 588590 - DNA, 33 bp, Homo sapien
acatttacgtgtactcgagtaaacttttgcggc

SEQ ID NO: 588591 - DNA, 33 bp, Homo sapien
cctacatggttaagcacaatggtcttagtatct

SEQ ID NO: 588592 - DNA, 33 bp, Homo sapien
cctacatggttaagcataatggtcttagtatct

SEQ ID NO: 588593 - DNA, 33 bp, Homo sapien
taattgtttttcactacgtacaccactctttga

SEQ ID NO: 588594 - DNA, 33 bp, Homo sapien
taattgtttttcactatgtacaccactctttga

SEQ ID NO: 588595 - DNA, 33 bp, Homo sapien
agcatttctattgaaaaagtgaaaatgtaagca

SEQ ID NO: 588596 - DNA, 33 bp, Homo sapien
agcatttctattgaaagagtgaaaatgtaagca

SEQ ID NO: 588597 - DNA, 33 bp, Homo sapien
tttgtccaagattatcactgaaactcaagtcca

SEQ ID NO: 588598 - DNA, 33 bp, Homo sapien
tttgtccaagattatcgctgaaactcaagtcca

SEQ ID NO: 588599 - DNA, 33 bp, Homo sapien
tgcctttgcttttctcaagtaacgatcaggacc

SEQ ID NO: 588600 - DNA, 33 bp, Homo sapien
tgcctttgcttttctcgagtaacgatcaggacc

SEQ ID NO: 588601 - DNA, 33 bp, Homo sapien
gcttgtctaatctttacgcttcttatttctttt

SEQ ID NO: 588602 - DNA, 33 bp, Homo sapien
gcttgtctaatctttatgcttcttatttctttt

SEQ ID NO: 588603 - DNA, 33 bp, Homo sapien
tgaacataaacatagaagtgtctttatgataga

SEQ ID NO: 588604 - DNA, 33 bp, Homo sapien
tgaacataaacatagatgtgtctttatgataga

SEQ ID NO: 588605 - DNA, 33 bp, Homo sapien
cttccataaacaatacagcggtgaacattgttg

SEQ ID NO: 588606 - DNA, 33 bp, Homo sapien
cttccataaacaatacggcggtgaacattgttg

SEQ ID NO: 588607 - DNA, 33 bp, Homo sapien
tctggtagccatcattcaactcttgagatcaat

SEQ ID NO: 588608 - DNA, 33 bp, Homo sapien
tctggtagccatcattgaactcttgagatcaat

SEQ ID NO: 588609 - DNA, 33 bp, Homo sapien
ggggcaatgctaaaaccgcaagtaatctttatg

SEQ ID NO: 588610 - DNA, 33 bp, Homo sapien
ggggcaatgctaaaactgcaagtaatctttatg

SEQ ID NO: 588611 - DNA, 33 bp, Homo sapien
aactgatcattcaagaaagcacagtgcactggc

SEQ ID NO: 588612 - DNA, 33 bp, Homo sapien
aactgatcattcaagacagcacagtgcactggc

SEQ ID NO: 588613 - DNA, 33 bp, Homo sapien
atagaattagcatctccatgtggttgtacctca

SEQ ID NO: 588614 - DNA, 33 bp, Homo sapien
atagaattagcatctctatgtggttgtacctca

SEQ ID NO: 588615 - DNA, 33 bp, Homo sapien
agtctggactgaaaaaggatataaggttaattg

SEQ ID NO: 588616 - DNA, 33 bp, Homo sapien
agtctggactgaaaaatgatataaggttaattg

SEQ ID NO: 588617 - DNA, 33 bp, Homo sapien
ttttctctaacggagaactatcaggattgaagg

SEQ ID NO: 588618 - DNA, 33 bp, Homo sapien
ttttctctaacggagatctatcaggattgaagg

SEQ ID NO: 588619 - DNA, 33 bp, Homo sapien
atctgaaatcaaatcaatctgaaagcacaatat

SEQ ID NO: 588620 - DNA, 33 bp, Homo sapien
atctgaaatcaaatcagtctgaaagcacaatat

SEQ ID NO: 588621 - DNA, 33 bp, Homo sapien
acaaagccagctgacacagaagtcaaagctatt

SEQ ID NO: 588622 - DNA, 33 bp, Homo sapien
acaaagccagctgacagagaagtcaaagctatt

SEQ ID NO: 588623 - DNA, 33 bp, Homo sapien
acacaaatagcactgaaagagaaaaggtcttca

SEQ ID NO: 588624 - DNA, 33 bp, Homo sapien
acacaaatagcactgagagagaaaaggtcttca

SEQ ID NO: 588625 - DNA, 33 bp, Homo sapien
agaagagtagaggacactcacacttcagaaata

SEQ ID NO: 588626 - DNA, 33 bp, Homo sapien
agaagagtagaggacagtcacacttcagaaata

SEQ ID NO: 588627 - DNA, 33 bp, Homo sapien
gtgggttaaggatatccaatgaagctccacctc

SEQ ID NO: 588628 - DNA, 33 bp, Homo sapien
gtgggttaaggatatctaatgaagctccacctc

SEQ ID NO: 588629 - DNA, 33 bp, Homo sapien
atgcaacataaaatcaacttgtaattgctaagc

SEQ ID NO: 588630 - DNA, 33 bp, Homo sapien
atgcaacataaaatcatcttgtaattgctaagc

SEQ ID NO: 588631 - DNA, 33 bp, Homo sapien
acctgaaattcaggaaatacacaaataaattgc

SEQ ID NO: 588632 - DNA, 33 bp, Homo sapien
acctgaaattcaggaactacacaaataaattgc

SEQ ID NO: 588633 - DNA, 33 bp, Homo sapien
ccatttaatatcatccgctgcctgaatttgtgt

SEQ ID NO: 588634 - DNA, 33 bp, Homo sapien
ccatttaatatcatcctctgcctgaatttgtgt

SEQ ID NO: 588635 - DNA, 33 bp, Homo sapien
aaacaaagaggatctacgctatgcagccagcct

SEQ ID NO: 588636 - DNA, 33 bp, Homo sapien
aaacaaagaggatctatgctatgcagccagcct

SEQ ID NO: 588637 - DNA, 33 bp, Homo sapien
catcatcttacatagtaacgtttgtgtgtgtat

SEQ ID NO: 588638 - DNA, 33 bp, Homo sapien
catcatcttacatagttacgtttgtgtgtgtat

SEQ ID NO: 588639 - DNA, 33 bp, Homo sapien
tatgtatgatagataaccctagagaactaatgt

SEQ ID NO: 588640 - DNA, 33 bp, Homo sapien
tatgtatgatagataatcctagagaactaatgt

SEQ ID NO: 588641 - DNA, 33 bp, Homo sapien
gctctgagaaaggccaacattcgtcttaaggaa

SEQ ID NO: 588642 - DNA, 33 bp, Homo sapien
gctctgagaaaggccaccattcgtcttaaggaa

SEQ ID NO: 588643 - DNA, 33 bp, Homo sapien
tagggtggcaagtcccaggaagtcaacttgtcc

SEQ ID NO: 588644 - DNA, 33 bp, Homo sapien
tagggtggcaagtcccgggaagtcaacttgtcc

SEQ ID NO: 588645 - DNA, 33 bp, Homo sapien
agatttgaacccctcaggttgttggaagaattg

SEQ ID NO: 588646 - DNA, 33 bp, Homo sapien
agatttgaacccctcatgttgttggaagaattg

SEQ ID NO: 588647 - DNA, 33 bp, Homo sapien
caccagcttgaggtataaaaagccctgtacggg

SEQ ID NO: 588648 - DNA, 33 bp, Homo sapien
caccagcttgaggtattaaaagccctgtacggg

SEQ ID NO: 588649 - DNA, 33 bp, Homo sapien
gctcatactgtaatgacgttataagacagtata

SEQ ID NO: 588650 - DNA, 33 bp, Homo sapien
gctcatactgtaatgatgttataagacagtata

SEQ ID NO: 588651 - DNA, 33 bp, Homo sapien
ttttgattttgttaataagtcaattagcaccag

SEQ ID NO: 588652 - DNA, 33 bp, Homo sapien
ttttgattttgttaattagtcaattagcaccag

SEQ ID NO: 588653 - DNA, 33 bp, Homo sapien
gaataaataagcagaaagatgtacacttacttt

SEQ ID NO: 588654 - DNA, 33 bp, Homo sapien
gaataaataagcagaaggatgtacacttacttt

SEQ ID NO: 588655 - DNA, 33 bp, Homo sapien
aatgggtaggaagaggaaagtctgaaatcagag

SEQ ID NO: 588656 - DNA, 33 bp, Homo sapien
aatgggtaggaagagggaagtctgaaatcagag

SEQ ID NO: 588657 - DNA, 33 bp, Homo sapien
tcactgaaatttcaccaattaaagatcaatggt

SEQ ID NO: 588658 - DNA, 33 bp, Homo sapien
tcactgaaatttcaccgattaaagatcaatggt

SEQ ID NO: 588659 - DNA, 33 bp, Homo sapien
tgaaactgaagcttggcataagacaataaatcc

SEQ ID NO: 588660 - DNA, 33 bp, Homo sapien
tgaaactgaagcttggtataagacaataaatcc

SEQ ID NO: 588661 - DNA, 33 bp, Homo sapien
actttatgtagacgatcaagtctttgctaagat

SEQ ID NO: 588662 - DNA, 33 bp, Homo sapien
actttatgtagacgattaagtctttgctaagat

SEQ ID NO: 588663 - DNA, 33 bp, Homo sapien
gtatatgctttcgacactctgctcattattgtc

SEQ ID NO: 588664 - DNA, 33 bp, Homo sapien
gtatatgctttcgacattctgctcattattgtc

SEQ ID NO: 588665 - DNA, 33 bp, Homo sapien
aagttcccagaagatgaagtttgactcattgtg

SEQ ID NO: 588666 - DNA, 33 bp, Homo sapien
aagttcccagaagatggagtttgactcattgtg

SEQ ID NO: 588667 - DNA, 33 bp, Homo sapien
gaatggaatacattgcacccatatatttttcta

SEQ ID NO: 588668 - DNA, 33 bp, Homo sapien
gaatggaatacattgcgcccatatatttttcta

SEQ ID NO: 588669 - DNA, 33 bp, Homo sapien
tcttcaaaaagctgacccgtcaagactggtgaa

SEQ ID NO: 588670 - DNA, 33 bp, Homo sapien
tcttcaaaaagctgactcgtcaagactggtgaa

SEQ ID NO: 588671 - DNA, 33 bp, Homo sapien
atattgtaatccctgtcaaagagcttgtatgtt

SEQ ID NO: 588672 - DNA, 33 bp, Homo sapien
atattgtaatccctgtgaaagagcttgtatgtt

SEQ ID NO: 588673 - DNA, 33 bp, Homo sapien
gctaagctgacttagcagagttcttggctaaaa

SEQ ID NO: 588674 - DNA, 33 bp, Homo sapien
gctaagctgacttagcggagttcttggctaaaa

SEQ ID NO: 588675 - DNA, 33 bp, Homo sapien
tcctgtacttccaagcaattcaactatcttgaa

SEQ ID NO: 588676 - DNA, 33 bp, Homo sapien
tcctgtacttccaagcgattcaactatcttgaa

SEQ ID NO: 588677 - DNA, 33 bp, Homo sapien
gaactgtactcaacaactgtaaaatgaactttg

SEQ ID NO: 588678 - DNA, 33 bp, Homo sapien
gaactgtactcaacaagtgtaaaatgaactttg

SEQ ID NO: 588679 - DNA, 33 bp, Homo sapien
gtccacagaggaaagtaaccaaccatcctggtg

SEQ ID NO: 588680 - DNA, 33 bp, Homo sapien
gtccacagaggaaagtgaccaaccatcctggtg

SEQ ID NO: 588681 - DNA, 33 bp, Homo sapien
tttgtttatttttgcacacaaggatggcaacat

SEQ ID NO: 588682 - DNA, 33 bp, Homo sapien
tttgtttatttttgcagacaaggatggcaacat

SEQ ID NO: 588683 - DNA, 33 bp, Homo sapien
tgtgcactgggttgcacatactcaataagaatt

SEQ ID NO: 588684 - DNA, 33 bp, Homo sapien
tgtgcactgggttgcatatactcaataagaatt

SEQ ID NO: 588685 - DNA, 33 bp, Homo sapien
ggaccagtcccaggagcctcaagttcatttgtg

SEQ ID NO: 588686 - DNA, 33 bp, Homo sapien
ggaccagtcccaggaggctcaagttcatttgtg

SEQ ID NO: 588687 - DNA, 33 bp, Homo sapien
taaaatgctttttctccatcactgaggtaatca

SEQ ID NO: 588688 - DNA, 33 bp, Homo sapien
taaaatgctttttctctatcactgaggtaatca

SEQ ID NO: 588689 - DNA, 33 bp, Homo sapien
gattctaagattatcacgtgtttgactttgctc

SEQ ID NO: 588690 - DNA, 33 bp, Homo sapien
gattctaagattatcatgtgtttgactttgctc

SEQ ID NO: 588691 - DNA, 33 bp, Homo sapien
gtccttgttttgcttgcaattttcagactattt

SEQ ID NO: 588692 - DNA, 33 bp, Homo sapien
gtccttgttttgcttgtaattttcagactattt

SEQ ID NO: 588693 - DNA, 33 bp, Homo sapien
ttctttagtgttggaagtggaaattttacttga

SEQ ID NO: 588694 - DNA, 33 bp, Homo sapien
ttctttagtgttggaattggaaattttacttga

SEQ ID NO: 588695 - DNA, 33 bp, Homo sapien
tttatctctagaatccaaatgaacaactgagtc

SEQ ID NO: 588696 - DNA, 33 bp, Homo sapien
tttatctctagaatccgaatgaacaactgagtc

SEQ ID NO: 588697 - DNA, 33 bp, Homo sapien
tatcaggaaaagatgacgcaggcccagtctatt

SEQ ID NO: 588698 - DNA, 33 bp, Homo sapien
tatcaggaaaagatgatgcaggcccagtctatt

SEQ ID NO: 588699 - DNA, 33 bp, Homo sapien
gttagagagctctgaacctgaagtcaacatatt

SEQ ID NO: 588700 - DNA, 33 bp, Homo sapien
gttagagagctctgaatctgaagtcaacatatt

SEQ ID NO: 588701 - DNA, 33 bp, Homo sapien
aatccctctccactgccagagaactttgatggg

SEQ ID NO: 588702 - DNA, 33 bp, Homo sapien
aatccctctccactgctagagaactttgatggg

SEQ ID NO: 588703 - DNA, 33 bp, Homo sapien
tgtgtcttttgtgaagaaatctgtgagtcctag

SEQ ID NO: 588704 - DNA, 33 bp, Homo sapien
tgtgtcttttgtgaaggaatctgtgagtcctag

SEQ ID NO: 588705 - DNA, 33 bp, Homo sapien
tcacaaaagacacaaactctgcatggtcaaagc

SEQ ID NO: 588706 - DNA, 33 bp, Homo sapien
tcacaaaagacacaaattctgcatggtcaaagc

SEQ ID NO: 588707 - DNA, 33 bp, Homo sapien
gacatgcatagcagcaatattttctgttcagct

SEQ ID NO: 588708 - DNA, 33 bp, Homo sapien
gacatgcatagcagcagtattttctgttcagct

SEQ ID NO: 588709 - DNA, 33 bp, Homo sapien
gcataccagcctcttacgtgtctgcaacccgag

SEQ ID NO: 588710 - DNA, 33 bp, Homo sapien
gcataccagcctcttatgtgtctgcaacccgag

SEQ ID NO: 588711 - DNA, 33 bp, Homo sapien
atagcttcgtggacaacgaaaaaaataggaaaa

SEQ ID NO: 588712 - DNA, 33 bp, Homo sapien
atagcttcgtggacaatgaaaaaaataggaaaa

SEQ ID NO: 588713 - DNA, 33 bp, Homo sapien
gaggagtcagaattcaatccataataagagtaa

SEQ ID NO: 588714 - DNA, 33 bp, Homo sapien
gaggagtcagaattcagtccataataagagtaa

SEQ ID NO: 588715 - DNA, 33 bp, Homo sapien
gaactaccatgagaccaagagtagagaagaatg

SEQ ID NO: 588716 - DNA, 33 bp, Homo sapien
gaactaccatgagaccgagagtagagaagaatg

SEQ ID NO: 588717 - DNA, 33 bp, Homo sapien
atgttggaaatattagcacaatgatttaggacg

SEQ ID NO: 588718 - DNA, 33 bp, Homo sapien
atgttggaaatattaggacaatgatttaggacg

SEQ ID NO: 588719 - DNA, 33 bp, Homo sapien
acaacaacaaaaaccaatgatgagatttgcctt

SEQ ID NO: 588720 - DNA, 33 bp, Homo sapien
acaacaacaaaaaccagtgatgagatttgcctt

SEQ ID NO: 588721 - DNA, 33 bp, Homo sapien
ggtctgatctaattacacgagttcttttttttt

SEQ ID NO: 588722 - DNA, 33 bp, Homo sapien
ggtctgatctaattacgcgagttcttttttttt

SEQ ID NO: 588723 - DNA, 33 bp, Homo sapien
aaatacagtatgagccaatttatttaagttttt

SEQ ID NO: 588724 - DNA, 33 bp, Homo sapien
aaatacagtatgagcccatttatttaagttttt

SEQ ID NO: 588725 - DNA, 33 bp, Homo sapien
ttctctcaatcactcaacctttatcaatggatg

SEQ ID NO: 588726 - DNA, 33 bp, Homo sapien
ttctctcaatcactcagcctttatcaatggatg

SEQ ID NO: 588727 - DNA, 33 bp, Homo sapien
ggggttctctgggaaaccgacttgggaaaggag

SEQ ID NO: 588728 - DNA, 33 bp, Homo sapien
ggggttctctgggaaatcgacttgggaaaggag

SEQ ID NO: 588729 - DNA, 33 bp, Homo sapien
caagatatatgtgtaacgactaatagatatatt

SEQ ID NO: 588730 - DNA, 33 bp, Homo sapien
caagatatatgtgtaatgactaatagatatatt

SEQ ID NO: 588731 - DNA, 33 bp, Homo sapien
ctcatctcaatactaaacattgtacaaccaacc

SEQ ID NO: 588732 - DNA, 33 bp, Homo sapien
ctcatctcaatactaagcattgtacaaccaacc

SEQ ID NO: 588733 - DNA, 33 bp, Homo sapien
tgatgtgattgacaacaatctagagtctgcgtg

SEQ ID NO: 588734 - DNA, 33 bp, Homo sapien
tgatgtgattgacaacgatctagagtctgcgtg

SEQ ID NO: 588735 - DNA, 33 bp, Homo sapien
tctttagtgatagaataacacacactaccaaca

SEQ ID NO: 588736 - DNA, 33 bp, Homo sapien
tctttagtgatagaatgacacacactaccaaca

SEQ ID NO: 588737 - DNA, 33 bp, Homo sapien
gagggaagtactgaagaacatccttatccagaa

SEQ ID NO: 588738 - DNA, 33 bp, Homo sapien
gagggaagtactgaaggacatccttatccagaa

SEQ ID NO: 588739 - DNA, 33 bp, Homo sapien
gattttcattgagtcccactgtgccctcgggat

SEQ ID NO: 588740 - DNA, 33 bp, Homo sapien
gattttcattgagtcctactgtgccctcgggat

SEQ ID NO: 588741 - DNA, 33 bp, Homo sapien
tacttggccggtaataagattttagttctattt

SEQ ID NO: 588742 - DNA, 33 bp, Homo sapien
tacttggccggtaatacgattttagttctattt

SEQ ID NO: 588743 - DNA, 33 bp, Homo sapien
atgttccttataggggaaccttgactaagactc

SEQ ID NO: 588744 - DNA, 33 bp, Homo sapien
atgttccttatagggggaccttgactaagactc

SEQ ID NO: 588745 - DNA, 33 bp, Homo sapien
tatgatctctcaggtcagaccaaaggcaattgc

SEQ ID NO: 588746 - DNA, 33 bp, Homo sapien
tatgatctctcaggtctgaccaaaggcaattgc

SEQ ID NO: 588747 - DNA, 33 bp, Homo sapien
atgagatgcattaaaacctgtgtgctacccttt

SEQ ID NO: 588748 - DNA, 33 bp, Homo sapien
atgagatgcattaaaatctgtgtgctacccttt

SEQ ID NO: 588749 - DNA, 33 bp, Homo sapien
gagggttgtcagtgccaaaatgtcccttgtatt

SEQ ID NO: 588750 - DNA, 33 bp, Homo sapien
gagggttgtcagtgcctaaatgtcccttgtatt

SEQ ID NO: 588751 - DNA, 33 bp, Homo sapien
tcttatgagtgtttcaatcacctttcaggcaaa

SEQ ID NO: 588752 - DNA, 33 bp, Homo sapien
tcttatgagtgtttcagtcacctttcaggcaaa

SEQ ID NO: 588753 - DNA, 33 bp, Homo sapien
ctggcacacacaaaatcaatctgtgatgataga

SEQ ID NO: 588754 - DNA, 33 bp, Homo sapien
ctggcacacacaaaattaatctgtgatgataga

SEQ ID NO: 588755 - DNA, 33 bp, Homo sapien
tgcccattcctggtggccatcgttctttcctag

SEQ ID NO: 588756 - DNA, 33 bp, Homo sapien
tgcccattcctggtggtcatcgttctttcctag

SEQ ID NO: 588757 - DNA, 33 bp, Homo sapien
gcttaaagggtaataaaagtgctggagaggatg

SEQ ID NO: 588758 - DNA, 33 bp, Homo sapien
gcttaaagggtaataacagtgctggagaggatg

SEQ ID NO: 588759 - DNA, 33 bp, Homo sapien
cacaaggtaatgtagacgggcctcaatcccagg

SEQ ID NO: 588760 - DNA, 33 bp, Homo sapien
cacaaggtaatgtagatgggcctcaatcccagg

SEQ ID NO: 588761 - DNA, 33 bp, Homo sapien
gccgttcatctgttgacagacactgagtaatta

SEQ ID NO: 588762 - DNA, 33 bp, Homo sapien
gccgttcatctgttgagagacactgagtaatta

SEQ ID NO: 588763 - DNA, 33 bp, Homo sapien
tccctcacagcatcccacctggtaccgtgcctg

SEQ ID NO: 588764 - DNA, 33 bp, Homo sapien
tccctcacagcatcccgcctggtaccgtgcctg

SEQ ID NO: 588765 - DNA, 33 bp, Homo sapien
tttgtttggtatcccaaaggttcttcctctaag

SEQ ID NO: 588766 - DNA, 33 bp, Homo sapien
tttgtttggtatcccagaggttcttcctctaag

SEQ ID NO: 588767 - DNA, 33 bp, Homo sapien
agaggatctactgcacacaagttagaagccgtc

SEQ ID NO: 588768 - DNA, 33 bp, Homo sapien
agaggatctactgcacccaagttagaagccgtc

SEQ ID NO: 588769 - DNA, 33 bp, Homo sapien
tcatgtcactgctgtcaaactgggctgacggct

SEQ ID NO: 588770 - DNA, 33 bp, Homo sapien
tcatgtcactgctgtcgaactgggctgacggct

SEQ ID NO: 588771 - DNA, 33 bp, Homo sapien
taaactccattgtcgacgaatgaggttttctat

SEQ ID NO: 588772 - DNA, 33 bp, Homo sapien
taaactccattgtcgatgaatgaggttttctat

SEQ ID NO: 588773 - DNA, 33 bp, Homo sapien
aggcggagaggcatatcacaggcagaagaatgg

SEQ ID NO: 588774 - DNA, 33 bp, Homo sapien
aggcggagaggcatatgacaggcagaagaatgg

SEQ ID NO: 588775 - DNA, 33 bp, Homo sapien
caaaatagacggtaaaggtggtgctcaaacccc

SEQ ID NO: 588776 - DNA, 33 bp, Homo sapien
caaaatagacggtaaatgtggtgctcaaacccc

SEQ ID NO: 588777 - DNA, 33 bp, Homo sapien
tggtgctcaaaccccacgaggttatacaaacaa

SEQ ID NO: 588778 - DNA, 33 bp, Homo sapien
tggtgctcaaaccccatgaggttatacaaacaa

SEQ ID NO: 588779 - DNA, 33 bp, Homo sapien
atttgcctctgcatctaaagaaattaaaacaac

SEQ ID NO: 588780 - DNA, 33 bp, Homo sapien
atttgcctctgcatctgaagaaattaaaacaac

SEQ ID NO: 588781 - DNA, 33 bp, Homo sapien
gattctttttctgtgaaccacatagcagtgaag

SEQ ID NO: 588782 - DNA, 33 bp, Homo sapien
gattctttttctgtgatccacatagcagtgaag

SEQ ID NO: 588783 - DNA, 33 bp, Homo sapien
tgttgtgaggcatagacgttgaacttgcatcag

SEQ ID NO: 588784 - DNA, 33 bp, Homo sapien
tgttgtgaggcatagatgttgaacttgcatcag

SEQ ID NO: 588785 - DNA, 33 bp, Homo sapien
tacatacaaaagacaaattcccagaggccacag

SEQ ID NO: 588786 - DNA, 33 bp, Homo sapien
tacatacaaaagacaagttcccagaggccacag

SEQ ID NO: 588787 - DNA, 33 bp, Homo sapien
agggtacacacatcgccgcccggatgactttgg

SEQ ID NO: 588788 - DNA, 33 bp, Homo sapien
agggtacacacatcgctgcccggatgactttgg

SEQ ID NO: 588789 - DNA, 33 bp, Homo sapien
tttgtcttatccttccacaacaatatcttctct

SEQ ID NO: 588790 - DNA, 33 bp, Homo sapien
tttgtcttatccttccgcaacaatatcttctct

SEQ ID NO: 588791 - DNA, 33 bp, Homo sapien
ccaacagctcaggggacggatgattattagttt

SEQ ID NO: 588792 - DNA, 33 bp, Homo sapien
ccaacagctcaggggatggatgattattagttt

SEQ ID NO: 588793 - DNA, 33 bp, Homo sapien
agaatattttgttgggaaagagttcctaggtcc

SEQ ID NO: 588794 - DNA, 33 bp, Homo sapien
agaatattttgttggggaagagttcctaggtcc

SEQ ID NO: 588795 - DNA, 33 bp, Homo sapien
tgtctcctgatttatcaacttcttgcttgggga

SEQ ID NO: 588796 - DNA, 33 bp, Homo sapien
tgtctcctgatttatcgacttcttgcttgggga

SEQ ID NO: 588797 - DNA, 33 bp, Homo sapien
ataacttcttctatcacccacctacctagcaag

SEQ ID NO: 588798 - DNA, 33 bp, Homo sapien
ataacttcttctatcatccacctacctagcaag

SEQ ID NO: 588799 - DNA, 33 bp, Homo sapien
caagaacatgagaataccctcccaaaaacaatc

SEQ ID NO: 588800 - DNA, 33 bp, Homo sapien
caagaacatgagaatatcctcccaaaaacaatc

SEQ ID NO: 588801 - DNA, 33 bp, Homo sapien
gcctcatctttattccagacttccttccctttt

SEQ ID NO: 588802 - DNA, 33 bp, Homo sapien
gcctcatctttattccggacttccttccctttt

SEQ ID NO: 588803 - DNA, 33 bp, Homo sapien
agggttagtgctagcaatgaataagctgtggta

SEQ ID NO: 588804 - DNA, 33 bp, Homo sapien
agggttagtgctagcagtgaataagctgtggta

SEQ ID NO: 588805 - DNA, 33 bp, Homo sapien
catgaagattttttgccaaaatggatgtatttg

SEQ ID NO: 588806 - DNA, 33 bp, Homo sapien
catgaagattttttgctaaaatggatgtatttg

SEQ ID NO: 588807 - DNA, 33 bp, Homo sapien
ttcacactgtggtctgcagaatcacaacctcct

SEQ ID NO: 588808 - DNA, 33 bp, Homo sapien
ttcacactgtggtctgtagaatcacaacctcct

SEQ ID NO: 588809 - DNA, 33 bp, Homo sapien
caggccgacagtttaccaggcgcgcgtgtctcc

SEQ ID NO: 588810 - DNA, 33 bp, Homo sapien
caggccgacagtttacgaggcgcgcgtgtctcc

SEQ ID NO: 588811 - DNA, 33 bp, Homo sapien
tggtgtataaaattagaaattgggctccttttc

SEQ ID NO: 588812 - DNA, 33 bp, Homo sapien
tggtgtataaaattaggaattgggctccttttc

SEQ ID NO: 588813 - DNA, 33 bp, Homo sapien
attcacactgccggcactcaccggtgtaagctt

SEQ ID NO: 588814 - DNA, 33 bp, Homo sapien
attcacactgccggcattcaccggtgtaagctt

SEQ ID NO: 588815 - DNA, 33 bp, Homo sapien
caagctgtcctgtccacgttcctatcccccaca

SEQ ID NO: 588816 - DNA, 33 bp, Homo sapien
caagctgtcctgtccatgttcctatcccccaca

SEQ ID NO: 588817 - DNA, 33 bp, Homo sapien
tgttatactttagaaaggtttcatactgataca

SEQ ID NO: 588818 - DNA, 33 bp, Homo sapien
tgttatactttagaaatgtttcatactgataca

SEQ ID NO: 588819 - DNA, 33 bp, Homo sapien
tttctagttccagataccgtggttgcattgaaa

SEQ ID NO: 588820 - DNA, 33 bp, Homo sapien
tttctagttccagatatcgtggttgcattgaaa

SEQ ID NO: 588821 - DNA, 33 bp, Homo sapien
gataggccatgtagagactaagtgccataggaa

SEQ ID NO: 588822 - DNA, 33 bp, Homo sapien
gataggccatgtagagcctaagtgccataggaa

SEQ ID NO: 588823 - DNA, 33 bp, Homo sapien
gcctagaacagctagaatagtgccaggcataca

SEQ ID NO: 588824 - DNA, 33 bp, Homo sapien
gcctagaacagctagagtagtgccaggcataca

SEQ ID NO: 588825 - DNA, 33 bp, Homo sapien
taaatgtccccgagaaactatataaatacagtt

SEQ ID NO: 588826 - DNA, 33 bp, Homo sapien
taaatgtccccgagaagctatataaatacagtt

SEQ ID NO: 588827 - DNA, 33 bp, Homo sapien
aatactgagctaagtaaggccatctccaccaac

SEQ ID NO: 588828 - DNA, 33 bp, Homo sapien
aatactgagctaagtagggccatctccaccaac

SEQ ID NO: 588829 - DNA, 33 bp, Homo sapien
ttgtgcaaaggaatttcaaatgttaatgaatat

SEQ ID NO: 588830 - DNA, 33 bp, Homo sapien
ttgtgcaaaggaattttaaatgttaatgaatat

SEQ ID NO: 588831 - DNA, 33 bp, Homo sapien
aaaccaggttcactttaaaaaagatcaaggcat

SEQ ID NO: 588832 - DNA, 33 bp, Homo sapien
aaaccaggttcactttgaaaaagatcaaggcat

SEQ ID NO: 588833 - DNA, 33 bp, Homo sapien
gaaatgaattttagaaaagagattagtcctgaa

SEQ ID NO: 588834 - DNA, 33 bp, Homo sapien
gaaatgaattttagaacagagattagtcctgaa

SEQ ID NO: 588835 - DNA, 33 bp, Homo sapien
gctttcttcatacacacagcaatacctgtactt

SEQ ID NO: 588836 - DNA, 33 bp, Homo sapien
gctttcttcatacacagagcaatacctgtactt

SEQ ID NO: 588837 - DNA, 33 bp, Homo sapien
ctgcctggatccataaaagtctaggatgagtac

SEQ ID NO: 588838 - DNA, 33 bp, Homo sapien
ctgcctggatccataagagtctaggatgagtac

SEQ ID NO: 588839 - DNA, 33 bp, Homo sapien
tgccactgcaaagggaaaaactgcagaaaagct

SEQ ID NO: 588840 - DNA, 33 bp, Homo sapien
tgccactgcaaagggacaaactgcagaaaagct

SEQ ID NO: 588841 - DNA, 33 bp, Homo sapien
atagatccagcttcaactatccaatggcatgga

SEQ ID NO: 588842 - DNA, 33 bp, Homo sapien
atagatccagcttcaattatccaatggcatgga

SEQ ID NO: 588843 - DNA, 33 bp, Homo sapien
gagatgaggtgtcacaactggatgaaaacccag

SEQ ID NO: 588844 - DNA, 33 bp, Homo sapien
gagatgaggtgtcacagctggatgaaaacccag

SEQ ID NO: 588845 - DNA, 33 bp, Homo sapien
gcaatttttggtttaactcgtgtattttatgag

SEQ ID NO: 588846 - DNA, 33 bp, Homo sapien
gcaatttttggtttaattcgtgtattttatgag

SEQ ID NO: 588847 - DNA, 33 bp, Homo sapien
atctgtggtctgagaacgtaagcctgaagcttg

SEQ ID NO: 588848 - DNA, 33 bp, Homo sapien
atctgtggtctgagaaggtaagcctgaagcttg

SEQ ID NO: 588849 - DNA, 33 bp, Homo sapien
atctacaaaccacctccacatcctcagcaaaag

SEQ ID NO: 588850 - DNA, 33 bp, Homo sapien
atctacaaaccacctctacatcctcagcaaaag

SEQ ID NO: 588851 - DNA, 33 bp, Homo sapien
gtcatgtgtcaaataaccagttttcacaggaaa

SEQ ID NO: 588852 - DNA, 33 bp, Homo sapien
gtcatgtgtcaaataagcagttttcacaggaaa

SEQ ID NO: 588853 - DNA, 33 bp, Homo sapien
cactttgaaatgtaccaactttacttctaagaa

SEQ ID NO: 588854 - DNA, 33 bp, Homo sapien
cactttgaaatgtaccgactttacttctaagaa

SEQ ID NO: 588855 - DNA, 33 bp, Homo sapien
ttcttgcacgagcttaaattacctagttctctc

SEQ ID NO: 588856 - DNA, 33 bp, Homo sapien
ttcttgcacgagcttagattacctagttctctc

SEQ ID NO: 588857 - DNA, 33 bp, Homo sapien
tcagtcttccagataacgagaaagcttttaagg

SEQ ID NO: 588858 - DNA, 33 bp, Homo sapien
tcagtcttccagataatgagaaagcttttaagg

SEQ ID NO: 588859 - DNA, 33 bp, Homo sapien
tgaggttgaaacttgaagactttgtcagaggta

SEQ ID NO: 588860 - DNA, 33 bp, Homo sapien
tgaggttgaaacttgaggactttgtcagaggta

SEQ ID NO: 588861 - DNA, 33 bp, Homo sapien
gaaatgatttgcaaataaaaacttaaggtcatt

SEQ ID NO: 588862 - DNA, 33 bp, Homo sapien
gaaatgatttgcaaatgaaaacttaaggtcatt

SEQ ID NO: 588863 - DNA, 33 bp, Homo sapien
aagttaggtgccatacaataaactcagaggcta

SEQ ID NO: 588864 - DNA, 33 bp, Homo sapien
aagttaggtgccatacgataaactcagaggcta

SEQ ID NO: 588865 - DNA, 33 bp, Homo sapien
accaattgccacaggacggtaatagagctgaga

SEQ ID NO: 588866 - DNA, 33 bp, Homo sapien
accaattgccacaggatggtaatagagctgaga

SEQ ID NO: 588867 - DNA, 33 bp, Homo sapien
ctgtggctcaggcagcagactgtgatttccaac

SEQ ID NO: 588868 - DNA, 33 bp, Homo sapien
ctgtggctcaggcagcggactgtgatttccaac

SEQ ID NO: 588869 - DNA, 33 bp, Homo sapien
tccacagttattctcaagatacctctaatatca

SEQ ID NO: 588870 - DNA, 33 bp, Homo sapien
tccacagttattctcaggatacctctaatatca

SEQ ID NO: 588871 - DNA, 33 bp, Homo sapien
tagtaaaacaagctgcacatacatcagtttttc

SEQ ID NO: 588872 - DNA, 33 bp, Homo sapien
tagtaaaacaagctgcgcatacatcagtttttc

SEQ ID NO: 588873 - DNA, 33 bp, Homo sapien
gtcgccaaacctcgcaccaaaaccacattttgg

SEQ ID NO: 588874 - DNA, 33 bp, Homo sapien
gtcgccaaacctcgcatcaaaaccacattttgg

SEQ ID NO: 588875 - DNA, 33 bp, Homo sapien
attgagacaatggtgacatgtagccaccctcag

SEQ ID NO: 588876 - DNA, 33 bp, Homo sapien
attgagacaatggtgagatgtagccaccctcag

SEQ ID NO: 588877 - DNA, 33 bp, Homo sapien
ttacaagatgcccttcaagttggtggtttttgt

SEQ ID NO: 588878 - DNA, 33 bp, Homo sapien
ttacaagatgcccttcgagttggtggtttttgt

SEQ ID NO: 588879 - DNA, 33 bp, Homo sapien
ctacagcgttctaccacggactccaccaaggaa

SEQ ID NO: 588880 - DNA, 33 bp, Homo sapien
ctacagcgttctaccatggactccaccaaggaa

SEQ ID NO: 588881 - DNA, 33 bp, Homo sapien
aatggtgaatacctacgccataccagcatccct

SEQ ID NO: 588882 - DNA, 33 bp, Homo sapien
aatggtgaatacctactccataccagcatccct

SEQ ID NO: 588883 - DNA, 33 bp, Homo sapien
gacaggagaggaccataactttgatcagaggac

SEQ ID NO: 588884 - DNA, 33 bp, Homo sapien
gacaggagaggaccatgactttgatcagaggac

SEQ ID NO: 588885 - DNA, 33 bp, Homo sapien
atgttaaatcgcggccagaacacatctgtcaga

SEQ ID NO: 588886 - DNA, 33 bp, Homo sapien
atgttaaatcgcggccggaacacatctgtcaga

SEQ ID NO: 588887 - DNA, 33 bp, Homo sapien
taatcgatgcccaaacacaggcttactgagaac

SEQ ID NO: 588888 - DNA, 33 bp, Homo sapien
taatcgatgcccaaacgcaggcttactgagaac

SEQ ID NO: 588889 - DNA, 33 bp, Homo sapien
caccgaaagagaaatgaaaagaatgaccttagt

SEQ ID NO: 588890 - DNA, 33 bp, Homo sapien
caccgaaagagaaatgcaaagaatgaccttagt

SEQ ID NO: 588891 - DNA, 33 bp, Homo sapien
tcccaccaattatgtcacaaaatccatatataa

SEQ ID NO: 588892 - DNA, 33 bp, Homo sapien
tcccaccaattatgtctcaaaatccatatataa

SEQ ID NO: 588893 - DNA, 33 bp, Homo sapien
atgtgtaatgaggactaaagcattgatgaagaa

SEQ ID NO: 588894 - DNA, 33 bp, Homo sapien
atgtgtaatgaggactgaagcattgatgaagaa

SEQ ID NO: 588895 - DNA, 33 bp, Homo sapien
ccagtctgctcaaagcacacagccttttctctc

SEQ ID NO: 588896 - DNA, 33 bp, Homo sapien
ccagtctgctcaaagcgcacagccttttctctc

SEQ ID NO: 588897 - DNA, 33 bp, Homo sapien
gataacacacagttcaactccagggtcactgcc

SEQ ID NO: 588898 - DNA, 33 bp, Homo sapien
gataacacacagttcatctccagggtcactgcc

SEQ ID NO: 588899 - DNA, 33 bp, Homo sapien
ctttgtgatctctaacagaatacatgattgcac

SEQ ID NO: 588900 - DNA, 33 bp, Homo sapien
ctttgtgatctctaacggaatacatgattgcac

SEQ ID NO: 588901 - DNA, 33 bp, Homo sapien
aagatgtccaagacagaataagtgaagacagac

SEQ ID NO: 588902 - DNA, 33 bp, Homo sapien
aagatgtccaagacagcataagtgaagacagac

SEQ ID NO: 588903 - DNA, 33 bp, Homo sapien
tctgttgaactacatccgaagtactgggggaga

SEQ ID NO: 588904 - DNA, 33 bp, Homo sapien
tctgttgaactacatctgaagtactgggggaga

SEQ ID NO: 588905 - DNA, 33 bp, Homo sapien
ctcacctctggcctaaataacctattcaaagca

SEQ ID NO: 588906 - DNA, 33 bp, Homo sapien
ctcacctctggcctaagtaacctattcaaagca

SEQ ID NO: 588907 - DNA, 33 bp, Homo sapien
acgttgcacggcgaccgcttgatccattctgtg

SEQ ID NO: 588908 - DNA, 33 bp, Homo sapien
acgttgcacggcgacctcttgatccattctgtg

SEQ ID NO: 588909 - DNA, 33 bp, Homo sapien
tcaatacattagagtacggatattttgataagc

SEQ ID NO: 588910 - DNA, 33 bp, Homo sapien
tcaatacattagagtatggatattttgataagc

SEQ ID NO: 588911 - DNA, 33 bp, Homo sapien
actgcaaaccctgacaactttatgcacgaacgt

SEQ ID NO: 588912 - DNA, 33 bp, Homo sapien
actgcaaaccctgacacctttatgcacgaacgt

SEQ ID NO: 588913 - DNA, 33 bp, Homo sapien
tgaaaggaattttaaaacccagctattgtagat

SEQ ID NO: 588914 - DNA, 33 bp, Homo sapien
tgaaaggaattttaaagcccagctattgtagat

SEQ ID NO: 588915 - DNA, 33 bp, Homo sapien
ccaacgcgtcctcacccatgtcacctagcaaca

SEQ ID NO: 588916 - DNA, 33 bp, Homo sapien
ccaacgcgtcctcacctatgtcacctagcaaca

SEQ ID NO: 588917 - DNA, 33 bp, Homo sapien
ttggccttctttgttacctttatctaactctgg

SEQ ID NO: 588918 - DNA, 33 bp, Homo sapien
ttggccttctttgttatctttatctaactctgg

SEQ ID NO: 588919 - DNA, 33 bp, Homo sapien
gatggtgaagtgaaaaagaccccacctatagac

SEQ ID NO: 588920 - DNA, 33 bp, Homo sapien
gatggtgaagtgaaaaggaccccacctatagac

SEQ ID NO: 588921 - DNA, 33 bp, Homo sapien
aaaaataaacaagacaataaaatgcaagccaca

SEQ ID NO: 588922 - DNA, 33 bp, Homo sapien
aaaaataaacaagacagtaaaatgcaagccaca

SEQ ID NO: 588923 - DNA, 33 bp, Homo sapien
ataataattgtcactgcattaatgggtaatgga

SEQ ID NO: 588924 - DNA, 33 bp, Homo sapien
ataataattgtcactgtattaatgggtaatgga

SEQ ID NO: 588925 - DNA, 33 bp, Homo sapien
aaggggtgatggactaacattgctttaaaaata

SEQ ID NO: 588926 - DNA, 33 bp, Homo sapien
aaggggtgatggactagcattgctttaaaaata

SEQ ID NO: 588927 - DNA, 33 bp, Homo sapien
gcaacccaaggaagtacctctgaaaccacacaa

SEQ ID NO: 588928 - DNA, 33 bp, Homo sapien
gcaacccaaggaagtatctctgaaaccacacaa

SEQ ID NO: 588929 - DNA, 33 bp, Homo sapien
tgggctttaagttagcaactcttttctcccatt

SEQ ID NO: 588930 - DNA, 33 bp, Homo sapien
tgggctttaagttagcgactcttttctcccatt

SEQ ID NO: 588931 - DNA, 33 bp, Homo sapien
aatgggcaaaataccaaaattatcagaatcact

SEQ ID NO: 588932 - DNA, 33 bp, Homo sapien
aatgggcaaaataccagaattatcagaatcact

SEQ ID NO: 588933 - DNA, 33 bp, Homo sapien
gatgcgtgtttggcacaagatttccctaattgc

SEQ ID NO: 588934 - DNA, 33 bp, Homo sapien
gatgcgtgtttggcacgagatttccctaattgc

SEQ ID NO: 588935 - DNA, 33 bp, Homo sapien
taatttgcattgtaccggatcggttagggacag

SEQ ID NO: 588936 - DNA, 33 bp, Homo sapien
taatttgcattgtacctgatcggttagggacag

SEQ ID NO: 588937 - DNA, 33 bp, Homo sapien
ttttccgaaagactgactacctccaatgacact

SEQ ID NO: 588938 - DNA, 33 bp, Homo sapien
ttttccgaaagactgattacctccaatgacact

SEQ ID NO: 588939 - DNA, 33 bp, Homo sapien
agacggatgtagcacactgaatgagaggattga

SEQ ID NO: 588940 - DNA, 33 bp, Homo sapien
agacggatgtagcacattgaatgagaggattga

SEQ ID NO: 588941 - DNA, 33 bp, Homo sapien
gtttctattgctcacaacaaaggttgcaaaatg

SEQ ID NO: 588942 - DNA, 33 bp, Homo sapien
gtttctattgctcacagcaaaggttgcaaaatg

SEQ ID NO: 588943 - DNA, 33 bp, Homo sapien
ccctgtcttcttggagacgtacaggaagataca

SEQ ID NO: 588944 - DNA, 33 bp, Homo sapien
ccctgtcttcttggagtcgtacaggaagataca

SEQ ID NO: 588945 - DNA, 33 bp, Homo sapien
tactggaagaaagaacaaggagaaaagtcaaaa

SEQ ID NO: 588946 - DNA, 33 bp, Homo sapien
tactggaagaaagaacgaggagaaaagtcaaaa

SEQ ID NO: 588947 - DNA, 33 bp, Homo sapien
agaaaagttcaaattacggactctctttcccga

SEQ ID NO: 588948 - DNA, 33 bp, Homo sapien
agaaaagttcaaattatggactctctttcccga

SEQ ID NO: 588949 - DNA, 33 bp, Homo sapien
caaaatcagcagtccacgtaaaacaaatgggag

SEQ ID NO: 588950 - DNA, 33 bp, Homo sapien
caaaatcagcagtccatgtaaaacaaatgggag

SEQ ID NO: 588951 - DNA, 33 bp, Homo sapien
attagaaaggttagcaataagtgcagcccagct

SEQ ID NO: 588952 - DNA, 33 bp, Homo sapien
attagaaaggttagcagtaagtgcagcccagct

SEQ ID NO: 588953 - DNA, 33 bp, Homo sapien
cgccctgaaaataccaacgacactggactttgc

SEQ ID NO: 588954 - DNA, 33 bp, Homo sapien
cgccctgaaaataccagcgacactggactttgc

SEQ ID NO: 588955 - DNA, 33 bp, Homo sapien
ggatggaagatactcccgaagaaatgctgaaag

SEQ ID NO: 588956 - DNA, 33 bp, Homo sapien
ggatggaagatactcctgaagaaatgctgaaag

SEQ ID NO: 588957 - DNA, 33 bp, Homo sapien
atttcactgctaaaaacatctttggttgttttc

SEQ ID NO: 588958 - DNA, 33 bp, Homo sapien
atttcactgctaaaaatatctttggttgttttc

SEQ ID NO: 588959 - DNA, 33 bp, Homo sapien
acaggctttggcctacaagcaaaaggctgtacc

SEQ ID NO: 588960 - DNA, 33 bp, Homo sapien
acaggctttggcctacgagcaaaaggctgtacc

SEQ ID NO: 588961 - DNA, 33 bp, Homo sapien
cagtctgaacagactacggagatgtctttggta

SEQ ID NO: 588962 - DNA, 33 bp, Homo sapien
cagtctgaacagactatggagatgtctttggta

SEQ ID NO: 588963 - DNA, 33 bp, Homo sapien
gcagtctcagccttcacgtctttaaaactaaca

SEQ ID NO: 588964 - DNA, 33 bp, Homo sapien
gcagtctcagccttcatgtctttaaaactaaca

SEQ ID NO: 588965 - DNA, 33 bp, Homo sapien
taacgaacccacttccaagacagtgacattaat

SEQ ID NO: 588966 - DNA, 33 bp, Homo sapien
taacgaacccacttccgagacagtgacattaat

SEQ ID NO: 588967 - DNA, 33 bp, Homo sapien
cgttataaaaacaagcgcggccctttcttgttc

SEQ ID NO: 588968 - DNA, 33 bp, Homo sapien
cgttataaaaacaagctcggccctttcttgttc

SEQ ID NO: 588969 - DNA, 33 bp, Homo sapien
gagactggactaattaccaggacctcagcaaat

SEQ ID NO: 588970 - DNA, 33 bp, Homo sapien
gagactggactaattatcaggacctcagcaaat

SEQ ID NO: 588971 - DNA, 33 bp, Homo sapien
ttgctcaaagtcaagactcactcatcatcatag

SEQ ID NO: 588972 - DNA, 33 bp, Homo sapien
ttgctcaaagtcaagattcactcatcatcatag

SEQ ID NO: 588973 - DNA, 33 bp, Homo sapien
gctactgatctccagacgtctttgctgtatttg

SEQ ID NO: 588974 - DNA, 33 bp, Homo sapien
gctactgatctccagatgtctttgctgtatttg

SEQ ID NO: 588975 - DNA, 33 bp, Homo sapien
acacttggtcttgccaggaactgactggacggc

SEQ ID NO: 588976 - DNA, 33 bp, Homo sapien
acacttggtcttgccatgaactgactggacggc

SEQ ID NO: 588977 - DNA, 33 bp, Homo sapien
ccagacactattctgagaactttgtttgaattt

SEQ ID NO: 588978 - DNA, 33 bp, Homo sapien
ccagacactattctgataactttgtttgaattt

SEQ ID NO: 588979 - DNA, 33 bp, Homo sapien
ttaatattctctaatacgatttggatgcttgtt

SEQ ID NO: 588980 - DNA, 33 bp, Homo sapien
ttaatattctctaatatgatttggatgcttgtt

SEQ ID NO: 588981 - DNA, 33 bp, Homo sapien
aacctaatcagagggacgtttccacagtctgtg

SEQ ID NO: 588982 - DNA, 33 bp, Homo sapien
aacctaatcagagggaggtttccacagtctgtg

SEQ ID NO: 588983 - DNA, 33 bp, Homo sapien
ttattgatgcaaagccaaattatgattacgctt

SEQ ID NO: 588984 - DNA, 33 bp, Homo sapien
ttattgatgcaaagcccaattatgattacgctt

SEQ ID NO: 588985 - DNA, 33 bp, Homo sapien
actaacacgccactgaaggaagtgaaaaaggaa

SEQ ID NO: 588986 - DNA, 33 bp, Homo sapien
actaacacgccactgatggaagtgaaaaaggaa

SEQ ID NO: 588987 - DNA, 33 bp, Homo sapien
tcaggtggagggcagacgccgggaatggctttt

SEQ ID NO: 588988 - DNA, 33 bp, Homo sapien
tcaggtggagggcagatgccgggaatggctttt

SEQ ID NO: 588989 - DNA, 33 bp, Homo sapien
ctaaatggacaatggccgcactgtatagtaggt

SEQ ID NO: 588990 - DNA, 33 bp, Homo sapien
ctaaatggacaatggctgcactgtatagtaggt

SEQ ID NO: 588991 - DNA, 33 bp, Homo sapien
tcactttagtgtattaagcaatagagcccaagg

SEQ ID NO: 588992 - DNA, 33 bp, Homo sapien
tcactttagtgtattaggcaatagagcccaagg

SEQ ID NO: 588993 - DNA, 33 bp, Homo sapien
cagtgacccagagcaacgtaaggactgtgctaa

SEQ ID NO: 588994 - DNA, 33 bp, Homo sapien
cagtgacccagagcaatgtaaggactgtgctaa

SEQ ID NO: 588995 - DNA, 33 bp, Homo sapien
cttggaaaaagggactaaaccaagtcattatgg

SEQ ID NO: 588996 - DNA, 33 bp, Homo sapien
cttggaaaaagggactgaaccaagtcattatgg

SEQ ID NO: 588997 - DNA, 33 bp, Homo sapien
tggcattggattttctcactccttttccagcaa

SEQ ID NO: 588998 - DNA, 33 bp, Homo sapien
tggcattggattttctgactccttttccagcaa

SEQ ID NO: 588999 - DNA, 33 bp, Homo sapien
ggtggacaatttttaactcactgtagcattgtc

SEQ ID NO: 589000 - DNA, 33 bp, Homo sapien
ggtggacaatttttaattcactgtagcattgtc

SEQ ID NO: 589001 - DNA, 33 bp, Homo sapien
tccctgtacaaggtgacggtccagctccagaac

SEQ ID NO: 589002 - DNA, 33 bp, Homo sapien
tccctgtacaaggtgatggtccagctccagaac

SEQ ID NO: 589003 - DNA, 33 bp, Homo sapien
tgcttgctgctggaataatctgtgatcatcttg

SEQ ID NO: 589004 - DNA, 33 bp, Homo sapien
tgcttgctgctggaatcatctgtgatcatcttg

SEQ ID NO: 589005 - DNA, 33 bp, Homo sapien
caaagccaggtgcaagcaatagcaatctgatct

SEQ ID NO: 589006 - DNA, 33 bp, Homo sapien
caaagccaggtgcaagtaatagcaatctgatct

SEQ ID NO: 589007 - DNA, 33 bp, Homo sapien
aatcacaataattcaccgaccagctataaaata

SEQ ID NO: 589008 - DNA, 33 bp, Homo sapien
aatcacaataattcactgaccagctataaaata

SEQ ID NO: 589009 - DNA, 33 bp, Homo sapien
gactctctctcaaaaaaagaatccaaaatcagc

SEQ ID NO: 589010 - DNA, 33 bp, Homo sapien
gactctctctcaaaaacagaatccaaaatcagc

SEQ ID NO: 589011 - DNA, 33 bp, Homo sapien
ttcaattaatttaaggaatcagagcccatttgc

SEQ ID NO: 589012 - DNA, 33 bp, Homo sapien
ttcaattaatttaaggtatcagagcccatttgc

SEQ ID NO: 589013 - DNA, 33 bp, Homo sapien
gaggtcattctattcaaaagtggctaagcaatg

SEQ ID NO: 589014 - DNA, 33 bp, Homo sapien
gaggtcattctattcataagtggctaagcaatg

SEQ ID NO: 589015 - DNA, 33 bp, Homo sapien
tgggttctgccactgaagttgacagaattaagc

SEQ ID NO: 589016 - DNA, 33 bp, Homo sapien
tgggttctgccactgaggttgacagaattaagc

SEQ ID NO: 589017 - DNA, 33 bp, Homo sapien
cagtgccctcaggagacaagatgtcagaatact

SEQ ID NO: 589018 - DNA, 33 bp, Homo sapien
cagtgccctcaggagataagatgtcagaatact

SEQ ID NO: 589019 - DNA, 33 bp, Homo sapien
gctttctcttcactgacacacaaggttcaatat

SEQ ID NO: 589020 - DNA, 33 bp, Homo sapien
gctttctcttcactgatacacaaggttcaatat

SEQ ID NO: 589021 - DNA, 33 bp, Homo sapien
agcctcagtattctaacgtataagctggtagct

SEQ ID NO: 589022 - DNA, 33 bp, Homo sapien
agcctcagtattctaatgtataagctggtagct

SEQ ID NO: 589023 - DNA, 33 bp, Homo sapien
gcacatgaagggaagaatcagagctaaaggtgg

SEQ ID NO: 589024 - DNA, 33 bp, Homo sapien
gcacatgaagggaagagtcagagctaaaggtgg

SEQ ID NO: 589025 - DNA, 33 bp, Homo sapien
tacagctcctatacatcaatctttttgaaacat

SEQ ID NO: 589026 - DNA, 33 bp, Homo sapien
tacagctcctatacatgaatctttttgaaacat

SEQ ID NO: 589027 - DNA, 33 bp, Homo sapien
gtttttaagcagagaagtaagccttcaaatagg

SEQ ID NO: 589028 - DNA, 33 bp, Homo sapien
gtttttaagcagagaattaagccttcaaatagg

SEQ ID NO: 589029 - DNA, 33 bp, Homo sapien
tgtgtgtacgtgaagacgatgctatctactaag

SEQ ID NO: 589030 - DNA, 33 bp, Homo sapien
tgtgtgtacgtgaagatgatgctatctactaag

SEQ ID NO: 589031 - DNA, 33 bp, Homo sapien
accaccctcaagaaaacgtctgaaaagagtata

SEQ ID NO: 589032 - DNA, 33 bp, Homo sapien
accaccctcaagaaaatgtctgaaaagagtata

SEQ ID NO: 589033 - DNA, 33 bp, Homo sapien
tgcttgggctaccataacaaaacaacaggctgg

SEQ ID NO: 589034 - DNA, 33 bp, Homo sapien
tgcttgggctaccatatcaaaacaacaggctgg

SEQ ID NO: 589035 - DNA, 33 bp, Homo sapien
taggctcttaatgcataacaagttctcagagat

SEQ ID NO: 589036 - DNA, 33 bp, Homo sapien
taggctcttaatgcatcacaagttctcagagat

SEQ ID NO: 589037 - DNA, 33 bp, Homo sapien
tgaagtctctataagcgctttcattgagtcttt

SEQ ID NO: 589038 - DNA, 33 bp, Homo sapien
tgaagtctctataagctctttcattgagtcttt

SEQ ID NO: 589039 - DNA, 33 bp, Homo sapien
cacattgactgcttaaatactttttctaataat

SEQ ID NO: 589040 - DNA, 33 bp, Homo sapien
cacattgactgcttaagtactttttctaataat

SEQ ID NO: 589041 - DNA, 33 bp, Homo sapien
tgtgtttgaaaaaacaataaatccaaatacagg

SEQ ID NO: 589042 - DNA, 33 bp, Homo sapien
tgtgtttgaaaaaacagtaaatccaaatacagg

SEQ ID NO: 589043 - DNA, 33 bp, Homo sapien
gtgtgtgtgagacagacagagattgttttgagg

SEQ ID NO: 589044 - DNA, 33 bp, Homo sapien
gtgtgtgtgagacagagagagattgttttgagg

SEQ ID NO: 589045 - DNA, 33 bp, Homo sapien
catgtattctttaaaactaagttcctggtcggg

SEQ ID NO: 589046 - DNA, 33 bp, Homo sapien
catgtattctttaaaagtaagttcctggtcggg

SEQ ID NO: 589047 - DNA, 33 bp, Homo sapien
aggcacatttaagaaaccacaaatcaaaatagt

SEQ ID NO: 589048 - DNA, 33 bp, Homo sapien
aggcacatttaagaaatcacaaatcaaaatagt

SEQ ID NO: 589049 - DNA, 33 bp, Homo sapien; identical to SEQ ID NO: 589047

SEQ ID NO: 589050 - DNA, 33 bp, Homo sapien; identical to SEQ ID NO: 589048

SEQ ID NO: 589051 - DNA, 33 bp, Homo sapien
catgggagctgctgacaatttgaaactcatcaa

SEQ ID NO: 589052 - DNA, 33 bp, Homo sapien
catgggagctgctgacgatttgaaactcatcaa

SEQ ID NO: 589053 - DNA, 33 bp, Homo sapien
tctaccaaaatgaaagcaagcagtatagccatt

SEQ ID NO: 589054 - DNA, 33 bp, Homo sapien
tctaccaaaatgaaagtaagcagtatagccatt

SEQ ID NO: 589055 - DNA, 33 bp, Homo sapien
tttttcatttttcggcccttatgacgtgacaaa

SEQ ID NO: 589056 - DNA, 33 bp, Homo sapien
tttttcatttttcggctcttatgacgtgacaaa

SEQ ID NO: 589057 - DNA, 33 bp, Homo sapien
ttcctaagtcaccacactcagtattgtagggtc

SEQ ID NO: 589058 - DNA, 33 bp, Homo sapien
ttcctaagtcaccacattcagtattgtagggtc

SEQ ID NO: 589059 - DNA, 33 bp, Homo sapien
aaatataccaagcaagcattaaccacaagaaag

SEQ ID NO: 589060 - DNA, 33 bp, Homo sapien
aaatataccaagcaagtattaaccacaagaaag

SEQ ID NO: 589061 - DNA, 33 bp, Homo sapien
aattggcttaacagtaaaggctggttgggaggt

SEQ ID NO: 589062 - DNA, 33 bp, Homo sapien
aattggcttaacagtagaggctggttgggaggt

SEQ ID NO: 589063 - DNA, 33 bp, Homo sapien
ggtaaaaaaattcacaacaatgggtagaagaga

SEQ ID NO: 589064 - DNA, 33 bp, Homo sapien
ggtaaaaaaattcacaccaatgggtagaagaga

SEQ ID NO: 589065 - DNA, 33 bp, Homo sapien
gtcttagcgtgtcccaagggccttgatatccat

SEQ ID NO: 589066 - DNA, 33 bp, Homo sapien
gtcttagcgtgtcccatgggccttgatatccat

SEQ ID NO: 589067 - DNA, 33 bp, Homo sapien
aagaatagtcatttacagacctcttacaaccat

SEQ ID NO: 589068 - DNA, 33 bp, Homo sapien
aagaatagtcatttacggacctcttacaaccat

SEQ ID NO: 589069 - DNA, 33 bp, Homo sapien
agcagagggagagctacagaagtttcatctgta

SEQ ID NO: 589070 - DNA, 33 bp, Homo sapien
agcagagggagagctagagaagtttcatctgta

SEQ ID NO: 589071 - DNA, 33 bp, Homo sapien
ttgtcgactgtcaatcaaaaaagccacttacag

SEQ ID NO: 589072 - DNA, 33 bp, Homo sapien
ttgtcgactgtcaatcgaaaaagccacttacag

SEQ ID NO: 589073 - DNA, 33 bp, Homo sapien
tctgagttgatccctacagagtttgttctgggc

SEQ ID NO: 589074 - DNA, 33 bp, Homo sapien
tctgagttgatccctagagagtttgttctgggc

SEQ ID NO: 589075 - DNA, 33 bp, Homo sapien
ccagattagatattccaaggagatgaagaaaga

SEQ ID NO: 589076 - DNA, 33 bp, Homo sapien
ccagattagatattccgaggagatgaagaaaga

SEQ ID NO: 589077 - DNA, 33 bp, Homo sapien
tgtaatttgaatgcataagcagcctcagagatt

SEQ ID NO: 589078 - DNA, 33 bp, Homo sapien
tgtaatttgaatgcatgagcagcctcagagatt

SEQ ID NO: 589079 - DNA, 33 bp, Homo sapien
tagccagttagcaacaccttaaaaataccacat

SEQ ID NO: 589080 - DNA, 33 bp, Homo sapien
tagccagttagcaacatcttaaaaataccacat

SEQ ID NO: 589081 - DNA, 33 bp, Homo sapien
tttgtaatcacattcacgcaggtgtcaggcact

SEQ ID NO: 589082 - DNA, 33 bp, Homo sapien
tttgtaatcacattcatgcaggtgtcaggcact

SEQ ID NO: 589083 - DNA, 33 bp, Homo sapien
agctttagagggttcacgttagaagttaatcag

SEQ ID NO: 589084 - DNA, 33 bp, Homo sapien
agctttagagggttcatgttagaagttaatcag

SEQ ID NO: 589085 - DNA, 33 bp, Homo sapien
tacaactcttaggaacactcttttgaatgtatg

SEQ ID NO: 589086 - DNA, 33 bp, Homo sapien
tacaactcttaggaacgctcttttgaatgtatg

SEQ ID NO: 589087 - DNA, 33 bp, Homo sapien
tcataaggcatagcacagcagtgtgtttactac

SEQ ID NO: 589088 - DNA, 33 bp, Homo sapien
tcataaggcatagcaccgcagtgtgtttactac

SEQ ID NO: 589089 - DNA, 33 bp, Homo sapien
aatataagcacctctcaatgttagctgttttgt

SEQ ID NO: 589090 - DNA, 33 bp, Homo sapien
aatataagcacctctcgatgttagctgttttgt

SEQ ID NO: 589091 - DNA, 33 bp, Homo sapien
tcacatggagctccgcaaaagagagaagcaaaa

SEQ ID NO: 589092 - DNA, 33 bp, Homo sapien
tcacatggagctccgcgaaagagagaagcaaaa

SEQ ID NO: 589093 - DNA, 33 bp, Homo sapien
aaccttgcagaacaccaagtaaggtggagagct

SEQ ID NO: 589094 - DNA, 33 bp, Homo sapien
aaccttgcagaacaccgagtaaggtggagagct

SEQ ID NO: 589095 - DNA, 33 bp, Homo sapien
aaagagctgtaacctcagaaaatgggtggtacc

SEQ ID NO: 589096 - DNA, 33 bp, Homo sapien
aaagagctgtaacctcggaaaatgggtggtacc

SEQ ID NO: 589097 - DNA, 33 bp, Homo sapien
tggctggatttcataaggggaagatgcttctct

SEQ ID NO: 589098 - DNA, 33 bp, Homo sapien
tggctggatttcataatgggaagatgcttctct

SEQ ID NO: 589099 - DNA, 33 bp, Homo sapien
ggactctctgtctttcaccttgcttttgtttgg

SEQ ID NO: 589100 - DNA, 33 bp, Homo sapien
ggactctctgtctttcgccttgcttttgtttgg

SEQ ID NO: 589101 - DNA, 33 bp, Homo sapien
agcagctggctaaagacgcagttctgttgcaga

SEQ ID NO: 589102 - DNA, 33 bp, Homo sapien
agcagctggctaaagatgcagttctgttgcaga

SEQ ID NO: 589103 - DNA, 33 bp, Homo sapien
gtggcagcatgacttaacattactcaagcaacg

SEQ ID NO: 589104 - DNA, 33 bp, Homo sapien
gtggcagcatgacttagcattactcaagcaacg

SEQ ID NO: 589105 - DNA, 33 bp, Homo sapien
catttgtgcaatgtccgatttgttacaggttgg

SEQ ID NO: 589106 - DNA, 33 bp, Homo sapien
catttgtgcaatgtcctatttgttacaggttgg

SEQ ID NO: 589107 - DNA, 33 bp, Homo sapien
tgccgcctccagaaacaatgggacctaccagca

SEQ ID NO: 589108 - DNA, 33 bp, Homo sapien
tgccgcctccagaaacgatgggacctaccagca

SEQ ID NO: 589109 - DNA, 33 bp, Homo sapien
aagtttaggggtaatcactctgaggaacaagaa

SEQ ID NO: 589110 - DNA, 33 bp, Homo sapien
aagtttaggggtaatcgctctgaggaacaagaa

SEQ ID NO: 589111 - DNA, 33 bp, Homo sapien
ttatcaatgtgattataaattgccaacctctat

SEQ ID NO: 589112 - DNA, 33 bp, Homo sapien
ttatcaatgtgattatcaattgccaacctctat

SEQ ID NO: 589113 - DNA, 33 bp, Homo sapien
ctacttctgtatgccaagagagcataggttgtc

SEQ ID NO: 589114 - DNA, 33 bp, Homo sapien
ctacttctgtatgccaggagagcataggttgtc

SEQ ID NO: 589115 - DNA, 33 bp, Homo sapien
attcatcatttagtcaaccgcctagctgtaaag

SEQ ID NO: 589116 - DNA, 33 bp, Homo sapien
attcatcatttagtcatccgcctagctgtaaag

SEQ ID NO: 589117 - DNA, 33 bp, Homo sapien
tccaaggtgactaatgcaaataaaaagatggtg

SEQ ID NO: 589118 - DNA, 33 bp, Homo sapien
tccaaggtgactaatggaaataaaaagatggtg

SEQ ID NO: 589119 - DNA, 33 bp, Homo sapien
acaccagatctcaagacgtcatagtatgaaaaa

SEQ ID NO: 589120 - DNA, 33 bp, Homo sapien
acaccagatctcaagatgtcatagtatgaaaaa

SEQ ID NO: 589121 - DNA, 33 bp, Homo sapien
cctcgtacctactttccagcattggcatttggc

SEQ ID NO: 589122 - DNA, 33 bp, Homo sapien
cctcgtacctactttctagcattggcatttggc

SEQ ID NO: 589123 - DNA, 33 bp, Homo sapien
cagtataagttcttggccatctctactactgcc

SEQ ID NO: 589124 - DNA, 33 bp, Homo sapien
cagtataagttcttggtcatctctactactgcc

SEQ ID NO: 589125 - DNA, 33 bp, Homo sapien
gatcagtaaaaccgagactcatcaacagatcca

SEQ ID NO: 589126 - DNA, 33 bp, Homo sapien
gatcagtaaaaccgaggctcatcaacagatcca

SEQ ID NO: 589127 - DNA, 33 bp, Homo sapien
attgtaaataaatcaagaatttgcacatcattt

SEQ ID NO: 589128 - DNA, 33 bp, Homo sapien
attgtaaataaatcaataatttgcacatcattt

SEQ ID NO: 589129 - DNA, 33 bp, Homo sapien
aaaaacattgtctataaatttttgtaaaagcag

SEQ ID NO: 589130 - DNA, 33 bp, Homo sapien
aaaaacattgtctatagatttttgtaaaagcag

SEQ ID NO: 589131 - DNA, 33 bp, Homo sapien
tagggctaccacttaaggagaaagcagagagac

SEQ ID NO: 589132 - DNA, 33 bp, Homo sapien
tagggctaccacttaatgagaaagcagagagac

SEQ ID NO: 589133 - DNA, 33 bp, Homo sapien
ctggatgactcatttaaaagattggatggaaat

SEQ ID NO: 589134 - DNA, 33 bp, Homo sapien
ctggatgactcatttacaagattggatggaaat

SEQ ID NO: 589135 - DNA, 33 bp, Homo sapien
tcagaccccaagtttacacagatagaaagtttg

SEQ ID NO: 589136 - DNA, 33 bp, Homo sapien
tcagaccccaagtttagacagatagaaagtttg

SEQ ID NO: 589137 - DNA, 33 bp, Homo sapien
ctagtctactttcaagaccttaaattggaagtt

SEQ ID NO: 589138 - DNA, 33 bp, Homo sapien
ctagtctactttcaaggccttaaattggaagtt

SEQ ID NO: 589139 - DNA, 33 bp, Homo sapien
ctgccacggagaatccagaaagcccctgggcca

SEQ ID NO: 589140 - DNA, 33 bp, Homo sapien
ctgccacggagaatccggaaagcccctgggcca

SEQ ID NO: 589141 - DNA, 33 bp, Homo sapien
tatgaggctcacatcaactaagccacagaaaga

SEQ ID NO: 589142 - DNA, 33 bp, Homo sapien
tatgaggctcacatcatctaagccacagaaaga

SEQ ID NO: 589143 - DNA, 33 bp, Homo sapien
tcttgttccacaaccaatgaatagaagatgtag

SEQ ID NO: 589144 - DNA, 33 bp, Homo sapien
tcttgttccacaaccagtgaatagaagatgtag

SEQ ID NO: 589145 - DNA, 33 bp, Homo sapien
aaggcatgagtggccactgagagacgggaaacc

SEQ ID NO: 589146 - DNA, 33 bp, Homo sapien
aaggcatgagtggccattgagagacgggaaacc

SEQ ID NO: 589147 - DNA, 33 bp, Homo sapien
tctccatttaaaaaataattgcaggcttgattg

SEQ ID NO: 589148 - DNA, 33 bp, Homo sapien
tctccatttaaaaaatgattgcaggcttgattg

SEQ ID NO: 589149 - DNA, 33 bp, Homo sapien
acttggattccacttgccaagataaattcaggg

SEQ ID NO: 589150 - DNA, 33 bp, Homo sapien
acttggattccacttggcaagataaattcaggg

SEQ ID NO: 589151 - DNA, 33 bp, Homo sapien
atatatcagcaggggaagctaaaaataaataaa

SEQ ID NO: 589152 - DNA, 33 bp, Homo sapien
atatatcagcaggggaggctaaaaataaataaa

SEQ ID NO: 589153 - DNA, 33 bp, Homo sapien
aagcgcaggtaggttaataacacaagaaaatca

SEQ ID NO: 589154 - DNA, 33 bp, Homo sapien
aagcgcaggtaggttagtaacacaagaaaatca

SEQ ID NO: 589155 - DNA, 33 bp, Homo sapien
gaagaatttttaccaaacttgagttgaaaacag

SEQ ID NO: 589156 - DNA, 33 bp, Homo sapien
gaagaatttttaccaagcttgagttgaaaacag

SEQ ID NO: 589157 - DNA, 33 bp, Homo sapien
tgatgccagaatcaacacaagagaaacaatctt

SEQ ID NO: 589158 - DNA, 33 bp, Homo sapien
tgatgccagaatcaactcaagagaaacaatctt

SEQ ID NO: 589159 - DNA, 33 bp, Homo sapien
gtcattaatttttaaaccagcgcttggctgaga

SEQ ID NO: 589160 - DNA, 33 bp, Homo sapien
gtcattaatttttaaatcagcgcttggctgaga

SEQ ID NO: 589161 - DNA, 33 bp, Homo sapien
ggaaacaaatggatcacagaaaattgaatgctg

SEQ ID NO: 589162 - DNA, 33 bp, Homo sapien
ggaaacaaatggatcatagaaaattgaatgctg

SEQ ID NO: 589163 - DNA, 33 bp, Homo sapien
tcagattgtgagcaaaccagggtgtggcccagg

SEQ ID NO: 589164 - DNA, 33 bp, Homo sapien
tcagattgtgagcaaatcagggtgtggcccagg

SEQ ID NO: 589165 - DNA, 33 bp, Homo sapien
gtcctgtggaggagacagagatgcctacaggag

SEQ ID NO: 589166 - DNA, 33 bp, Homo sapien
gtcctgtggaggagacggagatgcctacaggag

SEQ ID NO: 589167 - DNA, 33 bp, Homo sapien
agggcgggcttcgaaccgagagcttgaattcca

SEQ ID NO: 589168 - DNA, 33 bp, Homo sapien
agggcgggcttcgaactgagagcttgaattcca

SEQ ID NO: 589169 - DNA, 33 bp, Homo sapien
tgtggcagctggaacactggagaccttggccat

SEQ ID NO: 589170 - DNA, 33 bp, Homo sapien
tgtggcagctggaacattggagaccttggccat

SEQ ID NO: 589171 - DNA, 33 bp, Homo sapien
tctagaaaacagcaacggaacagagctccacac

SEQ ID NO: 589172 - DNA, 33 bp, Homo sapien
tctagaaaacagcaactgaacagagctccacac

SEQ ID NO: 589173 - DNA, 33 bp, Homo sapien
cttattttacctgcaacaggtgtgcctacaaaa

SEQ ID NO: 589174 - DNA, 33 bp, Homo sapien
cttattttacctgcaataggtgtgcctacaaaa

SEQ ID NO: 589175 - DNA, 33 bp, Homo sapien
ttgcctcctcctaccacggatccactcactcac

SEQ ID NO: 589176 - DNA, 33 bp, Homo sapien
ttgcctcctcctaccatggatccactcactcac

SEQ ID NO: 589177 - DNA, 33 bp, Homo sapien
cacattcaattcgttacgtccagagccaatgag

SEQ ID NO: 589178 - DNA, 33 bp, Homo sapien
cacattcaattcgttatgtccagagccaatgag

SEQ ID NO: 589179 - DNA, 33 bp, Homo sapien
gtcatgaaaagcaagaaaagactgaccaattgc

SEQ ID NO: 589180 - DNA, 33 bp, Homo sapien
gtcatgaaaagcaagagaagactgaccaattgc

SEQ ID NO: 589181 - DNA, 33 bp, Homo sapien
cacttcgcctctatggcattcttaacaaaaatc

SEQ ID NO: 589182 - DNA, 33 bp, Homo sapien
cacttcgcctctatggtattcttaacaaaaatc

SEQ ID NO: 589183 - DNA, 33 bp, Homo sapien
ctgaatgtaacactccagccaacgtgctcacaa

SEQ ID NO: 589184 - DNA, 33 bp, Homo sapien
ctgaatgtaacactccggccaacgtgctcacaa

SEQ ID NO: 589185 - DNA, 33 bp, Homo sapien
atactcacagtgcagagctagaaatgtctgtgc

SEQ ID NO: 589186 - DNA, 33 bp, Homo sapien
atactcacagtgcagatctagaaatgtctgtgc

SEQ ID NO: 589187 - DNA, 33 bp, Homo sapien
tgggtttcttctgaaaggacagcttagcatcat

SEQ ID NO: 589188 - DNA, 33 bp, Homo sapien
tgggtttcttctgaaatgacagcttagcatcat

SEQ ID NO: 589189 - DNA, 33 bp, Homo sapien
ggcgcttgcattgatacagagctgttgagtgac

SEQ ID NO: 589190 - DNA, 33 bp, Homo sapien
ggcgcttgcattgatatagagctgttgagtgac

SEQ ID NO: 589191 - DNA, 33 bp, Homo sapien
ggaggtaggttggagaaggtagtcatagcctcc

SEQ ID NO: 589192 - DNA, 33 bp, Homo sapien
ggaggtaggttggagagggtagtcatagcctcc

SEQ ID NO: 589193 - DNA, 33 bp, Homo sapien
cctgctcttcattttccccgggcacacagcccc

SEQ ID NO: 589194 - DNA, 33 bp, Homo sapien
cctgctcttcattttctccgggcacacagcccc

SEQ ID NO: 589195 - DNA, 33 bp, Homo sapien
tgtgtgtgtccatgaacgtgtgtataagtatat

SEQ ID NO: 589196 - DNA, 33 bp, Homo sapien
tgtgtgtgtccatgaatgtgtgtataagtatat

SEQ ID NO: 589197 - DNA, 33 bp, Homo sapien
aagaccatttctgtacactagggacagctatta

SEQ ID NO: 589198 - DNA, 33 bp, Homo sapien
aagaccatttctgtacgctagggacagctatta

SEQ ID NO: 589199 - DNA, 33 bp, Homo sapien
ggctgctaatgtatcacacaagattcaaacaag

SEQ ID NO: 589200 - DNA, 33 bp, Homo sapien
ggctgctaatgtatcagacaagattcaaacaag

SEQ ID NO: 589201 - DNA, 33 bp, Homo sapien
aaaactctgcagcaaaaagcaagtgtcataata

SEQ ID NO: 589202 - DNA, 33 bp, Homo sapien
aaaactctgcagcaaacagcaagtgtcataata

SEQ ID NO: 589203 - DNA, 33 bp, Homo sapien
ggaaatctgtggatgccatgttgtgaaccccaa

SEQ ID NO: 589204 - DNA, 33 bp, Homo sapien
ggaaatctgtggatgctatgttgtgaaccccaa

SEQ ID NO: 589205 - DNA, 33 bp, Homo sapien
ggtgagtccaaggccaagctctctaagtcttgg

SEQ ID NO: 589206 - DNA, 33 bp, Homo sapien
ggtgagtccaaggccaggctctctaagtcttgg

SEQ ID NO: 589207 - DNA, 33 bp, Homo sapien
ggaatgtttgtgaagagctgacacataatgaga

SEQ ID NO: 589208 - DNA, 33 bp, Homo sapien
ggaatgtttgtgaagatctgacacataatgaga

SEQ ID NO: 589209 - DNA, 33 bp, Homo sapien
aagtcattacaagggacaaagagtaagaccaaa

SEQ ID NO: 589210 - DNA, 33 bp, Homo sapien
aagtcattacaagggagaaagagtaagaccaaa

SEQ ID NO: 589211 - DNA, 33 bp, Homo sapien
acacagagtaaggacccggtaaataaatggaag

SEQ ID NO: 589212 - DNA, 33 bp, Homo sapien
acacagagtaaggacctggtaaataaatggaag

SEQ ID NO: 589213 - DNA, 33 bp, Homo sapien
tcctatgctcattgtaacaatcactgataaatg

SEQ ID NO: 589214 - DNA, 33 bp, Homo sapien
tcctatgctcattgtaccaatcactgataaatg

SEQ ID NO: 589215 - DNA, 33 bp, Homo sapien
ccccagcagcttgaataaaaccattgtctggat

SEQ ID NO: 589216 - DNA, 33 bp, Homo sapien
ccccagcagcttgaattaaaccattgtctggat

SEQ ID NO: 589217 - DNA, 33 bp, Homo sapien
tgattaatgtatgacacggtcctagaacaaaat

SEQ ID NO: 589218 - DNA, 33 bp, Homo sapien
tgattaatgtatgacatggtcctagaacaaaat

SEQ ID NO: 589219 - DNA, 33 bp, Homo sapien
accagaattttgttgaactttctttatggttta

SEQ ID NO: 589220 - DNA, 33 bp, Homo sapien
accagaattttgttgacctttctttatggttta

SEQ ID NO: 589221 - DNA, 33 bp, Homo sapien
aaaacagattggagtaagcatcacagacaaacc

SEQ ID NO: 589222 - DNA, 33 bp, Homo sapien
aaaacagattggagtaggcatcacagacaaacc

SEQ ID NO: 589223 - DNA, 33 bp, Homo sapien
cttcggagacatagtgccaacctgttttccaga

SEQ ID NO: 589224 - DNA, 33 bp, Homo sapien
cttcggagacatagtggcaacctgttttccaga

SEQ ID NO: 589225 - DNA, 33 bp, Homo sapien
atgacctatcagtttacatttcttgggggtgaa

SEQ ID NO: 589226 - DNA, 33 bp, Homo sapien
atgacctatcagtttatatttcttgggggtgaa

SEQ ID NO: 589227 - DNA, 33 bp, Homo sapien
tctccatccactccaacgtaccatttgtcacac

SEQ ID NO: 589228 - DNA, 33 bp, Homo sapien
tctccatccactccaatgtaccatttgtcacac

SEQ ID NO: 589229 - DNA, 33 bp, Homo sapien
agcccatgcactctatcaaaaatactgtctata

SEQ ID NO: 589230 - DNA, 33 bp, Homo sapien
agcccatgcactctatgaaaaatactgtctata

SEQ ID NO: 589231 - DNA, 33 bp, Homo sapien
cccagggagaaagaggacatcttgagaacttat

SEQ ID NO: 589232 - DNA, 33 bp, Homo sapien
cccagggagaaagaggtcatcttgagaacttat

SEQ ID NO: 589233 - DNA, 33 bp, Homo sapien
gagtgtttgcatttgaaggcttagttctactcg

SEQ ID NO: 589234 - DNA, 33 bp, Homo sapien
gagtgtttgcatttgagggcttagttctactcg

SEQ ID NO: 589235 - DNA, 33 bp, Homo sapien
cagtgtgaggtggaacaagttattctgaggctc

SEQ ID NO: 589236 - DNA, 33 bp, Homo sapien
cagtgtgaggtggaacgagttattctgaggctc

SEQ ID NO: 589237 - DNA, 33 bp, Homo sapien
tcaacaggataagctacgtaaaatgttcggccc

SEQ ID NO: 589238 - DNA, 33 bp, Homo sapien
tcaacaggataagctatgtaaaatgttcggccc

SEQ ID NO: 589239 - DNA, 33 bp, Homo sapien
gcaaaatgaatcagacacaggttcctactccaa

SEQ ID NO: 589240 - DNA, 33 bp, Homo sapien
gcaaaatgaatcagacgcaggttcctactccaa

SEQ ID NO: 589241 - DNA, 33 bp, Homo sapien
acagatggtttgtggacaaatgatcactaggaa

SEQ ID NO: 589242 - DNA, 33 bp, Homo sapien
acagatggtttgtggataaatgatcactaggaa

SEQ ID NO: 589243 - DNA, 33 bp, Homo sapien
aactatatggaagagaagaagcatagttcctcc

SEQ ID NO: 589244 - DNA, 33 bp, Homo sapien
aactatatggaagagaggaagcatagttcctcc

SEQ ID NO: 589245 - DNA, 33 bp, Homo sapien
aagctgagaaacaaaaggtaagatagaaaagaa

SEQ ID NO: 589246 - DNA, 33 bp, Homo sapien
aagctgagaaacaaaatgtaagatagaaaagaa

SEQ ID NO: 589247 - DNA, 33 bp, Homo sapien
agaacaatgagcaaaaaagaggagacctccgcc

SEQ ID NO: 589248 - DNA, 33 bp, Homo sapien
agaacaatgagcaaaagagaggagacctccgcc

SEQ ID NO: 589249 - DNA, 33 bp, Homo sapien
ctcaggccctatctctaacaattgacccacgtt

SEQ ID NO: 589250 - DNA, 33 bp, Homo sapien
ctcaggccctatctctgacaattgacccacgtt

SEQ ID NO: 589251 - DNA, 33 bp, Homo sapien
cccataggaatgaaaacgctgtagtttgcaacc

SEQ ID NO: 589252 - DNA, 33 bp, Homo sapien
cccataggaatgaaaatgctgtagtttgcaacc

SEQ ID NO: 589253 - DNA, 33 bp, Homo sapien
tttcactttcattgtcaagaagtagtttctctt

SEQ ID NO: 589254 - DNA, 33 bp, Homo sapien
tttcactttcattgtcgagaagtagtttctctt

SEQ ID NO: 589255 - DNA, 33 bp, Homo sapien
agaagaaaagtgtgaaaccaacagaagttgatt

SEQ ID NO: 589256 - DNA, 33 bp, Homo sapien
agaagaaaagtgtgaagccaacagaagttgatt

SEQ ID NO: 589257 - DNA, 33 bp, Homo sapien
catattctccacttcactcttccttttttacta

SEQ ID NO: 589258 - DNA, 33 bp, Homo sapien
catattctccacttcattcttccttttttacta

SEQ ID NO: 589259 - DNA, 33 bp, Homo sapien
cataaggaagctggccggacctactggaagatg

SEQ ID NO: 589260 - DNA, 33 bp, Homo sapien
cataaggaagctggcctgacctactggaagatg

SEQ ID NO: 589261 - DNA, 33 bp, Homo sapien
aaatgttccagctttggaagtcagacagtgtca

SEQ ID NO: 589262 - DNA, 33 bp, Homo sapien
aaatgttccagctttgtaagtcagacagtgtca

SEQ ID NO: 589263 - DNA, 33 bp, Homo sapien
gaagtatttgcatcataagaaagattattccag

SEQ ID NO: 589264 - DNA, 33 bp, Homo sapien
gaagtatttgcatcatgagaaagattattccag

SEQ ID NO: 589265 - DNA, 33 bp, Homo sapien
tcccataaatatgtccacatttgtttaagacag

SEQ ID NO: 589266 - DNA, 33 bp, Homo sapien
tcccataaatatgtccccatttgtttaagacag

SEQ ID NO: 589267 - DNA, 33 bp, Homo sapien
ctctcgcttctgtctcactttcagatgcccacc

SEQ ID NO: 589268 - DNA, 33 bp, Homo sapien
ctctcgcttctgtctcgctttcagatgcccacc

SEQ ID NO: 589269 - DNA, 33 bp, Homo sapien
ctttattccacgccataactttaagaaagcaaa

SEQ ID NO: 589270 - DNA, 33 bp, Homo sapien
ctttattccacgccatgactttaagaaagcaaa

SEQ ID NO: 589271 - DNA, 33 bp, Homo sapien
cttgcttattctcagcaacaatggacctgccat

SEQ ID NO: 589272 - DNA, 33 bp, Homo sapien
cttgcttattctcagcgacaatggacctgccat

SEQ ID NO: 589273 - DNA, 33 bp, Homo sapien
tggccaaatttaacgcagaatcatatagagaag

SEQ ID NO: 589274 - DNA, 33 bp, Homo sapien
tggccaaatttaacgcggaatcatatagagaag

SEQ ID NO: 589275 - DNA, 33 bp, Homo sapien
ccctaaaatatgcctccctaaaatacataaaac

SEQ ID NO: 589276 - DNA, 33 bp, Homo sapien
ccctaaaatatgcctctctaaaatacataaaac

SEQ ID NO: 589277 - DNA, 33 bp, Homo sapien
tgtgtcactaattaaaagaaatcctaagaaagt

SEQ ID NO: 589278 - DNA, 33 bp, Homo sapien
tgtgtcactaattaaaggaaatcctaagaaagt

SEQ ID NO: 589279 - DNA, 33 bp, Homo sapien
tagaacactacattcacctaaaaattgtcctgt

SEQ ID NO: 589280 - DNA, 33 bp, Homo sapien
tagaacactacattcagctaaaaattgtcctgt

SEQ ID NO: 589281 - DNA, 33 bp, Homo sapien
caaaggctaaccaatacgaggtgcatttattca

SEQ ID NO: 589282 - DNA, 33 bp, Homo sapien
caaaggctaaccaatatgaggtgcatttattca

SEQ ID NO: 589283 - DNA, 33 bp, Homo sapien
tagaaccatcactgtacatgcaaactatcattg

SEQ ID NO: 589284 - DNA, 33 bp, Homo sapien
tagaaccatcactgtatatgcaaactatcattg

SEQ ID NO: 589285 - DNA, 33 bp, Homo sapien
ccagagaatagaaaaacagagtattcatacaaa

SEQ ID NO: 589286 - DNA, 33 bp, Homo sapien
ccagagaatagaaaaagagagtattcatacaaa

SEQ ID NO: 589287 - DNA, 33 bp, Homo sapien
gtaccagagattccacaatagagcggacacagc

SEQ ID NO: 589288 - DNA, 33 bp, Homo sapien
gtaccagagattccaccatagagcggacacagc

SEQ ID NO: 589289 - DNA, 33 bp, Homo sapien
ggttcacctgtctgaaagcgaagaactggccta

SEQ ID NO: 589290 - DNA, 33 bp, Homo sapien
ggttcacctgtctgaaggcgaagaactggccta

SEQ ID NO: 589291 - DNA, 33 bp, Homo sapien
ccaggattccaccatacgctgtggttggtagtg

SEQ ID NO: 589292 - DNA, 33 bp, Homo sapien
ccaggattccaccatatgctgtggttggtagtg

SEQ ID NO: 589293 - DNA, 33 bp, Homo sapien
ccatcagcaggtcagaagggagtagttcactgg

SEQ ID NO: 589294 - DNA, 33 bp, Homo sapien
ccatcagcaggtcagaggggagtagttcactgg

SEQ ID NO: 589295 - DNA, 33 bp, Homo sapien
tatcatctgcttatcaaccccgctcaggaaatt

SEQ ID NO: 589296 - DNA, 33 bp, Homo sapien
tatcatctgcttatcatccccgctcaggaaatt

SEQ ID NO: 589297 - DNA, 33 bp, Homo sapien
aacaaaccaggatctcacttccatactgagaag

SEQ ID NO: 589298 - DNA, 33 bp, Homo sapien
aacaaaccaggatctcgcttccatactgagaag

SEQ ID NO: 589299 - DNA, 33 bp, Homo sapien
agactctgtttcaaaaattacataaataaaata

SEQ ID NO: 589300 - DNA, 33 bp, Homo sapien
agactctgtttcaaaacttacataaataaaata

SEQ ID NO: 589301 - DNA, 33 bp, Homo sapien
gtgtgcttcatcgctacggaagcttagaaaatt

SEQ ID NO: 589302 - DNA, 33 bp, Homo sapien
gtgtgcttcatcgctatggaagcttagaaaatt

SEQ ID NO: 589303 - DNA, 33 bp, Homo sapien
tgtgactttgaaaccaatagacaccaaagacat

SEQ ID NO: 589304 - DNA, 33 bp, Homo sapien
tgtgactttgaaaccagtagacaccaaagacat

SEQ ID NO: 589305 - DNA, 33 bp, Homo sapien
agaaagccgagtattacctgatattcaaggaag

SEQ ID NO: 589306 - DNA, 33 bp, Homo sapien
agaaagccgagtattagctgatattcaaggaag

SEQ ID NO: 589307 - DNA, 33 bp, Homo sapien
caagcacaagatgctacgtaaaacaattagaaa

SEQ ID NO: 589308 - DNA, 33 bp, Homo sapien
caagcacaagatgctatgtaaaacaattagaaa

SEQ ID NO: 589309 - DNA, 33 bp, Homo sapien
ttttttaagctcccaaggatggtattgagaagt

SEQ ID NO: 589310 - DNA, 33 bp, Homo sapien
ttttttaagctcccaatgatggtattgagaagt

SEQ ID NO: 589311 - DNA, 33 bp, Homo sapien
attataccatttctagccattttaaacaaagga

SEQ ID NO: 589312 - DNA, 33 bp, Homo sapien
attataccatttctaggcattttaaacaaagga

SEQ ID NO: 589313 - DNA, 33 bp, Homo sapien
gtccatttaacctgtcaaaatcactagactaaa

SEQ ID NO: 589314 - DNA, 33 bp, Homo sapien
gtccatttaacctgtcgaaatcactagactaaa

SEQ ID NO: 589315 - DNA, 33 bp, Homo sapien
gggaggtgctggcactcacttcttagctgtgtg

SEQ ID NO: 589316 - DNA, 33 bp, Homo sapien
gggaggtgctggcactgacttcttagctgtgtg

SEQ ID NO: 589317 - DNA, 33 bp, Homo sapien
cacttggatacctagaaaggctaaactcttcat

SEQ ID NO: 589318 - DNA, 33 bp, Homo sapien
cacttggatacctagagaggctaaactcttcat

SEQ ID NO: 589319 - DNA, 33 bp, Homo sapien
ccactcattgttaatacaggcattaaaaggtgg

SEQ ID NO: 589320 - DNA, 33 bp, Homo sapien
ccactcattgttaatagaggcattaaaaggtgg

SEQ ID NO: 589321 - DNA, 33 bp, Homo sapien
gaagtttttggtatgacagaaagtctaaaatta

SEQ ID NO: 589322 - DNA, 33 bp, Homo sapien
gaagtttttggtatgatagaaagtctaaaatta

SEQ ID NO: 589323 - DNA, 33 bp, Homo sapien
actacaagaaatactaaagggaatccttccagc

SEQ ID NO: 589324 - DNA, 33 bp, Homo sapien
actacaagaaatactacagggaatccttccagc

SEQ ID NO: 589325 - DNA, 33 bp, Homo sapien
ttatttctaccatttccatattagttttctgta

SEQ ID NO: 589326 - DNA, 33 bp, Homo sapien
ttatttctaccatttcgatattagttttctgta

SEQ ID NO: 589327 - DNA, 33 bp, Homo sapien
accatgaaaggttccccacgaaggtgccatcgc

SEQ ID NO: 589328 - DNA, 33 bp, Homo sapien
accatgaaaggttccctacgaaggtgccatcgc

SEQ ID NO: 589329 - DNA, 33 bp, Homo sapien
ctcctctagtctgtaaaatgtcagagaataacg

SEQ ID NO: 589330 - DNA, 33 bp, Homo sapien
ctcctctagtctgtaagatgtcagagaataacg

SEQ ID NO: 589331 - DNA, 33 bp, Homo sapien
ctctatggctgacatccaaagctgactcactta

SEQ ID NO: 589332 - DNA, 33 bp, Homo sapien
ctctatggctgacatctaaagctgactcactta

SEQ ID NO: 589333 - DNA, 33 bp, Homo sapien
gggcgacagagtgagacgacctaaaataaacca

SEQ ID NO: 589334 - DNA, 33 bp, Homo sapien
gggcgacagagtgagatgacctaaaataaacca

SEQ ID NO: 589335 - DNA, 33 bp, Homo sapien
cattttagacgtactaaacgaaaagatgttagg

SEQ ID NO: 589336 - DNA, 33 bp, Homo sapien
cattttagacgtactacacgaaaagatgttagg

SEQ ID NO: 589337 - DNA, 33 bp, Homo sapien
ggcagaaatgaaaaccacagggaacaggtgagg

SEQ ID NO: 589338 - DNA, 33 bp, Homo sapien
ggcagaaatgaaaaccgcagggaacaggtgagg

SEQ ID NO: 589339 - DNA, 33 bp, Homo sapien
tgtctgtttattctgccgattttccttttgtca

SEQ ID NO: 589340 - DNA, 33 bp, Homo sapien
tgtctgtttattctgctgattttccttttgtca

SEQ ID NO: 589341 - DNA, 33 bp, Homo sapien
ggaggccaaaacacacagcttacatggcctttc

SEQ ID NO: 589342 - DNA, 33 bp, Homo sapien
ggaggccaaaacacacggcttacatggcctttc

SEQ ID NO: 589343 - DNA, 33 bp, Homo sapien
acagccttttgagtctcaacaaatgcagccggc

SEQ ID NO: 589344 - DNA, 33 bp, Homo sapien
acagccttttgagtctgaacaaatgcagccggc

SEQ ID NO: 589345 - DNA, 33 bp, Homo sapien
cagaaatcgagtgatgccagccgtgaacttgta

SEQ ID NO: 589346 - DNA, 33 bp, Homo sapien
cagaaatcgagtgatgtcagccgtgaacttgta

SEQ ID NO: 589347 - DNA, 33 bp, Homo sapien
tctctgcattcacttactaactccggtagacat

SEQ ID NO: 589348 - DNA, 33 bp, Homo sapien
tctctgcattcacttattaactccggtagacat

SEQ ID NO: 589349 - DNA, 33 bp, Homo sapien
agtctttaactcaggcagccaagtgtcctgcta

SEQ ID NO: 589350 - DNA, 33 bp, Homo sapien
agtctttaactcaggcggccaagtgtcctgcta

SEQ ID NO: 589351 - DNA, 33 bp, Homo sapien
ctgccctgaggaaaaaaacacttcttggctccc

SEQ ID NO: 589352 - DNA, 33 bp, Homo sapien
ctgccctgaggaaaaagacacttcttggctccc

SEQ ID NO: 589353 - DNA, 33 bp, Homo sapien
ctgaccagcttcctacacttagggtttccagtc

SEQ ID NO: 589354 - DNA, 33 bp, Homo sapien
ctgaccagcttcctacgcttagggtttccagtc

SEQ ID NO: 589355 - DNA, 33 bp, Homo sapien
gtgactggaaaatacacgaacaaggtcagggca

SEQ ID NO: 589356 - DNA, 33 bp, Homo sapien
gtgactggaaaatacatgaacaaggtcagggca

SEQ ID NO: 589357 - DNA, 33 bp, Homo sapien
ggatccgtgacaagcaatgctacgaactgtgtg

SEQ ID NO: 589358 - DNA, 33 bp, Homo sapien
ggatccgtgacaagcagtgctacgaactgtgtg

SEQ ID NO: 589359 - DNA, 33 bp, Homo sapien
ttgtgtgcctgggttaaagcaaaaaacagagca

SEQ ID NO: 589360 - DNA, 33 bp, Homo sapien
ttgtgtgcctgggttatagcaaaaaacagagca

SEQ ID NO: 589361 - DNA, 33 bp, Homo sapien
aaacgaaaagcgttccagagatgctggcaagta

SEQ ID NO: 589362 - DNA, 33 bp, Homo sapien
aaacgaaaagcgttccggagatgctggcaagta

SEQ ID NO: 589363 - DNA, 33 bp, Homo sapien
actgctatgcccaagaatcatctgactatgctc

SEQ ID NO: 589364 - DNA, 33 bp, Homo sapien
actgctatgcccaagagtcatctgactatgctc

SEQ ID NO: 589365 - DNA, 33 bp, Homo sapien
agaaaattttgttcctaaactgctatgcccaag

SEQ ID NO: 589366 - DNA, 33 bp, Homo sapien
agaaaattttgttcctgaactgctatgcccaag

SEQ ID NO: 589367 - DNA, 33 bp, Homo sapien
tgtgatgagtctagcccattggggtgcctctgg

SEQ ID NO: 589368 - DNA, 33 bp, Homo sapien
tgtgatgagtctagcctattggggtgcctctgg

SEQ ID NO: 589369 - DNA, 33 bp, Homo sapien
accatgctgtggtccaatacaggccaggtggct

SEQ ID NO: 589370 - DNA, 33 bp, Homo sapien
accatgctgtggtccagtacaggccaggtggct

SEQ ID NO: 589371 - DNA, 33 bp, Homo sapien
aatgggaacgtgagcaagatcatgtcttcactc

SEQ ID NO: 589372 - DNA, 33 bp, Homo sapien
aatgggaacgtgagcaggatcatgtcttcactc

SEQ ID NO: 589373 - DNA, 33 bp, Homo sapien
aatgaggataaacgataagtagccttgagagaa

SEQ ID NO: 589374 - DNA, 33 bp, Homo sapien
aatgaggataaacgatgagtagccttgagagaa

SEQ ID NO: 589375 - DNA, 33 bp, Homo sapien
cctgacggggcaagacagaagaggttaacagtt

SEQ ID NO: 589376 - DNA, 33 bp, Homo sapien
cctgacggggcaagacggaagaggttaacagtt

SEQ ID NO: 589377 - DNA, 33 bp, Homo sapien
cagttctcagaataatcacatcatgtagccagc

SEQ ID NO: 589378 - DNA, 33 bp, Homo sapien
cagttctcagaataattacatcatgtagccagc

SEQ ID NO: 589379 - DNA, 33 bp, Homo sapien
ctttgctggcacaactcagtggtcacaacagac

SEQ ID NO: 589380 - DNA, 33 bp, Homo sapien
ctttgctggcacaactgagtggtcacaacagac

SEQ ID NO: 589381 - DNA, 33 bp, Homo sapien
aggcccataatagaccagcgcccgttctcacca

SEQ ID NO: 589382 - DNA, 33 bp, Homo sapien
aggcccataatagaccggcgcccgttctcacca

SEQ ID NO: 589383 - DNA, 33 bp, Homo sapien
acggaccctgtgataccggattagagttggaaa

SEQ ID NO: 589384 - DNA, 33 bp, Homo sapien
acggaccctgtgatactggattagagttggaaa

SEQ ID NO: 589385 - DNA, 33 bp, Homo sapien
aatactggaatatgacaagggaaaaatgataac

SEQ ID NO: 589386 - DNA, 33 bp, Homo sapien
aatactggaatatgacgagggaaaaatgataac

SEQ ID NO: 589387 - DNA, 33 bp, Homo sapien
gtaagtacaaaagtgacgtgattggatgtgtgt

SEQ ID NO: 589388 - DNA, 33 bp, Homo sapien
gtaagtacaaaagtgatgtgattggatgtgtgt

SEQ ID NO: 589389 - DNA, 33 bp, Homo sapien
gctgtctagacttttccccatccttcaagacag

SEQ ID NO: 589390 - DNA, 33 bp, Homo sapien
gctgtctagacttttctccatccttcaagacag

SEQ ID NO: 589391 - DNA, 33 bp, Homo sapien
taaggccttccttgtacccaaatgtccccagac

SEQ ID NO: 589392 - DNA, 33 bp, Homo sapien
taaggccttccttgtatccaaatgtccccagac

SEQ ID NO: 589393 - DNA, 33 bp, Homo sapien
gcaactccaacgtagccatagggttagcaccag

SEQ ID NO: 589394 - DNA, 33 bp, Homo sapien
gcaactccaacgtagctatagggttagcaccag

SEQ ID NO: 589395 - DNA, 33 bp, Homo sapien
gacatgaaaagcctgacgggtaggttgaagagc

SEQ ID NO: 589396 - DNA, 33 bp, Homo sapien
gacatgaaaagcctgatgggtaggttgaagagc

SEQ ID NO: 589397 - DNA, 33 bp, Homo sapien
caaggagtcacccacacaatgacaggacccgcc

SEQ ID NO: 589398 - DNA, 33 bp, Homo sapien
caaggagtcacccacataatgacaggacccgcc

SEQ ID NO: 589399 - DNA, 33 bp, Homo sapien
ggcttctgcaatataaagcaatgaacctgcgcc

SEQ ID NO: 589400 - DNA, 33 bp, Homo sapien
ggcttctgcaatataatgcaatgaacctgcgcc

SEQ ID NO: 589401 - DNA, 33 bp, Homo sapien
acttgctctgattaaccgatcatcttccgtagc

SEQ ID NO: 589402 - DNA, 33 bp, Homo sapien
acttgctctgattaactgatcatcttccgtagc

SEQ ID NO: 589403 - DNA, 33 bp, Homo sapien; identical to SEQ ID NO: 589401

SEQ ID NO: 589404 - DNA, 33 bp, Homo sapien; identical to SEQ ID NO: 589402

SEQ ID NO: 589405 - DNA, 33 bp, Homo sapien
aggcaacaggtttctacgtagcaagataaagca

SEQ ID NO: 589406 - DNA, 33 bp, Homo sapien
aggcaacaggtttctatgtagcaagataaagca

SEQ ID NO: 589407 - DNA, 33 bp, Homo sapien
caatatattttcttcccgagcacacaggagtag

SEQ ID NO: 589408 - DNA, 33 bp, Homo sapien
caatatattttcttcctgagcacacaggagtag

SEQ ID NO: 589409 - DNA, 33 bp, Homo sapien
ggctctagttctcttcacaattaacctccaggt

SEQ ID NO: 589410 - DNA, 33 bp, Homo sapien
ggctctagttctcttcgcaattaacctccaggt

SEQ ID NO: 589411 - DNA, 33 bp, Homo sapien
tggggaccgagactcaatctgtgggatatgatg

SEQ ID NO: 589412 - DNA, 33 bp, Homo sapien
tggggaccgagactcattctgtgggatatgatg

SEQ ID NO: 589413 - DNA, 33 bp, Homo sapien
cttagaacagcttagaccaaagttcttaggttt

SEQ ID NO: 589414 - DNA, 33 bp, Homo sapien
cttagaacagcttagatcaaagttcttaggttt

SEQ ID NO: 589415 - DNA, 33 bp, Homo sapien; identical to SEQ ID NO: 589413

SEQ ID NO: 589416 - DNA, 33 bp, Homo sapien; identical to SEQ ID NO: 589414

SEQ ID NO: 589417 - DNA, 33 bp, Homo sapien
tgttttcacagtcttaaaacagccctatgcaga

SEQ ID NO: 589418 - DNA, 33 bp, Homo sapien
tgttttcacagtcttataacagccctatgcaga

SEQ ID NO: 589419 - DNA, 33 bp, Homo sapien
gaattcagttggccaagcaggtaaatctgtaag

SEQ ID NO: 589420 - DNA, 33 bp, Homo sapien
gaattcagttggccaatcaggtaaatctgtaag

SEQ ID NO: 589421 - DNA, 33 bp, Homo sapien
cttctgttagccttaaagaatatggtcaggcat

SEQ ID NO: 589422 - DNA, 33 bp, Homo sapien
cttctgttagccttaaggaatatggtcaggcat

SEQ ID NO: 589423 - DNA, 33 bp, Homo sapien
caagcatctatggtacagcgtggtatgaactaa

SEQ ID NO: 589424 - DNA, 33 bp, Homo sapien
caagcatctatggtacggcgtggtatgaactaa

SEQ ID NO: 589425 - DNA, 33 bp, Homo sapien
taggcagtttgaaggacacgatcataaagtcat

SEQ ID NO: 589426 - DNA, 33 bp, Homo sapien
taggcagtttgaaggatacgatcataaagtcat

SEQ ID NO: 589427 - DNA, 33 bp, Homo sapien
ttcctgtttgatttcacgatctggagctaacag

SEQ ID NO: 589428 - DNA, 33 bp, Homo sapien
ttcctgtttgatttcatgatctggagctaacag

SEQ ID NO: 589429 - DNA, 33 bp, Homo sapien
tccaaaagctcaaagaaaactattggtaatgtt

SEQ ID NO: 589430 - DNA, 33 bp, Homo sapien
tccaaaagctcaaagagaactattggtaatgtt

SEQ ID NO: 589431 - DNA, 33 bp, Homo sapien
ggggatatttctgacaataaaaatccttacagt

SEQ ID NO: 589432 - DNA, 33 bp, Homo sapien
ggggatatttctgacagtaaaaatccttacagt

SEQ ID NO: 589433 - DNA, 33 bp, Homo sapien; identical to SEQ ID NO: 589431

SEQ ID NO: 589434 - DNA, 33 bp, Homo sapien; identical to SEQ ID NO: 589432

SEQ ID NO: 589435 - DNA, 33 bp, Homo sapien
ctgttatatttgcaacagagaccatatggccca

SEQ ID NO: 589436 - DNA, 33 bp, Homo sapien
ctgttatatttgcaacggagaccatatggccca

SEQ ID NO: 589437 - DNA, 33 bp, Homo sapien
atacatagagacggaaaataaaactatataaaa

SEQ ID NO: 589438 - DNA, 33 bp, Homo sapien
atacatagagacggaagataaaactatataaaa

SEQ ID NO: 589439 - DNA, 33 bp, Homo sapien
ctacttctactactaacaatagcagcactttat

SEQ ID NO: 589440 - DNA, 33 bp, Homo sapien
ctacttctactactaataatagcagcactttat

SEQ ID NO: 589441 - DNA, 33 bp, Homo sapien
ctttgagactgtctacaccaaaataatcatata

SEQ ID NO: 589442 - DNA, 33 bp, Homo sapien
ctttgagactgtctacgccaaaataatcatata

SEQ ID NO: 589443 - DNA, 33 bp, Homo sapien
gctcaaaagcagccacagatattacataatgca

SEQ ID NO: 589444 - DNA, 33 bp, Homo sapien
gctcaaaagcagccaccgatattacataatgca

SEQ ID NO: 589445 - DNA, 33 bp, Homo sapien
atgaaagttattcttccataaagaggcacagat

SEQ ID NO: 589446 - DNA, 33 bp, Homo sapien
atgaaagttattcttctataaagaggcacagat

SEQ ID NO: 589447 - DNA, 33 bp, Homo sapien
acatggagcacgatcacgtttggagtcaccctg

SEQ ID NO: 589448 - DNA, 33 bp, Homo sapien
acatggagcacgatcatgtttggagtcaccctg

SEQ ID NO: 589449 - DNA, 33 bp, Homo sapien
tttgctattggggctacacaaatttctttatcc

SEQ ID NO: 589450 - DNA, 33 bp, Homo sapien
tttgctattggggctatacaaatttctttatcc

SEQ ID NO: 589451 - DNA, 33 bp, Homo sapien
ctttgtgacctcacagaagacgtgatccctgaa

SEQ ID NO: 589452 - DNA, 33 bp, Homo sapien
ctttgtgacctcacagcagacgtgatccctgaa

SEQ ID NO: 589453 - DNA, 33 bp, Homo sapien; identical to SEQ ID NO: 589451

SEQ ID NO: 589454 - DNA, 33 bp, Homo sapien; identical to SEQ ID NO: 589452

SEQ ID NO: 589455 - DNA, 33 bp, Homo sapien
atgtttgtggtagtacagatgatgagaagttga

SEQ ID NO: 589456 - DNA, 33 bp, Homo sapien
atgtttgtggtagtacggatgatgagaagttga

SEQ ID NO: 589457 - DNA, 33 bp, Homo sapien
caaacaattgctgaagaactgcatatatcttct

SEQ ID NO: 589458 - DNA, 33 bp, Homo sapien
caaacaattgctgaaggactgcatatatcttct

SEQ ID NO: 589459 - DNA, 33 bp, Homo sapien
aaataggcttttaaaacccacgtatctgacctc

SEQ ID NO: 589460 - DNA, 33 bp, Homo sapien
aaataggcttttaaaatccacgtatctgacctc

SEQ ID NO: 589461 - DNA, 33 bp, Homo sapien; identical to SEQ ID NO: 589459

SEQ ID NO: 589462 - DNA, 33 bp, Homo sapien; identical to SEQ ID NO: 589460

SEQ ID NO: 589463 - DNA, 33 bp, Homo sapien
gacaactgacatttaaggtgaggcttataaaat

SEQ ID NO: 589464 - DNA, 33 bp, Homo sapien
gacaactgacatttaatgtgaggcttataaaat

SEQ ID NO: 589465 - DNA, 33 bp, Homo sapien
aaaaaaaatgcttcaacgtgaaagaaataaagc

SEQ ID NO: 589466 - DNA, 33 bp, Homo sapien
aaaaaaaatgcttcaatgtgaaagaaataaagc

SEQ ID NO: 589467 - DNA, 33 bp, Homo sapien
gttaaaaccctactccccgatgtgagaatatca

SEQ ID NO: 589468 - DNA, 33 bp, Homo sapien
gttaaaaccctactccgcgatgtgagaatatca

SEQ ID NO: 589469 - DNA, 33 bp, Homo sapien
taaatctagtgacctgcatatagtgggaattcc

SEQ ID NO: 589470 - DNA, 33 bp, Homo sapien
taaatctagtgacctgtatatagtgggaattcc

SEQ ID NO: 589471 - DNA, 33 bp, Homo sapien; identical to SEQ ID NO: 589469

SEQ ID NO: 589472 - DNA, 33 bp, Homo sapien; identical to SEQ ID NO: 589470

SEQ ID NO: 589473 - DNA, 33 bp, Homo sapien
ttcttttctgcccacagtatgcttcttattgtg

SEQ ID NO: 589474 - DNA, 33 bp, Homo sapien
ttcttttctgcccacattatgcttcttattgtg

SEQ ID NO: 589475 - DNA, 33 bp, Homo sapien
atttgacatatgcaataaacagggagttctttt

SEQ ID NO: 589476 - DNA, 33 bp, Homo sapien
atttgacatatgcaattaacagggagttctttt

SEQ ID NO: 589477 - DNA, 33 bp, Homo sapien
ttgaaattgagtatcaaattgcactctatgctt

SEQ ID NO: 589478 - DNA, 33 bp, Homo sapien
ttgaaattgagtatcagattgcactctatgctt

SEQ ID NO: 589479 - DNA, 33 bp, Homo sapien
catgtattggaatcccaaatttcacaagagcgt

SEQ ID NO: 589480 - DNA, 33 bp, Homo sapien
catgtattggaatcccgaatttcacaagagcgt

SEQ ID NO: 589481 - DNA, 33 bp, Homo sapien
taactcaggtcaatgacggagcatgagagaagt

SEQ ID NO: 589482 - DNA, 33 bp, Homo sapien
taactcaggtcaatgatggagcatgagagaagt

SEQ ID NO: 589483 - DNA, 33 bp, Homo sapien
ctttgggaaagaatgcaaggggataaatcatct

SEQ ID NO: 589484 - DNA, 33 bp, Homo sapien
ctttgggaaagaatgcgaggggataaatcatct

SEQ ID NO: 589485 - DNA, 33 bp, Homo sapien; identical to SEQ ID NO: 589483

SEQ ID NO: 589486 - DNA, 33 bp, Homo sapien; identical to SEQ ID NO: 589484

SEQ ID NO: 589487 - DNA, 33 bp, Homo sapien
ccgtgcatacagcagacacttggtttccttttg

SEQ ID NO: 589488 - DNA, 33 bp, Homo sapien
ccgtgcatacagcagatacttggtttccttttg

SEQ ID NO: 589489 - DNA, 33 bp, Homo sapien
caggcaggcatttcagaaaagtgttttgcacat

SEQ ID NO: 589490 - DNA, 33 bp, Homo sapien
caggcaggcatttcaggaaagtgttttgcacat

SEQ ID NO: 589491 - DNA, 33 bp, Homo sapien
tatggattgagtaccaatatctagagtttgttt

SEQ ID NO: 589492 - DNA, 33 bp, Homo sapien
tatggattgagtaccagtatctagagtttgttt

SEQ ID NO: 589493 - DNA, 33 bp, Homo sapien
tagaaaaatgtctgaccgtatcaaggattacca

SEQ ID NO: 589494 - DNA, 33 bp, Homo sapien
tagaaaaatgtctgactgtatcaaggattacca

SEQ ID NO: 589495 - DNA, 33 bp, Homo sapien
tcactaggcaagctacaatagaaacagaccagg

SEQ ID NO: 589496 - DNA, 33 bp, Homo sapien
tcactaggcaagctaccatagaaacagaccagg

SEQ ID NO: 589497 - DNA, 33 bp, Homo sapien
ttttccatacaggcctaaaatctataggtaaca

SEQ ID NO: 589498 - DNA, 33 bp, Homo sapien
ttttccatacaggcctgaaatctataggtaaca

SEQ ID NO: 589499 - DNA, 33 bp, Homo sapien
tctacccaaatatcctaagactctgaaggaagc

SEQ ID NO: 589500 - DNA, 33 bp, Homo sapien
tctacccaaatatcctgagactctgaaggaagc

SEQ ID NO: 589501 - DNA, 33 bp, Homo sapien
aataatacagtaatcaaattcttccaggaagta

SEQ ID NO: 589502 - DNA, 33 bp, Homo sapien
aataatacagtaatcagattcttccaggaagta

SEQ ID NO: 589503 - DNA, 33 bp, Homo sapien
caagattggaatgtgaagtttaaataggacatt

SEQ ID NO: 589504 - DNA, 33 bp, Homo sapien
caagattggaatgtgaggtttaaataggacatt

SEQ ID NO: 589505 - DNA, 33 bp, Homo sapien
caactccaagataggacagttttgagcttcatc

SEQ ID NO: 589506 - DNA, 33 bp, Homo sapien
caactccaagataggagagttttgagcttcatc

SEQ ID NO: 589507 - DNA, 33 bp, Homo sapien
tgactaaatactttccaaagcttagtgagtttc

SEQ ID NO: 589508 - DNA, 33 bp, Homo sapien
tgactaaatactttccgaagcttagtgagtttc

SEQ ID NO: 589509 - DNA, 33 bp, Homo sapien
ataccaatctatgcaccctttctgaaagaaccc

SEQ ID NO: 589510 - DNA, 33 bp, Homo sapien
ataccaatctatgcacgctttctgaaagaaccc

SEQ ID NO: 589511 - DNA, 33 bp, Homo sapien
catacattattgtgccccttgaaaaaaatttga

SEQ ID NO: 589512 - DNA, 33 bp, Homo sapien
catacattattgtgcctcttgaaaaaaatttga

SEQ ID NO: 589513 - DNA, 33 bp, Homo sapien
ggtaatcatagtctaagcttactgtatgtttat

SEQ ID NO: 589514 - DNA, 33 bp, Homo sapien
ggtaatcatagtctaatcttactgtatgtttat

SEQ ID NO: 589515 - DNA, 33 bp, Homo sapien
ggtaatttaaagagcaacaccaatgtccagttt

SEQ ID NO: 589516 - DNA, 33 bp, Homo sapien
ggtaatttaaagagcagcaccaatgtccagttt

SEQ ID NO: 589517 - DNA, 33 bp, Homo sapien
cctctcgcctcctccccactgctatagcctctc

SEQ ID NO: 589518 - DNA, 33 bp, Homo sapien
cctctcgcctcctccctactgctatagcctctc

SEQ ID NO: 589519 - DNA, 33 bp, Homo sapien
tctgacatctgcgccaatgactcttatatctgc

SEQ ID NO: 589520 - DNA, 33 bp, Homo sapien
tctgacatctgcgccagtgactcttatatctgc

SEQ ID NO: 589521 - DNA, 33 bp, Homo sapien
taatcggaatttaaaccgacacattcttgtcca

SEQ ID NO: 589522 - DNA, 33 bp, Homo sapien
taatcggaatttaaactgacacattcttgtcca

SEQ ID NO: 589523 - DNA, 33 bp, Homo sapien
acatttgttatcactaggactctgatattacaa

SEQ ID NO: 589524 - DNA, 33 bp, Homo sapien
acatttgttatcactatgactctgatattacaa

SEQ ID NO: 589525 - DNA, 33 bp, Homo sapien
tggtggaaattacagcactatttcctaccccag

SEQ ID NO: 589526 - DNA, 33 bp, Homo sapien
tggtggaaattacagcgctatttcctaccccag

SEQ ID NO: 589527 - DNA, 33 bp, Homo sapien
cttctcttatttgtggcacctgactattagcca

SEQ ID NO: 589528 - DNA, 33 bp, Homo sapien
cttctcttatttgtggtacctgactattagcca

SEQ ID NO: 589529 - DNA, 33 bp, Homo sapien
aatgtaaacatggtaccagacaaggactggcac

SEQ ID NO: 589530 - DNA, 33 bp, Homo sapien
aatgtaaacatggtacgagacaaggactggcac

SEQ ID NO: 589531 - DNA, 33 bp, Homo sapien
tctgcagaggcctcagaaaacttccaatgatgg

SEQ ID NO: 589532 - DNA, 33 bp, Homo sapien
tctgcagaggcctcagtaaacttccaatgatgg

SEQ ID NO: 589533 - DNA, 33 bp, Homo sapien
aaaacttcaaatagagaaagttgtgtcaacagt

SEQ ID NO: 589534 - DNA, 33 bp, Homo sapien
aaaacttcaaatagaggaagttgtgtcaacagt

SEQ ID NO: 589535 - DNA, 33 bp, Homo sapien
acatcataaaacactaagatttttctgcttcag

SEQ ID NO: 589536 - DNA, 33 bp, Homo sapien
acatcataaaacactaggatttttctgcttcag

SEQ ID NO: 589537 - DNA, 33 bp, Homo sapien
attgtgtaacacataaattatccattacaataa

SEQ ID NO: 589538 - DNA, 33 bp, Homo sapien
attgtgtaacacataagttatccattacaataa

SEQ ID NO: 589539 - DNA, 33 bp, Homo sapien
gtgttaactcaaagtacgtgatagaaaatctgt

SEQ ID NO: 589540 - DNA, 33 bp, Homo sapien
gtgttaactcaaagtatgtgatagaaaatctgt

SEQ ID NO: 589541 - DNA, 33 bp, Homo sapien
ctacactcactctatacgctggattcctgttat

SEQ ID NO: 589542 - DNA, 33 bp, Homo sapien
ctacactcactctatatgctggattcctgttat

SEQ ID NO: 589543 - DNA, 33 bp, Homo sapien
tgagctgctgtgggtcaaaccatctctcaggtg

SEQ ID NO: 589544 - DNA, 33 bp, Homo sapien
tgagctgctgtgggtcgaaccatctctcaggtg

SEQ ID NO: 589545 - DNA, 33 bp, Homo sapien
actaaaccagtgtgtacgagtcataggatcccc

SEQ ID NO: 589546 - DNA, 33 bp, Homo sapien
actaaaccagtgtgtatgagtcataggatcccc

SEQ ID NO: 589547 - DNA, 33 bp, Homo sapien
agcatttccagtagaacaatgtgtgtgtggggg

SEQ ID NO: 589548 - DNA, 33 bp, Homo sapien
agcatttccagtagaataatgtgtgtgtggggg

SEQ ID NO: 589549 - DNA, 33 bp, Homo sapien
acaggtcaacttgagaggtttttaatatgctta

SEQ ID NO: 589550 - DNA, 33 bp, Homo sapien
acaggtcaacttgagatgtttttaatatgctta

SEQ ID NO: 589551 - DNA, 33 bp, Homo sapien
gccttttttggagcctaacaaaactgcctcgag

SEQ ID NO: 589552 - DNA, 33 bp, Homo sapien
gccttttttggagcctcacaaaactgcctcgag

SEQ ID NO: 589553 - DNA, 33 bp, Homo sapien
ctgtctcccttccataactcgcaaaagaggatg

SEQ ID NO: 589554 - DNA, 33 bp, Homo sapien
ctgtctcccttccatagctcgcaaaagaggatg

SEQ ID NO: 589555 - DNA, 33 bp, Homo sapien
ttttcttttatggttcacacttcatgtgccatg

SEQ ID NO: 589556 - DNA, 33 bp, Homo sapien
ttttcttttatggttctcacttcatgtgccatg

SEQ ID NO: 589557 - DNA, 33 bp, Homo sapien
tggatcagtaatcaacacataagtccaccttca

SEQ ID NO: 589558 - DNA, 33 bp, Homo sapien
tggatcagtaatcaacgcataagtccaccttca

SEQ ID NO: 589559 - DNA, 33 bp, Homo sapien
tattagtcagggtaaactacacaagctgcagta

SEQ ID NO: 589560 - DNA, 33 bp, Homo sapien
tattagtcagggtaaattacacaagctgcagta

SEQ ID NO: 589561 - DNA, 33 bp, Homo sapien
atatcaaaagacaatccgatggaaacaacccaa

SEQ ID NO: 589562 - DNA, 33 bp, Homo sapien
atatcaaaagacaatctgatggaaacaacccaa

SEQ ID NO: 589563 - DNA, 33 bp, Homo sapien
cacagatgtcctaatagcagaaataagacagta

SEQ ID NO: 589564 - DNA, 33 bp, Homo sapien
cacagatgtcctaatatcagaaataagacagta

SEQ ID NO: 589565 - DNA, 33 bp, Homo sapien
tggttattggaatcaactactgtgttcaacaca

SEQ ID NO: 589566 - DNA, 33 bp, Homo sapien
tggttattggaatcaattactgtgttcaacaca

SEQ ID NO: 589567 - DNA, 33 bp, Homo sapien
gttattcaatcaagtacgaatctgggtgttgct

SEQ ID NO: 589568 - DNA, 33 bp, Homo sapien
gttattcaatcaagtatgaatctgggtgttgct

SEQ ID NO: 589569 - DNA, 33 bp, Homo sapien
catggtgagtgactgacggattggttagccagt

SEQ ID NO: 589570 - DNA, 33 bp, Homo sapien
catggtgagtgactgatggattggttagccagt

SEQ ID NO: 589571 - DNA, 33 bp, Homo sapien
attcttaaattttgtaagctacattgttgtata

SEQ ID NO: 589572 - DNA, 33 bp, Homo sapien
attcttaaattttgtatgctacattgttgtata

SEQ ID NO: 589573 - DNA, 33 bp, Homo sapien
tacttcctggttagaaccaaatatccaacttta

SEQ ID NO: 589574 - DNA, 33 bp, Homo sapien
tacttcctggttagaagcaaatatccaacttta

SEQ ID NO: 589575 - DNA, 33 bp, Homo sapien
gtttatttgacacggaactaatcacgaagtctg

SEQ ID NO: 589576 - DNA, 33 bp, Homo sapien
gtttatttgacacggagctaatcacgaagtctg

SEQ ID NO: 589577 - DNA, 33 bp, Homo sapien
gagcctggcaaagagaagtccttgaagaaatat

SEQ ID NO: 589578 - DNA, 33 bp, Homo sapien
gagcctggcaaagagaggtccttgaagaaatat

SEQ ID NO: 589579 - DNA, 33 bp, Homo sapien
ttcacttgttgtggagaatctaacaggagcaat

SEQ ID NO: 589580 - DNA, 33 bp, Homo sapien
ttcacttgttgtggagcatctaacaggagcaat

SEQ ID NO: 589581 - DNA, 33 bp, Homo sapien
cttgcaaatgcctgtactaaagaaaaacataat

SEQ ID NO: 589582 - DNA, 33 bp, Homo sapien
cttgcaaatgcctgtattaaagaaaaacataat

SEQ ID NO: 589583 - DNA, 33 bp, Homo sapien
atgcataagatgaaaacaccaagaaatagtaat

SEQ ID NO: 589584 - DNA, 33 bp, Homo sapien
atgcataagatgaaaataccaagaaatagtaat

SEQ ID NO: 589585 - DNA, 33 bp, Homo sapien
aaccaaatgaagaaccagagacccagagatgaa

SEQ ID NO: 589586 - DNA, 33 bp, Homo sapien
aaccaaatgaagaaccggagacccagagatgaa

SEQ ID NO: 589587 - DNA, 33 bp, Homo sapien
tgggaactctgtcctacctgccttataggttta

SEQ ID NO: 589588 - DNA, 33 bp, Homo sapien
tgggaactctgtcctatctgccttataggttta

SEQ ID NO: 589589 - DNA, 33 bp, Homo sapien
acaccttcacccctggccaatctcaagctggct

SEQ ID NO: 589590 - DNA, 33 bp, Homo sapien
acaccttcacccctggtcaatctcaagctggct

SEQ ID NO: 589591 - DNA, 33 bp, Homo sapien
ccactttactcaaagacgtggagctggaagtgc

SEQ ID NO: 589592 - DNA, 33 bp, Homo sapien
ccactttactcaaagatgtggagctggaagtgc

SEQ ID NO: 589593 - DNA, 33 bp, Homo sapien
caaggagatctcaaagaagaaggagtgaagaag

SEQ ID NO: 589594 - DNA, 33 bp, Homo sapien
caaggagatctcaaaggagaaggagtgaagaag

SEQ ID NO: 589595 - DNA, 33 bp, Homo sapien
catattcctggtgtaaccacactgcatccacac

SEQ ID NO: 589596 - DNA, 33 bp, Homo sapien
catattcctggtgtaagcacactgcatccacac

SEQ ID NO: 589597 - DNA, 33 bp, Homo sapien
aagaccctggagaccaagcagttaataagaggc

SEQ ID NO: 589598 - DNA, 33 bp, Homo sapien
aagaccctggagaccaggcagttaataagaggc

SEQ ID NO: 589599 - DNA, 33 bp, Homo sapien
gaagggcagtgttaaacaatgggataaccttga

SEQ ID NO: 589600 - DNA, 33 bp, Homo sapien
gaagggcagtgttaaagaatgggataaccttga

SEQ ID NO: 589601 - DNA, 33 bp, Homo sapien
ctgggaacaactcagacattaattttgaaagca

SEQ ID NO: 589602 - DNA, 33 bp, Homo sapien
ctgggaacaactcagatattaattttgaaagca

SEQ ID NO: 589603 - DNA, 33 bp, Homo sapien
tcccctaaatactgaaaggccataaacctaggt

SEQ ID NO: 589604 - DNA, 33 bp, Homo sapien
tcccctaaatactgaagggccataaacctaggt

SEQ ID NO: 589605 - DNA, 33 bp, Homo sapien
ttcccagggcagctgcaccatgtttcattccca

SEQ ID NO: 589606 - DNA, 33 bp, Homo sapien
ttcccagggcagctgcgccatgtttcattccca

SEQ ID NO: 589607 - DNA, 33 bp, Homo sapien
tctctaaagtcgaaaaatggctgctgctgctct

SEQ ID NO: 589608 - DNA, 33 bp, Homo sapien
tctctaaagtcgaaaagtggctgctgctgctct

SEQ ID NO: 589609 - DNA, 33 bp, Homo sapien
ctggcttatcatcagcaatcattttggtgatga

SEQ ID NO: 589610 - DNA, 33 bp, Homo sapien
ctggcttatcatcagcgatcattttggtgatga

SEQ ID NO: 589611 - DNA, 33 bp, Homo sapien
attggggtaaaaacccagcaatctctgtcacac

SEQ ID NO: 589612 - DNA, 33 bp, Homo sapien
attggggtaaaaacccggcaatctctgtcacac

SEQ ID NO: 589613 - DNA, 33 bp, Homo sapien
gcaacaagataaaaagacactgtggagccactg

SEQ ID NO: 589614 - DNA, 33 bp, Homo sapien
gcaacaagataaaaagccactgtggagccactg

SEQ ID NO: 589615 - DNA, 33 bp, Homo sapien
atgtcagaataggtgaagagactgaccacggtg

SEQ ID NO: 589616 - DNA, 33 bp, Homo sapien
atgtcagaataggtgacgagactgaccacggtg

SEQ ID NO: 589617 - DNA, 33 bp, Homo sapien
tgcattgcattgtggacgaggagggcccatgct

SEQ ID NO: 589618 - DNA, 33 bp, Homo sapien
tgcattgcattgtggatgaggagggcccatgct

SEQ ID NO: 589619 - DNA, 33 bp, Homo sapien
aaggtaccaagctcacaatttaccgagcttcca

SEQ ID NO: 589620 - DNA, 33 bp, Homo sapien
aaggtaccaagctcacgatttaccgagcttcca

SEQ ID NO: 589621 - DNA, 33 bp, Homo sapien
ttttgttcacagtggcaaatgttatatgtcaag

SEQ ID NO: 589622 - DNA, 33 bp, Homo sapien
ttttgttcacagtggcgaatgttatatgtcaag

SEQ ID NO: 589623 - DNA, 33 bp, Homo sapien
gggaaggacatttcaaagccgtagtggtgagga

SEQ ID NO: 589624 - DNA, 33 bp, Homo sapien
gggaaggacatttcaaggccgtagtggtgagga

SEQ ID NO: 589625 - DNA, 33 bp, Homo sapien
tctcagtcccactgacacaggcatccgtaggct

SEQ ID NO: 589626 - DNA, 33 bp, Homo sapien
tctcagtcccactgacgcaggcatccgtaggct

SEQ ID NO: 589627 - DNA, 33 bp, Homo sapien
tttgaaggggctcttaccaatcactatgaaatt

SEQ ID NO: 589628 - DNA, 33 bp, Homo sapien
tttgaaggggctcttatcaatcactatgaaatt

SEQ ID NO: 589629 - DNA, 33 bp, Homo sapien
tctatgtacttctaaaaacttcgtgcctcgatt

SEQ ID NO: 589630 - DNA, 33 bp, Homo sapien
tctatgtacttctaaacacttcgtgcctcgatt

SEQ ID NO: 589631 - DNA, 33 bp, Homo sapien
ctcattttagccttacagaactcctatggggct

SEQ ID NO: 589632 - DNA, 33 bp, Homo sapien
ctcattttagccttacggaactcctatggggct

SEQ ID NO: 589633 - DNA, 33 bp, Homo sapien
cacatattagagtgcaaagtctgtggttagacc

SEQ ID NO: 589634 - DNA, 33 bp, Homo sapien
cacatattagagtgcagagtctgtggttagacc

SEQ ID NO: 589635 - DNA, 33 bp, Homo sapien
caaagctaatgtgcaacggcctgtggctttctt

SEQ ID NO: 589636 - DNA, 33 bp, Homo sapien
caaagctaatgtgcaatggcctgtggctttctt

SEQ ID NO: 589637 - DNA, 33 bp, Homo sapien
atcgaacacacaactcaatttttcacgtagctg

SEQ ID NO: 589638 - DNA, 33 bp, Homo sapien
atcgaacacacaactcgatttttcacgtagctg

SEQ ID NO: 589639 - DNA, 33 bp, Homo sapien
gatgggcatttcctagcaaagtgtcaataacat

SEQ ID NO: 589640 - DNA, 33 bp, Homo sapien
gatgggcatttcctagtaaagtgtcaataacat

SEQ ID NO: 589641 - DNA, 33 bp, Homo sapien
tcatggctgtgtaggaataggactagaatgatg

SEQ ID NO: 589642 - DNA, 33 bp, Homo sapien
tcatggctgtgtaggagtaggactagaatgatg

SEQ ID NO: 589643 - DNA, 33 bp, Homo sapien
aaataaccttgtgctaactagaatgttctttat

SEQ ID NO: 589644 - DNA, 33 bp, Homo sapien
aaataaccttgtgctagctagaatgttctttat

SEQ ID NO: 589645 - DNA, 33 bp, Homo sapien
aataattagaaaactcactgattccgcagcacc

SEQ ID NO: 589646 - DNA, 33 bp, Homo sapien
aataattagaaaactcgctgattccgcagcacc

SEQ ID NO: 589647 - DNA, 33 bp, Homo sapien
ctcagtttacagttggctaaatatggcatttgt

SEQ ID NO: 589648 - DNA, 33 bp, Homo sapien
ctcagtttacagttggttaaatatggcatttgt

SEQ ID NO: 589649 - DNA, 33 bp, Homo sapien
tgacaaattctttcacacatgctaatttggata

SEQ ID NO: 589650 - DNA, 33 bp, Homo sapien
tgacaaattctttcactcatgctaatttggata

SEQ ID NO: 589651 - DNA, 33 bp, Homo sapien
atatattttttactcaccgagggtctccctgca

SEQ ID NO: 589652 - DNA, 33 bp, Homo sapien
atatattttttactcatcgagggtctccctgca

SEQ ID NO: 589653 - DNA, 33 bp, Homo sapien
atagtccattgcttgcactgggctcacacgcca

SEQ ID NO: 589654 - DNA, 33 bp, Homo sapien
atagtccattgcttgcgctgggctcacacgcca

SEQ ID NO: 589655 - DNA, 33 bp, Homo sapien
tgtgtgccacttggccagatacaagatgaaccc

SEQ ID NO: 589656 - DNA, 33 bp, Homo sapien
tgtgtgccacttggccggatacaagatgaaccc

SEQ ID NO: 589657 - DNA, 33 bp, Homo sapien
aaggagaatccaggcactcttttagcccagtag

SEQ ID NO: 589658 - DNA, 33 bp, Homo sapien
aaggagaatccaggcattcttttagcccagtag

SEQ ID NO: 589659 - DNA, 33 bp, Homo sapien
aaagtgcatatgttaacctagagggagaatcca

SEQ ID NO: 589660 - DNA, 33 bp, Homo sapien
aaagtgcatatgttaatctagagggagaatcca

SEQ ID NO: 589661 - DNA, 33 bp, Homo sapien
taccagttgtgctacaaacacctaacagggaaa

SEQ ID NO: 589662 - DNA, 33 bp, Homo sapien
taccagttgtgctacatacacctaacagggaaa

SEQ ID NO: 589663 - DNA, 33 bp, Homo sapien
ggaactgcaaataccacggtggtttgtgcccta

SEQ ID NO: 589664 - DNA, 33 bp, Homo sapien
ggaactgcaaataccatggtggtttgtgcccta

SEQ ID NO: 589665 - DNA, 33 bp, Homo sapien
ttgagtggcaagtctaacagataaagtaagagt

SEQ ID NO: 589666 - DNA, 33 bp, Homo sapien
ttgagtggcaagtctagcagataaagtaagagt

SEQ ID NO: 589667 - DNA, 33 bp, Homo sapien
cgctaatgaaaactacaaaccttcttcccagaa

SEQ ID NO: 589668 - DNA, 33 bp, Homo sapien
cgctaatgaaaactacgaaccttcttcccagaa

SEQ ID NO: 589669 - DNA, 33 bp, Homo sapien
caactggagagcgttacccaatatgacttatgg

SEQ ID NO: 589670 - DNA, 33 bp, Homo sapien
caactggagagcgttatccaatatgacttatgg

SEQ ID NO: 589671 - DNA, 33 bp, Homo sapien
aatatgacttatgggaggcacaaaagtgtgact

SEQ ID NO: 589672 - DNA, 33 bp, Homo sapien
aatatgacttatgggatgcacaaaagtgtgact

SEQ ID NO: 589673 - DNA, 33 bp, Homo sapien
cactaatagcccgttaaccaaagccacaaagtc

SEQ ID NO: 589674 - DNA, 33 bp, Homo sapien
cactaatagcccgttagccaaagccacaaagtc

SEQ ID NO: 589675 - DNA, 33 bp, Homo sapien
tcaagagcagtcatctcacccctaactgcgcat

SEQ ID NO: 589676 - DNA, 33 bp, Homo sapien
tcaagagcagtcatcttacccctaactgcgcat

SEQ ID NO: 589677 - DNA, 33 bp, Homo sapien
taatgctaacacgtataagtttaactatgtata

SEQ ID NO: 589678 - DNA, 33 bp, Homo sapien
taatgctaacacgtatgagtttaactatgtata

SEQ ID NO: 589679 - DNA, 33 bp, Homo sapien
ggaagcgaatcccagacgcttccaagaacaagc

SEQ ID NO: 589680 - DNA, 33 bp, Homo sapien
ggaagcgaatcccagatgcttccaagaacaagc

SEQ ID NO: 589681 - DNA, 33 bp, Homo sapien
aactttggcctagaaactatatgacccaccgta

SEQ ID NO: 589682 - DNA, 33 bp, Homo sapien
aactttggcctagaaattatatgacccaccgta

SEQ ID NO: 589683 - DNA, 33 bp, Homo sapien
cccagaaagaatttagcatagcctgtagaacct

SEQ ID NO: 589684 - DNA, 33 bp, Homo sapien
cccagaaagaatttagtatagcctgtagaacct

SEQ ID NO: 589685 - DNA, 33 bp, Homo sapien
caagtaaaaagcaaaactgaactaaaggcaagg

SEQ ID NO: 589686 - DNA, 33 bp, Homo sapien
caagtaaaaagcaaaattgaactaaaggcaagg

SEQ ID NO: 589687 - DNA, 33 bp, Homo sapien
aaagtgacatctcagaagaagaatatactggaa

SEQ ID NO: 589688 - DNA, 33 bp, Homo sapien
aaagtgacatctcagacgaagaatatactggaa

SEQ ID NO: 589689 - DNA, 33 bp, Homo sapien
gagaggtaagcaacaacgatttacttgttctta

SEQ ID NO: 589690 - DNA, 33 bp, Homo sapien
gagaggtaagcaacaatgatttacttgttctta

SEQ ID NO: 589691 - DNA, 33 bp, Homo sapien
gagaattagaaaagcaatgaacttaccccttta

SEQ ID NO: 589692 - DNA, 33 bp, Homo sapien
gagaattagaaaagcagtgaacttaccccttta

SEQ ID NO: 589693 - DNA, 33 bp, Homo sapien
acagatctgggcttctcactcagcaggtgccag

SEQ ID NO: 589694 - DNA, 33 bp, Homo sapien
acagatctgggcttctgactcagcaggtgccag

SEQ ID NO: 589695 - DNA, 33 bp, Homo sapien
actgcaatgtcacataacccatctttagcctgg

SEQ ID NO: 589696 - DNA, 33 bp, Homo sapien
actgcaatgtcacatatcccatctttagcctgg

SEQ ID NO: 589697 - DNA, 33 bp, Homo sapien
tctctcttcttaaatcacttctgtttcagcgat

SEQ ID NO: 589698 - DNA, 33 bp, Homo sapien
tctctcttcttaaatcgcttctgtttcagcgat

SEQ ID NO: 589699 - DNA, 33 bp, Homo sapien
ccacgtctgtgtctcaagtcagctagcactttt

SEQ ID NO: 589700 - DNA, 33 bp, Homo sapien
ccacgtctgtgtctcaggtcagctagcactttt

SEQ ID NO: 589701 - DNA, 33 bp, Homo sapien
ctcaccaggctgtaaaagtcacgcagagaagtg

SEQ ID NO: 589702 - DNA, 33 bp, Homo sapien
ctcaccaggctgtaaatgtcacgcagagaagtg

SEQ ID NO: 589703 - DNA, 33 bp, Homo sapien
tcttcatgtaagacaacagagtaatcccagcac

SEQ ID NO: 589704 - DNA, 33 bp, Homo sapien
tcttcatgtaagacaatagagtaatcccagcac

SEQ ID NO: 589705 - DNA, 33 bp, Homo sapien
agcatctctaccgccacgtgctattcattaaga

SEQ ID NO: 589706 - DNA, 33 bp, Homo sapien
agcatctctaccgccatgtgctattcattaaga

SEQ ID NO: 589707 - DNA, 33 bp, Homo sapien
tgtgtgagcttgggcaagtgtcctaaccactct

SEQ ID NO: 589708 - DNA, 33 bp, Homo sapien
tgtgtgagcttgggcaggtgtcctaaccactct

SEQ ID NO: 589709 - DNA, 33 bp, Homo sapien
gaataatgcatactcactagcccagcactgttc

SEQ ID NO: 589710 - DNA, 33 bp, Homo sapien
gaataatgcatactcattagcccagcactgttc

SEQ ID NO: 589711 - DNA, 33 bp, Homo sapien
aagagcaggtggcgaaccagcccattgggctac

SEQ ID NO: 589712 - DNA, 33 bp, Homo sapien
aagagcaggtggcgaatcagcccattgggctac

SEQ ID NO: 589713 - DNA, 33 bp, Homo sapien
taaagatgaaaaaaatcatttactcaaagtatg

SEQ ID NO: 589714 - DNA, 33 bp, Homo sapien
taaagatgaaaaaaatgatttactcaaagtatg

SEQ ID NO: 589715 - DNA, 33 bp, Homo sapien
tctgttgttttctataagttagattgcccattg

SEQ ID NO: 589716 - DNA, 33 bp, Homo sapien
tctgttgttttctataggttagattgcccattg

SEQ ID NO: 589717 - DNA, 33 bp, Homo sapien
acacaggtctaagtcagcatcagggtaggggca

SEQ ID NO: 589718 - DNA, 33 bp, Homo sapien
acacaggtctaagtcatcatcagggtaggggca

SEQ ID NO: 589719 - DNA, 33 bp, Homo sapien
atctggtgtcattctcaatgttggtcctttgta

SEQ ID NO: 589720 - DNA, 33 bp, Homo sapien
atctggtgtcattctcgatgttggtcctttgta

SEQ ID NO: 589721 - DNA, 33 bp, Homo sapien
gcttctccaagaacaaataataatttcgattta

SEQ ID NO: 589722 - DNA, 33 bp, Homo sapien
gcttctccaagaacaagtaataatttcgattta

SEQ ID NO: 589723 - DNA, 33 bp, Homo sapien
tcctagcaaacttgtcaataacaagtcctctac

SEQ ID NO: 589724 - DNA, 33 bp, Homo sapien
tcctagcaaacttgtcgataacaagtcctctac

SEQ ID NO: 589725 - DNA, 33 bp, Homo sapien
acattcttgtctcgtcccctccccattgtgcaa

SEQ ID NO: 589726 - DNA, 33 bp, Homo sapien
acattcttgtctcgtctcctccccattgtgcaa

SEQ ID NO: 589727 - DNA, 33 bp, Homo sapien
cgctaaccaaataaaccggctgatggagtcaac

SEQ ID NO: 589728 - DNA, 33 bp, Homo sapien
cgctaaccaaataaacgggctgatggagtcaac

SEQ ID NO: 589729 - DNA, 33 bp, Homo sapien
gaggtactgtcatagaagtgaaacatttattaa

SEQ ID NO: 589730 - DNA, 33 bp, Homo sapien
gaggtactgtcatagacgtgaaacatttattaa

SEQ ID NO: 589731 - DNA, 33 bp, Homo sapien
agtgttcctgcagatacataacaaagatgaaga

SEQ ID NO: 589732 - DNA, 33 bp, Homo sapien
agtgttcctgcagatatataacaaagatgaaga

SEQ ID NO: 589733 - DNA, 33 bp, Homo sapien
atagcactcttcagctcaaattgcattttataa

SEQ ID NO: 589734 - DNA, 33 bp, Homo sapien
atagcactcttcagcttaaattgcattttataa

SEQ ID NO: 589735 - DNA, 33 bp, Homo sapien
gtggccagaatacaaccgtgggttccaaatttc

SEQ ID NO: 589736 - DNA, 33 bp, Homo sapien
gtggccagaatacaactgtgggttccaaatttc

SEQ ID NO: 589737 - DNA, 33 bp, Homo sapien
gacaagcaggactccaaccattatgtcacgaat

SEQ ID NO: 589738 - DNA, 33 bp, Homo sapien
gacaagcaggactccatccattatgtcacgaat

SEQ ID NO: 589739 - DNA, 33 bp, Homo sapien
gggagggggtctcaggaaaggcattcataattg

SEQ ID NO: 589740 - DNA, 33 bp, Homo sapien
gggagggggtctcagggaaggcattcataattg

SEQ ID NO: 589741 - DNA, 33 bp, Homo sapien
catagcctacaacaggaagctgagaccagatgg

SEQ ID NO: 589742 - DNA, 33 bp, Homo sapien
catagcctacaacagggagctgagaccagatgg

SEQ ID NO: 589743 - DNA, 33 bp, Homo sapien
tccaggtttagagggaatacaaagagtgtgctt

SEQ ID NO: 589744 - DNA, 33 bp, Homo sapien
tccaggtttagagggactacaaagagtgtgctt

SEQ ID NO: 589745 - DNA, 33 bp, Homo sapien
acagccctgcatcttcaatttttgttgtcccta

SEQ ID NO: 589746 - DNA, 33 bp, Homo sapien
acagccctgcatcttccatttttgttgtcccta

SEQ ID NO: 589747 - DNA, 33 bp, Homo sapien
ctttgtagcactaataacagcatgatggatagc

SEQ ID NO: 589748 - DNA, 33 bp, Homo sapien
ctttgtagcactaataccagcatgatggatagc

SEQ ID NO: 589749 - DNA, 33 bp, Homo sapien
gtaagtaccatggaaaaaaattatgcgggaaag

SEQ ID NO: 589750 - DNA, 33 bp, Homo sapien
gtaagtaccatggaaagaaattatgcgggaaag

SEQ ID NO: 589751 - DNA, 33 bp, Homo sapien
attagtattaatcctcaaactatagcctcaggc

SEQ ID NO: 589752 - DNA, 33 bp, Homo sapien
attagtattaatcctcgaactatagcctcaggc

SEQ ID NO: 589753 - DNA, 33 bp, Homo sapien
ttcctgaagtgcgaccagactgaaaaatcagta

SEQ ID NO: 589754 - DNA, 33 bp, Homo sapien
ttcctgaagtgcgaccggactgaaaaatcagta

SEQ ID NO: 589755 - DNA, 33 bp, Homo sapien
tcaaggtttattctgacacctaatgcttctgag

SEQ ID NO: 589756 - DNA, 33 bp, Homo sapien
tcaaggtttattctgatacctaatgcttctgag

SEQ ID NO: 589757 - DNA, 33 bp, Homo sapien
gacatgattgcatccaactcaaattccagctca

SEQ ID NO: 589758 - DNA, 33 bp, Homo sapien
gacatgattgcatccagctcaaattccagctca

SEQ ID NO: 589759 - DNA, 33 bp, Homo sapien
tcacacaccatatggaccacttctagcttggag

SEQ ID NO: 589760 - DNA, 33 bp, Homo sapien
tcacacaccatatggatcacttctagcttggag

SEQ ID NO: 589761 - DNA, 33 bp, Homo sapien
tagcttgcaaataccaataatcacccatgaact

SEQ ID NO: 589762 - DNA, 33 bp, Homo sapien
tagcttgcaaataccagtaatcacccatgaact

SEQ ID NO: 589763 - DNA, 33 bp, Homo sapien
aggaccctgctctgcacaggttgtgaactgtgg

SEQ ID NO: 589764 - DNA, 33 bp, Homo sapien
aggaccctgctctgcataggttgtgaactgtgg

SEQ ID NO: 589765 - DNA, 33 bp, Homo sapien
ttgtgctttcattcccacaggcggcctcccatc

SEQ ID NO: 589766 - DNA, 33 bp, Homo sapien
ttgtgctttcattcccgcaggcggcctcccatc

SEQ ID NO: 589767 - DNA, 33 bp, Homo sapien
gggatatttttctcaacgatctgcgagccattc

SEQ ID NO: 589768 - DNA, 33 bp, Homo sapien
gggatatttttctcaatgatctgcgagccattc

SEQ ID NO: 589769 - DNA, 33 bp, Homo sapien
tggatagagttgttcacgcagagtttctgtttt

SEQ ID NO: 589770 - DNA, 33 bp, Homo sapien
tggatagagttgttcatgcagagtttctgtttt

SEQ ID NO: 589771 - DNA, 33 bp, Homo sapien
tagggcaggaggggaaaaacagagctcagtgtg

SEQ ID NO: 589772 - DNA, 33 bp, Homo sapien
tagggcaggaggggaagaacagagctcagtgtg

SEQ ID NO: 589773 - DNA, 33 bp, Homo sapien
ctctagtgtcagtgaccatccagagtttcattt

SEQ ID NO: 589774 - DNA, 33 bp, Homo sapien
ctctagtgtcagtgactatccagagtttcattt

SEQ ID NO: 589775 - DNA, 33 bp, Homo sapien
ttgggtccgggcttggaatcttttcattctcta

SEQ ID NO: 589776 - DNA, 33 bp, Homo sapien
ttgggtccgggcttggcatcttttcattctcta

SEQ ID NO: 589777 - DNA, 33 bp, Homo sapien
aatcatttaaaaatccaaaagccatgtgaaaaa

SEQ ID NO: 589778 - DNA, 33 bp, Homo sapien
aatcatttaaaaatccgaaagccatgtgaaaaa

SEQ ID NO: 589779 - DNA, 33 bp, Homo sapien
gagacagagcttctgacgagggacgcgaggtga

SEQ ID NO: 589780 - DNA, 33 bp, Homo sapien
gagacagagcttctgatgagggacgcgaggtga

SEQ ID NO: 589781 - DNA, 33 bp, Homo sapien
gcaccagcatgaactaagaatcctctatgagct

SEQ ID NO: 589782 - DNA, 33 bp, Homo sapien
gcaccagcatgaactaggaatcctctatgagct

SEQ ID NO: 589783 - DNA, 33 bp, Homo sapien
ccaaaaggaaacaaaactattcacctgctattt

SEQ ID NO: 589784 - DNA, 33 bp, Homo sapien
ccaaaaggaaacaaaattattcacctgctattt

SEQ ID NO: 589785 - DNA, 33 bp, Homo sapien
aagggccaggcaactacggagcagttcgaggtc

SEQ ID NO: 589786 - DNA, 33 bp, Homo sapien
aagggccaggcaactatggagcagttcgaggtc

SEQ ID NO: 589787 - DNA, 33 bp, Homo sapien
ataatgatagaatccagtaaccaggatccagag

SEQ ID NO: 589788 - DNA, 33 bp, Homo sapien
ataatgatagaatccattaaccaggatccagag

SEQ ID NO: 589789 - DNA, 33 bp, Homo sapien
gactgatctgaaaatcaacctcaactcaagggt

SEQ ID NO: 589790 - DNA, 33 bp, Homo sapien
gactgatctgaaaatcgacctcaactcaagggt

SEQ ID NO: 589791 - DNA, 33 bp, Homo sapien
gttagatactgaaaaaagctctagtttgccatc

SEQ ID NO: 589792 - DNA, 33 bp, Homo sapien
gttagatactgaaaaaggctctagtttgccatc

SEQ ID NO: 589793 - DNA, 33 bp, Homo sapien
aaggccttaagagaaaagaagcctgaggtccct

SEQ ID NO: 589794 - DNA, 33 bp, Homo sapien
aaggccttaagagaaacgaagcctgaggtccct

SEQ ID NO: 589795 - DNA, 33 bp, Homo sapien
taattgaagcaataagccaaaaatgaaagtaac

SEQ ID NO: 589796 - DNA, 33 bp, Homo sapien
taattgaagcaataaggcaaaaatgaaagtaac

SEQ ID NO: 589797 - DNA, 33 bp, Homo sapien
aaattaacaccttatgaacccttaaaggcaatg

SEQ ID NO: 589798 - DNA, 33 bp, Homo sapien
aaattaacaccttatgcacccttaaaggcaatg

SEQ ID NO: 589799 - DNA, 33 bp, Homo sapien
agcagttgcactaagaagtcagaagaacctgct

SEQ ID NO: 589800 - DNA, 33 bp, Homo sapien
agcagttgcactaagatgtcagaagaacctgct

SEQ ID NO: 589801 - DNA, 33 bp, Homo sapien
tcctttcatctaccaaactctcctcccagaaag

SEQ ID NO: 589802 - DNA, 33 bp, Homo sapien
tcctttcatctaccaacctctcctcccagaaag

SEQ ID NO: 589803 - DNA, 33 bp, Homo sapien
caactagtttgcaagaacttttggacagcagga

SEQ ID NO: 589804 - DNA, 33 bp, Homo sapien
caactagtttgcaagatcttttggacagcagga

SEQ ID NO: 589805 - DNA, 33 bp, Homo sapien
gcaaccaagtgtctcaataggtttgtgagatcc

SEQ ID NO: 589806 - DNA, 33 bp, Homo sapien
gcaaccaagtgtctcagtaggtttgtgagatcc

SEQ ID NO: 589807 - DNA, 33 bp, Homo sapien
aagtggaactggccaaacagaaagctgaagtga

SEQ ID NO: 589808 - DNA, 33 bp, Homo sapien
aagtggaactggccaatcagaaagctgaagtga

SEQ ID NO: 589809 - DNA, 33 bp, Homo sapien
ttaaaaatatttctggcagcactgagtccacag

SEQ ID NO: 589810 - DNA, 33 bp, Homo sapien
ttaaaaatatttctggtagcactgagtccacag

SEQ ID NO: 589811 - DNA, 33 bp, Homo sapien
tttgtcaacagctaggaaatgaacagaaaatgt

SEQ ID NO: 589812 - DNA, 33 bp, Homo sapien
tttgtcaacagctaggtaatgaacagaaaatgt

SEQ ID NO: 589813 - DNA, 33 bp, Homo sapien
tgcatattaaaaagtcacctaagaacatactaa

SEQ ID NO: 589814 - DNA, 33 bp, Homo sapien
tgcatattaaaaagtcgcctaagaacatactaa

SEQ ID NO: 589815 - DNA, 33 bp, Homo sapien
agcaagtaatttaaaaataagttgtaggtgcct

SEQ ID NO: 589816 - DNA, 33 bp, Homo sapien
agcaagtaatttaaaactaagttgtaggtgcct

SEQ ID NO: 589817 - DNA, 33 bp, Homo sapien
gcctcggagcggatggaaagaagtaggcattgc

SEQ ID NO: 589818 - DNA, 33 bp, Homo sapien
gcctcggagcggatgggaagaagtaggcattgc

SEQ ID NO: 589819 - DNA, 33 bp, Homo sapien
caattcatcttcagggcccacgttttgaggttc

SEQ ID NO: 589820 - DNA, 33 bp, Homo sapien
caattcatcttcagggtccacgttttgaggttc

SEQ ID NO: 589821 - DNA, 33 bp, Homo sapien
cactttcccaagctcacggatactggcaaagct

SEQ ID NO: 589822 - DNA, 33 bp, Homo sapien
cactttcccaagctcatggatactggcaaagct

SEQ ID NO: 589823 - DNA, 33 bp, Homo sapien
tctgaggctcaaaaaggccagatgattgaggtt

SEQ ID NO: 589824 - DNA, 33 bp, Homo sapien
tctgaggctcaaaaagtccagatgattgaggtt

SEQ ID NO: 589825 - DNA, 33 bp, Homo sapien
gatttggtgggacttcaatgcgtatacacataa

SEQ ID NO: 589826 - DNA, 33 bp, Homo sapien
gatttggtgggacttccatgcgtatacacataa

SEQ ID NO: 589827 - DNA, 33 bp, Homo sapien
tcaaggcctagagaaacgctagtgtcactttgg

SEQ ID NO: 589828 - DNA, 33 bp, Homo sapien
tcaaggcctagagaaatgctagtgtcactttgg

SEQ ID NO: 589829 - DNA, 33 bp, Homo sapien
gatgacacaaaatggcagcaaacagtggaagat

SEQ ID NO: 589830 - DNA, 33 bp, Homo sapien
gatgacacaaaatggcggcaaacagtggaagat

SEQ ID NO: 589831 - DNA, 33 bp, Homo sapien
gggtctcattacgagaaaactgaacagcatgat

SEQ ID NO: 589832 - DNA, 33 bp, Homo sapien
gggtctcattacgagacaactgaacagcatgat

SEQ ID NO: 589833 - DNA, 33 bp, Homo sapien
ggggtccttgagagacaacaactctgatggtgc

SEQ ID NO: 589834 - DNA, 33 bp, Homo sapien
ggggtccttgagagacgacaactctgatggtgc

SEQ ID NO: 589835 - DNA, 33 bp, Homo sapien
cagtctctgtagcctacgttttgggaatggaac

SEQ ID NO: 589836 - DNA, 33 bp, Homo sapien
cagtctctgtagcctatgttttgggaatggaac

SEQ ID NO: 589837 - DNA, 33 bp, Homo sapien
agcttttgttcaaaacacaggtttattgagata

SEQ ID NO: 589838 - DNA, 33 bp, Homo sapien
agcttttgttcaaaacgcaggtttattgagata

SEQ ID NO: 589839 - DNA, 33 bp, Homo sapien
tgagtggcttacgtatcaggactactagcagtt

SEQ ID NO: 589840 - DNA, 33 bp, Homo sapien
tgagtggcttacgtattaggactactagcagtt

SEQ ID NO: 589841 - DNA, 33 bp, Homo sapien
acaggggtaatctgaacaatttgaataaggcac

SEQ ID NO: 589842 - DNA, 33 bp, Homo sapien
acaggggtaatctgaagaatttgaataaggcac

SEQ ID NO: 589843 - DNA, 33 bp, Homo sapien
ggccaccagtgttctaaaagcaacttgggaaag

SEQ ID NO: 589844 - DNA, 33 bp, Homo sapien
ggccaccagtgttctacaagcaacttgggaaag

SEQ ID NO: 589845 - DNA, 33 bp, Homo sapien
aacagcaaagaaagaaatcatcaaacaagatgg

SEQ ID NO: 589846 - DNA, 33 bp, Homo sapien
aacagcaaagaaagaagtcatcaaacaagatgg

SEQ ID NO: 589847 - DNA, 33 bp, Homo sapien
aaagaaccactggaaaaaacatgtcccagagct

SEQ ID NO: 589848 - DNA, 33 bp, Homo sapien
aaagaaccactggaaagaacatgtcccagagct

SEQ ID NO: 589849 - DNA, 33 bp, Homo sapien
tcagtagaagcagatgaagaaatgacacagaca

SEQ ID NO: 589850 - DNA, 33 bp, Homo sapien
tcagtagaagcagatgcagaaatgacacagaca

SEQ ID NO: 589851 - DNA, 33 bp, Homo sapien
taatctatgccatccaatgattttttcatctca

SEQ ID NO: 589852 - DNA, 33 bp, Homo sapien
taatctatgccatccagtgattttttcatctca

SEQ ID NO: 589853 - DNA, 33 bp, Homo sapien
aaaacaaaaattggataacaattcaaatgaatt

SEQ ID NO: 589854 - DNA, 33 bp, Homo sapien
aaaacaaaaattggatgacaattcaaatgaatt

SEQ ID NO: 589855 - DNA, 33 bp, Homo sapien
ttgtgtgagaaggtagaaaaatcaaacaattcg

SEQ ID NO: 589856 - DNA, 33 bp, Homo sapien
ttgtgtgagaaggtaggaaaatcaaacaattcg

SEQ ID NO: 589857 - DNA, 33 bp, Homo sapien
cacgtagtaatagttaaagccaagagaatgagg

SEQ ID NO: 589858 - DNA, 33 bp, Homo sapien
cacgtagtaatagttatagccaagagaatgagg

SEQ ID NO: 589859 - DNA, 33 bp, Homo sapien
gtagcctcctcaacaaacaggtctaggagttat

SEQ ID NO: 589860 - DNA, 33 bp, Homo sapien
gtagcctcctcaacaaccaggtctaggagttat

SEQ ID NO: 589861 - DNA, 33 bp, Homo sapien
agcttaatgtagtatacgaactgaccatttttt

SEQ ID NO: 589862 - DNA, 33 bp, Homo sapien
agcttaatgtagtatatgaactgaccatttttt

SEQ ID NO: 589863 - DNA, 33 bp, Homo sapien
atttcccaagacatctaaacaatgttatgtgag

SEQ ID NO: 589864 - DNA, 33 bp, Homo sapien
atttcccaagacatctgaacaatgttatgtgag

SEQ ID NO: 589865 - DNA, 33 bp, Homo sapien
taacatagccatcatcccaaatacttaacatat

SEQ ID NO: 589866 - DNA, 33 bp, Homo sapien
taacatagccatcatctcaaatacttaacatat

SEQ ID NO: 589867 - DNA, 33 bp, Homo sapien
tatagtttggttccataacatacctcagtatgt

SEQ ID NO: 589868 - DNA, 33 bp, Homo sapien
tatagtttggttccatgacatacctcagtatgt

SEQ ID NO: 589869 - DNA, 33 bp, Homo sapien
atctatctctacaatcccatacatattttcttt

SEQ ID NO: 589870 - DNA, 33 bp, Homo sapien
atctatctctacaatctcatacatattttcttt

SEQ ID NO: 589871 - DNA, 33 bp, Homo sapien
gtgtctttgattccgcccttccaccactttata

SEQ ID NO: 589872 - DNA, 33 bp, Homo sapien
gtgtctttgattccgctcttccaccactttata

SEQ ID NO: 589873 - DNA, 33 bp, Homo sapien
agtggaaccaagacaacgtccagaagaccacaa

SEQ ID NO: 589874 - DNA, 33 bp, Homo sapien
agtggaaccaagacaatgtccagaagaccacaa

SEQ ID NO: 589875 - DNA, 33 bp, Homo sapien
ttttttaacctgaaggaataagcatgaaaatag

SEQ ID NO: 589876 - DNA, 33 bp, Homo sapien
ttttttaacctgaaggcataagcatgaaaatag

SEQ ID NO: 589877 - DNA, 33 bp, Homo sapien
cctttaaccacaaagaccgtgtttctgttggag

SEQ ID NO: 589878 - DNA, 33 bp, Homo sapien
cctttaaccacaaagatcgtgtttctgttggag

SEQ ID NO: 589879 - DNA, 33 bp, Homo sapien
atatatgcttgctgtacgaattactacaatttg

SEQ ID NO: 589880 - DNA, 33 bp, Homo sapien
atatatgcttgctgtatgaattactacaatttg

SEQ ID NO: 589881 - DNA, 33 bp, Homo sapien
cgagctgccttcgtatcactaattaactcaggg

SEQ ID NO: 589882 - DNA, 33 bp, Homo sapien
cgagctgccttcgtatgactaattaactcaggg

SEQ ID NO: 589883 - DNA, 33 bp, Homo sapien
aaatggccacgaaatacagaaaaatgatgctca

SEQ ID NO: 589884 - DNA, 33 bp, Homo sapien
aaatggccacgaaatatagaaaaatgatgctca

SEQ ID NO: 589885 - DNA, 33 bp, Homo sapien
gataaacacaatagaccgagaggctgtttcaag

SEQ ID NO: 589886 - DNA, 33 bp, Homo sapien
gataaacacaatagactgagaggctgtttcaag

SEQ ID NO: 589887 - DNA, 33 bp, Homo sapien
gatgctcacagctgcacatctcaaggcagagtg

SEQ ID NO: 589888 - DNA, 33 bp, Homo sapien
gatgctcacagctgcagatctcaaggcagagtg

SEQ ID NO: 589889 - DNA, 33 bp, Homo sapien
tcagcctcctgagatacatgtcactgtaccagg

SEQ ID NO: 589890 - DNA, 33 bp, Homo sapien
tcagcctcctgagatatatgtcactgtaccagg

SEQ ID NO: 589891 - DNA, 33 bp, Homo sapien
ctcggttcttcctaaaattaagtgatttttttt

SEQ ID NO: 589892 - DNA, 33 bp, Homo sapien
ctcggttcttcctaaagttaagtgatttttttt

SEQ ID NO: 589893 - DNA, 33 bp, Homo sapien
aaaaataatttacagcaaaagactatacttaaa

SEQ ID NO: 589894 - DNA, 33 bp, Homo sapien
aaaaataatttacagcgaaagactatacttaaa

SEQ ID NO: 589895 - DNA, 33 bp, Homo sapien
cccaaactaaaccagcaatcaggttaaaagtaa

SEQ ID NO: 589896 - DNA, 33 bp, Homo sapien
cccaaactaaaccagctatcaggttaaaagtaa

SEQ ID NO: 589897 - DNA, 33 bp, Homo sapien
tcctcaaagttccttcaagatgagtccacaatc

SEQ ID NO: 589898 - DNA, 33 bp, Homo sapien
tcctcaaagttccttccagatgagtccacaatc

SEQ ID NO: 589899 - DNA, 33 bp, Homo sapien
ggagtaatactaggaccaccaacctgattcgca

SEQ ID NO: 589900 - DNA, 33 bp, Homo sapien
ggagtaatactaggactaccaacctgattcgca

SEQ ID NO: 589901 - DNA, 33 bp, Homo sapien
gcaaaaatggacagtcaacaatatgcaaaaatt

SEQ ID NO: 589902 - DNA, 33 bp, Homo sapien
gcaaaaatggacagtcgacaatatgcaaaaatt

SEQ ID NO: 589903 - DNA, 33 bp, Homo sapien
tcccttctgcaagccaacgaattatgcctagta

SEQ ID NO: 589904 - DNA, 33 bp, Homo sapien
tcccttctgcaagccagcgaattatgcctagta

SEQ ID NO: 589905 - DNA, 33 bp, Homo sapien
ggccatgtattttctaagcatctaagccttagc

SEQ ID NO: 589906 - DNA, 33 bp, Homo sapien
ggccatgtattttctacgcatctaagccttagc

SEQ ID NO: 589907 - DNA, 33 bp, Homo sapien
catctcccttatagcccccagtaggtaaatgta

SEQ ID NO: 589908 - DNA, 33 bp, Homo sapien
catctcccttatagcctccagtaggtaaatgta

SEQ ID NO: 589909 - DNA, 33 bp, Homo sapien
acttaaagttgaaagcaaagggtgcaatcaata

SEQ ID NO: 589910 - DNA, 33 bp, Homo sapien
acttaaagttgaaagctaagggtgcaatcaata

SEQ ID NO: 589911 - DNA, 33 bp, Homo sapien
tcccaggacacaaacaatggagaagattagagt

SEQ ID NO: 589912 - DNA, 33 bp, Homo sapien
tcccaggacacaaacagtggagaagattagagt

SEQ ID NO: 589913 - DNA, 33 bp, Homo sapien
ccctctggaatgacaaatgtacaaaacttagaa

SEQ ID NO: 589914 - DNA, 33 bp, Homo sapien
ccctctggaatgacaagtgtacaaaacttagaa

SEQ ID NO: 589915 - DNA, 33 bp, Homo sapien
gaccgccaggtgcttccatcctggtggccgacc

SEQ ID NO: 589916 - DNA, 33 bp, Homo sapien
gaccgccaggtgcttctatcctggtggccgacc

SEQ ID NO: 589917 - DNA, 33 bp, Homo sapien
tttttatttcacgttacaggagggacctggagt

SEQ ID NO: 589918 - DNA, 33 bp, Homo sapien
tttttatttcacgttataggagggacctggagt

SEQ ID NO: 589919 - DNA, 33 bp, Homo sapien
cggtggcggtgtatgaagcaataacctgggcaa

SEQ ID NO: 589920 - DNA, 33 bp, Homo sapien
cggtggcggtgtatgaggcaataacctgggcaa

SEQ ID NO: 589921 - DNA, 33 bp, Homo sapien
gaaagtgtgccctaaaggtgtgcattgtacaca

SEQ ID NO: 589922 - DNA, 33 bp, Homo sapien
gaaagtgtgccctaaatgtgtgcattgtacaca

SEQ ID NO: 589923 - DNA, 33 bp, Homo sapien
acccacacttgtagaacagagttacccaaccag

SEQ ID NO: 589924 - DNA, 33 bp, Homo sapien
acccacacttgtagaatagagttacccaaccag

SEQ ID NO: 589925 - DNA, 33 bp, Homo sapien
taaatgactgtttgaactatctctgtgattcgc

SEQ ID NO: 589926 - DNA, 33 bp, Homo sapien
taaatgactgtttgaagtatctctgtgattcgc

SEQ ID NO: 589927 - DNA, 33 bp, Homo sapien
tcactttgagaaagccaataccaaaagaaaaaa

SEQ ID NO: 589928 - DNA, 33 bp, Homo sapien
tcactttgagaaagccgataccaaaagaaaaaa

SEQ ID NO: 589929 - DNA, 33 bp, Homo sapien
tccatcaacccactgaagagggtctaagagcca

SEQ ID NO: 589930 - DNA, 33 bp, Homo sapien
tccatcaacccactgatgagggtctaagagcca

SEQ ID NO: 589931 - DNA, 33 bp, Homo sapien
caccctgtttcacagaagaataaactagtccct

SEQ ID NO: 589932 - DNA, 33 bp, Homo sapien
caccctgtttcacagaggaataaactagtccct

SEQ ID NO: 589933 - DNA, 33 bp, Homo sapien
tcctgcttgccaagacagggttcaagccacgtg

SEQ ID NO: 589934 - DNA, 33 bp, Homo sapien
tcctgcttgccaagacggggttcaagccacgtg

SEQ ID NO: 589935 - DNA, 33 bp, Homo sapien
acccgctcagcaaacaagaagggaacagctccc

SEQ ID NO: 589936 - DNA, 33 bp, Homo sapien
acccgctcagcaaacaggaagggaacagctccc

SEQ ID NO: 589937 - DNA, 33 bp, Homo sapien
acagctccagggagaaaaccccacacagattca

SEQ ID NO: 589938 - DNA, 33 bp, Homo sapien
acagctccagggagaagaccccacacagattca

SEQ ID NO: 589939 - DNA, 33 bp, Homo sapien
tccaaaaatatagacactgcatttataaatcta

SEQ ID NO: 589940 - DNA, 33 bp, Homo sapien
tccaaaaatatagacattgcatttataaatcta

SEQ ID NO: 589941 - DNA, 33 bp, Homo sapien
catttgttcaaatgacacagaagatgaatccat

SEQ ID NO: 589942 - DNA, 33 bp, Homo sapien
catttgttcaaatgacccagaagatgaatccat

SEQ ID NO: 589943 - DNA, 33 bp, Homo sapien
ggaatctatttaggtgcatgaataatctgcaaa

SEQ ID NO: 589944 - DNA, 33 bp, Homo sapien
ggaatctatttaggtgtatgaataatctgcaaa

SEQ ID NO: 589945 - DNA, 33 bp, Homo sapien
agaaatgaagtgcatcaaaacctttatttttgt

SEQ ID NO: 589946 - DNA, 33 bp, Homo sapien
agaaatgaagtgcatcgaaacctttatttttgt

SEQ ID NO: 589947 - DNA, 33 bp, Homo sapien
gtgattgtgtgtatgacgccaccttctgcagag

SEQ ID NO: 589948 - DNA, 33 bp, Homo sapien
gtgattgtgtgtatgatgccaccttctgcagag

SEQ ID NO: 589949 - DNA, 33 bp, Homo sapien
cttggtaggtatcacactggccgcctccacagt

SEQ ID NO: 589950 - DNA, 33 bp, Homo sapien
cttggtaggtatcacattggccgcctccacagt

SEQ ID NO: 589951 - DNA, 33 bp, Homo sapien
ctagtatcctttagacaatgctcctcacacttc

SEQ ID NO: 589952 - DNA, 33 bp, Homo sapien
ctagtatcctttagacgatgctcctcacacttc

SEQ ID NO: 589953 - DNA, 33 bp, Homo sapien
ctcccctcactaccaacctgatcagtgagtatt

SEQ ID NO: 589954 - DNA, 33 bp, Homo sapien
ctcccctcactaccaatctgatcagtgagtatt

SEQ ID NO: 589955 - DNA, 33 bp, Homo sapien
aatgacatcacagcaaaagagaggttctctccc

SEQ ID NO: 589956 - DNA, 33 bp, Homo sapien
aatgacatcacagcaagagagaggttctctccc

SEQ ID NO: 589957 - DNA, 33 bp, Homo sapien; identical to SEQ ID NO: 589955

SEQ ID NO: 589958 - DNA, 33 bp, Homo sapien; identical to SEQ ID NO: 589956

SEQ ID NO: 589959 - DNA, 33 bp, Homo sapien
tttgtctaaagcctggaagtcagtcgagacatg

SEQ ID NO: 589960 - DNA, 33 bp, Homo sapien
tttgtctaaagcctggcagtcagtcgagacatg

SEQ ID NO: 589961 - DNA, 33 bp, Homo sapien
acggggtctcacacagacatttttggaggtgat

SEQ ID NO: 589962 - DNA, 33 bp, Homo sapien
acggggtctcacacaggcatttttggaggtgat

SEQ ID NO: 589963 - DNA, 33 bp, Homo sapien
gggtagtcatggcccaagtaagagagacgtggt

SEQ ID NO: 589964 - DNA, 33 bp, Homo sapien
gggtagtcatggcccaggtaagagagacgtggt

SEQ ID NO: 589965 - DNA, 33 bp, Homo sapien
gtgtggacacctgaccagcatggtgcactacag

SEQ ID NO: 589966 - DNA, 33 bp, Homo sapien
gtgtggacacctgaccggcatggtgcactacag

SEQ ID NO: 589967 - DNA, 33 bp, Homo sapien
gtctcagcttatgtggaactcgcttttcattct

SEQ ID NO: 589968 - DNA, 33 bp, Homo sapien
gtctcagcttatgtgggactcgcttttcattct

SEQ ID NO: 589969 - DNA, 33 bp, Homo sapien
ctctttagtctcttcccgctccagtaggattgt

SEQ ID NO: 589970 - DNA, 33 bp, Homo sapien
ctctttagtctcttcctgctccagtaggattgt

SEQ ID NO: 589971 - DNA, 33 bp, Homo sapien
gtctttgtggctcagccagattgcaagtttctc

SEQ ID NO: 589972 - DNA, 33 bp, Homo sapien
gtctttgtggctcagctagattgcaagtttctc

SEQ ID NO: 589973 - DNA, 33 bp, Homo sapien
ttgtgtttttacattacggaaatgtccaaacat

SEQ ID NO: 589974 - DNA, 33 bp, Homo sapien
ttgtgtttttacattatggaaatgtccaaacat

SEQ ID NO: 589975 - DNA, 33 bp, Homo sapien
gactcagtttaattaccaggtgctgcttggact

SEQ ID NO: 589976 - DNA, 33 bp, Homo sapien
gactcagtttaattactaggtgctgcttggact

SEQ ID NO: 589977 - DNA, 33 bp, Homo sapien
ttcgtaaaatccctcaaatctatggactgtgca

SEQ ID NO: 589978 - DNA, 33 bp, Homo sapien
ttcgtaaaatccctcacatctatggactgtgca

SEQ ID NO: 589979 - DNA, 33 bp, Homo sapien
agaaagcgctgtgttacaaagaactagtccttt

SEQ ID NO: 589980 - DNA, 33 bp, Homo sapien
agaaagcgctgtgttataaagaactagtccttt

SEQ ID NO: 589981 - DNA, 33 bp, Homo sapien
ccacctgggcatcaagaatcttctaccctgatt

SEQ ID NO: 589982 - DNA, 33 bp, Homo sapien
ccacctgggcatcaagtatcttctaccctgatt

SEQ ID NO: 589983 - DNA, 33 bp, Homo sapien
ttccaaaaatagaaaggaaagcttggtgacact

SEQ ID NO: 589984 - DNA, 33 bp, Homo sapien
ttccaaaaatagaaagtaaagcttggtgacact

SEQ ID NO: 589985 - DNA, 33 bp, Homo sapien
gcaatcacatctctaacggacagcggtcacttt

SEQ ID NO: 589986 - DNA, 33 bp, Homo sapien
gcaatcacatctctaatggacagcggtcacttt

SEQ ID NO: 589987 - DNA, 33 bp, Homo sapien
tctggcttttggattccaagcctcatattcttt

SEQ ID NO: 589988 - DNA, 33 bp, Homo sapien
tctggcttttggattctaagcctcatattcttt

SEQ ID NO: 589989 - DNA, 33 bp, Homo sapien
taaaatgacatgggaaaacaggggctcgaagca

SEQ ID NO: 589990 - DNA, 33 bp, Homo sapien
taaaatgacatgggaacacaggggctcgaagca

SEQ ID NO: 589991 - DNA, 33 bp, Homo sapien
tgctggtcctttcacaagccaccatctcacagt

SEQ ID NO: 589992 - DNA, 33 bp, Homo sapien
tgctggtcctttcacatgccaccatctcacagt

SEQ ID NO: 589993 - DNA, 33 bp, Homo sapien
ttagcctgagatgataggtcaaaaccagggagg

SEQ ID NO: 589994 - DNA, 33 bp, Homo sapien
ttagcctgagatgatatgtcaaaaccagggagg

SEQ ID NO: 589995 - DNA, 33 bp, Homo sapien
ctacattgtgacagacagacggggctatggtta

SEQ ID NO: 589996 - DNA, 33 bp, Homo sapien
ctacattgtgacagacggacggggctatggtta

SEQ ID NO: 589997 - DNA, 33 bp, Homo sapien
tgtcgcttccagatgacgcaaatctgatatcag

SEQ ID NO: 589998 - DNA, 33 bp, Homo sapien
tgtcgcttccagatgatgcaaatctgatatcag

SEQ ID NO: 589999 - DNA, 33 bp, Homo sapien
aatgactaaaagcttgaaactttgcttttaatc

SEQ ID NO: 590000 - DNA, 33 bp, Homo sapien
aatgactaaaagcttgcaactttgcttttaatc

SEQ ID NO: 590001 - DNA, 33 bp, Homo sapien
tctgaccaaacaggaaagatggagagcaagcag

SEQ ID NO: 590002 - DNA, 33 bp, Homo sapien
tctgaccaaacaggaacgatggagagcaagcag

SEQ ID NO: 590003 - DNA, 33 bp, Homo sapien
accaatgggaactgtccccaggctggccagagc

SEQ ID NO: 590004 - DNA, 33 bp, Homo sapien
accaatgggaactgtctccaggctggccagagc

SEQ ID NO: 590005 - DNA, 33 bp, Homo sapien
catggccttgaactcgcaataactcacacatgt

SEQ ID NO: 590006 - DNA, 33 bp, Homo sapien
catggccttgaactcgtaataactcacacatgt

SEQ ID NO: 590007 - DNA, 33 bp, Homo sapien
tcttcatgagctgttaaaggaaacaatgttttc

SEQ ID NO: 590008 - DNA, 33 bp, Homo sapien
tcttcatgagctgttacaggaaacaatgttttc

SEQ ID NO: 590009 - DNA, 33 bp, Homo sapien
ggttgctctgctgagactccaatttttgccaag

SEQ ID NO: 590010 - DNA, 33 bp, Homo sapien
ggttgctctgctgagattccaatttttgccaag

SEQ ID NO: 590011 - DNA, 33 bp, Homo sapien
agtgtcctggtcctcaaagtatgtggttttcag

SEQ ID NO: 590012 - DNA, 33 bp, Homo sapien
agtgtcctggtcctcagagtatgtggttttcag

SEQ ID NO: 590013 - DNA, 33 bp, Homo sapien
agacatggaccttgagcataggagataaagtct

SEQ ID NO: 590014 - DNA, 33 bp, Homo sapien
agacatggaccttgaggataggagataaagtct

SEQ ID NO: 590015 - DNA, 33 bp, Homo sapien
ttgtaggaaaactatccgactcaacatatagcc

SEQ ID NO: 590016 - DNA, 33 bp, Homo sapien
ttgtaggaaaactatctgactcaacatatagcc

SEQ ID NO: 590017 - DNA, 33 bp, Homo sapien
acatttgaaacagccaactcagaggtaagaaat

SEQ ID NO: 590018 - DNA, 33 bp, Homo sapien
acatttgaaacagccatctcagaggtaagaaat

SEQ ID NO: 590019 - DNA, 33 bp, Homo sapien
gtgacaaagagccaaacagggtgagaactcatg

SEQ ID NO: 590020 - DNA, 33 bp, Homo sapien
gtgacaaagagccaaagagggtgagaactcatg

SEQ ID NO: 590021 - DNA, 33 bp, Homo sapien
acaaccctcagaataaagtccaagcccttgaac

SEQ ID NO: 590022 - DNA, 33 bp, Homo sapien
acaaccctcagaataaggtccaagcccttgaac

SEQ ID NO: 590023 - DNA, 33 bp, Homo sapien
caattggcatcattcaaaaaccattaatttaat

SEQ ID NO: 590024 - DNA, 33 bp, Homo sapien
caattggcatcattcagaaaccattaatttaat

SEQ ID NO: 590025 - DNA, 33 bp, Homo sapien
gatttcaggaaactcaccttgtttattcttgac

SEQ ID NO: 590026 - DNA, 33 bp, Homo sapien
gatttcaggaaactcagcttgtttattcttgac

SEQ ID NO: 590027 - DNA, 33 bp, Homo sapien
tactggaagaaagaccactatttacaatgggcc

SEQ ID NO: 590028 - DNA, 33 bp, Homo sapien
tactggaagaaagaccgctatttacaatgggcc

SEQ ID NO: 590029 - DNA, 33 bp, Homo sapien
tctcaactatcttcacaaatagcagaaaaccct

SEQ ID NO: 590030 - DNA, 33 bp, Homo sapien
tctcaactatcttcacgaatagcagaaaaccct

SEQ ID NO: 590031 - DNA, 33 bp, Homo sapien
ttttgcagtgactgaacgggctcccatgccagg

SEQ ID NO: 590032 - DNA, 33 bp, Homo sapien
ttttgcagtgactgaatgggctcccatgccagg

SEQ ID NO: 590033 - DNA, 33 bp, Homo sapien
tgctttgtcaactgtcaaggggcatacagatac

SEQ ID NO: 590034 - DNA, 33 bp, Homo sapien
tgctttgtcaactgtcgaggggcatacagatac

SEQ ID NO: 590035 - DNA, 33 bp, Homo sapien
gtactctcatgttgcccgaatgagtgttacctt

SEQ ID NO: 590036 - DNA, 33 bp, Homo sapien
gtactctcatgttgcctgaatgagtgttacctt

SEQ ID NO: 590037 - DNA, 33 bp, Homo sapien
ccgtctccccttgattaaaagtccgtgtgtgtt

SEQ ID NO: 590038 - DNA, 33 bp, Homo sapien
ccgtctccccttgattgaaagtccgtgtgtgtt

SEQ ID NO: 590039 - DNA, 33 bp, Homo sapien
atgaggaagggtgttgacaaagctttcgagagg

SEQ ID NO: 590040 - DNA, 33 bp, Homo sapien
atgaggaagggtgttggcaaagctttcgagagg

SEQ ID NO: 590041 - DNA, 33 bp, Homo sapien
gttttacgtaaacagaaatgtgatctgatcaac

SEQ ID NO: 590042 - DNA, 33 bp, Homo sapien
gttttacgtaaacagagatgtgatctgatcaac

SEQ ID NO: 590043 - DNA, 33 bp, Homo sapien
accttgactcagttacaaattcaagttcttggt

SEQ ID NO: 590044 - DNA, 33 bp, Homo sapien
accttgactcagttacgaattcaagttcttggt

SEQ ID NO: 590045 - DNA, 33 bp, Homo sapien
tcctattttcctaaaccgaaagcaagcaaactg

SEQ ID NO: 590046 - DNA, 33 bp, Homo sapien
tcctattttcctaaactgaaagcaagcaaactg

SEQ ID NO: 590047 - DNA, 33 bp, Homo sapien
acctcctattcatttacgctggatatggaagag

SEQ ID NO: 590048 - DNA, 33 bp, Homo sapien
acctcctattcatttatgctggatatggaagag

SEQ ID NO: 590049 - DNA, 33 bp, Homo sapien
ttaggaccagtttagacaccgcattgtcttggg

SEQ ID NO: 590050 - DNA, 33 bp, Homo sapien
ttaggaccagtttagataccgcattgtcttggg

SEQ ID NO: 590051 - DNA, 33 bp, Homo sapien
taggaccaccatcatacacgtcgtccattgttc

SEQ ID NO: 590052 - DNA, 33 bp, Homo sapien
taggaccaccatcatatacgtcgtccattgttc

SEQ ID NO: 590053 - DNA, 33 bp, Homo sapien
aataaacgatttccacggattgaataagtacga

SEQ ID NO: 590054 - DNA, 33 bp, Homo sapien
aataaacgatttccactgattgaataagtacga

SEQ ID NO: 590055 - DNA, 33 bp, Homo sapien
aagcccaactatgaaactgattccacaggaact

SEQ ID NO: 590056 - DNA, 33 bp, Homo sapien
aagcccaactatgaaattgattccacaggaact

SEQ ID NO: 590057 - DNA, 33 bp, Homo sapien
agcatctctacggaatcagcgtttcagagacca

SEQ ID NO: 590058 - DNA, 33 bp, Homo sapien
agcatctctacggaattagcgtttcagagacca

SEQ ID NO: 590059 - DNA, 33 bp, Homo sapien
tgtggagaatgttcacaagtattatagaaataa

SEQ ID NO: 590060 - DNA, 33 bp, Homo sapien
tgtggagaatgttcacgagtattatagaaataa

SEQ ID NO: 590061 - DNA, 33 bp, Homo sapien
ttatgaattaagaaaacctctgtggactagtct

SEQ ID NO: 590062 - DNA, 33 bp, Homo sapien
ttatgaattaagaaaatctctgtggactagtct

SEQ ID NO: 590063 - DNA, 33 bp, Homo sapien
agcttactccatgagcactggcaccctctctag

SEQ ID NO: 590064 - DNA, 33 bp, Homo sapien
agcttactccatgagcgctggcaccctctctag

SEQ ID NO: 590065 - DNA, 33 bp, Homo sapien
tttggggcatgtctaggcagttgcaatgtagtc

SEQ ID NO: 590066 - DNA, 33 bp, Homo sapien
tttggggcatgtctagtcagttgcaatgtagtc

SEQ ID NO: 590067 - DNA, 33 bp, Homo sapien
acctcaggaggttaaacggatgaggcacacatg

SEQ ID NO: 590068 - DNA, 33 bp, Homo sapien
acctcaggaggttaaatggatgaggcacacatg

SEQ ID NO: 590069 - DNA, 33 bp, Homo sapien
gactccgagacaggcaaaccttactgtattcgc

SEQ ID NO: 590070 - DNA, 33 bp, Homo sapien
gactccgagacaggcagaccttactgtattcgc

SEQ ID NO: 590071 - DNA, 33 bp, Homo sapien
aggtgctatttgaataagttgaatacttgactg

SEQ ID NO: 590072 - DNA, 33 bp, Homo sapien
aggtgctatttgaatacgttgaatacttgactg

SEQ ID NO: 590073 - DNA, 33 bp, Homo sapien
cagagcctaactcaaaataagtaatcaataatt

SEQ ID NO: 590074 - DNA, 33 bp, Homo sapien
cagagcctaactcaaagtaagtaatcaataatt

SEQ ID NO: 590075 - DNA, 33 bp, Homo sapien
aggtgttcagtagatacgaatttcctgacaagt

SEQ ID NO: 590076 - DNA, 33 bp, Homo sapien
aggtgttcagtagatatgaatttcctgacaagt

SEQ ID NO: 590077 - DNA, 33 bp, Homo sapien
actgctaggttagatacaaaaccgggccaggca

SEQ ID NO: 590078 - DNA, 33 bp, Homo sapien
actgctaggttagatataaaaccgggccaggca

SEQ ID NO: 590079 - DNA, 33 bp, Homo sapien
aaaacaaggatcaacaatattccaagaaaaagt

SEQ ID NO: 590080 - DNA, 33 bp, Homo sapien
aaaacaaggatcaacagtattccaagaaaaagt

SEQ ID NO: 590081 - DNA, 33 bp, Homo sapien
ataagccaggcctacactaagctctaggagtgt

SEQ ID NO: 590082 - DNA, 33 bp, Homo sapien
ataagccaggcctacattaagctctaggagtgt

SEQ ID NO: 590083 - DNA, 33 bp, Homo sapien
atgacagcttccagtgcatttagaatttcattg

SEQ ID NO: 590084 - DNA, 33 bp, Homo sapien
atgacagcttccagtgtatttagaatttcattg

SEQ ID NO: 590085 - DNA, 33 bp, Homo sapien
aaggggcaaaaacttaaattcaagatggtaggt

SEQ ID NO: 590086 - DNA, 33 bp, Homo sapien
aaggggcaaaaacttacattcaagatggtaggt

SEQ ID NO: 590087 - DNA, 33 bp, Homo sapien
tttcccatctagaatcaaagtagaaaaccactc

SEQ ID NO: 590088 - DNA, 33 bp, Homo sapien
tttcccatctagaatcgaagtagaaaaccactc

SEQ ID NO: 590089 - DNA, 33 bp, Homo sapien
gaatccactctgacgacgtttgttcgtttgacc

SEQ ID NO: 590090 - DNA, 33 bp, Homo sapien
gaatccactctgacgatgtttgttcgtttgacc

SEQ ID NO: 590091 - DNA, 33 bp, Homo sapien
cacaccaagacatatcggagttaaacagctgaa

SEQ ID NO: 590092 - DNA, 33 bp, Homo sapien
cacaccaagacatatctgagttaaacagctgaa

SEQ ID NO: 590093 - DNA, 33 bp, Homo sapien
gctttattaaatcttcaaaatttagtggcattt

SEQ ID NO: 590094 - DNA, 33 bp, Homo sapien
gctttattaaatcttcgaaatttagtggcattt

SEQ ID NO: 590095 - DNA, 33 bp, Homo sapien
tcatgaaataatggcaacacatgataggtttag

SEQ ID NO: 590096 - DNA, 33 bp, Homo sapien
tcatgaaataatggcagcacatgataggtttag

SEQ ID NO: 590097 - DNA, 33 bp, Homo sapien
aattacaagattggaccattgaatgttagcagg

SEQ ID NO: 590098 - DNA, 33 bp, Homo sapien
aattacaagattggactattgaatgttagcagg

SEQ ID NO: 590099 - DNA, 33 bp, Homo sapien
gaatgttccctccgacgcttggcttaacttagt

SEQ ID NO: 590100 - DNA, 33 bp, Homo sapien
gaatgttccctccgactcttggcttaacttagt

SEQ ID NO: 590101 - DNA, 33 bp, Homo sapien
gtggtatgtttgtggcaatctagttatgattgc

SEQ ID NO: 590102 - DNA, 33 bp, Homo sapien
gtggtatgtttgtggcgatctagttatgattgc

SEQ ID NO: 590103 - DNA, 33 bp, Homo sapien
gtggcaaatggcattccaacttaagcaaagcaa

SEQ ID NO: 590104 - DNA, 33 bp, Homo sapien
gtggcaaatggcattctaacttaagcaaagcaa

SEQ ID NO: 590105 - DNA, 33 bp, Homo sapien
aatctataattatcccaaatgaaaagcttttaa

SEQ ID NO: 590106 - DNA, 33 bp, Homo sapien
aatctataattatccccaatgaaaagcttttaa

SEQ ID NO: 590107 - DNA, 33 bp, Homo sapien
cagcactgggaagaataagcctggagagtggtt

SEQ ID NO: 590108 - DNA, 33 bp, Homo sapien
cagcactgggaagaatgagcctggagagtggtt

SEQ ID NO: 590109 - DNA, 33 bp, Homo sapien
aacaattagtcaaaaaatcatgagctaacaaaa

SEQ ID NO: 590110 - DNA, 33 bp, Homo sapien
aacaattagtcaaaaagtcatgagctaacaaaa

SEQ ID NO: 590111 - DNA, 33 bp, Homo sapien
gtcagctggacttagcaacttgcttctaacaca

SEQ ID NO: 590112 - DNA, 33 bp, Homo sapien
gtcagctggacttagcgacttgcttctaacaca

SEQ ID NO: 590113 - DNA, 33 bp, Homo sapien
cagaggtgggtgtgtcacaacacaatatttcta

SEQ ID NO: 590114 - DNA, 33 bp, Homo sapien
cagaggtgggtgtgtctcaacacaatatttcta

SEQ ID NO: 590115 - DNA, 33 bp, Homo sapien
tatgagggtgaatgaacagtttaattatgtgag

SEQ ID NO: 590116 - DNA, 33 bp, Homo sapien
tatgagggtgaatgaatagtttaattatgtgag

SEQ ID NO: 590117 - DNA, 33 bp, Homo sapien
gcaaggcattttaaagacatccttggttccttt

SEQ ID NO: 590118 - DNA, 33 bp, Homo sapien
gcaaggcattttaaagtcatccttggttccttt

SEQ ID NO: 590119 - DNA, 33 bp, Homo sapien
cttaggcagactgtacgctattaatataatgga

SEQ ID NO: 590120 - DNA, 33 bp, Homo sapien
cttaggcagactgtactctattaatataatgga

SEQ ID NO: 590121 - DNA, 33 bp, Homo sapien
atgacacttcctctaacggtagtcactttaatt

SEQ ID NO: 590122 - DNA, 33 bp, Homo sapien
atgacacttcctctaatggtagtcactttaatt

SEQ ID NO: 590123 - DNA, 33 bp, Homo sapien
ggaggagagacttaggaaattcttgggagagtt

SEQ ID NO: 590124 - DNA, 33 bp, Homo sapien
ggaggagagacttagggaattcttgggagagtt

SEQ ID NO: 590125 - DNA, 33 bp, Homo sapien
gtgtaatcgatacaaactagtccttttatcctt

SEQ ID NO: 590126 - DNA, 33 bp, Homo sapien
gtgtaatcgatacaaattagtccttttatcctt

SEQ ID NO: 590127 - DNA, 33 bp, Homo sapien
ccctactctccacacacgatggccaaatgcatc

SEQ ID NO: 590128 - DNA, 33 bp, Homo sapien
ccctactctccacacaggatggccaaatgcatc

SEQ ID NO: 590129 - DNA, 33 bp, Homo sapien
ggaacacaactgtgtggatttctcaatgccctt

SEQ ID NO: 590130 - DNA, 33 bp, Homo sapien
ggaacacaactgtgtgtatttctcaatgccctt

SEQ ID NO: 590131 - DNA, 33 bp, Homo sapien
atggggcttgacttaacagttgtacaaagttac

SEQ ID NO: 590132 - DNA, 33 bp, Homo sapien
atggggcttgacttaagagttgtacaaagttac

SEQ ID NO: 590133 - DNA, 33 bp, Homo sapien
cagggagacaaatttcagaaaccacagatgggg

SEQ ID NO: 590134 - DNA, 33 bp, Homo sapien
cagggagacaaatttcggaaaccacagatgggg

SEQ ID NO: 590135 - DNA, 33 bp, Homo sapien
cagcacctcacttttacagtggccaaacccaaa

SEQ ID NO: 590136 - DNA, 33 bp, Homo sapien
cagcacctcacttttatagtggccaaacccaaa

SEQ ID NO: 590137 - DNA, 33 bp, Homo sapien
caccatccttcagtcaacctgatcagaagccct

SEQ ID NO: 590138 - DNA, 33 bp, Homo sapien
caccatccttcagtcaccctgatcagaagccct

SEQ ID NO: 590139 - DNA, 33 bp, Homo sapien
tgcctacaagggcctgccaaaaactccaaacag

SEQ ID NO: 590140 - DNA, 33 bp, Homo sapien
tgcctacaagggcctgtcaaaaactccaaacag

SEQ ID NO: 590141 - DNA, 33 bp, Homo sapien
aatagaaagttaagaccgccacctagccacttt

SEQ ID NO: 590142 - DNA, 33 bp, Homo sapien
aatagaaagttaagactgccacctagccacttt

SEQ ID NO: 590143 - DNA, 33 bp, Homo sapien
aggtatatccagctaacagtccatcgatgggct

SEQ ID NO: 590144 - DNA, 33 bp, Homo sapien
aggtatatccagctaagagtccatcgatgggct

SEQ ID NO: 590145 - DNA, 33 bp, Homo sapien
ttgcccaccacctaccacctgctgtatgcccag

SEQ ID NO: 590146 - DNA, 33 bp, Homo sapien
ttgcccaccacctaccgcctgctgtatgcccag

SEQ ID NO: 590147 - DNA, 33 bp, Homo sapien
tagaggcatttgcagacaaagtagaagaaggca

SEQ ID NO: 590148 - DNA, 33 bp, Homo sapien
tagaggcatttgcagataaagtagaagaaggca

SEQ ID NO: 590149 - DNA, 33 bp, Homo sapien
atggctttcccataaaaagagaagggagggaga

SEQ ID NO: 590150 - DNA, 33 bp, Homo sapien
atggctttcccataaagagagaagggagggaga

SEQ ID NO: 590151 - DNA, 33 bp, Homo sapien
ctgtgctcaggctccccggccttctggtatgga

SEQ ID NO: 590152 - DNA, 33 bp, Homo sapien
ctgtgctcaggctccctggccttctggtatgga

SEQ ID NO: 590153 - DNA, 33 bp, Homo sapien
caagttcttttcttgacaggcaaggaggggcag

SEQ ID NO: 590154 - DNA, 33 bp, Homo sapien
caagttcttttcttgataggcaaggaggggcag

SEQ ID NO: 590155 - DNA, 33 bp, Homo sapien
ccactaaaaagcagtacctttaggaaatgaacc

SEQ ID NO: 590156 - DNA, 33 bp, Homo sapien
ccactaaaaagcagtatctttaggaaatgaacc

SEQ ID NO: 590157 - DNA, 33 bp, Homo sapien
cgggaaggcgccaggaacctgtacaaattttcc

SEQ ID NO: 590158 - DNA, 33 bp, Homo sapien
cgggaaggcgccaggagcctgtacaaattttcc

SEQ ID NO: 590159 - DNA, 33 bp, Homo sapien
ctggcaatcactggtccctttacaggctccata

SEQ ID NO: 590160 - DNA, 33 bp, Homo sapien
ctggcaatcactggtctctttacaggctccata

SEQ ID NO: 590161 - DNA, 33 bp, Homo sapien
aacaagttttaagaagaaatggcttcatacata

SEQ ID NO: 590162 - DNA, 33 bp, Homo sapien
aacaagttttaagaaggaatggcttcatacata

SEQ ID NO: 590163 - DNA, 33 bp, Homo sapien
tgctgcttttcctagacacttcctctcagatgc

SEQ ID NO: 590164 - DNA, 33 bp, Homo sapien
tgctgcttttcctagatacttcctctcagatgc

SEQ ID NO: 590165 - DNA, 33 bp, Homo sapien
ttccctccgtccttcaatcaaatacaatgacct

SEQ ID NO: 590166 - DNA, 33 bp, Homo sapien
ttccctccgtccttcagtcaaatacaatgacct

SEQ ID NO: 590167 - DNA, 33 bp, Homo sapien
cagggcaggggttacaatgagatctgatctttg

SEQ ID NO: 590168 - DNA, 33 bp, Homo sapien
cagggcaggggttacagtgagatctgatctttg

SEQ ID NO: 590169 - DNA, 33 bp, Homo sapien
tcatcaaggcttttgacacttattgccaaattt

SEQ ID NO: 590170 - DNA, 33 bp, Homo sapien
tcatcaaggcttttgatacttattgccaaattt

SEQ ID NO: 590171 - DNA, 33 bp, Homo sapien
agcaggtcacagcctacgcaatatctcacagaa

SEQ ID NO: 590172 - DNA, 33 bp, Homo sapien
agcaggtcacagcctatgcaatatctcacagaa

SEQ ID NO: 590173 - DNA, 33 bp, Homo sapien
tctctaatagcagtaacgacaattttaatcatc

SEQ ID NO: 590174 - DNA, 33 bp, Homo sapien
tctctaatagcagtaatgacaattttaatcatc

SEQ ID NO: 590175 - DNA, 33 bp, Homo sapien
gattctgactctctccaagctttagtttcctgg

SEQ ID NO: 590176 - DNA, 33 bp, Homo sapien
gattctgactctctccgagctttagtttcctgg

SEQ ID NO: 590177 - DNA, 33 bp, Homo sapien
gagtgacatcggatacacctatcggatacacct

SEQ ID NO: 590178 - DNA, 33 bp, Homo sapien
gagtgacatcggatacgcctatcggatacacct

SEQ ID NO: 590179 - DNA, 33 bp, Homo sapien
tgaacattcatgccctcaactgcctgtctgtgg

SEQ ID NO: 590180 - DNA, 33 bp, Homo sapien
tgaacattcatgccctgaactgcctgtctgtgg

SEQ ID NO: 590181 - DNA, 33 bp, Homo sapien
aaaacaaacctaatacggcaccatttccgtcca

SEQ ID NO: 590182 - DNA, 33 bp, Homo sapien
aaaacaaacctaatactgcaccatttccgtcca

SEQ ID NO: 590183 - DNA, 33 bp, Homo sapien
gtgatggggagcagtaagttagagcaaggcacc

SEQ ID NO: 590184 - DNA, 33 bp, Homo sapien
gtgatggggagcagtacgttagagcaaggcacc

SEQ ID NO: 590185 - DNA, 33 bp, Homo sapien
tgaagaaatctggaaacctagtaccgcggcacc

SEQ ID NO: 590186 - DNA, 33 bp, Homo sapien
tgaagaaatctggaaatctagtaccgcggcacc

SEQ ID NO: 590187 - DNA, 33 bp, Homo sapien
ggggccctattactaacataacaaagcccatgt

SEQ ID NO: 590188 - DNA, 33 bp, Homo sapien
ggggccctattactaatataacaaagcccatgt

SEQ ID NO: 590189 - DNA, 33 bp, Homo sapien
gatgcctgattttcaacaaactgaaattcatga

SEQ ID NO: 590190 - DNA, 33 bp, Homo sapien
gatgcctgattttcaataaactgaaattcatga

SEQ ID NO: 590191 - DNA, 33 bp, Homo sapien
gctggatgctcttcagcacaatttaggaagcag

SEQ ID NO: 590192 - DNA, 33 bp, Homo sapien
gctggatgctcttcaggacaatttaggaagcag

SEQ ID NO: 590193 - DNA, 33 bp, Homo sapien
ccctggctctctctggacacccatctaccagtc

SEQ ID NO: 590194 - DNA, 33 bp, Homo sapien
ccctggctctctctggtcacccatctaccagtc

SEQ ID NO: 590195 - DNA, 33 bp, Homo sapien
cctttttatggctcaacaatattctactgtatg

SEQ ID NO: 590196 - DNA, 33 bp, Homo sapien
cctttttatggctcaataatattctactgtatg

SEQ ID NO: 590197 - DNA, 33 bp, Homo sapien
caggtgtgtagtgatacattatggtggttttag

SEQ ID NO: 590198 - DNA, 33 bp, Homo sapien
caggtgtgtagtgatatattatggtggttttag

SEQ ID NO: 590199 - DNA, 33 bp, Homo sapien
agctctttacaaaacgacgtgtactcttaccat

SEQ ID NO: 590200 - DNA, 33 bp, Homo sapien
agctctttacaaaacggcgtgtactcttaccat

SEQ ID NO: 590201 - DNA, 33 bp, Homo sapien
tccaccatcgtagtaacatacagagcattttcg

SEQ ID NO: 590202 - DNA, 33 bp, Homo sapien
tccaccatcgtagtaatatacagagcattttcg

SEQ ID NO: 590203 - DNA, 33 bp, Homo sapien
tcttcaagcactggtagcctttacttatctctc

SEQ ID NO: 590204 - DNA, 33 bp, Homo sapien
tcttcaagcactggtatcctttacttatctctc

SEQ ID NO: 590205 - DNA, 33 bp, Homo sapien
ctagtcttgcataagccgccaggaactagttgt

SEQ ID NO: 590206 - DNA, 33 bp, Homo sapien
ctagtcttgcataagctgccaggaactagttgt

SEQ ID NO: 590207 - DNA, 33 bp, Homo sapien
tgcgggctgttgaatcactgagcaggtgtgtag

SEQ ID NO: 590208 - DNA, 33 bp, Homo sapien
tgcgggctgttgaatccctgagcaggtgtgtag

SEQ ID NO: 590209 - DNA, 33 bp, Homo sapien
gtcagagcttaagtccagctaattaactgcctt

SEQ ID NO: 590210 - DNA, 33 bp, Homo sapien
gtcagagcttaagtccggctaattaactgcctt

SEQ ID NO: 590211 - DNA, 33 bp, Homo sapien
tgctaaatgtcctccacacccccaatgcctgct

SEQ ID NO: 590212 - DNA, 33 bp, Homo sapien
tgctaaatgtcctccatacccccaatgcctgct

SEQ ID NO: 590213 - DNA, 33 bp, Homo sapien
catgctgactattacgaagacattgccaaactc

SEQ ID NO: 590214 - DNA, 33 bp, Homo sapien
catgctgactattacggagacattgccaaactc

SEQ ID NO: 590215 - DNA, 33 bp, Homo sapien
cttctgataggagagactacttttggcaagcca

SEQ ID NO: 590216 - DNA, 33 bp, Homo sapien
cttctgataggagagattacttttggcaagcca

SEQ ID NO: 590217 - DNA, 33 bp, Homo sapien
cagtatttactgagtccctatacagacagggta

SEQ ID NO: 590218 - DNA, 33 bp, Homo sapien
cagtatttactgagtctctatacagacagggta

SEQ ID NO: 590219 - DNA, 33 bp, Homo sapien
tcacaggtatttctcacgtggataactggtgac

SEQ ID NO: 590220 - DNA, 33 bp, Homo sapien
tcacaggtatttctcatgtggataactggtgac

SEQ ID NO: 590221 - DNA, 33 bp, Homo sapien
ggggcctggaaatttgaactaggaaggtaagca

SEQ ID NO: 590222 - DNA, 33 bp, Homo sapien
ggggcctggaaatttggactaggaaggtaagca

SEQ ID NO: 590223 - DNA, 33 bp, Homo sapien
ctgggatggagaaaaacgagcaggctgccatct

SEQ ID NO: 590224 - DNA, 33 bp, Homo sapien
ctgggatggagaaaaatgagcaggctgccatct

SEQ ID NO: 590225 - DNA, 33 bp, Homo sapien
ggtccatagtgcataccataggtttcagaggga

SEQ ID NO: 590226 - DNA, 33 bp, Homo sapien
ggtccatagtgcatacgataggtttcagaggga

SEQ ID NO: 590227 - DNA, 33 bp, Homo sapien
gttgttccctggagagaaaggcttatttccaga

SEQ ID NO: 590228 - DNA, 33 bp, Homo sapien
gttgttccctggagaggaaggcttatttccaga

SEQ ID NO: 590229 - DNA, 33 bp, Homo sapien
ttatattttggccttacaataccgtaacaatgt

SEQ ID NO: 590230 - DNA, 33 bp, Homo sapien
ttatattttggccttagaataccgtaacaatgt

SEQ ID NO: 590231 - DNA, 33 bp, Homo sapien
gaggacaggacaggaaacaccaacattttatgg

SEQ ID NO: 590232 - DNA, 33 bp, Homo sapien
gaggacaggacaggaaccaccaacattttatgg

SEQ ID NO: 590233 - DNA, 33 bp, Homo sapien
tcattttaatcactacacttttcttcttcattt

SEQ ID NO: 590234 - DNA, 33 bp, Homo sapien
tcattttaatcactacccttttcttcttcattt

SEQ ID NO: 590235 - DNA, 33 bp, Homo sapien
gagaactggggatatgaaacacttcgatcattt

SEQ ID NO: 590236 - DNA, 33 bp, Homo sapien
gagaactggggatatgcaacacttcgatcattt

SEQ ID NO: 590237 - DNA, 33 bp, Homo sapien
agcaaagacagttgaacaatcttcaaatacctc

SEQ ID NO: 590238 - DNA, 33 bp, Homo sapien
agcaaagacagttgaataatcttcaaatacctc

SEQ ID NO: 590239 - DNA, 33 bp, Homo sapien
ggagtgtgttttgaggcatataagccatttgtc

SEQ ID NO: 590240 - DNA, 33 bp, Homo sapien
ggagtgtgttttgaggtatataagccatttgtc

SEQ ID NO: 590241 - DNA, 33 bp, Homo sapien
cactggtgcagttctccgaattttggtgtcatt

SEQ ID NO: 590242 - DNA, 33 bp, Homo sapien
cactggtgcagttctctgaattttggtgtcatt

SEQ ID NO: 590243 - DNA, 33 bp, Homo sapien
tgacacccacagagcacacatgtggccctcaag

SEQ ID NO: 590244 - DNA, 33 bp, Homo sapien
tgacacccacagagcatacatgtggccctcaag

SEQ ID NO: 590245 - DNA, 33 bp, Homo sapien
accacatggacactgcggagggccaggattctt

SEQ ID NO: 590246 - DNA, 33 bp, Homo sapien
accacatggacactgctgagggccaggattctt

SEQ ID NO: 590247 - DNA, 33 bp, Homo sapien
actggcagatgtactaaaaaatcttctaccaag

SEQ ID NO: 590248 - DNA, 33 bp, Homo sapien
actggcagatgtactagaaaatcttctaccaag

SEQ ID NO: 590249 - DNA, 33 bp, Homo sapien
cagaatcaagatcgtcactataaccatgtcacc

SEQ ID NO: 590250 - DNA, 33 bp, Homo sapien
cagaatcaagatcgtcgctataaccatgtcacc

SEQ ID NO: 590251 - DNA, 33 bp, Homo sapien
ctgttccactaaggacactgcttactcaggtga

SEQ ID NO: 590252 - DNA, 33 bp, Homo sapien
ctgttccactaaggaccctgcttactcaggtga

SEQ ID NO: 590253 - DNA, 33 bp, Homo sapien
aatgacctcaattaagcactttgtccaatgcta

SEQ ID NO: 590254 - DNA, 33 bp, Homo sapien
aatgacctcaattaagtactttgtccaatgcta

SEQ ID NO: 590255 - DNA, 33 bp, Homo sapien
ggattctgaaccaaagcctatagatcctatgtt

SEQ ID NO: 590256 - DNA, 33 bp, Homo sapien
ggattctgaaccaaagtctatagatcctatgtt

SEQ ID NO: 590257 - DNA, 33 bp, Homo sapien
gcttggtattagttgacagcaggatacagattc

SEQ ID NO: 590258 - DNA, 33 bp, Homo sapien
gcttggtattagttgatagcaggatacagattc

SEQ ID NO: 590259 - DNA, 33 bp, Homo sapien
aagacttaggaatagcaatcatgggtcccaggg

SEQ ID NO: 590260 - DNA, 33 bp, Homo sapien
aagacttaggaatagcgatcatgggtcccaggg

SEQ ID NO: 590261 - DNA, 33 bp, Homo sapien
attattagctcttgataaggctttggcagaatt

SEQ ID NO: 590262 - DNA, 33 bp, Homo sapien
attattagctcttgatgaggctttggcagaatt

SEQ ID NO: 590263 - DNA, 33 bp, Homo sapien
ggactcacgtgatgtccctatcagggttcctct

SEQ ID NO: 590264 - DNA, 33 bp, Homo sapien
ggactcacgtgatgtctctatcagggttcctct

SEQ ID NO: 590265 - DNA, 33 bp, Homo sapien
agaaatagcagcgatccgaaattgactgccagt

SEQ ID NO: 590266 - DNA, 33 bp, Homo sapien
agaaatagcagcgatctgaaattgactgccagt

SEQ ID NO: 590267 - DNA, 33 bp, Homo sapien
aaacagcggacaccacaatcaatactgatggca

SEQ ID NO: 590268 - DNA, 33 bp, Homo sapien
aaacagcggacaccacgatcaatactgatggca

SEQ ID NO: 590269 - DNA, 33 bp, Homo sapien
atacatggtcgctgggaaagagatactgtgaag

SEQ ID NO: 590270 - DNA, 33 bp, Homo sapien
atacatggtcgctggggaagagatactgtgaag

SEQ ID NO: 590271 - DNA, 33 bp, Homo sapien
ctgtactgttgtgtaggacattccagagacgta

SEQ ID NO: 590272 - DNA, 33 bp, Homo sapien
ctgtactgttgtgtagtacattccagagacgta

SEQ ID NO: 590273 - DNA, 33 bp, Homo sapien
tcaccttctctgaagcaaacacagaaaatcagt

SEQ ID NO: 590274 - DNA, 33 bp, Homo sapien
tcaccttctctgaagcgaacacagaaaatcagt

SEQ ID NO: 590275 - DNA, 33 bp, Homo sapien
acaaccagcatgaaggccacatgcaaaaacaca

SEQ ID NO: 590276 - DNA, 33 bp, Homo sapien
acaaccagcatgaaggtcacatgcaaaaacaca

SEQ ID NO: 590277 - DNA, 33 bp, Homo sapien
ctggctgatggctgctcacagcaggagacctca

SEQ ID NO: 590278 - DNA, 33 bp, Homo sapien
ctggctgatggctgcttacagcaggagacctca

SEQ ID NO: 590279 - DNA, 33 bp, Homo sapien
tctggccagattttcccatatgatgtctatgtt

SEQ ID NO: 590280 - DNA, 33 bp, Homo sapien
tctggccagattttcctatatgatgtctatgtt

SEQ ID NO: 590281 - DNA, 33 bp, Homo sapien
aaaattagcaaaagtaaacactcctcggtagta

SEQ ID NO: 590282 - DNA, 33 bp, Homo sapien
aaaattagcaaaagtagacactcctcggtagta

SEQ ID NO: 590283 - DNA, 33 bp, Homo sapien
catcaagatacctgaaagtgagataaaatacca

SEQ ID NO: 590284 - DNA, 33 bp, Homo sapien
catcaagatacctgaaggtgagataaaatacca

SEQ ID NO: 590285 - DNA, 33 bp, Homo sapien
ggtgttattctacttaggtaagccatcttttct

SEQ ID NO: 590286 - DNA, 33 bp, Homo sapien
ggtgttattctacttatgtaagccatcttttct

SEQ ID NO: 590287 - DNA, 33 bp, Homo sapien
attaattgttaaatcacgctaaaatgtaagatc

SEQ ID NO: 590288 - DNA, 33 bp, Homo sapien
attaattgttaaatcaggctaaaatgtaagatc

SEQ ID NO: 590289 - DNA, 33 bp, Homo sapien
acctctttacagacacaaagctgaagatgctca

SEQ ID NO: 590290 - DNA, 33 bp, Homo sapien
acctctttacagacacgaagctgaagatgctca

SEQ ID NO: 590291 - DNA, 33 bp, Homo sapien
ttgaatccttcttacaaccttctaagatatata

SEQ ID NO: 590292 - DNA, 33 bp, Homo sapien
ttgaatccttcttacagccttctaagatatata

SEQ ID NO: 590293 - DNA, 33 bp, Homo sapien
tataattgattgtaagcataattgattgtaagt

SEQ ID NO: 590294 - DNA, 33 bp, Homo sapien
tataattgattgtaagtataattgattgtaagt

SEQ ID NO: 590295 - DNA, 33 bp, Homo sapien
tctccctgtgtccctaagtggtctttcctcagt

SEQ ID NO: 590296 - DNA, 33 bp, Homo sapien
tctccctgtgtccctacgtggtctttcctcagt

SEQ ID NO: 590297 - DNA, 33 bp, Homo sapien
ttagagaaatagtggaaaactgaaaataaactt

SEQ ID NO: 590298 - DNA, 33 bp, Homo sapien
ttagagaaatagtggataactgaaaataaactt

SEQ ID NO: 590299 - DNA, 33 bp, Homo sapien
tggtagtgaaaataaacagcttcccttcatcaa

SEQ ID NO: 590300 - DNA, 33 bp, Homo sapien
tggtagtgaaaataaagagcttcccttcatcaa

SEQ ID NO: 590301 - DNA, 33 bp, Homo sapien
tagaaccagccactcactaaccagctaaagtac

SEQ ID NO: 590302 - DNA, 33 bp, Homo sapien
tagaaccagccactcattaaccagctaaagtac

SEQ ID NO: 590303 - DNA, 33 bp, Homo sapien
ccagatgccacagttaaattagcaaaagaactc

SEQ ID NO: 590304 - DNA, 33 bp, Homo sapien
ccagatgccacagttatattagcaaaagaactc

SEQ ID NO: 590305 - DNA, 33 bp, Homo sapien
tggtcacctttaccaactgactgactgtttcct

SEQ ID NO: 590306 - DNA, 33 bp, Homo sapien
tggtcacctttaccaattgactgactgtttcct

SEQ ID NO: 590307 - DNA, 33 bp, Homo sapien
ttcagccacaccatggccaggaagtgtgcagac

SEQ ID NO: 590308 - DNA, 33 bp, Homo sapien
ttcagccacaccatgggcaggaagtgtgcagac

SEQ ID NO: 590309 - DNA, 33 bp, Homo sapien
acaggaatgactattacgcctggcaatttattc

SEQ ID NO: 590310 - DNA, 33 bp, Homo sapien
acaggaatgactattatgcctggcaatttattc

SEQ ID NO: 590311 - DNA, 33 bp, Homo sapien
ttgcagggaagcatgacgttgccatgatatgaa

SEQ ID NO: 590312 - DNA, 33 bp, Homo sapien
ttgcagggaagcatgatgttgccatgatatgaa

SEQ ID NO: 590313 - DNA, 33 bp, Homo sapien
aactggttgagtaaatcaggatatatgcgcgca

SEQ ID NO: 590314 - DNA, 33 bp, Homo sapien
aactggttgagtaaattaggatatatgcgcgca

SEQ ID NO: 590315 - DNA, 33 bp, Homo sapien
agccagctgtgaacaccgaaattatggcattag

SEQ ID NO: 590316 - DNA, 33 bp, Homo sapien
agccagctgtgaacactgaaattatggcattag

SEQ ID NO: 590317 - DNA, 33 bp, Homo sapien
gggaatatgaagagaagaaatgtgctatgtaaa

SEQ ID NO: 590318 - DNA, 33 bp, Homo sapien
gggaatatgaagagaataaatgtgctatgtaaa

SEQ ID NO: 590319 - DNA, 33 bp, Homo sapien
acctggattgaactcaaccaaattaaaaagaaa

SEQ ID NO: 590320 - DNA, 33 bp, Homo sapien
acctggattgaactcatccaaattaaaaagaaa

SEQ ID NO: 590321 - DNA, 33 bp, Homo sapien
aagatactctacaataaaatcataagctaaatg

SEQ ID NO: 590322 - DNA, 33 bp, Homo sapien
aagatactctacaatagaatcataagctaaatg

SEQ ID NO: 590323 - DNA, 33 bp, Homo sapien
ctcatgccatgcttcaccaatagtttaaattgc

SEQ ID NO: 590324 - DNA, 33 bp, Homo sapien
ctcatgccatgcttcatcaatagtttaaattgc

SEQ ID NO: 590325 - DNA, 33 bp, Homo sapien
tgtagcgtatctcaaaattaagtcggcatctct

SEQ ID NO: 590326 - DNA, 33 bp, Homo sapien
tgtagcgtatctcaaacttaagtcggcatctct

SEQ ID NO: 590327 - DNA, 33 bp, Homo sapien
atatgaaagggaaagaaataggagtatcctagg

SEQ ID NO: 590328 - DNA, 33 bp, Homo sapien
atatgaaagggaaagacataggagtatcctagg

SEQ ID NO: 590329 - DNA, 33 bp, Homo sapien
tgtcgtaagtttattacaagccaggctacttct

SEQ ID NO: 590330 - DNA, 33 bp, Homo sapien
tgtcgtaagtttattataagccaggctacttct

SEQ ID NO: 590331 - DNA, 33 bp, Homo sapien
aataatcaccatgtgtaaagggcaggatcaaat

SEQ ID NO: 590332 - DNA, 33 bp, Homo sapien
aataatcaccatgtgtcaagggcaggatcaaat

SEQ ID NO: 590333 - DNA, 33 bp, Homo sapien
atgacacagagaagccaccgagtgcaacctaaa

SEQ ID NO: 590334 - DNA, 33 bp, Homo sapien
atgacacagagaagccgccgagtgcaacctaaa

SEQ ID NO: 590335 - DNA, 33 bp, Homo sapien
acaacaagtcccggcaaatgggccctgaaaagc

SEQ ID NO: 590336 - DNA, 33 bp, Homo sapien
acaacaagtcccggcagatgggccctgaaaagc

SEQ ID NO: 590337 - DNA, 33 bp, Homo sapien
aagaaggacattttaacaatcgccttcaatttt

SEQ ID NO: 590338 - DNA, 33 bp, Homo sapien
aagaaggacattttaataatcgccttcaatttt

SEQ ID NO: 590339 - DNA, 33 bp, Homo sapien
gaatacaaagttagcactagtaacatctggtag

SEQ ID NO: 590340 - DNA, 33 bp, Homo sapien
gaatacaaagttagcagtagtaacatctggtag

SEQ ID NO: 590341 - DNA, 33 bp, Homo sapien
aatgtgtgaagggaaactggccacaggataatt

SEQ ID NO: 590342 - DNA, 33 bp, Homo sapien
aatgtgtgaagggaaattggccacaggataatt

SEQ ID NO: 590343 - DNA, 33 bp, Homo sapien
aatcaggctgatagggaataatgtcccaaaaca

SEQ ID NO: 590344 - DNA, 33 bp, Homo sapien
aatcaggctgataggggataatgtcccaaaaca

SEQ ID NO: 590345 - DNA, 33 bp, Homo sapien
tgtggagcgggaagtaaggcatttccgcgaagt

SEQ ID NO: 590346 - DNA, 33 bp, Homo sapien
tgtggagcgggaagtatggcatttccgcgaagt

SEQ ID NO: 590347 - DNA, 33 bp, Homo sapien
agaataaggagattgaccaggttggaggagagg

SEQ ID NO: 590348 - DNA, 33 bp, Homo sapien
agaataaggagattgatcaggttggaggagagg

SEQ ID NO: 590349 - DNA, 33 bp, Homo sapien
ggttacaatgtgaaaacgtcaacccaacgccat

SEQ ID NO: 590350 - DNA, 33 bp, Homo sapien
ggttacaatgtgaaaatgtcaacccaacgccat

SEQ ID NO: 590351 - DNA, 33 bp, Homo sapien
tcactataatcagaatcaacgcatgtagaacca

SEQ ID NO: 590352 - DNA, 33 bp, Homo sapien
tcactataatcagaattaacgcatgtagaacca

SEQ ID NO: 590353 - DNA, 33 bp, Homo sapien
aagtccggttctaagacgatacagctgcccgtc

SEQ ID NO: 590354 - DNA, 33 bp, Homo sapien
aagtccggttctaagatgatacagctgcccgtc

SEQ ID NO: 590355 - DNA, 33 bp, Homo sapien
taacctagagcataacaacccctttctcttttc

SEQ ID NO: 590356 - DNA, 33 bp, Homo sapien
taacctagagcataacgacccctttctcttttc

SEQ ID NO: 590357 - DNA, 33 bp, Homo sapien
ataagctgaaagagacactcaggagagccctga

SEQ ID NO: 590358 - DNA, 33 bp, Homo sapien
ataagctgaaagagacgctcaggagagccctga

SEQ ID NO: 590359 - DNA, 33 bp, Homo sapien
acaactcctgtagctgcattacgacaacctcaa

SEQ ID NO: 590360 - DNA, 33 bp, Homo sapien
acaactcctgtagctggattacgacaacctcaa

SEQ ID NO: 590361 - DNA, 33 bp, Homo sapien
aacggcaagacctcgacgtgatattactccacg

SEQ ID NO: 590362 - DNA, 33 bp, Homo sapien
aacggcaagacctcgatgtgatattactccacg

SEQ ID NO: 590363 - DNA, 33 bp, Homo sapien
gacctcaaactttcagccattatggtcaatcat

SEQ ID NO: 590364 - DNA, 33 bp, Homo sapien
gacctcaaactttcagtcattatggtcaatcat

SEQ ID NO: 590365 - DNA, 33 bp, Homo sapien
agctgcgtaacagaataaaatcatcactccaga

SEQ ID NO: 590366 - DNA, 33 bp, Homo sapien
agctgcgtaacagaatgaaatcatcactccaga

SEQ ID NO: 590367 - DNA, 33 bp, Homo sapien
caaagagcacacaaaacgtctcctttaaacaga

SEQ ID NO: 590368 - DNA, 33 bp, Homo sapien
caaagagcacacaaaatgtctcctttaaacaga

SEQ ID NO: 590369 - DNA, 33 bp, Homo sapien
tgggaggaggataatactaaaagaattaactag

SEQ ID NO: 590370 - DNA, 33 bp, Homo sapien
tgggaggaggataatattaaaagaattaactag

SEQ ID NO: 590371 - DNA, 33 bp, Homo sapien
atgatctctgaactaacagtaatagctaacact

SEQ ID NO: 590372 - DNA, 33 bp, Homo sapien
atgatctctgaactaatagtaatagctaacact

SEQ ID NO: 590373 - DNA, 33 bp, Homo sapien
tgcagccgtggctacaatagcaagttctcaggg

SEQ ID NO: 590374 - DNA, 33 bp, Homo sapien
tgcagccgtggctacagtagcaagttctcaggg

SEQ ID NO: 590375 - DNA, 33 bp, Homo sapien
gttatgcttattggtgcacggtagtatgaaatt

SEQ ID NO: 590376 - DNA, 33 bp, Homo sapien
gttatgcttattggtgtacggtagtatgaaatt

SEQ ID NO: 590377 - DNA, 33 bp, Homo sapien
aatcagatacttgatacgtgaggcagaaaaaaa

SEQ ID NO: 590378 - DNA, 33 bp, Homo sapien
aatcagatacttgatatgtgaggcagaaaaaaa

SEQ ID NO: 590379 - DNA, 33 bp, Homo sapien
acattcaagggcccaactgtatatgcgaaggca

SEQ ID NO: 590380 - DNA, 33 bp, Homo sapien
acattcaagggcccaattgtatatgcgaaggca

SEQ ID NO: 590381 - DNA, 33 bp, Homo sapien
gcagaggaataacaacaaaatatacctgaccca

SEQ ID NO: 590382 - DNA, 33 bp, Homo sapien
gcagaggaataacaaccaaatatacctgaccca

SEQ ID NO: 590383 - DNA, 33 bp, Homo sapien
tttcaataccaggcaacggggatatatgtttgt

SEQ ID NO: 590384 - DNA, 33 bp, Homo sapien
tttcaataccaggcaatggggatatatgtttgt

SEQ ID NO: 590385 - DNA, 33 bp, Homo sapien
aaggctagaaaaaaagaatgagtaatgtgatcg

SEQ ID NO: 590386 - DNA, 33 bp, Homo sapien
aaggctagaaaaaaaggatgagtaatgtgatcg

SEQ ID NO: 590387 - DNA, 33 bp, Homo sapien
accactgcagatgtagaagggcaccctggagaa

SEQ ID NO: 590388 - DNA, 33 bp, Homo sapien
accactgcagatgtaggagggcaccctggagaa

SEQ ID NO: 590389 - DNA, 33 bp, Homo sapien
tcagatcccttattcaaacccatcagtctgcgc

SEQ ID NO: 590390 - DNA, 33 bp, Homo sapien
tcagatcccttattcagacccatcagtctgcgc

SEQ ID NO: 590391 - DNA, 33 bp, Homo sapien
gctgggctcaggagatcaaatggtaaaggggca

SEQ ID NO: 590392 - DNA, 33 bp, Homo sapien
gctgggctcaggagattaaatggtaaaggggca

SEQ ID NO: 590393 - DNA, 33 bp, Homo sapien
tcaccactaacctcaactctaccttatccctaa

SEQ ID NO: 590394 - DNA, 33 bp, Homo sapien
tcaccactaacctcaattctaccttatccctaa

SEQ ID NO: 590395 - DNA, 33 bp, Homo sapien
ttaccatgtactgacaaaacaaaaagacctagc

SEQ ID NO: 590396 - DNA, 33 bp, Homo sapien
ttaccatgtactgacagaacaaaaagacctagc

SEQ ID NO: 590397 - DNA, 33 bp, Homo sapien
atggttctggtggggaacacctttgcctgctta

SEQ ID NO: 590398 - DNA, 33 bp, Homo sapien
atggttctggtggggagcacctttgcctgctta

SEQ ID NO: 590399 - DNA, 33 bp, Homo sapien
ggcaggctgtttctcaatctggctttggggaca

SEQ ID NO: 590400 - DNA, 33 bp, Homo sapien
ggcaggctgtttctcagtctggctttggggaca

SEQ ID NO: 590401 - DNA, 33 bp, Homo sapien
atttcaaaacttcacaatcctcaggcacttagt

SEQ ID NO: 590402 - DNA, 33 bp, Homo sapien
atttcaaaacttcacattcctcaggcacttagt

SEQ ID NO: 590403 - DNA, 33 bp, Homo sapien
caactgtgaatgtttacagggcggtgctttaaa

SEQ ID NO: 590404 - DNA, 33 bp, Homo sapien
caactgtgaatgtttatagggcggtgctttaaa

SEQ ID NO: 590405 - DNA, 33 bp, Homo sapien
acaattgctcctacaaacatcaaatcaaacttt

SEQ ID NO: 590406 - DNA, 33 bp, Homo sapien
acaattgctcctacaaccatcaaatcaaacttt

SEQ ID NO: 590407 - DNA, 33 bp, Homo sapien
tgtggctttttatatacgctgctcgcctgagat

SEQ ID NO: 590408 - DNA, 33 bp, Homo sapien
tgtggctttttatatatgctgctcgcctgagat

SEQ ID NO: 590409 - DNA, 33 bp, Homo sapien
atcttaatgttttctccacctacaactagatac

SEQ ID NO: 590410 - DNA, 33 bp, Homo sapien
atcttaatgttttctctacctacaactagatac

SEQ ID NO: 590411 - DNA, 33 bp, Homo sapien
ctaggtctacacagccgcaaactgcattcagta

SEQ ID NO: 590412 - DNA, 33 bp, Homo sapien
ctaggtctacacagcctcaaactgcattcagta

SEQ ID NO: 590413 - DNA, 33 bp, Homo sapien
gatgcacttttaaatacgttcttcacacctagg

SEQ ID NO: 590414 - DNA, 33 bp, Homo sapien
gatgcacttttaaatatgttcttcacacctagg

SEQ ID NO: 590415 - DNA, 33 bp, Homo sapien
ccaaaagagaaaaatacgcatggatgttcactt

SEQ ID NO: 590416 - DNA, 33 bp, Homo sapien
ccaaaagagaaaaatatgcatggatgttcactt

SEQ ID NO: 590417 - DNA, 33 bp, Homo sapien
taggcgtgagggtccccatgcagcacaaaagca

SEQ ID NO: 590418 - DNA, 33 bp, Homo sapien
taggcgtgagggtccctatgcagcacaaaagca

SEQ ID NO: 590419 - DNA, 33 bp, Homo sapien
ccccagctgggaaacactgagcaagattatgat

SEQ ID NO: 590420 - DNA, 33 bp, Homo sapien
ccccagctgggaaacattgagcaagattatgat

SEQ ID NO: 590421 - DNA, 33 bp, Homo sapien
ttgataagcagggagacaagatactgataataa

SEQ ID NO: 590422 - DNA, 33 bp, Homo sapien
ttgataagcagggagagaagatactgataataa

SEQ ID NO: 590423 - DNA, 33 bp, Homo sapien
aaaatctgactcctaacgatatgaggtttgcat

SEQ ID NO: 590424 - DNA, 33 bp, Homo sapien
aaaatctgactcctaatgatatgaggtttgcat

SEQ ID NO: 590425 - DNA, 33 bp, Homo sapien
cttttgtgcaaagataacagtttctggctggtc

SEQ ID NO: 590426 - DNA, 33 bp, Homo sapien
cttttgtgcaaagataccagtttctggctggtc

SEQ ID NO: 590427 - DNA, 33 bp, Homo sapien
ttggcgaatgtcacaccagtaagattttctggt

SEQ ID NO: 590428 - DNA, 33 bp, Homo sapien
ttggcgaatgtcacactagtaagattttctggt

SEQ ID NO: 590429 - DNA, 33 bp, Homo sapien
aatgaatgtatgaattaaaagcaggggtcctgt

SEQ ID NO: 590430 - DNA, 33 bp, Homo sapien
aatgaatgtatgaattgaaagcaggggtcctgt

SEQ ID NO: 590431 - DNA, 33 bp, Homo sapien
aagtattttttccttaagcaacttttgtgttca

SEQ ID NO: 590432 - DNA, 33 bp, Homo sapien
aagtattttttccttatgcaacttttgtgttca

SEQ ID NO: 590433 - DNA, 33 bp, Homo sapien
tgctctaccagctcaccaagggtcgtcttatca

SEQ ID NO: 590434 - DNA, 33 bp, Homo sapien
tgctctaccagctcactaagggtcgtcttatca

SEQ ID NO: 590435 - DNA, 33 bp, Homo sapien
tttatttaaatgcatgcaattcaaagattgtct

SEQ ID NO: 590436 - DNA, 33 bp, Homo sapien
tttatttaaatgcatgtaattcaaagattgtct

SEQ ID NO: 590437 - DNA, 33 bp, Homo sapien
tattcaatgagaactacgaagaacagccttttt

SEQ ID NO: 590438 - DNA, 33 bp, Homo sapien
tattcaatgagaactatgaagaacagccttttt

SEQ ID NO: 590439 - DNA, 33 bp, Homo sapien
agaacatctgctcaatgaccgtgaggaaggaag

SEQ ID NO: 590440 - DNA, 33 bp, Homo sapien
agaacatctgctcaattaccgtgaggaaggaag

SEQ ID NO: 590441 - DNA, 33 bp, Homo sapien
tggtacaaacgaagaaggtgtttgggagactcc

SEQ ID NO: 590442 - DNA, 33 bp, Homo sapien
tggtacaaacgaagaatgtgtttgggagactcc

SEQ ID NO: 590443 - DNA, 33 bp, Homo sapien
ccaattcacaaatgaaaatcagcttgccctaca

SEQ ID NO: 590444 - DNA, 33 bp, Homo sapien
ccaattcacaaatgaacatcagcttgccctaca

SEQ ID NO: 590445 - DNA, 33 bp, Homo sapien
gaaatttctgttgcaccacttagagtccagagt

SEQ ID NO: 590446 - DNA, 33 bp, Homo sapien
gaaatttctgttgcactacttagagtccagagt

SEQ ID NO: 590447 - DNA, 33 bp, Homo sapien
cagtacagacttctcaaggcgctttgaacacaa

SEQ ID NO: 590448 - DNA, 33 bp, Homo sapien
cagtacagacttctcagggcgctttgaacacaa

SEQ ID NO: 590449 - DNA, 33 bp, Homo sapien
atctcatgttaaccaacggtgcctagtggaacc

SEQ ID NO: 590450 - DNA, 33 bp, Homo sapien
atctcatgttaaccaatggtgcctagtggaacc

SEQ ID NO: 590451 - DNA, 33 bp, Homo sapien
ctctctcaggacatacacagaaaagctgtacga

SEQ ID NO: 590452 - DNA, 33 bp, Homo sapien
ctctctcaggacatacgcagaaaagctgtacga

SEQ ID NO: 590453 - DNA, 33 bp, Homo sapien
ctttttatgtgaagtcactctaaatattcaagg

SEQ ID NO: 590454 - DNA, 33 bp, Homo sapien
ctttttatgtgaagtcgctctaaatattcaagg

SEQ ID NO: 590455 - DNA, 33 bp, Homo sapien
gggcataaagcacatacgatgaaaattctcctt

SEQ ID NO: 590456 - DNA, 33 bp, Homo sapien
gggcataaagcacataggatgaaaattctcctt

SEQ ID NO: 590457 - DNA, 33 bp, Homo sapien
agctcggcttgattcacgtgctatataaaaaaa

SEQ ID NO: 590458 - DNA, 33 bp, Homo sapien
agctcggcttgattcatgtgctatataaaaaaa

SEQ ID NO: 590459 - DNA, 33 bp, Homo sapien
gcctgacccctgcaataaaacaatcagacaatc

SEQ ID NO: 590460 - DNA, 33 bp, Homo sapien
gcctgacccctgcaatgaaacaatcagacaatc

SEQ ID NO: 590461 - DNA, 33 bp, Homo sapien
cccatctggaagctaccgaatccagatctttgt

SEQ ID NO: 590462 - DNA, 33 bp, Homo sapien
cccatctggaagctactgaatccagatctttgt

SEQ ID NO: 590463 - DNA, 33 bp, Homo sapien
cccccaagaagtatcaaaactgggcaggtccgg

SEQ ID NO: 590464 - DNA, 33 bp, Homo sapien
cccccaagaagtatcacaactgggcaggtccgg

SEQ ID NO: 590465 - DNA, 33 bp, Homo sapien
aagatgtggattttgaaggtgaatcaatggggc

SEQ ID NO: 590466 - DNA, 33 bp, Homo sapien
aagatgtggattttgacggtgaatcaatggggc

SEQ ID NO: 590467 - DNA, 33 bp, Homo sapien
atgcctcaatttcaaacagataaagtttatcat

SEQ ID NO: 590468 - DNA, 33 bp, Homo sapien
atgcctcaatttcaaatagataaagtttatcat

SEQ ID NO: 590469 - DNA, 33 bp, Homo sapien
ctgaaaatttggaaataaagtgtggattatagg

SEQ ID NO: 590470 - DNA, 33 bp, Homo sapien
ctgaaaatttggaaatgaagtgtggattatagg

SEQ ID NO: 590471 - DNA, 33 bp, Homo sapien
gattgcataaaaacgcgccagatgatttttatt

SEQ ID NO: 590472 - DNA, 33 bp, Homo sapien
gattgcataaaaacgctccagatgatttttatt

SEQ ID NO: 590473 - DNA, 33 bp, Homo sapien
ctagggcatttccgaaacaagtatctacctcct

SEQ ID NO: 590474 - DNA, 33 bp, Homo sapien
ctagggcatttccgaatcaagtatctacctcct

SEQ ID NO: 590475 - DNA, 33 bp, Homo sapien
ccaactttcaagtttacatggcatttttatatc

SEQ ID NO: 590476 - DNA, 33 bp, Homo sapien
ccaactttcaagtttatatggcatttttatatc

SEQ ID NO: 590477 - DNA, 33 bp, Homo sapien
aaaacactctcagggcaaccacacaccaatccc

SEQ ID NO: 590478 - DNA, 33 bp, Homo sapien
aaaacactctcagggcgaccacacaccaatccc

SEQ ID NO: 590479 - DNA, 33 bp, Homo sapien
aggctggagtacaataacacgatcatggtcgct

SEQ ID NO: 590480 - DNA, 33 bp, Homo sapien
aggctggagtacaatagcacgatcatggtcgct

SEQ ID NO: 590481 - DNA, 33 bp, Homo sapien
gcccagggagtctctacggcctgcagaagggaa

SEQ ID NO: 590482 - DNA, 33 bp, Homo sapien
gcccagggagtctctagggcctgcagaagggaa

SEQ ID NO: 590483 - DNA, 33 bp, Homo sapien
ggtggattacctcttacgctccaagtagcaagt

SEQ ID NO: 590484 - DNA, 33 bp, Homo sapien
ggtggattacctcttatgctccaagtagcaagt

SEQ ID NO: 590485 - DNA, 33 bp, Homo sapien
aagtaactggttaagacgaggtcatcctggatt

SEQ ID NO: 590486 - DNA, 33 bp, Homo sapien
aagtaactggttaagatgaggtcatcctggatt

SEQ ID NO: 590487 - DNA, 33 bp, Homo sapien
aatttattccacatcactcactgagattctcca

SEQ ID NO: 590488 - DNA, 33 bp, Homo sapien
aatttattccacatcattcactgagattctcca

SEQ ID NO: 590489 - DNA, 33 bp, Homo sapien
tattgagacttgctctcacccagccaaagtcaa

SEQ ID NO: 590490 - DNA, 33 bp, Homo sapien
tattgagacttgctcttacccagccaaagtcaa

SEQ ID NO: 590491 - DNA, 33 bp, Homo sapien
cttgagtaaagtcacaaataaagcttacactag

SEQ ID NO: 590492 - DNA, 33 bp, Homo sapien
cttgagtaaagtcacagataaagcttacactag

SEQ ID NO: 590493 - DNA, 33 bp, Homo sapien
agcttacactagaacccgggaactttgatcctg

SEQ ID NO: 590494 - DNA, 33 bp, Homo sapien
agcttacactagaacctgggaactttgatcctg

SEQ ID NO: 590495 - DNA, 33 bp, Homo sapien
agtaaatatcacaaaacaaagggcctgaacgag

SEQ ID NO: 590496 - DNA, 33 bp, Homo sapien
agtaaatatcacaaaataaagggcctgaacgag

SEQ ID NO: 590497 - DNA, 33 bp, Homo sapien
tcacaaacacatgctgcacctttttagctctca

SEQ ID NO: 590498 - DNA, 33 bp, Homo sapien
tcacaaacacatgctgtacctttttagctctca

SEQ ID NO: 590499 - DNA, 33 bp, Homo sapien
tttcatggtggtgccacgtacacattcgagttg

SEQ ID NO: 590500 - DNA, 33 bp, Homo sapien
tttcatggtggtgccatgtacacattcgagttg

SEQ ID NO: 590501 - DNA, 33 bp, Homo sapien
cacacagaactgcataaaaagttgatattggta

SEQ ID NO: 590502 - DNA, 33 bp, Homo sapien
cacacagaactgcatagaaagttgatattggta

SEQ ID NO: 590503 - DNA, 33 bp, Homo sapien
gagatgactaagtatcaatcctggactagaagg

SEQ ID NO: 590504 - DNA, 33 bp, Homo sapien
gagatgactaagtatcgatcctggactagaagg

SEQ ID NO: 590505 - DNA, 33 bp, Homo sapien
gtatctcattattggcaagtaggacgagtttct

SEQ ID NO: 590506 - DNA, 33 bp, Homo sapien
gtatctcattattggcgagtaggacgagtttct

SEQ ID NO: 590507 - DNA, 33 bp, Homo sapien
taatgagatacaatgacgccagtggtggaagag

SEQ ID NO: 590508 - DNA, 33 bp, Homo sapien
taatgagatacaatgatgccagtggtggaagag

SEQ ID NO: 590509 - DNA, 33 bp, Homo sapien
actatcataatgaaataaaactcacaacaaagg

SEQ ID NO: 590510 - DNA, 33 bp, Homo sapien
actatcataatgaaatgaaactcacaacaaagg

SEQ ID NO: 590511 - DNA, 33 bp, Homo sapien
catccatgcatttgcccattcatctatccatcc

SEQ ID NO: 590512 - DNA, 33 bp, Homo sapien
catccatgcatttgcctattcatctatccatcc

SEQ ID NO: 590513 - DNA, 33 bp, Homo sapien
aggatgctcattggtaactcgtgcaaaggatca

SEQ ID NO: 590514 - DNA, 33 bp, Homo sapien
aggatgctcattggtagctcgtgcaaaggatca

SEQ ID NO: 590515 - DNA, 33 bp, Homo sapien
gcctgctggcgcaacaaaggcttgccatctctg

SEQ ID NO: 590516 - DNA, 33 bp, Homo sapien
gcctgctggcgcaacagaggcttgccatctctg

SEQ ID NO: 590517 - DNA, 33 bp, Homo sapien
aggctaaactccctcaggtgccaaacagatatt

SEQ ID NO: 590518 - DNA, 33 bp, Homo sapien
aggctaaactccctcatgtgccaaacagatatt

SEQ ID NO: 590519 - DNA, 33 bp, Homo sapien
atcttcagaagctacactggtgcctgaacagat

SEQ ID NO: 590520 - DNA, 33 bp, Homo sapien
atcttcagaagctacattggtgcctgaacagat

SEQ ID NO: 590521 - DNA, 33 bp, Homo sapien
agacatatctgtggccaaaaaacataaaaaaat

SEQ ID NO: 590522 - DNA, 33 bp, Homo sapien
agacatatctgtggcccaaaaacataaaaaaat

SEQ ID NO: 590523 - DNA, 33 bp, Homo sapien
cctatttaccccacaacagcccatctcgaacat

SEQ ID NO: 590524 - DNA, 33 bp, Homo sapien
cctatttaccccacaatagcccatctcgaacat

SEQ ID NO: 590525 - DNA, 33 bp, Homo sapien
aatcaggtgattccaccgtacttcaaaccctca

SEQ ID NO: 590526 - DNA, 33 bp, Homo sapien
aatcaggtgattccactgtacttcaaaccctca

SEQ ID NO: 590527 - DNA, 33 bp, Homo sapien
agaagataatagagtacgccattgaacttcaat

SEQ ID NO: 590528 - DNA, 33 bp, Homo sapien
agaagataatagagtatgccattgaacttcaat

SEQ ID NO: 590529 - DNA, 33 bp, Homo sapien
aacagttgcatgtgcacaatcagcacaatcctc

SEQ ID NO: 590530 - DNA, 33 bp, Homo sapien
aacagttgcatgtgcagaatcagcacaatcctc

SEQ ID NO: 590531 - DNA, 33 bp, Homo sapien
caactgattttgattaacctggcgccaaataaa

SEQ ID NO: 590532 - DNA, 33 bp, Homo sapien
caactgattttgattaccctggcgccaaataaa

SEQ ID NO: 590533 - DNA, 33 bp, Homo sapien
tatacgacagtggcccaataacatacagtggag

SEQ ID NO: 590534 - DNA, 33 bp, Homo sapien
tatacgacagtggccccataacatacagtggag

SEQ ID NO: 590535 - DNA, 33 bp, Homo sapien
atacaaaattgggagggaactgctatgaggtaa

SEQ ID NO: 590536 - DNA, 33 bp, Homo sapien
atacaaaattgggaggtaactgctatgaggtaa

SEQ ID NO: 590537 - DNA, 33 bp, Homo sapien
ctgcctcagaaaaaggaacacgagagagacagg

SEQ ID NO: 590538 - DNA, 33 bp, Homo sapien
ctgcctcagaaaaagggacacgagagagacagg

SEQ ID NO: 590539 - DNA, 33 bp, Homo sapien
atgctaggtgaaagaacgtagatttgaaaggct

SEQ ID NO: 590540 - DNA, 33 bp, Homo sapien
atgctaggtgaaagaaggtagatttgaaaggct

SEQ ID NO: 590541 - DNA, 33 bp, Homo sapien
aggtaggaagcaaatgcaaactcataattttca

SEQ ID NO: 590542 - DNA, 33 bp, Homo sapien
aggtaggaagcaaatggaaactcataattttca

SEQ ID NO: 590543 - DNA, 33 bp, Homo sapien
agtcatgatactttacacatcttctcctgatca

SEQ ID NO: 590544 - DNA, 33 bp, Homo sapien
agtcatgatactttacgcatcttctcctgatca

SEQ ID NO: 590545 - DNA, 33 bp, Homo sapien
ttgcttttcaaaacaacgtttgctcttccctga

SEQ ID NO: 590546 - DNA, 33 bp, Homo sapien
ttgcttttcaaaacaaggtttgctcttccctga

SEQ ID NO: 590547 - DNA, 33 bp, Homo sapien
ctttctatggatattacgagctctctagttgat

SEQ ID NO: 590548 - DNA, 33 bp, Homo sapien
ctttctatggatattatgagctctctagttgat

SEQ ID NO: 590549 - DNA, 33 bp, Homo sapien
tgaggccaaaatccacaagacaaaggaagacac

SEQ ID NO: 590550 - DNA, 33 bp, Homo sapien
tgaggccaaaatccacgagacaaaggaagacac

SEQ ID NO: 590551 - DNA, 33 bp, Homo sapien
ataagagagtgcttcacgttcttagcaaatatt

SEQ ID NO: 590552 - DNA, 33 bp, Homo sapien
ataagagagtgcttcatgttcttagcaaatatt

SEQ ID NO: 590553 - DNA, 33 bp, Homo sapien
ggcttttgaattaaccccatccatcaaagacca

SEQ ID NO: 590554 - DNA, 33 bp, Homo sapien
ggcttttgaattaacctcatccatcaaagacca

SEQ ID NO: 590555 - DNA, 33 bp, Homo sapien
gcttaatcttttcacaggtttttctcctagaga

SEQ ID NO: 590556 - DNA, 33 bp, Homo sapien
gcttaatcttttcacatgtttttctcctagaga

SEQ ID NO: 590557 - DNA, 33 bp, Homo sapien
gacacaaagcctctacaacactgaggcctcccc

SEQ ID NO: 590558 - DNA, 33 bp, Homo sapien
gacacaaagcctctaccacactgaggcctcccc

SEQ ID NO: 590559 - DNA, 33 bp, Homo sapien
cagtgtaaagacaaagcaggtaaaatacaggag

SEQ ID NO: 590560 - DNA, 33 bp, Homo sapien
cagtgtaaagacaaagtaggtaaaatacaggag

SEQ ID NO: 590561 - DNA, 33 bp, Homo sapien
ctgtgtattttccagcactcattctggtctgga

SEQ ID NO: 590562 - DNA, 33 bp, Homo sapien
ctgtgtattttccagcgctcattctggtctgga

SEQ ID NO: 590563 - DNA, 33 bp, Homo sapien
tcatcagccaagagcaaaagggcctaacactgt

SEQ ID NO: 590564 - DNA, 33 bp, Homo sapien
tcatcagccaagagcagaagggcctaacactgt

SEQ ID NO: 590565 - DNA, 33 bp, Homo sapien
atctctccaggaaacacacagaagccatctccg

SEQ ID NO: 590566 - DNA, 33 bp, Homo sapien
atctctccaggaaacatacagaagccatctccg

SEQ ID NO: 590567 - DNA, 33 bp, Homo sapien
cagctaaggaaagaagaacatagagcggaaccc

SEQ ID NO: 590568 - DNA, 33 bp, Homo sapien
cagctaaggaaagaagcacatagagcggaaccc

SEQ ID NO: 590569 - DNA, 33 bp, Homo sapien
taccgggaagaatgcaactaacatcagctaagg

SEQ ID NO: 590570 - DNA, 33 bp, Homo sapien
taccgggaagaatgcagctaacatcagctaagg

SEQ ID NO: 590571 - DNA, 33 bp, Homo sapien
atctattccaaattcccaataagaacccagagg

SEQ ID NO: 590572 - DNA, 33 bp, Homo sapien
atctattccaaattcctaataagaacccagagg

SEQ ID NO: 590573 - DNA, 33 bp, Homo sapien
cttcaaactgtatgagacattgggaatcatcta

SEQ ID NO: 590574 - DNA, 33 bp, Homo sapien
cttcaaactgtatgaggcattgggaatcatcta

SEQ ID NO: 590575 - DNA, 33 bp, Homo sapien
ataatttgatgaatgaatatcaatgtgtcacta

SEQ ID NO: 590576 - DNA, 33 bp, Homo sapien
ataatttgatgaatgagtatcaatgtgtcacta

SEQ ID NO: 590577 - DNA, 33 bp, Homo sapien
tgtgttcagatgtatacgtaagaaaattattca

SEQ ID NO: 590578 - DNA, 33 bp, Homo sapien
tgtgttcagatgtatatgtaagaaaattattca

SEQ ID NO: 590579 - DNA, 33 bp, Homo sapien
tttgattcacatgctacaattgctgacaagttt

SEQ ID NO: 590580 - DNA, 33 bp, Homo sapien
tttgattcacatgctataattgctgacaagttt

SEQ ID NO: 590581 - DNA, 33 bp, Homo sapien
tagggacaggaaggaaatagacataattgcaca

SEQ ID NO: 590582 - DNA, 33 bp, Homo sapien
tagggacaggaaggaagtagacataattgcaca

SEQ ID NO: 590583 - DNA, 33 bp, Homo sapien
gaaccatgtggccttaccttcagttccttccac

SEQ ID NO: 590584 - DNA, 33 bp, Homo sapien
gaaccatgtggccttatcttcagttccttccac

SEQ ID NO: 590585 - DNA, 33 bp, Homo sapien
ttgaagttgcaaagaaagcatcggcctcacata

SEQ ID NO: 590586 - DNA, 33 bp, Homo sapien
ttgaagttgcaaagaacgcatcggcctcacata

SEQ ID NO: 590587 - DNA, 33 bp, Homo sapien
gtaatttagggcttcaagaatggatgaaacatg

SEQ ID NO: 590588 - DNA, 33 bp, Homo sapien
gtaatttagggcttcacgaatggatgaaacatg

SEQ ID NO: 590589 - DNA, 33 bp, Homo sapien
cagtaaaggagcttaaccaagcaagagagacag

SEQ ID NO: 590590 - DNA, 33 bp, Homo sapien
cagtaaaggagcttaatcaagcaagagagacag

SEQ ID NO: 590591 - DNA, 33 bp, Homo sapien
gtagctttaactcttggaagaaccatcaaactg

SEQ ID NO: 590592 - DNA, 33 bp, Homo sapien
gtagctttaactcttgtaagaaccatcaaactg

SEQ ID NO: 590593 - DNA, 33 bp, Homo sapien
tgttcacaaatatatacgtttattgctcgatta

SEQ ID NO: 590594 - DNA, 33 bp, Homo sapien
tgttcacaaatatataggtttattgctcgatta

SEQ ID NO: 590595 - DNA, 33 bp, Homo sapien
agcttccctgagctaacgtggttctgcttgtgt

SEQ ID NO: 590596 - DNA, 33 bp, Homo sapien
agcttccctgagctaatgtggttctgcttgtgt

SEQ ID NO: 590597 - DNA, 33 bp, Homo sapien
agaggtttcagagagaatatggtgctactgaca

SEQ ID NO: 590598 - DNA, 33 bp, Homo sapien
agaggtttcagagagagtatggtgctactgaca

SEQ ID NO: 590599 - DNA, 33 bp, Homo sapien
tcaggaaagcctgctacagtgcaaatatttgga

SEQ ID NO: 590600 - DNA, 33 bp, Homo sapien
tcaggaaagcctgctagagtgcaaatatttgga

SEQ ID NO: 590601 - DNA, 33 bp, Homo sapien
tgctgttttccaaatgaagattaattcagggtt

SEQ ID NO: 590602 - DNA, 33 bp, Homo sapien
tgctgttttccaaatgtagattaattcagggtt

SEQ ID NO: 590603 - DNA, 33 bp, Homo sapien
ctttctgtttgaatgaatcacatcccttccctc

SEQ ID NO: 590604 - DNA, 33 bp, Homo sapien
ctttctgtttgaatgagtcacatcccttccctc

SEQ ID NO: 590605 - DNA, 33 bp, Homo sapien
gacaggttattatttacatcctcgtaatgccga

SEQ ID NO: 590606 - DNA, 33 bp, Homo sapien
gacaggttattatttatatcctcgtaatgccga

SEQ ID NO: 590607 - DNA, 33 bp, Homo sapien
gactaagacaaatccacctctattctcaaggaa

SEQ ID NO: 590608 - DNA, 33 bp, Homo sapien
gactaagacaaatccatctctattctcaaggaa

SEQ ID NO: 590609 - DNA, 33 bp, Homo sapien
tggggattcatatgtacgggttgtttcaaaata

SEQ ID NO: 590610 - DNA, 33 bp, Homo sapien
tggggattcatatgtatgggttgtttcaaaata

SEQ ID NO: 590611 - DNA, 33 bp, Homo sapien
atgaattaaatgtcataagaccgtctagtgctt

SEQ ID NO: 590612 - DNA, 33 bp, Homo sapien
atgaattaaatgtcatcagaccgtctagtgctt

SEQ ID NO: 590613 - DNA, 33 bp, Homo sapien
gttgctgagttgcttccagtttttgaagagggg

SEQ ID NO: 590614 - DNA, 33 bp, Homo sapien
gttgctgagttgcttctagtttttgaagagggg

SEQ ID NO: 590615 - DNA, 33 bp, Homo sapien
acaaacctgctagagtcactatcaactcatatc

SEQ ID NO: 590616 - DNA, 33 bp, Homo sapien
acaaacctgctagagtgactatcaactcatatc

SEQ ID NO: 590617 - DNA, 33 bp, Homo sapien
ctgcaactgaaagagacaaaagggaatcacacc

SEQ ID NO: 590618 - DNA, 33 bp, Homo sapien
ctgcaactgaaagagagaaaagggaatcacacc

SEQ ID NO: 590619 - DNA, 33 bp, Homo sapien
tttatttcctttagccccagataatgttaaaat

SEQ ID NO: 590620 - DNA, 33 bp, Homo sapien
tttatttcctttagcctcagataatgttaaaat

SEQ ID NO: 590621 - DNA, 33 bp, Homo sapien
acacaatgctgcctggcaatggctaagctcacg

SEQ ID NO: 590622 - DNA, 33 bp, Homo sapien
acacaatgctgcctggtaatggctaagctcacg

SEQ ID NO: 590623 - DNA, 33 bp, Homo sapien
gcacaattaatgttaccgactgctatgggtcaa

SEQ ID NO: 590624 - DNA, 33 bp, Homo sapien
gcacaattaatgttactgactgctatgggtcaa

SEQ ID NO: 590625 - DNA, 33 bp, Homo sapien
tttggttttcctcattcaatgaatctgttcctc

SEQ ID NO: 590626 - DNA, 33 bp, Homo sapien
tttggttttcctcatttaatgaatctgttcctc

SEQ ID NO: 590627 - DNA, 33 bp, Homo sapien
gacaatctatgtattaaccagttggtgacagaa

SEQ ID NO: 590628 - DNA, 33 bp, Homo sapien
gacaatctatgtattagccagttggtgacagaa

SEQ ID NO: 590629 - DNA, 33 bp, Homo sapien
catatcagcctgtaccactctcacaaagtgacc

SEQ ID NO: 590630 - DNA, 33 bp, Homo sapien
catatcagcctgtaccgctctcacaaagtgacc

SEQ ID NO: 590631 - DNA, 33 bp, Homo sapien
ttgcctattttgttaacgttatctccatctttt

SEQ ID NO: 590632 - DNA, 33 bp, Homo sapien
ttgcctattttgttaatgttatctccatctttt

SEQ ID NO: 590633 - DNA, 33 bp, Homo sapien
ctttcaactcaactgacaggccacaagcaacca

SEQ ID NO: 590634 - DNA, 33 bp, Homo sapien
ctttcaactcaactgataggccacaagcaacca

SEQ ID NO: 590635 - DNA, 33 bp, Homo sapien
gcttgaagaaccagaaaaacaatttcaggagac

SEQ ID NO: 590636 - DNA, 33 bp, Homo sapien
gcttgaagaaccagaagaacaatttcaggagac

SEQ ID NO: 590637 - DNA, 33 bp, Homo sapien
ctttattcttcgtatacctagtaaacttgcttt

SEQ ID NO: 590638 - DNA, 33 bp, Homo sapien
ctttattcttcgtatatctagtaaacttgcttt

SEQ ID NO: 590639 - DNA, 33 bp, Homo sapien
aaaataaccttcaagaaagatggaaataatctt

SEQ ID NO: 590640 - DNA, 33 bp, Homo sapien
aaaataaccttcaagacagatggaaataatctt

SEQ ID NO: 590641 - DNA, 33 bp, Homo sapien
ctactagggataactaagtaagtctgcattgag

SEQ ID NO: 590642 - DNA, 33 bp, Homo sapien
ctactagggataactaggtaagtctgcattgag

SEQ ID NO: 590643 - DNA, 33 bp, Homo sapien
aaggtattctaaggccacagttcatatacatgg

SEQ ID NO: 590644 - DNA, 33 bp, Homo sapien
aaggtattctaaggccgcagttcatatacatgg

SEQ ID NO: 590645 - DNA, 33 bp, Homo sapien
gagagtttcaccataaatcatataggcaaggca

SEQ ID NO: 590646 - DNA, 33 bp, Homo sapien
gagagtttcaccataagtcatataggcaaggca

SEQ ID NO: 590647 - DNA, 33 bp, Homo sapien
agattcatgctgccacaatggaatgaccacact

SEQ ID NO: 590648 - DNA, 33 bp, Homo sapien
agattcatgctgccacgatggaatgaccacact

SEQ ID NO: 590649 - DNA, 33 bp, Homo sapien
cacgaactgaaatgaacgatcacagatggaatg

SEQ ID NO: 590650 - DNA, 33 bp, Homo sapien
cacgaactgaaatgaaggatcacagatggaatg

SEQ ID NO: 590651 - DNA, 33 bp, Homo sapien
actaactataacctgaagaaccagataaatacc

SEQ ID NO: 590652 - DNA, 33 bp, Homo sapien
actaactataacctgaggaaccagataaatacc

SEQ ID NO: 590653 - DNA, 33 bp, Homo sapien
cagatgggtgaatgaacgctgctgcttcttgga

SEQ ID NO: 590654 - DNA, 33 bp, Homo sapien
cagatgggtgaatgaatgctgctgcttcttgga

SEQ ID NO: 590655 - DNA, 33 bp, Homo sapien
cataacttgcttggcaccctctgcatcaaaaaa

SEQ ID NO: 590656 - DNA, 33 bp, Homo sapien
cataacttgcttggcatcctctgcatcaaaaaa

SEQ ID NO: 590657 - DNA, 33 bp, Homo sapien
taatattcttatacacaacaggtatggctttgg

SEQ ID NO: 590658 - DNA, 33 bp, Homo sapien
taatattcttatacaccacaggtatggctttgg

SEQ ID NO: 590659 - DNA, 33 bp, Homo sapien
agaaaccagccatttgaatgcgctcaatggaat

SEQ ID NO: 590660 - DNA, 33 bp, Homo sapien
agaaaccagccatttgcatgcgctcaatggaat

SEQ ID NO: 590661 - DNA, 33 bp, Homo sapien
cgctcaatggaataaacaacctgcaaaaattaa

SEQ ID NO: 590662 - DNA, 33 bp, Homo sapien
cgctcaatggaataaataacctgcaaaaattaa

SEQ ID NO: 590663 - DNA, 33 bp, Homo sapien
attgatcaatctggaaccactccttgcttcttt

SEQ ID NO: 590664 - DNA, 33 bp, Homo sapien
attgatcaatctggaatcactccttgcttcttt

SEQ ID NO: 590665 - DNA, 33 bp, Homo sapien
taaactgtttgcattcagaagataaaaatacta

SEQ ID NO: 590666 - DNA, 33 bp, Homo sapien
taaactgtttgcattcggaagataaaaatacta

SEQ ID NO: 590667 - DNA, 33 bp, Homo sapien
taattgtttggatgaacatatctagaacctgta

SEQ ID NO: 590668 - DNA, 33 bp, Homo sapien
taattgtttggatgaatatatctagaacctgta

SEQ ID NO: 590669 - DNA, 33 bp, Homo sapien
attgtagcagaccaaaaaatatatgagttattt

SEQ ID NO: 590670 - DNA, 33 bp, Homo sapien
attgtagcagaccaaagaatatatgagttattt

SEQ ID NO: 590671 - DNA, 33 bp, Homo sapien
caacagtcagttcccacagaaagaaggggaccc

SEQ ID NO: 590672 - DNA, 33 bp, Homo sapien
caacagtcagttcccatagaaagaaggggaccc

SEQ ID NO: 590673 - DNA, 33 bp, Homo sapien
atgtgcataacattccactttatcaatatcccc

SEQ ID NO: 590674 - DNA, 33 bp, Homo sapien
atgtgcataacattccgctttatcaatatcccc

SEQ ID NO: 590675 - DNA, 33 bp, Homo sapien
ataatcaaggaaggtacactcaacttttattgc

SEQ ID NO: 590676 - DNA, 33 bp, Homo sapien
ataatcaaggaaggtatactcaacttttattgc

SEQ ID NO: 590677 - DNA, 33 bp, Homo sapien
ctgcaggtgtcggctgaacttccacatcggtgg

SEQ ID NO: 590678 - DNA, 33 bp, Homo sapien
ctgcaggtgtcggctggacttccacatcggtgg

SEQ ID NO: 590679 - DNA, 33 bp, Homo sapien
ctagtggttctccatgcaatacagaagaccaag

SEQ ID NO: 590680 - DNA, 33 bp, Homo sapien
ctagtggttctccatggaatacagaagaccaag

SEQ ID NO: 590681 - DNA, 33 bp, Homo sapien
gaggtacttaagccaaaagccgtatattctcaa

SEQ ID NO: 590682 - DNA, 33 bp, Homo sapien
gaggtacttaagccaacagccgtatattctcaa

SEQ ID NO: 590683 - DNA, 33 bp, Homo sapien
tattatgatttatccactcaaccaacatgtctg

SEQ ID NO: 590684 - DNA, 33 bp, Homo sapien
tattatgatttatccattcaaccaacatgtctg

SEQ ID NO: 590685 - DNA, 33 bp, Homo sapien
agcggctcatttactcactcctgcaggactcca

SEQ ID NO: 590686 - DNA, 33 bp, Homo sapien
agcggctcatttactcgctcctgcaggactcca

SEQ ID NO: 590687 - DNA, 33 bp, Homo sapien
ttcaggactgcagggacctacgtaaacaggtat

SEQ ID NO: 590688 - DNA, 33 bp, Homo sapien
ttcaggactgcagggatctacgtaaacaggtat

SEQ ID NO: 590689 - DNA, 33 bp, Homo sapien
ggatgaatgggagagaaaaccactcaaggtgaa

SEQ ID NO: 590690 - DNA, 33 bp, Homo sapien
ggatgaatgggagagagaaccactcaaggtgaa

SEQ ID NO: 590691 - DNA, 33 bp, Homo sapien
aaccactcaaggtgaaaagagtggaggatggga

SEQ ID NO: 590692 - DNA, 33 bp, Homo sapien
aaccactcaaggtgaagagagtggaggatggga

SEQ ID NO: 590693 - DNA, 33 bp, Homo sapien
agcttgctggataaagacctatttggaaaggct

SEQ ID NO: 590694 - DNA, 33 bp, Homo sapien
agcttgctggataaaggcctatttggaaaggct

SEQ ID NO: 590695 - DNA, 33 bp, Homo sapien
gaagtgttgaaaactaactattggacactgttt

SEQ ID NO: 590696 - DNA, 33 bp, Homo sapien
gaagtgttgaaaactacctattggacactgttt

SEQ ID NO: 590697 - DNA, 33 bp, Homo sapien
tccccatcacaataaacaggtgtaatactgata

SEQ ID NO: 590698 - DNA, 33 bp, Homo sapien
tccccatcacaataaataggtgtaatactgata

SEQ ID NO: 590699 - DNA, 33 bp, Homo sapien
ggatttcagagggtcacgatggtgccaggctat

SEQ ID NO: 590700 - DNA, 33 bp, Homo sapien
ggatttcagagggtcatgatggtgccaggctat

SEQ ID NO: 590701 - DNA, 33 bp, Homo sapien
ccctgtttcagtacaccaaataaataagcatag

SEQ ID NO: 590702 - DNA, 33 bp, Homo sapien
ccctgtttcagtacactaaataaataagcatag

SEQ ID NO: 590703 - DNA, 33 bp, Homo sapien
gccttttccttggccaaacaaacttcttccaga

SEQ ID NO: 590704 - DNA, 33 bp, Homo sapien
gccttttccttggccacacaaacttcttccaga

SEQ ID NO: 590705 - DNA, 33 bp, Homo sapien
ccctgtgctcatcccgccctttactcagagtat

SEQ ID NO: 590706 - DNA, 33 bp, Homo sapien
ccctgtgctcatcccggcctttactcagagtat

SEQ ID NO: 590707 - DNA, 33 bp, Homo sapien
ttattttttataggtaagttgactcacattagc

SEQ ID NO: 590708 - DNA, 33 bp, Homo sapien
ttattttttataggtatgttgactcacattagc

SEQ ID NO: 590709 - DNA, 33 bp, Homo sapien
ttaaaatattctcttacgcacagaattagattt

SEQ ID NO: 590710 - DNA, 33 bp, Homo sapien
ttaaaatattctcttatgcacagaattagattt

SEQ ID NO: 590711 - DNA, 33 bp, Homo sapien
acatttcagtcaaaaacgcataggtctttagta

SEQ ID NO: 590712 - DNA, 33 bp, Homo sapien
acatttcagtcaaaaatgcataggtctttagta

SEQ ID NO: 590713 - DNA, 33 bp, Homo sapien
cacccataaggcaagacggaaaaccttctggca

SEQ ID NO: 590714 - DNA, 33 bp, Homo sapien
cacccataaggcaagatggaaaaccttctggca

SEQ ID NO: 590715 - DNA, 33 bp, Homo sapien
ctcaactctccattcactatgatcctatgagaa

SEQ ID NO: 590716 - DNA, 33 bp, Homo sapien
ctcaactctccattcattatgatcctatgagaa

SEQ ID NO: 590717 - DNA, 33 bp, Homo sapien
tccgtacatggcctgaacacattaaaaaaggat

SEQ ID NO: 590718 - DNA, 33 bp, Homo sapien
tccgtacatggcctgagcacattaaaaaaggat

SEQ ID NO: 590719 - DNA, 33 bp, Homo sapien
accaggtatcttgacccggaatttcttgaatta

SEQ ID NO: 590720 - DNA, 33 bp, Homo sapien
accaggtatcttgacctggaatttcttgaatta

SEQ ID NO: 590721 - DNA, 33 bp, Homo sapien
agccttcagaactcgacgacaacaaatgtctgt

SEQ ID NO: 590722 - DNA, 33 bp, Homo sapien
agccttcagaactcgatgacaacaaatgtctgt

SEQ ID NO: 590723 - DNA, 33 bp, Homo sapien
gaactgtccagataaaacagccctgtgcggtta

SEQ ID NO: 590724 - DNA, 33 bp, Homo sapien
gaactgtccagataaagcagccctgtgcggtta

SEQ ID NO: 590725 - DNA, 33 bp, Homo sapien
ctccttggctgcattcagaactcctaacaagct

SEQ ID NO: 590726 - DNA, 33 bp, Homo sapien
ctccttggctgcattcggaactcctaacaagct

SEQ ID NO: 590727 - DNA, 33 bp, Homo sapien
ttacagacagaagaaaatgaatggagaatggtt

SEQ ID NO: 590728 - DNA, 33 bp, Homo sapien
ttacagacagaagaaactgaatggagaatggtt

SEQ ID NO: 590729 - DNA, 33 bp, Homo sapien
tcctcctgaatcaaccccactgttccttgccct

SEQ ID NO: 590730 - DNA, 33 bp, Homo sapien
tcctcctgaatcaacctcactgttccttgccct

SEQ ID NO: 590731 - DNA, 33 bp, Homo sapien
gattttccctccttcaagttacttggattttct

SEQ ID NO: 590732 - DNA, 33 bp, Homo sapien
gattttccctccttcaggttacttggattttct

SEQ ID NO: 590733 - DNA, 33 bp, Homo sapien
ttgagaatcacagagacgtctggaaggataaca

SEQ ID NO: 590734 - DNA, 33 bp, Homo sapien
ttgagaatcacagagaggtctggaaggataaca

SEQ ID NO: 590735 - DNA, 33 bp, Homo sapien
gcttctcagtccaaaacctacctagagaaatct

SEQ ID NO: 590736 - DNA, 33 bp, Homo sapien
gcttctcagtccaaaatctacctagagaaatct

SEQ ID NO: 590737 - DNA, 33 bp, Homo sapien
ggacaagcctgaatcacggagaaattaaatcag

SEQ ID NO: 590738 - DNA, 33 bp, Homo sapien
ggacaagcctgaatcatggagaaattaaatcag

SEQ ID NO: 590739 - DNA, 33 bp, Homo sapien
attctctttcatatgccctaaatgcctctgaat

SEQ ID NO: 590740 - DNA, 33 bp, Homo sapien
attctctttcatatgctctaaatgcctctgaat

SEQ ID NO: 590741 - DNA, 33 bp, Homo sapien
tgctttcatataaccaagtctagcttagttagg

SEQ ID NO: 590742 - DNA, 33 bp, Homo sapien
tgctttcatataaccacgtctagcttagttagg

SEQ ID NO: 590743 - DNA, 33 bp, Homo sapien
tggactgtgactcgccactaaagcgtatttttg

SEQ ID NO: 590744 - DNA, 33 bp, Homo sapien
tggactgtgactcgcctctaaagcgtatttttg

SEQ ID NO: 590745 - DNA, 33 bp, Homo sapien
catgtgtctgtagttgcacctgagttccagtgc

SEQ ID NO: 590746 - DNA, 33 bp, Homo sapien
catgtgtctgtagttgtacctgagttccagtgc

SEQ ID NO: 590747 - DNA, 33 bp, Homo sapien
cagttcacaaagttgaggctgaagtgagtggtg

SEQ ID NO: 590748 - DNA, 33 bp, Homo sapien
cagttcacaaagttgatgctgaagtgagtggtg

SEQ ID NO: 590749 - DNA, 33 bp, Homo sapien
atgtatatttgcccccaagtctaaaggataagt

SEQ ID NO: 590750 - DNA, 33 bp, Homo sapien
atgtatatttgcccccgagtctaaaggataagt

SEQ ID NO: 590751 - DNA, 33 bp, Homo sapien
agtaatcagaaaggtaagtttcaaggaatgttg

SEQ ID NO: 590752 - DNA, 33 bp, Homo sapien
agtaatcagaaaggtatgtttcaaggaatgttg

SEQ ID NO: 590753 - DNA, 33 bp, Homo sapien
attttagtagataacccctccatctgggccctt

SEQ ID NO: 590754 - DNA, 33 bp, Homo sapien
attttagtagataacctctccatctgggccctt

SEQ ID NO: 590755 - DNA, 33 bp, Homo sapien
gtaatatggacaagacaattggtgcttataatt

SEQ ID NO: 590756 - DNA, 33 bp, Homo sapien
gtaatatggacaagaccattggtgcttataatt

SEQ ID NO: 590757 - DNA, 33 bp, Homo sapien
ttagcctggcctcaaaccgtggagaatttttta

SEQ ID NO: 590758 - DNA, 33 bp, Homo sapien
ttagcctggcctcaaatcgtggagaatttttta

SEQ ID NO: 590759 - DNA, 33 bp, Homo sapien
ctaaaataacttcttaaatttcaagtgacctta

SEQ ID NO: 590760 - DNA, 33 bp, Homo sapien
ctaaaataacttcttacatttcaagtgacctta

SEQ ID NO: 590761 - DNA, 33 bp, Homo sapien
atgctgggatacaaaacagtacgatggccacat

SEQ ID NO: 590762 - DNA, 33 bp, Homo sapien
atgctgggatacaaaatagtacgatggccacat

SEQ ID NO: 590763 - DNA, 33 bp, Homo sapien
tatgtggtgtattgggaagaaggataatagtct

SEQ ID NO: 590764 - DNA, 33 bp, Homo sapien
tatgtggtgtattggggagaaggataatagtct

SEQ ID NO: 590765 - DNA, 33 bp, Homo sapien
aacacttttgagtttaagaatttcagaaaccag

SEQ ID NO: 590766 - DNA, 33 bp, Homo sapien
aacacttttgagtttaggaatttcagaaaccag

SEQ ID NO: 590767 - DNA, 33 bp, Homo sapien
cttgctcaacttgggacgactggtacgagggag

SEQ ID NO: 590768 - DNA, 33 bp, Homo sapien
cttgctcaacttgggatgactggtacgagggag

SEQ ID NO: 590769 - DNA, 33 bp, Homo sapien
atgtaattacatgaaaaattgttccaagcatac

SEQ ID NO: 590770 - DNA, 33 bp, Homo sapien
atgtaattacatgaaagattgttccaagcatac

SEQ ID NO: 590771 - DNA, 33 bp, Homo sapien
gccacatcctgtccccaagtaaagaaccttact

SEQ ID NO: 590772 - DNA, 33 bp, Homo sapien
gccacatcctgtccccgagtaaagaaccttact

SEQ ID NO: 590773 - DNA, 33 bp, Homo sapien
gtactgattaatgcacaacctactgacattgaa

SEQ ID NO: 590774 - DNA, 33 bp, Homo sapien
gtactgattaatgcacgacctactgacattgaa

SEQ ID NO: 590775 - DNA, 33 bp, Homo sapien
tactattgctgttgcaaaagatctcatcaaaca

SEQ ID NO: 590776 - DNA, 33 bp, Homo sapien
tactattgctgttgcagaagatctcatcaaaca

SEQ ID NO: 590777 - DNA, 33 bp, Homo sapien
ctgttagaacacccaccgtgagagactgggcat

SEQ ID NO: 590778 - DNA, 33 bp, Homo sapien
ctgttagaacacccacggtgagagactgggcat

SEQ ID NO: 590779 - DNA, 33 bp, Homo sapien
ccttcattcagatggaaagaaagagccatgatt

SEQ ID NO: 590780 - DNA, 33 bp, Homo sapien
ccttcattcagatggagagaaagagccatgatt

SEQ ID NO: 590781 - DNA, 33 bp, Homo sapien
atggttacaggtttaagataaaggatacagctc

SEQ ID NO: 590782 - DNA, 33 bp, Homo sapien
atggttacaggtttaatataaaggatacagctc

SEQ ID NO: 590783 - DNA, 33 bp, Homo sapien
agaggaagaggcaaaactatgatagaaagtgga

SEQ ID NO: 590784 - DNA, 33 bp, Homo sapien
agaggaagaggcaaaagtatgatagaaagtgga

SEQ ID NO: 590785 - DNA, 33 bp, Homo sapien
gatgggctcctgcgtcaacgggcaagtaaacat

SEQ ID NO: 590786 - DNA, 33 bp, Homo sapien
gatgggctcctgcgtccacgggcaagtaaacat

SEQ ID NO: 590787 - DNA, 33 bp, Homo sapien
ctcacaagtaagaatcaaggacatttgggtcac

SEQ ID NO: 590788 - DNA, 33 bp, Homo sapien
ctcacaagtaagaatcgaggacatttgggtcac

SEQ ID NO: 590789 - DNA, 33 bp, Homo sapien
aagttactcacacaaaacatggaaaagacaagg

SEQ ID NO: 590790 - DNA, 33 bp, Homo sapien
aagttactcacacaaagcatggaaaagacaagg

SEQ ID NO: 590791 - DNA, 33 bp, Homo sapien
taatttcctacttcaaaggcaatgaatttccca

SEQ ID NO: 590792 - DNA, 33 bp, Homo sapien
taatttcctacttcaagggcaatgaatttccca

SEQ ID NO: 590793 - DNA, 33 bp, Homo sapien
aaaaatttaccttccacgagtttctagtgccag

SEQ ID NO: 590794 - DNA, 33 bp, Homo sapien
aaaaatttaccttccatgagtttctagtgccag

SEQ ID NO: 590795 - DNA, 33 bp, Homo sapien
aaccttcagttctatgcattgacatctttacct

SEQ ID NO: 590796 - DNA, 33 bp, Homo sapien
aaccttcagttctatgtattgacatctttacct

SEQ ID NO: 590797 - DNA, 33 bp, Homo sapien
ctatgcaatctttggcaagttactaagctctct

SEQ ID NO: 590798 - DNA, 33 bp, Homo sapien
ctatgcaatctttggcgagttactaagctctct

SEQ ID NO: 590799 - DNA, 33 bp, Homo sapien
taactcatttgctttgcatattacgttctttga

SEQ ID NO: 590800 - DNA, 33 bp, Homo sapien
taactcatttgctttgtatattacgttctttga

SEQ ID NO: 590801 - DNA, 33 bp, Homo sapien
gtcacggatggtacagaacttgatcccagacag

SEQ ID NO: 590802 - DNA, 33 bp, Homo sapien
gtcacggatggtacagtacttgatcccagacag

SEQ ID NO: 590803 - DNA, 33 bp, Homo sapien
ctcatagtccttggataatcataaaacccacat

SEQ ID NO: 590804 - DNA, 33 bp, Homo sapien
ctcatagtccttggatcatcataaaacccacat

SEQ ID NO: 590805 - DNA, 33 bp, Homo sapien
gcaggtgccagggcttcaagaatacagaaaata

SEQ ID NO: 590806 - DNA, 33 bp, Homo sapien
gcaggtgccagggctttaagaatacagaaaata

SEQ ID NO: 590807 - DNA, 33 bp, Homo sapien
tcaaagaactagcagcagactccccaactctag

SEQ ID NO: 590808 - DNA, 33 bp, Homo sapien
tcaaagaactagcagctgactccccaactctag

SEQ ID NO: 590809 - DNA, 33 bp, Homo sapien
ttcaatggagaagtaaacatggtcaaagaacta

SEQ ID NO: 590810 - DNA, 33 bp, Homo sapien
ttcaatggagaagtaagcatggtcaaagaacta

SEQ ID NO: 590811 - DNA, 33 bp, Homo sapien
gagatccttcttcatgaatggcaaggagaattc

SEQ ID NO: 590812 - DNA, 33 bp, Homo sapien
gagatccttcttcatgcatggcaaggagaattc

SEQ ID NO: 590813 - DNA, 33 bp, Homo sapien
atgctgctcattgtagcatctgcaagccttgta

SEQ ID NO: 590814 - DNA, 33 bp, Homo sapien
atgctgctcattgtagtatctgcaagccttgta

SEQ ID NO: 590815 - DNA, 33 bp, Homo sapien
acttgttagcttgcaaataggttataatttcag

SEQ ID NO: 590816 - DNA, 33 bp, Homo sapien
acttgttagcttgcaagtaggttataatttcag

SEQ ID NO: 590817 - DNA, 33 bp, Homo sapien
gaatggagaaacacgaactaaacatagcaattg

SEQ ID NO: 590818 - DNA, 33 bp, Homo sapien
gaatggagaaacacgagctaaacatagcaattg

SEQ ID NO: 590819 - DNA, 33 bp, Homo sapien
aagcataaaactggcacattcattaaacaagcc

SEQ ID NO: 590820 - DNA, 33 bp, Homo sapien
aagcataaaactggcatattcattaaacaagcc

SEQ ID NO: 590821 - DNA, 33 bp, Homo sapien
tgtgacctaagcgaaacacaattaaattttaaa

SEQ ID NO: 590822 - DNA, 33 bp, Homo sapien
tgtgacctaagcgaaatacaattaaattttaaa

SEQ ID NO: 590823 - DNA, 33 bp, Homo sapien
cgtcagcctcttttcacgatgcttggtaacaca

SEQ ID NO: 590824 - DNA, 33 bp, Homo sapien
cgtcagcctcttttcatgatgcttggtaacaca

SEQ ID NO: 590825 - DNA, 33 bp, Homo sapien
tctaagaaggtctgcaataaggcccatgtttgt

SEQ ID NO: 590826 - DNA, 33 bp, Homo sapien
tctaagaaggtctgcagtaaggcccatgtttgt

SEQ ID NO: 590827 - DNA, 33 bp, Homo sapien
aaacttgatctgaaggacataactaggtagaag

SEQ ID NO: 590828 - DNA, 33 bp, Homo sapien
aaacttgatctgaagggcataactaggtagaag

SEQ ID NO: 590829 - DNA, 33 bp, Homo sapien
ttctgagaagtaaggccatgatgtacatacact

SEQ ID NO: 590830 - DNA, 33 bp, Homo sapien
ttctgagaagtaaggctatgatgtacatacact

SEQ ID NO: 590831 - DNA, 33 bp, Homo sapien
aagttaaccaagacacaggagttggaaaggcgc

SEQ ID NO: 590832 - DNA, 33 bp, Homo sapien
aagttaaccaagacacgggagttggaaaggcgc

SEQ ID NO: 590833 - DNA, 33 bp, Homo sapien
ctccagaccatttgtgaattcttgctctgaaca

SEQ ID NO: 590834 - DNA, 33 bp, Homo sapien
ctccagaccatttgtgcattcttgctctgaaca

SEQ ID NO: 590835 - DNA, 33 bp, Homo sapien
aaaaagtaggtaaatgaagatgtgagtaagcat

SEQ ID NO: 590836 - DNA, 33 bp, Homo sapien
aaaaagtaggtaaatgcagatgtgagtaagcat

SEQ ID NO: 590837 - DNA, 33 bp, Homo sapien
atgaatagcagtgtgacactcaaaatgggtggg

SEQ ID NO: 590838 - DNA, 33 bp, Homo sapien
atgaatagcagtgtgagactcaaaatgggtggg

SEQ ID NO: 590839 - DNA, 33 bp, Homo sapien
gaaacaatcatttgtacggcatagagacctacc

SEQ ID NO: 590840 - DNA, 33 bp, Homo sapien
gaaacaatcatttgtatggcatagagacctacc

SEQ ID NO: 590841 - DNA, 33 bp, Homo sapien
actctcgaaaagcgcaaacaggcttaaaccacg

SEQ ID NO: 590842 - DNA, 33 bp, Homo sapien
actctcgaaaagcgcagacaggcttaaaccacg

SEQ ID NO: 590843 - DNA, 33 bp, Homo sapien
tttgcttctcctttcaaatcttacatgaaggta

SEQ ID NO: 590844 - DNA, 33 bp, Homo sapien
tttgcttctcctttcagatcttacatgaaggta

SEQ ID NO: 590845 - DNA, 33 bp, Homo sapien
aatcagaaaataagaccgagtaatggatgaata

SEQ ID NO: 590846 - DNA, 33 bp, Homo sapien
aatcagaaaataagactgagtaatggatgaata

SEQ ID NO: 590847 - DNA, 33 bp, Homo sapien
ttcatgggtgactacaataatgcaggaaatatt

SEQ ID NO: 590848 - DNA, 33 bp, Homo sapien
ttcatgggtgactacagtaatgcaggaaatatt

SEQ ID NO: 590849 - DNA, 33 bp, Homo sapien
caaatatcaccttctacgtgaacacttgctact

SEQ ID NO: 590850 - DNA, 33 bp, Homo sapien
caaatatcaccttctatgtgaacacttgctact

SEQ ID NO: 590851 - DNA, 33 bp, Homo sapien
caaaccgttttctaacccaagaatctgattcaa

SEQ ID NO: 590852 - DNA, 33 bp, Homo sapien
caaaccgttttctaacgcaagaatctgattcaa

SEQ ID NO: 590853 - DNA, 33 bp, Homo sapien
gccttctcctctcttggagtcaagtcttccttt

SEQ ID NO: 590854 - DNA, 33 bp, Homo sapien
gccttctcctctcttgtagtcaagtcttccttt

SEQ ID NO: 590855 - DNA, 33 bp, Homo sapien
ctataatacaaggctgcaagtaaagatgttcta

SEQ ID NO: 590856 - DNA, 33 bp, Homo sapien
ctataatacaaggctggaagtaaagatgttcta

SEQ ID NO: 590857 - DNA, 33 bp, Homo sapien
acaaaccttagaaaggccaaagggatatccatt

SEQ ID NO: 590858 - DNA, 33 bp, Homo sapien
acaaaccttagaaaggtcaaagggatatccatt

SEQ ID NO: 590859 - DNA, 33 bp, Homo sapien
agaagattcctgaagacgctcatagggcaacat

SEQ ID NO: 590860 - DNA, 33 bp, Homo sapien
agaagattcctgaagatgctcatagggcaacat

SEQ ID NO: 590861 - DNA, 33 bp, Homo sapien
ttgatcccactttctcacttcccatttttgttt

SEQ ID NO: 590862 - DNA, 33 bp, Homo sapien
ttgatcccactttctcgcttcccatttttgttt

SEQ ID NO: 590863 - DNA, 33 bp, Homo sapien
ttgtttaatcattcaactgttgaaggacatctg

SEQ ID NO: 590864 - DNA, 33 bp, Homo sapien
ttgtttaatcattcaattgttgaaggacatctg

SEQ ID NO: 590865 - DNA, 33 bp, Homo sapien
actaatatgccctaacccctttgaaaatttgag

SEQ ID NO: 590866 - DNA, 33 bp, Homo sapien
actaatatgccctaactcctttgaaaatttgag

SEQ ID NO: 590867 - DNA, 33 bp, Homo sapien
tctaaaactaacaagaatattagcttcattgat

SEQ ID NO: 590868 - DNA, 33 bp, Homo sapien
tctaaaactaacaagagtattagcttcattgat

SEQ ID NO: 590869 - DNA, 33 bp, Homo sapien
gaaagaacacataggacagggaatgtagaggag

SEQ ID NO: 590870 - DNA, 33 bp, Homo sapien
gaaagaacacataggagagggaatgtagaggag

SEQ ID NO: 590871 - DNA, 33 bp, Homo sapien
gcttcagccagcgacactggtatccccacttgg

SEQ ID NO: 590872 - DNA, 33 bp, Homo sapien
gcttcagccagcgacattggtatccccacttgg

SEQ ID NO: 590873 - DNA, 33 bp, Homo sapien
aaactggtggacatgaaggactgacccatggga

SEQ ID NO: 590874 - DNA, 33 bp, Homo sapien
aaactggtggacatgacggactgacccatggga

SEQ ID NO: 590875 - DNA, 33 bp, Homo sapien
ttatttttcttcacacaaggtggatacatccaa

SEQ ID NO: 590876 - DNA, 33 bp, Homo sapien
ttatttttcttcacacgaggtggatacatccaa

SEQ ID NO: 590877 - DNA, 33 bp, Homo sapien
catcaagagctgatcacgtgtgtcttcactttg

SEQ ID NO: 590878 - DNA, 33 bp, Homo sapien
catcaagagctgatcatgtgtgtcttcactttg

SEQ ID NO: 590879 - DNA, 33 bp, Homo sapien
ttcactctgggttctcaactccagccaggcagc

SEQ ID NO: 590880 - DNA, 33 bp, Homo sapien
ttcactctgggttctcgactccagccaggcagc

SEQ ID NO: 590881 - DNA, 33 bp, Homo sapien
ataattctaacatagcgctggaatccggttccc

SEQ ID NO: 590882 - DNA, 33 bp, Homo sapien
ataattctaacatagctctggaatccggttccc

SEQ ID NO: 590883 - DNA, 33 bp, Homo sapien
ttccctctgcttgaagaatttcccttatttata

SEQ ID NO: 590884 - DNA, 33 bp, Homo sapien
ttccctctgcttgaagtatttcccttatttata

SEQ ID NO: 590885 - DNA, 33 bp, Homo sapien
gtctagtgtagagggaaaagaagacatgcaaat

SEQ ID NO: 590886 - DNA, 33 bp, Homo sapien
gtctagtgtagagggagaagaagacatgcaaat

SEQ ID NO: 590887 - DNA, 33 bp, Homo sapien
attaaaaagcaaagaacctacaacaagtcatct

SEQ ID NO: 590888 - DNA, 33 bp, Homo sapien
attaaaaagcaaagaatctacaacaagtcatct

SEQ ID NO: 590889 - DNA, 33 bp, Homo sapien
tcttttcctgtatttaaccatttgaacggccat

SEQ ID NO: 590890 - DNA, 33 bp, Homo sapien
tcttttcctgtatttagccatttgaacggccat

SEQ ID NO: 590891 - DNA, 33 bp, Homo sapien
gctccaggacctaacactgaaactggaaggaaa

SEQ ID NO: 590892 - DNA, 33 bp, Homo sapien
gctccaggacctaacattgaaactggaaggaaa

SEQ ID NO: 590893 - DNA, 33 bp, Homo sapien
cttatgctttaggaagaataaaaaccacctggg

SEQ ID NO: 590894 - DNA, 33 bp, Homo sapien
cttatgctttaggaaggataaaaaccacctggg

SEQ ID NO: 590895 - DNA, 33 bp, Homo sapien
agaagctccaaaatacagctaacaggatttcca

SEQ ID NO: 590896 - DNA, 33 bp, Homo sapien
agaagctccaaaatacggctaacaggatttcca

SEQ ID NO: 590897 - DNA, 33 bp, Homo sapien
agaactgcagatgagagtaaagtccacggagct

SEQ ID NO: 590898 - DNA, 33 bp, Homo sapien
agaactgcagatgagattaaagtccacggagct

SEQ ID NO: 590899 - DNA, 33 bp, Homo sapien
ttacaaacacacgaagccatttaccactgagag

SEQ ID NO: 590900 - DNA, 33 bp, Homo sapien
ttacaaacacacgaaggcatttaccactgagag

SEQ ID NO: 590901 - DNA, 33 bp, Homo sapien
acaatctttattgctgcaagttcagtcccatct

SEQ ID NO: 590902 - DNA, 33 bp, Homo sapien
acaatctttattgctggaagttcagtcccatct

SEQ ID NO: 590903 - DNA, 33 bp, Homo sapien
agctactgactgtcctcaccagctgtgtatcgc

SEQ ID NO: 590904 - DNA, 33 bp, Homo sapien
agctactgactgtccttaccagctgtgtatcgc

SEQ ID NO: 590905 - DNA, 33 bp, Homo sapien
agagggatctatagacacctttggcttacagag

SEQ ID NO: 590906 - DNA, 33 bp, Homo sapien
agagggatctatagacgcctttggcttacagag

SEQ ID NO: 590907 - DNA, 33 bp, Homo sapien
cccaagtggtctcccacaattctaagtaagaat

SEQ ID NO: 590908 - DNA, 33 bp, Homo sapien
cccaagtggtctcccagaattctaagtaagaat

SEQ ID NO: 590909 - DNA, 33 bp, Homo sapien
gtattcttgagatttacgtagttttcatttgaa

SEQ ID NO: 590910 - DNA, 33 bp, Homo sapien
gtattcttgagatttatgtagttttcatttgaa

SEQ ID NO: 590911 - DNA, 33 bp, Homo sapien
tagaaaaaatgtagaacatcttcgcgagttagg

SEQ ID NO: 590912 - DNA, 33 bp, Homo sapien
tagaaaaaatgtagaatatcttcgcgagttagg

SEQ ID NO: 590913 - DNA, 33 bp, Homo sapien
gcaaggggaataacaactaccggcagaggcata

SEQ ID NO: 590914 - DNA, 33 bp, Homo sapien
gcaaggggaataacaagtaccggcagaggcata

SEQ ID NO: 590915 - DNA, 33 bp, Homo sapien
gttaaacttttaaaaaatcacacttgttatgaa

SEQ ID NO: 590916 - DNA, 33 bp, Homo sapien
gttaaacttttaaaaattcacacttgttatgaa

SEQ ID NO: 590917 - DNA, 33 bp, Homo sapien
tgtatactcacagacaaataccttactgcagaa

SEQ ID NO: 590918 - DNA, 33 bp, Homo sapien
tgtatactcacagacagataccttactgcagaa

SEQ ID NO: 590919 - DNA, 33 bp, Homo sapien
ttctagatgtgaaggccctaaaaatgccctaaa

SEQ ID NO: 590920 - DNA, 33 bp, Homo sapien
ttctagatgtgaaggctctaaaaatgccctaaa

SEQ ID NO: 590921 - DNA, 33 bp, Homo sapien
ggggaaatagaactgaaaggagatggtggctga

SEQ ID NO: 590922 - DNA, 33 bp, Homo sapien
ggggaaatagaactgacaggagatggtggctga

SEQ ID NO: 590923 - DNA, 33 bp, Homo sapien
cgctacctgggctttacagtgctttaccttcaa

SEQ ID NO: 590924 - DNA, 33 bp, Homo sapien
cgctacctgggctttagagtgctttaccttcaa

SEQ ID NO: 590925 - DNA, 33 bp, Homo sapien
tttccctctaataccacactgactgaagagtca

SEQ ID NO: 590926 - DNA, 33 bp, Homo sapien
tttccctctaataccatactgactgaagagtca

SEQ ID NO: 590927 - DNA, 33 bp, Homo sapien
tctgagattgttgagcagatgacttccatcagt

SEQ ID NO: 590928 - DNA, 33 bp, Homo sapien
tctgagattgttgagcggatgacttccatcagt

SEQ ID NO: 590929 - DNA, 33 bp, Homo sapien
tgggatctggcatatgcaagaggaaacagccaa

SEQ ID NO: 590930 - DNA, 33 bp, Homo sapien
tgggatctggcatatgtaagaggaaacagccaa

SEQ ID NO: 590931 - DNA, 33 bp, Homo sapien
taactgaaaagtaagcgctgtagtattttcctt

SEQ ID NO: 590932 - DNA, 33 bp, Homo sapien
taactgaaaagtaagctctgtagtattttcctt

SEQ ID NO: 590933 - DNA, 33 bp, Homo sapien
tgtaacacacaagccaatgcttcagctcagagt

SEQ ID NO: 590934 - DNA, 33 bp, Homo sapien
tgtaacacacaagccagtgcttcagctcagagt

SEQ ID NO: 590935 - DNA, 33 bp, Homo sapien
tgtgttatctggagaaacacatctggctcttga

SEQ ID NO: 590936 - DNA, 33 bp, Homo sapien
tgtgttatctggagaagcacatctggctcttga

SEQ ID NO: 590937 - DNA, 33 bp, Homo sapien
tagtgacattaggaaacagagaacaacaaggcg

SEQ ID NO: 590938 - DNA, 33 bp, Homo sapien
tagtgacattaggaaagagagaacaacaaggcg

SEQ ID NO: 590939 - DNA, 33 bp, Homo sapien
acatttctaattttaccagctcttctaattaga

SEQ ID NO: 590940 - DNA, 33 bp, Homo sapien
acatttctaattttacgagctcttctaattaga

SEQ ID NO: 590941 - DNA, 33 bp, Homo sapien
ggatctagccaggttcaaccagcttagccctca

SEQ ID NO: 590942 - DNA, 33 bp, Homo sapien
ggatctagccaggttcgaccagcttagccctca

SEQ ID NO: 590943 - DNA, 33 bp, Homo sapien
ggggttatcagcatcacactagtgcccacctgg

SEQ ID NO: 590944 - DNA, 33 bp, Homo sapien
ggggttatcagcatcatactagtgcccacctgg

SEQ ID NO: 590945 - DNA, 33 bp, Homo sapien
tttagtaaacagtgggacatttagtaaggcctt

SEQ ID NO: 590946 - DNA, 33 bp, Homo sapien
tttagtaaacagtggggcatttagtaaggcctt

SEQ ID NO: 590947 - DNA, 33 bp, Homo sapien
ttgagagaagcaagtgcagcaactgcctggcct

SEQ ID NO: 590948 - DNA, 33 bp, Homo sapien
ttgagagaagcaagtgtagcaactgcctggcct

SEQ ID NO: 590949 - DNA, 33 bp, Homo sapien
ctcatcagttctcaaaataacaaattggtttac

SEQ ID NO: 590950 - DNA, 33 bp, Homo sapien
ctcatcagttctcaaactaacaaattggtttac

SEQ ID NO: 590951 - DNA, 33 bp, Homo sapien
agctttgctgtcagaaattcaagagccagacac

SEQ ID NO: 590952 - DNA, 33 bp, Homo sapien
agctttgctgtcagaacttcaagagccagacac

SEQ ID NO: 590953 - DNA, 33 bp, Homo sapien
tggctgtcatggaagaaggttggtagtcagagc

SEQ ID NO: 590954 - DNA, 33 bp, Homo sapien
tggctgtcatggaagatggttggtagtcagagc

SEQ ID NO: 590955 - DNA, 33 bp, Homo sapien
aaattgcacagaaaacccttttccctccagcta

SEQ ID NO: 590956 - DNA, 33 bp, Homo sapien
aaattgcacagaaaactcttttccctccagcta

SEQ ID NO: 590957 - DNA, 33 bp, Homo sapien
attgggatatttttgcccatacaggtgaatgac

SEQ ID NO: 590958 - DNA, 33 bp, Homo sapien
attgggatatttttgctcatacaggtgaatgac

SEQ ID NO: 590959 - DNA, 33 bp, Homo sapien
taaaggaaggtatctcaaaatgtgcatgaagct

SEQ ID NO: 590960 - DNA, 33 bp, Homo sapien
taaaggaaggtatctccaaatgtgcatgaagct

SEQ ID NO: 590961 - DNA, 33 bp, Homo sapien
tcaacaacttcagtaacatatgctgtattaatc

SEQ ID NO: 590962 - DNA, 33 bp, Homo sapien
tcaacaacttcagtaatatatgctgtattaatc

SEQ ID NO: 590963 - DNA, 33 bp, Homo sapien
tgtagcaggccagagtcaatgagactgtgagag

SEQ ID NO: 590964 - DNA, 33 bp, Homo sapien
tgtagcaggccagagttaatgagactgtgagag

SEQ ID NO: 590965 - DNA, 33 bp, Homo sapien
tgctgatgatctgataaatttggtattgaatag

SEQ ID NO: 590966 - DNA, 33 bp, Homo sapien
tgctgatgatctgatacatttggtattgaatag

SEQ ID NO: 590967 - DNA, 33 bp, Homo sapien
tttaacagaattgtaggatcaagaccttcctta

SEQ ID NO: 590968 - DNA, 33 bp, Homo sapien
tttaacagaattgtagtatcaagaccttcctta

SEQ ID NO: 590969 - DNA, 33 bp, Homo sapien
tggtagggagagttaacatagccctgggtcagt

SEQ ID NO: 590970 - DNA, 33 bp, Homo sapien
tggtagggagagttaatatagccctgggtcagt

SEQ ID NO: 590971 - DNA, 33 bp, Homo sapien
gacccaacctcacttacggttcatgacaagttt

SEQ ID NO: 590972 - DNA, 33 bp, Homo sapien
gacccaacctcacttatggttcatgacaagttt

SEQ ID NO: 590973 - DNA, 33 bp, Homo sapien
ctatgaaaatgctctacggctccagggagcagc

SEQ ID NO: 590974 - DNA, 33 bp, Homo sapien
ctatgaaaatgctctatggctccagggagcagc

SEQ ID NO: 590975 - DNA, 33 bp, Homo sapien
gtctgaagctcaagaaataagtctgggctggtg

SEQ ID NO: 590976 - DNA, 33 bp, Homo sapien
gtctgaagctcaagaagtaagtctgggctggtg

SEQ ID NO: 590977 - DNA, 33 bp, Homo sapien
agaacagctcatgtaaaccataaatacaggcac

SEQ ID NO: 590978 - DNA, 33 bp, Homo sapien
agaacagctcatgtaacccataaatacaggcac

SEQ ID NO: 590979 - DNA, 33 bp, Homo sapien
ttgtccatctgcactgaaaataaccatcaggtc

SEQ ID NO: 590980 - DNA, 33 bp, Homo sapien
ttgtccatctgcactgcaaataaccatcaggtc

SEQ ID NO: 590981 - DNA, 33 bp, Homo sapien
aaagctctaatccattaaaaaacaggtaccaat

SEQ ID NO: 590982 - DNA, 33 bp, Homo sapien
aaagctctaatccatttaaaaacaggtaccaat

SEQ ID NO: 590983 - DNA, 33 bp, Homo sapien
gcaagcaccacctgatgagattgaaagagacag

SEQ ID NO: 590984 - DNA, 33 bp, Homo sapien
gcaagcaccacctgattagattgaaagagacag

SEQ ID NO: 590985 - DNA, 33 bp, Homo sapien
acaactgaggttgagcacaaggactctgggtgt

SEQ ID NO: 590986 - DNA, 33 bp, Homo sapien
acaactgaggttgagcgcaaggactctgggtgt

SEQ ID NO: 590987 - DNA, 33 bp, Homo sapien
cccagcctcatcgtgcaaagaatgcattttatt

SEQ ID NO: 590988 - DNA, 33 bp, Homo sapien
cccagcctcatcgtgcgaagaatgcattttatt

SEQ ID NO: 590989 - DNA, 33 bp, Homo sapien
gccgacttcgaactggcaagcctggcagacata

SEQ ID NO: 590990 - DNA, 33 bp, Homo sapien
gccgacttcgaactggtaagcctggcagacata

SEQ ID NO: 590991 - DNA, 33 bp, Homo sapien
ttcagaaaaggttaacagaagctgcaagagggc

SEQ ID NO: 590992 - DNA, 33 bp, Homo sapien
ttcagaaaaggttaacggaagctgcaagagggc

SEQ ID NO: 590993 - DNA, 33 bp, Homo sapien
gatgcttgctgatccaccaagattgttgctatt

SEQ ID NO: 590994 - DNA, 33 bp, Homo sapien
gatgcttgctgatccatcaagattgttgctatt

SEQ ID NO: 590995 - DNA, 33 bp, Homo sapien
atctttaaccatctgactaacatttgcttcata

SEQ ID NO: 590996 - DNA, 33 bp, Homo sapien
atctttaaccatctgattaacatttgcttcata

SEQ ID NO: 590997 - DNA, 33 bp, Homo sapien
cgcacggctgttccctaacctaacatggcagca

SEQ ID NO: 590998 - DNA, 33 bp, Homo sapien
cgcacggctgttccctgacctaacatggcagca

SEQ ID NO: 590999 - DNA, 33 bp, Homo sapien
aaatatttcctaactcacagaaaaagttgattg

SEQ ID NO: 591000 - DNA, 33 bp, Homo sapien
aaatatttcctaactcgcagaaaaagttgattg

SEQ ID NO: 591001 - DNA, 33 bp, Homo sapien
ctgaatagacaaaaagaccaaccctctcccaag

SEQ ID NO: 591002 - DNA, 33 bp, Homo sapien
ctgaatagacaaaaaggccaaccctctcccaag

SEQ ID NO: 591003 - DNA, 33 bp, Homo sapien
agtgcagtgccttggacataatagatgttcaat

SEQ ID NO: 591004 - DNA, 33 bp, Homo sapien
agtgcagtgccttggatataatagatgttcaat

SEQ ID NO: 591005 - DNA, 33 bp, Homo sapien
tttcacactcaaaagaaaacatccctcaaagga

SEQ ID NO: 591006 - DNA, 33 bp, Homo sapien
tttcacactcaaaagagaacatccctcaaagga

SEQ ID NO: 591007 - DNA, 33 bp, Homo sapien
gagaccatgagaccaacgtggaccttaccatga

SEQ ID NO: 591008 - DNA, 33 bp, Homo sapien
gagaccatgagaccaatgtggaccttaccatga

SEQ ID NO: 591009 - DNA, 33 bp, Homo sapien
tacaactgaccttttcacacaaggcagctggga

SEQ ID NO: 591010 - DNA, 33 bp, Homo sapien
tacaactgaccttttctcacaaggcagctggga

SEQ ID NO: 591011 - DNA, 33 bp, Homo sapien
atgctaaagctttgcaactcaagaccaaattcc

SEQ ID NO: 591012 - DNA, 33 bp, Homo sapien
atgctaaagctttgcagctcaagaccaaattcc

SEQ ID NO: 591013 - DNA, 33 bp, Homo sapien
caagtcctggaaccaagcggggctggcaagact

SEQ ID NO: 591014 - DNA, 33 bp, Homo sapien
caagtcctggaaccaatcggggctggcaagact

SEQ ID NO: 591015 - DNA, 33 bp, Homo sapien
aaaagcagagaaaaaaatgctgctaaaggtact

SEQ ID NO: 591016 - DNA, 33 bp, Homo sapien
aaaagcagagaaaaaagtgctgctaaaggtact

SEQ ID NO: 591017 - DNA, 33 bp, Homo sapien
ctgaatttttaatcaaatcaggatcttctgaaa

SEQ ID NO: 591018 - DNA, 33 bp, Homo sapien
ctgaatttttaatcaagtcaggatcttctgaaa

SEQ ID NO: 591019 - DNA, 33 bp, Homo sapien
attgggcactatggagaatatgagaatggcctc

SEQ ID NO: 591020 - DNA, 33 bp, Homo sapien
attgggcactatggaggatatgagaatggcctc

SEQ ID NO: 591021 - DNA, 33 bp, Homo sapien
tccctgctgcaggagaaaacagtctatgtgtca

SEQ ID NO: 591022 - DNA, 33 bp, Homo sapien
tccctgctgcaggagagaacagtctatgtgtca

SEQ ID NO: 591023 - DNA, 33 bp, Homo sapien
aaaataactaattagccagtcccttcctatcca

SEQ ID NO: 591024 - DNA, 33 bp, Homo sapien
aaaataactaattagcgagtcccttcctatcca

SEQ ID NO: 591025 - DNA, 33 bp, Homo sapien
caaaaactaagggcataagtttgcaaaggatca

SEQ ID NO: 591026 - DNA, 33 bp, Homo sapien
caaaaactaagggcatgagtttgcaaaggatca

SEQ ID NO: 591027 - DNA, 33 bp, Homo sapien
aatatgactatggagaagggagagacttttaat

SEQ ID NO: 591028 - DNA, 33 bp, Homo sapien
aatatgactatggagaggggagagacttttaat

SEQ ID NO: 591029 - DNA, 33 bp, Homo sapien
cttaactactttccaagttattcattttctgca

SEQ ID NO: 591030 - DNA, 33 bp, Homo sapien
cttaactactttccaatttattcattttctgca

SEQ ID NO: 591031 - DNA, 33 bp, Homo sapien
agctccttattgataacaacaccttcagctggt

SEQ ID NO: 591032 - DNA, 33 bp, Homo sapien
agctccttattgataataacaccttcagctggt

SEQ ID NO: 591033 - DNA, 33 bp, Homo sapien
gtggctatgaccagcacgtataatttttgtcaa

SEQ ID NO: 591034 - DNA, 33 bp, Homo sapien
gtggctatgaccagcaggtataatttttgtcaa

SEQ ID NO: 591035 - DNA, 33 bp, Homo sapien
tttctgcttctttccaactcctcaggtacatgg

SEQ ID NO: 591036 - DNA, 33 bp, Homo sapien
tttctgcttctttccagctcctcaggtacatgg

SEQ ID NO: 591037 - DNA, 33 bp, Homo sapien
ataatattttcttccaatacaaaggctaagaat

SEQ ID NO: 591038 - DNA, 33 bp, Homo sapien
ataatattttcttccactacaaaggctaagaat

SEQ ID NO: 591039 - DNA, 33 bp, Homo sapien
attcttctcacatctacgcccatgcacatgcta

SEQ ID NO: 591040 - DNA, 33 bp, Homo sapien
attcttctcacatctatgcccatgcacatgcta

SEQ ID NO: 591041 - DNA, 33 bp, Homo sapien
gccagcccttgtttcacatgaggaggctgtgat

SEQ ID NO: 591042 - DNA, 33 bp, Homo sapien
gccagcccttgtttcatatgaggaggctgtgat

SEQ ID NO: 591043 - DNA, 33 bp, Homo sapien
gcatgcaagagccaacagttaacttttcaggaa

SEQ ID NO: 591044 - DNA, 33 bp, Homo sapien
gcatgcaagagccaaccgttaacttttcaggaa

SEQ ID NO: 591045 - DNA, 33 bp, Homo sapien
gtaaacaccgcagcacagtctctattaatctaa

SEQ ID NO: 591046 - DNA, 33 bp, Homo sapien
gtaaacaccgcagcacggtctctattaatctaa

SEQ ID NO: 591047 - DNA, 33 bp, Homo sapien
aaaaagagttgtagtacgaaaaatcattaaaca

SEQ ID NO: 591048 - DNA, 33 bp, Homo sapien
aaaaagagttgtagtatgaaaaatcattaaaca

SEQ ID NO: 591049 - DNA, 33 bp, Homo sapien
aaagaatcctatacaacgtgcagaggtcatgga

SEQ ID NO: 591050 - DNA, 33 bp, Homo sapien
aaagaatcctatacaatgtgcagaggtcatgga

SEQ ID NO: 591051 - DNA, 33 bp, Homo sapien
tgctgtcttgaattagaatacctgtccaagaag

SEQ ID NO: 591052 - DNA, 33 bp, Homo sapien
tgctgtcttgaattaggatacctgtccaagaag

SEQ ID NO: 591053 - DNA, 33 bp, Homo sapien
cttcagacaagaagcaagaaacagaggtttgtc

SEQ ID NO: 591054 - DNA, 33 bp, Homo sapien
cttcagacaagaagcaggaaacagaggtttgtc

SEQ ID NO: 591055 - DNA, 33 bp, Homo sapien
gcacaggtggtggaaagaatacctggataaata

SEQ ID NO: 591056 - DNA, 33 bp, Homo sapien
gcacaggtggtggaaataatacctggataaata

SEQ ID NO: 591057 - DNA, 33 bp, Homo sapien
aaaacccatgagaagacgggcggtttgtctccc

SEQ ID NO: 591058 - DNA, 33 bp, Homo sapien
aaaacccatgagaagatgggcggtttgtctccc

SEQ ID NO: 591059 - DNA, 33 bp, Homo sapien
gtgaaagtgctgtatcgatttgaaactgttacg

SEQ ID NO: 591060 - DNA, 33 bp, Homo sapien
gtgaaagtgctgtatctatttgaaactgttacg

SEQ ID NO: 591061 - DNA, 33 bp, Homo sapien
caaaggtgattctcgaacattgtctccaaaaag

SEQ ID NO: 591062 - DNA, 33 bp, Homo sapien
caaaggtgattctcgagcattgtctccaaaaag

SEQ ID NO: 591063 - DNA, 33 bp, Homo sapien
gcttgttaaaactgcaccatctaggtcctcatc

SEQ ID NO: 591064 - DNA, 33 bp, Homo sapien
gcttgttaaaactgcatcatctaggtcctcatc

SEQ ID NO: 591065 - DNA, 33 bp, Homo sapien
agatgaggctttcagacatagagcctccttaaa

SEQ ID NO: 591066 - DNA, 33 bp, Homo sapien
agatgaggctttcagatatagagcctccttaaa

SEQ ID NO: 591067 - DNA, 33 bp, Homo sapien
taggaaaaaagaggacaaagatgctcagcgcct

SEQ ID NO: 591068 - DNA, 33 bp, Homo sapien
taggaaaaaagaggacgaagatgctcagcgcct

SEQ ID NO: 591069 - DNA, 33 bp, Homo sapien
catgcactcaagagaaagatgttgcaggaagag

SEQ ID NO: 591070 - DNA, 33 bp, Homo sapien
catgcactcaagagaacgatgttgcaggaagag

SEQ ID NO: 591071 - DNA, 33 bp, Homo sapien
atacacaaggttagtgcatgagtaacaattcgg

SEQ ID NO: 591072 - DNA, 33 bp, Homo sapien
atacacaaggttagtgtatgagtaacaattcgg

SEQ ID NO: 591073 - DNA, 33 bp, Homo sapien
ccactatattcccagaaaggctgccatagatct

SEQ ID NO: 591074 - DNA, 33 bp, Homo sapien
ccactatattcccagagaggctgccatagatct

SEQ ID NO: 591075 - DNA, 33 bp, Homo sapien
tgaagtagggtaaatacgacatacaatcagtga

SEQ ID NO: 591076 - DNA, 33 bp, Homo sapien
tgaagtagggtaaatatgacatacaatcagtga

SEQ ID NO: 591077 - DNA, 33 bp, Homo sapien
agaggcactctccaacagagccatcgaacaggg

SEQ ID NO: 591078 - DNA, 33 bp, Homo sapien
agaggcactctccaacggagccatcgaacaggg

SEQ ID NO: 591079 - DNA, 33 bp, Homo sapien
cattcaccgggaaaaacagatcccagtgcagca

SEQ ID NO: 591080 - DNA, 33 bp, Homo sapien
cattcaccgggaaaaatagatcccagtgcagca

SEQ ID NO: 591081 - DNA, 33 bp, Homo sapien
tgtgggaggcaagctgaagagtgtcaattcttt

SEQ ID NO: 591082 - DNA, 33 bp, Homo sapien
tgtgggaggcaagctggagagtgtcaattcttt

SEQ ID NO: 591083 - DNA, 33 bp, Homo sapien
accatgtagggtctgcaaagtttttaatgttca

SEQ ID NO: 591084 - DNA, 33 bp, Homo sapien
accatgtagggtctgcgaagtttttaatgttca

SEQ ID NO: 591085 - DNA, 33 bp, Homo sapien
aagacacagcccggaagagtctcagaaggcttc

SEQ ID NO: 591086 - DNA, 33 bp, Homo sapien
aagacacagcccggaatagtctcagaaggcttc

SEQ ID NO: 591087 - DNA, 33 bp, Homo sapien
aagcaactccaatgtacgacatccctttttcct

SEQ ID NO: 591088 - DNA, 33 bp, Homo sapien
aagcaactccaatgtatgacatccctttttcct

SEQ ID NO: 591089 - DNA, 33 bp, Homo sapien
agtcagcgatcagagcaaagagaaatgctgtga

SEQ ID NO: 591090 - DNA, 33 bp, Homo sapien
agtcagcgatcagagcgaagagaaatgctgtga

SEQ ID NO: 591091 - DNA, 33 bp, Homo sapien
tacttgcacaattgccaataaaaagatctcatg

SEQ ID NO: 591092 - DNA, 33 bp, Homo sapien
tacttgcacaattgccgataaaaagatctcatg

SEQ ID NO: 591093 - DNA, 33 bp, Homo sapien
ctatgatggaagagaacaggctactatgagcca

SEQ ID NO: 591094 - DNA, 33 bp, Homo sapien
ctatgatggaagagaagaggctactatgagcca

SEQ ID NO: 591095 - DNA, 33 bp, Homo sapien
tcacagaaaatcgtgcactagagatctttaaaa

SEQ ID NO: 591096 - DNA, 33 bp, Homo sapien
tcacagaaaatcgtgcgctagagatctttaaaa

SEQ ID NO: 591097 - DNA, 33 bp, Homo sapien
acaaaataaatttccacgctgcttaagcacctc

SEQ ID NO: 591098 - DNA, 33 bp, Homo sapien
acaaaataaatttccatgctgcttaagcacctc

SEQ ID NO: 591099 - DNA, 33 bp, Homo sapien
ttttgactgaagcccaaaaatgttacctcctat

SEQ ID NO: 591100 - DNA, 33 bp, Homo sapien
ttttgactgaagcccagaaatgttacctcctat

SEQ ID NO: 591101 - DNA, 33 bp, Homo sapien
ccagaactgtaagcaccgggcacgggtcactgc

SEQ ID NO: 591102 - DNA, 33 bp, Homo sapien
ccagaactgtaagcactgggcacgggtcactgc

SEQ ID NO: 591103 - DNA, 33 bp, Homo sapien
cagttggatttacataagactttccagatggcc

SEQ ID NO: 591104 - DNA, 33 bp, Homo sapien
cagttggatttacataggactttccagatggcc

SEQ ID NO: 591105 - DNA, 33 bp, Homo sapien
caacatagaccctgtcactacaacaaatttaaa

SEQ ID NO: 591106 - DNA, 33 bp, Homo sapien
caacatagaccctgtcgctacaacaaatttaaa

SEQ ID NO: 591107 - DNA, 33 bp, Homo sapien
tgccgacctcgtcccccactgtactgggcgttg

SEQ ID NO: 591108 - DNA, 33 bp, Homo sapien
tgccgacctcgtccccgactgtactgggcgttg

SEQ ID NO: 591109 - DNA, 33 bp, Homo sapien
cattcttttagccaaagataattgatttaaagc

SEQ ID NO: 591110 - DNA, 33 bp, Homo sapien
cattcttttagccaaatataattgatttaaagc

SEQ ID NO: 591111 - DNA, 33 bp, Homo sapien
aatagtaccacaacggcaaaggcagctgacctg

SEQ ID NO: 591112 - DNA, 33 bp, Homo sapien
aatagtaccacaacgggaaaggcagctgacctg

SEQ ID NO: 591113 - DNA, 33 bp, Homo sapien
aaatcccttgtgactccactttagccacaggaa

SEQ ID NO: 591114 - DNA, 33 bp, Homo sapien
aaatcccttgtgactcgactttagccacaggaa

SEQ ID NO: 591115 - DNA, 33 bp, Homo sapien
cagcttggaagaatcaaagggggatggttaaca

SEQ ID NO: 591116 - DNA, 33 bp, Homo sapien
cagcttggaagaatcagagggggatggttaaca

SEQ ID NO: 591117 - DNA, 33 bp, Homo sapien
cacccttttatagaagaacatggccttgcagag

SEQ ID NO: 591118 - DNA, 33 bp, Homo sapien
cacccttttatagaagtacatggccttgcagag

SEQ ID NO: 591119 - DNA, 33 bp, Homo sapien
tcttaattctgtcccaacctatcagtccttaga

SEQ ID NO: 591120 - DNA, 33 bp, Homo sapien
tcttaattctgtcccagcctatcagtccttaga

SEQ ID NO: 591121 - DNA, 33 bp, Homo sapien
cctctcttcttcctatgaaagggcaactcgacc

SEQ ID NO: 591122 - DNA, 33 bp, Homo sapien
cctctcttcttcctattaaagggcaactcgacc

SEQ ID NO: 591123 - DNA, 33 bp, Homo sapien
agagacgtttatgtacactctcgtttagtctta

SEQ ID NO: 591124 - DNA, 33 bp, Homo sapien
agagacgtttatgtaccctctcgtttagtctta

SEQ ID NO: 591125 - DNA, 33 bp, Homo sapien
acggagaaataaacaggccggcttcacctccaa

SEQ ID NO: 591126 - DNA, 33 bp, Homo sapien
acggagaaataaacagtccggcttcacctccaa

SEQ ID NO: 591127 - DNA, 33 bp, Homo sapien
ttccctaaggaaaaacagcattatctcttatga

SEQ ID NO: 591128 - DNA, 33 bp, Homo sapien
ttccctaaggaaaaacggcattatctcttatga

SEQ ID NO: 591129 - DNA, 33 bp, Homo sapien
actgaacagcaacaagcattgtgacagaccaag

SEQ ID NO: 591130 - DNA, 33 bp, Homo sapien
actgaacagcaacaaggattgtgacagaccaag

SEQ ID NO: 591131 - DNA, 33 bp, Homo sapien
gatgcggtatcaagtacagaaactgcacaggac

SEQ ID NO: 591132 - DNA, 33 bp, Homo sapien
gatgcggtatcaagtatagaaactgcacaggac

SEQ ID NO: 591133 - DNA, 33 bp, Homo sapien
cactgccaagtcacccacctcgctgcccacacc

SEQ ID NO: 591134 - DNA, 33 bp, Homo sapien
cactgccaagtcacccgcctcgctgcccacacc

SEQ ID NO: 591135 - DNA, 33 bp, Homo sapien
cgttgcctatttcttcactcctatggcaggaag

SEQ ID NO: 591136 - DNA, 33 bp, Homo sapien
cgttgcctatttcttcgctcctatggcaggaag

SEQ ID NO: 591137 - DNA, 33 bp, Homo sapien
tgaaccaagatggcaccgctgttctctagcctg

SEQ ID NO: 591138 - DNA, 33 bp, Homo sapien
tgaaccaagatggcactgctgttctctagcctg

SEQ ID NO: 591139 - DNA, 33 bp, Homo sapien
ttgccttctgagaagacaccaaatggaaaggat

SEQ ID NO: 591140 - DNA, 33 bp, Homo sapien
ttgccttctgagaagagaccaaatggaaaggat

SEQ ID NO: 591141 - DNA, 33 bp, Homo sapien
tacagttacagaggccaagctcaaggggctgca

SEQ ID NO: 591142 - DNA, 33 bp, Homo sapien
tacagttacagaggccgagctcaaggggctgca

SEQ ID NO: 591143 - DNA, 33 bp, Homo sapien
tctcccaagaaagttaggagctagaaactccat

SEQ ID NO: 591144 - DNA, 33 bp, Homo sapien
tctcccaagaaagttatgagctagaaactccat

SEQ ID NO: 591145 - DNA, 33 bp, Homo sapien
ctgcattccacaaatcagaattagattatcctc

SEQ ID NO: 591146 - DNA, 33 bp, Homo sapien
ctgcattccacaaatcggaattagattatcctc

SEQ ID NO: 591147 - DNA, 33 bp, Homo sapien
atttctgagattggggcagatgcactggttacc

SEQ ID NO: 591148 - DNA, 33 bp, Homo sapien
atttctgagattggggtagatgcactggttacc

SEQ ID NO: 591149 - DNA, 33 bp, Homo sapien
aactggcatgctctaaagaaatgagatgttaac

SEQ ID NO: 591150 - DNA, 33 bp, Homo sapien
aactggcatgctctaatgaaatgagatgttaac

SEQ ID NO: 591151 - DNA, 33 bp, Homo sapien
cttcccaggtgtatgacgagtatttcaggtcgg

SEQ ID NO: 591152 - DNA, 33 bp, Homo sapien
cttcccaggtgtatgatgagtatttcaggtcgg

SEQ ID NO: 591153 - DNA, 33 bp, Homo sapien
cagcgccttgtgaagcccacactccagggttga

SEQ ID NO: 591154 - DNA, 33 bp, Homo sapien
cagcgccttgtgaagcgcacactccagggttga

SEQ ID NO: 591155 - DNA, 33 bp, Homo sapien
cttgactgaaatggcaggacccggttgctttgc

SEQ ID NO: 591156 - DNA, 33 bp, Homo sapien
cttgactgaaatggcatgacccggttgctttgc

SEQ ID NO: 591157 - DNA, 33 bp, Homo sapien
agcacattttttcacactattttattagcattc

SEQ ID NO: 591158 - DNA, 33 bp, Homo sapien
agcacattttttcacattattttattagcattc

SEQ ID NO: 591159 - DNA, 33 bp, Homo sapien
ttttattacccaagtaaccggtatttcagctca

SEQ ID NO: 591160 - DNA, 33 bp, Homo sapien
ttttattacccaagtagccggtatttcagctca

SEQ ID NO: 591161 - DNA, 33 bp, Homo sapien
gtgatggctttatgataaactgttgcacacaca

SEQ ID NO: 591162 - DNA, 33 bp, Homo sapien
gtgatggctttatgattaactgttgcacacaca

SEQ ID NO: 591163 - DNA, 33 bp, Homo sapien
cgctgggcttaaaaccacaacgagacagattct

SEQ ID NO: 591164 - DNA, 33 bp, Homo sapien
cgctgggcttaaaaccgcaacgagacagattct

SEQ ID NO: 591165 - DNA, 33 bp, Homo sapien
acttctgggtgccacactgcatttggttttctg

SEQ ID NO: 591166 - DNA, 33 bp, Homo sapien
acttctgggtgccacattgcatttggttttctg

SEQ ID NO: 591167 - DNA, 33 bp, Homo sapien
ggagctgcgtttgcagaaggcatgagagagcat

SEQ ID NO: 591168 - DNA, 33 bp, Homo sapien
ggagctgcgtttgcaggaggcatgagagagcat

SEQ ID NO: 591169 - DNA, 33 bp, Homo sapien
aaccaggatctggacacgggagggccaactctg

SEQ ID NO: 591170 - DNA, 33 bp, Homo sapien
aaccaggatctggacatgggagggccaactctg

SEQ ID NO: 591171 - DNA, 33 bp, Homo sapien
gcttgtttttgatacaccaatggctccttccgc

SEQ ID NO: 591172 - DNA, 33 bp, Homo sapien
gcttgtttttgatacatcaatggctccttccgc

SEQ ID NO: 591173 - DNA, 33 bp, Homo sapien
ctgaccctggatttgccaaaaccaatgtcacta

SEQ ID NO: 591174 - DNA, 33 bp, Homo sapien
ctgaccctggatttgctaaaaccaatgtcacta

SEQ ID NO: 591175 - DNA, 33 bp, Homo sapien
ccccaccttcctcatcaccgggagccgctgcca

SEQ ID NO: 591176 - DNA, 33 bp, Homo sapien
ccccaccttcctcatcgccgggagccgctgcca

SEQ ID NO: 591177 - DNA, 33 bp, Homo sapien
cgaatgctgcatgaagaaccacagcggattcgc

SEQ ID NO: 591178 - DNA, 33 bp, Homo sapien
cgaatgctgcatgaagtaccacagcggattcgc

SEQ ID NO: 591179 - DNA, 33 bp, Homo sapien
ctacctttaaaataaaagacaggcatctatgta

SEQ ID NO: 591180 - DNA, 33 bp, Homo sapien
ctacctttaaaataaaggacaggcatctatgta

SEQ ID NO: 591181 - DNA, 33 bp, Homo sapien
ccagcgggaggttagcacactgctgtccaggtg

SEQ ID NO: 591182 - DNA, 33 bp, Homo sapien
ccagcgggaggttagcgcactgctgtccaggtg

SEQ ID NO: 591183 - DNA, 33 bp, Homo sapien
tgccgtaaaagctgcacaggtgatcccggggca

SEQ ID NO: 591184 - DNA, 33 bp, Homo sapien
tgccgtaaaagctgcagaggtgatcccggggca

SEQ ID NO: 591185 - DNA, 33 bp, Homo sapien
ctggtgattccaacgcaaaaccaaagttgagtc

SEQ ID NO: 591186 - DNA, 33 bp, Homo sapien
ctggtgattccaacgcgaaaccaaagttgagtc

SEQ ID NO: 591187 - DNA, 33 bp, Homo sapien
aaatgctagatcactacgtccttaaattgccga

SEQ ID NO: 591188 - DNA, 33 bp, Homo sapien
aaatgctagatcactaggtccttaaattgccga

SEQ ID NO: 591189 - DNA, 33 bp, Homo sapien
tgcagatacaagctccggccacacggacagcga

SEQ ID NO: 591190 - DNA, 33 bp, Homo sapien
tgcagatacaagctcctgccacacggacagcga

SEQ ID NO: 591191 - DNA, 33 bp, Homo sapien
gagataacttataaagccacttgtttgatttta

SEQ ID NO: 591192 - DNA, 33 bp, Homo sapien
gagataacttataaagtcacttgtttgatttta

SEQ ID NO: 591193 - DNA, 33 bp, Homo sapien
gataacaaatgaactacagatttctacttctga

SEQ ID NO: 591194 - DNA, 33 bp, Homo sapien
gataacaaatgaactagagatttctacttctga

SEQ ID NO: 591195 - DNA, 33 bp, Homo sapien
tggccagctcgattggccaggagcatctcggga

SEQ ID NO: 591196 - DNA, 33 bp, Homo sapien
tggccagctcgattggtcaggagcatctcggga

SEQ ID NO: 591197 - DNA, 33 bp, Homo sapien
aggcttggatttgcatgaaattgatacagaaaa

SEQ ID NO: 591198 - DNA, 33 bp, Homo sapien
aggcttggatttgcattaaattgatacagaaaa

SEQ ID NO: 591199 - DNA, 33 bp, Homo sapien
tatatattcgctgtcacaggagggaagtgaccg

SEQ ID NO: 591200 - DNA, 33 bp, Homo sapien
tatatattcgctgtcataggagggaagtgaccg

SEQ ID NO: 591201 - DNA, 33 bp, Homo sapien
gtaggatttcaggttcccaaactccaagtgttt

SEQ ID NO: 591202 - DNA, 33 bp, Homo sapien
gtaggatttcaggttctcaaactccaagtgttt

SEQ ID NO: 591203 - DNA, 33 bp, Homo sapien
aacgttacaatgccgacgctgcacgtccaggtg

SEQ ID NO: 591204 - DNA, 33 bp, Homo sapien
aacgttacaatgccgatgctgcacgtccaggtg

SEQ ID NO: 591205 - DNA, 33 bp, Homo sapien
tgtaggtgaaaggatacgaaggtgcaattatgg

SEQ ID NO: 591206 - DNA, 33 bp, Homo sapien
tgtaggtgaaaggatatgaaggtgcaattatgg

SEQ ID NO: 591207 - DNA, 33 bp, Homo sapien
tacatcccatcctacacacatacaagcctgccg

SEQ ID NO: 591208 - DNA, 33 bp, Homo sapien
tacatcccatcctacatacatacaagcctgccg

SEQ ID NO: 591209 - DNA, 33 bp, Homo sapien
tccatacagtggaatacggttcagcaacaaaaa

SEQ ID NO: 591210 - DNA, 33 bp, Homo sapien
tccatacagtggaatatggttcagcaacaaaaa

SEQ ID NO: 591211 - DNA, 33 bp, Homo sapien
agtgcttttgaacaagactatttccattttgaa

SEQ ID NO: 591212 - DNA, 33 bp, Homo sapien
agtgcttttgaacaagcctatttccattttgaa

SEQ ID NO: 591213 - DNA, 33 bp, Homo sapien
gcccggccaacaattggaactcttatttgaatt

SEQ ID NO: 591214 - DNA, 33 bp, Homo sapien
gcccggccaacaattgtaactcttatttgaatt

SEQ ID NO: 591215 - DNA, 33 bp, Homo sapien
taggaaatggtgtttacaggattttagggcctt

SEQ ID NO: 591216 - DNA, 33 bp, Homo sapien
taggaaatggtgtttataggattttagggcctt

SEQ ID NO: 591217 - DNA, 33 bp, Homo sapien
acttcttttcagaaagcacaaaaatagtttatt

SEQ ID NO: 591218 - DNA, 33 bp, Homo sapien
acttcttttcagaaaggacaaaaatagtttatt

SEQ ID NO: 591219 - DNA, 33 bp, Homo sapien
ctggggaacgtgggaacatagcgagccagaacc

SEQ ID NO: 591220 - DNA, 33 bp, Homo sapien
ctggggaacgtgggaagatagcgagccagaacc

SEQ ID NO: 591221 - DNA, 33 bp, Homo sapien
ggataggcgcatttgaagggtgttttggagctc

SEQ ID NO: 591222 - DNA, 33 bp, Homo sapien
ggataggcgcatttgaggggtgttttggagctc

SEQ ID NO: 591223 - DNA, 33 bp, Homo sapien
aaatttcacatcatcagcaaagtcatgactgcc

SEQ ID NO: 591224 - DNA, 33 bp, Homo sapien
aaatttcacatcatcatcaaagtcatgactgcc

SEQ ID NO: 591225 - DNA, 33 bp, Homo sapien
taattcaaccctttacagcatttgatccagcaa

SEQ ID NO: 591226 - DNA, 33 bp, Homo sapien
taattcaaccctttacggcatttgatccagcaa

SEQ ID NO: 591227 - DNA, 33 bp, Homo sapien
tgatccattgtgcctgccaagaccttgattttg

SEQ ID NO: 591228 - DNA, 33 bp, Homo sapien
tgatccattgtgcctggcaagaccttgattttg

SEQ ID NO: 591229 - DNA, 33 bp, Homo sapien
gggaacagcagataagaaagcgcagggccgtgg

SEQ ID NO: 591230 - DNA, 33 bp, Homo sapien
gggaacagcagataaggaagcgcagggccgtgg

SEQ ID NO: 591231 - DNA, 33 bp, Homo sapien
tgccgtctccatactaaaccttcagtaaaattt

SEQ ID NO: 591232 - DNA, 33 bp, Homo sapien
tgccgtctccatactacaccttcagtaaaattt

SEQ ID NO: 591233 - DNA, 33 bp, Homo sapien
aacatgtaataggagacgatttcccaagctgtg

SEQ ID NO: 591234 - DNA, 33 bp, Homo sapien
aacatgtaataggagatgatttcccaagctgtg

SEQ ID NO: 591235 - DNA, 33 bp, Homo sapien
accagcataagacataaccagaaggtaagactg

SEQ ID NO: 591236 - DNA, 33 bp, Homo sapien
accagcataagacatagccagaaggtaagactg

SEQ ID NO: 591237 - DNA, 33 bp, Homo sapien
aagcccagcacaatacccactttaattcctttc

SEQ ID NO: 591238 - DNA, 33 bp, Homo sapien
aagcccagcacaatacgcactttaattcctttc

SEQ ID NO: 591239 - DNA, 33 bp, Homo sapien
ggaatttaaaccatgcaactagaaaagatcaca

SEQ ID NO: 591240 - DNA, 33 bp, Homo sapien
ggaatttaaaccatgcgactagaaaagatcaca

SEQ ID NO: 591241 - DNA, 33 bp, Homo sapien
tgtaaattaaagtcagccatgttttctggtccc

SEQ ID NO: 591242 - DNA, 33 bp, Homo sapien
tgtaaattaaagtcagtcatgttttctggtccc

SEQ ID NO: 591243 - DNA, 33 bp, Homo sapien
tcagagctggtgatcccgaaaccagagccagtt

SEQ ID NO: 591244 - DNA, 33 bp, Homo sapien
tcagagctggtgatcctgaaaccagagccagtt

SEQ ID NO: 591245 - DNA, 33 bp, Homo sapien
gccatgcactactttagctgcaaggcctttgct

SEQ ID NO: 591246 - DNA, 33 bp, Homo sapien
gccatgcactactttatctgcaaggcctttgct

SEQ ID NO: 591247 - DNA, 33 bp, Homo sapien
acagcagcaccaaaacaccaatgctctggccaa

SEQ ID NO: 591248 - DNA, 33 bp, Homo sapien
acagcagcaccaaaacgccaatgctctggccaa

SEQ ID NO: 591249 - DNA, 33 bp, Homo sapien
catgtctctcctcacacgtcgttctcttcttat

SEQ ID NO: 591250 - DNA, 33 bp, Homo sapien
catgtctctcctcacatgtcgttctcttcttat

SEQ ID NO: 591251 - DNA, 33 bp, Homo sapien
gccatgtaggatatgacgccagggaagagagaa

SEQ ID NO: 591252 - DNA, 33 bp, Homo sapien
gccatgtaggatatgatgccagggaagagagaa

SEQ ID NO: 591253 - DNA, 33 bp, Homo sapien
tttaataacttgtccaacattacaaagttagca

SEQ ID NO: 591254 - DNA, 33 bp, Homo sapien
tttaataacttgtccaccattacaaagttagca

SEQ ID NO: 591255 - DNA, 33 bp, Homo sapien
aggaaatattggctccgaaagacatccgtgtca

SEQ ID NO: 591256 - DNA, 33 bp, Homo sapien
aggaaatattggctcctaaagacatccgtgtca

SEQ ID NO: 591257 - DNA, 33 bp, Homo sapien
tctgagggctgcacaaaaagccgttcacagcga

SEQ ID NO: 591258 - DNA, 33 bp, Homo sapien
tctgagggctgcacaagaagccgttcacagcga

SEQ ID NO: 591259 - DNA, 33 bp, Homo sapien
atcttgaaatagccataaccatcggagaactag

SEQ ID NO: 591260 - DNA, 33 bp, Homo sapien
atcttgaaatagccatgaccatcggagaactag

SEQ ID NO: 591261 - DNA, 33 bp, Homo sapien
tgacacaaggcaatacaggatctggtctaagta

SEQ ID NO: 591262 - DNA, 33 bp, Homo sapien
tgacacaaggcaatacgggatctggtctaagta

SEQ ID NO: 591263 - DNA, 33 bp, Homo sapien
tctcgaagtgtgggccagacaggaaacctagaa

SEQ ID NO: 591264 - DNA, 33 bp, Homo sapien
tctcgaagtgtgggccggacaggaaacctagaa

SEQ ID NO: 591265 - DNA, 33 bp, Homo sapien
tcagtttggcaagtcaacctcctaacatgggag

SEQ ID NO: 591266 - DNA, 33 bp, Homo sapien
tcagtttggcaagtcaccctcctaacatgggag

SEQ ID NO: 591267 - DNA, 33 bp, Homo sapien
aaccctaaaggtaaaaatggtggcgtagtctgc

SEQ ID NO: 591268 - DNA, 33 bp, Homo sapien
aaccctaaaggtaaaagtggtggcgtagtctgc

SEQ ID NO: 591269 - DNA, 33 bp, Homo sapien
agctccagtgacagaacacatttttctttttgt

SEQ ID NO: 591270 - DNA, 33 bp, Homo sapien
agctccagtgacagaagacatttttctttttgt

SEQ ID NO: 591271 - DNA, 33 bp, Homo sapien
gagactcatctaccaaacaattgaaaccatcat

SEQ ID NO: 591272 - DNA, 33 bp, Homo sapien
gagactcatctaccaaccaattgaaaccatcat

SEQ ID NO: 591273 - DNA, 33 bp, Homo sapien
cagtttgggatgagtgaagtttaattcagggag

SEQ ID NO: 591274 - DNA, 33 bp, Homo sapien
cagtttgggatgagtggagtttaattcagggag

SEQ ID NO: 591275 - DNA, 33 bp, Homo sapien
ttctttctttctgaaacgacagcttttcaagaa

SEQ ID NO: 591276 - DNA, 33 bp, Homo sapien
ttctttctttctgaaatgacagcttttcaagaa

SEQ ID NO: 591277 - DNA, 33 bp, Homo sapien
tcgctgccagcttcaagtctttatttctttttt

SEQ ID NO: 591278 - DNA, 33 bp, Homo sapien
tcgctgccagcttcaattctttatttctttttt

SEQ ID NO: 591279 - DNA, 33 bp, Homo sapien
tcttcaatatttggtacaaagctgtcggttact

SEQ ID NO: 591280 - DNA, 33 bp, Homo sapien
tcttcaatatttggtagaaagctgtcggttact

SEQ ID NO: 591281 - DNA, 33 bp, Homo sapien
tggaatcaaacagagaagttgaaaaacaaggat

SEQ ID NO: 591282 - DNA, 33 bp, Homo sapien
tggaatcaaacagagacgttgaaaaacaaggat

SEQ ID NO: 591283 - DNA, 33 bp, Homo sapien
aaagtctgttgtttccacctctccttttcatcc

SEQ ID NO: 591284 - DNA, 33 bp, Homo sapien
aaagtctgttgtttcctcctctccttttcatcc

SEQ ID NO: 591285 - DNA, 33 bp, Homo sapien
tcatccaacaacctccccacagagctgggctgc

SEQ ID NO: 591286 - DNA, 33 bp, Homo sapien
tcatccaacaacctcctcacagagctgggctgc

SEQ ID NO: 591287 - DNA, 33 bp, Homo sapien
aacaaaataatcagccacctctttcacagctca

SEQ ID NO: 591288 - DNA, 33 bp, Homo sapien
aacaaaataatcagccgcctctttcacagctca

SEQ ID NO: 591289 - DNA, 33 bp, Homo sapien
tctcctatgtatctgcaacaccattatcatacc

SEQ ID NO: 591290 - DNA, 33 bp, Homo sapien
tctcctatgtatctgcgacaccattatcatacc

SEQ ID NO: 591291 - DNA, 33 bp, Homo sapien
atttaacttcgctctccaacaattgatccatca

SEQ ID NO: 591292 - DNA, 33 bp, Homo sapien
atttaacttcgctctcgaacaattgatccatca

SEQ ID NO: 591293 - DNA, 33 bp, Homo sapien
aggcaggcatcaatacacagctcatcgagggaa

SEQ ID NO: 591294 - DNA, 33 bp, Homo sapien
aggcaggcatcaatacgcagctcatcgagggaa

SEQ ID NO: 591295 - DNA, 33 bp, Homo sapien
attcattcattctttcaaccatgcaataaatac

SEQ ID NO: 591296 - DNA, 33 bp, Homo sapien
attcattcattctttcgaccatgcaataaatac

SEQ ID NO: 591297 - DNA, 33 bp, Homo sapien
tgagaaaccctggcgacgagcaggatttggcac

SEQ ID NO: 591298 - DNA, 33 bp, Homo sapien
tgagaaaccctggcgatgagcaggatttggcac

SEQ ID NO: 591299 - DNA, 33 bp, Homo sapien
ccattttttactgttaccaaactgtagaaatct

SEQ ID NO: 591300 - DNA, 33 bp, Homo sapien
ccattttttactgttagcaaactgtagaaatct

SEQ ID NO: 591301 - DNA, 33 bp, Homo sapien
ccaaggtttcaaagccaagacccgtgctgttct

SEQ ID NO: 591302 - DNA, 33 bp, Homo sapien
ccaaggtttcaaagccgagacccgtgctgttct

SEQ ID NO: 591303 - DNA, 33 bp, Homo sapien
tctgcacccccaagtcccaggcaggttaaaaca

SEQ ID NO: 591304 - DNA, 33 bp, Homo sapien
tctgcacccccaagtctcaggcaggttaaaaca

SEQ ID NO: 591305 - DNA, 33 bp, Homo sapien
tcaacaggagagtgcgaaacagatgggagctaa

SEQ ID NO: 591306 - DNA, 33 bp, Homo sapien
tcaacaggagagtgcgcaacagatgggagctaa

SEQ ID NO: 591307 - DNA, 33 bp, Homo sapien
agttttctcaacgttcaaatgtttccaatgttt

SEQ ID NO: 591308 - DNA, 33 bp, Homo sapien
agttttctcaacgttcgaatgtttccaatgttt

SEQ ID NO: 591309 - DNA, 33 bp, Homo sapien
ggctggtcaggtggtacgtgggacattgcccaa

SEQ ID NO: 591310 - DNA, 33 bp, Homo sapien
ggctggtcaggtggtatgtgggacattgcccaa

SEQ ID NO: 591311 - DNA, 33 bp, Homo sapien
cccaattttctactcccgattttctataggtca

SEQ ID NO: 591312 - DNA, 33 bp, Homo sapien
cccaattttctactcctgattttctataggtca

SEQ ID NO: 591313 - DNA, 33 bp, Homo sapien
ggatatgacaaccaaaatgtaagccacaaaagc

SEQ ID NO: 591314 - DNA, 33 bp, Homo sapien
ggatatgacaaccaaagtgtaagccacaaaagc

SEQ ID NO: 591315 - DNA, 33 bp, Homo sapien
cacagtgcatctcaaactatctgtggtaagaaa

SEQ ID NO: 591316 - DNA, 33 bp, Homo sapien
cacagtgcatctcaaagtatctgtggtaagaaa

SEQ ID NO: 591317 - DNA, 33 bp, Homo sapien
tgtgggacataagtagcctacagaaggaggagt

SEQ ID NO: 591318 - DNA, 33 bp, Homo sapien
tgtgggacataagtagtctacagaaggaggagt

SEQ ID NO: 591319 - DNA, 33 bp, Homo sapien
ccccaggcgccattacaccatatttgaattatg

SEQ ID NO: 591320 - DNA, 33 bp, Homo sapien
ccccaggcgccattacgccatatttgaattatg

SEQ ID NO: 591321 - DNA, 33 bp, Homo sapien
gaattatgttatcaaaaagacagacgtggattc

SEQ ID NO: 591322 - DNA, 33 bp, Homo sapien
gaattatgttatcaaagagacagacgtggattc

SEQ ID NO: 591323 - DNA, 33 bp, Homo sapien
taccagctatcgctaaaccaacaaaagccatca

SEQ ID NO: 591324 - DNA, 33 bp, Homo sapien
taccagctatcgctaagccaacaaaagccatca

SEQ ID NO: 591325 - DNA, 33 bp, Homo sapien
cacttttcatccctaactgatggcttttgttgg

SEQ ID NO: 591326 - DNA, 33 bp, Homo sapien
cacttttcatccctaattgatggcttttgttgg

SEQ ID NO: 591327 - DNA, 33 bp, Homo sapien
ttctgacctctagaaccgtaggataataacatt

SEQ ID NO: 591328 - DNA, 33 bp, Homo sapien
ttctgacctctagaactgtaggataataacatt

SEQ ID NO: 591329 - DNA, 33 bp, Homo sapien
gatctagtgatgctgaaatttgcattcataggg

SEQ ID NO: 591330 - DNA, 33 bp, Homo sapien
gatctagtgatgctgagatttgcattcataggg

SEQ ID NO: 591331 - DNA, 33 bp, Homo sapien
ggcccctgagttaaagccttcagaatatgtgaa

SEQ ID NO: 591332 - DNA, 33 bp, Homo sapien
ggcccctgagttaaaggcttcagaatatgtgaa

SEQ ID NO: 591333 - DNA, 33 bp, Homo sapien
aggggccttccttaatcacagcacgattacatg

SEQ ID NO: 591334 - DNA, 33 bp, Homo sapien
aggggccttccttaattacagcacgattacatg

SEQ ID NO: 591335 - DNA, 33 bp, Homo sapien
tgatgacaaagcaagacgttaaaagcctaggct

SEQ ID NO: 591336 - DNA, 33 bp, Homo sapien
tgatgacaaagcaagatgttaaaagcctaggct

SEQ ID NO: 591337 - DNA, 33 bp, Homo sapien
ttgtagtttactggtgaaaatggctttaccaca

SEQ ID NO: 591338 - DNA, 33 bp, Homo sapien
ttgtagtttactggtggaaatggctttaccaca

SEQ ID NO: 591339 - DNA, 33 bp, Homo sapien
atgattctgtgagctaagtaatcaattcgggtc

SEQ ID NO: 591340 - DNA, 33 bp, Homo sapien
atgattctgtgagctaggtaatcaattcgggtc

SEQ ID NO: 591341 - DNA, 33 bp, Homo sapien
aacagtagggctgacgaaccacgttcagttgct

SEQ ID NO: 591342 - DNA, 33 bp, Homo sapien
aacagtagggctgacggaccacgttcagttgct

SEQ ID NO: 591343 - DNA, 33 bp, Homo sapien
agtctcccctgctaacagtgtggttaccaggac

SEQ ID NO: 591344 - DNA, 33 bp, Homo sapien
agtctcccctgctaacggtgtggttaccaggac

SEQ ID NO: 591345 - DNA, 33 bp, Homo sapien
ttggcctctaatcaagcacttatttgcaacaac

SEQ ID NO: 591346 - DNA, 33 bp, Homo sapien
ttggcctctaatcaagtacttatttgcaacaac

SEQ ID NO: 591347 - DNA, 33 bp, Homo sapien
ctatgtcagcctttgacatctgttctccatcct

SEQ ID NO: 591348 - DNA, 33 bp, Homo sapien
ctatgtcagcctttgatatctgttctccatcct

SEQ ID NO: 591349 - DNA, 33 bp, Homo sapien
tgaacaatcggtggaaatcaactgtacacatgt

SEQ ID NO: 591350 - DNA, 33 bp, Homo sapien
tgaacaatcggtggaagtcaactgtacacatgt

SEQ ID NO: 591351 - DNA, 33 bp, Homo sapien
acaagttctatctccaacaaaccagctgtcagg

SEQ ID NO: 591352 - DNA, 33 bp, Homo sapien
acaagttctatctccatcaaaccagctgtcagg

SEQ ID NO: 591353 - DNA, 33 bp, Homo sapien
acagacactgcaaacaagcgcccttacctgcag

SEQ ID NO: 591354 - DNA, 33 bp, Homo sapien
acagacactgcaaacaggcgcccttacctgcag

SEQ ID NO: 591355 - DNA, 33 bp, Homo sapien
gcaggtgtaatataccgaggcctcaaaaccaca

SEQ ID NO: 591356 - DNA, 33 bp, Homo sapien
gcaggtgtaatatacctaggcctcaaaaccaca

SEQ ID NO: 591357 - DNA, 33 bp, Homo sapien
acaagcccaccttgagaagagaagctaataagg

SEQ ID NO: 591358 - DNA, 33 bp, Homo sapien
acaagcccaccttgaggagagaagctaataagg

SEQ ID NO: 591359 - DNA, 33 bp, Homo sapien
gggtcaggtagccccaactttcaggcagacaca

SEQ ID NO: 591360 - DNA, 33 bp, Homo sapien
gggtcaggtagccccagctttcaggcagacaca

SEQ ID NO: 591361 - DNA, 33 bp, Homo sapien
acttgaagatggaaaacggtcccttctccttgt

SEQ ID NO: 591362 - DNA, 33 bp, Homo sapien
acttgaagatggaaaatggtcccttctccttgt

SEQ ID NO: 591363 - DNA, 33 bp, Homo sapien
tagccaagcagaaaaagctccttccatgacatc

SEQ ID NO: 591364 - DNA, 33 bp, Homo sapien
tagccaagcagaaaaatctccttccatgacatc

SEQ ID NO: 591365 - DNA, 33 bp, Homo sapien
tgggatatggtaagaaagttctatgtggcagtc

SEQ ID NO: 591366 - DNA, 33 bp, Homo sapien
tgggatatggtaagaacgttctatgtggcagtc

SEQ ID NO: 591367 - DNA, 33 bp, Homo sapien
tttcagtcttccaagaccctgattgcacctctc

SEQ ID NO: 591368 - DNA, 33 bp, Homo sapien
tttcagtcttccaagagcctgattgcacctctc

SEQ ID NO: 591369 - DNA, 33 bp, Homo sapien
gagagaaaggagaagagaaatgctctcccgtct

SEQ ID NO: 591370 - DNA, 33 bp, Homo sapien
gagagaaaggagaagataaatgctctcccgtct

SEQ ID NO: 591371 - DNA, 33 bp, Homo sapien
cttgacaatttccatgacagggacccagatccc

SEQ ID NO: 591372 - DNA, 33 bp, Homo sapien
cttgacaatttccatgccagggacccagatccc

SEQ ID NO: 591373 - DNA, 33 bp, Homo sapien
ctgttaaaggattatacatctctgtcccttgac

SEQ ID NO: 591374 - DNA, 33 bp, Homo sapien
ctgttaaaggattatatatctctgtcccttgac

SEQ ID NO: 591375 - DNA, 33 bp, Homo sapien
ctacgttttgctgtgaaaatggcagcacatctg

SEQ ID NO: 591376 - DNA, 33 bp, Homo sapien
ctacgttttgctgtgataatggcagcacatctg

SEQ ID NO: 591377 - DNA, 33 bp, Homo sapien
ctgcacatatttctggaaggaatcttagttggt

SEQ ID NO: 591378 - DNA, 33 bp, Homo sapien
ctgcacatatttctgggaggaatcttagttggt

SEQ ID NO: 591379 - DNA, 33 bp, Homo sapien
tttacaggttgatgtaagattggccctgtgcag

SEQ ID NO: 591380 - DNA, 33 bp, Homo sapien
tttacaggttgatgtacgattggccctgtgcag

SEQ ID NO: 591381 - DNA, 33 bp, Homo sapien
gagcacacactggggaactatagacttctcaaa

SEQ ID NO: 591382 - DNA, 33 bp, Homo sapien
gagcacacactggggagctatagacttctcaaa

SEQ ID NO: 591383 - DNA, 33 bp, Homo sapien
agcatctttcctttagaatacatgcagtacact

SEQ ID NO: 591384 - DNA, 33 bp, Homo sapien
agcatctttcctttagcatacatgcagtacact

SEQ ID NO: 591385 - DNA, 33 bp, Homo sapien
gtctttttatgcatgaactgccattattttgtc

SEQ ID NO: 591386 - DNA, 33 bp, Homo sapien
gtctttttatgcatgagctgccattattttgtc

SEQ ID NO: 591387 - DNA, 33 bp, Homo sapien
tttatgtctagtgttccgaaatctcacaaaatt

SEQ ID NO: 591388 - DNA, 33 bp, Homo sapien
tttatgtctagtgttctgaaatctcacaaaatt

SEQ ID NO: 591389 - DNA, 33 bp, Homo sapien
cccactgcctggtcaactgggttgcagctcatc

SEQ ID NO: 591390 - DNA, 33 bp, Homo sapien
cccactgcctggtcaattgggttgcagctcatc

SEQ ID NO: 591391 - DNA, 33 bp, Homo sapien
cgttgctgtgattaacaaaatagttggatgcat

SEQ ID NO: 591392 - DNA, 33 bp, Homo sapien
cgttgctgtgattaacgaaatagttggatgcat

SEQ ID NO: 591393 - DNA, 33 bp, Homo sapien
aatcgccagggaaagcaaatgaaacacatccca

SEQ ID NO: 591394 - DNA, 33 bp, Homo sapien
aatcgccagggaaagcgaatgaaacacatccca

SEQ ID NO: 591395 - DNA, 33 bp, Homo sapien
tttctcttccttaccccatgtcggcagaccgcg

SEQ ID NO: 591396 - DNA, 33 bp, Homo sapien
tttctcttccttaccctatgtcggcagaccgcg

SEQ ID NO: 591397 - DNA, 33 bp, Homo sapien
agaaatgagttgcccacctaactagggtgatgt

SEQ ID NO: 591398 - DNA, 33 bp, Homo sapien
agaaatgagttgcccatctaactagggtgatgt

SEQ ID NO: 591399 - DNA, 33 bp, Homo sapien
tccctgctctcctaaaatcactcaatcttagga

SEQ ID NO: 591400 - DNA, 33 bp, Homo sapien
tccctgctctcctaaagtcactcaatcttagga

SEQ ID NO: 591401 - DNA, 33 bp, Homo sapien
tcacacttcttagacgcagtgctccactgggtg

SEQ ID NO: 591402 - DNA, 33 bp, Homo sapien
tcacacttcttagacgtagtgctccactgggtg

SEQ ID NO: 591403 - DNA, 33 bp, Homo sapien
tagtgaagcttaggacaaaggcattttgagctt

SEQ ID NO: 591404 - DNA, 33 bp, Homo sapien
tagtgaagcttaggacgaaggcattttgagctt

SEQ ID NO: 591405 - DNA, 33 bp, Homo sapien
ccaggtgcaggtagaaaagaggacgcggctgtt

SEQ ID NO: 591406 - DNA, 33 bp, Homo sapien
ccaggtgcaggtagaagagaggacgcggctgtt

SEQ ID NO: 591407 - DNA, 33 bp, Homo sapien
cctttgggccaagaaaactggagtggaactgtc

SEQ ID NO: 591408 - DNA, 33 bp, Homo sapien
cctttgggccaagaaagctggagtggaactgtc

SEQ ID NO: 591409 - DNA, 33 bp, Homo sapien
tggttttgcctacaacacctatatctgtaagag

SEQ ID NO: 591410 - DNA, 33 bp, Homo sapien
tggttttgcctacaacgcctatatctgtaagag

SEQ ID NO: 591411 - DNA, 33 bp, Homo sapien
accgatgcaagttccccgctactgctttttatt

SEQ ID NO: 591412 - DNA, 33 bp, Homo sapien
accgatgcaagttccctgctactgctttttatt

SEQ ID NO: 591413 - DNA, 33 bp, Homo sapien
ttcacgtcttccctaaatctcagaaagcgatat

SEQ ID NO: 591414 - DNA, 33 bp, Homo sapien
ttcacgtcttccctaagtctcagaaagcgatat

SEQ ID NO: 591415 - DNA, 33 bp, Homo sapien
ctgtgcctggccagaaacagctaaatcaagcca

SEQ ID NO: 591416 - DNA, 33 bp, Homo sapien
ctgtgcctggccagaagcagctaaatcaagcca

SEQ ID NO: 591417 - DNA, 33 bp, Homo sapien
tcaagacggtgtgtaactgatgtaaccactgag

SEQ ID NO: 591418 - DNA, 33 bp, Homo sapien
tcaagacggtgtgtaattgatgtaaccactgag

SEQ ID NO: 591419 - DNA, 33 bp, Homo sapien
ggctgactcgctgacccaagtcatggcgtcctg

SEQ ID NO: 591420 - DNA, 33 bp, Homo sapien
ggctgactcgctgacctaagtcatggcgtcctg

SEQ ID NO: 591421 - DNA, 33 bp, Homo sapien
cccagagcgccattacccgccgcggccacacca

SEQ ID NO: 591422 - DNA, 33 bp, Homo sapien
cccagagcgccattactcgccgcggccacacca

SEQ ID NO: 591423 - DNA, 33 bp, Homo sapien
aactaaactatcattaccttccccgatgctaag

SEQ ID NO: 591424 - DNA, 33 bp, Homo sapien
aactaaactatcattatcttccccgatgctaag

SEQ ID NO: 591425 - DNA, 33 bp, Homo sapien
aaatgctttgctgaaacgaccactgaactggaa

SEQ ID NO: 591426 - DNA, 33 bp, Homo sapien
aaatgctttgctgaaatgaccactgaactggaa

SEQ ID NO: 591427 - DNA, 33 bp, Homo sapien
tttaaaatcatgatccacatttgttaagtcagg

SEQ ID NO: 591428 - DNA, 33 bp, Homo sapien
tttaaaatcatgatccgcatttgttaagtcagg

SEQ ID NO: 591429 - DNA, 33 bp, Homo sapien
taaaacagaccttccacgtgatattttagtatt

SEQ ID NO: 591430 - DNA, 33 bp, Homo sapien
taaaacagaccttccatgtgatattttagtatt

SEQ ID NO: 591431 - DNA, 33 bp, Homo sapien
ggacagtgagtcggtgaaccccagcattgttca

SEQ ID NO: 591432 - DNA, 33 bp, Homo sapien
ggacagtgagtcggtgtaccccagcattgttca

SEQ ID NO: 591433 - DNA, 33 bp, Homo sapien
cttcctagcactcatcacaattgaaatttaagg

SEQ ID NO: 591434 - DNA, 33 bp, Homo sapien
cttcctagcactcatcgcaattgaaatttaagg

SEQ ID NO: 591435 - DNA, 33 bp, Homo sapien
caaaagccatacagacaagaatgcagtgtttcg

SEQ ID NO: 591436 - DNA, 33 bp, Homo sapien
caaaagccatacagacgagaatgcagtgtttcg

SEQ ID NO: 591437 - DNA, 33 bp, Homo sapien
ccttcttttctgttcactccaggggtgcagccc

SEQ ID NO: 591438 - DNA, 33 bp, Homo sapien
ccttcttttctgttcattccaggggtgcagccc

SEQ ID NO: 591439 - DNA, 33 bp, Homo sapien
ggacacttgccgggaaggctgttgttacaaatg

SEQ ID NO: 591440 - DNA, 33 bp, Homo sapien
ggacacttgccgggaatgctgttgttacaaatg

SEQ ID NO: 591441 - DNA, 33 bp, Homo sapien
actggctattaaaataaaaagcaattgtcaatt

SEQ ID NO: 591442 - DNA, 33 bp, Homo sapien
actggctattaaaatacaaagcaattgtcaatt

SEQ ID NO: 591443 - DNA, 33 bp, Homo sapien
ttacctctggaaaaaaaacaagtaactacagca

SEQ ID NO: 591444 - DNA, 33 bp, Homo sapien
ttacctctggaaaaaagacaagtaactacagca

SEQ ID NO: 591445 - DNA, 33 bp, Homo sapien
ggttatgaaaacagaaactactaacttgagtcc

SEQ ID NO: 591446 - DNA, 33 bp, Homo sapien
ggttatgaaaacagaatctactaacttgagtcc

SEQ ID NO: 591447 - DNA, 33 bp, Homo sapien
acaaaggagcgctagacaaagaccacgctgaga

SEQ ID NO: 591448 - DNA, 33 bp, Homo sapien
acaaaggagcgctagagaaagaccacgctgaga

SEQ ID NO: 591449 - DNA, 33 bp, Homo sapien
agtggaagctacaccgcagaagtggcctggtga

SEQ ID NO: 591450 - DNA, 33 bp, Homo sapien
agtggaagctacaccggagaagtggcctggtga

SEQ ID NO: 591451 - DNA, 33 bp, Homo sapien
tgcgccaggcccaaaacggtttttaatgataat

SEQ ID NO: 591452 - DNA, 33 bp, Homo sapien
tgcgccaggcccaaaatggtttttaatgataat

SEQ ID NO: 591453 - DNA, 33 bp, Homo sapien
taatcaggaatcaaaaacgcatgaggggttcaa

SEQ ID NO: 591454 - DNA, 33 bp, Homo sapien
taatcaggaatcaaaagcgcatgaggggttcaa

SEQ ID NO: 591455 - DNA, 33 bp, Homo sapien
aaacacaaaggatggaagtagtagcgtgtgctt

SEQ ID NO: 591456 - DNA, 33 bp, Homo sapien
aaacacaaaggatggaggtagtagcgtgtgctt

SEQ ID NO: 591457 - DNA, 33 bp, Homo sapien
tcacaaatatattctccgagaagcttaacagtt

SEQ ID NO: 591458 - DNA, 33 bp, Homo sapien
tcacaaatatattctctgagaagcttaacagtt

SEQ ID NO: 591459 - DNA, 33 bp, Homo sapien
tacttctggacacttaccctgttccattcatct

SEQ ID NO: 591460 - DNA, 33 bp, Homo sapien
tacttctggacacttatcctgttccattcatct

SEQ ID NO: 591461 - DNA, 33 bp, Homo sapien
agaaattcagtaactagccaaaatcatagggtt

SEQ ID NO: 591462 - DNA, 33 bp, Homo sapien
agaaattcagtaactatccaaaatcatagggtt

SEQ ID NO: 591463 - DNA, 33 bp, Homo sapien
tggaacagatgcagtcacaggaatgataacagt

SEQ ID NO: 591464 - DNA, 33 bp, Homo sapien
tggaacagatgcagtcgcaggaatgataacagt

SEQ ID NO: 591465 - DNA, 33 bp, Homo sapien
gaagatgtagactcgactagagtggaagatgga

SEQ ID NO: 591466 - DNA, 33 bp, Homo sapien
gaagatgtagactcgattagagtggaagatgga

SEQ ID NO: 591467 - DNA, 33 bp, Homo sapien
agatgctgtattagaagctttccgtaaatgata

SEQ ID NO: 591468 - DNA, 33 bp, Homo sapien
agatgctgtattagaatctttccgtaaatgata

SEQ ID NO: 591469 - DNA, 33 bp, Homo sapien
aagaaaaggaagacaaagatttccctgactatg

SEQ ID NO: 591470 - DNA, 33 bp, Homo sapien
aagaaaaggaagacaacgatttccctgactatg

SEQ ID NO: 591471 - DNA, 33 bp, Homo sapien
acataagcaagtggtaaaggagccaaagattcc

SEQ ID NO: 591472 - DNA, 33 bp, Homo sapien
acataagcaagtggtataggagccaaagattcc

SEQ ID NO: 591473 - DNA, 33 bp, Homo sapien
gatcaaaatttgctcaagagctatggacgtgag

SEQ ID NO: 591474 - DNA, 33 bp, Homo sapien
gatcaaaatttgctcacgagctatggacgtgag

SEQ ID NO: 591475 - DNA, 33 bp, Homo sapien
caggagtaagatgctgccacacaccctggatca

SEQ ID NO: 591476 - DNA, 33 bp, Homo sapien
caggagtaagatgctgtcacacaccctggatca

SEQ ID NO: 591477 - DNA, 33 bp, Homo sapien
cacttttgttattacgacatcttggcctccagc

SEQ ID NO: 591478 - DNA, 33 bp, Homo sapien
cacttttgttattacgtcatcttggcctccagc

SEQ ID NO: 591479 - DNA, 33 bp, Homo sapien
aattctcatggtatgcaaggctcattcatgtca

SEQ ID NO: 591480 - DNA, 33 bp, Homo sapien
aattctcatggtatgccaggctcattcatgtca

SEQ ID NO: 591481 - DNA, 33 bp, Homo sapien
gttgttattgtcttcacaggggattttattatt

SEQ ID NO: 591482 - DNA, 33 bp, Homo sapien
gttgttattgtcttcataggggattttattatt

SEQ ID NO: 591483 - DNA, 33 bp, Homo sapien
tcatgacttgcgactaagaagaaatttcttaaa

SEQ ID NO: 591484 - DNA, 33 bp, Homo sapien
tcatgacttgcgactaggaagaaatttcttaaa

SEQ ID NO: 591485 - DNA, 33 bp, Homo sapien
tccatggagctaacacaggccaggaatgggcgg

SEQ ID NO: 591486 - DNA, 33 bp, Homo sapien
tccatggagctaacacgggccaggaatgggcgg

SEQ ID NO: 591487 - DNA, 33 bp, Homo sapien
ttgctgtaagttgatgcacgaatttggtacaag

SEQ ID NO: 591488 - DNA, 33 bp, Homo sapien
ttgctgtaagttgatgtacgaatttggtacaag

SEQ ID NO: 591489 - DNA, 33 bp, Homo sapien
taaaaccctttatttcacaattacgctaatatc

SEQ ID NO: 591490 - DNA, 33 bp, Homo sapien
taaaaccctttatttcgcaattacgctaatatc

SEQ ID NO: 591491 - DNA, 33 bp, Homo sapien
taaaacgtcacttctacagggaggatgtctctg

SEQ ID NO: 591492 - DNA, 33 bp, Homo sapien
taaaacgtcacttctatagggaggatgtctctg

SEQ ID NO: 591493 - DNA, 33 bp, Homo sapien
ggccaacggtggctaacagtgtgtaggtgacct

SEQ ID NO: 591494 - DNA, 33 bp, Homo sapien
ggccaacggtggctaatagtgtgtaggtgacct

SEQ ID NO: 591495 - DNA, 33 bp, Homo sapien
cagtgggtgacaggcaatcagcagcaatacatc

SEQ ID NO: 591496 - DNA, 33 bp, Homo sapien
cagtgggtgacaggcagtcagcagcaatacatc

SEQ ID NO: 591497 - DNA, 33 bp, Homo sapien
ccaggtgatcgcacccaggacaccccacagtga

SEQ ID NO: 591498 - DNA, 33 bp, Homo sapien
ccaggtgatcgcaccccggacaccccacagtga

SEQ ID NO: 591499 - DNA, 33 bp, Homo sapien
ataagtcccatatataacagatttccttccagt

SEQ ID NO: 591500 - DNA, 33 bp, Homo sapien
ataagtcccatatataccagatttccttccagt

SEQ ID NO: 591501 - DNA, 33 bp, Homo sapien
cactggtgtcccagccaagtaagctgcagattt

SEQ ID NO: 591502 - DNA, 33 bp, Homo sapien
cactggtgtcccagccgagtaagctgcagattt

SEQ ID NO: 591503 - DNA, 33 bp, Homo sapien
caagtcttttggttaaccagggtattcaagaaa

SEQ ID NO: 591504 - DNA, 33 bp, Homo sapien
caagtcttttggttaatcagggtattcaagaaa

SEQ ID NO: 591505 - DNA, 33 bp, Homo sapien
cgctgagcttcacctcactctggtcagccttgg

SEQ ID NO: 591506 - DNA, 33 bp, Homo sapien
cgctgagcttcacctcgctctggtcagccttgg

SEQ ID NO: 591507 - DNA, 33 bp, Homo sapien
aaaccaaaatcaaaacaaagaagcaggaaaaaa

SEQ ID NO: 591508 - DNA, 33 bp, Homo sapien
aaaccaaaatcaaaacgaagaagcaggaaaaaa

SEQ ID NO: 591509 - DNA, 33 bp, Homo sapien
acataagccaactgtccacttagtgatgctgac

SEQ ID NO: 591510 - DNA, 33 bp, Homo sapien
acataagccaactgtcgacttagtgatgctgac

SEQ ID NO: 591511 - DNA, 33 bp, Homo sapien
agaataattaaattcaagttcactctgagaaga

SEQ ID NO: 591512 - DNA, 33 bp, Homo sapien
agaataattaaattcacgttcactctgagaaga

SEQ ID NO: 591513 - DNA, 33 bp, Homo sapien
agctaccaccatatcaaggtaatttcccacaca

SEQ ID NO: 591514 - DNA, 33 bp, Homo sapien
agctaccaccatatcagggtaatttcccacaca

SEQ ID NO: 591515 - DNA, 33 bp, Homo sapien
tatgtttggtagaagaagaccagctgttgatac

SEQ ID NO: 591516 - DNA, 33 bp, Homo sapien
tatgtttggtagaagacgaccagctgttgatac

SEQ ID NO: 591517 - DNA, 33 bp, Homo sapien
actgtcctgtagagaaatgtaggatatggcttt

SEQ ID NO: 591518 - DNA, 33 bp, Homo sapien
actgtcctgtagagaagtgtaggatatggcttt

SEQ ID NO: 591519 - DNA, 33 bp, Homo sapien
taaattagaacatcttgaactattggaaatatg

SEQ ID NO: 591520 - DNA, 33 bp, Homo sapien
taaattagaacatctttaactattggaaatatg

SEQ ID NO: 591521 - DNA, 33 bp, Homo sapien
tgacctagagagatgaaataatttgcttaagat

SEQ ID NO: 591522 - DNA, 33 bp, Homo sapien
tgacctagagagatgagataatttgcttaagat

SEQ ID NO: 591523 - DNA, 33 bp, Homo sapien
acagggtcttgctttacctcccaagctagagtg

SEQ ID NO: 591524 - DNA, 33 bp, Homo sapien
acagggtcttgctttatctcccaagctagagtg

SEQ ID NO: 591525 - DNA, 33 bp, Homo sapien
aaattggacgactccagagtacttcttcatttt

SEQ ID NO: 591526 - DNA, 33 bp, Homo sapien
aaattggacgactccatagtacttcttcatttt

SEQ ID NO: 591527 - DNA, 33 bp, Homo sapien
attgtgtgagattcggaacctcccttctcaaag

SEQ ID NO: 591528 - DNA, 33 bp, Homo sapien
attgtgtgagattcgggacctcccttctcaaag

SEQ ID NO: 591529 - DNA, 33 bp, Homo sapien
agaatcctttctcaaaggcatgcatgagtgcac

SEQ ID NO: 591530 - DNA, 33 bp, Homo sapien
agaatcctttctcaaatgcatgcatgagtgcac

SEQ ID NO: 591531 - DNA, 33 bp, Homo sapien
ccattattacatcaaagcacgcagcgtaggagg

SEQ ID NO: 591532 - DNA, 33 bp, Homo sapien
ccattattacatcaaatcacgcagcgtaggagg

SEQ ID NO: 591533 - DNA, 33 bp, Homo sapien
cttctttgataacaaaagttctattctctctgc

SEQ ID NO: 591534 - DNA, 33 bp, Homo sapien
cttctttgataacaaacgttctattctctctgc

SEQ ID NO: 591535 - DNA, 33 bp, Homo sapien
atgtgctcttcaaatacacctctggaatataaa

SEQ ID NO: 591536 - DNA, 33 bp, Homo sapien
atgtgctcttcaaatagacctctggaatataaa

SEQ ID NO: 591537 - DNA, 33 bp, Homo sapien
ctcttcagtttttaaactattttcaggctgaag

SEQ ID NO: 591538 - DNA, 33 bp, Homo sapien
ctcttcagtttttaaattattttcaggctgaag

SEQ ID NO: 591539 - DNA, 33 bp, Homo sapien
ccaacgtatctatgaaacagaccctactcttat

SEQ ID NO: 591540 - DNA, 33 bp, Homo sapien
ccaacgtatctatgaatcagaccctactcttat

SEQ ID NO: 591541 - DNA, 33 bp, Homo sapien
cttgccaggtgcgtaaatccttcacagaatggt

SEQ ID NO: 591542 - DNA, 33 bp, Homo sapien
cttgccaggtgcgtaagtccttcacagaatggt

SEQ ID NO: 591543 - DNA, 33 bp, Homo sapien
gttgcttttctgggtaaaagtgctaatactcca

SEQ ID NO: 591544 - DNA, 33 bp, Homo sapien
gttgcttttctgggtagaagtgctaatactcca

SEQ ID NO: 591545 - DNA, 33 bp, Homo sapien
acgaaaccttgagcaaacggagcagtagctggg

SEQ ID NO: 591546 - DNA, 33 bp, Homo sapien
acgaaaccttgagcaatcggagcagtagctggg

SEQ ID NO: 591547 - DNA, 33 bp, Homo sapien
ttttatactttgatcaaggtgaatccatacaca

SEQ ID NO: 591548 - DNA, 33 bp, Homo sapien
ttttatactttgatcatggtgaatccatacaca

SEQ ID NO: 591549 - DNA, 33 bp, Homo sapien
agataccgagatttcaagtaaaactatagtatt

SEQ ID NO: 591550 - DNA, 33 bp, Homo sapien
agataccgagatttcaggtaaaactatagtatt

SEQ ID NO: 591551 - DNA, 33 bp, Homo sapien
gcatactttatacttacgttcaatggaagtgat

SEQ ID NO: 591552 - DNA, 33 bp, Homo sapien
gcatactttatacttatgttcaatggaagtgat

SEQ ID NO: 591553 - DNA, 33 bp, Homo sapien
ttcttttaatctcaccagacaacttctgtcttt

SEQ ID NO: 591554 - DNA, 33 bp, Homo sapien
ttcttttaatctcaccggacaacttctgtcttt

SEQ ID NO: 591555 - DNA, 33 bp, Homo sapien
atcaaatggggataacaatactacctacctgat

SEQ ID NO: 591556 - DNA, 33 bp, Homo sapien
atcaaatggggataacgatactacctacctgat

SEQ ID NO: 591557 - DNA, 33 bp, Homo sapien
tacacaatgtcaaaaacgaaaaattagcaaacc

SEQ ID NO: 591558 - DNA, 33 bp, Homo sapien
tacacaatgtcaaaaatgaaaaattagcaaacc

SEQ ID NO: 591559 - DNA, 33 bp, Homo sapien
atatttaagtgctggcaaaaactctattttaac

SEQ ID NO: 591560 - DNA, 33 bp, Homo sapien
atatttaagtgctggctaaaactctattttaac

SEQ ID NO: 591561 - DNA, 33 bp, Homo sapien
attgctagaaataaaaagtgagattagattcat

SEQ ID NO: 591562 - DNA, 33 bp, Homo sapien
attgctagaaataaaaggtgagattagattcat

SEQ ID NO: 591563 - DNA, 33 bp, Homo sapien
tatcttccaacttgtgcagaatagattttctca

SEQ ID NO: 591564 - DNA, 33 bp, Homo sapien
tatcttccaacttgtggagaatagattttctca

SEQ ID NO: 591565 - DNA, 33 bp, Homo sapien
cccaggagattattaaaatgtgaccagagaggt

SEQ ID NO: 591566 - DNA, 33 bp, Homo sapien
cccaggagattattaagatgtgaccagagaggt

SEQ ID NO: 591567 - DNA, 33 bp, Homo sapien
tggtacacagataaaagaatgaaaccaatagtg

SEQ ID NO: 591568 - DNA, 33 bp, Homo sapien
tggtacacagataaaataatgaaaccaatagtg

SEQ ID NO: 591569 - DNA, 33 bp, Homo sapien
gctcagctttgtacaacccgaagaagaaaaagc

SEQ ID NO: 591570 - DNA, 33 bp, Homo sapien
gctcagctttgtacaatccgaagaagaaaaagc

SEQ ID NO: 591571 - DNA, 33 bp, Homo sapien
tatttaaatttagcacaaggtcataggtatttt

SEQ ID NO: 591572 - DNA, 33 bp, Homo sapien
tatttaaatttagcacgaggtcataggtatttt

SEQ ID NO: 591573 - DNA, 33 bp, Homo sapien
cagtgattaactgatacgcctacactgctgtaa

SEQ ID NO: 591574 - DNA, 33 bp, Homo sapien
cagtgattaactgatatgcctacactgctgtaa

SEQ ID NO: 591575 - DNA, 33 bp, Homo sapien
acgcttagcgattacagtcatgtgtcactgggg

SEQ ID NO: 591576 - DNA, 33 bp, Homo sapien
acgcttagcgattacattcatgtgtcactgggg

SEQ ID NO: 591577 - DNA, 33 bp, Homo sapien
aaaagaaatcttatacccactagctgtcactcc

SEQ ID NO: 591578 - DNA, 33 bp, Homo sapien
aaaagaaatcttatactcactagctgtcactcc

SEQ ID NO: 591579 - DNA, 33 bp, Homo sapien
agactcctgagtagacaagactacaaacacatg

SEQ ID NO: 591580 - DNA, 33 bp, Homo sapien
agactcctgagtagacgagactacaaacacatg

SEQ ID NO: 591581 - DNA, 33 bp, Homo sapien
aggctgatagagaacacgaaaacacaattcatt

SEQ ID NO: 591582 - DNA, 33 bp, Homo sapien
aggctgatagagaacatgaaaacacaattcatt

SEQ ID NO: 591583 - DNA, 33 bp, Homo sapien
tacaaaaagaaagaaaagtagcaactgtctttc

SEQ ID NO: 591584 - DNA, 33 bp, Homo sapien
tacaaaaagaaagaaatgtagcaactgtctttc

SEQ ID NO: 591585 - DNA, 33 bp, Homo sapien
aatattcatcagaacccatgacaatttgctaag

SEQ ID NO: 591586 - DNA, 33 bp, Homo sapien
aatattcatcagaacctatgacaatttgctaag

SEQ ID NO: 591587 - DNA, 33 bp, Homo sapien
tcacatggcatggtgtaaattaatcatacattt

SEQ ID NO: 591588 - DNA, 33 bp, Homo sapien
tcacatggcatggtgtgaattaatcatacattt

SEQ ID NO: 591589 - DNA, 33 bp, Homo sapien
tgtggaaacaaacacacctgaatagtaaagaat

SEQ ID NO: 591590 - DNA, 33 bp, Homo sapien
tgtggaaacaaacacatctgaatagtaaagaat

SEQ ID NO: 591591 - DNA, 33 bp, Homo sapien
atgcatagcaacaaagaaaatcacaattggctg

SEQ ID NO: 591592 - DNA, 33 bp, Homo sapien
atgcatagcaacaaaggaaatcacaattggctg

SEQ ID NO: 591593 - DNA, 33 bp, Homo sapien
cctttaggttgcagaactgtttatattcgaaag

SEQ ID NO: 591594 - DNA, 33 bp, Homo sapien
cctttaggttgcagaattgtttatattcgaaag

SEQ ID NO: 591595 - DNA, 33 bp, Homo sapien
cagtcccaacctagaaagctgatcagaagactc

SEQ ID NO: 591596 - DNA, 33 bp, Homo sapien
cagtcccaacctagaaggctgatcagaagactc

SEQ ID NO: 591597 - DNA, 33 bp, Homo sapien
ctcgtgggtggcaccaataacctccagtcttgc

SEQ ID NO: 591598 - DNA, 33 bp, Homo sapien
ctcgtgggtggcaccagtaacctccagtcttgc

SEQ ID NO: 591599 - DNA, 33 bp, Homo sapien
taaatctgaaaagaagaaaattggagaaactag

SEQ ID NO: 591600 - DNA, 33 bp, Homo sapien
taaatctgaaaagaaggaaattggagaaactag

SEQ ID NO: 591601 - DNA, 33 bp, Homo sapien
actctgctgctaaagaccctgcatatacttact

SEQ ID NO: 591602 - DNA, 33 bp, Homo sapien
actctgctgctaaagatcctgcatatacttact

SEQ ID NO: 591603 - DNA, 33 bp, Homo sapien
tcaacttgtctaagccaccatttcctcattaga

SEQ ID NO: 591604 - DNA, 33 bp, Homo sapien
tcaacttgtctaagcctccatttcctcattaga

SEQ ID NO: 591605 - DNA, 33 bp, Homo sapien
gagcttgtgtaaataagagcaggcttccctagt

SEQ ID NO: 591606 - DNA, 33 bp, Homo sapien
gagcttgtgtaaataatagcaggcttccctagt

SEQ ID NO: 591607 - DNA, 33 bp, Homo sapien
agatctgcaggcaacaaatagaataccagactc

SEQ ID NO: 591608 - DNA, 33 bp, Homo sapien
agatctgcaggcaacagatagaataccagactc

SEQ ID NO: 591609 - DNA, 33 bp, Homo sapien
atgtgtagcaaattaccccaatctgtagtagct

SEQ ID NO: 591610 - DNA, 33 bp, Homo sapien
atgtgtagcaaattactccaatctgtagtagct

SEQ ID NO: 591611 - DNA, 33 bp, Homo sapien
cttccagccgacaacaagccttcagacaactgc

SEQ ID NO: 591612 - DNA, 33 bp, Homo sapien
cttccagccgacaacaggccttcagacaactgc

SEQ ID NO: 591613 - DNA, 33 bp, Homo sapien
ccagaaggcagaatacaagatggagatttaaca

SEQ ID NO: 591614 - DNA, 33 bp, Homo sapien
ccagaaggcagaatacgagatggagatttaaca

SEQ ID NO: 591615 - DNA, 33 bp, Homo sapien
cagaggtgcaatgtcagagtcaaaggcaatctt

SEQ ID NO: 591616 - DNA, 33 bp, Homo sapien
cagaggtgcaatgtcatagtcaaaggcaatctt

SEQ ID NO: 591617 - DNA, 33 bp, Homo sapien
tgcaagttcaaaatcaagatgtcagcagggttg

SEQ ID NO: 591618 - DNA, 33 bp, Homo sapien
tgcaagttcaaaatcaggatgtcagcagggttg

SEQ ID NO: 591619 - DNA, 33 bp, Homo sapien
caccaaattatctaccaccgatcagcgaatgga

SEQ ID NO: 591620 - DNA, 33 bp, Homo sapien
caccaaattatctaccgccgatcagcgaatgga

SEQ ID NO: 591621 - DNA, 33 bp, Homo sapien
tctatttcagagtggaagttctctggttcaaat

SEQ ID NO: 591622 - DNA, 33 bp, Homo sapien
tctatttcagagtggacgttctctggttcaaat

SEQ ID NO: 591623 - DNA, 33 bp, Homo sapien
aatcaaaccgtgttgaaggggagggaagcatag

SEQ ID NO: 591624 - DNA, 33 bp, Homo sapien
aatcaaaccgtgttgagggggagggaagcatag

SEQ ID NO: 591625 - DNA, 33 bp, Homo sapien
cttttactacaattaaaaaaagcacacccaaaa

SEQ ID NO: 591626 - DNA, 33 bp, Homo sapien
cttttactacaattaagaaaagcacacccaaaa

SEQ ID NO: 591627 - DNA, 33 bp, Homo sapien
aggaaagagataaagaataatgtggctaataaa

SEQ ID NO: 591628 - DNA, 33 bp, Homo sapien
aggaaagagataaagagtaatgtggctaataaa

SEQ ID NO: 591629 - DNA, 33 bp, Homo sapien
tagcttttggatggaaaactcagcctgaatgtc

SEQ ID NO: 591630 - DNA, 33 bp, Homo sapien
tagcttttggatggaagactcagcctgaatgtc

SEQ ID NO: 591631 - DNA, 33 bp, Homo sapien
atgcaggagtataatacgtgacaacagtatcac

SEQ ID NO: 591632 - DNA, 33 bp, Homo sapien
atgcaggagtataatatgtgacaacagtatcac

SEQ ID NO: 591633 - DNA, 33 bp, Homo sapien
aatgaatctttggctaacaactgttcgagaatg

SEQ ID NO: 591634 - DNA, 33 bp, Homo sapien
aatgaatctttggctagcaactgttcgagaatg

SEQ ID NO: 591635 - DNA, 33 bp, Homo sapien
tgaacagttattattacggaacatgagaagggg

SEQ ID NO: 591636 - DNA, 33 bp, Homo sapien
tgaacagttattattatggaacatgagaagggg

SEQ ID NO: 591637 - DNA, 33 bp, Homo sapien
tccctaatgtaaggtcggaactacaataataat

SEQ ID NO: 591638 - DNA, 33 bp, Homo sapien
tccctaatgtaaggtctgaactacaataataat

SEQ ID NO: 591639 - DNA, 33 bp, Homo sapien
tgagaagagttcacagcatatattaagtgaaat

SEQ ID NO: 591640 - DNA, 33 bp, Homo sapien
tgagaagagttcacagtatatattaagtgaaat

SEQ ID NO: 591641 - DNA, 33 bp, Homo sapien
cagatcctctaaactaataaagccacccaagct

SEQ ID NO: 591642 - DNA, 33 bp, Homo sapien
cagatcctctaaactagtaaagccacccaagct

SEQ ID NO: 591643 - DNA, 33 bp, Homo sapien
aacagattggcacagcagaatacaatgaaaata

SEQ ID NO: 591644 - DNA, 33 bp, Homo sapien
aacagattggcacagcggaatacaatgaaaata

SEQ ID NO: 591645 - DNA, 33 bp, Homo sapien
atacttttctgagacacagaactttcaacctgg

SEQ ID NO: 591646 - DNA, 33 bp, Homo sapien
atacttttctgagacatagaactttcaacctgg

SEQ ID NO: 591647 - DNA, 33 bp, Homo sapien
aggcatgaggcacttcaaaaatggataggattt

SEQ ID NO: 591648 - DNA, 33 bp, Homo sapien
aggcatgaggcacttcgaaaatggataggattt

SEQ ID NO: 591649 - DNA, 33 bp, Homo sapien
aaagtttgagtggagaagagagtttgaagtatt

SEQ ID NO: 591650 - DNA, 33 bp, Homo sapien
aaagtttgagtggagaggagagtttgaagtatt

SEQ ID NO: 591651 - DNA, 33 bp, Homo sapien
tgaagcggtcaggggacagaaccagaggtcaca

SEQ ID NO: 591652 - DNA, 33 bp, Homo sapien
tgaagcggtcaggggatagaaccagaggtcaca

SEQ ID NO: 591653 - DNA, 33 bp, Homo sapien
gaaaaagagctatttgcaaaccctccatgtctt

SEQ ID NO: 591654 - DNA, 33 bp, Homo sapien
gaaaaagagctatttggaaaccctccatgtctt

SEQ ID NO: 591655 - DNA, 33 bp, Homo sapien
tcttccaaaaatcaaaagaaaatccaaatgtac

SEQ ID NO: 591656 - DNA, 33 bp, Homo sapien
tcttccaaaaatcaaaggaaaatccaaatgtac

SEQ ID NO: 591657 - DNA, 33 bp, Homo sapien
atgttgtgttagggtacaatggtgtcactcatt

SEQ ID NO: 591658 - DNA, 33 bp, Homo sapien
atgttgtgttagggtagaatggtgtcactcatt

SEQ ID NO: 591659 - DNA, 33 bp, Homo sapien
ccaagttttagtgtcccctacagtgtggcacat

SEQ ID NO: 591660 - DNA, 33 bp, Homo sapien
ccaagttttagtgtcctctacagtgtggcacat

SEQ ID NO: 591661 - DNA, 33 bp, Homo sapien
cagtttatgcttctaccagctgcacatcagaat

SEQ ID NO: 591662 - DNA, 33 bp, Homo sapien
cagtttatgcttctactagctgcacatcagaat

SEQ ID NO: 591663 - DNA, 33 bp, Homo sapien
taaaaaagtgtagagacccatattgctaatgga

SEQ ID NO: 591664 - DNA, 33 bp, Homo sapien
taaaaaagtgtagagatccatattgctaatgga

SEQ ID NO: 591665 - DNA, 33 bp, Homo sapien
gtactctatttaggagaagataattgctaggct

SEQ ID NO: 591666 - DNA, 33 bp, Homo sapien
gtactctatttaggaggagataattgctaggct

SEQ ID NO: 591667 - DNA, 33 bp, Homo sapien
ttttgtgcgtacctggacattttttattgtgta

SEQ ID NO: 591668 - DNA, 33 bp, Homo sapien
ttttgtgcgtacctggtcattttttattgtgta

SEQ ID NO: 591669 - DNA, 33 bp, Homo sapien
agaagaaatacaaaaacactcggcacccgacaa

SEQ ID NO: 591670 - DNA, 33 bp, Homo sapien
agaagaaatacaaaaatactcggcacccgacaa

SEQ ID NO: 591671 - DNA, 33 bp, Homo sapien
tggagagagatacacaataaacatctgaacaaa

SEQ ID NO: 591672 - DNA, 33 bp, Homo sapien
tggagagagatacacagtaaacatctgaacaaa

SEQ ID NO: 591673 - DNA, 33 bp, Homo sapien
tgcacacttttatctggcaccctcttaggctgt

SEQ ID NO: 591674 - DNA, 33 bp, Homo sapien
tgcacacttttatctgtcaccctcttaggctgt

SEQ ID NO: 591675 - DNA, 33 bp, Homo sapien
attttccagccaaataggaggtgacgtttaagc

SEQ ID NO: 591676 - DNA, 33 bp, Homo sapien
attttccagccaaatatgaggtgacgtttaagc

SEQ ID NO: 591677 - DNA, 33 bp, Homo sapien
tctaaattaactgcaccgtctacgttgagtttt

SEQ ID NO: 591678 - DNA, 33 bp, Homo sapien
tctaaattaactgcactgtctacgttgagtttt

SEQ ID NO: 591679 - DNA, 33 bp, Homo sapien
atgactagactatgccacttaatacgcagccta

SEQ ID NO: 591680 - DNA, 33 bp, Homo sapien
atgactagactatgccgcttaatacgcagccta

SEQ ID NO: 591681 - DNA, 33 bp, Homo sapien
agtaatgatgctcactaaaaaacaccaaaatca

SEQ ID NO: 591682 - DNA, 33 bp, Homo sapien
agtaatgatgctcactcaaaaacaccaaaatca

SEQ ID NO: 591683 - DNA, 33 bp, Homo sapien
aatccaggatcattgacgctagccacagcactc

SEQ ID NO: 591684 - DNA, 33 bp, Homo sapien
aatccaggatcattgatgctagccacagcactc

SEQ ID NO: 591685 - DNA, 33 bp, Homo sapien
caatgaggggttccaccgtgagcatcctgctag

SEQ ID NO: 591686 - DNA, 33 bp, Homo sapien
caatgaggggttccactgtgagcatcctgctag

SEQ ID NO: 591687 - DNA, 33 bp, Homo sapien
agttataactgacagtaaacagcaaagtttcat

SEQ ID NO: 591688 - DNA, 33 bp, Homo sapien
agttataactgacagtgaacagcaaagtttcat

SEQ ID NO: 591689 - DNA, 33 bp, Homo sapien
gcagctgtgaacagaaatcacaattggagtaaa

SEQ ID NO: 591690 - DNA, 33 bp, Homo sapien
gcagctgtgaacagaagtcacaattggagtaaa

SEQ ID NO: 591691 - DNA, 33 bp, Homo sapien
tgtaaaaaatcatgaaagattcagtaattatgt

SEQ ID NO: 591692 - DNA, 33 bp, Homo sapien
tgtaaaaaatcatgaaggattcagtaattatgt

SEQ ID NO: 591693 - DNA, 33 bp, Homo sapien
tgaacctgcattctgcaactatcaaaataaagg

SEQ ID NO: 591694 - DNA, 33 bp, Homo sapien
tgaacctgcattctgcgactatcaaaataaagg

SEQ ID NO: 591695 - DNA, 33 bp, Homo sapien
gtgatgtatgttttcacgcaaggaaacaggcct

SEQ ID NO: 591696 - DNA, 33 bp, Homo sapien
gtgatgtatgttttcatgcaaggaaacaggcct

SEQ ID NO: 591697 - DNA, 33 bp, Homo sapien
ttccagaacaacaaaaagtcctcaatttccacg

SEQ ID NO: 591698 - DNA, 33 bp, Homo sapien
ttccagaacaacaaaacgtcctcaatttccacg

SEQ ID NO: 591699 - DNA, 33 bp, Homo sapien
cttgggtcttcttctgaaccttctaatgtgctg

SEQ ID NO: 591700 - DNA, 33 bp, Homo sapien
cttgggtcttcttctggaccttctaatgtgctg

SEQ ID NO: 591701 - DNA, 33 bp, Homo sapien
ccgcaggactgagaggcactgataccaagtgaa

SEQ ID NO: 591702 - DNA, 33 bp, Homo sapien
ccgcaggactgagagggactgataccaagtgaa

SEQ ID NO: 591703 - DNA, 33 bp, Homo sapien
acatttgaatatgaacaatcctttagatccaac

SEQ ID NO: 591704 - DNA, 33 bp, Homo sapien
acatttgaatatgaaccatcctttagatccaac

SEQ ID NO: 591705 - DNA, 33 bp, Homo sapien
ggcaaggaaaaccacactagtacatctaaggcc

SEQ ID NO: 591706 - DNA, 33 bp, Homo sapien
ggcaaggaaaaccacagtagtacatctaaggcc

SEQ ID NO: 591707 - DNA, 33 bp, Homo sapien
ccatgttcacagagctcactgctgtctagtgct

SEQ ID NO: 591708 - DNA, 33 bp, Homo sapien
ccatgttcacagagcttactgctgtctagtgct

SEQ ID NO: 591709 - DNA, 33 bp, Homo sapien
agtagaatcaaactaaaagccactaatggtaaa

SEQ ID NO: 591710 - DNA, 33 bp, Homo sapien
agtagaatcaaactaatagccactaatggtaaa

SEQ ID NO: 591711 - DNA, 33 bp, Homo sapien
tgtacattattctgataacggatacactaacat

SEQ ID NO: 591712 - DNA, 33 bp, Homo sapien
tgtacattattctgatgacggatacactaacat

SEQ ID NO: 591713 - DNA, 33 bp, Homo sapien
cttcgagtaactctcacggtggagggaaagtcc

SEQ ID NO: 591714 - DNA, 33 bp, Homo sapien
cttcgagtaactctcatggtggagggaaagtcc

SEQ ID NO: 591715 - DNA, 33 bp, Homo sapien
gagagaaagtacaatacgtaaatgcgtgaaatt

SEQ ID NO: 591716 - DNA, 33 bp, Homo sapien
gagagaaagtacaataggtaaatgcgtgaaatt

SEQ ID NO: 591717 - DNA, 33 bp, Homo sapien
catcaccccagcaatacattctcactggaagag

SEQ ID NO: 591718 - DNA, 33 bp, Homo sapien
catcaccccagcaatatattctcactggaagag

SEQ ID NO: 591719 - DNA, 33 bp, Homo sapien
cctccctgtgctccagcatcaaggaaatcccaa

SEQ ID NO: 591720 - DNA, 33 bp, Homo sapien
cctccctgtgctccaggatcaaggaaatcccaa

SEQ ID NO: 591721 - DNA, 33 bp, Homo sapien
tggggaggagttagagacgagccgaggcactgg

SEQ ID NO: 591722 - DNA, 33 bp, Homo sapien
tggggaggagttagagccgagccgaggcactgg

SEQ ID NO: 591723 - DNA, 33 bp, Homo sapien
ctcaagttcaaagccaaatggaaaatggcaagt

SEQ ID NO: 591724 - DNA, 33 bp, Homo sapien
ctcaagttcaaagccagatggaaaatggcaagt

SEQ ID NO: 591725 - DNA, 33 bp, Homo sapien
ccctgttctggaccaaccttaatcttctaggca

SEQ ID NO: 591726 - DNA, 33 bp, Homo sapien
ccctgttctggaccaatcttaatcttctaggca

SEQ ID NO: 591727 - DNA, 33 bp, Homo sapien
tacaatatagatcatgcaaaaagcttgtgaccc

SEQ ID NO: 591728 - DNA, 33 bp, Homo sapien
tacaatatagatcatggaaaaagcttgtgaccc

SEQ ID NO: 591729 - DNA, 33 bp, Homo sapien
atggaagccagaaggcaatgagaagacattatt

SEQ ID NO: 591730 - DNA, 33 bp, Homo sapien
atggaagccagaaggccatgagaagacattatt

SEQ ID NO: 591731 - DNA, 33 bp, Homo sapien
attacaagcagtgtaacacaaaaaatttccaac

SEQ ID NO: 591732 - DNA, 33 bp, Homo sapien
attacaagcagtgtaatacaaaaaatttccaac

SEQ ID NO: 591733 - DNA, 33 bp, Homo sapien
cagtcaaactgacacgcaaactcacccaggaca

SEQ ID NO: 591734 - DNA, 33 bp, Homo sapien
cagtcaaactgacacgtaaactcacccaggaca

SEQ ID NO: 591735 - DNA, 33 bp, Homo sapien
aacagcctggaggatacgattccaataaaatta

SEQ ID NO: 591736 - DNA, 33 bp, Homo sapien
aacagcctggaggatatgattccaataaaatta

SEQ ID NO: 591737 - DNA, 33 bp, Homo sapien
tcctttccttggtcaaatgtaaaagcaacagct

SEQ ID NO: 591738 - DNA, 33 bp, Homo sapien
tcctttccttggtcaagtgtaaaagcaacagct

SEQ ID NO: 591739 - DNA, 33 bp, Homo sapien
aagaacaagtatatgtaaagtaaaccctgacat

SEQ ID NO: 591740 - DNA, 33 bp, Homo sapien
aagaacaagtatatgtgaagtaaaccctgacat

SEQ ID NO: 591741 - DNA, 33 bp, Homo sapien
gctgcttcaattgcacaaagaagaaattatagt

SEQ ID NO: 591742 - DNA, 33 bp, Homo sapien
gctgcttcaattgcacgaagaagaaattatagt

SEQ ID NO: 591743 - DNA, 33 bp, Homo sapien
gcttgtttgcaaacaacagatagagaccctgac

SEQ ID NO: 591744 - DNA, 33 bp, Homo sapien
gcttgtttgcaaacaatagatagagaccctgac

SEQ ID NO: 591745 - DNA, 33 bp, Homo sapien
catcttataccacagaagcaaatctcggtttgg

SEQ ID NO: 591746 - DNA, 33 bp, Homo sapien
catcttataccacagaggcaaatctcggtttgg

SEQ ID NO: 591747 - DNA, 33 bp, Homo sapien
cctcagagaatggcgacattttatcactctgca

SEQ ID NO: 591748 - DNA, 33 bp, Homo sapien
cctcagagaatggcgatattttatcactctgca

SEQ ID NO: 591749 - DNA, 33 bp, Homo sapien
tgtctatgtcagaaacagcttagttctgggtta

SEQ ID NO: 591750 - DNA, 33 bp, Homo sapien
tgtctatgtcagaaacggcttagttctgggtta

SEQ ID NO: 591751 - DNA, 33 bp, Homo sapien
aggtgcaagtttaaaacgacttctcttggaata

SEQ ID NO: 591752 - DNA, 33 bp, Homo sapien
aggtgcaagtttaaaatgacttctcttggaata

SEQ ID NO: 591753 - DNA, 33 bp, Homo sapien
atttccaacccagcatcaagctcagtctatttc

SEQ ID NO: 591754 - DNA, 33 bp, Homo sapien
atttccaacccagcattaagctcagtctatttc

SEQ ID NO: 591755 - DNA, 33 bp, Homo sapien
tcataggcaaatcaaaactgaaattatttatga

SEQ ID NO: 591756 - DNA, 33 bp, Homo sapien
tcataggcaaatcaaagctgaaattatttatga

SEQ ID NO: 591757 - DNA, 33 bp, Homo sapien
cttttcactttgcaaaaaattttcacatcattc

SEQ ID NO: 591758 - DNA, 33 bp, Homo sapien
cttttcactttgcaaagaattttcacatcattc

SEQ ID NO: 591759 - DNA, 33 bp, Homo sapien
atgattggatgaaagcactagagccaggagtca

SEQ ID NO: 591760 - DNA, 33 bp, Homo sapien
atgattggatgaaagcgctagagccaggagtca

SEQ ID NO: 591761 - DNA, 33 bp, Homo sapien
ttaaaaattactttcccatctgatctggctgtt

SEQ ID NO: 591762 - DNA, 33 bp, Homo sapien
ttaaaaattactttcctatctgatctggctgtt

SEQ ID NO: 591763 - DNA, 33 bp, Homo sapien
cttggagtaactaaacaagcaaacctctggcac

SEQ ID NO: 591764 - DNA, 33 bp, Homo sapien
cttggagtaactaaaccagcaaacctctggcac

SEQ ID NO: 591765 - DNA, 33 bp, Homo sapien
gatatatgaagagggaacaaaaggaactcacac

SEQ ID NO: 591766 - DNA, 33 bp, Homo sapien
gatatatgaagagggaccaaaaggaactcacac

SEQ ID NO: 591767 - DNA, 33 bp, Homo sapien
ctcctccaactcctcacgtggggctgaacatgg

SEQ ID NO: 591768 - DNA, 33 bp, Homo sapien
ctcctccaactcctcatgtggggctgaacatgg

SEQ ID NO: 591769 - DNA, 33 bp, Homo sapien
aatttgtagtatgtcaccaaaaaaaggcaaact

SEQ ID NO: 591770 - DNA, 33 bp, Homo sapien
aatttgtagtatgtcagcaaaaaaaggcaaact

SEQ ID NO: 591771 - DNA, 33 bp, Homo sapien
gagccggctcctggaaagaaacaggactggaag

SEQ ID NO: 591772 - DNA, 33 bp, Homo sapien
gagccggctcctggaaggaaacaggactggaag

SEQ ID NO: 591773 - DNA, 33 bp, Homo sapien
tctaaaacagcaccgaccataacattcatggat

SEQ ID NO: 591774 - DNA, 33 bp, Homo sapien
tctaaaacagcaccgatcataacattcatggat

SEQ ID NO: 591775 - DNA, 33 bp, Homo sapien
tacatggtttaaaacaaaggcacaaaatatttg

SEQ ID NO: 591776 - DNA, 33 bp, Homo sapien
tacatggtttaaaacacaggcacaaaatatttg

SEQ ID NO: 591777 - DNA, 33 bp, Homo sapien
cgagacaattcagagtgaaatgttgggcaagac

SEQ ID NO: 591778 - DNA, 33 bp, Homo sapien
cgagacaattcagagttaaatgttgggcaagac

SEQ ID NO: 591779 - DNA, 33 bp, Homo sapien
aattccccaacaggcaactgtcactcttctttt

SEQ ID NO: 591780 - DNA, 33 bp, Homo sapien
aattccccaacaggcacctgtcactcttctttt

SEQ ID NO: 591781 - DNA, 33 bp, Homo sapien
aaacctgtaatttgatcaagtgcttctgacagg

SEQ ID NO: 591782 - DNA, 33 bp, Homo sapien
aaacctgtaatttgatgaagtgcttctgacagg

SEQ ID NO: 591783 - DNA, 33 bp, Homo sapien
gggtggctcgcaaggagggtggattagtttcct

SEQ ID NO: 591784 - DNA, 33 bp, Homo sapien
gggtggctcgcaaggatggtggattagtttcct

SEQ ID NO: 591785 - DNA, 33 bp, Homo sapien
aagccagctcacccccactgcagaagggatcct

SEQ ID NO: 591786 - DNA, 33 bp, Homo sapien
aagccagctcacccccgctgcagaagggatcct

SEQ ID NO: 591787 - DNA, 33 bp, Homo sapien
agtgcagtaggcatgacgagaagccagctcacc

SEQ ID NO: 591788 - DNA, 33 bp, Homo sapien
agtgcagtaggcatgatgagaagccagctcacc

SEQ ID NO: 591789 - DNA, 33 bp, Homo sapien
cctctcagaccatcagaaagattcatgcctggc

SEQ ID NO: 591790 - DNA, 33 bp, Homo sapien
cctctcagaccatcaggaagattcatgcctggc

SEQ ID NO: 591791 - DNA, 33 bp, Homo sapien
cagccacatcggactacggtctgctcttctcca

SEQ ID NO: 591792 - DNA, 33 bp, Homo sapien
cagccacatcggactatggtctgctcttctcca

SEQ ID NO: 591793 - DNA, 33 bp, Homo sapien
atctttgccagtaggacaagtgaaaacgggtgt

SEQ ID NO: 591794 - DNA, 33 bp, Homo sapien
atctttgccagtaggataagtgaaaacgggtgt

SEQ ID NO: 591795 - DNA, 33 bp, Homo sapien
atgttaaattaataaaaagcagttgaccatata

SEQ ID NO: 591796 - DNA, 33 bp, Homo sapien
atgttaaattaataaagagcagttgaccatata

SEQ ID NO: 591797 - DNA, 33 bp, Homo sapien
aagggacagtttttgacgcaaatctttatttgg

SEQ ID NO: 591798 - DNA, 33 bp, Homo sapien
aagggacagtttttgatgcaaatctttatttgg

SEQ ID NO: 591799 - DNA, 33 bp, Homo sapien
tcactagtgactgccgaaccctgtgtatgttcc

SEQ ID NO: 591800 - DNA, 33 bp, Homo sapien
tcactagtgactgccgcaccctgtgtatgttcc

SEQ ID NO: 591801 - DNA, 33 bp, Homo sapien
gataatatgagattgaaagacatgacaacaaag

SEQ ID NO: 591802 - DNA, 33 bp, Homo sapien
gataatatgagattgagagacatgacaacaaag

SEQ ID NO: 591803 - DNA, 33 bp, Homo sapien
aaattgtgtttatggacacatatcattttcaca

SEQ ID NO: 591804 - DNA, 33 bp, Homo sapien
aaattgtgtttatggatacatatcattttcaca

SEQ ID NO: 591805 - DNA, 33 bp, Homo sapien
aacttctggaaagcgaccacccttcccatgttt

SEQ ID NO: 591806 - DNA, 33 bp, Homo sapien
aacttctggaaagcgatcacccttcccatgttt

SEQ ID NO: 591807 - DNA, 33 bp, Homo sapien
gtctctagtacccaaacatcctttcctctcagg

SEQ ID NO: 591808 - DNA, 33 bp, Homo sapien
gtctctagtacccaaatatcctttcctctcagg

SEQ ID NO: 591809 - DNA, 33 bp, Homo sapien
gttaacccagagcttcaactggcacagtcacct

SEQ ID NO: 591810 - DNA, 33 bp, Homo sapien
gttaacccagagcttccactggcacagtcacct

SEQ ID NO: 591811 - DNA, 33 bp, Homo sapien
cttttggttattttacacttcttttgatggaac

SEQ ID NO: 591812 - DNA, 33 bp, Homo sapien
cttttggttattttacgcttcttttgatggaac

SEQ ID NO: 591813 - DNA, 33 bp, Homo sapien
tatttgcaaagtagaccatatgtttcttatgct

SEQ ID NO: 591814 - DNA, 33 bp, Homo sapien
tatttgcaaagtagacgatatgtttcttatgct

SEQ ID NO: 591815 - DNA, 33 bp, Homo sapien
gagatgtggtctcaagccaaggaacacccggag

SEQ ID NO: 591816 - DNA, 33 bp, Homo sapien
gagatgtggtctcaaggcaaggaacacccggag

SEQ ID NO: 591817 - DNA, 33 bp, Homo sapien
atagctccagactgaaaaatggtgggattttgc

SEQ ID NO: 591818 - DNA, 33 bp, Homo sapien
atagctccagactgaagaatggtgggattttgc

SEQ ID NO: 591819 - DNA, 33 bp, Homo sapien
gcccctgattcttcttcaaagcgatttcaagaa

SEQ ID NO: 591820 - DNA, 33 bp, Homo sapien
gcccctgattcttctttaaagcgatttcaagaa

SEQ ID NO: 591821 - DNA, 33 bp, Homo sapien
ataataaggcgtgtccaatccccacttaccata

SEQ ID NO: 591822 - DNA, 33 bp, Homo sapien
ataataaggcgtgtccgatccccacttaccata

SEQ ID NO: 591823 - DNA, 33 bp, Homo sapien
aaccaaagccaaatcacgctattcaagtttatg

SEQ ID NO: 591824 - DNA, 33 bp, Homo sapien
aaccaaagccaaatcatgctattcaagtttatg

SEQ ID NO: 591825 - DNA, 33 bp, Homo sapien
gctctgtgagaaatgaagtggatgttggcaaga

SEQ ID NO: 591826 - DNA, 33 bp, Homo sapien
gctctgtgagaaatgacgtggatgttggcaaga

SEQ ID NO: 591827 - DNA, 33 bp, Homo sapien
agtcagagtggataaacgacaatttacagagta

SEQ ID NO: 591828 - DNA, 33 bp, Homo sapien
agtcagagtggataaaggacaatttacagagta

SEQ ID NO: 591829 - DNA, 33 bp, Homo sapien
tatttggatggaatgccagagctcaaaagaaaa

SEQ ID NO: 591830 - DNA, 33 bp, Homo sapien
tatttggatggaatgctagagctcaaaagaaaa

SEQ ID NO: 591831 - DNA, 33 bp, Homo sapien
aaagccttatattcgccgatatttttgctgact

SEQ ID NO: 591832 - DNA, 33 bp, Homo sapien
aaagccttatattcgctgatatttttgctgact

SEQ ID NO: 591833 - DNA, 33 bp, Homo sapien
cttgttcataaggtgcaagatcagtggaacact

SEQ ID NO: 591834 - DNA, 33 bp, Homo sapien
cttgttcataaggtgcgagatcagtggaacact

SEQ ID NO: 591835 - DNA, 33 bp, Homo sapien
aattttaacccagtgacacctgagttagacttc

SEQ ID NO: 591836 - DNA, 33 bp, Homo sapien
aattttaacccagtgagacctgagttagacttc

SEQ ID NO: 591837 - DNA, 33 bp, Homo sapien
caacacattacaagtcacaagcctgtgggtaca

SEQ ID NO: 591838 - DNA, 33 bp, Homo sapien
caacacattacaagtcgcaagcctgtgggtaca

SEQ ID NO: 591839 - DNA, 33 bp, Homo sapien
tccaggttgatagctccatacctattaagacag

SEQ ID NO: 591840 - DNA, 33 bp, Homo sapien
tccaggttgatagctctatacctattaagacag

SEQ ID NO: 591841 - DNA, 33 bp, Homo sapien
gccacaggtatgcaaaattccttctagctggtc

SEQ ID NO: 591842 - DNA, 33 bp, Homo sapien
gccacaggtatgcaaacttccttctagctggtc

SEQ ID NO: 591843 - DNA, 33 bp, Homo sapien
agtagagaataaagtacgcgtgggcaaggccag

SEQ ID NO: 591844 - DNA, 33 bp, Homo sapien
agtagagaataaagtatgcgtgggcaaggccag

SEQ ID NO: 591845 - DNA, 33 bp, Homo sapien
tcatgagattaggggcaaaggctactgcatttc

SEQ ID NO: 591846 - DNA, 33 bp, Homo sapien
tcatgagattaggggcgaaggctactgcatttc

SEQ ID NO: 591847 - DNA, 33 bp, Homo sapien
agcatcccatgggaataaaaggcatagtgtccg

SEQ ID NO: 591848 - DNA, 33 bp, Homo sapien
agcatcccatgggaatgaaaggcatagtgtccg

SEQ ID NO: 591849 - DNA, 33 bp, Homo sapien
agccttgttctcaatgcaatagacctagccaag

SEQ ID NO: 591850 - DNA, 33 bp, Homo sapien
agccttgttctcaatgtaatagacctagccaag

SEQ ID NO: 591851 - DNA, 33 bp, Homo sapien
tgtcttcaaaaattcaagaaaactatctgcagg

SEQ ID NO: 591852 - DNA, 33 bp, Homo sapien
tgtcttcaaaaattcatgaaaactatctgcagg

SEQ ID NO: 591853 - DNA, 33 bp, Homo sapien
cataagagttgacgggcagatattcaggaatcc

SEQ ID NO: 591854 - DNA, 33 bp, Homo sapien
cataagagttgacgggtagatattcaggaatcc

SEQ ID NO: 591855 - DNA, 33 bp, Homo sapien
tctagtacaaataagccaagtaagggattgtac

SEQ ID NO: 591856 - DNA, 33 bp, Homo sapien
tctagtacaaataagctaagtaagggattgtac

SEQ ID NO: 591857 - DNA, 33 bp, Homo sapien
tagctctgaggcttcacggcatagcaggaggct

SEQ ID NO: 591858 - DNA, 33 bp, Homo sapien
tagctctgaggcttcatggcatagcaggaggct

SEQ ID NO: 591859 - DNA, 33 bp, Homo sapien
cctcaagaacttaaaactgctctctacatcaca

SEQ ID NO: 591860 - DNA, 33 bp, Homo sapien
cctcaagaacttaaaattgctctctacatcaca

SEQ ID NO: 591861 - DNA, 33 bp, Homo sapien
ctcttacctgttatgccatcagtaaggataaga

SEQ ID NO: 591862 - DNA, 33 bp, Homo sapien
ctcttacctgttatgctatcagtaaggataaga

SEQ ID NO: 591863 - DNA, 33 bp, Homo sapien
agttcatactcttctaaccttcccaggtcaaca

SEQ ID NO: 591864 - DNA, 33 bp, Homo sapien
agttcatactcttctagccttcccaggtcaaca

SEQ ID NO: 591865 - DNA, 33 bp, Homo sapien
tgaggcaaataggccacgtttgttatttctttc

SEQ ID NO: 591866 - DNA, 33 bp, Homo sapien
tgaggcaaataggccatgtttgttatttctttc

SEQ ID NO: 591867 - DNA, 33 bp, Homo sapien
acctaaaatactatgcaatcttatccaagttac

SEQ ID NO: 591868 - DNA, 33 bp, Homo sapien
acctaaaatactatgcgatcttatccaagttac

SEQ ID NO: 591869 - DNA, 33 bp, Homo sapien
ccaaaagtaaaaatgaataacatcaactctgat

SEQ ID NO: 591870 - DNA, 33 bp, Homo sapien
ccaaaagtaaaaatgagtaacatcaactctgat

SEQ ID NO: 591871 - DNA, 33 bp, Homo sapien
tcccaaaaatgagtcactcaatagtcagcagtt

SEQ ID NO: 591872 - DNA, 33 bp, Homo sapien
tcccaaaaatgagtcattcaatagtcagcagtt

SEQ ID NO: 591873 - DNA, 33 bp, Homo sapien
catttacatatggaggaatggtgcaggttgtga

SEQ ID NO: 591874 - DNA, 33 bp, Homo sapien
catttacatatggagggatggtgcaggttgtga

SEQ ID NO: 591875 - DNA, 33 bp, Homo sapien
tctcactctttaaccacgccttttgatccagaa

SEQ ID NO: 591876 - DNA, 33 bp, Homo sapien
tctcactctttaaccatgccttttgatccagaa

SEQ ID NO: 591877 - DNA, 33 bp, Homo sapien
aattgtctcaaggttaaacagctaagaagtgga

SEQ ID NO: 591878 - DNA, 33 bp, Homo sapien
aattgtctcaaggttagacagctaagaagtgga

SEQ ID NO: 591879 - DNA, 33 bp, Homo sapien
gactcactttgctcaacggagtgaaagaaggaa

SEQ ID NO: 591880 - DNA, 33 bp, Homo sapien
gactcactttgctcaagggagtgaaagaaggaa

SEQ ID NO: 591881 - DNA, 33 bp, Homo sapien
acagtatttcaccgtaagaatttgcttttccag

SEQ ID NO: 591882 - DNA, 33 bp, Homo sapien
acagtatttcaccgtaggaatttgcttttccag

SEQ ID NO: 591883 - DNA, 33 bp, Homo sapien
aatagaacaacgataagattttaatgtgtgcag

SEQ ID NO: 591884 - DNA, 33 bp, Homo sapien
aatagaacaacgataatattttaatgtgtgcag

SEQ ID NO: 591885 - DNA, 33 bp, Homo sapien
ctgtaaaggcatataaaattcttacagattata

SEQ ID NO: 591886 - DNA, 33 bp, Homo sapien
ctgtaaaggcatataacattcttacagattata

SEQ ID NO: 591887 - DNA, 33 bp, Homo sapien
tctcaggaaattgctaagaagattggcttattt

SEQ ID NO: 591888 - DNA, 33 bp, Homo sapien
tctcaggaaattgctatgaagattggcttattt

SEQ ID NO: 591889 - DNA, 33 bp, Homo sapien
tgagttttccaaacaaacttacatcatcttttt

SEQ ID NO: 591890 - DNA, 33 bp, Homo sapien
tgagttttccaaacaagcttacatcatcttttt

SEQ ID NO: 591891 - DNA, 33 bp, Homo sapien
gccactttgtgctttaccatctccagggtgtgg

SEQ ID NO: 591892 - DNA, 33 bp, Homo sapien
gccactttgtgctttatcatctccagggtgtgg

SEQ ID NO: 591893 - DNA, 33 bp, Homo sapien
ttatgcaatgaaaggggagacatgggaaacaca

SEQ ID NO: 591894 - DNA, 33 bp, Homo sapien
ttatgcaatgaaagggtagacatgggaaacaca

SEQ ID NO: 591895 - DNA, 33 bp, Homo sapien
cataacattggaaaaacatttggcaaacataaa

SEQ ID NO: 591896 - DNA, 33 bp, Homo sapien
cataacattggaaaaatatttggcaaacataaa

SEQ ID NO: 591897 - DNA, 33 bp, Homo sapien
agaggagtccccaaacactagggtaacaggact

SEQ ID NO: 591898 - DNA, 33 bp, Homo sapien
agaggagtccccaaacgctagggtaacaggact

SEQ ID NO: 591899 - DNA, 33 bp, Homo sapien
gaaggagcagggatctcacagttttctacagct

SEQ ID NO: 591900 - DNA, 33 bp, Homo sapien
gaaggagcagggatcttacagttttctacagct

SEQ ID NO: 591901 - DNA, 33 bp, Homo sapien
tcctgatgttcaactcaaaaatccctagtaggg

SEQ ID NO: 591902 - DNA, 33 bp, Homo sapien
tcctgatgttcaactcgaaaatccctagtaggg

SEQ ID NO: 591903 - DNA, 33 bp, Homo sapien
cataatgacaaaaagtaaaagtcagttcgtttg

SEQ ID NO: 591904 - DNA, 33 bp, Homo sapien
cataatgacaaaaagttaaagtcagttcgtttg

SEQ ID NO: 591905 - DNA, 33 bp, Homo sapien
tatagcaagggaatacaatttgagaatgcttgg

SEQ ID NO: 591906 - DNA, 33 bp, Homo sapien
tatagcaagggaatacgatttgagaatgcttgg

SEQ ID NO: 591907 - DNA, 33 bp, Homo sapien
agtgataaagaaataaagtaccctaacacagtt

SEQ ID NO: 591908 - DNA, 33 bp, Homo sapien
agtgataaagaaataaggtaccctaacacagtt

SEQ ID NO: 591909 - DNA, 33 bp, Homo sapien
agcctctgaatgggtacgggctattgttttatg

SEQ ID NO: 591910 - DNA, 33 bp, Homo sapien
agcctctgaatgggtatgggctattgttttatg

SEQ ID NO: 591911 - DNA, 33 bp, Homo sapien
gtgttcctactcagcactgagaggcatattttt

SEQ ID NO: 591912 - DNA, 33 bp, Homo sapien
gtgttcctactcagcattgagaggcatattttt

SEQ ID NO: 591913 - DNA, 33 bp, Homo sapien
ctgaagcctgtgcctaacaatggaaaaccctaa

SEQ ID NO: 591914 - DNA, 33 bp, Homo sapien
ctgaagcctgtgcctaccaatggaaaaccctaa

SEQ ID NO: 591915 - DNA, 33 bp, Homo sapien
gtgccttaacacaatgccagagctataataacc

SEQ ID NO: 591916 - DNA, 33 bp, Homo sapien
gtgccttaacacaatgtcagagctataataacc

SEQ ID NO: 591917 - DNA, 33 bp, Homo sapien
tggcaagacttcctgcactgtatttgatgcatt

SEQ ID NO: 591918 - DNA, 33 bp, Homo sapien
tggcaagacttcctgcgctgtatttgatgcatt

SEQ ID NO: 591919 - DNA, 33 bp, Homo sapien
aaataagtgtgtggtacatttaattagtcatga

SEQ ID NO: 591920 - DNA, 33 bp, Homo sapien
aaataagtgtgtggtatatttaattagtcatga

SEQ ID NO: 591921 - DNA, 33 bp, Homo sapien
agtttattggtccttacaaagatacagcaaatt

SEQ ID NO: 591922 - DNA, 33 bp, Homo sapien
agtttattggtccttagaaagatacagcaaatt

SEQ ID NO: 591923 - DNA, 33 bp, Homo sapien
gagaggctaagtgtcacgtcacagagctgaata

SEQ ID NO: 591924 - DNA, 33 bp, Homo sapien
gagaggctaagtgtcatgtcacagagctgaata

SEQ ID NO: 591925 - DNA, 33 bp, Homo sapien
tgaggaaggaagaagaagtggacagcaggggtt

SEQ ID NO: 591926 - DNA, 33 bp, Homo sapien
tgaggaaggaagaagaggtggacagcaggggtt

SEQ ID NO: 591927 - DNA, 33 bp, Homo sapien
tcttccttcctcaccccctgatattttgcattt

SEQ ID NO: 591928 - DNA, 33 bp, Homo sapien
tcttccttcctcaccctctgatattttgcattt

SEQ ID NO: 591929 - DNA, 33 bp, Homo sapien
ccgccactctctctacaaacatccaagtgggat

SEQ ID NO: 591930 - DNA, 33 bp, Homo sapien
ccgccactctctctacgaacatccaagtgggat

SEQ ID NO: 591931 - DNA, 33 bp, Homo sapien
acatacacaatgaagacgaaagctacaataaat

SEQ ID NO: 591932 - DNA, 33 bp, Homo sapien
acatacacaatgaagatgaaagctacaataaat

SEQ ID NO: 591933 - DNA, 33 bp, Homo sapien
acactgaagtgtgctgaaaaatgcatgtctgcc

SEQ ID NO: 591934 - DNA, 33 bp, Homo sapien
acactgaagtgtgctggaaaatgcatgtctgcc

SEQ ID NO: 591935 - DNA, 33 bp, Homo sapien
gaaggtacttgaggaacgtccttgagaagcacc

SEQ ID NO: 591936 - DNA, 33 bp, Homo sapien
gaaggtacttgaggaatgtccttgagaagcacc

SEQ ID NO: 591937 - DNA, 33 bp, Homo sapien
gagagcatagacactcaacattcacagcagaga

SEQ ID NO: 591938 - DNA, 33 bp, Homo sapien
gagagcatagacactcgacattcacagcagaga

SEQ ID NO: 591939 - DNA, 33 bp, Homo sapien
ctacattgatcttcaccagtaattctctgctgt

SEQ ID NO: 591940 - DNA, 33 bp, Homo sapien
ctacattgatcttcactagtaattctctgctgt

SEQ ID NO: 591941 - DNA, 33 bp, Homo sapien
ttgcttaaagagacaaggtaagccaataagact

SEQ ID NO: 591942 - DNA, 33 bp, Homo sapien
ttgcttaaagagacaatgtaagccaataagact

SEQ ID NO: 591943 - DNA, 33 bp, Homo sapien
gttcatgtgaatctgcacctccaagatcaatac

SEQ ID NO: 591944 - DNA, 33 bp, Homo sapien
gttcatgtgaatctgcgcctccaagatcaatac

SEQ ID NO: 591945 - DNA, 33 bp, Homo sapien
ggagtggagataagacacagttttctttgcagg

SEQ ID NO: 591946 - DNA, 33 bp, Homo sapien
ggagtggagataagacgcagttttctttgcagg

SEQ ID NO: 591947 - DNA, 33 bp, Homo sapien
gggctggagataataaatctggccactgggtat

SEQ ID NO: 591948 - DNA, 33 bp, Homo sapien
gggctggagataataattctggccactgggtat

SEQ ID NO: 591949 - DNA, 33 bp, Homo sapien
gtgacagttcacattcaatctcttagaaagccc

SEQ ID NO: 591950 - DNA, 33 bp, Homo sapien
gtgacagttcacattcgatctcttagaaagccc

SEQ ID NO: 591951 - DNA, 33 bp, Homo sapien
aagtattgaagtgtgaagccagcaataagggaa

SEQ ID NO: 591952 - DNA, 33 bp, Homo sapien
aagtattgaagtgtgaggccagcaataagggaa

SEQ ID NO: 591953 - DNA, 33 bp, Homo sapien
gcccagtgtctgccccccttcctgacccagtgg

SEQ ID NO: 591954 - DNA, 33 bp, Homo sapien
gcccagtgtctgcccctcttcctgacccagtgg

SEQ ID NO: 591955 - DNA, 33 bp, Homo sapien
tgtccctgagatggacacatgcgattgtccagt

SEQ ID NO: 591956 - DNA, 33 bp, Homo sapien
tgtccctgagatggacgcatgcgattgtccagt

SEQ ID NO: 591957 - DNA, 33 bp, Homo sapien
gttagggaaatggaaaagatgtaagagaaccgg

SEQ ID NO: 591958 - DNA, 33 bp, Homo sapien
gttagggaaatggaaacgatgtaagagaaccgg

SEQ ID NO: 591959 - DNA, 33 bp, Homo sapien
aagtgcatctgtggctaaaaagatccatgtcct

SEQ ID NO: 591960 - DNA, 33 bp, Homo sapien
aagtgcatctgtggctgaaaagatccatgtcct

SEQ ID NO: 591961 - DNA, 33 bp, Homo sapien
tcatcctcataatgaacgtctacttcccttctg

SEQ ID NO: 591962 - DNA, 33 bp, Homo sapien
tcatcctcataatgaatgtctacttcccttctg

SEQ ID NO: 591963 - DNA, 33 bp, Homo sapien
ggctgagactgcctaaatatttgcatctggctt

SEQ ID NO: 591964 - DNA, 33 bp, Homo sapien
ggctgagactgcctaagtatttgcatctggctt

SEQ ID NO: 591965 - DNA, 33 bp, Homo sapien
tcagctgggaacatacgcctgctcaaatttttt

SEQ ID NO: 591966 - DNA, 33 bp, Homo sapien
tcagctgggaacatactcctgctcaaatttttt

SEQ ID NO: 591967 - DNA, 33 bp, Homo sapien
ctcattctcaagctcccaaagtgttccagatct

SEQ ID NO: 591968 - DNA, 33 bp, Homo sapien
ctcattctcaagctcctaaagtgttccagatct

SEQ ID NO: 591969 - DNA, 33 bp, Homo sapien
cacagagagctgaaggaatgtgggcaaaggtgt

SEQ ID NO: 591970 - DNA, 33 bp, Homo sapien
cacagagagctgaagggatgtgggcaaaggtgt

SEQ ID NO: 591971 - DNA, 33 bp, Homo sapien
ggggtggcatgaggaagtattggtaaaatctgg

SEQ ID NO: 591972 - DNA, 33 bp, Homo sapien
ggggtggcatgaggaattattggtaaaatctgg

SEQ ID NO: 591973 - DNA, 33 bp, Homo sapien
tccaggtggtcaagagaacaatgagctaaactg

SEQ ID NO: 591974 - DNA, 33 bp, Homo sapien
tccaggtggtcaagaggacaatgagctaaactg

SEQ ID NO: 591975 - DNA, 33 bp, Homo sapien
ccaagcaagtgcctacaagaagaaagctcagct

SEQ ID NO: 591976 - DNA, 33 bp, Homo sapien
ccaagcaagtgcctacgagaagaaagctcagct

SEQ ID NO: 591977 - DNA, 33 bp, Homo sapien
aggaaagggatatttacgaggtatagggtttgc

SEQ ID NO: 591978 - DNA, 33 bp, Homo sapien
aggaaagggatatttatgaggtatagggtttgc

SEQ ID NO: 591979 - DNA, 33 bp, Homo sapien
gagtaaacaagatggaactggcactcaaatttg

SEQ ID NO: 591980 - DNA, 33 bp, Homo sapien
gagtaaacaagatggacctggcactcaaatttg

SEQ ID NO: 591981 - DNA, 33 bp, Homo sapien
ctcacaaggaaatgtacacagaacacaggacca

SEQ ID NO: 591982 - DNA, 33 bp, Homo sapien
ctcacaaggaaatgtagacagaacacaggacca

SEQ ID NO: 591983 - DNA, 33 bp, Homo sapien
aaagtgggggagcaaaaatactctagtgagaca

SEQ ID NO: 591984 - DNA, 33 bp, Homo sapien
aaagtgggggagcaaacatactctagtgagaca

SEQ ID NO: 591985 - DNA, 33 bp, Homo sapien
aatagagtcaagaagcaattcgaggctttagtt

SEQ ID NO: 591986 - DNA, 33 bp, Homo sapien
aatagagtcaagaagcgattcgaggctttagtt

SEQ ID NO: 591987 - DNA, 33 bp, Homo sapien
tttctgcatgtcctacccttagcccctcagcat

SEQ ID NO: 591988 - DNA, 33 bp, Homo sapien
tttctgcatgtcctactcttagcccctcagcat

SEQ ID NO: 591989 - DNA, 33 bp, Homo sapien
gttctcagtggcctcaaaggaggtgtgagtctg

SEQ ID NO: 591990 - DNA, 33 bp, Homo sapien
gttctcagtggcctcagaggaggtgtgagtctg

SEQ ID NO: 591991 - DNA, 33 bp, Homo sapien
aacaactaactaaacaaaaagctacagatctga

SEQ ID NO: 591992 - DNA, 33 bp, Homo sapien
aacaactaactaaacacaaagctacagatctga

SEQ ID NO: 591993 - DNA, 33 bp, Homo sapien
gggagacatgatttaacaatagcagtgaggact

SEQ ID NO: 591994 - DNA, 33 bp, Homo sapien
gggagacatgatttaataatagcagtgaggact

SEQ ID NO: 591995 - DNA, 33 bp, Homo sapien
tctcccttctcccatcacctttagctggcttct

SEQ ID NO: 591996 - DNA, 33 bp, Homo sapien
tctcccttctcccatcgcctttagctggcttct

SEQ ID NO: 591997 - DNA, 33 bp, Homo sapien
attgagcaaggagatacgtgtctaattacgatt

SEQ ID NO: 591998 - DNA, 33 bp, Homo sapien
attgagcaaggagatatgtgtctaattacgatt

SEQ ID NO: 591999 - DNA, 33 bp, Homo sapien
tggacacaggattaaacctaaaacattcactac

SEQ ID NO: 592000 - DNA, 33 bp, Homo sapien
tggacacaggattaaatctaaaacattcactac

SEQ ID NO: 592001 - DNA, 33 bp, Homo sapien
agccgaagagtatctacgccttcttgttaatag

SEQ ID NO: 592002 - DNA, 33 bp, Homo sapien
agccgaagagtatctatgccttcttgttaatag

SEQ ID NO: 592003 - DNA, 33 bp, Homo sapien
gcctggcactagcctccgaagccgctgctgcca

SEQ ID NO: 592004 - DNA, 33 bp, Homo sapien
gcctggcactagcctctgaagccgctgctgcca

SEQ ID NO: 592005 - DNA, 33 bp, Homo sapien
ttgatgaagtaagcaaacaacagatcacagcag

SEQ ID NO: 592006 - DNA, 33 bp, Homo sapien
ttgatgaagtaagcaatcaacagatcacagcag

SEQ ID NO: 592007 - DNA, 33 bp, Homo sapien
gctgatagatctgagaagctcacaagagcttct

SEQ ID NO: 592008 - DNA, 33 bp, Homo sapien
gctgatagatctgagaggctcacaagagcttct

SEQ ID NO: 592009 - DNA, 33 bp, Homo sapien
ttttaatcatgtttcacagaaaaacctggaact

SEQ ID NO: 592010 - DNA, 33 bp, Homo sapien
ttttaatcatgtttcatagaaaaacctggaact

SEQ ID NO: 592011 - DNA, 33 bp, Homo sapien
ctggcttccaactgcaaatatctgtgtctcttt

SEQ ID NO: 592012 - DNA, 33 bp, Homo sapien
ctggcttccaactgcacatatctgtgtctcttt

SEQ ID NO: 592013 - DNA, 33 bp, Homo sapien
atccagactggatttaggtagatatatacacgt

SEQ ID NO: 592014 - DNA, 33 bp, Homo sapien
atccagactggatttatgtagatatatacacgt

SEQ ID NO: 592015 - DNA, 33 bp, Homo sapien
agtggaaagttgagaacagatgctagaaactct

SEQ ID NO: 592016 - DNA, 33 bp, Homo sapien
agtggaaagttgagaatagatgctagaaactct

SEQ ID NO: 592017 - DNA, 33 bp, Homo sapien
gtgtctttggggcatgcaagttggggttatagt

SEQ ID NO: 592018 - DNA, 33 bp, Homo sapien
gtgtctttggggcatggaagttggggttatagt

SEQ ID NO: 592019 - DNA, 33 bp, Homo sapien
tgtcatggctgccactcaatcttacaggcatgt

SEQ ID NO: 592020 - DNA, 33 bp, Homo sapien
tgtcatggctgccactgaatcttacaggcatgt

SEQ ID NO: 592021 - DNA, 33 bp, Homo sapien
gtacagtcacgctgccaaggacagaaatatgaa

SEQ ID NO: 592022 - DNA, 33 bp, Homo sapien
gtacagtcacgctgccgaggacagaaatatgaa

SEQ ID NO: 592023 - DNA, 33 bp, Homo sapien
gctctgtgcaagaatccacccctccatggttgg

SEQ ID NO: 592024 - DNA, 33 bp, Homo sapien
gctctgtgcaagaatctacccctccatggttgg

SEQ ID NO: 592025 - DNA, 33 bp, Homo sapien
gaaaggataaattaagaccaagaactgtgggtt

SEQ ID NO: 592026 - DNA, 33 bp, Homo sapien
gaaaggataaattaaggccaagaactgtgggtt

SEQ ID NO: 592027 - DNA, 33 bp, Homo sapien
aagaaaaaaagtgaagccttaacatggattatt

SEQ ID NO: 592028 - DNA, 33 bp, Homo sapien
aagaaaaaaagtgaaggcttaacatggattatt

SEQ ID NO: 592029 - DNA, 33 bp, Homo sapien
agatcctcatttaagacagtgttttttggtgct

SEQ ID NO: 592030 - DNA, 33 bp, Homo sapien
agatcctcatttaagatagtgttttttggtgct

SEQ ID NO: 592031 - DNA, 33 bp, Homo sapien
gtcttggggctataaccgttacaagctttctcc

SEQ ID NO: 592032 - DNA, 33 bp, Homo sapien
gtcttggggctataactgttacaagctttctcc

SEQ ID NO: 592033 - DNA, 33 bp, Homo sapien
ttggaaagtcatcgtgaaaaatgaaggctggct

SEQ ID NO: 592034 - DNA, 33 bp, Homo sapien
ttggaaagtcatcgtggaaaatgaaggctggct

SEQ ID NO: 592035 - DNA, 33 bp, Homo sapien
gaagctatgatggttaaagagattcacatttga

SEQ ID NO: 592036 - DNA, 33 bp, Homo sapien
gaagctatgatggttagagagattcacatttga

SEQ ID NO: 592037 - DNA, 33 bp, Homo sapien
tttaatccaaattgagaaaatggggaagtagtc

SEQ ID NO: 592038 - DNA, 33 bp, Homo sapien
tttaatccaaattgagcaaatggggaagtagtc

SEQ ID NO: 592039 - DNA, 33 bp, Homo sapien
ttgaaaatagggacaacgaagaagcatggctat

SEQ ID NO: 592040 - DNA, 33 bp, Homo sapien
ttgaaaatagggacaaggaagaagcatggctat

SEQ ID NO: 592041 - DNA, 33 bp, Homo sapien
gttcatgccaagaccgaaagtgctggcccagta

SEQ ID NO: 592042 - DNA, 33 bp, Homo sapien
gttcatgccaagaccgtaagtgctggcccagta

SEQ ID NO: 592043 - DNA, 33 bp, Homo sapien
tcagccagatcatctgcagtttgggattcttgg

SEQ ID NO: 592044 - DNA, 33 bp, Homo sapien
tcagccagatcatctgtagtttgggattcttgg

SEQ ID NO: 592045 - DNA, 33 bp, Homo sapien
agcccagatgttcccacagtaaacttcaggtac

SEQ ID NO: 592046 - DNA, 33 bp, Homo sapien
agcccagatgttcccagagtaaacttcaggtac

SEQ ID NO: 592047 - DNA, 33 bp, Homo sapien
aatttcgcatctataaacaaccaagaagaaaag

SEQ ID NO: 592048 - DNA, 33 bp, Homo sapien
aatttcgcatctataagcaaccaagaagaaaag

SEQ ID NO: 592049 - DNA, 33 bp, Homo sapien
tacaagagagcttgcacgaaataaacaatcagc

SEQ ID NO: 592050 - DNA, 33 bp, Homo sapien
tacaagagagcttgcatgaaataaacaatcagc

SEQ ID NO: 592051 - DNA, 33 bp, Homo sapien
tcttctctgctaagtacggtttttagtctcctg

SEQ ID NO: 592052 - DNA, 33 bp, Homo sapien
tcttctctgctaagtatggtttttagtctcctg

SEQ ID NO: 592053 - DNA, 33 bp, Homo sapien
ggttattggatggtacactgaagattgcagcac

SEQ ID NO: 592054 - DNA, 33 bp, Homo sapien
ggttattggatggtacgctgaagattgcagcac

SEQ ID NO: 592055 - DNA, 33 bp, Homo sapien
tacttttaaggagatacggctagtaagaaaaac

SEQ ID NO: 592056 - DNA, 33 bp, Homo sapien
tacttttaaggagatatggctagtaagaaaaac

SEQ ID NO: 592057 - DNA, 33 bp, Homo sapien
caagagtgggaagtgagatttcctccattagga

SEQ ID NO: 592058 - DNA, 33 bp, Homo sapien
caagagtgggaagtgatatttcctccattagga

SEQ ID NO: 592059 - DNA, 33 bp, Homo sapien
catctccagggatcaacatacagtctcttactt

SEQ ID NO: 592060 - DNA, 33 bp, Homo sapien
catctccagggatcaatatacagtctcttactt

SEQ ID NO: 592061 - DNA, 33 bp, Homo sapien
tttacacatggccgaaactcgagtcatcatcag

SEQ ID NO: 592062 - DNA, 33 bp, Homo sapien
tttacacatggccgaagctcgagtcatcatcag

SEQ ID NO: 592063 - DNA, 33 bp, Homo sapien
ttttacagctcttaggcactgtataggccccaa

SEQ ID NO: 592064 - DNA, 33 bp, Homo sapien
ttttacagctcttaggtactgtataggccccaa

SEQ ID NO: 592065 - DNA, 33 bp, Homo sapien
gcagaattatttttaaccagggagcaacatctg

SEQ ID NO: 592066 - DNA, 33 bp, Homo sapien
gcagaattatttttaagcagggagcaacatctg

SEQ ID NO: 592067 - DNA, 33 bp, Homo sapien
agcagctagttctgaacgcttctccatcagcac

SEQ ID NO: 592068 - DNA, 33 bp, Homo sapien
agcagctagttctgaatgcttctccatcagcac

SEQ ID NO: 592069 - DNA, 33 bp, Homo sapien
attaatattgctcttgaagttaataaacacacc

SEQ ID NO: 592070 - DNA, 33 bp, Homo sapien
attaatattgctcttgtagttaataaacacacc

SEQ ID NO: 592071 - DNA, 33 bp, Homo sapien
tatcgaagcaatctggaatttccacccttcatg

SEQ ID NO: 592072 - DNA, 33 bp, Homo sapien
tatcgaagcaatctgggatttccacccttcatg

SEQ ID NO: 592073 - DNA, 33 bp, Homo sapien
gtacgcacatcagaaaaagtacttgggttatca

SEQ ID NO: 592074 - DNA, 33 bp, Homo sapien
gtacgcacatcagaaagagtacttgggttatca

SEQ ID NO: 592075 - DNA, 33 bp, Homo sapien
cacatgagccttggacgggcctcccttgatgtg

SEQ ID NO: 592076 - DNA, 33 bp, Homo sapien
cacatgagccttggactggcctcccttgatgtg

SEQ ID NO: 592077 - DNA, 33 bp, Homo sapien
atacagactatacctacgtcaaacatacctaag

SEQ ID NO: 592078 - DNA, 33 bp, Homo sapien
atacagactatacctatgtcaaacatacctaag

SEQ ID NO: 592079 - DNA, 33 bp, Homo sapien
ttaaaacacattcagacccaaatacctttattg

SEQ ID NO: 592080 - DNA, 33 bp, Homo sapien
ttaaaacacattcagagccaaatacctttattg

SEQ ID NO: 592081 - DNA, 33 bp, Homo sapien
tatacatttctaccaaccacagggctagcaagt

SEQ ID NO: 592082 - DNA, 33 bp, Homo sapien
tatacatttctaccaatcacagggctagcaagt

SEQ ID NO: 592083 - DNA, 33 bp, Homo sapien
tgggtttttaaatcaactctcactcagattttg

SEQ ID NO: 592084 - DNA, 33 bp, Homo sapien
tgggtttttaaatcaattctcactcagattttg

SEQ ID NO: 592085 - DNA, 33 bp, Homo sapien
tacattgacccaggtaaaacagttacacactcc

SEQ ID NO: 592086 - DNA, 33 bp, Homo sapien
tacattgacccaggtagaacagttacacactcc

SEQ ID NO: 592087 - DNA, 33 bp, Homo sapien
gcatgatctgcatggaacaatgatggcgacgtc

SEQ ID NO: 592088 - DNA, 33 bp, Homo sapien
gcatgatctgcatggagcaatgatggcgacgtc

SEQ ID NO: 592089 - DNA, 33 bp, Homo sapien
aaaagcaatcatttcaatatgcattctagattt

SEQ ID NO: 592090 - DNA, 33 bp, Homo sapien
aaaagcaatcatttcagtatgcattctagattt

SEQ ID NO: 592091 - DNA, 33 bp, Homo sapien
aaaaatcaaagatgccaagtcttaatttggaaa

SEQ ID NO: 592092 - DNA, 33 bp, Homo sapien
aaaaatcaaagatgccgagtcttaatttggaaa

SEQ ID NO: 592093 - DNA, 33 bp, Homo sapien
tgtttaaaaatcatgaaaaaatgctaaatatgt

SEQ ID NO: 592094 - DNA, 33 bp, Homo sapien
tgtttaaaaatcatgacaaaatgctaaatatgt

SEQ ID NO: 592095 - DNA, 33 bp, Homo sapien
gactctttccaatacactccctatgctgcgttt

SEQ ID NO: 592096 - DNA, 33 bp, Homo sapien
gactctttccaatacattccctatgctgcgttt

SEQ ID NO: 592097 - DNA, 33 bp, Homo sapien
gttgaaatgtcttttcaccttttcaacattttt

SEQ ID NO: 592098 - DNA, 33 bp, Homo sapien
gttgaaatgtcttttcgccttttcaacattttt

SEQ ID NO: 592099 - DNA, 33 bp, Homo sapien
acacgttgcccacttacgagaatgaaggctctt

SEQ ID NO: 592100 - DNA, 33 bp, Homo sapien
acacgttgcccacttaggagaatgaaggctctt

SEQ ID NO: 592101 - DNA, 33 bp, Homo sapien
aaagaattcgcatcgacgagtaaagggaacaac

SEQ ID NO: 592102 - DNA, 33 bp, Homo sapien
aaagaattcgcatcgaggagtaaagggaacaac

SEQ ID NO: 592103 - DNA, 33 bp, Homo sapien
ttttgcttttctaatgcatagtagggtgagagg

SEQ ID NO: 592104 - DNA, 33 bp, Homo sapien
ttttgcttttctaatgtatagtagggtgagagg

SEQ ID NO: 592105 - DNA, 33 bp, Homo sapien
gttactgagccagtaacaaggttagagctggaa

SEQ ID NO: 592106 - DNA, 33 bp, Homo sapien
gttactgagccagtaataaggttagagctggaa

SEQ ID NO: 592107 - DNA, 33 bp, Homo sapien
aacattgtcaaagataagttgtagagattctga

SEQ ID NO: 592108 - DNA, 33 bp, Homo sapien
aacattgtcaaagatatgttgtagagattctga

SEQ ID NO: 592109 - DNA, 33 bp, Homo sapien
accctcatttggtgaaagagaaagatgcacaga

SEQ ID NO: 592110 - DNA, 33 bp, Homo sapien
accctcatttggtgaaggagaaagatgcacaga

SEQ ID NO: 592111 - DNA, 33 bp, Homo sapien
tcatcaaccttctgatcaaggtagccagaagct

SEQ ID NO: 592112 - DNA, 33 bp, Homo sapien
tcatcaaccttctgattaaggtagccagaagct

SEQ ID NO: 592113 - DNA, 33 bp, Homo sapien
ctcccaggactgtagaagattggcattgactca

SEQ ID NO: 592114 - DNA, 33 bp, Homo sapien
ctcccaggactgtagatgattggcattgactca

SEQ ID NO: 592115 - DNA, 33 bp, Homo sapien
gattaggagtttgcaacgggaaagaagaggaat

SEQ ID NO: 592116 - DNA, 33 bp, Homo sapien
gattaggagtttgcaatgggaaagaagaggaat

SEQ ID NO: 592117 - DNA, 33 bp, Homo sapien
gattcactaggatagacgtcagagagacctgag

SEQ ID NO: 592118 - DNA, 33 bp, Homo sapien
gattcactaggatagatgtcagagagacctgag

SEQ ID NO: 592119 - DNA, 33 bp, Homo sapien
ccctgcttcttgcataaccctgaggctgccctg

SEQ ID NO: 592120 - DNA, 33 bp, Homo sapien
ccctgcttcttgcatacccctgaggctgccctg

SEQ ID NO: 592121 - DNA, 33 bp, Homo sapien
gtccttcaataccaaaagtctgtctcatgcccc

SEQ ID NO: 592122 - DNA, 33 bp, Homo sapien
gtccttcaataccaaatgtctgtctcatgcccc

SEQ ID NO: 592123 - DNA, 33 bp, Homo sapien
agttattgttgatgaaagtctgtgcagaattct

SEQ ID NO: 592124 - DNA, 33 bp, Homo sapien
agttattgttgatgaatgtctgtgcagaattct

SEQ ID NO: 592125 - DNA, 33 bp, Homo sapien
acctgtaaacagacctcaaaacatagtgttcac

SEQ ID NO: 592126 - DNA, 33 bp, Homo sapien
acctgtaaacagacctgaaaacatagtgttcac

SEQ ID NO: 592127 - DNA, 33 bp, Homo sapien
ggctgttcctttcttccatctttgcaaccaact

SEQ ID NO: 592128 - DNA, 33 bp, Homo sapien
ggctgttcctttcttctatctttgcaaccaact

SEQ ID NO: 592129 - DNA, 33 bp, Homo sapien
ctgatgttgctggctagcccttgaagacaatgt

SEQ ID NO: 592130 - DNA, 33 bp, Homo sapien
ctgatgttgctggctatcccttgaagacaatgt

SEQ ID NO: 592131 - DNA, 33 bp, Homo sapien
ctgtggcttgggattcactagccctgagcctga

SEQ ID NO: 592132 - DNA, 33 bp, Homo sapien
ctgtggcttgggattcgctagccctgagcctga

SEQ ID NO: 592133 - DNA, 33 bp, Homo sapien
gtaagtaatatcaatcaatgtgataaaatgatt

SEQ ID NO: 592134 - DNA, 33 bp, Homo sapien
gtaagtaatatcaatcgatgtgataaaatgatt

SEQ ID NO: 592135 - DNA, 33 bp, Homo sapien
aagcagcctgtgtgcaagtagaatttttttccc

SEQ ID NO: 592136 - DNA, 33 bp, Homo sapien
aagcagcctgtgtgcacgtagaatttttttccc

SEQ ID NO: 592137 - DNA, 33 bp, Homo sapien
gccaagattcaggaaaacaccgattatttaatg

SEQ ID NO: 592138 - DNA, 33 bp, Homo sapien
gccaagattcaggaaatcaccgattatttaatg

SEQ ID NO: 592139 - DNA, 33 bp, Homo sapien
tagcaaatggctaaaactgcattctttgcttcc

SEQ ID NO: 592140 - DNA, 33 bp, Homo sapien
tagcaaatggctaaaattgcattctttgcttcc

SEQ ID NO: 592141 - DNA, 33 bp, Homo sapien
tacattcctaagtatccgaaagtattctgaatc

SEQ ID NO: 592142 - DNA, 33 bp, Homo sapien
tacattcctaagtatcggaaagtattctgaatc

SEQ ID NO: 592143 - DNA, 33 bp, Homo sapien
tatggttcttatgacccgagcttcagagggttc

SEQ ID NO: 592144 - DNA, 33 bp, Homo sapien
tatggttcttatgacctgagcttcagagggttc

SEQ ID NO: 592145 - DNA, 33 bp, Homo sapien
gccctgagttctaatcccaccatttctccactt

SEQ ID NO: 592146 - DNA, 33 bp, Homo sapien
gccctgagttctaatctcaccatttctccactt

SEQ ID NO: 592147 - DNA, 33 bp, Homo sapien
ttatggcttctgtcacaccaggaatcaaagaaa

SEQ ID NO: 592148 - DNA, 33 bp, Homo sapien
ttatggcttctgtcacgccaggaatcaaagaaa

SEQ ID NO: 592149 - DNA, 33 bp, Homo sapien
agagagcacagcaacacacgaggatggggatga

SEQ ID NO: 592150 - DNA, 33 bp, Homo sapien
agagagcacagcaacatacgaggatggggatga

SEQ ID NO: 592151 - DNA, 33 bp, Homo sapien
gctgcatggagtttaacatccttttaaatgcac

SEQ ID NO: 592152 - DNA, 33 bp, Homo sapien
gctgcatggagtttaatatccttttaaatgcac

SEQ ID NO: 592153 - DNA, 33 bp, Homo sapien
agaaacgtgatctcaaccaatctttgcaaatgg

SEQ ID NO: 592154 - DNA, 33 bp, Homo sapien
agaaacgtgatctcaagcaatctttgcaaatgg

SEQ ID NO: 592155 - DNA, 33 bp, Homo sapien
gatcccacaaccagaaacactgggatagaaatc

SEQ ID NO: 592156 - DNA, 33 bp, Homo sapien
gatcccacaaccagaatcactgggatagaaatc

SEQ ID NO: 592157 - DNA, 33 bp, Homo sapien
cccactcagaaagtgcgctcctgcctcagatgg

SEQ ID NO: 592158 - DNA, 33 bp, Homo sapien
cccactcagaaagtgctctcctgcctcagatgg

SEQ ID NO: 592159 - DNA, 33 bp, Homo sapien
ttgggatctgttttggaagcttaatagttatca

SEQ ID NO: 592160 - DNA, 33 bp, Homo sapien
ttgggatctgttttgggagcttaatagttatca

SEQ ID NO: 592161 - DNA, 33 bp, Homo sapien
tggacacgactttccaaccccttgttctccatc

SEQ ID NO: 592162 - DNA, 33 bp, Homo sapien
tggacacgactttccagccccttgttctccatc

SEQ ID NO: 592163 - DNA, 33 bp, Homo sapien
ctggtgaaatgtccccaaactcttccaaagctt

SEQ ID NO: 592164 - DNA, 33 bp, Homo sapien
ctggtgaaatgtccccgaactcttccaaagctt

SEQ ID NO: 592165 - DNA, 33 bp, Homo sapien
aagcctttcctgggccaccagagaggaatgtct

SEQ ID NO: 592166 - DNA, 33 bp, Homo sapien
aagcctttcctgggccgccagagaggaatgtct

SEQ ID NO: 592167 - DNA, 33 bp, Homo sapien
agtgacattccaaaaaacagttgcatgctgaac

SEQ ID NO: 592168 - DNA, 33 bp, Homo sapien
agtgacattccaaaaagcagttgcatgctgaac

SEQ ID NO: 592169 - DNA, 33 bp, Homo sapien
tcagatttctcatttgaagatgacaagtttgga

SEQ ID NO: 592170 - DNA, 33 bp, Homo sapien
tcagatttctcatttggagatgacaagtttgga

SEQ ID NO: 592171 - DNA, 33 bp, Homo sapien
tatataacctgttttcaccaatttctgatataa

SEQ ID NO: 592172 - DNA, 33 bp, Homo sapien
tatataacctgttttcgccaatttctgatataa

SEQ ID NO: 592173 - DNA, 33 bp, Homo sapien
agctgataaaatgtgaaaagtggtgtatcttgt

SEQ ID NO: 592174 - DNA, 33 bp, Homo sapien
agctgataaaatgtgacaagtggtgtatcttgt

SEQ ID NO: 592175 - DNA, 33 bp, Homo sapien
tggattgtgtagccaacgcccaggagttccagg

SEQ ID NO: 592176 - DNA, 33 bp, Homo sapien
tggattgtgtagccaatgcccaggagttccagg

SEQ ID NO: 592177 - DNA, 33 bp, Homo sapien
ggcagtctggctaagaagttcacaccatcattc

SEQ ID NO: 592178 - DNA, 33 bp, Homo sapien
ggcagtctggctaagaggttcacaccatcattc

SEQ ID NO: 592179 - DNA, 33 bp, Homo sapien
tccaggatctcgcaaacgttcagtctagtttca

SEQ ID NO: 592180 - DNA, 33 bp, Homo sapien
tccaggatctcgcaaatgttcagtctagtttca

SEQ ID NO: 592181 - DNA, 33 bp, Homo sapien
tttgttgaacttatgactaagagaatattctta

SEQ ID NO: 592182 - DNA, 33 bp, Homo sapien
tttgttgaacttatgagtaagagaatattctta

SEQ ID NO: 592183 - DNA, 33 bp, Homo sapien
ctagcactacaagccacagataatttttgaaaa

SEQ ID NO: 592184 - DNA, 33 bp, Homo sapien
ctagcactacaagccatagataatttttgaaaa

SEQ ID NO: 592185 - DNA, 33 bp, Homo sapien
aggtcagtgattctccggagctctgtaggtcag

SEQ ID NO: 592186 - DNA, 33 bp, Homo sapien
aggtcagtgattctcctgagctctgtaggtcag

SEQ ID NO: 592187 - DNA, 33 bp, Homo sapien
tttacttgtgagtaaaattctaaccactcttct

SEQ ID NO: 592188 - DNA, 33 bp, Homo sapien
tttacttgtgagtaaacttctaaccactcttct

SEQ ID NO: 592189 - DNA, 33 bp, Homo sapien
aggcttcttatcacaacgttttctccaaaaaat

SEQ ID NO: 592190 - DNA, 33 bp, Homo sapien
aggcttcttatcacaatgttttctccaaaaaat

SEQ ID NO: 592191 - DNA, 33 bp, Homo sapien
agggagagataagatcaaatgttaggatggact

SEQ ID NO: 592192 - DNA, 33 bp, Homo sapien
agggagagataagatcgaatgttaggatggact

SEQ ID NO: 592193 - DNA, 33 bp, Homo sapien
taggatgccgttttatcagttcagtcttaggac

SEQ ID NO: 592194 - DNA, 33 bp, Homo sapien
taggatgccgttttatgagttcagtcttaggac

SEQ ID NO: 592195 - DNA, 33 bp, Homo sapien
agttgtaactctcttaagttttctctactgtcc

SEQ ID NO: 592196 - DNA, 33 bp, Homo sapien
agttgtaactctcttatgttttctctactgtcc

SEQ ID NO: 592197 - DNA, 33 bp, Homo sapien
ttcaagaaggattccaaaataaggcactgttat

SEQ ID NO: 592198 - DNA, 33 bp, Homo sapien
ttcaagaaggattccacaataaggcactgttat

SEQ ID NO: 592199 - DNA, 33 bp, Homo sapien
caggtgtacaggtgtaccatttttttcccttct

SEQ ID NO: 592200 - DNA, 33 bp, Homo sapien
caggtgtacaggtgtatcatttttttcccttct

SEQ ID NO: 592201 - DNA, 33 bp, Homo sapien
tctattcatgtagctacaagtagggcacattaa

SEQ ID NO: 592202 - DNA, 33 bp, Homo sapien
tctattcatgtagctataagtagggcacattaa

SEQ ID NO: 592203 - DNA, 33 bp, Homo sapien
ccttcgaggagaaaacagacctgtgaccctgaa

SEQ ID NO: 592204 - DNA, 33 bp, Homo sapien
ccttcgaggagaaaaccgacctgtgaccctgaa

SEQ ID NO: 592205 - DNA, 33 bp, Homo sapien
agaggtgtggtctcaacaggcgaccccaagaac

SEQ ID NO: 592206 - DNA, 33 bp, Homo sapien
agaggtgtggtctcaataggcgaccccaagaac

SEQ ID NO: 592207 - DNA, 33 bp, Homo sapien
actcatgactcattcacgtctttatccctgccc

SEQ ID NO: 592208 - DNA, 33 bp, Homo sapien
actcatgactcattcatgtctttatccctgccc

SEQ ID NO: 592209 - DNA, 33 bp, Homo sapien
gaagatggctgccttccatctccaatgcatttt

SEQ ID NO: 592210 - DNA, 33 bp, Homo sapien
gaagatggctgccttctatctccaatgcatttt

SEQ ID NO: 592211 - DNA, 33 bp, Homo sapien
aaataaaaagagctccccagtgtaagaattcca

SEQ ID NO: 592212 - DNA, 33 bp, Homo sapien
aaataaaaagagctcctcagtgtaagaattcca

SEQ ID NO: 592213 - DNA, 33 bp, Homo sapien
gtacacttgtgatacaacagaagcactaaaatg

SEQ ID NO: 592214 - DNA, 33 bp, Homo sapien
gtacacttgtgatacatcagaagcactaaaatg

SEQ ID NO: 592215 - DNA, 33 bp, Homo sapien
ataaagtacaaatcccaatctgctctccccaat

SEQ ID NO: 592216 - DNA, 33 bp, Homo sapien
ataaagtacaaatcccgatctgctctccccaat

SEQ ID NO: 592217 - DNA, 33 bp, Homo sapien
actgcgatttaagagacactttgtttttgtagg

SEQ ID NO: 592218 - DNA, 33 bp, Homo sapien
actgcgatttaagagatactttgtttttgtagg

SEQ ID NO: 592219 - DNA, 33 bp, Homo sapien
aggctcatagtgttggaagctgattaaagcaat

SEQ ID NO: 592220 - DNA, 33 bp, Homo sapien
aggctcatagtgttggcagctgattaaagcaat

SEQ ID NO: 592221 - DNA, 33 bp, Homo sapien
ttttcggactattagtcaacagaatcatcataa

SEQ ID NO: 592222 - DNA, 33 bp, Homo sapien
ttttcggactattagttaacagaatcatcataa

SEQ ID NO: 592223 - DNA, 33 bp, Homo sapien
taatttaaaactccaaaagacaggagcagtgat

SEQ ID NO: 592224 - DNA, 33 bp, Homo sapien
taatttaaaactccaagagacaggagcagtgat

SEQ ID NO: 592225 - DNA, 33 bp, Homo sapien
gagttattttcttagacagaagccacgttacct

SEQ ID NO: 592226 - DNA, 33 bp, Homo sapien
gagttattttcttagagagaagccacgttacct

SEQ ID NO: 592227 - DNA, 33 bp, Homo sapien
aatcataaaatattcacgagtgtaagatgtaca

SEQ ID NO: 592228 - DNA, 33 bp, Homo sapien
aatcataaaatattcatgagtgtaagatgtaca

SEQ ID NO: 592229 - DNA, 33 bp, Homo sapien
aggaatacagataaaacgctatgggatttcagg

SEQ ID NO: 592230 - DNA, 33 bp, Homo sapien
aggaatacagataaaatgctatgggatttcagg

SEQ ID NO: 592231 - DNA, 33 bp, Homo sapien
gaagatagtgttgattaaaaaaaattgtgtttt

SEQ ID NO: 592232 - DNA, 33 bp, Homo sapien
gaagatagtgttgatttaaaaaaattgtgtttt

SEQ ID NO: 592233 - DNA, 33 bp, Homo sapien
atctccaaccaaacctaacttatacttaggggc

SEQ ID NO: 592234 - DNA, 33 bp, Homo sapien
atctccaaccaaacctgacttatacttaggggc

SEQ ID NO: 592235 - DNA, 33 bp, Homo sapien
ggggatgcagaggagacgctgacgtcccagagg

SEQ ID NO: 592236 - DNA, 33 bp, Homo sapien
ggggatgcagaggagaggctgacgtcccagagg

SEQ ID NO: 592237 - DNA, 33 bp, Homo sapien
gggcttgtgcttgttacctggaattgaaaagag

SEQ ID NO: 592238 - DNA, 33 bp, Homo sapien
gggcttgtgcttgttatctggaattgaaaagag

SEQ ID NO: 592239 - DNA, 33 bp, Homo sapien
tacttttttagagtaacgaagccataaaatgta

SEQ ID NO: 592240 - DNA, 33 bp, Homo sapien
tacttttttagagtaatgaagccataaaatgta

SEQ ID NO: 592241 - DNA, 33 bp, Homo sapien
ttgactcagaggtaaaagctcccttgctcccaa

SEQ ID NO: 592242 - DNA, 33 bp, Homo sapien
ttgactcagaggtaaacgctcccttgctcccaa

SEQ ID NO: 592243 - DNA, 33 bp, Homo sapien
caaaagtcaggttctacgcccggtggtggggtg

SEQ ID NO: 592244 - DNA, 33 bp, Homo sapien
caaaagtcaggttctatgcccggtggtggggtg

SEQ ID NO: 592245 - DNA, 33 bp, Homo sapien
gccatttactattcaaagatttggagactgatg

SEQ ID NO: 592246 - DNA, 33 bp, Homo sapien
gccatttactattcaaggatttggagactgatg

SEQ ID NO: 592247 - DNA, 33 bp, Homo sapien
aagagtaaatgatttcaacaaatgaaccaaaaa

SEQ ID NO: 592248 - DNA, 33 bp, Homo sapien
aagagtaaatgatttccacaaatgaaccaaaaa

SEQ ID NO: 592249 - DNA, 33 bp, Homo sapien
agtaccccacaatgaaagcaaaagagcacccag

SEQ ID NO: 592250 - DNA, 33 bp, Homo sapien
agtaccccacaatgaaggcaaaagagcacccag

SEQ ID NO: 592251 - DNA, 33 bp, Homo sapien
ttaacaaaatcactgaaagaaatttaacgtcaa

SEQ ID NO: 592252 - DNA, 33 bp, Homo sapien
ttaacaaaatcactgagagaaatttaacgtcaa

SEQ ID NO: 592253 - DNA, 33 bp, Homo sapien
aagataaatcagagccaaaaacatagttcattc

SEQ ID NO: 592254 - DNA, 33 bp, Homo sapien
aagataaatcagagccgaaaacatagttcattc

SEQ ID NO: 592255 - DNA, 33 bp, Homo sapien
ttctagcaggacaggaaacaattcaccaatggc

SEQ ID NO: 592256 - DNA, 33 bp, Homo sapien
ttctagcaggacaggacacaattcaccaatggc

SEQ ID NO: 592257 - DNA, 33 bp, Homo sapien
ctaagaacttaataacaaagctgaaaaggatgt

SEQ ID NO: 592258 - DNA, 33 bp, Homo sapien
ctaagaacttaataacgaagctgaaaaggatgt

SEQ ID NO: 592259 - DNA, 33 bp, Homo sapien
aatgtgggttgataccggctaattaagtcaaac

SEQ ID NO: 592260 - DNA, 33 bp, Homo sapien
aatgtgggttgatacctgctaattaagtcaaac

SEQ ID NO: 592261 - DNA, 33 bp, Homo sapien
ttgttttctcctttacaatggctctttgcagta

SEQ ID NO: 592262 - DNA, 33 bp, Homo sapien
ttgttttctcctttacgatggctctttgcagta

SEQ ID NO: 592263 - DNA, 33 bp, Homo sapien
acaatatgattacagaacttgagacattttcga

SEQ ID NO: 592264 - DNA, 33 bp, Homo sapien
acaatatgattacagatcttgagacattttcga

SEQ ID NO: 592265 - DNA, 33 bp, Homo sapien
gctcttcatgagaggcaattgggttggaatggg

SEQ ID NO: 592266 - DNA, 33 bp, Homo sapien
gctcttcatgagaggcgattgggttggaatggg

SEQ ID NO: 592267 - DNA, 33 bp, Homo sapien
gggaaatggggctgaaagttctgagcatctaat

SEQ ID NO: 592268 - DNA, 33 bp, Homo sapien
gggaaatggggctgaaggttctgagcatctaat

SEQ ID NO: 592269 - DNA, 33 bp, Homo sapien
tgaagccagggtcgatcagtggaaggaatagta

SEQ ID NO: 592270 - DNA, 33 bp, Homo sapien
tgaagccagggtcgattagtggaaggaatagta

SEQ ID NO: 592271 - DNA, 33 bp, Homo sapien
tgccttgcttgatcctcaatgccagagtgtagc

SEQ ID NO: 592272 - DNA, 33 bp, Homo sapien
tgccttgcttgatccttaatgccagagtgtagc

SEQ ID NO: 592273 - DNA, 33 bp, Homo sapien
ggccacatagctgctccagtaagaagaactgga

SEQ ID NO: 592274 - DNA, 33 bp, Homo sapien
ggccacatagctgctctagtaagaagaactgga

SEQ ID NO: 592275 - DNA, 33 bp, Homo sapien
tttaggctaggaagtccgaaccttgttgtgaaa

SEQ ID NO: 592276 - DNA, 33 bp, Homo sapien
tttaggctaggaagtctgaaccttgttgtgaaa

SEQ ID NO: 592277 - DNA, 33 bp, Homo sapien
gtaatcaagtgtcacacggtttggctcacaaag

SEQ ID NO: 592278 - DNA, 33 bp, Homo sapien
gtaatcaagtgtcacatggtttggctcacaaag

SEQ ID NO: 592279 - DNA, 33 bp, Homo sapien
tgtcctgatgacagaaattcaactacacaggta

SEQ ID NO: 592280 - DNA, 33 bp, Homo sapien
tgtcctgatgacagaacttcaactacacaggta

SEQ ID NO: 592281 - DNA, 33 bp, Homo sapien
gttaagctttgactacacctcatttaaaatttt

SEQ ID NO: 592282 - DNA, 33 bp, Homo sapien
gttaagctttgactacccctcatttaaaatttt

SEQ ID NO: 592283 - DNA, 33 bp, Homo sapien
gtagatagatgatacacagaagataggcagata

SEQ ID NO: 592284 - DNA, 33 bp, Homo sapien
gtagatagatgatacatagaagataggcagata

SEQ ID NO: 592285 - DNA, 33 bp, Homo sapien
gatattgtggccctgaacaacattgggattcat

SEQ ID NO: 592286 - DNA, 33 bp, Homo sapien
gatattgtggccctgagcaacattgggattcat

SEQ ID NO: 592287 - DNA, 33 bp, Homo sapien
attgattcttagagacactattattcagtacaa

SEQ ID NO: 592288 - DNA, 33 bp, Homo sapien
attgattcttagagacgctattattcagtacaa

SEQ ID NO: 592289 - DNA, 33 bp, Homo sapien
taactcttacctacaactaatctatgcatgaaa

SEQ ID NO: 592290 - DNA, 33 bp, Homo sapien
taactcttacctacaattaatctatgcatgaaa

SEQ ID NO: 592291 - DNA, 33 bp, Homo sapien
gtggggactcaggggaccatctaagtagactct

SEQ ID NO: 592292 - DNA, 33 bp, Homo sapien
gtggggactcaggggagcatctaagtagactct

SEQ ID NO: 592293 - DNA, 33 bp, Homo sapien
gtttcttgtggtagaacgggtcttcaagctaca

SEQ ID NO: 592294 - DNA, 33 bp, Homo sapien
gtttcttgtggtagaatgggtcttcaagctaca

SEQ ID NO: 592295 - DNA, 33 bp, Homo sapien
aatttgtactctgatacgaaactgcaatgcttg

SEQ ID NO: 592296 - DNA, 33 bp, Homo sapien
aatttgtactctgataggaaactgcaatgcttg

SEQ ID NO: 592297 - DNA, 33 bp, Homo sapien
gaggacaattagagcacctcctgcaaagagcca

SEQ ID NO: 592298 - DNA, 33 bp, Homo sapien
gaggacaattagagcatctcctgcaaagagcca

SEQ ID NO: 592299 - DNA, 33 bp, Homo sapien
tctaccattcccgccaatccagatccaacacgc

SEQ ID NO: 592300 - DNA, 33 bp, Homo sapien
tctaccattcccgccagtccagatccaacacgc

SEQ ID NO: 592301 - DNA, 33 bp, Homo sapien
ggcacgtgcaaaggaacggaggctagaagctac

SEQ ID NO: 592302 - DNA, 33 bp, Homo sapien
ggcacgtgcaaaggaagggaggctagaagctac

SEQ ID NO: 592303 - DNA, 33 bp, Homo sapien
aagacaaaagcaggtacaaaaatctcattccca

SEQ ID NO: 592304 - DNA, 33 bp, Homo sapien
aagacaaaagcaggtataaaaatctcattccca

SEQ ID NO: 592305 - DNA, 33 bp, Homo sapien
aatggcctattttacacacttgaaggatatttc

SEQ ID NO: 592306 - DNA, 33 bp, Homo sapien
aatggcctattttacatacttgaaggatatttc

SEQ ID NO: 592307 - DNA, 33 bp, Homo sapien
atccctctacagtaaacgctcacaagggaggaa

SEQ ID NO: 592308 - DNA, 33 bp, Homo sapien
atccctctacagtaaatgctcacaagggaggaa

SEQ ID NO: 592309 - DNA, 33 bp, Homo sapien
actgggaatcccttccacattttgtccccttgt

SEQ ID NO: 592310 - DNA, 33 bp, Homo sapien
actgggaatcccttcctcattttgtccccttgt

SEQ ID NO: 592311 - DNA, 33 bp, Homo sapien
ccttttactaaagatacgtgaagtcagttttac

SEQ ID NO: 592312 - DNA, 33 bp, Homo sapien
ccttttactaaagatatgtgaagtcagttttac

SEQ ID NO: 592313 - DNA, 33 bp, Homo sapien
gactcctgctttaaaccattgatgagaagagct

SEQ ID NO: 592314 - DNA, 33 bp, Homo sapien
gactcctgctttaaacgattgatgagaagagct

SEQ ID NO: 592315 - DNA, 33 bp, Homo sapien
ttcacatcctgatagcaacaacaaggaacgtta

SEQ ID NO: 592316 - DNA, 33 bp, Homo sapien
ttcacatcctgatagcgacaacaaggaacgtta

SEQ ID NO: 592317 - DNA, 33 bp, Homo sapien
atgtaattcatgaaaaccaaaattcccttctcg

SEQ ID NO: 592318 - DNA, 33 bp, Homo sapien
atgtaattcatgaaaatcaaaattcccttctcg

SEQ ID NO: 592319 - DNA, 33 bp, Homo sapien
ttgttttgccaagaaaacatcctgagttccctg

SEQ ID NO: 592320 - DNA, 33 bp, Homo sapien
ttgttttgccaagaaaccatcctgagttccctg

SEQ ID NO: 592321 - DNA, 33 bp, Homo sapien
agcaccctcctggatcactttcactattcattc

SEQ ID NO: 592322 - DNA, 33 bp, Homo sapien
agcaccctcctggatcgctttcactattcattc

SEQ ID NO: 592323 - DNA, 33 bp, Homo sapien
gtactctctgacagtcacaaggaagactgtcaa

SEQ ID NO: 592324 - DNA, 33 bp, Homo sapien
gtactctctgacagtcgcaaggaagactgtcaa

SEQ ID NO: 592325 - DNA, 33 bp, Homo sapien
cgtattggtttcatgggcactataaagacacat

SEQ ID NO: 592326 - DNA, 33 bp, Homo sapien
cgtattggtttcatggtcactataaagacacat

SEQ ID NO: 592327 - DNA, 33 bp, Homo sapien
actcaattctcgtaaacaagtggcttgccagag

SEQ ID NO: 592328 - DNA, 33 bp, Homo sapien
actcaattctcgtaaataagtggcttgccagag

SEQ ID NO: 592329 - DNA, 33 bp, Homo sapien
gaggaattcattccaaaccagctcacggaggaa

SEQ ID NO: 592330 - DNA, 33 bp, Homo sapien
gaggaattcattccaacccagctcacggaggaa

SEQ ID NO: 592331 - DNA, 33 bp, Homo sapien
ccttcatttgctgacacgggcattagcaggaca

SEQ ID NO: 592332 - DNA, 33 bp, Homo sapien
ccttcatttgctgacatgggcattagcaggaca

SEQ ID NO: 592333 - DNA, 33 bp, Homo sapien
tacagaaacctctctcactttgctgtgtttttt

SEQ ID NO: 592334 - DNA, 33 bp, Homo sapien
tacagaaacctctctcgctttgctgtgtttttt

SEQ ID NO: 592335 - DNA, 33 bp, Homo sapien
atgtgtctcatccctactacctgcttcagatat

SEQ ID NO: 592336 - DNA, 33 bp, Homo sapien
atgtgtctcatccctattacctgcttcagatat

SEQ ID NO: 592337 - DNA, 33 bp, Homo sapien
agggaggttgggacggaatttgattcagaagaa

SEQ ID NO: 592338 - DNA, 33 bp, Homo sapien
agggaggttgggacgggatttgattcagaagaa

SEQ ID NO: 592339 - DNA, 33 bp, Homo sapien
ctgcactctctcctgacggtgactccttgcagc

SEQ ID NO: 592340 - DNA, 33 bp, Homo sapien
ctgcactctctcctgatggtgactccttgcagc

SEQ ID NO: 592341 - DNA, 33 bp, Homo sapien
gtggtctccagagcaaagaagcagcactagtac

SEQ ID NO: 592342 - DNA, 33 bp, Homo sapien
gtggtctccagagcaaggaagcagcactagtac

SEQ ID NO: 592343 - DNA, 33 bp, Homo sapien
tcacagtgtatgaaacaaatgttagttactcca

SEQ ID NO: 592344 - DNA, 33 bp, Homo sapien
tcacagtgtatgaaacgaatgttagttactcca

SEQ ID NO: 592345 - DNA, 33 bp, Homo sapien
agggccataaaactgacggtgcaagctgaaact

SEQ ID NO: 592346 - DNA, 33 bp, Homo sapien
agggccataaaactgatggtgcaagctgaaact

SEQ ID NO: 592347 - DNA, 33 bp, Homo sapien
accttagcggaatagcacctctccatccagttc

SEQ ID NO: 592348 - DNA, 33 bp, Homo sapien
accttagcggaatagcgcctctccatccagttc

SEQ ID NO: 592349 - DNA, 33 bp, Homo sapien
aggacttgtggaggtcaaaaatatcatgaatga

SEQ ID NO: 592350 - DNA, 33 bp, Homo sapien
aggacttgtggaggtcgaaaatatcatgaatga

SEQ ID NO: 592351 - DNA, 33 bp, Homo sapien
tgtacctgctaggtaactctgaacaacaccact

SEQ ID NO: 592352 - DNA, 33 bp, Homo sapien
tgtacctgctaggtaattctgaacaacaccact

SEQ ID NO: 592353 - DNA, 33 bp, Homo sapien
caatcgttgtaaaacacggaatgcaatgtgaaa

SEQ ID NO: 592354 - DNA, 33 bp, Homo sapien
caatcgttgtaaaacatggaatgcaatgtgaaa

SEQ ID NO: 592355 - DNA, 33 bp, Homo sapien
aagctagcaccaggcacaaagggtcatttctac

SEQ ID NO: 592356 - DNA, 33 bp, Homo sapien
aagctagcaccaggcagaaagggtcatttctac

SEQ ID NO: 592357 - DNA, 33 bp, Homo sapien
aggaagggaaggaaaccgtagctgctttggagg

SEQ ID NO: 592358 - DNA, 33 bp, Homo sapien
aggaagggaaggaaactgtagctgctttggagg

SEQ ID NO: 592359 - DNA, 33 bp, Homo sapien
aagccattctgattcacagcccctgtccttgca

SEQ ID NO: 592360 - DNA, 33 bp, Homo sapien
aagccattctgattcagagcccctgtccttgca

SEQ ID NO: 592361 - DNA, 33 bp, Homo sapien
gtactcaacactctaacatattctgcacatttg

SEQ ID NO: 592362 - DNA, 33 bp, Homo sapien
gtactcaacactctaatatattctgcacatttg

SEQ ID NO: 592363 - DNA, 33 bp, Homo sapien
tttctcagtatcacaacgggatatgctgtttca

SEQ ID NO: 592364 - DNA, 33 bp, Homo sapien
tttctcagtatcacaatgggatatgctgtttca

SEQ ID NO: 592365 - DNA, 33 bp, Homo sapien
aactgaggaccagagcaagtaagcaaatagtct

SEQ ID NO: 592366 - DNA, 33 bp, Homo sapien
aactgaggaccagagcgagtaagcaaatagtct

SEQ ID NO: 592367 - DNA, 33 bp, Homo sapien
agggccgactaagagaagttgtaaagtatgtat

SEQ ID NO: 592368 - DNA, 33 bp, Homo sapien
agggccgactaagagacgttgtaaagtatgtat

SEQ ID NO: 592369 - DNA, 33 bp, Homo sapien
acagacaagcctgtcgaactttgaaaccaactt

SEQ ID NO: 592370 - DNA, 33 bp, Homo sapien
acagacaagcctgtcggactttgaaaccaactt

SEQ ID NO: 592371 - DNA, 33 bp, Homo sapien
taaacagagacttgccacttgatgatggaatgt

SEQ ID NO: 592372 - DNA, 33 bp, Homo sapien
taaacagagacttgccgcttgatgatggaatgt

SEQ ID NO: 592373 - DNA, 33 bp, Homo sapien
tctgttcaaagtgcaacgtaggccaatggaatt

SEQ ID NO: 592374 - DNA, 33 bp, Homo sapien
tctgttcaaagtgcaaggtaggccaatggaatt

SEQ ID NO: 592375 - DNA, 33 bp, Homo sapien
cccagtaattttctgacgtgatttgtggtgata

SEQ ID NO: 592376 - DNA, 33 bp, Homo sapien
cccagtaattttctgatgtgatttgtggtgata

SEQ ID NO: 592377 - DNA, 33 bp, Homo sapien
ttatttagtttttgagaaaggaccagccaaata

SEQ ID NO: 592378 - DNA, 33 bp, Homo sapien
ttatttagtttttgaggaaggaccagccaaata

SEQ ID NO: 592379 - DNA, 33 bp, Homo sapien
agaactggtctgcacacatactgaaatatggtg

SEQ ID NO: 592380 - DNA, 33 bp, Homo sapien
agaactggtctgcacatatactgaaatatggtg

SEQ ID NO: 592381 - DNA, 33 bp, Homo sapien
accagcaaatcataaaagtgtttctcatcagag

SEQ ID NO: 592382 - DNA, 33 bp, Homo sapien
accagcaaatcataaaggtgtttctcatcagag

SEQ ID NO: 592383 - DNA, 33 bp, Homo sapien
atacatagcttgagaaaacagaagccccaaggt

SEQ ID NO: 592384 - DNA, 33 bp, Homo sapien
atacatagcttgagaagacagaagccccaaggt

SEQ ID NO: 592385 - DNA, 33 bp, Homo sapien
ttgtcttaaccaaaaacgtgatgttcccacatg

SEQ ID NO: 592386 - DNA, 33 bp, Homo sapien
ttgtcttaaccaaaaatgtgatgttcccacatg

SEQ ID NO: 592387 - DNA, 33 bp, Homo sapien
ccacccaagagtaatgcaatcagaggctcccag

SEQ ID NO: 592388 - DNA, 33 bp, Homo sapien
ccacccaagagtaatggaatcagaggctcccag

SEQ ID NO: 592389 - DNA, 33 bp, Homo sapien
tgccaaagcaattcaacgagaaaaaaaggaaat

SEQ ID NO: 592390 - DNA, 33 bp, Homo sapien
tgccaaagcaattcaatgagaaaaaaaggaaat

SEQ ID NO: 592391 - DNA, 33 bp, Homo sapien
ctctgaatttattgaaacttttccctgttcacg

SEQ ID NO: 592392 - DNA, 33 bp, Homo sapien
ctctgaatttattgaaccttttccctgttcacg

SEQ ID NO: 592393 - DNA, 33 bp, Homo sapien
ataagtaagcctgaaccgggaatctatccaaat

SEQ ID NO: 592394 - DNA, 33 bp, Homo sapien
ataagtaagcctgaactgggaatctatccaaat

SEQ ID NO: 592395 - DNA, 33 bp, Homo sapien
gtgtactggcctttcaaccttccactttgccaa

SEQ ID NO: 592396 - DNA, 33 bp, Homo sapien
gtgtactggcctttcagccttccactttgccaa

SEQ ID NO: 592397 - DNA, 33 bp, Homo sapien
gtctaaaatatcacaacgcttataatggaaaca

SEQ ID NO: 592398 - DNA, 33 bp, Homo sapien
gtctaaaatatcacaaggcttataatggaaaca

SEQ ID NO: 592399 - DNA, 33 bp, Homo sapien
ttatctgggtcttcagaaagtcaatactatgat

SEQ ID NO: 592400 - DNA, 33 bp, Homo sapien
ttatctgggtcttcaggaagtcaatactatgat

SEQ ID NO: 592401 - DNA, 33 bp, Homo sapien
taacaatgtgggctccgctgaacatgtacttcg

SEQ ID NO: 592402 - DNA, 33 bp, Homo sapien
taacaatgtgggctcctctgaacatgtacttcg

SEQ ID NO: 592403 - DNA, 33 bp, Homo sapien
tcagactttttcaggccgcaaatggattgataa

SEQ ID NO: 592404 - DNA, 33 bp, Homo sapien
tcagactttttcaggctgcaaatggattgataa

SEQ ID NO: 592405 - DNA, 33 bp, Homo sapien
ttctatttggaatccacgaagatccctaggcca

SEQ ID NO: 592406 - DNA, 33 bp, Homo sapien
ttctatttggaatccatgaagatccctaggcca

SEQ ID NO: 592407 - DNA, 33 bp, Homo sapien
ctcagaggtctaatgacgcaacagctgcagcac

SEQ ID NO: 592408 - DNA, 33 bp, Homo sapien
ctcagaggtctaatgatgcaacagctgcagcac

SEQ ID NO: 592409 - DNA, 33 bp, Homo sapien
attttcaatgtaacaacccaggagaaataagta

SEQ ID NO: 592410 - DNA, 33 bp, Homo sapien
attttcaatgtaacaatccaggagaaataagta

SEQ ID NO: 592411 - DNA, 33 bp, Homo sapien
catctgcaccatttagcatgaactgttccttgt

SEQ ID NO: 592412 - DNA, 33 bp, Homo sapien
catctgcaccatttaggatgaactgttccttgt

SEQ ID NO: 592413 - DNA, 33 bp, Homo sapien
gggagaggctatatgtaaaagggaacttacctg

SEQ ID NO: 592414 - DNA, 33 bp, Homo sapien
gggagaggctatatgtgaaagggaacttacctg

SEQ ID NO: 592415 - DNA, 33 bp, Homo sapien
ttctctttgttgttggaaaatttctgatgacac

SEQ ID NO: 592416 - DNA, 33 bp, Homo sapien
ttctctttgttgttgggaaatttctgatgacac

SEQ ID NO: 592417 - DNA, 33 bp, Homo sapien
ttaccagtgaagactaagccccaagaaagctgt

SEQ ID NO: 592418 - DNA, 33 bp, Homo sapien
ttaccagtgaagactaggccccaagaaagctgt

SEQ ID NO: 592419 - DNA, 33 bp, Homo sapien
agcaaaccaaacacaactggacctgttttcacc

SEQ ID NO: 592420 - DNA, 33 bp, Homo sapien
agcaaaccaaacacaattggacctgttttcacc

SEQ ID NO: 592421 - DNA, 33 bp, Homo sapien
agaggtgaagtcagtgcaagatgctccaaccct

SEQ ID NO: 592422 - DNA, 33 bp, Homo sapien
agaggtgaagtcagtggaagatgctccaaccct

SEQ ID NO: 592423 - DNA, 33 bp, Homo sapien
aactacaggcctgtaacgctgctcgccctaagt

SEQ ID NO: 592424 - DNA, 33 bp, Homo sapien
aactacaggcctgtaatgctgctcgccctaagt

SEQ ID NO: 592425 - DNA, 33 bp, Homo sapien
tggagggaactacccacagaaaccactgcagaa

SEQ ID NO: 592426 - DNA, 33 bp, Homo sapien
tggagggaactacccagagaaaccactgcagaa

SEQ ID NO: 592427 - DNA, 33 bp, Homo sapien
gagccaggattttgtacgtggatgagattcttc

SEQ ID NO: 592428 - DNA, 33 bp, Homo sapien
gagccaggattttgtatgtggatgagattcttc

SEQ ID NO: 592429 - DNA, 33 bp, Homo sapien
cagtaagtgaaaatcactctggagaaaaaaata

SEQ ID NO: 592430 - DNA, 33 bp, Homo sapien
cagtaagtgaaaatcattctggagaaaaaaata

SEQ ID NO: 592431 - DNA, 33 bp, Homo sapien
gggaacagggcacaaagctcagaaatggactgg

SEQ ID NO: 592432 - DNA, 33 bp, Homo sapien
gggaacagggcacaaatctcagaaatggactgg

SEQ ID NO: 592433 - DNA, 33 bp, Homo sapien
gctttgatttactttgacaaaggctctttgagc

SEQ ID NO: 592434 - DNA, 33 bp, Homo sapien
gctttgatttactttggcaaaggctctttgagc

SEQ ID NO: 592435 - DNA, 33 bp, Homo sapien
catccaggaggtctccactcaacttgaagaaat

SEQ ID NO: 592436 - DNA, 33 bp, Homo sapien
catccaggaggtctccgctcaacttgaagaaat

SEQ ID NO: 592437 - DNA, 33 bp, Homo sapien
gacatttcagttctcacaatcttctctccaaac

SEQ ID NO: 592438 - DNA, 33 bp, Homo sapien
gacatttcagttctcataatcttctctccaaac

SEQ ID NO: 592439 - DNA, 33 bp, Homo sapien
ggttctggggaatggaagtgtgagaaagaaaac

SEQ ID NO: 592440 - DNA, 33 bp, Homo sapien
ggttctggggaatggacgtgtgagaaagaaaac

SEQ ID NO: 592441 - DNA, 33 bp, Homo sapien
ctaagttttatgcaccaacgcctttgttcttgt

SEQ ID NO: 592442 - DNA, 33 bp, Homo sapien
ctaagttttatgcaccgacgcctttgttcttgt

SEQ ID NO: 592443 - DNA, 33 bp, Homo sapien
ggtaaacttgtgctgcaaatgtttattgaacag

SEQ ID NO: 592444 - DNA, 33 bp, Homo sapien
ggtaaacttgtgctgcgaatgtttattgaacag

SEQ ID NO: 592445 - DNA, 33 bp, Homo sapien
ctcatgtgtatcttcacgctttccctaaggcac

SEQ ID NO: 592446 - DNA, 33 bp, Homo sapien
ctcatgtgtatcttcatgctttccctaaggcac

SEQ ID NO: 592447 - DNA, 33 bp, Homo sapien
gccggtgtcttaggaaatggaactctgtggtag

SEQ ID NO: 592448 - DNA, 33 bp, Homo sapien
gccggtgtcttaggaactggaactctgtggtag

SEQ ID NO: 592449 - DNA, 33 bp, Homo sapien
ggccacatagctcccacgtctggcttcctcttg

SEQ ID NO: 592450 - DNA, 33 bp, Homo sapien
ggccacatagctcccatgtctggcttcctcttg

SEQ ID NO: 592451 - DNA, 33 bp, Homo sapien
ttctcacaatttgggccataggaaatttatatc

SEQ ID NO: 592452 - DNA, 33 bp, Homo sapien
ttctcacaatttgggctataggaaatttatatc

SEQ ID NO: 592453 - DNA, 33 bp, Homo sapien
aatgtgtctcggcagacgaaggaagctcacgcc

SEQ ID NO: 592454 - DNA, 33 bp, Homo sapien
aatgtgtctcggcagatgaaggaagctcacgcc

SEQ ID NO: 592455 - DNA, 33 bp, Homo sapien
ttactggtgtcaaagtaacaaggatgctaacac

SEQ ID NO: 592456 - DNA, 33 bp, Homo sapien
ttactggtgtcaaagtcacaaggatgctaacac

SEQ ID NO: 592457 - DNA, 33 bp, Homo sapien
ctagcttccatgtctacgaagttttatctgatt

SEQ ID NO: 592458 - DNA, 33 bp, Homo sapien
ctagcttccatgtctatgaagttttatctgatt

SEQ ID NO: 592459 - DNA, 33 bp, Homo sapien
gtcattcctgtgtcaacgagactctcacaggta

SEQ ID NO: 592460 - DNA, 33 bp, Homo sapien
gtcattcctgtgtcaatgagactctcacaggta

SEQ ID NO: 592461 - DNA, 33 bp, Homo sapien
ggtttttgtaatgacaatatcatcaaatgctgt

SEQ ID NO: 592462 - DNA, 33 bp, Homo sapien
ggtttttgtaatgacagtatcatcaaatgctgt

SEQ ID NO: 592463 - DNA, 33 bp, Homo sapien
ttatgataaaatatccactctttaatgcaaaca

SEQ ID NO: 592464 - DNA, 33 bp, Homo sapien
ttatgataaaatatccgctctttaatgcaaaca

SEQ ID NO: 592465 - DNA, 33 bp, Homo sapien
cggcacccaccatcaagacacacatatgtctcc

SEQ ID NO: 592466 - DNA, 33 bp, Homo sapien
cggcacccaccatcaatacacacatatgtctcc

SEQ ID NO: 592467 - DNA, 33 bp, Homo sapien
agtagggccagcttgagcctgggagccgtgtgg

SEQ ID NO: 592468 - DNA, 33 bp, Homo sapien
agtagggccagcttgatcctgggagccgtgtgg

SEQ ID NO: 592469 - DNA, 33 bp, Homo sapien
atggagtaaatggggacgagcaggtgagaggtg

SEQ ID NO: 592470 - DNA, 33 bp, Homo sapien
atggagtaaatggggatgagcaggtgagaggtg

SEQ ID NO: 592471 - DNA, 33 bp, Homo sapien
tgtataaactggtccaatgagttttattttaaa

SEQ ID NO: 592472 - DNA, 33 bp, Homo sapien
tgtataaactggtccattgagttttattttaaa

SEQ ID NO: 592473 - DNA, 33 bp, Homo sapien
tttgggatagaataacactggtaatagttgagt

SEQ ID NO: 592474 - DNA, 33 bp, Homo sapien
tttgggatagaataacgctggtaatagttgagt

SEQ ID NO: 592475 - DNA, 33 bp, Homo sapien
gagaaggggaaaggtgcaagacaatggggaaag

SEQ ID NO: 592476 - DNA, 33 bp, Homo sapien
gagaaggggaaaggtggaagacaatggggaaag

SEQ ID NO: 592477 - DNA, 33 bp, Homo sapien
ttaagctgctaacttgaagtggtttgtaggaaa

SEQ ID NO: 592478 - DNA, 33 bp, Homo sapien
ttaagctgctaacttgtagtggtttgtaggaaa

SEQ ID NO: 592479 - DNA, 33 bp, Homo sapien
caccctcactctcactaagctgttttctattgc

SEQ ID NO: 592480 - DNA, 33 bp, Homo sapien
caccctcactctcactgagctgttttctattgc

SEQ ID NO: 592481 - DNA, 33 bp, Homo sapien
acagaaatgaagaaaccgtgctaaatctcaaag

SEQ ID NO: 592482 - DNA, 33 bp, Homo sapien
acagaaatgaagaaactgtgctaaatctcaaag

SEQ ID NO: 592483 - DNA, 33 bp, Homo sapien
aaagcatccttcatgcgccatttgctaggttcc

SEQ ID NO: 592484 - DNA, 33 bp, Homo sapien
aaagcatccttcatgctccatttgctaggttcc

SEQ ID NO: 592485 - DNA, 33 bp, Homo sapien
tttaagcacagaaatacgtttcccaaagttgtt

SEQ ID NO: 592486 - DNA, 33 bp, Homo sapien
tttaagcacagaaatatgtttcccaaagttgtt

SEQ ID NO: 592487 - DNA, 33 bp, Homo sapien
tggacttcccatgaccagcagagtgggtttgat

SEQ ID NO: 592488 - DNA, 33 bp, Homo sapien
tggacttcccatgaccggcagagtgggtttgat

SEQ ID NO: 592489 - DNA, 33 bp, Homo sapien
ctgtttgcagatgtcaactgtggtaactcggcc

SEQ ID NO: 592490 - DNA, 33 bp, Homo sapien
ctgtttgcagatgtcagctgtggtaactcggcc

SEQ ID NO: 592491 - DNA, 33 bp, Homo sapien
ctccatttgtgatataagagtcaacactggcca

SEQ ID NO: 592492 - DNA, 33 bp, Homo sapien
ctccatttgtgatataggagtcaacactggcca

SEQ ID NO: 592493 - DNA, 33 bp, Homo sapien
atggggctgctgttccagagctgactccaacat

SEQ ID NO: 592494 - DNA, 33 bp, Homo sapien
atggggctgctgttccggagctgactccaacat

SEQ ID NO: 592495 - DNA, 33 bp, Homo sapien
ttcaaatccctgcttcccatctgcctgctcatt

SEQ ID NO: 592496 - DNA, 33 bp, Homo sapien
ttcaaatccctgcttctcatctgcctgctcatt

SEQ ID NO: 592497 - DNA, 33 bp, Homo sapien
cacctgtgtctggtaactggaagtgctccataa

SEQ ID NO: 592498 - DNA, 33 bp, Homo sapien
cacctgtgtctggtaattggaagtgctccataa

SEQ ID NO: 592499 - DNA, 33 bp, Homo sapien
ttgatacaaagtgccaatatttcaatttttctc

SEQ ID NO: 592500 - DNA, 33 bp, Homo sapien
ttgatacaaagtgccagtatttcaatttttctc

SEQ ID NO: 592501 - DNA, 33 bp, Homo sapien
aacaaggtcatattcacgggtactaggggttag

SEQ ID NO: 592502 - DNA, 33 bp, Homo sapien
aacaaggtcatattcatgggtactaggggttag

SEQ ID NO: 592503 - DNA, 33 bp, Homo sapien
cagtatgttgaaatacagctaacaaaatgtaac

SEQ ID NO: 592504 - DNA, 33 bp, Homo sapien
cagtatgttgaaatacggctaacaaaatgtaac

SEQ ID NO: 592505 - DNA, 33 bp, Homo sapien
aaaatgagtctacgaaccagaagtctcttgaca

SEQ ID NO: 592506 - DNA, 33 bp, Homo sapien
aaaatgagtctacgaatcagaagtctcttgaca

SEQ ID NO: 592507 - DNA, 33 bp, Homo sapien
tgggtgttcacagatacagctggagttccccgg

SEQ ID NO: 592508 - DNA, 33 bp, Homo sapien
tgggtgttcacagatagagctggagttccccgg

SEQ ID NO: 592509 - DNA, 33 bp, Homo sapien
tgataatcataatcaaatgagctttggattgtc

SEQ ID NO: 592510 - DNA, 33 bp, Homo sapien
tgataatcataatcaagtgagctttggattgtc

SEQ ID NO: 592511 - DNA, 33 bp, Homo sapien
aaaagcagcttgttcaaagttagtcaaaggctt

SEQ ID NO: 592512 - DNA, 33 bp, Homo sapien
aaaagcagcttgttcagagttagtcaaaggctt

SEQ ID NO: 592513 - DNA, 33 bp, Homo sapien
taaggaaaggcagaaaagtgccccagaacaagg

SEQ ID NO: 592514 - DNA, 33 bp, Homo sapien
taaggaaaggcagaaacgtgccccagaacaagg

SEQ ID NO: 592515 - DNA, 33 bp, Homo sapien
tgccaacaacaaattgcacaactgctgaagctt

SEQ ID NO: 592516 - DNA, 33 bp, Homo sapien
tgccaacaacaaattgtacaactgctgaagctt

SEQ ID NO: 592517 - DNA, 33 bp, Homo sapien
ggattgtatgtccccccggcttgtcgaggtgag

SEQ ID NO: 592518 - DNA, 33 bp, Homo sapien
ggattgtatgtccccctggcttgtcgaggtgag

SEQ ID NO: 592519 - DNA, 33 bp, Homo sapien
gtgtgagagttggcctcaatgccgtggacaggg

SEQ ID NO: 592520 - DNA, 33 bp, Homo sapien
gtgtgagagttggcctgaatgccgtggacaggg

SEQ ID NO: 592521 - DNA, 33 bp, Homo sapien
ctgccaggcctctctggcaaacaagcaggagtc

SEQ ID NO: 592522 - DNA, 33 bp, Homo sapien
ctgccaggcctctctgtcaaacaagcaggagtc

SEQ ID NO: 592523 - DNA, 33 bp, Homo sapien
gttcatctgtgaaataaaggagtggacttcatt

SEQ ID NO: 592524 - DNA, 33 bp, Homo sapien
gttcatctgtgaaatagaggagtggacttcatt

SEQ ID NO: 592525 - DNA, 33 bp, Homo sapien
gaaacagtggaaactcaccctttgtaaaagcag

SEQ ID NO: 592526 - DNA, 33 bp, Homo sapien
gaaacagtggaaactcgccctttgtaaaagcag

SEQ ID NO: 592527 - DNA, 33 bp, Homo sapien
cgtacctttgcacaaacaatgccaacatgctgg

SEQ ID NO: 592528 - DNA, 33 bp, Homo sapien
cgtacctttgcacaaataatgccaacatgctgg

SEQ ID NO: 592529 - DNA, 33 bp, Homo sapien
tgttgtttgcacatagaccacctcacaatgaat

SEQ ID NO: 592530 - DNA, 33 bp, Homo sapien
tgttgtttgcacatagtccacctcacaatgaat

SEQ ID NO: 592531 - DNA, 33 bp, Homo sapien
tcttaaagcactgccaatcatggtgctcacatg

SEQ ID NO: 592532 - DNA, 33 bp, Homo sapien
tcttaaagcactgccagtcatggtgctcacatg

SEQ ID NO: 592533 - DNA, 33 bp, Homo sapien
tgctcagtaagtatagcacaaggcagcatgaca

SEQ ID NO: 592534 - DNA, 33 bp, Homo sapien
tgctcagtaagtatagtacaaggcagcatgaca

SEQ ID NO: 592535 - DNA, 33 bp, Homo sapien
ctagaaaatgagatgaaaaactcctgtaagatt

SEQ ID NO: 592536 - DNA, 33 bp, Homo sapien
ctagaaaatgagatgagaaactcctgtaagatt

SEQ ID NO: 592537 - DNA, 33 bp, Homo sapien
ggaccagtcaataatccgaaccctcagctttct

SEQ ID NO: 592538 - DNA, 33 bp, Homo sapien
ggaccagtcaataatctgaaccctcagctttct

SEQ ID NO: 592539 - DNA, 33 bp, Homo sapien
ttgcatgtgagagcaacgtctgcagctacagtc

SEQ ID NO: 592540 - DNA, 33 bp, Homo sapien
ttgcatgtgagagcaaggtctgcagctacagtc

SEQ ID NO: 592541 - DNA, 33 bp, Homo sapien
cataactgtactcaccaatcaggaaaacagacc

SEQ ID NO: 592542 - DNA, 33 bp, Homo sapien
cataactgtactcaccgatcaggaaaacagacc

SEQ ID NO: 592543 - DNA, 33 bp, Homo sapien
aacacagatcaactcccaaataaattcctctct

SEQ ID NO: 592544 - DNA, 33 bp, Homo sapien
aacacagatcaactccgaaataaattcctctct

SEQ ID NO: 592545 - DNA, 33 bp, Homo sapien
aggcatctcatcaacaacttctgataaatgagg

SEQ ID NO: 592546 - DNA, 33 bp, Homo sapien
aggcatctcatcaacagcttctgataaatgagg

SEQ ID NO: 592547 - DNA, 33 bp, Homo sapien
gacaagtaggatatctaaacagttggaagatgt

SEQ ID NO: 592548 - DNA, 33 bp, Homo sapien
gacaagtaggatatctgaacagttggaagatgt

SEQ ID NO: 592549 - DNA, 33 bp, Homo sapien
tttttataagaacaccaatcattggatttaggc

SEQ ID NO: 592550 - DNA, 33 bp, Homo sapien
tttttataagaacaccgatcattggatttaggc

SEQ ID NO: 592551 - DNA, 33 bp, Homo sapien
acagagtcagataggaaaatctagccatcttcc

SEQ ID NO: 592552 - DNA, 33 bp, Homo sapien
acagagtcagataggagaatctagccatcttcc

SEQ ID NO: 592553 - DNA, 33 bp, Homo sapien
gtttatctgtaattcaactttaactgggtgtcc

SEQ ID NO: 592554 - DNA, 33 bp, Homo sapien
gtttatctgtaattcagctttaactgggtgtcc

SEQ ID NO: 592555 - DNA, 33 bp, Homo sapien
tttttctaatggctaacgaacatcttttcatgt

SEQ ID NO: 592556 - DNA, 33 bp, Homo sapien
tttttctaatggctaatgaacatcttttcatgt

SEQ ID NO: 592557 - DNA, 33 bp, Homo sapien
atagtgggaaacataccattgaatttgcacttt

SEQ ID NO: 592558 - DNA, 33 bp, Homo sapien
atagtgggaaacatactattgaatttgcacttt

SEQ ID NO: 592559 - DNA, 33 bp, Homo sapien
gccaggctgcaatacccagttgtttaatcaaac

SEQ ID NO: 592560 - DNA, 33 bp, Homo sapien
gccaggctgcaatacctagttgtttaatcaaac

SEQ ID NO: 592561 - DNA, 33 bp, Homo sapien
gtgcttcatggaaaaggccctggaggcagagtc

SEQ ID NO: 592562 - DNA, 33 bp, Homo sapien
gtgcttcatggaaaagtccctggaggcagagtc

SEQ ID NO: 592563 - DNA, 33 bp, Homo sapien
aaaactccagggaagacgccagtgaattagagg

SEQ ID NO: 592564 - DNA, 33 bp, Homo sapien
aaaactccagggaagatgccagtgaattagagg

SEQ ID NO: 592565 - DNA, 33 bp, Homo sapien
tgcagtgacagtagccagaatccacacaaagac

SEQ ID NO: 592566 - DNA, 33 bp, Homo sapien
tgcagtgacagtagccggaatccacacaaagac

SEQ ID NO: 592567 - DNA, 33 bp, Homo sapien
ataagacttcaaaggcaaatgttctaaatttct

SEQ ID NO: 592568 - DNA, 33 bp, Homo sapien
ataagacttcaaaggcgaatgttctaaatttct

SEQ ID NO: 592569 - DNA, 33 bp, Homo sapien
attcttgcatttcccacgtaggtcacaaatttc

SEQ ID NO: 592570 - DNA, 33 bp, Homo sapien
attcttgcatttcccatgtaggtcacaaatttc

SEQ ID NO: 592571 - DNA, 33 bp, Homo sapien
aaaactctgcagtcaccgtattaaaattctcag

SEQ ID NO: 592572 - DNA, 33 bp, Homo sapien
aaaactctgcagtcactgtattaaaattctcag

SEQ ID NO: 592573 - DNA, 33 bp, Homo sapien
tctccctgtttgtaacccatccactattccaca

SEQ ID NO: 592574 - DNA, 33 bp, Homo sapien
tctccctgtttgtaactcatccactattccaca

SEQ ID NO: 592575 - DNA, 33 bp, Homo sapien
ctttcaaagttcttgacgagggtgatgaagcca

SEQ ID NO: 592576 - DNA, 33 bp, Homo sapien
ctttcaaagttcttgatgagggtgatgaagcca

SEQ ID NO: 592577 - DNA, 33 bp, Homo sapien
aatctgaggcttgtgaaccactgtattagtcag

SEQ ID NO: 592578 - DNA, 33 bp, Homo sapien
aatctgaggcttgtgatccactgtattagtcag

SEQ ID NO: 592579 - DNA, 33 bp, Homo sapien
ggttaaaatctattcaccaggccaatcaattag

SEQ ID NO: 592580 - DNA, 33 bp, Homo sapien
ggttaaaatctattcatcaggccaatcaattag

SEQ ID NO: 592581 - DNA, 33 bp, Homo sapien
agtcaatggaaataggcaaacagttcaattaat

SEQ ID NO: 592582 - DNA, 33 bp, Homo sapien
agtcaatggaaataggtaaacagttcaattaat

SEQ ID NO: 592583 - DNA, 33 bp, Homo sapien
gaagatgacctttggcaaaaaaacaatttgttc

SEQ ID NO: 592584 - DNA, 33 bp, Homo sapien
gaagatgacctttggcgaaaaaacaatttgttc

SEQ ID NO: 592585 - DNA, 33 bp, Homo sapien
tctttggcgcgtcttccctacaaagcctaactc

SEQ ID NO: 592586 - DNA, 33 bp, Homo sapien
tctttggcgcgtcttctctacaaagcctaactc

SEQ ID NO: 592587 - DNA, 33 bp, Homo sapien
ttgttggcgtctttacagcttttccctaaagac

SEQ ID NO: 592588 - DNA, 33 bp, Homo sapien
ttgttggcgtctttacggcttttccctaaagac

SEQ ID NO: 592589 - DNA, 33 bp, Homo sapien
catccttatgtctcttcctcttttctgatttcc

SEQ ID NO: 592590 - DNA, 33 bp, Homo sapien
catccttatgtctcttgctcttttctgatttcc

SEQ ID NO: 592591 - DNA, 33 bp, Homo sapien
acagaaaggtgagccaacattgtgaccactttc

SEQ ID NO: 592592 - DNA, 33 bp, Homo sapien
acagaaaggtgagccagcattgtgaccactttc

SEQ ID NO: 592593 - DNA, 33 bp, Homo sapien
atgacccttaatgatcccctacagaagaaatca

SEQ ID NO: 592594 - DNA, 33 bp, Homo sapien
atgacccttaatgatctcctacagaagaaatca

SEQ ID NO: 592595 - DNA, 33 bp, Homo sapien
cataagacctgaacacaagaagactgttcaggt

SEQ ID NO: 592596 - DNA, 33 bp, Homo sapien
cataagacctgaacacgagaagactgttcaggt

SEQ ID NO: 592597 - DNA, 33 bp, Homo sapien
cgttactgtgaagataagttttagatgggatta

SEQ ID NO: 592598 - DNA, 33 bp, Homo sapien
cgttactgtgaagatatgttttagatgggatta

SEQ ID NO: 592599 - DNA, 33 bp, Homo sapien
agccctgtggcagaacaacgccggccccttcct

SEQ ID NO: 592600 - DNA, 33 bp, Homo sapien
agccctgtggcagaacgacgccggccccttcct

SEQ ID NO: 592601 - DNA, 33 bp, Homo sapien
aggggctgtgtattgacaaacaaggaccttcag

SEQ ID NO: 592602 - DNA, 33 bp, Homo sapien
aggggctgtgtattgagaaacaaggaccttcag

SEQ ID NO: 592603 - DNA, 33 bp, Homo sapien
catcatttataaagaacaggtttaactagttcc

SEQ ID NO: 592604 - DNA, 33 bp, Homo sapien
catcatttataaagaagaggtttaactagttcc

SEQ ID NO: 592605 - DNA, 33 bp, Homo sapien
gggattgcaattcaacgcgagatttacaggaga

SEQ ID NO: 592606 - DNA, 33 bp, Homo sapien
gggattgcaattcaactcgagatttacaggaga

SEQ ID NO: 592607 - DNA, 33 bp, Homo sapien
aaatgagtttcatttaaacagcatatagttgga

SEQ ID NO: 592608 - DNA, 33 bp, Homo sapien
aaatgagtttcatttatacagcatatagttgga

SEQ ID NO: 592609 - DNA, 33 bp, Homo sapien
tcacaatgaactcgcaacatggataggaaaggc

SEQ ID NO: 592610 - DNA, 33 bp, Homo sapien
tcacaatgaactcgcagcatggataggaaaggc

SEQ ID NO: 592611 - DNA, 33 bp, Homo sapien
aattctgagtgaaaagacaggcccagccactgg

SEQ ID NO: 592612 - DNA, 33 bp, Homo sapien
aattctgagtgaaaaggcaggcccagccactgg

SEQ ID NO: 592613 - DNA, 33 bp, Homo sapien
caaggaaggataaacaagacattgcctttaggg

SEQ ID NO: 592614 - DNA, 33 bp, Homo sapien
caaggaaggataaacaggacattgcctttaggg

SEQ ID NO: 592615 - DNA, 33 bp, Homo sapien
taatcaaaatgaactaaccagatgatctacaat

SEQ ID NO: 592616 - DNA, 33 bp, Homo sapien
taatcaaaatgaactagccagatgatctacaat

SEQ ID NO: 592617 - DNA, 33 bp, Homo sapien
acatcacagaagcacagtccctacaaattagtg

SEQ ID NO: 592618 - DNA, 33 bp, Homo sapien
acatcacagaagcacattccctacaaattagtg

SEQ ID NO: 592619 - DNA, 33 bp, Homo sapien
tcttcgctttcagcaccgtcttgtgaaaagggt

SEQ ID NO: 592620 - DNA, 33 bp, Homo sapien
tcttcgctttcagcactgtcttgtgaaaagggt

SEQ ID NO: 592621 - DNA, 33 bp, Homo sapien; identical to SEQ ID NO: 592619

SEQ ID NO: 592622 - DNA, 33 bp, Homo sapien; identical to SEQ ID NO: 592620

SEQ ID NO: 592623 - DNA, 33 bp, Homo sapien
tttagtggccagcaccaaaagtttaagaaatgg

SEQ ID NO: 592624 - DNA, 33 bp, Homo sapien
tttagtggccagcaccgaaagtttaagaaatgg

SEQ ID NO: 592625 - DNA, 33 bp, Homo sapien
tcaagatgctgagaaccaggtgctgtcagcaga

SEQ ID NO: 592626 - DNA, 33 bp, Homo sapien
tcaagatgctgagaacgaggtgctgtcagcaga

SEQ ID NO: 592627 - DNA, 33 bp, Homo sapien
tattgtcctctctgtccagcaaattgaatataa

SEQ ID NO: 592628 - DNA, 33 bp, Homo sapien
tattgtcctctctgtctagcaaattgaatataa

SEQ ID NO: 592629 - DNA, 33 bp, Homo sapien
ccactaaaaggagtcaagctgcaaagtaccagg

SEQ ID NO: 592630 - DNA, 33 bp, Homo sapien
ccactaaaaggagtcatgctgcaaagtaccagg

SEQ ID NO: 592631 - DNA, 33 bp, Homo sapien
tcttgaggaagctacaatgggaaggctcatttt

SEQ ID NO: 592632 - DNA, 33 bp, Homo sapien
tcttgaggaagctacagtgggaaggctcatttt

SEQ ID NO: 592633 - DNA, 33 bp, Homo sapien
ggctaagctgagaagaagtggttggatatttag

SEQ ID NO: 592634 - DNA, 33 bp, Homo sapien
ggctaagctgagaagaggtggttggatatttag

SEQ ID NO: 592635 - DNA, 33 bp, Homo sapien
ttgttattgcaagttcacagaaagagttgaact

SEQ ID NO: 592636 - DNA, 33 bp, Homo sapien
ttgttattgcaagttcgcagaaagagttgaact

SEQ ID NO: 592637 - DNA, 33 bp, Homo sapien
ttactaatttgaaggccagtagtttctggagaa

SEQ ID NO: 592638 - DNA, 33 bp, Homo sapien
ttactaatttgaaggctagtagtttctggagaa

SEQ ID NO: 592639 - DNA, 33 bp, Homo sapien
actgctctatgtgttcaatttgttcccttttca

SEQ ID NO: 592640 - DNA, 33 bp, Homo sapien
actgctctatgtgttctatttgttcccttttca

SEQ ID NO: 592641 - DNA, 33 bp, Homo sapien
aaggcaagttgtctacactctacaaacctaata

SEQ ID NO: 592642 - DNA, 33 bp, Homo sapien
aaggcaagttgtctacgctctacaaacctaata

SEQ ID NO: 592643 - DNA, 33 bp, Homo sapien
cagtctgccctctaaccgcaattactcacgccc

SEQ ID NO: 592644 - DNA, 33 bp, Homo sapien
cagtctgccctctaactgcaattactcacgccc

SEQ ID NO: 592645 - DNA, 33 bp, Homo sapien
catcacaacagtagaaggaatgacaaaaaccat

SEQ ID NO: 592646 - DNA, 33 bp, Homo sapien
catcacaacagtagaatgaatgacaaaaaccat

SEQ ID NO: 592647 - DNA, 33 bp, Homo sapien
ttttcttaatgaccaaatacatcagcctgagtc

SEQ ID NO: 592648 - DNA, 33 bp, Homo sapien
ttttcttaatgaccaattacatcagcctgagtc

SEQ ID NO: 592649 - DNA, 33 bp, Homo sapien
caggtgtgtcataaacacttggacttgttcaga

SEQ ID NO: 592650 - DNA, 33 bp, Homo sapien
caggtgtgtcataaacgcttggacttgttcaga

SEQ ID NO: 592651 - DNA, 33 bp, Homo sapien
ttttttagaaaatgagaccaaaggtataaacca

SEQ ID NO: 592652 - DNA, 33 bp, Homo sapien
ttttttagaaaatgagcccaaaggtataaacca

SEQ ID NO: 592653 - DNA, 33 bp, Homo sapien
aggaagttggttgtgccaaactctggaatgaat

SEQ ID NO: 592654 - DNA, 33 bp, Homo sapien
aggaagttggttgtgctaaactctggaatgaat

SEQ ID NO: 592655 - DNA, 33 bp, Homo sapien
cattaaagtttgttggcatgagattgtagtaag

SEQ ID NO: 592656 - DNA, 33 bp, Homo sapien
cattaaagtttgttgggatgagattgtagtaag

SEQ ID NO: 592657 - DNA, 33 bp, Homo sapien
ccagatccattccctacaattcacatccccaaa

SEQ ID NO: 592658 - DNA, 33 bp, Homo sapien
ccagatccattccctataattcacatccccaaa

SEQ ID NO: 592659 - DNA, 33 bp, Homo sapien
tgacattacgatgacactatgatcacaccatgc

SEQ ID NO: 592660 - DNA, 33 bp, Homo sapien
tgacattacgatgacattatgatcacaccatgc

SEQ ID NO: 592661 - DNA, 33 bp, Homo sapien
taacgttcaaggctaacgtttccaagcttggat

SEQ ID NO: 592662 - DNA, 33 bp, Homo sapien
taacgttcaaggctaatgtttccaagcttggat

SEQ ID NO: 592663 - DNA, 33 bp, Homo sapien
aatatagggtgaaggacgggtacctagtcaagg

SEQ ID NO: 592664 - DNA, 33 bp, Homo sapien
aatatagggtgaaggatgggtacctagtcaagg

SEQ ID NO: 592665 - DNA, 33 bp, Homo sapien
acagccagacacagccactttgatcacttcaac

SEQ ID NO: 592666 - DNA, 33 bp, Homo sapien
acagccagacacagcctctttgatcacttcaac

SEQ ID NO: 592667 - DNA, 33 bp, Homo sapien
aatttgtactgtattaacagagtgagatggagt

SEQ ID NO: 592668 - DNA, 33 bp, Homo sapien
aatttgtactgtattatcagagtgagatggagt

SEQ ID NO: 592669 - DNA, 33 bp, Homo sapien
tggacaatagacctagccatccaagacctctga

SEQ ID NO: 592670 - DNA, 33 bp, Homo sapien
tggacaatagacctagtcatccaagacctctga

SEQ ID NO: 592671 - DNA, 33 bp, Homo sapien
gtaaatccaacaatcaagactgtaattttacca

SEQ ID NO: 592672 - DNA, 33 bp, Homo sapien
gtaaatccaacaatcaggactgtaattttacca

SEQ ID NO: 592673 - DNA, 33 bp, Homo sapien
aacaaaaaatgaggcaataaacaacaatataat

SEQ ID NO: 592674 - DNA, 33 bp, Homo sapien
aacaaaaaatgaggcagtaaacaacaatataat

SEQ ID NO: 592675 - DNA, 33 bp, Homo sapien
cctatttttcatatcacaggcaaaaatattcat

SEQ ID NO: 592676 - DNA, 33 bp, Homo sapien
cctatttttcatatcagaggcaaaaatattcat

SEQ ID NO: 592677 - DNA, 33 bp, Homo sapien
tgcctagggaaaaatccacgagtgaatgcaact

SEQ ID NO: 592678 - DNA, 33 bp, Homo sapien
tgcctagggaaaaatctacgagtgaatgcaact

SEQ ID NO: 592679 - DNA, 33 bp, Homo sapien
tacatacaaataaacacgtattgctagtaagac

SEQ ID NO: 592680 - DNA, 33 bp, Homo sapien
tacatacaaataaacaggtattgctagtaagac

SEQ ID NO: 592681 - DNA, 33 bp, Homo sapien
attcattaggtgcatacacattttgaattgctt

SEQ ID NO: 592682 - DNA, 33 bp, Homo sapien
attcattaggtgcatatacattttgaattgctt

SEQ ID NO: 592683 - DNA, 33 bp, Homo sapien
ggtaatttctggtacaatgtaacaaatgagatt

SEQ ID NO: 592684 - DNA, 33 bp, Homo sapien
ggtaatttctggtacagtgtaacaaatgagatt

SEQ ID NO: 592685 - DNA, 33 bp, Homo sapien
atgttattctttgctacacaacgtaaggataaa

SEQ ID NO: 592686 - DNA, 33 bp, Homo sapien
atgttattctttgctatacaacgtaaggataaa

SEQ ID NO: 592687 - DNA, 33 bp, Homo sapien
gcacttgtgttgcttaaccctgtcattcaacat

SEQ ID NO: 592688 - DNA, 33 bp, Homo sapien
gcacttgtgttgcttagccctgtcattcaacat

SEQ ID NO: 592689 - DNA, 33 bp, Homo sapien
tctatttaagtgaccaataatacacagcctagg

SEQ ID NO: 592690 - DNA, 33 bp, Homo sapien
tctatttaagtgaccagtaatacacagcctagg

SEQ ID NO: 592691 - DNA, 33 bp, Homo sapien
aggttttagtattacaatgaggctcagggttag

SEQ ID NO: 592692 - DNA, 33 bp, Homo sapien
aggttttagtattacagtgaggctcagggttag

SEQ ID NO: 592693 - DNA, 33 bp, Homo sapien
gttcacggctctcttacatcaactaacaatggt

SEQ ID NO: 592694 - DNA, 33 bp, Homo sapien
gttcacggctctcttatatcaactaacaatggt

SEQ ID NO: 592695 - DNA, 33 bp, Homo sapien
caccacaaatgtaaaactgcatggttctttttt

SEQ ID NO: 592696 - DNA, 33 bp, Homo sapien
caccacaaatgtaaaattgcatggttctttttt

SEQ ID NO: 592697 - DNA, 33 bp, Homo sapien
taggctcacccaacaacaagaagttatttgtat

SEQ ID NO: 592698 - DNA, 33 bp, Homo sapien
taggctcacccaacaagaagaagttatttgtat

SEQ ID NO: 592699 - DNA, 33 bp, Homo sapien
ttgtcatttggtaacactggtaatcttgcagca

SEQ ID NO: 592700 - DNA, 33 bp, Homo sapien
ttgtcatttggtaacattggtaatcttgcagca

SEQ ID NO: 592701 - DNA, 33 bp, Homo sapien
gtgagaggtaagacaaaccagagagaggccaga

SEQ ID NO: 592702 - DNA, 33 bp, Homo sapien
gtgagaggtaagacaagccagagagaggccaga

SEQ ID NO: 592703 - DNA, 33 bp, Homo sapien
tgagttttgacaaacacatcgatgtcatcacag

SEQ ID NO: 592704 - DNA, 33 bp, Homo sapien
tgagttttgacaaacatatcgatgtcatcacag

SEQ ID NO: 592705 - DNA, 33 bp, Homo sapien
ttttctagtagtgaaactgaaccagtagcaagc

SEQ ID NO: 592706 - DNA, 33 bp, Homo sapien
ttttctagtagtgaaattgaaccagtagcaagc

SEQ ID NO: 592707 - DNA, 33 bp, Homo sapien
tatacttaagagggcaaaatgacaacagaatgt

SEQ ID NO: 592708 - DNA, 33 bp, Homo sapien
tatacttaagagggcagaatgacaacagaatgt

SEQ ID NO: 592709 - DNA, 33 bp, Homo sapien
ttgcgtgaacatcatacagagtgcttacacaaa

SEQ ID NO: 592710 - DNA, 33 bp, Homo sapien
ttgcgtgaacatcatagagagtgcttacacaaa

SEQ ID NO: 592711 - DNA, 33 bp, Homo sapien
ccagttcacaactcaacagcacgtacactacat

SEQ ID NO: 592712 - DNA, 33 bp, Homo sapien
ccagttcacaactcaatagcacgtacactacat

SEQ ID NO: 592713 - DNA, 33 bp, Homo sapien; identical to SEQ ID NO: 592711

SEQ ID NO: 592714 - DNA, 33 bp, Homo sapien; identical to SEQ ID NO: 592712

SEQ ID NO: 592715 - DNA, 33 bp, Homo sapien; identical to SEQ ID NO: 592711

SEQ ID NO: 592716 - DNA, 33 bp, Homo sapien; identical to SEQ ID NO: 592712

SEQ ID NO: 592717 - DNA, 33 bp, Homo sapien; identical to SEQ ID NO: 592711

SEQ ID NO: 592718 - DNA, 33 bp, Homo sapien; identical to SEQ ID NO: 592712

SEQ ID NO: 592719 - DNA, 33 bp, Homo sapien
ttgcatataaataaaacgacaacgtgttaaatg

SEQ ID NO: 592720 - DNA, 33 bp, Homo sapien
ttgcatataaataaaatgacaacgtgttaaatg

SEQ ID NO: 592721 - DNA, 33 bp, Homo sapien
agacaacttaaggtccaccccagtaatcaggaa

SEQ ID NO: 592722 - DNA, 33 bp, Homo sapien
agacaacttaaggtcccccccagtaatcaggaa

SEQ ID NO: 592723 - DNA, 33 bp, Homo sapien
gtaatcaggaaaacaacgtatgctaaggagatt

SEQ ID NO: 592724 - DNA, 33 bp, Homo sapien
gtaatcaggaaaacaatgtatgctaaggagatt

SEQ ID NO: 592725 - DNA, 33 bp, Homo sapien
aacttcaatgctaacacgggcggaaaaatcact

SEQ ID NO: 592726 - DNA, 33 bp, Homo sapien
aacttcaatgctaacatgggcggaaaaatcact

SEQ ID NO: 592727 - DNA, 33 bp, Homo sapien
aaaaagataggtaataatatactgctcacgcca

SEQ ID NO: 592728 - DNA, 33 bp, Homo sapien
aaaaagataggtaatagtatactgctcacgcca

SEQ ID NO: 592729 - DNA, 33 bp, Homo sapien
aaaaaataggctagacagattaataggtctgtg

SEQ ID NO: 592730 - DNA, 33 bp, Homo sapien
aaaaaataggctagactgattaataggtctgtg

SEQ ID NO: 592731 - DNA, 33 bp, Homo sapien
cttagcagaaattaaccaggtgtttagagccct

SEQ ID NO: 592732 - DNA, 33 bp, Homo sapien
cttagcagaaattaacgaggtgtttagagccct

SEQ ID NO: 592733 - DNA, 33 bp, Homo sapien
gcgagtattatcatcccaccctcctttacctcc

SEQ ID NO: 592734 - DNA, 33 bp, Homo sapien
gcgagtattatcatcctaccctcctttacctcc

SEQ ID NO: 592735 - DNA, 33 bp, Homo sapien
accttacgtccattagaatggttagtattacaa

SEQ ID NO: 592736 - DNA, 33 bp, Homo sapien
accttacgtccattaggatggttagtattacaa

SEQ ID NO: 592737 - DNA, 33 bp, Homo sapien
caggaggcccttcctcgcaatccgagctttgca

SEQ ID NO: 592738 - DNA, 33 bp, Homo sapien
caggaggcccttcctctcaatccgagctttgca

SEQ ID NO: 592739 - DNA, 33 bp, Homo sapien
agtctggctactcaaacgagatactcagtgaga

SEQ ID NO: 592740 - DNA, 33 bp, Homo sapien
agtctggctactcaaaggagatactcagtgaga

SEQ ID NO: 592741 - DNA, 33 bp, Homo sapien
ggattgaaaagatacagaattttggaactacgg

SEQ ID NO: 592742 - DNA, 33 bp, Homo sapien
ggattgaaaagatacataattttggaactacgg

SEQ ID NO: 592743 - DNA, 33 bp, Homo sapien
aaaacagactccatacacggctctagtggaaaa

SEQ ID NO: 592744 - DNA, 33 bp, Homo sapien
aaaacagactccatacgcggctctagtggaaaa

SEQ ID NO: 592745 - DNA, 33 bp, Homo sapien
gttagcaattaacaaccgtcaggagaattttct

SEQ ID NO: 592746 - DNA, 33 bp, Homo sapien
gttagcaattaacaactgtcaggagaattttct

SEQ ID NO: 592747 - DNA, 33 bp, Homo sapien
atttttacagattcaaatatgtgatacaactct

SEQ ID NO: 592748 - DNA, 33 bp, Homo sapien
atttttacagattcaagtatgtgatacaactct

SEQ ID NO: 592749 - DNA, 33 bp, Homo sapien
gggctctacctaccaactgaaaaaagaagaggg

SEQ ID NO: 592750 - DNA, 33 bp, Homo sapien
gggctctacctaccaattgaaaaaagaagaggg

SEQ ID NO: 592751 - DNA, 33 bp, Homo sapien
gatgcttaagaaatacactgtttcaagcctcaa

SEQ ID NO: 592752 - DNA, 33 bp, Homo sapien
gatgcttaagaaatacgctgtttcaagcctcaa

SEQ ID NO: 592753 - DNA, 33 bp, Homo sapien
ccatggatcccatcacacatccttctcatctca

SEQ ID NO: 592754 - DNA, 33 bp, Homo sapien
ccatggatcccatcacgcatccttctcatctca

SEQ ID NO: 592755 - DNA, 33 bp, Homo sapien
agccagtgaaatccaaatattgtggtactctgt

SEQ ID NO: 592756 - DNA, 33 bp, Homo sapien
agccagtgaaatccaagtattgtggtactctgt

SEQ ID NO: 592757 - DNA, 33 bp, Homo sapien
tcttttttgacccatgcattgaaattatgagta

SEQ ID NO: 592758 - DNA, 33 bp, Homo sapien
tcttttttgacccatgtattgaaattatgagta

SEQ ID NO: 592759 - DNA, 33 bp, Homo sapien
gtttccgtaaataaaccggctcacaagtgtgca

SEQ ID NO: 592760 - DNA, 33 bp, Homo sapien
gtttccgtaaataaactggctcacaagtgtgca

SEQ ID NO: 592761 - DNA, 33 bp, Homo sapien
tggatgcggtgatttccaccttcatttagtatt

SEQ ID NO: 592762 - DNA, 33 bp, Homo sapien
tggatgcggtgatttctaccttcatttagtatt

SEQ ID NO: 592763 - DNA, 33 bp, Homo sapien
tagaggacttctatgcagattcatttccagttc

SEQ ID NO: 592764 - DNA, 33 bp, Homo sapien
tagaggacttctatgcggattcatttccagttc

SEQ ID NO: 592765 - DNA, 33 bp, Homo sapien
cattagacgactaacccaagatccacaagatcc

SEQ ID NO: 592766 - DNA, 33 bp, Homo sapien
cattagacgactaaccgaagatccacaagatcc

SEQ ID NO: 592767 - DNA, 33 bp, Homo sapien
acctacttagtgaagaataaggatgaagagaaa

SEQ ID NO: 592768 - DNA, 33 bp, Homo sapien
acctacttagtgaagattaaggatgaagagaaa

SEQ ID NO: 592769 - DNA, 33 bp, Homo sapien
agctctacggttgacagtatctggttaattcat

SEQ ID NO: 592770 - DNA, 33 bp, Homo sapien
agctctacggttgacattatctggttaattcat

SEQ ID NO: 592771 - DNA, 33 bp, Homo sapien
cctagagaataaactacggcctcaaattcagtt

SEQ ID NO: 592772 - DNA, 33 bp, Homo sapien
cctagagaataaactatggcctcaaattcagtt

SEQ ID NO: 592773 - DNA, 33 bp, Homo sapien
ttattttccatcgtcaatagaagtttaaaatta

SEQ ID NO: 592774 - DNA, 33 bp, Homo sapien
ttattttccatcgtcagtagaagtttaaaatta

SEQ ID NO: 592775 - DNA, 33 bp, Homo sapien
tgcccttctcacttacgatccacctattttgtt

SEQ ID NO: 592776 - DNA, 33 bp, Homo sapien
tgcccttctcacttactatccacctattttgtt

SEQ ID NO: 592777 - DNA, 33 bp, Homo sapien
acattccctttgatgaaccaaggatatgacata

SEQ ID NO: 592778 - DNA, 33 bp, Homo sapien
acattccctttgatgacccaaggatatgacata

SEQ ID NO: 592779 - DNA, 33 bp, Homo sapien
aagattcatcaccaaaccttgtgtcctcaaaga

SEQ ID NO: 592780 - DNA, 33 bp, Homo sapien
aagattcatcaccaaagcttgtgtcctcaaaga

SEQ ID NO: 592781 - DNA, 33 bp, Homo sapien
agaggtcaagtatggaatagtaaatactctctg

SEQ ID NO: 592782 - DNA, 33 bp, Homo sapien
agaggtcaagtatggagtagtaaatactctctg

SEQ ID NO: 592783 - DNA, 33 bp, Homo sapien
cagattattcctgtcacgctgtaaagctctctt

SEQ ID NO: 592784 - DNA, 33 bp, Homo sapien
cagattattcctgtcatgctgtaaagctctctt

SEQ ID NO: 592785 - DNA, 33 bp, Homo sapien
ctgttttctgacattacggattagattttcctt

SEQ ID NO: 592786 - DNA, 33 bp, Homo sapien
ctgttttctgacattatggattagattttcctt

SEQ ID NO: 592787 - DNA, 33 bp, Homo sapien
caagccctgatcgtagaagcagtttggggaggg

SEQ ID NO: 592788 - DNA, 33 bp, Homo sapien
caagccctgatcgtaggagcagtttggggaggg

SEQ ID NO: 592789 - DNA, 33 bp, Homo sapien
atgtgtatttgaggaaaataatagcaccaagaa

SEQ ID NO: 592790 - DNA, 33 bp, Homo sapien
atgtgtatttgaggaagataatagcaccaagaa

SEQ ID NO: 592791 - DNA, 33 bp, Homo sapien
aatgatttaatgaggccaagaacattttaagaa

SEQ ID NO: 592792 - DNA, 33 bp, Homo sapien
aatgatttaatgaggctaagaacattttaagaa

SEQ ID NO: 592793 - DNA, 33 bp, Homo sapien
ggttttgtttagatcaactccttcaggggtctg

SEQ ID NO: 592794 - DNA, 33 bp, Homo sapien
ggttttgtttagatcatctccttcaggggtctg

SEQ ID NO: 592795 - DNA, 33 bp, Homo sapien
aaccacatggagttaccctgtgactcaataata

SEQ ID NO: 592796 - DNA, 33 bp, Homo sapien
aaccacatggagttactctgtgactcaataata

SEQ ID NO: 592797 - DNA, 33 bp, Homo sapien
ccaagaaaaatgaaaacctgtccttacaaaagc

SEQ ID NO: 592798 - DNA, 33 bp, Homo sapien
ccaagaaaaatgaaaatctgtccttacaaaagc

SEQ ID NO: 592799 - DNA, 33 bp, Homo sapien
gcaggagaccatttataaagatgttgctacctc

SEQ ID NO: 592800 - DNA, 33 bp, Homo sapien
gcaggagaccatttatgaagatgttgctacctc

SEQ ID NO: 592801 - DNA, 33 bp, Homo sapien
aggatgtttcctataccgaggactggctacata

SEQ ID NO: 592802 - DNA, 33 bp, Homo sapien
aggatgtttcctatactgaggactggctacata

SEQ ID NO: 592803 - DNA, 33 bp, Homo sapien
taggcacaagtcacatgagtatctttaagtatc

SEQ ID NO: 592804 - DNA, 33 bp, Homo sapien
taggcacaagtcacattagtatctttaagtatc

SEQ ID NO: 592805 - DNA, 33 bp, Homo sapien
aatttacagattgctaaagaccaactctcgcta

SEQ ID NO: 592806 - DNA, 33 bp, Homo sapien
aatttacagattgctagagaccaactctcgcta

SEQ ID NO: 592807 - DNA, 33 bp, Homo sapien
gaatgaagcaacggtacggtttaggagagcagg

SEQ ID NO: 592808 - DNA, 33 bp, Homo sapien
gaatgaagcaacggtatggtttaggagagcagg

SEQ ID NO: 592809 - DNA, 33 bp, Homo sapien
ccagagtaggaggctccatacaaagcaggatgg

SEQ ID NO: 592810 - DNA, 33 bp, Homo sapien
ccagagtaggaggctctatacaaagcaggatgg

SEQ ID NO: 592811 - DNA, 33 bp, Homo sapien
ccttcaactgttttcagtcttgacttgaggaac

SEQ ID NO: 592812 - DNA, 33 bp, Homo sapien
ccttcaactgttttcattcttgacttgaggaac

SEQ ID NO: 592813 - DNA, 33 bp, Homo sapien
atgtgccaagaagcgacgagtgtgaccagatca

SEQ ID NO: 592814 - DNA, 33 bp, Homo sapien
atgtgccaagaagcgaggagtgtgaccagatca

SEQ ID NO: 592815 - DNA, 33 bp, Homo sapien
agaccagatgctgtaccaagggctttatgtaca

SEQ ID NO: 592816 - DNA, 33 bp, Homo sapien
agaccagatgctgtactaagggctttatgtaca

SEQ ID NO: 592817 - DNA, 33 bp, Homo sapien
acacatctcaaagttaaggtaatgaaaagacag

SEQ ID NO: 592818 - DNA, 33 bp, Homo sapien
acacatctcaaagttatggtaatgaaaagacag

SEQ ID NO: 592819 - DNA, 33 bp, Homo sapien
aaacgcaatccagttgaaataaaattacaggca

SEQ ID NO: 592820 - DNA, 33 bp, Homo sapien
aaacgcaatccagttgcaataaaattacaggca

SEQ ID NO: 592821 - DNA, 33 bp, Homo sapien
catacatgtcaatcaccacggatgccctggaat

SEQ ID NO: 592822 - DNA, 33 bp, Homo sapien
catacatgtcaatcactacggatgccctggaat

SEQ ID NO: 592823 - DNA, 33 bp, Homo sapien
actgcagacttgcagccgagtgcgggtgcccac

SEQ ID NO: 592824 - DNA, 33 bp, Homo sapien
actgcagacttgcagcggagtgcgggtgcccac

SEQ ID NO: 592825 - DNA, 33 bp, Homo sapien
cctagactcaataccacatatcttagctgcttg

SEQ ID NO: 592826 - DNA, 33 bp, Homo sapien
cctagactcaataccatatatcttagctgcttg

SEQ ID NO: 592827 - DNA, 33 bp, Homo sapien
tggcccatgaatcaaccgcatccaaatctgtgg

SEQ ID NO: 592828 - DNA, 33 bp, Homo sapien
tggcccatgaatcaactgcatccaaatctgtgg

SEQ ID NO: 592829 - DNA, 33 bp, Homo sapien
gggagggacctaaacagtcacaccatagcggaa

SEQ ID NO: 592830 - DNA, 33 bp, Homo sapien
gggagggacctaaacattcacaccatagcggaa

SEQ ID NO: 592831 - DNA, 33 bp, Homo sapien
gtagccatgagtggaaaaggcttcctcctgctg

SEQ ID NO: 592832 - DNA, 33 bp, Homo sapien
gtagccatgagtggaacaggcttcctcctgctg

SEQ ID NO: 592833 - DNA, 33 bp, Homo sapien
caaattaacttccctcccaaagctggaattctt

SEQ ID NO: 592834 - DNA, 33 bp, Homo sapien
caaattaacttccctctcaaagctggaattctt

SEQ ID NO: 592835 - DNA, 33 bp, Homo sapien
tgccttttgtgagttaagatatgtttagataaa

SEQ ID NO: 592836 - DNA, 33 bp, Homo sapien
tgccttttgtgagttaggatatgtttagataaa

SEQ ID NO: 592837 - DNA, 33 bp, Homo sapien
gaatctgcagtcatgtaaaaagttgttctccca

SEQ ID NO: 592838 - DNA, 33 bp, Homo sapien
gaatctgcagtcatgtgaaaagttgttctccca

SEQ ID NO: 592839 - DNA, 33 bp, Homo sapien
attgagactgcagttccgaaagcaaaaagaaag

SEQ ID NO: 592840 - DNA, 33 bp, Homo sapien
attgagactgcagttctgaaagcaaaaagaaag

SEQ ID NO: 592841 - DNA, 33 bp, Homo sapien
gagttttgtcctctgaagttccagtctcagttt

SEQ ID NO: 592842 - DNA, 33 bp, Homo sapien
gagttttgtcctctgaggttccagtctcagttt

SEQ ID NO: 592843 - DNA, 33 bp, Homo sapien
catcctgtctagaagacaaaagtcaatgcttaa

SEQ ID NO: 592844 - DNA, 33 bp, Homo sapien
catcctgtctagaagataaaagtcaatgcttaa

SEQ ID NO: 592845 - DNA, 33 bp, Homo sapien
gggtctgatttaggcaaccccgtatacctagcc

SEQ ID NO: 592846 - DNA, 33 bp, Homo sapien
gggtctgatttaggcatccccgtatacctagcc

SEQ ID NO: 592847 - DNA, 33 bp, Homo sapien
aatcaccaatgaagtccaacccttagtgagaat

SEQ ID NO: 592848 - DNA, 33 bp, Homo sapien
aatcaccaatgaagtctaacccttagtgagaat

SEQ ID NO: 592849 - DNA, 33 bp, Homo sapien
gtgaagtccaggagagacccatgaatatccgtg

SEQ ID NO: 592850 - DNA, 33 bp, Homo sapien
gtgaagtccaggagagtcccatgaatatccgtg

SEQ ID NO: 592851 - DNA, 33 bp, Homo sapien
tgtagggagtctggcacaattcccaggtgtctg

SEQ ID NO: 592852 - DNA, 33 bp, Homo sapien
tgtagggagtctggcataattcccaggtgtctg

SEQ ID NO: 592853 - DNA, 33 bp, Homo sapien
gtttccctaaccatgccccttcagacatcagga

SEQ ID NO: 592854 - DNA, 33 bp, Homo sapien
gtttccctaaccatgctccttcagacatcagga

SEQ ID NO: 592855 - DNA, 33 bp, Homo sapien
aatgagaaatagaccacgtgaaatggcacgtat

SEQ ID NO: 592856 - DNA, 33 bp, Homo sapien
aatgagaaatagaccatgtgaaatggcacgtat

SEQ ID NO: 592857 - DNA, 33 bp, Homo sapien
tttttacactgagccacgtgttgtctttctcat

SEQ ID NO: 592858 - DNA, 33 bp, Homo sapien
tttttacactgagccatgtgttgtctttctcat

SEQ ID NO: 592859 - DNA, 33 bp, Homo sapien
acatgaaacagaagaaattcccttgtcctcctc

SEQ ID NO: 592860 - DNA, 33 bp, Homo sapien
acatgaaacagaagaagttcccttgtcctcctc

SEQ ID NO: 592861 - DNA, 33 bp, Homo sapien
tgcaactaggctcctaagcagccactctctagg

SEQ ID NO: 592862 - DNA, 33 bp, Homo sapien
tgcaactaggctcctacgcagccactctctagg

SEQ ID NO: 592863 - DNA, 33 bp, Homo sapien
ctgggggttccacgacaaagacgacaaatcttt

SEQ ID NO: 592864 - DNA, 33 bp, Homo sapien
ctgggggttccacgacgaagacgacaaatcttt

SEQ ID NO: 592865 - DNA, 33 bp, Homo sapien
cctctaggttgcaaggaaagcagttcaccagtt

SEQ ID NO: 592866 - DNA, 33 bp, Homo sapien
cctctaggttgcaagggaagcagttcaccagtt

SEQ ID NO: 592867 - DNA, 33 bp, Homo sapien
cctggtcaaggtactaagtggtttttctctcct

SEQ ID NO: 592868 - DNA, 33 bp, Homo sapien
cctggtcaaggtactatgtggtttttctctcct

SEQ ID NO: 592869 - DNA, 33 bp, Homo sapien
ggtgacgctacagacacggtaaattgtgaaggc

SEQ ID NO: 592870 - DNA, 33 bp, Homo sapien
ggtgacgctacagacatggtaaattgtgaaggc

SEQ ID NO: 592871 - DNA, 33 bp, Homo sapien
gcagtgcagcggaaacaaaagaggtggaccagg

SEQ ID NO: 592872 - DNA, 33 bp, Homo sapien
gcagtgcagcggaaacgaaagaggtggaccagg

SEQ ID NO: 592873 - DNA, 33 bp, Homo sapien
tgctgacctgcctagcaagcaggacatcccttc

SEQ ID NO: 592874 - DNA, 33 bp, Homo sapien
tgctgacctgcctagcgagcaggacatcccttc

SEQ ID NO: 592875 - DNA, 33 bp, Homo sapien
atattgttttccttgcacttaccaatttctaac

SEQ ID NO: 592876 - DNA, 33 bp, Homo sapien
atattgttttccttgcgcttaccaatttctaac

SEQ ID NO: 592877 - DNA, 33 bp, Homo sapien
ggtttatgtttcacgcaacttgaatgtaacctt

SEQ ID NO: 592878 - DNA, 33 bp, Homo sapien
ggtttatgtttcacgcgacttgaatgtaacctt

SEQ ID NO: 592879 - DNA, 33 bp, Homo sapien
caagggacttggcgagaaaggtaaaattcaaac

SEQ ID NO: 592880 - DNA, 33 bp, Homo sapien
caagggacttggcgaggaaggtaaaattcaaac

SEQ ID NO: 592881 - DNA, 33 bp, Homo sapien
tgttacattgaaaaacaaaaccttggccaggcg

SEQ ID NO: 592882 - DNA, 33 bp, Homo sapien
tgttacattgaaaaacgaaaccttggccaggcg

SEQ ID NO: 592883 - DNA, 33 bp, Homo sapien
ttatttcttacaacacccacagaaaactaatac

SEQ ID NO: 592884 - DNA, 33 bp, Homo sapien
ttatttcttacaacactcacagaaaactaatac

SEQ ID NO: 592885 - DNA, 33 bp, Homo sapien
acaagataataaattaggcaaactaaattttat

SEQ ID NO: 592886 - DNA, 33 bp, Homo sapien
acaagataataaattatgcaaactaaattttat

SEQ ID NO: 592887 - DNA, 33 bp, Homo sapien
gcttctttttatataactcaccaccacgttaca

SEQ ID NO: 592888 - DNA, 33 bp, Homo sapien
gcttctttttatataattcaccaccacgttaca

SEQ ID NO: 592889 - DNA, 33 bp, Homo sapien
acttccttaccattcaacttgttttcaaaggtc

SEQ ID NO: 592890 - DNA, 33 bp, Homo sapien
acttccttaccattcatcttgttttcaaaggtc

SEQ ID NO: 592891 - DNA, 33 bp, Homo sapien
cagtaggagttggtcccaaactaattgcaaggg

SEQ ID NO: 592892 - DNA, 33 bp, Homo sapien
cagtaggagttggtcctaaactaattgcaaggg

SEQ ID NO: 592893 - DNA, 33 bp, Homo sapien
aggataaaggcattgactaattctagattctta

SEQ ID NO: 592894 - DNA, 33 bp, Homo sapien
aggataaaggcattgattaattctagattctta

SEQ ID NO: 592895 - DNA, 33 bp, Homo sapien
tcagcaattcaagaaggccaatgattcccacaa

SEQ ID NO: 592896 - DNA, 33 bp, Homo sapien
tcagcaattcaagaagtccaatgattcccacaa

SEQ ID NO: 592897 - DNA, 33 bp, Homo sapien
caatgatcagcgcccaatcaaaggaagtcaacc

SEQ ID NO: 592898 - DNA, 33 bp, Homo sapien
caatgatcagcgcccagtcaaaggaagtcaacc

SEQ ID NO: 592899 - DNA, 33 bp, Homo sapien
tggatcaccctgtcaacagaggtgagcatttgt

SEQ ID NO: 592900 - DNA, 33 bp, Homo sapien
tggatcaccctgtcaatagaggtgagcatttgt

SEQ ID NO: 592901 - DNA, 33 bp, Homo sapien
catgttcttccagcacgattcttttgtccctct

SEQ ID NO: 592902 - DNA, 33 bp, Homo sapien
catgttcttccagcactattcttttgtccctct

SEQ ID NO: 592903 - DNA, 33 bp, Homo sapien
tggtcattgtccctaacctgtgagaggaagtga

SEQ ID NO: 592904 - DNA, 33 bp, Homo sapien
tggtcattgtccctaatctgtgagaggaagtga

SEQ ID NO: 592905 - DNA, 33 bp, Homo sapien
ggccacttttgtttccactccaagtagatgaca

SEQ ID NO: 592906 - DNA, 33 bp, Homo sapien
ggccacttttgtttccgctccaagtagatgaca

SEQ ID NO: 592907 - DNA, 33 bp, Homo sapien
taaaacaaaagggctacggacagtcttgaaatg

SEQ ID NO: 592908 - DNA, 33 bp, Homo sapien
taaaacaaaagggctatggacagtcttgaaatg

SEQ ID NO: 592909 - DNA, 33 bp, Homo sapien
gtggatcccacagtcacgcattcatggcacacc

SEQ ID NO: 592910 - DNA, 33 bp, Homo sapien
gtggatcccacagtcatgcattcatggcacacc

SEQ ID NO: 592911 - DNA, 33 bp, Homo sapien
agatggtggctggccacgatcttgcaggcttag

SEQ ID NO: 592912 - DNA, 33 bp, Homo sapien
agatggtggctggccatgatcttgcaggcttag

SEQ ID NO: 592913 - DNA, 33 bp, Homo sapien
taagtaaaggctcatacctcctgtttttcttgg

SEQ ID NO: 592914 - DNA, 33 bp, Homo sapien
taagtaaaggctcatatctcctgtttttcttgg

SEQ ID NO: 592915 - DNA, 33 bp, Homo sapien
gcttgatggatattcacagctgatgtcaaagta

SEQ ID NO: 592916 - DNA, 33 bp, Homo sapien
gcttgatggatattcatagctgatgtcaaagta

SEQ ID NO: 592917 - DNA, 33 bp, Homo sapien
gacactctggtttgtccatggagaaacagtggt

SEQ ID NO: 592918 - DNA, 33 bp, Homo sapien
gacactctggtttgtctatggagaaacagtggt

SEQ ID NO: 592919 - DNA, 33 bp, Homo sapien
gaacaatgtgtacttacggttgcaagagctgtt

SEQ ID NO: 592920 - DNA, 33 bp, Homo sapien
gaacaatgtgtacttatggttgcaagagctgtt

SEQ ID NO: 592921 - DNA, 33 bp, Homo sapien
ccaatttacaatcccacgttttgtgtcagagat

SEQ ID NO: 592922 - DNA, 33 bp, Homo sapien
ccaatttacaatcccatgttttgtgtcagagat

SEQ ID NO: 592923 - DNA, 33 bp, Homo sapien
ttattcttactaaaacccaataattcaactcag

SEQ ID NO: 592924 - DNA, 33 bp, Homo sapien
ttattcttactaaaactcaataattcaactcag

SEQ ID NO: 592925 - DNA, 33 bp, Homo sapien
taacatgcctctattcacccttcaagtgagtaa

SEQ ID NO: 592926 - DNA, 33 bp, Homo sapien
taacatgcctctattcgcccttcaagtgagtaa

SEQ ID NO: 592927 - DNA, 33 bp, Homo sapien
gtaaaacattcctcagaacttgcctggcaaaag

SEQ ID NO: 592928 - DNA, 33 bp, Homo sapien
gtaaaacattcctcaggacttgcctggcaaaag

SEQ ID NO: 592929 - DNA, 33 bp, Homo sapien
ggacttaactgtaataccaaagaagaagctcct

SEQ ID NO: 592930 - DNA, 33 bp, Homo sapien
ggacttaactgtaatatcaaagaagaagctcct

SEQ ID NO: 592931 - DNA, 33 bp, Homo sapien
agccaccacacccagtcaaaggtctgctttttt

SEQ ID NO: 592932 - DNA, 33 bp, Homo sapien
agccaccacacccagtgaaaggtctgctttttt

SEQ ID NO: 592933 - DNA, 33 bp, Homo sapien
cgtcctctggatgagacagccattaggagtaag

SEQ ID NO: 592934 - DNA, 33 bp, Homo sapien
cgtcctctggatgagatagccattaggagtaag

SEQ ID NO: 592935 - DNA, 33 bp, Homo sapien
ggcaccttgacatccaaaagaacaaatcctctt

SEQ ID NO: 592936 - DNA, 33 bp, Homo sapien
ggcaccttgacatccacaagaacaaatcctctt

SEQ ID NO: 592937 - DNA, 33 bp, Homo sapien
accattgacagcacataaggattctgccatgta

SEQ ID NO: 592938 - DNA, 33 bp, Homo sapien
accattgacagcacatgaggattctgccatgta

SEQ ID NO: 592939 - DNA, 33 bp, Homo sapien
cattggctttggcgaaaaatttatggctaagtc

SEQ ID NO: 592940 - DNA, 33 bp, Homo sapien
cattggctttggcgaagaatttatggctaagtc

SEQ ID NO: 592941 - DNA, 33 bp, Homo sapien
taaagagcttccatgcagcaagagaaattgcca

SEQ ID NO: 592942 - DNA, 33 bp, Homo sapien
taaagagcttccatgcggcaagagaaattgcca

SEQ ID NO: 592943 - DNA, 33 bp, Homo sapien
ccagttctcaaatccacatctcgagccctgccc

SEQ ID NO: 592944 - DNA, 33 bp, Homo sapien
ccagttctcaaatccatatctcgagccctgccc

SEQ ID NO: 592945 - DNA, 33 bp, Homo sapien
ggataaactcctataaagaaatcgtgtagccag

SEQ ID NO: 592946 - DNA, 33 bp, Homo sapien
ggataaactcctataaggaaatcgtgtagccag

SEQ ID NO: 592947 - DNA, 33 bp, Homo sapien
aaactaggagaagccacggtatgtggtctgcca

SEQ ID NO: 592948 - DNA, 33 bp, Homo sapien
aaactaggagaagccatggtatgtggtctgcca

SEQ ID NO: 592949 - DNA, 33 bp, Homo sapien
agctggcaacatcccaagatttgcattcacagc

SEQ ID NO: 592950 - DNA, 33 bp, Homo sapien
agctggcaacatcccaggatttgcattcacagc

SEQ ID NO: 592951 - DNA, 33 bp, Homo sapien
gcacacagttgatttacggagatccattcattt

SEQ ID NO: 592952 - DNA, 33 bp, Homo sapien
gcacacagttgatttatggagatccattcattt

SEQ ID NO: 592953 - DNA, 33 bp, Homo sapien
gtgtaaaaggtactgaaaccaaagtgtttgaga

SEQ ID NO: 592954 - DNA, 33 bp, Homo sapien
gtgtaaaaggtactgagaccaaagtgtttgaga

SEQ ID NO: 592955 - DNA, 33 bp, Homo sapien
gaatgctgacctatgcaagagtgttcttaataa

SEQ ID NO: 592956 - DNA, 33 bp, Homo sapien
gaatgctgacctatgcgagagtgttcttaataa

SEQ ID NO: 592957 - DNA, 33 bp, Homo sapien
actagtgccttaacgacggtagctggaggcatg

SEQ ID NO: 592958 - DNA, 33 bp, Homo sapien
actagtgccttaacgatggtagctggaggcatg

SEQ ID NO: 592959 - DNA, 33 bp, Homo sapien
gcactggatcttgatgaataatttagaaacaaa

SEQ ID NO: 592960 - DNA, 33 bp, Homo sapien
gcactggatcttgatggataatttagaaacaaa

SEQ ID NO: 592961 - DNA, 33 bp, Homo sapien
acagaaatgatacaaacctcgagcattgcagac

SEQ ID NO: 592962 - DNA, 33 bp, Homo sapien
acagaaatgatacaaatctcgagcattgcagac

SEQ ID NO: 592963 - DNA, 33 bp, Homo sapien
aggaatcactacattccacaaggtgctcatgtg

SEQ ID NO: 592964 - DNA, 33 bp, Homo sapien
aggaatcactacattctacaaggtgctcatgtg

SEQ ID NO: 592965 - DNA, 33 bp, Homo sapien
ttgggcaagtcagcaaacttcagggctcagttt

SEQ ID NO: 592966 - DNA, 33 bp, Homo sapien
ttgggcaagtcagcaaccttcagggctcagttt

SEQ ID NO: 592967 - DNA, 33 bp, Homo sapien
ctggctgcccattagaataacttgggaactttt

SEQ ID NO: 592968 - DNA, 33 bp, Homo sapien
ctggctgcccattagagtaacttgggaactttt

SEQ ID NO: 592969 - DNA, 33 bp, Homo sapien
tcaaagtgtagtgtacaagtcagcaagaggcat

SEQ ID NO: 592970 - DNA, 33 bp, Homo sapien
tcaaagtgtagtgtacgagtcagcaagaggcat

SEQ ID NO: 592971 - DNA, 33 bp, Homo sapien
agacccaaactctgacaaaaatggaactggtat

SEQ ID NO: 592972 - DNA, 33 bp, Homo sapien
agacccaaactctgaccaaaatggaactggtat

SEQ ID NO: 592973 - DNA, 33 bp, Homo sapien
tttaacggactcttacgaactgaagtttgcata

SEQ ID NO: 592974 - DNA, 33 bp, Homo sapien
tttaacggactcttactaactgaagtttgcata

SEQ ID NO: 592975 - DNA, 33 bp, Homo sapien
gctttgaaatcaatggccatccaccactttgga

SEQ ID NO: 592976 - DNA, 33 bp, Homo sapien
gctttgaaatcaatgggcatccaccactttgga

SEQ ID NO: 592977 - DNA, 33 bp, Homo sapien
acaaaccaaattcatcaaggaactaagactaga

SEQ ID NO: 592978 - DNA, 33 bp, Homo sapien
acaaaccaaattcatcgaggaactaagactaga

SEQ ID NO: 592979 - DNA, 33 bp, Homo sapien
ctttttttcccttacaatatatcctggaaatca

SEQ ID NO: 592980 - DNA, 33 bp, Homo sapien
ctttttttcccttacagtatatcctggaaatca

SEQ ID NO: 592981 - DNA, 33 bp, Homo sapien
cttttgatgttaggaccgatggccccctttatc

SEQ ID NO: 592982 - DNA, 33 bp, Homo sapien
cttttgatgttaggactgatggccccctttatc

SEQ ID NO: 592983 - DNA, 33 bp, Homo sapien
actaagcagttgtcccagcagcattgactgaaa

SEQ ID NO: 592984 - DNA, 33 bp, Homo sapien
actaagcagttgtcccggcagcattgactgaaa

SEQ ID NO: 592985 - DNA, 33 bp, Homo sapien
taaaacggaaagctacaaggcagactcacccaa

SEQ ID NO: 592986 - DNA, 33 bp, Homo sapien
taaaacggaaagctacgaggcagactcacccaa

SEQ ID NO: 592987 - DNA, 33 bp, Homo sapien
cctctctccaaacttcacaattgccaggggtca

SEQ ID NO: 592988 - DNA, 33 bp, Homo sapien
cctctctccaaacttcgcaattgccaggggtca

SEQ ID NO: 592989 - DNA, 33 bp, Homo sapien
aatataaagataggcacaagaaatagtttaaaa

SEQ ID NO: 592990 - DNA, 33 bp, Homo sapien
aatataaagataggcataagaaatagtttaaaa

SEQ ID NO: 592991 - DNA, 33 bp, Homo sapien
acacttctatagttccaaagtaattattgttaa

SEQ ID NO: 592992 - DNA, 33 bp, Homo sapien
acacttctatagttccgaagtaattattgttaa

SEQ ID NO: 592993 - DNA, 33 bp, Homo sapien
cccatagatatgcacacaaagcattttgtgaaa

SEQ ID NO: 592994 - DNA, 33 bp, Homo sapien
cccatagatatgcacagaaagcattttgtgaaa

SEQ ID NO: 592995 - DNA, 33 bp, Homo sapien
atgagctatttataaaagcaaactgcaaacaac

SEQ ID NO: 592996 - DNA, 33 bp, Homo sapien
atgagctatttataaaggcaaactgcaaacaac

SEQ ID NO: 592997 - DNA, 33 bp, Homo sapien
gctggcaaaactaaaaatatttactacagggcc

SEQ ID NO: 592998 - DNA, 33 bp, Homo sapien
gctggcaaaactaaaactatttactacagggcc

SEQ ID NO: 592999 - DNA, 33 bp, Homo sapien
gctcacatattgtctacggctacctaaacatgt

SEQ ID NO: 593000 - DNA, 33 bp, Homo sapien
gctcacatattgtctatggctacctaaacatgt

SEQ ID NO: 593001 - DNA, 33 bp, Homo sapien
agtttcacccagacacaaaatgatccaaagctt

SEQ ID NO: 593002 - DNA, 33 bp, Homo sapien
agtttcacccagacactaaatgatccaaagctt

SEQ ID NO: 593003 - DNA, 33 bp, Homo sapien
cattaagtggcaaaaaccaagctgtgtgctcta

SEQ ID NO: 593004 - DNA, 33 bp, Homo sapien
cattaagtggcaaaaatcaagctgtgtgctcta

SEQ ID NO: 593005 - DNA, 33 bp, Homo sapien
cctcccctccatatcaactggtcagcatggaga

SEQ ID NO: 593006 - DNA, 33 bp, Homo sapien
cctcccctccatatcagctggtcagcatggaga

SEQ ID NO: 593007 - DNA, 33 bp, Homo sapien
ttagtttctagcccagacaaagataattcaact

SEQ ID NO: 593008 - DNA, 33 bp, Homo sapien
ttagtttctagcccagccaaagataattcaact

SEQ ID NO: 593009 - DNA, 33 bp, Homo sapien
ctggcatcctaccagggacactcttaattaacc

SEQ ID NO: 593010 - DNA, 33 bp, Homo sapien
ctggcatcctaccaggtacactcttaattaacc

SEQ ID NO: 593011 - DNA, 33 bp, Homo sapien
tctattttttcatttacgttgaatgcaatgtgc

SEQ ID NO: 593012 - DNA, 33 bp, Homo sapien
tctattttttcatttatgttgaatgcaatgtgc

SEQ ID NO: 593013 - DNA, 33 bp, Homo sapien
gtcctgtgccttaactcactgtcagtgcatttt

SEQ ID NO: 593014 - DNA, 33 bp, Homo sapien
gtcctgtgccttaacttactgtcagtgcatttt

SEQ ID NO: 593015 - DNA, 33 bp, Homo sapien
atgatgggcccttgaaatcctttctggcactta

SEQ ID NO: 593016 - DNA, 33 bp, Homo sapien
atgatgggcccttgaagtcctttctggcactta

SEQ ID NO: 593017 - DNA, 33 bp, Homo sapien
ttccctttgtggagtcccagaagcatgatgcag

SEQ ID NO: 593018 - DNA, 33 bp, Homo sapien
ttccctttgtggagtctcagaagcatgatgcag

SEQ ID NO: 593019 - DNA, 33 bp, Homo sapien
tttaaggataactccagaatactcttgactttt

SEQ ID NO: 593020 - DNA, 33 bp, Homo sapien
tttaaggataactccataatactcttgactttt

SEQ ID NO: 593021 - DNA, 33 bp, Homo sapien
ttacttctccttgctcactaaaggttataacat

SEQ ID NO: 593022 - DNA, 33 bp, Homo sapien
ttacttctccttgctcgctaaaggttataacat

SEQ ID NO: 593023 - DNA, 33 bp, Homo sapien
atatttgttcgtattaagttgaaaagacagatg

SEQ ID NO: 593024 - DNA, 33 bp, Homo sapien
atatttgttcgtattacgttgaaaagacagatg

SEQ ID NO: 593025 - DNA, 33 bp, Homo sapien
tattactttacatgacaaaagagactgtgcaga

SEQ ID NO: 593026 - DNA, 33 bp, Homo sapien
tattactttacatgacgaaagagactgtgcaga

SEQ ID NO: 593027 - DNA, 33 bp, Homo sapien
atacaaagctgcaagacgtcactttatatatat

SEQ ID NO: 593028 - DNA, 33 bp, Homo sapien
atacaaagctgcaagatgtcactttatatatat

SEQ ID NO: 593029 - DNA, 33 bp, Homo sapien
aatgtttgttgtttaaatcactctttctataat

SEQ ID NO: 593030 - DNA, 33 bp, Homo sapien
aatgtttgttgtttaagtcactctttctataat

SEQ ID NO: 593031 - DNA, 33 bp, Homo sapien
gccgtgggttcagaaactactactagactaagt

SEQ ID NO: 593032 - DNA, 33 bp, Homo sapien
gccgtgggttcagaaagtactactagactaagt

SEQ ID NO: 593033 - DNA, 33 bp, Homo sapien
atttcttatacatagaaacccttgacagccaaa

SEQ ID NO: 593034 - DNA, 33 bp, Homo sapien
atttcttatacatagagacccttgacagccaaa

SEQ ID NO: 593035 - DNA, 33 bp, Homo sapien
gatgctaaatcgcttgcactcttttgtatcttg

SEQ ID NO: 593036 - DNA, 33 bp, Homo sapien
gatgctaaatcgcttgtactcttttgtatcttg

SEQ ID NO: 593037 - DNA, 33 bp, Homo sapien
actcagccttcaataaatcccaacagacgaggg

SEQ ID NO: 593038 - DNA, 33 bp, Homo sapien
actcagccttcaataagtcccaacagacgaggg

SEQ ID NO: 593039 - DNA, 33 bp, Homo sapien
gggctaattatgcccaaatcatgatgggatgaa

SEQ ID NO: 593040 - DNA, 33 bp, Homo sapien
gggctaattatgcccacatcatgatgggatgaa

SEQ ID NO: 593041 - DNA, 33 bp, Homo sapien
actgtgatgaagatgcagacactccaggattca

SEQ ID NO: 593042 - DNA, 33 bp, Homo sapien
actgtgatgaagatgccgacactccaggattca

SEQ ID NO: 593043 - DNA, 33 bp, Homo sapien
cttactcacaatctaagatcttttctgtaactt

SEQ ID NO: 593044 - DNA, 33 bp, Homo sapien
cttactcacaatctaatatcttttctgtaactt

SEQ ID NO: 593045 - DNA, 33 bp, Homo sapien
aaactaaaggcaaagaagatgtaattactagac

SEQ ID NO: 593046 - DNA, 33 bp, Homo sapien
aaactaaaggcaaagatgatgtaattactagac

SEQ ID NO: 593047 - DNA, 33 bp, Homo sapien
ccaaagcaacaagggacgtgctaatagagggac

SEQ ID NO: 593048 - DNA, 33 bp, Homo sapien
ccaaagcaacaagggaggtgctaatagagggac

SEQ ID NO: 593049 - DNA, 33 bp, Homo sapien
ctgtctggtaggataacacacacctatcccaag

SEQ ID NO: 593050 - DNA, 33 bp, Homo sapien
ctgtctggtaggataatacacacctatcccaag

SEQ ID NO: 593051 - DNA, 33 bp, Homo sapien
cactctcagcaggtggaacaatgagtacttcag

SEQ ID NO: 593052 - DNA, 33 bp, Homo sapien
cactctcagcaggtgggacaatgagtacttcag

SEQ ID NO: 593053 - DNA, 33 bp, Homo sapien
tccctatgtatggatgaaaaggtcattttataa

SEQ ID NO: 593054 - DNA, 33 bp, Homo sapien
tccctatgtatggatggaaaggtcattttataa

SEQ ID NO: 593055 - DNA, 33 bp, Homo sapien
tctctgtcttgtcacaccttctaattccaagtg

SEQ ID NO: 593056 - DNA, 33 bp, Homo sapien
tctctgtcttgtcacatcttctaattccaagtg

SEQ ID NO: 593057 - DNA, 33 bp, Homo sapien
ctatgtctgcaaaggcaaggaaatgaagcagaa

SEQ ID NO: 593058 - DNA, 33 bp, Homo sapien
ctatgtctgcaaaggcgaggaaatgaagcagaa

SEQ ID NO: 593059 - DNA, 33 bp, Homo sapien
aggaaagtaaagtacaacgaggaaagtaaagtc

SEQ ID NO: 593060 - DNA, 33 bp, Homo sapien
aggaaagtaaagtacagcgaggaaagtaaagtc

SEQ ID NO: 593061 - DNA, 33 bp, Homo sapien
gtattggtgcccatgaagacatcctaagaaaag

SEQ ID NO: 593062 - DNA, 33 bp, Homo sapien
gtattggtgcccatgaggacatcctaagaaaag

SEQ ID NO: 593063 - DNA, 33 bp, Homo sapien
cttcctgagtatgtccagagggaacagaatgca

SEQ ID NO: 593064 - DNA, 33 bp, Homo sapien
cttcctgagtatgtccggagggaacagaatgca

SEQ ID NO: 593065 - DNA, 33 bp, Homo sapien
acacgaccaccaataccaacaaccaactcatct

SEQ ID NO: 593066 - DNA, 33 bp, Homo sapien
acacgaccaccaatacgaacaaccaactcatct

SEQ ID NO: 593067 - DNA, 33 bp, Homo sapien
cacctgcatttcattacaacaggtcattgcggg

SEQ ID NO: 593068 - DNA, 33 bp, Homo sapien
cacctgcatttcattataacaggtcattgcggg

SEQ ID NO: 593069 - DNA, 33 bp, Homo sapien
caagcacctccatttacgccagctacagccaaa

SEQ ID NO: 593070 - DNA, 33 bp, Homo sapien
caagcacctccatttatgccagctacagccaaa

SEQ ID NO: 593071 - DNA, 33 bp, Homo sapien
ggctctacctgtgttacgaagttgttaatttca

SEQ ID NO: 593072 - DNA, 33 bp, Homo sapien
ggctctacctgtgttatgaagttgttaatttca

SEQ ID NO: 593073 - DNA, 33 bp, Homo sapien
aaataaacaagtgacaagtatgaaatatgtaag

SEQ ID NO: 593074 - DNA, 33 bp, Homo sapien
aaataaacaagtgacaggtatgaaatatgtaag

SEQ ID NO: 593075 - DNA, 33 bp, Homo sapien
gatgtcggttgcactacggttttattagagaag

SEQ ID NO: 593076 - DNA, 33 bp, Homo sapien
gatgtcggttgcactatggttttattagagaag

SEQ ID NO: 593077 - DNA, 33 bp, Homo sapien
actgccaagaatggaaacctcgctttctgaagc

SEQ ID NO: 593078 - DNA, 33 bp, Homo sapien
actgccaagaatggaagcctcgctttctgaagc

SEQ ID NO: 593079 - DNA, 33 bp, Homo sapien
ttcctggatgctcaccaaagagtctagaagaag

SEQ ID NO: 593080 - DNA, 33 bp, Homo sapien
ttcctggatgctcaccgaagagtctagaagaag

SEQ ID NO: 593081 - DNA, 33 bp, Homo sapien
gattcattcttatctacgaggaacatctgaatt

SEQ ID NO: 593082 - DNA, 33 bp, Homo sapien
gattcattcttatctatgaggaacatctgaatt

SEQ ID NO: 593083 - DNA, 33 bp, Homo sapien
atataacagattgaacacagaagccagtatgaa

SEQ ID NO: 593084 - DNA, 33 bp, Homo sapien
atataacagattgaacgcagaagccagtatgaa

SEQ ID NO: 593085 - DNA, 33 bp, Homo sapien
tttggatcacaaaagaaccaagtcaggtacatt

SEQ ID NO: 593086 - DNA, 33 bp, Homo sapien
tttggatcacaaaagacccaagtcaggtacatt

SEQ ID NO: 593087 - DNA, 33 bp, Homo sapien
agagttgacagataaaatatatcctaagcaaaa

SEQ ID NO: 593088 - DNA, 33 bp, Homo sapien
agagttgacagataaagtatatcctaagcaaaa

SEQ ID NO: 593089 - DNA, 33 bp, Homo sapien
ccctggaacagaataaagttaatgggctacatc

SEQ ID NO: 593090 - DNA, 33 bp, Homo sapien
ccctggaacagaataaggttaatgggctacatc

SEQ ID NO: 593091 - DNA, 33 bp, Homo sapien
ccatagtaccattatcccatcagtttagttaac

SEQ ID NO: 593092 - DNA, 33 bp, Homo sapien
ccatagtaccattatctcatcagtttagttaac

SEQ ID NO: 593093 - DNA, 33 bp, Homo sapien
ttcagaagcaaaacccaacctagatctcaggct

SEQ ID NO: 593094 - DNA, 33 bp, Homo sapien
ttcagaagcaaaaccccacctagatctcaggct

SEQ ID NO: 593095 - DNA, 33 bp, Homo sapien
ggctgaattgtcctcaaagagtagatctccctc

SEQ ID NO: 593096 - DNA, 33 bp, Homo sapien
ggctgaattgtcctcagagagtagatctccctc

SEQ ID NO: 593097 - DNA, 33 bp, Homo sapien
aaaaaggaaatggcaactggaacagaaaaacca

SEQ ID NO: 593098 - DNA, 33 bp, Homo sapien
aaaaaggaaatggcaattggaacagaaaaacca

SEQ ID NO: 593099 - DNA, 33 bp, Homo sapien
ttgcagcattgtacgacgacattgtctttgggc

SEQ ID NO: 593100 - DNA, 33 bp, Homo sapien
ttgcagcattgtacgatgacattgtctttgggc

SEQ ID NO: 593101 - DNA, 33 bp, Homo sapien
cacagaatcataaagaatcagaattcgacaagc

SEQ ID NO: 593102 - DNA, 33 bp, Homo sapien
cacagaatcataaagagtcagaattcgacaagc

SEQ ID NO: 593103 - DNA, 33 bp, Homo sapien
tgagctacctgcagataagatattcattcttat

SEQ ID NO: 593104 - DNA, 33 bp, Homo sapien
tgagctacctgcagatgagatattcattcttat

SEQ ID NO: 593105 - DNA, 33 bp, Homo sapien
acaccgaatcaccccgaaaaatggcattgggaa

SEQ ID NO: 593106 - DNA, 33 bp, Homo sapien
acaccgaatcaccccggaaaatggcattgggaa

SEQ ID NO: 593107 - DNA, 33 bp, Homo sapien
ataagttatctggttacagtggcccgcacctgt

SEQ ID NO: 593108 - DNA, 33 bp, Homo sapien
ataagttatctggttatagtggcccgcacctgt

SEQ ID NO: 593109 - DNA, 33 bp, Homo sapien
cagagcagaaatagacactaccgtatacgactc

SEQ ID NO: 593110 - DNA, 33 bp, Homo sapien
cagagcagaaatagacgctaccgtatacgactc

SEQ ID NO: 593111 - DNA, 33 bp, Homo sapien
tcccaggtccaaccacacagctgagctgataga

SEQ ID NO: 593112 - DNA, 33 bp, Homo sapien
tcccaggtccaaccacgcagctgagctgataga

SEQ ID NO: 593113 - DNA, 33 bp, Homo sapien
cgtgaaattccatacaaaacagacccgtctacc

SEQ ID NO: 593114 - DNA, 33 bp, Homo sapien
cgtgaaattccatacacaacagacccgtctacc

SEQ ID NO: 593115 - DNA, 33 bp, Homo sapien
gtatttgtaaggagaaaaggcccagagtaccca

SEQ ID NO: 593116 - DNA, 33 bp, Homo sapien
gtatttgtaaggagaagaggcccagagtaccca

SEQ ID NO: 593117 - DNA, 33 bp, Homo sapien
tccttcttcacaaaaccctggaacacactccat

SEQ ID NO: 593118 - DNA, 33 bp, Homo sapien
tccttcttcacaaaactctggaacacactccat

SEQ ID NO: 593119 - DNA, 33 bp, Homo sapien
cattaaatactatgaacaaatgaccacccattt

SEQ ID NO: 593120 - DNA, 33 bp, Homo sapien
cattaaatactatgaagaaatgaccacccattt

SEQ ID NO: 593121 - DNA, 33 bp, Homo sapien
tgggatataatagtcccgagtaggagtctgcct

SEQ ID NO: 593122 - DNA, 33 bp, Homo sapien
tgggatataatagtcctgagtaggagtctgcct

SEQ ID NO: 593123 - DNA, 33 bp, Homo sapien
gtgattttccagtacacgcggcagaatcctatg

SEQ ID NO: 593124 - DNA, 33 bp, Homo sapien
gtgattttccagtacaggcggcagaatcctatg

SEQ ID NO: 593125 - DNA, 33 bp, Homo sapien
ggcaagaagaggcttaaaaacccgcctggagct

SEQ ID NO: 593126 - DNA, 33 bp, Homo sapien
ggcaagaagaggcttagaaacccgcctggagct

SEQ ID NO: 593127 - DNA, 33 bp, Homo sapien
tggcacctgagaatgacgtcagggagcactgct

SEQ ID NO: 593128 - DNA, 33 bp, Homo sapien
tggcacctgagaatgatgtcagggagcactgct

SEQ ID NO: 593129 - DNA, 33 bp, Homo sapien
caagtgagccattaatcaatatgctaggcagct

SEQ ID NO: 593130 - DNA, 33 bp, Homo sapien
caagtgagccattaattaatatgctaggcagct

SEQ ID NO: 593131 - DNA, 33 bp, Homo sapien
aggatgttattggtacaaaagggtttattgcca

SEQ ID NO: 593132 - DNA, 33 bp, Homo sapien
aggatgttattggtacgaaagggtttattgcca

SEQ ID NO: 593133 - DNA, 33 bp, Homo sapien
gctacctggagtgtgaaaaacagttccacttgt

SEQ ID NO: 593134 - DNA, 33 bp, Homo sapien
gctacctggagtgtgagaaacagttccacttgt

SEQ ID NO: 593135 - DNA, 33 bp, Homo sapien
ctctctttattttacccgatgttagaggtgact

SEQ ID NO: 593136 - DNA, 33 bp, Homo sapien
ctctctttattttacctgatgttagaggtgact

SEQ ID NO: 593137 - DNA, 33 bp, Homo sapien
agagacgtgaaatttgcagaggtccctcaaaga

SEQ ID NO: 593138 - DNA, 33 bp, Homo sapien
agagacgtgaaatttggagaggtccctcaaaga

SEQ ID NO: 593139 - DNA, 33 bp, Homo sapien
aactattcacttcccaagtagattcatcagggt

SEQ ID NO: 593140 - DNA, 33 bp, Homo sapien
aactattcacttcccaggtagattcatcagggt

SEQ ID NO: 593141 - DNA, 33 bp, Homo sapien
ctggctacttgaggtaagtaacttctctgtagt

SEQ ID NO: 593142 - DNA, 33 bp, Homo sapien
ctggctacttgaggtaggtaacttctctgtagt

SEQ ID NO: 593143 - DNA, 33 bp, Homo sapien
ttgtccttgtaagcacaatatttttccaaagca

SEQ ID NO: 593144 - DNA, 33 bp, Homo sapien
ttgtccttgtaagcacgatatttttccaaagca

SEQ ID NO: 593145 - DNA, 33 bp, Homo sapien
ctaccttgattgtccacgatttgagctgtaatc

SEQ ID NO: 593146 - DNA, 33 bp, Homo sapien
ctaccttgattgtccatgatttgagctgtaatc

SEQ ID NO: 593147 - DNA, 33 bp, Homo sapien
ttgtttactgcccatcaatttactgcacaacgt

SEQ ID NO: 593148 - DNA, 33 bp, Homo sapien
ttgtttactgcccatcgatttactgcacaacgt

SEQ ID NO: 593149 - DNA, 33 bp, Homo sapien
acagctgtagggaaaacggagccagtcttgaag

SEQ ID NO: 593150 - DNA, 33 bp, Homo sapien
acagctgtagggaaaatggagccagtcttgaag

SEQ ID NO: 593151 - DNA, 33 bp, Homo sapien
cacatctctctcatcaccataccttcaggactt

SEQ ID NO: 593152 - DNA, 33 bp, Homo sapien
cacatctctctcatcatcataccttcaggactt

SEQ ID NO: 593153 - DNA, 33 bp, Homo sapien
tttccacacctggcaaagtgagcccaccaggaa

SEQ ID NO: 593154 - DNA, 33 bp, Homo sapien
tttccacacctggcaacgtgagcccaccaggaa

SEQ ID NO: 593155 - DNA, 33 bp, Homo sapien
aaattaagatagaacaaaatgaaggtgtgatgt

SEQ ID NO: 593156 - DNA, 33 bp, Homo sapien
aaattaagatagaacacaatgaaggtgtgatgt

SEQ ID NO: 593157 - DNA, 33 bp, Homo sapien
ctgactttattgttacaggctattataaactct

SEQ ID NO: 593158 - DNA, 33 bp, Homo sapien
ctgactttattgttacgggctattataaactct

SEQ ID NO: 593159 - DNA, 33 bp, Homo sapien
ttccaggcattttagagtagattttctgtgctt

SEQ ID NO: 593160 - DNA, 33 bp, Homo sapien
ttccaggcattttagattagattttctgtgctt

SEQ ID NO: 593161 - DNA, 33 bp, Homo sapien
tccaggtgagtgctgacgtcacagtctcaggat

SEQ ID NO: 593162 - DNA, 33 bp, Homo sapien
tccaggtgagtgctgatgtcacagtctcaggat

SEQ ID NO: 593163 - DNA, 33 bp, Homo sapien
gaagccacagtttacaagaaaagctatttgagt

SEQ ID NO: 593164 - DNA, 33 bp, Homo sapien
gaagccacagtttacaggaaaagctatttgagt

SEQ ID NO: 593165 - DNA, 33 bp, Homo sapien
ttttgcaaattgtgaacagttttcagtttttag

SEQ ID NO: 593166 - DNA, 33 bp, Homo sapien
ttttgcaaattgtgaagagttttcagtttttag

SEQ ID NO: 593167 - DNA, 33 bp, Homo sapien
cacctttcctagtgggaaacaaccgaatagcaa

SEQ ID NO: 593168 - DNA, 33 bp, Homo sapien
cacctttcctagtggggaacaaccgaatagcaa

SEQ ID NO: 593169 - DNA, 33 bp, Homo sapien
taaaacagtgagcaacagttatgcacaccccag

SEQ ID NO: 593170 - DNA, 33 bp, Homo sapien
taaaacagtgagcaacggttatgcacaccccag

SEQ ID NO: 593171 - DNA, 33 bp, Homo sapien
gcaccatcagaaatcaacctcttcccttctcca

SEQ ID NO: 593172 - DNA, 33 bp, Homo sapien
gcaccatcagaaatcatcctcttcccttctcca

SEQ ID NO: 593173 - DNA, 33 bp, Homo sapien
aagcacatcaaacaaaatgacttgaagcctttg

SEQ ID NO: 593174 - DNA, 33 bp, Homo sapien
aagcacatcaaacaaattgacttgaagcctttg

SEQ ID NO: 593175 - DNA, 33 bp, Homo sapien
gagatgctacctctgaaacactggagagaatcc

SEQ ID NO: 593176 - DNA, 33 bp, Homo sapien
gagatgctacctctgagacactggagagaatcc

SEQ ID NO: 593177 - DNA, 33 bp, Homo sapien
ttctggtggtggccgtcaattcgtggtgtttcc

SEQ ID NO: 593178 - DNA, 33 bp, Homo sapien
ttctggtggtggccgttaattcgtggtgtttcc

SEQ ID NO: 593179 - DNA, 33 bp, Homo sapien
ctgtggtccagaatcacagcctaaggagagccc

SEQ ID NO: 593180 - DNA, 33 bp, Homo sapien
ctgtggtccagaatcagagcctaaggagagccc

SEQ ID NO: 593181 - DNA, 33 bp, Homo sapien
aaccataggagccttcaaggacatagttatctc

SEQ ID NO: 593182 - DNA, 33 bp, Homo sapien
aaccataggagccttcgaggacatagttatctc

SEQ ID NO: 593183 - DNA, 33 bp, Homo sapien
agacttcgcatacataataagacaaaactgatt

SEQ ID NO: 593184 - DNA, 33 bp, Homo sapien
agacttcgcatacatagtaagacaaaactgatt

SEQ ID NO: 593185 - DNA, 33 bp, Homo sapien
cagtgggggctcaatacagttttgtggaatgaa

SEQ ID NO: 593186 - DNA, 33 bp, Homo sapien
cagtgggggctcaatatagttttgtggaatgaa

SEQ ID NO: 593187 - DNA, 33 bp, Homo sapien
ggacagatgctcctgaataccccgggaaacctc

SEQ ID NO: 593188 - DNA, 33 bp, Homo sapien
ggacagatgctcctgagtaccccgggaaacctc

SEQ ID NO: 593189 - DNA, 33 bp, Homo sapien
gtgttctcccaaccagccacttggactccagtc

SEQ ID NO: 593190 - DNA, 33 bp, Homo sapien
gtgttctcccaaccaggcacttggactccagtc

SEQ ID NO: 593191 - DNA, 33 bp, Homo sapien
atggacttatgaagtacaaaagctggagtatga

SEQ ID NO: 593192 - DNA, 33 bp, Homo sapien
atggacttatgaagtataaaagctggagtatga

SEQ ID NO: 593193 - DNA, 33 bp, Homo sapien
tacaagtgaggaatctaagacttgcaaataacc

SEQ ID NO: 593194 - DNA, 33 bp, Homo sapien
tacaagtgaggaatctcagacttgcaaataacc

SEQ ID NO: 593195 - DNA, 33 bp, Homo sapien
tggttattatctagcacaaagtgaaaagtgcca

SEQ ID NO: 593196 - DNA, 33 bp, Homo sapien
tggttattatctagcataaagtgaaaagtgcca

SEQ ID NO: 593197 - DNA, 33 bp, Homo sapien
ccaacactgaacaggtaaaattgacaggttggg

SEQ ID NO: 593198 - DNA, 33 bp, Homo sapien
ccaacactgaacaggtgaaattgacaggttggg

SEQ ID NO: 593199 - DNA, 33 bp, Homo sapien
ctaactggtcaatcagcctgaaggaataacagg

SEQ ID NO: 593200 - DNA, 33 bp, Homo sapien
ctaactggtcaatcaggctgaaggaataacagg

SEQ ID NO: 593201 - DNA, 33 bp, Homo sapien
caagaaaggggcctccagagagaaagtcagtca

SEQ ID NO: 593202 - DNA, 33 bp, Homo sapien
caagaaaggggcctccggagagaaagtcagtca

SEQ ID NO: 593203 - DNA, 33 bp, Homo sapien
taaggccatcttcccccgacctctgtgtaaagg

SEQ ID NO: 593204 - DNA, 33 bp, Homo sapien
taaggccatcttcccctgacctctgtgtaaagg

SEQ ID NO: 593205 - DNA, 33 bp, Homo sapien
tagcaacaatcatgcacagtgtgcctctacttc

SEQ ID NO: 593206 - DNA, 33 bp, Homo sapien
tagcaacaatcatgcatagtgtgcctctacttc

SEQ ID NO: 593207 - DNA, 33 bp, Homo sapien
tccctctatcttccaccggcattcaggcagctt

SEQ ID NO: 593208 - DNA, 33 bp, Homo sapien
tccctctatcttccactggcattcaggcagctt

SEQ ID NO: 593209 - DNA, 33 bp, Homo sapien
tttacatttggactagaagtaagggctttcaaa

SEQ ID NO: 593210 - DNA, 33 bp, Homo sapien
tttacatttggactagcagtaagggctttcaaa

SEQ ID NO: 593211 - DNA, 33 bp, Homo sapien
agatgcttctgtttccagagccgaaagtataag

SEQ ID NO: 593212 - DNA, 33 bp, Homo sapien
agatgcttctgtttccggagccgaaagtataag

SEQ ID NO: 593213 - DNA, 33 bp, Homo sapien
ttgaaagaaaaacatacatcaaaggcatcagtg

SEQ ID NO: 593214 - DNA, 33 bp, Homo sapien
ttgaaagaaaaacatatatcaaaggcatcagtg

SEQ ID NO: 593215 - DNA, 33 bp, Homo sapien
tttcatagaattgccaagacgagagccagctgt

SEQ ID NO: 593216 - DNA, 33 bp, Homo sapien
tttcatagaattgccaggacgagagccagctgt

SEQ ID NO: 593217 - DNA, 33 bp, Homo sapien
atattggatattcagaaatacttgtcagacctg

SEQ ID NO: 593218 - DNA, 33 bp, Homo sapien
atattggatattcagagatacttgtcagacctg

SEQ ID NO: 593219 - DNA, 33 bp, Homo sapien
tgaagggagctaattaaagaatcacacaacttt

SEQ ID NO: 593220 - DNA, 33 bp, Homo sapien
tgaagggagctaattagagaatcacacaacttt

SEQ ID NO: 593221 - DNA, 33 bp, Homo sapien
gactactctggtgctcccttctctgtaagtgca

SEQ ID NO: 593222 - DNA, 33 bp, Homo sapien
gactactctggtgctctcttctctgtaagtgca

SEQ ID NO: 593223 - DNA, 33 bp, Homo sapien
agagtagtcagcggtaagctctgttattacagg

SEQ ID NO: 593224 - DNA, 33 bp, Homo sapien
agagtagtcagcggtacgctctgttattacagg

SEQ ID NO: 593225 - DNA, 33 bp, Homo sapien
ctgttcacgcccactcaatgtcgacctaaatat

SEQ ID NO: 593226 - DNA, 33 bp, Homo sapien
ctgttcacgcccactcgatgtcgacctaaatat

SEQ ID NO: 593227 - DNA, 33 bp, Homo sapien
cacctgtataatgctacgtgcatctaacagaag

SEQ ID NO: 593228 - DNA, 33 bp, Homo sapien
cacctgtataatgctatgtgcatctaacagaag

SEQ ID NO: 593229 - DNA, 33 bp, Homo sapien
agagcctacaataatccctgacatacagagttt

SEQ ID NO: 593230 - DNA, 33 bp, Homo sapien
agagcctacaataatctctgacatacagagttt

SEQ ID NO: 593231 - DNA, 33 bp, Homo sapien
atgcgtactgtgatcacggtattaatctgcttt

SEQ ID NO: 593232 - DNA, 33 bp, Homo sapien
atgcgtactgtgatcatggtattaatctgcttt

SEQ ID NO: 593233 - DNA, 33 bp, Homo sapien
tattacatcctggaccactggatgcacctcacc

SEQ ID NO: 593234 - DNA, 33 bp, Homo sapien
tattacatcctggaccgctggatgcacctcacc

SEQ ID NO: 593235 - DNA, 33 bp, Homo sapien
tcagttcttcctgccacgtaaaaagcaacatgc

SEQ ID NO: 593236 - DNA, 33 bp, Homo sapien
tcagttcttcctgccaggtaaaaagcaacatgc

SEQ ID NO: 593237 - DNA, 33 bp, Homo sapien
attattgtctagtgagacgcatttagcaaatat

SEQ ID NO: 593238 - DNA, 33 bp, Homo sapien
attattgtctagtgaggcgcatttagcaaatat

SEQ ID NO: 593239 - DNA, 33 bp, Homo sapien
gcactggtgtgggggaagataccctgtacaaag

SEQ ID NO: 593240 - DNA, 33 bp, Homo sapien
gcactggtgtgggggacgataccctgtacaaag

SEQ ID NO: 593241 - DNA, 33 bp, Homo sapien
aaacatctgtaatcgaatacacatcaatccaga

SEQ ID NO: 593242 - DNA, 33 bp, Homo sapien
aaacatctgtaatcgactacacatcaatccaga

SEQ ID NO: 593243 - DNA, 33 bp, Homo sapien
accattgggactggccaacttaacgaactaagc

SEQ ID NO: 593244 - DNA, 33 bp, Homo sapien
accattgggactggccgacttaacgaactaagc

SEQ ID NO: 593245 - DNA, 33 bp, Homo sapien
atgggttcagcctgggaaatgaaacagggccca

SEQ ID NO: 593246 - DNA, 33 bp, Homo sapien
atgggttcagcctgggcaatgaaacagggccca

SEQ ID NO: 593247 - DNA, 33 bp, Homo sapien
tgaaatggattgttacaaaactgatcaattccg

SEQ ID NO: 593248 - DNA, 33 bp, Homo sapien
tgaaatggattgttacgaaactgatcaattccg

SEQ ID NO: 593249 - DNA, 33 bp, Homo sapien
tgctgtctttaccaaaaccaactgcaaaacact

SEQ ID NO: 593250 - DNA, 33 bp, Homo sapien
tgctgtctttaccaaacccaactgcaaaacact

SEQ ID NO: 593251 - DNA, 33 bp, Homo sapien
agacatagttgtctaacggtaacaaggaaagac

SEQ ID NO: 593252 - DNA, 33 bp, Homo sapien
agacatagttgtctaatggtaacaaggaaagac

SEQ ID NO: 593253 - DNA, 33 bp, Homo sapien
tcaagatgctggtgaccatctcctgtatcctgg

SEQ ID NO: 593254 - DNA, 33 bp, Homo sapien
tcaagatgctggtgacgatctcctgtatcctgg

SEQ ID NO: 593255 - DNA, 33 bp, Homo sapien
ctgatagcctgaaagacaagaatgaacattcca

SEQ ID NO: 593256 - DNA, 33 bp, Homo sapien
ctgatagcctgaaagagaagaatgaacattcca

SEQ ID NO: 593257 - DNA, 33 bp, Homo sapien
atttctccttttgccacatttggttcattaatc

SEQ ID NO: 593258 - DNA, 33 bp, Homo sapien
atttctccttttgccatatttggttcattaatc

SEQ ID NO: 593259 - DNA, 33 bp, Homo sapien
gaaatacagaaacagccaacattacgaagttgc

SEQ ID NO: 593260 - DNA, 33 bp, Homo sapien
gaaatacagaaacagctaacattacgaagttgc

SEQ ID NO: 593261 - DNA, 33 bp, Homo sapien
cagacactgctgccttcaaagtatggaggtctg

SEQ ID NO: 593262 - DNA, 33 bp, Homo sapien
cagacactgctgccttgaaagtatggaggtctg

SEQ ID NO: 593263 - DNA, 33 bp, Homo sapien
caagcccttcctattacgaggcatgaagctaag

SEQ ID NO: 593264 - DNA, 33 bp, Homo sapien
caagcccttcctattatgaggcatgaagctaag

SEQ ID NO: 593265 - DNA, 33 bp, Homo sapien
ttctctagtcctctcaatcaggggctaagtctg

SEQ ID NO: 593266 - DNA, 33 bp, Homo sapien
ttctctagtcctctcagtcaggggctaagtctg

SEQ ID NO: 593267 - DNA, 33 bp, Homo sapien
gaaaaatgttgtggagcctaactctgactattt

SEQ ID NO: 593268 - DNA, 33 bp, Homo sapien
gaaaaatgttgtggagtctaactctgactattt

SEQ ID NO: 593269 - DNA, 33 bp, Homo sapien
tgtctcaaagctcttaaagagaaccagccctgc

SEQ ID NO: 593270 - DNA, 33 bp, Homo sapien
tgtctcaaagctcttagagagaaccagccctgc

SEQ ID NO: 593271 - DNA, 33 bp, Homo sapien
catcattgcacttgacacagtccactcaggggt

SEQ ID NO: 593272 - DNA, 33 bp, Homo sapien
catcattgcacttgacgcagtccactcaggggt

SEQ ID NO: 593273 - DNA, 33 bp, Homo sapien
cagccatcatctggacacgagaattctcaaagg

SEQ ID NO: 593274 - DNA, 33 bp, Homo sapien
cagccatcatctggacgcgagaattctcaaagg

SEQ ID NO: 593275 - DNA, 33 bp, Homo sapien
taaaatgaatgggttgaaaaagtaattgaataa

SEQ ID NO: 593276 - DNA, 33 bp, Homo sapien
taaaatgaatgggttgcaaaagtaattgaataa

SEQ ID NO: 593277 - DNA, 33 bp, Homo sapien
tctgcacttcatttccaaaagataagcaagaaa

SEQ ID NO: 593278 - DNA, 33 bp, Homo sapien
tctgcacttcatttccgaaagataagcaagaaa

SEQ ID NO: 593279 - DNA, 33 bp, Homo sapien
gtgagcttagaaaatacgggtgatgtggatgaa

SEQ ID NO: 593280 - DNA, 33 bp, Homo sapien
gtgagcttagaaaatatgggtgatgtggatgaa

SEQ ID NO: 593281 - DNA, 33 bp, Homo sapien
tgtagtacctggagcactaccagccatgggagg

SEQ ID NO: 593282 - DNA, 33 bp, Homo sapien
tgtagtacctggagcagtaccagccatgggagg

SEQ ID NO: 593283 - DNA, 33 bp, Homo sapien
aatgatgctttagacaactttgcttggagcatg

SEQ ID NO: 593284 - DNA, 33 bp, Homo sapien
aatgatgctttagacatctttgcttggagcatg

SEQ ID NO: 593285 - DNA, 33 bp, Homo sapien
tcaaggatttctttaacttaaacacatttctaa

SEQ ID NO: 593286 - DNA, 33 bp, Homo sapien
tcaaggatttctttaatttaaacacatttctaa

SEQ ID NO: 593287 - DNA, 33 bp, Homo sapien
ctgctaagagcctcaccgcagaatttcacgttt

SEQ ID NO: 593288 - DNA, 33 bp, Homo sapien
ctgctaagagcctcactgcagaatttcacgttt

SEQ ID NO: 593289 - DNA, 33 bp, Homo sapien
cagcaactatgcattcccccatttctcaggtta

SEQ ID NO: 593290 - DNA, 33 bp, Homo sapien
cagcaactatgcattctcccatttctcaggtta

SEQ ID NO: 593291 - DNA, 33 bp, Homo sapien
gcatttgtgtctcaagacaaagcccacatatac

SEQ ID NO: 593292 - DNA, 33 bp, Homo sapien
gcatttgtgtctcaaggcaaagcccacatatac

SEQ ID NO: 593293 - DNA, 33 bp, Homo sapien
aaagggagtgtcccaaaaagaggagctatgtca

SEQ ID NO: 593294 - DNA, 33 bp, Homo sapien
aaagggagtgtcccaacaagaggagctatgtca

SEQ ID NO: 593295 - DNA, 33 bp, Homo sapien
acaggagaggcactaccaagaaaggagcattgg

SEQ ID NO: 593296 - DNA, 33 bp, Homo sapien
acaggagaggcactactaagaaaggagcattgg

SEQ ID NO: 593297 - DNA, 33 bp, Homo sapien
cttgattaacaaccccaatttggatccctatcc

SEQ ID NO: 593298 - DNA, 33 bp, Homo sapien
cttgattaacaaccccgatttggatccctatcc

SEQ ID NO: 593299 - DNA, 33 bp, Homo sapien
ctaatgttactttaaaatgtgatgaaatagtgt

SEQ ID NO: 593300 - DNA, 33 bp, Homo sapien
ctaatgttactttaaagtgtgatgaaatagtgt

SEQ ID NO: 593301 - DNA, 33 bp, Homo sapien
gagtctggatgaacacaaaaaatctaagtgtag

SEQ ID NO: 593302 - DNA, 33 bp, Homo sapien
gagtctggatgaacacgaaaaatctaagtgtag

SEQ ID NO: 593303 - DNA, 33 bp, Homo sapien
aaggccgtctgccgtcaagccagaaatcctgtt

SEQ ID NO: 593304 - DNA, 33 bp, Homo sapien
aaggccgtctgccgtcgagccagaaatcctgtt

SEQ ID NO: 593305 - DNA, 33 bp, Homo sapien
aaagaaaaggatactacgtaagaatgtaaattt

SEQ ID NO: 593306 - DNA, 33 bp, Homo sapien
aaagaaaaggatactatgtaagaatgtaaattt

SEQ ID NO: 593307 - DNA, 33 bp, Homo sapien
cagtcaaccagttaatgactaggaagtgccaag

SEQ ID NO: 593308 - DNA, 33 bp, Homo sapien
cagtcaaccagttaattactaggaagtgccaag

SEQ ID NO: 593309 - DNA, 33 bp, Homo sapien
ggagatcctgaagtcaaaggaacttacccaagt

SEQ ID NO: 593310 - DNA, 33 bp, Homo sapien
ggagatcctgaagtcacaggaacttacccaagt

SEQ ID NO: 593311 - DNA, 33 bp, Homo sapien
attccagctaattgagacatcattacaacctat

SEQ ID NO: 593312 - DNA, 33 bp, Homo sapien
attccagctaattgaggcatcattacaacctat

SEQ ID NO: 593313 - DNA, 33 bp, Homo sapien
ccatcgccaagagcaacgggtaacatagagggt

SEQ ID NO: 593314 - DNA, 33 bp, Homo sapien
ccatcgccaagagcaatgggtaacatagagggt

SEQ ID NO: 593315 - DNA, 33 bp, Homo sapien
ctagccacagagtgctaaagcaatgttaaagag

SEQ ID NO: 593316 - DNA, 33 bp, Homo sapien
ctagccacagagtgctgaagcaatgttaaagag

SEQ ID NO: 593317 - DNA, 33 bp, Homo sapien
aataggttgctttaaactgcacacttttgtttc

SEQ ID NO: 593318 - DNA, 33 bp, Homo sapien
aataggttgctttaaattgcacacttttgtttc

SEQ ID NO: 593319 - DNA, 33 bp, Homo sapien
ctcatctcattaactccgactgtgtcacttatt

SEQ ID NO: 593320 - DNA, 33 bp, Homo sapien
ctcatctcattaactctgactgtgtcacttatt

SEQ ID NO: 593321 - DNA, 33 bp, Homo sapien
tctctacttttctgcacgaagtccttgtcttag

SEQ ID NO: 593322 - DNA, 33 bp, Homo sapien
tctctacttttctgcatgaagtccttgtcttag

SEQ ID NO: 593323 - DNA, 33 bp, Homo sapien
ggacagaattgtaagcacatatgccccctgatg

SEQ ID NO: 593324 - DNA, 33 bp, Homo sapien
ggacagaattgtaagcgcatatgccccctgatg

SEQ ID NO: 593325 - DNA, 33 bp, Homo sapien
cacgaggatgccccccaatgctactactttgca

SEQ ID NO: 593326 - DNA, 33 bp, Homo sapien
cacgaggatgccccccgatgctactactttgca

SEQ ID NO: 593327 - DNA, 33 bp, Homo sapien
atgatatctctcactacgtgtttaacaaatctc

SEQ ID NO: 593328 - DNA, 33 bp, Homo sapien
atgatatctctcactatgtgtttaacaaatctc

SEQ ID NO: 593329 - DNA, 33 bp, Homo sapien
tggatgtccatgcataaatttctgtttgtgttt

SEQ ID NO: 593330 - DNA, 33 bp, Homo sapien
tggatgtccatgcatacatttctgtttgtgttt

SEQ ID NO: 593331 - DNA, 33 bp, Homo sapien
aaccaggctgcaactccgagcctatacagccct

SEQ ID NO: 593332 - DNA, 33 bp, Homo sapien
aaccaggctgcaactctgagcctatacagccct

SEQ ID NO: 593333 - DNA, 33 bp, Homo sapien
atgtgaagtactttaacacattggttatatgct

SEQ ID NO: 593334 - DNA, 33 bp, Homo sapien
atgtgaagtactttaatacattggttatatgct

SEQ ID NO: 593335 - DNA, 33 bp, Homo sapien
gaaatgcattaatcagcatatttgtcagtaatc

SEQ ID NO: 593336 - DNA, 33 bp, Homo sapien
gaaatgcattaatcagtatatttgtcagtaatc

SEQ ID NO: 593337 - DNA, 33 bp, Homo sapien
gagagagagagctttacggctcaaagtcatttt

SEQ ID NO: 593338 - DNA, 33 bp, Homo sapien
gagagagagagctttatggctcaaagtcatttt

SEQ ID NO: 593339 - DNA, 33 bp, Homo sapien
tttccatcttattacacggtcagtgctgtgggg

SEQ ID NO: 593340 - DNA, 33 bp, Homo sapien
tttccatcttattacatggtcagtgctgtgggg

SEQ ID NO: 593341 - DNA, 33 bp, Homo sapien
tggtatggatattataccacaataaagctatta

SEQ ID NO: 593342 - DNA, 33 bp, Homo sapien
tggtatggatattatatcacaataaagctatta

SEQ ID NO: 593343 - DNA, 33 bp, Homo sapien
taccactgaaattggcaagtgctagaaatcacg

SEQ ID NO: 593344 - DNA, 33 bp, Homo sapien
taccactgaaattggcgagtgctagaaatcacg

SEQ ID NO: 593345 - DNA, 33 bp, Homo sapien
taaacatttaccagaacaatacttaggagagtg

SEQ ID NO: 593346 - DNA, 33 bp, Homo sapien
taaacatttaccagaataatacttaggagagtg

SEQ ID NO: 593347 - DNA, 33 bp, Homo sapien
gtaaagtttggaaccaatctttaatatcagtga

SEQ ID NO: 593348 - DNA, 33 bp, Homo sapien
gtaaagtttggaaccagtctttaatatcagtga

SEQ ID NO: 593349 - DNA, 33 bp, Homo sapien
aaacacattttgattcaacactgtgcattaaag

SEQ ID NO: 593350 - DNA, 33 bp, Homo sapien
aaacacattttgattcgacactgtgcattaaag

SEQ ID NO: 593351 - DNA, 33 bp, Homo sapien
gaaagtggaaatttcaaggactttatgaggagt

SEQ ID NO: 593352 - DNA, 33 bp, Homo sapien
gaaagtggaaatttcacggactttatgaggagt

SEQ ID NO: 593353 - DNA, 33 bp, Homo sapien
gactggactggtcttgcaccgatgatgctgtcc

SEQ ID NO: 593354 - DNA, 33 bp, Homo sapien
gactggactggtcttgtaccgatgatgctgtcc

SEQ ID NO: 593355 - DNA, 33 bp, Homo sapien
taagacttagatatgactaaccacaatctggaa

SEQ ID NO: 593356 - DNA, 33 bp, Homo sapien
taagacttagatatgagtaaccacaatctggaa

SEQ ID NO: 593357 - DNA, 33 bp, Homo sapien
atggagaaacagagaagataaatcatcatcccc

SEQ ID NO: 593358 - DNA, 33 bp, Homo sapien
atggagaaacagagaatataaatcatcatcccc

SEQ ID NO: 593359 - DNA, 33 bp, Homo sapien
tatgtaaaataccatcaacctttctgcattcat

SEQ ID NO: 593360 - DNA, 33 bp, Homo sapien
tatgtaaaataccatcgacctttctgcattcat

SEQ ID NO: 593361 - DNA, 33 bp, Homo sapien
ctctggggtcccacaacctgtctgaatcatccc

SEQ ID NO: 593362 - DNA, 33 bp, Homo sapien
ctctggggtcccacaatctgtctgaatcatccc

SEQ ID NO: 593363 - DNA, 33 bp, Homo sapien
gggtatttatgttctgaatcatctatcaaatgg

SEQ ID NO: 593364 - DNA, 33 bp, Homo sapien
gggtatttatgttctggatcatctatcaaatgg

SEQ ID NO: 593365 - DNA, 33 bp, Homo sapien
attgtacattcctgtacggctaaagagcttttc

SEQ ID NO: 593366 - DNA, 33 bp, Homo sapien
attgtacattcctgtatggctaaagagcttttc

SEQ ID NO: 593367 - DNA, 33 bp, Homo sapien
gagggcaatggctcctaaagacttttaattatc

SEQ ID NO: 593368 - DNA, 33 bp, Homo sapien
gagggcaatggctcctgaagacttttaattatc

SEQ ID NO: 593369 - DNA, 33 bp, Homo sapien
cctgcatccagcagtgaaatgggtaaacagatg

SEQ ID NO: 593370 - DNA, 33 bp, Homo sapien
cctgcatccagcagtgtaatgggtaaacagatg

SEQ ID NO: 593371 - DNA, 33 bp, Homo sapien
gagatagttccatgtcaaatataaaaggccaaa

SEQ ID NO: 593372 - DNA, 33 bp, Homo sapien
gagatagttccatgtcgaatataaaaggccaaa

SEQ ID NO: 593373 - DNA, 33 bp, Homo sapien
cgtctaggtaaagagacctttgaacacccgtgt

SEQ ID NO: 593374 - DNA, 33 bp, Homo sapien
cgtctaggtaaagagagctttgaacacccgtgt

SEQ ID NO: 593375 - DNA, 33 bp, Homo sapien
gaaaagcaaggattagaaatgtttactaccaca

SEQ ID NO: 593376 - DNA, 33 bp, Homo sapien
gaaaagcaaggattaggaatgtttactaccaca

SEQ ID NO: 593377 - DNA, 33 bp, Homo sapien
ccctctaggcccgtgaccatcagcttactgcaa

SEQ ID NO: 593378 - DNA, 33 bp, Homo sapien
ccctctaggcccgtgatcatcagcttactgcaa

SEQ ID NO: 593379 - DNA, 33 bp, Homo sapien
gaattttacgatattccagtgcagggatataag

SEQ ID NO: 593380 - DNA, 33 bp, Homo sapien
gaattttacgatattctagtgcagggatataag

SEQ ID NO: 593381 - DNA, 33 bp, Homo sapien
ggagcctataaagaaacattctgtgctgataat

SEQ ID NO: 593382 - DNA, 33 bp, Homo sapien
ggagcctataaagaaagattctgtgctgataat

SEQ ID NO: 593383 - DNA, 33 bp, Homo sapien
cagagtttgcataacaacaaatttctttatagt

SEQ ID NO: 593384 - DNA, 33 bp, Homo sapien
cagagtttgcataacatcaaatttctttatagt

SEQ ID NO: 593385 - DNA, 33 bp, Homo sapien
ttggaatacaaggaaagaaattgtgtcctgcat

SEQ ID NO: 593386 - DNA, 33 bp, Homo sapien
ttggaatacaaggaaataaattgtgtcctgcat

SEQ ID NO: 593387 - DNA, 33 bp, Homo sapien
agaatgacaacacttacgtgaacacatttaatg

SEQ ID NO: 593388 - DNA, 33 bp, Homo sapien
agaatgacaacacttatgtgaacacatttaatg

SEQ ID NO: 593389 - DNA, 33 bp, Homo sapien
atttttatacctagccaaaggttttctcaattc

SEQ ID NO: 593390 - DNA, 33 bp, Homo sapien
atttttatacctagccgaaggttttctcaattc

SEQ ID NO: 593391 - DNA, 33 bp, Homo sapien
caccaacactatttcaaacaagatctggttaaa

SEQ ID NO: 593392 - DNA, 33 bp, Homo sapien
caccaacactatttcagacaagatctggttaaa

SEQ ID NO: 593393 - DNA, 33 bp, Homo sapien
ttttgttcttagtcaactgtttaagtgaatgtt

SEQ ID NO: 593394 - DNA, 33 bp, Homo sapien
ttttgttcttagtcaattgtttaagtgaatgtt

SEQ ID NO: 593395 - DNA, 33 bp, Homo sapien
gctcatttgtgcatcaatattagtttatggaat

SEQ ID NO: 593396 - DNA, 33 bp, Homo sapien
gctcatttgtgcatcagtattagtttatggaat

SEQ ID NO: 593397 - DNA, 33 bp, Homo sapien
ttctctatcttcaaaacggctaaaatcctgcca

SEQ ID NO: 593398 - DNA, 33 bp, Homo sapien
ttctctatcttcaaaatggctaaaatcctgcca

SEQ ID NO: 593399 - DNA, 33 bp, Homo sapien
agaccttgttgataaaagtctctatattcccgg

SEQ ID NO: 593400 - DNA, 33 bp, Homo sapien
agaccttgttgataaacgtctctatattcccgg

SEQ ID NO: 593401 - DNA, 33 bp, Homo sapien
gcttgatatctctcccaacattaaaatagcacc

SEQ ID NO: 593402 - DNA, 33 bp, Homo sapien
gcttgatatctctcccgacattaaaatagcacc

SEQ ID NO: 593403 - DNA, 33 bp, Homo sapien
ttctctaatgtttagacacctctttcaagaaca

SEQ ID NO: 593404 - DNA, 33 bp, Homo sapien
ttctctaatgtttagagacctctttcaagaaca

SEQ ID NO: 593405 - DNA, 33 bp, Homo sapien
ggcttcagaatgggccagagtcaaccatgacac

SEQ ID NO: 593406 - DNA, 33 bp, Homo sapien
ggcttcagaatgggccggagtcaaccatgacac

SEQ ID NO: 593407 - DNA, 33 bp, Homo sapien
gaatttagttctcaaggaccattcggaagaaag

SEQ ID NO: 593408 - DNA, 33 bp, Homo sapien
gaatttagttctcaagtaccattcggaagaaag

SEQ ID NO: 593409 - DNA, 33 bp, Homo sapien
attgcatctaatgtgacggagctctctcagtaa

SEQ ID NO: 593410 - DNA, 33 bp, Homo sapien
attgcatctaatgtgatggagctctctcagtaa

SEQ ID NO: 593411 - DNA, 33 bp, Homo sapien
tggtgaccttacaacacggtgagcgtgagccag

SEQ ID NO: 593412 - DNA, 33 bp, Homo sapien
tggtgaccttacaacatggtgagcgtgagccag

SEQ ID NO: 593413 - DNA, 33 bp, Homo sapien
ttacactcagataaccaaaacaaagatgtttca

SEQ ID NO: 593414 - DNA, 33 bp, Homo sapien
ttacactcagataaccgaaacaaagatgtttca

SEQ ID NO: 593415 - DNA, 33 bp, Homo sapien
gactgtgcccttctcacctgaatctgacagtga

SEQ ID NO: 593416 - DNA, 33 bp, Homo sapien
gactgtgcccttctcatctgaatctgacagtga

SEQ ID NO: 593417 - DNA, 33 bp, Homo sapien
gtagaatgacctatgaaggtttggggattcaca

SEQ ID NO: 593418 - DNA, 33 bp, Homo sapien
gtagaatgacctatgacggtttggggattcaca

SEQ ID NO: 593419 - DNA, 33 bp, Homo sapien
ttcctttaaggttgtaccaagacaggaagacat

SEQ ID NO: 593420 - DNA, 33 bp, Homo sapien
ttcctttaaggttgtatcaagacaggaagacat

SEQ ID NO: 593421 - DNA, 33 bp, Homo sapien
agcagaagaatactgaataacacagaaaaaaat

SEQ ID NO: 593422 - DNA, 33 bp, Homo sapien
agcagaagaatactgagtaacacagaaaaaaat

SEQ ID NO: 593423 - DNA, 33 bp, Homo sapien
agatcagacctgttgaggtaacacttctcctat

SEQ ID NO: 593424 - DNA, 33 bp, Homo sapien
agatcagacctgttgatgtaacacttctcctat

SEQ ID NO: 593425 - DNA, 33 bp, Homo sapien
caagtgagttttgataaggactttttactattg

SEQ ID NO: 593426 - DNA, 33 bp, Homo sapien
caagtgagttttgatagggactttttactattg

SEQ ID NO: 593427 - DNA, 33 bp, Homo sapien
gaatcatagaaacaaaatctagggcaatagtaa

SEQ ID NO: 593428 - DNA, 33 bp, Homo sapien
gaatcatagaaacaaagtctagggcaatagtaa

SEQ ID NO: 593429 - DNA, 33 bp, Homo sapien
aagggcaagatccctaacaagactgctcttatg

SEQ ID NO: 593430 - DNA, 33 bp, Homo sapien
aagggcaagatccctagcaagactgctcttatg

SEQ ID NO: 593431 - DNA, 33 bp, Homo sapien
ggtgttctgtgccagagagtggtgactcagaca

SEQ ID NO: 593432 - DNA, 33 bp, Homo sapien
ggtgttctgtgccagatagtggtgactcagaca

SEQ ID NO: 593433 - DNA, 33 bp, Homo sapien
tccttgctcatagcaacacagtaggcagaataa

SEQ ID NO: 593434 - DNA, 33 bp, Homo sapien
tccttgctcatagcaatacagtaggcagaataa

SEQ ID NO: 593435 - DNA, 33 bp, Homo sapien
gaggtctttgaagcaccattattctgcctactg

SEQ ID NO: 593436 - DNA, 33 bp, Homo sapien
gaggtctttgaagcacgattattctgcctactg

SEQ ID NO: 593437 - DNA, 33 bp, Homo sapien
ggagtggtgtctttagaaactctaatggccaat

SEQ ID NO: 593438 - DNA, 33 bp, Homo sapien
ggagtggtgtctttagcaactctaatggccaat

SEQ ID NO: 593439 - DNA, 33 bp, Homo sapien
ctccttttgttgtgcaagagggatccatatcgg

SEQ ID NO: 593440 - DNA, 33 bp, Homo sapien
ctccttttgttgtgcatgagggatccatatcgg

SEQ ID NO: 593441 - DNA, 33 bp, Homo sapien
gattttgtgctcagtacgagttatttggacata

SEQ ID NO: 593442 - DNA, 33 bp, Homo sapien
gattttgtgctcagtatgagttatttggacata

SEQ ID NO: 593443 - DNA, 33 bp, Homo sapien
gaaatgatcactaagaactgaagtgcagctccc

SEQ ID NO: 593444 - DNA, 33 bp, Homo sapien
gaaatgatcactaagagctgaagtgcagctccc

SEQ ID NO: 593445 - DNA, 33 bp, Homo sapien
gacatttgccttcttcaacattatttttaatgc

SEQ ID NO: 593446 - DNA, 33 bp, Homo sapien
gacatttgccttcttcgacattatttttaatgc

SEQ ID NO: 593447 - DNA, 33 bp, Homo sapien
cagacagtgtctagcaaccttccccacttcttt

SEQ ID NO: 593448 - DNA, 33 bp, Homo sapien
cagacagtgtctagcacccttccccacttcttt

SEQ ID NO: 593449 - DNA, 33 bp, Homo sapien
tactcagtgggtttcacgtactcctagttccat

SEQ ID NO: 593450 - DNA, 33 bp, Homo sapien
tactcagtgggtttcaggtactcctagttccat

SEQ ID NO: 593451 - DNA, 33 bp, Homo sapien
tactttgcttgcttataaaagagaggatccccc

SEQ ID NO: 593452 - DNA, 33 bp, Homo sapien
tactttgcttgcttattaaagagaggatccccc

SEQ ID NO: 593453 - DNA, 33 bp, Homo sapien
aggtaccattttggaaacttgaattagaggtac

SEQ ID NO: 593454 - DNA, 33 bp, Homo sapien
aggtaccattttggaagcttgaattagaggtac

SEQ ID NO: 593455 - DNA, 33 bp, Homo sapien
ccatagcctttattacactcatctggtattgct

SEQ ID NO: 593456 - DNA, 33 bp, Homo sapien
ccatagcctttattacgctcatctggtattgct

SEQ ID NO: 593457 - DNA, 33 bp, Homo sapien
tatattgtggtgagccggcttgccaatatagtt

SEQ ID NO: 593458 - DNA, 33 bp, Homo sapien
tatattgtggtgagcctgcttgccaatatagtt

SEQ ID NO: 593459 - DNA, 33 bp, Homo sapien
attaaagagatgaatacgttcaactacataatt

SEQ ID NO: 593460 - DNA, 33 bp, Homo sapien
attaaagagatgaataggttcaactacataatt

SEQ ID NO: 593461 - DNA, 33 bp, Homo sapien
taggggaattcagccgaaatctcaggaatgcca

SEQ ID NO: 593462 - DNA, 33 bp, Homo sapien
taggggaattcagccgcaatctcaggaatgcca

SEQ ID NO: 593463 - DNA, 33 bp, Homo sapien
atttgctttaccgccaaaatagattgtgaattc

SEQ ID NO: 593464 - DNA, 33 bp, Homo sapien
atttgctttaccgccagaatagattgtgaattc

SEQ ID NO: 593465 - DNA, 33 bp, Homo sapien
ctcctagatgatgtcacagggtattaacattct

SEQ ID NO: 593466 - DNA, 33 bp, Homo sapien
ctcctagatgatgtcatagggtattaacattct

SEQ ID NO: 593467 - DNA, 33 bp, Homo sapien
acagtttattcaacaactgtaagtccatttcaa

SEQ ID NO: 593468 - DNA, 33 bp, Homo sapien
acagtttattcaacaattgtaagtccatttcaa

SEQ ID NO: 593469 - DNA, 33 bp, Homo sapien
tattcataagacataaaatcgatggcacaaagt

SEQ ID NO: 593470 - DNA, 33 bp, Homo sapien
tattcataagacataagatcgatggcacaaagt

SEQ ID NO: 593471 - DNA, 33 bp, Homo sapien
gaaaacaaacaagaaacgctaaataatgttcgt

SEQ ID NO: 593472 - DNA, 33 bp, Homo sapien
gaaaacaaacaagaaaggctaaataatgttcgt

SEQ ID NO: 593473 - DNA, 33 bp, Homo sapien
taataaagagaaacacaaaagatgcaagttgga

SEQ ID NO: 593474 - DNA, 33 bp, Homo sapien
taataaagagaaacacgaaagatgcaagttgga

SEQ ID NO: 593475 - DNA, 33 bp, Homo sapien
attattacggggcatacatattgcattacatta

SEQ ID NO: 593476 - DNA, 33 bp, Homo sapien
attattacggggcatatatattgcattacatta

SEQ ID NO: 593477 - DNA, 33 bp, Homo sapien
tactgactgaatcttcacaggaactttagttga

SEQ ID NO: 593478 - DNA, 33 bp, Homo sapien
tactgactgaatcttctcaggaactttagttga

SEQ ID NO: 593479 - DNA, 33 bp, Homo sapien
gcactgactgggttaaagttggaaatggcattt

SEQ ID NO: 593480 - DNA, 33 bp, Homo sapien
gcactgactgggttaatgttggaaatggcattt

SEQ ID NO: 593481 - DNA, 33 bp, Homo sapien
cctgaaaataagctctaaatctgtacttacagc

SEQ ID NO: 593482 - DNA, 33 bp, Homo sapien
cctgaaaataagctctgaatctgtacttacagc

SEQ ID NO: 593483 - DNA, 33 bp, Homo sapien
ttgggagttaatggaaagctacagagaaaacat

SEQ ID NO: 593484 - DNA, 33 bp, Homo sapien
ttgggagttaatggaacgctacagagaaaacat

SEQ ID NO: 593485 - DNA, 33 bp, Homo sapien
aactttgtaattttgacgaacatctctattccc

SEQ ID NO: 593486 - DNA, 33 bp, Homo sapien
aactttgtaattttgatgaacatctctattccc

SEQ ID NO: 593487 - DNA, 33 bp, Homo sapien
gtagccaaggaataagactgagcattcaggact

SEQ ID NO: 593488 - DNA, 33 bp, Homo sapien
gtagccaaggaataagtctgagcattcaggact

SEQ ID NO: 593489 - DNA, 33 bp, Homo sapien
aaaagtgagagcaacaatgtataatccagccag

SEQ ID NO: 593490 - DNA, 33 bp, Homo sapien
aaaagtgagagcaacagtgtataatccagccag

SEQ ID NO: 593491 - DNA, 33 bp, Homo sapien
acctgaaacagaaagacgggctcttagatcatc

SEQ ID NO: 593492 - DNA, 33 bp, Homo sapien
acctgaaacagaaagatgggctcttagatcatc

SEQ ID NO: 593493 - DNA, 33 bp, Homo sapien
aagacacacaaagggaaacagaatgagacagaa

SEQ ID NO: 593494 - DNA, 33 bp, Homo sapien
aagacacacaaagggagacagaatgagacagaa

SEQ ID NO: 593495 - DNA, 33 bp, Homo sapien
gtcacggagctgagccacaaaaaacactcatag

SEQ ID NO: 593496 - DNA, 33 bp, Homo sapien
gtcacggagctgagccgcaaaaaacactcatag

SEQ ID NO: 593497 - DNA, 33 bp, Homo sapien
atatgaattgagttaacagcaattgaaagaaga

SEQ ID NO: 593498 - DNA, 33 bp, Homo sapien
atatgaattgagttaatagcaattgaaagaaga

SEQ ID NO: 593499 - DNA, 33 bp, Homo sapien
cttgtgctaccatttaacatcttattagcagag

SEQ ID NO: 593500 - DNA, 33 bp, Homo sapien
cttgtgctaccatttagcatcttattagcagag

SEQ ID NO: 593501 - DNA, 33 bp, Homo sapien
caaaaaagtcaagctgcagacagggcgttggag

SEQ ID NO: 593502 - DNA, 33 bp, Homo sapien
caaaaaagtcaagctggagacagggcgttggag

SEQ ID NO: 593503 - DNA, 33 bp, Homo sapien
atctcctgtatgaaaacaatctctcattttaat

SEQ ID NO: 593504 - DNA, 33 bp, Homo sapien
atctcctgtatgaaaagaatctctcattttaat

SEQ ID NO: 593505 - DNA, 33 bp, Homo sapien
aaacggaagcctagtcagaaaagtaacaattcc

SEQ ID NO: 593506 - DNA, 33 bp, Homo sapien
aaacggaagcctagtcggaaaagtaacaattcc

SEQ ID NO: 593507 - DNA, 33 bp, Homo sapien
aaaccaaaaacacaaaatctgtcaatgcaatac

SEQ ID NO: 593508 - DNA, 33 bp, Homo sapien
aaaccaaaaacacaaattctgtcaatgcaatac

SEQ ID NO: 593509 - DNA, 33 bp, Homo sapien
cttgattggctattacagatccatctaaaatgg

SEQ ID NO: 593510 - DNA, 33 bp, Homo sapien
cttgattggctattacggatccatctaaaatgg

SEQ ID NO: 593511 - DNA, 33 bp, Homo sapien
gaaaatatatgctttaaaggagtaccattttct

SEQ ID NO: 593512 - DNA, 33 bp, Homo sapien
gaaaatatatgctttacaggagtaccattttct

SEQ ID NO: 593513 - DNA, 33 bp, Homo sapien
ctaagaaactaaccaacacgacgtagaaagtaa

SEQ ID NO: 593514 - DNA, 33 bp, Homo sapien
ctaagaaactaaccaatacgacgtagaaagtaa

SEQ ID NO: 593515 - DNA, 33 bp, Homo sapien
tcagaagcaatgtccaaaactcagtgaaatttt

SEQ ID NO: 593516 - DNA, 33 bp, Homo sapien
tcagaagcaatgtccacaactcagtgaaatttt

SEQ ID NO: 593517 - DNA, 33 bp, Homo sapien
cccatatttaatgcacacagctccaaaggctgg

SEQ ID NO: 593518 - DNA, 33 bp, Homo sapien
cccatatttaatgcacgcagctccaaaggctgg

SEQ ID NO: 593519 - DNA, 33 bp, Homo sapien
ggtctcaatttggagccgatattagggaaccag

SEQ ID NO: 593520 - DNA, 33 bp, Homo sapien
ggtctcaatttggagctgatattagggaaccag

SEQ ID NO: 593521 - DNA, 33 bp, Homo sapien
aggtatactgccaaagaaaggtaatgatttctc

SEQ ID NO: 593522 - DNA, 33 bp, Homo sapien
aggtatactgccaaaggaaggtaatgatttctc

SEQ ID NO: 593523 - DNA, 33 bp, Homo sapien
attcctggatgatgaaagggaaggtgccagagc

SEQ ID NO: 593524 - DNA, 33 bp, Homo sapien
attcctggatgatgaaggggaaggtgccagagc

SEQ ID NO: 593525 - DNA, 33 bp, Homo sapien
actcagacctctcattcaactaataaaaagggt

SEQ ID NO: 593526 - DNA, 33 bp, Homo sapien
actcagacctctcattgaactaataaaaagggt

SEQ ID NO: 593527 - DNA, 33 bp, Homo sapien
cttatgttctgaaagcactgagcagaggtagac

SEQ ID NO: 593528 - DNA, 33 bp, Homo sapien
cttatgttctgaaagcgctgagcagaggtagac

SEQ ID NO: 593529 - DNA, 33 bp, Homo sapien
ctggaaattgccctacaagatcatctgggcatc

SEQ ID NO: 593530 - DNA, 33 bp, Homo sapien
ctggaaattgccctacgagatcatctgggcatc

SEQ ID NO: 593531 - DNA, 33 bp, Homo sapien
tactgtacagtttttaagactatgtatttggga

SEQ ID NO: 593532 - DNA, 33 bp, Homo sapien
tactgtacagtttttatgactatgtatttggga

SEQ ID NO: 593533 - DNA, 33 bp, Homo sapien
tttgaaatacatctataactcagtatattagct

SEQ ID NO: 593534 - DNA, 33 bp, Homo sapien
tttgaaatacatctatgactcagtatattagct

SEQ ID NO: 593535 - DNA, 33 bp, Homo sapien
gtctagattgcaaataacctcttttgcctattt

SEQ ID NO: 593536 - DNA, 33 bp, Homo sapien
gtctagattgcaaatagcctcttttgcctattt

SEQ ID NO: 593537 - DNA, 33 bp, Homo sapien
caaggcataaaagtccagagggcatagaaggta

SEQ ID NO: 593538 - DNA, 33 bp, Homo sapien
caaggcataaaagtccggagggcatagaaggta

SEQ ID NO: 593539 - DNA, 33 bp, Homo sapien
aaagtacctaaaatgcaaagttttcatacacta

SEQ ID NO: 593540 - DNA, 33 bp, Homo sapien
aaagtacctaaaatgcgaagttttcatacacta

SEQ ID NO: 593541 - DNA, 33 bp, Homo sapien
tattttgttggtgccacataataacattgaaaa

SEQ ID NO: 593542 - DNA, 33 bp, Homo sapien
tattttgttggtgccatataataacattgaaaa

SEQ ID NO: 593543 - DNA, 33 bp, Homo sapien
ttttggaaatgagtaaactaggacccagagagg

SEQ ID NO: 593544 - DNA, 33 bp, Homo sapien
ttttggaaatgagtaagctaggacccagagagg

SEQ ID NO: 593545 - DNA, 33 bp, Homo sapien
ctcacacatggtcaacactctatgcttattcgg

SEQ ID NO: 593546 - DNA, 33 bp, Homo sapien
ctcacacatggtcaacgctctatgcttattcgg

SEQ ID NO: 593547 - DNA, 33 bp, Homo sapien
gggtatattgaaagaaaccgagcatatttgctg

SEQ ID NO: 593548 - DNA, 33 bp, Homo sapien
gggtatattgaaagaatccgagcatatttgctg

SEQ ID NO: 593549 - DNA, 33 bp, Homo sapien
taagggagaggagaataaagtagggccaatctg

SEQ ID NO: 593550 - DNA, 33 bp, Homo sapien
taagggagaggagaatcaagtagggccaatctg

SEQ ID NO: 593551 - DNA, 33 bp, Homo sapien
ctggccattgtaaaccacacactaaacacattt

SEQ ID NO: 593552 - DNA, 33 bp, Homo sapien
ctggccattgtaaaccgcacactaaacacattt

SEQ ID NO: 593553 - DNA, 33 bp, Homo sapien
ggataagtaaagaccacgaacaaactaaaatgt

SEQ ID NO: 593554 - DNA, 33 bp, Homo sapien
ggataagtaaagaccatgaacaaactaaaatgt

SEQ ID NO: 593555 - DNA, 33 bp, Homo sapien
gcaactgtttccagaacacatggtggactgcct

SEQ ID NO: 593556 - DNA, 33 bp, Homo sapien
gcaactgtttccagaatacatggtggactgcct

SEQ ID NO: 593557 - DNA, 33 bp, Homo sapien
aatgctccaccagaaaaagtagttattgagccg

SEQ ID NO: 593558 - DNA, 33 bp, Homo sapien
aatgctccaccagaaagagtagttattgagccg

SEQ ID NO: 593559 - DNA, 33 bp, Homo sapien
tccttctcttatcgaacggtatgttctagcatt

SEQ ID NO: 593560 - DNA, 33 bp, Homo sapien
tccttctcttatcgaatggtatgttctagcatt

SEQ ID NO: 593561 - DNA, 33 bp, Homo sapien
tgagagcatttaacgccctggacttctgacatc

SEQ ID NO: 593562 - DNA, 33 bp, Homo sapien
tgagagcatttaacgctctggacttctgacatc

SEQ ID NO: 593563 - DNA, 33 bp, Homo sapien
tggaagaactgatggaagaaggggtgattggac

SEQ ID NO: 593564 - DNA, 33 bp, Homo sapien
tggaagaactgatggaggaaggggtgattggac

SEQ ID NO: 593565 - DNA, 33 bp, Homo sapien
aggtgcaaaggaggccaagaagcatttcatgtg

SEQ ID NO: 593566 - DNA, 33 bp, Homo sapien
aggtgcaaaggaggccgagaagcatttcatgtg

SEQ ID NO: 593567 - DNA, 33 bp, Homo sapien
atagactgcggatgccaaccccttagataatag

SEQ ID NO: 593568 - DNA, 33 bp, Homo sapien
atagactgcggatgccgaccccttagataatag

SEQ ID NO: 593569 - DNA, 33 bp, Homo sapien
ggctatgccagaaacgcccttgtatttctatag

SEQ ID NO: 593570 - DNA, 33 bp, Homo sapien
ggctatgccagaaacgtccttgtatttctatag

SEQ ID NO: 593571 - DNA, 33 bp, Homo sapien
ctgtcagcagtaaaaacgaatatcctagcagtg

SEQ ID NO: 593572 - DNA, 33 bp, Homo sapien
ctgtcagcagtaaaaatgaatatcctagcagtg

SEQ ID NO: 593573 - DNA, 33 bp, Homo sapien
atatgtcacatgaagacaggtttcaatacagaa

SEQ ID NO: 593574 - DNA, 33 bp, Homo sapien
atatgtcacatgaagataggtttcaatacagaa

SEQ ID NO: 593575 - DNA, 33 bp, Homo sapien
acgggtcctgtctgccactccgggttgttatgg

SEQ ID NO: 593576 - DNA, 33 bp, Homo sapien
acgggtcctgtctgcctctccgggttgttatgg

SEQ ID NO: 593577 - DNA, 33 bp, Homo sapien
ctcactgtttattttacatggaagccccctatg

SEQ ID NO: 593578 - DNA, 33 bp, Homo sapien
ctcactgtttattttatatggaagccccctatg

SEQ ID NO: 593579 - DNA, 33 bp, Homo sapien
tcctcatgatcttgcacgacttacaaattagca

SEQ ID NO: 593580 - DNA, 33 bp, Homo sapien
tcctcatgatcttgcaggacttacaaattagca

SEQ ID NO: 593581 - DNA, 33 bp, Homo sapien
ccaatcgtactgatcaaggtgaatagcctttgt

SEQ ID NO: 593582 - DNA, 33 bp, Homo sapien
ccaatcgtactgatcacggtgaatagcctttgt

SEQ ID NO: 593583 - DNA, 33 bp, Homo sapien
ccagcaatggcccatcaagtttcccattgcatc

SEQ ID NO: 593584 - DNA, 33 bp, Homo sapien
ccagcaatggcccatcgagtttcccattgcatc

SEQ ID NO: 593585 - DNA, 33 bp, Homo sapien
gaagatactatccagccaaaactaaaaccaaaa

SEQ ID NO: 593586 - DNA, 33 bp, Homo sapien
gaagatactatccagctaaaactaaaaccaaaa

SEQ ID NO: 593587 - DNA, 33 bp, Homo sapien
acccagctgcctgtcacggtttgagtctctgta

SEQ ID NO: 593588 - DNA, 33 bp, Homo sapien
acccagctgcctgtcatggtttgagtctctgta

SEQ ID NO: 593589 - DNA, 33 bp, Homo sapien
tggatgccaactgtcaactctgttcctgtcttc

SEQ ID NO: 593590 - DNA, 33 bp, Homo sapien
tggatgccaactgtcatctctgttcctgtcttc

SEQ ID NO: 593591 - DNA, 33 bp, Homo sapien
gctggaagctcaagaaggatttctatttttatg

SEQ ID NO: 593592 - DNA, 33 bp, Homo sapien
gctggaagctcaagaatgatttctatttttatg

SEQ ID NO: 593593 - DNA, 33 bp, Homo sapien
agctcacacattcactcaagttcttaagatact

SEQ ID NO: 593594 - DNA, 33 bp, Homo sapien
agctcacacattcactgaagttcttaagatact

SEQ ID NO: 593595 - DNA, 33 bp, Homo sapien
tcttgatggaaaccaaattactctgaaaagtta

SEQ ID NO: 593596 - DNA, 33 bp, Homo sapien
tcttgatggaaaccaagttactctgaaaagtta

SEQ ID NO: 593597 - DNA, 33 bp, Homo sapien
ttgctcctaataaacacaagctaatagtgcaaa

SEQ ID NO: 593598 - DNA, 33 bp, Homo sapien
ttgctcctaataaacagaagctaatagtgcaaa

SEQ ID NO: 593599 - DNA, 33 bp, Homo sapien
ttcttttatgctctcacggctgcttaaaaggtc

SEQ ID NO: 593600 - DNA, 33 bp, Homo sapien
ttcttttatgctctcatggctgcttaaaaggtc

SEQ ID NO: 593601 - DNA, 33 bp, Homo sapien
ctgtaaagagaataaacgctacctcattgtctt

SEQ ID NO: 593602 - DNA, 33 bp, Homo sapien
ctgtaaagagaataaatgctacctcattgtctt

SEQ ID NO: 593603 - DNA, 33 bp, Homo sapien
aaattccaaggttagaaaatgtcaaaaggaatc

SEQ ID NO: 593604 - DNA, 33 bp, Homo sapien
aaattccaaggttagataatgtcaaaaggaatc

SEQ ID NO: 593605 - DNA, 33 bp, Homo sapien
tgagactgtagagagacgcggcacctcagatac

SEQ ID NO: 593606 - DNA, 33 bp, Homo sapien
tgagactgtagagagatgcggcacctcagatac

SEQ ID NO: 593607 - DNA, 33 bp, Homo sapien
cagatacacctaaatgaagcaaggtgaccaact

SEQ ID NO: 593608 - DNA, 33 bp, Homo sapien
cagatacacctaaatggagcaaggtgaccaact

SEQ ID NO: 593609 - DNA, 33 bp, Homo sapien
actgactaagagttcaacttggcacttactgtc

SEQ ID NO: 593610 - DNA, 33 bp, Homo sapien
actgactaagagttcatcttggcacttactgtc

SEQ ID NO: 593611 - DNA, 33 bp, Homo sapien
tgatctttaagtaagtaaacgctaaaccagctc

SEQ ID NO: 593612 - DNA, 33 bp, Homo sapien
tgatctttaagtaagtgaacgctaaaccagctc

SEQ ID NO: 593613 - DNA, 33 bp, Homo sapien
tctcagataaaatatcactgtgtactactattg

SEQ ID NO: 593614 - DNA, 33 bp, Homo sapien
tctcagataaaatatcgctgtgtactactattg

SEQ ID NO: 593615 - DNA, 33 bp, Homo sapien
acaaagttccctgatacgtacatttgtgaccct

SEQ ID NO: 593616 - DNA, 33 bp, Homo sapien
acaaagttccctgatatgtacatttgtgaccct

SEQ ID NO: 593617 - DNA, 33 bp, Homo sapien
caggccatgacaggaacagaggccatcagacat

SEQ ID NO: 593618 - DNA, 33 bp, Homo sapien
caggccatgacaggaagagaggccatcagacat

SEQ ID NO: 593619 - DNA, 33 bp, Homo sapien
ttcaactggaaactcaagtagtctagaaatagg

SEQ ID NO: 593620 - DNA, 33 bp, Homo sapien
ttcaactggaaactcacgtagtctagaaatagg

SEQ ID NO: 593621 - DNA, 33 bp, Homo sapien
tgtccttcactacgtacgccaggatgaagtgaa

SEQ ID NO: 593622 - DNA, 33 bp, Homo sapien
tgtccttcactacgtatgccaggatgaagtgaa

SEQ ID NO: 593623 - DNA, 33 bp, Homo sapien
ctactaacacatcatacagaagcagcagaaata

SEQ ID NO: 593624 - DNA, 33 bp, Homo sapien
ctactaacacatcatagagaagcagcagaaata

SEQ ID NO: 593625 - DNA, 33 bp, Homo sapien
agggtttaagtctagacgtaagccaaactctgt

SEQ ID NO: 593626 - DNA, 33 bp, Homo sapien
agggtttaagtctagatgtaagccaaactctgt

SEQ ID NO: 593627 - DNA, 33 bp, Homo sapien
atttagcttttcacaccgctactcaccacccaa

SEQ ID NO: 593628 - DNA, 33 bp, Homo sapien
atttagcttttcacactgctactcaccacccaa

SEQ ID NO: 593629 - DNA, 33 bp, Homo sapien
gatttatcactcaggaactttgtagctgcgatg

SEQ ID NO: 593630 - DNA, 33 bp, Homo sapien
gatttatcactcaggagctttgtagctgcgatg

SEQ ID NO: 593631 - DNA, 33 bp, Homo sapien
gaaaaagattactgacaaagttaagatcgtcgc

SEQ ID NO: 593632 - DNA, 33 bp, Homo sapien
gaaaaagattactgaccaagttaagatcgtcgc

SEQ ID NO: 593633 - DNA, 33 bp, Homo sapien
ctcaccatgataaccaaatggtttagacagggc

SEQ ID NO: 593634 - DNA, 33 bp, Homo sapien
ctcaccatgataaccagatggtttagacagggc

SEQ ID NO: 593635 - DNA, 33 bp, Homo sapien
tctggcttcttccttcacattcaagtcttgact

SEQ ID NO: 593636 - DNA, 33 bp, Homo sapien
tctggcttcttccttcgcattcaagtcttgact

SEQ ID NO: 593637 - DNA, 33 bp, Homo sapien
tctacagatgttttccactaaatctcatgttcc

SEQ ID NO: 593638 - DNA, 33 bp, Homo sapien
tctacagatgttttccgctaaatctcatgttcc

SEQ ID NO: 593639 - DNA, 33 bp, Homo sapien
ttgaatactcacagcaatcttgagacagtcgtt

SEQ ID NO: 593640 - DNA, 33 bp, Homo sapien
ttgaatactcacagcagtcttgagacagtcgtt

SEQ ID NO: 593641 - DNA, 33 bp, Homo sapien
tacctacctgtccttccatcagggagcacatag

SEQ ID NO: 593642 - DNA, 33 bp, Homo sapien
tacctacctgtccttctatcagggagcacatag

SEQ ID NO: 593643 - DNA, 33 bp, Homo sapien
taggctctgcctctaacctgcataataagattc

SEQ ID NO: 593644 - DNA, 33 bp, Homo sapien
taggctctgcctctaatctgcataataagattc

SEQ ID NO: 593645 - DNA, 33 bp, Homo sapien
atgattaggtgacggccaccctgatgcctggcc

SEQ ID NO: 593646 - DNA, 33 bp, Homo sapien
atgattaggtgacggctaccctgatgcctggcc

SEQ ID NO: 593647 - DNA, 33 bp, Homo sapien
acttgcttgaccaagacaatctggtggatgtga

SEQ ID NO: 593648 - DNA, 33 bp, Homo sapien
acttgcttgaccaagagaatctggtggatgtga

SEQ ID NO: 593649 - DNA, 33 bp, Homo sapien
ttaagccacttgaccacgatgtgcagttttcag

SEQ ID NO: 593650 - DNA, 33 bp, Homo sapien
ttaagccacttgaccatgatgtgcagttttcag

SEQ ID NO: 593651 - DNA, 33 bp, Homo sapien
atcttgtgtgcctggaaacattctgaaaggggc

SEQ ID NO: 593652 - DNA, 33 bp, Homo sapien
atcttgtgtgcctggagacattctgaaaggggc

SEQ ID NO: 593653 - DNA, 33 bp, Homo sapien
tagaattaaagggttcaaagaaatgtataagga

SEQ ID NO: 593654 - DNA, 33 bp, Homo sapien
tagaattaaagggttcgaagaaatgtataagga

SEQ ID NO: 593655 - DNA, 33 bp, Homo sapien
gattttattctcacctcacctctgtatgaactc

SEQ ID NO: 593656 - DNA, 33 bp, Homo sapien
gattttattctcaccttacctctgtatgaactc

SEQ ID NO: 593657 - DNA, 33 bp, Homo sapien
ttatctctgtcccaaactaggaagttatacagc

SEQ ID NO: 593658 - DNA, 33 bp, Homo sapien
ttatctctgtcccaaagtaggaagttatacagc

SEQ ID NO: 593659 - DNA, 33 bp, Homo sapien
aagccaggtataggcaaattctatcagttggct

SEQ ID NO: 593660 - DNA, 33 bp, Homo sapien
aagccaggtataggcagattctatcagttggct

SEQ ID NO: 593661 - DNA, 33 bp, Homo sapien
acccacattctgaatcccagtcttggaccaact

SEQ ID NO: 593662 - DNA, 33 bp, Homo sapien
acccacattctgaatctcagtcttggaccaact

SEQ ID NO: 593663 - DNA, 33 bp, Homo sapien
aaaacttgttctcacaatgataaatttgcatag

SEQ ID NO: 593664 - DNA, 33 bp, Homo sapien
aaaacttgttctcacagtgataaatttgcatag

SEQ ID NO: 593665 - DNA, 33 bp, Homo sapien
atattccttctagaaccacataccttcaaacct

SEQ ID NO: 593666 - DNA, 33 bp, Homo sapien
atattccttctagaactacataccttcaaacct

SEQ ID NO: 593667 - DNA, 33 bp, Homo sapien
gctgttccatcactcaatacaattcttctctgc

SEQ ID NO: 593668 - DNA, 33 bp, Homo sapien
gctgttccatcactcagtacaattcttctctgc

SEQ ID NO: 593669 - DNA, 33 bp, Homo sapien
atatactttagcaacacattatgccacattgtt

SEQ ID NO: 593670 - DNA, 33 bp, Homo sapien
atatactttagcaacagattatgccacattgtt

SEQ ID NO: 593671 - DNA, 33 bp, Homo sapien
agtgccttctgcaaggaaacttggagagagaga

SEQ ID NO: 593672 - DNA, 33 bp, Homo sapien
agtgccttctgcaaggtaacttggagagagaga

SEQ ID NO: 593673 - DNA, 33 bp, Homo sapien
aacctcttcatctggacaaggctttatttcatc

SEQ ID NO: 593674 - DNA, 33 bp, Homo sapien
aacctcttcatctggagaaggctttatttcatc

SEQ ID NO: 593675 - DNA, 33 bp, Homo sapien
tccagattttgaactgaacagctggacaacctt

SEQ ID NO: 593676 - DNA, 33 bp, Homo sapien
tccagattttgaactggacagctggacaacctt

SEQ ID NO: 593677 - DNA, 33 bp, Homo sapien
acggccggcatctgcacctaccaagtttccatc

SEQ ID NO: 593678 - DNA, 33 bp, Homo sapien
acggccggcatctgcagctaccaagtttccatc

SEQ ID NO: 593679 - DNA, 33 bp, Homo sapien
tacctagtacaaatacacatttccagacgtatc

SEQ ID NO: 593680 - DNA, 33 bp, Homo sapien
tacctagtacaaatacgcatttccagacgtatc

SEQ ID NO: 593681 - DNA, 33 bp, Homo sapien
aggcttcaacacacacaaggtcatgtaaggcaa

SEQ ID NO: 593682 - DNA, 33 bp, Homo sapien
aggcttcaacacacacgaggtcatgtaaggcaa

SEQ ID NO: 593683 - DNA, 33 bp, Homo sapien
aaaatgctctatttccagaagcctccaggccaa

SEQ ID NO: 593684 - DNA, 33 bp, Homo sapien
aaaatgctctatttccggaagcctccaggccaa

SEQ ID NO: 593685 - DNA, 33 bp, Homo sapien
tatggccaaaataggacgctcctgtatgtctgc

SEQ ID NO: 593686 - DNA, 33 bp, Homo sapien
tatggccaaaataggatgctcctgtatgtctgc

SEQ ID NO: 593687 - DNA, 33 bp, Homo sapien
gagagccacaagaccaatcacttccttccctgc

SEQ ID NO: 593688 - DNA, 33 bp, Homo sapien
gagagccacaagaccactcacttccttccctgc

SEQ ID NO: 593689 - DNA, 33 bp, Homo sapien
tgagggatggctcctcaaaggaaaacccaagtg

SEQ ID NO: 593690 - DNA, 33 bp, Homo sapien
tgagggatggctcctcgaaggaaaacccaagtg

SEQ ID NO: 593691 - DNA, 33 bp, Homo sapien
ccagggactgaggtcacatttgtcccaagttag

SEQ ID NO: 593692 - DNA, 33 bp, Homo sapien
ccagggactgaggtcagatttgtcccaagttag

SEQ ID NO: 593693 - DNA, 33 bp, Homo sapien
acaatgacaggcagcaccagttgtgtttgtgca

SEQ ID NO: 593694 - DNA, 33 bp, Homo sapien
acaatgacaggcagcatcagttgtgtttgtgca

SEQ ID NO: 593695 - DNA, 33 bp, Homo sapien
ggaccagcagattcagcaacacctgggagctca

SEQ ID NO: 593696 - DNA, 33 bp, Homo sapien
ggaccagcagattcaggaacacctgggagctca

SEQ ID NO: 593697 - DNA, 33 bp, Homo sapien
cccacaccaagctactcaatcagaatctgcttt

SEQ ID NO: 593698 - DNA, 33 bp, Homo sapien
cccacaccaagctactgaatcagaatctgcttt

SEQ ID NO: 593699 - DNA, 33 bp, Homo sapien
agctcactgtaatacaatctattaattcaacag

SEQ ID NO: 593700 - DNA, 33 bp, Homo sapien
agctcactgtaatacagtctattaattcaacag

SEQ ID NO: 593701 - DNA, 33 bp, Homo sapien
ggtggttccaacaataaaatcatttcatgaaaa

SEQ ID NO: 593702 - DNA, 33 bp, Homo sapien
ggtggttccaacaatagaatcatttcatgaaaa

SEQ ID NO: 593703 - DNA, 33 bp, Homo sapien
tgaagatgcccaataaaccgtggcacccgaaag

SEQ ID NO: 593704 - DNA, 33 bp, Homo sapien
tgaagatgcccaataagccgtggcacccgaaag

SEQ ID NO: 593705 - DNA, 33 bp, Homo sapien
aagttattctgagtcaaaaattatatttctcaa

SEQ ID NO: 593706 - DNA, 33 bp, Homo sapien
aagttattctgagtcacaaattatatttctcaa

SEQ ID NO: 593707 - DNA, 33 bp, Homo sapien
ccttaatggcagaatacaaaatgaactccattt

SEQ ID NO: 593708 - DNA, 33 bp, Homo sapien
ccttaatggcagaatataaaatgaactccattt

SEQ ID NO: 593709 - DNA, 33 bp, Homo sapien
gcagccttgatcttcactctacatccaactact

SEQ ID NO: 593710 - DNA, 33 bp, Homo sapien
gcagccttgatcttcattctacatccaactact

SEQ ID NO: 593711 - DNA, 33 bp, Homo sapien
agagagaacggggatcagaagaaaactgcacac

SEQ ID NO: 593712 - DNA, 33 bp, Homo sapien
agagagaacggggatcggaagaaaactgcacac

SEQ ID NO: 593713 - DNA, 33 bp, Homo sapien
aggaggagctgggttcaagcgactgagcaagga

SEQ ID NO: 593714 - DNA, 33 bp, Homo sapien
aggaggagctgggttctagcgactgagcaagga

SEQ ID NO: 593715 - DNA, 33 bp, Homo sapien
aggatagaacctccaggacgatgtagaatagaa

SEQ ID NO: 593716 - DNA, 33 bp, Homo sapien
aggatagaacctccagtacgatgtagaatagaa

SEQ ID NO: 593717 - DNA, 33 bp, Homo sapien
atgggcagtcatattacccaaatcaaatttctc

SEQ ID NO: 593718 - DNA, 33 bp, Homo sapien
atgggcagtcatattatccaaatcaaatttctc

SEQ ID NO: 593719 - DNA, 33 bp, Homo sapien
ctggattcatagtccacagggtttcagatgtca

SEQ ID NO: 593720 - DNA, 33 bp, Homo sapien
ctggattcatagtccatagggtttcagatgtca

SEQ ID NO: 593721 - DNA, 33 bp, Homo sapien
attaattttcaggataactttctgaggccagac

SEQ ID NO: 593722 - DNA, 33 bp, Homo sapien
attaattttcaggatagctttctgaggccagac

SEQ ID NO: 593723 - DNA, 33 bp, Homo sapien
ataattcaaattttctcaaaatgctgtgagcag

SEQ ID NO: 593724 - DNA, 33 bp, Homo sapien
ataattcaaattttctgaaaatgctgtgagcag

SEQ ID NO: 593725 - DNA, 33 bp, Homo sapien
aataaccctcagtgaacctagtaaagagagcaa

SEQ ID NO: 593726 - DNA, 33 bp, Homo sapien
aataaccctcagtgaagctagtaaagagagcaa

SEQ ID NO: 593727 - DNA, 33 bp, Homo sapien
actgagggttattatgcaatgaaatttgccaca

SEQ ID NO: 593728 - DNA, 33 bp, Homo sapien
actgagggttattatggaatgaaatttgccaca

SEQ ID NO: 593729 - DNA, 33 bp, Homo sapien
atttacttgtagaagcaaaaagagaaacaattt

SEQ ID NO: 593730 - DNA, 33 bp, Homo sapien
atttacttgtagaagcgaaaagagaaacaattt

SEQ ID NO: 593731 - DNA, 33 bp, Homo sapien
accttccagagcagtaagttaagccaggcctgg

SEQ ID NO: 593732 - DNA, 33 bp, Homo sapien
accttccagagcagtaggttaagccaggcctgg

SEQ ID NO: 593733 - DNA, 33 bp, Homo sapien
acttccgtggctccaccaggcattactctagtg

SEQ ID NO: 593734 - DNA, 33 bp, Homo sapien
acttccgtggctccactaggcattactctagtg

SEQ ID NO: 593735 - DNA, 33 bp, Homo sapien
tataagaacacacttccaagattttagctactt

SEQ ID NO: 593736 - DNA, 33 bp, Homo sapien
tataagaacacacttcgaagattttagctactt

SEQ ID NO: 593737 - DNA, 33 bp, Homo sapien
tgtggctgtgacttaaagatctgattactgaac

SEQ ID NO: 593738 - DNA, 33 bp, Homo sapien
tgtggctgtgacttaaggatctgattactgaac

SEQ ID NO: 593739 - DNA, 33 bp, Homo sapien
atgactgttctgaagaagtatttaggaatgggt

SEQ ID NO: 593740 - DNA, 33 bp, Homo sapien
atgactgttctgaagacgtatttaggaatgggt

SEQ ID NO: 593741 - DNA, 33 bp, Homo sapien
ttggagccagcaccacagatatgatgatcactt

SEQ ID NO: 593742 - DNA, 33 bp, Homo sapien
ttggagccagcaccacggatatgatgatcactt

SEQ ID NO: 593743 - DNA, 33 bp, Homo sapien
ccactgtttgctttagaaaaagagcaagagtta

SEQ ID NO: 593744 - DNA, 33 bp, Homo sapien
ccactgtttgctttaggaaaagagcaagagtta

SEQ ID NO: 593745 - DNA, 33 bp, Homo sapien
tcacatttcaaatctcaaagaagacttctgtat

SEQ ID NO: 593746 - DNA, 33 bp, Homo sapien
tcacatttcaaatctcgaagaagacttctgtat

SEQ ID NO: 593747 - DNA, 33 bp, Homo sapien
gagcttagcatcattaccaacttctgttacttc

SEQ ID NO: 593748 - DNA, 33 bp, Homo sapien
gagcttagcatcattatcaacttctgttacttc

SEQ ID NO: 593749 - DNA, 33 bp, Homo sapien
gcaataatgtggagaacaaagctagtcccagaa

SEQ ID NO: 593750 - DNA, 33 bp, Homo sapien
gcaataatgtggagaagaaagctagtcccagaa

SEQ ID NO: 593751 - DNA, 33 bp, Homo sapien
caaagcttcacactataataaaaccatgtggct

SEQ ID NO: 593752 - DNA, 33 bp, Homo sapien
caaagcttcacactatgataaaaccatgtggct

SEQ ID NO: 593753 - DNA, 33 bp, Homo sapien
tcactgagaatcaacaagatcagtccccatagt

SEQ ID NO: 593754 - DNA, 33 bp, Homo sapien
tcactgagaatcaacacgatcagtccccatagt

SEQ ID NO: 593755 - DNA, 33 bp, Homo sapien
tcataaaagcaacaccagaactcactcactctg

SEQ ID NO: 593756 - DNA, 33 bp, Homo sapien
tcataaaagcaacaccggaactcactcactctg

SEQ ID NO: 593757 - DNA, 33 bp, Homo sapien
ctgattttccctctgacgccatagaaaggcatt

SEQ ID NO: 593758 - DNA, 33 bp, Homo sapien
ctgattttccctctgatgccatagaaaggcatt

SEQ ID NO: 593759 - DNA, 33 bp, Homo sapien
gagctaagaaaagaggaaaaatcattatggcaa

SEQ ID NO: 593760 - DNA, 33 bp, Homo sapien
gagctaagaaaagagggaaaatcattatggcaa

SEQ ID NO: 593761 - DNA, 33 bp, Homo sapien
tttccatttatttagaagttaccttggaaattt

SEQ ID NO: 593762 - DNA, 33 bp, Homo sapien
tttccatttatttagatgttaccttggaaattt

SEQ ID NO: 593763 - DNA, 33 bp, Homo sapien
atcctaatcttgtacacatctttcagttaccac

SEQ ID NO: 593764 - DNA, 33 bp, Homo sapien
atcctaatcttgtacatatctttcagttaccac

SEQ ID NO: 593765 - DNA, 33 bp, Homo sapien
cttcagtttaacgagacacccaggagacttgaa

SEQ ID NO: 593766 - DNA, 33 bp, Homo sapien
cttcagtttaacgagatacccaggagacttgaa

SEQ ID NO: 593767 - DNA, 33 bp, Homo sapien
aatatactcttagtaaaggcaaccattataagt

SEQ ID NO: 593768 - DNA, 33 bp, Homo sapien
aatatactcttagtaacggcaaccattataagt

SEQ ID NO: 593769 - DNA, 33 bp, Homo sapien
atcagaattcgaggtcagacccacaaaatacag

SEQ ID NO: 593770 - DNA, 33 bp, Homo sapien
atcagaattcgaggtcggacccacaaaatacag

SEQ ID NO: 593771 - DNA, 33 bp, Homo sapien
cagaattctaccgttacgagtcatgaaatcagt

SEQ ID NO: 593772 - DNA, 33 bp, Homo sapien
cagaattctaccgttaggagtcatgaaatcagt

SEQ ID NO: 593773 - DNA, 33 bp, Homo sapien
tgttatgagtaaagcacgcctgttcttagtcaa

SEQ ID NO: 593774 - DNA, 33 bp, Homo sapien
tgttatgagtaaagcatgcctgttcttagtcaa

SEQ ID NO: 593775 - DNA, 33 bp, Homo sapien
acttattgcctgtccaaaattgcctggactgat

SEQ ID NO: 593776 - DNA, 33 bp, Homo sapien
acttattgcctgtccacaattgcctggactgat

SEQ ID NO: 593777 - DNA, 33 bp, Homo sapien; identical to SEQ ID NO: 593775

SEQ ID NO: 593778 - DNA, 33 bp, Homo sapien; identical to SEQ ID NO: 593776

SEQ ID NO: 593779 - DNA, 33 bp, Homo sapien
tcttagtaaagtgaacaattgcatcaacaagga

SEQ ID NO: 593780 - DNA, 33 bp, Homo sapien
tcttagtaaagtgaaccattgcatcaacaagga

SEQ ID NO: 593781 - DNA, 33 bp, Homo sapien
ttttgtgctcacattacgtgttggactgactgt

SEQ ID NO: 593782 - DNA, 33 bp, Homo sapien
ttttgtgctcacattatgtgttggactgactgt

SEQ ID NO: 593783 - DNA, 33 bp, Homo sapien
attagcgctacatgtacactgacatgtgtattc

SEQ ID NO: 593784 - DNA, 33 bp, Homo sapien
attagcgctacatgtatactgacatgtgtattc

SEQ ID NO: 593785 - DNA, 33 bp, Homo sapien
cctacttctgggcctaagtacacatctcctcat

SEQ ID NO: 593786 - DNA, 33 bp, Homo sapien
cctacttctgggcctaggtacacatctcctcat

SEQ ID NO: 593787 - DNA, 33 bp, Homo sapien
caagtagaacagagaactgataaaagtgcagct

SEQ ID NO: 593788 - DNA, 33 bp, Homo sapien
caagtagaacagagaagtgataaaagtgcagct

SEQ ID NO: 593789 - DNA, 33 bp, Homo sapien
gagttttgtaaagggacgttgagtaggcagctg

SEQ ID NO: 593790 - DNA, 33 bp, Homo sapien
gagttttgtaaagggatgttgagtaggcagctg

SEQ ID NO: 593791 - DNA, 33 bp, Homo sapien
ccctccaaatttcagcagacaacactaggtgac

SEQ ID NO: 593792 - DNA, 33 bp, Homo sapien
ccctccaaatttcagcggacaacactaggtgac

SEQ ID NO: 593793 - DNA, 33 bp, Homo sapien
ggtgacttcattagaaaagtattccaaccagca

SEQ ID NO: 593794 - DNA, 33 bp, Homo sapien
ggtgacttcattagaacagtattccaaccagca

SEQ ID NO: 593795 - DNA, 33 bp, Homo sapien
tgcatacctgtgccacactatggtgatattctt

SEQ ID NO: 593796 - DNA, 33 bp, Homo sapien
tgcatacctgtgccacgctatggtgatattctt

SEQ ID NO: 593797 - DNA, 33 bp, Homo sapien
aagatgttgaactggaacattctttgtcgtggg

SEQ ID NO: 593798 - DNA, 33 bp, Homo sapien
aagatgttgaactggatcattctttgtcgtggg

SEQ ID NO: 593799 - DNA, 33 bp, Homo sapien
caggctcagagaactccaacccttgcttctaga

SEQ ID NO: 593800 - DNA, 33 bp, Homo sapien
caggctcagagaactctaacccttgcttctaga

SEQ ID NO: 593801 - DNA, 33 bp, Homo sapien
ctgtctcagcccgttcgagctcatctcttaagc

SEQ ID NO: 593802 - DNA, 33 bp, Homo sapien
ctgtctcagcccgttctagctcatctcttaagc

SEQ ID NO: 593803 - DNA, 33 bp, Homo sapien
atacatctgcattttaacagtagacaacaatat

SEQ ID NO: 593804 - DNA, 33 bp, Homo sapien
atacatctgcattttagcagtagacaacaatat

SEQ ID NO: 593805 - DNA, 33 bp, Homo sapien
acagctcacaaaacacaggagaagcaaatggtg

SEQ ID NO: 593806 - DNA, 33 bp, Homo sapien
acagctcacaaaacacgggagaagcaaatggtg

SEQ ID NO: 593807 - DNA, 33 bp, Homo sapien
caggaaggtatcctcacggcctggcccaagtac

SEQ ID NO: 593808 - DNA, 33 bp, Homo sapien
caggaaggtatcctcatggcctggcccaagtac

SEQ ID NO: 593809 - DNA, 33 bp, Homo sapien
cctttgaactacaccactgactttcccaggtct

SEQ ID NO: 593810 - DNA, 33 bp, Homo sapien
cctttgaactacaccattgactttcccaggtct

SEQ ID NO: 593811 - DNA, 33 bp, Homo sapien
tggtgcttacagtcaacattatgctcactgtat

SEQ ID NO: 593812 - DNA, 33 bp, Homo sapien
tggtgcttacagtcaatattatgctcactgtat

SEQ ID NO: 593813 - DNA, 33 bp, Homo sapien
actttatacgtctaaaactaatgcgaccctcaa

SEQ ID NO: 593814 - DNA, 33 bp, Homo sapien
actttatacgtctaaatctaatgcgaccctcaa

SEQ ID NO: 593815 - DNA, 33 bp, Homo sapien
gaattgcacaagtagtgaaacatttgaataatt

SEQ ID NO: 593816 - DNA, 33 bp, Homo sapien
gaattgcacaagtagttaaacatttgaataatt

SEQ ID NO: 593817 - DNA, 33 bp, Homo sapien
taaagaaatgctactactaaacatatttgtaag

SEQ ID NO: 593818 - DNA, 33 bp, Homo sapien
taaagaaatgctactattaaacatatttgtaag

SEQ ID NO: 593819 - DNA, 33 bp, Homo sapien
attggatttcttaaaaatggtactagaagttag

SEQ ID NO: 593820 - DNA, 33 bp, Homo sapien
attggatttcttaaaagtggtactagaagttag

SEQ ID NO: 593821 - DNA, 33 bp, Homo sapien
gctagcaataagtggaagataatagttgagtgt

SEQ ID NO: 593822 - DNA, 33 bp, Homo sapien
gctagcaataagtggaggataatagttgagtgt

SEQ ID NO: 593823 - DNA, 33 bp, Homo sapien
gactcataattctcaactccaaaacttacaaca

SEQ ID NO: 593824 - DNA, 33 bp, Homo sapien
gactcataattctcaattccaaaacttacaaca

SEQ ID NO: 593825 - DNA, 33 bp, Homo sapien
ctttgccaccttgaagccatgccattcttcatg

SEQ ID NO: 593826 - DNA, 33 bp, Homo sapien
ctttgccaccttgaagtcatgccattcttcatg

SEQ ID NO: 593827 - DNA, 33 bp, Homo sapien
catgacgtgatcagtccgaacagtggaataaat

SEQ ID NO: 593828 - DNA, 33 bp, Homo sapien
catgacgtgatcagtctgaacagtggaataaat

SEQ ID NO: 593829 - DNA, 33 bp, Homo sapien
tacctaagttgtttctaaaaaccatcttataac

SEQ ID NO: 593830 - DNA, 33 bp, Homo sapien
tacctaagttgtttctgaaaaccatcttataac

SEQ ID NO: 593831 - DNA, 33 bp, Homo sapien
agatactgtcattatcccattgtgtgcaggtaa

SEQ ID NO: 593832 - DNA, 33 bp, Homo sapien
agatactgtcattatctcattgtgtgcaggtaa

SEQ ID NO: 593833 - DNA, 33 bp, Homo sapien
actcataggtggtaggcactcaactccagatgg

SEQ ID NO: 593834 - DNA, 33 bp, Homo sapien
actcataggtggtagggactcaactccagatgg

SEQ ID NO: 593835 - DNA, 33 bp, Homo sapien
gactacaaagctgaggcagctgaaccacttagc

SEQ ID NO: 593836 - DNA, 33 bp, Homo sapien
gactacaaagctgaggtagctgaaccacttagc

SEQ ID NO: 593837 - DNA, 33 bp, Homo sapien
cttgattaaattgtgaggaagcaaggtatcaca

SEQ ID NO: 593838 - DNA, 33 bp, Homo sapien
cttgattaaattgtgatgaagcaaggtatcaca

SEQ ID NO: 593839 - DNA, 33 bp, Homo sapien
tcacatctgttatccaggacagagccttgatgt

SEQ ID NO: 593840 - DNA, 33 bp, Homo sapien
tcacatctgttatccatgacagagccttgatgt

SEQ ID NO: 593841 - DNA, 33 bp, Homo sapien
agaagatgcagataccactgagagccatcgtgg

SEQ ID NO: 593842 - DNA, 33 bp, Homo sapien
agaagatgcagataccgctgagagccatcgtgg

SEQ ID NO: 593843 - DNA, 33 bp, Homo sapien
caatggctcaggagcaaccactgcattaaacta

SEQ ID NO: 593844 - DNA, 33 bp, Homo sapien
caatggctcaggagcagccactgcattaaacta

SEQ ID NO: 593845 - DNA, 33 bp, Homo sapien
tctgccatcctccacagataaccattctctttt

SEQ ID NO: 593846 - DNA, 33 bp, Homo sapien
tctgccatcctccacatataaccattctctttt

SEQ ID NO: 593847 - DNA, 33 bp, Homo sapien
attttttgtgttaggaccattacaaatcttctt

SEQ ID NO: 593848 - DNA, 33 bp, Homo sapien
attttttgtgttaggatcattacaaatcttctt

SEQ ID NO: 593849 - DNA, 33 bp, Homo sapien
cttcttaccacttctcaaatgagcatcacgttg

SEQ ID NO: 593850 - DNA, 33 bp, Homo sapien
cttcttaccacttctcgaatgagcatcacgttg

SEQ ID NO: 593851 - DNA, 33 bp, Homo sapien
gacagcttgcaccatacactagaaaacccacag

SEQ ID NO: 593852 - DNA, 33 bp, Homo sapien
gacagcttgcaccatatactagaaaacccacag

SEQ ID NO: 593853 - DNA, 33 bp, Homo sapien
tgagtcctctgtgataacaatgaatggcctcac

SEQ ID NO: 593854 - DNA, 33 bp, Homo sapien
tgagtcctctgtgatagcaatgaatggcctcac

SEQ ID NO: 593855 - DNA, 33 bp, Homo sapien
ccttcagcagatagaaagaaagatggtggctga

SEQ ID NO: 593856 - DNA, 33 bp, Homo sapien
ccttcagcagatagaaggaaagatggtggctga

SEQ ID NO: 593857 - DNA, 33 bp, Homo sapien
aattcagtcacatcagccagtccttttcactat

SEQ ID NO: 593858 - DNA, 33 bp, Homo sapien
aattcagtcacatcaggcagtccttttcactat

SEQ ID NO: 593859 - DNA, 33 bp, Homo sapien
aatcagagatcatctcaccaacagcagatcctt

SEQ ID NO: 593860 - DNA, 33 bp, Homo sapien
aatcagagatcatctcgccaacagcagatcctt

SEQ ID NO: 593861 - DNA, 33 bp, Homo sapien
agtaagcaattcagaacaccttttcgaatactg

SEQ ID NO: 593862 - DNA, 33 bp, Homo sapien
agtaagcaattcagaataccttttcgaatactg

SEQ ID NO: 593863 - DNA, 33 bp, Homo sapien
taacggcataatgcagcaattcaccatgtggtt

SEQ ID NO: 593864 - DNA, 33 bp, Homo sapien
taacggcataatgcagtaattcaccatgtggtt

SEQ ID NO: 593865 - DNA, 33 bp, Homo sapien
aaaaacatattctgcccgaacaagaaaagacaa

SEQ ID NO: 593866 - DNA, 33 bp, Homo sapien
aaaaacatattctgcctgaacaagaaaagacaa

SEQ ID NO: 593867 - DNA, 33 bp, Homo sapien
tgagtatagaaaggaaagacatctgtgtggatt

SEQ ID NO: 593868 - DNA, 33 bp, Homo sapien
tgagtatagaaaggaaggacatctgtgtggatt

SEQ ID NO: 593869 - DNA, 33 bp, Homo sapien
tcaggacaggctgccaagataaggacacagagc

SEQ ID NO: 593870 - DNA, 33 bp, Homo sapien
tcaggacaggctgccacgataaggacacagagc

SEQ ID NO: 593871 - DNA, 33 bp, Homo sapien
aaggatcctggattctcactctaacctattgga

SEQ ID NO: 593872 - DNA, 33 bp, Homo sapien
aaggatcctggattctgactctaacctattgga

SEQ ID NO: 593873 - DNA, 33 bp, Homo sapien
tcaagaaggagggttcaaagagaggtaataggg

SEQ ID NO: 593874 - DNA, 33 bp, Homo sapien
tcaagaaggagggttcgaagagaggtaataggg

SEQ ID NO: 593875 - DNA, 33 bp, Homo sapien
ctgcacgtaggctcaaatatggctggcagcttg

SEQ ID NO: 593876 - DNA, 33 bp, Homo sapien
ctgcacgtaggctcaagtatggctggcagcttg

SEQ ID NO: 593877 - DNA, 33 bp, Homo sapien
aaaattcaaagcctccaaagggcaaagcattcg

SEQ ID NO: 593878 - DNA, 33 bp, Homo sapien
aaaattcaaagcctccgaagggcaaagcattcg

SEQ ID NO: 593879 - DNA, 33 bp, Homo sapien
ctattcaggggataaccctgccatgtgtggttt

SEQ ID NO: 593880 - DNA, 33 bp, Homo sapien
ctattcaggggataactctgccatgtgtggttt

SEQ ID NO: 593881 - DNA, 33 bp, Homo sapien
tggttttgctgaaaaaaaaagtgaaaatgtcta

SEQ ID NO: 593882 - DNA, 33 bp, Homo sapien
tggttttgctgaaaaagaaagtgaaaatgtcta

SEQ ID NO: 593883 - DNA, 33 bp, Homo sapien
tctcatagcaacgtcgcacccaatggcaggttt

SEQ ID NO: 593884 - DNA, 33 bp, Homo sapien
tctcatagcaacgtcgtacccaatggcaggttt

SEQ ID NO: 593885 - DNA, 33 bp, Homo sapien
ctttatggtttctatcgaaccatccgtccatcc

SEQ ID NO: 593886 - DNA, 33 bp, Homo sapien
ctttatggtttctatctaaccatccgtccatcc

SEQ ID NO: 593887 - DNA, 33 bp, Homo sapien
aacacccaggtcaaaaatggtgcttttctagcc

SEQ ID NO: 593888 - DNA, 33 bp, Homo sapien
aacacccaggtcaaaagtggtgcttttctagcc

SEQ ID NO: 593889 - DNA, 33 bp, Homo sapien
ttagccatgagtagaacacctgctcaactaact

SEQ ID NO: 593890 - DNA, 33 bp, Homo sapien
ttagccatgagtagaatacctgctcaactaact

SEQ ID NO: 593891 - DNA, 33 bp, Homo sapien
ctctcaagtactatgacggtggctgccacattc

SEQ ID NO: 593892 - DNA, 33 bp, Homo sapien
ctctcaagtactatgatggtggctgccacattc

SEQ ID NO: 593893 - DNA, 33 bp, Homo sapien
gggctcttccctcttcactaagcacttatctct

SEQ ID NO: 593894 - DNA, 33 bp, Homo sapien
gggctcttccctcttccctaagcacttatctct

SEQ ID NO: 593895 - DNA, 33 bp, Homo sapien
ttctgaacctttgtaacgatgtgtctcaatgtg

SEQ ID NO: 593896 - DNA, 33 bp, Homo sapien
ttctgaacctttgtaatgatgtgtctcaatgtg

SEQ ID NO: 593897 - DNA, 33 bp, Homo sapien
tttccttataatagcaacttcagaggaagagat

SEQ ID NO: 593898 - DNA, 33 bp, Homo sapien
tttccttataatagcatcttcagaggaagagat

SEQ ID NO: 593899 - DNA, 33 bp, Homo sapien
ggcacaaggacagaaaagaagaggaggtgacat

SEQ ID NO: 593900 - DNA, 33 bp, Homo sapien
ggcacaaggacagaaaggaagaggaggtgacat

SEQ ID NO: 593901 - DNA, 33 bp, Homo sapien
cagtaccatgcaaacacatccattatagcatct

SEQ ID NO: 593902 - DNA, 33 bp, Homo sapien
cagtaccatgcaaacatatccattatagcatct

SEQ ID NO: 593903 - DNA, 33 bp, Homo sapien
tatagattaagtttgccatcttctgtgggtgca

SEQ ID NO: 593904 - DNA, 33 bp, Homo sapien
tatagattaagtttgctatcttctgtgggtgca

SEQ ID NO: 593905 - DNA, 33 bp, Homo sapien
gagtgactttcctctagccgggactctaggagg

SEQ ID NO: 593906 - DNA, 33 bp, Homo sapien
gagtgactttcctctatccgggactctaggagg

SEQ ID NO: 593907 - DNA, 33 bp, Homo sapien
agagctctttcttagacgcgcactggaataaag

SEQ ID NO: 593908 - DNA, 33 bp, Homo sapien
agagctctttcttagaggcgcactggaataaag

SEQ ID NO: 593909 - DNA, 33 bp, Homo sapien
tagtccttcattgagaaatagttccaagttttc

SEQ ID NO: 593910 - DNA, 33 bp, Homo sapien
tagtccttcattgagatatagttccaagttttc

SEQ ID NO: 593911 - DNA, 33 bp, Homo sapien
tgccatagcaagacccacaggtgatccgtatgc

SEQ ID NO: 593912 - DNA, 33 bp, Homo sapien
tgccatagcaagacccgcaggtgatccgtatgc

SEQ ID NO: 593913 - DNA, 33 bp, Homo sapien
taatggccatacttgcagaaataaggtggtggt

SEQ ID NO: 593914 - DNA, 33 bp, Homo sapien
taatggccatacttgccgaaataaggtggtggt

SEQ ID NO: 593915 - DNA, 33 bp, Homo sapien
ttttcttatgcaattacacatggttttatccag

SEQ ID NO: 593916 - DNA, 33 bp, Homo sapien
ttttcttatgcaattatacatggttttatccag

SEQ ID NO: 593917 - DNA, 33 bp, Homo sapien
tgagatacattcaccaacttaattggagctcgg

SEQ ID NO: 593918 - DNA, 33 bp, Homo sapien
tgagatacattcaccatcttaattggagctcgg

SEQ ID NO: 593919 - DNA, 33 bp, Homo sapien
aaagccagtcatttcaacagcgtggtgactgtg

SEQ ID NO: 593920 - DNA, 33 bp, Homo sapien
aaagccagtcatttcagcagcgtggtgactgtg

SEQ ID NO: 593921 - DNA, 33 bp, Homo sapien
agtgtttgtagaatgcaagtgtgctctcacagc

SEQ ID NO: 593922 - DNA, 33 bp, Homo sapien
agtgtttgtagaatgcgagtgtgctctcacagc

SEQ ID NO: 593923 - DNA, 33 bp, Homo sapien
gctgttctgtcgctcaatgaaactcttctctgc

SEQ ID NO: 593924 - DNA, 33 bp, Homo sapien
gctgttctgtcgctcagtgaaactcttctctgc

SEQ ID NO: 593925 - DNA, 33 bp, Homo sapien
aaccatttcaatagaccccttgtcttggcaaag

SEQ ID NO: 593926 - DNA, 33 bp, Homo sapien
aaccatttcaatagacgccttgtcttggcaaag

SEQ ID NO: 593927 - DNA, 33 bp, Homo sapien
tcatgaaccacaggaaagcttagccagggactc

SEQ ID NO: 593928 - DNA, 33 bp, Homo sapien
tcatgaaccacaggaatgcttagccagggactc

SEQ ID NO: 593929 - DNA, 33 bp, Homo sapien
ctggtttggatctgcaatctgctgcttactata

SEQ ID NO: 593930 - DNA, 33 bp, Homo sapien
ctggtttggatctgcactctgctgcttactata

SEQ ID NO: 593931 - DNA, 33 bp, Homo sapien
ccatcagttggtctgcaccaggatcctccatcc

SEQ ID NO: 593932 - DNA, 33 bp, Homo sapien
ccatcagttggtctgcgccaggatcctccatcc

SEQ ID NO: 593933 - DNA, 33 bp, Homo sapien
actcacccagcagttacgtgtctacagcagttc

SEQ ID NO: 593934 - DNA, 33 bp, Homo sapien
actcacccagcagttatgtgtctacagcagttc

SEQ ID NO: 593935 - DNA, 33 bp, Homo sapien
tttaaagtacatgtaacaggaaatagaggtaga

SEQ ID NO: 593936 - DNA, 33 bp, Homo sapien
tttaaagtacatgtaagaggaaatagaggtaga

SEQ ID NO: 593937 - DNA, 33 bp, Homo sapien
gctctttctttattcccgattccttaattagtg

SEQ ID NO: 593938 - DNA, 33 bp, Homo sapien
gctctttctttattcctgattccttaattagtg

SEQ ID NO: 593939 - DNA, 33 bp, Homo sapien
ttgtggctcttaactccaccccctgagcttgag

SEQ ID NO: 593940 - DNA, 33 bp, Homo sapien
ttgtggctcttaactctaccccctgagcttgag

SEQ ID NO: 593941 - DNA, 33 bp, Homo sapien
agttattcagaatcgacggtggcagctcaaact

SEQ ID NO: 593942 - DNA, 33 bp, Homo sapien
agttattcagaatcgagggtggcagctcaaact

SEQ ID NO: 593943 - DNA, 33 bp, Homo sapien
atttaaacggaaatatcaatgtttgaggactca

SEQ ID NO: 593944 - DNA, 33 bp, Homo sapien
atttaaacggaaatatgaatgtttgaggactca

SEQ ID NO: 593945 - DNA, 33 bp, Homo sapien
cgggactgtatcaacactcatcatctgtgaaaa

SEQ ID NO: 593946 - DNA, 33 bp, Homo sapien
cgggactgtatcaacattcatcatctgtgaaaa

SEQ ID NO: 593947 - DNA, 33 bp, Homo sapien
ttgacggcatcggaacagtccttgagcctggaa

SEQ ID NO: 593948 - DNA, 33 bp, Homo sapien
ttgacggcatcggaacggtccttgagcctggaa

SEQ ID NO: 593949 - DNA, 33 bp, Homo sapien
tcacttgcttgacaataaaagtactagaaaaaa

SEQ ID NO: 593950 - DNA, 33 bp, Homo sapien
tcacttgcttgacaatgaaagtactagaaaaaa

SEQ ID NO: 593951 - DNA, 33 bp, Homo sapien
tcagaacaggttataagtgaaatggcagatgtg

SEQ ID NO: 593952 - DNA, 33 bp, Homo sapien
tcagaacaggttataattgaaatggcagatgtg

SEQ ID NO: 593953 - DNA, 33 bp, Homo sapien
aaaattggatcagtcaagaatcatttgcacaca

SEQ ID NO: 593954 - DNA, 33 bp, Homo sapien
aaaattggatcagtcaggaatcatttgcacaca

SEQ ID NO: 593955 - DNA, 33 bp, Homo sapien
ggaaggaactacaggcagaaataaatgctgcag

SEQ ID NO: 593956 - DNA, 33 bp, Homo sapien
ggaaggaactacaggcggaaataaatgctgcag

SEQ ID NO: 593957 - DNA, 33 bp, Homo sapien
tcttccttgaagagcactgaggtttttgttgtt

SEQ ID NO: 593958 - DNA, 33 bp, Homo sapien
tcttccttgaagagcattgaggtttttgttgtt

SEQ ID NO: 593959 - DNA, 33 bp, Homo sapien
tgcaaacctcacatgcaaactacgccacattat

SEQ ID NO: 593960 - DNA, 33 bp, Homo sapien
tgcaaacctcacatgccaactacgccacattat

SEQ ID NO: 593961 - DNA, 33 bp, Homo sapien
ccgatctggcacttaccaggccgcattatactt

SEQ ID NO: 593962 - DNA, 33 bp, Homo sapien
ccgatctggcacttactaggccgcattatactt

SEQ ID NO: 593963 - DNA, 33 bp, Homo sapien
cagcatactctgggaaacaactcaaagtctttc

SEQ ID NO: 593964 - DNA, 33 bp, Homo sapien
cagcatactctgggaagcaactcaaagtctttc

SEQ ID NO: 593965 - DNA, 33 bp, Homo sapien
atcctgacggagaaagaagaacggagaaaggtg

SEQ ID NO: 593966 - DNA, 33 bp, Homo sapien
atcctgacggagaaaggagaacggagaaaggtg

SEQ ID NO: 593967 - DNA, 33 bp, Homo sapien
taagtgattattgataaaaagaccagagagtaa

SEQ ID NO: 593968 - DNA, 33 bp, Homo sapien
taagtgattattgatataaagaccagagagtaa

SEQ ID NO: 593969 - DNA, 33 bp, Homo sapien
ttcaacgattgccgccgctgtagcgcatcagat

SEQ ID NO: 593970 - DNA, 33 bp, Homo sapien
ttcaacgattgccgcctctgtagcgcatcagat

SEQ ID NO: 593971 - DNA, 33 bp, Homo sapien
ggctgagacagtttcaccaagttcaaagacagg

SEQ ID NO: 593972 - DNA, 33 bp, Homo sapien
ggctgagacagtttcatcaagttcaaagacagg

SEQ ID NO: 593973 - DNA, 33 bp, Homo sapien
ggcgtggcactgcgcacagagctgagtgggtct

SEQ ID NO: 593974 - DNA, 33 bp, Homo sapien
ggcgtggcactgcgcatagagctgagtgggtct

SEQ ID NO: 593975 - DNA, 33 bp, Homo sapien
taggctcatccagcaaccttttgaggtgaggga

SEQ ID NO: 593976 - DNA, 33 bp, Homo sapien
taggctcatccagcaatcttttgaggtgaggga

SEQ ID NO: 593977 - DNA, 33 bp, Homo sapien
acactaaatctttcacaaaagctaggagtagaa

SEQ ID NO: 593978 - DNA, 33 bp, Homo sapien
acactaaatctttcacgaaagctaggagtagaa

SEQ ID NO: 593979 - DNA, 33 bp, Homo sapien
tctggatgggttccagaatataaatgtgacact

SEQ ID NO: 593980 - DNA, 33 bp, Homo sapien
tctggatgggttccaggatataaatgtgacact

SEQ ID NO: 593981 - DNA, 33 bp, Homo sapien
cccgcatctggaattacctccctggcgctcagg

SEQ ID NO: 593982 - DNA, 33 bp, Homo sapien
cccgcatctggaattatctccctggcgctcagg

SEQ ID NO: 593983 - DNA, 33 bp, Homo sapien
cctggctggtcctgttaaaattcgatcagttta

SEQ ID NO: 593984 - DNA, 33 bp, Homo sapien
cctggctggtcctgtttaaattcgatcagttta

SEQ ID NO: 593985 - DNA, 33 bp, Homo sapien
tttcagaaaatgaccaaataaatacaatacatt

SEQ ID NO: 593986 - DNA, 33 bp, Homo sapien
tttcagaaaatgaccacataaatacaatacatt

SEQ ID NO: 593987 - DNA, 33 bp, Homo sapien
gcctcgaccaaaagaaccatcctttcatgtact

SEQ ID NO: 593988 - DNA, 33 bp, Homo sapien
gcctcgaccaaaagaagcatcctttcatgtact

SEQ ID NO: 593989 - DNA, 33 bp, Homo sapien
tcggaggtggccggtacacatggaaataaggaa

SEQ ID NO: 593990 - DNA, 33 bp, Homo sapien
tcggaggtggccggtagacatggaaataaggaa

SEQ ID NO: 593991 - DNA, 33 bp, Homo sapien
ttgaattaattaacagccaagttattatttata

SEQ ID NO: 593992 - DNA, 33 bp, Homo sapien
ttgaattaattaacaggcaagttattatttata

SEQ ID NO: 593993 - DNA, 33 bp, Homo sapien
tcaatgacctttatttaaaaatgatgaggttta

SEQ ID NO: 593994 - DNA, 33 bp, Homo sapien
tcaatgacctttattttaaaatgatgaggttta

SEQ ID NO: 593995 - DNA, 33 bp, Homo sapien
atttccagtctatcacagggccacaaggtgtaa

SEQ ID NO: 593996 - DNA, 33 bp, Homo sapien
atttccagtctatcacggggccacaaggtgtaa

SEQ ID NO: 593997 - DNA, 33 bp, Homo sapien
accactgtctcattcaagggaaaaggccgccaa

SEQ ID NO: 593998 - DNA, 33 bp, Homo sapien
accactgtctcattcatgggaaaaggccgccaa

SEQ ID NO: 593999 - DNA, 33 bp, Homo sapien
acattgtcattctataactgagaaccattctac

SEQ ID NO: 594000 - DNA, 33 bp, Homo sapien
acattgtcattctatagctgagaaccattctac

SEQ ID NO: 594001 - DNA, 33 bp, Homo sapien
gacagcggagtccacagtcgcttggcttctaag

SEQ ID NO: 594002 - DNA, 33 bp, Homo sapien
gacagcggagtccacattcgcttggcttctaag

SEQ ID NO: 594003 - DNA, 33 bp, Homo sapien
tcctcacttagatttacacgcacaacagtcttg

SEQ ID NO: 594004 - DNA, 33 bp, Homo sapien
tcctcacttagatttatacgcacaacagtcttg

SEQ ID NO: 594005 - DNA, 33 bp, Homo sapien
gtctgtattttgctggccatagaagccaaagag

SEQ ID NO: 594006 - DNA, 33 bp, Homo sapien
gtctgtattttgctggtcatagaagccaaagag

SEQ ID NO: 594007 - DNA, 33 bp, Homo sapien
ggctgtttctcaaatacatcactctgcagaaaa

SEQ ID NO: 594008 - DNA, 33 bp, Homo sapien
ggctgtttctcaaatatatcactctgcagaaaa

SEQ ID NO: 594009 - DNA, 33 bp, Homo sapien
cctcagattctgcagcgaacaagaggttgagct

SEQ ID NO: 594010 - DNA, 33 bp, Homo sapien
cctcagattctgcagctaacaagaggttgagct

SEQ ID NO: 594011 - DNA, 33 bp, Homo sapien
actaactagatgaatcacccagtttttcccttt

SEQ ID NO: 594012 - DNA, 33 bp, Homo sapien
actaactagatgaatcgcccagtttttcccttt

SEQ ID NO: 594013 - DNA, 33 bp, Homo sapien
tgactctatgaagcacaaagccctcactagacc

SEQ ID NO: 594014 - DNA, 33 bp, Homo sapien
tgactctatgaagcacgaagccctcactagacc

SEQ ID NO: 594015 - DNA, 33 bp, Homo sapien
ccaattatacagaaaacctgagagtaaaagagt

SEQ ID NO: 594016 - DNA, 33 bp, Homo sapien
ccaattatacagaaaatctgagagtaaaagagt

SEQ ID NO: 594017 - DNA, 33 bp, Homo sapien
ggaaggcgagaagaaagtagccactgagttcct

SEQ ID NO: 594018 - DNA, 33 bp, Homo sapien
ggaaggcgagaagaaattagccactgagttcct

SEQ ID NO: 594019 - DNA, 33 bp, Homo sapien
gacctgcccttgaaaaccatctgtgatccaagc

SEQ ID NO: 594020 - DNA, 33 bp, Homo sapien
gacctgcccttgaaaatcatctgtgatccaagc

SEQ ID NO: 594021 - DNA, 33 bp, Homo sapien
ggctgagtaattcttgcatgtatcaaatagtca

SEQ ID NO: 594022 - DNA, 33 bp, Homo sapien
ggctgagtaattcttgtatgtatcaaatagtca

SEQ ID NO: 594023 - DNA, 33 bp, Homo sapien
agaaaattgctgaacacgtctgctatgtgggtc

SEQ ID NO: 594024 - DNA, 33 bp, Homo sapien
agaaaattgctgaacaggtctgctatgtgggtc

SEQ ID NO: 594025 - DNA, 33 bp, Homo sapien
ggtggtgaatgttccaatgagttactatagagc

SEQ ID NO: 594026 - DNA, 33 bp, Homo sapien
ggtggtgaatgttccagtgagttactatagagc

SEQ ID NO: 594027 - DNA, 33 bp, Homo sapien
aaatgcttggagaatacgatctagaacagaggt

SEQ ID NO: 594028 - DNA, 33 bp, Homo sapien
aaatgcttggagaataggatctagaacagaggt

SEQ ID NO: 594029 - DNA, 33 bp, Homo sapien
aaaaccacgaggtagaaggaatgagatcacaac

SEQ ID NO: 594030 - DNA, 33 bp, Homo sapien
aaaaccacgaggtagagggaatgagatcacaac

SEQ ID NO: 594031 - DNA, 33 bp, Homo sapien
gcccagcgcctctctaaggaggaaatccagacg

SEQ ID NO: 594032 - DNA, 33 bp, Homo sapien
gcccagcgcctctctacggaggaaatccagacg

SEQ ID NO: 594033 - DNA, 33 bp, Homo sapien
acgtgccacgtaaccacgcgcactgcagacacc

SEQ ID NO: 594034 - DNA, 33 bp, Homo sapien
acgtgccacgtaaccatgcgcactgcagacacc

SEQ ID NO: 594035 - DNA, 33 bp, Homo sapien
atctgccgatgtccacacactgaatatcagggg

SEQ ID NO: 594036 - DNA, 33 bp, Homo sapien
atctgccgatgtccacgcactgaatatcagggg

SEQ ID NO: 594037 - DNA, 33 bp, Homo sapien
aaattgtcaagacacacgaagtacctactagta

SEQ ID NO: 594038 - DNA, 33 bp, Homo sapien
aaattgtcaagacacatgaagtacctactagta

SEQ ID NO: 594039 - DNA, 33 bp, Homo sapien
aagtcaaatgaaaaagacaacagcataaaacgt

SEQ ID NO: 594040 - DNA, 33 bp, Homo sapien
aagtcaaatgaaaaaggcaacagcataaaacgt

SEQ ID NO: 594041 - DNA, 33 bp, Homo sapien
ctcacctgtgtagtaccgcagtgtcgctggcat

SEQ ID NO: 594042 - DNA, 33 bp, Homo sapien
ctcacctgtgtagtactgcagtgtcgctggcat

SEQ ID NO: 594043 - DNA, 33 bp, Homo sapien
gacactttggcataacaaaccccatagagcctg

SEQ ID NO: 594044 - DNA, 33 bp, Homo sapien
gacactttggcataacgaaccccatagagcctg

SEQ ID NO: 594045 - DNA, 33 bp, Homo sapien
ttctctcctatgaatcactaaatcaatgccttg

SEQ ID NO: 594046 - DNA, 33 bp, Homo sapien
ttctctcctatgaatcgctaaatcaatgccttg

SEQ ID NO: 594047 - DNA, 33 bp, Homo sapien
ttgagaaggactgccacgtcacaggcatttttt

SEQ ID NO: 594048 - DNA, 33 bp, Homo sapien
ttgagaaggactgccaggtcacaggcatttttt

SEQ ID NO: 594049 - DNA, 33 bp, Homo sapien
atcccttcagttccaaactctccctggaactgt

SEQ ID NO: 594050 - DNA, 33 bp, Homo sapien
atcccttcagttccaatctctccctggaactgt

SEQ ID NO: 594051 - DNA, 33 bp, Homo sapien
gaaaccacccatttcactcaatcataagaagca

SEQ ID NO: 594052 - DNA, 33 bp, Homo sapien
gaaaccacccatttcattcaatcataagaagca

SEQ ID NO: 594053 - DNA, 33 bp, Homo sapien
ctgtgagtctcctgaaggtgccaaatgtgtctg

SEQ ID NO: 594054 - DNA, 33 bp, Homo sapien
ctgtgagtctcctgaatgtgccaaatgtgtctg

SEQ ID NO: 594055 - DNA, 33 bp, Homo sapien
caactacgtggaaagcaagaggctctctgtgtc

SEQ ID NO: 594056 - DNA, 33 bp, Homo sapien
caactacgtggaaagcgagaggctctctgtgtc

SEQ ID NO: 594057 - DNA, 33 bp, Homo sapien
tagctctgtctggtcaacatggtcaagtgccat

SEQ ID NO: 594058 - DNA, 33 bp, Homo sapien
tagctctgtctggtcagcatggtcaagtgccat

SEQ ID NO: 594059 - DNA, 33 bp, Homo sapien
gcccatcctgctttcacccccaggactgagctc

SEQ ID NO: 594060 - DNA, 33 bp, Homo sapien
gcccatcctgctttcatccccaggactgagctc

SEQ ID NO: 594061 - DNA, 33 bp, Homo sapien
tgaaggaataggtaacggtggccccagctgaac

SEQ ID NO: 594062 - DNA, 33 bp, Homo sapien
tgaaggaataggtaactgtggccccagctgaac

SEQ ID NO: 594063 - DNA, 33 bp, Homo sapien
gacctttgaagtagacagtatcagagaatacaa

SEQ ID NO: 594064 - DNA, 33 bp, Homo sapien
gacctttgaagtagacggtatcagagaatacaa

SEQ ID NO: 594065 - DNA, 33 bp, Homo sapien
aaggaggcgaagaccacgaacaccaccttgagc

SEQ ID NO: 594066 - DNA, 33 bp, Homo sapien
aaggaggcgaagaccatgaacaccaccttgagc

SEQ ID NO: 594067 - DNA, 33 bp, Homo sapien
ctggtggctttccccacatatgctgtaaccaca

SEQ ID NO: 594068 - DNA, 33 bp, Homo sapien
ctggtggctttccccagatatgctgtaaccaca

SEQ ID NO: 594069 - DNA, 33 bp, Homo sapien
ttcctgagtattcccactcatgtattctctctg

SEQ ID NO: 594070 - DNA, 33 bp, Homo sapien
ttcctgagtattcccattcatgtattctctctg

SEQ ID NO: 594071 - DNA, 33 bp, Homo sapien
tcagtctccagatacccaaatttaaagcaaacg

SEQ ID NO: 594072 - DNA, 33 bp, Homo sapien
tcagtctccagatacctaaatttaaagcaaacg

SEQ ID NO: 594073 - DNA, 33 bp, Homo sapien
tttgagtttcttaaataggtaggtattgaagtc

SEQ ID NO: 594074 - DNA, 33 bp, Homo sapien
tttgagtttcttaaattggtaggtattgaagtc

SEQ ID NO: 594075 - DNA, 33 bp, Homo sapien
acacttattcaggtcaccctgttctgctaaagg

SEQ ID NO: 594076 - DNA, 33 bp, Homo sapien
acacttattcaggtcatcctgttctgctaaagg

SEQ ID NO: 594077 - DNA, 33 bp, Homo sapien
tctagaggaacatgaaatcacaaggggaaagca

SEQ ID NO: 594078 - DNA, 33 bp, Homo sapien
tctagaggaacatgaagtcacaaggggaaagca

SEQ ID NO: 594079 - DNA, 33 bp, Homo sapien
acagctcctagccctacggagactttctcaggg

SEQ ID NO: 594080 - DNA, 33 bp, Homo sapien
acagctcctagccctatggagactttctcaggg

SEQ ID NO: 594081 - DNA, 33 bp, Homo sapien
gctccatttcatgtacacagttaagcattgtca

SEQ ID NO: 594082 - DNA, 33 bp, Homo sapien
gctccatttcatgtacgcagttaagcattgtca

SEQ ID NO: 594083 - DNA, 33 bp, Homo sapien
tttagaggggtgaacacggaaattggagtgaag

SEQ ID NO: 594084 - DNA, 33 bp, Homo sapien
tttagaggggtgaacatggaaattggagtgaag

SEQ ID NO: 594085 - DNA, 33 bp, Homo sapien
tttttctcaacaacaacacaaacagacaaggaa

SEQ ID NO: 594086 - DNA, 33 bp, Homo sapien
tttttctcaacaacaatacaaacagacaaggaa

SEQ ID NO: 594087 - DNA, 33 bp, Homo sapien
gtcagatacaacatacacacaagtcactctaat

SEQ ID NO: 594088 - DNA, 33 bp, Homo sapien
gtcagatacaacatacgcacaagtcactctaat

SEQ ID NO: 594089 - DNA, 33 bp, Homo sapien
tctgtagtttgtaggacgctgggattgttccca

SEQ ID NO: 594090 - DNA, 33 bp, Homo sapien
tctgtagtttgtaggatgctgggattgttccca

SEQ ID NO: 594091 - DNA, 33 bp, Homo sapien
tctcattctcccttacaacttcttctccttcta

SEQ ID NO: 594092 - DNA, 33 bp, Homo sapien
tctcattctcccttacgacttcttctccttcta

SEQ ID NO: 594093 - DNA, 33 bp, Homo sapien
tgcagttgactcatcccggagccatccttctta

SEQ ID NO: 594094 - DNA, 33 bp, Homo sapien
tgcagttgactcatcctggagccatccttctta

SEQ ID NO: 594095 - DNA, 33 bp, Homo sapien
cataatgaggattctacattttggtgagctgtg

SEQ ID NO: 594096 - DNA, 33 bp, Homo sapien
cataatgaggattctatattttggtgagctgtg

SEQ ID NO: 594097 - DNA, 33 bp, Homo sapien
tagctctaccaatatgaaacccagctccttagg

SEQ ID NO: 594098 - DNA, 33 bp, Homo sapien
tagctctaccaatatggaacccagctccttagg

SEQ ID NO: 594099 - DNA, 33 bp, Homo sapien
gtttttgcttactaacacttgaaagccaccact

SEQ ID NO: 594100 - DNA, 33 bp, Homo sapien
gtttttgcttactaacgcttgaaagccaccact

SEQ ID NO: 594101 - DNA, 33 bp, Homo sapien
cacccagacacagtgcaatgtccccgcatatca

SEQ ID NO: 594102 - DNA, 33 bp, Homo sapien
cacccagacacagtgcgatgtccccgcatatca

SEQ ID NO: 594103 - DNA, 33 bp, Homo sapien
tagcgccttaggcccacggttctcaaactttta

SEQ ID NO: 594104 - DNA, 33 bp, Homo sapien
tagcgccttaggcccatggttctcaaactttta

SEQ ID NO: 594105 - DNA, 33 bp, Homo sapien
tcctgcacatcaggccacggttccttctacttc

SEQ ID NO: 594106 - DNA, 33 bp, Homo sapien
tcctgcacatcaggccccggttccttctacttc

SEQ ID NO: 594107 - DNA, 33 bp, Homo sapien
gtgtcactcatggtgacgttctcacaaggtctc

SEQ ID NO: 594108 - DNA, 33 bp, Homo sapien
gtgtcactcatggtgatgttctcacaaggtctc

SEQ ID NO: 594109 - DNA, 33 bp, Homo sapien
ctgtatccattatgatcacctacacatattaca

SEQ ID NO: 594110 - DNA, 33 bp, Homo sapien
ctgtatccattatgattacctacacatattaca

SEQ ID NO: 594111 - DNA, 33 bp, Homo sapien
ctttgagtgctacgggccagatgtctttggatc

SEQ ID NO: 594112 - DNA, 33 bp, Homo sapien
ctttgagtgctacgggtcagatgtctttggatc

SEQ ID NO: 594113 - DNA, 33 bp, Homo sapien
actttttgtttctgtaccagcaattttttagca

SEQ ID NO: 594114 - DNA, 33 bp, Homo sapien
actttttgtttctgtatcagcaattttttagca

SEQ ID NO: 594115 - DNA, 33 bp, Homo sapien
ggagtgcttaaacgcacagaacaagagatccac

SEQ ID NO: 594116 - DNA, 33 bp, Homo sapien
ggagtgcttaaacgcatagaacaagagatccac

SEQ ID NO: 594117 - DNA, 33 bp, Homo sapien
aatcgtgcagtatcaaccaaagcatgtgtctac

SEQ ID NO: 594118 - DNA, 33 bp, Homo sapien
aatcgtgcagtatcaatcaaagcatgtgtctac

SEQ ID NO: 594119 - DNA, 33 bp, Homo sapien
gaggacagaaatgaacccggagaagggctgctt

SEQ ID NO: 594120 - DNA, 33 bp, Homo sapien
gaggacagaaatgaacgcggagaagggctgctt

SEQ ID NO: 594121 - DNA, 33 bp, Homo sapien
tctcccttaagcatgaatcaaactgatcaccct

SEQ ID NO: 594122 - DNA, 33 bp, Homo sapien
tctcccttaagcatgagtcaaactgatcaccct

SEQ ID NO: 594123 - DNA, 33 bp, Homo sapien
tgtccactgcgagaacacgtgcctagtattgaa

SEQ ID NO: 594124 - DNA, 33 bp, Homo sapien
tgtccactgcgagaacgcgtgcctagtattgaa

SEQ ID NO: 594125 - DNA, 33 bp, Homo sapien
atgcagccaggaaggaagctataccttgcgaag

SEQ ID NO: 594126 - DNA, 33 bp, Homo sapien
atgcagccaggaaggaggctataccttgcgaag

SEQ ID NO: 594127 - DNA, 33 bp, Homo sapien
taaatgaatgtgctgaagcaaagtgcccatggt

SEQ ID NO: 594128 - DNA, 33 bp, Homo sapien
taaatgaatgtgctgaggcaaagtgcccatggt

SEQ ID NO: 594129 - DNA, 33 bp, Homo sapien
gccaccagaagcgttcacactgtttgtggccgt

SEQ ID NO: 594130 - DNA, 33 bp, Homo sapien
gccaccagaagcgttcgcactgtttgtggccgt

SEQ ID NO: 594131 - DNA, 33 bp, Homo sapien
ccaccaccgacatccacaagagaggtaaagctc

SEQ ID NO: 594132 - DNA, 33 bp, Homo sapien
ccaccaccgacatccagaagagaggtaaagctc

SEQ ID NO: 594133 - DNA, 33 bp, Homo sapien
tctgtatggcctagacacttttgagaaggatat

SEQ ID NO: 594134 - DNA, 33 bp, Homo sapien
tctgtatggcctagacgcttttgagaaggatat

SEQ ID NO: 594135 - DNA, 33 bp, Homo sapien
cttctggcaggcaagaagttatgctacttataa

SEQ ID NO: 594136 - DNA, 33 bp, Homo sapien
cttctggcaggcaagacgttatgctacttataa

SEQ ID NO: 594137 - DNA, 33 bp, Homo sapien
acatatctccaggtgaccaagacgggaaagaca

SEQ ID NO: 594138 - DNA, 33 bp, Homo sapien
acatatctccaggtgatcaagacgggaaagaca

SEQ ID NO: 594139 - DNA, 33 bp, Homo sapien
aggcaacagccaaaaaaccgatggagtcaatgg

SEQ ID NO: 594140 - DNA, 33 bp, Homo sapien
aggcaacagccaaaaagccgatggagtcaatgg

SEQ ID NO: 594141 - DNA, 33 bp, Homo sapien
cggttgtgagggtaagcatacaataatgctagt

SEQ ID NO: 594142 - DNA, 33 bp, Homo sapien
cggttgtgagggtaagtatacaataatgctagt

SEQ ID NO: 594143 - DNA, 33 bp, Homo sapien
caggttaggatcaagaaactatgagaaggacat

SEQ ID NO: 594144 - DNA, 33 bp, Homo sapien
caggttaggatcaagacactatgagaaggacat

SEQ ID NO: 594145 - DNA, 33 bp, Homo sapien
tctcggccagctctgaagcttgtggtttctaca

SEQ ID NO: 594146 - DNA, 33 bp, Homo sapien
tctcggccagctctgaggcttgtggtttctaca

SEQ ID NO: 594147 - DNA, 33 bp, Homo sapien
gatgcctgtccagcaaagtaaacttgagggctt

SEQ ID NO: 594148 - DNA, 33 bp, Homo sapien
gatgcctgtccagcaatgtaaacttgagggctt

SEQ ID NO: 594149 - DNA, 33 bp, Homo sapien
agagatgccgtcaacacgaaatgctgtatagta

SEQ ID NO: 594150 - DNA, 33 bp, Homo sapien
agagatgccgtcaacatgaaatgctgtatagta

SEQ ID NO: 594151 - DNA, 33 bp, Homo sapien
agaaaaccagcctcgactcccaaccagcgcatt

SEQ ID NO: 594152 - DNA, 33 bp, Homo sapien
agaaaaccagcctcgattcccaaccagcgcatt

SEQ ID NO: 594153 - DNA, 33 bp, Homo sapien
tgtaaggagatgtgtaagtgtgaagtcgacaag

SEQ ID NO: 594154 - DNA, 33 bp, Homo sapien
tgtaaggagatgtgtaggtgtgaagtcgacaag

SEQ ID NO: 594155 - DNA, 33 bp, Homo sapien
cactagcaaaattttcacttgctgtttctgtga

SEQ ID NO: 594156 - DNA, 33 bp, Homo sapien
cactagcaaaattttcgcttgctgtttctgtga

SEQ ID NO: 594157 - DNA, 33 bp, Homo sapien
ttctgggacaccccagaaggattgtggtgaagg

SEQ ID NO: 594158 - DNA, 33 bp, Homo sapien
ttctgggacaccccagtaggattgtggtgaagg

SEQ ID NO: 594159 - DNA, 33 bp, Homo sapien
ccatctttgacatatacagcctttcattcaaaa

SEQ ID NO: 594160 - DNA, 33 bp, Homo sapien
ccatctttgacatatatagcctttcattcaaaa

SEQ ID NO: 594161 - DNA, 33 bp, Homo sapien
ttgccgcacctgtcaacctaccacctaggtatt

SEQ ID NO: 594162 - DNA, 33 bp, Homo sapien
ttgccgcacctgtcaatctaccacctaggtatt

SEQ ID NO: 594163 - DNA, 33 bp, Homo sapien
agaaatgtacaaggatcaaaaagcttattttat

SEQ ID NO: 594164 - DNA, 33 bp, Homo sapien
agaaatgtacaaggatgaaaaagcttattttat

SEQ ID NO: 594165 - DNA, 33 bp, Homo sapien
atgcaagagaatgtacaactactagcactaaca

SEQ ID NO: 594166 - DNA, 33 bp, Homo sapien
atgcaagagaatgtacgactactagcactaaca

SEQ ID NO: 594167 - DNA, 33 bp, Homo sapien
tcttctctgacggcaacaataggacatctgcat

SEQ ID NO: 594168 - DNA, 33 bp, Homo sapien
tcttctctgacggcaataataggacatctgcat

SEQ ID NO: 594169 - DNA, 33 bp, Homo sapien
agagtactgctactaaaggaacccaagctctga

SEQ ID NO: 594170 - DNA, 33 bp, Homo sapien
agagtactgctactaacggaacccaagctctga

SEQ ID NO: 594171 - DNA, 33 bp, Homo sapien
gaaacaataaatgagacgtccctgtttatcaga

SEQ ID NO: 594172 - DNA, 33 bp, Homo sapien
gaaacaataaatgagatgtccctgtttatcaga

SEQ ID NO: 594173 - DNA, 33 bp, Homo sapien
gatgcctcatggttgacggtgatgctatcatgg

SEQ ID NO: 594174 - DNA, 33 bp, Homo sapien
gatgcctcatggttgatggtgatgctatcatgg

SEQ ID NO: 594175 - DNA, 33 bp, Homo sapien
taggaccgcccagggaacagtggcttgagccgc

SEQ ID NO: 594176 - DNA, 33 bp, Homo sapien
taggaccgcccagggagcagtggcttgagccgc

SEQ ID NO: 594177 - DNA, 33 bp, Homo sapien
caggactccaggaccacgagcttcctgctgggg

SEQ ID NO: 594178 - DNA, 33 bp, Homo sapien
caggactccaggaccatgagcttcctgctgggg

SEQ ID NO: 594179 - DNA, 33 bp, Homo sapien
atctttgcctgcccaaatgtaggagtttatagt

SEQ ID NO: 594180 - DNA, 33 bp, Homo sapien
atctttgcctgcccaagtgtaggagtttatagt

SEQ ID NO: 594181 - DNA, 33 bp, Homo sapien
taggattcaaactcacacctcgactcagggtca

SEQ ID NO: 594182 - DNA, 33 bp, Homo sapien
taggattcaaactcacccctcgactcagggtca

SEQ ID NO: 594183 - DNA, 33 bp, Homo sapien
cttggcctttctcaaaatgcaggggtttgctct

SEQ ID NO: 594184 - DNA, 33 bp, Homo sapien
cttggcctttctcaaagtgcaggggtttgctct

SEQ ID NO: 594185 - DNA, 33 bp, Homo sapien
ggaggagacgagaaagaaggaaggttgccctag

SEQ ID NO: 594186 - DNA, 33 bp, Homo sapien
ggaggagacgagaaaggaggaaggttgccctag

SEQ ID NO: 594187 - DNA, 33 bp, Homo sapien
gcatcaagactttgtcaacggcagcagcctcgc

SEQ ID NO: 594188 - DNA, 33 bp, Homo sapien
gcatcaagactttgtcgacggcagcagcctcgc

SEQ ID NO: 594189 - DNA, 33 bp, Homo sapien
gtggaaactcgtagccactcagtttcctcatct

SEQ ID NO: 594190 - DNA, 33 bp, Homo sapien
gtggaaactcgtagccgctcagtttcctcatct

SEQ ID NO: 594191 - DNA, 33 bp, Homo sapien
gagccctgtaacctgacggagcagactgctctt

SEQ ID NO: 594192 - DNA, 33 bp, Homo sapien
gagccctgtaacctgatggagcagactgctctt

SEQ ID NO: 594193 - DNA, 33 bp, Homo sapien
aacgtggtgacattagcaaaagaagagagatgg

SEQ ID NO: 594194 - DNA, 33 bp, Homo sapien
aacgtggtgacattaggaaaagaagagagatgg

SEQ ID NO: 594195 - DNA, 33 bp, Homo sapien
ttattccttttttcagcacaaaggtgagcttca

SEQ ID NO: 594196 - DNA, 33 bp, Homo sapien
ttattccttttttcagtacaaaggtgagcttca

SEQ ID NO: 594197 - DNA, 33 bp, Homo sapien
aggtggggaataacaacgaacaattattctgag

SEQ ID NO: 594198 - DNA, 33 bp, Homo sapien
aggtggggaataacaatgaacaattattctgag

SEQ ID NO: 594199 - DNA, 33 bp, Homo sapien
catgggggtacgcctacgtggaaggttgcagaa

SEQ ID NO: 594200 - DNA, 33 bp, Homo sapien
catgggggtacgcctatgtggaaggttgcagaa

SEQ ID NO: 594201 - DNA, 33 bp, Homo sapien
gcaggatcatgcctgcaatgttcaggaaaccga

SEQ ID NO: 594202 - DNA, 33 bp, Homo sapien
gcaggatcatgcctgcgatgttcaggaaaccga

SEQ ID NO: 594203 - DNA, 33 bp, Homo sapien
taatagcactttcaggaagacttaattcaatta

SEQ ID NO: 594204 - DNA, 33 bp, Homo sapien
taatagcactttcagggagacttaattcaatta

SEQ ID NO: 594205 - DNA, 33 bp, Homo sapien
ctacatgatgctgtacaacaccaacatttgtat

SEQ ID NO: 594206 - DNA, 33 bp, Homo sapien
ctacatgatgctgtacgacaccaacatttgtat

SEQ ID NO: 594207 - DNA, 33 bp, Homo sapien
taaaaggagccaatgaaacatcttcaacagaac

SEQ ID NO: 594208 - DNA, 33 bp, Homo sapien
taaaaggagccaatgatacatcttcaacagaac

SEQ ID NO: 594209 - DNA, 33 bp, Homo sapien
aaaatgtgttgccaaacggtgagataaatagag

SEQ ID NO: 594210 - DNA, 33 bp, Homo sapien
aaaatgtgttgccaaatggtgagataaatagag

SEQ ID NO: 594211 - DNA, 33 bp, Homo sapien
ctgtgccccagagttccagcctgtgcctcctga

SEQ ID NO: 594212 - DNA, 33 bp, Homo sapien
ctgtgccccagagttctagcctgtgcctcctga

SEQ ID NO: 594213 - DNA, 33 bp, Homo sapien
cccttccattgcgtgaagatgcaggcagaaagt

SEQ ID NO: 594214 - DNA, 33 bp, Homo sapien
cccttccattgcgtgaggatgcaggcagaaagt

SEQ ID NO: 594215 - DNA, 33 bp, Homo sapien
acattccagggtagaagttagcatttccaaacc

SEQ ID NO: 594216 - DNA, 33 bp, Homo sapien
acattccagggtagaatttagcatttccaaacc

SEQ ID NO: 594217 - DNA, 33 bp, Homo sapien
ctagtgactgctccacaagatgccagtgctgtt

SEQ ID NO: 594218 - DNA, 33 bp, Homo sapien
ctagtgactgctccacgagatgccagtgctgtt

SEQ ID NO: 594219 - DNA, 33 bp, Homo sapien
ggagatctacacacccaaaggctttgctttcct

SEQ ID NO: 594220 - DNA, 33 bp, Homo sapien
ggagatctacacacccgaaggctttgctttcct

SEQ ID NO: 594221 - DNA, 33 bp, Homo sapien
gactggcaacaggaagacttccccaaaggaccc

SEQ ID NO: 594222 - DNA, 33 bp, Homo sapien
gactggcaacaggaagccttccccaaaggaccc

SEQ ID NO: 594223 - DNA, 33 bp, Homo sapien
tttgaagtctggcaaacgtgttttaacatcatt

SEQ ID NO: 594224 - DNA, 33 bp, Homo sapien
tttgaagtctggcaaatgtgttttaacatcatt

SEQ ID NO: 594225 - DNA, 33 bp, Homo sapien
catgccggcagcatcacggttcttatcttttct

SEQ ID NO: 594226 - DNA, 33 bp, Homo sapien
catgccggcagcatcatggttcttatcttttct

SEQ ID NO: 594227 - DNA, 33 bp, Homo sapien
cctgaatccggctcaacgaagacaaagatgatg

SEQ ID NO: 594228 - DNA, 33 bp, Homo sapien
cctgaatccggctcaatgaagacaaagatgatg

SEQ ID NO: 594229 - DNA, 33 bp, Homo sapien
tcactgttactaaatacccattacttggacttg

SEQ ID NO: 594230 - DNA, 33 bp, Homo sapien
tcactgttactaaatatccattacttggacttg

SEQ ID NO: 594231 - DNA, 33 bp, Homo sapien
acgtgcaactatttcaaaaactggagcacatga

SEQ ID NO: 594232 - DNA, 33 bp, Homo sapien
acgtgcaactatttcataaactggagcacatga

SEQ ID NO: 594233 - DNA, 33 bp, Homo sapien
gattcgagtcttccagaaacaccacctcactct

SEQ ID NO: 594234 - DNA, 33 bp, Homo sapien
gattcgagtcttccagcaacaccacctcactct

SEQ ID NO: 594235 - DNA, 33 bp, Homo sapien
acttgccttctggatgaaatgttaactgctatt

SEQ ID NO: 594236 - DNA, 33 bp, Homo sapien
acttgccttctggatggaatgttaactgctatt

SEQ ID NO: 594237 - DNA, 33 bp, Homo sapien
ctccctccgtttccagacatgacttgaccaagg

SEQ ID NO: 594238 - DNA, 33 bp, Homo sapien
ctccctccgtttccaggcatgacttgaccaagg

SEQ ID NO: 594239 - DNA, 33 bp, Homo sapien
agctgatccactgacgaacaatcatccacacca

SEQ ID NO: 594240 - DNA, 33 bp, Homo sapien
agctgatccactgacgtacaatcatccacacca

SEQ ID NO: 594241 - DNA, 33 bp, Homo sapien
ttggatgctagattaaaaagaaaatgcaagaga

SEQ ID NO: 594242 - DNA, 33 bp, Homo sapien
ttggatgctagattaagaagaaaatgcaagaga

SEQ ID NO: 594243 - DNA, 33 bp, Homo sapien
ccctgggatgaacaacccccttgctcaggtggc

SEQ ID NO: 594244 - DNA, 33 bp, Homo sapien
ccctgggatgaacaacgcccttgctcaggtggc

SEQ ID NO: 594245 - DNA, 33 bp, Homo sapien
atggctcccacagccacagaaaggagatacaaa

SEQ ID NO: 594246 - DNA, 33 bp, Homo sapien
atggctcccacagccagagaaaggagatacaaa

SEQ ID NO: 594247 - DNA, 33 bp, Homo sapien
caaccccactacttagccatcatttagagacta

SEQ ID NO: 594248 - DNA, 33 bp, Homo sapien
caaccccactacttagtcatcatttagagacta

SEQ ID NO: 594249 - DNA, 33 bp, Homo sapien
tggagctcctgctggcacggaagatcagtgtca

SEQ ID NO: 594250 - DNA, 33 bp, Homo sapien
tggagctcctgctggcgcggaagatcagtgtca

SEQ ID NO: 594251 - DNA, 33 bp, Homo sapien
tgtagttaatgtcactcaattatacactttaaa

SEQ ID NO: 594252 - DNA, 33 bp, Homo sapien
tgtagttaatgtcactgaattatacactttaaa

SEQ ID NO: 594253 - DNA, 33 bp, Homo sapien
tctcttccagctttgcaatcgtcatctggggcg

SEQ ID NO: 594254 - DNA, 33 bp, Homo sapien
tctcttccagctttgcgatcgtcatctggggcg

SEQ ID NO: 594255 - DNA, 33 bp, Homo sapien
gggctgtttatagacaacgaattcaccatcgaa

SEQ ID NO: 594256 - DNA, 33 bp, Homo sapien
gggctgtttatagacaccgaattcaccatcgaa

SEQ ID NO: 594257 - DNA, 33 bp, Homo sapien
actccagcggctctcacgtcctcccacttccat

SEQ ID NO: 594258 - DNA, 33 bp, Homo sapien
actccagcggctctcatgtcctcccacttccat

SEQ ID NO: 594259 - DNA, 33 bp, Homo sapien
cactggttttcagttacattatctctcttactt

SEQ ID NO: 594260 - DNA, 33 bp, Homo sapien
cactggttttcagttatattatctctcttactt

SEQ ID NO: 594261 - DNA, 33 bp, Homo sapien
gggatctccggttccgaatcatccacgagacgg

SEQ ID NO: 594262 - DNA, 33 bp, Homo sapien
gggatctccggttccgcatcatccacgagacgg

SEQ ID NO: 594263 - DNA, 33 bp, Homo sapien
caggtgagtgctgggaatactgaagtggtgatt

SEQ ID NO: 594264 - DNA, 33 bp, Homo sapien
caggtgagtgctgggagtactgaagtggtgatt

SEQ ID NO: 594265 - DNA, 33 bp, Homo sapien
gggtgtcgcccggcggcatttgcaattcaataa

SEQ ID NO: 594266 - DNA, 33 bp, Homo sapien
gggtgtcgcccggcggtatttgcaattcaataa

SEQ ID NO: 594267 - DNA, 33 bp, Homo sapien
ggataaataattaaaacgtgctaaattgagcct

SEQ ID NO: 594268 - DNA, 33 bp, Homo sapien
ggataaataattaaaatgtgctaaattgagcct

SEQ ID NO: 594269 - DNA, 33 bp, Homo sapien
tcagcttctggcccccaaagagtcccccgctct

SEQ ID NO: 594270 - DNA, 33 bp, Homo sapien
tcagcttctggcccccgaagagtcccccgctct

SEQ ID NO: 594271 - DNA, 33 bp, Homo sapien
agaagtgggtgttttaaggaaggaattggccca

SEQ ID NO: 594272 - DNA, 33 bp, Homo sapien
agaagtgggtgttttagggaaggaattggccca

SEQ ID NO: 594273 - DNA, 33 bp, Homo sapien
atctcaattgaaataacatttggatttgttatc

SEQ ID NO: 594274 - DNA, 33 bp, Homo sapien
atctcaattgaaataatatttggatttgttatc

SEQ ID NO: 594275 - DNA, 33 bp, Homo sapien
ttatgtaaatgcctgcaccttgctttttttatt

SEQ ID NO: 594276 - DNA, 33 bp, Homo sapien
ttatgtaaatgcctgcgccttgctttttttatt

SEQ ID NO: 594277 - DNA, 33 bp, Homo sapien
aagactgcggctcaagcctaagacctatctagt

SEQ ID NO: 594278 - DNA, 33 bp, Homo sapien
aagactgcggctcaagtctaagacctatctagt

SEQ ID NO: 594279 - DNA, 33 bp, Homo sapien
tttttaattttatctaccaagcctctctaatag

SEQ ID NO: 594280 - DNA, 33 bp, Homo sapien
tttttaattttatctatcaagcctctctaatag

SEQ ID NO: 594281 - DNA, 33 bp, Homo sapien
ctcacaggtggccaaacgtgaaatgaatgaatc

SEQ ID NO: 594282 - DNA, 33 bp, Homo sapien
ctcacaggtggccaaaggtgaaatgaatgaatc

SEQ ID NO: 594283 - DNA, 33 bp, Homo sapien
ttttatgctaaaatgtaaacacttcttagaaac

SEQ ID NO: 594284 - DNA, 33 bp, Homo sapien
ttttatgctaaaatgtgaacacttcttagaaac

SEQ ID NO: 594285 - DNA, 33 bp, Homo sapien
tcaaggttgaagggaacctttagtcatgcttgt

SEQ ID NO: 594286 - DNA, 33 bp, Homo sapien
tcaaggttgaagggaatctttagtcatgcttgt

SEQ ID NO: 594287 - DNA, 33 bp, Homo sapien
ccagaaccttccaataagttaagaatcttaagc

SEQ ID NO: 594288 - DNA, 33 bp, Homo sapien
ccagaaccttccaatatgttaagaatcttaagc

SEQ ID NO: 594289 - DNA, 33 bp, Homo sapien
ctgcgatttccttcacagcaccgtcacccgtgt

SEQ ID NO: 594290 - DNA, 33 bp, Homo sapien
ctgcgatttccttcacggcaccgtcacccgtgt

SEQ ID NO: 594291 - DNA, 33 bp, Homo sapien
ataagaattgaacaaaaggagtgagtggaaaag

SEQ ID NO: 594292 - DNA, 33 bp, Homo sapien
ataagaattgaacaaagggagtgagtggaaaag

SEQ ID NO: 594293 - DNA, 33 bp, Homo sapien
ctcctacggaaactacaggaaaatgtgctttcc

SEQ ID NO: 594294 - DNA, 33 bp, Homo sapien
ctcctacggaaactacgggaaaatgtgctttcc

SEQ ID NO: 594295 - DNA, 33 bp, Homo sapien
cgtttgcagatatcacaatatttcaccctaaat

SEQ ID NO: 594296 - DNA, 33 bp, Homo sapien
cgtttgcagatatcacgatatttcaccctaaat

SEQ ID NO: 594297 - DNA, 33 bp, Homo sapien
tttcaaacctacggaacaacccatatagccttc

SEQ ID NO: 594298 - DNA, 33 bp, Homo sapien
tttcaaacctacggaataacccatatagccttc

SEQ ID NO: 594299 - DNA, 33 bp, Homo sapien
aataattgcacactcaatatgtgccaagaattt

SEQ ID NO: 594300 - DNA, 33 bp, Homo sapien
aataattgcacactcactatgtgccaagaattt

SEQ ID NO: 594301 - DNA, 33 bp, Homo sapien
tgtaaaaggctgttacaaaagcttggcttctgt

SEQ ID NO: 594302 - DNA, 33 bp, Homo sapien
tgtaaaaggctgttacgaaagcttggcttctgt

SEQ ID NO: 594303 - DNA, 33 bp, Homo sapien
ctttgtataatcaaagcctactatggggaaaga

SEQ ID NO: 594304 - DNA, 33 bp, Homo sapien
ctttgtataatcaaagtctactatggggaaaga

SEQ ID NO: 594305 - DNA, 33 bp, Homo sapien
gcgtctctggcgtggcaccgggccctgcgggtg

SEQ ID NO: 594306 - DNA, 33 bp, Homo sapien
gcgtctctggcgtggcgccgggccctgcgggtg

SEQ ID NO: 594307 - DNA, 33 bp, Homo sapien
aagaccttagaacaggaacaggagccaggcacg

SEQ ID NO: 594308 - DNA, 33 bp, Homo sapien
aagaccttagaacaggtacaggagccaggcacg

SEQ ID NO: 594309 - DNA, 33 bp, Homo sapien
catgctgctaaggacaacgtctgagaagtggcc

SEQ ID NO: 594310 - DNA, 33 bp, Homo sapien
catgctgctaaggacagcgtctgagaagtggcc

SEQ ID NO: 594311 - DNA, 33 bp, Homo sapien
taaccctcttcctctcacagatgggcctagcgg

SEQ ID NO: 594312 - DNA, 33 bp, Homo sapien
taaccctcttcctctcgcagatgggcctagcgg

SEQ ID NO: 594313 - DNA, 33 bp, Homo sapien
ctctctctctcgcatcccatttctgcagcttgc

SEQ ID NO: 594314 - DNA, 33 bp, Homo sapien
ctctctctctcgcatctcatttctgcagcttgc

SEQ ID NO: 594315 - DNA, 33 bp, Homo sapien
cgacagcacaaaggaaatggccgtgggtgtttc

SEQ ID NO: 594316 - DNA, 33 bp, Homo sapien
cgacagcacaaaggaagtggccgtgggtgtttc

SEQ ID NO: 594317 - DNA, 33 bp, Homo sapien
agcagaggttctgtacaaaaggggagtcttaca

SEQ ID NO: 594318 - DNA, 33 bp, Homo sapien
agcagaggttctgtaccaaaggggagtcttaca

SEQ ID NO: 594319 - DNA, 33 bp, Homo sapien
atcaatagaatgcttacggcaaaccaggtgctg

SEQ ID NO: 594320 - DNA, 33 bp, Homo sapien
atcaatagaatgcttatggcaaaccaggtgctg

SEQ ID NO: 594321 - DNA, 33 bp, Homo sapien
accccatccgagtgaacgctaatgaggacgggc

SEQ ID NO: 594322 - DNA, 33 bp, Homo sapien
accccatccgagtgaatgctaatgaggacgggc

SEQ ID NO: 594323 - DNA, 33 bp, Homo sapien
tgtcatttgagatccacctgaattctgtacctg

SEQ ID NO: 594324 - DNA, 33 bp, Homo sapien
tgtcatttgagatccagctgaattctgtacctg

SEQ ID NO: 594325 - DNA, 33 bp, Homo sapien
gtctggtcctgcgtacaatgaaacagcatctcc

SEQ ID NO: 594326 - DNA, 33 bp, Homo sapien
gtctggtcctgcgtacgatgaaacagcatctcc

SEQ ID NO: 594327 - DNA, 33 bp, Homo sapien
ggctgctgttggagccaagacaagcaacacaga

SEQ ID NO: 594328 - DNA, 33 bp, Homo sapien
ggctgctgttggagccgagacaagcaacacaga

SEQ ID NO: 594329 - DNA, 33 bp, Homo sapien
caagatgtccttgagaacgtcagacatcgcact

SEQ ID NO: 594330 - DNA, 33 bp, Homo sapien
caagatgtccttgagagcgtcagacatcgcact

SEQ ID NO: 594331 - DNA, 33 bp, Homo sapien
tcgcacttgtctcagcaacctggtcctggtgaa

SEQ ID NO: 594332 - DNA, 33 bp, Homo sapien
tcgcacttgtctcagccacctggtcctggtgaa

SEQ ID NO: 594333 - DNA, 33 bp, Homo sapien
cctgctcccaatctcacgtcttcaggtgactaa

SEQ ID NO: 594334 - DNA, 33 bp, Homo sapien
cctgctcccaatctcatgtcttcaggtgactaa

SEQ ID NO: 594335 - DNA, 33 bp, Homo sapien
cccaccacatcctcaccataaaaaagacaacag

SEQ ID NO: 594336 - DNA, 33 bp, Homo sapien
cccaccacatcctcactataaaaaagacaacag

SEQ ID NO: 594337 - DNA, 33 bp, Homo sapien
gcttggagatttttaactggaagaaccagaaca

SEQ ID NO: 594338 - DNA, 33 bp, Homo sapien
gcttggagatttttaattggaagaaccagaaca

SEQ ID NO: 594339 - DNA, 33 bp, Homo sapien
ggtggagatgagatacaatgggagcttgtgggg

SEQ ID NO: 594340 - DNA, 33 bp, Homo sapien
ggtggagatgagatacgatgggagcttgtgggg

SEQ ID NO: 594341 - DNA, 33 bp, Homo sapien
atacaccaatggttgcaaaatcagtgaggaaga

SEQ ID NO: 594342 - DNA, 33 bp, Homo sapien
atacaccaatggttgcgaaatcagtgaggaaga

SEQ ID NO: 594343 - DNA, 33 bp, Homo sapien
agggtttctttagaggaatgttctaattgcaaa

SEQ ID NO: 594344 - DNA, 33 bp, Homo sapien
agggtttctttagaggtatgttctaattgcaaa

SEQ ID NO: 594345 - DNA, 33 bp, Homo sapien
gtcaaagctcaaacaactgcttttacgtggtgc

SEQ ID NO: 594346 - DNA, 33 bp, Homo sapien
gtcaaagctcaaacaattgcttttacgtggtgc

SEQ ID NO: 594347 - DNA, 33 bp, Homo sapien
gctagtacacacttgccatccatcagagttcct

SEQ ID NO: 594348 - DNA, 33 bp, Homo sapien
gctagtacacacttgctatccatcagagttcct

SEQ ID NO: 594349 - DNA, 33 bp, Homo sapien
taaagtgaaaaatagaacagtggctcttgactg

SEQ ID NO: 594350 - DNA, 33 bp, Homo sapien
taaagtgaaaaatagagcagtggctcttgactg

SEQ ID NO: 594351 - DNA, 33 bp, Homo sapien
gagatcatccaacagacaattctcatctccacc

SEQ ID NO: 594352 - DNA, 33 bp, Homo sapien
gagatcatccaacagataattctcatctccacc

SEQ ID NO: 594353 - DNA, 33 bp, Homo sapien
ctccaaaaagagaaaaatgttaaaagctggaaa

SEQ ID NO: 594354 - DNA, 33 bp, Homo sapien
ctccaaaaagagaaaactgttaaaagctggaaa

SEQ ID NO: 594355 - DNA, 33 bp, Homo sapien
gggaggggtcatctcactccagcgaagtcatct

SEQ ID NO: 594356 - DNA, 33 bp, Homo sapien
gggaggggtcatctcattccagcgaagtcatct

SEQ ID NO: 594357 - DNA, 33 bp, Homo sapien
tccaataataaatccacgtgcgctaatgttcgt

SEQ ID NO: 594358 - DNA, 33 bp, Homo sapien
tccaataataaatccatgtgcgctaatgttcgt

SEQ ID NO: 594359 - DNA, 33 bp, Homo sapien
gcaccatgaaatggaacggcgaggctccccaac

SEQ ID NO: 594360 - DNA, 33 bp, Homo sapien
gcaccatgaaatggaatggcgaggctccccaac

SEQ ID NO: 594361 - DNA, 33 bp, Homo sapien
aacataaatatcccaactgtctacaagatgact

SEQ ID NO: 594362 - DNA, 33 bp, Homo sapien
aacataaatatcccaattgtctacaagatgact

SEQ ID NO: 594363 - DNA, 33 bp, Homo sapien
gggcagttgtgctttcccaggcctggccggggc

SEQ ID NO: 594364 - DNA, 33 bp, Homo sapien
gggcagttgtgctttctcaggcctggccggggc

SEQ ID NO: 594365 - DNA, 33 bp, Homo sapien
gactccttacggcatacgtgtttctgcctgttt

SEQ ID NO: 594366 - DNA, 33 bp, Homo sapien
gactccttacggcatatgtgtttctgcctgttt

SEQ ID NO: 594367 - DNA, 33 bp, Homo sapien
ctcgaagcacaggtaaaggctaaccacttcaca

SEQ ID NO: 594368 - DNA, 33 bp, Homo sapien
ctcgaagcacaggtaacggctaaccacttcaca

SEQ ID NO: 594369 - DNA, 33 bp, Homo sapien
aaatcacaactgctgacgatcacgagataatcc

SEQ ID NO: 594370 - DNA, 33 bp, Homo sapien
aaatcacaactgctgatgatcacgagataatcc

SEQ ID NO: 594371 - DNA, 33 bp, Homo sapien
gaaaatccaaactacaaactggcatacaagact

SEQ ID NO: 594372 - DNA, 33 bp, Homo sapien
gaaaatccaaactacagactggcatacaagact

SEQ ID NO: 594373 - DNA, 33 bp, Homo sapien
ctgattaaaacttcccacttccaaatatgaaga

SEQ ID NO: 594374 - DNA, 33 bp, Homo sapien
ctgattaaaacttcccgcttccaaatatgaaga

SEQ ID NO: 594375 - DNA, 33 bp, Homo sapien
tcaaacacaggtatcacgtgatgaacaatcagg

SEQ ID NO: 594376 - DNA, 33 bp, Homo sapien
tcaaacacaggtatcatgtgatgaacaatcagg

SEQ ID NO: 594377 - DNA, 33 bp, Homo sapien
gggatttggtcacacaaaggctactggtgaccc

SEQ ID NO: 594378 - DNA, 33 bp, Homo sapien
gggatttggtcacacagaggctactggtgaccc

SEQ ID NO: 594379 - DNA, 33 bp, Homo sapien
acaaagacacaagaacacagcagatattggtaa

SEQ ID NO: 594380 - DNA, 33 bp, Homo sapien
acaaagacacaagaacgcagcagatattggtaa

SEQ ID NO: 594381 - DNA, 33 bp, Homo sapien
cctaccctcagagagacgcttcctcactcccca

SEQ ID NO: 594382 - DNA, 33 bp, Homo sapien
cctaccctcagagagatgcttcctcactcccca

SEQ ID NO: 594383 - DNA, 33 bp, Homo sapien
aattggagtttcccaacgggttcagtattagta

SEQ ID NO: 594384 - DNA, 33 bp, Homo sapien
aattggagtttcccaatgggttcagtattagta

SEQ ID NO: 594385 - DNA, 33 bp, Homo sapien
ccacctctcacgaaaacggctaaaaacggctgg

SEQ ID NO: 594386 - DNA, 33 bp, Homo sapien
ccacctctcacgaaaatggctaaaaacggctgg

SEQ ID NO: 594387 - DNA, 33 bp, Homo sapien
cttcttttgtcttctacgatctatgaaagataa

SEQ ID NO: 594388 - DNA, 33 bp, Homo sapien
cttcttttgtcttctaggatctatgaaagataa

SEQ ID NO: 594389 - DNA, 33 bp, Homo sapien
tcagctcaggaagcctaaccttttgaggggccc

SEQ ID NO: 594390 - DNA, 33 bp, Homo sapien
tcagctcaggaagcctgaccttttgaggggccc

SEQ ID NO: 594391 - DNA, 33 bp, Homo sapien
tcccattgctgggcacaatatccacacccaaac

SEQ ID NO: 594392 - DNA, 33 bp, Homo sapien
tcccattgctgggcacgatatccacacccaaac

SEQ ID NO: 594393 - DNA, 33 bp, Homo sapien
gtgtctacacatccaacaatcagttttcgtaac

SEQ ID NO: 594394 - DNA, 33 bp, Homo sapien
gtgtctacacatccaagaatcagttttcgtaac

SEQ ID NO: 594395 - DNA, 33 bp, Homo sapien
ccatatcacatagtcacggggctgtggaggccc

SEQ ID NO: 594396 - DNA, 33 bp, Homo sapien
ccatatcacatagtcatggggctgtggaggccc

SEQ ID NO: 594397 - DNA, 33 bp, Homo sapien
ttagggcgcagggtgaaaaggagattaggagga

SEQ ID NO: 594398 - DNA, 33 bp, Homo sapien
ttagggcgcagggtgacaaggagattaggagga

SEQ ID NO: 594399 - DNA, 33 bp, Homo sapien
tggcatcagggccgcaaaatagtcatatcgggg

SEQ ID NO: 594400 - DNA, 33 bp, Homo sapien
tggcatcagggccgcagaatagtcatatcgggg

SEQ ID NO: 594401 - DNA, 33 bp, Homo sapien
cagtctcatagagctgcagaacagtctcataga

SEQ ID NO: 594402 - DNA, 33 bp, Homo sapien
cagtctcatagagctggagaacagtctcataga

SEQ ID NO: 594403 - DNA, 33 bp, Homo sapien
caaagacactcatgaaagttctttgtatgtact

SEQ ID NO: 594404 - DNA, 33 bp, Homo sapien
caaagacactcatgaaggttctttgtatgtact

SEQ ID NO: 594405 - DNA, 33 bp, Homo sapien
gttccaagcactgagacgagggatctgtgggag

SEQ ID NO: 594406 - DNA, 33 bp, Homo sapien
gttccaagcactgagatgagggatctgtgggag

SEQ ID NO: 594407 - DNA, 33 bp, Homo sapien
cccagctcccgcacgacgctttttagcctacaa

SEQ ID NO: 594408 - DNA, 33 bp, Homo sapien
cccagctcccgcacgatgctttttagcctacaa

SEQ ID NO: 594409 - DNA, 33 bp, Homo sapien
gcagatttctggccacactctttgatcacaaat

SEQ ID NO: 594410 - DNA, 33 bp, Homo sapien
gcagatttctggccacgctctttgatcacaaat

SEQ ID NO: 594411 - DNA, 33 bp, Homo sapien
aaggaatgaaaacttaccagctaaatgaaagct

SEQ ID NO: 594412 - DNA, 33 bp, Homo sapien
aaggaatgaaaacttagcagctaaatgaaagct

SEQ ID NO: 594413 - DNA, 33 bp, Homo sapien
cttggccctactcttacatccggagccagcggt

SEQ ID NO: 594414 - DNA, 33 bp, Homo sapien
cttggccctactcttatatccggagccagcggt

SEQ ID NO: 594415 - DNA, 33 bp, Homo sapien
gataaaatactacaaacatggtgcagtatatac

SEQ ID NO: 594416 - DNA, 33 bp, Homo sapien
gataaaatactacaaatatggtgcagtatatac

SEQ ID NO: 594417 - DNA, 33 bp, Homo sapien
tataaccttccaaaaaattcaacatcatcttcc

SEQ ID NO: 594418 - DNA, 33 bp, Homo sapien
tataaccttccaaaaacttcaacatcatcttcc

SEQ ID NO: 594419 - DNA, 33 bp, Homo sapien
aatgctcagtcgttgcaagaaccatgatgcagg

SEQ ID NO: 594420 - DNA, 33 bp, Homo sapien
aatgctcagtcgttgcgagaaccatgatgcagg

SEQ ID NO: 594421 - DNA, 33 bp, Homo sapien
cacacatactgacacacgttcacacttacacac

SEQ ID NO: 594422 - DNA, 33 bp, Homo sapien
cacacatactgacacatgttcacacttacacac

SEQ ID NO: 594423 - DNA, 33 bp, Homo sapien
cactggaccatgactaacagtgttgccaggagc

SEQ ID NO: 594424 - DNA, 33 bp, Homo sapien
cactggaccatgactagcagtgttgccaggagc

SEQ ID NO: 594425 - DNA, 33 bp, Homo sapien
tgcattgagttagggaagaaggagatttgtgac

SEQ ID NO: 594426 - DNA, 33 bp, Homo sapien
tgcattgagttagggacgaaggagatttgtgac

SEQ ID NO: 594427 - DNA, 33 bp, Homo sapien
tccaggcagctctaccaatggccgtgcatgaaa

SEQ ID NO: 594428 - DNA, 33 bp, Homo sapien
tccaggcagctctaccgatggccgtgcatgaaa

SEQ ID NO: 594429 - DNA, 33 bp, Homo sapien
agcaccaggaagcaccaacgtgaggtccccgtg

SEQ ID NO: 594430 - DNA, 33 bp, Homo sapien
agcaccaggaagcaccgacgtgaggtccccgtg

SEQ ID NO: 594431 - DNA, 33 bp, Homo sapien
cctttccaaccttcataagtgcttaggaccaag

SEQ ID NO: 594432 - DNA, 33 bp, Homo sapien
cctttccaaccttcatgagtgcttaggaccaag

SEQ ID NO: 594433 - DNA, 33 bp, Homo sapien
accacagccatgcgccaccacagctggctcatt

SEQ ID NO: 594434 - DNA, 33 bp, Homo sapien
accacagccatgcgcccccacagctggctcatt

SEQ ID NO: 594435 - DNA, 33 bp, Homo sapien
ttggggtaaaagaatcccatctaatccaaagaa

SEQ ID NO: 594436 - DNA, 33 bp, Homo sapien
ttggggtaaaagaatctcatctaatccaaagaa

SEQ ID NO: 594437 - DNA, 33 bp, Homo sapien
ttaatggtcgtgaagaagttgatggatgtctgc

SEQ ID NO: 594438 - DNA, 33 bp, Homo sapien
ttaatggtcgtgaagacgttgatggatgtctgc

SEQ ID NO: 594439 - DNA, 33 bp, Homo sapien
aacactctcatgacaaccttacggcctgcctgt

SEQ ID NO: 594440 - DNA, 33 bp, Homo sapien
aacactctcatgacaagcttacggcctgcctgt

SEQ ID NO: 594441 - DNA, 33 bp, Homo sapien
cgggtatggaggcggcagcagagtgccatagac

SEQ ID NO: 594442 - DNA, 33 bp, Homo sapien
cgggtatggaggcggccgcagagtgccatagac

SEQ ID NO: 594443 - DNA, 33 bp, Homo sapien
aaaggcaccattttaaagcaaagtaaacaaaaa

SEQ ID NO: 594444 - DNA, 33 bp, Homo sapien
aaaggcaccattttaacgcaaagtaaacaaaaa

SEQ ID NO: 594445 - DNA, 33 bp, Homo sapien
tacgactttgtcctaaggaatttgatctgtttg

SEQ ID NO: 594446 - DNA, 33 bp, Homo sapien
tacgactttgtcctaatgaatttgatctgtttg

SEQ ID NO: 594447 - DNA, 33 bp, Homo sapien
aagaagaaactctgacaacattaccttcacagg

SEQ ID NO: 594448 - DNA, 33 bp, Homo sapien
aagaagaaactctgacgacattaccttcacagg

SEQ ID NO: 594449 - DNA, 33 bp, Homo sapien
ggacccttccttgagacggaatatacaaatggg

SEQ ID NO: 594450 - DNA, 33 bp, Homo sapien
ggacccttccttgagatggaatatacaaatggg

SEQ ID NO: 594451 - DNA, 33 bp, Homo sapien
ccttgggtcccttgaggactgtgtcttggtcac

SEQ ID NO: 594452 - DNA, 33 bp, Homo sapien
ccttgggtcccttgagtactgtgtcttggtcac

SEQ ID NO: 594453 - DNA, 33 bp, Homo sapien
tgccttcttccctttccctcactgggttatatc

SEQ ID NO: 594454 - DNA, 33 bp, Homo sapien
tgccttcttccctttctctcactgggttatatc

SEQ ID NO: 594455 - DNA, 33 bp, Homo sapien
ctcatcgctgggattcacatcttaaatattaag

SEQ ID NO: 594456 - DNA, 33 bp, Homo sapien
ctcatcgctgggattcgcatcttaaatattaag

SEQ ID NO: 594457 - DNA, 33 bp, Homo sapien
ttgtctttcccgtctcccctgccaggactcctg

SEQ ID NO: 594458 - DNA, 33 bp, Homo sapien
ttgtctttcccgtctctcctgccaggactcctg

SEQ ID NO: 594459 - DNA, 33 bp, Homo sapien
gaacaaaaaattgaacagaatgcataaacaaag

SEQ ID NO: 594460 - DNA, 33 bp, Homo sapien
gaacaaaaaattgaacggaatgcataaacaaag

SEQ ID NO: 594461 - DNA, 33 bp, Homo sapien
aagcaaaaaagaaggaagcgacgaaagacaaag

SEQ ID NO: 594462 - DNA, 33 bp, Homo sapien
aagcaaaaaagaaggacgcgacgaaagacaaag

SEQ ID NO: 594463 - DNA, 33 bp, Homo sapien
ctctcacaatgcagaacgttagccgagaatccc

SEQ ID NO: 594464 - DNA, 33 bp, Homo sapien
ctctcacaatgcagaatgttagccgagaatccc

SEQ ID NO: 594465 - DNA, 33 bp, Homo sapien
tcaccaggagagcaaactgacaagccatggtgc

SEQ ID NO: 594466 - DNA, 33 bp, Homo sapien
tcaccaggagagcaaattgacaagccatggtgc

SEQ ID NO: 594467 - DNA, 33 bp, Homo sapien
tatctcacatataaacaggctaagcactgcaat

SEQ ID NO: 594468 - DNA, 33 bp, Homo sapien
tatctcacatataaacgggctaagcactgcaat

SEQ ID NO: 594469 - DNA, 33 bp, Homo sapien
gaataaccttgtccaacgaacctgaaagcagca

SEQ ID NO: 594470 - DNA, 33 bp, Homo sapien
gaataaccttgtccaatgaacctgaaagcagca

SEQ ID NO: 594471 - DNA, 33 bp, Homo sapien
ctgagccctcagcaaactgactttagtgcttcc

SEQ ID NO: 594472 - DNA, 33 bp, Homo sapien
ctgagccctcagcaaattgactttagtgcttcc

SEQ ID NO: 594473 - DNA, 33 bp, Homo sapien
gagaagggggctgggcaaggcatttactcattt

SEQ ID NO: 594474 - DNA, 33 bp, Homo sapien
gagaagggggctgggcgaggcatttactcattt

SEQ ID NO: 594475 - DNA, 33 bp, Homo sapien
ataactgagctcaaccaatatgaagcaaccata

SEQ ID NO: 594476 - DNA, 33 bp, Homo sapien
ataactgagctcaacctatatgaagcaaccata

SEQ ID NO: 594477 - DNA, 33 bp, Homo sapien
gagctctcaagtctcaaccctcagaaatgactg

SEQ ID NO: 594478 - DNA, 33 bp, Homo sapien
gagctctcaagtctcacccctcagaaatgactg

SEQ ID NO: 594479 - DNA, 33 bp, Homo sapien
acatcatatcacaatacctctagccaatgatta

SEQ ID NO: 594480 - DNA, 33 bp, Homo sapien
acatcatatcacaatatctctagccaatgatta

SEQ ID NO: 594481 - DNA, 33 bp, Homo sapien
ggcagatttctacaagaagcacaagttcaatct

SEQ ID NO: 594482 - DNA, 33 bp, Homo sapien
ggcagatttctacaaggagcacaagttcaatct

SEQ ID NO: 594483 - DNA, 33 bp, Homo sapien
tttattgggtgaagacagcaaacctattccaaa

SEQ ID NO: 594484 - DNA, 33 bp, Homo sapien
tttattgggtgaagacggcaaacctattccaaa

SEQ ID NO: 594485 - DNA, 33 bp, Homo sapien
tagggccataaagcccagaaaaaggatccaggt

SEQ ID NO: 594486 - DNA, 33 bp, Homo sapien
tagggccataaagccccgaaaaaggatccaggt

SEQ ID NO: 594487 - DNA, 33 bp, Homo sapien
gaggtcacaggggcacagagaagaacgagtttg

SEQ ID NO: 594488 - DNA, 33 bp, Homo sapien
gaggtcacaggggcacggagaagaacgagtttg

SEQ ID NO: 594489 - DNA, 33 bp, Homo sapien
gatgttctggaaaagacacacaacccagcaggg

SEQ ID NO: 594490 - DNA, 33 bp, Homo sapien
gatgttctggaaaagatacacaacccagcaggg

SEQ ID NO: 594491 - DNA, 33 bp, Homo sapien
aaaaaagcatgtttagaagatcaagggtgtagc

SEQ ID NO: 594492 - DNA, 33 bp, Homo sapien
aaaaaagcatgtttaggagatcaagggtgtagc

SEQ ID NO: 594493 - DNA, 33 bp, Homo sapien
cacatctgatttaaatgatgtgtagctgggact

SEQ ID NO: 594494 - DNA, 33 bp, Homo sapien
cacatctgatttaaattatgtgtagctgggact

SEQ ID NO: 594495 - DNA, 33 bp, Homo sapien
agcagagttaggccccagctagtccttgaatga

SEQ ID NO: 594496 - DNA, 33 bp, Homo sapien
agcagagttaggccccggctagtccttgaatga

SEQ ID NO: 594497 - DNA, 33 bp, Homo sapien
atagattcctagcagaaaacataattgtgagag

SEQ ID NO: 594498 - DNA, 33 bp, Homo sapien
atagattcctagcagagaacataattgtgagag

SEQ ID NO: 594499 - DNA, 33 bp, Homo sapien
gagtaattactgtatccgaggccggggaaatta

SEQ ID NO: 594500 - DNA, 33 bp, Homo sapien
gagtaattactgtatctgaggccggggaaatta

SEQ ID NO: 594501 - DNA, 33 bp, Homo sapien
gagcccattcacacaaaggtctcattttattag

SEQ ID NO: 594502 - DNA, 33 bp, Homo sapien
gagcccattcacacaagggtctcattttattag

SEQ ID NO: 594503 - DNA, 33 bp, Homo sapien
gtttagagaggaaaataggcagcatcattttgt

SEQ ID NO: 594504 - DNA, 33 bp, Homo sapien
gtttagagaggaaaatgggcagcatcattttgt

SEQ ID NO: 594505 - DNA, 33 bp, Homo sapien
tcctggtttcatgaagccaaatactcctctttc

SEQ ID NO: 594506 - DNA, 33 bp, Homo sapien
tcctggtttcatgaaggcaaatactcctctttc

SEQ ID NO: 594507 - DNA, 33 bp, Homo sapien
tttcgaatctcaacaccctgagctctgtgcttt

SEQ ID NO: 594508 - DNA, 33 bp, Homo sapien
tttcgaatctcaacactctgagctctgtgcttt

SEQ ID NO: 594509 - DNA, 33 bp, Homo sapien
atgggtcaccaaagacacacaaaggtaagatgt

SEQ ID NO: 594510 - DNA, 33 bp, Homo sapien
atgggtcaccaaagacgcacaaaggtaagatgt

SEQ ID NO: 594511 - DNA, 33 bp, Homo sapien
aaataacacaagagccagaacagaatgaatgtg

SEQ ID NO: 594512 - DNA, 33 bp, Homo sapien
aaataacacaagagccggaacagaatgaatgtg

SEQ ID NO: 594513 - DNA, 33 bp, Homo sapien
aatagttttaaaatcacggtcaaattctaagtc

SEQ ID NO: 594514 - DNA, 33 bp, Homo sapien
aatagttttaaaatcatggtcaaattctaagtc

SEQ ID NO: 594515 - DNA, 33 bp, Homo sapien
aatcacagacattttcaattttgcaggacacgc

SEQ ID NO: 594516 - DNA, 33 bp, Homo sapien
aatcacagacattttcgattttgcaggacacgc

SEQ ID NO: 594517 - DNA, 33 bp, Homo sapien
atgtcccctaaaaaaggattaagttgcatcatt

SEQ ID NO: 594518 - DNA, 33 bp, Homo sapien
atgtcccctaaaaaagtattaagttgcatcatt

SEQ ID NO: 594519 - DNA, 33 bp, Homo sapien
cgtgtgtgggacaggcaacatttcagggagtgc

SEQ ID NO: 594520 - DNA, 33 bp, Homo sapien
cgtgtgtgggacaggcgacatttcagggagtgc

SEQ ID NO: 594521 - DNA, 33 bp, Homo sapien
tcgatggagggctatccgagacaaagagattgg

SEQ ID NO: 594522 - DNA, 33 bp, Homo sapien
tcgatggagggctatctgagacaaagagattgg

SEQ ID NO: 594523 - DNA, 33 bp, Homo sapien
cacagcaaaaattccacgatcttctagaacatt

SEQ ID NO: 594524 - DNA, 33 bp, Homo sapien
cacagcaaaaattccatgatcttctagaacatt

SEQ ID NO: 594525 - DNA, 33 bp, Homo sapien
ctcagactcgtcctgacggaatgtgttcgttca

SEQ ID NO: 594526 - DNA, 33 bp, Homo sapien
ctcagactcgtcctgatggaatgtgttcgttca

SEQ ID NO: 594527 - DNA, 33 bp, Homo sapien
aggtggccagattgtcaacttctctggtagaat

SEQ ID NO: 594528 - DNA, 33 bp, Homo sapien
aggtggccagattgtccacttctctggtagaat

SEQ ID NO: 594529 - DNA, 33 bp, Homo sapien
attcagccgctcctaaataggtggccagattgt

SEQ ID NO: 594530 - DNA, 33 bp, Homo sapien
attcagccgctcctaagtaggtggccagattgt

SEQ ID NO: 594531 - DNA, 33 bp, Homo sapien
cctgaactctgtgacaacacgtcttagacttta

SEQ ID NO: 594532 - DNA, 33 bp, Homo sapien
cctgaactctgtgacagcacgtcttagacttta

SEQ ID NO: 594533 - DNA, 33 bp, Homo sapien
ccagtgaatatgtaccactcattcaacttgttt

SEQ ID NO: 594534 - DNA, 33 bp, Homo sapien
ccagtgaatatgtaccgctcattcaacttgttt

SEQ ID NO: 594535 - DNA, 33 bp, Homo sapien
gaactacatcgagtgaagtcagtgttgaaaacg

SEQ ID NO: 594536 - DNA, 33 bp, Homo sapien
gaactacatcgagtgaggtcagtgttgaaaacg

SEQ ID NO: 594537 - DNA, 33 bp, Homo sapien
ctgtccttaaaatccacgtgtcctgggcaggaa

SEQ ID NO: 594538 - DNA, 33 bp, Homo sapien
ctgtccttaaaatccatgtgtcctgggcaggaa

SEQ ID NO: 594539 - DNA, 33 bp, Homo sapien
ggtagggagaaaatacgagatgctctaccagac

SEQ ID NO: 594540 - DNA, 33 bp, Homo sapien
ggtagggagaaaatactagatgctctaccagac

SEQ ID NO: 594541 - DNA, 33 bp, Homo sapien
ggtttgatgagattgcacatggaaaggtagggt

SEQ ID NO: 594542 - DNA, 33 bp, Homo sapien
ggtttgatgagattgcgcatggaaaggtagggt

SEQ ID NO: 594543 - DNA, 33 bp, Homo sapien
catcaatggacagcagcattttcatgttattaa

SEQ ID NO: 594544 - DNA, 33 bp, Homo sapien
catcaatggacagcaggattttcatgttattaa

SEQ ID NO: 594545 - DNA, 33 bp, Homo sapien
aagggtgtcctccccaaaattcacgtccctcct

SEQ ID NO: 594546 - DNA, 33 bp, Homo sapien
aagggtgtcctccccagaattcacgtccctcct

SEQ ID NO: 594547 - DNA, 33 bp, Homo sapien
gttttgtgactttagaaaccataggattaactg

SEQ ID NO: 594548 - DNA, 33 bp, Homo sapien
gttttgtgactttagagaccataggattaactg

SEQ ID NO: 594549 - DNA, 33 bp, Homo sapien
ctgcagatccttggacactggggatgcactttc

SEQ ID NO: 594550 - DNA, 33 bp, Homo sapien
ctgcagatccttggacgctggggatgcactttc

SEQ ID NO: 594551 - DNA, 33 bp, Homo sapien
gagccctcaagaaacaaatttagacctctgtct

SEQ ID NO: 594552 - DNA, 33 bp, Homo sapien
gagccctcaagaaacacatttagacctctgtct

SEQ ID NO: 594553 - DNA, 33 bp, Homo sapien
ttgttctctctcaccaaagtctgtcacagttat

SEQ ID NO: 594554 - DNA, 33 bp, Homo sapien
ttgttctctctcaccagagtctgtcacagttat

SEQ ID NO: 594555 - DNA, 33 bp, Homo sapien
gatattttaatttttaagtgcatagagaccttc

SEQ ID NO: 594556 - DNA, 33 bp, Homo sapien
gatattttaatttttatgtgcatagagaccttc

SEQ ID NO: 594557 - DNA, 33 bp, Homo sapien
ataataataataataacgtttgtgagctgcctg

SEQ ID NO: 594558 - DNA, 33 bp, Homo sapien
ataataataataataatgtttgtgagctgcctg

SEQ ID NO: 594559 - DNA, 33 bp, Homo sapien
agcagggttctggcgaaaattaaaaataacgtt

SEQ ID NO: 594560 - DNA, 33 bp, Homo sapien
agcagggttctggcgagaattaaaaataacgtt

SEQ ID NO: 594561 - DNA, 33 bp, Homo sapien
aaggataaattcacaaacatgagcatccgtctc

SEQ ID NO: 594562 - DNA, 33 bp, Homo sapien
aaggataaattcacaagcatgagcatccgtctc

SEQ ID NO: 594563 - DNA, 33 bp, Homo sapien
atggtggattgttcaccagcgcccactgaatgg

SEQ ID NO: 594564 - DNA, 33 bp, Homo sapien
atggtggattgttcacgagcgcccactgaatgg

SEQ ID NO: 594565 - DNA, 33 bp, Homo sapien
ccaccagcaagaaggcactcaagagatacaacc

SEQ ID NO: 594566 - DNA, 33 bp, Homo sapien
ccaccagcaagaaggcgctcaagagatacaacc

SEQ ID NO: 594567 - DNA, 33 bp, Homo sapien
gacagttctccataaagttctcacatttctgca

SEQ ID NO: 594568 - DNA, 33 bp, Homo sapien
gacagttctccataaatttctcacatttctgca

SEQ ID NO: 594569 - DNA, 33 bp, Homo sapien
tccacctgcttttgcccatcctgtaaattggat

SEQ ID NO: 594570 - DNA, 33 bp, Homo sapien
tccacctgcttttgccgatcctgtaaattggat

SEQ ID NO: 594571 - DNA, 33 bp, Homo sapien
agatggttaaagtgtaggagaggatgcacgtgg

SEQ ID NO: 594572 - DNA, 33 bp, Homo sapien
agatggttaaagtgtatgagaggatgcacgtgg

SEQ ID NO: 594573 - DNA, 33 bp, Homo sapien
gatgacagtgtagacaagaacgagacactgact

SEQ ID NO: 594574 - DNA, 33 bp, Homo sapien
gatgacagtgtagacaggaacgagacactgact

SEQ ID NO: 594575 - DNA, 33 bp, Homo sapien
atgatgggtctgtctaagaaggaggaagcagga

SEQ ID NO: 594576 - DNA, 33 bp, Homo sapien
atgatgggtctgtctaggaaggaggaagcagga

SEQ ID NO: 594577 - DNA, 33 bp, Homo sapien
agtcttcactctcctcacattgcccagatccgc

SEQ ID NO: 594578 - DNA, 33 bp, Homo sapien
agtcttcactctcctcgcattgcccagatccgc

SEQ ID NO: 594579 - DNA, 33 bp, Homo sapien
cagcgtgacatgttgacagaatatatctcctta

SEQ ID NO: 594580 - DNA, 33 bp, Homo sapien
cagcgtgacatgttgatagaatatatctcctta

SEQ ID NO: 594581 - DNA, 33 bp, Homo sapien
tgaggttatctgaactcacatagctgcaagcac

SEQ ID NO: 594582 - DNA, 33 bp, Homo sapien
tgaggttatctgaacttacatagctgcaagcac

SEQ ID NO: 594583 - DNA, 33 bp, Homo sapien
ctttgcgcattccagtaaaatgccttttgcttg

SEQ ID NO: 594584 - DNA, 33 bp, Homo sapien
ctttgcgcattccagtgaaatgccttttgcttg

SEQ ID NO: 594585 - DNA, 33 bp, Homo sapien
gtcctggcactgtaaaaatgagctgggctctgg

SEQ ID NO: 594586 - DNA, 33 bp, Homo sapien
gtcctggcactgtaaacatgagctgggctctgg

SEQ ID NO: 594587 - DNA, 33 bp, Homo sapien
aaaaagtgaatagtcaactgttatagttctttg

SEQ ID NO: 594588 - DNA, 33 bp, Homo sapien
aaaaagtgaatagtcacctgttatagttctttg

SEQ ID NO: 594589 - DNA, 33 bp, Homo sapien
caataagatgagaccaccgagaagtctcaggga

SEQ ID NO: 594590 - DNA, 33 bp, Homo sapien
caataagatgagaccagcgagaagtctcaggga

SEQ ID NO: 594591 - DNA, 33 bp, Homo sapien
gttcaatcccagctgaagacatgacctaaaaat

SEQ ID NO: 594592 - DNA, 33 bp, Homo sapien
gttcaatcccagctgaggacatgacctaaaaat

SEQ ID NO: 594593 - DNA, 33 bp, Homo sapien
tagactctggaggtctcaaggtcaagagagaaa

SEQ ID NO: 594594 - DNA, 33 bp, Homo sapien
tagactctggaggtctgaaggtcaagagagaaa

SEQ ID NO: 594595 - DNA, 33 bp, Homo sapien
ccaggcctaaaacacacaacttgccacggtctc

SEQ ID NO: 594596 - DNA, 33 bp, Homo sapien
ccaggcctaaaacacagaacttgccacggtctc

SEQ ID NO: 594597 - DNA, 33 bp, Homo sapien
gacaaacaatgggaaaatcattgtcttagcaga

SEQ ID NO: 594598 - DNA, 33 bp, Homo sapien
gacaaacaatgggaaagtcattgtcttagcaga

SEQ ID NO: 594599 - DNA, 33 bp, Homo sapien
agaagtccatgctatacgtttagtagtaaaatc

SEQ ID NO: 594600 - DNA, 33 bp, Homo sapien
agaagtccatgctataggtttagtagtaaaatc

SEQ ID NO: 594601 - DNA, 33 bp, Homo sapien
cttcttgaaactctacaattaaacaaaaagccg

SEQ ID NO: 594602 - DNA, 33 bp, Homo sapien
cttcttgaaactctacgattaaacaaaaagccg

SEQ ID NO: 594603 - DNA, 33 bp, Homo sapien
gatggctggatccctgcagatttttccaggaag

SEQ ID NO: 594604 - DNA, 33 bp, Homo sapien
gatggctggatccctgtagatttttccaggaag

SEQ ID NO: 594605 - DNA, 33 bp, Homo sapien
ccagcatctggtcatgcatgtacttgagaatgt

SEQ ID NO: 594606 - DNA, 33 bp, Homo sapien
ccagcatctggtcatgtatgtacttgagaatgt

SEQ ID NO: 594607 - DNA, 33 bp, Homo sapien
acccaggatcatttccccatttcaagaccctcc

SEQ ID NO: 594608 - DNA, 33 bp, Homo sapien
acccaggatcatttcctcatttcaagaccctcc

SEQ ID NO: 594609 - DNA, 33 bp, Homo sapien
atccaaaacttcagcccgcaagttgaaaacttc

SEQ ID NO: 594610 - DNA, 33 bp, Homo sapien
atccaaaacttcagccggcaagttgaaaacttc

SEQ ID NO: 594611 - DNA, 33 bp, Homo sapien
aaacacacacaagagccgccctctcattttagc

SEQ ID NO: 594612 - DNA, 33 bp, Homo sapien
aaacacacacaagagctgccctctcattttagc

SEQ ID NO: 594613 - DNA, 33 bp, Homo sapien
gagccccccaaatctcccttgtgttccctgagg

SEQ ID NO: 594614 - DNA, 33 bp, Homo sapien
gagccccccaaatctctcttgtgttccctgagg

SEQ ID NO: 594615 - DNA, 33 bp, Homo sapien
aaggcatctgtgatccccctctaaaatgtcaag

SEQ ID NO: 594616 - DNA, 33 bp, Homo sapien
aaggcatctgtgatcctcctctaaaatgtcaag

SEQ ID NO: 594617 - DNA, 33 bp, Homo sapien
agaggtgtttattcaacgccaacattagctctt

SEQ ID NO: 594618 - DNA, 33 bp, Homo sapien
agaggtgtttattcaatgccaacattagctctt

SEQ ID NO: 594619 - DNA, 33 bp, Homo sapien
gagatgctgctgtttccagaggcgtcttagtct

SEQ ID NO: 594620 - DNA, 33 bp, Homo sapien
gagatgctgctgtttctagaggcgtcttagtct

SEQ ID NO: 594621 - DNA, 33 bp, Homo sapien
agaaaaccatcgaccacgtcaaaactgggttgc

SEQ ID NO: 594622 - DNA, 33 bp, Homo sapien
agaaaaccatcgaccaggtcaaaactgggttgc

SEQ ID NO: 594623 - DNA, 33 bp, Homo sapien
tcattggttacagcaaccacagagacatagtaa

SEQ ID NO: 594624 - DNA, 33 bp, Homo sapien
tcattggttacagcaatcacagagacatagtaa

SEQ ID NO: 594625 - DNA, 33 bp, Homo sapien
atgctgataaacaacaacagcgcttcatccgaa

SEQ ID NO: 594626 - DNA, 33 bp, Homo sapien
atgctgataaacaacagcagcgcttcatccgaa

SEQ ID NO: 594627 - DNA, 33 bp, Homo sapien
gtgctatcagtacctcacaaggagaacaaaatg

SEQ ID NO: 594628 - DNA, 33 bp, Homo sapien
gtgctatcagtacctcgcaaggagaacaaaatg

SEQ ID NO: 594629 - DNA, 33 bp, Homo sapien
tatttgcatttgtcaaccaacttaacatacagc

SEQ ID NO: 594630 - DNA, 33 bp, Homo sapien
tatttgcatttgtcaatcaacttaacatacagc

SEQ ID NO: 594631 - DNA, 33 bp, Homo sapien
ggatttgcataaacgcaaaagctcaagtgtcaa

SEQ ID NO: 594632 - DNA, 33 bp, Homo sapien
ggatttgcataaacgcgaaagctcaagtgtcaa

SEQ ID NO: 594633 - DNA, 33 bp, Homo sapien
agtctgaacatggaacactttgtaataaaaaat

SEQ ID NO: 594634 - DNA, 33 bp, Homo sapien
agtctgaacatggaacgctttgtaataaaaaat

SEQ ID NO: 594635 - DNA, 33 bp, Homo sapien
gtagtaaatgcgcaacaaacactagctgatatt

SEQ ID NO: 594636 - DNA, 33 bp, Homo sapien
gtagtaaatgcgcaaccaacactagctgatatt

SEQ ID NO: 594637 - DNA, 33 bp, Homo sapien
tcgtgtttctgaaaaccatcctttctggcaagg

SEQ ID NO: 594638 - DNA, 33 bp, Homo sapien
tcgtgtttctgaaaactatcctttctggcaagg

SEQ ID NO: 594639 - DNA, 33 bp, Homo sapien
gattctgcaggccgccacttaaaacagaatttt

SEQ ID NO: 594640 - DNA, 33 bp, Homo sapien
gattctgcaggccgccgcttaaaacagaatttt

SEQ ID NO: 594641 - DNA, 33 bp, Homo sapien
caattcacctctgactaaagaaagccacagcta

SEQ ID NO: 594642 - DNA, 33 bp, Homo sapien
caattcacctctgactgaagaaagccacagcta

SEQ ID NO: 594643 - DNA, 33 bp, Homo sapien
ctggttgggattccaaagaacaaagcactaaat

SEQ ID NO: 594644 - DNA, 33 bp, Homo sapien
ctggttgggattccaacgaacaaagcactaaat

SEQ ID NO: 594645 - DNA, 33 bp, Homo sapien
cccccgttgattctgcaccgactccctactttg

SEQ ID NO: 594646 - DNA, 33 bp, Homo sapien
cccccgttgattctgcgccgactccctactttg

SEQ ID NO: 594647 - DNA, 33 bp, Homo sapien
agataatagaatgtgaacataaaatcctctctt

SEQ ID NO: 594648 - DNA, 33 bp, Homo sapien
agataatagaatgtgagcataaaatcctctctt

SEQ ID NO: 594649 - DNA, 33 bp, Homo sapien
ttcttttcgctcttcaagatttgcttctggagt

SEQ ID NO: 594650 - DNA, 33 bp, Homo sapien
ttcttttcgctcttcaggatttgcttctggagt

SEQ ID NO: 594651 - DNA, 33 bp, Homo sapien
ttagcatttttagataaagcgatcgttattacg

SEQ ID NO: 594652 - DNA, 33 bp, Homo sapien
ttagcatttttagatagagcgatcgttattacg

SEQ ID NO: 594653 - DNA, 33 bp, Homo sapien
ttgtagccaccatacccgagttgtttgctcctg

SEQ ID NO: 594654 - DNA, 33 bp, Homo sapien
ttgtagccaccatacctgagttgtttgctcctg

SEQ ID NO: 594655 - DNA, 33 bp, Homo sapien
tgcttctaggtatctcagacctttcacaaaatc

SEQ ID NO: 594656 - DNA, 33 bp, Homo sapien
tgcttctaggtatctcggacctttcacaaaatc

SEQ ID NO: 594657 - DNA, 33 bp, Homo sapien
attaagcttaaaaagaaatctgtggttgtagaa

SEQ ID NO: 594658 - DNA, 33 bp, Homo sapien
attaagcttaaaaagacatctgtggttgtagaa

SEQ ID NO: 594659 - DNA, 33 bp, Homo sapien
tgtgggtcaaacccagccgttccgaatcatcaa

SEQ ID NO: 594660 - DNA, 33 bp, Homo sapien
tgtgggtcaaacccagtcgttccgaatcatcaa

SEQ ID NO: 594661 - DNA, 33 bp, Homo sapien
tgatttataccgaggaacaattagtagttaact

SEQ ID NO: 594662 - DNA, 33 bp, Homo sapien
tgatttataccgaggagcaattagtagttaact

SEQ ID NO: 594663 - DNA, 33 bp, Homo sapien
agccccatcttgctgacggtggagaagatgtag

SEQ ID NO: 594664 - DNA, 33 bp, Homo sapien
agccccatcttgctgatggtggagaagatgtag

SEQ ID NO: 594665 - DNA, 33 bp, Homo sapien
aagcaacatgaactgcaccatcactgacttcta

SEQ ID NO: 594666 - DNA, 33 bp, Homo sapien
aagcaacatgaactgcgccatcactgacttcta

SEQ ID NO: 594667 - DNA, 33 bp, Homo sapien
cgaccatgtttacctgcaagttctgagaattaa

SEQ ID NO: 594668 - DNA, 33 bp, Homo sapien
cgaccatgtttacctggaagttctgagaattaa

SEQ ID NO: 594669 - DNA, 33 bp, Homo sapien
gcaggtgtgtttcttgcaaataaccagtgcctg

SEQ ID NO: 594670 - DNA, 33 bp, Homo sapien
gcaggtgtgtttcttgtaaataaccagtgcctg

SEQ ID NO: 594671 - DNA, 33 bp, Homo sapien
tgaaaagtgctagcccaaagaggcctatgatta

SEQ ID NO: 594672 - DNA, 33 bp, Homo sapien
tgaaaagtgctagcccgaagaggcctatgatta

SEQ ID NO: 594673 - DNA, 33 bp, Homo sapien
tgctcacctggctttagagtcacctgagaagct

SEQ ID NO: 594674 - DNA, 33 bp, Homo sapien
tgctcacctggctttatagtcacctgagaagct

SEQ ID NO: 594675 - DNA, 33 bp, Homo sapien
taaactgcgtgatttacaaaatacccagatggc

SEQ ID NO: 594676 - DNA, 33 bp, Homo sapien
taaactgcgtgatttataaaatacccagatggc

SEQ ID NO: 594677 - DNA, 33 bp, Homo sapien
aaagagagcacttctcagaatctccacacagcc

SEQ ID NO: 594678 - DNA, 33 bp, Homo sapien
aaagagagcacttctcggaatctccacacagcc

SEQ ID NO: 594679 - DNA, 33 bp, Homo sapien
gatggaagcgggaaccaaaagcctggctgagag

SEQ ID NO: 594680 - DNA, 33 bp, Homo sapien
gatggaagcgggaaccgaaagcctggctgagag

SEQ ID NO: 594681 - DNA, 33 bp, Homo sapien
tggattttaacagtaaaagaatgtccaatgcct

SEQ ID NO: 594682 - DNA, 33 bp, Homo sapien
tggattttaacagtaacagaatgtccaatgcct

SEQ ID NO: 594683 - DNA, 33 bp, Homo sapien
atcatttcaaagcatacggtcggtggcgtctgg

SEQ ID NO: 594684 - DNA, 33 bp, Homo sapien
atcatttcaaagcatatggtcggtggcgtctgg

SEQ ID NO: 594685 - DNA, 33 bp, Homo sapien
cgagtagccacaggacagaactgagaagcgagt

SEQ ID NO: 594686 - DNA, 33 bp, Homo sapien
cgagtagccacaggacggaactgagaagcgagt

SEQ ID NO: 594687 - DNA, 33 bp, Homo sapien
aatgtctgaatggaccaaagtgaatcatgtcag

SEQ ID NO: 594688 - DNA, 33 bp, Homo sapien
aatgtctgaatggaccgaagtgaatcatgtcag

SEQ ID NO: 594689 - DNA, 33 bp, Homo sapien
tagttacctagggcaacgctgatgcagataagt

SEQ ID NO: 594690 - DNA, 33 bp, Homo sapien
tagttacctagggcaatgctgatgcagataagt

SEQ ID NO: 594691 - DNA, 33 bp, Homo sapien
tcttttgccgctataaaatatttgaagagattt

SEQ ID NO: 594692 - DNA, 33 bp, Homo sapien
tcttttgccgctataagatatttgaagagattt

SEQ ID NO: 594693 - DNA, 33 bp, Homo sapien
ctttctctatggagaagacaatggcttaaagtc

SEQ ID NO: 594694 - DNA, 33 bp, Homo sapien
ctttctctatggagaatacaatggcttaaagtc

SEQ ID NO: 594695 - DNA, 33 bp, Homo sapien
attagtgaccagtgcaaagttgggcatggctag

SEQ ID NO: 594696 - DNA, 33 bp, Homo sapien
attagtgaccagtgcagagttgggcatggctag

SEQ ID NO: 594697 - DNA, 33 bp, Homo sapien
cccttagagaattaaaccagtgctggagtagag

SEQ ID NO: 594698 - DNA, 33 bp, Homo sapien
cccttagagaattaaatcagtgctggagtagag

SEQ ID NO: 594699 - DNA, 33 bp, Homo sapien
gccttatagccagagaagacctcacagagcatt

SEQ ID NO: 594700 - DNA, 33 bp, Homo sapien
gccttatagccagagaggacctcacagagcatt

SEQ ID NO: 594701 - DNA, 33 bp, Homo sapien
agcctcccttgaataaccaacagtcatgggatt

SEQ ID NO: 594702 - DNA, 33 bp, Homo sapien
agcctcccttgaataatcaacagtcatgggatt

SEQ ID NO: 594703 - DNA, 33 bp, Homo sapien
tgggcatctgagggcacgaaccctcactgggca

SEQ ID NO: 594704 - DNA, 33 bp, Homo sapien
tgggcatctgagggcatgaaccctcactgggca

SEQ ID NO: 594705 - DNA, 33 bp, Homo sapien
atcttccgaaggcttgcattttctccacgagcc

SEQ ID NO: 594706 - DNA, 33 bp, Homo sapien
atcttccgaaggcttgtattttctccacgagcc

SEQ ID NO: 594707 - DNA, 33 bp, Homo sapien
tgcttgtttgggcagacggtgaacactccacat

SEQ ID NO: 594708 - DNA, 33 bp, Homo sapien
tgcttgtttgggcagatggtgaacactccacat

SEQ ID NO: 594709 - DNA, 33 bp, Homo sapien
actgcaggtccggccactgcaagttttcctttt

SEQ ID NO: 594710 - DNA, 33 bp, Homo sapien
actgcaggtccggccattgcaagttttcctttt

SEQ ID NO: 594711 - DNA, 33 bp, Homo sapien
ctctgatctcacttgcaaattctgataagaagc

SEQ ID NO: 594712 - DNA, 33 bp, Homo sapien
ctctgatctcacttgcgaattctgataagaagc

SEQ ID NO: 594713 - DNA, 33 bp, Homo sapien
agctgaaatctccgaagaattgcagaggcctgg

SEQ ID NO: 594714 - DNA, 33 bp, Homo sapien
agctgaaatctccgaataattgcagaggcctgg

SEQ ID NO: 594715 - DNA, 33 bp, Homo sapien
cctgtggggggctaagaatcaacctccaggcta

SEQ ID NO: 594716 - DNA, 33 bp, Homo sapien
cctgtggggggctaaggatcaacctccaggcta

SEQ ID NO: 594717 - DNA, 33 bp, Homo sapien
gggaagaccgaggaacaatgcttagagaactgg

SEQ ID NO: 594718 - DNA, 33 bp, Homo sapien
gggaagaccgaggaacgatgcttagagaactgg

SEQ ID NO: 594719 - DNA, 33 bp, Homo sapien
agtgacacagtgggagacagcaacaggaatttg

SEQ ID NO: 594720 - DNA, 33 bp, Homo sapien
agtgacacagtgggagtcagcaacaggaatttg

SEQ ID NO: 594721 - DNA, 33 bp, Homo sapien
ccttccccacaaagcccacaaagcctgcaaagc

SEQ ID NO: 594722 - DNA, 33 bp, Homo sapien
ccttccccacaaagcctacaaagcctgcaaagc

SEQ ID NO: 594723 - DNA, 33 bp, Homo sapien
aggagccgcgctagaaagtgttcaagcgtccgc

SEQ ID NO: 594724 - DNA, 33 bp, Homo sapien
aggagccgcgctagaaggtgttcaagcgtccgc

SEQ ID NO: 594725 - DNA, 33 bp, Homo sapien
tgttctagcatttgacacgtattagcccactta

SEQ ID NO: 594726 - DNA, 33 bp, Homo sapien
tgttctagcatttgacgcgtattagcccactta

SEQ ID NO: 594727 - DNA, 33 bp, Homo sapien
gggcttgcctcctatacgtgccggaagggtgaa

SEQ ID NO: 594728 - DNA, 33 bp, Homo sapien
gggcttgcctcctatatgtgccggaagggtgaa

SEQ ID NO: 594729 - DNA, 33 bp, Homo sapien
aggagccatgggaagacggttacccagaactgg

SEQ ID NO: 594730 - DNA, 33 bp, Homo sapien
aggagccatgggaagatggttacccagaactgg

SEQ ID NO: 594731 - DNA, 33 bp, Homo sapien
ttgccacgaatctcaacgtccccactggttgca

SEQ ID NO: 594732 - DNA, 33 bp, Homo sapien
ttgccacgaatctcaatgtccccactggttgca

SEQ ID NO: 594733 - DNA, 33 bp, Homo sapien
gcccctcagagtgcacaggggatgatcttggag

SEQ ID NO: 594734 - DNA, 33 bp, Homo sapien
gcccctcagagtgcacgggggatgatcttggag

SEQ ID NO: 594735 - DNA, 33 bp, Homo sapien
agtcagttccgttactcactgatcatctgaact

SEQ ID NO: 594736 - DNA, 33 bp, Homo sapien
agtcagttccgttactgactgatcatctgaact

SEQ ID NO: 594737 - DNA, 33 bp, Homo sapien
acacaataaagttacaagattaacagtgacctt

SEQ ID NO: 594738 - DNA, 33 bp, Homo sapien
acacaataaagttacatgattaacagtgacctt

SEQ ID NO: 594739 - DNA, 33 bp, Homo sapien
ccatgtgatggaaaccgagggagagcaagctga

SEQ ID NO: 594740 - DNA, 33 bp, Homo sapien
ccatgtgatggaaacctagggagagcaagctga

SEQ ID NO: 594741 - DNA, 33 bp, Homo sapien
ggaaagaagcaaaaccaccagtgtgcacaaagg

SEQ ID NO: 594742 - DNA, 33 bp, Homo sapien
ggaaagaagcaaaaccgccagtgtgcacaaagg

SEQ ID NO: 594743 - DNA, 33 bp, Homo sapien
gaatgaaccacggatacaggcgacaacccggat

SEQ ID NO: 594744 - DNA, 33 bp, Homo sapien
gaatgaaccacggatataggcgacaacccggat

SEQ ID NO: 594745 - DNA, 33 bp, Homo sapien
cccagccattttgatacgtgtgcagtggtgtct

SEQ ID NO: 594746 - DNA, 33 bp, Homo sapien
cccagccattttgataggtgtgcagtggtgtct

SEQ ID NO: 594747 - DNA, 33 bp, Homo sapien
aaatgcataagatagacggaagcaaacattttt

SEQ ID NO: 594748 - DNA, 33 bp, Homo sapien
aaatgcataagatagagggaagcaaacattttt

SEQ ID NO: 594749 - DNA, 33 bp, Homo sapien
ttgcatctttgggttaaggctctgctgcccttg

SEQ ID NO: 594750 - DNA, 33 bp, Homo sapien
ttgcatctttgggttacggctctgctgcccttg

SEQ ID NO: 594751 - DNA, 33 bp, Homo sapien
cgtagagcacacttccggagtgacagagaaaag

SEQ ID NO: 594752 - DNA, 33 bp, Homo sapien
cgtagagcacacttcctgagtgacagagaaaag

SEQ ID NO: 594753 - DNA, 33 bp, Homo sapien
ataaccaccgctccacagagatccatttggtag

SEQ ID NO: 594754 - DNA, 33 bp, Homo sapien
ataaccaccgctccacggagatccatttggtag

SEQ ID NO: 594755 - DNA, 33 bp, Homo sapien
tatgtactgaaagcaaatgccaaaaaatgccac

SEQ ID NO: 594756 - DNA, 33 bp, Homo sapien
tatgtactgaaagcaagtgccaaaaaatgccac

SEQ ID NO: 594757 - DNA, 33 bp, Homo sapien
atggaattgcaccaaagtcagtctgctgcaacc

SEQ ID NO: 594758 - DNA, 33 bp, Homo sapien
atggaattgcaccaaattcagtctgctgcaacc

SEQ ID NO: 594759 - DNA, 33 bp, Homo sapien
ttgttcaaggcagtcccgaaaggcagatgcgtc

SEQ ID NO: 594760 - DNA, 33 bp, Homo sapien
ttgttcaaggcagtcctgaaaggcagatgcgtc

SEQ ID NO: 594761 - DNA, 33 bp, Homo sapien
ggcatggcagaaaatccatctggaaaactggaa

SEQ ID NO: 594762 - DNA, 33 bp, Homo sapien
ggcatggcagaaaatctatctggaaaactggaa

SEQ ID NO: 594763 - DNA, 33 bp, Homo sapien
atccaggctctgaagcggattagacaggaaagc

SEQ ID NO: 594764 - DNA, 33 bp, Homo sapien
atccaggctctgaagctgattagacaggaaagc

SEQ ID NO: 594765 - DNA, 33 bp, Homo sapien
aacatttcatttctgtgttgggtcactttcctt

SEQ ID NO: 594766 - DNA, 33 bp, Homo sapien
aacatttcatttctgttttgggtcactttcctt

SEQ ID NO: 594767 - DNA, 33 bp, Homo sapien
aatgtctgtgtgtctccagtggctgtcttgggt

SEQ ID NO: 594768 - DNA, 33 bp, Homo sapien
aatgtctgtgtgtctcgagtggctgtcttgggt

SEQ ID NO: 594769 - DNA, 33 bp, Homo sapien
ttgatgtcatctgtggaactttgcagcttgatc

SEQ ID NO: 594770 - DNA, 33 bp, Homo sapien
ttgatgtcatctgtggcactttgcagcttgatc

SEQ ID NO: 594771 - DNA, 33 bp, Homo sapien
gtgcataatgagatgcacacatacagttagaga

SEQ ID NO: 594772 - DNA, 33 bp, Homo sapien
gtgcataatgagatgcgcacatacagttagaga

SEQ ID NO: 594773 - DNA, 33 bp, Homo sapien
gagtaaaagctaggaacgctgggcttcacgaag

SEQ ID NO: 594774 - DNA, 33 bp, Homo sapien
gagtaaaagctaggaatgctgggcttcacgaag

SEQ ID NO: 594775 - DNA, 33 bp, Homo sapien
tgtccaggcagtcaaacgcaaaagtttaggttt

SEQ ID NO: 594776 - DNA, 33 bp, Homo sapien
tgtccaggcagtcaaaggcaaaagtttaggttt

SEQ ID NO: 594777 - DNA, 33 bp, Homo sapien
caaaagctgaaaatcactgagttcaggagagac

SEQ ID NO: 594778 - DNA, 33 bp, Homo sapien
caaaagctgaaaatcattgagttcaggagagac

SEQ ID NO: 594779 - DNA, 33 bp, Homo sapien
ggtgtttggtcttgcacaaaaatgtgtctatgt

SEQ ID NO: 594780 - DNA, 33 bp, Homo sapien
ggtgtttggtcttgcataaaaatgtgtctatgt

SEQ ID NO: 594781 - DNA, 33 bp, Homo sapien
ggataaagagaaaaaaacaaaagcagccgcaga

SEQ ID NO: 594782 - DNA, 33 bp, Homo sapien
ggataaagagaaaaaatcaaaagcagccgcaga

SEQ ID NO: 594783 - DNA, 33 bp, Homo sapien
tgtatcagtcaagagacagaaacatttaacacg

SEQ ID NO: 594784 - DNA, 33 bp, Homo sapien
tgtatcagtcaagagatagaaacatttaacacg

SEQ ID NO: 594785 - DNA, 33 bp, Homo sapien
atgaacaatccacaaccacaggcaacaaggtgg

SEQ ID NO: 594786 - DNA, 33 bp, Homo sapien
atgaacaatccacaactacaggcaacaaggtgg

SEQ ID NO: 594787 - DNA, 33 bp, Homo sapien
gcagtctctacaaggccacgttcgacaacgtga

SEQ ID NO: 594788 - DNA, 33 bp, Homo sapien
gcagtctctacaaggctacgttcgacaacgtga

SEQ ID NO: 594789 - DNA, 33 bp, Homo sapien
tcctgcagacaccatcacctccaagactgcaag

SEQ ID NO: 594790 - DNA, 33 bp, Homo sapien
tcctgcagacaccatcgcctccaagactgcaag

SEQ ID NO: 594791 - DNA, 33 bp, Homo sapien
caggagcgatgcagacaaggtacagggttcgcc

SEQ ID NO: 594792 - DNA, 33 bp, Homo sapien
caggagcgatgcagaccaggtacagggttcgcc

SEQ ID NO: 594793 - DNA, 33 bp, Homo sapien
atcagcaaccgtcccacgacaactggtacaacc

SEQ ID NO: 594794 - DNA, 33 bp, Homo sapien
atcagcaaccgtcccatgacaactggtacaacc

SEQ ID NO: 594795 - DNA, 33 bp, Homo sapien
ctgtgtttccgaaaacaactgtgagagccacgg

SEQ ID NO: 594796 - DNA, 33 bp, Homo sapien
ctgtgtttccgaaaacgactgtgagagccacgg

SEQ ID NO: 594797 - DNA, 33 bp, Homo sapien
cgtccaccttctccaactctggcagctattttg

SEQ ID NO: 594798 - DNA, 33 bp, Homo sapien
cgtccaccttctccaagtctggcagctattttg

SEQ ID NO: 594799 - DNA, 33 bp, Homo sapien
ttactggctccttgaaataatggttgaaggcgg

SEQ ID NO: 594800 - DNA, 33 bp, Homo sapien
ttactggctccttgaagtaatggttgaaggcgg

SEQ ID NO: 594801 - DNA, 33 bp, Homo sapien
taattttccatacagacgaagtctcactgtatt

SEQ ID NO: 594802 - DNA, 33 bp, Homo sapien
taattttccatacagatgaagtctcactgtatt

SEQ ID NO: 594803 - DNA, 33 bp, Homo sapien
aatgcttgtaaatggacacgtgcaggcccatat

SEQ ID NO: 594804 - DNA, 33 bp, Homo sapien
aatgcttgtaaatggatacgtgcaggcccatat

SEQ ID NO: 594805 - DNA, 33 bp, Homo sapien
ctgccggcacagatatcaggggctggatgttct

SEQ ID NO: 594806 - DNA, 33 bp, Homo sapien
ctgccggcacagatattaggggctggatgttct

SEQ ID NO: 594807 - DNA, 33 bp, Homo sapien
ttctgtactagaaatacggcctgtaacgctgtc

SEQ ID NO: 594808 - DNA, 33 bp, Homo sapien
ttctgtactagaaatatggcctgtaacgctgtc

SEQ ID NO: 594809 - DNA, 33 bp, Homo sapien
ttcctctcttgtttaacggaagccatgagaaaa

SEQ ID NO: 594810 - DNA, 33 bp, Homo sapien
ttcctctcttgtttaatggaagccatgagaaaa

SEQ ID NO: 594811 - DNA, 33 bp, Homo sapien
tggctactccaaaggcagaataggaatacgact

SEQ ID NO: 594812 - DNA, 33 bp, Homo sapien
tggctactccaaaggcggaataggaatacgact

SEQ ID NO: 594813 - DNA, 33 bp, Homo sapien
gtatgagtctgtgtaacggatagtttttattca

SEQ ID NO: 594814 - DNA, 33 bp, Homo sapien
gtatgagtctgtgtaatggatagtttttattca

SEQ ID NO: 594815 - DNA, 33 bp, Homo sapien
cagcgtgtcacaaagccgctcacctgctcgtgt

SEQ ID NO: 594816 - DNA, 33 bp, Homo sapien
cagcgtgtcacaaagctgctcacctgctcgtgt

SEQ ID NO: 594817 - DNA, 33 bp, Homo sapien
atcctagagttctggggagtcatgagcaagtgc

SEQ ID NO: 594818 - DNA, 33 bp, Homo sapien
atcctagagttctgggtagtcatgagcaagtgc

SEQ ID NO: 594819 - DNA, 33 bp, Homo sapien
tgtgacaataagaataacatccccctagaatag

SEQ ID NO: 594820 - DNA, 33 bp, Homo sapien
tgtgacaataagaataccatccccctagaatag

SEQ ID NO: 594821 - DNA, 33 bp, Homo sapien
agcatattttcaataacatcacagaaggaacac

SEQ ID NO: 594822 - DNA, 33 bp, Homo sapien
agcatattttcaataatatcacagaaggaacac

SEQ ID NO: 594823 - DNA, 33 bp, Homo sapien
agttgtaaatgcaaagcagaagtttctttccaa

SEQ ID NO: 594824 - DNA, 33 bp, Homo sapien
agttgtaaatgcaaagtagaagtttctttccaa

SEQ ID NO: 594825 - DNA, 33 bp, Homo sapien
tttccaggaagccacaatggatcgttacttatt

SEQ ID NO: 594826 - DNA, 33 bp, Homo sapien
tttccaggaagccacagtggatcgttacttatt

SEQ ID NO: 594827 - DNA, 33 bp, Homo sapien
aagaagagagcagcaaatctgcatagtctcttt

SEQ ID NO: 594828 - DNA, 33 bp, Homo sapien
aagaagagagcagcaagtctgcatagtctcttt

SEQ ID NO: 594829 - DNA, 33 bp, Homo sapien
atttaaatgcaaaatggacaactataaaacttt

SEQ ID NO: 594830 - DNA, 33 bp, Homo sapien
atttaaatgcaaaatgtacaactataaaacttt

SEQ ID NO: 594831 - DNA, 33 bp, Homo sapien
tcttttggaagccacaatgcaggctgacgttgc

SEQ ID NO: 594832 - DNA, 33 bp, Homo sapien
tcttttggaagccacagtgcaggctgacgttgc

SEQ ID NO: 594833 - DNA, 33 bp, Homo sapien
acagaaaaatggacacactctccatgagttttt

SEQ ID NO: 594834 - DNA, 33 bp, Homo sapien
acagaaaaatggacacgctctccatgagttttt

SEQ ID NO: 594835 - DNA, 33 bp, Homo sapien
gccagggcctggagcacggccttgtaacgagca

SEQ ID NO: 594836 - DNA, 33 bp, Homo sapien
gccagggcctggagcatggccttgtaacgagca

SEQ ID NO: 594837 - DNA, 33 bp, Homo sapien
gagtagccatgttcacaatatcagggaaacaaa

SEQ ID NO: 594838 - DNA, 33 bp, Homo sapien
gagtagccatgttcacgatatcagggaaacaaa

SEQ ID NO: 594839 - DNA, 33 bp, Homo sapien
cagctatccagatagacaagtctggcttttaat

SEQ ID NO: 594840 - DNA, 33 bp, Homo sapien
cagctatccagatagagaagtctggcttttaat

SEQ ID NO: 594841 - DNA, 33 bp, Homo sapien
ccgtgaaagcgcctatcaaaccagaacccgtcc

SEQ ID NO: 594842 - DNA, 33 bp, Homo sapien
ccgtgaaagcgcctattaaaccagaacccgtcc

SEQ ID NO: 594843 - DNA, 33 bp, Homo sapien
gttggtgatctggtgacgtccagacgagtgcag

SEQ ID NO: 594844 - DNA, 33 bp, Homo sapien
gttggtgatctggtgatgtccagacgagtgcag

SEQ ID NO: 594845 - DNA, 33 bp, Homo sapien
gtaatgtggtgaacgaaagtgcgtggttctctt

SEQ ID NO: 594846 - DNA, 33 bp, Homo sapien
gtaatgtggtgaacgagagtgcgtggttctctt

SEQ ID NO: 594847 - DNA, 33 bp, Homo sapien
aattgaccaaatttaacgaacctgcccaaagtt

SEQ ID NO: 594848 - DNA, 33 bp, Homo sapien
aattgaccaaatttaatgaacctgcccaaagtt

SEQ ID NO: 594849 - DNA, 33 bp, Homo sapien
tctacactaaagagcaagcagccgaagagacgg

SEQ ID NO: 594850 - DNA, 33 bp, Homo sapien
tctacactaaagagcaggcagccgaagagacgg

SEQ ID NO: 594851 - DNA, 33 bp, Homo sapien
gcttcccagtgccaccaaggttcaggcagtgct

SEQ ID NO: 594852 - DNA, 33 bp, Homo sapien
gcttcccagtgccaccgaggttcaggcagtgct

SEQ ID NO: 594853 - DNA, 33 bp, Homo sapien
gagaatgcacactgtaccattcagcatgggtgt

SEQ ID NO: 594854 - DNA, 33 bp, Homo sapien
gagaatgcacactgtatcattcagcatgggtgt

SEQ ID NO: 594855 - DNA, 33 bp, Homo sapien
gcattctctccagctgaaaactttcttcaactt

SEQ ID NO: 594856 - DNA, 33 bp, Homo sapien
gcattctctccagctgcaaactttcttcaactt

SEQ ID NO: 594857 - DNA, 33 bp, Homo sapien
ctttcctaaattcttactaaattcagaggaata

SEQ ID NO: 594858 - DNA, 33 bp, Homo sapien
ctttcctaaattcttagtaaattcagaggaata

SEQ ID NO: 594859 - DNA, 33 bp, Homo sapien
ttaaaagcacccattgcagagaggttaaaggaa

SEQ ID NO: 594860 - DNA, 33 bp, Homo sapien
ttaaaagcacccattggagagaggttaaaggaa

SEQ ID NO: 594861 - DNA, 33 bp, Homo sapien
aaaccctcacggctaacggctctgggagttgtg

SEQ ID NO: 594862 - DNA, 33 bp, Homo sapien
aaaccctcacggctaagggctctgggagttgtg

SEQ ID NO: 594863 - DNA, 33 bp, Homo sapien
ttaaacaactatcctacgtcttagtgaaggtaa

SEQ ID NO: 594864 - DNA, 33 bp, Homo sapien
ttaaacaactatcctaggtcttagtgaaggtaa

SEQ ID NO: 594865 - DNA, 33 bp, Homo sapien
cttattttgagacctcaaaggcataaatcctaa

SEQ ID NO: 594866 - DNA, 33 bp, Homo sapien
cttattttgagacctcgaaggcataaatcctaa

SEQ ID NO: 594867 - DNA, 33 bp, Homo sapien
cctgtgcggcttagcccattgctcccagccatg

SEQ ID NO: 594868 - DNA, 33 bp, Homo sapien
cctgtgcggcttagcctattgctcccagccatg

SEQ ID NO: 594869 - DNA, 33 bp, Homo sapien
atgtttcagccaacaacggactgagcagaccaa

SEQ ID NO: 594870 - DNA, 33 bp, Homo sapien
atgtttcagccaacaatggactgagcagaccaa

SEQ ID NO: 594871 - DNA, 33 bp, Homo sapien
ggtctacttctgtcaacagctttatttcgtggc

SEQ ID NO: 594872 - DNA, 33 bp, Homo sapien
ggtctacttctgtcaatagctttatttcgtggc

SEQ ID NO: 594873 - DNA, 33 bp, Homo sapien
caccagaccttatctcacaaaaacccacaaaaa

SEQ ID NO: 594874 - DNA, 33 bp, Homo sapien
caccagaccttatctcgcaaaaacccacaaaaa

SEQ ID NO: 594875 - DNA, 33 bp, Homo sapien
atagactagctctgcaatgaagtactcaaagaa

SEQ ID NO: 594876 - DNA, 33 bp, Homo sapien
atagactagctctgcactgaagtactcaaagaa

SEQ ID NO: 594877 - DNA, 33 bp, Homo sapien
acttaaataacttaaacggtggcctgtaatgag

SEQ ID NO: 594878 - DNA, 33 bp, Homo sapien
acttaaataacttaaatggtggcctgtaatgag

SEQ ID NO: 594879 - DNA, 33 bp, Homo sapien
tacccaccagaggcaaagaactagcaggcactg

SEQ ID NO: 594880 - DNA, 33 bp, Homo sapien
tacccaccagaggcaaggaactagcaggcactg

SEQ ID NO: 594881 - DNA, 33 bp, Homo sapien
agcaaagttggagctaagttcaggtgctgtcat

SEQ ID NO: 594882 - DNA, 33 bp, Homo sapien
agcaaagttggagctacgttcaggtgctgtcat

SEQ ID NO: 594883 - DNA, 33 bp, Homo sapien
gatgtatttgtccttacgtttttgtgtgtgaaa

SEQ ID NO: 594884 - DNA, 33 bp, Homo sapien
gatgtatttgtccttatgtttttgtgtgtgaaa

SEQ ID NO: 594885 - DNA, 33 bp, Homo sapien
gtgcctccgtttccccaaaatgcaaggagctga

SEQ ID NO: 594886 - DNA, 33 bp, Homo sapien
gtgcctccgtttccccgaaatgcaaggagctga

SEQ ID NO: 594887 - DNA, 33 bp, Homo sapien
aaactccagattgggaacgagtgctgcccaggt

SEQ ID NO: 594888 - DNA, 33 bp, Homo sapien
aaactccagattgggaccgagtgctgcccaggt

SEQ ID NO: 594889 - DNA, 33 bp, Homo sapien
ggccctgtagggaccacagttgatctagacctc

SEQ ID NO: 594890 - DNA, 33 bp, Homo sapien
ggccctgtagggaccatagttgatctagacctc

SEQ ID NO: 594891 - DNA, 33 bp, Homo sapien
agggcaagccccgcacacatggtgagaagctgg

SEQ ID NO: 594892 - DNA, 33 bp, Homo sapien
agggcaagccccgcacgcatggtgagaagctgg

SEQ ID NO: 594893 - DNA, 33 bp, Homo sapien
accccctggctcactacgacaccaccgctgatg

SEQ ID NO: 594894 - DNA, 33 bp, Homo sapien
accccctggctcactatgacaccaccgctgatg

SEQ ID NO: 594895 - DNA, 33 bp, Homo sapien
catttcatgcagcccagtctctcgctcttaaaa

SEQ ID NO: 594896 - DNA, 33 bp, Homo sapien
catttcatgcagcccattctctcgctcttaaaa

SEQ ID NO: 594897 - DNA, 33 bp, Homo sapien
tgcaccccaccagaacagcttacaaaccaagcg

SEQ ID NO: 594898 - DNA, 33 bp, Homo sapien
tgcaccccaccagaacggcttacaaaccaagcg

SEQ ID NO: 594899 - DNA, 33 bp, Homo sapien
tgatggtgaaacttgaaagcaagctaaaaagtc

SEQ ID NO: 594900 - DNA, 33 bp, Homo sapien
tgatggtgaaacttgagagcaagctaaaaagtc

SEQ ID NO: 594901 - DNA, 33 bp, Homo sapien
gtatagtaaggtggaacagtattacaggataat

SEQ ID NO: 594902 - DNA, 33 bp, Homo sapien
gtatagtaaggtggaatagtattacaggataat

SEQ ID NO: 594903 - DNA, 33 bp, Homo sapien
taagactcgttatacactacaaagtgtcattag

SEQ ID NO: 594904 - DNA, 33 bp, Homo sapien
taagactcgttatacattacaaagtgtcattag

SEQ ID NO: 594905 - DNA, 33 bp, Homo sapien
agtgtgtggacagaacagacaatcttttctgcc

SEQ ID NO: 594906 - DNA, 33 bp, Homo sapien
agtgtgtggacagaacggacaatcttttctgcc

SEQ ID NO: 594907 - DNA, 33 bp, Homo sapien
tcccattagcagcagtcacagtggggttttaag

SEQ ID NO: 594908 - DNA, 33 bp, Homo sapien
tcccattagcagcagttacagtggggttttaag

SEQ ID NO: 594909 - DNA, 33 bp, Homo sapien
cctgtctctctgggcccgataactttggcacac

SEQ ID NO: 594910 - DNA, 33 bp, Homo sapien
cctgtctctctgggcctgataactttggcacac

SEQ ID NO: 594911 - DNA, 33 bp, Homo sapien
agatcttgaccaggaacggatggaacggaattg

SEQ ID NO: 594912 - DNA, 33 bp, Homo sapien
agatcttgaccaggaatggatggaacggaattg

SEQ ID NO: 594913 - DNA, 33 bp, Homo sapien
agtgagcaggaggacccctgaattagagagatg

SEQ ID NO: 594914 - DNA, 33 bp, Homo sapien
agtgagcaggaggacctctgaattagagagatg

SEQ ID NO: 594915 - DNA, 33 bp, Homo sapien
aagatgtaaccccaacagaggtcaaggtctgaa

SEQ ID NO: 594916 - DNA, 33 bp, Homo sapien
aagatgtaaccccaacggaggtcaaggtctgaa

SEQ ID NO: 594917 - DNA, 33 bp, Homo sapien
gactgtcagggacggcaactctttgtccaccgc

SEQ ID NO: 594918 - DNA, 33 bp, Homo sapien
gactgtcagggacggcgactctttgtccaccgc

SEQ ID NO: 594919 - DNA, 33 bp, Homo sapien
tataatcgctagaatacgtttgttatcgtgaat

SEQ ID NO: 594920 - DNA, 33 bp, Homo sapien
tataatcgctagaataggtttgttatcgtgaat

SEQ ID NO: 594921 - DNA, 33 bp, Homo sapien
ctgctgtgtcatcccgcagcagcaggtggaaga

SEQ ID NO: 594922 - DNA, 33 bp, Homo sapien
ctgctgtgtcatcccgtagcagcaggtggaaga

SEQ ID NO: 594923 - DNA, 33 bp, Homo sapien
tgtttgcatcatgacccaaaaagaatctgctca

SEQ ID NO: 594924 - DNA, 33 bp, Homo sapien
tgtttgcatcatgacctaaaaagaatctgctca

SEQ ID NO: 594925 - DNA, 33 bp, Homo sapien
catgtgaagatgtacactggctaggaggcggcc

SEQ ID NO: 594926 - DNA, 33 bp, Homo sapien
catgtgaagatgtacattggctaggaggcggcc

SEQ ID NO: 594927 - DNA, 33 bp, Homo sapien
aacactgagaccccacaatgaccctggcagtgg

SEQ ID NO: 594928 - DNA, 33 bp, Homo sapien
aacactgagaccccacgatgaccctggcagtgg

SEQ ID NO: 594929 - DNA, 33 bp, Homo sapien
agacctgggctaacacaggagtggatgcatatc

SEQ ID NO: 594930 - DNA, 33 bp, Homo sapien
agacctgggctaacacgggagtggatgcatatc

SEQ ID NO: 594931 - DNA, 33 bp, Homo sapien
gcacaggaggagaacccggtaagctggaagttc

SEQ ID NO: 594932 - DNA, 33 bp, Homo sapien
gcacaggaggagaaccgggtaagctggaagttc

SEQ ID NO: 594933 - DNA, 33 bp, Homo sapien
aaaactatcattttccaagaaactggaagtcct

SEQ ID NO: 594934 - DNA, 33 bp, Homo sapien
aaaactatcattttccgagaaactggaagtcct

SEQ ID NO: 594935 - DNA, 33 bp, Homo sapien
ctgggcagacatttcaacatctggctagtcccg

SEQ ID NO: 594936 - DNA, 33 bp, Homo sapien
ctgggcagacatttcagcatctggctagtcccg

SEQ ID NO: 594937 - DNA, 33 bp, Homo sapien
ttaatcaatgcaaagcaagataggagaggagaa

SEQ ID NO: 594938 - DNA, 33 bp, Homo sapien
ttaatcaatgcaaagcgagataggagaggagaa

SEQ ID NO: 594939 - DNA, 33 bp, Homo sapien
caaagcaggagccaacagttctttcaagactgg

SEQ ID NO: 594940 - DNA, 33 bp, Homo sapien
caaagcaggagccaaccgttctttcaagactgg

SEQ ID NO: 594941 - DNA, 33 bp, Homo sapien
gctttacagaaaacagccctgggtacctgattc

SEQ ID NO: 594942 - DNA, 33 bp, Homo sapien
gctttacagaaaacagtcctgggtacctgattc

SEQ ID NO: 594943 - DNA, 33 bp, Homo sapien
atgagatgcgatcccaaagggtgcacaggccac

SEQ ID NO: 594944 - DNA, 33 bp, Homo sapien
atgagatgcgatcccagagggtgcacaggccac

SEQ ID NO: 594945 - DNA, 33 bp, Homo sapien
gcaacagaatggataaatcgataaacagtggaa

SEQ ID NO: 594946 - DNA, 33 bp, Homo sapien
gcaacagaatggataagtcgataaacagtggaa

SEQ ID NO: 594947 - DNA, 33 bp, Homo sapien
ttccgcatagagaaaaaaaacaactgaattggt

SEQ ID NO: 594948 - DNA, 33 bp, Homo sapien
ttccgcatagagaaaataaacaactgaattggt

SEQ ID NO: 594949 - DNA, 33 bp, Homo sapien
atttgaccagataccaaagatggagggattctc

SEQ ID NO: 594950 - DNA, 33 bp, Homo sapien
atttgaccagataccagagatggagggattctc

SEQ ID NO: 594951 - DNA, 33 bp, Homo sapien
attctgaagtatatcccgaagtagaaactgagt

SEQ ID NO: 594952 - DNA, 33 bp, Homo sapien
attctgaagtatatcctgaagtagaaactgagt

SEQ ID NO: 594953 - DNA, 33 bp, Homo sapien
ctggggagccggtaacaatgtgtggacagtaag

SEQ ID NO: 594954 - DNA, 33 bp, Homo sapien
ctggggagccggtaacgatgtgtggacagtaag

SEQ ID NO: 594955 - DNA, 33 bp, Homo sapien
aatgctaaaaggtgaaagcaaacatggcggacc

SEQ ID NO: 594956 - DNA, 33 bp, Homo sapien
aatgctaaaaggtgaacgcaaacatggcggacc

SEQ ID NO: 594957 - DNA, 33 bp, Homo sapien
cgtgactttggacacccatttccagatgcccgg

SEQ ID NO: 594958 - DNA, 33 bp, Homo sapien
cgtgactttggacacctatttccagatgcccgg

SEQ ID NO: 594959 - DNA, 33 bp, Homo sapien
gcgtcacaatggccacagcaataaccacaataa

SEQ ID NO: 594960 - DNA, 33 bp, Homo sapien
gcgtcacaatggccacggcaataaccacaataa

SEQ ID NO: 594961 - DNA, 33 bp, Homo sapien
aacatatgcaaaaataagcttacgctcaagtgt

SEQ ID NO: 594962 - DNA, 33 bp, Homo sapien
aacatatgcaaaaataggcttacgctcaagtgt

SEQ ID NO: 594963 - DNA, 33 bp, Homo sapien
tagttcccaagttgcacgtgaagttaagcctaa

SEQ ID NO: 594964 - DNA, 33 bp, Homo sapien
tagttcccaagttgcatgtgaagttaagcctaa

SEQ ID NO: 594965 - DNA, 33 bp, Homo sapien
ctgtaatgcacagatactactgatattattttg

SEQ ID NO: 594966 - DNA, 33 bp, Homo sapien
ctgtaatgcacagatattactgatattattttg

SEQ ID NO: 594967 - DNA, 33 bp, Homo sapien
agatcatatcaagggaaacaagcccattataaa

SEQ ID NO: 594968 - DNA, 33 bp, Homo sapien
agatcatatcaagggacacaagcccattataaa

SEQ ID NO: 594969 - DNA, 33 bp, Homo sapien
gctgaataaggcagcacgtgggtaaacagcccc

SEQ ID NO: 594970 - DNA, 33 bp, Homo sapien
gctgaataaggcagcatgtgggtaaacagcccc

SEQ ID NO: 594971 - DNA, 33 bp, Homo sapien
acagatagaggcaaaaatcaatagggcttgact

SEQ ID NO: 594972 - DNA, 33 bp, Homo sapien
acagatagaggcaaaagtcaatagggcttgact

SEQ ID NO: 594973 - DNA, 33 bp, Homo sapien
tctcttcctaatccccggcatcaactctgattc

SEQ ID NO: 594974 - DNA, 33 bp, Homo sapien
tctcttcctaatcccctgcatcaactctgattc

SEQ ID NO: 594975 - DNA, 33 bp, Homo sapien
ccacgtcttggagcaaccactggagcttcgctt

SEQ ID NO: 594976 - DNA, 33 bp, Homo sapien
ccacgtcttggagcaatcactggagcttcgctt

SEQ ID NO: 594977 - DNA, 33 bp, Homo sapien
ttccccttgaacctgaagagacctttgtgatct

SEQ ID NO: 594978 - DNA, 33 bp, Homo sapien
ttccccttgaacctgaggagacctttgtgatct

SEQ ID NO: 594979 - DNA, 33 bp, Homo sapien
ctgcctatattcaagagtaggcagaactagtct

SEQ ID NO: 594980 - DNA, 33 bp, Homo sapien
ctgcctatattcaagattaggcagaactagtct

SEQ ID NO: 594981 - DNA, 33 bp, Homo sapien
ctgtcattgcaccaaccggaaagatgagaagac

SEQ ID NO: 594982 - DNA, 33 bp, Homo sapien
ctgtcattgcaccaactggaaagatgagaagac

SEQ ID NO: 594983 - DNA, 33 bp, Homo sapien
tttagattctttacagccatcacactccctgat

SEQ ID NO: 594984 - DNA, 33 bp, Homo sapien
tttagattctttacaggcatcacactccctgat

SEQ ID NO: 594985 - DNA, 33 bp, Homo sapien
ctgtgggacagaagtaagagtctgactgccagg

SEQ ID NO: 594986 - DNA, 33 bp, Homo sapien
ctgtgggacagaagtacgagtctgactgccagg

SEQ ID NO: 594987 - DNA, 33 bp, Homo sapien
gctcttggctgactcacagctggtggacgcaga

SEQ ID NO: 594988 - DNA, 33 bp, Homo sapien
gctcttggctgactcagagctggtggacgcaga

SEQ ID NO: 594989 - DNA, 33 bp, Homo sapien
ttgagaattgcaggaaacgagacctgaactcaa

SEQ ID NO: 594990 - DNA, 33 bp, Homo sapien
ttgagaattgcaggaagcgagacctgaactcaa

SEQ ID NO: 594991 - DNA, 33 bp, Homo sapien
caaacttgcccaaccgcattctgaaacgagccc

SEQ ID NO: 594992 - DNA, 33 bp, Homo sapien
caaacttgcccaaccgtattctgaaacgagccc

SEQ ID NO: 594993 - DNA, 33 bp, Homo sapien
gaaaacaggacttcaaagagggagcgggcagaa

SEQ ID NO: 594994 - DNA, 33 bp, Homo sapien
gaaaacaggacttcaaggagggagcgggcagaa

SEQ ID NO: 594995 - DNA, 33 bp, Homo sapien
ggcctcgggacctttccagaaccttggaagtgg

SEQ ID NO: 594996 - DNA, 33 bp, Homo sapien
ggcctcgggacctttctagaaccttggaagtgg

SEQ ID NO: 594997 - DNA, 33 bp, Homo sapien
gtttcagaggctccaggatttggaagaagccca

SEQ ID NO: 594998 - DNA, 33 bp, Homo sapien
gtttcagaggctccagtatttggaagaagccca

SEQ ID NO: 594999 - DNA, 33 bp, Homo sapien
gcagcggaattgatgactaaggtccacagatga

SEQ ID NO: 595000 - DNA, 33 bp, Homo sapien
gcagcggaattgatgattaaggtccacagatga

SEQ ID NO: 595001 - DNA, 33 bp, Homo sapien
gagctctccctaccgcagataggacagcactcc

SEQ ID NO: 595002 - DNA, 33 bp, Homo sapien
gagctctccctaccgccgataggacagcactcc

SEQ ID NO: 595003 - DNA, 33 bp, Homo sapien
ctcctgcagtaatgccagattaatacaataggt

SEQ ID NO: 595004 - DNA, 33 bp, Homo sapien
ctcctgcagtaatgccggattaatacaataggt

SEQ ID NO: 595005 - DNA, 33 bp, Homo sapien
acttccatttctctccactggatgcgcaggact

SEQ ID NO: 595006 - DNA, 33 bp, Homo sapien
acttccatttctctccgctggatgcgcaggact

SEQ ID NO: 595007 - DNA, 33 bp, Homo sapien
cagactctcgagttgacggttacttgatttctc

SEQ ID NO: 595008 - DNA, 33 bp, Homo sapien
cagactctcgagttgatggttacttgatttctc

SEQ ID NO: 595009 - DNA, 33 bp, Homo sapien
tgagagcgattcactcaacagaagccgcccagc

SEQ ID NO: 595010 - DNA, 33 bp, Homo sapien
tgagagcgattcactcgacagaagccgcccagc

SEQ ID NO: 595011 - DNA, 33 bp, Homo sapien
tctcccatgcttgggcacttcttccagaactcc

SEQ ID NO: 595012 - DNA, 33 bp, Homo sapien
tctcccatgcttgggcgcttcttccagaactcc

SEQ ID NO: 595013 - DNA, 33 bp, Homo sapien
accacttagcagatgaagttcctcgaggagata

SEQ ID NO: 595014 - DNA, 33 bp, Homo sapien
accacttagcagatgaggttcctcgaggagata

SEQ ID NO: 595015 - DNA, 33 bp, Homo sapien
gaacgagaattcagggaagttggcacaaaactt

SEQ ID NO: 595016 - DNA, 33 bp, Homo sapien
gaacgagaattcaggggagttggcacaaaactt

SEQ ID NO: 595017 - DNA, 33 bp, Homo sapien
cccagggtgatgtcccaacagtggaggtgagat

SEQ ID NO: 595018 - DNA, 33 bp, Homo sapien
cccagggtgatgtcccgacagtggaggtgagat

SEQ ID NO: 595019 - DNA, 33 bp, Homo sapien
caaagtataaaaaacaagcagttctaaacaaca

SEQ ID NO: 595020 - DNA, 33 bp, Homo sapien
caaagtataaaaaacaggcagttctaaacaaca

SEQ ID NO: 595021 - DNA, 33 bp, Homo sapien
acccactaatagaaaacggagcagaaaataaga

SEQ ID NO: 595022 - DNA, 33 bp, Homo sapien
acccactaatagaaaatggagcagaaaataaga

SEQ ID NO: 595023 - DNA, 33 bp, Homo sapien
gcctgggtcgagctcaacctgaagcctgtagta

SEQ ID NO: 595024 - DNA, 33 bp, Homo sapien
gcctgggtcgagctcagcctgaagcctgtagta

SEQ ID NO: 595025 - DNA, 33 bp, Homo sapien
cagcacacccaaatcacctggactaagggcagg

SEQ ID NO: 595026 - DNA, 33 bp, Homo sapien
cagcacacccaaatcatctggactaagggcagg

SEQ ID NO: 595027 - DNA, 33 bp, Homo sapien
ctcaccctcagtctccacgttgtctccacctag

SEQ ID NO: 595028 - DNA, 33 bp, Homo sapien
ctcaccctcagtctccgcgttgtctccacctag

SEQ ID NO: 595029 - DNA, 33 bp, Homo sapien
tctctcaggcttgagtaaccaggacacagacct

SEQ ID NO: 595030 - DNA, 33 bp, Homo sapien
tctctcaggcttgagttaccaggacacagacct

SEQ ID NO: 595031 - DNA, 33 bp, Homo sapien
cttaccctctaggacagctttgccatgtgcagt

SEQ ID NO: 595032 - DNA, 33 bp, Homo sapien
cttaccctctaggacatctttgccatgtgcagt

SEQ ID NO: 595033 - DNA, 33 bp, Homo sapien
gagggactcactgacacgcacggcggttacacg

SEQ ID NO: 595034 - DNA, 33 bp, Homo sapien
gagggactcactgacatgcacggcggttacacg

SEQ ID NO: 595035 - DNA, 33 bp, Homo sapien
taaagctgacgtaccacgaaagacacaaatctt

SEQ ID NO: 595036 - DNA, 33 bp, Homo sapien
taaagctgacgtaccatgaaagacacaaatctt

SEQ ID NO: 595037 - DNA, 33 bp, Homo sapien
gacagatccctctttcaagcaagcatctgctct

SEQ ID NO: 595038 - DNA, 33 bp, Homo sapien
gacagatccctctttccagcaagcatctgctct

SEQ ID NO: 595039 - DNA, 33 bp, Homo sapien
ggtgagcgaaggccacagcgacagcaccagtgc

SEQ ID NO: 595040 - DNA, 33 bp, Homo sapien
ggtgagcgaaggccacggcgacagcaccagtgc

SEQ ID NO: 595041 - DNA, 33 bp, Homo sapien
ctgttgaagactcctcactgctgcaggtccgcg

SEQ ID NO: 595042 - DNA, 33 bp, Homo sapien
ctgttgaagactcctcgctgctgcaggtccgcg

SEQ ID NO: 595043 - DNA, 33 bp, Homo sapien
gaagggtttctcccgcaaaggaagagccggcac

SEQ ID NO: 595044 - DNA, 33 bp, Homo sapien
gaagggtttctcccgcgaaggaagagccggcac

SEQ ID NO: 595045 - DNA, 33 bp, Homo sapien
ttcactttaaaacgcccctgtgagactggaaca

SEQ ID NO: 595046 - DNA, 33 bp, Homo sapien
ttcactttaaaacgcctctgtgagactggaaca

SEQ ID NO: 595047 - DNA, 33 bp, Homo sapien
ctagggtctttctccacatgacaccaacaggcc

SEQ ID NO: 595048 - DNA, 33 bp, Homo sapien
ctagggtctttctccatatgacaccaacaggcc

SEQ ID NO: 595049 - DNA, 33 bp, Homo sapien
tgtgattttcaaaactcaaacacttatgaatac

SEQ ID NO: 595050 - DNA, 33 bp, Homo sapien
tgtgattttcaaaactgaaacacttatgaatac

SEQ ID NO: 595051 - DNA, 33 bp, Homo sapien
tgtttaacagatgatacagcttcttttacctcc

SEQ ID NO: 595052 - DNA, 33 bp, Homo sapien
tgtttaacagatgatatagcttcttttacctcc

SEQ ID NO: 595053 - DNA, 33 bp, Homo sapien
ttagctgtgacttaaccctgagtgccattttgt

SEQ ID NO: 595054 - DNA, 33 bp, Homo sapien
ttagctgtgacttaactctgagtgccattttgt

SEQ ID NO: 595055 - DNA, 33 bp, Homo sapien
tgtgatagacatagcccgaaggtaattttatat

SEQ ID NO: 595056 - DNA, 33 bp, Homo sapien
tgtgatagacatagccggaaggtaattttatat

SEQ ID NO: 595057 - DNA, 33 bp, Homo sapien
agttgtaatttactgtaaaggttgagggaatag

SEQ ID NO: 595058 - DNA, 33 bp, Homo sapien
agttgtaatttactgtgaaggttgagggaatag

SEQ ID NO: 595059 - DNA, 33 bp, Homo sapien
ggggtactgcctaactaactggccttggcaagt

SEQ ID NO: 595060 - DNA, 33 bp, Homo sapien
ggggtactgcctaactgactggccttggcaagt

SEQ ID NO: 595061 - DNA, 33 bp, Homo sapien
gaaaactaaccaatgacgtctggcaaaaatgac

SEQ ID NO: 595062 - DNA, 33 bp, Homo sapien
gaaaactaaccaatgatgtctggcaaaaatgac

SEQ ID NO: 595063 - DNA, 33 bp, Homo sapien
ggatttggaattcctcaaatgttacaggatatt

SEQ ID NO: 595064 - DNA, 33 bp, Homo sapien
ggatttggaattcctcgaatgttacaggatatt

SEQ ID NO: 595065 - DNA, 33 bp, Homo sapien
cctaatgtcaactaaacgtgagaagtcatccag

SEQ ID NO: 595066 - DNA, 33 bp, Homo sapien
cctaatgtcaactaaatgtgagaagtcatccag

SEQ ID NO: 595067 - DNA, 33 bp, Homo sapien
gcattcatggactgtaacttagctctgttgaaa

SEQ ID NO: 595068 - DNA, 33 bp, Homo sapien
gcattcatggactgtatcttagctctgttgaaa

SEQ ID NO: 595069 - DNA, 33 bp, Homo sapien
cttgacagaaacttaagaggcctaccaattttt

SEQ ID NO: 595070 - DNA, 33 bp, Homo sapien
cttgacagaaacttaataggcctaccaattttt

SEQ ID NO: 595071 - DNA, 33 bp, Homo sapien
gtagcgttcaccaaggaaattcaactctggtta

SEQ ID NO: 595072 - DNA, 33 bp, Homo sapien
gtagcgttcaccaagggaattcaactctggtta

SEQ ID NO: 595073 - DNA, 33 bp, Homo sapien
cagagaacgttttccacaggataccaggatgct

SEQ ID NO: 595074 - DNA, 33 bp, Homo sapien
cagagaacgttttccataggataccaggatgct

SEQ ID NO: 595075 - DNA, 33 bp, Homo sapien
tcttccaatctcatgcaaatttttttcctcctt

SEQ ID NO: 595076 - DNA, 33 bp, Homo sapien
tcttccaatctcatgcgaatttttttcctcctt

SEQ ID NO: 595077 - DNA, 33 bp, Homo sapien
aaaatctcaactctcacgggaaaaaacaatcaa

SEQ ID NO: 595078 - DNA, 33 bp, Homo sapien
aaaatctcaactctcatgggaaaaaacaatcaa

SEQ ID NO: 595079 - DNA, 33 bp, Homo sapien
tcttttatcatttctccattgatttgtcttggc

SEQ ID NO: 595080 - DNA, 33 bp, Homo sapien
tcttttatcatttctctattgatttgtcttggc

SEQ ID NO: 595081 - DNA, 33 bp, Homo sapien
ttgcaataatactgacaaaggtgttgcctgaga

SEQ ID NO: 595082 - DNA, 33 bp, Homo sapien
ttgcaataatactgacgaaggtgttgcctgaga

SEQ ID NO: 595083 - DNA, 33 bp, Homo sapien
gaagatagctcaccccaagaatatgagtttctg

SEQ ID NO: 595084 - DNA, 33 bp, Homo sapien
gaagatagctcaccccgagaatatgagtttctg

SEQ ID NO: 595085 - DNA, 33 bp, Homo sapien
tagacatgtgaaatatcagtaagttttgaaatg

SEQ ID NO: 595086 - DNA, 33 bp, Homo sapien
tagacatgtgaaatattagtaagttttgaaatg

SEQ ID NO: 595087 - DNA, 33 bp, Homo sapien
tccatagcagatgctaagcagaccacattatca

SEQ ID NO: 595088 - DNA, 33 bp, Homo sapien
tccatagcagatgctaggcagaccacattatca

SEQ ID NO: 595089 - DNA, 33 bp, Homo sapien
caacctgtctgatgtgcatctttccagatcttt

SEQ ID NO: 595090 - DNA, 33 bp, Homo sapien
caacctgtctgatgtgtatctttccagatcttt

SEQ ID NO: 595091 - DNA, 33 bp, Homo sapien
atccacagcaagaacccgggagcatgacaaagg

SEQ ID NO: 595092 - DNA, 33 bp, Homo sapien
atccacagcaagaacctgggagcatgacaaagg

SEQ ID NO: 595093 - DNA, 33 bp, Homo sapien
atagagaattgaaatccagtagaaggcataaaa

SEQ ID NO: 595094 - DNA, 33 bp, Homo sapien
atagagaattgaaatctagtagaaggcataaaa

SEQ ID NO: 595095 - DNA, 33 bp, Homo sapien
tctgcaaaattgctgcaaagacgaaggagtaag

SEQ ID NO: 595096 - DNA, 33 bp, Homo sapien
tctgcaaaattgctgcgaagacgaaggagtaag

SEQ ID NO: 595097 - DNA, 33 bp, Homo sapien
aactgagagctcaacacaagtgcagttccacct

SEQ ID NO: 595098 - DNA, 33 bp, Homo sapien
aactgagagctcaacagaagtgcagttccacct

SEQ ID NO: 595099 - DNA, 33 bp, Homo sapien
aattctcattacatagacgcacaagaatatgtc

SEQ ID NO: 595100 - DNA, 33 bp, Homo sapien
aattctcattacataggcgcacaagaatatgtc

SEQ ID NO: 595101 - DNA, 33 bp, Homo sapien
gtaatctacagcaataccggtttcaatgaatct

SEQ ID NO: 595102 - DNA, 33 bp, Homo sapien
gtaatctacagcaatagcggtttcaatgaatct

SEQ ID NO: 595103 - DNA, 33 bp, Homo sapien
gtgtggtctcacaacactgtcaatacactaaat

SEQ ID NO: 595104 - DNA, 33 bp, Homo sapien
gtgtggtctcacaacattgtcaatacactaaat

SEQ ID NO: 595105 - DNA, 33 bp, Homo sapien
cgagtccacacttatgaaatatctagaaacaca

SEQ ID NO: 595106 - DNA, 33 bp, Homo sapien
cgagtccacacttatggaatatctagaaacaca

SEQ ID NO: 595107 - DNA, 33 bp, Homo sapien
cagacgtgcttgggacaatctctgcacagccca

SEQ ID NO: 595108 - DNA, 33 bp, Homo sapien
cagacgtgcttgggacgatctctgcacagccca

SEQ ID NO: 595109 - DNA, 33 bp, Homo sapien
ccgcaccgacggaccacgagaatgaaagaatgc

SEQ ID NO: 595110 - DNA, 33 bp, Homo sapien
ccgcaccgacggaccaggagaatgaaagaatgc

SEQ ID NO: 595111 - DNA, 33 bp, Homo sapien
tagtgcagttctgaagacaaagaagactctttc

SEQ ID NO: 595112 - DNA, 33 bp, Homo sapien
tagtgcagttctgaaggcaaagaagactctttc

SEQ ID NO: 595113 - DNA, 33 bp, Homo sapien
aacagatattaagcaacgatgacacaaatcctg

SEQ ID NO: 595114 - DNA, 33 bp, Homo sapien
aacagatattaagcaatgatgacacaaatcctg

SEQ ID NO: 595115 - DNA, 33 bp, Homo sapien
acagtgtgaaaatgacgcagaaggctggggcca

SEQ ID NO: 595116 - DNA, 33 bp, Homo sapien
acagtgtgaaaatgactcagaaggctggggcca

SEQ ID NO: 595117 - DNA, 33 bp, Homo sapien
cttattgtcagggtacagaagtttaatactttc

SEQ ID NO: 595118 - DNA, 33 bp, Homo sapien
cttattgtcagggtacggaagtttaatactttc

SEQ ID NO: 595119 - DNA, 33 bp, Homo sapien
atctccaggacactgacggcttaggtccttccc

SEQ ID NO: 595120 - DNA, 33 bp, Homo sapien
atctccaggacactgatggcttaggtccttccc

SEQ ID NO: 595121 - DNA, 33 bp, Homo sapien
agggcagctgccgtgacgtcgtggctatgaggc

SEQ ID NO: 595122 - DNA, 33 bp, Homo sapien
agggcagctgccgtgatgtcgtggctatgaggc

SEQ ID NO: 595123 - DNA, 33 bp, Homo sapien
agcttattttaggatcacaagtgcacgctctgg

SEQ ID NO: 595124 - DNA, 33 bp, Homo sapien
agcttattttaggatcgcaagtgcacgctctgg

SEQ ID NO: 595125 - DNA, 33 bp, Homo sapien
aatgagaacaaaagaccatttattcaggacttg

SEQ ID NO: 595126 - DNA, 33 bp, Homo sapien
aatgagaacaaaagacgatttattcaggacttg

SEQ ID NO: 595127 - DNA, 33 bp, Homo sapien
tcaacacaagagaggacggcgactcccttgtac

SEQ ID NO: 595128 - DNA, 33 bp, Homo sapien
tcaacacaagagaggatggcgactcccttgtac

SEQ ID NO: 595129 - DNA, 33 bp, Homo sapien
ctttctctctgctagcaatcttgaggacagagg

SEQ ID NO: 595130 - DNA, 33 bp, Homo sapien
ctttctctctgctagcgatcttgaggacagagg

SEQ ID NO: 595131 - DNA, 33 bp, Homo sapien
ggtctagagttgtgcaaggaattcagctccagt

SEQ ID NO: 595132 - DNA, 33 bp, Homo sapien
ggtctagagttgtgcagggaattcagctccagt

SEQ ID NO: 595133 - DNA, 33 bp, Homo sapien
gttttcagcatattcaaagttgtacagccatca

SEQ ID NO: 595134 - DNA, 33 bp, Homo sapien
gttttcagcatattcagagttgtacagccatca

SEQ ID NO: 595135 - DNA, 33 bp, Homo sapien
caacgcatgcagccaccgtagaaaagtctggaa

SEQ ID NO: 595136 - DNA, 33 bp, Homo sapien
caacgcatgcagccactgtagaaaagtctggaa

SEQ ID NO: 595137 - DNA, 33 bp, Homo sapien
cgtgagaaggtggccactgattaagataagcca

SEQ ID NO: 595138 - DNA, 33 bp, Homo sapien
cgtgagaaggtggccattgattaagataagcca

SEQ ID NO: 595139 - DNA, 33 bp, Homo sapien
agaccccacgcggtgaagttgaggcctggacgg

SEQ ID NO: 595140 - DNA, 33 bp, Homo sapien
agaccccacgcggtgatgttgaggcctggacgg

SEQ ID NO: 595141 - DNA, 33 bp, Homo sapien
cctcagtttccagaaacaagccagactcagtgc

SEQ ID NO: 595142 - DNA, 33 bp, Homo sapien
cctcagtttccagaaagaagccagactcagtgc

SEQ ID NO: 595143 - DNA, 33 bp, Homo sapien
gtctccaatattcagcaacctttcatggattaa

SEQ ID NO: 595144 - DNA, 33 bp, Homo sapien
gtctccaatattcagcgacctttcatggattaa

SEQ ID NO: 595145 - DNA, 33 bp, Homo sapien
accttgtcctccacacacttacagaggagggaa

SEQ ID NO: 595146 - DNA, 33 bp, Homo sapien
accttgtcctccacacgcttacagaggagggaa

SEQ ID NO: 595147 - DNA, 33 bp, Homo sapien
aggctttgcttaacccagaattaactgcagtct

SEQ ID NO: 595148 - DNA, 33 bp, Homo sapien
aggctttgcttaacccggaattaactgcagtct

SEQ ID NO: 595149 - DNA, 33 bp, Homo sapien
gtccagagtatctagccagctgtttacagccac

SEQ ID NO: 595150 - DNA, 33 bp, Homo sapien
gtccagagtatctagcgagctgtttacagccac

SEQ ID NO: 595151 - DNA, 33 bp, Homo sapien
actcccctgaagctcaaaggcaatgatgagccc

SEQ ID NO: 595152 - DNA, 33 bp, Homo sapien
actcccctgaagctcagaggcaatgatgagccc

SEQ ID NO: 595153 - DNA, 33 bp, Homo sapien
agaagagaggaatttcaacagccccgtacacaa

SEQ ID NO: 595154 - DNA, 33 bp, Homo sapien
agaagagaggaatttcgacagccccgtacacaa

SEQ ID NO: 595155 - DNA, 33 bp, Homo sapien
gggcgctggatttccacgagcgggaacgtgcgg

SEQ ID NO: 595156 - DNA, 33 bp, Homo sapien
gggcgctggatttccatgagcgggaacgtgcgg

SEQ ID NO: 595157 - DNA, 33 bp, Homo sapien
aatgttcccgtttgagaagaagtgtggtgataa

SEQ ID NO: 595158 - DNA, 33 bp, Homo sapien
aatgttcccgtttgagtagaagtgtggtgataa

SEQ ID NO: 595159 - DNA, 33 bp, Homo sapien
ttttttccaaagttaaaggtgcacatctgtgac

SEQ ID NO: 595160 - DNA, 33 bp, Homo sapien
ttttttccaaagttaagggtgcacatctgtgac

SEQ ID NO: 595161 - DNA, 33 bp, Homo sapien
acttgtctcccagaacaaactcttctgttgctt

SEQ ID NO: 595162 - DNA, 33 bp, Homo sapien
acttgtctcccagaacgaactcttctgttgctt

SEQ ID NO: 595163 - DNA, 33 bp, Homo sapien
agcagcgtgccagcaacgccctgaatggccttg

SEQ ID NO: 595164 - DNA, 33 bp, Homo sapien
agcagcgtgccagcaatgccctgaatggccttg

SEQ ID NO: 595165 - DNA, 33 bp, Homo sapien
attttgagaagatgaagatggaaatcggtttga

SEQ ID NO: 595166 - DNA, 33 bp, Homo sapien
attttgagaagatgaatatggaaatcggtttga

SEQ ID NO: 595167 - DNA, 33 bp, Homo sapien
ctcccctgggcaagtagccggcagtgtgttcac

SEQ ID NO: 595168 - DNA, 33 bp, Homo sapien
ctcccctgggcaagtatccggcagtgtgttcac

SEQ ID NO: 595169 - DNA, 33 bp, Homo sapien
gggtgggaggctgtcacgaggttagtatcgtgt

SEQ ID NO: 595170 - DNA, 33 bp, Homo sapien
gggtgggaggctgtcaggaggttagtatcgtgt

SEQ ID NO: 595171 - DNA, 33 bp, Homo sapien
ctcacaacaatctatcaagtatttgctaaacct

SEQ ID NO: 595172 - DNA, 33 bp, Homo sapien
ctcacaacaatctatcgagtatttgctaaacct

SEQ ID NO: 595173 - DNA, 33 bp, Homo sapien
actcaggcacctcacactgaaataacgagaacg

SEQ ID NO: 595174 - DNA, 33 bp, Homo sapien
actcaggcacctcacagtgaaataacgagaacg

SEQ ID NO: 595175 - DNA, 33 bp, Homo sapien
aagaaaaacaaacacaatctagcgtggaacctc

SEQ ID NO: 595176 - DNA, 33 bp, Homo sapien
aagaaaaacaaacacagtctagcgtggaacctc

SEQ ID NO: 595177 - DNA, 33 bp, Homo sapien
ccacatgaaaagagcaccttctcgttcatcttc

SEQ ID NO: 595178 - DNA, 33 bp, Homo sapien
ccacatgaaaagagcagcttctcgttcatcttc

SEQ ID NO: 595179 - DNA, 33 bp, Homo sapien
caggtactgtctcaccaggaatcggaactaaag

SEQ ID NO: 595180 - DNA, 33 bp, Homo sapien
caggtactgtctcaccgggaatcggaactaaag

SEQ ID NO: 595181 - DNA, 33 bp, Homo sapien
gcctcaataattaaaacagcacagtaccggctt

SEQ ID NO: 595182 - DNA, 33 bp, Homo sapien
gcctcaataattaaaatagcacagtaccggctt

SEQ ID NO: 595183 - DNA, 33 bp, Homo sapien
gctctcttaatggctccaggtcactggcagctc

SEQ ID NO: 595184 - DNA, 33 bp, Homo sapien
gctctcttaatggctctaggtcactggcagctc

SEQ ID NO: 595185 - DNA, 33 bp, Homo sapien
gaccctttgagatatcactgcgtctctactgtt

SEQ ID NO: 595186 - DNA, 33 bp, Homo sapien
gaccctttgagatatcgctgcgtctctactgtt

SEQ ID NO: 595187 - DNA, 33 bp, Homo sapien
gcaaaaacttacagacaggttttgtatcagatt

SEQ ID NO: 595188 - DNA, 33 bp, Homo sapien
gcaaaaacttacagacgggttttgtatcagatt

SEQ ID NO: 595189 - DNA, 33 bp, Homo sapien
ctgcacgggtgaacaaagggccgctacccgaga

SEQ ID NO: 595190 - DNA, 33 bp, Homo sapien
ctgcacgggtgaacaaggggccgctacccgaga

SEQ ID NO: 595191 - DNA, 33 bp, Homo sapien
ttgagacaaagcccacaaagggacagagcatct

SEQ ID NO: 595192 - DNA, 33 bp, Homo sapien
ttgagacaaagcccacgaagggacagagcatct

SEQ ID NO: 595193 - DNA, 33 bp, Homo sapien
tgactggacagttttcccattgtaccatttacg

SEQ ID NO: 595194 - DNA, 33 bp, Homo sapien
tgactggacagttttcgcattgtaccatttacg

SEQ ID NO: 595195 - DNA, 33 bp, Homo sapien
acataggagcagcaccaatgcctttcacgccaa

SEQ ID NO: 595196 - DNA, 33 bp, Homo sapien
acataggagcagcaccgatgcctttcacgccaa

SEQ ID NO: 595197 - DNA, 33 bp, Homo sapien
gttgggtgatgaatgaccgaatcatagcaatag

SEQ ID NO: 595198 - DNA, 33 bp, Homo sapien
gttgggtgatgaatgagcgaatcatagcaatag

SEQ ID NO: 595199 - DNA, 33 bp, Homo sapien
cctccaagcaaggttccatgattctatttttga

SEQ ID NO: 595200 - DNA, 33 bp, Homo sapien
cctccaagcaaggttctatgattctatttttga

SEQ ID NO: 595201 - DNA, 33 bp, Homo sapien
aaaatccaattgcaaccgcataaataatccaaa

SEQ ID NO: 595202 - DNA, 33 bp, Homo sapien
aaaatccaattgcaactgcataaataatccaaa

SEQ ID NO: 595203 - DNA, 33 bp, Homo sapien
aaactttggcagttaaaagattgtatgggcttt

SEQ ID NO: 595204 - DNA, 33 bp, Homo sapien
aaactttggcagttaatagattgtatgggcttt

SEQ ID NO: 595205 - DNA, 33 bp, Homo sapien
aaggaggaggaaggaacaaaattgccgctcagg

SEQ ID NO: 595206 - DNA, 33 bp, Homo sapien
aaggaggaggaaggaagaaaattgccgctcagg

SEQ ID NO: 595207 - DNA, 33 bp, Homo sapien
agtacgacgaactggacgccctcttctctcagt

SEQ ID NO: 595208 - DNA, 33 bp, Homo sapien
agtacgacgaactggatgccctcttctctcagt

SEQ ID NO: 595209 - DNA, 33 bp, Homo sapien
cttaacacattttccaataagggagtgcgcaag

SEQ ID NO: 595210 - DNA, 33 bp, Homo sapien
cttaacacattttccattaagggagtgcgcaag

SEQ ID NO: 595211 - DNA, 33 bp, Homo sapien
ccaacagtggcattaactactgcatggcatgat

SEQ ID NO: 595212 - DNA, 33 bp, Homo sapien
ccaacagtggcattaattactgcatggcatgat

SEQ ID NO: 595213 - DNA, 33 bp, Homo sapien
atacacatgtcgaggaactttcatagctgaatc

SEQ ID NO: 595214 - DNA, 33 bp, Homo sapien
atacacatgtcgaggagctttcatagctgaatc

SEQ ID NO: 595215 - DNA, 33 bp, Homo sapien
tgctcttatcaccacacgctcatttctcagatc

SEQ ID NO: 595216 - DNA, 33 bp, Homo sapien
tgctcttatcaccacatgctcatttctcagatc

SEQ ID NO: 595217 - DNA, 33 bp, Homo sapien
cttagaagtacgtttcaaatgctaaacactaga

SEQ ID NO: 595218 - DNA, 33 bp, Homo sapien
cttagaagtacgtttcgaatgctaaacactaga

SEQ ID NO: 595219 - DNA, 33 bp, Homo sapien
cctaaattttacctgcaatggaaattcagttat

SEQ ID NO: 595220 - DNA, 33 bp, Homo sapien
cctaaattttacctgcgatggaaattcagttat

SEQ ID NO: 595221 - DNA, 33 bp, Homo sapien
ggagtcaagacttgaacggggactggaggaaga

SEQ ID NO: 595222 - DNA, 33 bp, Homo sapien
ggagtcaagacttgaatggggactggaggaaga

SEQ ID NO: 595223 - DNA, 33 bp, Homo sapien
aggttggcagtacctaagagacagcagattggc

SEQ ID NO: 595224 - DNA, 33 bp, Homo sapien
aggttggcagtacctaggagacagcagattggc

SEQ ID NO: 595225 - DNA, 33 bp, Homo sapien
acctccatggcgtccaaagacaggttgcaagag

SEQ ID NO: 595226 - DNA, 33 bp, Homo sapien
acctccatggcgtccagagacaggttgcaagag

SEQ ID NO: 595227 - DNA, 33 bp, Homo sapien
gccaccattcccgggcactgtttgggtttgttt

SEQ ID NO: 595228 - DNA, 33 bp, Homo sapien
gccaccattcccgggcgctgtttgggtttgttt

SEQ ID NO: 595229 - DNA, 33 bp, Homo sapien
cttctaattcagttccaacagtatggacccggg

SEQ ID NO: 595230 - DNA, 33 bp, Homo sapien
cttctaattcagttccgacagtatggacccggg

SEQ ID NO: 595231 - DNA, 33 bp, Homo sapien
tctagaggaagaaagcagcgggaaattccaggg

SEQ ID NO: 595232 - DNA, 33 bp, Homo sapien
tctagaggaagaaagctgcgggaaattccaggg

SEQ ID NO: 595233 - DNA, 33 bp, Homo sapien
ttacaacagtcgtttcaacagagttgagtcagc

SEQ ID NO: 595234 - DNA, 33 bp, Homo sapien
ttacaacagtcgtttcgacagagttgagtcagc

SEQ ID NO: 595235 - DNA, 33 bp, Homo sapien
gtaactacttcttctcagaaaagcccatcacca

SEQ ID NO: 595236 - DNA, 33 bp, Homo sapien
gtaactacttcttctcggaaaagcccatcacca

SEQ ID NO: 595237 - DNA, 33 bp, Homo sapien
gggtagcctctaaaccactaggaatgggtagag

SEQ ID NO: 595238 - DNA, 33 bp, Homo sapien
gggtagcctctaaaccgctaggaatgggtagag

SEQ ID NO: 595239 - DNA, 33 bp, Homo sapien
ttttaaactgagtgacacatggatgtatggatg

SEQ ID NO: 595240 - DNA, 33 bp, Homo sapien
ttttaaactgagtgacgcatggatgtatggatg

SEQ ID NO: 595241 - DNA, 33 bp, Homo sapien
gactgtgctcgctgaaagtcagggacagggtgg

SEQ ID NO: 595242 - DNA, 33 bp, Homo sapien
gactgtgctcgctgaacgtcagggacagggtgg

SEQ ID NO: 595243 - DNA, 33 bp, Homo sapien
cacccacaaaaatcaaaagagcagattttccaa

SEQ ID NO: 595244 - DNA, 33 bp, Homo sapien
cacccacaaaaatcaagagagcagattttccaa

SEQ ID NO: 595245 - DNA, 33 bp, Homo sapien
accaacatttccattaacaaaagcggtcttgtc

SEQ ID NO: 595246 - DNA, 33 bp, Homo sapien
accaacatttccattagcaaaagcggtcttgtc

SEQ ID NO: 595247 - DNA, 33 bp, Homo sapien
ccagagctctgttttgaatgggattttagcgcg

SEQ ID NO: 595248 - DNA, 33 bp, Homo sapien
ccagagctctgttttgcatgggattttagcgcg

SEQ ID NO: 595249 - DNA, 33 bp, Homo sapien
ctaacccatcaccgtcaaatctaaggttgaaag

SEQ ID NO: 595250 - DNA, 33 bp, Homo sapien
ctaacccatcaccgtcgaatctaaggttgaaag

SEQ ID NO: 595251 - DNA, 33 bp, Homo sapien
gtgatgggttagtaaacgtcaattctaaagtgg

SEQ ID NO: 595252 - DNA, 33 bp, Homo sapien
gtgatgggttagtaaatgtcaattctaaagtgg

SEQ ID NO: 595253 - DNA, 33 bp, Homo sapien
tgacgctgtcggagccaatggccttgagactgg

SEQ ID NO: 595254 - DNA, 33 bp, Homo sapien
tgacgctgtcggagccgatggccttgagactgg

SEQ ID NO: 595255 - DNA, 33 bp, Homo sapien
aggaggaggatgtcaacgtgcaagttctcaggg

SEQ ID NO: 595256 - DNA, 33 bp, Homo sapien
aggaggaggatgtcaatgtgcaagttctcaggg

SEQ ID NO: 595257 - DNA, 33 bp, Homo sapien
ttatgggcccacatccaaaatccacacagccca

SEQ ID NO: 595258 - DNA, 33 bp, Homo sapien
ttatgggcccacatccgaaatccacacagccca

SEQ ID NO: 595259 - DNA, 33 bp, Homo sapien
ggggtgagcataccccacgttttcctccctggc

SEQ ID NO: 595260 - DNA, 33 bp, Homo sapien
ggggtgagcataccccgcgttttcctccctggc

SEQ ID NO: 595261 - DNA, 33 bp, Homo sapien
gggagttctcagcttggacccttatctccccag

SEQ ID NO: 595262 - DNA, 33 bp, Homo sapien
gggagttctcagcttgtacccttatctccccag

SEQ ID NO: 595263 - DNA, 33 bp, Homo sapien
ctccatcaaataataccccagtcttcacgccca

SEQ ID NO: 595264 - DNA, 33 bp, Homo sapien
ctccatcaaataatactccagtcttcacgccca

SEQ ID NO: 595265 - DNA, 33 bp, Homo sapien
caccagggaggctccagtcaaggctggcagatg

SEQ ID NO: 595266 - DNA, 33 bp, Homo sapien
caccagggaggctccattcaaggctggcagatg

SEQ ID NO: 595267 - DNA, 33 bp, Homo sapien
cttctgcaggcagacgccggttttctcaggact

SEQ ID NO: 595268 - DNA, 33 bp, Homo sapien
cttctgcaggcagacgtcggttttctcaggact

SEQ ID NO: 595269 - DNA, 33 bp, Homo sapien
caggggagaattagcccgaaaaaggaaggaggc

SEQ ID NO: 595270 - DNA, 33 bp, Homo sapien
caggggagaattagcctgaaaaaggaaggaggc

SEQ ID NO: 595271 - DNA, 33 bp, Homo sapien
ggaagtagaatagaagacttcacttgagtgaac

SEQ ID NO: 595272 - DNA, 33 bp, Homo sapien
ggaagtagaatagaagccttcacttgagtgaac

SEQ ID NO: 595273 - DNA, 33 bp, Homo sapien
ttaagatagtcaagtaccagaaccccgtctcct

SEQ ID NO: 595274 - DNA, 33 bp, Homo sapien
ttaagatagtcaagtatcagaaccccgtctcct

SEQ ID NO: 595275 - DNA, 33 bp, Homo sapien
ttgatattgccacatcactgtgcaggggagcga

SEQ ID NO: 595276 - DNA, 33 bp, Homo sapien
ttgatattgccacatcgctgtgcaggggagcga

SEQ ID NO: 595277 - DNA, 33 bp, Homo sapien
cacactccagaatgagcagctgaaaggatgggt

SEQ ID NO: 595278 - DNA, 33 bp, Homo sapien
cacactccagaatgagtagctgaaaggatgggt

SEQ ID NO: 595279 - DNA, 33 bp, Homo sapien
agaaaaggcaaacccacgttgagagaaagtcga

SEQ ID NO: 595280 - DNA, 33 bp, Homo sapien
agaaaaggcaaacccatgttgagagaaagtcga

SEQ ID NO: 595281 - DNA, 33 bp, Homo sapien
caggttattgtgcaaaaagacatccttgaacaa

SEQ ID NO: 595282 - DNA, 33 bp, Homo sapien
caggttattgtgcaaatagacatccttgaacaa

SEQ ID NO: 595283 - DNA, 33 bp, Homo sapien
aacctgctttgacgcccggagacaatgaagctg

SEQ ID NO: 595284 - DNA, 33 bp, Homo sapien
aacctgctttgacgcctggagacaatgaagctg

SEQ ID NO: 595285 - DNA, 33 bp, Homo sapien
gactcaggttcaggcccaccctgtcatctgctg

SEQ ID NO: 595286 - DNA, 33 bp, Homo sapien
gactcaggttcaggccgaccctgtcatctgctg

SEQ ID NO: 595287 - DNA, 33 bp, Homo sapien
atctcactcggatcaaacacagagaagacttgt

SEQ ID NO: 595288 - DNA, 33 bp, Homo sapien
atctcactcggatcaatcacagagaagacttgt

SEQ ID NO: 595289 - DNA, 33 bp, Homo sapien
cagcatttacagaaaagacgcatttataggaaa

SEQ ID NO: 595290 - DNA, 33 bp, Homo sapien
cagcatttacagaaaatacgcatttataggaaa

SEQ ID NO: 595291 - DNA, 33 bp, Homo sapien
ctgcagtagcaattacacgatattcttcccata

SEQ ID NO: 595292 - DNA, 33 bp, Homo sapien
ctgcagtagcaattacgcgatattcttcccata

SEQ ID NO: 595293 - DNA, 33 bp, Homo sapien
gttaactaaaaacataacgcaaggcagttaata

SEQ ID NO: 595294 - DNA, 33 bp, Homo sapien
gttaactaaaaacataccgcaaggcagttaata

SEQ ID NO: 595295 - DNA, 33 bp, Homo sapien
tcctctccactacacacgacggtcactgtcaga

SEQ ID NO: 595296 - DNA, 33 bp, Homo sapien
tcctctccactacacatgacggtcactgtcaga

SEQ ID NO: 595297 - DNA, 33 bp, Homo sapien
ggctgatgttctgagaagacctggccacatgct

SEQ ID NO: 595298 - DNA, 33 bp, Homo sapien
ggctgatgttctgagaggacctggccacatgct

SEQ ID NO: 595299 - DNA, 33 bp, Homo sapien
gtcccgcacagaagccgctctcatctcaccaac

SEQ ID NO: 595300 - DNA, 33 bp, Homo sapien
gtcccgcacagaagcctctctcatctcaccaac

SEQ ID NO: 595301 - DNA, 33 bp, Homo sapien
aataatgttgacacaacgccgagtgtggtagct

SEQ ID NO: 595302 - DNA, 33 bp, Homo sapien
aataatgttgacacaaggccgagtgtggtagct

SEQ ID NO: 595303 - DNA, 33 bp, Homo sapien
tggagtatgttggtgccatcctcagccttgacc

SEQ ID NO: 595304 - DNA, 33 bp, Homo sapien
tggagtatgttggtgcgatcctcagccttgacc

SEQ ID NO: 595305 - DNA, 33 bp, Homo sapien
gcctctcaacaattcaaagtgacaggcgcagca

SEQ ID NO: 595306 - DNA, 33 bp, Homo sapien
gcctctcaacaattcagagtgacaggcgcagca

SEQ ID NO: 595307 - DNA, 33 bp, Homo sapien
cactggctaataacacaaagtgggtgtttatca

SEQ ID NO: 595308 - DNA, 33 bp, Homo sapien
cactggctaataacacgaagtgggtgtttatca

SEQ ID NO: 595309 - DNA, 33 bp, Homo sapien
ccatgcagtgccctgaaaaccttctcttacttg

SEQ ID NO: 595310 - DNA, 33 bp, Homo sapien
ccatgcagtgccctgacaaccttctcttacttg

SEQ ID NO: 595311 - DNA, 33 bp, Homo sapien
cccaccaggtgaccccaagttaacccagagcct

SEQ ID NO: 595312 - DNA, 33 bp, Homo sapien
cccaccaggtgaccccgagttaacccagagcct

SEQ ID NO: 595313 - DNA, 33 bp, Homo sapien
gtatagttaaggtgtaggacttgatgttctgat

SEQ ID NO: 595314 - DNA, 33 bp, Homo sapien
gtatagttaaggtgtatgacttgatgttctgat

SEQ ID NO: 595315 - DNA, 33 bp, Homo sapien
ctcatattgggataaaaacataacacaactagt

SEQ ID NO: 595316 - DNA, 33 bp, Homo sapien
ctcatattgggataaagacataacacaactagt

SEQ ID NO: 595317 - DNA, 33 bp, Homo sapien
tcagcggttatgcgtccctctagtttcgggtga

SEQ ID NO: 595318 - DNA, 33 bp, Homo sapien
tcagcggttatgcgtctctctagtttcgggtga

SEQ ID NO: 595319 - DNA, 33 bp, Homo sapien
gcaccagtcattcacccatacatccttatccta

SEQ ID NO: 595320 - DNA, 33 bp, Homo sapien
gcaccagtcattcacctatacatccttatccta

SEQ ID NO: 595321 - DNA, 33 bp, Homo sapien
gggctggtcataaagacagagcagatgcggagg

SEQ ID NO: 595322 - DNA, 33 bp, Homo sapien
gggctggtcataaagatagagcagatgcggagg

SEQ ID NO: 595323 - DNA, 33 bp, Homo sapien
tggtgaaaaacaggctgaaatcctaagtgatac

SEQ ID NO: 595324 - DNA, 33 bp, Homo sapien
tggtgaaaaacaggcttaaatcctaagtgatac

SEQ ID NO: 595325 - DNA, 33 bp, Homo sapien
tttaacctttccaaaaattatgccaattgtagg

SEQ ID NO: 595326 - DNA, 33 bp, Homo sapien
tttaacctttccaaaagttatgccaattgtagg

SEQ ID NO: 595327 - DNA, 33 bp, Homo sapien
gcaagaggaatattcacgaaggcaaagcgtaga

SEQ ID NO: 595328 - DNA, 33 bp, Homo sapien
gcaagaggaatattcatgaaggcaaagcgtaga

SEQ ID NO: 595329 - DNA, 33 bp, Homo sapien
aacaccagaacttgtcaatcgagattttaaaaa

SEQ ID NO: 595330 - DNA, 33 bp, Homo sapien
aacaccagaacttgtccatcgagattttaaaaa

SEQ ID NO: 595331 - DNA, 33 bp, Homo sapien
tcagctgtgcgtgcccacggacgtgcagagaag

SEQ ID NO: 595332 - DNA, 33 bp, Homo sapien
tcagctgtgcgtgcccgcggacgtgcagagaag

SEQ ID NO: 595333 - DNA, 33 bp, Homo sapien
ggtgaccgcgactgcacggcctactcctcgtca

SEQ ID NO: 595334 - DNA, 33 bp, Homo sapien
ggtgaccgcgactgcagggcctactcctcgtca

SEQ ID NO: 595335 - DNA, 33 bp, Homo sapien
tttcaacacaatgtgaaaaatgttggcaaaaca

SEQ ID NO: 595336 - DNA, 33 bp, Homo sapien
tttcaacacaatgtgagaaatgttggcaaaaca

SEQ ID NO: 595337 - DNA, 33 bp, Homo sapien
acctggtctgggcacccgaaggcagagctgctc

SEQ ID NO: 595338 - DNA, 33 bp, Homo sapien
acctggtctgggcacctgaaggcagagctgctc

SEQ ID NO: 595339 - DNA, 33 bp, Homo sapien
ttagggtctgtggcaactgtcctcctcagtggg

SEQ ID NO: 595340 - DNA, 33 bp, Homo sapien
ttagggtctgtggcaagtgtcctcctcagtggg

SEQ ID NO: 595341 - DNA, 33 bp, Homo sapien
tgtggtcctgaccttacggtaatgtcagccccc

SEQ ID NO: 595342 - DNA, 33 bp, Homo sapien
tgtggtcctgaccttatggtaatgtcagccccc

SEQ ID NO: 595343 - DNA, 33 bp, Homo sapien
cccaggtactcaaccaaaatgagaagatcagaa

SEQ ID NO: 595344 - DNA, 33 bp, Homo sapien
cccaggtactcaaccagaatgagaagatcagaa

SEQ ID NO: 595345 - DNA, 33 bp, Homo sapien
gcacttacgaaataaaaaatgctactaatgaga

SEQ ID NO: 595346 - DNA, 33 bp, Homo sapien
gcacttacgaaataaagaatgctactaatgaga

SEQ ID NO: 595347 - DNA, 33 bp, Homo sapien
ctcccgcaaaacggacaaccagaccatttccca

SEQ ID NO: 595348 - DNA, 33 bp, Homo sapien
ctcccgcaaaacggacgaccagaccatttccca

SEQ ID NO: 595349 - DNA, 33 bp, Homo sapien
ggctcacgtgtgcgaccctgtcagccttttacc

SEQ ID NO: 595350 - DNA, 33 bp, Homo sapien
ggctcacgtgtgcgactctgtcagccttttacc

SEQ ID NO: 595351 - DNA, 33 bp, Homo sapien
ctacggcaagttgtgccctcgataatgtgaaag

SEQ ID NO: 595352 - DNA, 33 bp, Homo sapien
ctacggcaagttgtgctctcgataatgtgaaag

SEQ ID NO: 595353 - DNA, 33 bp, Homo sapien
agatccaaggagatgaagagcctgaaaggttat

SEQ ID NO: 595354 - DNA, 33 bp, Homo sapien
agatccaaggagatgacgagcctgaaaggttat

SEQ ID NO: 595355 - DNA, 33 bp, Homo sapien
gaacataaagacagacaaattaatatactctag

SEQ ID NO: 595356 - DNA, 33 bp, Homo sapien
gaacataaagacagacgaattaatatactctag

SEQ ID NO: 595357 - DNA, 33 bp, Homo sapien
gctcatatttcttcccactttgtctggtgaaaa

SEQ ID NO: 595358 - DNA, 33 bp, Homo sapien
gctcatatttcttcccgctttgtctggtgaaaa

SEQ ID NO: 595359 - DNA, 33 bp, Homo sapien
tctgaggtcagcctgaggcagttcatttccaga

SEQ ID NO: 595360 - DNA, 33 bp, Homo sapien
tctgaggtcagcctgatgcagttcatttccaga

SEQ ID NO: 595361 - DNA, 33 bp, Homo sapien
gggtcttgagcagcagacatttctttctcccag

SEQ ID NO: 595362 - DNA, 33 bp, Homo sapien
gggtcttgagcagcaggcatttctttctcccag

SEQ ID NO: 595363 - DNA, 33 bp, Homo sapien
caggccaggtatagccactgaggatggagaagg

SEQ ID NO: 595364 - DNA, 33 bp, Homo sapien
caggccaggtatagccgctgaggatggagaagg

SEQ ID NO: 595365 - DNA, 33 bp, Homo sapien
cattgcaataagagaaaactacagaccaaccaa

SEQ ID NO: 595366 - DNA, 33 bp, Homo sapien
cattgcaataagagaagactacagaccaaccaa

SEQ ID NO: 595367 - DNA, 33 bp, Homo sapien
caacatcaaagtggataaagcacacagttcttg

SEQ ID NO: 595368 - DNA, 33 bp, Homo sapien
caacatcaaagtggatgaagcacacagttcttg

SEQ ID NO: 595369 - DNA, 33 bp, Homo sapien
ccgctggctgagtacacgggctttggttcattt

SEQ ID NO: 595370 - DNA, 33 bp, Homo sapien
ccgctggctgagtacaggggctttggttcattt

SEQ ID NO: 595371 - DNA, 33 bp, Homo sapien
ttttgtcttgtctgtcacagaaaatccttactg

SEQ ID NO: 595372 - DNA, 33 bp, Homo sapien
ttttgtcttgtctgtcgcagaaaatccttactg

SEQ ID NO: 595373 - DNA, 33 bp, Homo sapien
cacaacattcccatcacctaatcaatgcataga

SEQ ID NO: 595374 - DNA, 33 bp, Homo sapien
cacaacattcccatcatctaatcaatgcataga

SEQ ID NO: 595375 - DNA, 33 bp, Homo sapien
gggtgttcggcctaaaccacatggtacaaacag

SEQ ID NO: 595376 - DNA, 33 bp, Homo sapien
gggtgttcggcctaaagcacatggtacaaacag

SEQ ID NO: 595377 - DNA, 33 bp, Homo sapien
tgctcctcatgaaacccacgatggcctggcctc

SEQ ID NO: 595378 - DNA, 33 bp, Homo sapien
tgctcctcatgaaacctacgatggcctggcctc

SEQ ID NO: 595379 - DNA, 33 bp, Homo sapien
gaatgtccaggtgacaaagggcagtttcagcca

SEQ ID NO: 595380 - DNA, 33 bp, Homo sapien
gaatgtccaggtgacacagggcagtttcagcca

SEQ ID NO: 595381 - DNA, 33 bp, Homo sapien
tcacaaaaaatgcaaaaggcacaaatcattaga

SEQ ID NO: 595382 - DNA, 33 bp, Homo sapien
tcacaaaaaatgcaaacggcacaaatcattaga

SEQ ID NO: 595383 - DNA, 33 bp, Homo sapien
attttagatataaaaccagaagtgggatttgtg

SEQ ID NO: 595384 - DNA, 33 bp, Homo sapien
attttagatataaaactagaagtgggatttgtg

SEQ ID NO: 595385 - DNA, 33 bp, Homo sapien
tgcatatcccggatgactaaagccactcattga

SEQ ID NO: 595386 - DNA, 33 bp, Homo sapien
tgcatatcccggatgagtaaagccactcattga

SEQ ID NO: 595387 - DNA, 33 bp, Homo sapien
acagtgacaattacaaagggatatttctgggta

SEQ ID NO: 595388 - DNA, 33 bp, Homo sapien
acagtgacaattacaatgggatatttctgggta

SEQ ID NO: 595389 - DNA, 33 bp, Homo sapien
tggggctttgctgatacgtttgagcttaaacct

SEQ ID NO: 595390 - DNA, 33 bp, Homo sapien
tggggctttgctgatatgtttgagcttaaacct

SEQ ID NO: 595391 - DNA, 33 bp, Homo sapien
gaggggaagatgggggaataaaaaatctcaaaa

SEQ ID NO: 595392 - DNA, 33 bp, Homo sapien
gaggggaagatgggggcataaaaaatctcaaaa

SEQ ID NO: 595393 - DNA, 33 bp, Homo sapien
aagacggcgtatgacaaccaaggcaaagattgt

SEQ ID NO: 595394 - DNA, 33 bp, Homo sapien
aagacggcgtatgacagccaaggcaaagattgt

SEQ ID NO: 595395 - DNA, 33 bp, Homo sapien
tttcctgcgtgtatcacccatttgcatatcctc

SEQ ID NO: 595396 - DNA, 33 bp, Homo sapien
tttcctgcgtgtatcatccatttgcatatcctc

SEQ ID NO: 595397 - DNA, 33 bp, Homo sapien
catagcagtggaggtccgaagtctgctgtgggt

SEQ ID NO: 595398 - DNA, 33 bp, Homo sapien
catagcagtggaggtctgaagtctgctgtgggt

SEQ ID NO: 595399 - DNA, 33 bp, Homo sapien
ggacagagaagatggacgaaaacatcagccacg

SEQ ID NO: 595400 - DNA, 33 bp, Homo sapien
ggacagagaagatggatgaaaacatcagccacg

SEQ ID NO: 595401 - DNA, 33 bp, Homo sapien
actcctttcactgctaaagttcagaatcacact

SEQ ID NO: 595402 - DNA, 33 bp, Homo sapien
actcctttcactgctatagttcagaatcacact

SEQ ID NO: 595403 - DNA, 33 bp, Homo sapien; identical to SEQ ID NO: 595401

SEQ ID NO: 595404 - DNA, 33 bp, Homo sapien; identical to SEQ ID NO: 595402

SEQ ID NO: 595405 - DNA, 33 bp, Homo sapien
acaaaagtgaaacaacaggattcggtactttga

SEQ ID NO: 595406 - DNA, 33 bp, Homo sapien
acaaaagtgaaacaacgggattcggtactttga

SEQ ID NO: 595407 - DNA, 33 bp, Homo sapien
ggtacataccaacttcaatggcagcagcacctc

SEQ ID NO: 595408 - DNA, 33 bp, Homo sapien
ggtacataccaacttcgatggcagcagcacctc

SEQ ID NO: 595409 - DNA, 33 bp, Homo sapien
aaggtgcgttgaaggaacacagaaaggcagtag

SEQ ID NO: 595410 - DNA, 33 bp, Homo sapien
aaggtgcgttgaaggagcacagaaaggcagtag

SEQ ID NO: 595411 - DNA, 33 bp, Homo sapien
acaattctgagattgacggcaagaagaagtctg

SEQ ID NO: 595412 - DNA, 33 bp, Homo sapien
acaattctgagattgagggcaagaagaagtctg

SEQ ID NO: 595413 - DNA, 33 bp, Homo sapien
aaaactgatcaccctgaaattgatgaaggaaaa

SEQ ID NO: 595414 - DNA, 33 bp, Homo sapien
aaaactgatcaccctgcaattgatgaaggaaaa

SEQ ID NO: 595415 - DNA, 33 bp, Homo sapien
gaagtccaatccagtgcaatcaggtaagagata

SEQ ID NO: 595416 - DNA, 33 bp, Homo sapien
gaagtccaatccagtgtaatcaggtaagagata

SEQ ID NO: 595417 - DNA, 33 bp, Homo sapien
ctcttccaattgggacagcttttatttctatct

SEQ ID NO: 595418 - DNA, 33 bp, Homo sapien
ctcttccaattgggacggcttttatttctatct

SEQ ID NO: 595419 - DNA, 33 bp, Homo sapien
ctgaacttgtggcctcacccggcttgtccctag

SEQ ID NO: 595420 - DNA, 33 bp, Homo sapien
ctgaacttgtggcctcgcccggcttgtccctag

SEQ ID NO: 595421 - DNA, 33 bp, Homo sapien
gagtcacttattgaaccctctacccccggtata

SEQ ID NO: 595422 - DNA, 33 bp, Homo sapien
gagtcacttattgaacgctctacccccggtata

SEQ ID NO: 595423 - DNA, 33 bp, Homo sapien
caaggtccccctgttgcaaatgccatctggagc

SEQ ID NO: 595424 - DNA, 33 bp, Homo sapien
caaggtccccctgttgtaaatgccatctggagc

SEQ ID NO: 595425 - DNA, 33 bp, Homo sapien
ataaacaggttaaacaaaagataagcagttctt

SEQ ID NO: 595426 - DNA, 33 bp, Homo sapien
ataaacaggttaaacagaagataagcagttctt

SEQ ID NO: 595427 - DNA, 33 bp, Homo sapien
gttgaaaatcagttggccataaatgtatgagtt

SEQ ID NO: 595428 - DNA, 33 bp, Homo sapien
gttgaaaatcagttggtcataaatgtatgagtt

SEQ ID NO: 595429 - DNA, 33 bp, Homo sapien
ggcagattcaaaccacagacttcatggatatcg

SEQ ID NO: 595430 - DNA, 33 bp, Homo sapien
ggcagattcaaaccacggacttcatggatatcg

SEQ ID NO: 595431 - DNA, 33 bp, Homo sapien
cccctcggtgttgaacaatctgggtaaccagct

SEQ ID NO: 595432 - DNA, 33 bp, Homo sapien
cccctcggtgttgaacgatctgggtaaccagct

SEQ ID NO: 595433 - DNA, 33 bp, Homo sapien
acagcccctgcgatgggacaggctcattctgtc

SEQ ID NO: 595434 - DNA, 33 bp, Homo sapien
acagcccctgcgatggtacaggctcattctgtc

SEQ ID NO: 595435 - DNA, 33 bp, Homo sapien
tgtgaaaatagactaagcaagaaagaaagagga

SEQ ID NO: 595436 - DNA, 33 bp, Homo sapien
tgtgaaaatagactaatcaagaaagaaagagga

SEQ ID NO: 595437 - DNA, 33 bp, Homo sapien
tctgcttcaagggaaacagagacgatcaataga

SEQ ID NO: 595438 - DNA, 33 bp, Homo sapien
tctgcttcaagggaaatagagacgatcaataga

SEQ ID NO: 595439 - DNA, 33 bp, Homo sapien
gacacacttcacagccacctttggccaaacaat

SEQ ID NO: 595440 - DNA, 33 bp, Homo sapien
gacacacttcacagccgcctttggccaaacaat

SEQ ID NO: 595441 - DNA, 33 bp, Homo sapien
ggctgtgaagtgtgtccatgtctttaaatattc

SEQ ID NO: 595442 - DNA, 33 bp, Homo sapien
ggctgtgaagtgtgtctatgtctttaaatattc

SEQ ID NO: 595443 - DNA, 33 bp, Homo sapien
ttcatggggaggtcaacctttttcacaaggctt

SEQ ID NO: 595444 - DNA, 33 bp, Homo sapien
ttcatggggaggtcaatctttttcacaaggctt

SEQ ID NO: 595445 - DNA, 33 bp, Homo sapien
atttcggagtcaggaacagaatgttatgggccg

SEQ ID NO: 595446 - DNA, 33 bp, Homo sapien
atttcggagtcaggaatagaatgttatgggccg

SEQ ID NO: 595447 - DNA, 33 bp, Homo sapien
gagctgatggcagaacaagccaccactttgggg

SEQ ID NO: 595448 - DNA, 33 bp, Homo sapien
gagctgatggcagaacgagccaccactttgggg

SEQ ID NO: 595449 - DNA, 33 bp, Homo sapien
aagtatcgtgtttcatcactcacaagttctgct

SEQ ID NO: 595450 - DNA, 33 bp, Homo sapien
aagtatcgtgtttcattactcacaagttctgct

SEQ ID NO: 595451 - DNA, 33 bp, Homo sapien
tttcctccagttgacactagcatgttcctggtt

SEQ ID NO: 595452 - DNA, 33 bp, Homo sapien
tttcctccagttgacattagcatgttcctggtt

SEQ ID NO: 595453 - DNA, 33 bp, Homo sapien
ctttagttctgtaccacatggcctgtccagcag

SEQ ID NO: 595454 - DNA, 33 bp, Homo sapien
ctttagttctgtaccatatggcctgtccagcag

SEQ ID NO: 595455 - DNA, 33 bp, Homo sapien
aaagatgttttggtccacatttactcacctttg

SEQ ID NO: 595456 - DNA, 33 bp, Homo sapien
aaagatgttttggtccgcatttactcacctttg

SEQ ID NO: 595457 - DNA, 33 bp, Homo sapien
gctgggctctgcaaaacggcgtcttgggggcac

SEQ ID NO: 595458 - DNA, 33 bp, Homo sapien
gctgggctctgcaaaatggcgtcttgggggcac

SEQ ID NO: 595459 - DNA, 33 bp, Homo sapien
gtctgtgcctgtaaaacatgaaagtgcagcagc

SEQ ID NO: 595460 - DNA, 33 bp, Homo sapien
gtctgtgcctgtaaaagatgaaagtgcagcagc

SEQ ID NO: 595461 - DNA, 33 bp, Homo sapien
gaaatcacacatcttcgccgtcagtaccgctca

SEQ ID NO: 595462 - DNA, 33 bp, Homo sapien
gaaatcacacatcttctccgtcagtaccgctca

SEQ ID NO: 595463 - DNA, 33 bp, Homo sapien
aggcccggttctgtccagcagcatgggagagag

SEQ ID NO: 595464 - DNA, 33 bp, Homo sapien
aggcccggttctgtccggcagcatgggagagag

SEQ ID NO: 595465 - DNA, 33 bp, Homo sapien
tttctcaggccctacgcacattccctccagttg

SEQ ID NO: 595466 - DNA, 33 bp, Homo sapien
tttctcaggccctacgtacattccctccagttg

SEQ ID NO: 595467 - DNA, 33 bp, Homo sapien
gactccagggcacagacggcgttcagccctgca

SEQ ID NO: 595468 - DNA, 33 bp, Homo sapien
gactccagggcacagatggcgttcagccctgca

SEQ ID NO: 595469 - DNA, 33 bp, Homo sapien
ccaggctctgcctggaatcaagcctctgtgcct

SEQ ID NO: 595470 - DNA, 33 bp, Homo sapien
ccaggctctgcctggagtcaagcctctgtgcct

SEQ ID NO: 595471 - DNA, 33 bp, Homo sapien
cagggcgtcttccacgaacagttacattgcttt

SEQ ID NO: 595472 - DNA, 33 bp, Homo sapien
cagggcgtcttccacggacagttacattgcttt

SEQ ID NO: 595473 - DNA, 33 bp, Homo sapien
ggcatggaccaaagaaagttcttggctccccaa

SEQ ID NO: 595474 - DNA, 33 bp, Homo sapien
ggcatggaccaaagaatgttcttggctccccaa

SEQ ID NO: 595475 - DNA, 33 bp, Homo sapien
gctggaaccatcagacaaggctctaaggcagtt

SEQ ID NO: 595476 - DNA, 33 bp, Homo sapien
gctggaaccatcagacgaggctctaaggcagtt

SEQ ID NO: 595477 - DNA, 33 bp, Homo sapien
tgtatttcgtatgttggattttttagttctaca

SEQ ID NO: 595478 - DNA, 33 bp, Homo sapien
tgtatttcgtatgttgtattttttagttctaca

SEQ ID NO: 595479 - DNA, 33 bp, Homo sapien
ttctgaagaacagagaacaaagggtgagtgtgt

SEQ ID NO: 595480 - DNA, 33 bp, Homo sapien
ttctgaagaacagagagcaaagggtgagtgtgt

SEQ ID NO: 595481 - DNA, 33 bp, Homo sapien
tggtctatgaggcatacagtagatttgatgtga

SEQ ID NO: 595482 - DNA, 33 bp, Homo sapien
tggtctatgaggcatatagtagatttgatgtga

SEQ ID NO: 595483 - DNA, 33 bp, Homo sapien
ggctactgcaacaccacgatgtctctgtttgtc

SEQ ID NO: 595484 - DNA, 33 bp, Homo sapien
ggctactgcaacaccatgatgtctctgtttgtc

SEQ ID NO: 595485 - DNA, 33 bp, Homo sapien
aatcacacaaacaaaacgcaaagtcacatcagg

SEQ ID NO: 595486 - DNA, 33 bp, Homo sapien
aatcacacaaacaaaatgcaaagtcacatcagg

SEQ ID NO: 595487 - DNA, 33 bp, Homo sapien
gtgaattagatacaaaagcaaatattgaaaaca

SEQ ID NO: 595488 - DNA, 33 bp, Homo sapien
gtgaattagatacaaaggcaaatattgaaaaca

SEQ ID NO: 595489 - DNA, 33 bp, Homo sapien
ctagagctgggcaagaactgtaaccatctgtct

SEQ ID NO: 595490 - DNA, 33 bp, Homo sapien
ctagagctgggcaagacctgtaaccatctgtct

SEQ ID NO: 595491 - DNA, 33 bp, Homo sapien
gccaaacatcaactctcactgggcggtgtcacc

SEQ ID NO: 595492 - DNA, 33 bp, Homo sapien
gccaaacatcaactcttactgggcggtgtcacc

SEQ ID NO: 595493 - DNA, 33 bp, Homo sapien
aagctaaaagaatgaaagtgagaaaaaaaataa

SEQ ID NO: 595494 - DNA, 33 bp, Homo sapien
aagctaaaagaatgaatgtgagaaaaaaaataa

SEQ ID NO: 595495 - DNA, 33 bp, Homo sapien
tccctctaatgaaggaaaagggtttttgaacag

SEQ ID NO: 595496 - DNA, 33 bp, Homo sapien
tccctctaatgaaggagaagggtttttgaacag

SEQ ID NO: 595497 - DNA, 33 bp, Homo sapien
ggcagcctggggcgaaacggctgccaaaatcaa

SEQ ID NO: 595498 - DNA, 33 bp, Homo sapien
ggcagcctggggcgaagcggctgccaaaatcaa

SEQ ID NO: 595499 - DNA, 33 bp, Homo sapien
ctgaaatgaagtaaatcaaaaaggcacaaacag

SEQ ID NO: 595500 - DNA, 33 bp, Homo sapien
ctgaaatgaagtaaatgaaaaaggcacaaacag

SEQ ID NO: 595501 - DNA, 33 bp, Homo sapien
aacacgccaagttggccgcatacaagttgggag

SEQ ID NO: 595502 - DNA, 33 bp, Homo sapien
aacacgccaagttggctgcatacaagttgggag

SEQ ID NO: 595503 - DNA, 33 bp, Homo sapien
ggcactttccataagagaaggtgaacttagagc

SEQ ID NO: 595504 - DNA, 33 bp, Homo sapien
ggcactttccataagataaggtgaacttagagc

SEQ ID NO: 595505 - DNA, 33 bp, Homo sapien
gatctcaggggcgacgacaagaacccggcgtgc

SEQ ID NO: 595506 - DNA, 33 bp, Homo sapien
gatctcaggggcgacggcaagaacccggcgtgc

SEQ ID NO: 595507 - DNA, 33 bp, Homo sapien
tgtctttccttcactccctcattgggaattggg

SEQ ID NO: 595508 - DNA, 33 bp, Homo sapien
tgtctttccttcactctctcattgggaattggg

SEQ ID NO: 595509 - DNA, 33 bp, Homo sapien
aactgtgtcctcgggaaaagaaagaatgaggct

SEQ ID NO: 595510 - DNA, 33 bp, Homo sapien
aactgtgtcctcgggagaagaaagaatgaggct

SEQ ID NO: 595511 - DNA, 33 bp, Homo sapien
gaacacaggaacacgcagcatactaaacacacg

SEQ ID NO: 595512 - DNA, 33 bp, Homo sapien
gaacacaggaacacgcggcatactaaacacacg

SEQ ID NO: 595513 - DNA, 33 bp, Homo sapien
tctaaactcacagaaacggaggttaagcctgat

SEQ ID NO: 595514 - DNA, 33 bp, Homo sapien
tctaaactcacagaaatggaggttaagcctgat

SEQ ID NO: 595515 - DNA, 33 bp, Homo sapien
aatttttgcaattctacgcttccagaacaggtc

SEQ ID NO: 595516 - DNA, 33 bp, Homo sapien
aatttttgcaattctatgcttccagaacaggtc

SEQ ID NO: 595517 - DNA, 33 bp, Homo sapien
atctgtaggtgagtccaaagacacaagtgtgct

SEQ ID NO: 595518 - DNA, 33 bp, Homo sapien
atctgtaggtgagtccgaagacacaagtgtgct

SEQ ID NO: 595519 - DNA, 33 bp, Homo sapien
gactggaacactcacacgataccagcagggcat

SEQ ID NO: 595520 - DNA, 33 bp, Homo sapien
gactggaacactcacaggataccagcagggcat

SEQ ID NO: 595521 - DNA, 33 bp, Homo sapien
atttaatggtatttgaaggacattaggtgtttg

SEQ ID NO: 595522 - DNA, 33 bp, Homo sapien
atttaatggtatttgatggacattaggtgtttg

SEQ ID NO: 595523 - DNA, 33 bp, Homo sapien
agtaagaggttatcacacagttagaagttcgtt

SEQ ID NO: 595524 - DNA, 33 bp, Homo sapien
agtaagaggttatcacgcagttagaagttcgtt

SEQ ID NO: 595525 - DNA, 33 bp, Homo sapien
aatccagttattttccaccctcaaaatgacagc

SEQ ID NO: 595526 - DNA, 33 bp, Homo sapien
aatccagttattttccgccctcaaaatgacagc

SEQ ID NO: 595527 - DNA, 33 bp, Homo sapien
agggtcacaaatttaactcacagcaaacaatga

SEQ ID NO: 595528 - DNA, 33 bp, Homo sapien
agggtcacaaatttaattcacagcaaacaatga

SEQ ID NO: 595529 - DNA, 33 bp, Homo sapien
cacaacacatatagacagcacagcgacggcagc

SEQ ID NO: 595530 - DNA, 33 bp, Homo sapien
cacaacacatatagacggcacagcgacggcagc

SEQ ID NO: 595531 - DNA, 33 bp, Homo sapien
gttgacgccagcgacactggggacgcctttcat

SEQ ID NO: 595532 - DNA, 33 bp, Homo sapien
gttgacgccagcgacattggggacgcctttcat

SEQ ID NO: 595533 - DNA, 33 bp, Homo sapien
ataaattcatgtatcaaattcaggaaattcagc

SEQ ID NO: 595534 - DNA, 33 bp, Homo sapien
ataaattcatgtatcagattcaggaaattcagc

SEQ ID NO: 595535 - DNA, 33 bp, Homo sapien
gagtgcctctcctctaagacagcgcaaggtggg

SEQ ID NO: 595536 - DNA, 33 bp, Homo sapien
gagtgcctctcctctaggacagcgcaaggtggg

SEQ ID NO: 595537 - DNA, 33 bp, Homo sapien
ttctgctttgtaggaacgtgataaagaactgga

SEQ ID NO: 595538 - DNA, 33 bp, Homo sapien
ttctgctttgtaggaatgtgataaagaactgga

SEQ ID NO: 595539 - DNA, 33 bp, Homo sapien
gagacagctggagtgcacacaattggccagacc

SEQ ID NO: 595540 - DNA, 33 bp, Homo sapien
gagacagctggagtgcgcacaattggccagacc

SEQ ID NO: 595541 - DNA, 33 bp, Homo sapien
tgcactaggcaggtcacgtcgatgccgcctgag

SEQ ID NO: 595542 - DNA, 33 bp, Homo sapien
tgcactaggcaggtcatgtcgatgccgcctgag

SEQ ID NO: 595543 - DNA, 33 bp, Homo sapien
tggaggcgcgggtcgtaaagtcctgacacttcc

SEQ ID NO: 595544 - DNA, 33 bp, Homo sapien
tggaggcgcgggtcgtgaagtcctgacacttcc

SEQ ID NO: 595545 - DNA, 33 bp, Homo sapien
agaatttgaggaacgtaaccattcgtctccaac

SEQ ID NO: 595546 - DNA, 33 bp, Homo sapien
agaatttgaggaacgtgaccattcgtctccaac

SEQ ID NO: 595547 - DNA, 33 bp, Homo sapien
gaaggtagaggtaaaacatggcctccttcacat

SEQ ID NO: 595548 - DNA, 33 bp, Homo sapien
gaaggtagaggtaaaatatggcctccttcacat

SEQ ID NO: 595549 - DNA, 33 bp, Homo sapien
tgatacaaacaagaaacgtggactccaaacccc

SEQ ID NO: 595550 - DNA, 33 bp, Homo sapien
tgatacaaacaagaaatgtggactccaaacccc

SEQ ID NO: 595551 - DNA, 33 bp, Homo sapien
aaccataaaaactccaagagcacaggttacttc

SEQ ID NO: 595552 - DNA, 33 bp, Homo sapien
aaccataaaaactccacgagcacaggttacttc

SEQ ID NO: 595553 - DNA, 33 bp, Homo sapien
acctagaaagtcaaggcacacccgcagtctcgc

SEQ ID NO: 595554 - DNA, 33 bp, Homo sapien
acctagaaagtcaaggtacacccgcagtctcgc

SEQ ID NO: 595555 - DNA, 33 bp, Homo sapien
ttggaacagaaggttacgggccagttcactcat

SEQ ID NO: 595556 - DNA, 33 bp, Homo sapien
ttggaacagaaggttatgggccagttcactcat

SEQ ID NO: 595557 - DNA, 33 bp, Homo sapien
aggtggccagaaacacactgggaggaaaacttc

SEQ ID NO: 595558 - DNA, 33 bp, Homo sapien
aggtggccagaaacacgctgggaggaaaacttc

SEQ ID NO: 595559 - DNA, 33 bp, Homo sapien
gccgcatcctgtgagaactcatttctgtaacat

SEQ ID NO: 595560 - DNA, 33 bp, Homo sapien
gccgcatcctgtgagacctcatttctgtaacat

SEQ ID NO: 595561 - DNA, 33 bp, Homo sapien
gttttccaggaccagcaaaagggaactgttgaa

SEQ ID NO: 595562 - DNA, 33 bp, Homo sapien
gttttccaggaccagccaaagggaactgttgaa

SEQ ID NO: 595563 - DNA, 33 bp, Homo sapien
aggattctgaattcaggccagcgtgaatgcagc

SEQ ID NO: 595564 - DNA, 33 bp, Homo sapien
aggattctgaattcagtccagcgtgaatgcagc

SEQ ID NO: 595565 - DNA, 33 bp, Homo sapien
tggagctgtcaccttcacttttaggcaagagtg

SEQ ID NO: 595566 - DNA, 33 bp, Homo sapien
tggagctgtcaccttcgcttttaggcaagagtg

SEQ ID NO: 595567 - DNA, 33 bp, Homo sapien
ttctccttctgttccagctcattctctccttcc

SEQ ID NO: 595568 - DNA, 33 bp, Homo sapien
ttctccttctgttccatctcattctctccttcc

SEQ ID NO: 595569 - DNA, 33 bp, Homo sapien
tctgaataacagggtaaggggcacgccggatag

SEQ ID NO: 595570 - DNA, 33 bp, Homo sapien
tctgaataacagggtagggggcacgccggatag

SEQ ID NO: 595571 - DNA, 33 bp, Homo sapien
aagcctgccttttccagtctacaccgtagctca

SEQ ID NO: 595572 - DNA, 33 bp, Homo sapien
aagcctgccttttccattctacaccgtagctca

SEQ ID NO: 595573 - DNA, 33 bp, Homo sapien
gtgttaagcacttataacactatgtagctacta

SEQ ID NO: 595574 - DNA, 33 bp, Homo sapien
gtgttaagcacttataccactatgtagctacta

SEQ ID NO: 595575 - DNA, 33 bp, Homo sapien
cctatttcaagctaccaatgagctgtcaactgg

SEQ ID NO: 595576 - DNA, 33 bp, Homo sapien
cctatttcaagctaccgatgagctgtcaactgg

SEQ ID NO: 595577 - DNA, 33 bp, Homo sapien
atgaggagcaggagatcagcttacagttttctg

SEQ ID NO: 595578 - DNA, 33 bp, Homo sapien
atgaggagcaggagatgagcttacagttttctg

SEQ ID NO: 595579 - DNA, 33 bp, Homo sapien
taaataaaaaaagttacaatcaggatgggcaga

SEQ ID NO: 595580 - DNA, 33 bp, Homo sapien
taaataaaaaaagttataatcaggatgggcaga

SEQ ID NO: 595581 - DNA, 33 bp, Homo sapien
ttaatgttatatttaacgttctctttcataaga

SEQ ID NO: 595582 - DNA, 33 bp, Homo sapien
ttaatgttatatttaatgttctctttcataaga

SEQ ID NO: 595583 - DNA, 33 bp, Homo sapien
gggcctgctcactgacaagttgccacccgggat

SEQ ID NO: 595584 - DNA, 33 bp, Homo sapien
gggcctgctcactgacgagttgccacccgggat

SEQ ID NO: 595585 - DNA, 33 bp, Homo sapien
tttttaatgcttctcaaaagatttgctagcgtt

SEQ ID NO: 595586 - DNA, 33 bp, Homo sapien
tttttaatgcttctcagaagatttgctagcgtt

SEQ ID NO: 595587 - DNA, 33 bp, Homo sapien
tgcacaataaatgtaacgcgctggaatcatccc

SEQ ID NO: 595588 - DNA, 33 bp, Homo sapien
tgcacaataaatgtaatgcgctggaatcatccc

SEQ ID NO: 595589 - DNA, 33 bp, Homo sapien
agatcttacatgagcacggtttaatacaggagt

SEQ ID NO: 595590 - DNA, 33 bp, Homo sapien
agatcttacatgagcatggtttaatacaggagt

SEQ ID NO: 595591 - DNA, 33 bp, Homo sapien
atgtttgtgtctaacactggaacagttgccttt

SEQ ID NO: 595592 - DNA, 33 bp, Homo sapien
atgtttgtgtctaacattggaacagttgccttt

SEQ ID NO: 595593 - DNA, 33 bp, Homo sapien
aaagcattcatgacaactcggtggtgccacagg

SEQ ID NO: 595594 - DNA, 33 bp, Homo sapien
aaagcattcatgacaagtcggtggtgccacagg

SEQ ID NO: 595595 - DNA, 33 bp, Homo sapien
agtgatatttccactgcagagcaagaacagcta

SEQ ID NO: 595596 - DNA, 33 bp, Homo sapien
agtgatatttccactggagagcaagaacagcta

SEQ ID NO: 595597 - DNA, 33 bp, Homo sapien
gtgttgttctttactacgtaagagtgtggccat

SEQ ID NO: 595598 - DNA, 33 bp, Homo sapien
gtgttgttctttactatgtaagagtgtggccat

SEQ ID NO: 595599 - DNA, 33 bp, Homo sapien
tgtgaacatgagaaaacggacatcgaaatgata

SEQ ID NO: 595600 - DNA, 33 bp, Homo sapien
tgtgaacatgagaaaatggacatcgaaatgata

SEQ ID NO: 595601 - DNA, 33 bp, Homo sapien
cggccaagagtttcaacctgtgccgttttctcc

SEQ ID NO: 595602 - DNA, 33 bp, Homo sapien
cggccaagagtttcaatctgtgccgttttctcc

SEQ ID NO: 595603 - DNA, 33 bp, Homo sapien
acaagccaagtataaccagaaagtcccatatgt

SEQ ID NO: 595604 - DNA, 33 bp, Homo sapien
acaagccaagtataactagaaagtcccatatgt

SEQ ID NO: 595605 - DNA, 33 bp, Homo sapien
ttgtctctgtgtcttaggtctgtcccagcagac

SEQ ID NO: 595606 - DNA, 33 bp, Homo sapien
ttgtctctgtgtcttatgtctgtcccagcagac

SEQ ID NO: 595607 - DNA, 33 bp, Homo sapien
tatgcgcaatccatcacgtctccgtccgtctgc

SEQ ID NO: 595608 - DNA, 33 bp, Homo sapien
tatgcgcaatccatcatgtctccgtccgtctgc

SEQ ID NO: 595609 - DNA, 33 bp, Homo sapien
ttattgaatacttcccagcacagatgatctgtt

SEQ ID NO: 595610 - DNA, 33 bp, Homo sapien
ttattgaatacttcccggcacagatgatctgtt

SEQ ID NO: 595611 - DNA, 33 bp, Homo sapien
ttaagtaatcgacttacatagaaggtgtgcacc

SEQ ID NO: 595612 - DNA, 33 bp, Homo sapien
ttaagtaatcgacttatatagaaggtgtgcacc

SEQ ID NO: 595613 - DNA, 33 bp, Homo sapien
gttccttagaagaggacgctaatagctgcctgg

SEQ ID NO: 595614 - DNA, 33 bp, Homo sapien
gttccttagaagaggatgctaatagctgcctgg

SEQ ID NO: 595615 - DNA, 33 bp, Homo sapien
cgtcgcaggcaccatccaggatgtgtaggcgtc

SEQ ID NO: 595616 - DNA, 33 bp, Homo sapien
cgtcgcaggcaccatcgaggatgtgtaggcgtc

SEQ ID NO: 595617 - DNA, 33 bp, Homo sapien
gctcaacagtaaaataaacaaatagtccaatta

SEQ ID NO: 595618 - DNA, 33 bp, Homo sapien
gctcaacagtaaaatatacaaatagtccaatta

SEQ ID NO: 595619 - DNA, 33 bp, Homo sapien
agaacaggtattacaacttctagttactaacaa

SEQ ID NO: 595620 - DNA, 33 bp, Homo sapien
agaacaggtattacaatttctagttactaacaa

SEQ ID NO: 595621 - DNA, 33 bp, Homo sapien
cctttaaacattcccacggatgaagctgatgaa

SEQ ID NO: 595622 - DNA, 33 bp, Homo sapien
cctttaaacattcccatggatgaagctgatgaa

SEQ ID NO: 595623 - DNA, 33 bp, Homo sapien
tgcttctcatctggaaaaccacacaggtaaatc

SEQ ID NO: 595624 - DNA, 33 bp, Homo sapien
tgcttctcatctggaagaccacacaggtaaatc

SEQ ID NO: 595625 - DNA, 33 bp, Homo sapien
tatcagttaatgttaacgatgccagataagttt

SEQ ID NO: 595626 - DNA, 33 bp, Homo sapien
tatcagttaatgttaatgatgccagataagttt

SEQ ID NO: 595627 - DNA, 33 bp, Homo sapien
atagaaaagtagggaagaattctgcagctcatt

SEQ ID NO: 595628 - DNA, 33 bp, Homo sapien
atagaaaagtagggaataattctgcagctcatt

SEQ ID NO: 595629 - DNA, 33 bp, Homo sapien
gttgcagggttcttcaataaggcacagaaaacc

SEQ ID NO: 595630 - DNA, 33 bp, Homo sapien
gttgcagggttcttcagtaaggcacagaaaacc

SEQ ID NO: 595631 - DNA, 33 bp, Homo sapien
cagtcagcgtccatgcaaataaaacaagtaaag

SEQ ID NO: 595632 - DNA, 33 bp, Homo sapien
cagtcagcgtccatgcgaataaaacaagtaaag

SEQ ID NO: 595633 - DNA, 33 bp, Homo sapien
acagcgtggggatgataaaaaggaatcttttga

SEQ ID NO: 595634 - DNA, 33 bp, Homo sapien
acagcgtggggatgatcaaaaggaatcttttga

SEQ ID NO: 595635 - DNA, 33 bp, Homo sapien
ttttcacatgagactgaaaaagccgacacaccc

SEQ ID NO: 595636 - DNA, 33 bp, Homo sapien
ttttcacatgagactggaaaagccgacacaccc

SEQ ID NO: 595637 - DNA, 33 bp, Homo sapien
gcttcacgtactgtacaagcacaggtgggccag

SEQ ID NO: 595638 - DNA, 33 bp, Homo sapien
gcttcacgtactgtacgagcacaggtgggccag

SEQ ID NO: 595639 - DNA, 33 bp, Homo sapien
acctcaacatttacagccaggctctacgagatt

SEQ ID NO: 595640 - DNA, 33 bp, Homo sapien
acctcaacatttacagtcaggctctacgagatt

SEQ ID NO: 595641 - DNA, 33 bp, Homo sapien
ttggagtctcactgcccgccttcacaggtgcca

SEQ ID NO: 595642 - DNA, 33 bp, Homo sapien
ttggagtctcactgcctgccttcacaggtgcca

SEQ ID NO: 595643 - DNA, 33 bp, Homo sapien
tttttggttttgctccaaatctctgaattttga

SEQ ID NO: 595644 - DNA, 33 bp, Homo sapien
tttttggttttgctcctaatctctgaattttga

SEQ ID NO: 595645 - DNA, 33 bp, Homo sapien
gattacatagcatgaactgacggtttatgaggg

SEQ ID NO: 595646 - DNA, 33 bp, Homo sapien
gattacatagcatgaattgacggtttatgaggg

SEQ ID NO: 595647 - DNA, 33 bp, Homo sapien
caccaaggaggcaatcacagcaaaactgagtga

SEQ ID NO: 595648 - DNA, 33 bp, Homo sapien
caccaaggaggcaatcgcagcaaaactgagtga

SEQ ID NO: 595649 - DNA, 33 bp, Homo sapien
cacagaaactacaaacgacaaaatttctagaaa

SEQ ID NO: 595650 - DNA, 33 bp, Homo sapien
cacagaaactacaaactacaaaatttctagaaa

SEQ ID NO: 595651 - DNA, 33 bp, Homo sapien
ctgttgttcagacatcaaattttatagtaattt

SEQ ID NO: 595652 - DNA, 33 bp, Homo sapien
ctgttgttcagacatcgaattttatagtaattt

SEQ ID NO: 595653 - DNA, 33 bp, Homo sapien
tcctatactggagacacctcttcccccctccca

SEQ ID NO: 595654 - DNA, 33 bp, Homo sapien
tcctatactggagacatctcttcccccctccca

SEQ ID NO: 595655 - DNA, 33 bp, Homo sapien
gtaaataaatcaacttaaaatttggaccacaca

SEQ ID NO: 595656 - DNA, 33 bp, Homo sapien
gtaaataaatcaacttgaaatttggaccacaca

SEQ ID NO: 595657 - DNA, 33 bp, Homo sapien
tcaaggcagacctcaaggaagttgatgatccaa

SEQ ID NO: 595658 - DNA, 33 bp, Homo sapien
tcaaggcagacctcaatgaagttgatgatccaa

SEQ ID NO: 595659 - DNA, 33 bp, Homo sapien
gaaacttcaaactgtaaatgaaaaatttcatgc

SEQ ID NO: 595660 - DNA, 33 bp, Homo sapien
gaaacttcaaactgtacatgaaaaatttcatgc

SEQ ID NO: 595661 - DNA, 33 bp, Homo sapien
atactattgcagataagatgccctgaacaaccc

SEQ ID NO: 595662 - DNA, 33 bp, Homo sapien
atactattgcagataatatgccctgaacaaccc

SEQ ID NO: 595663 - DNA, 33 bp, Homo sapien
ccaggtcacttcagccccttatgaaacagcagc

SEQ ID NO: 595664 - DNA, 33 bp, Homo sapien
ccaggtcacttcagcctcttatgaaacagcagc

SEQ ID NO: 595665 - DNA, 33 bp, Homo sapien
tactttccactggtcaaagctgtccccgcaggg

SEQ ID NO: 595666 - DNA, 33 bp, Homo sapien
tactttccactggtcagagctgtccccgcaggg

SEQ ID NO: 595667 - DNA, 33 bp, Homo sapien
actgggccatcttagaccctgtgtcagcagaca

SEQ ID NO: 595668 - DNA, 33 bp, Homo sapien
actgggccatcttagatcctgtgtcagcagaca

SEQ ID NO: 595669 - DNA, 33 bp, Homo sapien
gtgcatttctgggccacgacaccttctgaattg

SEQ ID NO: 595670 - DNA, 33 bp, Homo sapien
gtgcatttctgggccatgacaccttctgaattg

SEQ ID NO: 595671 - DNA, 33 bp, Homo sapien
agaggatgtttacctcaccttctcgactggctg

SEQ ID NO: 595672 - DNA, 33 bp, Homo sapien
agaggatgtttacctcgccttctcgactggctg

SEQ ID NO: 595673 - DNA, 33 bp, Homo sapien
acacccctaatgcaaacaagttatggatcttat

SEQ ID NO: 595674 - DNA, 33 bp, Homo sapien
acacccctaatgcaaagaagttatggatcttat

SEQ ID NO: 595675 - DNA, 33 bp, Homo sapien
cctactgcggactgtacggttcaactcagcatg

SEQ ID NO: 595676 - DNA, 33 bp, Homo sapien
cctactgcggactgtatggttcaactcagcatg

SEQ ID NO: 595677 - DNA, 33 bp, Homo sapien
cacacttgaaagataagtcatgaaccgaatgat

SEQ ID NO: 595678 - DNA, 33 bp, Homo sapien
cacacttgaaagataattcatgaaccgaatgat

SEQ ID NO: 595679 - DNA, 33 bp, Homo sapien
atctttcaagtgtgtcaaatttgctattcatgt

SEQ ID NO: 595680 - DNA, 33 bp, Homo sapien
atctttcaagtgtgtcgaatttgctattcatgt

SEQ ID NO: 595681 - DNA, 33 bp, Homo sapien
gaacaagatgttatcaaaaatgaaatacaatta

SEQ ID NO: 595682 - DNA, 33 bp, Homo sapien
gaacaagatgttatcagaaatgaaatacaatta

SEQ ID NO: 595683 - DNA, 33 bp, Homo sapien
ttctgtaaatatgttaaccgtcattactgtata

SEQ ID NO: 595684 - DNA, 33 bp, Homo sapien
ttctgtaaatatgttagccgtcattactgtata

SEQ ID NO: 595685 - DNA, 33 bp, Homo sapien
tccttcaaatgtcggccgcaatgcagttctcta

SEQ ID NO: 595686 - DNA, 33 bp, Homo sapien
tccttcaaatgtcggcggcaatgcagttctcta

SEQ ID NO: 595687 - DNA, 33 bp, Homo sapien
ttcctctggtccttctcaatctaaggtctgcac

SEQ ID NO: 595688 - DNA, 33 bp, Homo sapien
ttcctctggtccttctgaatctaaggtctgcac

SEQ ID NO: 595689 - DNA, 33 bp, Homo sapien
ataaactgctttatggaagttggtagctgtgga

SEQ ID NO: 595690 - DNA, 33 bp, Homo sapien
ataaactgctttatggtagttggtagctgtgga

SEQ ID NO: 595691 - DNA, 33 bp, Homo sapien
gctcatactcgatgacagggatgtttttattga

SEQ ID NO: 595692 - DNA, 33 bp, Homo sapien
gctcatactcgatgacggggatgtttttattga

SEQ ID NO: 595693 - DNA, 33 bp, Homo sapien
ctgcaactggccgggccgcagagtggtcagggc

SEQ ID NO: 595694 - DNA, 33 bp, Homo sapien
ctgcaactggccgggctgcagagtggtcagggc

SEQ ID NO: 595695 - DNA, 33 bp, Homo sapien
acataacttcttacacacccatgagtcctcctg

SEQ ID NO: 595696 - DNA, 33 bp, Homo sapien
acataacttcttacactcccatgagtcctcctg

SEQ ID NO: 595697 - DNA, 33 bp, Homo sapien
attccatcgatgggagcctcaagtggtctgaag

SEQ ID NO: 595698 - DNA, 33 bp, Homo sapien
attccatcgatgggagtctcaagtggtctgaag

SEQ ID NO: 595699 - DNA, 33 bp, Homo sapien
acgacacatgtttaaacggcattctgtgagccc

SEQ ID NO: 595700 - DNA, 33 bp, Homo sapien
acgacacatgtttaaatggcattctgtgagccc

SEQ ID NO: 595701 - DNA, 33 bp, Homo sapien
gccaaggtgttggtcaaattccttcaaatctta

SEQ ID NO: 595702 - DNA, 33 bp, Homo sapien
gccaaggtgttggtcagattccttcaaatctta

SEQ ID NO: 595703 - DNA, 33 bp, Homo sapien
gcttctaaaaataaacacttgctaggctcccac

SEQ ID NO: 595704 - DNA, 33 bp, Homo sapien
gcttctaaaaataaacccttgctaggctcccac

SEQ ID NO: 595705 - DNA, 33 bp, Homo sapien
agagcactcaacccccaacatgccaggctctgc

SEQ ID NO: 595706 - DNA, 33 bp, Homo sapien
agagcactcaaccccccacatgccaggctctgc

SEQ ID NO: 595707 - DNA, 33 bp, Homo sapien
gattctgtggtttccacacctgggaagagaaaa

SEQ ID NO: 595708 - DNA, 33 bp, Homo sapien
gattctgtggtttccatacctgggaagagaaaa

SEQ ID NO: 595709 - DNA, 33 bp, Homo sapien
attccagctgatacataatcgttactgaaggtc

SEQ ID NO: 595710 - DNA, 33 bp, Homo sapien
attccagctgatacatcatcgttactgaaggtc

SEQ ID NO: 595711 - DNA, 33 bp, Homo sapien
aaggaagtgcctgttcaagccaccagttctgcg

SEQ ID NO: 595712 - DNA, 33 bp, Homo sapien
aaggaagtgcctgttcgagccaccagttctgcg

SEQ ID NO: 595713 - DNA, 33 bp, Homo sapien
gtttggtcgtggtgtaacatttacttcccttgc

SEQ ID NO: 595714 - DNA, 33 bp, Homo sapien
gtttggtcgtggtgtaccatttacttcccttgc

SEQ ID NO: 595715 - DNA, 33 bp, Homo sapien
ttgcagccggggaatcagacggcaaagctgtag

SEQ ID NO: 595716 - DNA, 33 bp, Homo sapien
ttgcagccggggaatcggacggcaaagctgtag

SEQ ID NO: 595717 - DNA, 33 bp, Homo sapien
tgattggttgaacccacgaatacagagggccag

SEQ ID NO: 595718 - DNA, 33 bp, Homo sapien
tgattggttgaacccatgaatacagagggccag

SEQ ID NO: 595719 - DNA, 33 bp, Homo sapien
tgctgcagaacatggccgattccccaggggctg

SEQ ID NO: 595720 - DNA, 33 bp, Homo sapien
tgctgcagaacatggctgattccccaggggctg

SEQ ID NO: 595721 - DNA, 33 bp, Homo sapien
tctgggctccttgtcacggtgcactggcatcca

SEQ ID NO: 595722 - DNA, 33 bp, Homo sapien
tctgggctccttgtcatggtgcactggcatcca

SEQ ID NO: 595723 - DNA, 33 bp, Homo sapien
gacccttctgaaaaacagttttgccgcttgcta

SEQ ID NO: 595724 - DNA, 33 bp, Homo sapien
gacccttctgaaaaaccgttttgccgcttgcta

SEQ ID NO: 595725 - DNA, 33 bp, Homo sapien
gctccacacctttgacaactcttgctacagtcg

SEQ ID NO: 595726 - DNA, 33 bp, Homo sapien
gctccacacctttgacgactcttgctacagtcg

SEQ ID NO: 595727 - DNA, 33 bp, Homo sapien
agaaatcagtcagaacactgcaaaggtatcaga

SEQ ID NO: 595728 - DNA, 33 bp, Homo sapien
agaaatcagtcagaactctgcaaaggtatcaga

SEQ ID NO: 595729 - DNA, 33 bp, Homo sapien
ttttggtgattttaaaaggaatgcaaaatattt

SEQ ID NO: 595730 - DNA, 33 bp, Homo sapien
ttttggtgattttaaagggaatgcaaaatattt

SEQ ID NO: 595731 - DNA, 33 bp, Homo sapien
aaaagaacacaacggacaacaccagctcttgga

SEQ ID NO: 595732 - DNA, 33 bp, Homo sapien
aaaagaacacaacggataacaccagctcttgga

SEQ ID NO: 595733 - DNA, 33 bp, Homo sapien
gaactagagatggaaccgtaggccagggttgtt

SEQ ID NO: 595734 - DNA, 33 bp, Homo sapien
gaactagagatggaactgtaggccagggttgtt

SEQ ID NO: 595735 - DNA, 33 bp, Homo sapien
aataaataaaatccaacctgacaatctatcttt

SEQ ID NO: 595736 - DNA, 33 bp, Homo sapien
aataaataaaatccaatctgacaatctatcttt

SEQ ID NO: 595737 - DNA, 33 bp, Homo sapien
catagagcgtgtttccaagggattacaatacga

SEQ ID NO: 595738 - DNA, 33 bp, Homo sapien
catagagcgtgtttccgagggattacaatacga

SEQ ID NO: 595739 - DNA, 33 bp, Homo sapien
ccctcctcaaagccacagatgggcaccatgctt

SEQ ID NO: 595740 - DNA, 33 bp, Homo sapien
ccctcctcaaagccacggatgggcaccatgctt

SEQ ID NO: 595741 - DNA, 33 bp, Homo sapien
gtttaaaaatcatgaaaatttcacaatgcaacc

SEQ ID NO: 595742 - DNA, 33 bp, Homo sapien
gtttaaaaatcatgaacatttcacaatgcaacc

SEQ ID NO: 595743 - DNA, 33 bp, Homo sapien
aaccccacgcagacaaatgcatcatccctgtga

SEQ ID NO: 595744 - DNA, 33 bp, Homo sapien
aaccccacgcagacaagtgcatcatccctgtga

SEQ ID NO: 595745 - DNA, 33 bp, Homo sapien
cttgctttcccaatgacggaatgttctaggaag

SEQ ID NO: 595746 - DNA, 33 bp, Homo sapien
cttgctttcccaatgatggaatgttctaggaag

SEQ ID NO: 595747 - DNA, 33 bp, Homo sapien
ctccagctcaatttccacagaacagaaggagga

SEQ ID NO: 595748 - DNA, 33 bp, Homo sapien
ctccagctcaatttccgcagaacagaaggagga

SEQ ID NO: 595749 - DNA, 33 bp, Homo sapien
aggctcgggacagagcagaatgagatagtgtga

SEQ ID NO: 595750 - DNA, 33 bp, Homo sapien
aggctcgggacagagcggaatgagatagtgtga

SEQ ID NO: 595751 - DNA, 33 bp, Homo sapien
acacgttttcttatgacgctttctaaaccctgc

SEQ ID NO: 595752 - DNA, 33 bp, Homo sapien
acacgttttcttatgatgctttctaaaccctgc

SEQ ID NO: 595753 - DNA, 33 bp, Homo sapien
aaattcaactggactcaagcgacttacagatca

SEQ ID NO: 595754 - DNA, 33 bp, Homo sapien
aaattcaactggactcgagcgacttacagatca

SEQ ID NO: 595755 - DNA, 33 bp, Homo sapien
cccacgctcagcctcacacgttcccagctctca

SEQ ID NO: 595756 - DNA, 33 bp, Homo sapien
cccacgctcagcctcagacgttcccagctctca

SEQ ID NO: 595757 - DNA, 33 bp, Homo sapien
gtggccttcagaacgaagatgacatgcaggcca

SEQ ID NO: 595758 - DNA, 33 bp, Homo sapien
gtggccttcagaacgaggatgacatgcaggcca

SEQ ID NO: 595759 - DNA, 33 bp, Homo sapien
agcgtctcttgtaagcagcacatggtttagcca

SEQ ID NO: 595760 - DNA, 33 bp, Homo sapien
agcgtctcttgtaagcggcacatggtttagcca

SEQ ID NO: 595761 - DNA, 33 bp, Homo sapien
aaacatacgcaatttcccttcactcatttttga

SEQ ID NO: 595762 - DNA, 33 bp, Homo sapien
aaacatacgcaatttctcttcactcatttttga

SEQ ID NO: 595763 - DNA, 33 bp, Homo sapien
aggacgtccttgccgtcaaaggagaagatgcgt

SEQ ID NO: 595764 - DNA, 33 bp, Homo sapien
aggacgtccttgccgttaaaggagaagatgcgt

SEQ ID NO: 595765 - DNA, 33 bp, Homo sapien
tcacctgcgtttgtaaatctctattttgggtgg

SEQ ID NO: 595766 - DNA, 33 bp, Homo sapien
tcacctgcgtttgtaagtctctattttgggtgg

SEQ ID NO: 595767 - DNA, 33 bp, Homo sapien
aacacaaaaacagcccccctcatacgtacacac

SEQ ID NO: 595768 - DNA, 33 bp, Homo sapien
aacacaaaaacagccctcctcatacgtacacac

SEQ ID NO: 595769 - DNA, 33 bp, Homo sapien
cttcactgctgttaataaggaacacggaagctc

SEQ ID NO: 595770 - DNA, 33 bp, Homo sapien
cttcactgctgttaatgaggaacacggaagctc

SEQ ID NO: 595771 - DNA, 33 bp, Homo sapien
aaatggatgtcacagtaaaaataaatctgcttg

SEQ ID NO: 595772 - DNA, 33 bp, Homo sapien
aaatggatgtcacagtgaaaataaatctgcttg

SEQ ID NO: 595773 - DNA, 33 bp, Homo sapien
gagacgtgaaacaaacaggttgagacctagagc

SEQ ID NO: 595774 - DNA, 33 bp, Homo sapien
gagacgtgaaacaaacgggttgagacctagagc

SEQ ID NO: 595775 - DNA, 33 bp, Homo sapien
agcaagaatgacatacagaccgagggtgtgctg

SEQ ID NO: 595776 - DNA, 33 bp, Homo sapien
agcaagaatgacatacggaccgagggtgtgctg

SEQ ID NO: 595777 - DNA, 33 bp, Homo sapien
accctgggttttcagaaatccctgctatgttaa

SEQ ID NO: 595778 - DNA, 33 bp, Homo sapien
accctgggttttcagagatccctgctatgttaa

SEQ ID NO: 595779 - DNA, 33 bp, Homo sapien
agaaagcagttgccaactatgacagtctgcctc

SEQ ID NO: 595780 - DNA, 33 bp, Homo sapien
agaaagcagttgccaattatgacagtctgcctc

SEQ ID NO: 595781 - DNA, 33 bp, Homo sapien
agcagacgctgaccaactctcccattaaaaaca

SEQ ID NO: 595782 - DNA, 33 bp, Homo sapien
agcagacgctgaccaattctcccattaaaaaca

SEQ ID NO: 595783 - DNA, 33 bp, Homo sapien
tccctcttcaataaacccttatctgcaaagcct

SEQ ID NO: 595784 - DNA, 33 bp, Homo sapien
tccctcttcaataaactcttatctgcaaagcct

SEQ ID NO: 595785 - DNA, 33 bp, Homo sapien
tgcagggaccttcccccagtggcacgcacttcc

SEQ ID NO: 595786 - DNA, 33 bp, Homo sapien
tgcagggaccttccccgagtggcacgcacttcc

SEQ ID NO: 595787 - DNA, 33 bp, Homo sapien
atcaaagtgccctctcagaaacgtcgccttcat

SEQ ID NO: 595788 - DNA, 33 bp, Homo sapien
atcaaagtgccctctcggaaacgtcgccttcat

SEQ ID NO: 595789 - DNA, 33 bp, Homo sapien
caagatggaatagacaaatttggccaggcgcgg

SEQ ID NO: 595790 - DNA, 33 bp, Homo sapien
caagatggaatagacacatttggccaggcgcgg

SEQ ID NO: 595791 - DNA, 33 bp, Homo sapien
tggggaagattctgacaaggatgaagtgactga

SEQ ID NO: 595792 - DNA, 33 bp, Homo sapien
tggggaagattctgacgaggatgaagtgactga

SEQ ID NO: 595793 - DNA, 33 bp, Homo sapien
aggtcacatgacattcagaaaccgttccaaatg

SEQ ID NO: 595794 - DNA, 33 bp, Homo sapien
aggtcacatgacattcggaaaccgttccaaatg

SEQ ID NO: 595795 - DNA, 33 bp, Homo sapien
tcaccctctgctctaaaatatcagcaaagacat

SEQ ID NO: 595796 - DNA, 33 bp, Homo sapien
tcaccctctgctctaagatatcagcaaagacat

SEQ ID NO: 595797 - DNA, 33 bp, Homo sapien
caccagtcagaacaggaattattaaaaagccaa

SEQ ID NO: 595798 - DNA, 33 bp, Homo sapien
caccagtcagaacagggattattaaaaagccaa

SEQ ID NO: 595799 - DNA, 33 bp, Homo sapien
ctaccctgcgtgtctcacctgggaatggatggc

SEQ ID NO: 595800 - DNA, 33 bp, Homo sapien
ctaccctgcgtgtctctcctgggaatggatggc

SEQ ID NO: 595801 - DNA, 33 bp, Homo sapien
tcttacgttaacacacgccaggaagcatctcct

SEQ ID NO: 595802 - DNA, 33 bp, Homo sapien
tcttacgttaacacactccaggaagcatctcct

SEQ ID NO: 595803 - DNA, 33 bp, Homo sapien
gtggctataatcagacaaagagtaacggtgcat

SEQ ID NO: 595804 - DNA, 33 bp, Homo sapien
gtggctataatcagacgaagagtaacggtgcat

SEQ ID NO: 595805 - DNA, 33 bp, Homo sapien
ctgtgtcctctgaaccggctcaggctgtttccc

SEQ ID NO: 595806 - DNA, 33 bp, Homo sapien
ctgtgtcctctgaacctgctcaggctgtttccc

SEQ ID NO: 595807 - DNA, 33 bp, Homo sapien
tcagtattcaccagaaacactgccatgctgttc

SEQ ID NO: 595808 - DNA, 33 bp, Homo sapien
tcagtattcaccagaagcactgccatgctgttc

SEQ ID NO: 595809 - DNA, 33 bp, Homo sapien
ggactatgttatgttacatggcaggggagttaa

SEQ ID NO: 595810 - DNA, 33 bp, Homo sapien
ggactatgttatgttatatggcaggggagttaa

SEQ ID NO: 595811 - DNA, 33 bp, Homo sapien
agacacgccacactgaacatgatgaatgaagac

SEQ ID NO: 595812 - DNA, 33 bp, Homo sapien
agacacgccacactgaccatgatgaatgaagac

SEQ ID NO: 595813 - DNA, 33 bp, Homo sapien
tcttcctacataaagaataacaacatcaactaa

SEQ ID NO: 595814 - DNA, 33 bp, Homo sapien
tcttcctacataaagagtaacaacatcaactaa

SEQ ID NO: 595815 - DNA, 33 bp, Homo sapien
ggaaagtttcttgggaccttaccacagaactct

SEQ ID NO: 595816 - DNA, 33 bp, Homo sapien
ggaaagtttcttgggatcttaccacagaactct

SEQ ID NO: 595817 - DNA, 33 bp, Homo sapien
ccggcttcatagtccaatctggttctttgccta

SEQ ID NO: 595818 - DNA, 33 bp, Homo sapien
ccggcttcatagtccagtctggttctttgccta

SEQ ID NO: 595819 - DNA, 33 bp, Homo sapien
tcagaatatacaaagaacttttgcagctcaata

SEQ ID NO: 595820 - DNA, 33 bp, Homo sapien
tcagaatatacaaagaccttttgcagctcaata

SEQ ID NO: 595821 - DNA, 33 bp, Homo sapien
catctcccagggactaaattgtgaagcccaggt

SEQ ID NO: 595822 - DNA, 33 bp, Homo sapien
catctcccagggactacattgtgaagcccaggt

SEQ ID NO: 595823 - DNA, 33 bp, Homo sapien
ctggcttatcttctaacctccatcgtctcctgc

SEQ ID NO: 595824 - DNA, 33 bp, Homo sapien
ctggcttatcttctaatctccatcgtctcctgc

SEQ ID NO: 595825 - DNA, 33 bp, Homo sapien
tgcctctttctctaaactggatggcactgaggt

SEQ ID NO: 595826 - DNA, 33 bp, Homo sapien
tgcctctttctctaaattggatggcactgaggt

SEQ ID NO: 595827 - DNA, 33 bp, Homo sapien
aaaggtctgttagcaccggagaggtggttgttg

SEQ ID NO: 595828 - DNA, 33 bp, Homo sapien
aaaggtctgttagcactggagaggtggttgttg

SEQ ID NO: 595829 - DNA, 33 bp, Homo sapien
tccaccagtgagaagacgatgactcactgaagg

SEQ ID NO: 595830 - DNA, 33 bp, Homo sapien
tccaccagtgagaagatgatgactcactgaagg

SEQ ID NO: 595831 - DNA, 33 bp, Homo sapien
ttgctctgtcagctaaaatggcctaaaagcaac

SEQ ID NO: 595832 - DNA, 33 bp, Homo sapien
ttgctctgtcagctaagatggcctaaaagcaac

SEQ ID NO: 595833 - DNA, 33 bp, Homo sapien
ggctagtagttcccacacactcttctgaatgta

SEQ ID NO: 595834 - DNA, 33 bp, Homo sapien
ggctagtagttcccactcactcttctgaatgta

SEQ ID NO: 595835 - DNA, 33 bp, Homo sapien
atggaaatgtcaaataagcactgagacaaatta

SEQ ID NO: 595836 - DNA, 33 bp, Homo sapien
atggaaatgtcaaataggcactgagacaaatta

SEQ ID NO: 595837 - DNA, 33 bp, Homo sapien
tgtatgtgtgtgtagaagtacaaccaaaggctt

SEQ ID NO: 595838 - DNA, 33 bp, Homo sapien
tgtatgtgtgtgtagaggtacaaccaaaggctt

SEQ ID NO: 595839 - DNA, 33 bp, Homo sapien
tctgtacctaggagggaagttgctgtcctatgg

SEQ ID NO: 595840 - DNA, 33 bp, Homo sapien
tctgtacctaggaggggagttgctgtcctatgg

SEQ ID NO: 595841 - DNA, 33 bp, Homo sapien
ttacaggactgtctacaagagagaagctcccca

SEQ ID NO: 595842 - DNA, 33 bp, Homo sapien
ttacaggactgtctacgagagagaagctcccca

SEQ ID NO: 595843 - DNA, 33 bp, Homo sapien
ttcatattgttgctgaataatttttgataaata

SEQ ID NO: 595844 - DNA, 33 bp, Homo sapien
ttcatattgttgctgagtaatttttgataaata

SEQ ID NO: 595845 - DNA, 33 bp, Homo sapien
tcaacctcaatcctaaacaagcagcaaggaaga

SEQ ID NO: 595846 - DNA, 33 bp, Homo sapien
tcaacctcaatcctaagcaagcagcaaggaaga

SEQ ID NO: 595847 - DNA, 33 bp, Homo sapien
ccggacgtttggtcaccggagcagcagtgctcg

SEQ ID NO: 595848 - DNA, 33 bp, Homo sapien
ccggacgtttggtcactggagcagcagtgctcg

SEQ ID NO: 595849 - DNA, 33 bp, Homo sapien
aacaggaaaagccatgcatgacattcaaaacac

SEQ ID NO: 595850 - DNA, 33 bp, Homo sapien
aacaggaaaagccatgtatgacattcaaaacac

SEQ ID NO: 595851 - DNA, 33 bp, Homo sapien
cgcacatctgtctccacgcttataattatcact

SEQ ID NO: 595852 - DNA, 33 bp, Homo sapien
cgcacatctgtctccatgcttataattatcact

SEQ ID NO: 595853 - DNA, 33 bp, Homo sapien
aacatcatggttaaaaaataattgagactatgg

SEQ ID NO: 595854 - DNA, 33 bp, Homo sapien
aacatcatggttaaaacataattgagactatgg

SEQ ID NO: 595855 - DNA, 33 bp, Homo sapien
aggatctactgaatcaagtatgtcacaacaagt

SEQ ID NO: 595856 - DNA, 33 bp, Homo sapien
aggatctactgaatcaggtatgtcacaacaagt

SEQ ID NO: 595857 - DNA, 33 bp, Homo sapien
ccttgtggcttttcatgaattttatatttgtgt

SEQ ID NO: 595858 - DNA, 33 bp, Homo sapien
ccttgtggcttttcattaattttatatttgtgt

SEQ ID NO: 595859 - DNA, 33 bp, Homo sapien
atgcacgactatccaacgaacatcatacaaaca

SEQ ID NO: 595860 - DNA, 33 bp, Homo sapien
atgcacgactatccaatgaacatcatacaaaca

SEQ ID NO: 595861 - DNA, 33 bp, Homo sapien
aagttgtcaggaaagaaaaggtaggaaaatgat

SEQ ID NO: 595862 - DNA, 33 bp, Homo sapien
aagttgtcaggaaagagaaggtaggaaaatgat

SEQ ID NO: 595863 - DNA, 33 bp, Homo sapien
tggggtctgataaatagctaagttgtcaggaaa

SEQ ID NO: 595864 - DNA, 33 bp, Homo sapien
tggggtctgataaatatctaagttgtcaggaaa

SEQ ID NO: 595865 - DNA, 33 bp, Homo sapien
aatctcacccactacgccaatgtgagtccttgt

SEQ ID NO: 595866 - DNA, 33 bp, Homo sapien
aatctcacccactacgtcaatgtgagtccttgt

SEQ ID NO: 595867 - DNA, 33 bp, Homo sapien
ttcctgcacagtgcagacatctcctcttaggcc

SEQ ID NO: 595868 - DNA, 33 bp, Homo sapien
ttcctgcacagtgcaggcatctcctcttaggcc

SEQ ID NO: 595869 - DNA, 33 bp, Homo sapien
agggcaggtattctcaaatgctttctgacctaa

SEQ ID NO: 595870 - DNA, 33 bp, Homo sapien
agggcaggtattctcagatgctttctgacctaa

SEQ ID NO: 595871 - DNA, 33 bp, Homo sapien
agatgtcacccagcgcaaggtgagggagccctg

SEQ ID NO: 595872 - DNA, 33 bp, Homo sapien
agatgtcacccagcgcgaggtgagggagccctg

SEQ ID NO: 595873 - DNA, 33 bp, Homo sapien
cttagatgtgacagaacggagatagttctgggt

SEQ ID NO: 595874 - DNA, 33 bp, Homo sapien
cttagatgtgacagaatggagatagttctgggt

SEQ ID NO: 595875 - DNA, 33 bp, Homo sapien
tgtacagttaaaacaaaaaactgtgaaatgaga

SEQ ID NO: 595876 - DNA, 33 bp, Homo sapien
tgtacagttaaaacaagaaactgtgaaatgaga

SEQ ID NO: 595877 - DNA, 33 bp, Homo sapien
aacagaaaattcacagccctgaaagctgttttg

SEQ ID NO: 595878 - DNA, 33 bp, Homo sapien
aacagaaaattcacagtcctgaaagctgttttg

SEQ ID NO: 595879 - DNA, 33 bp, Homo sapien
tgtctgccttctgcccaggatccaagtgcccga

SEQ ID NO: 595880 - DNA, 33 bp, Homo sapien
tgtctgccttctgcccgggatccaagtgcccga

SEQ ID NO: 595881 - DNA, 33 bp, Homo sapien
gctaatacccagttcccaccaactacagccttc

SEQ ID NO: 595882 - DNA, 33 bp, Homo sapien
gctaatacccagttcctaccaactacagccttc

SEQ ID NO: 595883 - DNA, 33 bp, Homo sapien
ttcttacccactgccaatcttgaggaaagggaa

SEQ ID NO: 595884 - DNA, 33 bp, Homo sapien
ttcttacccactgccagtcttgaggaaagggaa

SEQ ID NO: 595885 - DNA, 33 bp, Homo sapien
gttgctgctttcacgcggattcgtgggggctcc

SEQ ID NO: 595886 - DNA, 33 bp, Homo sapien
gttgctgctttcacgctgattcgtgggggctcc

SEQ ID NO: 595887 - DNA, 33 bp, Homo sapien
aacagctaaaaaaatccgactaaaaagctaagc

SEQ ID NO: 595888 - DNA, 33 bp, Homo sapien
aacagctaaaaaaatctgactaaaaagctaagc

SEQ ID NO: 595889 - DNA, 33 bp, Homo sapien
tggatttgcaagtcacagccagccttcgaaagc

SEQ ID NO: 595890 - DNA, 33 bp, Homo sapien
tggatttgcaagtcacggccagccttcgaaagc

SEQ ID NO: 595891 - DNA, 33 bp, Homo sapien
tcaatactcagaagcaccgtaatcctattttct

SEQ ID NO: 595892 - DNA, 33 bp, Homo sapien
tcaatactcagaagcatcgtaatcctattttct

SEQ ID NO: 595893 - DNA, 33 bp, Homo sapien
agacagattttccaaccctgagccagccttgca

SEQ ID NO: 595894 - DNA, 33 bp, Homo sapien
agacagattttccaactctgagccagccttgca

SEQ ID NO: 595895 - DNA, 33 bp, Homo sapien
taccacaagaattacacgctataaccattcttc

SEQ ID NO: 595896 - DNA, 33 bp, Homo sapien
taccacaagaattacatgctataaccattcttc

SEQ ID NO: 595897 - DNA, 33 bp, Homo sapien
cagagaacatacactacggtttcaattctgtta

SEQ ID NO: 595898 - DNA, 33 bp, Homo sapien
cagagaacatacactatggtttcaattctgtta

SEQ ID NO: 595899 - DNA, 33 bp, Homo sapien
aagtataaatggtccaaatacaccaattgaagc

SEQ ID NO: 595900 - DNA, 33 bp, Homo sapien
aagtataaatggtccagatacaccaattgaagc

SEQ ID NO: 595901 - DNA, 33 bp, Homo sapien
tgtgcggcctccctggaattcgtacacggccag

SEQ ID NO: 595902 - DNA, 33 bp, Homo sapien
tgtgcggcctccctgggattcgtacacggccag

SEQ ID NO: 595903 - DNA, 33 bp, Homo sapien
ttcactccagctggtcacctcgctgccccctgc

SEQ ID NO: 595904 - DNA, 33 bp, Homo sapien
ttcactccagctggtcgcctcgctgccccctgc

SEQ ID NO: 595905 - DNA, 33 bp, Homo sapien
ccctaattctataatccccacagctggaaattc

SEQ ID NO: 595906 - DNA, 33 bp, Homo sapien
ccctaattctataatctccacagctggaaattc

SEQ ID NO: 595907 - DNA, 33 bp, Homo sapien
agatgaatacctcagacatcttaggaatggtat

SEQ ID NO: 595908 - DNA, 33 bp, Homo sapien
agatgaatacctcagatatcttaggaatggtat

SEQ ID NO: 595909 - DNA, 33 bp, Homo sapien
aaatctgtttctctaaactcattgcaaggggtc

SEQ ID NO: 595910 - DNA, 33 bp, Homo sapien
aaatctgtttctctaacctcattgcaaggggtc

SEQ ID NO: 595911 - DNA, 33 bp, Homo sapien
cccactcgaacgcagaagtagggatgggaatag

SEQ ID NO: 595912 - DNA, 33 bp, Homo sapien
cccactcgaacgcagaggtagggatgggaatag

SEQ ID NO: 595913 - DNA, 33 bp, Homo sapien
ggatttgtttaaacataaaggtggagtccacag

SEQ ID NO: 595914 - DNA, 33 bp, Homo sapien
ggatttgtttaaacatcaaggtggagtccacag

SEQ ID NO: 595915 - DNA, 33 bp, Homo sapien
ggtccctgatttctccaactggacagaaataaa

SEQ ID NO: 595916 - DNA, 33 bp, Homo sapien
ggtccctgatttctccgactggacagaaataaa

SEQ ID NO: 595917 - DNA, 33 bp, Homo sapien
gggagtgattaggagacctggaagactagaaat

SEQ ID NO: 595918 - DNA, 33 bp, Homo sapien
gggagtgattaggagagctggaagactagaaat

SEQ ID NO: 595919 - DNA, 33 bp, Homo sapien
gggcctcttgtttcatgaaaggagtggctgcag

SEQ ID NO: 595920 - DNA, 33 bp, Homo sapien
gggcctcttgtttcattaaaggagtggctgcag

SEQ ID NO: 595921 - DNA, 33 bp, Homo sapien
tgtagattcagtgaccaaggccatgaaacagac

SEQ ID NO: 595922 - DNA, 33 bp, Homo sapien
tgtagattcagtgaccgaggccatgaaacagac

SEQ ID NO: 595923 - DNA, 33 bp, Homo sapien
tgcttcttcatggaaaaggctattgacgacact

SEQ ID NO: 595924 - DNA, 33 bp, Homo sapien
tgcttcttcatggaaacggctattgacgacact

SEQ ID NO: 595925 - DNA, 33 bp, Homo sapien
ggccatgtgccaattacgaaaccaccctcctaa

SEQ ID NO: 595926 - DNA, 33 bp, Homo sapien
ggccatgtgccaattaggaaaccaccctcctaa

SEQ ID NO: 595927 - DNA, 33 bp, Homo sapien
agccccttcacgcttgaaagtggacgtccctcc

SEQ ID NO: 595928 - DNA, 33 bp, Homo sapien
agccccttcacgcttgcaagtggacgtccctcc

SEQ ID NO: 595929 - DNA, 33 bp, Homo sapien
taggacgaatgccggcccattgttcactgtgaa

SEQ ID NO: 595930 - DNA, 33 bp, Homo sapien
taggacgaatgccggctcattgttcactgtgaa

SEQ ID NO: 595931 - DNA, 33 bp, Homo sapien
tgaattcgactttgtaaggacagcgtcttttcc

SEQ ID NO: 595932 - DNA, 33 bp, Homo sapien
tgaattcgactttgtacggacagcgtcttttcc

SEQ ID NO: 595933 - DNA, 33 bp, Homo sapien
actttcaatcctcgaacgcacaacgctataaaa

SEQ ID NO: 595934 - DNA, 33 bp, Homo sapien
actttcaatcctcgaatgcacaacgctataaaa

SEQ ID NO: 595935 - DNA, 33 bp, Homo sapien
gagactgaaaatacagaaataactgcagacaga

SEQ ID NO: 595936 - DNA, 33 bp, Homo sapien
gagactgaaaatacagcaataactgcagacaga

SEQ ID NO: 595937 - DNA, 33 bp, Homo sapien
ttgctctctctaccccaactgtgcaagcaccca

SEQ ID NO: 595938 - DNA, 33 bp, Homo sapien
ttgctctctctaccccgactgtgcaagcaccca

SEQ ID NO: 595939 - DNA, 33 bp, Homo sapien
tctgaataacaagagaagaatagagccttagga

SEQ ID NO: 595940 - DNA, 33 bp, Homo sapien
tctgaataacaagagacgaatagagccttagga

SEQ ID NO: 595941 - DNA, 33 bp, Homo sapien
tctaggctgctccacgcatatgagctgcagcca

SEQ ID NO: 595942 - DNA, 33 bp, Homo sapien
tctaggctgctccacgtatatgagctgcagcca

SEQ ID NO: 595943 - DNA, 33 bp, Homo sapien
gcatgcgccgattcagacacccgcgcgcgccga

SEQ ID NO: 595944 - DNA, 33 bp, Homo sapien
gcatgcgccgattcagccacccgcgcgcgccga

SEQ ID NO: 595945 - DNA, 33 bp, Homo sapien
aggcttcatcacaatgcaccccaaaccagagca

SEQ ID NO: 595946 - DNA, 33 bp, Homo sapien
aggcttcatcacaatggaccccaaaccagagca

SEQ ID NO: 595947 - DNA, 33 bp, Homo sapien
ttacaccttgacgcaactgactatggaaattaa

SEQ ID NO: 595948 - DNA, 33 bp, Homo sapien
ttacaccttgacgcaattgactatggaaattaa

SEQ ID NO: 595949 - DNA, 33 bp, Homo sapien
aagacaactggacgcagagtctgaatctgttac

SEQ ID NO: 595950 - DNA, 33 bp, Homo sapien
aagacaactggacgcatagtctgaatctgttac

SEQ ID NO: 595951 - DNA, 33 bp, Homo sapien
cagtgtctgaaaccacagtcctgagaaggacca

SEQ ID NO: 595952 - DNA, 33 bp, Homo sapien
cagtgtctgaaaccactgtcctgagaaggacca

SEQ ID NO: 595953 - DNA, 33 bp, Homo sapien
aagtctgccctcttgacactgagctcccacata

SEQ ID NO: 595954 - DNA, 33 bp, Homo sapien
aagtctgccctcttgatactgagctcccacata

SEQ ID NO: 595955 - DNA, 33 bp, Homo sapien
atggaaagtaagtcacagcatatagggttagat

SEQ ID NO: 595956 - DNA, 33 bp, Homo sapien
atggaaagtaagtcacggcatatagggttagat

SEQ ID NO: 595957 - DNA, 33 bp, Homo sapien
gcttttaaaggtctcaataggaaacacttgtca

SEQ ID NO: 595958 - DNA, 33 bp, Homo sapien
gcttttaaaggtctcagtaggaaacacttgtca

SEQ ID NO: 595959 - DNA, 33 bp, Homo sapien
cttcctttcactgaataagctgcgtcactcata

SEQ ID NO: 595960 - DNA, 33 bp, Homo sapien
cttcctttcactgaatgagctgcgtcactcata

SEQ ID NO: 595961 - DNA, 33 bp, Homo sapien
gcacctccagggcccccagaaaccgagtttcgg

SEQ ID NO: 595962 - DNA, 33 bp, Homo sapien
gcacctccagggccccgagaaaccgagtttcgg

SEQ ID NO: 595963 - DNA, 33 bp, Homo sapien
atgagctcatcccagaataggctgatctctggc

SEQ ID NO: 595964 - DNA, 33 bp, Homo sapien
atgagctcatcccagagtaggctgatctctggc

SEQ ID NO: 595965 - DNA, 33 bp, Homo sapien
tcaggcaggccagagacgacccgtttcagccac

SEQ ID NO: 595966 - DNA, 33 bp, Homo sapien
tcaggcaggccagagaggacccgtttcagccac

SEQ ID NO: 595967 - DNA, 33 bp, Homo sapien
atataacggcagagaaaaggaaaaactcgtgaa

SEQ ID NO: 595968 - DNA, 33 bp, Homo sapien
atataacggcagagaagaggaaaaactcgtgaa

SEQ ID NO: 595969 - DNA, 33 bp, Homo sapien
agtaaatgactgaatacggaagctgtgtgcagg

SEQ ID NO: 595970 - DNA, 33 bp, Homo sapien
agtaaatgactgaatatggaagctgtgtgcagg

SEQ ID NO: 595971 - DNA, 33 bp, Homo sapien
gtatgttttgcagatacggtctcccactccatg

SEQ ID NO: 595972 - DNA, 33 bp, Homo sapien
gtatgttttgcagatatggtctcccactccatg

SEQ ID NO: 595973 - DNA, 33 bp, Homo sapien
tttccccaatccctggccaaatttagcttatct

SEQ ID NO: 595974 - DNA, 33 bp, Homo sapien
tttccccaatccctggtcaaatttagcttatct

SEQ ID NO: 595975 - DNA, 33 bp, Homo sapien
ccatagcttctgtgccagcagactgtgcctggc

SEQ ID NO: 595976 - DNA, 33 bp, Homo sapien
ccatagcttctgtgccggcagactgtgcctggc

SEQ ID NO: 595977 - DNA, 33 bp, Homo sapien
tatttttcctgttccacgaagaggactttttgt

SEQ ID NO: 595978 - DNA, 33 bp, Homo sapien
tatttttcctgttccatgaagaggactttttgt

SEQ ID NO: 595979 - DNA, 33 bp, Homo sapien
gctactgggaggagtcactgagagcttcgttac

SEQ ID NO: 595980 - DNA, 33 bp, Homo sapien
gctactgggaggagtcgctgagagcttcgttac

SEQ ID NO: 595981 - DNA, 33 bp, Homo sapien
gactgggcactctgcaaataacgccgctcctcg

SEQ ID NO: 595982 - DNA, 33 bp, Homo sapien
gactgggcactctgcacataacgccgctcctcg

SEQ ID NO: 595983 - DNA, 33 bp, Homo sapien
ctgcctgagtgggcaacagtacagcctcacaga

SEQ ID NO: 595984 - DNA, 33 bp, Homo sapien
ctgcctgagtgggcaagagtacagcctcacaga

SEQ ID NO: 595985 - DNA, 33 bp, Homo sapien
aaatccatttttgtatcataactgtgctattct

SEQ ID NO: 595986 - DNA, 33 bp, Homo sapien
aaatccatttttgtattataactgtgctattct

SEQ ID NO: 595987 - DNA, 33 bp, Homo sapien
cctagtgttgcctctagagagttccgctgtgcc

SEQ ID NO: 595988 - DNA, 33 bp, Homo sapien
cctagtgttgcctctatagagttccgctgtgcc

SEQ ID NO: 595989 - DNA, 33 bp, Homo sapien
ggtggatgcgtgggctcacgtgcacaggaaggt

SEQ ID NO: 595990 - DNA, 33 bp, Homo sapien
ggtggatgcgtgggcttacgtgcacaggaaggt

SEQ ID NO: 595991 - DNA, 33 bp, Homo sapien
ccagctttctccttgcacctgacttgggctttt

SEQ ID NO: 595992 - DNA, 33 bp, Homo sapien
ccagctttctccttgcgcctgacttgggctttt

SEQ ID NO: 595993 - DNA, 33 bp, Homo sapien
actccagagtagctccagcacgctggccccatg

SEQ ID NO: 595994 - DNA, 33 bp, Homo sapien
actccagagtagctccggcacgctggccccatg

SEQ ID NO: 595995 - DNA, 33 bp, Homo sapien
gatcctgacctggtacaagcccggaacattctt

SEQ ID NO: 595996 - DNA, 33 bp, Homo sapien
gatcctgacctggtacgagcccggaacattctt

SEQ ID NO: 595997 - DNA, 33 bp, Homo sapien
gttatgtcaggttaagccattttagcattctta

SEQ ID NO: 595998 - DNA, 33 bp, Homo sapien
gttatgtcaggttaaggcattttagcattctta

SEQ ID NO: 595999 - DNA, 33 bp, Homo sapien
gattttgtggctgttacgacactcttgagaccc

SEQ ID NO: 596000 - DNA, 33 bp, Homo sapien
gattttgtggctgttaggacactcttgagaccc

SEQ ID NO: 596001 - DNA, 33 bp, Homo sapien
gacatgaagcagagaaactccaaaaacctagct

SEQ ID NO: 596002 - DNA, 33 bp, Homo sapien
gacatgaagcagagaagctccaaaaacctagct

SEQ ID NO: 596003 - DNA, 33 bp, Homo sapien
agtactggtaagttctaaaattcatcaggataa

SEQ ID NO: 596004 - DNA, 33 bp, Homo sapien
agtactggtaagttctgaaattcatcaggataa

SEQ ID NO: 596005 - DNA, 33 bp, Homo sapien
agccagagccatagaacaaggcctctttgacaa

SEQ ID NO: 596006 - DNA, 33 bp, Homo sapien
agccagagccatagaagaaggcctctttgacaa

SEQ ID NO: 596007 - DNA, 33 bp, Homo sapien
gctgtgttaaggtacactgatagacctgcttca

SEQ ID NO: 596008 - DNA, 33 bp, Homo sapien
gctgtgttaaggtacattgatagacctgcttca

SEQ ID NO: 596009 - DNA, 33 bp, Homo sapien
cacactggctaatccacggtggtctgttcctcc

SEQ ID NO: 596010 - DNA, 33 bp, Homo sapien
cacactggctaatccatggtggtctgttcctcc

SEQ ID NO: 596011 - DNA, 33 bp, Homo sapien
tgcagggcctagaacaacaggtgctacaggggc

SEQ ID NO: 596012 - DNA, 33 bp, Homo sapien
tgcagggcctagaacagcaggtgctacaggggc

SEQ ID NO: 596013 - DNA, 33 bp, Homo sapien
tgtgctggatggtaaaatctaaaaaacagaaaa

SEQ ID NO: 596014 - DNA, 33 bp, Homo sapien
tgtgctggatggtaaagtctaaaaaacagaaaa

SEQ ID NO: 596015 - DNA, 33 bp, Homo sapien
gcagcctatctactaacggtaaaaatgcagagt

SEQ ID NO: 596016 - DNA, 33 bp, Homo sapien
gcagcctatctactaatggtaaaaatgcagagt

SEQ ID NO: 596017 - DNA, 33 bp, Homo sapien
actttccgttttgtgacgagcagtttagttgct

SEQ ID NO: 596018 - DNA, 33 bp, Homo sapien
actttccgttttgtgatgagcagtttagttgct

SEQ ID NO: 596019 - DNA, 33 bp, Homo sapien
ggtgtcgctatagggcactatttcctggtcctt

SEQ ID NO: 596020 - DNA, 33 bp, Homo sapien
ggtgtcgctatagggcgctatttcctggtcctt

SEQ ID NO: 596021 - DNA, 33 bp, Homo sapien
gcagatgcctggaaaacagtccacaaccgccat

SEQ ID NO: 596022 - DNA, 33 bp, Homo sapien
gcagatgcctggaaaatagtccacaaccgccat

SEQ ID NO: 596023 - DNA, 33 bp, Homo sapien
taacacagacctgctgaatcagcttctttctga

SEQ ID NO: 596024 - DNA, 33 bp, Homo sapien
taacacagacctgctggatcagcttctttctga

SEQ ID NO: 596025 - DNA, 33 bp, Homo sapien
gcttctttctgagctgacagaagtacagaagtt

SEQ ID NO: 596026 - DNA, 33 bp, Homo sapien
gcttctttctgagctgccagaagtacagaagtt

SEQ ID NO: 596027 - DNA, 33 bp, Homo sapien
tgtgcagatgtaagcccggaatcttgagcgggg

SEQ ID NO: 596028 - DNA, 33 bp, Homo sapien
tgtgcagatgtaagcctggaatcttgagcgggg

SEQ ID NO: 596029 - DNA, 33 bp, Homo sapien
ggaagggaggctgaaaagacgcgaccaggttcc

SEQ ID NO: 596030 - DNA, 33 bp, Homo sapien
ggaagggaggctgaaatgacgcgaccaggttcc

SEQ ID NO: 596031 - DNA, 33 bp, Homo sapien
gggcctgttatttatacattgctttaagatgtc

SEQ ID NO: 596032 - DNA, 33 bp, Homo sapien
gggcctgttatttatagattgctttaagatgtc

SEQ ID NO: 596033 - DNA, 33 bp, Homo sapien
tggacacgtgccagcaatcacgggctagcagga

SEQ ID NO: 596034 - DNA, 33 bp, Homo sapien
tggacacgtgccagcattcacgggctagcagga

SEQ ID NO: 596035 - DNA, 33 bp, Homo sapien
aagcaagccggctaaaactacaagaactgaatt

SEQ ID NO: 596036 - DNA, 33 bp, Homo sapien
aagcaagccggctaaagctacaagaactgaatt

SEQ ID NO: 596037 - DNA, 33 bp, Homo sapien
ggaacgtaaagagatcaccgagaaattcagtgc

SEQ ID NO: 596038 - DNA, 33 bp, Homo sapien
ggaacgtaaagagatcgccgagaaattcagtgc

SEQ ID NO: 596039 - DNA, 33 bp, Homo sapien
acacgatttcagaaaacgaacacctccttgtgc

SEQ ID NO: 596040 - DNA, 33 bp, Homo sapien
acacgatttcagaaaatgaacacctccttgtgc

SEQ ID NO: 596041 - DNA, 33 bp, Homo sapien
cagaaacgggttcgcacggcacaacactgaagt

SEQ ID NO: 596042 - DNA, 33 bp, Homo sapien
cagaaacgggttcgcatggcacaacactgaagt

SEQ ID NO: 596043 - DNA, 33 bp, Homo sapien
tcctgagggtccagaaatacagttagaggtgac

SEQ ID NO: 596044 - DNA, 33 bp, Homo sapien
tcctgagggtccagaagtacagttagaggtgac

SEQ ID NO: 596045 - DNA, 33 bp, Homo sapien
tgtccagataacacagacgatgggcttgtgacc

SEQ ID NO: 596046 - DNA, 33 bp, Homo sapien
tgtccagataacacaggcgatgggcttgtgacc

SEQ ID NO: 596047 - DNA, 33 bp, Homo sapien
gctggttcagagcgtcaatttctaaatttctct

SEQ ID NO: 596048 - DNA, 33 bp, Homo sapien
gctggttcagagcgtcgatttctaaatttctct

SEQ ID NO: 596049 - DNA, 33 bp, Homo sapien
acaagaataaatctgaagcctttcaaagtaaaa

SEQ ID NO: 596050 - DNA, 33 bp, Homo sapien
acaagaataaatctgaggcctttcaaagtaaaa

SEQ ID NO: 596051 - DNA, 33 bp, Homo sapien
ccctggtgagaaagacacacgtcaagtaagaaa

SEQ ID NO: 596052 - DNA, 33 bp, Homo sapien
ccctggtgagaaagacgcacgtcaagtaagaaa

SEQ ID NO: 596053 - DNA, 33 bp, Homo sapien
ggaggccctgaggctcaaactgctggtcctgtg

SEQ ID NO: 596054 - DNA, 33 bp, Homo sapien
ggaggccctgaggctcgaactgctggtcctgtg

SEQ ID NO: 596055 - DNA, 33 bp, Homo sapien
agcatcttcgcttgccagaccggagcagcctgc

SEQ ID NO: 596056 - DNA, 33 bp, Homo sapien
agcatcttcgcttgccggaccggagcagcctgc

SEQ ID NO: 596057 - DNA, 33 bp, Homo sapien
acacaaagacagatccagcgggaagaggcccaa

SEQ ID NO: 596058 - DNA, 33 bp, Homo sapien
acacaaagacagatccggcgggaagaggcccaa

SEQ ID NO: 596059 - DNA, 33 bp, Homo sapien
ttgtaatgagggatctaaaggaaacggccccag

SEQ ID NO: 596060 - DNA, 33 bp, Homo sapien
ttgtaatgagggatctgaaggaaacggccccag

SEQ ID NO: 596061 - DNA, 33 bp, Homo sapien
actgtctagtctaagcaagtatgagtgaaacat

SEQ ID NO: 596062 - DNA, 33 bp, Homo sapien
actgtctagtctaagcgagtatgagtgaaacat

SEQ ID NO: 596063 - DNA, 33 bp, Homo sapien
ctgcttctaccaggtacgacaatggtggtattt

SEQ ID NO: 596064 - DNA, 33 bp, Homo sapien
ctgcttctaccaggtatgacaatggtggtattt

SEQ ID NO: 596065 - DNA, 33 bp, Homo sapien
actggtaatcccaagaatagtactttgcatcat

SEQ ID NO: 596066 - DNA, 33 bp, Homo sapien
actggtaatcccaagagtagtactttgcatcat

SEQ ID NO: 596067 - DNA, 33 bp, Homo sapien
aaagagccttaacaaacgcagtacagtagatcc

SEQ ID NO: 596068 - DNA, 33 bp, Homo sapien
aaagagccttaacaaatgcagtacagtagatcc

SEQ ID NO: 596069 - DNA, 33 bp, Homo sapien
tgttttcacttattcaataattattcagtgtcc

SEQ ID NO: 596070 - DNA, 33 bp, Homo sapien
tgttttcacttattcagtaattattcagtgtcc

SEQ ID NO: 596071 - DNA, 33 bp, Homo sapien
aagccagagttaaagcaacttgcaaaaatgtaa

SEQ ID NO: 596072 - DNA, 33 bp, Homo sapien
aagccagagttaaagcgacttgcaaaaatgtaa

SEQ ID NO: 596073 - DNA, 33 bp, Homo sapien
ttcccagaacctagaccatgaattccttttcaa

SEQ ID NO: 596074 - DNA, 33 bp, Homo sapien
ttcccagaacctagactatgaattccttttcaa

SEQ ID NO: 596075 - DNA, 33 bp, Homo sapien
tccacaactttgttcaaaggatgcactgtacat

SEQ ID NO: 596076 - DNA, 33 bp, Homo sapien
tccacaactttgttcagaggatgcactgtacat

SEQ ID NO: 596077 - DNA, 33 bp, Homo sapien
ttctcctttcagttgcaaggctagtctaagttt

SEQ ID NO: 596078 - DNA, 33 bp, Homo sapien
ttctcctttcagttgcgaggctagtctaagttt

SEQ ID NO: 596079 - DNA, 33 bp, Homo sapien
caagtgatatttaaaaacattcttccattaaat

SEQ ID NO: 596080 - DNA, 33 bp, Homo sapien
caagtgatatttaaaagcattcttccattaaat

SEQ ID NO: 596081 - DNA, 33 bp, Homo sapien
atgcattcaggacatacaggtagataacaatgt

SEQ ID NO: 596082 - DNA, 33 bp, Homo sapien
atgcattcaggacatataggtagataacaatgt

SEQ ID NO: 596083 - DNA, 33 bp, Homo sapien
agctctggctcaatctaactaactgccgtgtgg

SEQ ID NO: 596084 - DNA, 33 bp, Homo sapien
agctctggctcaatctgactaactgccgtgtgg

SEQ ID NO: 596085 - DNA, 33 bp, Homo sapien
tttgggatgaatctcaagtcttctagtcatagc

SEQ ID NO: 596086 - DNA, 33 bp, Homo sapien
tttgggatgaatctcacgtcttctagtcatagc

SEQ ID NO: 596087 - DNA, 33 bp, Homo sapien
aacaaaaggtgaggaaaatctgtgaagagtaat

SEQ ID NO: 596088 - DNA, 33 bp, Homo sapien
aacaaaaggtgaggaatatctgtgaagagtaat

SEQ ID NO: 596089 - DNA, 33 bp, Homo sapien
taccaagtctcggttacgtgtttgttagcagca

SEQ ID NO: 596090 - DNA, 33 bp, Homo sapien
taccaagtctcggttatgtgtttgttagcagca

SEQ ID NO: 596091 - DNA, 33 bp, Homo sapien
tgttatatatgtggtcaatcgttgcccgaaaca

SEQ ID NO: 596092 - DNA, 33 bp, Homo sapien
tgttatatatgtggtccatcgttgcccgaaaca

SEQ ID NO: 596093 - DNA, 33 bp, Homo sapien
aactttttaaggtttacaaggcagtaattttca

SEQ ID NO: 596094 - DNA, 33 bp, Homo sapien
aactttttaaggtttagaaggcagtaattttca

SEQ ID NO: 596095 - DNA, 33 bp, Homo sapien
gggtgaacaaggatgacgtacttccaaggggta

SEQ ID NO: 596096 - DNA, 33 bp, Homo sapien
gggtgaacaaggatgatgtacttccaaggggta

SEQ ID NO: 596097 - DNA, 33 bp, Homo sapien
ttcgggtcaattaaaaatacacagacacaaagc

SEQ ID NO: 596098 - DNA, 33 bp, Homo sapien
ttcgggtcaattaaaagtacacagacacaaagc

SEQ ID NO: 596099 - DNA, 33 bp, Homo sapien
aaatgcaccatcatgaaaacacttcttaatgta

SEQ ID NO: 596100 - DNA, 33 bp, Homo sapien
aaatgcaccatcatgacaacacttcttaatgta

SEQ ID NO: 596101 - DNA, 33 bp, Homo sapien
tctctgcttgcagagacgggtctattcctgaaa

SEQ ID NO: 596102 - DNA, 33 bp, Homo sapien
tctctgcttgcagagatgggtctattcctgaaa

SEQ ID NO: 596103 - DNA, 33 bp, Homo sapien
tactatattgcagatcaaaacgccctttgcatc

SEQ ID NO: 596104 - DNA, 33 bp, Homo sapien
tactatattgcagatcgaaacgccctttgcatc

SEQ ID NO: 596105 - DNA, 33 bp, Homo sapien
tgaacatctttttatgcacctatttgccatctg

SEQ ID NO: 596106 - DNA, 33 bp, Homo sapien
tgaacatctttttatgtacctatttgccatctg

SEQ ID NO: 596107 - DNA, 33 bp, Homo sapien
ccacaggcagtgagtacgtgaggggttccagtt

SEQ ID NO: 596108 - DNA, 33 bp, Homo sapien
ccacaggcagtgagtatgtgaggggttccagtt

SEQ ID NO: 596109 - DNA, 33 bp, Homo sapien
tgaggggttccagttaactcttttctcaccagc

SEQ ID NO: 596110 - DNA, 33 bp, Homo sapien
tgaggggttccagttatctcttttctcaccagc

SEQ ID NO: 596111 - DNA, 33 bp, Homo sapien
tgtattccagcaacagcataatgcttaagtaaa

SEQ ID NO: 596112 - DNA, 33 bp, Homo sapien
tgtattccagcaacagtataatgcttaagtaaa

SEQ ID NO: 596113 - DNA, 33 bp, Homo sapien
ccagttaggagagaatgagatgagagagaaacc

SEQ ID NO: 596114 - DNA, 33 bp, Homo sapien
ccagttaggagagaattagatgagagagaaacc

SEQ ID NO: 596115 - DNA, 33 bp, Homo sapien
cctacctggcatgacccggattaatgggcaaag

SEQ ID NO: 596116 - DNA, 33 bp, Homo sapien
cctacctggcatgacctggattaatgggcaaag

SEQ ID NO: 596117 - DNA, 33 bp, Homo sapien
ttagaccgttcatcgacaggactgcttttcttg

SEQ ID NO: 596118 - DNA, 33 bp, Homo sapien
ttagaccgttcatcgataggactgcttttcttg

SEQ ID NO: 596119 - DNA, 33 bp, Homo sapien
agatggggcaaggtcacgaaaagccacaaagca

SEQ ID NO: 596120 - DNA, 33 bp, Homo sapien
agatggggcaaggtcatgaaaagccacaaagca

SEQ ID NO: 596121 - DNA, 33 bp, Homo sapien
gcgctgcggacccccacgccgggagtagattcc

SEQ ID NO: 596122 - DNA, 33 bp, Homo sapien
gcgctgcggacccccatgccgggagtagattcc

SEQ ID NO: 596123 - DNA, 33 bp, Homo sapien
gacaaggagcttgggaatagaagaagcaaaatt

SEQ ID NO: 596124 - DNA, 33 bp, Homo sapien
gacaaggagcttgggagtagaagaagcaaaatt

SEQ ID NO: 596125 - DNA, 33 bp, Homo sapien
gctttctggaagggacactgcacccgtgtaatg

SEQ ID NO: 596126 - DNA, 33 bp, Homo sapien
gctttctggaagggacgctgcacccgtgtaatg

SEQ ID NO: 596127 - DNA, 33 bp, Homo sapien
ctagccatgcaaagctaagatgccatccttgag

SEQ ID NO: 596128 - DNA, 33 bp, Homo sapien
ctagccatgcaaagctgagatgccatccttgag

SEQ ID NO: 596129 - DNA, 33 bp, Homo sapien
gcacgcaccagcatacagatgagctcaaagatc

SEQ ID NO: 596130 - DNA, 33 bp, Homo sapien
gcacgcaccagcatacggatgagctcaaagatc

SEQ ID NO: 596131 - DNA, 33 bp, Homo sapien
gaagcacagaggcaccaacaaggtcaaggtcaa

SEQ ID NO: 596132 - DNA, 33 bp, Homo sapien
gaagcacagaggcaccgacaaggtcaaggtcaa

SEQ ID NO: 596133 - DNA, 33 bp, Homo sapien
tcagtcctgcaggccaacttctgagggacgtta

SEQ ID NO: 596134 - DNA, 33 bp, Homo sapien
tcagtcctgcaggccagcttctgagggacgtta

SEQ ID NO: 596135 - DNA, 33 bp, Homo sapien
tgcagtcccgaatgtgcagattgatctgttgtc

SEQ ID NO: 596136 - DNA, 33 bp, Homo sapien
tgcagtcccgaatgtggagattgatctgttgtc

SEQ ID NO: 596137 - DNA, 33 bp, Homo sapien
gcccccacaatgccaccgggtactacaccgttt

SEQ ID NO: 596138 - DNA, 33 bp, Homo sapien
gcccccacaatgccactgggtactacaccgttt

SEQ ID NO: 596139 - DNA, 33 bp, Homo sapien
ccttgctctgctccaaacgatgcacagcactca

SEQ ID NO: 596140 - DNA, 33 bp, Homo sapien
ccttgctctgctccaaccgatgcacagcactca

SEQ ID NO: 596141 - DNA, 33 bp, Homo sapien
gggtttatgttacatacgaatgctgctgtttac

SEQ ID NO: 596142 - DNA, 33 bp, Homo sapien
gggtttatgttacatatgaatgctgctgtttac

SEQ ID NO: 596143 - DNA, 33 bp, Homo sapien
aacaacgctgatgtacagcaatacagcaaatac

SEQ ID NO: 596144 - DNA, 33 bp, Homo sapien
aacaacgctgatgtacggcaatacagcaaatac

SEQ ID NO: 596145 - DNA, 33 bp, Homo sapien
aatacaagaaatgaaaaagatataaggcatata

SEQ ID NO: 596146 - DNA, 33 bp, Homo sapien
aatacaagaaatgaaagagatataaggcatata

SEQ ID NO: 596147 - DNA, 33 bp, Homo sapien
attgttcgatgttttcaattcaatgttttgtac

SEQ ID NO: 596148 - DNA, 33 bp, Homo sapien
attgttcgatgttttccattcaatgttttgtac

SEQ ID NO: 596149 - DNA, 33 bp, Homo sapien
tacagccatgtccaccagcaacctggcaggcaa

SEQ ID NO: 596150 - DNA, 33 bp, Homo sapien
tacagccatgtccaccggcaacctggcaggcaa

SEQ ID NO: 596151 - DNA, 33 bp, Homo sapien
tgtagaggatggtccgcagcgtccagagatggt

SEQ ID NO: 596152 - DNA, 33 bp, Homo sapien
tgtagaggatggtccggagcgtccagagatggt

SEQ ID NO: 596153 - DNA, 33 bp, Homo sapien
caggttcatgaaaacaaacttttcacacctggt

SEQ ID NO: 596154 - DNA, 33 bp, Homo sapien
caggttcatgaaaacagacttttcacacctggt

SEQ ID NO: 596155 - DNA, 33 bp, Homo sapien
acggttggcatttacaacctggaactaacggca

SEQ ID NO: 596156 - DNA, 33 bp, Homo sapien
acggttggcatttacagcctggaactaacggca

SEQ ID NO: 596157 - DNA, 33 bp, Homo sapien
ccaacccatctctcggccatcacagctgtggtt

SEQ ID NO: 596158 - DNA, 33 bp, Homo sapien
ccaacccatctctcgggcatcacagctgtggtt

SEQ ID NO: 596159 - DNA, 33 bp, Homo sapien
cgctctttttattgaacgcaggccctcgcggtg

SEQ ID NO: 596160 - DNA, 33 bp, Homo sapien
cgctctttttattgaatgcaggccctcgcggtg

SEQ ID NO: 596161 - DNA, 33 bp, Homo sapien
tttcctgtaacagagacggtcatgcaagaaagc

SEQ ID NO: 596162 - DNA, 33 bp, Homo sapien
tttcctgtaacagagatggtcatgcaagaaagc

SEQ ID NO: 596163 - DNA, 33 bp, Homo sapien
acattaaattccactgaaagcctttgagacagg

SEQ ID NO: 596164 - DNA, 33 bp, Homo sapien
acattaaattccactggaagcctttgagacagg

SEQ ID NO: 596165 - DNA, 33 bp, Homo sapien
taacaaatgtaggccacgttcccaagagttact

SEQ ID NO: 596166 - DNA, 33 bp, Homo sapien
taacaaatgtaggccatgttcccaagagttact

SEQ ID NO: 596167 - DNA, 33 bp, Homo sapien
ggcagaactgtcaggaaaaagtttcatgacacc

SEQ ID NO: 596168 - DNA, 33 bp, Homo sapien
ggcagaactgtcaggagaaagtttcatgacacc

SEQ ID NO: 596169 - DNA, 33 bp, Homo sapien
ccaagccttcctatcccggagaattgttactct

SEQ ID NO: 596170 - DNA, 33 bp, Homo sapien
ccaagccttcctatcctggagaattgttactct

SEQ ID NO: 596171 - DNA, 33 bp, Homo sapien
acagacccctgtcacgccctcagttaagccagt

SEQ ID NO: 596172 - DNA, 33 bp, Homo sapien
acagacccctgtcacgtcctcagttaagccagt

SEQ ID NO: 596173 - DNA, 33 bp, Homo sapien
tttgggaccttgatgcacctactgtacacaaga

SEQ ID NO: 596174 - DNA, 33 bp, Homo sapien
tttgggaccttgatgctcctactgtacacaaga

SEQ ID NO: 596175 - DNA, 33 bp, Homo sapien
ctccatctcctcttaaaatccatctgtacactg

SEQ ID NO: 596176 - DNA, 33 bp, Homo sapien
ctccatctcctcttaagatccatctgtacactg

SEQ ID NO: 596177 - DNA, 33 bp, Homo sapien
tgaagaaatccgaactcaaggagctcatcaaca

SEQ ID NO: 596178 - DNA, 33 bp, Homo sapien
tgaagaaatccgaactgaaggagctcatcaaca

SEQ ID NO: 596179 - DNA, 33 bp, Homo sapien
ttcagaggctccagtcaagcgagttgaggggac

SEQ ID NO: 596180 - DNA, 33 bp, Homo sapien
ttcagaggctccagtcgagcgagttgaggggac

SEQ ID NO: 596181 - DNA, 33 bp, Homo sapien
gcagaaggaacacaccaataatcagaatgcctt

SEQ ID NO: 596182 - DNA, 33 bp, Homo sapien
gcagaaggaacacaccgataatcagaatgcctt

SEQ ID NO: 596183 - DNA, 33 bp, Homo sapien
catcatttccatgtgacggtaccctgctgttac

SEQ ID NO: 596184 - DNA, 33 bp, Homo sapien
catcatttccatgtgatggtaccctgctgttac

SEQ ID NO: 596185 - DNA, 33 bp, Homo sapien
ggacaaagggacaaaacgggggcaacaggaaac

SEQ ID NO: 596186 - DNA, 33 bp, Homo sapien
ggacaaagggacaaaatgggggcaacaggaaac

SEQ ID NO: 596187 - DNA, 33 bp, Homo sapien
aagagaagtctcatcaacactctctatgaaatc

SEQ ID NO: 596188 - DNA, 33 bp, Homo sapien
aagagaagtctcatcaccactctctatgaaatc

SEQ ID NO: 596189 - DNA, 33 bp, Homo sapien
aaataaacaattgtaacgtgctggatctttgtt

SEQ ID NO: 596190 - DNA, 33 bp, Homo sapien
aaataaacaattgtaatgtgctggatctttgtt

SEQ ID NO: 596191 - DNA, 33 bp, Homo sapien
cttgtttatgatcagcacctcaagagtcaggtc

SEQ ID NO: 596192 - DNA, 33 bp, Homo sapien
cttgtttatgatcagcgcctcaagagtcaggtc

SEQ ID NO: 596193 - DNA, 33 bp, Homo sapien
ccatagcaggaattccacttgattcttcagcca

SEQ ID NO: 596194 - DNA, 33 bp, Homo sapien
ccatagcaggaattccgcttgattcttcagcca

SEQ ID NO: 596195 - DNA, 33 bp, Homo sapien
tcaccttcaggaagcaaagctgatgaaggacaa

SEQ ID NO: 596196 - DNA, 33 bp, Homo sapien
tcaccttcaggaagcagagctgatgaaggacaa

SEQ ID NO: 596197 - DNA, 33 bp, Homo sapien
cggggatctgtaaaaaccctgtgcctaacaggt

SEQ ID NO: 596198 - DNA, 33 bp, Homo sapien
cggggatctgtaaaaatcctgtgcctaacaggt

SEQ ID NO: 596199 - DNA, 33 bp, Homo sapien
acccagtacctagaagaaaccactgttatcact

SEQ ID NO: 596200 - DNA, 33 bp, Homo sapien
acccagtacctagaaggaaccactgttatcact

SEQ ID NO: 596201 - DNA, 33 bp, Homo sapien
aaagaaattaggctccaaaatcaaggaaaatga

SEQ ID NO: 596202 - DNA, 33 bp, Homo sapien
aaagaaattaggctcccaaatcaaggaaaatga

SEQ ID NO: 596203 - DNA, 33 bp, Homo sapien
gatatgcctcattttacgtctccacagaactta

SEQ ID NO: 596204 - DNA, 33 bp, Homo sapien
gatatgcctcattttatgtctccacagaactta

SEQ ID NO: 596205 - DNA, 33 bp, Homo sapien
ctcctgaggccccacccactatacatcatccct

SEQ ID NO: 596206 - DNA, 33 bp, Homo sapien
ctcctgaggccccacctactatacatcatccct

SEQ ID NO: 596207 - DNA, 33 bp, Homo sapien
ggattgtaggaccaacaccaaatcagagtgcag

SEQ ID NO: 596208 - DNA, 33 bp, Homo sapien
ggattgtaggaccaacgccaaatcagagtgcag

SEQ ID NO: 596209 - DNA, 33 bp, Homo sapien
tggagattcacactccacaagccataaaatctc

SEQ ID NO: 596210 - DNA, 33 bp, Homo sapien
tggagattcacactcctcaagccataaaatctc

SEQ ID NO: 596211 - DNA, 33 bp, Homo sapien
caagttgcttactttcacttcttctctgttaga

SEQ ID NO: 596212 - DNA, 33 bp, Homo sapien
caagttgcttactttctcttcttctctgttaga

SEQ ID NO: 596213 - DNA, 33 bp, Homo sapien
cataaattaagacgaaatccgaggagttatggt

SEQ ID NO: 596214 - DNA, 33 bp, Homo sapien
cataaattaagacgaagtccgaggagttatggt

SEQ ID NO: 596215 - DNA, 33 bp, Homo sapien
attttttaactgagacagaaatcattttataca

SEQ ID NO: 596216 - DNA, 33 bp, Homo sapien
attttttaactgagactgaaatcattttataca

SEQ ID NO: 596217 - DNA, 33 bp, Homo sapien
ttcactggataaaaaagtctaggttgacagatt

SEQ ID NO: 596218 - DNA, 33 bp, Homo sapien
ttcactggataaaaaattctaggttgacagatt

SEQ ID NO: 596219 - DNA, 33 bp, Homo sapien
aatatattaaaaatcagacgtaattaccttcag

SEQ ID NO: 596220 - DNA, 33 bp, Homo sapien
aatatattaaaaatcatacgtaattaccttcag

SEQ ID NO: 596221 - DNA, 33 bp, Homo sapien
attatctcagcaagagcaatgcggtaagagagc

SEQ ID NO: 596222 - DNA, 33 bp, Homo sapien
attatctcagcaagaggaatgcggtaagagagc

SEQ ID NO: 596223 - DNA, 33 bp, Homo sapien
catttttgaagatctcaaatttggcctctcatt

SEQ ID NO: 596224 - DNA, 33 bp, Homo sapien
catttttgaagatctccaatttggcctctcatt

SEQ ID NO: 596225 - DNA, 33 bp, Homo sapien
cctttgaaggaaagcagtcactcttgaggagca

SEQ ID NO: 596226 - DNA, 33 bp, Homo sapien
cctttgaaggaaagcattcactcttgaggagca

SEQ ID NO: 596227 - DNA, 33 bp, Homo sapien
cattcaaaactgaccaaggaatgccactagcta

SEQ ID NO: 596228 - DNA, 33 bp, Homo sapien
cattcaaaactgaccacggaatgccactagcta

SEQ ID NO: 596229 - DNA, 33 bp, Homo sapien
ctcaatgatttaaacacataaggtgtgcacctg

SEQ ID NO: 596230 - DNA, 33 bp, Homo sapien
ctcaatgatttaaacatataaggtgtgcacctg

SEQ ID NO: 596231 - DNA, 33 bp, Homo sapien
catgtactcttcaacaatggatcgaccctagct

SEQ ID NO: 596232 - DNA, 33 bp, Homo sapien
catgtactcttcaacagtggatcgaccctagct

SEQ ID NO: 596233 - DNA, 33 bp, Homo sapien
gcccaaattgatattaacaaatacactgaactt

SEQ ID NO: 596234 - DNA, 33 bp, Homo sapien
gcccaaattgatattatcaaatacactgaactt

SEQ ID NO: 596235 - DNA, 33 bp, Homo sapien
tgtggcttaaatctaaagtcaggttctggtgtt

SEQ ID NO: 596236 - DNA, 33 bp, Homo sapien
tgtggcttaaatctaaggtcaggttctggtgtt

SEQ ID NO: 596237 - DNA, 33 bp, Homo sapien
tgaggtcagcagttaaagatgagcccggccaaa

SEQ ID NO: 596238 - DNA, 33 bp, Homo sapien
tgaggtcagcagttaaggatgagcccggccaaa

SEQ ID NO: 596239 - DNA, 33 bp, Homo sapien
gctggcaaaataaacccagaagaatcgtaattg

SEQ ID NO: 596240 - DNA, 33 bp, Homo sapien
gctggcaaaataaaccgagaagaatcgtaattg

SEQ ID NO: 596241 - DNA, 33 bp, Homo sapien
tattaatcacttactgaacattttacttgcatt

SEQ ID NO: 596242 - DNA, 33 bp, Homo sapien
tattaatcacttactgcacattttacttgcatt

SEQ ID NO: 596243 - DNA, 33 bp, Homo sapien
agaaaatcaaggtgaactagataccagaaaatt

SEQ ID NO: 596244 - DNA, 33 bp, Homo sapien
agaaaatcaaggtgaattagataccagaaaatt

SEQ ID NO: 596245 - DNA, 33 bp, Homo sapien
taaaaatatataaacacacagcaaatgatgacc

SEQ ID NO: 596246 - DNA, 33 bp, Homo sapien
taaaaatatataaacatacagcaaatgatgacc

SEQ ID NO: 596247 - DNA, 33 bp, Homo sapien
gaaggagctccaaacaaaatggaacttggagca

SEQ ID NO: 596248 - DNA, 33 bp, Homo sapien
gaaggagctccaaacagaatggaacttggagca

SEQ ID NO: 596249 - DNA, 33 bp, Homo sapien
aacctgattttatcatgactcaacatatacacg

SEQ ID NO: 596250 - DNA, 33 bp, Homo sapien
aacctgattttatcattactcaacatatacacg

SEQ ID NO: 596251 - DNA, 33 bp, Homo sapien; identical to SEQ ID NO: 596249

SEQ ID NO: 596252 - DNA, 33 bp, Homo sapien; identical to SEQ ID NO: 596250

SEQ ID NO: 596253 - DNA, 33 bp, Homo sapien
atatccatatgcaaaacaataatacaggactct

SEQ ID NO: 596254 - DNA, 33 bp, Homo sapien
atatccatatgcaaaagaataatacaggactct

SEQ ID NO: 596255 - DNA, 33 bp, Homo sapien
cgtcctgggagcagtcgaaggaacaggagactc

SEQ ID NO: 596256 - DNA, 33 bp, Homo sapien
cgtcctgggagcagtctaaggaacaggagactc

SEQ ID NO: 596257 - DNA, 33 bp, Homo sapien
gcacttgaacgtaaagacctcctcaagaaggcc

SEQ ID NO: 596258 - DNA, 33 bp, Homo sapien
gcacttgaacgtaaagtcctcctcaagaaggcc

SEQ ID NO: 596259 - DNA, 33 bp, Homo sapien
cagaattatatgtaagaaaacaggcatgactga

SEQ ID NO: 596260 - DNA, 33 bp, Homo sapien
cagaattatatgtaagcaaacaggcatgactga

SEQ ID NO: 596261 - DNA, 33 bp, Homo sapien
atttcagataagtggccctaatattgtttcttg

SEQ ID NO: 596262 - DNA, 33 bp, Homo sapien
atttcagataagtggctctaatattgtttcttg

SEQ ID NO: 596263 - DNA, 33 bp, Homo sapien
gtaacaatctgggaaaattaaatataaatagat

SEQ ID NO: 596264 - DNA, 33 bp, Homo sapien
gtaacaatctgggaaagttaaatataaatagat

SEQ ID NO: 596265 - DNA, 33 bp, Homo sapien
attattacctaaaatcaccatgcatactggtga

SEQ ID NO: 596266 - DNA, 33 bp, Homo sapien
attattacctaaaatcgccatgcatactggtga

SEQ ID NO: 596267 - DNA, 33 bp, Homo sapien
aaatgatccttgctaaagcattaaaaacgtgcc

SEQ ID NO: 596268 - DNA, 33 bp, Homo sapien
aaatgatccttgctaaggcattaaaaacgtgcc

SEQ ID NO: 596269 - DNA, 33 bp, Homo sapien
gtgatttatgcaatggccattttaagggtgtgg

SEQ ID NO: 596270 - DNA, 33 bp, Homo sapien
gtgatttatgcaatggtcattttaagggtgtgg

SEQ ID NO: 596271 - DNA, 33 bp, Homo sapien
gttgcttttaacagaacggtaattttcacaata

SEQ ID NO: 596272 - DNA, 33 bp, Homo sapien
gttgcttttaacagaatggtaattttcacaata

SEQ ID NO: 596273 - DNA, 33 bp, Homo sapien
gccatatttctttaaagagttttcagcaactgc

SEQ ID NO: 596274 - DNA, 33 bp, Homo sapien
gccatatttctttaaatagttttcagcaactgc

SEQ ID NO: 596275 - DNA, 33 bp, Homo sapien
taaagaaatatggcagaaaatagtccaaatatg

SEQ ID NO: 596276 - DNA, 33 bp, Homo sapien
taaagaaatatggcagcaaatagtccaaatatg

SEQ ID NO: 596277 - DNA, 33 bp, Homo sapien
catgaaagtgcacagcaaaaaggctggtccata

SEQ ID NO: 596278 - DNA, 33 bp, Homo sapien
catgaaagtgcacagcgaaaaggctggtccata

SEQ ID NO: 596279 - DNA, 33 bp, Homo sapien
atcaaactagaaattaacatctgcaaatataaa

SEQ ID NO: 596280 - DNA, 33 bp, Homo sapien
atcaaactagaaattagcatctgcaaatataaa

SEQ ID NO: 596281 - DNA, 33 bp, Homo sapien
agcagcagtgttctgcaatcctttgtgagggac

SEQ ID NO: 596282 - DNA, 33 bp, Homo sapien
agcagcagtgttctgccatcctttgtgagggac

SEQ ID NO: 596283 - DNA, 33 bp, Homo sapien
cactcagaaaccagcacagatgctctagaatcc

SEQ ID NO: 596284 - DNA, 33 bp, Homo sapien
cactcagaaaccagcagagatgctctagaatcc

SEQ ID NO: 596285 - DNA, 33 bp, Homo sapien
ataactcaatttggagaaggtttagctgtctgc

SEQ ID NO: 596286 - DNA, 33 bp, Homo sapien
ataactcaatttggaggaggtttagctgtctgc

SEQ ID NO: 596287 - DNA, 33 bp, Homo sapien
aaagagtgtattctatcaggattctgactagag

SEQ ID NO: 596288 - DNA, 33 bp, Homo sapien
aaagagtgtattctatgaggattctgactagag

SEQ ID NO: 596289 - DNA, 33 bp, Homo sapien
gttttcttacacactaagccactgtctgtaacc

SEQ ID NO: 596290 - DNA, 33 bp, Homo sapien
gttttcttacacactatgccactgtctgtaacc

SEQ ID NO: 596291 - DNA, 33 bp, Homo sapien
ggagtgacaactgattcaagggatcagcgtgaa

SEQ ID NO: 596292 - DNA, 33 bp, Homo sapien
ggagtgacaactgattgaagggatcagcgtgaa

SEQ ID NO: 596293 - DNA, 33 bp, Homo sapien
ttggaacaccccctccccaatattccatatgga

SEQ ID NO: 596294 - DNA, 33 bp, Homo sapien
ttggaacaccccctccgcaatattccatatgga

SEQ ID NO: 596295 - DNA, 33 bp, Homo sapien
catcatatttggccttcaactcaaagctgaatt

SEQ ID NO: 596296 - DNA, 33 bp, Homo sapien
catcatatttggccttgaactcaaagctgaatt

SEQ ID NO: 596297 - DNA, 33 bp, Homo sapien; identical to SEQ ID NO: 596295

SEQ ID NO: 596298 - DNA, 33 bp, Homo sapien; identical to SEQ ID NO: 596296

SEQ ID NO: 596299 - DNA, 33 bp, Homo sapien
atgttattagaccagtcacaaagaagagaatgt

SEQ ID NO: 596300 - DNA, 33 bp, Homo sapien
atgttattagaccagttacaaagaagagaatgt

SEQ ID NO: 596301 - DNA, 33 bp, Homo sapien
aattccatgtatgataacccgttttgaaattcc

SEQ ID NO: 596302 - DNA, 33 bp, Homo sapien
aattccatgtatgataccccgttttgaaattcc

SEQ ID NO: 596303 - DNA, 33 bp, Homo sapien
atcatccctcaaggacaccaagtagccacctgg

SEQ ID NO: 596304 - DNA, 33 bp, Homo sapien
atcatccctcaaggacgccaagtagccacctgg

SEQ ID NO: 596305 - DNA, 33 bp, Homo sapien
tagcaatactccattaactcagtatcaaaatct

SEQ ID NO: 596306 - DNA, 33 bp, Homo sapien
tagcaatactccattacctcagtatcaaaatct

SEQ ID NO: 596307 - DNA, 33 bp, Homo sapien
tgtagtaactatgtaacggatgaactttgctat

SEQ ID NO: 596308 - DNA, 33 bp, Homo sapien
tgtagtaactatgtaatggatgaactttgctat

SEQ ID NO: 596309 - DNA, 33 bp, Homo sapien
aagcctgaaacagaaaacagtcacatttgatac

SEQ ID NO: 596310 - DNA, 33 bp, Homo sapien
aagcctgaaacagaaagcagtcacatttgatac

SEQ ID NO: 596311 - DNA, 33 bp, Homo sapien
tcaaagaaaagaaagacgacagagtgaaataag

SEQ ID NO: 596312 - DNA, 33 bp, Homo sapien
tcaaagaaaagaaagatgacagagtgaaataag

SEQ ID NO: 596313 - DNA, 33 bp, Homo sapien
aagcagaagcacaaagcccaggttccatcaggt

SEQ ID NO: 596314 - DNA, 33 bp, Homo sapien
aagcagaagcacaaagtccaggttccatcaggt

SEQ ID NO: 596315 - DNA, 33 bp, Homo sapien
gagagcagcaagattaaaacagttacaactcac

SEQ ID NO: 596316 - DNA, 33 bp, Homo sapien
gagagcagcaagattagaacagttacaactcac

SEQ ID NO: 596317 - DNA, 33 bp, Homo sapien; identical to SEQ ID NO: 596315

SEQ ID NO: 596318 - DNA, 33 bp, Homo sapien; identical to SEQ ID NO: 596316

SEQ ID NO: 596319 - DNA, 33 bp, Homo sapien
tttcctgattaataagaactacactttacacaa

SEQ ID NO: 596320 - DNA, 33 bp, Homo sapien
tttcctgattaataaggactacactttacacaa

SEQ ID NO: 596321 - DNA, 33 bp, Homo sapien; identical to SEQ ID NO: 596319

SEQ ID NO: 596322 - DNA, 33 bp, Homo sapien; identical to SEQ ID NO: 596320

SEQ ID NO: 596323 - DNA, 33 bp, Homo sapien
aggctgaactgtaaaagtcagcattgacagcat

SEQ ID NO: 596324 - DNA, 33 bp, Homo sapien
aggctgaactgtaaaattcagcattgacagcat

SEQ ID NO: 596325 - DNA, 33 bp, Homo sapien
cctatgcagatgcaaaatattatgtttcctatt

SEQ ID NO: 596326 - DNA, 33 bp, Homo sapien
cctatgcagatgcaaattattatgtttcctatt

SEQ ID NO: 596327 - DNA, 33 bp, Homo sapien; identical to SEQ ID NO: 596325

SEQ ID NO: 596328 - DNA, 33 bp, Homo sapien; identical to SEQ ID NO: 596326

SEQ ID NO: 596329 - DNA, 33 bp, Homo sapien
gccaagataatgttgagggggaaatgatcacag

SEQ ID NO: 596330 - DNA, 33 bp, Homo sapien
gccaagataatgttgatggggaaatgatcacag

SEQ ID NO: 596331 - DNA, 33 bp, Homo sapien
cacagctctgagaccacagtagcaaaaatctag

SEQ ID NO: 596332 - DNA, 33 bp, Homo sapien
cacagctctgagaccatagtagcaaaaatctag

SEQ ID NO: 596333 - DNA, 33 bp, Homo sapien
atgccagatttgttgtaaatttgccgagtgaca

SEQ ID NO: 596334 - DNA, 33 bp, Homo sapien
atgccagatttgttgtcaatttgccgagtgaca

SEQ ID NO: 596335 - DNA, 33 bp, Homo sapien; identical to SEQ ID NO: 596333

SEQ ID NO: 596336 - DNA, 33 bp, Homo sapien; identical to SEQ ID NO: 596334

SEQ ID NO: 596337 - DNA, 33 bp, Homo sapien
ctcattcctctattccacaaaactgcaaagttt

SEQ ID NO: 596338 - DNA, 33 bp, Homo sapien
ctcattcctctattccgcaaaactgcaaagttt

SEQ ID NO: 596339 - DNA, 33 bp, Homo sapien; identical to SEQ ID NO: 596337

SEQ ID NO: 596340 - DNA, 33 bp, Homo sapien; identical to SEQ ID NO: 596338

SEQ ID NO: 596341 - DNA, 33 bp, Homo sapien
tattctctctaacccacaaaggaagctgaacac

SEQ ID NO: 596342 - DNA, 33 bp, Homo sapien
tattctctctaacccagaaaggaagctgaacac

SEQ ID NO: 596343 - DNA, 33 bp, Homo sapien; identical to SEQ ID NO: 596341

SEQ ID NO: 596344 - DNA, 33 bp, Homo sapien; identical to SEQ ID NO: 596342

SEQ ID NO: 596345 - DNA, 33 bp, Homo sapien
ctttacctcgtattgaaaatgtcagttctgtaa

SEQ ID NO: 596346 - DNA, 33 bp, Homo sapien
ctttacctcgtattgagaatgtcagttctgtaa

SEQ ID NO: 596347 - DNA, 33 bp, Homo sapien
gtgtagctaactttcaactaactcaaacttctg

SEQ ID NO: 596348 - DNA, 33 bp, Homo sapien
gtgtagctaactttcagctaactcaaacttctg

SEQ ID NO: 596349 - DNA, 33 bp, Homo sapien; identical to SEQ ID NO: 596347

SEQ ID NO: 596350 - DNA, 33 bp, Homo sapien; identical to SEQ ID NO: 596348

SEQ ID NO: 596351 - DNA, 33 bp, Homo sapien
tacatcttaaattgtacggaagaacctctattt

SEQ ID NO: 596352 - DNA, 33 bp, Homo sapien
tacatcttaaattgtatggaagaacctctattt

SEQ ID NO: 596353 - DNA, 33 bp, Homo sapien; identical to SEQ ID NO: 596351

SEQ ID NO: 596354 - DNA, 33 bp, Homo sapien; identical to SEQ ID NO: 596352

SEQ ID NO: 596355 - DNA, 33 bp, Homo sapien
ctcttgggtaaatactcaagtgggaatcgagat

SEQ ID NO: 596356 - DNA, 33 bp, Homo sapien
ctcttgggtaaatactgaagtgggaatcgagat

SEQ ID NO: 596357 - DNA, 33 bp, Homo sapien
ttttatggtgttaaatcatcctatccaagaaca

SEQ ID NO: 596358 - DNA, 33 bp, Homo sapien
ttttatggtgttaaatgatcctatccaagaaca

SEQ ID NO: 596359 - DNA, 33 bp, Homo sapien; identical to SEQ ID NO: 596357

SEQ ID NO: 596360 - DNA, 33 bp, Homo sapien; identical to SEQ ID NO: 596358

SEQ ID NO: 596361 - DNA, 33 bp, Homo sapien
ggtaaacaagttgacactaaagtctatacggaa

SEQ ID NO: 596362 - DNA, 33 bp, Homo sapien
ggtaaacaagttgacattaaagtctatacggaa

SEQ ID NO: 596363 - DNA, 33 bp, Homo sapien
aagcgctggactaagaccaaaggaggaaaaatt

SEQ ID NO: 596364 - DNA, 33 bp, Homo sapien
aagcgctggactaagatcaaaggaggaaaaatt

SEQ ID NO: 596365 - DNA, 33 bp, Homo sapien; identical to SEQ ID NO: 596363

SEQ ID NO: 596366 - DNA, 33 bp, Homo sapien; identical to SEQ ID NO: 596364

SEQ ID NO: 596367 - DNA, 33 bp, Homo sapien
acctccatgcaagccacgaacaaactatagctc

SEQ ID NO: 596368 - DNA, 33 bp, Homo sapien
acctccatgcaagccatgaacaaactatagctc

SEQ ID NO: 596369 - DNA, 33 bp, Homo sapien
gatgtgattaggaaaccaaacaataataagtgt

SEQ ID NO: 596370 - DNA, 33 bp, Homo sapien
gatgtgattaggaaacgaaacaataataagtgt

SEQ ID NO: 596371 - DNA, 33 bp, Homo sapien
tcctctccagctcctgaacgttggcattagggc

SEQ ID NO: 596372 - DNA, 33 bp, Homo sapien
tcctctccagctcctgcacgttggcattagggc

SEQ ID NO: 596373 - DNA, 33 bp, Homo sapien
cgggtgcgagagatccactaccagggtggcaac

SEQ ID NO: 596374 - DNA, 33 bp, Homo sapien
cgggtgcgagagatccgctaccagggtggcaac

SEQ ID NO: 596375 - DNA, 33 bp, Homo sapien
tgtgttagcatcaaggacatgaaatttatctgg

SEQ ID NO: 596376 - DNA, 33 bp, Homo sapien
tgtgttagcatcaagggcatgaaatttatctgg

SEQ ID NO: 596377 - DNA, 33 bp, Homo sapien
tcataattaagcagagccgccttttgagggaat

SEQ ID NO: 596378 - DNA, 33 bp, Homo sapien
tcataattaagcagagtcgccttttgagggaat

SEQ ID NO: 596379 - DNA, 33 bp, Homo sapien
aaaccttcctctataaaataagccacaggaact

SEQ ID NO: 596380 - DNA, 33 bp, Homo sapien
aaaccttcctctataagataagccacaggaact

SEQ ID NO: 596381 - DNA, 33 bp, Homo sapien; identical to SEQ ID NO: 596379

SEQ ID NO: 596382 - DNA, 33 bp, Homo sapien; identical to SEQ ID NO: 596380

SEQ ID NO: 596383 - DNA, 33 bp, Homo sapien
tttgttgattctgacccgattctgattctatag

SEQ ID NO: 596384 - DNA, 33 bp, Homo sapien
tttgttgattctgacctgattctgattctatag

SEQ ID NO: 596385 - DNA, 33 bp, Homo sapien
tttctacaactgcaaacactattcagcaattta

SEQ ID NO: 596386 - DNA, 33 bp, Homo sapien
tttctacaactgcaaatactattcagcaattta

SEQ ID NO: 596387 - DNA, 33 bp, Homo sapien
ttctttcatggctgaccattggactgcagactg

SEQ ID NO: 596388 - DNA, 33 bp, Homo sapien
ttctttcatggctgacgattggactgcagactg

SEQ ID NO: 596389 - DNA, 33 bp, Homo sapien
gcaagaaagcatcatcgatttttacatcaaggc

SEQ ID NO: 596390 - DNA, 33 bp, Homo sapien
gcaagaaagcatcatctatttttacatcaaggc

SEQ ID NO: 596391 - DNA, 33 bp, Homo sapien
tccataagtagtttccgccatcccacctcccaa

SEQ ID NO: 596392 - DNA, 33 bp, Homo sapien
tccataagtagtttcctccatcccacctcccaa

SEQ ID NO: 596393 - DNA, 33 bp, Homo sapien
gattcactattgtagacgccactaagaacattc

SEQ ID NO: 596394 - DNA, 33 bp, Homo sapien
gattcactattgtagatgccactaagaacattc

SEQ ID NO: 596395 - DNA, 33 bp, Homo sapien
gacttagaatatgccacgaacttagttgataga

SEQ ID NO: 596396 - DNA, 33 bp, Homo sapien
gacttagaatatgccatgaacttagttgataga

SEQ ID NO: 596397 - DNA, 33 bp, Homo sapien
tcagagatgcaatgaaaaatgccagagtcacta

SEQ ID NO: 596398 - DNA, 33 bp, Homo sapien
tcagagatgcaatgaacaatgccagagtcacta

SEQ ID NO: 596399 - DNA, 33 bp, Homo sapien
accattaagctaccgccgatagaattcttctgt

SEQ ID NO: 596400 - DNA, 33 bp, Homo sapien
accattaagctaccgctgatagaattcttctgt

SEQ ID NO: 596401 - DNA, 33 bp, Homo sapien
aaaatacagttgagagcattgacagaagtggcc

SEQ ID NO: 596402 - DNA, 33 bp, Homo sapien
aaaatacagttgagagtattgacagaagtggcc

SEQ ID NO: 596403 - DNA, 33 bp, Homo sapien
ttctccgtaaagaaaacaggtctcttaataggc

SEQ ID NO: 596404 - DNA, 33 bp, Homo sapien
ttctccgtaaagaaaataggtctcttaataggc

SEQ ID NO: 596405 - DNA, 33 bp, Homo sapien
taactgacaaaatgtagacggacacctatttat

SEQ ID NO: 596406 - DNA, 33 bp, Homo sapien
taactgacaaaatgtatacggacacctatttat

SEQ ID NO: 596407 - DNA, 33 bp, Homo sapien
atttctgctctcttcaataacatgattgtagtg

SEQ ID NO: 596408 - DNA, 33 bp, Homo sapien
atttctgctctcttcagtaacatgattgtagtg

SEQ ID NO: 596409 - DNA, 33 bp, Homo sapien
tactttctcagactagcaaaagccatcaattaa

SEQ ID NO: 596410 - DNA, 33 bp, Homo sapien
tactttctcagactaggaaaagccatcaattaa

SEQ ID NO: 596411 - DNA, 33 bp, Homo sapien
cataaaaaatgtagaaaaggaagcccagaaata

SEQ ID NO: 596412 - DNA, 33 bp, Homo sapien
cataaaaaatgtagaagaggaagcccagaaata

SEQ ID NO: 596413 - DNA, 33 bp, Homo sapien
ggtagaaagtgaaagtaaagtcactgaacaatg

SEQ ID NO: 596414 - DNA, 33 bp, Homo sapien
ggtagaaagtgaaagtgaagtcactgaacaatg

SEQ ID NO: 596415 - DNA, 33 bp, Homo sapien
aggccctatgctcctcacaccaatctagtaaga

SEQ ID NO: 596416 - DNA, 33 bp, Homo sapien
aggccctatgctcctcgcaccaatctagtaaga

SEQ ID NO: 596417 - DNA, 33 bp, Homo sapien
acatttctgagactggaaagtaaacagtcttgg

SEQ ID NO: 596418 - DNA, 33 bp, Homo sapien
acatttctgagactgggaagtaaacagtcttgg

SEQ ID NO: 596419 - DNA, 33 bp, Homo sapien
caataacaaacataacacatacaatctcagatt

SEQ ID NO: 596420 - DNA, 33 bp, Homo sapien
caataacaaacataacccatacaatctcagatt

SEQ ID NO: 596421 - DNA, 33 bp, Homo sapien
agtagatacaagagaaatgtttttaatcttaat

SEQ ID NO: 596422 - DNA, 33 bp, Homo sapien
agtagatacaagagaagtgtttttaatcttaat

SEQ ID NO: 596423 - DNA, 33 bp, Homo sapien
gaatatttcaagaaacactttagagcaggggct

SEQ ID NO: 596424 - DNA, 33 bp, Homo sapien
gaatatttcaagaaacgctttagagcaggggct

SEQ ID NO: 596425 - DNA, 33 bp, Homo sapien
acaaccacagcttctcaatactacatcatatct

SEQ ID NO: 596426 - DNA, 33 bp, Homo sapien
acaaccacagcttctcgatactacatcatatct

SEQ ID NO: 596427 - DNA, 33 bp, Homo sapien
actttccagccttcagaataatgagcaaaataa

SEQ ID NO: 596428 - DNA, 33 bp, Homo sapien
actttccagccttcaggataatgagcaaaataa

SEQ ID NO: 596429 - DNA, 33 bp, Homo sapien
gagctgcctatagagacgagctacccactcctc

SEQ ID NO: 596430 - DNA, 33 bp, Homo sapien
gagctgcctatagagaggagctacccactcctc

SEQ ID NO: 596431 - DNA, 33 bp, Homo sapien
gatacactgaaggcaagaagaaaatccagcaaa

SEQ ID NO: 596432 - DNA, 33 bp, Homo sapien
gatacactgaaggcaataagaaaatccagcaaa

SEQ ID NO: 596433 - DNA, 33 bp, Homo sapien
tcactgttcaattcctaaagaccctagacaagc

SEQ ID NO: 596434 - DNA, 33 bp, Homo sapien
tcactgttcaattcctgaagaccctagacaagc

SEQ ID NO: 596435 - DNA, 33 bp, Homo sapien
tttccaattgacacaaatatttcagctaaatgt

SEQ ID NO: 596436 - DNA, 33 bp, Homo sapien
tttccaattgacacaagtatttcagctaaatgt

SEQ ID NO: 596437 - DNA, 33 bp, Homo sapien
atattcataagaaacaatagaagacaaaaatgt

SEQ ID NO: 596438 - DNA, 33 bp, Homo sapien
atattcataagaaacactagaagacaaaaatgt

SEQ ID NO: 596439 - DNA, 33 bp, Homo sapien
taataacatttttcaactcacgaagattatgcc

SEQ ID NO: 596440 - DNA, 33 bp, Homo sapien
taataacatttttcaattcacgaagattatgcc

SEQ ID NO: 596441 - DNA, 33 bp, Homo sapien
catcctctttaaagtcaagtccatctaatataa

SEQ ID NO: 596442 - DNA, 33 bp, Homo sapien
catcctctttaaagtcgagtccatctaatataa

SEQ ID NO: 596443 - DNA, 33 bp, Homo sapien; identical to SEQ ID NO: 596441

SEQ ID NO: 596444 - DNA, 33 bp, Homo sapien; identical to SEQ ID NO: 596442

SEQ ID NO: 596445 - DNA, 33 bp, Homo sapien
aagcccagcagcttgaaacataaagcgaggtgt

SEQ ID NO: 596446 - DNA, 33 bp, Homo sapien
aagcccagcagcttgagacataaagcgaggtgt

SEQ ID NO: 596447 - DNA, 33 bp, Homo sapien
tcaatgagtcataatcaagttctttagtagtcg

SEQ ID NO: 596448 - DNA, 33 bp, Homo sapien
tcaatgagtcataatcgagttctttagtagtcg

SEQ ID NO: 596449 - DNA, 33 bp, Homo sapien
attgttttggtaggcaaactttcagaactcttc

SEQ ID NO: 596450 - DNA, 33 bp, Homo sapien
attgttttggtaggcacactttcagaactcttc

SEQ ID NO: 596451 - DNA, 33 bp, Homo sapien
ggacacagccctctgacggctaagactcagccc

SEQ ID NO: 596452 - DNA, 33 bp, Homo sapien
ggacacagccctctgatggctaagactcagccc

SEQ ID NO: 596453 - DNA, 33 bp, Homo sapien
ttaaccacagtgggataaagctagaaattagta

SEQ ID NO: 596454 - DNA, 33 bp, Homo sapien
ttaaccacagtgggatgaagctagaaattagta

SEQ ID NO: 596455 - DNA, 33 bp, Homo sapien
caaatttgaaacatacaaaatgatttatttgaa

SEQ ID NO: 596456 - DNA, 33 bp, Homo sapien
caaatttgaaacatacgaaatgatttatttgaa

SEQ ID NO: 596457 - DNA, 33 bp, Homo sapien; identical to SEQ ID NO: 596455

SEQ ID NO: 596458 - DNA, 33 bp, Homo sapien; identical to SEQ ID NO: 596456

SEQ ID NO: 596459 - DNA, 33 bp, Homo sapien
gactgggttcagtagagagataagtttggcctc

SEQ ID NO: 596460 - DNA, 33 bp, Homo sapien
gactgggttcagtagatagataagtttggcctc

SEQ ID NO: 596461 - DNA, 33 bp, Homo sapien
cttctttttttattccaattccctgtgtatcca

SEQ ID NO: 596462 - DNA, 33 bp, Homo sapien
cttctttttttattccgattccctgtgtatcca

SEQ ID NO: 596463 - DNA, 33 bp, Homo sapien
tttcgtgtggacgcaccgagattctgaactggg

SEQ ID NO: 596464 - DNA, 33 bp, Homo sapien
tttcgtgtggacgcactgagattctgaactggg

SEQ ID NO: 596465 - DNA, 33 bp, Homo sapien
cagggaaatataaaggcaatctgtttcttaacc

SEQ ID NO: 596466 - DNA, 33 bp, Homo sapien
cagggaaatataaaggtaatctgtttcttaacc

SEQ ID NO: 596467 - DNA, 33 bp, Homo sapien; identical to SEQ ID NO: 596465

SEQ ID NO: 596468 - DNA, 33 bp, Homo sapien; identical to SEQ ID NO: 596466

SEQ ID NO: 596469 - DNA, 33 bp, Homo sapien
tagggaaattccaaaaatttaggaaatctttca

SEQ ID NO: 596470 - DNA, 33 bp, Homo sapien
tagggaaattccaaaactttaggaaatctttca

SEQ ID NO: 596471 - DNA, 33 bp, Homo sapien
agctcttgaaaataaactgctccctgctggcta

SEQ ID NO: 596472 - DNA, 33 bp, Homo sapien
agctcttgaaaataaattgctccctgctggcta

SEQ ID NO: 596473 - DNA, 33 bp, Homo sapien; identical to SEQ ID NO: 596471

SEQ ID NO: 596474 - DNA, 33 bp, Homo sapien; identical to SEQ ID NO: 596472

SEQ ID NO: 596475 - DNA, 33 bp, Homo sapien
tagaaacagtgacatagaaatgagctaaagatg

SEQ ID NO: 596476 - DNA, 33 bp, Homo sapien
tagaaacagtgacatataaatgagctaaagatg

SEQ ID NO: 596477 - DNA, 33 bp, Homo sapien
aaactgaattttcaagacaacagtattagacat

SEQ ID NO: 596478 - DNA, 33 bp, Homo sapien
aaactgaattttcaaggcaacagtattagacat

SEQ ID NO: 596479 - DNA, 33 bp, Homo sapien
aagcactgctcagttaagacaagagagactcat

SEQ ID NO: 596480 - DNA, 33 bp, Homo sapien
aagcactgctcagttaggacaagagagactcat

SEQ ID NO: 596481 - DNA, 33 bp, Homo sapien
attgatcagaaattcaccttctatacacacttt

SEQ ID NO: 596482 - DNA, 33 bp, Homo sapien
attgatcagaaattcatcttctatacacacttt

SEQ ID NO: 596483 - DNA, 33 bp, Homo sapien
tcagtgaggagtgtgacaagacggggattctgc

SEQ ID NO: 596484 - DNA, 33 bp, Homo sapien
tcagtgaggagtgtgagaagacggggattctgc

SEQ ID NO: 596485 - DNA, 33 bp, Homo sapien
ttgtctctatcacctgcagaaacagcacagatg

SEQ ID NO: 596486 - DNA, 33 bp, Homo sapien
ttgtctctatcacctgtagaaacagcacagatg

SEQ ID NO: 596487 - DNA, 33 bp, Homo sapien
gaaaaataacacaaaaagtgctcagggaaaatc

SEQ ID NO: 596488 - DNA, 33 bp, Homo sapien
gaaaaataacacaaaaggtgctcagggaaaatc

SEQ ID NO: 596489 - DNA, 33 bp, Homo sapien
catctttgtgcatctgcagggaattgcttgaac

SEQ ID NO: 596490 - DNA, 33 bp, Homo sapien
catctttgtgcatctgtagggaattgcttgaac

SEQ ID NO: 596491 - DNA, 33 bp, Homo sapien
aacctatggacctcttcaacgccagggatttta

SEQ ID NO: 596492 - DNA, 33 bp, Homo sapien
aacctatggacctctttaacgccagggatttta

SEQ ID NO: 596493 - DNA, 33 bp, Homo sapien
gaataagatgtgtatacagttgcaaacatttcc

SEQ ID NO: 596494 - DNA, 33 bp, Homo sapien
gaataagatgtgtatatagttgcaaacatttcc

SEQ ID NO: 596495 - DNA, 33 bp, Homo sapien
acatttgtcgaagtcaaaataaaagatgaatct

SEQ ID NO: 596496 - DNA, 33 bp, Homo sapien
acatttgtcgaagtcagaataaaagatgaatct

SEQ ID NO: 596497 - DNA, 33 bp, Homo sapien
gcttctgtagtgccaacgagccttctttcaaaa

SEQ ID NO: 596498 - DNA, 33 bp, Homo sapien
gcttctgtagtgccaatgagccttctttcaaaa

SEQ ID NO: 596499 - DNA, 33 bp, Homo sapien
ccaattattttctctacctgaatcttagtcatt

SEQ ID NO: 596500 - DNA, 33 bp, Homo sapien
ccaattattttctctatctgaatcttagtcatt

SEQ ID NO: 596501 - DNA, 33 bp, Homo sapien
cagcatggggcacccacattgattaaaaacagt

SEQ ID NO: 596502 - DNA, 33 bp, Homo sapien
cagcatggggcacccagattgattaaaaacagt

SEQ ID NO: 596503 - DNA, 33 bp, Homo sapien
ctgcatctgactacaaaagcctacttcatggaa

SEQ ID NO: 596504 - DNA, 33 bp, Homo sapien
ctgcatctgactacaagagcctacttcatggaa

SEQ ID NO: 596505 - DNA, 33 bp, Homo sapien
agggcttcttgtgccaaagttcaggtagggatc

SEQ ID NO: 596506 - DNA, 33 bp, Homo sapien
agggcttcttgtgccagagttcaggtagggatc

SEQ ID NO: 596507 - DNA, 33 bp, Homo sapien
atccccaggcggaatacccttcctgcagtagac

SEQ ID NO: 596508 - DNA, 33 bp, Homo sapien
atccccaggcggaatatccttcctgcagtagac

SEQ ID NO: 596509 - DNA, 33 bp, Homo sapien
agtggcctaagattccaagaaaagtggcagaac

SEQ ID NO: 596510 - DNA, 33 bp, Homo sapien
agtggcctaagattcccagaaaagtggcagaac

SEQ ID NO: 596511 - DNA, 33 bp, Homo sapien
cccatactctgcttctaacctggatgggggccc

SEQ ID NO: 596512 - DNA, 33 bp, Homo sapien
cccatactctgcttctgacctggatgggggccc

SEQ ID NO: 596513 - DNA, 33 bp, Homo sapien
tttatcttcagagccacagagaggccgcagtgc

SEQ ID NO: 596514 - DNA, 33 bp, Homo sapien
tttatcttcagagccagagagaggccgcagtgc

SEQ ID NO: 596515 - DNA, 33 bp, Homo sapien
gatttcttgacatatccgagtggaaaagtcttg

SEQ ID NO: 596516 - DNA, 33 bp, Homo sapien
gatttcttgacatatctgagtggaaaagtcttg

SEQ ID NO: 596517 - DNA, 33 bp, Homo sapien
aaagtactcactgtggaaagaaactaaaaaaga

SEQ ID NO: 596518 - DNA, 33 bp, Homo sapien
aaagtactcactgtgggaagaaactaaaaaaga

SEQ ID NO: 596519 - DNA, 33 bp, Homo sapien
tgcactgttccttgaactcacttggcacttaaa

SEQ ID NO: 596520 - DNA, 33 bp, Homo sapien
tgcactgttccttgaattcacttggcacttaaa

SEQ ID NO: 596521 - DNA, 33 bp, Homo sapien; identical to SEQ ID NO: 596519

SEQ ID NO: 596522 - DNA, 33 bp, Homo sapien; identical to SEQ ID NO: 596520

SEQ ID NO: 596523 - DNA, 33 bp, Homo sapien
gctcttgtgtgtaaaacgactgtgaatttagcc

SEQ ID NO: 596524 - DNA, 33 bp, Homo sapien
gctcttgtgtgtaaaatgactgtgaatttagcc

SEQ ID NO: 596525 - DNA, 33 bp, Homo sapien
gctctctagtggtcccagagaagcaagtgtgag

SEQ ID NO: 596526 - DNA, 33 bp, Homo sapien
gctctctagtggtcccggagaagcaagtgtgag

SEQ ID NO: 596527 - DNA, 33 bp, Homo sapien
agtgcgccaactgctacgtggtttctcaccatc

SEQ ID NO: 596528 - DNA, 33 bp, Homo sapien
agtgcgccaactgctatgtggtttctcaccatc

SEQ ID NO: 596529 - DNA, 33 bp, Homo sapien
cacatacattgagacaacataaagtcagaatgt

SEQ ID NO: 596530 - DNA, 33 bp, Homo sapien
cacatacattgagacaccataaagtcagaatgt

SEQ ID NO: 596531 - DNA, 33 bp, Homo sapien
aacccaaataagactaccaaaaggcatataata

SEQ ID NO: 596532 - DNA, 33 bp, Homo sapien
aacccaaataagactatcaaaaggcatataata

SEQ ID NO: 596533 - DNA, 33 bp, Homo sapien
catctaatgtgtagccggaccttggaccactgt

SEQ ID NO: 596534 - DNA, 33 bp, Homo sapien
catctaatgtgtagcctgaccttggaccactgt

SEQ ID NO: 596535 - DNA, 33 bp, Homo sapien
ggagtgagcctctgggaagtaacgactctctta

SEQ ID NO: 596536 - DNA, 33 bp, Homo sapien
ggagtgagcctctggggagtaacgactctctta

SEQ ID NO: 596537 - DNA, 33 bp, Homo sapien
aaggaggatcaccatacgtaacttgacaaaaat

SEQ ID NO: 596538 - DNA, 33 bp, Homo sapien
aaggaggatcaccatatgtaacttgacaaaaat

SEQ ID NO: 596539 - DNA, 33 bp, Homo sapien
ctcacagtctgtcgacacagaaaaaaggaaact

SEQ ID NO: 596540 - DNA, 33 bp, Homo sapien
ctcacagtctgtcgacccagaaaaaaggaaact

SEQ ID NO: 596541 - DNA, 33 bp, Homo sapien
tccaagttaaactaaactctcctccctaatcac

SEQ ID NO: 596542 - DNA, 33 bp, Homo sapien
tccaagttaaactaaagtctcctccctaatcac

SEQ ID NO: 596543 - DNA, 33 bp, Homo sapien
attggttctgcaatgaaaacagaggaaaaaggg

SEQ ID NO: 596544 - DNA, 33 bp, Homo sapien
attggttctgcaatgagaacagaggaaaaaggg

SEQ ID NO: 596545 - DNA, 33 bp, Homo sapien
acctatgggaggttccaataacattcagtagca

SEQ ID NO: 596546 - DNA, 33 bp, Homo sapien
acctatgggaggttccgataacattcagtagca

SEQ ID NO: 596547 - DNA, 33 bp, Homo sapien
ctggcacgttgtacataatcaattgggatcaca

SEQ ID NO: 596548 - DNA, 33 bp, Homo sapien
ctggcacgttgtacattatcaattgggatcaca

SEQ ID NO: 596549 - DNA, 33 bp, Homo sapien
cgctgaagcccaggaaagtctggatcatctact

SEQ ID NO: 596550 - DNA, 33 bp, Homo sapien
cgctgaagcccaggaaggtctggatcatctact

SEQ ID NO: 596551 - DNA, 33 bp, Homo sapien
acgtggacgtggtcctaaaattcgcccagttcc

SEQ ID NO: 596552 - DNA, 33 bp, Homo sapien
acgtggacgtggtcctgaaattcgcccagttcc

SEQ ID NO: 596553 - DNA, 33 bp, Homo sapien
catcctgttcgtttaacgtgtcctcggcactag

SEQ ID NO: 596554 - DNA, 33 bp, Homo sapien
catcctgttcgtttaatgtgtcctcggcactag

SEQ ID NO: 596555 - DNA, 33 bp, Homo sapien
aggcaaacaccggaggaagagagcaatacctaa

SEQ ID NO: 596556 - DNA, 33 bp, Homo sapien
aggcaaacaccggagggagagagcaatacctaa

SEQ ID NO: 596557 - DNA, 33 bp, Homo sapien
gccttttcagattataaaagtaatatgtgttcc

SEQ ID NO: 596558 - DNA, 33 bp, Homo sapien
gccttttcagattatagaagtaatatgtgttcc

SEQ ID NO: 596559 - DNA, 33 bp, Homo sapien
catgaacagcttgtgcaatgggtttaggggtag

SEQ ID NO: 596560 - DNA, 33 bp, Homo sapien
catgaacagcttgtgccatgggtttaggggtag

SEQ ID NO: 596561 - DNA, 33 bp, Homo sapien
cttttcttcctgactgcaatgtggcattgtgcc

SEQ ID NO: 596562 - DNA, 33 bp, Homo sapien
cttttcttcctgactgtaatgtggcattgtgcc

SEQ ID NO: 596563 - DNA, 33 bp, Homo sapien
agacatatataattgtaacaaggaacaaaattt

SEQ ID NO: 596564 - DNA, 33 bp, Homo sapien
agacatatataattgtgacaaggaacaaaattt

SEQ ID NO: 596565 - DNA, 33 bp, Homo sapien
cacatgtgtcacctcacgtgattctcaccacag

SEQ ID NO: 596566 - DNA, 33 bp, Homo sapien
cacatgtgtcacctcatgtgattctcaccacag

SEQ ID NO: 596567 - DNA, 33 bp, Homo sapien
ctgccctgagtgaaacccctgcttagcatttgg

SEQ ID NO: 596568 - DNA, 33 bp, Homo sapien
ctgccctgagtgaaacgcctgcttagcatttgg

SEQ ID NO: 596569 - DNA, 33 bp, Homo sapien
tccctccttcttccagactctaaccgccagcta

SEQ ID NO: 596570 - DNA, 33 bp, Homo sapien
tccctccttcttccaggctctaaccgccagcta

SEQ ID NO: 596571 - DNA, 33 bp, Homo sapien
aacatcccattcccagccccatgaaaacaaggc

SEQ ID NO: 596572 - DNA, 33 bp, Homo sapien
aacatcccattcccagtcccatgaaaacaaggc

SEQ ID NO: 596573 - DNA, 33 bp, Homo sapien
taaaacaataagggaaagacaatacagaaattt

SEQ ID NO: 596574 - DNA, 33 bp, Homo sapien
taaaacaataagggaaggacaatacagaaattt

SEQ ID NO: 596575 - DNA, 33 bp, Homo sapien
agctcctttagtaagagtagtatggatcagcca

SEQ ID NO: 596576 - DNA, 33 bp, Homo sapien
agctcctttagtaagattagtatggatcagcca

SEQ ID NO: 596577 - DNA, 33 bp, Homo sapien
agctgtgctcattcccgcggtgtaagtgttgct

SEQ ID NO: 596578 - DNA, 33 bp, Homo sapien
agctgtgctcattccctcggtgtaagtgttgct

SEQ ID NO: 596579 - DNA, 33 bp, Homo sapien
agagctgcttcctttagaacaaaccagtaacaa

SEQ ID NO: 596580 - DNA, 33 bp, Homo sapien
agagctgcttcctttataacaaaccagtaacaa

SEQ ID NO: 596581 - DNA, 33 bp, Homo sapien
ggtgtggaaaagaagacggatcttgttactggt

SEQ ID NO: 596582 - DNA, 33 bp, Homo sapien
ggtgtggaaaagaagagggatcttgttactggt

SEQ ID NO: 596583 - DNA, 33 bp, Homo sapien
gcgtctacaatcccagcaacccacagtccacgg

SEQ ID NO: 596584 - DNA, 33 bp, Homo sapien
gcgtctacaatcccaggaacccacagtccacgg

SEQ ID NO: 596585 - DNA, 33 bp, Homo sapien
gacaggcgtgttttaccggtgactcagaaatta

SEQ ID NO: 596586 - DNA, 33 bp, Homo sapien
gacaggcgtgttttactggtgactcagaaatta

SEQ ID NO: 596587 - DNA, 33 bp, Homo sapien
gtcgccttccactccaagagaaccacaacccca

SEQ ID NO: 596588 - DNA, 33 bp, Homo sapien
gtcgccttccactccaggagaaccacaacccca

SEQ ID NO: 596589 - DNA, 33 bp, Homo sapien
agccagacatgtaacaaaggcatttttatgtat

SEQ ID NO: 596590 - DNA, 33 bp, Homo sapien
agccagacatgtaacagaggcatttttatgtat

SEQ ID NO: 596591 - DNA, 33 bp, Homo sapien
ttcggtgcttggattacactatatttggaattt

SEQ ID NO: 596592 - DNA, 33 bp, Homo sapien
ttcggtgcttggattatactatatttggaattt

SEQ ID NO: 596593 - DNA, 33 bp, Homo sapien
ctctttcagtctgaaacagcttcttagtcttcc

SEQ ID NO: 596594 - DNA, 33 bp, Homo sapien
ctctttcagtctgaaatagcttcttagtcttcc

SEQ ID NO: 596595 - DNA, 33 bp, Homo sapien
ggccctttcttcctcaaatgtcctcggctctat

SEQ ID NO: 596596 - DNA, 33 bp, Homo sapien
ggccctttcttcctcagatgtcctcggctctat

SEQ ID NO: 596597 - DNA, 33 bp, Homo sapien
agcgtgcaggtagagcaccaccgctggagtctg

SEQ ID NO: 596598 - DNA, 33 bp, Homo sapien
agcgtgcaggtagagcgccaccgctggagtctg

SEQ ID NO: 596599 - DNA, 33 bp, Homo sapien
cgcctgtaggctctaaccctgaggcatgggcct

SEQ ID NO: 596600 - DNA, 33 bp, Homo sapien
cgcctgtaggctctaatcctgaggcatgggcct

SEQ ID NO: 596601 - DNA, 33 bp, Homo sapien
agcttccttgtagtcacgcaaggagtggccagt

SEQ ID NO: 596602 - DNA, 33 bp, Homo sapien
agcttccttgtagtcatgcaaggagtggccagt

SEQ ID NO: 596603 - DNA, 33 bp, Homo sapien
tttatgagattgccgagctgtcacctaagaaat

SEQ ID NO: 596604 - DNA, 33 bp, Homo sapien
tttatgagattgccgatctgtcacctaagaaat

SEQ ID NO: 596605 - DNA, 33 bp, Homo sapien
acctccccaccaaatcaaagcacaaccaggaca

SEQ ID NO: 596606 - DNA, 33 bp, Homo sapien
acctccccaccaaatcgaagcacaaccaggaca

SEQ ID NO: 596607 - DNA, 33 bp, Homo sapien
tcggagcgtataaaagactacagaatatgctaa

SEQ ID NO: 596608 - DNA, 33 bp, Homo sapien
tcggagcgtataaaagcctacagaatatgctaa

SEQ ID NO: 596609 - DNA, 33 bp, Homo sapien
ccaacctgggtaacaaagtcatatcctctctaa

SEQ ID NO: 596610 - DNA, 33 bp, Homo sapien
ccaacctgggtaacaatgtcatatcctctctaa

SEQ ID NO: 596611 - DNA, 33 bp, Homo sapien
aagcgaggtctgactccgaccgtcctgggtaca

SEQ ID NO: 596612 - DNA, 33 bp, Homo sapien
aagcgaggtctgactctgaccgtcctgggtaca

SEQ ID NO: 596613 - DNA, 33 bp, Homo sapien
ttgagcaaatatttaacgagtgttgcaatcgaa

SEQ ID NO: 596614 - DNA, 33 bp, Homo sapien
ttgagcaaatatttaatgagtgttgcaatcgaa

SEQ ID NO: 596615 - DNA, 33 bp, Homo sapien
gcggtcctcaggacaactctgtgaggtaggtga

SEQ ID NO: 596616 - DNA, 33 bp, Homo sapien
gcggtcctcaggacaattctgtgaggtaggtga

SEQ ID NO: 596617 - DNA, 33 bp, Homo sapien
cccatccttgagatcccgatggaaatgtgtctt

SEQ ID NO: 596618 - DNA, 33 bp, Homo sapien
cccatccttgagatcctgatggaaatgtgtctt

SEQ ID NO: 596619 - DNA, 33 bp, Homo sapien
catttaggttcggcaacgacacagattcacaga

SEQ ID NO: 596620 - DNA, 33 bp, Homo sapien
catttaggttcggcaatgacacagattcacaga

SEQ ID NO: 596621 - DNA, 33 bp, Homo sapien
cccgccactttgatctaacctagctgggtgcac

SEQ ID NO: 596622 - DNA, 33 bp, Homo sapien
cccgccactttgatctgacctagctgggtgcac

SEQ ID NO: 596623 - DNA, 33 bp, Homo sapien
aatctgacagatacacaagagagaactccaggg

SEQ ID NO: 596624 - DNA, 33 bp, Homo sapien
aatctgacagatacacgagagagaactccaggg

SEQ ID NO: 596625 - DNA, 33 bp, Homo sapien
ataaaacatttttggcaagaacacatcctggat

SEQ ID NO: 596626 - DNA, 33 bp, Homo sapien
ataaaacatttttggcgagaacacatcctggat

SEQ ID NO: 596627 - DNA, 33 bp, Homo sapien
aaccctatagcgctagaaaggcaggaaggatgg

SEQ ID NO: 596628 - DNA, 33 bp, Homo sapien
aaccctatagcgctaggaaggcaggaaggatgg

SEQ ID NO: 596629 - DNA, 33 bp, Homo sapien
ggatacactgaacatacgtggtgtgtaaataaa

SEQ ID NO: 596630 - DNA, 33 bp, Homo sapien
ggatacactgaacatatgtggtgtgtaaataaa

SEQ ID NO: 596631 - DNA, 33 bp, Homo sapien
tcttttccaattttctaaacaagacctgtctgg

SEQ ID NO: 596632 - DNA, 33 bp, Homo sapien
tcttttccaattttctgaacaagacctgtctgg

SEQ ID NO: 596633 - DNA, 33 bp, Homo sapien
ataattggggcaaaaacgttcttgggtgaaact

SEQ ID NO: 596634 - DNA, 33 bp, Homo sapien
ataattggggcaaaaatgttcttgggtgaaact

SEQ ID NO: 596635 - DNA, 33 bp, Homo sapien
ttctgaatgataggacgctgcacagcatgcagt

SEQ ID NO: 596636 - DNA, 33 bp, Homo sapien
ttctgaatgataggactctgcacagcatgcagt

SEQ ID NO: 596637 - DNA, 33 bp, Homo sapien
aatactacaaatactacgcttgtgggaaggttc

SEQ ID NO: 596638 - DNA, 33 bp, Homo sapien
aatactacaaatactatgcttgtgggaaggttc

SEQ ID NO: 596639 - DNA, 33 bp, Homo sapien
ctctccgtcctctcccaggctgactcttcagtt

SEQ ID NO: 596640 - DNA, 33 bp, Homo sapien
ctctccgtcctctcccgggctgactcttcagtt

SEQ ID NO: 596641 - DNA, 33 bp, Homo sapien
ataaaccagattgttgaattaccaggatagatg

SEQ ID NO: 596642 - DNA, 33 bp, Homo sapien
ataaaccagattgttgcattaccaggatagatg

SEQ ID NO: 596643 - DNA, 33 bp, Homo sapien
agacaaaatgaatgtcaaaaatgaaatcaggct

SEQ ID NO: 596644 - DNA, 33 bp, Homo sapien
agacaaaatgaatgtcgaaaatgaaatcaggct

SEQ ID NO: 596645 - DNA, 33 bp, Homo sapien
ccaccattcctgttccaaatttctattgtagaa

SEQ ID NO: 596646 - DNA, 33 bp, Homo sapien
ccaccattcctgttccgaatttctattgtagaa

SEQ ID NO: 596647 - DNA, 33 bp, Homo sapien
tagccctggcctctgacgctacaacaaacaaga

SEQ ID NO: 596648 - DNA, 33 bp, Homo sapien
tagccctggcctctgatgctacaacaaacaaga

SEQ ID NO: 596649 - DNA, 33 bp, Homo sapien
cttttacaattctgataagcaaagccattgtct

SEQ ID NO: 596650 - DNA, 33 bp, Homo sapien
cttttacaattctgatgagcaaagccattgtct

SEQ ID NO: 596651 - DNA, 33 bp, Homo sapien
caatggctacaggggacgattctgtcagtacac

SEQ ID NO: 596652 - DNA, 33 bp, Homo sapien
caatggctacaggggatgattctgtcagtacac

SEQ ID NO: 596653 - DNA, 33 bp, Homo sapien
aaagccccacaatacccatggccaggacaattg

SEQ ID NO: 596654 - DNA, 33 bp, Homo sapien
aaagccccacaatacctatggccaggacaattg

SEQ ID NO: 596655 - DNA, 33 bp, Homo sapien
attactgatgccattccaggttagaggcacttc

SEQ ID NO: 596656 - DNA, 33 bp, Homo sapien
attactgatgccattctaggttagaggcacttc

SEQ ID NO: 596657 - DNA, 33 bp, Homo sapien
atcggaacccgagaaacgctcacagtctccatg

SEQ ID NO: 596658 - DNA, 33 bp, Homo sapien
atcggaacccgagaaatgctcacagtctccatg

SEQ ID NO: 596659 - DNA, 33 bp, Homo sapien
ttaagggcctccacaacgtgtctacaacctgcc

SEQ ID NO: 596660 - DNA, 33 bp, Homo sapien
ttaagggcctccacaatgtgtctacaacctgcc

SEQ ID NO: 596661 - DNA, 33 bp, Homo sapien
gaccaaggtctagaaacgtagctggaaaatgct

SEQ ID NO: 596662 - DNA, 33 bp, Homo sapien
gaccaaggtctagaaatgtagctggaaaatgct

SEQ ID NO: 596663 - DNA, 33 bp, Homo sapien
gagtctagctgtagaagaaactcctagaagaag

SEQ ID NO: 596664 - DNA, 33 bp, Homo sapien
gagtctagctgtagaataaactcctagaagaag

SEQ ID NO: 596665 - DNA, 33 bp, Homo sapien
actcctagaagaagaactggtagatcaaagggt

SEQ ID NO: 596666 - DNA, 33 bp, Homo sapien
actcctagaagaagaattggtagatcaaagggt

SEQ ID NO: 596667 - DNA, 33 bp, Homo sapien
ctagaagaaatgacaacagaaattcataaaaga

SEQ ID NO: 596668 - DNA, 33 bp, Homo sapien
ctagaagaaatgacaatagaaattcataaaaga

SEQ ID NO: 596669 - DNA, 33 bp, Homo sapien
tatctgtagcctcccaagtcatcaacttcttcc

SEQ ID NO: 596670 - DNA, 33 bp, Homo sapien
tatctgtagcctcccatgtcatcaacttcttcc

SEQ ID NO: 596671 - DNA, 33 bp, Homo sapien
acagctaatagacgcaaaacccttccttcatgt

SEQ ID NO: 596672 - DNA, 33 bp, Homo sapien
acagctaatagacgcagaacccttccttcatgt

SEQ ID NO: 596673 - DNA, 33 bp, Homo sapien
aaataacacgtggtcaatatgagagacttcaga

SEQ ID NO: 596674 - DNA, 33 bp, Homo sapien
aaataacacgtggtcattatgagagacttcaga

SEQ ID NO: 596675 - DNA, 33 bp, Homo sapien
gggagtcaccctttcacgtcaacggagtcaatt

SEQ ID NO: 596676 - DNA, 33 bp, Homo sapien
gggagtcaccctttcatgtcaacggagtcaatt

SEQ ID NO: 596677 - DNA, 33 bp, Homo sapien
tcccatccatggtgaactcttatagtgactggc

SEQ ID NO: 596678 - DNA, 33 bp, Homo sapien
tcccatccatggtgaattcttatagtgactggc

SEQ ID NO: 596679 - DNA, 33 bp, Homo sapien
tagacacggacattcaccatatcgagaccaggc

SEQ ID NO: 596680 - DNA, 33 bp, Homo sapien
tagacacggacattcatcatatcgagaccaggc

SEQ ID NO: 596681 - DNA, 33 bp, Homo sapien
taacatggaacttggaaatttaccaaagaagct

SEQ ID NO: 596682 - DNA, 33 bp, Homo sapien
taacatggaacttggagatttaccaaagaagct

SEQ ID NO: 596683 - DNA, 33 bp, Homo sapien
tgtgttcttaggcagacgactgtgggtttcagg

SEQ ID NO: 596684 - DNA, 33 bp, Homo sapien
tgtgttcttaggcagatgactgtgggtttcagg

SEQ ID NO: 596685 - DNA, 33 bp, Homo sapien
ctggaaggagagaggacaagacctgtcaaacag

SEQ ID NO: 596686 - DNA, 33 bp, Homo sapien
ctggaaggagagaggataagacctgtcaaacag

SEQ ID NO: 596687 - DNA, 33 bp, Homo sapien
cagacaaaagtgaggaagtgttaggctctttga

SEQ ID NO: 596688 - DNA, 33 bp, Homo sapien
cagacaaaagtgaggatgtgttaggctctttga

SEQ ID NO: 596689 - DNA, 33 bp, Homo sapien
agcatatagaaaagtacgatcttgtgtttacaa

SEQ ID NO: 596690 - DNA, 33 bp, Homo sapien
agcatatagaaaagtatgatcttgtgtttacaa

SEQ ID NO: 596691 - DNA, 33 bp, Homo sapien
cttttacgcaatttacagagaacactgagtcag

SEQ ID NO: 596692 - DNA, 33 bp, Homo sapien
cttttacgcaatttacggagaacactgagtcag

SEQ ID NO: 596693 - DNA, 33 bp, Homo sapien
tatataaaacatattacccaattcctaagtcac

SEQ ID NO: 596694 - DNA, 33 bp, Homo sapien
tatataaaacatattatccaattcctaagtcac

SEQ ID NO: 596695 - DNA, 33 bp, Homo sapien
atccaaaagcaaaaacaatacatcatctggtga

SEQ ID NO: 596696 - DNA, 33 bp, Homo sapien
atccaaaagcaaaaacgatacatcatctggtga

SEQ ID NO: 596697 - DNA, 33 bp, Homo sapien
actatttttatttacaaacaacatgatcatcta

SEQ ID NO: 596698 - DNA, 33 bp, Homo sapien
actatttttatttacagacaacatgatcatcta

SEQ ID NO: 596699 - DNA, 33 bp, Homo sapien
aggtgcaaaggccctaaggagttcagagccttt

SEQ ID NO: 596700 - DNA, 33 bp, Homo sapien
aggtgcaaaggccctatggagttcagagccttt

SEQ ID NO: 596701 - DNA, 33 bp, Homo sapien
taagtcttgggcttcccattaactgctaggctt

SEQ ID NO: 596702 - DNA, 33 bp, Homo sapien
taagtcttgggcttcctattaactgctaggctt

SEQ ID NO: 596703 - DNA, 33 bp, Homo sapien
tctatccgacccagcccgataattactttcagt

SEQ ID NO: 596704 - DNA, 33 bp, Homo sapien
tctatccgacccagcctgataattactttcagt

SEQ ID NO: 596705 - DNA, 33 bp, Homo sapien
cctaaggaaagagtcacgtatacacttacacag

SEQ ID NO: 596706 - DNA, 33 bp, Homo sapien
cctaaggaaagagtcatgtatacacttacacag

SEQ ID NO: 596707 - DNA, 33 bp, Homo sapien
aaatcagcaaatgctaccgaattaggagctggg

SEQ ID NO: 596708 - DNA, 33 bp, Homo sapien
aaatcagcaaatgctatcgaattaggagctggg

SEQ ID NO: 596709 - DNA, 33 bp, Homo sapien
gcccaaaatgtcataccgaatactaaatgaaag

SEQ ID NO: 596710 - DNA, 33 bp, Homo sapien
gcccaaaatgtcatactgaatactaaatgaaag

SEQ ID NO: 596711 - DNA, 33 bp, Homo sapien
tgagcatagcttgtcccaaccactgtgttagat

SEQ ID NO: 596712 - DNA, 33 bp, Homo sapien
tgagcatagcttgtcctaaccactgtgttagat

SEQ ID NO: 596713 - DNA, 33 bp, Homo sapien
aagtgataaatgcatacggataaacattaaagt

SEQ ID NO: 596714 - DNA, 33 bp, Homo sapien
aagtgataaatgcatatggataaacattaaagt

SEQ ID NO: 596715 - DNA, 33 bp, Homo sapien
atataaacacatgaaaataccaagaggagaaga

SEQ ID NO: 596716 - DNA, 33 bp, Homo sapien
atataaacacatgaaagtaccaagaggagaaga

SEQ ID NO: 596717 - DNA, 33 bp, Homo sapien
accagactcatcggaaccagactgagagagggc

SEQ ID NO: 596718 - DNA, 33 bp, Homo sapien
accagactcatcggaagcagactgagagagggc

SEQ ID NO: 596719 - DNA, 33 bp, Homo sapien
aaagttttaatgaccaagtctaagggttggagt

SEQ ID NO: 596720 - DNA, 33 bp, Homo sapien
aaagttttaatgaccaggtctaagggttggagt

SEQ ID NO: 596721 - DNA, 33 bp, Homo sapien
cagtgatggccgtttaccattgcctggtattca

SEQ ID NO: 596722 - DNA, 33 bp, Homo sapien
cagtgatggccgtttagcattgcctggtattca

SEQ ID NO: 596723 - DNA, 33 bp, Homo sapien
actatatgggctctgaaaggaataggactatgc

SEQ ID NO: 596724 - DNA, 33 bp, Homo sapien
actatatgggctctgataggaataggactatgc

SEQ ID NO: 596725 - DNA, 33 bp, Homo sapien
tggtgaatagttcaaaatgggactgtgggaaag

SEQ ID NO: 596726 - DNA, 33 bp, Homo sapien
tggtgaatagttcaaagtgggactgtgggaaag

SEQ ID NO: 596727 - DNA, 33 bp, Homo sapien
gaatgtgactttaaacaaattgtaaaaagtagg

SEQ ID NO: 596728 - DNA, 33 bp, Homo sapien
gaatgtgactttaaacgaattgtaaaaagtagg

SEQ ID NO: 596729 - DNA, 33 bp, Homo sapien
aggtcctcagtaaatacgtggtagaattaatag

SEQ ID NO: 596730 - DNA, 33 bp, Homo sapien
aggtcctcagtaaatatgtggtagaattaatag

SEQ ID NO: 596731 - DNA, 33 bp, Homo sapien
gtagttcatcacactcaattatctctaaccctc

SEQ ID NO: 596732 - DNA, 33 bp, Homo sapien
gtagttcatcacactcgattatctctaaccctc

SEQ ID NO: 596733 - DNA, 33 bp, Homo sapien
cgatataagcgataaacgattccacccaaaaat

SEQ ID NO: 596734 - DNA, 33 bp, Homo sapien
cgatataagcgataaaggattccacccaaaaat

SEQ ID NO: 596735 - DNA, 33 bp, Homo sapien
tttctggttaaagtcaatatgtgtgtgaaggcc

SEQ ID NO: 596736 - DNA, 33 bp, Homo sapien
tttctggttaaagtcagtatgtgtgtgaaggcc

SEQ ID NO: 596737 - DNA, 33 bp, Homo sapien
tattatagcaacaacactagctgtctctagttc

SEQ ID NO: 596738 - DNA, 33 bp, Homo sapien
tattatagcaacaacattagctgtctctagttc

SEQ ID NO: 596739 - DNA, 33 bp, Homo sapien
gggctcagcttgtctacaataaacacaagataa

SEQ ID NO: 596740 - DNA, 33 bp, Homo sapien
gggctcagcttgtctataataaacacaagataa

SEQ ID NO: 596741 - DNA, 33 bp, Homo sapien
agaattttacatggaaacaagattaagaaagat

SEQ ID NO: 596742 - DNA, 33 bp, Homo sapien
agaattttacatggaaccaagattaagaaagat

SEQ ID NO: 596743 - DNA, 33 bp, Homo sapien
cggaagtcgctctaaaaacaacagtggtgcaca

SEQ ID NO: 596744 - DNA, 33 bp, Homo sapien
cggaagtcgctctaaagacaacagtggtgcaca

SEQ ID NO: 596745 - DNA, 33 bp, Homo sapien
accaggaagcagattacgaggagtggggagtca

SEQ ID NO: 596746 - DNA, 33 bp, Homo sapien
accaggaagcagattatgaggagtggggagtca

SEQ ID NO: 596747 - DNA, 33 bp, Homo sapien
ttctgggtttaaggaaggagaacagtaaatagc

SEQ ID NO: 596748 - DNA, 33 bp, Homo sapien
ttctgggtttaaggaatgagaacagtaaatagc

SEQ ID NO: 596749 - DNA, 33 bp, Homo sapien
aacttaagactgttcaaattccctgttagaaaa

SEQ ID NO: 596750 - DNA, 33 bp, Homo sapien
aacttaagactgttcagattccctgttagaaaa

SEQ ID NO: 596751 - DNA, 33 bp, Homo sapien
gctgccaattgaagtgaagattcaaggcaactt

SEQ ID NO: 596752 - DNA, 33 bp, Homo sapien
gctgccaattgaagtgcagattcaaggcaactt

SEQ ID NO: 596753 - DNA, 33 bp, Homo sapien
gagagaatagaccatcaagtataagagggagaa

SEQ ID NO: 596754 - DNA, 33 bp, Homo sapien
gagagaatagaccatcgagtataagagggagaa

SEQ ID NO: 596755 - DNA, 33 bp, Homo sapien
gaagaattagtttcgaaggggtcatttctccca

SEQ ID NO: 596756 - DNA, 33 bp, Homo sapien
gaagaattagtttcgacggggtcatttctccca

SEQ ID NO: 596757 - DNA, 33 bp, Homo sapien
tctaggagggaggacacgcaaaaaaccagtaac

SEQ ID NO: 596758 - DNA, 33 bp, Homo sapien
tctaggagggaggacaggcaaaaaaccagtaac

SEQ ID NO: 596759 - DNA, 33 bp, Homo sapien
actcatgaagtcattaaaaacagggttcaacat

SEQ ID NO: 596760 - DNA, 33 bp, Homo sapien
actcatgaagtcattagaaacagggttcaacat

SEQ ID NO: 596761 - DNA, 33 bp, Homo sapien
ggaaaccacatagtaaaagtgatcctctaagga

SEQ ID NO: 596762 - DNA, 33 bp, Homo sapien
ggaaaccacatagtaagagtgatcctctaagga

SEQ ID NO: 596763 - DNA, 33 bp, Homo sapien
tttcccagtggctgacacttcatccaagccgca

SEQ ID NO: 596764 - DNA, 33 bp, Homo sapien
tttcccagtggctgacgcttcatccaagccgca

SEQ ID NO: 596765 - DNA, 33 bp, Homo sapien
tgagcagggagaagacagaaggtatgaataagc

SEQ ID NO: 596766 - DNA, 33 bp, Homo sapien
tgagcagggagaagacggaaggtatgaataagc

SEQ ID NO: 596767 - DNA, 33 bp, Homo sapien
caaggagatgaatggacgagtaagtgaatgaat

SEQ ID NO: 596768 - DNA, 33 bp, Homo sapien
caaggagatgaatggatgagtaagtgaatgaat

SEQ ID NO: 596769 - DNA, 33 bp, Homo sapien
aggatgaccttcactaacatatacggtttcaag

SEQ ID NO: 596770 - DNA, 33 bp, Homo sapien
aggatgaccttcactagcatatacggtttcaag

SEQ ID NO: 596771 - DNA, 33 bp, Homo sapien
cccccagccttttgtcacttaacatgtttcttt

SEQ ID NO: 596772 - DNA, 33 bp, Homo sapien
cccccagccttttgtcgcttaacatgtttcttt

SEQ ID NO: 596773 - DNA, 33 bp, Homo sapien
agtgtaacacaataaaaaatagtaagatgcaac

SEQ ID NO: 596774 - DNA, 33 bp, Homo sapien
agtgtaacacaataaagaatagtaagatgcaac

SEQ ID NO: 596775 - DNA, 33 bp, Homo sapien
ccttcaaaagtagtaacctagatacaagtagtt

SEQ ID NO: 596776 - DNA, 33 bp, Homo sapien
ccttcaaaagtagtaagctagatacaagtagtt

SEQ ID NO: 596777 - DNA, 33 bp, Homo sapien
agtgtcttttataatacgtatcactggcaaaaa

SEQ ID NO: 596778 - DNA, 33 bp, Homo sapien
agtgtcttttataatatgtatcactggcaaaaa

SEQ ID NO: 596779 - DNA, 33 bp, Homo sapien
ctttgtgcgctgtggacgttttccctatagtta

SEQ ID NO: 596780 - DNA, 33 bp, Homo sapien
ctttgtgcgctgtggatgttttccctatagtta

SEQ ID NO: 596781 - DNA, 33 bp, Homo sapien
aatgtatgaatgtctcaatatactgatcacaaa

SEQ ID NO: 596782 - DNA, 33 bp, Homo sapien
aatgtatgaatgtctcgatatactgatcacaaa

SEQ ID NO: 596783 - DNA, 33 bp, Homo sapien
ccctgtcaagtaaaaacagcatggtctttctgt

SEQ ID NO: 596784 - DNA, 33 bp, Homo sapien
ccctgtcaagtaaaaatagcatggtctttctgt

SEQ ID NO: 596785 - DNA, 33 bp, Homo sapien
acttctgtagatgggactacaatacaggcatta

SEQ ID NO: 596786 - DNA, 33 bp, Homo sapien
acttctgtagatgggattacaatacaggcatta

SEQ ID NO: 596787 - DNA, 33 bp, Homo sapien
gagagagacagagagagaatgagaattcagcaa

SEQ ID NO: 596788 - DNA, 33 bp, Homo sapien
gagagagacagagagataatgagaattcagcaa

SEQ ID NO: 596789 - DNA, 33 bp, Homo sapien
tctttatttactaaccccgaggcaggatttcac

SEQ ID NO: 596790 - DNA, 33 bp, Homo sapien
tctttatttactaacctcgaggcaggatttcac

SEQ ID NO: 596791 - DNA, 33 bp, Homo sapien
atttagaataaaggaacggctagacacagtggc

SEQ ID NO: 596792 - DNA, 33 bp, Homo sapien
atttagaataaaggaatggctagacacagtggc

SEQ ID NO: 596793 - DNA, 33 bp, Homo sapien
ttgggattaaaaaataagtaatctggctgggcg

SEQ ID NO: 596794 - DNA, 33 bp, Homo sapien
ttgggattaaaaaatatgtaatctggctgggcg

SEQ ID NO: 596795 - DNA, 33 bp, Homo sapien
cacattgaacaaagcaagaagaggaaaaaggaa

SEQ ID NO: 596796 - DNA, 33 bp, Homo sapien
cacattgaacaaagcaggaagaggaaaaaggaa

SEQ ID NO: 596797 - DNA, 33 bp, Homo sapien
cattgcgtcctttcccaaagagtctgttcccat

SEQ ID NO: 596798 - DNA, 33 bp, Homo sapien
cattgcgtcctttcccgaagagtctgttcccat

SEQ ID NO: 596799 - DNA, 33 bp, Homo sapien
gtacacttcctttcacccctttcacggacacaa

SEQ ID NO: 596800 - DNA, 33 bp, Homo sapien
gtacacttcctttcactcctttcacggacacaa

SEQ ID NO: 596801 - DNA, 33 bp, Homo sapien
cacacagtgttgaatacgtcatggagtttattg

SEQ ID NO: 596802 - DNA, 33 bp, Homo sapien
cacacagtgttgaatatgtcatggagtttattg

SEQ ID NO: 596803 - DNA, 33 bp, Homo sapien
tggttaccaagttacaaaactctactatcttaa

SEQ ID NO: 596804 - DNA, 33 bp, Homo sapien
tggttaccaagttacagaactctactatcttaa

SEQ ID NO: 596805 - DNA, 33 bp, Homo sapien
catctactgtggcaaacacgtacacacaagcat

SEQ ID NO: 596806 - DNA, 33 bp, Homo sapien
catctactgtggcaaatacgtacacacaagcat

SEQ ID NO: 596807 - DNA, 33 bp, Homo sapien
tgggacgataaagagaactgtaaacttaatttt

SEQ ID NO: 596808 - DNA, 33 bp, Homo sapien
tgggacgataaagagagctgtaaacttaatttt

SEQ ID NO: 596809 - DNA, 33 bp, Homo sapien
ttgctgtggctgccaacctagttattccctgac

SEQ ID NO: 596810 - DNA, 33 bp, Homo sapien
ttgctgtggctgccaatctagttattccctgac

SEQ ID NO: 596811 - DNA, 33 bp, Homo sapien
ttctcatggctggaaaattcaagattggacagc

SEQ ID NO: 596812 - DNA, 33 bp, Homo sapien
ttctcatggctggaaagttcaagattggacagc

SEQ ID NO: 596813 - DNA, 33 bp, Homo sapien
ctctgtaaatggaaaaagtatataaactcataa

SEQ ID NO: 596814 - DNA, 33 bp, Homo sapien
ctctgtaaatggaaaaggtatataaactcataa

SEQ ID NO: 596815 - DNA, 33 bp, Homo sapien
cctaccccagctacacaaagcttgttaggaaca

SEQ ID NO: 596816 - DNA, 33 bp, Homo sapien
cctaccccagctacacgaagcttgttaggaaca

SEQ ID NO: 596817 - DNA, 33 bp, Homo sapien
ttccaacctaaatgaaagaactgtagaagcatc

SEQ ID NO: 596818 - DNA, 33 bp, Homo sapien
ttccaacctaaatgaaggaactgtagaagcatc

SEQ ID NO: 596819 - DNA, 33 bp, Homo sapien
tcagcagacaaactcagagtgactaaatccggg

SEQ ID NO: 596820 - DNA, 33 bp, Homo sapien
tcagcagacaaactcatagtgactaaatccggg

SEQ ID NO: 596821 - DNA, 33 bp, Homo sapien
tctccaccagtgataaaccttccttctaataat

SEQ ID NO: 596822 - DNA, 33 bp, Homo sapien
tctccaccagtgataacccttccttctaataat

SEQ ID NO: 596823 - DNA, 33 bp, Homo sapien
ggatgaactaatcccacgtggcaagataaactg

SEQ ID NO: 596824 - DNA, 33 bp, Homo sapien
ggatgaactaatcccatgtggcaagataaactg

SEQ ID NO: 596825 - DNA, 33 bp, Homo sapien
tctcactgccaccatcaattaataagaactgac

SEQ ID NO: 596826 - DNA, 33 bp, Homo sapien
tctcactgccaccatcgattaataagaactgac

SEQ ID NO: 596827 - DNA, 33 bp, Homo sapien
ttgggatagaagaaacaaaattaccatctttgc

SEQ ID NO: 596828 - DNA, 33 bp, Homo sapien
ttgggatagaagaaacgaaattaccatctttgc

SEQ ID NO: 596829 - DNA, 33 bp, Homo sapien
tgttaaatttagcctgcacgcttatatcatgag

SEQ ID NO: 596830 - DNA, 33 bp, Homo sapien
tgttaaatttagcctgtacgcttatatcatgag

SEQ ID NO: 596831 - DNA, 33 bp, Homo sapien
atctgccacaagagataatacttcatttatgag

SEQ ID NO: 596832 - DNA, 33 bp, Homo sapien
atctgccacaagagatgatacttcatttatgag

SEQ ID NO: 596833 - DNA, 33 bp, Homo sapien
tattaataaatggcaacgtttattgtcctgtgg

SEQ ID NO: 596834 - DNA, 33 bp, Homo sapien
tattaataaatggcaatgtttattgtcctgtgg

SEQ ID NO: 596835 - DNA, 33 bp, Homo sapien
ggaatatgctagaggactattctaccctctagc

SEQ ID NO: 596836 - DNA, 33 bp, Homo sapien
ggaatatgctagaggagtattctaccctctagc

SEQ ID NO: 596837 - DNA, 33 bp, Homo sapien
atctccctaaaacacactgtatcctctctccta

SEQ ID NO: 596838 - DNA, 33 bp, Homo sapien
atctccctaaaacacattgtatcctctctccta

SEQ ID NO: 596839 - DNA, 33 bp, Homo sapien
cataatatgtaacccacctgtttctttctgtgc

SEQ ID NO: 596840 - DNA, 33 bp, Homo sapien
cataatatgtaacccatctgtttctttctgtgc

SEQ ID NO: 596841 - DNA, 33 bp, Homo sapien
ataaatgtgctagttacataatagtgttcttgg

SEQ ID NO: 596842 - DNA, 33 bp, Homo sapien
ataaatgtgctagttatataatagtgttcttgg

SEQ ID NO: 596843 - DNA, 33 bp, Homo sapien
ttttttcactttatgacggcagtgcaaacagaa

SEQ ID NO: 596844 - DNA, 33 bp, Homo sapien
ttttttcactttatgatggcagtgcaaacagaa

SEQ ID NO: 596845 - DNA, 33 bp, Homo sapien
gaaatgcaagagacacagaatagtcaaagcaat

SEQ ID NO: 596846 - DNA, 33 bp, Homo sapien
gaaatgcaagagacaccgaatagtcaaagcaat

SEQ ID NO: 596847 - DNA, 33 bp, Homo sapien
attcccaggacatgggccagattcacaatcaca

SEQ ID NO: 596848 - DNA, 33 bp, Homo sapien
attcccaggacatgggtcagattcacaatcaca

SEQ ID NO: 596849 - DNA, 33 bp, Homo sapien
aagggtgcaccaacagcagagctcagatacaaa

SEQ ID NO: 596850 - DNA, 33 bp, Homo sapien
aagggtgcaccaacagtagagctcagatacaaa

SEQ ID NO: 596851 - DNA, 33 bp, Homo sapien
attatattcatgtcaccactagaggaaatggca

SEQ ID NO: 596852 - DNA, 33 bp, Homo sapien
attatattcatgtcacgactagaggaaatggca

SEQ ID NO: 596853 - DNA, 33 bp, Homo sapien
ttggcttctaaagaaacgaagagaaagcagccc

SEQ ID NO: 596854 - DNA, 33 bp, Homo sapien
ttggcttctaaagaaaggaagagaaagcagccc

SEQ ID NO: 596855 - DNA, 33 bp, Homo sapien
gtctccagaaaaatacacaagaaattggtaata

SEQ ID NO: 596856 - DNA, 33 bp, Homo sapien
gtctccagaaaaatacgcaagaaattggtaata

SEQ ID NO: 596857 - DNA, 33 bp, Homo sapien
ctcacaaaaataatgacgtgaaagtgttttgtg

SEQ ID NO: 596858 - DNA, 33 bp, Homo sapien
ctcacaaaaataatgatgtgaaagtgttttgtg

SEQ ID NO: 596859 - DNA, 33 bp, Homo sapien
tcacttttctcagccacactcttcccatgtgcc

SEQ ID NO: 596860 - DNA, 33 bp, Homo sapien
tcacttttctcagccagactcttcccatgtgcc

SEQ ID NO: 596861 - DNA, 33 bp, Homo sapien
tttaactgagtcagaaaattataaatagacttc

SEQ ID NO: 596862 - DNA, 33 bp, Homo sapien
tttaactgagtcagaagattataaatagacttc

SEQ ID NO: 596863 - DNA, 33 bp, Homo sapien
tagtgccaaggctgagaaacccggtcctggagg

SEQ ID NO: 596864 - DNA, 33 bp, Homo sapien
tagtgccaaggctgagcaacccggtcctggagg

SEQ ID NO: 596865 - DNA, 33 bp, Homo sapien
ggggattaagagctaacaagtcagtagctgagg

SEQ ID NO: 596866 - DNA, 33 bp, Homo sapien
ggggattaagagctaagaagtcagtagctgagg

SEQ ID NO: 596867 - DNA, 33 bp, Homo sapien
aggcaggaggataacccggatgaccttctgagg

SEQ ID NO: 596868 - DNA, 33 bp, Homo sapien
aggcaggaggataacctggatgaccttctgagg

SEQ ID NO: 596869 - DNA, 33 bp, Homo sapien
tgcctaaccttgtctaaaagcaaaaatatttaa

SEQ ID NO: 596870 - DNA, 33 bp, Homo sapien
tgcctaaccttgtctacaagcaaaaatatttaa

SEQ ID NO: 596871 - DNA, 33 bp, Homo sapien
ccttctcccctgtgtacgccatcataagggtgg

SEQ ID NO: 596872 - DNA, 33 bp, Homo sapien
ccttctcccctgtgtatgccatcataagggtgg

SEQ ID NO: 596873 - DNA, 33 bp, Homo sapien
gtgccacagtagagcaaagctggggtttatgca

SEQ ID NO: 596874 - DNA, 33 bp, Homo sapien
gtgccacagtagagcacagctggggtttatgca

SEQ ID NO: 596875 - DNA, 33 bp, Homo sapien
ggttctggttaataaaattcactgttgtgtgaa

SEQ ID NO: 596876 - DNA, 33 bp, Homo sapien
ggttctggttaataaagttcactgttgtgtgaa

SEQ ID NO: 596877 - DNA, 33 bp, Homo sapien
ggaaagggaagactgcaatcactccctgcaggg

SEQ ID NO: 596878 - DNA, 33 bp, Homo sapien
ggaaagggaagactgcgatcactccctgcaggg

SEQ ID NO: 596879 - DNA, 33 bp, Homo sapien
ggtccagaactctgacaaagtaactggacgtag

SEQ ID NO: 596880 - DNA, 33 bp, Homo sapien
ggtccagaactctgacgaagtaactggacgtag

SEQ ID NO: 596881 - DNA, 33 bp, Homo sapien
tctggacacagagcggcgctgccaccacagcag

SEQ ID NO: 596882 - DNA, 33 bp, Homo sapien
tctggacacagagcggtgctgccaccacagcag

SEQ ID NO: 596883 - DNA, 33 bp, Homo sapien
ggggcacggctcatcaactcaaacccacaactc

SEQ ID NO: 596884 - DNA, 33 bp, Homo sapien
ggggcacggctcatcagctcaaacccacaactc

SEQ ID NO: 596885 - DNA, 33 bp, Homo sapien
ataccactgacccataccgatgttgtcacatca

SEQ ID NO: 596886 - DNA, 33 bp, Homo sapien
ataccactgacccatagcgatgttgtcacatca

SEQ ID NO: 596887 - DNA, 33 bp, Homo sapien
cgatgttgtcacatcacggaggaataccactaa

SEQ ID NO: 596888 - DNA, 33 bp, Homo sapien
cgatgttgtcacatcatggaggaataccactaa

SEQ ID NO: 596889 - DNA, 33 bp, Homo sapien
aaattcttcttacagaaacaaactggaatattt

SEQ ID NO: 596890 - DNA, 33 bp, Homo sapien
aaattcttcttacagagacaaactggaatattt

SEQ ID NO: 596891 - DNA, 33 bp, Homo sapien
cgcgctgggaaacctcactctaaaacacacaca

SEQ ID NO: 596892 - DNA, 33 bp, Homo sapien
cgcgctgggaaacctcgctctaaaacacacaca

SEQ ID NO: 596893 - DNA, 33 bp, Homo sapien
gaaggagtttgcactacgacagtggttttcaag

SEQ ID NO: 596894 - DNA, 33 bp, Homo sapien
gaaggagtttgcactatgacagtggttttcaag

SEQ ID NO: 596895 - DNA, 33 bp, Homo sapien
gacgtggctaacggaaatactgctgccagtgtg

SEQ ID NO: 596896 - DNA, 33 bp, Homo sapien
gacgtggctaacggaagtactgctgccagtgtg

SEQ ID NO: 596897 - DNA, 33 bp, Homo sapien
gggagtgggacttctgaagcaaagataaaagaa

SEQ ID NO: 596898 - DNA, 33 bp, Homo sapien
gggagtgggacttctggagcaaagataaaagaa

SEQ ID NO: 596899 - DNA, 33 bp, Homo sapien
cgtccagacacactctaagaaaagtaccagaac

SEQ ID NO: 596900 - DNA, 33 bp, Homo sapien
cgtccagacacactctgagaaaagtaccagaac

SEQ ID NO: 596901 - DNA, 33 bp, Homo sapien
catgtttctggtcaccactgctctttcctcact

SEQ ID NO: 596902 - DNA, 33 bp, Homo sapien
catgtttctggtcaccgctgctctttcctcact

SEQ ID NO: 596903 - DNA, 33 bp, Homo sapien
gctgagaaggtagagaaaggccctgcactcttt

SEQ ID NO: 596904 - DNA, 33 bp, Homo sapien
gctgagaaggtagagagaggccctgcactcttt

SEQ ID NO: 596905 - DNA, 33 bp, Homo sapien
gcactgccagggcgatcactgccaggtgaagaa

SEQ ID NO: 596906 - DNA, 33 bp, Homo sapien
gcactgccagggcgattactgccaggtgaagaa

SEQ ID NO: 596907 - DNA, 33 bp, Homo sapien
agaatctcgccttgtccaaagagaggactccag

SEQ ID NO: 596908 - DNA, 33 bp, Homo sapien
agaatctcgccttgtctaaagagaggactccag

SEQ ID NO: 596909 - DNA, 33 bp, Homo sapien
gtactctcttggtctcaatgtgtgacgatacgc

SEQ ID NO: 596910 - DNA, 33 bp, Homo sapien
gtactctcttggtctcgatgtgtgacgatacgc

SEQ ID NO: 596911 - DNA, 33 bp, Homo sapien
atccaggtaaatgaacaagtgaagctgattcac

SEQ ID NO: 596912 - DNA, 33 bp, Homo sapien
atccaggtaaatgaacgagtgaagctgattcac

SEQ ID NO: 596913 - DNA, 33 bp, Homo sapien
tatcttcccctcacaacgcacttgctagacact

SEQ ID NO: 596914 - DNA, 33 bp, Homo sapien
tatcttcccctcacaatgcacttgctagacact

SEQ ID NO: 596915 - DNA, 33 bp, Homo sapien
gtgcatgtcatttaacactgtttgaacataaaa

SEQ ID NO: 596916 - DNA, 33 bp, Homo sapien
gtgcatgtcatttaacgctgtttgaacataaaa

SEQ ID NO: 596917 - DNA, 33 bp, Homo sapien
ggactgcagagcacgtcaagtggagcaaacctt

SEQ ID NO: 596918 - DNA, 33 bp, Homo sapien
ggactgcagagcacgtgaagtggagcaaacctt

SEQ ID NO: 596919 - DNA, 33 bp, Homo sapien
ccctggtgggaatcccaacttctccttatgcaa

SEQ ID NO: 596920 - DNA, 33 bp, Homo sapien
ccctggtgggaatcccgacttctccttatgcaa

SEQ ID NO: 596921 - DNA, 33 bp, Homo sapien
ttcagaataacaccacaagtgggagaaggccgc

SEQ ID NO: 596922 - DNA, 33 bp, Homo sapien
ttcagaataacaccacgagtgggagaaggccgc

SEQ ID NO: 596923 - DNA, 33 bp, Homo sapien
gccccgggcagcaaagccagctggtgcagtgcc

SEQ ID NO: 596924 - DNA, 33 bp, Homo sapien
gccccgggcagcaaaggcagctggtgcagtgcc

SEQ ID NO: 596925 - DNA, 33 bp, Homo sapien
tgcaattatatttttaaccaagcatcccaggtg

SEQ ID NO: 596926 - DNA, 33 bp, Homo sapien
tgcaattatatttttagccaagcatcccaggtg

SEQ ID NO: 596927 - DNA, 33 bp, Homo sapien
tgctagaagcctctgaaagacgggacgttccac

SEQ ID NO: 596928 - DNA, 33 bp, Homo sapien
tgctagaagcctctgacagacgggacgttccac

SEQ ID NO: 596929 - DNA, 33 bp, Homo sapien
gctggattcgagaggaccaaaacgaaggatgat

SEQ ID NO: 596930 - DNA, 33 bp, Homo sapien
gctggattcgagaggatcaaaacgaaggatgat

SEQ ID NO: 596931 - DNA, 33 bp, Homo sapien
gagtgacggcactgcaagctttactgtcaattt

SEQ ID NO: 596932 - DNA, 33 bp, Homo sapien
gagtgacggcactgcaggctttactgtcaattt

SEQ ID NO: 596933 - DNA, 33 bp, Homo sapien
ccgtggcactgttcccacattttgtcagctgca

SEQ ID NO: 596934 - DNA, 33 bp, Homo sapien
ccgtggcactgttcccgcattttgtcagctgca

SEQ ID NO: 596935 - DNA, 33 bp, Homo sapien
aacttggtttcacagtaaacggcaaaaacaaag

SEQ ID NO: 596936 - DNA, 33 bp, Homo sapien
aacttggtttcacagtcaacggcaaaaacaaag

SEQ ID NO: 596937 - DNA, 33 bp, Homo sapien
gaggtaagctggattgcagaattctcttgctcc

SEQ ID NO: 596938 - DNA, 33 bp, Homo sapien
gaggtaagctggattgtagaattctcttgctcc

SEQ ID NO: 596939 - DNA, 33 bp, Homo sapien
acctggtacttcaacaccctctgcttgagacac

SEQ ID NO: 596940 - DNA, 33 bp, Homo sapien
acctggtacttcaacagcctctgcttgagacac

SEQ ID NO: 596941 - DNA, 33 bp, Homo sapien
tgtgggaccggggctacgctctggcctccctct

SEQ ID NO: 596942 - DNA, 33 bp, Homo sapien
tgtgggaccggggctatgctctggcctccctct

SEQ ID NO: 596943 - DNA, 33 bp, Homo sapien
taacaaggaaatgcaacaaaggcaggagcatga

SEQ ID NO: 596944 - DNA, 33 bp, Homo sapien
taacaaggaaatgcaagaaaggcaggagcatga

SEQ ID NO: 596945 - DNA, 33 bp, Homo sapien
tgtgggaggtagttaactatggccagactccaa

SEQ ID NO: 596946 - DNA, 33 bp, Homo sapien
tgtgggaggtagttaattatggccagactccaa

SEQ ID NO: 596947 - DNA, 33 bp, Homo sapien
aacatccaacactagaccaacagctaagagaag

SEQ ID NO: 596948 - DNA, 33 bp, Homo sapien
aacatccaacactagagcaacagctaagagaag

SEQ ID NO: 596949 - DNA, 33 bp, Homo sapien
aggaacaacatgggaacgcctacggttaaatga

SEQ ID NO: 596950 - DNA, 33 bp, Homo sapien
aggaacaacatgggaatgcctacggttaaatga

SEQ ID NO: 596951 - DNA, 33 bp, Homo sapien
agattcacttggggaactgctagaatggtcatg

SEQ ID NO: 596952 - DNA, 33 bp, Homo sapien
agattcacttggggaattgctagaatggtcatg

SEQ ID NO: 596953 - DNA, 33 bp, Homo sapien
attctggtgtcactgccgatacagttttcagag

SEQ ID NO: 596954 - DNA, 33 bp, Homo sapien
attctggtgtcactgcggatacagttttcagag

SEQ ID NO: 596955 - DNA, 33 bp, Homo sapien
aatgagaacaaattcacgcttatgggttggaag

SEQ ID NO: 596956 - DNA, 33 bp, Homo sapien
aatgagaacaaattcatgcttatgggttggaag

SEQ ID NO: 596957 - DNA, 33 bp, Homo sapien
tcatcaagctgacactcagcaggatggagagga

SEQ ID NO: 596958 - DNA, 33 bp, Homo sapien
tcatcaagctgacacttagcaggatggagagga

SEQ ID NO: 596959 - DNA, 33 bp, Homo sapien
ggcaccgagtagtaacaactcagtatcttctat

SEQ ID NO: 596960 - DNA, 33 bp, Homo sapien
ggcaccgagtagtaacgactcagtatcttctat

SEQ ID NO: 596961 - DNA, 33 bp, Homo sapien
ggagagaaatacctcaagagatgaccggagaac

SEQ ID NO: 596962 - DNA, 33 bp, Homo sapien
ggagagaaatacctcacgagatgaccggagaac

SEQ ID NO: 596963 - DNA, 33 bp, Homo sapien
gagggaaggcagatgagatgggcatagacattg

SEQ ID NO: 596964 - DNA, 33 bp, Homo sapien
gagggaaggcagatgatatgggcatagacattg

SEQ ID NO: 596965 - DNA, 33 bp, Homo sapien
gccttccctccaatgacagcgagcgacatctgc

SEQ ID NO: 596966 - DNA, 33 bp, Homo sapien
gccttccctccaatgatagcgagcgacatctgc

SEQ ID NO: 596967 - DNA, 33 bp, Homo sapien
aatctcggggcttccaccaggattgtggtaggc

SEQ ID NO: 596968 - DNA, 33 bp, Homo sapien
aatctcggggcttccatcaggattgtggtaggc

SEQ ID NO: 596969 - DNA, 33 bp, Homo sapien
tgggagaaaagaaaccacagttttggctatagt

SEQ ID NO: 596970 - DNA, 33 bp, Homo sapien
tgggagaaaagaaaccccagttttggctatagt

SEQ ID NO: 596971 - DNA, 33 bp, Homo sapien
gctgaatgtgccaactcaagtcactttctcctc

SEQ ID NO: 596972 - DNA, 33 bp, Homo sapien
gctgaatgtgccaacttaagtcactttctcctc

SEQ ID NO: 596973 - DNA, 33 bp, Homo sapien
tttcacgagagcaacaatacttttttcactgga

SEQ ID NO: 596974 - DNA, 33 bp, Homo sapien
tttcacgagagcaacagtacttttttcactgga

SEQ ID NO: 596975 - DNA, 33 bp, Homo sapien
gcccttgtgccattagcaaagcggaggctgggt

SEQ ID NO: 596976 - DNA, 33 bp, Homo sapien
gcccttgtgccattaggaaagcggaggctgggt

SEQ ID NO: 596977 - DNA, 33 bp, Homo sapien
acaagaatccaactaacgtaactgaacacttag

SEQ ID NO: 596978 - DNA, 33 bp, Homo sapien
acaagaatccaactaatgtaactgaacacttag

SEQ ID NO: 596979 - DNA, 33 bp, Homo sapien
agcccatgctgctgaccaacaggagctaaagtg

SEQ ID NO: 596980 - DNA, 33 bp, Homo sapien
agcccatgctgctgacgaacaggagctaaagtg

SEQ ID NO: 596981 - DNA, 33 bp, Homo sapien
gacatcgggaaagtgacggcaacttcaaccaaa

SEQ ID NO: 596982 - DNA, 33 bp, Homo sapien
gacatcgggaaagtgatggcaacttcaaccaaa

SEQ ID NO: 596983 - DNA, 33 bp, Homo sapien
tgttatcatccttagcacctagaacctgttaaa

SEQ ID NO: 596984 - DNA, 33 bp, Homo sapien
tgttatcatccttagcgcctagaacctgttaaa

SEQ ID NO: 596985 - DNA, 33 bp, Homo sapien
ccacatttcttctaccagctgcatttgctatgc

SEQ ID NO: 596986 - DNA, 33 bp, Homo sapien
ccacatttcttctaccggctgcatttgctatgc

SEQ ID NO: 596987 - DNA, 33 bp, Homo sapien
atatgggaaggaaacacgcaccctggaacaccc

SEQ ID NO: 596988 - DNA, 33 bp, Homo sapien
atatgggaaggaaacatgcaccctggaacaccc

SEQ ID NO: 596989 - DNA, 33 bp, Homo sapien
aggtgagcagggcaacgagacggtgcgggacct

SEQ ID NO: 596990 - DNA, 33 bp, Homo sapien
aggtgagcagggcaactagacggtgcgggacct

SEQ ID NO: 596991 - DNA, 33 bp, Homo sapien
tgtccctactcccgtacgtccgttcacctgttg

SEQ ID NO: 596992 - DNA, 33 bp, Homo sapien
tgtccctactcccgtatgtccgttcacctgttg

SEQ ID NO: 596993 - DNA, 33 bp, Homo sapien
gctcggagtcacaggacgctccttaaagaactg

SEQ ID NO: 596994 - DNA, 33 bp, Homo sapien
gctcggagtcacaggatgctccttaaagaactg

SEQ ID NO: 596995 - DNA, 33 bp, Homo sapien
aagatacataaataaaaaacaagtcccctgagc

SEQ ID NO: 596996 - DNA, 33 bp, Homo sapien
aagatacataaataaacaacaagtcccctgagc

SEQ ID NO: 596997 - DNA, 33 bp, Homo sapien
atggttttccaggagccgaaagttgtccttgcc

SEQ ID NO: 596998 - DNA, 33 bp, Homo sapien
atggttttccaggagctgaaagttgtccttgcc

SEQ ID NO: 596999 - DNA, 33 bp, Homo sapien
ctgtctattggtcccccccagacactgtggact

SEQ ID NO: 597000 - DNA, 33 bp, Homo sapien
ctgtctattggtcccctccagacactgtggact

SEQ ID NO: 597001 - DNA, 33 bp, Homo sapien
aatagtcacagatgtaagagttggaccaaatta

SEQ ID NO: 597002 - DNA, 33 bp, Homo sapien
aatagtcacagatgtaggagttggaccaaatta

SEQ ID NO: 597003 - DNA, 33 bp, Homo sapien
gaaaaagaaacaagaagaatcattttccacaga

SEQ ID NO: 597004 - DNA, 33 bp, Homo sapien
gaaaaagaaacaagaataatcattttccacaga

SEQ ID NO: 597005 - DNA, 33 bp, Homo sapien
ttgaacacagagcgacagcggaagtcgagtttt

SEQ ID NO: 597006 - DNA, 33 bp, Homo sapien
ttgaacacagagcgacggcggaagtcgagtttt

SEQ ID NO: 597007 - DNA, 33 bp, Homo sapien
atcatccccagttttacggatgacaaggttttg

SEQ ID NO: 597008 - DNA, 33 bp, Homo sapien
atcatccccagttttatggatgacaaggttttg

SEQ ID NO: 597009 - DNA, 33 bp, Homo sapien
tttatagtgtattcaacagcttgagttaatttc

SEQ ID NO: 597010 - DNA, 33 bp, Homo sapien
tttatagtgtattcaatagcttgagttaatttc

SEQ ID NO: 597011 - DNA, 33 bp, Homo sapien
ccacctttggtaaagacgaatcctgtcttcttt

SEQ ID NO: 597012 - DNA, 33 bp, Homo sapien
ccacctttggtaaagatgaatcctgtcttcttt

SEQ ID NO: 597013 - DNA, 33 bp, Homo sapien
gctcgtccctaactcaatctgtgacaaccattc

SEQ ID NO: 597014 - DNA, 33 bp, Homo sapien
gctcgtccctaactcagtctgtgacaaccattc

SEQ ID NO: 597015 - DNA, 33 bp, Homo sapien
aacatgacacgcctacaaagaatgctgagctag

SEQ ID NO: 597016 - DNA, 33 bp, Homo sapien
aacatgacacgcctacgaagaatgctgagctag

SEQ ID NO: 597017 - DNA, 33 bp, Homo sapien
ttagtccaaagattaccgcttctgagttgatcc

SEQ ID NO: 597018 - DNA, 33 bp, Homo sapien
ttagtccaaagattactgcttctgagttgatcc

SEQ ID NO: 597019 - DNA, 33 bp, Homo sapien
cctatacataaagtcaataatcatgttcttcag

SEQ ID NO: 597020 - DNA, 33 bp, Homo sapien
cctatacataaagtcagtaatcatgttcttcag

SEQ ID NO: 597021 - DNA, 33 bp, Homo sapien
gacatagaacaagccacgtacctcttcttcatt

SEQ ID NO: 597022 - DNA, 33 bp, Homo sapien
gacatagaacaagccatgtacctcttcttcatt

SEQ ID NO: 597023 - DNA, 33 bp, Homo sapien
tgtcccaaagtagataccctataagctctcaga

SEQ ID NO: 597024 - DNA, 33 bp, Homo sapien
tgtcccaaagtagatatcctataagctctcaga

SEQ ID NO: 597025 - DNA, 33 bp, Homo sapien
gtgttggccaatcagacgaggactgcagaacag

SEQ ID NO: 597026 - DNA, 33 bp, Homo sapien
gtgttggccaatcagatgaggactgcagaacag

SEQ ID NO: 597027 - DNA, 33 bp, Homo sapien
ggaagcctgggcctgcaacagaccagaagacct

SEQ ID NO: 597028 - DNA, 33 bp, Homo sapien
ggaagcctgggcctgcgacagaccagaagacct

SEQ ID NO: 597029 - DNA, 33 bp, Homo sapien
tgagaatactcaagaaatggttatcttgggtag

SEQ ID NO: 597030 - DNA, 33 bp, Homo sapien
tgagaatactcaagaagtggttatcttgggtag

SEQ ID NO: 597031 - DNA, 33 bp, Homo sapien
ataaaatgtacaaaagcatatccagtgaaaaat

SEQ ID NO: 597032 - DNA, 33 bp, Homo sapien
ataaaatgtacaaaagtatatccagtgaaaaat

SEQ ID NO: 597033 - DNA, 33 bp, Homo sapien
accttcacttgcaaaaaaggctgagatatgtag

SEQ ID NO: 597034 - DNA, 33 bp, Homo sapien
accttcacttgcaaaagaggctgagatatgtag

SEQ ID NO: 597035 - DNA, 33 bp, Homo sapien
ctatttataagcactgcagtttggattccatgt

SEQ ID NO: 597036 - DNA, 33 bp, Homo sapien
ctatttataagcactgtagtttggattccatgt

SEQ ID NO: 597037 - DNA, 33 bp, Homo sapien
tcactagcttaacatcacgagcggtcaccggta

SEQ ID NO: 597038 - DNA, 33 bp, Homo sapien
tcactagcttaacatcccgagcggtcaccggta

SEQ ID NO: 597039 - DNA, 33 bp, Homo sapien
atctagatgaagagaaagtaaacaagataatgc

SEQ ID NO: 597040 - DNA, 33 bp, Homo sapien
atctagatgaagagaaggtaaacaagataatgc

SEQ ID NO: 597041 - DNA, 33 bp, Homo sapien
ttcctctgcaaggccacaagacactgctaagaa

SEQ ID NO: 597042 - DNA, 33 bp, Homo sapien
ttcctctgcaaggccagaagacactgctaagaa

SEQ ID NO: 597043 - DNA, 33 bp, Homo sapien
aatcaagttccatcaacaatttttagctggaaa

SEQ ID NO: 597044 - DNA, 33 bp, Homo sapien
aatcaagttccatcaagaatttttagctggaaa

SEQ ID NO: 597045 - DNA, 33 bp, Homo sapien
ttggacctttacctaacagattgtgctgaaatc

SEQ ID NO: 597046 - DNA, 33 bp, Homo sapien
ttggacctttacctaatagattgtgctgaaatc

SEQ ID NO: 597047 - DNA, 33 bp, Homo sapien
caccatctcagtagcaaggaaaaaataggcaga

SEQ ID NO: 597048 - DNA, 33 bp, Homo sapien
caccatctcagtagcagggaaaaaataggcaga

SEQ ID NO: 597049 - DNA, 33 bp, Homo sapien
gccagcacctcgctataaaacacactgagctgg

SEQ ID NO: 597050 - DNA, 33 bp, Homo sapien
gccagcacctcgctatgaaacacactgagctgg

SEQ ID NO: 597051 - DNA, 33 bp, Homo sapien
cttgttctgcactaaccggaaaaagaacctaga

SEQ ID NO: 597052 - DNA, 33 bp, Homo sapien
cttgttctgcactaactggaaaaagaacctaga

SEQ ID NO: 597053 - DNA, 33 bp, Homo sapien
acaattctactaaaaccacttgcaactcagcca

SEQ ID NO: 597054 - DNA, 33 bp, Homo sapien
acaattctactaaaactacttgcaactcagcca

SEQ ID NO: 597055 - DNA, 33 bp, Homo sapien
actgcaatcatttttacgtatcttatgcttgat

SEQ ID NO: 597056 - DNA, 33 bp, Homo sapien
actgcaatcatttttatgtatcttatgcttgat

SEQ ID NO: 597057 - DNA, 33 bp, Homo sapien
taactctgtgtagctacgcatgctcattgtgtg

SEQ ID NO: 597058 - DNA, 33 bp, Homo sapien
taactctgtgtagctatgcatgctcattgtgtg

SEQ ID NO: 597059 - DNA, 33 bp, Homo sapien
taatcacctctgtcataagcgattaggggaagg

SEQ ID NO: 597060 - DNA, 33 bp, Homo sapien
taatcacctctgtcatgagcgattaggggaagg

SEQ ID NO: 597061 - DNA, 33 bp, Homo sapien
tgtacctgcttagaggaagcctgtctgttgagc

SEQ ID NO: 597062 - DNA, 33 bp, Homo sapien
tgtacctgcttagaggcagcctgtctgttgagc

SEQ ID NO: 597063 - DNA, 33 bp, Homo sapien
gccacccccacccacacgatgtgcgatatgatt

SEQ ID NO: 597064 - DNA, 33 bp, Homo sapien
gccacccccacccacatgatgtgcgatatgatt

SEQ ID NO: 597065 - DNA, 33 bp, Homo sapien
tgaagggaaagaatccaatctggagggcaatag

SEQ ID NO: 597066 - DNA, 33 bp, Homo sapien
tgaagggaaagaatccgatctggagggcaatag

SEQ ID NO: 597067 - DNA, 33 bp, Homo sapien
atctaccgcgaccagccgaagtagggtgcaaag

SEQ ID NO: 597068 - DNA, 33 bp, Homo sapien
atctaccgcgaccagctgaagtagggtgcaaag

SEQ ID NO: 597069 - DNA, 33 bp, Homo sapien
gatcactttacccagcaataagagctgtaaggc

SEQ ID NO: 597070 - DNA, 33 bp, Homo sapien
gatcactttacccagcgataagagctgtaaggc

SEQ ID NO: 597071 - DNA, 33 bp, Homo sapien
gatgtagaaagaaactaaacgtccagagtgtga

SEQ ID NO: 597072 - DNA, 33 bp, Homo sapien
gatgtagaaagaaactgaacgtccagagtgtga

SEQ ID NO: 597073 - DNA, 33 bp, Homo sapien
cagcatggtactaaggaagttaaagttagaatg

SEQ ID NO: 597074 - DNA, 33 bp, Homo sapien
cagcatggtactaaggcagttaaagttagaatg

SEQ ID NO: 597075 - DNA, 33 bp, Homo sapien
ttctgaggaccatacaaatcggttttccaccta

SEQ ID NO: 597076 - DNA, 33 bp, Homo sapien
ttctgaggaccatacagatcggttttccaccta

SEQ ID NO: 597077 - DNA, 33 bp, Homo sapien
gatgtttgcatataggcacatttagctggatta

SEQ ID NO: 597078 - DNA, 33 bp, Homo sapien
gatgtttgcatataggtacatttagctggatta

SEQ ID NO: 597079 - DNA, 33 bp, Homo sapien
cctggattagggtggcgcttaaattcagtgaca

SEQ ID NO: 597080 - DNA, 33 bp, Homo sapien
cctggattagggtggctcttaaattcagtgaca

SEQ ID NO: 597081 - DNA, 33 bp, Homo sapien
agtatttagtcagcaacgtaccattatagaaaa

SEQ ID NO: 597082 - DNA, 33 bp, Homo sapien
agtatttagtcagcaatgtaccattatagaaaa

SEQ ID NO: 597083 - DNA, 33 bp, Homo sapien
gtctggggcctttaaaactattgaggagccagt

SEQ ID NO: 597084 - DNA, 33 bp, Homo sapien
gtctggggcctttaaagctattgaggagccagt

SEQ ID NO: 597085 - DNA, 33 bp, Homo sapien
gatggacacaaacatacatagaaggagtgagtt

SEQ ID NO: 597086 - DNA, 33 bp, Homo sapien
gatggacacaaacatagatagaaggagtgagtt

SEQ ID NO: 597087 - DNA, 33 bp, Homo sapien
ggaacatctgcaacacagcttctttaactccat

SEQ ID NO: 597088 - DNA, 33 bp, Homo sapien
ggaacatctgcaacacggcttctttaactccat

SEQ ID NO: 597089 - DNA, 33 bp, Homo sapien
aaagaggactgggcacaaagtatatgcctggac

SEQ ID NO: 597090 - DNA, 33 bp, Homo sapien
aaagaggactgggcacgaagtatatgcctggac

SEQ ID NO: 597091 - DNA, 33 bp, Homo sapien
aacaccaaaagcactgcacttcaggtgagtaga

SEQ ID NO: 597092 - DNA, 33 bp, Homo sapien
aacaccaaaagcactgtacttcaggtgagtaga

SEQ ID NO: 597093 - DNA, 33 bp, Homo sapien
ttacacttctttgtacagcatgattttgtggcc

SEQ ID NO: 597094 - DNA, 33 bp, Homo sapien
ttacacttctttgtacggcatgattttgtggcc

SEQ ID NO: 597095 - DNA, 33 bp, Homo sapien
gagtggggcaaaaggaaaggatattgatactga

SEQ ID NO: 597096 - DNA, 33 bp, Homo sapien
gagtggggcaaaaggagaggatattgatactga

SEQ ID NO: 597097 - DNA, 33 bp, Homo sapien
agttagatacttaacaataacaatttaggaaat

SEQ ID NO: 597098 - DNA, 33 bp, Homo sapien
agttagatacttaacattaacaatttaggaaat

SEQ ID NO: 597099 - DNA, 33 bp, Homo sapien
ctgtcatgatcgttcaaattgtttttcaggaac

SEQ ID NO: 597100 - DNA, 33 bp, Homo sapien
ctgtcatgatcgttcacattgtttttcaggaac

SEQ ID NO: 597101 - DNA, 33 bp, Homo sapien
ggctggtggactttgcacagtatggtgtttaca

SEQ ID NO: 597102 - DNA, 33 bp, Homo sapien
ggctggtggactttgcgcagtatggtgtttaca

SEQ ID NO: 597103 - DNA, 33 bp, Homo sapien
ccaaatgactctaacacgtaggctaattgcaag

SEQ ID NO: 597104 - DNA, 33 bp, Homo sapien
ccaaatgactctaacatgtaggctaattgcaag

SEQ ID NO: 597105 - DNA, 33 bp, Homo sapien
atacaatgcgggtaggcaagaattagagaagga

SEQ ID NO: 597106 - DNA, 33 bp, Homo sapien
atacaatgcgggtaggtaagaattagagaagga

SEQ ID NO: 597107 - DNA, 33 bp, Homo sapien
gaggtcaatagcagatcagagctggcaaaagaa

SEQ ID NO: 597108 - DNA, 33 bp, Homo sapien
gaggtcaatagcagattagagctggcaaaagaa

SEQ ID NO: 597109 - DNA, 33 bp, Homo sapien
gaagggcatcgaggcgcagggagcgcaggagca

SEQ ID NO: 597110 - DNA, 33 bp, Homo sapien
gaagggcatcgaggcgtagggagcgcaggagca

SEQ ID NO: 597111 - DNA, 33 bp, Homo sapien; identical to SEQ ID NO: 597109

SEQ ID NO: 597112 - DNA, 33 bp, Homo sapien; identical to SEQ ID NO: 597110

SEQ ID NO: 597113 - DNA, 33 bp, Homo sapien
ttacctggatgataataaactgcacaaaacctc

SEQ ID NO: 597114 - DNA, 33 bp, Homo sapien
ttacctggatgataattaactgcacaaaacctc

SEQ ID NO: 597115 - DNA, 33 bp, Homo sapien; identical to SEQ ID NO: 597113

SEQ ID NO: 597116 - DNA, 33 bp, Homo sapien; identical to SEQ ID NO: 597114

SEQ ID NO: 597117 - DNA, 33 bp, Homo sapien
acccggaaaagaccaaatccaatatgacacata

SEQ ID NO: 597118 - DNA, 33 bp, Homo sapien
acccggaaaagaccaagtccaatatgacacata

SEQ ID NO: 597119 - DNA, 33 bp, Homo sapien
gtgtccctgccatgtgacacataaaggcatgag

SEQ ID NO: 597120 - DNA, 33 bp, Homo sapien
gtgtccctgccatgtggcacataaaggcatgag

SEQ ID NO: 597121 - DNA, 33 bp, Homo sapien
ataaggctgaatgaagcactcccagggcaactt

SEQ ID NO: 597122 - DNA, 33 bp, Homo sapien
ataaggctgaatgaagtactcccagggcaactt

SEQ ID NO: 597123 - DNA, 33 bp, Homo sapien
agctgtgtaggagaccactcttgttctagagca

SEQ ID NO: 597124 - DNA, 33 bp, Homo sapien
agctgtgtaggagaccgctcttgttctagagca

SEQ ID NO: 597125 - DNA, 33 bp, Homo sapien
agagctgccaaaaaggaaactgccaaaatccaa

SEQ ID NO: 597126 - DNA, 33 bp, Homo sapien
agagctgccaaaaagggaactgccaaaatccaa

SEQ ID NO: 597127 - DNA, 33 bp, Homo sapien
agttactgaaactcccaatcctgctagaaagaa

SEQ ID NO: 597128 - DNA, 33 bp, Homo sapien
agttactgaaactccccatcctgctagaaagaa

SEQ ID NO: 597129 - DNA, 33 bp, Homo sapien
acaggtgcctggactacgtgttggaggagctga

SEQ ID NO: 597130 - DNA, 33 bp, Homo sapien
acaggtgcctggactatgtgttggaggagctga

SEQ ID NO: 597131 - DNA, 33 bp, Homo sapien
acgatccctccccagaagcaaagctgtgtctgt

SEQ ID NO: 597132 - DNA, 33 bp, Homo sapien
acgatccctccccagacgcaaagctgtgtctgt

SEQ ID NO: 597133 - DNA, 33 bp, Homo sapien
agtctggttattgtaacggactcgctggacata

SEQ ID NO: 597134 - DNA, 33 bp, Homo sapien
agtctggttattgtaatggactcgctggacata

SEQ ID NO: 597135 - DNA, 33 bp, Homo sapien
tgtgtgaactgaaaagcaaacaggctgagcctg

SEQ ID NO: 597136 - DNA, 33 bp, Homo sapien
tgtgtgaactgaaaagtaaacaggctgagcctg

SEQ ID NO: 597137 - DNA, 33 bp, Homo sapien
aaattggccacagttccctgagcttgctcctgc

SEQ ID NO: 597138 - DNA, 33 bp, Homo sapien
aaattggccacagttcgctgagcttgctcctgc

SEQ ID NO: 597139 - DNA, 33 bp, Homo sapien
tggcctgtgtgttctcagaaggagtctgggtgg

SEQ ID NO: 597140 - DNA, 33 bp, Homo sapien
tggcctgtgtgttctcggaaggagtctgggtgg

SEQ ID NO: 597141 - DNA, 33 bp, Homo sapien
gcccagtcgccaagagaccatatcgaggcccca

SEQ ID NO: 597142 - DNA, 33 bp, Homo sapien
gcccagtcgccaagaggccatatcgaggcccca

SEQ ID NO: 597143 - DNA, 33 bp, Homo sapien
gggcagagagaccacacgaggtgctgcctgctt

SEQ ID NO: 597144 - DNA, 33 bp, Homo sapien
gggcagagagaccacaggaggtgctgcctgctt

SEQ ID NO: 597145 - DNA, 33 bp, Homo sapien
ctgcttggcctgaggacactgttcccacctgga

SEQ ID NO: 597146 - DNA, 33 bp, Homo sapien
ctgcttggcctgaggatactgttcccacctgga

SEQ ID NO: 597147 - DNA, 33 bp, Homo sapien
ggtttctcaaacccaaaggatactagaactcct

SEQ ID NO: 597148 - DNA, 33 bp, Homo sapien
ggtttctcaaacccaatggatactagaactcct

SEQ ID NO: 597149 - DNA, 33 bp, Homo sapien
ggtaataatgcctgaaagtaatcactctatgac

SEQ ID NO: 597150 - DNA, 33 bp, Homo sapien
ggtaataatgcctgaatgtaatcactctatgac

SEQ ID NO: 597151 - DNA, 33 bp, Homo sapien
cagggcaaggtttacacgaagatgccaccaggc

SEQ ID NO: 597152 - DNA, 33 bp, Homo sapien
cagggcaaggtttacatgaagatgccaccaggc

SEQ ID NO: 597153 - DNA, 33 bp, Homo sapien
tatgctccttctttcacgtgaacttcacaattg

SEQ ID NO: 597154 - DNA, 33 bp, Homo sapien
tatgctccttctttcatgtgaacttcacaattg

SEQ ID NO: 597155 - DNA, 33 bp, Homo sapien
ctcctgattcattcaacgaacaagccgtcaggc

SEQ ID NO: 597156 - DNA, 33 bp, Homo sapien
ctcctgattcattcaaggaacaagccgtcaggc

SEQ ID NO: 597157 - DNA, 33 bp, Homo sapien
actgtgaccaacaggcaagaccctgggcaccct

SEQ ID NO: 597158 - DNA, 33 bp, Homo sapien
actgtgaccaacaggccagaccctgggcaccct

SEQ ID NO: 597159 - DNA, 33 bp, Homo sapien
cggggccactctgttacctcctatcctttaaag

SEQ ID NO: 597160 - DNA, 33 bp, Homo sapien
cggggccactctgttatctcctatcctttaaag

SEQ ID NO: 597161 - DNA, 33 bp, Homo sapien
ggggatccaggcaagcaagggacaatccaggaa

SEQ ID NO: 597162 - DNA, 33 bp, Homo sapien
ggggatccaggcaagcgagggacaatccaggaa

SEQ ID NO: 597163 - DNA, 33 bp, Homo sapien
gaggagctgataatcacgacttaatccctgact

SEQ ID NO: 597164 - DNA, 33 bp, Homo sapien
gaggagctgataatcaggacttaatccctgact

SEQ ID NO: 597165 - DNA, 33 bp, Homo sapien
tctgatataacagggacgtctccacatgtcttc

SEQ ID NO: 597166 - DNA, 33 bp, Homo sapien
tctgatataacagggatgtctccacatgtcttc

SEQ ID NO: 597167 - DNA, 33 bp, Homo sapien
agggctacttcagcaacgtggcacgcaacgtgc

SEQ ID NO: 597168 - DNA, 33 bp, Homo sapien
agggctacttcagcaatgtggcacgcaacgtgc

SEQ ID NO: 597169 - DNA, 33 bp, Homo sapien
catttgcttaatcccacgcacaaatgccctgag

SEQ ID NO: 597170 - DNA, 33 bp, Homo sapien
catttgcttaatcccatgcacaaatgccctgag

SEQ ID NO: 597171 - DNA, 33 bp, Homo sapien
agcaatctgaagcatcaagcctgccagtccaca

SEQ ID NO: 597172 - DNA, 33 bp, Homo sapien
agcaatctgaagcatcgagcctgccagtccaca

SEQ ID NO: 597173 - DNA, 33 bp, Homo sapien
aaggatgaaaaaaatacagtgtagtggagacac

SEQ ID NO: 597174 - DNA, 33 bp, Homo sapien
aaggatgaaaaaaatatagtgtagtggagacac

SEQ ID NO: 597175 - DNA, 33 bp, Homo sapien
gactgcaccgttgtaccccaaaatgggcgacag

SEQ ID NO: 597176 - DNA, 33 bp, Homo sapien
gactgcaccgttgtactccaaaatgggcgacag

SEQ ID NO: 597177 - DNA, 33 bp, Homo sapien
acatggctctgtattccaggaaacggcatctca

SEQ ID NO: 597178 - DNA, 33 bp, Homo sapien
acatggctctgtattctaggaaacggcatctca

SEQ ID NO: 597179 - DNA, 33 bp, Homo sapien
gatctctggttttatccgacttctgacctctgg

SEQ ID NO: 597180 - DNA, 33 bp, Homo sapien
gatctctggttttatctgacttctgacctctgg

SEQ ID NO: 597181 - DNA, 33 bp, Homo sapien
catgctaatcccttaaagtcacccttcctgcgc

SEQ ID NO: 597182 - DNA, 33 bp, Homo sapien
catgctaatcccttaaggtcacccttcctgcgc

SEQ ID NO: 597183 - DNA, 33 bp, Homo sapien
aggcacatttgtgaaacgatacctgagttgacc

SEQ ID NO: 597184 - DNA, 33 bp, Homo sapien
aggcacatttgtgaaatgatacctgagttgacc

SEQ ID NO: 597185 - DNA, 33 bp, Homo sapien
cccagccaagtggtggccacgaaaagcgtgaaa

SEQ ID NO: 597186 - DNA, 33 bp, Homo sapien
cccagccaagtggtggtcacgaaaagcgtgaaa

SEQ ID NO: 597187 - DNA, 33 bp, Homo sapien
tgtgggccacactgccaaaaaaggtagcctccc

SEQ ID NO: 597188 - DNA, 33 bp, Homo sapien
tgtgggccacactgccgaaaaaggtagcctccc

SEQ ID NO: 597189 - DNA, 33 bp, Homo sapien
actggcagcttccttacacacattctgattttg

SEQ ID NO: 597190 - DNA, 33 bp, Homo sapien
actggcagcttccttagacacattctgattttg

SEQ ID NO: 597191 - DNA, 33 bp, Homo sapien
aaacaggagtaacaaacggagaggagagagaga

SEQ ID NO: 597192 - DNA, 33 bp, Homo sapien
aaacaggagtaacaaatggagaggagagagaga

SEQ ID NO: 597193 - DNA, 33 bp, Homo sapien
gacaaggcgaaaatacaaaaagcagcaaatggg

SEQ ID NO: 597194 - DNA, 33 bp, Homo sapien
gacaaggcgaaaatacgaaaagcagcaaatggg

SEQ ID NO: 597195 - DNA, 33 bp, Homo sapien
tgatgttctaactgtacctgagccttaagcagg

SEQ ID NO: 597196 - DNA, 33 bp, Homo sapien
tgatgttctaactgtatctgagccttaagcagg

SEQ ID NO: 597197 - DNA, 33 bp, Homo sapien
acactttcttatgtacccacactatatggatca

SEQ ID NO: 597198 - DNA, 33 bp, Homo sapien
acactttcttatgtactcacactatatggatca

SEQ ID NO: 597199 - DNA, 33 bp, Homo sapien
catttaataaaaatcaatacacttttgtaacac

SEQ ID NO: 597200 - DNA, 33 bp, Homo sapien
catttaataaaaatcagtacacttttgtaacac

SEQ ID NO: 597201 - DNA, 33 bp, Homo sapien
tttctcatagaaatcacagttccatcaaggcca

SEQ ID NO: 597202 - DNA, 33 bp, Homo sapien
tttctcatagaaatcatagttccatcaaggcca

SEQ ID NO: 597203 - DNA, 33 bp, Homo sapien
ggggtgtgagtgataccatggtacatagacgct

SEQ ID NO: 597204 - DNA, 33 bp, Homo sapien
ggggtgtgagtgatactatggtacatagacgct

SEQ ID NO: 597205 - DNA, 33 bp, Homo sapien
gttttagcatagtcaccgagttgtattcatggg

SEQ ID NO: 597206 - DNA, 33 bp, Homo sapien
gttttagcatagtcactgagttgtattcatggg

SEQ ID NO: 597207 - DNA, 33 bp, Homo sapien
tgcctgggtagtaagcaactccaccaagttcag

SEQ ID NO: 597208 - DNA, 33 bp, Homo sapien
tgcctgggtagtaagcgactccaccaagttcag

SEQ ID NO: 597209 - DNA, 33 bp, Homo sapien
cttttttgctcatgataaagtaacaaacattca

SEQ ID NO: 597210 - DNA, 33 bp, Homo sapien
cttttttgctcatgatgaagtaacaaacattca

SEQ ID NO: 597211 - DNA, 33 bp, Homo sapien
gggcctgagactggaaactgagaaagaacagag

SEQ ID NO: 597212 - DNA, 33 bp, Homo sapien
gggcctgagactggaagctgagaaagaacagag

SEQ ID NO: 597213 - DNA, 33 bp, Homo sapien
cttaagatgaaaagtacgctgcagaacattaac

SEQ ID NO: 597214 - DNA, 33 bp, Homo sapien
cttaagatgaaaagtatgctgcagaacattaac

SEQ ID NO: 597215 - DNA, 33 bp, Homo sapien
tttctgcctgcttttaagattttatcgctgatt

SEQ ID NO: 597216 - DNA, 33 bp, Homo sapien
tttctgcctgcttttaggattttatcgctgatt

SEQ ID NO: 597217 - DNA, 33 bp, Homo sapien
ggggctattttagccaaagctgtctggttgtaa

SEQ ID NO: 597218 - DNA, 33 bp, Homo sapien
ggggctattttagccagagctgtctggttgtaa

SEQ ID NO: 597219 - DNA, 33 bp, Homo sapien
gagcccagggtgtctacgctgcagtaatctgtg

SEQ ID NO: 597220 - DNA, 33 bp, Homo sapien
gagcccagggtgtctatgctgcagtaatctgtg

SEQ ID NO: 597221 - DNA, 33 bp, Homo sapien
tgtttcataaagtgtcaacaatccattggctaa

SEQ ID NO: 597222 - DNA, 33 bp, Homo sapien
tgtttcataaagtgtccacaatccattggctaa

SEQ ID NO: 597223 - DNA, 33 bp, Homo sapien
aatgtgaaggaaggcccgaagctgttctatgta

SEQ ID NO: 597224 - DNA, 33 bp, Homo sapien
aatgtgaaggaaggcctgaagctgttctatgta

SEQ ID NO: 597225 - DNA, 33 bp, Homo sapien
tattctaagaccatagacagagttctgtaggta

SEQ ID NO: 597226 - DNA, 33 bp, Homo sapien
tattctaagaccataggcagagttctgtaggta

SEQ ID NO: 597227 - DNA, 33 bp, Homo sapien
ccctctgatcccatcagaacagcaaagagcact

SEQ ID NO: 597228 - DNA, 33 bp, Homo sapien
ccctctgatcccatcataacagcaaagagcact

SEQ ID NO: 597229 - DNA, 33 bp, Homo sapien
gaaactgaagagtgagcagtagaacagattgag

SEQ ID NO: 597230 - DNA, 33 bp, Homo sapien
gaaactgaagagtgaggagtagaacagattgag

SEQ ID NO: 597231 - DNA, 33 bp, Homo sapien
gcacgtgtcctcttagacatggtgggaggtgat

SEQ ID NO: 597232 - DNA, 33 bp, Homo sapien
gcacgtgtcctcttagccatggtgggaggtgat

SEQ ID NO: 597233 - DNA, 33 bp, Homo sapien
tgggaagtggagcagcaaaggcgcagcctaaca

SEQ ID NO: 597234 - DNA, 33 bp, Homo sapien
tgggaagtggagcagcgaaggcgcagcctaaca

SEQ ID NO: 597235 - DNA, 33 bp, Homo sapien
gctagctgtaccaacaatagaaggaagacgacc

SEQ ID NO: 597236 - DNA, 33 bp, Homo sapien
gctagctgtaccaacactagaaggaagacgacc

SEQ ID NO: 597237 - DNA, 33 bp, Homo sapien
gagtatgaggaaggtaccagtcagagcccactt

SEQ ID NO: 597238 - DNA, 33 bp, Homo sapien
gagtatgaggaaggtatcagtcagagcccactt

SEQ ID NO: 597239 - DNA, 33 bp, Homo sapien
ttgaggttctggtgcacgatgtccaggtcgtgg

SEQ ID NO: 597240 - DNA, 33 bp, Homo sapien
ttgaggttctggtgcatgatgtccaggtcgtgg

SEQ ID NO: 597241 - DNA, 33 bp, Homo sapien
gtctgccctggatgccaaggtacactgatgagc

SEQ ID NO: 597242 - DNA, 33 bp, Homo sapien
gtctgccctggatgccgaggtacactgatgagc

SEQ ID NO: 597243 - DNA, 33 bp, Homo sapien
ggctctaaaagaagtccgaagctttgcgccggg

SEQ ID NO: 597244 - DNA, 33 bp, Homo sapien
ggctctaaaagaagtctgaagctttgcgccggg

SEQ ID NO: 597245 - DNA, 33 bp, Homo sapien
acattgtggaaaggtgaaaaggttacatgtaaa

SEQ ID NO: 597246 - DNA, 33 bp, Homo sapien
acattgtggaaaggtggaaaggttacatgtaaa

SEQ ID NO: 597247 - DNA, 33 bp, Homo sapien
ggcctgcagagctcctcacgtgtctgtgaccat

SEQ ID NO: 597248 - DNA, 33 bp, Homo sapien
ggcctgcagagctcctgacgtgtctgtgaccat

SEQ ID NO: 597249 - DNA, 33 bp, Homo sapien
tactttttgctttacaatccagctttttcggcc

SEQ ID NO: 597250 - DNA, 33 bp, Homo sapien
tactttttgctttacagtccagctttttcggcc

SEQ ID NO: 597251 - DNA, 33 bp, Homo sapien
tcaatacaatgttgaactgaagtggcgagagtg

SEQ ID NO: 597252 - DNA, 33 bp, Homo sapien
tcaatacaatgttgaattgaagtggcgagagtg

SEQ ID NO: 597253 - DNA, 33 bp, Homo sapien
tttatgctgaataggagagccaagtatacatat

SEQ ID NO: 597254 - DNA, 33 bp, Homo sapien
tttatgctgaataggatagccaagtatacatat

SEQ ID NO: 597255 - DNA, 33 bp, Homo sapien
aaattcctgtttcaccactctcatcctaaacat

SEQ ID NO: 597256 - DNA, 33 bp, Homo sapien
aaattcctgtttcaccgctctcatcctaaacat

SEQ ID NO: 597257 - DNA, 33 bp, Homo sapien
cagcagcgctattcacagcagccagagggtgga

SEQ ID NO: 597258 - DNA, 33 bp, Homo sapien
cagcagcgctattcaccgcagccagagggtgga

SEQ ID NO: 597259 - DNA, 33 bp, Homo sapien
tgctggaaacacgagaagagtgacagctcctcg

SEQ ID NO: 597260 - DNA, 33 bp, Homo sapien
tgctggaaacacgagacgagtgacagctcctcg

SEQ ID NO: 597261 - DNA, 33 bp, Homo sapien
tcctggttagtggggaaacgtggagcaccaggc

SEQ ID NO: 597262 - DNA, 33 bp, Homo sapien
tcctggttagtggggagacgtggagcaccaggc

SEQ ID NO: 597263 - DNA, 33 bp, Homo sapien
gattcaaaggtgattcaaggtgaccctgaggat

SEQ ID NO: 597264 - DNA, 33 bp, Homo sapien
gattcaaaggtgattcgaggtgaccctgaggat

SEQ ID NO: 597265 - DNA, 33 bp, Homo sapien
cactctctatcctcacagcagacttccccatct

SEQ ID NO: 597266 - DNA, 33 bp, Homo sapien
cactctctatcctcacggcagacttccccatct

SEQ ID NO: 597267 - DNA, 33 bp, Homo sapien
tgtggagaagtgtacgcccaggaatgttggcac

SEQ ID NO: 597268 - DNA, 33 bp, Homo sapien
tgtggagaagtgtacgtccaggaatgttggcac

SEQ ID NO: 597269 - DNA, 33 bp, Homo sapien
ggcatggccaagtccacgaggttgtgcctccag

SEQ ID NO: 597270 - DNA, 33 bp, Homo sapien
ggcatggccaagtccatgaggttgtgcctccag

SEQ ID NO: 597271 - DNA, 33 bp, Homo sapien
tatactccaccttaaacggcattccggccatgc

SEQ ID NO: 597272 - DNA, 33 bp, Homo sapien
tatactccaccttaaatggcattccggccatgc

SEQ ID NO: 597273 - DNA, 33 bp, Homo sapien
cattgagtctgcactacgtttaaaagctgtaac

SEQ ID NO: 597274 - DNA, 33 bp, Homo sapien
cattgagtctgcactaggtttaaaagctgtaac

SEQ ID NO: 597275 - DNA, 33 bp, Homo sapien
ggttacagaattacataatgaacttttaacacc

SEQ ID NO: 597276 - DNA, 33 bp, Homo sapien
ggttacagaattacatgatgaacttttaacacc

SEQ ID NO: 597277 - DNA, 33 bp, Homo sapien
ttgtagtaaacagaacacctggatgtaagtctt

SEQ ID NO: 597278 - DNA, 33 bp, Homo sapien
ttgtagtaaacagaacgcctggatgtaagtctt

SEQ ID NO: 597279 - DNA, 33 bp, Homo sapien
aggtcggtgccacaataaacttgaaacaccaga

SEQ ID NO: 597280 - DNA, 33 bp, Homo sapien
aggtcggtgccacaatcaacttgaaacaccaga

SEQ ID NO: 597281 - DNA, 33 bp, Homo sapien
agtacacacaaactaaaaactatcaaaggaggt

SEQ ID NO: 597282 - DNA, 33 bp, Homo sapien
agtacacacaaactaacaactatcaaaggaggt

SEQ ID NO: 597283 - DNA, 33 bp, Homo sapien
atactacagcccttgagagcctttctggcctac

SEQ ID NO: 597284 - DNA, 33 bp, Homo sapien
atactacagcccttgatagcctttctggcctac

SEQ ID NO: 597285 - DNA, 33 bp, Homo sapien
gaaacacacactcccacctctatactgccggtc

SEQ ID NO: 597286 - DNA, 33 bp, Homo sapien
gaaacacacactcccatctctatactgccggtc

SEQ ID NO: 597287 - DNA, 33 bp, Homo sapien
agtgcacgcttccacacggaccggcagtataga

SEQ ID NO: 597288 - DNA, 33 bp, Homo sapien
agtgcacgcttccacatggaccggcagtataga

SEQ ID NO: 597289 - DNA, 33 bp, Homo sapien
gtaagagaaaacaccaagtaaggacaccttacc

SEQ ID NO: 597290 - DNA, 33 bp, Homo sapien
gtaagagaaaacaccacgtaaggacaccttacc

SEQ ID NO: 597291 - DNA, 33 bp, Homo sapien
gttagaagcctcctacaacgtggacagtttggg

SEQ ID NO: 597292 - DNA, 33 bp, Homo sapien
gttagaagcctcctacgacgtggacagtttggg

SEQ ID NO: 597293 - DNA, 33 bp, Homo sapien
gaattcggcctctcaagcagtcttgtagtagtg

SEQ ID NO: 597294 - DNA, 33 bp, Homo sapien
gaattcggcctctcaatcagtcttgtagtagtg

SEQ ID NO: 597295 - DNA, 33 bp, Homo sapien
gatggtaagagtttccagcaagtacacaagcaa

SEQ ID NO: 597296 - DNA, 33 bp, Homo sapien
gatggtaagagtttccggcaagtacacaagcaa

SEQ ID NO: 597297 - DNA, 33 bp, Homo sapien
gactacttcttataaaactatgggttccaaatt

SEQ ID NO: 597298 - DNA, 33 bp, Homo sapien
gactacttcttataaacctatgggttccaaatt

SEQ ID NO: 597299 - DNA, 33 bp, Homo sapien
ttttattttccaccaaacaaacaaaagatgctg

SEQ ID NO: 597300 - DNA, 33 bp, Homo sapien
ttttattttccaccaagcaaacaaaagatgctg

SEQ ID NO: 597301 - DNA, 33 bp, Homo sapien
tatgacaagctgactcagaagaacctagagaag

SEQ ID NO: 597302 - DNA, 33 bp, Homo sapien
tatgacaagctgactcggaagaacctagagaag

SEQ ID NO: 597303 - DNA, 33 bp, Homo sapien
ttgacaatatcacacccgggccagtaatgcaag

SEQ ID NO: 597304 - DNA, 33 bp, Homo sapien
ttgacaatatcacacctgggccagtaatgcaag

SEQ ID NO: 597305 - DNA, 33 bp, Homo sapien
gataggccgtcggatcagagccattgggtcact

SEQ ID NO: 597306 - DNA, 33 bp, Homo sapien
gataggccgtcggatcggagccattgggtcact

SEQ ID NO: 597307 - DNA, 33 bp, Homo sapien
gtatttccaataccagaagcagtggtaggccaa

SEQ ID NO: 597308 - DNA, 33 bp, Homo sapien
gtatttccaataccaggagcagtggtaggccaa

SEQ ID NO: 597309 - DNA, 33 bp, Homo sapien
atctaaattaaagcacagagataaaaggacaga

SEQ ID NO: 597310 - DNA, 33 bp, Homo sapien
atctaaattaaagcacggagataaaaggacaga

SEQ ID NO: 597311 - DNA, 33 bp, Homo sapien
aggaatgactttctatgaatcccgatagattga

SEQ ID NO: 597312 - DNA, 33 bp, Homo sapien
aggaatgactttctattaatcccgatagattga

SEQ ID NO: 597313 - DNA, 33 bp, Homo sapien
tttgtctcagaaatcacgtagaaaataaaaagt

SEQ ID NO: 597314 - DNA, 33 bp, Homo sapien
tttgtctcagaaatcatgtagaaaataaaaagt

SEQ ID NO: 597315 - DNA, 33 bp, Homo sapien
caccctgacaccaaaaccaaagacctaacaaga

SEQ ID NO: 597316 - DNA, 33 bp, Homo sapien
caccctgacaccaaaatcaaagacctaacaaga

SEQ ID NO: 597317 - DNA, 33 bp, Homo sapien
taatacattcattcaaaagaaggcagaaaaaca

SEQ ID NO: 597318 - DNA, 33 bp, Homo sapien
taatacattcattcaacagaaggcagaaaaaca

SEQ ID NO: 597319 - DNA, 33 bp, Homo sapien
atacaccatttgattccattaggtagtattttg

SEQ ID NO: 597320 - DNA, 33 bp, Homo sapien
atacaccatttgattcgattaggtagtattttg

SEQ ID NO: 597321 - DNA, 33 bp, Homo sapien; identical to SEQ ID NO: 597319

SEQ ID NO: 597322 - DNA, 33 bp, Homo sapien; identical to SEQ ID NO: 597320

SEQ ID NO: 597323 - DNA, 33 bp, Homo sapien
atggaaacacatctaaagctcatggtaggtaaa

SEQ ID NO: 597324 - DNA, 33 bp, Homo sapien
atggaaacacatctaatgctcatggtaggtaaa

SEQ ID NO: 597325 - DNA, 33 bp, Homo sapien
aaaatgttagcatctgcagctgatatctgagaa

SEQ ID NO: 597326 - DNA, 33 bp, Homo sapien
aaaatgttagcatctgtagctgatatctgagaa

SEQ ID NO: 597327 - DNA, 33 bp, Homo sapien
taaactagcctctataacagctggcacccagct

SEQ ID NO: 597328 - DNA, 33 bp, Homo sapien
taaactagcctctataccagctggcacccagct

SEQ ID NO: 597329 - DNA, 33 bp, Homo sapien
ccagcatgaaatagcaacctgccagtattctat

SEQ ID NO: 597330 - DNA, 33 bp, Homo sapien
ccagcatgaaatagcagcctgccagtattctat

SEQ ID NO: 597331 - DNA, 33 bp, Homo sapien
tcttggcagagttggcacagaggtgtcatgaac

SEQ ID NO: 597332 - DNA, 33 bp, Homo sapien
tcttggcagagttggcgcagaggtgtcatgaac

SEQ ID NO: 597333 - DNA, 33 bp, Homo sapien
aggacactgcggatgaaacccaaggagaagagt

SEQ ID NO: 597334 - DNA, 33 bp, Homo sapien
aggacactgcggatgacacccaaggagaagagt

SEQ ID NO: 597335 - DNA, 33 bp, Homo sapien
aggccacccagagccccgctttgtgtcacttct

SEQ ID NO: 597336 - DNA, 33 bp, Homo sapien
aggccacccagagccctgctttgtgtcacttct

SEQ ID NO: 597337 - DNA, 33 bp, Homo sapien
cagcaaggtattagaacatctagctaagatcat

SEQ ID NO: 597338 - DNA, 33 bp, Homo sapien
cagcaaggtattagaagatctagctaagatcat

SEQ ID NO: 597339 - DNA, 33 bp, Homo sapien
tctgctctcatgaggcgcctgtctagcttgtta

SEQ ID NO: 597340 - DNA, 33 bp, Homo sapien
tctgctctcatgaggctcctgtctagcttgtta

SEQ ID NO: 597341 - DNA, 33 bp, Homo sapien
tcctcatgcactttcacgtacagcagtcactac

SEQ ID NO: 597342 - DNA, 33 bp, Homo sapien
tcctcatgcactttcatgtacagcagtcactac

SEQ ID NO: 597343 - DNA, 33 bp, Homo sapien
gctgttaagtagttgcaaataatctgtgagaac

SEQ ID NO: 597344 - DNA, 33 bp, Homo sapien
gctgttaagtagttgcgaataatctgtgagaac

SEQ ID NO: 597345 - DNA, 33 bp, Homo sapien
atacagagctgaaatacgagaagaattttacta

SEQ ID NO: 597346 - DNA, 33 bp, Homo sapien
atacagagctgaaatatgagaagaattttacta

SEQ ID NO: 597347 - DNA, 33 bp, Homo sapien
gcagccctggagttctaactgtgccaggcattc

SEQ ID NO: 597348 - DNA, 33 bp, Homo sapien
gcagccctggagttctgactgtgccaggcattc

SEQ ID NO: 597349 - DNA, 33 bp, Homo sapien
gggtccgctgtgacgacggtgccaaccttgcct

SEQ ID NO: 597350 - DNA, 33 bp, Homo sapien
gggtccgctgtgacgatggtgccaaccttgcct

SEQ ID NO: 597351 - DNA, 33 bp, Homo sapien
atctattaatgagacacatttctgagtagagat

SEQ ID NO: 597352 - DNA, 33 bp, Homo sapien
atctattaatgagacatatttctgagtagagat

SEQ ID NO: 597353 - DNA, 33 bp, Homo sapien
atctttcaggtcttccaaaggccaagttgtgag

SEQ ID NO: 597354 - DNA, 33 bp, Homo sapien
atctttcaggtcttccgaaggccaagttgtgag

SEQ ID NO: 597355 - DNA, 33 bp, Homo sapien
gagcatcaaagagcccagacaagtgagaatcaa

SEQ ID NO: 597356 - DNA, 33 bp, Homo sapien
gagcatcaaagagcccggacaagtgagaatcaa

SEQ ID NO: 597357 - DNA, 33 bp, Homo sapien
attcgagccatcccagaagattccatagagcca

SEQ ID NO: 597358 - DNA, 33 bp, Homo sapien
attcgagccatcccagcagattccatagagcca

SEQ ID NO: 597359 - DNA, 33 bp, Homo sapien
cctggctcagcctgtacgtgctcttgggtagtc

SEQ ID NO: 597360 - DNA, 33 bp, Homo sapien
cctggctcagcctgtatgtgctcttgggtagtc

SEQ ID NO: 597361 - DNA, 33 bp, Homo sapien
agtgaaaaatccacagcaaaatctcacccagtt

SEQ ID NO: 597362 - DNA, 33 bp, Homo sapien
agtgaaaaatccacagtaaaatctcacccagtt

SEQ ID NO: 597363 - DNA, 33 bp, Homo sapien
gtccctctccatcttacgctcttgctgcttgta

SEQ ID NO: 597364 - DNA, 33 bp, Homo sapien
gtccctctccatcttatgctcttgctgcttgta

SEQ ID NO: 597365 - DNA, 33 bp, Homo sapien
aatgaggtagctaaacagttgtgccactgtgaa

SEQ ID NO: 597366 - DNA, 33 bp, Homo sapien
aatgaggtagctaaacggttgtgccactgtgaa

SEQ ID NO: 597367 - DNA, 33 bp, Homo sapien
caagctactgtgaaaaactactgaataggtcat

SEQ ID NO: 597368 - DNA, 33 bp, Homo sapien
caagctactgtgaaaagctactgaataggtcat

SEQ ID NO: 597369 - DNA, 33 bp, Homo sapien
aataatcagattagcacgtcaaaagatctcacg

SEQ ID NO: 597370 - DNA, 33 bp, Homo sapien
aataatcagattagcatgtcaaaagatctcacg

SEQ ID NO: 597371 - DNA, 33 bp, Homo sapien
ccaaaattcaagaaagcattcactttcctatta

SEQ ID NO: 597372 - DNA, 33 bp, Homo sapien
ccaaaattcaagaaaggattcactttcctatta

SEQ ID NO: 597373 - DNA, 33 bp, Homo sapien
agaatccactagaacccgatacctttgctttct

SEQ ID NO: 597374 - DNA, 33 bp, Homo sapien
agaatccactagaacctgatacctttgctttct

SEQ ID NO: 597375 - DNA, 33 bp, Homo sapien
tctttttcaaataagcagagttcttctagacaa

SEQ ID NO: 597376 - DNA, 33 bp, Homo sapien
tctttttcaaataagcggagttcttctagacaa

SEQ ID NO: 597377 - DNA, 33 bp, Homo sapien
cctggaatagtcactcactgtacttccaagctg

SEQ ID NO: 597378 - DNA, 33 bp, Homo sapien
cctggaatagtcactcgctgtacttccaagctg

SEQ ID NO: 597379 - DNA, 33 bp, Homo sapien
agagcatacagcacaacgggcagccgagtaccc

SEQ ID NO: 597380 - DNA, 33 bp, Homo sapien
agagcatacagcacaatgggcagccgagtaccc

SEQ ID NO: 597381 - DNA, 33 bp, Homo sapien
tattctttgtgtgtgacacccataggccagtca

SEQ ID NO: 597382 - DNA, 33 bp, Homo sapien
tattctttgtgtgtgatacccataggccagtca

SEQ ID NO: 597383 - DNA, 33 bp, Homo sapien
atattaagtagaaagacgcaaaatcagatgtat

SEQ ID NO: 597384 - DNA, 33 bp, Homo sapien
atattaagtagaaagatgcaaaatcagatgtat

SEQ ID NO: 597385 - DNA, 33 bp, Homo sapien
cgctatagacttataacggcccatcagtgtgtg

SEQ ID NO: 597386 - DNA, 33 bp, Homo sapien
cgctatagacttataatggcccatcagtgtgtg

SEQ ID NO: 597387 - DNA, 33 bp, Homo sapien
tttcctcctctgagtacctaaagctcccacagt

SEQ ID NO: 597388 - DNA, 33 bp, Homo sapien
tttcctcctctgagtatctaaagctcccacagt

SEQ ID NO: 597389 - DNA, 33 bp, Homo sapien
aagagaaggcagtggaaccggcctatagcccac

SEQ ID NO: 597390 - DNA, 33 bp, Homo sapien
aagagaaggcagtggagccggcctatagcccac

SEQ ID NO: 597391 - DNA, 33 bp, Homo sapien
cacagcagagtgggtgaaatgttccctataaac

SEQ ID NO: 597392 - DNA, 33 bp, Homo sapien
cacagcagagtgggtgcaatgttccctataaac

SEQ ID NO: 597393 - DNA, 33 bp, Homo sapien
tagaaaccaagcacccaggaaaacatgattgga

SEQ ID NO: 597394 - DNA, 33 bp, Homo sapien
tagaaaccaagcacccgggaaaacatgattgga

SEQ ID NO: 597395 - DNA, 33 bp, Homo sapien
tgacttgggcctgtgaaggacattagcacatct

SEQ ID NO: 597396 - DNA, 33 bp, Homo sapien
tgacttgggcctgtgagggacattagcacatct

SEQ ID NO: 597397 - DNA, 33 bp, Homo sapien
ggttccagggcctgcaatagcctcaaagggtca

SEQ ID NO: 597398 - DNA, 33 bp, Homo sapien
ggttccagggcctgcagtagcctcaaagggtca

SEQ ID NO: 597399 - DNA, 33 bp, Homo sapien
tcccccccgggaagacaatagaggtgacacagg

SEQ ID NO: 597400 - DNA, 33 bp, Homo sapien
tcccccccgggaagacgatagaggtgacacagg

SEQ ID NO: 597401 - DNA, 33 bp, Homo sapien
ggcaaaaaataagtcccaagcaaagccggttct

SEQ ID NO: 597402 - DNA, 33 bp, Homo sapien
ggcaaaaaataagtcctaagcaaagccggttct

SEQ ID NO: 597403 - DNA, 33 bp, Homo sapien
atggcaccatcatttgcaacagccaatacgact

SEQ ID NO: 597404 - DNA, 33 bp, Homo sapien
atggcaccatcatttggaacagccaatacgact

SEQ ID NO: 597405 - DNA, 33 bp, Homo sapien
ttaccttcatccatgacaatgtgaccagtcatc

SEQ ID NO: 597406 - DNA, 33 bp, Homo sapien
ttaccttcatccatgagaatgtgaccagtcatc

SEQ ID NO: 597407 - DNA, 33 bp, Homo sapien
cgcagccgaaaccatccctcttgcaggtgcagc

SEQ ID NO: 597408 - DNA, 33 bp, Homo sapien
cgcagccgaaaccatcgctcttgcaggtgcagc

SEQ ID NO: 597409 - DNA, 33 bp, Homo sapien
tgtgcctttggccaacaggatctttgtccgagg

SEQ ID NO: 597410 - DNA, 33 bp, Homo sapien
tgtgcctttggccaacgggatctttgtccgagg

SEQ ID NO: 597411 - DNA, 33 bp, Homo sapien
gcagaagggcaaaaccggcctcgctggttcctt

SEQ ID NO: 597412 - DNA, 33 bp, Homo sapien
gcagaagggcaaaacctgcctcgctggttcctt

SEQ ID NO: 597413 - DNA, 33 bp, Homo sapien
tgccaggaaagtgaagcattgttgaacccagat

SEQ ID NO: 597414 - DNA, 33 bp, Homo sapien
tgccaggaaagtgaagtattgttgaacccagat

SEQ ID NO: 597415 - DNA, 33 bp, Homo sapien
gtctaagcagggagtagccacagatcaggctcc

SEQ ID NO: 597416 - DNA, 33 bp, Homo sapien
gtctaagcagggagtatccacagatcaggctcc

SEQ ID NO: 597417 - DNA, 33 bp, Homo sapien
taaggactatgttaacaatgatgttatctctgg

SEQ ID NO: 597418 - DNA, 33 bp, Homo sapien
taaggactatgttaactatgatgttatctctgg

SEQ ID NO: 597419 - DNA, 33 bp, Homo sapien
aattaagaagctgtcaatcaactgccagatcct

SEQ ID NO: 597420 - DNA, 33 bp, Homo sapien
aattaagaagctgtcagtcaactgccagatcct

SEQ ID NO: 597421 - DNA, 33 bp, Homo sapien
ctaacagaagaatcaaattaatgaaactggaag

SEQ ID NO: 597422 - DNA, 33 bp, Homo sapien
ctaacagaagaatcaagttaatgaaactggaag

SEQ ID NO: 597423 - DNA, 33 bp, Homo sapien
ctggctttgctctgtcactcacagcgcttccct

SEQ ID NO: 597424 - DNA, 33 bp, Homo sapien
ctggctttgctctgtctctcacagcgcttccct

SEQ ID NO: 597425 - DNA, 33 bp, Homo sapien
ccacacgttcttataaagatgtgaccccaactt

SEQ ID NO: 597426 - DNA, 33 bp, Homo sapien
ccacacgttcttataaggatgtgaccccaactt

SEQ ID NO: 597427 - DNA, 33 bp, Homo sapien
aatcttagcttccctcacattactgctattcat

SEQ ID NO: 597428 - DNA, 33 bp, Homo sapien
aatcttagcttccctcgcattactgctattcat

SEQ ID NO: 597429 - DNA, 33 bp, Homo sapien
tcttttccaatagttaacaatgcagcagaaaac

SEQ ID NO: 597430 - DNA, 33 bp, Homo sapien
tcttttccaatagttagcaatgcagcagaaaac

SEQ ID NO: 597431 - DNA, 33 bp, Homo sapien
ctggactttgagaggacgttgaaaggagcactc

SEQ ID NO: 597432 - DNA, 33 bp, Homo sapien
ctggactttgagaggatgttgaaaggagcactc

SEQ ID NO: 597433 - DNA, 33 bp, Homo sapien
caaatcccttattcacagacctggccaaacact

SEQ ID NO: 597434 - DNA, 33 bp, Homo sapien
caaatcccttattcacggacctggccaaacact

SEQ ID NO: 597435 - DNA, 33 bp, Homo sapien
ttttctcaccttttgcacttgctacaacctcca

SEQ ID NO: 597436 - DNA, 33 bp, Homo sapien
ttttctcaccttttgcccttgctacaacctcca

SEQ ID NO: 597437 - DNA, 33 bp, Homo sapien
tctacagaaaagctaccgaaactcacaaggaaa

SEQ ID NO: 597438 - DNA, 33 bp, Homo sapien
tctacagaaaagctactgaaactcacaaggaaa

SEQ ID NO: 597439 - DNA, 33 bp, Homo sapien
ccgttggtgcttaatcagagtggaagaggctgt

SEQ ID NO: 597440 - DNA, 33 bp, Homo sapien
ccgttggtgcttaatcggagtggaagaggctgt

SEQ ID NO: 597441 - DNA, 33 bp, Homo sapien
ttcttgtttccagtgcaaatccactgtgaccag

SEQ ID NO: 597442 - DNA, 33 bp, Homo sapien
ttcttgtttccagtgcgaatccactgtgaccag

SEQ ID NO: 597443 - DNA, 33 bp, Homo sapien
gcaagagcatgcataaatctgacaggaagacac

SEQ ID NO: 597444 - DNA, 33 bp, Homo sapien
gcaagagcatgcataactctgacaggaagacac

SEQ ID NO: 597445 - DNA, 33 bp, Homo sapien
cagtatacaatacacacaacatacaaaatatgt

SEQ ID NO: 597446 - DNA, 33 bp, Homo sapien
cagtatacaatacacataacatacaaaatatgt

SEQ ID NO: 597447 - DNA, 33 bp, Homo sapien; identical to SEQ ID NO: 597445

SEQ ID NO: 597448 - DNA, 33 bp, Homo sapien; identical to SEQ ID NO: 597446

SEQ ID NO: 597449 - DNA, 33 bp, Homo sapien
gtatccacttgggtcccgaagttcatctaagac

SEQ ID NO: 597450 - DNA, 33 bp, Homo sapien
gtatccacttgggtcctgaagttcatctaagac

SEQ ID NO: 597451 - DNA, 33 bp, Homo sapien
ggatgtgggaatttcacggttggttctttcagt

SEQ ID NO: 597452 - DNA, 33 bp, Homo sapien
ggatgtgggaatttcatggttggttctttcagt

SEQ ID NO: 597453 - DNA, 33 bp, Homo sapien
cctgtctagattttcaagtgtgggtctctccta

SEQ ID NO: 597454 - DNA, 33 bp, Homo sapien
cctgtctagattttcaggtgtgggtctctccta

SEQ ID NO: 597455 - DNA, 33 bp, Homo sapien
aacaaaacaaaacagaagcgtatgaacactttc

SEQ ID NO: 597456 - DNA, 33 bp, Homo sapien
aacaaaacaaaacagaggcgtatgaacactttc

SEQ ID NO: 597457 - DNA, 33 bp, Homo sapien
tcatctgtcttgtcccacaaaggccaagacaaa

SEQ ID NO: 597458 - DNA, 33 bp, Homo sapien
tcatctgtcttgtcccgcaaaggccaagacaaa

SEQ ID NO: 597459 - DNA, 33 bp, Homo sapien
gaagagttccagccaaactttgtaaatgccgag

SEQ ID NO: 597460 - DNA, 33 bp, Homo sapien
gaagagttccagccaatctttgtaaatgccgag

SEQ ID NO: 597461 - DNA, 33 bp, Homo sapien
ccttcatataggttccacttgggtaccagctgc

SEQ ID NO: 597462 - DNA, 33 bp, Homo sapien
ccttcatataggttccgcttgggtaccagctgc

SEQ ID NO: 597463 - DNA, 33 bp, Homo sapien
ccatgtatccctttacacacatatacgcacacc

SEQ ID NO: 597464 - DNA, 33 bp, Homo sapien
ccatgtatccctttacgcacatatacgcacacc

SEQ ID NO: 597465 - DNA, 33 bp, Homo sapien
ctgggcgacatcaccacgctggttcctccctgt

SEQ ID NO: 597466 - DNA, 33 bp, Homo sapien
ctgggcgacatcaccatgctggttcctccctgt

SEQ ID NO: 597467 - DNA, 33 bp, Homo sapien
tgggttgcactgcctgacacactggagccatcc

SEQ ID NO: 597468 - DNA, 33 bp, Homo sapien
tgggttgcactgcctgccacactggagccatcc

SEQ ID NO: 597469 - DNA, 33 bp, Homo sapien
gaagtgaaagctgagacgtctaggaacacacca

SEQ ID NO: 597470 - DNA, 33 bp, Homo sapien
gaagtgaaagctgagatgtctaggaacacacca

SEQ ID NO: 597471 - DNA, 33 bp, Homo sapien
tttgctaggaagagaacgccaatgttcaggtgc

SEQ ID NO: 597472 - DNA, 33 bp, Homo sapien
tttgctaggaagagaatgccaatgttcaggtgc

SEQ ID NO: 597473 - DNA, 33 bp, Homo sapien
gaaagaaccatgaccccgaatattggagtgggg

SEQ ID NO: 597474 - DNA, 33 bp, Homo sapien
gaaagaaccatgaccctgaatattggagtgggg

SEQ ID NO: 597475 - DNA, 33 bp, Homo sapien
tagggaccccctcagaaaatcttcagctccctc

SEQ ID NO: 597476 - DNA, 33 bp, Homo sapien
tagggaccccctcagacaatcttcagctccctc

SEQ ID NO: 597477 - DNA, 33 bp, Homo sapien
tttgaatgtgtgtagacgtcaagtagatcacaa

SEQ ID NO: 597478 - DNA, 33 bp, Homo sapien
tttgaatgtgtgtagatgtcaagtagatcacaa

SEQ ID NO: 597479 - DNA, 33 bp, Homo sapien
cccgggtggcaagaacactctcaggcagctcac

SEQ ID NO: 597480 - DNA, 33 bp, Homo sapien
cccgggtggcaagaacgctctcaggcagctcac

SEQ ID NO: 597481 - DNA, 33 bp, Homo sapien
accctgctggaacttaagactgtaatttatggg

SEQ ID NO: 597482 - DNA, 33 bp, Homo sapien
accctgctggaacttaggactgtaatttatggg

SEQ ID NO: 597483 - DNA, 33 bp, Homo sapien
ctgtgagcctgctggcaccgagtttcatcatct

SEQ ID NO: 597484 - DNA, 33 bp, Homo sapien
ctgtgagcctgctggcgccgagtttcatcatct

SEQ ID NO: 597485 - DNA, 33 bp, Homo sapien
gaacttccccaggtacaagcgagagcagctcac

SEQ ID NO: 597486 - DNA, 33 bp, Homo sapien
gaacttccccaggtacgagcgagagcagctcac

SEQ ID NO: 597487 - DNA, 33 bp, Homo sapien
actccttgtgtgtaaactgggtgatgccccatg

SEQ ID NO: 597488 - DNA, 33 bp, Homo sapien
actccttgtgtgtaaagtgggtgatgccccatg

SEQ ID NO: 597489 - DNA, 33 bp, Homo sapien
gacacatccaggttacaagacactgggcaagac

SEQ ID NO: 597490 - DNA, 33 bp, Homo sapien
gacacatccaggttacgagacactgggcaagac

SEQ ID NO: 597491 - DNA, 33 bp, Homo sapien
tgaactggtgcacgggaatgtcacgcttcctgt

SEQ ID NO: 597492 - DNA, 33 bp, Homo sapien
tgaactggtgcacggggatgtcacgcttcctgt

SEQ ID NO: 597493 - DNA, 33 bp, Homo sapien
acccctcccttctgccacagttacacttacagg

SEQ ID NO: 597494 - DNA, 33 bp, Homo sapien
acccctcccttctgccgcagttacacttacagg

SEQ ID NO: 597495 - DNA, 33 bp, Homo sapien
agtggtggaagcagcaaaaactggctggagaga

SEQ ID NO: 597496 - DNA, 33 bp, Homo sapien
agtggtggaagcagcagaaactggctggagaga

SEQ ID NO: 597497 - DNA, 33 bp, Homo sapien
atttctggtttggaaccattatgaataaagctg

SEQ ID NO: 597498 - DNA, 33 bp, Homo sapien
atttctggtttggaactattatgaataaagctg

SEQ ID NO: 597499 - DNA, 33 bp, Homo sapien
aagagtttcctcaggacgccctttgtttatccc

SEQ ID NO: 597500 - DNA, 33 bp, Homo sapien
aagagtttcctcaggatgccctttgtttatccc

SEQ ID NO: 597501 - DNA, 33 bp, Homo sapien
taagtcccgaggaatgcaggctgcgatgcgatg

SEQ ID NO: 597502 - DNA, 33 bp, Homo sapien
taagtcccgaggaatgtaggctgcgatgcgatg

SEQ ID NO: 597503 - DNA, 33 bp, Homo sapien
cctgagctgacacccacagcgatcatggccggg

SEQ ID NO: 597504 - DNA, 33 bp, Homo sapien
cctgagctgacacccatagcgatcatggccggg

SEQ ID NO: 597505 - DNA, 33 bp, Homo sapien
agagcttctttgtagcaagacctgtcagtgtct

SEQ ID NO: 597506 - DNA, 33 bp, Homo sapien
agagcttctttgtagcgagacctgtcagtgtct

SEQ ID NO: 597507 - DNA, 33 bp, Homo sapien
caggtctgaaacggacactggtcagatgacagc

SEQ ID NO: 597508 - DNA, 33 bp, Homo sapien
caggtctgaaacggacgctggtcagatgacagc

SEQ ID NO: 597509 - DNA, 33 bp, Homo sapien
ggcactatggcaactacagaccttgcaggtgct

SEQ ID NO: 597510 - DNA, 33 bp, Homo sapien
ggcactatggcaactatagaccttgcaggtgct

SEQ ID NO: 597511 - DNA, 33 bp, Homo sapien
atggcaaccactggcacgttggcgaacctgcca

SEQ ID NO: 597512 - DNA, 33 bp, Homo sapien
atggcaaccactggcatgttggcgaacctgcca

SEQ ID NO: 597513 - DNA, 33 bp, Homo sapien
gtctggcaatcaaaggaactaaaacgcaagcaa

SEQ ID NO: 597514 - DNA, 33 bp, Homo sapien
gtctggcaatcaaagggactaaaacgcaagcaa

SEQ ID NO: 597515 - DNA, 33 bp, Homo sapien
agctgcagggcctcacaatggactattagattc

SEQ ID NO: 597516 - DNA, 33 bp, Homo sapien
agctgcagggcctcacgatggactattagattc

SEQ ID NO: 597517 - DNA, 33 bp, Homo sapien
ctgcctcttgggctcaaacgattctcttgcctc

SEQ ID NO: 597518 - DNA, 33 bp, Homo sapien
ctgcctcttgggctcagacgattctcttgcctc

SEQ ID NO: 597519 - DNA, 33 bp, Homo sapien
accacattaagtattcaaatggtttgttgaaga

SEQ ID NO: 597520 - DNA, 33 bp, Homo sapien
accacattaagtattcgaatggtttgttgaaga

SEQ ID NO: 597521 - DNA, 33 bp, Homo sapien
ggagagggggtggagagagttaagagttatagg

SEQ ID NO: 597522 - DNA, 33 bp, Homo sapien
ggagagggggtggagatagttaagagttatagg

SEQ ID NO: 597523 - DNA, 33 bp, Homo sapien
tggttacagatttggaacttgctgatatggaga

SEQ ID NO: 597524 - DNA, 33 bp, Homo sapien
tggttacagatttggagcttgctgatatggaga

SEQ ID NO: 597525 - DNA, 33 bp, Homo sapien
tgactccagtatgcacaaatttcagtgtccatg

SEQ ID NO: 597526 - DNA, 33 bp, Homo sapien
tgactccagtatgcacgaatttcagtgtccatg

SEQ ID NO: 597527 - DNA, 33 bp, Homo sapien
tttttcatttcttttaacagcattttgtagttt

SEQ ID NO: 597528 - DNA, 33 bp, Homo sapien
tttttcatttcttttagcagcattttgtagttt

SEQ ID NO: 597529 - DNA, 33 bp, Homo sapien
aaccatcgacactcgcaccaacgaagatgagtc

SEQ ID NO: 597530 - DNA, 33 bp, Homo sapien
aaccatcgacactcgcgccaacgaagatgagtc

SEQ ID NO: 597531 - DNA, 33 bp, Homo sapien
tccccactttccttcacgtgcttctggacagtc

SEQ ID NO: 597532 - DNA, 33 bp, Homo sapien
tccccactttccttcatgtgcttctggacagtc

SEQ ID NO: 597533 - DNA, 33 bp, Homo sapien
tcaaaaaaagaaataaagaaatgctgtcagaag

SEQ ID NO: 597534 - DNA, 33 bp, Homo sapien
tcaaaaaaagaaataaggaaatgctgtcagaag

SEQ ID NO: 597535 - DNA, 33 bp, Homo sapien
agagaagaaagtgctgaaacattcattattaag

SEQ ID NO: 597536 - DNA, 33 bp, Homo sapien
agagaagaaagtgctgcaacattcattattaag

SEQ ID NO: 597537 - DNA, 33 bp, Homo sapien
tactgaaaacatcttggaagcttttttaggcca

SEQ ID NO: 597538 - DNA, 33 bp, Homo sapien
tactgaaaacatcttgtaagcttttttaggcca

SEQ ID NO: 597539 - DNA, 33 bp, Homo sapien
tatgttcttggtaaaccagcccttggtcttaca

SEQ ID NO: 597540 - DNA, 33 bp, Homo sapien
tatgttcttggtaaactagcccttggtcttaca

SEQ ID NO: 597541 - DNA, 33 bp, Homo sapien
agcgcatcctgaaccacgtgctgcagcatgcgg

SEQ ID NO: 597542 - DNA, 33 bp, Homo sapien
agcgcatcctgaaccatgtgctgcagcatgcgg

SEQ ID NO: 597543 - DNA, 33 bp, Homo sapien
cactgtcgcttctccacggcattagattttcag

SEQ ID NO: 597544 - DNA, 33 bp, Homo sapien
cactgtcgcttctccatggcattagattttcag

SEQ ID NO: 597545 - DNA, 33 bp, Homo sapien
cccttttctgatagcagagataggcaagcatcc

SEQ ID NO: 597546 - DNA, 33 bp, Homo sapien
cccttttctgatagcatagataggcaagcatcc

SEQ ID NO: 597547 - DNA, 33 bp, Homo sapien
gaactcaggcctatgaaggagaggcacccaagg

SEQ ID NO: 597548 - DNA, 33 bp, Homo sapien
gaactcaggcctatgagggagaggcacccaagg

SEQ ID NO: 597549 - DNA, 33 bp, Homo sapien
ttactgtgtgacccaaatgagtcttgtcctggt

SEQ ID NO: 597550 - DNA, 33 bp, Homo sapien
ttactgtgtgacccaagtgagtcttgtcctggt

SEQ ID NO: 597551 - DNA, 33 bp, Homo sapien
ttttgggactctaacccggctcctctgcttcct

SEQ ID NO: 597552 - DNA, 33 bp, Homo sapien
ttttgggactctaacctggctcctctgcttcct

SEQ ID NO: 597553 - DNA, 33 bp, Homo sapien
aaaaacggccagaaaccacctcaacaggagtac

SEQ ID NO: 597554 - DNA, 33 bp, Homo sapien
aaaaacggccagaaacgacctcaacaggagtac

SEQ ID NO: 597555 - DNA, 33 bp, Homo sapien
tgggtaggtccctgccagataaaggtacacaag

SEQ ID NO: 597556 - DNA, 33 bp, Homo sapien
tgggtaggtccctgccggataaaggtacacaag

SEQ ID NO: 597557 - DNA, 33 bp, Homo sapien
ggtgctcttaatctggaaaggaaatgtaaccta

SEQ ID NO: 597558 - DNA, 33 bp, Homo sapien
ggtgctcttaatctggcaaggaaatgtaaccta

SEQ ID NO: 597559 - DNA, 33 bp, Homo sapien
gtgtcagtggtgacaaagaagatcagagtgtct

SEQ ID NO: 597560 - DNA, 33 bp, Homo sapien
gtgtcagtggtgacaacgaagatcagagtgtct

SEQ ID NO: 597561 - DNA, 33 bp, Homo sapien
aagatctcaatggatgcacccccaaatgtcagc

SEQ ID NO: 597562 - DNA, 33 bp, Homo sapien
aagatctcaatggatgtacccccaaatgtcagc

SEQ ID NO: 597563 - DNA, 33 bp, Homo sapien
tagaaatagccttatactacatgggattttccc

SEQ ID NO: 597564 - DNA, 33 bp, Homo sapien
tagaaatagccttatattacatgggattttccc

SEQ ID NO: 597565 - DNA, 33 bp, Homo sapien
ggccaatcagggagaacggagcaatgggaccct

SEQ ID NO: 597566 - DNA, 33 bp, Homo sapien
ggccaatcagggagaatggagcaatgggaccct

SEQ ID NO: 597567 - DNA, 33 bp, Homo sapien
ttttgcagaattaccaagttgttaggctagggg

SEQ ID NO: 597568 - DNA, 33 bp, Homo sapien
ttttgcagaattaccaggttgttaggctagggg

SEQ ID NO: 597569 - DNA, 33 bp, Homo sapien
ttggccaactctacagaagggttggtgtcccag

SEQ ID NO: 597570 - DNA, 33 bp, Homo sapien
ttggccaactctacaggagggttggtgtcccag

SEQ ID NO: 597571 - DNA, 33 bp, Homo sapien
agggcatggcacagtcactggcaatgaccaaaa

SEQ ID NO: 597572 - DNA, 33 bp, Homo sapien
agggcatggcacagtccctggcaatgaccaaaa

SEQ ID NO: 597573 - DNA, 33 bp, Homo sapien
gctttccgggctcaggaaattctctagcctcag

SEQ ID NO: 597574 - DNA, 33 bp, Homo sapien
gctttccgggctcaggcaattctctagcctcag

SEQ ID NO: 597575 - DNA, 33 bp, Homo sapien
gcatacaatccggtgacgccagagagtgagagg

SEQ ID NO: 597576 - DNA, 33 bp, Homo sapien
gcatacaatccggtgatgccagagagtgagagg

SEQ ID NO: 597577 - DNA, 33 bp, Homo sapien
cccgccacaatgtgccaaccacttcccgtttgc

SEQ ID NO: 597578 - DNA, 33 bp, Homo sapien
cccgccacaatgtgccgaccacttcccgtttgc

SEQ ID NO: 597579 - DNA, 33 bp, Homo sapien
cctccccctttcctcacggcttcttcagcacca

SEQ ID NO: 597580 - DNA, 33 bp, Homo sapien
cctccccctttcctcatggcttcttcagcacca

SEQ ID NO: 597581 - DNA, 33 bp, Homo sapien
agtctagtctggccaggaaacagtggatcctcg

SEQ ID NO: 597582 - DNA, 33 bp, Homo sapien
agtctagtctggccagtaaacagtggatcctcg

SEQ ID NO: 597583 - DNA, 33 bp, Homo sapien
gctaacaactgactataaagtgctgaagacgct

SEQ ID NO: 597584 - DNA, 33 bp, Homo sapien
gctaacaactgactatgaagtgctgaagacgct

SEQ ID NO: 597585 - DNA, 33 bp, Homo sapien
catctactccgaggaacgcactatatggacaag

SEQ ID NO: 597586 - DNA, 33 bp, Homo sapien
catctactccgaggaatgcactatatggacaag

SEQ ID NO: 597587 - DNA, 33 bp, Homo sapien
tggtgctgcattttcaacaggctcattcagaag

SEQ ID NO: 597588 - DNA, 33 bp, Homo sapien
tggtgctgcattttcagcaggctcattcagaag

SEQ ID NO: 597589 - DNA, 33 bp, Homo sapien
aggccataattgttcacagttcctagttgtact

SEQ ID NO: 597590 - DNA, 33 bp, Homo sapien
aggccataattgttcatagttcctagttgtact

SEQ ID NO: 597591 - DNA, 33 bp, Homo sapien
cacgtatctttgacacccaagcaagcacgttac

SEQ ID NO: 597592 - DNA, 33 bp, Homo sapien
cacgtatctttgacactcaagcaagcacgttac

SEQ ID NO: 597593 - DNA, 33 bp, Homo sapien
ctcaggctccgcaacaactaatgggaaccggag

SEQ ID NO: 597594 - DNA, 33 bp, Homo sapien
ctcaggctccgcaacacctaatgggaaccggag

SEQ ID NO: 597595 - DNA, 33 bp, Homo sapien
gagatattttccagtacgccattgggggttgtc

SEQ ID NO: 597596 - DNA, 33 bp, Homo sapien
gagatattttccagtatgccattgggggttgtc

SEQ ID NO: 597597 - DNA, 33 bp, Homo sapien
ggatgtacttccaaaggcaactactctcaggtt

SEQ ID NO: 597598 - DNA, 33 bp, Homo sapien
ggatgtacttccaaagtcaactactctcaggtt

SEQ ID NO: 597599 - DNA, 33 bp, Homo sapien
tgcatttgaggatgcaccttgttgacactgcag

SEQ ID NO: 597600 - DNA, 33 bp, Homo sapien
tgcatttgaggatgcagcttgttgacactgcag

SEQ ID NO: 597601 - DNA, 33 bp, Homo sapien
tgacagcccggggctcaatggtacatggccggc

SEQ ID NO: 597602 - DNA, 33 bp, Homo sapien
tgacagcccggggctcgatggtacatggccggc

SEQ ID NO: 597603 - DNA, 33 bp, Homo sapien
gcgggatgtggctccaacgcctcacttccagct

SEQ ID NO: 597604 - DNA, 33 bp, Homo sapien
gcgggatgtggctccagcgcctcacttccagct

SEQ ID NO: 597605 - DNA, 33 bp, Homo sapien
ctcaatgtccagccgccagagtatctgcctact

SEQ ID NO: 597606 - DNA, 33 bp, Homo sapien
ctcaatgtccagccgctagagtatctgcctact

SEQ ID NO: 597607 - DNA, 33 bp, Homo sapien
gggcgggcacgctacactctgaagtctgaatcg

SEQ ID NO: 597608 - DNA, 33 bp, Homo sapien
gggcgggcacgctacattctgaagtctgaatcg

SEQ ID NO: 597609 - DNA, 33 bp, Homo sapien
tgtcttatttttgtgcagattccccgcagcccg

SEQ ID NO: 597610 - DNA, 33 bp, Homo sapien
tgtcttatttttgtgccgattccccgcagcccg

SEQ ID NO: 597611 - DNA, 33 bp, Homo sapien
gcaggggagggtcataagagatcaggagctctc

SEQ ID NO: 597612 - DNA, 33 bp, Homo sapien
gcaggggagggtcataggagatcaggagctctc

SEQ ID NO: 597613 - DNA, 33 bp, Homo sapien
ggaggcacacagaacccggcagagccacttgtc

SEQ ID NO: 597614 - DNA, 33 bp, Homo sapien
ggaggcacacagaacctggcagagccacttgtc

SEQ ID NO: 597615 - DNA, 33 bp, Homo sapien
ggggttccacttgaccacctcagggcacagctc

SEQ ID NO: 597616 - DNA, 33 bp, Homo sapien
ggggttccacttgaccgcctcagggcacagctc

SEQ ID NO: 597617 - DNA, 33 bp, Homo sapien
gtctggtctagagagccgaaccagtttaggggc

SEQ ID NO: 597618 - DNA, 33 bp, Homo sapien
gtctggtctagagagctgaaccagtttaggggc

SEQ ID NO: 597619 - DNA, 33 bp, Homo sapien
taaatgaacatccatcccgaggcgggcagagga

SEQ ID NO: 597620 - DNA, 33 bp, Homo sapien
taaatgaacatccatctcgaggcgggcagagga

SEQ ID NO: 597621 - DNA, 33 bp, Homo sapien
ataaaaggcagatgcacggagagaaaaaaacca

SEQ ID NO: 597622 - DNA, 33 bp, Homo sapien
ataaaaggcagatgcatggagagaaaaaaacca

SEQ ID NO: 597623 - DNA, 33 bp, Homo sapien
tttgcattacgaacacccaatattctctttcta

SEQ ID NO: 597624 - DNA, 33 bp, Homo sapien
tttgcattacgaacactcaatattctctttcta

SEQ ID NO: 597625 - DNA, 33 bp, Homo sapien; identical to SEQ ID NO: 597623

SEQ ID NO: 597626 - DNA, 33 bp, Homo sapien; identical to SEQ ID NO: 597624

SEQ ID NO: 597627 - DNA, 33 bp, Homo sapien
gcacgatttcgaacacagtgccgtcgagaagcg

SEQ ID NO: 597628 - DNA, 33 bp, Homo sapien
gcacgatttcgaacacggtgccgtcgagaagcg

SEQ ID NO: 597629 - DNA, 33 bp, Homo sapien; identical to SEQ ID NO: 597627

SEQ ID NO: 597630 - DNA, 33 bp, Homo sapien; identical to SEQ ID NO: 597628

SEQ ID NO: 597631 - DNA, 33 bp, Homo sapien
ccttcagtctttaaaaacttgcttgtaataagg

SEQ ID NO: 597632 - DNA, 33 bp, Homo sapien
ccttcagtctttaaaaccttgcttgtaataagg

SEQ ID NO: 597633 - DNA, 33 bp, Homo sapien
agtcccagctacttgccacttgggagactgagg

SEQ ID NO: 597634 - DNA, 33 bp, Homo sapien
agtcccagctacttgctacttgggagactgagg

SEQ ID NO: 597635 - DNA, 33 bp, Homo sapien
ttaagatgtgttattaccaaagaatcaaaaaat

SEQ ID NO: 597636 - DNA, 33 bp, Homo sapien
ttaagatgtgttattatcaaagaatcaaaaaat

SEQ ID NO: 597637 - DNA, 33 bp, Homo sapien
tacaatcaaaaagccccagaggtgtactctcca

SEQ ID NO: 597638 - DNA, 33 bp, Homo sapien
tacaatcaaaaagccctagaggtgtactctcca

SEQ ID NO: 597639 - DNA, 33 bp, Homo sapien
gggaaagaactgagagaaaatataccaaaaatg

SEQ ID NO: 597640 - DNA, 33 bp, Homo sapien
gggaaagaactgagaggaaatataccaaaaatg

SEQ ID NO: 597641 - DNA, 33 bp, Homo sapien
atatagaaagagtgaagttaaggaaacactgag

SEQ ID NO: 597642 - DNA, 33 bp, Homo sapien
atatagaaagagtgaatttaaggaaacactgag

SEQ ID NO: 597643 - DNA, 33 bp, Homo sapien; identical to SEQ ID NO: 597641

SEQ ID NO: 597644 - DNA, 33 bp, Homo sapien; identical to SEQ ID NO: 597642

SEQ ID NO: 597645 - DNA, 33 bp, Homo sapien
cgggcctcagaccctaccctactcttgctggtt

SEQ ID NO: 597646 - DNA, 33 bp, Homo sapien
cgggcctcagaccctatcctactcttgctggtt

SEQ ID NO: 597647 - DNA, 33 bp, Homo sapien
caaaaaaatagctccacaggtatcagaatatgg

SEQ ID NO: 597648 - DNA, 33 bp, Homo sapien
caaaaaaatagctccagaggtatcagaatatgg

SEQ ID NO: 597649 - DNA, 33 bp, Homo sapien
attgtcaaactgaattaaaaaagcaagctacag

SEQ ID NO: 597650 - DNA, 33 bp, Homo sapien
attgtcaaactgaattcaaaaagcaagctacag

SEQ ID NO: 597651 - DNA, 33 bp, Homo sapien
acaaatcccagaaacaaggaattccaaaaacct

SEQ ID NO: 597652 - DNA, 33 bp, Homo sapien
acaaatcccagaaacacggaattccaaaaacct

SEQ ID NO: 597653 - DNA, 33 bp, Homo sapien
ctctattcaaagctcactaacgcaaaaggatcc

SEQ ID NO: 597654 - DNA, 33 bp, Homo sapien
ctctattcaaagctcagtaacgcaaaaggatcc

SEQ ID NO: 597655 - DNA, 33 bp, Homo sapien
tgagcctagtccaagaatcgagtccaagatgta

SEQ ID NO: 597656 - DNA, 33 bp, Homo sapien
tgagcctagtccaagagtcgagtccaagatgta

SEQ ID NO: 597657 - DNA, 33 bp, Homo sapien
cttgccttatcaccccaatcaggtctgcatgcc

SEQ ID NO: 597658 - DNA, 33 bp, Homo sapien
cttgccttatcacccccatcaggtctgcatgcc

SEQ ID NO: 597659 - DNA, 33 bp, Homo sapien
ggacgggctcctgacacggctttaatcaggagt

SEQ ID NO: 597660 - DNA, 33 bp, Homo sapien
ggacgggctcctgacatggctttaatcaggagt

SEQ ID NO: 597661 - DNA, 33 bp, Homo sapien
ataatgttcactggaaagtgatgctagtcataa

SEQ ID NO: 597662 - DNA, 33 bp, Homo sapien
ataatgttcactggaacgtgatgctagtcataa

SEQ ID NO: 597663 - DNA, 33 bp, Homo sapien
aaaagtgaatttcctgaacttaactcatgtaaa

SEQ ID NO: 597664 - DNA, 33 bp, Homo sapien
aaaagtgaatttcctggacttaactcatgtaaa

SEQ ID NO: 597665 - DNA, 33 bp, Homo sapien
cagaagaagcccctcccagcacccactggagag

SEQ ID NO: 597666 - DNA, 33 bp, Homo sapien
cagaagaagcccctccgagcacccactggagag

SEQ ID NO: 597667 - DNA, 33 bp, Homo sapien
aattatttataggcacaaacaatcttgatgttc

SEQ ID NO: 597668 - DNA, 33 bp, Homo sapien
aattatttataggcacgaacaatcttgatgttc

SEQ ID NO: 597669 - DNA, 33 bp, Homo sapien
aatgatcaaagatgggaacagaggcctatgtta

SEQ ID NO: 597670 - DNA, 33 bp, Homo sapien
aatgatcaaagatgggcacagaggcctatgtta

SEQ ID NO: 597671 - DNA, 33 bp, Homo sapien
cacacagatgcataaacgacatacacatacaca

SEQ ID NO: 597672 - DNA, 33 bp, Homo sapien
cacacagatgcataaatgacatacacatacaca

SEQ ID NO: 597673 - DNA, 33 bp, Homo sapien
tagggtgatacgatgacatggatttgggactcc

SEQ ID NO: 597674 - DNA, 33 bp, Homo sapien
tagggtgatacgatgatatggatttgggactcc

SEQ ID NO: 597675 - DNA, 33 bp, Homo sapien
agcattagcattttccaaaggcggagtttttgg

SEQ ID NO: 597676 - DNA, 33 bp, Homo sapien
agcattagcattttccgaaggcggagtttttgg

SEQ ID NO: 597677 - DNA, 33 bp, Homo sapien
tgatctgtttctagtgcagtgagtgcatcttag

SEQ ID NO: 597678 - DNA, 33 bp, Homo sapien
tgatctgtttctagtgtagtgagtgcatcttag

SEQ ID NO: 597679 - DNA, 33 bp, Homo sapien
gcatggcgcagtgcccaaacagagcagaggctt

SEQ ID NO: 597680 - DNA, 33 bp, Homo sapien
gcatggcgcagtgcccgaacagagcagaggctt

SEQ ID NO: 597681 - DNA, 33 bp, Homo sapien
tttctcaacacgtcagcccaaccttttccagct

SEQ ID NO: 597682 - DNA, 33 bp, Homo sapien
tttctcaacacgtcaggccaaccttttccagct

SEQ ID NO: 597683 - DNA, 33 bp, Homo sapien
gagagcccggttctggaaccctggaccctgggc

SEQ ID NO: 597684 - DNA, 33 bp, Homo sapien
gagagcccggttctgggaccctggaccctgggc

SEQ ID NO: 597685 - DNA, 33 bp, Homo sapien
ctgtctcaaaaagagaaatagagataggagaga

SEQ ID NO: 597686 - DNA, 33 bp, Homo sapien
ctgtctcaaaaagagagatagagataggagaga

SEQ ID NO: 597687 - DNA, 33 bp, Homo sapien
tccgttgggaagagcaataccttctgtgatgtg

SEQ ID NO: 597688 - DNA, 33 bp, Homo sapien
tccgttgggaagagcagtaccttctgtgatgtg

SEQ ID NO: 597689 - DNA, 33 bp, Homo sapien
ttctctaaaaatgggaatacctggcttatccag

SEQ ID NO: 597690 - DNA, 33 bp, Homo sapien
ttctctaaaaatgggattacctggcttatccag

SEQ ID NO: 597691 - DNA, 33 bp, Homo sapien
aaggcagccaagatgacgacgaagtgagcagaa

SEQ ID NO: 597692 - DNA, 33 bp, Homo sapien
aaggcagccaagatgatgacgaagtgagcagaa

SEQ ID NO: 597693 - DNA, 33 bp, Homo sapien
acagaaggcacttaaaccatacatattttgctt

SEQ ID NO: 597694 - DNA, 33 bp, Homo sapien
acagaaggcacttaaagcatacatattttgctt

SEQ ID NO: 597695 - DNA, 33 bp, Homo sapien
acctagaagttaaataaaggactgggtcagagg

SEQ ID NO: 597696 - DNA, 33 bp, Homo sapien
acctagaagttaaatagaggactgggtcagagg

SEQ ID NO: 597697 - DNA, 33 bp, Homo sapien
ctagctctcagcctcagatgacttgtcttgatc

SEQ ID NO: 597698 - DNA, 33 bp, Homo sapien
ctagctctcagcctcatatgacttgtcttgatc

SEQ ID NO: 597699 - DNA, 33 bp, Homo sapien
cctcaaacatgtgctaccctttaagaaagtgag

SEQ ID NO: 597700 - DNA, 33 bp, Homo sapien
cctcaaacatgtgctatcctttaagaaagtgag

SEQ ID NO: 597701 - DNA, 33 bp, Homo sapien
ctaaaagaccacggcaacctctctgctctccga

SEQ ID NO: 597702 - DNA, 33 bp, Homo sapien
ctaaaagaccacggcaccctctctgctctccga

SEQ ID NO: 597703 - DNA, 33 bp, Homo sapien
accaacttaatattcaactcatttgttttagtt

SEQ ID NO: 597704 - DNA, 33 bp, Homo sapien
accaacttaatattcagctcatttgttttagtt

SEQ ID NO: 597705 - DNA, 33 bp, Homo sapien
tttgggaggctcaggaaagaagatcacttgagg

SEQ ID NO: 597706 - DNA, 33 bp, Homo sapien
tttgggaggctcaggagagaagatcacttgagg

SEQ ID NO: 597707 - DNA, 33 bp, Homo sapien
tctgatgtgctaaaaagagtgaggtaatgagag

SEQ ID NO: 597708 - DNA, 33 bp, Homo sapien
tctgatgtgctaaaaatagtgaggtaatgagag

SEQ ID NO: 597709 - DNA, 33 bp, Homo sapien
acaagagcttcactcaacctgattccttgaagg

SEQ ID NO: 597710 - DNA, 33 bp, Homo sapien
acaagagcttcactcagcctgattccttgaagg

SEQ ID NO: 597711 - DNA, 33 bp, Homo sapien
ttcatacagggctccacctaagtaagaatgtga

SEQ ID NO: 597712 - DNA, 33 bp, Homo sapien
ttcatacagggctccatctaagtaagaatgtga

SEQ ID NO: 597713 - DNA, 33 bp, Homo sapien
gccacatacatgtccacaatgggagtctgtctt

SEQ ID NO: 597714 - DNA, 33 bp, Homo sapien
gccacatacatgtccataatgggagtctgtctt

SEQ ID NO: 597715 - DNA, 33 bp, Homo sapien
cctgttttcttggacccaatttgttgccacaag

SEQ ID NO: 597716 - DNA, 33 bp, Homo sapien
cctgttttcttggacctaatttgttgccacaag

SEQ ID NO: 597717 - DNA, 33 bp, Homo sapien
tccctgggccacctcactccaattaagcaggtc

SEQ ID NO: 597718 - DNA, 33 bp, Homo sapien
tccctgggccacctcattccaattaagcaggtc

SEQ ID NO: 597719 - DNA, 33 bp, Homo sapien
gatcagagctcgggcaatacctccaaactgcat

SEQ ID NO: 597720 - DNA, 33 bp, Homo sapien
gatcagagctcgggcagtacctccaaactgcat

SEQ ID NO: 597721 - DNA, 33 bp, Homo sapien; identical to SEQ ID NO: 597719

SEQ ID NO: 597722 - DNA, 33 bp, Homo sapien; identical to SEQ ID NO: 597720

SEQ ID NO: 597723 - DNA, 33 bp, Homo sapien
aaaaggtgctgatccacaaaaacctctggaagg

SEQ ID NO: 597724 - DNA, 33 bp, Homo sapien
aaaaggtgctgatccataaaaacctctggaagg

SEQ ID NO: 597725 - DNA, 33 bp, Homo sapien
catcatcaatcggaacacagatccccagtattt

SEQ ID NO: 597726 - DNA, 33 bp, Homo sapien
catcatcaatcggaacgcagatccccagtattt

SEQ ID NO: 597727 - DNA, 33 bp, Homo sapien
agcagagccaaccctcactaatgggaaccccgg

SEQ ID NO: 597728 - DNA, 33 bp, Homo sapien
agcagagccaaccctcgctaatgggaaccccgg

SEQ ID NO: 597729 - DNA, 33 bp, Homo sapien
ctaccacgagctggtcacagttcagaccaagca

SEQ ID NO: 597730 - DNA, 33 bp, Homo sapien
ctaccacgagctggtcgcagttcagaccaagca

SEQ ID NO: 597731 - DNA, 33 bp, Homo sapien
gatagaagaaaatagccaggtacggtggctcaa

SEQ ID NO: 597732 - DNA, 33 bp, Homo sapien
gatagaagaaaatagctaggtacggtggctcaa

SEQ ID NO: 597733 - DNA, 33 bp, Homo sapien
ggctccacacaggagacatcagaacacacctgc

SEQ ID NO: 597734 - DNA, 33 bp, Homo sapien
ggctccacacaggagagatcagaacacacctgc

SEQ ID NO: 597735 - DNA, 33 bp, Homo sapien
aggcagaaccagcagacaggaaggtgacacagt

SEQ ID NO: 597736 - DNA, 33 bp, Homo sapien
aggcagaaccagcagataggaaggtgacacagt

SEQ ID NO: 597737 - DNA, 33 bp, Homo sapien
cagggttcctttgagcacagggctgatcccatg

SEQ ID NO: 597738 - DNA, 33 bp, Homo sapien
cagggttcctttgagcgcagggctgatcccatg

SEQ ID NO: 597739 - DNA, 33 bp, Homo sapien
ttctttcactggggtacgtggcttaccaagcag

SEQ ID NO: 597740 - DNA, 33 bp, Homo sapien
ttctttcactggggtatgtggcttaccaagcag

SEQ ID NO: 597741 - DNA, 33 bp, Homo sapien
tagaacaaagtgaaaaaatcatgaggacattca

SEQ ID NO: 597742 - DNA, 33 bp, Homo sapien
tagaacaaagtgaaaacatcatgaggacattca

SEQ ID NO: 597743 - DNA, 33 bp, Homo sapien
gcctgagagttcctggcccagagtgcatagaac

SEQ ID NO: 597744 - DNA, 33 bp, Homo sapien
gcctgagagttcctggtccagagtgcatagaac

SEQ ID NO: 597745 - DNA, 33 bp, Homo sapien
gctgtggccacactgacactcatccagacagct

SEQ ID NO: 597746 - DNA, 33 bp, Homo sapien
gctgtggccacactgatactcatccagacagct

SEQ ID NO: 597747 - DNA, 33 bp, Homo sapien
tcagaacaccactctcacttggccaaatgccct

SEQ ID NO: 597748 - DNA, 33 bp, Homo sapien
tcagaacaccactctcgcttggccaaatgccct

SEQ ID NO: 597749 - DNA, 33 bp, Homo sapien
ggaactaagagaaccaccctgactctcggggag

SEQ ID NO: 597750 - DNA, 33 bp, Homo sapien
ggaactaagagaaccatcctgactctcggggag

SEQ ID NO: 597751 - DNA, 33 bp, Homo sapien
cagggacaaaaaaagaagatgggtcagatgggg

SEQ ID NO: 597752 - DNA, 33 bp, Homo sapien
cagggacaaaaaaagaggatgggtcagatgggg

SEQ ID NO: 597753 - DNA, 33 bp, Homo sapien
aagccctgtcaggagaagaaagaaaagcatcat

SEQ ID NO: 597754 - DNA, 33 bp, Homo sapien
aagccctgtcaggagaggaaagaaaagcatcat

SEQ ID NO: 597755 - DNA, 33 bp, Homo sapien
aaggaggggttaaaaactagctgagcatgatgg

SEQ ID NO: 597756 - DNA, 33 bp, Homo sapien
aaggaggggttaaaaagtagctgagcatgatgg

SEQ ID NO: 597757 - DNA, 33 bp, Homo sapien
ttttcttcacaaggaaagcaaggcttgatgtca

SEQ ID NO: 597758 - DNA, 33 bp, Homo sapien
ttttcttcacaaggaaggcaaggcttgatgtca

SEQ ID NO: 597759 - DNA, 33 bp, Homo sapien
gtgtggaggaatagtacagaatcaacctaagtg

SEQ ID NO: 597760 - DNA, 33 bp, Homo sapien
gtgtggaggaatagtatagaatcaacctaagtg

SEQ ID NO: 597761 - DNA, 33 bp, Homo sapien
agaaaaaagaaaaaaaatgctgccataacttac

SEQ ID NO: 597762 - DNA, 33 bp, Homo sapien
agaaaaaagaaaaaaattgctgccataacttac

SEQ ID NO: 597763 - DNA, 33 bp, Homo sapien
aagagagagatgcgcccgagatttaagtttaca

SEQ ID NO: 597764 - DNA, 33 bp, Homo sapien
aagagagagatgcgcctgagatttaagtttaca

SEQ ID NO: 597765 - DNA, 33 bp, Homo sapien
ggaacaggtggcactagtacctagcatgctcgc

SEQ ID NO: 597766 - DNA, 33 bp, Homo sapien
ggaacaggtggcactattacctagcatgctcgc

SEQ ID NO: 597767 - DNA, 33 bp, Homo sapien
tccccaggaggcctaccctgttcttccatgaat

SEQ ID NO: 597768 - DNA, 33 bp, Homo sapien
tccccaggaggcctactctgttcttccatgaat

SEQ ID NO: 597769 - DNA, 33 bp, Homo sapien
tcccgtggagaaaagaaccagctgctgggaggc

SEQ ID NO: 597770 - DNA, 33 bp, Homo sapien
tcccgtggagaaaagatccagctgctgggaggc

SEQ ID NO: 597771 - DNA, 33 bp, Homo sapien
ggatggtgtggctggaaatcataggccaggtgg

SEQ ID NO: 597772 - DNA, 33 bp, Homo sapien
ggatggtgtggctggagatcataggccaggtgg

SEQ ID NO: 597773 - DNA, 33 bp, Homo sapien; identical to SEQ ID NO: 597771

SEQ ID NO: 597774 - DNA, 33 bp, Homo sapien; identical to SEQ ID NO: 597772

SEQ ID NO: 597775 - DNA, 33 bp, Homo sapien
ggggcaaggaatcaggccattaccgggctctcc

SEQ ID NO: 597776 - DNA, 33 bp, Homo sapien
ggggcaaggaatcagggcattaccgggctctcc

SEQ ID NO: 597777 - DNA, 33 bp, Homo sapien
cctcgtgaatcaaagaactcctcaacctggagg

SEQ ID NO: 597778 - DNA, 33 bp, Homo sapien
cctcgtgaatcaaagagctcctcaacctggagg

SEQ ID NO: 597779 - DNA, 33 bp, Homo sapien
gtgcatctattaccttcaaactggaaaccagtc

SEQ ID NO: 597780 - DNA, 33 bp, Homo sapien
gtgcatctattaccttgaaactggaaaccagtc

SEQ ID NO: 597781 - DNA, 33 bp, Homo sapien
gtaaccacacattcacagaaacaatgccccatg

SEQ ID NO: 597782 - DNA, 33 bp, Homo sapien
gtaaccacacattcacggaaacaatgccccatg

SEQ ID NO: 597783 - DNA, 33 bp, Homo sapien
tcagggattataaacaggaattgaagaagtgag

SEQ ID NO: 597784 - DNA, 33 bp, Homo sapien
tcagggattataaacatgaattgaagaagtgag

SEQ ID NO: 597785 - DNA, 33 bp, Homo sapien; identical to SEQ ID NO: 597783

SEQ ID NO: 597786 - DNA, 33 bp, Homo sapien; identical to SEQ ID NO: 597784

SEQ ID NO: 597787 - DNA, 33 bp, Homo sapien
ttttgtgcagtttgaactcaggccctggtacgt

SEQ ID NO: 597788 - DNA, 33 bp, Homo sapien
ttttgtgcagtttgaattcaggccctggtacgt

SEQ ID NO: 597789 - DNA, 33 bp, Homo sapien
actcttaaggcccaccaaggtctgaggctgaag

SEQ ID NO: 597790 - DNA, 33 bp, Homo sapien
actcttaaggcccaccgaggtctgaggctgaag

SEQ ID NO: 597791 - DNA, 33 bp, Homo sapien
atggcgtttccatcacaggtgacattgctctca

SEQ ID NO: 597792 - DNA, 33 bp, Homo sapien
atggcgtttccatcacgggtgacattgctctca

SEQ ID NO: 597793 - DNA, 33 bp, Homo sapien
aaagggtacaccttgaatacaaaggcaacccac

SEQ ID NO: 597794 - DNA, 33 bp, Homo sapien
aaagggtacaccttgagtacaaaggcaacccac

SEQ ID NO: 597795 - DNA, 33 bp, Homo sapien
tcatttgactgaggacaaggccaattccccgag

SEQ ID NO: 597796 - DNA, 33 bp, Homo sapien
tcatttgactgaggacgaggccaattccccgag

SEQ ID NO: 597797 - DNA, 33 bp, Homo sapien
ctttaaagtgctgccaaggtaaacctcacaaga

SEQ ID NO: 597798 - DNA, 33 bp, Homo sapien
ctttaaagtgctgccagggtaaacctcacaaga

SEQ ID NO: 597799 - DNA, 33 bp, Homo sapien
aagaaagtgttcctgaaagaaaggctatttgga

SEQ ID NO: 597800 - DNA, 33 bp, Homo sapien
aagaaagtgttcctgagagaaaggctatttgga

SEQ ID NO: 597801 - DNA, 33 bp, Homo sapien
ctgggaggtgttactagacgtggtgtctggtgg

SEQ ID NO: 597802 - DNA, 33 bp, Homo sapien
ctgggaggtgttactatacgtggtgtctggtgg

SEQ ID NO: 597803 - DNA, 33 bp, Homo sapien
ttcctcaattcccagacggtgcggcggccagac

SEQ ID NO: 597804 - DNA, 33 bp, Homo sapien
ttcctcaattcccagatggtgcggcggccagac

SEQ ID NO: 597805 - DNA, 33 bp, Homo sapien
ccgtcatatactcaaaatgtcagctctaagaac

SEQ ID NO: 597806 - DNA, 33 bp, Homo sapien
ccgtcatatactcaaagtgtcagctctaagaac

SEQ ID NO: 597807 - DNA, 33 bp, Homo sapien
actaggttgtgattaaatccagattactgtttg

SEQ ID NO: 597808 - DNA, 33 bp, Homo sapien
actaggttgtgattaagtccagattactgtttg

SEQ ID NO: 597809 - DNA, 33 bp, Homo sapien
atattggttcactgccacctgttcctctcaggc

SEQ ID NO: 597810 - DNA, 33 bp, Homo sapien
atattggttcactgccgcctgttcctctcaggc

SEQ ID NO: 597811 - DNA, 33 bp, Homo sapien
tgcccagtagttcaaaagtatcctgaaaagcac

SEQ ID NO: 597812 - DNA, 33 bp, Homo sapien
tgcccagtagttcaaacgtatcctgaaaagcac

SEQ ID NO: 597813 - DNA, 33 bp, Homo sapien
aaagaacaaacacacaatgtgaaatacctgttt

SEQ ID NO: 597814 - DNA, 33 bp, Homo sapien
aaagaacaaacacacagtgtgaaatacctgttt

SEQ ID NO: 597815 - DNA, 33 bp, Homo sapien
gcccctcatctgaataacaagcacagaaatgag

SEQ ID NO: 597816 - DNA, 33 bp, Homo sapien
gcccctcatctgaataccaagcacagaaatgag

SEQ ID NO: 597817 - DNA, 33 bp, Homo sapien
atattaagctctaaataacaactgctcaacata

SEQ ID NO: 597818 - DNA, 33 bp, Homo sapien
atattaagctctaaatgacaactgctcaacata

SEQ ID NO: 597819 - DNA, 33 bp, Homo sapien
caggcctcccaaggaagacaggtctactgagat

SEQ ID NO: 597820 - DNA, 33 bp, Homo sapien
caggcctcccaaggaatacaggtctactgagat

SEQ ID NO: 597821 - DNA, 33 bp, Homo sapien
ttggttggaatatggcactttctttgtgaatga

SEQ ID NO: 597822 - DNA, 33 bp, Homo sapien
ttggttggaatatggcgctttctttgtgaatga

SEQ ID NO: 597823 - DNA, 33 bp, Homo sapien
tctgagattctctccacgtcagtttagtgggtg

SEQ ID NO: 597824 - DNA, 33 bp, Homo sapien
tctgagattctctccatgtcagtttagtgggtg

SEQ ID NO: 597825 - DNA, 33 bp, Homo sapien
ggagggactgttgctaaggcgcttctgttcttc

SEQ ID NO: 597826 - DNA, 33 bp, Homo sapien
ggagggactgttgctagggcgcttctgttcttc

SEQ ID NO: 597827 - DNA, 33 bp, Homo sapien
cagtcccatcgggcaaacaggaggctggtggga

SEQ ID NO: 597828 - DNA, 33 bp, Homo sapien
cagtcccatcgggcaagcaggaggctggtggga

SEQ ID NO: 597829 - DNA, 33 bp, Homo sapien
tgacaggttgaagataccacttgtcagcccttg

SEQ ID NO: 597830 - DNA, 33 bp, Homo sapien
tgacaggttgaagatatcacttgtcagcccttg

SEQ ID NO: 597831 - DNA, 33 bp, Homo sapien
aaactccataaggcctcaaccacatggcctcct

SEQ ID NO: 597832 - DNA, 33 bp, Homo sapien
aaactccataaggcctgaaccacatggcctcct

SEQ ID NO: 597833 - DNA, 33 bp, Homo sapien
agaggagagacacaaaaaggccactgaacttcc

SEQ ID NO: 597834 - DNA, 33 bp, Homo sapien
agaggagagacacaaacaggccactgaacttcc

SEQ ID NO: 597835 - DNA, 33 bp, Homo sapien
ttcaaagggcttcacacacagagtgtcctctga

SEQ ID NO: 597836 - DNA, 33 bp, Homo sapien
ttcaaagggcttcacagacagagtgtcctctga

SEQ ID NO: 597837 - DNA, 33 bp, Homo sapien
tagatgggatttatgggatttcattggttcatt

SEQ ID NO: 597838 - DNA, 33 bp, Homo sapien
tagatgggatttatggtatttcattggttcatt

SEQ ID NO: 597839 - DNA, 33 bp, Homo sapien
gaacaaattcaggtcccactctaaaatctgtct

SEQ ID NO: 597840 - DNA, 33 bp, Homo sapien
gaacaaattcaggtccgactctaaaatctgtct

SEQ ID NO: 597841 - DNA, 33 bp, Homo sapien
cttctgaagcaattccaagttcacttctctgcc

SEQ ID NO: 597842 - DNA, 33 bp, Homo sapien
cttctgaagcaattccgagttcacttctctgcc

SEQ ID NO: 597843 - DNA, 33 bp, Homo sapien
tcttagggaagacaggaaaatatgcaaatgcac

SEQ ID NO: 597844 - DNA, 33 bp, Homo sapien
tcttagggaagacaggcaaatatgcaaatgcac

SEQ ID NO: 597845 - DNA, 33 bp, Homo sapien
ggtgattagcagggtacgctggaatttgctgga

SEQ ID NO: 597846 - DNA, 33 bp, Homo sapien
ggtgattagcagggtatgctggaatttgctgga

SEQ ID NO: 597847 - DNA, 33 bp, Homo sapien
tacaatgaaaagatgccgattaaaaccatcaaa

SEQ ID NO: 597848 - DNA, 33 bp, Homo sapien
tacaatgaaaagatgctgattaaaaccatcaaa

SEQ ID NO: 597849 - DNA, 33 bp, Homo sapien
ggtcacaagcacattaagtccggtcatttcctc

SEQ ID NO: 597850 - DNA, 33 bp, Homo sapien
ggtcacaagcacattaggtccggtcatttcctc

SEQ ID NO: 597851 - DNA, 33 bp, Homo sapien
gggagccatttttcacaaagaaaccattgtttt

SEQ ID NO: 597852 - DNA, 33 bp, Homo sapien
gggagccatttttcacgaagaaaccattgtttt

SEQ ID NO: 597853 - DNA, 33 bp, Homo sapien
acaatagccaggtacagtgaaattggtgctaga

SEQ ID NO: 597854 - DNA, 33 bp, Homo sapien
acaatagccaggtacattgaaattggtgctaga

SEQ ID NO: 597855 - DNA, 33 bp, Homo sapien
aacttcagtttctaaacgcacacggaaaagccc

SEQ ID NO: 597856 - DNA, 33 bp, Homo sapien
aacttcagtttctaaatgcacacggaaaagccc

SEQ ID NO: 597857 - DNA, 33 bp, Homo sapien
ttaagggggcctgtgaaccagtcgtttggtgga

SEQ ID NO: 597858 - DNA, 33 bp, Homo sapien
ttaagggggcctgtgagccagtcgtttggtgga

SEQ ID NO: 597859 - DNA, 33 bp, Homo sapien
atgtactgtactcagcagactttgagcattaca

SEQ ID NO: 597860 - DNA, 33 bp, Homo sapien
atgtactgtactcagcggactttgagcattaca

SEQ ID NO: 597861 - DNA, 33 bp, Homo sapien
ggaattgaagtcagtgaaacagatcgtgtggag

SEQ ID NO: 597862 - DNA, 33 bp, Homo sapien
ggaattgaagtcagtggaacagatcgtgtggag

SEQ ID NO: 597863 - DNA, 33 bp, Homo sapien
cccatgctgggacaagaaatgaagttttgatat

SEQ ID NO: 597864 - DNA, 33 bp, Homo sapien
cccatgctgggacaaggaatgaagttttgatat

SEQ ID NO: 597865 - DNA, 33 bp, Homo sapien
attcatatagaattgcaaggaacctgaatagcc

SEQ ID NO: 597866 - DNA, 33 bp, Homo sapien
attcatatagaattgcgaggaacctgaatagcc

SEQ ID NO: 597867 - DNA, 33 bp, Homo sapien
ggggaacacactttcaagctaaggggtctgagg

SEQ ID NO: 597868 - DNA, 33 bp, Homo sapien
ggggaacacactttcaggctaaggggtctgagg

SEQ ID NO: 597869 - DNA, 33 bp, Homo sapien
gataccttcttatcaaatactcagacaggacac

SEQ ID NO: 597870 - DNA, 33 bp, Homo sapien
gataccttcttatcaactactcagacaggacac

SEQ ID NO: 597871 - DNA, 33 bp, Homo sapien
gagtagttccctggaggactggctaaggtgcct

SEQ ID NO: 597872 - DNA, 33 bp, Homo sapien
gagtagttccctggagtactggctaaggtgcct

SEQ ID NO: 597873 - DNA, 33 bp, Homo sapien
cctgacatcctagcccaaaagaggtgccccatg

SEQ ID NO: 597874 - DNA, 33 bp, Homo sapien
cctgacatcctagcccgaaagaggtgccccatg

SEQ ID NO: 597875 - DNA, 33 bp, Homo sapien
tgatgattgtcatcatcatccccgtttttcaaa

SEQ ID NO: 597876 - DNA, 33 bp, Homo sapien
tgatgattgtcatcattatccccgtttttcaaa

SEQ ID NO: 597877 - DNA, 33 bp, Homo sapien
ttggcattatctgttacctatcgacaattaata

SEQ ID NO: 597878 - DNA, 33 bp, Homo sapien
ttggcattatctgttatctatcgacaattaata

SEQ ID NO: 597879 - DNA, 33 bp, Homo sapien
actggtaatattgcccaatgaactttaaagggt

SEQ ID NO: 597880 - DNA, 33 bp, Homo sapien
actggtaatattgccccatgaactttaaagggt

SEQ ID NO: 597881 - DNA, 33 bp, Homo sapien
cgttgcagaggtctagaaaggctggtttgaaga

SEQ ID NO: 597882 - DNA, 33 bp, Homo sapien
cgttgcagaggtctaggaaggctggtttgaaga

SEQ ID NO: 597883 - DNA, 33 bp, Homo sapien
gaagaaagaatcttcccgcccttgagctgttca

SEQ ID NO: 597884 - DNA, 33 bp, Homo sapien
gaagaaagaatcttcctgcccttgagctgttca

SEQ ID NO: 597885 - DNA, 33 bp, Homo sapien
tggacctgctgaaccaaactcttaggggaatgc

SEQ ID NO: 597886 - DNA, 33 bp, Homo sapien
tggacctgctgaaccatactcttaggggaatgc

SEQ ID NO: 597887 - DNA, 33 bp, Homo sapien
acagaggccatgccaggagaggaaaataattga

SEQ ID NO: 597888 - DNA, 33 bp, Homo sapien
acagaggccatgccagtagaggaaaataattga

SEQ ID NO: 597889 - DNA, 33 bp, Homo sapien
cagccctgacgtttcacgggaagagccagaagt

SEQ ID NO: 597890 - DNA, 33 bp, Homo sapien
cagccctgacgtttcatgggaagagccagaagt

SEQ ID NO: 597891 - DNA, 33 bp, Homo sapien
ggtcctgaagaacccaatgatcaccaacttagc

SEQ ID NO: 597892 - DNA, 33 bp, Homo sapien
ggtcctgaagaacccagtgatcaccaacttagc

SEQ ID NO: 597893 - DNA, 33 bp, Homo sapien
actattcctctgcttgaaatgctctccctctga

SEQ ID NO: 597894 - DNA, 33 bp, Homo sapien
actattcctctgcttgcaatgctctccctctga

SEQ ID NO: 597895 - DNA, 33 bp, Homo sapien
tgtgtattttcatgaacggttaagtgttctttg

SEQ ID NO: 597896 - DNA, 33 bp, Homo sapien
tgtgtattttcatgaatggttaagtgttctttg

SEQ ID NO: 597897 - DNA, 33 bp, Homo sapien; identical to SEQ ID NO: 597895

SEQ ID NO: 597898 - DNA, 33 bp, Homo sapien; identical to SEQ ID NO: 597896

SEQ ID NO: 597899 - DNA, 33 bp, Homo sapien
tgaaacatccggagtacgcaaatctatacagac

SEQ ID NO: 597900 - DNA, 33 bp, Homo sapien
tgaaacatccggagtatgcaaatctatacagac

SEQ ID NO: 597901 - DNA, 33 bp, Homo sapien
gtgtccagataggcaacgcccgctgggaactgt

SEQ ID NO: 597902 - DNA, 33 bp, Homo sapien
gtgtccagataggcaatgcccgctgggaactgt

SEQ ID NO: 597903 - DNA, 33 bp, Homo sapien; identical to SEQ ID NO: 597901

SEQ ID NO: 597904 - DNA, 33 bp, Homo sapien; identical to SEQ ID NO: 597902

SEQ ID NO: 597905 - DNA, 33 bp, Homo sapien
aagatgcagccaataactactccagaggccatt

SEQ ID NO: 597906 - DNA, 33 bp, Homo sapien
aagatgcagccaataattactccagaggccatt

SEQ ID NO: 597907 - DNA, 33 bp, Homo sapien
ctgctctaagtgctgcaaaaatgaccttccttt

SEQ ID NO: 597908 - DNA, 33 bp, Homo sapien
ctgctctaagtgctgcgaaaatgaccttccttt

SEQ ID NO: 597909 - DNA, 33 bp, Homo sapien
actatccataatgaacacgcatcacactttgaa

SEQ ID NO: 597910 - DNA, 33 bp, Homo sapien
actatccataatgaacgcgcatcacactttgaa

SEQ ID NO: 597911 - DNA, 33 bp, Homo sapien
ccagccaaggaataaaaagaaaagagccttgga

SEQ ID NO: 597912 - DNA, 33 bp, Homo sapien
ccagccaaggaataaagagaaaagagccttgga

SEQ ID NO: 597913 - DNA, 33 bp, Homo sapien
ctggagaaggattatgaagaggtgggcatggat

SEQ ID NO: 597914 - DNA, 33 bp, Homo sapien
ctggagaaggattatgtagaggtgggcatggat

SEQ ID NO: 597915 - DNA, 33 bp, Homo sapien
aacctatccactcaacacttggcttgtttctcc

SEQ ID NO: 597916 - DNA, 33 bp, Homo sapien
aacctatccactcaacgcttggcttgtttctcc

SEQ ID NO: 597917 - DNA, 33 bp, Homo sapien
actgaaggagacaacacgtagcctttgctgggg

SEQ ID NO: 597918 - DNA, 33 bp, Homo sapien
actgaaggagacaacatgtagcctttgctgggg

SEQ ID NO: 597919 - DNA, 33 bp, Homo sapien
cttttccacgagtcaccggtagactgaggtggc

SEQ ID NO: 597920 - DNA, 33 bp, Homo sapien
cttttccacgagtcactggtagactgaggtggc

SEQ ID NO: 597921 - DNA, 33 bp, Homo sapien
gcctgatacgggaaccacgagctatatatggct

SEQ ID NO: 597922 - DNA, 33 bp, Homo sapien
gcctgatacgggaaccgcgagctatatatggct

SEQ ID NO: 597923 - DNA, 33 bp, Homo sapien
aattactgtagcaggaaaaaaataaaccatgag

SEQ ID NO: 597924 - DNA, 33 bp, Homo sapien
aattactgtagcaggagaaaaataaaccatgag

SEQ ID NO: 597925 - DNA, 33 bp, Homo sapien
agttattgaatgtctcccaatgtctcattgtgc

SEQ ID NO: 597926 - DNA, 33 bp, Homo sapien
agttattgaatgtctcgcaatgtctcattgtgc

SEQ ID NO: 597927 - DNA, 33 bp, Homo sapien
tattttaacaaattccatgattgtcagttacct

SEQ ID NO: 597928 - DNA, 33 bp, Homo sapien
tattttaacaaattccgtgattgtcagttacct

SEQ ID NO: 597929 - DNA, 33 bp, Homo sapien
agttagctgaccatcaaaaatcatcctggcagg

SEQ ID NO: 597930 - DNA, 33 bp, Homo sapien
agttagctgaccatcagaaatcatcctggcagg

SEQ ID NO: 597931 - DNA, 33 bp, Homo sapien
aaggcacattgtcacagtaaaggcactgaaaag

SEQ ID NO: 597932 - DNA, 33 bp, Homo sapien
aaggcacattgtcacattaaaggcactgaaaag

SEQ ID NO: 597933 - DNA, 33 bp, Homo sapien
atctgttatcatagcacagtgtagcctaagctg

SEQ ID NO: 597934 - DNA, 33 bp, Homo sapien
atctgttatcatagcatagtgtagcctaagctg

SEQ ID NO: 597935 - DNA, 33 bp, Homo sapien
aacatacacaattagaagttatgctgggacatg

SEQ ID NO: 597936 - DNA, 33 bp, Homo sapien
aacatacacaattagaggttatgctgggacatg

SEQ ID NO: 597937 - DNA, 33 bp, Homo sapien
aacagcagaaactaacactacagagggacaaaa

SEQ ID NO: 597938 - DNA, 33 bp, Homo sapien
aacagcagaaactaacgctacagagggacaaaa

SEQ ID NO: 597939 - DNA, 33 bp, Homo sapien
atttctctgtaaaacacagatttgtcagataac

SEQ ID NO: 597940 - DNA, 33 bp, Homo sapien
atttctctgtaaaacatagatttgtcagataac

SEQ ID NO: 597941 - DNA, 33 bp, Homo sapien
gagtaaaacaaataggaaatgcttatcatttga

SEQ ID NO: 597942 - DNA, 33 bp, Homo sapien
gagtaaaacaaataggcaatgcttatcatttga

SEQ ID NO: 597943 - DNA, 33 bp, Homo sapien
tgttttgtttcaaaaactgaatcccaagcccac

SEQ ID NO: 597944 - DNA, 33 bp, Homo sapien
tgttttgtttcaaaaagtgaatcccaagcccac

SEQ ID NO: 597945 - DNA, 33 bp, Homo sapien
ctcctctccatttcacagaaacaccacaacaga

SEQ ID NO: 597946 - DNA, 33 bp, Homo sapien
ctcctctccatttcacggaaacaccacaacaga

SEQ ID NO: 597947 - DNA, 33 bp, Homo sapien
ttgataaagccaaaaaatcattttaaagcaact

SEQ ID NO: 597948 - DNA, 33 bp, Homo sapien
ttgataaagccaaaaagtcattttaaagcaact

SEQ ID NO: 597949 - DNA, 33 bp, Homo sapien
aaaggaagtgtccccacgctaaatattccaaga

SEQ ID NO: 597950 - DNA, 33 bp, Homo sapien
aaaggaagtgtccccatgctaaatattccaaga

SEQ ID NO: 597951 - DNA, 33 bp, Homo sapien
cagtggaggcagtggacaccatgctcgcctgca

SEQ ID NO: 597952 - DNA, 33 bp, Homo sapien
cagtggaggcagtggagaccatgctcgcctgca

SEQ ID NO: 597953 - DNA, 33 bp, Homo sapien
ggaacctacttcaagaacttgattgtctggccg

SEQ ID NO: 597954 - DNA, 33 bp, Homo sapien
ggaacctacttcaagagcttgattgtctggccg

SEQ ID NO: 597955 - DNA, 33 bp, Homo sapien
gggaactgtgggagcactcctccggtacagaca

SEQ ID NO: 597956 - DNA, 33 bp, Homo sapien
gggaactgtgggagcagtcctccggtacagaca

SEQ ID NO: 597957 - DNA, 33 bp, Homo sapien
gtgtgtgttctactcactaggcctcgttgccac

SEQ ID NO: 597958 - DNA, 33 bp, Homo sapien
gtgtgtgttctactcattaggcctcgttgccac

SEQ ID NO: 597959 - DNA, 33 bp, Homo sapien; identical to SEQ ID NO: 597957

SEQ ID NO: 597960 - DNA, 33 bp, Homo sapien; identical to SEQ ID NO: 597958

SEQ ID NO: 597961 - DNA, 33 bp, Homo sapien
cagactaaggagaagacgacagaatactcacaa

SEQ ID NO: 597962 - DNA, 33 bp, Homo sapien
cagactaaggagaagatgacagaatactcacaa

SEQ ID NO: 597963 - DNA, 33 bp, Homo sapien
atttaaccttcacacacggacgaagtaactaag

SEQ ID NO: 597964 - DNA, 33 bp, Homo sapien
atttaaccttcacacatggacgaagtaactaag

SEQ ID NO: 597965 - DNA, 33 bp, Homo sapien
agtaactctttctccaacctacagaataagaga

SEQ ID NO: 597966 - DNA, 33 bp, Homo sapien
agtaactctttctccaccctacagaataagaga

SEQ ID NO: 597967 - DNA, 33 bp, Homo sapien
caggagaattactaccacattagcattttagaa

SEQ ID NO: 597968 - DNA, 33 bp, Homo sapien
caggagaattactaccgcattagcattttagaa

SEQ ID NO: 597969 - DNA, 33 bp, Homo sapien
gcccaggagaccctcacagaaacaagcacggac

SEQ ID NO: 597970 - DNA, 33 bp, Homo sapien
gcccaggagaccctcagagaaacaagcacggac

SEQ ID NO: 597971 - DNA, 33 bp, Homo sapien
ctagaaaactcgcagagattggagctgagaaaa

SEQ ID NO: 597972 - DNA, 33 bp, Homo sapien
ctagaaaactcgcagatattggagctgagaaaa

SEQ ID NO: 597973 - DNA, 33 bp, Homo sapien
gaaggaactgagcctgaatccaatcgagcttta

SEQ ID NO: 597974 - DNA, 33 bp, Homo sapien
gaaggaactgagcctggatccaatcgagcttta

SEQ ID NO: 597975 - DNA, 33 bp, Homo sapien
accaagaagacgagaaagaagccaagacagaag

SEQ ID NO: 597976 - DNA, 33 bp, Homo sapien
accaagaagacgagaaggaagccaagacagaag

SEQ ID NO: 597977 - DNA, 33 bp, Homo sapien
cgtacatggtgacgcacgcatgcctgtagtctc

SEQ ID NO: 597978 - DNA, 33 bp, Homo sapien
cgtacatggtgacgcatgcatgcctgtagtctc

SEQ ID NO: 597979 - DNA, 33 bp, Homo sapien
tctgctagaccgcaccacaggagtgcaggcatc

SEQ ID NO: 597980 - DNA, 33 bp, Homo sapien
tctgctagaccgcaccgcaggagtgcaggcatc

SEQ ID NO: 597981 - DNA, 33 bp, Homo sapien
gctgagatcttgcaaccgctttctagctggggc

SEQ ID NO: 597982 - DNA, 33 bp, Homo sapien
gctgagatcttgcaactgctttctagctggggc

SEQ ID NO: 597983 - DNA, 33 bp, Homo sapien
tctgctgcggtgctgacgtggatggcatgcctg

SEQ ID NO: 597984 - DNA, 33 bp, Homo sapien
tctgctgcggtgctgaggtggatggcatgcctg

SEQ ID NO: 597985 - DNA, 33 bp, Homo sapien
tgttgtccagtgtgtcactccgtctaacacact

SEQ ID NO: 597986 - DNA, 33 bp, Homo sapien
tgttgtccagtgtgtccctccgtctaacacact

SEQ ID NO: 597987 - DNA, 33 bp, Homo sapien
cagctcctggtagcagcaggttggccgctgtgg

SEQ ID NO: 597988 - DNA, 33 bp, Homo sapien
cagctcctggtagcagtaggttggccgctgtgg

SEQ ID NO: 597989 - DNA, 33 bp, Homo sapien
ggctggggacggcacgaacctccaactgtttcc

SEQ ID NO: 597990 - DNA, 33 bp, Homo sapien
ggctggggacggcacggacctccaactgtttcc

SEQ ID NO: 597991 - DNA, 33 bp, Homo sapien
tctcaatttaaaacaaaagagaaccagactgag

SEQ ID NO: 597992 - DNA, 33 bp, Homo sapien
tctcaatttaaaacaagagagaaccagactgag

SEQ ID NO: 597993 - DNA, 33 bp, Homo sapien
tcacaaaacagcattcaaaggagaagggaaagt

SEQ ID NO: 597994 - DNA, 33 bp, Homo sapien
tcacaaaacagcattcgaaggagaagggaaagt

SEQ ID NO: 597995 - DNA, 33 bp, Homo sapien
aaattccttttgaccacgtagcaaggaacacac

SEQ ID NO: 597996 - DNA, 33 bp, Homo sapien
aaattccttttgaccatgtagcaaggaacacac

SEQ ID NO: 597997 - DNA, 33 bp, Homo sapien
acgacaataaccaagcaaaggggaaatatacag

SEQ ID NO: 597998 - DNA, 33 bp, Homo sapien
acgacaataaccaagcgaaggggaaatatacag

SEQ ID NO: 597999 - DNA, 33 bp, Homo sapien
gacaaaaattcaagagaaaacagccacatatac

SEQ ID NO: 598000 - DNA, 33 bp, Homo sapien
gacaaaaattcaagaggaaacagccacatatac

SEQ ID NO: 598001 - DNA, 33 bp, Homo sapien
tagatctgagcttctaacttataccattctcct

SEQ ID NO: 598002 - DNA, 33 bp, Homo sapien
tagatctgagcttctatcttataccattctcct

SEQ ID NO: 598003 - DNA, 33 bp, Homo sapien
tataaaaagaagtatacgtcttgatcaggtggg

SEQ ID NO: 598004 - DNA, 33 bp, Homo sapien
tataaaaagaagtataggtcttgatcaggtggg

SEQ ID NO: 598005 - DNA, 33 bp, Homo sapien
taactcgagggcccgcactgctgactggcagca

SEQ ID NO: 598006 - DNA, 33 bp, Homo sapien
taactcgagggcccgcgctgctgactggcagca

SEQ ID NO: 598007 - DNA, 33 bp, Homo sapien
agattctgtataaggcaatcagaataatcatct

SEQ ID NO: 598008 - DNA, 33 bp, Homo sapien
agattctgtataaggccatcagaataatcatct

SEQ ID NO: 598009 - DNA, 33 bp, Homo sapien
aatgcctgcaaacaaaagtaactgctaatctga

SEQ ID NO: 598010 - DNA, 33 bp, Homo sapien
aatgcctgcaaacaaacgtaactgctaatctga

SEQ ID NO: 598011 - DNA, 33 bp, Homo sapien
tctttaccatatacaacgcaagtaatattgctt

SEQ ID NO: 598012 - DNA, 33 bp, Homo sapien
tctttaccatatacaaggcaagtaatattgctt

SEQ ID NO: 598013 - DNA, 33 bp, Homo sapien
gtcagtcctcagctcacgtctacttggttcttt

SEQ ID NO: 598014 - DNA, 33 bp, Homo sapien
gtcagtcctcagctcatgtctacttggttcttt

SEQ ID NO: 598015 - DNA, 33 bp, Homo sapien
gacaggcagcaaggaaaggatgagaacccaaag

SEQ ID NO: 598016 - DNA, 33 bp, Homo sapien
gacaggcagcaaggaacggatgagaacccaaag

SEQ ID NO: 598017 - DNA, 33 bp, Homo sapien
tcttgagtttttgtagaacggtagttactgata

SEQ ID NO: 598018 - DNA, 33 bp, Homo sapien
tcttgagtttttgtagcacggtagttactgata

SEQ ID NO: 598019 - DNA, 33 bp, Homo sapien
ggtggttgttacatgacagtttatgtttgttaa

SEQ ID NO: 598020 - DNA, 33 bp, Homo sapien
ggtggttgttacatgatagtttatgtttgttaa

SEQ ID NO: 598021 - DNA, 33 bp, Homo sapien
gtgccttctaatacaacgaagtgcttttctggt

SEQ ID NO: 598022 - DNA, 33 bp, Homo sapien
gtgccttctaatacaatgaagtgcttttctggt

SEQ ID NO: 598023 - DNA, 33 bp, Homo sapien
agtcacgagtgaaaagaagatttttccagatgc

SEQ ID NO: 598024 - DNA, 33 bp, Homo sapien
agtcacgagtgaaaaggagatttttccagatgc

SEQ ID NO: 598025 - DNA, 33 bp, Homo sapien
ctttctgaatgcattgcagtaagccgtaagtct

SEQ ID NO: 598026 - DNA, 33 bp, Homo sapien
ctttctgaatgcattgtagtaagccgtaagtct

SEQ ID NO: 598027 - DNA, 33 bp, Homo sapien
ttgccctgctttgacacgctcactgtaacaaat

SEQ ID NO: 598028 - DNA, 33 bp, Homo sapien
ttgccctgctttgacatgctcactgtaacaaat

SEQ ID NO: 598029 - DNA, 33 bp, Homo sapien
ttttaagctctgcttacgataatgtcaacaaag

SEQ ID NO: 598030 - DNA, 33 bp, Homo sapien
ttttaagctctgcttatgataatgtcaacaaag

SEQ ID NO: 598031 - DNA, 33 bp, Homo sapien
tgaggttcagtgaggtgaagataattgcccgag

SEQ ID NO: 598032 - DNA, 33 bp, Homo sapien
tgaggttcagtgaggttaagataattgcccgag

SEQ ID NO: 598033 - DNA, 33 bp, Homo sapien
aagagagatcccttcaatctggaaagctgacag

SEQ ID NO: 598034 - DNA, 33 bp, Homo sapien
aagagagatcccttcactctggaaagctgacag

SEQ ID NO: 598035 - DNA, 33 bp, Homo sapien
tctgccaagagtacataagggatcaggggcttg

SEQ ID NO: 598036 - DNA, 33 bp, Homo sapien
tctgccaagagtacatgagggatcaggggcttg

SEQ ID NO: 598037 - DNA, 33 bp, Homo sapien
aagaagcaagtgaaaactagaactgaaaaaata

SEQ ID NO: 598038 - DNA, 33 bp, Homo sapien
aagaagcaagtgaaaattagaactgaaaaaata

SEQ ID NO: 598039 - DNA, 33 bp, Homo sapien
aagtctggactgaaggaaacaagttggggggaa

SEQ ID NO: 598040 - DNA, 33 bp, Homo sapien
aagtctggactgaaggtaacaagttggggggaa

SEQ ID NO: 598041 - DNA, 33 bp, Homo sapien
tgcccacctgtctaggccatgcatcggcttgta

SEQ ID NO: 598042 - DNA, 33 bp, Homo sapien
tgcccacctgtctaggtcatgcatcggcttgta

SEQ ID NO: 598043 - DNA, 33 bp, Homo sapien
gctgggctggagaaagaattacaatttacagac

SEQ ID NO: 598044 - DNA, 33 bp, Homo sapien
gctgggctggagaaaggattacaatttacagac

SEQ ID NO: 598045 - DNA, 33 bp, Homo sapien
ccttcctggggctctcactgtctgcaggtggac

SEQ ID NO: 598046 - DNA, 33 bp, Homo sapien
ccttcctggggctctcgctgtctgcaggtggac

SEQ ID NO: 598047 - DNA, 33 bp, Homo sapien
tctcactgccctcctgaactcacttttgtgacc

SEQ ID NO: 598048 - DNA, 33 bp, Homo sapien
tctcactgccctcctggactcacttttgtgacc

SEQ ID NO: 598049 - DNA, 33 bp, Homo sapien
agggaaaggaaatggcagacaggaaatggcaag

SEQ ID NO: 598050 - DNA, 33 bp, Homo sapien
agggaaaggaaatggccgacaggaaatggcaag

SEQ ID NO: 598051 - DNA, 33 bp, Homo sapien
cctgctctgtcacttaccagctattgacggcag

SEQ ID NO: 598052 - DNA, 33 bp, Homo sapien
cctgctctgtcacttagcagctattgacggcag

SEQ ID NO: 598053 - DNA, 33 bp, Homo sapien
ttcctggcgttgggctcacctggagactttttc

SEQ ID NO: 598054 - DNA, 33 bp, Homo sapien
ttcctggcgttgggcttacctggagactttttc

SEQ ID NO: 598055 - DNA, 33 bp, Homo sapien
cttcaggtgtgttaaacgggacctgcccattgg

SEQ ID NO: 598056 - DNA, 33 bp, Homo sapien
cttcaggtgtgttaaatgggacctgcccattgg

SEQ ID NO: 598057 - DNA, 33 bp, Homo sapien
aaagagcacttcagggcagttatcaccatgtgg

SEQ ID NO: 598058 - DNA, 33 bp, Homo sapien
aaagagcacttcagggtagttatcaccatgtgg

SEQ ID NO: 598059 - DNA, 33 bp, Homo sapien
atgggactgctctggcaagaaggaaaagagaag

SEQ ID NO: 598060 - DNA, 33 bp, Homo sapien
atgggactgctctggcgagaaggaaaagagaag

SEQ ID NO: 598061 - DNA, 33 bp, Homo sapien
cacttacttattttgaagaaaaaagcaaattgt

SEQ ID NO: 598062 - DNA, 33 bp, Homo sapien
cacttacttattttgaggaaaaaagcaaattgt

SEQ ID NO: 598063 - DNA, 33 bp, Homo sapien
agagatttagggactccccttctctcaccctgg

SEQ ID NO: 598064 - DNA, 33 bp, Homo sapien
agagatttagggactctccttctctcaccctgg

SEQ ID NO: 598065 - DNA, 33 bp, Homo sapien
tggacagtcatctccaagggatccctaggaaga

SEQ ID NO: 598066 - DNA, 33 bp, Homo sapien
tggacagtcatctccaggggatccctaggaaga

SEQ ID NO: 598067 - DNA, 33 bp, Homo sapien
atcacaaagttaatcacagtccttacctcacac

SEQ ID NO: 598068 - DNA, 33 bp, Homo sapien
atcacaaagttaatcatagtccttacctcacac

SEQ ID NO: 598069 - DNA, 33 bp, Homo sapien
acaccattttttcctacactatgtacataatcg

SEQ ID NO: 598070 - DNA, 33 bp, Homo sapien
acaccattttttcctagactatgtacataatcg

SEQ ID NO: 598071 - DNA, 33 bp, Homo sapien
tatgttgcagtgctatcaccagtcttctaaagt

SEQ ID NO: 598072 - DNA, 33 bp, Homo sapien
tatgttgcagtgctattaccagtcttctaaagt

SEQ ID NO: 598073 - DNA, 33 bp, Homo sapien
gggcaaaataacattggaaggtagattgtcacc

SEQ ID NO: 598074 - DNA, 33 bp, Homo sapien
gggcaaaataacattgtaaggtagattgtcacc

SEQ ID NO: 598075 - DNA, 33 bp, Homo sapien
aaattgtcaaggtcacaggcatctttttgtttt

SEQ ID NO: 598076 - DNA, 33 bp, Homo sapien
aaattgtcaaggtcacgggcatctttttgtttt

SEQ ID NO: 598077 - DNA, 33 bp, Homo sapien
tccgaggacctaatccacaagtgtagtttcagt

SEQ ID NO: 598078 - DNA, 33 bp, Homo sapien
tccgaggacctaatccgcaagtgtagtttcagt

SEQ ID NO: 598079 - DNA, 33 bp, Homo sapien
tgtttccagtacaggacagggtgaccttctgtc

SEQ ID NO: 598080 - DNA, 33 bp, Homo sapien
tgtttccagtacaggagagggtgaccttctgtc

SEQ ID NO: 598081 - DNA, 33 bp, Homo sapien
acagcataacttccaacgttgttgctgtttcca

SEQ ID NO: 598082 - DNA, 33 bp, Homo sapien
acagcataacttccaatgttgttgctgtttcca

SEQ ID NO: 598083 - DNA, 33 bp, Homo sapien
tggaaacattgaacccaaagaatgcaggaagaa

SEQ ID NO: 598084 - DNA, 33 bp, Homo sapien
tggaaacattgaacccgaagaatgcaggaagaa

SEQ ID NO: 598085 - DNA, 33 bp, Homo sapien
ttccttttctgcaatcaaatttcttgaggggct

SEQ ID NO: 598086 - DNA, 33 bp, Homo sapien
ttccttttctgcaatctaatttcttgaggggct

SEQ ID NO: 598087 - DNA, 33 bp, Homo sapien
agaagaaataggcccacagagaagcaaggcagt

SEQ ID NO: 598088 - DNA, 33 bp, Homo sapien
agaagaaataggcccagagagaagcaaggcagt

SEQ ID NO: 598089 - DNA, 33 bp, Homo sapien
gtggtctgtccctaaagcttgtgctggagaccc

SEQ ID NO: 598090 - DNA, 33 bp, Homo sapien
gtggtctgtccctaaatcttgtgctggagaccc

SEQ ID NO: 598091 - DNA, 33 bp, Homo sapien
ctgacactgagtggtgcaacagataaggcaatc

SEQ ID NO: 598092 - DNA, 33 bp, Homo sapien
ctgacactgagtggtggaacagataaggcaatc

SEQ ID NO: 598093 - DNA, 33 bp, Homo sapien
tattgagttatttgaccaagcaatattagctaa

SEQ ID NO: 598094 - DNA, 33 bp, Homo sapien
tattgagttatttgactaagcaatattagctaa

SEQ ID NO: 598095 - DNA, 33 bp, Homo sapien
gtggatcccccgacataaggttctttctcacct

SEQ ID NO: 598096 - DNA, 33 bp, Homo sapien
gtggatcccccgacatgaggttctttctcacct

SEQ ID NO: 598097 - DNA, 33 bp, Homo sapien
caggtgcaatataaaggaaatgtgggccgggca

SEQ ID NO: 598098 - DNA, 33 bp, Homo sapien
caggtgcaatataaagtaaatgtgggccgggca

SEQ ID NO: 598099 - DNA, 33 bp, Homo sapien
agtaatttcacagggaccagaaaaaccatccat

SEQ ID NO: 598100 - DNA, 33 bp, Homo sapien
agtaatttcacagggatcagaaaaaccatccat

SEQ ID NO: 598101 - DNA, 33 bp, Homo sapien
agaggaaatttggaaccatcgagatataatgca

SEQ ID NO: 598102 - DNA, 33 bp, Homo sapien
agaggaaatttggaactatcgagatataatgca

SEQ ID NO: 598103 - DNA, 33 bp, Homo sapien
cccagtacagtccccaagaactgcatgttgata

SEQ ID NO: 598104 - DNA, 33 bp, Homo sapien
cccagtacagtccccatgaactgcatgttgata

SEQ ID NO: 598105 - DNA, 33 bp, Homo sapien
ccatcagtacctgatgcagcttaagagtgatgg

SEQ ID NO: 598106 - DNA, 33 bp, Homo sapien
ccatcagtacctgatggagcttaagagtgatgg

SEQ ID NO: 598107 - DNA, 33 bp, Homo sapien
ctgttgtaatatttgcacaatagttacagatca

SEQ ID NO: 598108 - DNA, 33 bp, Homo sapien
ctgttgtaatatttgcgcaatagttacagatca

SEQ ID NO: 598109 - DNA, 33 bp, Homo sapien
tttgcacccccctatacagccacaatacaccag

SEQ ID NO: 598110 - DNA, 33 bp, Homo sapien
tttgcacccccctatatagccacaatacaccag

SEQ ID NO: 598111 - DNA, 33 bp, Homo sapien
ggaatagaaatagccacgaatatcatcctggta

SEQ ID NO: 598112 - DNA, 33 bp, Homo sapien
ggaatagaaatagccatgaatatcatcctggta

SEQ ID NO: 598113 - DNA, 33 bp, Homo sapien
aggaccctaacacgcaaatgagcactgcagtgg

SEQ ID NO: 598114 - DNA, 33 bp, Homo sapien
aggaccctaacacgcagatgagcactgcagtgg

SEQ ID NO: 598115 - DNA, 33 bp, Homo sapien
cttgttctctaaacacagaggtcaacattctaa

SEQ ID NO: 598116 - DNA, 33 bp, Homo sapien
cttgttctctaaacacggaggtcaacattctaa

SEQ ID NO: 598117 - DNA, 33 bp, Homo sapien
ctacaaaacttagcaactgcaaagatgtgcaat

SEQ ID NO: 598118 - DNA, 33 bp, Homo sapien
ctacaaaacttagcaagtgcaaagatgtgcaat

SEQ ID NO: 598119 - DNA, 33 bp, Homo sapien
ggctccattgcccagggataacagatatgtggg

SEQ ID NO: 598120 - DNA, 33 bp, Homo sapien
ggctccattgcccaggtataacagatatgtggg

SEQ ID NO: 598121 - DNA, 33 bp, Homo sapien
ctttccaaaggttggaaattgaacccgcatctt

SEQ ID NO: 598122 - DNA, 33 bp, Homo sapien
ctttccaaaggttggatattgaacccgcatctt

SEQ ID NO: 598123 - DNA, 33 bp, Homo sapien
ctgttagtatgaaacacataatagacaacctgc

SEQ ID NO: 598124 - DNA, 33 bp, Homo sapien
ctgttagtatgaaacagataatagacaacctgc

SEQ ID NO: 598125 - DNA, 33 bp, Homo sapien
atgtctcttcatttccaaagtcctatctctccc

SEQ ID NO: 598126 - DNA, 33 bp, Homo sapien
atgtctcttcatttccgaagtcctatctctccc

SEQ ID NO: 598127 - DNA, 33 bp, Homo sapien
gttaattcagttataacgtgaaaattcagggtg

SEQ ID NO: 598128 - DNA, 33 bp, Homo sapien
gttaattcagttataatgtgaaaattcagggtg

SEQ ID NO: 598129 - DNA, 33 bp, Homo sapien
ttctcattaactcaggacagttcatgctttact

SEQ ID NO: 598130 - DNA, 33 bp, Homo sapien
ttctcattaactcagggcagttcatgctttact

SEQ ID NO: 598131 - DNA, 33 bp, Homo sapien
aaactcactctactaaatgaaaaacaacaaaaa

SEQ ID NO: 598132 - DNA, 33 bp, Homo sapien
aaactcactctactaagtgaaaaacaacaaaaa

SEQ ID NO: 598133 - DNA, 33 bp, Homo sapien
cctgtctgtaagggctgaactgttctcagtata

SEQ ID NO: 598134 - DNA, 33 bp, Homo sapien
cctgtctgtaagggcttaactgttctcagtata

SEQ ID NO: 598135 - DNA, 33 bp, Homo sapien
tagtggtccatatgaacatctgttactgaaaac

SEQ ID NO: 598136 - DNA, 33 bp, Homo sapien
tagtggtccatatgaatatctgttactgaaaac

SEQ ID NO: 598137 - DNA, 33 bp, Homo sapien
tgagccctgtgtcctacaaagaccctgagagcc

SEQ ID NO: 598138 - DNA, 33 bp, Homo sapien
tgagccctgtgtcctataaagaccctgagagcc

SEQ ID NO: 598139 - DNA, 33 bp, Homo sapien
atgctgttcaaattcaagaagaattaggccggg

SEQ ID NO: 598140 - DNA, 33 bp, Homo sapien
atgctgttcaaattcaggaagaattaggccggg

SEQ ID NO: 598141 - DNA, 33 bp, Homo sapien
tcttgttatagactcacattagcttgccttatt

SEQ ID NO: 598142 - DNA, 33 bp, Homo sapien
tcttgttatagactcatattagcttgccttatt

SEQ ID NO: 598143 - DNA, 33 bp, Homo sapien
gactatacattttacaacaaacatacagggaat

SEQ ID NO: 598144 - DNA, 33 bp, Homo sapien
gactatacattttacagcaaacatacagggaat

SEQ ID NO: 598145 - DNA, 33 bp, Homo sapien
atatatgatagcttaaagatggacttaatattt

SEQ ID NO: 598146 - DNA, 33 bp, Homo sapien
atatatgatagcttaaggatggacttaatattt

SEQ ID NO: 598147 - DNA, 33 bp, Homo sapien
tgagttcaagagtggacgattaataggtgaaag

SEQ ID NO: 598148 - DNA, 33 bp, Homo sapien
tgagttcaagagtggatgattaataggtgaaag

SEQ ID NO: 598149 - DNA, 33 bp, Homo sapien
atattcgggttgaggcaatactataaattatga

SEQ ID NO: 598150 - DNA, 33 bp, Homo sapien
atattcgggttgaggcgatactataaattatga

SEQ ID NO: 598151 - DNA, 33 bp, Homo sapien
tatgcattatgtctccaaaatgtcattacgcta

SEQ ID NO: 598152 - DNA, 33 bp, Homo sapien
tatgcattatgtctccgaaatgtcattacgcta

SEQ ID NO: 598153 - DNA, 33 bp, Homo sapien
caaaatacttcacctccctggaaaacagtaaag

SEQ ID NO: 598154 - DNA, 33 bp, Homo sapien
caaaatacttcacctctctggaaaacagtaaag

SEQ ID NO: 598155 - DNA, 33 bp, Homo sapien
aatcaacaaagccaacagaaccaatagagcatt

SEQ ID NO: 598156 - DNA, 33 bp, Homo sapien
aatcaacaaagccaacggaaccaatagagcatt

SEQ ID NO: 598157 - DNA, 33 bp, Homo sapien
agagcatttgctttcacaagaatttaagtgttg

SEQ ID NO: 598158 - DNA, 33 bp, Homo sapien
agagcatttgctttcataagaatttaagtgttg

SEQ ID NO: 598159 - DNA, 33 bp, Homo sapien
caataggtttggaaacagcacttcttagattct

SEQ ID NO: 598160 - DNA, 33 bp, Homo sapien
caataggtttggaaacggcacttcttagattct

SEQ ID NO: 598161 - DNA, 33 bp, Homo sapien
tgatgaaacagcttccactcacttttttataca

SEQ ID NO: 598162 - DNA, 33 bp, Homo sapien
tgatgaaacagcttccgctcacttttttataca

SEQ ID NO: 598163 - DNA, 33 bp, Homo sapien
aaagcgttttcaccaacagcttgtttctagttt

SEQ ID NO: 598164 - DNA, 33 bp, Homo sapien
aaagcgttttcaccaagagcttgtttctagttt

SEQ ID NO: 598165 - DNA, 33 bp, Homo sapien
catcattgtaaaatcacgcaaatctgagtgtgc

SEQ ID NO: 598166 - DNA, 33 bp, Homo sapien
catcattgtaaaatcatgcaaatctgagtgtgc

SEQ ID NO: 598167 - DNA, 33 bp, Homo sapien
agtaaatgcttaatacaggcagaaggtttgttc

SEQ ID NO: 598168 - DNA, 33 bp, Homo sapien
agtaaatgcttaatacgggcagaaggtttgttc

SEQ ID NO: 598169 - DNA, 33 bp, Homo sapien
aaatgaaaattcctccactttagtcctgattac

SEQ ID NO: 598170 - DNA, 33 bp, Homo sapien
aaatgaaaattcctcctctttagtcctgattac

SEQ ID NO: 598171 - DNA, 33 bp, Homo sapien
ttaaaactttgattcaccttgagttaattcctg

SEQ ID NO: 598172 - DNA, 33 bp, Homo sapien
ttaaaactttgattcatcttgagttaattcctg

SEQ ID NO: 598173 - DNA, 33 bp, Homo sapien
actatagcacagcctacgtaaacaagaagacag

SEQ ID NO: 598174 - DNA, 33 bp, Homo sapien
actatagcacagcctatgtaaacaagaagacag

SEQ ID NO: 598175 - DNA, 33 bp, Homo sapien
cctttcttgccttccacgacaattacattttta

SEQ ID NO: 598176 - DNA, 33 bp, Homo sapien
cctttcttgccttccatgacaattacattttta

SEQ ID NO: 598177 - DNA, 33 bp, Homo sapien
ttactgtaatttccaaatagttgatagccagta

SEQ ID NO: 598178 - DNA, 33 bp, Homo sapien
ttactgtaatttccaagtagttgatagccagta

SEQ ID NO: 598179 - DNA, 33 bp, Homo sapien
atgttgaatgcatagaacagagaaaaacagaag

SEQ ID NO: 598180 - DNA, 33 bp, Homo sapien
atgttgaatgcatagagcagagaaaaacagaag

SEQ ID NO: 598181 - DNA, 33 bp, Homo sapien
aaatttctaactaggactaatgcaaagatttca

SEQ ID NO: 598182 - DNA, 33 bp, Homo sapien
aaatttctaactaggattaatgcaaagatttca

SEQ ID NO: 598183 - DNA, 33 bp, Homo sapien
ataactttctcaaacaactcagaattcccaatg

SEQ ID NO: 598184 - DNA, 33 bp, Homo sapien
ataactttctcaaacacctcagaattcccaatg

SEQ ID NO: 598185 - DNA, 33 bp, Homo sapien
tggaacgttgctggaaggcatctcagttctttg

SEQ ID NO: 598186 - DNA, 33 bp, Homo sapien
tggaacgttgctggaatgcatctcagttctttg

SEQ ID NO: 598187 - DNA, 33 bp, Homo sapien
gctttcacctggttaagtagcatttcctaagag

SEQ ID NO: 598188 - DNA, 33 bp, Homo sapien
gctttcacctggttaattagcatttcctaagag

SEQ ID NO: 598189 - DNA, 33 bp, Homo sapien
catttcctaagagccacgagggcatctgctcac

SEQ ID NO: 598190 - DNA, 33 bp, Homo sapien
catttcctaagagccatgagggcatctgctcac

SEQ ID NO: 598191 - DNA, 33 bp, Homo sapien
taaactcaatgagccaagagagcccagggtcca

SEQ ID NO: 598192 - DNA, 33 bp, Homo sapien
taaactcaatgagccaggagagcccagggtcca

SEQ ID NO: 598193 - DNA, 33 bp, Homo sapien
gagtggagtgtggaggaattggtaaactcaatg

SEQ ID NO: 598194 - DNA, 33 bp, Homo sapien
gagtggagtgtggagggattggtaaactcaatg

SEQ ID NO: 598195 - DNA, 33 bp, Homo sapien
ctgcccctcacttacacagattgcagaaagtga

SEQ ID NO: 598196 - DNA, 33 bp, Homo sapien
ctgcccctcacttacatagattgcagaaagtga

SEQ ID NO: 598197 - DNA, 33 bp, Homo sapien
cacactggatgcaacaaaagtctggccaacttt

SEQ ID NO: 598198 - DNA, 33 bp, Homo sapien
cacactggatgcaacagaagtctggccaacttt

SEQ ID NO: 598199 - DNA, 33 bp, Homo sapien
caggaataaatattgacgtagacccttctgttt

SEQ ID NO: 598200 - DNA, 33 bp, Homo sapien
caggaataaatattgatgtagacccttctgttt

SEQ ID NO: 598201 - DNA, 33 bp, Homo sapien
ttccagaaatagaaaaagctgctcacacacatg

SEQ ID NO: 598202 - DNA, 33 bp, Homo sapien
ttccagaaatagaaaacgctgctcacacacatg

SEQ ID NO: 598203 - DNA, 33 bp, Homo sapien
attctctggtagctgaagagaaacccaggaagt

SEQ ID NO: 598204 - DNA, 33 bp, Homo sapien
attctctggtagctgaggagaaacccaggaagt

SEQ ID NO: 598205 - DNA, 33 bp, Homo sapien
gttaaggaaagtacggaaagaatgcctcattac

SEQ ID NO: 598206 - DNA, 33 bp, Homo sapien
gttaaggaaagtacgggaagaatgcctcattac

SEQ ID NO: 598207 - DNA, 33 bp, Homo sapien
gtacctttgatagacactaataaaccagctgat

SEQ ID NO: 598208 - DNA, 33 bp, Homo sapien
gtacctttgatagacagtaataaaccagctgat

SEQ ID NO: 598209 - DNA, 33 bp, Homo sapien
tttaatcagtttagtacgaaattgctttcccag

SEQ ID NO: 598210 - DNA, 33 bp, Homo sapien
tttaatcagtttagtatgaaattgctttcccag

SEQ ID NO: 598211 - DNA, 33 bp, Homo sapien
atcagatagttgtagacgcatggtattatttct

SEQ ID NO: 598212 - DNA, 33 bp, Homo sapien
atcagatagttgtagatgcatggtattatttct

SEQ ID NO: 598213 - DNA, 33 bp, Homo sapien
accctgttcctttacactcccagtcatgggctc

SEQ ID NO: 598214 - DNA, 33 bp, Homo sapien
accctgttcctttacattcccagtcatgggctc

SEQ ID NO: 598215 - DNA, 33 bp, Homo sapien
ccctccagcagtgagacaagtgcagaatctgag

SEQ ID NO: 598216 - DNA, 33 bp, Homo sapien
ccctccagcagtgagataagtgcagaatctgag

SEQ ID NO: 598217 - DNA, 33 bp, Homo sapien
ttcctacattcaaataagtccctgcacccggat

SEQ ID NO: 598218 - DNA, 33 bp, Homo sapien
ttcctacattcaaatatgtccctgcacccggat

SEQ ID NO: 598219 - DNA, 33 bp, Homo sapien
gaacattcactgttacggctggagtcttagggt

SEQ ID NO: 598220 - DNA, 33 bp, Homo sapien
gaacattcactgttactgctggagtcttagggt

SEQ ID NO: 598221 - DNA, 33 bp, Homo sapien
tcaccagtgtttctaccctccaaaaaagacatt

SEQ ID NO: 598222 - DNA, 33 bp, Homo sapien
tcaccagtgtttctactctccaaaaaagacatt

SEQ ID NO: 598223 - DNA, 33 bp, Homo sapien
tgtctcagggctttcccccaacaggccctgcag

SEQ ID NO: 598224 - DNA, 33 bp, Homo sapien
tgtctcagggctttcctccaacaggccctgcag

SEQ ID NO: 598225 - DNA, 33 bp, Homo sapien
tttcttgggcaaatggaaaatgggttcaacaca

SEQ ID NO: 598226 - DNA, 33 bp, Homo sapien
tttcttgggcaaatgggaaatgggttcaacaca

SEQ ID NO: 598227 - DNA, 33 bp, Homo sapien
ggtgtctctgaggtagaacacatggacagggat

SEQ ID NO: 598228 - DNA, 33 bp, Homo sapien
ggtgtctctgaggtaggacacatggacagggat

SEQ ID NO: 598229 - DNA, 33 bp, Homo sapien
tctagaacctgagacaggagattgggcagggga

SEQ ID NO: 598230 - DNA, 33 bp, Homo sapien
tctagaacctgagacatgagattgggcagggga

SEQ ID NO: 598231 - DNA, 33 bp, Homo sapien
gctagagggcttgaccacggctgtgcctgtcat

SEQ ID NO: 598232 - DNA, 33 bp, Homo sapien
gctagagggcttgaccgcggctgtgcctgtcat

SEQ ID NO: 598233 - DNA, 33 bp, Homo sapien
tgcacctggcccaggcaagaagcaggacatggg

SEQ ID NO: 598234 - DNA, 33 bp, Homo sapien
tgcacctggcccaggcgagaagcaggacatggg

SEQ ID NO: 598235 - DNA, 33 bp, Homo sapien
gtggcagcctgcctcacggccaaaatgtgatct

SEQ ID NO: 598236 - DNA, 33 bp, Homo sapien
gtggcagcctgcctcatggccaaaatgtgatct

SEQ ID NO: 598237 - DNA, 33 bp, Homo sapien
acacctgctggtggaaaagtttaatgctgggca

SEQ ID NO: 598238 - DNA, 33 bp, Homo sapien
acacctgctggtggaagagtttaatgctgggca

SEQ ID NO: 598239 - DNA, 33 bp, Homo sapien
atgctgggcaatcacaagtcaggtcccttcttc

SEQ ID NO: 598240 - DNA, 33 bp, Homo sapien
atgctgggcaatcacaggtcaggtcccttcttc

SEQ ID NO: 598241 - DNA, 33 bp, Homo sapien
tttatggattattcccggctaggactacaactc

SEQ ID NO: 598242 - DNA, 33 bp, Homo sapien
tttatggattattccctgctaggactacaactc

SEQ ID NO: 598243 - DNA, 33 bp, Homo sapien
gaatttataacacaaggagaagataaaatgcta

SEQ ID NO: 598244 - DNA, 33 bp, Homo sapien
gaatttataacacaagtagaagataaaatgcta

SEQ ID NO: 598245 - DNA, 33 bp, Homo sapien
ctctgtccaagatcccaaacctttcttacctct

SEQ ID NO: 598246 - DNA, 33 bp, Homo sapien
ctctgtccaagatcccgaacctttcttacctct

SEQ ID NO: 598247 - DNA, 33 bp, Homo sapien
actgaggctgctgtccaatgctgagcagtaata

SEQ ID NO: 598248 - DNA, 33 bp, Homo sapien
actgaggctgctgtcccatgctgagcagtaata

SEQ ID NO: 598249 - DNA, 33 bp, Homo sapien
tttatcttgatggaaaattatcctgaaaacagc

SEQ ID NO: 598250 - DNA, 33 bp, Homo sapien
tttatcttgatggaaagttatcctgaaaacagc

SEQ ID NO: 598251 - DNA, 33 bp, Homo sapien
gtcacctcctgagtccacctttcccattgcgtt

SEQ ID NO: 598252 - DNA, 33 bp, Homo sapien
gtcacctcctgagtccgcctttcccattgcgtt

SEQ ID NO: 598253 - DNA, 33 bp, Homo sapien
tcaacaccagatttacacatttatacaccattg

SEQ ID NO: 598254 - DNA, 33 bp, Homo sapien
tcaacaccagatttacgcatttatacaccattg

SEQ ID NO: 598255 - DNA, 33 bp, Homo sapien
caaagggagctgtgtccaccatggcctggaccc

SEQ ID NO: 598256 - DNA, 33 bp, Homo sapien
caaagggagctgtgtctaccatggcctggaccc

SEQ ID NO: 598257 - DNA, 33 bp, Homo sapien
agtcagcgtccaccaccgtcctccatcctcatc

SEQ ID NO: 598258 - DNA, 33 bp, Homo sapien
agtcagcgtccaccactgtcctccatcctcatc

SEQ ID NO: 598259 - DNA, 33 bp, Homo sapien
tgctggttaggtcttacggctcctctggtgtgt

SEQ ID NO: 598260 - DNA, 33 bp, Homo sapien
tgctggttaggtcttatggctcctctggtgtgt

SEQ ID NO: 598261 - DNA, 33 bp, Homo sapien
agaattatttttctaccacaatcccaggaaaag

SEQ ID NO: 598262 - DNA, 33 bp, Homo sapien
agaattatttttctacgacaatcccaggaaaag

SEQ ID NO: 598263 - DNA, 33 bp, Homo sapien
acctgaaccctggagacggtcagtttgtcctgg

SEQ ID NO: 598264 - DNA, 33 bp, Homo sapien
acctgaaccctggagatggtcagtttgtcctgg

SEQ ID NO: 598265 - DNA, 33 bp, Homo sapien
tggaagaactggagagacaagaaaacctgctgg

SEQ ID NO: 598266 - DNA, 33 bp, Homo sapien
tggaagaactggagaggcaagaaaacctgctgg

SEQ ID NO: 598267 - DNA, 33 bp, Homo sapien
tgtgaggaaagcactacatgactttacaaaagc

SEQ ID NO: 598268 - DNA, 33 bp, Homo sapien
tgtgaggaaagcactatatgactttacaaaagc

SEQ ID NO: 598269 - DNA, 33 bp, Homo sapien
gttccaccagcctagaaccatcttccatctgaa

SEQ ID NO: 598270 - DNA, 33 bp, Homo sapien
gttccaccagcctagagccatcttccatctgaa

SEQ ID NO: 598271 - DNA, 33 bp, Homo sapien
ggggctgggcccttcccactgttcagctgtcat

SEQ ID NO: 598272 - DNA, 33 bp, Homo sapien
ggggctgggcccttcctactgttcagctgtcat

SEQ ID NO: 598273 - DNA, 33 bp, Homo sapien
aggcagcttcccagtacaggcctagagttctta

SEQ ID NO: 598274 - DNA, 33 bp, Homo sapien
aggcagcttcccagtagaggcctagagttctta

SEQ ID NO: 598275 - DNA, 33 bp, Homo sapien
tttcgtgtggacagaaggtagatttttagtagc

SEQ ID NO: 598276 - DNA, 33 bp, Homo sapien
tttcgtgtggacagaatgtagatttttagtagc

SEQ ID NO: 598277 - DNA, 33 bp, Homo sapien
tctccaggagttagcaatcactggttagttccc

SEQ ID NO: 598278 - DNA, 33 bp, Homo sapien
tctccaggagttagcagtcactggttagttccc

SEQ ID NO: 598279 - DNA, 33 bp, Homo sapien
atatttctcacaatcaaacaagagccagggccc

SEQ ID NO: 598280 - DNA, 33 bp, Homo sapien
atatttctcacaatcagacaagagccagggccc

SEQ ID NO: 598281 - DNA, 33 bp, Homo sapien
aaactaaataaatagccaagcatggtgatgcac

SEQ ID NO: 598282 - DNA, 33 bp, Homo sapien
aaactaaataaatagctaagcatggtgatgcac

SEQ ID NO: 598283 - DNA, 33 bp, Homo sapien
aggggtaaaagcctgacgcaggaagaacccagt

SEQ ID NO: 598284 - DNA, 33 bp, Homo sapien
aggggtaaaagcctgatgcaggaagaacccagt

SEQ ID NO: 598285 - DNA, 33 bp, Homo sapien
ggctgggagcataaaggccaggaagatagacat

SEQ ID NO: 598286 - DNA, 33 bp, Homo sapien
ggctgggagcataaagtccaggaagatagacat

SEQ ID NO: 598287 - DNA, 33 bp, Homo sapien
tgtgcattccctccaacagtcatgttacgtatc

SEQ ID NO: 598288 - DNA, 33 bp, Homo sapien
tgtgcattccctccaatagtcatgttacgtatc

SEQ ID NO: 598289 - DNA, 33 bp, Homo sapien
tttttctgtgtttccactatgtttcttcaaagc

SEQ ID NO: 598290 - DNA, 33 bp, Homo sapien
tttttctgtgtttccattatgtttcttcaaagc

SEQ ID NO: 598291 - DNA, 33 bp, Homo sapien
tatgacatcttctatcaaaacattttaggccaa

SEQ ID NO: 598292 - DNA, 33 bp, Homo sapien
tatgacatcttctatcgaaacattttaggccaa

SEQ ID NO: 598293 - DNA, 33 bp, Homo sapien
gcagctggggttgttcaaaaggacagtgaagaa

SEQ ID NO: 598294 - DNA, 33 bp, Homo sapien
gcagctggggttgttcgaaaggacagtgaagaa

SEQ ID NO: 598295 - DNA, 33 bp, Homo sapien
gtcagcactatatctgcaattccctgacctgtg

SEQ ID NO: 598296 - DNA, 33 bp, Homo sapien
gtcagcactatatctggaattccctgacctgtg

SEQ ID NO: 598297 - DNA, 33 bp, Homo sapien
ccccttgactctctcaagtcctacatagaggtt

SEQ ID NO: 598298 - DNA, 33 bp, Homo sapien
ccccttgactctctcatgtcctacatagaggtt

SEQ ID NO: 598299 - DNA, 33 bp, Homo sapien
gagaccagtaagaaaacgagttatcatccctgc

SEQ ID NO: 598300 - DNA, 33 bp, Homo sapien
gagaccagtaagaaaaggagttatcatccctgc

SEQ ID NO: 598301 - DNA, 33 bp, Homo sapien
tttcctgagctctgaaactgtgggaaagatgac

SEQ ID NO: 598302 - DNA, 33 bp, Homo sapien
tttcctgagctctgaatctgtgggaaagatgac

SEQ ID NO: 598303 - DNA, 33 bp, Homo sapien
tctggtcacctgatcacagaacggtttgcctta

SEQ ID NO: 598304 - DNA, 33 bp, Homo sapien
tctggtcacctgatcatagaacggtttgcctta

SEQ ID NO: 598305 - DNA, 33 bp, Homo sapien
gcatggaccagaatcaaaagcaataaggtgagg

SEQ ID NO: 598306 - DNA, 33 bp, Homo sapien
gcatggaccagaatcagaagcaataaggtgagg

SEQ ID NO: 598307 - DNA, 33 bp, Homo sapien
ttttccagatataatgaagtaaggccctggtta

SEQ ID NO: 598308 - DNA, 33 bp, Homo sapien
ttttccagatataatgcagtaaggccctggtta

SEQ ID NO: 598309 - DNA, 33 bp, Homo sapien
tctaatggataaacggaatatagtatacacaca

SEQ ID NO: 598310 - DNA, 33 bp, Homo sapien
tctaatggataaacgggatatagtatacacaca

SEQ ID NO: 598311 - DNA, 33 bp, Homo sapien
aatactcttctagctacggatgaggacaggtct

SEQ ID NO: 598312 - DNA, 33 bp, Homo sapien
aatactcttctagctatggatgaggacaggtct

SEQ ID NO: 598313 - DNA, 33 bp, Homo sapien
tccacaatgggggtcaaaccttgtgctttttct

SEQ ID NO: 598314 - DNA, 33 bp, Homo sapien
tccacaatgggggtcataccttgtgctttttct

SEQ ID NO: 598315 - DNA, 33 bp, Homo sapien
tgtcacctcttggatacaccacaatatgcctta

SEQ ID NO: 598316 - DNA, 33 bp, Homo sapien
tgtcacctcttggatataccacaatatgcctta

SEQ ID NO: 598317 - DNA, 33 bp, Homo sapien
tctccagcaagtgatgaagcagctgaggtggtg

SEQ ID NO: 598318 - DNA, 33 bp, Homo sapien
tctccagcaagtgatgcagcagctgaggtggtg

SEQ ID NO: 598319 - DNA, 33 bp, Homo sapien
gtgtgtgagacactcaataacggcaagaggatg

SEQ ID NO: 598320 - DNA, 33 bp, Homo sapien
gtgtgtgagacactcagtaacggcaagaggatg

SEQ ID NO: 598321 - DNA, 33 bp, Homo sapien
ggtttcataataacaacgaggagttactcaagg

SEQ ID NO: 598322 - DNA, 33 bp, Homo sapien
ggtttcataataacaatgaggagttactcaagg

SEQ ID NO: 598323 - DNA, 33 bp, Homo sapien
actgtgcagaaaatgacgttttacttagggaga

SEQ ID NO: 598324 - DNA, 33 bp, Homo sapien
actgtgcagaaaatgatgttttacttagggaga

SEQ ID NO: 598325 - DNA, 33 bp, Homo sapien
aaagatccctgaaaaactttaccctggtttctg

SEQ ID NO: 598326 - DNA, 33 bp, Homo sapien
aaagatccctgaaaaattttaccctggtttctg

SEQ ID NO: 598327 - DNA, 33 bp, Homo sapien; identical to SEQ ID NO: 598325

SEQ ID NO: 598328 - DNA, 33 bp, Homo sapien; identical to SEQ ID NO: 598326

SEQ ID NO: 598329 - DNA, 33 bp, Homo sapien
cattgatgccactgcgcaaggtgcaggtgagac

SEQ ID NO: 598330 - DNA, 33 bp, Homo sapien
cattgatgccactgcgtaaggtgcaggtgagac

SEQ ID NO: 598331 - DNA, 33 bp, Homo sapien
tctttcaagaaaaaaacgtccagctccacaggc

SEQ ID NO: 598332 - DNA, 33 bp, Homo sapien
tctttcaagaaaaaaatgtccagctccacaggc

SEQ ID NO: 598333 - DNA, 33 bp, Homo sapien
gagaagattttggttcaaattcagtagtgagtg

SEQ ID NO: 598334 - DNA, 33 bp, Homo sapien
gagaagattttggttccaattcagtagtgagtg

SEQ ID NO: 598335 - DNA, 33 bp, Homo sapien
attcctgacttcccaacgcacaaaatagagaaa

SEQ ID NO: 598336 - DNA, 33 bp, Homo sapien
attcctgacttcccaatgcacaaaatagagaaa

SEQ ID NO: 598337 - DNA, 33 bp, Homo sapien
cacccgctcctcaaaaagaataaccagactcag

SEQ ID NO: 598338 - DNA, 33 bp, Homo sapien
cacccgctcctcaaaaggaataaccagactcag

SEQ ID NO: 598339 - DNA, 33 bp, Homo sapien
tgtcaaccattttatacctcacaatatgcctta

SEQ ID NO: 598340 - DNA, 33 bp, Homo sapien
tgtcaaccattttatagctcacaatatgcctta

SEQ ID NO: 598341 - DNA, 33 bp, Homo sapien
ctgcacaggtcccagccaagttctcaggtccca

SEQ ID NO: 598342 - DNA, 33 bp, Homo sapien
ctgcacaggtcccagcgaagttctcaggtccca

SEQ ID NO: 598343 - DNA, 33 bp, Homo sapien
ggccaggaatctcggacatcaggatggctggac

SEQ ID NO: 598344 - DNA, 33 bp, Homo sapien
ggccaggaatctcggatatcaggatggctggac

SEQ ID NO: 598345 - DNA, 33 bp, Homo sapien
taggatgtttaggaaagaatactgttcaaaatc

SEQ ID NO: 598346 - DNA, 33 bp, Homo sapien
taggatgtttaggaaataatactgttcaaaatc

SEQ ID NO: 598347 - DNA, 33 bp, Homo sapien
tccagacttgcagtcacagtcatcgggatcctg

SEQ ID NO: 598348 - DNA, 33 bp, Homo sapien
tccagacttgcagtcatagtcatcgggatcctg

SEQ ID NO: 598349 - DNA, 33 bp, Homo sapien
ggagagacacagacacagtgattcttggtctag

SEQ ID NO: 598350 - DNA, 33 bp, Homo sapien
ggagagacacagacacggtgattcttggtctag

SEQ ID NO: 598351 - DNA, 33 bp, Homo sapien; identical to SEQ ID NO: 598349

SEQ ID NO: 598352 - DNA, 33 bp, Homo sapien; identical to SEQ ID NO: 598350

SEQ ID NO: 598353 - DNA, 33 bp, Homo sapien
gcatgggataccagcccgagagcttgcacagtg

SEQ ID NO: 598354 - DNA, 33 bp, Homo sapien
gcatgggataccagcctgagagcttgcacagtg

SEQ ID NO: 598355 - DNA, 33 bp, Homo sapien
actgagacaagaacccccttcctcctccgccag

SEQ ID NO: 598356 - DNA, 33 bp, Homo sapien
actgagacaagaaccctcttcctcctccgccag

SEQ ID NO: 598357 - DNA, 33 bp, Homo sapien
attcttactgaaactgaaactcaagaagaaatg

SEQ ID NO: 598358 - DNA, 33 bp, Homo sapien
attcttactgaaactggaactcaagaagaaatg

SEQ ID NO: 598359 - DNA, 33 bp, Homo sapien
aagaacctttgccgagaactcggtgattttaaa

SEQ ID NO: 598360 - DNA, 33 bp, Homo sapien
aagaacctttgccgaggactcggtgattttaaa

SEQ ID NO: 598361 - DNA, 33 bp, Homo sapien
atttgctgagtgggagaaagcaactgctctagc

SEQ ID NO: 598362 - DNA, 33 bp, Homo sapien
atttgctgagtgggaggaagcaactgctctagc

SEQ ID NO: 598363 - DNA, 33 bp, Homo sapien
tgaccaatttgtaggaccacaagtatacactta

SEQ ID NO: 598364 - DNA, 33 bp, Homo sapien
tgaccaatttgtaggatcacaagtatacactta

SEQ ID NO: 598365 - DNA, 33 bp, Homo sapien
tagggaaggagagagaagtgagagttttcacta

SEQ ID NO: 598366 - DNA, 33 bp, Homo sapien
tagggaaggagagagaggtgagagttttcacta

SEQ ID NO: 598367 - DNA, 33 bp, Homo sapien
tgcttatcctgccttacgtatttcttgctttac

SEQ ID NO: 598368 - DNA, 33 bp, Homo sapien
tgcttatcctgccttatgtatttcttgctttac

SEQ ID NO: 598369 - DNA, 33 bp, Homo sapien
aaatagaaacttctacactaattactaatacag

SEQ ID NO: 598370 - DNA, 33 bp, Homo sapien
aaatagaaacttctacgctaattactaatacag

SEQ ID NO: 598371 - DNA, 33 bp, Homo sapien
gagcatgctttaatgaaactgcaaacaacagtg

SEQ ID NO: 598372 - DNA, 33 bp, Homo sapien
gagcatgctttaatgagactgcaaacaacagtg

SEQ ID NO: 598373 - DNA, 33 bp, Homo sapien
ctctcggtgaggttctcaaatattccaaccaac

SEQ ID NO: 598374 - DNA, 33 bp, Homo sapien
ctctcggtgaggttcttaaatattccaaccaac

SEQ ID NO: 598375 - DNA, 33 bp, Homo sapien
ttttctctgttgcttaagagtagatcccaggct

SEQ ID NO: 598376 - DNA, 33 bp, Homo sapien
ttttctctgttgcttaggagtagatcccaggct

SEQ ID NO: 598377 - DNA, 33 bp, Homo sapien
ctgacaatccagccaaaggtttcactgaaacct

SEQ ID NO: 598378 - DNA, 33 bp, Homo sapien
ctgacaatccagccaagggtttcactgaaacct

SEQ ID NO: 598379 - DNA, 33 bp, Homo sapien
cctgaactaatcaaacacatcattcagattccc

SEQ ID NO: 598380 - DNA, 33 bp, Homo sapien
cctgaactaatcaaacgcatcattcagattccc

SEQ ID NO: 598381 - DNA, 33 bp, Homo sapien
cctttcctttgctgaaacatagctgtttggtat

SEQ ID NO: 598382 - DNA, 33 bp, Homo sapien
cctttcctttgctgaagcatagctgtttggtat

SEQ ID NO: 598383 - DNA, 33 bp, Homo sapien
ataccttcaccttaccacaagggataggctctg

SEQ ID NO: 598384 - DNA, 33 bp, Homo sapien
ataccttcaccttaccgcaagggataggctctg

SEQ ID NO: 598385 - DNA, 33 bp, Homo sapien
cacattaaaaataggacgacatcttgggtccta

SEQ ID NO: 598386 - DNA, 33 bp, Homo sapien
cacattaaaaataggatgacatcttgggtccta

SEQ ID NO: 598387 - DNA, 33 bp, Homo sapien
gttggtgaggcccagaagctccacttcaagtgc

SEQ ID NO: 598388 - DNA, 33 bp, Homo sapien
gttggtgaggcccagacgctccacttcaagtgc

SEQ ID NO: 598389 - DNA, 33 bp, Homo sapien
tgttccaggccctgagaatgtaccttgcatgct

SEQ ID NO: 598390 - DNA, 33 bp, Homo sapien
tgttccaggccctgaggatgtaccttgcatgct

SEQ ID NO: 598391 - DNA, 33 bp, Homo sapien
tttggggcatctgttacctccttgcttatttct

SEQ ID NO: 598392 - DNA, 33 bp, Homo sapien
tttggggcatctgttatctccttgcttatttct

SEQ ID NO: 598393 - DNA, 33 bp, Homo sapien
ttatttaatcagcaaccagagatttcctgaggt

SEQ ID NO: 598394 - DNA, 33 bp, Homo sapien
ttatttaatcagcaactagagatttcctgaggt

SEQ ID NO: 598395 - DNA, 33 bp, Homo sapien
cctgtttcatgcctaactagctgggtgcacata

SEQ ID NO: 598396 - DNA, 33 bp, Homo sapien
cctgtttcatgcctaattagctgggtgcacata

SEQ ID NO: 598397 - DNA, 33 bp, Homo sapien
actgctcccagcttacaaccttaagcttctacg

SEQ ID NO: 598398 - DNA, 33 bp, Homo sapien
actgctcccagcttacgaccttaagcttctacg

SEQ ID NO: 598399 - DNA, 33 bp, Homo sapien
gctgatgcctgaagtacgaagtaaaagtgcaga

SEQ ID NO: 598400 - DNA, 33 bp, Homo sapien
gctgatgcctgaagtatgaagtaaaagtgcaga

SEQ ID NO: 598401 - DNA, 33 bp, Homo sapien
gttagtcagaagtaagcctgggcatttgtaatg

SEQ ID NO: 598402 - DNA, 33 bp, Homo sapien
gttagtcagaagtaaggctgggcatttgtaatg

SEQ ID NO: 598403 - DNA, 33 bp, Homo sapien
aggaggaaccgcgatcaagtgtgagttgtgtaa

SEQ ID NO: 598404 - DNA, 33 bp, Homo sapien
aggaggaaccgcgatcgagtgtgagttgtgtaa

SEQ ID NO: 598405 - DNA, 33 bp, Homo sapien
ctgtgaaaacctccgcaaatactgctgaggaaa

SEQ ID NO: 598406 - DNA, 33 bp, Homo sapien
ctgtgaaaacctccgcgaatactgctgaggaaa

SEQ ID NO: 598407 - DNA, 33 bp, Homo sapien
ggcagatttctggggacacttgtggtggtggat

SEQ ID NO: 598408 - DNA, 33 bp, Homo sapien
ggcagatttctggggatacttgtggtggtggat

SEQ ID NO: 598409 - DNA, 33 bp, Homo sapien
ctcctattaagaccaaaggaccaataactagaa

SEQ ID NO: 598410 - DNA, 33 bp, Homo sapien
ctcctattaagaccaatggaccaataactagaa

SEQ ID NO: 598411 - DNA, 33 bp, Homo sapien
tctagcacaagcaaaacggtcctgagaacgagt

SEQ ID NO: 598412 - DNA, 33 bp, Homo sapien
tctagcacaagcaaaatggtcctgagaacgagt

SEQ ID NO: 598413 - DNA, 33 bp, Homo sapien
gcagaagaccaagcatcagctcagaggtcccca

SEQ ID NO: 598414 - DNA, 33 bp, Homo sapien
gcagaagaccaagcattagctcagaggtcccca

SEQ ID NO: 598415 - DNA, 33 bp, Homo sapien; identical to SEQ ID NO: 598413

SEQ ID NO: 598416 - DNA, 33 bp, Homo sapien; identical to SEQ ID NO: 598414

SEQ ID NO: 598417 - DNA, 33 bp, Homo sapien; identical to SEQ ID NO: 598413

SEQ ID NO: 598418 - DNA, 33 bp, Homo sapien; identical to SEQ ID NO: 598414

SEQ ID NO: 598419 - DNA, 33 bp, Homo sapien
ctcagggctcagataaaaactcagacacatcaa

SEQ ID NO: 598420 - DNA, 33 bp, Homo sapien
ctcagggctcagataagaactcagacacatcaa

SEQ ID NO: 598421 - DNA, 33 bp, Homo sapien
cagagcccgacaaaggaatgacaaaaatatcct

SEQ ID NO: 598422 - DNA, 33 bp, Homo sapien
cagagcccgacaaaggcatgacaaaaatatcct

SEQ ID NO: 598423 - DNA, 33 bp, Homo sapien
ctacaaggaagagtacagaagaagagagagcag

SEQ ID NO: 598424 - DNA, 33 bp, Homo sapien
ctacaaggaagagtacggaagaagagagagcag

SEQ ID NO: 598425 - DNA, 33 bp, Homo sapien
tgatgcctctgattagacacatttccacactgg

SEQ ID NO: 598426 - DNA, 33 bp, Homo sapien
tgatgcctctgattaggcacatttccacactgg

SEQ ID NO: 598427 - DNA, 33 bp, Homo sapien
aatcaaattgctaaagaacagtgatgaagagac

SEQ ID NO: 598428 - DNA, 33 bp, Homo sapien
aatcaaattgctaaagcacagtgatgaagagac

SEQ ID NO: 598429 - DNA, 33 bp, Homo sapien
aacattgatgtacaaactcttttgccccatgtc

SEQ ID NO: 598430 - DNA, 33 bp, Homo sapien
aacattgatgtacaaattcttttgccccatgtc

SEQ ID NO: 598431 - DNA, 33 bp, Homo sapien
gcttgaggacaaaggacgcattgccaggaatcc

SEQ ID NO: 598432 - DNA, 33 bp, Homo sapien
gcttgaggacaaaggatgcattgccaggaatcc

SEQ ID NO: 598433 - DNA, 33 bp, Homo sapien
ccgaatttattattgaaccaccttctgtagggc

SEQ ID NO: 598434 - DNA, 33 bp, Homo sapien
ccgaatttattattgatccaccttctgtagggc

SEQ ID NO: 598435 - DNA, 33 bp, Homo sapien
tgggaatgtgttacaccggagcgctcagcaaga

SEQ ID NO: 598436 - DNA, 33 bp, Homo sapien
tgggaatgtgttacactggagcgctcagcaaga

SEQ ID NO: 598437 - DNA, 33 bp, Homo sapien
catcacacgtattttaaccaactagcccagagt

SEQ ID NO: 598438 - DNA, 33 bp, Homo sapien
catcacacgtattttagccaactagcccagagt

SEQ ID NO: 598439 - DNA, 33 bp, Homo sapien
gtttctctgtctccaacgtcacttccggcaggt

SEQ ID NO: 598440 - DNA, 33 bp, Homo sapien
gtttctctgtctccaatgtcacttccggcaggt

SEQ ID NO: 598441 - DNA, 33 bp, Homo sapien
catcatgatgggtgcgccattctgtaatccaga

SEQ ID NO: 598442 - DNA, 33 bp, Homo sapien
catcatgatgggtgcgtcattctgtaatccaga

SEQ ID NO: 598443 - DNA, 33 bp, Homo sapien
ccatgtcttcctctcaacctacagccttgacgt

SEQ ID NO: 598444 - DNA, 33 bp, Homo sapien
ccatgtcttcctctcaccctacagccttgacgt

SEQ ID NO: 598445 - DNA, 33 bp, Homo sapien
ctgctggaaatggccaaccgggactgtggttca

SEQ ID NO: 598446 - DNA, 33 bp, Homo sapien
ctgctggaaatggccacccgggactgtggttca

SEQ ID NO: 598447 - DNA, 33 bp, Homo sapien
tgggttctggaaagtaacatctaaaaatatatt

SEQ ID NO: 598448 - DNA, 33 bp, Homo sapien
tgggttctggaaagtaccatctaaaaatatatt

SEQ ID NO: 598449 - DNA, 33 bp, Homo sapien
tacctatggacttatagcaccatttacaatgca

SEQ ID NO: 598450 - DNA, 33 bp, Homo sapien
tacctatggacttatatcaccatttacaatgca

SEQ ID NO: 598451 - DNA, 33 bp, Homo sapien
catcagtgatttctcaacagggcccagctcagc

SEQ ID NO: 598452 - DNA, 33 bp, Homo sapien
catcagtgatttctcagcagggcccagctcagc

SEQ ID NO: 598453 - DNA, 33 bp, Homo sapien
gtatctgcttcagtgaggtaactgtgcacctgc

SEQ ID NO: 598454 - DNA, 33 bp, Homo sapien
gtatctgcttcagtgatgtaactgtgcacctgc

SEQ ID NO: 598455 - DNA, 33 bp, Homo sapien
ggactgatctctacaacagttgaatgatcctgg

SEQ ID NO: 598456 - DNA, 33 bp, Homo sapien
ggactgatctctacaatagttgaatgatcctgg

SEQ ID NO: 598457 - DNA, 33 bp, Homo sapien
tgggtaaatctgaaaacgcacttggcccttctt

SEQ ID NO: 598458 - DNA, 33 bp, Homo sapien
tgggtaaatctgaaaatgcacttggcccttctt

SEQ ID NO: 598459 - DNA, 33 bp, Homo sapien
cctatgcaaagagtgaagagagtgagccagaga

SEQ ID NO: 598460 - DNA, 33 bp, Homo sapien
cctatgcaaagagtgaggagagtgagccagaga

SEQ ID NO: 598461 - DNA, 33 bp, Homo sapien
tggtaaccatctcacagtgacacagacagatgg

SEQ ID NO: 598462 - DNA, 33 bp, Homo sapien
tggtaaccatctcacattgacacagacagatgg

SEQ ID NO: 598463 - DNA, 33 bp, Homo sapien
ggtcaggatgatgtgaagcttgaaggaccaggc

SEQ ID NO: 598464 - DNA, 33 bp, Homo sapien
ggtcaggatgatgtgaggcttgaaggaccaggc

SEQ ID NO: 598465 - DNA, 33 bp, Homo sapien
ccatgtttaactgagaccctcaagccccagctc

SEQ ID NO: 598466 - DNA, 33 bp, Homo sapien
ccatgtttaactgagatcctcaagccccagctc

SEQ ID NO: 598467 - DNA, 33 bp, Homo sapien
aaaagaaccacgcaaagactcttgagggaacac

SEQ ID NO: 598468 - DNA, 33 bp, Homo sapien
aaaagaaccacgcaaatactcttgagggaacac

SEQ ID NO: 598469 - DNA, 33 bp, Homo sapien
ttttattgccatttgggattgattcacttctct

SEQ ID NO: 598470 - DNA, 33 bp, Homo sapien
ttttattgccatttggtattgattcacttctct

SEQ ID NO: 598471 - DNA, 33 bp, Homo sapien
gaaagacaccaagtccgctggtagtgctcaagt

SEQ ID NO: 598472 - DNA, 33 bp, Homo sapien
gaaagacaccaagtcctctggtagtgctcaagt

SEQ ID NO: 598473 - DNA, 33 bp, Homo sapien
atatgtctgagaaataaagaaagtccagactca

SEQ ID NO: 598474 - DNA, 33 bp, Homo sapien
atatgtctgagaaatacagaaagtccagactca

SEQ ID NO: 598475 - DNA, 33 bp, Homo sapien
ttagtggaaattcacactgatgagcccattatc

SEQ ID NO: 598476 - DNA, 33 bp, Homo sapien
ttagtggaaattcacattgatgagcccattatc

SEQ ID NO: 598477 - DNA, 33 bp, Homo sapien
tctcctggtaccaacaacacccaggcaaagccc

SEQ ID NO: 598478 - DNA, 33 bp, Homo sapien
tctcctggtaccaacagcacccaggcaaagccc

SEQ ID NO: 598479 - DNA, 33 bp, Homo sapien; identical to SEQ ID NO: 598477

SEQ ID NO: 598480 - DNA, 33 bp, Homo sapien; identical to SEQ ID NO: 598478

SEQ ID NO: 598481 - DNA, 33 bp, Homo sapien
ttgtggcgataaccatcagaatgtagttgctaa

SEQ ID NO: 598482 - DNA, 33 bp, Homo sapien
ttgtggcgataaccattagaatgtagttgctaa

SEQ ID NO: 598483 - DNA, 33 bp, Homo sapien
aagtgtgtaattaagcagcagtaagtacagtaa

SEQ ID NO: 598484 - DNA, 33 bp, Homo sapien
aagtgtgtaattaagcggcagtaagtacagtaa

SEQ ID NO: 598485 - DNA, 33 bp, Homo sapien
gaggggatgacacacaagtagaaggtggtaggg

SEQ ID NO: 598486 - DNA, 33 bp, Homo sapien
gaggggatgacacacaggtagaaggtggtaggg

SEQ ID NO: 598487 - DNA, 33 bp, Homo sapien
catccaagtggagaagacagacagtattgtgtg

SEQ ID NO: 598488 - DNA, 33 bp, Homo sapien
catccaagtggagaagtcagacagtattgtgtg

SEQ ID NO: 598489 - DNA, 33 bp, Homo sapien
gtttttgatcacagaacggagaatgcaggataa

SEQ ID NO: 598490 - DNA, 33 bp, Homo sapien
gtttttgatcacagaatggagaatgcaggataa

SEQ ID NO: 598491 - DNA, 33 bp, Homo sapien
aagaagactttcataacacggaataggatgatg

SEQ ID NO: 598492 - DNA, 33 bp, Homo sapien
aagaagactttcataatacggaataggatgatg

SEQ ID NO: 598493 - DNA, 33 bp, Homo sapien
ccctatgctcaaggcccgatctttactagaaaa

SEQ ID NO: 598494 - DNA, 33 bp, Homo sapien
ccctatgctcaaggcctgatctttactagaaaa

SEQ ID NO: 598495 - DNA, 33 bp, Homo sapien
ccagagtgagcaaatccctgacacatggataag

SEQ ID NO: 598496 - DNA, 33 bp, Homo sapien
ccagagtgagcaaatctctgacacatggataag

SEQ ID NO: 598497 - DNA, 33 bp, Homo sapien
agcccaggcaggaaaacggccctgagagagggg

SEQ ID NO: 598498 - DNA, 33 bp, Homo sapien
agcccaggcaggaaaagggccctgagagagggg

SEQ ID NO: 598499 - DNA, 33 bp, Homo sapien
gtcttgctttcttttacgtttgtctgctttgta

SEQ ID NO: 598500 - DNA, 33 bp, Homo sapien
gtcttgctttcttttatgtttgtctgctttgta

SEQ ID NO: 598501 - DNA, 33 bp, Homo sapien
tatgtgaatattttgtaaagtctgacatgagaa

SEQ ID NO: 598502 - DNA, 33 bp, Homo sapien
tatgtgaatattttgtgaagtctgacatgagaa

SEQ ID NO: 598503 - DNA, 33 bp, Homo sapien
agtcacagcccatgaactaggaacctctgcccg

SEQ ID NO: 598504 - DNA, 33 bp, Homo sapien
agtcacagcccatgaagtaggaacctctgcccg

SEQ ID NO: 598505 - DNA, 33 bp, Homo sapien
agtttgttgcaagtccccatctgtctttgtcac

SEQ ID NO: 598506 - DNA, 33 bp, Homo sapien
agtttgttgcaagtcctcatctgtctttgtcac

SEQ ID NO: 598507 - DNA, 33 bp, Homo sapien
cctataaccattctcaaccttttagtgtctata

SEQ ID NO: 598508 - DNA, 33 bp, Homo sapien
cctataaccattctcacccttttagtgtctata

SEQ ID NO: 598509 - DNA, 33 bp, Homo sapien
atacaaagtcacaagaaagcacgactcattccc

SEQ ID NO: 598510 - DNA, 33 bp, Homo sapien
atacaaagtcacaagagagcacgactcattccc

SEQ ID NO: 598511 - DNA, 33 bp, Homo sapien
cacgactcattcccagaaaaataatcgactgaa

SEQ ID NO: 598512 - DNA, 33 bp, Homo sapien
cacgactcattcccaggaaaataatcgactgaa

SEQ ID NO: 598513 - DNA, 33 bp, Homo sapien
tcttagggcttgtttcccactctcaggaatgcg

SEQ ID NO: 598514 - DNA, 33 bp, Homo sapien
tcttagggcttgtttcgcactctcaggaatgcg

SEQ ID NO: 598515 - DNA, 33 bp, Homo sapien
tagttatagttgaggcccttgtgtttggtttac

SEQ ID NO: 598516 - DNA, 33 bp, Homo sapien
tagttatagttgaggctcttgtgtttggtttac

SEQ ID NO: 598517 - DNA, 33 bp, Homo sapien
ataaatgcatttctacaagggccaataaatgaa

SEQ ID NO: 598518 - DNA, 33 bp, Homo sapien
ataaatgcatttctacgagggccaataaatgaa

SEQ ID NO: 598519 - DNA, 33 bp, Homo sapien
atatgtttatggggtacacgtgctattttgatg

SEQ ID NO: 598520 - DNA, 33 bp, Homo sapien
atatgtttatggggtatacgtgctattttgatg

SEQ ID NO: 598521 - DNA, 33 bp, Homo sapien
atgtgacagttgtccaaattcaatacccttcac

SEQ ID NO: 598522 - DNA, 33 bp, Homo sapien
atgtgacagttgtccacattcaatacccttcac

SEQ ID NO: 598523 - DNA, 33 bp, Homo sapien
caaggccaggaacttacagcatctcctgagtct

SEQ ID NO: 598524 - DNA, 33 bp, Homo sapien
caaggccaggaacttatagcatctcctgagtct

SEQ ID NO: 598525 - DNA, 33 bp, Homo sapien
ggtacttcctctgttgaatactggctcagaata

SEQ ID NO: 598526 - DNA, 33 bp, Homo sapien
ggtacttcctctgttggatactggctcagaata

SEQ ID NO: 598527 - DNA, 33 bp, Homo sapien
ggtcaagaaatattcacggaggacccaatatgt

SEQ ID NO: 598528 - DNA, 33 bp, Homo sapien
ggtcaagaaatattcatggaggacccaatatgt

SEQ ID NO: 598529 - DNA, 33 bp, Homo sapien
tgtcacttggaactccaggaaaccagtctctgg

SEQ ID NO: 598530 - DNA, 33 bp, Homo sapien
tgtcacttggaactccgggaaaccagtctctgg

SEQ ID NO: 598531 - DNA, 33 bp, Homo sapien
cacctcgaatgcaaaaattaaaggagcatccaa

SEQ ID NO: 598532 - DNA, 33 bp, Homo sapien
cacctcgaatgcaaaagttaaaggagcatccaa

SEQ ID NO: 598533 - DNA, 33 bp, Homo sapien
aaacttataacacagtcaaagattaggcagctg

SEQ ID NO: 598534 - DNA, 33 bp, Homo sapien
aaacttataacacagtgaaagattaggcagctg

SEQ ID NO: 598535 - DNA, 33 bp, Homo sapien
acaaattgagaacccacgaaaggctaggaatta

SEQ ID NO: 598536 - DNA, 33 bp, Homo sapien
acaaattgagaacccaggaaaggctaggaatta

SEQ ID NO: 598537 - DNA, 33 bp, Homo sapien
agattctgcctttcaacagaaacctaaccacgc

SEQ ID NO: 598538 - DNA, 33 bp, Homo sapien
agattctgcctttcaatagaaacctaaccacgc

SEQ ID NO: 598539 - DNA, 33 bp, Homo sapien
gacaggggataggtccactcttggtcagatgcc

SEQ ID NO: 598540 - DNA, 33 bp, Homo sapien
gacaggggataggtccgctcttggtcagatgcc

SEQ ID NO: 598541 - DNA, 33 bp, Homo sapien
aagctaagctttaccacaggaaattatttccct

SEQ ID NO: 598542 - DNA, 33 bp, Homo sapien
aagctaagctttaccataggaaattatttccct

SEQ ID NO: 598543 - DNA, 33 bp, Homo sapien
gtcagtagaaggaaaacgtggtcgaactgaaat

SEQ ID NO: 598544 - DNA, 33 bp, Homo sapien
gtcagtagaaggaaaaggtggtcgaactgaaat

SEQ ID NO: 598545 - DNA, 33 bp, Homo sapien
atatactgaattgcaacgacaatgcggctacaa

SEQ ID NO: 598546 - DNA, 33 bp, Homo sapien
atatactgaattgcaatgacaatgcggctacaa

SEQ ID NO: 598547 - DNA, 33 bp, Homo sapien
atgttttctgattgacaaggaggacatttattg

SEQ ID NO: 598548 - DNA, 33 bp, Homo sapien
atgttttctgattgacgaggaggacatttattg

SEQ ID NO: 598549 - DNA, 33 bp, Homo sapien
ggtgatggaaaaagtacggctcagagaaacacg

SEQ ID NO: 598550 - DNA, 33 bp, Homo sapien
ggtgatggaaaaagtatggctcagagaaacacg

SEQ ID NO: 598551 - DNA, 33 bp, Homo sapien
gttgtgggaagaatgacgttgaccacagggaca

SEQ ID NO: 598552 - DNA, 33 bp, Homo sapien
gttgtgggaagaatgatgttgaccacagggaca

SEQ ID NO: 598553 - DNA, 33 bp, Homo sapien
tttttcctggccccaaattcctccagcctgtcc

SEQ ID NO: 598554 - DNA, 33 bp, Homo sapien
tttttcctggccccaatttcctccagcctgtcc

SEQ ID NO: 598555 - DNA, 33 bp, Homo sapien
ctggaatatcctgggaacgtttcctccacatgg

SEQ ID NO: 598556 - DNA, 33 bp, Homo sapien
ctggaatatcctgggagcgtttcctccacatgg

SEQ ID NO: 598557 - DNA, 33 bp, Homo sapien
ataaatggtacgggacaataaggccactcaata

SEQ ID NO: 598558 - DNA, 33 bp, Homo sapien
ataaatggtacgggacgataaggccactcaata

SEQ ID NO: 598559 - DNA, 33 bp, Homo sapien
tggccttggagaagggccatagacagatgttca

SEQ ID NO: 598560 - DNA, 33 bp, Homo sapien
tggccttggagaagggtcatagacagatgttca

SEQ ID NO: 598561 - DNA, 33 bp, Homo sapien
agacagatgttcacaacagggcaagaagaagtg

SEQ ID NO: 598562 - DNA, 33 bp, Homo sapien
agacagatgttcacaatagggcaagaagaagtg

SEQ ID NO: 598563 - DNA, 33 bp, Homo sapien
cccatctttgtgataaccccatgatttcatgca

SEQ ID NO: 598564 - DNA, 33 bp, Homo sapien
cccatctttgtgataagcccatgatttcatgca

SEQ ID NO: 598565 - DNA, 33 bp, Homo sapien
cagactgacttccagaaaagagagcctgaactg

SEQ ID NO: 598566 - DNA, 33 bp, Homo sapien
cagactgacttccagagaagagagcctgaactg

SEQ ID NO: 598567 - DNA, 33 bp, Homo sapien
gtagccaggtcaacctaaggaagagggagattt

SEQ ID NO: 598568 - DNA, 33 bp, Homo sapien
gtagccaggtcaaccttaggaagagggagattt

SEQ ID NO: 598569 - DNA, 33 bp, Homo sapien
ttcagaaagcagctaccgactcacgcggagtga

SEQ ID NO: 598570 - DNA, 33 bp, Homo sapien
ttcagaaagcagctactgactcacgcggagtga

SEQ ID NO: 598571 - DNA, 33 bp, Homo sapien
gagtcctaaggtacaacagatacaatacaatag

SEQ ID NO: 598572 - DNA, 33 bp, Homo sapien
gagtcctaaggtacaatagatacaatacaatag

SEQ ID NO: 598573 - DNA, 33 bp, Homo sapien
ctgtcagataacacaacgcaaaatagtacagag

SEQ ID NO: 598574 - DNA, 33 bp, Homo sapien
ctgtcagataacacaatgcaaaatagtacagag

SEQ ID NO: 598575 - DNA, 33 bp, Homo sapien
gattgtaacattggaaaagagaaagaacataca

SEQ ID NO: 598576 - DNA, 33 bp, Homo sapien
gattgtaacattggaatagagaaagaacataca

SEQ ID NO: 598577 - DNA, 33 bp, Homo sapien
tattcacagaagacgaaaaacaacagagaaact

SEQ ID NO: 598578 - DNA, 33 bp, Homo sapien
tattcacagaagacgagaaacaacagagaaact

SEQ ID NO: 598579 - DNA, 33 bp, Homo sapien
aattactgaactaaaccggagttgaatgcacac

SEQ ID NO: 598580 - DNA, 33 bp, Homo sapien
aattactgaactaaactggagttgaatgcacac

SEQ ID NO: 598581 - DNA, 33 bp, Homo sapien
ctggactcaaaactgcaaaatgttttatgccat

SEQ ID NO: 598582 - DNA, 33 bp, Homo sapien
ctggactcaaaactgcgaaatgttttatgccat

SEQ ID NO: 598583 - DNA, 33 bp, Homo sapien
tctgatgaggtgtcaacgattaagtgtgtcatt

SEQ ID NO: 598584 - DNA, 33 bp, Homo sapien
tctgatgaggtgtcaatgattaagtgtgtcatt

SEQ ID NO: 598585 - DNA, 33 bp, Homo sapien
cattgcaccagatgcacacatttcaacatagga

SEQ ID NO: 598586 - DNA, 33 bp, Homo sapien
cattgcaccagatgcatacatttcaacatagga

SEQ ID NO: 598587 - DNA, 33 bp, Homo sapien
tacatgacacatggaacaccattaagtgaaaga

SEQ ID NO: 598588 - DNA, 33 bp, Homo sapien
tacatgacacatggaataccattaagtgaaaga

SEQ ID NO: 598589 - DNA, 33 bp, Homo sapien
tctaccacatggccaggatgcaaattttccaaa

SEQ ID NO: 598590 - DNA, 33 bp, Homo sapien
tctaccacatggccagtatgcaaattttccaaa

SEQ ID NO: 598591 - DNA, 33 bp, Homo sapien
actttcacttccaactaaatccacagtgattcc

SEQ ID NO: 598592 - DNA, 33 bp, Homo sapien
actttcacttccaactgaatccacagtgattcc

SEQ ID NO: 598593 - DNA, 33 bp, Homo sapien
gatgagaacacatggacgcatagaagaaacaac

SEQ ID NO: 598594 - DNA, 33 bp, Homo sapien
gatgagaacacatggatgcatagaagaaacaac

SEQ ID NO: 598595 - DNA, 33 bp, Homo sapien
tgcccctgtggcttcacccatcagagtatgtaa

SEQ ID NO: 598596 - DNA, 33 bp, Homo sapien
tgcccctgtggcttcatccatcagagtatgtaa

SEQ ID NO: 598597 - DNA, 33 bp, Homo sapien
tggccagcctagtgaactggataaatgcccatg

SEQ ID NO: 598598 - DNA, 33 bp, Homo sapien
tggccagcctagtgaattggataaatgcccatg

SEQ ID NO: 598599 - DNA, 33 bp, Homo sapien
ttggaatgcccttggtaaagaggggtgtccatc

SEQ ID NO: 598600 - DNA, 33 bp, Homo sapien
ttggaatgcccttggttaagaggggtgtccatc

SEQ ID NO: 598601 - DNA, 33 bp, Homo sapien
gcatgtttggggctaaaatactttatttcaggg

SEQ ID NO: 598602 - DNA, 33 bp, Homo sapien
gcatgtttggggctaacatactttatttcaggg

SEQ ID NO: 598603 - DNA, 33 bp, Homo sapien
aagctgtctcttctgaaggaaatctacattctg

SEQ ID NO: 598604 - DNA, 33 bp, Homo sapien
aagctgtctcttctgagggaaatctacattctg

SEQ ID NO: 598605 - DNA, 33 bp, Homo sapien
ggtggaggagtaaaaaaatatttctggcaaaga

SEQ ID NO: 598606 - DNA, 33 bp, Homo sapien
ggtggaggagtaaaaagatatttctggcaaaga

SEQ ID NO: 598607 - DNA, 33 bp, Homo sapien
ttacttccccaagttcacagatatgtttttagg

SEQ ID NO: 598608 - DNA, 33 bp, Homo sapien
ttacttccccaagttcgcagatatgtttttagg

SEQ ID NO: 598609 - DNA, 33 bp, Homo sapien
actgtggaaataacttaaaatggtcatagttaa

SEQ ID NO: 598610 - DNA, 33 bp, Homo sapien
actgtggaaataactttaaatggtcatagttaa

SEQ ID NO: 598611 - DNA, 33 bp, Homo sapien
cctgatcctctctctcgcgcagctccctgcttt

SEQ ID NO: 598612 - DNA, 33 bp, Homo sapien
cctgatcctctctctctcgcagctccctgcttt

SEQ ID NO: 598613 - DNA, 33 bp, Homo sapien
ctgtgagtggatgctacgtccctgctgtacccc

SEQ ID NO: 598614 - DNA, 33 bp, Homo sapien
ctgtgagtggatgctatgtccctgctgtacccc

SEQ ID NO: 598615 - DNA, 33 bp, Homo sapien
atggttggccaagagacaaaggccaagagttga

SEQ ID NO: 598616 - DNA, 33 bp, Homo sapien
atggttggccaagagataaaggccaagagttga

SEQ ID NO: 598617 - DNA, 33 bp, Homo sapien
tgggggaaacgaatgacggacgggcaggcaggt

SEQ ID NO: 598618 - DNA, 33 bp, Homo sapien
tgggggaaacgaatgatggacgggcaggcaggt

SEQ ID NO: 598619 - DNA, 33 bp, Homo sapien
agttatcatgaccctgaaacagcagagcctcct

SEQ ID NO: 598620 - DNA, 33 bp, Homo sapien
agttatcatgaccctggaacagcagagcctcct

SEQ ID NO: 598621 - DNA, 33 bp, Homo sapien
acccacattttcattcaccagaatacgggatca

SEQ ID NO: 598622 - DNA, 33 bp, Homo sapien
acccacattttcattcgccagaatacgggatca

SEQ ID NO: 598623 - DNA, 33 bp, Homo sapien
gacactgctcttcccaagatgacacatcggata

SEQ ID NO: 598624 - DNA, 33 bp, Homo sapien
gacactgctcttcccacgatgacacatcggata

SEQ ID NO: 598625 - DNA, 33 bp, Homo sapien
ctctttgccactaggcagaaccgagtccagtgc

SEQ ID NO: 598626 - DNA, 33 bp, Homo sapien
ctctttgccactaggcggaaccgagtccagtgc

SEQ ID NO: 598627 - DNA, 33 bp, Homo sapien
gctaagtgtccatctcaccctcctgccgtggcc

SEQ ID NO: 598628 - DNA, 33 bp, Homo sapien
gctaagtgtccatctcgccctcctgccgtggcc

SEQ ID NO: 598629 - DNA, 33 bp, Homo sapien
gtggtatagctgtagacccccagatttctccct

SEQ ID NO: 598630 - DNA, 33 bp, Homo sapien
gtggtatagctgtagatccccagatttctccct

SEQ ID NO: 598631 - DNA, 33 bp, Homo sapien
tctgccttccaagaaacgtggacagcagaaagc

SEQ ID NO: 598632 - DNA, 33 bp, Homo sapien
tctgccttccaagaaatgtggacagcagaaagc

SEQ ID NO: 598633 - DNA, 33 bp, Homo sapien
gttaggtatctccaacccctactttgggacctg

SEQ ID NO: 598634 - DNA, 33 bp, Homo sapien
gttaggtatctccaactcctactttgggacctg

SEQ ID NO: 598635 - DNA, 33 bp, Homo sapien
agaggtgccagagataacccttcagccagaaca

SEQ ID NO: 598636 - DNA, 33 bp, Homo sapien
agaggtgccagagatagcccttcagccagaaca

SEQ ID NO: 598637 - DNA, 33 bp, Homo sapien
ctcattggcctatacacctcttaggacctttgt

SEQ ID NO: 598638 - DNA, 33 bp, Homo sapien
ctcattggcctatacatctcttaggacctttgt

SEQ ID NO: 598639 - DNA, 33 bp, Homo sapien
gccaggccctaggagaacagtactgatcagaag

SEQ ID NO: 598640 - DNA, 33 bp, Homo sapien
gccaggccctaggagagcagtactgatcagaag

SEQ ID NO: 598641 - DNA, 33 bp, Homo sapien
tgcccgatgctgggaaagaaggaaatgtcttca

SEQ ID NO: 598642 - DNA, 33 bp, Homo sapien
tgcccgatgctgggaatgaaggaaatgtcttca

SEQ ID NO: 598643 - DNA, 33 bp, Homo sapien
tgcttcacccccagataaaatctccatgcagtt

SEQ ID NO: 598644 - DNA, 33 bp, Homo sapien
tgcttcacccccagatgaaatctccatgcagtt

SEQ ID NO: 598645 - DNA, 33 bp, Homo sapien
aattttacaagcgttccctggttcaggaaggct

SEQ ID NO: 598646 - DNA, 33 bp, Homo sapien
aattttacaagcgttctctggttcaggaaggct

SEQ ID NO: 598647 - DNA, 33 bp, Homo sapien
gaaatgcataatttagaatggacatttcactca

SEQ ID NO: 598648 - DNA, 33 bp, Homo sapien
gaaatgcataatttagtatggacatttcactca

SEQ ID NO: 598649 - DNA, 33 bp, Homo sapien
gcgggacccagtctccaatgcttcctcagacat

SEQ ID NO: 598650 - DNA, 33 bp, Homo sapien
gcgggacccagtctccgatgcttcctcagacat

SEQ ID NO: 598651 - DNA, 33 bp, Homo sapien
atctgtaacaaaggtaaattatggcctcaaagt

SEQ ID NO: 598652 - DNA, 33 bp, Homo sapien
atctgtaacaaaggtacattatggcctcaaagt

SEQ ID NO: 598653 - DNA, 33 bp, Homo sapien
tggtggtgatgcaatcaatgacagagccaggtg

SEQ ID NO: 598654 - DNA, 33 bp, Homo sapien
tggtggtgatgcaatcgatgacagagccaggtg

SEQ ID NO: 598655 - DNA, 33 bp, Homo sapien
aagaaaccagcaacggaaagaggagaagctcat

SEQ ID NO: 598656 - DNA, 33 bp, Homo sapien
aagaaaccagcaacgggaagaggagaagctcat

SEQ ID NO: 598657 - DNA, 33 bp, Homo sapien
gagcagagagacagtccgaaggaaatgcaggtc

SEQ ID NO: 598658 - DNA, 33 bp, Homo sapien
gagcagagagacagtctgaaggaaatgcaggtc

SEQ ID NO: 598659 - DNA, 33 bp, Homo sapien
ctcagtcaccatctaaatcctggattaactggt

SEQ ID NO: 598660 - DNA, 33 bp, Homo sapien
ctcagtcaccatctaactcctggattaactggt

SEQ ID NO: 598661 - DNA, 33 bp, Homo sapien
attgtctggttgactgaagttagggaagtgggt

SEQ ID NO: 598662 - DNA, 33 bp, Homo sapien
attgtctggttgactggagttagggaagtgggt

SEQ ID NO: 598663 - DNA, 33 bp, Homo sapien
cattgcttctgactcgaaggacacggccccttg

SEQ ID NO: 598664 - DNA, 33 bp, Homo sapien
cattgcttctgactcggaggacacggccccttg

SEQ ID NO: 598665 - DNA, 33 bp, Homo sapien
cctgtctgttagaacccgcctctttgatggtag

SEQ ID NO: 598666 - DNA, 33 bp, Homo sapien
cctgtctgttagaacctgcctctttgatggtag

SEQ ID NO: 598667 - DNA, 33 bp, Homo sapien
cactaggaagaatgaaatattgcatctgaagca

SEQ ID NO: 598668 - DNA, 33 bp, Homo sapien
cactaggaagaatgaagtattgcatctgaagca

SEQ ID NO: 598669 - DNA, 33 bp, Homo sapien
ggctgtcacttctcataacaaagacaaccccac

SEQ ID NO: 598670 - DNA, 33 bp, Homo sapien
ggctgtcacttctcatgacaaagacaaccccac

SEQ ID NO: 598671 - DNA, 33 bp, Homo sapien
gtgtgtcacctgttcactctgcaagcattaact

SEQ ID NO: 598672 - DNA, 33 bp, Homo sapien
gtgtgtcacctgttcattctgcaagcattaact

SEQ ID NO: 598673 - DNA, 33 bp, Homo sapien
aggtggttacctgggcagaattcctgtcctggt

SEQ ID NO: 598674 - DNA, 33 bp, Homo sapien
aggtggttacctgggcggaattcctgtcctggt

SEQ ID NO: 598675 - DNA, 33 bp, Homo sapien
cccagcttgtgtggagcaggcatggaatcctac

SEQ ID NO: 598676 - DNA, 33 bp, Homo sapien
cccagcttgtgtggaggaggcatggaatcctac

SEQ ID NO: 598677 - DNA, 33 bp, Homo sapien
tccactttttattgacaagaagcctgggtccca

SEQ ID NO: 598678 - DNA, 33 bp, Homo sapien
tccactttttattgacgagaagcctgggtccca

SEQ ID NO: 598679 - DNA, 33 bp, Homo sapien
gcacctgggctttttacgactctggggctcaga

SEQ ID NO: 598680 - DNA, 33 bp, Homo sapien
gcacctgggctttttaggactctggggctcaga

SEQ ID NO: 598681 - DNA, 33 bp, Homo sapien
gatggacatcagtaccacctggccataacctca

SEQ ID NO: 598682 - DNA, 33 bp, Homo sapien
gatggacatcagtaccgcctggccataacctca

SEQ ID NO: 598683 - DNA, 33 bp, Homo sapien
ccattaagcagtcaccaacctcctttctgtctt

SEQ ID NO: 598684 - DNA, 33 bp, Homo sapien
ccattaagcagtcaccgacctcctttctgtctt

SEQ ID NO: 598685 - DNA, 33 bp, Homo sapien
ccctgccaggggcagacgtatctcagaaagccc

SEQ ID NO: 598686 - DNA, 33 bp, Homo sapien
ccctgccaggggcagatgtatctcagaaagccc

SEQ ID NO: 598687 - DNA, 33 bp, Homo sapien
acccaactgtctccaaatgagagtacggagacc

SEQ ID NO: 598688 - DNA, 33 bp, Homo sapien
acccaactgtctccaagtgagagtacggagacc

SEQ ID NO: 598689 - DNA, 33 bp, Homo sapien
gggcctttaaggtaaactgaagccaaaaggttc

SEQ ID NO: 598690 - DNA, 33 bp, Homo sapien
gggcctttaaggtaaagtgaagccaaaaggttc

SEQ ID NO: 598691 - DNA, 33 bp, Homo sapien
cccacagccgtacaacactatagaaggaggaac

SEQ ID NO: 598692 - DNA, 33 bp, Homo sapien
cccacagccgtacaacgctatagaaggaggaac

SEQ ID NO: 598693 - DNA, 33 bp, Homo sapien
ggtggccctgacggtcacgggttttgaatatcc

SEQ ID NO: 598694 - DNA, 33 bp, Homo sapien
ggtggccctgacggtcgcgggttttgaatatcc

SEQ ID NO: 598695 - DNA, 33 bp, Homo sapien
ggacttgaacttgcccacttaactgtaacctgt

SEQ ID NO: 598696 - DNA, 33 bp, Homo sapien
ggacttgaacttgcccgcttaactgtaacctgt

SEQ ID NO: 598697 - DNA, 33 bp, Homo sapien
cagacggtaggaatagaaattacatgaaaaggg

SEQ ID NO: 598698 - DNA, 33 bp, Homo sapien
cagacggtaggaataggaattacatgaaaaggg

SEQ ID NO: 598699 - DNA, 33 bp, Homo sapien
aacaaggtgctgcttaaattgacttaaatgtta

SEQ ID NO: 598700 - DNA, 33 bp, Homo sapien
aacaaggtgctgcttatattgacttaaatgtta

SEQ ID NO: 598701 - DNA, 33 bp, Homo sapien
ccactggggtcaacagaataacatttaagtcaa

SEQ ID NO: 598702 - DNA, 33 bp, Homo sapien
ccactggggtcaacaggataacatttaagtcaa

SEQ ID NO: 598703 - DNA, 33 bp, Homo sapien
ctggcgacctgcccgaggacacccggactccag

SEQ ID NO: 598704 - DNA, 33 bp, Homo sapien
ctggcgacctgcccgatgacacccggactccag

SEQ ID NO: 598705 - DNA, 33 bp, Homo sapien
caagaatgaacacacccggaaacatggagacac

SEQ ID NO: 598706 - DNA, 33 bp, Homo sapien
caagaatgaacacacctggaaacatggagacac

SEQ ID NO: 598707 - DNA, 33 bp, Homo sapien
ctctctctggatgtcactcttgatctgggagat

SEQ ID NO: 598708 - DNA, 33 bp, Homo sapien
ctctctctggatgtcattcttgatctgggagat

SEQ ID NO: 598709 - DNA, 33 bp, Homo sapien
tctcacctctggccacaggcttgagctgttcaa

SEQ ID NO: 598710 - DNA, 33 bp, Homo sapien
tctcacctctggccacgggcttgagctgttcaa

SEQ ID NO: 598711 - DNA, 33 bp, Homo sapien
tgcgttttcacttggacgcgccccactctgaga

SEQ ID NO: 598712 - DNA, 33 bp, Homo sapien
tgcgttttcacttggatgcgccccactctgaga

SEQ ID NO: 598713 - DNA, 33 bp, Homo sapien
cagtgagggtggtggacgtgacctgctacaatc

SEQ ID NO: 598714 - DNA, 33 bp, Homo sapien
cagtgagggtggtggaggtgacctgctacaatc

SEQ ID NO: 598715 - DNA, 33 bp, Homo sapien
gcgcagattcaccaacagcaccgtcagggtgat

SEQ ID NO: 598716 - DNA, 33 bp, Homo sapien
gcgcagattcaccaacggcaccgtcagggtgat

SEQ ID NO: 598717 - DNA, 33 bp, Homo sapien
acagaatagtctcaccaccataaaagtgaacct

SEQ ID NO: 598718 - DNA, 33 bp, Homo sapien
acagaatagtctcaccgccataaaagtgaacct

SEQ ID NO: 598719 - DNA, 33 bp, Homo sapien
atcagcaaagatgacaagtgactcagggaagag

SEQ ID NO: 598720 - DNA, 33 bp, Homo sapien
atcagcaaagatgacaggtgactcagggaagag

SEQ ID NO: 598721 - DNA, 33 bp, Homo sapien
caacctagaaaatttgcagatgaagagagatgc

SEQ ID NO: 598722 - DNA, 33 bp, Homo sapien
caacctagaaaatttgtagatgaagagagatgc

SEQ ID NO: 598723 - DNA, 33 bp, Homo sapien
tactggagataccacaaagaatgaactggacaa

SEQ ID NO: 598724 - DNA, 33 bp, Homo sapien
tactggagataccacagagaatgaactggacaa

SEQ ID NO: 598725 - DNA, 33 bp, Homo sapien
agaggcaccaataggagagaaacttatgtatgt

SEQ ID NO: 598726 - DNA, 33 bp, Homo sapien
agaggcaccaataggatagaaacttatgtatgt

SEQ ID NO: 598727 - DNA, 33 bp, Homo sapien
ttctttgaaggaaagggaagaatgtctcctgct

SEQ ID NO: 598728 - DNA, 33 bp, Homo sapien
ttctttgaaggaaaggtaagaatgtctcctgct

SEQ ID NO: 598729 - DNA, 33 bp, Homo sapien
acataaatagtacaagcaggcaaaagtatagac

SEQ ID NO: 598730 - DNA, 33 bp, Homo sapien
acataaatagtacaaggaggcaaaagtatagac

SEQ ID NO: 598731 - DNA, 33 bp, Homo sapien
agatcatccagaccacaaaaaaatcattagtta

SEQ ID NO: 598732 - DNA, 33 bp, Homo sapien
agatcatccagaccacgaaaaaatcattagtta

SEQ ID NO: 598733 - DNA, 33 bp, Homo sapien
ttgtttgaactaaccaatcctgaacctgctcac

SEQ ID NO: 598734 - DNA, 33 bp, Homo sapien
ttgtttgaactaaccagtcctgaacctgctcac

SEQ ID NO: 598735 - DNA, 33 bp, Homo sapien
gacaatggggaggagaagctgaaagtctttaat

SEQ ID NO: 598736 - DNA, 33 bp, Homo sapien
gacaatggggaggagatgctgaaagtctttaat

SEQ ID NO: 598737 - DNA, 33 bp, Homo sapien
tatgcctggcccgagaacaatattttttagcca

SEQ ID NO: 598738 - DNA, 33 bp, Homo sapien
tatgcctggcccgagagcaatattttttagcca

SEQ ID NO: 598739 - DNA, 33 bp, Homo sapien; identical to SEQ ID NO: 598737

SEQ ID NO: 598740 - DNA, 33 bp, Homo sapien; identical to SEQ ID NO: 598738

SEQ ID NO: 598741 - DNA, 33 bp, Homo sapien
gagctaggtctcttgaacacttctattatcctg

SEQ ID NO: 598742 - DNA, 33 bp, Homo sapien
gagctaggtctcttgaccacttctattatcctg

SEQ ID NO: 598743 - DNA, 33 bp, Homo sapien; identical to SEQ ID NO: 598741

SEQ ID NO: 598744 - DNA, 33 bp, Homo sapien; identical to SEQ ID NO: 598742

SEQ ID NO: 598745 - DNA, 33 bp, Homo sapien
tagagataatgccatccgaataacgttttatgt

SEQ ID NO: 598746 - DNA, 33 bp, Homo sapien
tagagataatgccatctgaataacgttttatgt

SEQ ID NO: 598747 - DNA, 33 bp, Homo sapien
cagatggagaagatgaagcacaggaatggcata

SEQ ID NO: 598748 - DNA, 33 bp, Homo sapien
cagatggagaagatgaggcacaggaatggcata

SEQ ID NO: 598749 - DNA, 33 bp, Homo sapien
tttatgagcggacttaaaataaataaaagcagt

SEQ ID NO: 598750 - DNA, 33 bp, Homo sapien
tttatgagcggacttacaataaataaaagcagt

SEQ ID NO: 598751 - DNA, 33 bp, Homo sapien
aatccactgagccggcacatacctaaaataaac

SEQ ID NO: 598752 - DNA, 33 bp, Homo sapien
aatccactgagccggcgcatacctaaaataaac

SEQ ID NO: 598753 - DNA, 33 bp, Homo sapien
tcacacccttcccgcactgagatagcctcagcc

SEQ ID NO: 598754 - DNA, 33 bp, Homo sapien
tcacacccttcccgcattgagatagcctcagcc

SEQ ID NO: 598755 - DNA, 33 bp, Homo sapien
attcctgatcactgcaaagaccgccctgcgctg

SEQ ID NO: 598756 - DNA, 33 bp, Homo sapien
attcctgatcactgcacagaccgccctgcgctg

SEQ ID NO: 598757 - DNA, 33 bp, Homo sapien
cttatcaggatcccaacttatgacctcattcaa

SEQ ID NO: 598758 - DNA, 33 bp, Homo sapien
cttatcaggatcccaatttatgacctcattcaa

SEQ ID NO: 598759 - DNA, 33 bp, Homo sapien
cccaaatacaaaatagacaaaagacactaatag

SEQ ID NO: 598760 - DNA, 33 bp, Homo sapien
cccaaatacaaaataggcaaaagacactaatag

SEQ ID NO: 598761 - DNA, 33 bp, Homo sapien
actgcatgaccgagtcaaatgacaacaaacagg

SEQ ID NO: 598762 - DNA, 33 bp, Homo sapien
actgcatgaccgagtcgaatgacaacaaacagg

SEQ ID NO: 598763 - DNA, 33 bp, Homo sapien
catctttgctcaccaagtgagtgactgggttgg

SEQ ID NO: 598764 - DNA, 33 bp, Homo sapien
catctttgctcaccaattgagtgactgggttgg

SEQ ID NO: 598765 - DNA, 33 bp, Homo sapien
actgttgtgtatattaacctggctctcctgagg

SEQ ID NO: 598766 - DNA, 33 bp, Homo sapien
actgttgtgtatattaccctggctctcctgagg

SEQ ID NO: 598767 - DNA, 33 bp, Homo sapien
tggaggaagggaccaaaggatacaactttaata

SEQ ID NO: 598768 - DNA, 33 bp, Homo sapien
tggaggaagggaccaacggatacaactttaata

SEQ ID NO: 598769 - DNA, 33 bp, Homo sapien
taccacatgcctgggaagattctaaatgcttac

SEQ ID NO: 598770 - DNA, 33 bp, Homo sapien
taccacatgcctgggaggattctaaatgcttac

SEQ ID NO: 598771 - DNA, 33 bp, Homo sapien
ggggggataaggaacacactcccggtcacacac

SEQ ID NO: 598772 - DNA, 33 bp, Homo sapien
ggggggataaggaacatactcccggtcacacac

SEQ ID NO: 598773 - DNA, 33 bp, Homo sapien
gtggatttaccttcaaaataaactagtgtgtat

SEQ ID NO: 598774 - DNA, 33 bp, Homo sapien
gtggatttaccttcaagataaactagtgtgtat

SEQ ID NO: 598775 - DNA, 33 bp, Homo sapien
gcaaacttgatgtatgaaaatgtggatttacct

SEQ ID NO: 598776 - DNA, 33 bp, Homo sapien
gcaaacttgatgtatggaaatgtggatttacct

SEQ ID NO: 598777 - DNA, 33 bp, Homo sapien
tgcctaattgtaccgaagaaagcatctaaatac

SEQ ID NO: 598778 - DNA, 33 bp, Homo sapien
tgcctaattgtaccgaggaaagcatctaaatac

SEQ ID NO: 598779 - DNA, 33 bp, Homo sapien
gcctccacctcttcacaccaccccacagatgaa

SEQ ID NO: 598780 - DNA, 33 bp, Homo sapien
gcctccacctcttcacgccaccccacagatgaa

SEQ ID NO: 598781 - DNA, 33 bp, Homo sapien
cacatattactgtagaaagtcaacagcagcctt

SEQ ID NO: 598782 - DNA, 33 bp, Homo sapien
cacatattactgtagagagtcaacagcagcctt

SEQ ID NO: 598783 - DNA, 33 bp, Homo sapien
gccgattttgctgaagaattttaatcataaaga

SEQ ID NO: 598784 - DNA, 33 bp, Homo sapien
gccgattttgctgaaggattttaatcataaaga

SEQ ID NO: 598785 - DNA, 33 bp, Homo sapien
ccaccgctcacactgcaaggtttgaaacccagc

SEQ ID NO: 598786 - DNA, 33 bp, Homo sapien
ccaccgctcacactgcgaggtttgaaacccagc

SEQ ID NO: 598787 - DNA, 33 bp, Homo sapien; identical to SEQ ID NO: 598785

SEQ ID NO: 598788 - DNA, 33 bp, Homo sapien; identical to SEQ ID NO: 598786

SEQ ID NO: 598789 - DNA, 33 bp, Homo sapien
aatgggcaaaagactcaaacatatatttcccta

SEQ ID NO: 598790 - DNA, 33 bp, Homo sapien
aatgggcaaaagactcgaacatatatttcccta

SEQ ID NO: 598791 - DNA, 33 bp, Homo sapien
ggagttctatattgaaccttctaagccactgca

SEQ ID NO: 598792 - DNA, 33 bp, Homo sapien
ggagttctatattgaatcttctaagccactgca

SEQ ID NO: 598793 - DNA, 33 bp, Homo sapien
acaaaaccttgtccaccgtaagcaacatagcac

SEQ ID NO: 598794 - DNA, 33 bp, Homo sapien
acaaaaccttgtccactgtaagcaacatagcac

SEQ ID NO: 598795 - DNA, 33 bp, Homo sapien
agggtgatacatgagactaatgattaagtggta

SEQ ID NO: 598796 - DNA, 33 bp, Homo sapien
agggtgatacatgagattaatgattaagtggta

SEQ ID NO: 598797 - DNA, 33 bp, Homo sapien
ggtttccagagagtcgaagtttgcctaaagcct

SEQ ID NO: 598798 - DNA, 33 bp, Homo sapien
ggtttccagagagtcgcagtttgcctaaagcct

SEQ ID NO: 598799 - DNA, 33 bp, Homo sapien
agccttagaaggatgaactggagaactggaggc

SEQ ID NO: 598800 - DNA, 33 bp, Homo sapien
agccttagaaggatgacctggagaactggaggc

SEQ ID NO: 598801 - DNA, 33 bp, Homo sapien
caaaggtcaggggaaccgctatgtctgcataaa

SEQ ID NO: 598802 - DNA, 33 bp, Homo sapien
caaaggtcaggggaactgctatgtctgcataaa

SEQ ID NO: 598803 - DNA, 33 bp, Homo sapien
ttcctggtgtgacctcagacaaggctctttgcc

SEQ ID NO: 598804 - DNA, 33 bp, Homo sapien
ttcctggtgtgacctcggacaaggctctttgcc

SEQ ID NO: 598805 - DNA, 33 bp, Homo sapien
gaatgctcgagttaaacagagtctgagggagta

SEQ ID NO: 598806 - DNA, 33 bp, Homo sapien
gaatgctcgagttaaatagagtctgagggagta

SEQ ID NO: 598807 - DNA, 33 bp, Homo sapien
ccagccgggcaccctacggagcacatgaccccc

SEQ ID NO: 598808 - DNA, 33 bp, Homo sapien
ccagccgggcaccctatggagcacatgaccccc

SEQ ID NO: 598809 - DNA, 33 bp, Homo sapien
agcaatcaatccccaacaccgtggacgtgcttg

SEQ ID NO: 598810 - DNA, 33 bp, Homo sapien
agcaatcaatccccaataccgtggacgtgcttg

SEQ ID NO: 598811 - DNA, 33 bp, Homo sapien
agtcacagactcagacaggagacaggctcgata

SEQ ID NO: 598812 - DNA, 33 bp, Homo sapien
agtcacagactcagacgggagacaggctcgata

SEQ ID NO: 598813 - DNA, 33 bp, Homo sapien
gggcactcgacaaccgacagagtctggaagcag

SEQ ID NO: 598814 - DNA, 33 bp, Homo sapien
gggcactcgacaaccggcagagtctggaagcag

SEQ ID NO: 598815 - DNA, 33 bp, Homo sapien
agggttcaagtggccaagaccttctatgccctg

SEQ ID NO: 598816 - DNA, 33 bp, Homo sapien
agggttcaagtggccaggaccttctatgccctg

SEQ ID NO: 598817 - DNA, 33 bp, Homo sapien
ctcagtaaacactggacggacagatgggcagaa

SEQ ID NO: 598818 - DNA, 33 bp, Homo sapien
ctcagtaaacactggatggacagatgggcagaa

SEQ ID NO: 598819 - DNA, 33 bp, Homo sapien
cacccatccatgaatccactcagctacccattc

SEQ ID NO: 598820 - DNA, 33 bp, Homo sapien
cacccatccatgaatctactcagctacccattc

SEQ ID NO: 598821 - DNA, 33 bp, Homo sapien
cacctgatattttcatcaggacacatcttctgc

SEQ ID NO: 598822 - DNA, 33 bp, Homo sapien
cacctgatattttcattaggacacatcttctgc

SEQ ID NO: 598823 - DNA, 33 bp, Homo sapien
ctgacttagctgtgtaaaaaaatagcaagggct

SEQ ID NO: 598824 - DNA, 33 bp, Homo sapien
ctgacttagctgtgtataaaaatagcaagggct

SEQ ID NO: 598825 - DNA, 33 bp, Homo sapien
cacggaccgtggtaaccgtggcagcaggaagac

SEQ ID NO: 598826 - DNA, 33 bp, Homo sapien
cacggaccgtggtaactgtggcagcaggaagac

SEQ ID NO: 598827 - DNA, 33 bp, Homo sapien
gagaacaagagggctgaaatttggacaaggagc

SEQ ID NO: 598828 - DNA, 33 bp, Homo sapien
gagaacaagagggctggaatttggacaaggagc

SEQ ID NO: 598829 - DNA, 33 bp, Homo sapien
aaaccaggagaaagaccgccaagacaacatcct

SEQ ID NO: 598830 - DNA, 33 bp, Homo sapien
aaaccaggagaaagactgccaagacaacatcct

SEQ ID NO: 598831 - DNA, 33 bp, Homo sapien
gtgcctgggacattgacgtattcaccaacagct

SEQ ID NO: 598832 - DNA, 33 bp, Homo sapien
gtgcctgggacattgaggtattcaccaacagct

SEQ ID NO: 598833 - DNA, 33 bp, Homo sapien
tcagctccttgagggacgggatcttgtctcatt

SEQ ID NO: 598834 - DNA, 33 bp, Homo sapien
tcagctccttgagggatgggatcttgtctcatt

SEQ ID NO: 598835 - DNA, 33 bp, Homo sapien
ctgaatcagtgaccagcaaacatcgaggcaaat

SEQ ID NO: 598836 - DNA, 33 bp, Homo sapien
ctgaatcagtgaccaggaaacatcgaggcaaat

SEQ ID NO: 598837 - DNA, 33 bp, Homo sapien
aggttaacagcaggtcaaggcaaaataattttt

SEQ ID NO: 598838 - DNA, 33 bp, Homo sapien
aggttaacagcaggtcgaggcaaaataattttt

SEQ ID NO: 598839 - DNA, 33 bp, Homo sapien
ccacatcctgccagtacagttttgtgtgctgtg

SEQ ID NO: 598840 - DNA, 33 bp, Homo sapien
ccacatcctgccagtatagttttgtgtgctgtg

SEQ ID NO: 598841 - DNA, 33 bp, Homo sapien
cctgttcactggtgcacgttatacccacaggcg

SEQ ID NO: 598842 - DNA, 33 bp, Homo sapien
cctgttcactggtgcatgttatacccacaggcg

SEQ ID NO: 598843 - DNA, 33 bp, Homo sapien
aagtgcctccaaagaaaaagcccaggagaggct

SEQ ID NO: 598844 - DNA, 33 bp, Homo sapien
aagtgcctccaaagaagaagcccaggagaggct

SEQ ID NO: 598845 - DNA, 33 bp, Homo sapien
atccagcaatgggacacattcagcagaaccctg

SEQ ID NO: 598846 - DNA, 33 bp, Homo sapien
atccagcaatgggacatattcagcagaaccctg

SEQ ID NO: 598847 - DNA, 33 bp, Homo sapien
ggatacattttcagaggcaactaggcagaaagg

SEQ ID NO: 598848 - DNA, 33 bp, Homo sapien
ggatacattttcagagtcaactaggcagaaagg

SEQ ID NO: 598849 - DNA, 33 bp, Homo sapien
ttcataaatcaataaacagacacacattttcca

SEQ ID NO: 598850 - DNA, 33 bp, Homo sapien
ttcataaatcaataaatagacacacattttcca

SEQ ID NO: 598851 - DNA, 33 bp, Homo sapien
ccaaaacaaatttctcaaagtggaatgacttga

SEQ ID NO: 598852 - DNA, 33 bp, Homo sapien
ccaaaacaaatttctcgaagtggaatgacttga

SEQ ID NO: 598853 - DNA, 33 bp, Homo sapien
gcacctgaataaatgcactcagtctctttattt

SEQ ID NO: 598854 - DNA, 33 bp, Homo sapien
gcacctgaataaatgcgctcagtctctttattt

SEQ ID NO: 598855 - DNA, 33 bp, Homo sapien
tcagggagtgaaaagtgactgacaggttatatg

SEQ ID NO: 598856 - DNA, 33 bp, Homo sapien
tcagggagtgaaaagttactgacaggttatatg

SEQ ID NO: 598857 - DNA, 33 bp, Homo sapien
gtgtaagtacactggacataattatgctggtac

SEQ ID NO: 598858 - DNA, 33 bp, Homo sapien
gtgtaagtacactggatataattatgctggtac

SEQ ID NO: 598859 - DNA, 33 bp, Homo sapien
tctgccaggtgcgggcactactacaggcacagc

SEQ ID NO: 598860 - DNA, 33 bp, Homo sapien
tctgccaggtgcgggcgctactacaggcacagc

SEQ ID NO: 598861 - DNA, 33 bp, Homo sapien
tgatggttgtacgctaaaatgtgaacttaaaat

SEQ ID NO: 598862 - DNA, 33 bp, Homo sapien
tgatggttgtacgctacaatgtgaacttaaaat

SEQ ID NO: 598863 - DNA, 33 bp, Homo sapien
gacagtcagtcatcagaaataaggtgggatcag

SEQ ID NO: 598864 - DNA, 33 bp, Homo sapien
gacagtcagtcatcaggaataaggtgggatcag

SEQ ID NO: 598865 - DNA, 33 bp, Homo sapien; identical to SEQ ID NO: 598863

SEQ ID NO: 598866 - DNA, 33 bp, Homo sapien; identical to SEQ ID NO: 598864

SEQ ID NO: 598867 - DNA, 33 bp, Homo sapien
cagcaaaagttcaggacaccagagccaagctca

SEQ ID NO: 598868 - DNA, 33 bp, Homo sapien
cagcaaaagttcaggataccagagccaagctca

SEQ ID NO: 598869 - DNA, 33 bp, Homo sapien
caatattcttacaatcaaagtgtccagaatggg

SEQ ID NO: 598870 - DNA, 33 bp, Homo sapien
caatattcttacaatctaagtgtccagaatggg

SEQ ID NO: 598871 - DNA, 33 bp, Homo sapien; identical to SEQ ID NO: 598869

SEQ ID NO: 598872 - DNA, 33 bp, Homo sapien; identical to SEQ ID NO: 598870

SEQ ID NO: 598873 - DNA, 33 bp, Homo sapien
gacgggtacattatcccatgagccaaactgccg

SEQ ID NO: 598874 - DNA, 33 bp, Homo sapien
gacgggtacattatcctatgagccaaactgccg

SEQ ID NO: 598875 - DNA, 33 bp, Homo sapien; identical to SEQ ID NO: 598873

SEQ ID NO: 598876 - DNA, 33 bp, Homo sapien; identical to SEQ ID NO: 598874

SEQ ID NO: 598877 - DNA, 33 bp, Homo sapien
aggtgctatgaccaagcccttaccctggctatt

SEQ ID NO: 598878 - DNA, 33 bp, Homo sapien
aggtgctatgaccaagtccttaccctggctatt

SEQ ID NO: 598879 - DNA, 33 bp, Homo sapien; identical to SEQ ID NO: 598877

SEQ ID NO: 598880 - DNA, 33 bp, Homo sapien; identical to SEQ ID NO: 598878

SEQ ID NO: 598881 - DNA, 33 bp, Homo sapien
ttttacaattcattcacagctctcccaattcag

SEQ ID NO: 598882 - DNA, 33 bp, Homo sapien
ttttacaattcattcatagctctcccaattcag

SEQ ID NO: 598883 - DNA, 33 bp, Homo sapien
ggaagcagttgatacgacataaaaaaaagcccg

SEQ ID NO: 598884 - DNA, 33 bp, Homo sapien
ggaagcagttgatacgtcataaaaaaaagcccg

SEQ ID NO: 598885 - DNA, 33 bp, Homo sapien
agaaattgctagatacaaaaggactacaaataa

SEQ ID NO: 598886 - DNA, 33 bp, Homo sapien
agaaattgctagatacgaaaggactacaaataa

SEQ ID NO: 598887 - DNA, 33 bp, Homo sapien
ttggcaggtatctgccaaactggagctttcttt

SEQ ID NO: 598888 - DNA, 33 bp, Homo sapien
ttggcaggtatctgccgaactggagctttcttt

SEQ ID NO: 598889 - DNA, 33 bp, Homo sapien
taatgaactcacttcaactgaattacctcttgg

SEQ ID NO: 598890 - DNA, 33 bp, Homo sapien
taatgaactcacttcacctgaattacctcttgg

SEQ ID NO: 598891 - DNA, 33 bp, Homo sapien
cagacagcaggttggcaaaaagttaaaagcgtg

SEQ ID NO: 598892 - DNA, 33 bp, Homo sapien
cagacagcaggttggcgaaaagttaaaagcgtg

SEQ ID NO: 598893 - DNA, 33 bp, Homo sapien
ggatggagaatgataaaacgattcctgccttca

SEQ ID NO: 598894 - DNA, 33 bp, Homo sapien
ggatggagaatgataatacgattcctgccttca

SEQ ID NO: 598895 - DNA, 33 bp, Homo sapien
tagaaaccaagtctgcaatggcactggtaaagg

SEQ ID NO: 598896 - DNA, 33 bp, Homo sapien
tagaaaccaagtctgcgatggcactggtaaagg

SEQ ID NO: 598897 - DNA, 33 bp, Homo sapien
ccagaaggaatctcagacatcctttaccagtgc

SEQ ID NO: 598898 - DNA, 33 bp, Homo sapien
ccagaaggaatctcaggcatcctttaccagtgc

SEQ ID NO: 598899 - DNA, 33 bp, Homo sapien
agacgatgacgtgcaccgaggagaagttgttga

SEQ ID NO: 598900 - DNA, 33 bp, Homo sapien
agacgatgacgtgcactgaggagaagttgttga

SEQ ID NO: 598901 - DNA, 33 bp, Homo sapien
ctgtgcctccacctcacgtcttcaggtcctcca

SEQ ID NO: 598902 - DNA, 33 bp, Homo sapien
ctgtgcctccacctcatgtcttcaggtcctcca

SEQ ID NO: 598903 - DNA, 33 bp, Homo sapien
ttattaaccatatgtgcagtgtcatttctggat

SEQ ID NO: 598904 - DNA, 33 bp, Homo sapien
ttattaaccatatgtggagtgtcatttctggat

SEQ ID NO: 598905 - DNA, 33 bp, Homo sapien
cacctgctataactgcacatgaggacttctggg

SEQ ID NO: 598906 - DNA, 33 bp, Homo sapien
cacctgctataactgcgcatgaggacttctggg

SEQ ID NO: 598907 - DNA, 33 bp, Homo sapien
aaggggatggattgcacactgtagtgagacatc

SEQ ID NO: 598908 - DNA, 33 bp, Homo sapien
aaggggatggattgcatactgtagtgagacatc

SEQ ID NO: 598909 - DNA, 33 bp, Homo sapien
gctcccttctagctgcaacttctgttttaccat

SEQ ID NO: 598910 - DNA, 33 bp, Homo sapien
gctcccttctagctgcgacttctgttttaccat

SEQ ID NO: 598911 - DNA, 33 bp, Homo sapien
tttattacattgtaaaaatatcaaagtcttgtc

SEQ ID NO: 598912 - DNA, 33 bp, Homo sapien
tttattacattgtaaagatatcaaagtcttgtc

SEQ ID NO: 598913 - DNA, 33 bp, Homo sapien
gcagggccattgggtacgtgagcgggccggggc

SEQ ID NO: 598914 - DNA, 33 bp, Homo sapien
gcagggccattgggtatgtgagcgggccggggc

SEQ ID NO: 598915 - DNA, 33 bp, Homo sapien
tggcgacacacccacgacagatggcagagcatc

SEQ ID NO: 598916 - DNA, 33 bp, Homo sapien
tggcgacacacccacggcagatggcagagcatc

SEQ ID NO: 598917 - DNA, 33 bp, Homo sapien
aagaaacgtaagccaaatcctggattccggaga

SEQ ID NO: 598918 - DNA, 33 bp, Homo sapien
aagaaacgtaagccaagtcctggattccggaga

SEQ ID NO: 598919 - DNA, 33 bp, Homo sapien
tatggggaaagagtccaaagttcacaggcccaa

SEQ ID NO: 598920 - DNA, 33 bp, Homo sapien
tatggggaaagagtccgaagttcacaggcccaa

SEQ ID NO: 598921 - DNA, 33 bp, Homo sapien
gggccagcagagataaacggggagcttggcaga

SEQ ID NO: 598922 - DNA, 33 bp, Homo sapien
gggccagcagagataagcggggagcttggcaga

SEQ ID NO: 598923 - DNA, 33 bp, Homo sapien
gcccaactcccagcaacgttcaccaaataaaag

SEQ ID NO: 598924 - DNA, 33 bp, Homo sapien
gcccaactcccagcaatgttcaccaaataaaag

SEQ ID NO: 598925 - DNA, 33 bp, Homo sapien
ataactgaattccccaaggtcacaagatacaag

SEQ ID NO: 598926 - DNA, 33 bp, Homo sapien
ataactgaattccccagggtcacaagatacaag

SEQ ID NO: 598927 - DNA, 33 bp, Homo sapien
ctgcaactggaatgcactaagtggtcgatgaga

SEQ ID NO: 598928 - DNA, 33 bp, Homo sapien
ctgcaactggaatgcagtaagtggtcgatgaga

SEQ ID NO: 598929 - DNA, 33 bp, Homo sapien
ggagagctgatcctgcaaagttactggcacctc

SEQ ID NO: 598930 - DNA, 33 bp, Homo sapien
ggagagctgatcctgcgaagttactggcacctc

SEQ ID NO: 598931 - DNA, 33 bp, Homo sapien
atccacaccagtgagcacacacccagctccagt

SEQ ID NO: 598932 - DNA, 33 bp, Homo sapien
atccacaccagtgagcgcacacccagctccagt

SEQ ID NO: 598933 - DNA, 33 bp, Homo sapien
aaggccccatccaaacgccagggtatgtttccc

SEQ ID NO: 598934 - DNA, 33 bp, Homo sapien
aaggccccatccaaactccagggtatgtttccc

SEQ ID NO: 598935 - DNA, 33 bp, Homo sapien
actgaagagaatgggcacagatccgggcacaga

SEQ ID NO: 598936 - DNA, 33 bp, Homo sapien
actgaagagaatgggcccagatccgggcacaga

SEQ ID NO: 598937 - DNA, 33 bp, Homo sapien
gtgtgtgagccttatccgacccctgtggctcat

SEQ ID NO: 598938 - DNA, 33 bp, Homo sapien
gtgtgtgagccttatctgacccctgtggctcat

SEQ ID NO: 598939 - DNA, 33 bp, Homo sapien
catcagttcacccaccaatgagacagacgaaat

SEQ ID NO: 598940 - DNA, 33 bp, Homo sapien
catcagttcacccaccgatgagacagacgaaat

SEQ ID NO: 598941 - DNA, 33 bp, Homo sapien
ggagggaagtgtggaaaacgagggatgctctgg

SEQ ID NO: 598942 - DNA, 33 bp, Homo sapien
ggagggaagtgtggaagacgagggatgctctgg

SEQ ID NO: 598943 - DNA, 33 bp, Homo sapien
tttagggcatccaagaagcatttcaaggagaat

SEQ ID NO: 598944 - DNA, 33 bp, Homo sapien
tttagggcatccaagaggcatttcaaggagaat

SEQ ID NO: 598945 - DNA, 33 bp, Homo sapien
cataatagtgtaggcacctttctgcaactttgt

SEQ ID NO: 598946 - DNA, 33 bp, Homo sapien
cataatagtgtaggcatctttctgcaactttgt

SEQ ID NO: 598947 - DNA, 33 bp, Homo sapien
tctgcaatgaggctaaaagaagatgccacatgg

SEQ ID NO: 598948 - DNA, 33 bp, Homo sapien
tctgcaatgaggctaagagaagatgccacatgg

SEQ ID NO: 598949 - DNA, 33 bp, Homo sapien
ccctgtcatctcattaccataagcgcaggtatg

SEQ ID NO: 598950 - DNA, 33 bp, Homo sapien
ccctgtcatctcattagcataagcgcaggtatg

SEQ ID NO: 598951 - DNA, 33 bp, Homo sapien
ggatacaactcatgaagagccagatgggaaaga

SEQ ID NO: 598952 - DNA, 33 bp, Homo sapien
ggatacaactcatgaatagccagatgggaaaga

SEQ ID NO: 598953 - DNA, 33 bp, Homo sapien
tccttctatgtgatgacggatgcccagagcccc

SEQ ID NO: 598954 - DNA, 33 bp, Homo sapien
tccttctatgtgatgatggatgcccagagcccc

SEQ ID NO: 598955 - DNA, 33 bp, Homo sapien
aggttccatcttgatcacggtggtgtttcccaa

SEQ ID NO: 598956 - DNA, 33 bp, Homo sapien
aggttccatcttgatcgcggtggtgtttcccaa

SEQ ID NO: 598957 - DNA, 33 bp, Homo sapien
cagagtcatctctctccaggtgtttgattctct

SEQ ID NO: 598958 - DNA, 33 bp, Homo sapien
cagagtcatctctctctaggtgtttgattctct

SEQ ID NO: 598959 - DNA, 33 bp, Homo sapien
ctcgatgtccattaccagctttgaagatgaagg

SEQ ID NO: 598960 - DNA, 33 bp, Homo sapien
ctcgatgtccattaccggctttgaagatgaagg

SEQ ID NO: 598961 - DNA, 33 bp, Homo sapien
aaggacagtgcgccataactcagagaaccaggg

SEQ ID NO: 598962 - DNA, 33 bp, Homo sapien
aaggacagtgcgccatgactcagagaaccaggg

SEQ ID NO: 598963 - DNA, 33 bp, Homo sapien
ccttgtgacagtactacccctagtatcagagga

SEQ ID NO: 598964 - DNA, 33 bp, Homo sapien
ccttgtgacagtactatccctagtatcagagga

SEQ ID NO: 598965 - DNA, 33 bp, Homo sapien
aagtcacagtggtccaagccaaaggggatgcag

SEQ ID NO: 598966 - DNA, 33 bp, Homo sapien
aagtcacagtggtccaggccaaaggggatgcag

SEQ ID NO: 598967 - DNA, 33 bp, Homo sapien
taagtagatacctaacaacacttcctcattgtc

SEQ ID NO: 598968 - DNA, 33 bp, Homo sapien
taagtagatacctaaccacacttcctcattgtc

SEQ ID NO: 598969 - DNA, 33 bp, Homo sapien
gtctccagatggagccaggaagtgctaggaggc

SEQ ID NO: 598970 - DNA, 33 bp, Homo sapien
gtctccagatggagccgggaagtgctaggaggc

SEQ ID NO: 598971 - DNA, 33 bp, Homo sapien
gggttaatctgttccacagtctgaatgtgttac

SEQ ID NO: 598972 - DNA, 33 bp, Homo sapien
gggttaatctgttccatagtctgaatgtgttac

SEQ ID NO: 598973 - DNA, 33 bp, Homo sapien
acaaacaaacaaggcaataatgtcttatgaaaa

SEQ ID NO: 598974 - DNA, 33 bp, Homo sapien
acaaacaaacaaggcagtaatgtcttatgaaaa

SEQ ID NO: 598975 - DNA, 33 bp, Homo sapien
tacaataacctatataaaagacaaacaagacaa

SEQ ID NO: 598976 - DNA, 33 bp, Homo sapien
tacaataacctatatacaagacaaacaagacaa

SEQ ID NO: 598977 - DNA, 33 bp, Homo sapien
gatagctggtagtccaagagtgctgctctgcct

SEQ ID NO: 598978 - DNA, 33 bp, Homo sapien
gatagctggtagtccaggagtgctgctctgcct

SEQ ID NO: 598979 - DNA, 33 bp, Homo sapien
ctgaggtaaggtatgaagctttcctggcagggc

SEQ ID NO: 598980 - DNA, 33 bp, Homo sapien
ctgaggtaaggtatgacgctttcctggcagggc

SEQ ID NO: 598981 - DNA, 33 bp, Homo sapien
aggagctattgaacacccttgcatgagacatcc

SEQ ID NO: 598982 - DNA, 33 bp, Homo sapien
aggagctattgaacactcttgcatgagacatcc

SEQ ID NO: 598983 - DNA, 33 bp, Homo sapien
caagttggttgaggcccagtgtctcttttcagt

SEQ ID NO: 598984 - DNA, 33 bp, Homo sapien
caagttggttgaggcctagtgtctcttttcagt

SEQ ID NO: 598985 - DNA, 33 bp, Homo sapien
ccccgagagcttgccaacaaagaacacaaggca

SEQ ID NO: 598986 - DNA, 33 bp, Homo sapien
ccccgagagcttgccagcaaagaacacaaggca

SEQ ID NO: 598987 - DNA, 33 bp, Homo sapien
ctgtgaaatgttgggaaacatctgcggccatac

SEQ ID NO: 598988 - DNA, 33 bp, Homo sapien
ctgtgaaatgttgggagacatctgcggccatac

SEQ ID NO: 598989 - DNA, 33 bp, Homo sapien
agcttcacggaagagcaaaagaagggcaggata

SEQ ID NO: 598990 - DNA, 33 bp, Homo sapien
agcttcacggaagagcgaaagaagggcaggata

SEQ ID NO: 598991 - DNA, 33 bp, Homo sapien
tagccaatgtagtgtcagaaaagcgattggcct

SEQ ID NO: 598992 - DNA, 33 bp, Homo sapien
tagccaatgtagtgtcggaaaagcgattggcct

SEQ ID NO: 598993 - DNA, 33 bp, Homo sapien
gtccactcactagtataaggatcaaaacattct

SEQ ID NO: 598994 - DNA, 33 bp, Homo sapien
gtccactcactagtatgaggatcaaaacattct

SEQ ID NO: 598995 - DNA, 33 bp, Homo sapien
tggggccatcacttgaagataggctggtgaggt

SEQ ID NO: 598996 - DNA, 33 bp, Homo sapien
tggggccatcacttgaggataggctggtgaggt

SEQ ID NO: 598997 - DNA, 33 bp, Homo sapien
tctgcattcttggcccaactgcaaagcagcggg

SEQ ID NO: 598998 - DNA, 33 bp, Homo sapien
tctgcattcttggcccgactgcaaagcagcggg

SEQ ID NO: 598999 - DNA, 33 bp, Homo sapien; identical to SEQ ID NO: 598997

SEQ ID NO: 599000 - DNA, 33 bp, Homo sapien; identical to SEQ ID NO: 598998

SEQ ID NO: 599001 - DNA, 33 bp, Homo sapien
gtcagatgcaggaaaaagaaaaggcagaagaat

SEQ ID NO: 599002 - DNA, 33 bp, Homo sapien
gtcagatgcaggaaaaggaaaaggcagaagaat

SEQ ID NO: 599003 - DNA, 33 bp, Homo sapien; identical to SEQ ID NO: 599001

SEQ ID NO: 599004 - DNA, 33 bp, Homo sapien; identical to SEQ ID NO: 599002

SEQ ID NO: 599005 - DNA, 33 bp, Homo sapien
ccattcagtagaagggcaaagaggcccacatgt

SEQ ID NO: 599006 - DNA, 33 bp, Homo sapien
ccattcagtagaagggtaaagaggcccacatgt

SEQ ID NO: 599007 - DNA, 33 bp, Homo sapien
tcctggccctgtccacactttggatatgttggg

SEQ ID NO: 599008 - DNA, 33 bp, Homo sapien
tcctggccctgtccacgctttggatatgttggg

SEQ ID NO: 599009 - DNA, 33 bp, Homo sapien
ccctgaacactcttcaaccgttttctggggcat

SEQ ID NO: 599010 - DNA, 33 bp, Homo sapien
ccctgaacactcttcagccgttttctggggcat

SEQ ID NO: 599011 - DNA, 33 bp, Homo sapien
cggtggctctcggctacgaactgtttgagggac

SEQ ID NO: 599012 - DNA, 33 bp, Homo sapien
cggtggctctcggctatgaactgtttgagggac

SEQ ID NO: 599013 - DNA, 33 bp, Homo sapien
atgtctgtgccataagccaacatgcccctctca

SEQ ID NO: 599014 - DNA, 33 bp, Homo sapien
atgtctgtgccataagtcaacatgcccctctca

SEQ ID NO: 599015 - DNA, 33 bp, Homo sapien
gtttggcataagaaagcaagaagagctgagcca

SEQ ID NO: 599016 - DNA, 33 bp, Homo sapien
gtttggcataagaaaggaagaagagctgagcca

SEQ ID NO: 599017 - DNA, 33 bp, Homo sapien
cccttcccggctgccactcattagtgatgtcct

SEQ ID NO: 599018 - DNA, 33 bp, Homo sapien
cccttcccggctgccattcattagtgatgtcct

SEQ ID NO: 599019 - DNA, 33 bp, Homo sapien
tacagcagactatggacaggaaacagctcagaa

SEQ ID NO: 599020 - DNA, 33 bp, Homo sapien
tacagcagactatggagaggaaacagctcagaa

SEQ ID NO: 599021 - DNA, 33 bp, Homo sapien
tgcttgcattggatataaatgaatcgttgcggt

SEQ ID NO: 599022 - DNA, 33 bp, Homo sapien
tgcttgcattggatatgaatgaatcgttgcggt

SEQ ID NO: 599023 - DNA, 33 bp, Homo sapien
tcactcctatttgaataatctgtgcaagactca

SEQ ID NO: 599024 - DNA, 33 bp, Homo sapien
tcactcctatttgaatcatctgtgcaagactca

SEQ ID NO: 599025 - DNA, 33 bp, Homo sapien
gcatcctcatattagacataaggaagctgagcc

SEQ ID NO: 599026 - DNA, 33 bp, Homo sapien
gcatcctcatattagagataaggaagctgagcc

SEQ ID NO: 599027 - DNA, 33 bp, Homo sapien
gaggcaaatcacctaacgtggcaagcctgaggt

SEQ ID NO: 599028 - DNA, 33 bp, Homo sapien
gaggcaaatcacctaatgtggcaagcctgaggt

SEQ ID NO: 599029 - DNA, 33 bp, Homo sapien
tatataaaatggcgacaatagcttgactagcgt

SEQ ID NO: 599030 - DNA, 33 bp, Homo sapien
tatataaaatggcgacgatagcttgactagcgt

SEQ ID NO: 599031 - DNA, 33 bp, Homo sapien
aaggatcagggagtcaagtatctgagacacaac

SEQ ID NO: 599032 - DNA, 33 bp, Homo sapien
aaggatcagggagtcaggtatctgagacacaac

SEQ ID NO: 599033 - DNA, 33 bp, Homo sapien
gaatacaaagaaaaaccgtgggtgagagaagga

SEQ ID NO: 599034 - DNA, 33 bp, Homo sapien
gaatacaaagaaaaactgtgggtgagagaagga

SEQ ID NO: 599035 - DNA, 33 bp, Homo sapien
tagtggtaataataaaaaagagcatagttgtga

SEQ ID NO: 599036 - DNA, 33 bp, Homo sapien
tagtggtaataataaagaagagcatagttgtga

SEQ ID NO: 599037 - DNA, 33 bp, Homo sapien
acatgtacatcactcaagttaatgtcataatga

SEQ ID NO: 599038 - DNA, 33 bp, Homo sapien
acatgtacatcactcaggttaatgtcataatga

SEQ ID NO: 599039 - DNA, 33 bp, Homo sapien
tgcctatggtcctccaaaaagatcctacggtct

SEQ ID NO: 599040 - DNA, 33 bp, Homo sapien
tgcctatggtcctccagaaagatcctacggtct

SEQ ID NO: 599041 - DNA, 33 bp, Homo sapien
tgacatgtcgattcacaatgtttcggtgagtgc

SEQ ID NO: 599042 - DNA, 33 bp, Homo sapien
tgacatgtcgattcacgatgtttcggtgagtgc

SEQ ID NO: 599043 - DNA, 33 bp, Homo sapien
ttcagactcaagtaggcatgtatgaaatccatt

SEQ ID NO: 599044 - DNA, 33 bp, Homo sapien
ttcagactcaagtaggtatgtatgaaatccatt

SEQ ID NO: 599045 - DNA, 33 bp, Homo sapien
tttcttcaatccagcacactttctaccattgca

SEQ ID NO: 599046 - DNA, 33 bp, Homo sapien
tttcttcaatccagcatactttctaccattgca

SEQ ID NO: 599047 - DNA, 33 bp, Homo sapien
tttatatgtgttgacaatctgctgtatttgcca

SEQ ID NO: 599048 - DNA, 33 bp, Homo sapien
tttatatgtgttgacagtctgctgtatttgcca

SEQ ID NO: 599049 - DNA, 33 bp, Homo sapien
ttcgttctggccttaaaaggcaggtgctaggcg

SEQ ID NO: 599050 - DNA, 33 bp, Homo sapien
ttcgttctggccttaacaggcaggtgctaggcg

SEQ ID NO: 599051 - DNA, 33 bp, Homo sapien
cagcagcagtccagctaaagcaccaggaagacc

SEQ ID NO: 599052 - DNA, 33 bp, Homo sapien
cagcagcagtccagctgaagcaccaggaagacc

SEQ ID NO: 599053 - DNA, 33 bp, Homo sapien
gagatccagatgtccaccatttggttcagccca

SEQ ID NO: 599054 - DNA, 33 bp, Homo sapien
gagatccagatgtccatcatttggttcagccca

SEQ ID NO: 599055 - DNA, 33 bp, Homo sapien
tttgtccagcgaaaagacaagctgcaaaatcat

SEQ ID NO: 599056 - DNA, 33 bp, Homo sapien
tttgtccagcgaaaaggcaagctgcaaaatcat

SEQ ID NO: 599057 - DNA, 33 bp, Homo sapien
ctgctaggggtcgcctaaagggtgctactcact

SEQ ID NO: 599058 - DNA, 33 bp, Homo sapien
ctgctaggggtcgcctgaagggtgctactcact

SEQ ID NO: 599059 - DNA, 33 bp, Homo sapien
ctccgcatgctaagtcaaagcctatctgcagac

SEQ ID NO: 599060 - DNA, 33 bp, Homo sapien
ctccgcatgctaagtcgaagcctatctgcagac

SEQ ID NO: 599061 - DNA, 33 bp, Homo sapien
agcatttcgtttaagcaccaaagtttcagattt

SEQ ID NO: 599062 - DNA, 33 bp, Homo sapien
agcatttcgtttaagcgccaaagtttcagattt

SEQ ID NO: 599063 - DNA, 33 bp, Homo sapien
ttgccttttatgcgcacctatgtgcactagctt

SEQ ID NO: 599064 - DNA, 33 bp, Homo sapien
ttgccttttatgcgcatctatgtgcactagctt

SEQ ID NO: 599065 - DNA, 33 bp, Homo sapien
gctgcagagagcaaaacgacctgaccttctcac

SEQ ID NO: 599066 - DNA, 33 bp, Homo sapien
gctgcagagagcaaaatgacctgaccttctcac

SEQ ID NO: 599067 - DNA, 33 bp, Homo sapien
tgagcaaagggacaagcagcggtggcatgaaaa

SEQ ID NO: 599068 - DNA, 33 bp, Homo sapien
tgagcaaagggacaagtagcggtggcatgaaaa

SEQ ID NO: 599069 - DNA, 33 bp, Homo sapien
accatagcacctggtcgaagtccagcataatcc

SEQ ID NO: 599070 - DNA, 33 bp, Homo sapien
accatagcacctggtctaagtccagcataatcc

SEQ ID NO: 599071 - DNA, 33 bp, Homo sapien
ctggcccacctttggaaatggagaaactaaggt

SEQ ID NO: 599072 - DNA, 33 bp, Homo sapien
ctggcccacctttggagatggagaaactaaggt

SEQ ID NO: 599073 - DNA, 33 bp, Homo sapien
tgggccagttggatgagatcagtggttttccag

SEQ ID NO: 599074 - DNA, 33 bp, Homo sapien
tgggccagttggatgatatcagtggttttccag

SEQ ID NO: 599075 - DNA, 33 bp, Homo sapien
agatgtgaccagaaagacttgacccaagcatag

SEQ ID NO: 599076 - DNA, 33 bp, Homo sapien
agatgtgaccagaaagccttgacccaagcatag

SEQ ID NO: 599077 - DNA, 33 bp, Homo sapien
cccagctcctttaacacatgatttcacttacac

SEQ ID NO: 599078 - DNA, 33 bp, Homo sapien
cccagctcctttaacatatgatttcacttacac

SEQ ID NO: 599079 - DNA, 33 bp, Homo sapien
ctgcccactatggccaagtgctggaggctcagc

SEQ ID NO: 599080 - DNA, 33 bp, Homo sapien
ctgcccactatggccacgtgctggaggctcagc

SEQ ID NO: 599081 - DNA, 33 bp, Homo sapien
tgtggccatttgttcccagaggagcctgtgaag

SEQ ID NO: 599082 - DNA, 33 bp, Homo sapien
tgtggccatttgttcctagaggagcctgtgaag

SEQ ID NO: 599083 - DNA, 33 bp, Homo sapien
gtactctccgcgcccactgaatgtgaagttggt

SEQ ID NO: 599084 - DNA, 33 bp, Homo sapien
gtactctccgcgcccattgaatgtgaagttggt

SEQ ID NO: 599085 - DNA, 33 bp, Homo sapien
agccctgcacggttaaagatgcccctggcaagt

SEQ ID NO: 599086 - DNA, 33 bp, Homo sapien
agccctgcacggttaaggatgcccctggcaagt

SEQ ID NO: 599087 - DNA, 33 bp, Homo sapien
caaaatgaaaccatataaatatcacaagaacac

SEQ ID NO: 599088 - DNA, 33 bp, Homo sapien
caaaatgaaaccatatgaatatcacaagaacac

SEQ ID NO: 599089 - DNA, 33 bp, Homo sapien
tccatttatattgtcccagaaaggcttttatta

SEQ ID NO: 599090 - DNA, 33 bp, Homo sapien
tccatttatattgtcctagaaaggcttttatta

SEQ ID NO: 599091 - DNA, 33 bp, Homo sapien
gaggttcggctggtccacgagcatcagtttccc

SEQ ID NO: 599092 - DNA, 33 bp, Homo sapien
gaggttcggctggtccgcgagcatcagtttccc

SEQ ID NO: 599093 - DNA, 33 bp, Homo sapien
tcggctgccaccaaacagcagattaggttgcag

SEQ ID NO: 599094 - DNA, 33 bp, Homo sapien
tcggctgccaccaaaccgcagattaggttgcag

SEQ ID NO: 599095 - DNA, 33 bp, Homo sapien
gagtaatcggcagtaaatgagtggtggctgccc

SEQ ID NO: 599096 - DNA, 33 bp, Homo sapien
gagtaatcggcagtaactgagtggtggctgccc

SEQ ID NO: 599097 - DNA, 33 bp, Homo sapien; identical to SEQ ID NO: 599095

SEQ ID NO: 599098 - DNA, 33 bp, Homo sapien; identical to SEQ ID NO: 599096

SEQ ID NO: 599099 - DNA, 33 bp, Homo sapien
aatgtttttatgaggaaagctactttttattcc

SEQ ID NO: 599100 - DNA, 33 bp, Homo sapien
aatgtttttatgaggagagctactttttattcc

SEQ ID NO: 599101 - DNA, 33 bp, Homo sapien
caaagtaaatgcaaaaaagttttaacaccataa

SEQ ID NO: 599102 - DNA, 33 bp, Homo sapien
caaagtaaatgcaaaatagttttaacaccataa

SEQ ID NO: 599103 - DNA, 33 bp, Homo sapien
tgaaggatcttctcacactggcaaaaaccaaag

SEQ ID NO: 599104 - DNA, 33 bp, Homo sapien
tgaaggatcttctcacgctggcaaaaaccaaag

SEQ ID NO: 599105 - DNA, 33 bp, Homo sapien
aaatcattgcactaaaataacaaataaataaaa

SEQ ID NO: 599106 - DNA, 33 bp, Homo sapien
aaatcattgcactaaagtaacaaataaataaaa

SEQ ID NO: 599107 - DNA, 33 bp, Homo sapien
gtagcctcatgattaaggatgtggactctggag

SEQ ID NO: 599108 - DNA, 33 bp, Homo sapien
gtagcctcatgattaatgatgtggactctggag

SEQ ID NO: 599109 - DNA, 33 bp, Homo sapien
gaggcagagctggacacgagccaagaatatctg

SEQ ID NO: 599110 - DNA, 33 bp, Homo sapien
gaggcagagctggacaggagccaagaatatctg

SEQ ID NO: 599111 - DNA, 33 bp, Homo sapien
tcttgttctttcttaccactacatctagtccat

SEQ ID NO: 599112 - DNA, 33 bp, Homo sapien
tcttgttctttcttactactacatctagtccat

SEQ ID NO: 599113 - DNA, 33 bp, Homo sapien
gtcataactgtcttaactcttttagtaggtatt

SEQ ID NO: 599114 - DNA, 33 bp, Homo sapien
gtcataactgtcttaattcttttagtaggtatt

SEQ ID NO: 599115 - DNA, 33 bp, Homo sapien
gtcaagtaggcaactggatacacgaacctagag

SEQ ID NO: 599116 - DNA, 33 bp, Homo sapien
gtcaagtaggcaactgtatacacgaacctagag

SEQ ID NO: 599117 - DNA, 33 bp, Homo sapien
cctgagctcagctgaagccaaccctcgaggcct

SEQ ID NO: 599118 - DNA, 33 bp, Homo sapien
cctgagctcagctgaatccaaccctcgaggcct

SEQ ID NO: 599119 - DNA, 33 bp, Homo sapien
atatactcttcctttacgggtaaatgccaactg

SEQ ID NO: 599120 - DNA, 33 bp, Homo sapien
atatactcttcctttatgggtaaatgccaactg

SEQ ID NO: 599121 - DNA, 33 bp, Homo sapien
gtgctcaccttacgatcaacttattttattgct

SEQ ID NO: 599122 - DNA, 33 bp, Homo sapien
gtgctcaccttacgatgaacttattttattgct

SEQ ID NO: 599123 - DNA, 33 bp, Homo sapien
cctttctgaaaatcccaatggtctgtgtgtccc

SEQ ID NO: 599124 - DNA, 33 bp, Homo sapien
cctttctgaaaatcccgatggtctgtgtgtccc

SEQ ID NO: 599125 - DNA, 33 bp, Homo sapien
cttctggttcctcatacgtcgcactagcaaggc

SEQ ID NO: 599126 - DNA, 33 bp, Homo sapien
cttctggttcctcatatgtcgcactagcaaggc

SEQ ID NO: 599127 - DNA, 33 bp, Homo sapien
ggaaccagactttgaggactgagctagatgggt

SEQ ID NO: 599128 - DNA, 33 bp, Homo sapien
ggaaccagactttgagtactgagctagatgggt

SEQ ID NO: 599129 - DNA, 33 bp, Homo sapien
attcaggcctgtcccacgcataagggtcccatc

SEQ ID NO: 599130 - DNA, 33 bp, Homo sapien
attcaggcctgtcccatgcataagggtcccatc

SEQ ID NO: 599131 - DNA, 33 bp, Homo sapien
tggaatagcacaatgcaagctgtttctctcatc

SEQ ID NO: 599132 - DNA, 33 bp, Homo sapien
tggaatagcacaatgcgagctgtttctctcatc

SEQ ID NO: 599133 - DNA, 33 bp, Homo sapien
cctctctctgggattcaaatttatagtcttggt

SEQ ID NO: 599134 - DNA, 33 bp, Homo sapien
cctctctctgggattcgaatttatagtcttggt

SEQ ID NO: 599135 - DNA, 33 bp, Homo sapien
cagggaggttgaggaccgctctttgtcttaaca

SEQ ID NO: 599136 - DNA, 33 bp, Homo sapien
cagggaggttgaggactgctctttgtcttaaca

SEQ ID NO: 599137 - DNA, 33 bp, Homo sapien
taatcatgggcctaaagccttccctgtgactaa

SEQ ID NO: 599138 - DNA, 33 bp, Homo sapien
taatcatgggcctaaatccttccctgtgactaa

SEQ ID NO: 599139 - DNA, 33 bp, Homo sapien
ggaggaaagataagcaccagttaagtcacagct

SEQ ID NO: 599140 - DNA, 33 bp, Homo sapien
ggaggaaagataagcagcagttaagtcacagct

SEQ ID NO: 599141 - DNA, 33 bp, Homo sapien
ctcactgcagcattaacattgctggacactgac

SEQ ID NO: 599142 - DNA, 33 bp, Homo sapien
ctcactgcagcattaatattgctggacactgac

SEQ ID NO: 599143 - DNA, 33 bp, Homo sapien; identical to SEQ ID NO: 599141

SEQ ID NO: 599144 - DNA, 33 bp, Homo sapien; identical to SEQ ID NO: 599142

SEQ ID NO: 599145 - DNA, 33 bp, Homo sapien
atcgaatcaaaaattccgaaactaaatgattct

SEQ ID NO: 599146 - DNA, 33 bp, Homo sapien
atcgaatcaaaaattctgaaactaaatgattct

SEQ ID NO: 599147 - DNA, 33 bp, Homo sapien
atttattacaatacccaacattgatgtataggt

SEQ ID NO: 599148 - DNA, 33 bp, Homo sapien
atttattacaatacccgacattgatgtataggt

SEQ ID NO: 599149 - DNA, 33 bp, Homo sapien
ccatgagagtctgtcacagattttgagttaagt

SEQ ID NO: 599150 - DNA, 33 bp, Homo sapien
ccatgagagtctgtcatagattttgagttaagt

SEQ ID NO: 599151 - DNA, 33 bp, Homo sapien
atctgtgttcaactaaaagtgcatgaataaagc

SEQ ID NO: 599152 - DNA, 33 bp, Homo sapien
atctgtgttcaactaagagtgcatgaataaagc

SEQ ID NO: 599153 - DNA, 33 bp, Homo sapien
gaatttgtaaaaaccgaaaggataagacacaag

SEQ ID NO: 599154 - DNA, 33 bp, Homo sapien
gaatttgtaaaaaccggaaggataagacacaag

SEQ ID NO: 599155 - DNA, 33 bp, Homo sapien
aagggttttatggctacggtcctttcgttagca

SEQ ID NO: 599156 - DNA, 33 bp, Homo sapien
aagggttttatggctatggtcctttcgttagca

SEQ ID NO: 599157 - DNA, 33 bp, Homo sapien
gaattccttcatcatccgaatcctctcttacag

SEQ ID NO: 599158 - DNA, 33 bp, Homo sapien
gaattccttcatcatctgaatcctctcttacag

SEQ ID NO: 599159 - DNA, 33 bp, Homo sapien
ctattaggtaactgaaactttaggtgcattatt

SEQ ID NO: 599160 - DNA, 33 bp, Homo sapien
ctattaggtaactgaagctttaggtgcattatt

SEQ ID NO: 599161 - DNA, 33 bp, Homo sapien
tttgcgtcatcttgtcacatttgatcatccaat

SEQ ID NO: 599162 - DNA, 33 bp, Homo sapien
tttgcgtcatcttgtcgcatttgatcatccaat

SEQ ID NO: 599163 - DNA, 33 bp, Homo sapien
gtgcgcggacacaagcactggcggaccgtggcc

SEQ ID NO: 599164 - DNA, 33 bp, Homo sapien
gtgcgcggacacaagctctggcggaccgtggcc

SEQ ID NO: 599165 - DNA, 33 bp, Homo sapien
acatcctgaacaactgcattaatggcaaatcaa

SEQ ID NO: 599166 - DNA, 33 bp, Homo sapien
acatcctgaacaactgtattaatggcaaatcaa

SEQ ID NO: 599167 - DNA, 33 bp, Homo sapien
ggctttcatcactttgaattaccttcatcatga

SEQ ID NO: 599168 - DNA, 33 bp, Homo sapien
ggctttcatcactttgcattaccttcatcatga

SEQ ID NO: 599169 - DNA, 33 bp, Homo sapien
ttgttttgatccaaggacatataccacctcacc

SEQ ID NO: 599170 - DNA, 33 bp, Homo sapien
ttgttttgatccaagggcatataccacctcacc

SEQ ID NO: 599171 - DNA, 33 bp, Homo sapien
ccttctgagaggtgtcacttctacccacagcct

SEQ ID NO: 599172 - DNA, 33 bp, Homo sapien
ccttctgagaggtgtcgcttctacccacagcct

SEQ ID NO: 599173 - DNA, 33 bp, Homo sapien
ttctaagtgtcagaccaaacacctaggccattg

SEQ ID NO: 599174 - DNA, 33 bp, Homo sapien
ttctaagtgtcagaccgaacacctaggccattg

SEQ ID NO: 599175 - DNA, 33 bp, Homo sapien
aggcatatgctgtctgaaatacccaaggagtct

SEQ ID NO: 599176 - DNA, 33 bp, Homo sapien
aggcatatgctgtctgcaatacccaaggagtct

SEQ ID NO: 599177 - DNA, 33 bp, Homo sapien
tgcactcggccaattcacaatgtttaatccttc

SEQ ID NO: 599178 - DNA, 33 bp, Homo sapien
tgcactcggccaattcgcaatgtttaatccttc

SEQ ID NO: 599179 - DNA, 33 bp, Homo sapien
atacagctattctaacaattttaccagaacacc

SEQ ID NO: 599180 - DNA, 33 bp, Homo sapien
atacagctattctaacgattttaccagaacacc

SEQ ID NO: 599181 - DNA, 33 bp, Homo sapien
gtgctgaggacagtagaaaagaacgtaggaagt

SEQ ID NO: 599182 - DNA, 33 bp, Homo sapien
gtgctgaggacagtaggaaagaacgtaggaagt

SEQ ID NO: 599183 - DNA, 33 bp, Homo sapien
gatgggactaggaccacgtagaagcttggcctc

SEQ ID NO: 599184 - DNA, 33 bp, Homo sapien
gatgggactaggaccaggtagaagcttggcctc

SEQ ID NO: 599185 - DNA, 33 bp, Homo sapien
ccttaattgtagatgactacgttttgagaataa

SEQ ID NO: 599186 - DNA, 33 bp, Homo sapien
ccttaattgtagatgattacgttttgagaataa

SEQ ID NO: 599187 - DNA, 33 bp, Homo sapien
tacaattaagggttaaaaaataacagtgcaaca

SEQ ID NO: 599188 - DNA, 33 bp, Homo sapien
tacaattaagggttaacaaataacagtgcaaca

SEQ ID NO: 599189 - DNA, 33 bp, Homo sapien
gcctcagaaggaaccacgcctgaccaatggtgg

SEQ ID NO: 599190 - DNA, 33 bp, Homo sapien
gcctcagaaggaaccatgcctgaccaatggtgg

SEQ ID NO: 599191 - DNA, 33 bp, Homo sapien
tgtgtgaaattgtcctaaagaatgcatttctgg

SEQ ID NO: 599192 - DNA, 33 bp, Homo sapien
tgtgtgaaattgtcctgaagaatgcatttctgg

SEQ ID NO: 599193 - DNA, 33 bp, Homo sapien
agcacaacactacctcaagggaactggtctaag

SEQ ID NO: 599194 - DNA, 33 bp, Homo sapien
agcacaacactacctcgagggaactggtctaag

SEQ ID NO: 599195 - DNA, 33 bp, Homo sapien
catctcctgcgtggggaacgtttgaggcactga

SEQ ID NO: 599196 - DNA, 33 bp, Homo sapien
catctcctgcgtgggggacgtttgaggcactga

SEQ ID NO: 599197 - DNA, 33 bp, Homo sapien
gtaacattaaccctgaactggcctttttccctc

SEQ ID NO: 599198 - DNA, 33 bp, Homo sapien
gtaacattaaccctgagctggcctttttccctc

SEQ ID NO: 599199 - DNA, 33 bp, Homo sapien
caacactgaataccagcaatcacccagaaagcc

SEQ ID NO: 599200 - DNA, 33 bp, Homo sapien
caacactgaataccaggaatcacccagaaagcc

SEQ ID NO: 599201 - DNA, 33 bp, Homo sapien
cctcacattctagagcaccatccccacaaatga

SEQ ID NO: 599202 - DNA, 33 bp, Homo sapien
cctcacattctagagcgccatccccacaaatga

SEQ ID NO: 599203 - DNA, 33 bp, Homo sapien
ccccaaatggatggtcaaaatccactgttctcc

SEQ ID NO: 599204 - DNA, 33 bp, Homo sapien
ccccaaatggatggtcgaaatccactgttctcc

SEQ ID NO: 599205 - DNA, 33 bp, Homo sapien
gaccttatttacggaacgatttacagaaagaca

SEQ ID NO: 599206 - DNA, 33 bp, Homo sapien
gaccttatttacggaatgatttacagaaagaca

SEQ ID NO: 599207 - DNA, 33 bp, Homo sapien
cagtgagtgtgtaagacgccaggaatcctagta

SEQ ID NO: 599208 - DNA, 33 bp, Homo sapien
cagtgagtgtgtaagaggccaggaatcctagta

SEQ ID NO: 599209 - DNA, 33 bp, Homo sapien
cagaaatgttgaaaaaactgtacagtaagcaac

SEQ ID NO: 599210 - DNA, 33 bp, Homo sapien
cagaaatgttgaaaaagctgtacagtaagcaac

SEQ ID NO: 599211 - DNA, 33 bp, Homo sapien
aacacctcagagagacaaaagaatcttgaataa

SEQ ID NO: 599212 - DNA, 33 bp, Homo sapien
aacacctcagagagaccaaagaatcttgaataa

SEQ ID NO: 599213 - DNA, 33 bp, Homo sapien
catccagttttccacactggttacttactacca

SEQ ID NO: 599214 - DNA, 33 bp, Homo sapien
catccagttttccacattggttacttactacca

SEQ ID NO: 599215 - DNA, 33 bp, Homo sapien
atactcaatatctaaaaccaggtcagtcatggg

SEQ ID NO: 599216 - DNA, 33 bp, Homo sapien
atactcaatatctaaacccaggtcagtcatggg

SEQ ID NO: 599217 - DNA, 33 bp, Homo sapien
taaatcttaaattaccacgcttttctcatatgt

SEQ ID NO: 599218 - DNA, 33 bp, Homo sapien
taaatcttaaattacctcgcttttctcatatgt

SEQ ID NO: 599219 - DNA, 33 bp, Homo sapien
tacacagataccacctaacttttcatgtttacc

SEQ ID NO: 599220 - DNA, 33 bp, Homo sapien
tacacagataccaccttacttttcatgtttacc

SEQ ID NO: 599221 - DNA, 33 bp, Homo sapien
tagaaggccaaagacacaccgaaagaacaaacc

SEQ ID NO: 599222 - DNA, 33 bp, Homo sapien
tagaaggccaaagacataccgaaagaacaaacc

SEQ ID NO: 599223 - DNA, 33 bp, Homo sapien
cacaggtggacatgagacctcaggtacataccc

SEQ ID NO: 599224 - DNA, 33 bp, Homo sapien
cacaggtggacatgaggcctcaggtacataccc

SEQ ID NO: 599225 - DNA, 33 bp, Homo sapien
gttggctatccagtcccaagttgacacccaggc

SEQ ID NO: 599226 - DNA, 33 bp, Homo sapien
gttggctatccagtcctaagttgacacccaggc

SEQ ID NO: 599227 - DNA, 33 bp, Homo sapien
gtgtttcttggtgactaaggacttcctgggacc

SEQ ID NO: 599228 - DNA, 33 bp, Homo sapien
gtgtttcttggtgactgaggacttcctgggacc

SEQ ID NO: 599229 - DNA, 33 bp, Homo sapien
tgtggtgagccatgaacgcgtcaatgtgtggaa

SEQ ID NO: 599230 - DNA, 33 bp, Homo sapien
tgtggtgagccatgaatgcgtcaatgtgtggaa

SEQ ID NO: 599231 - DNA, 33 bp, Homo sapien
ttaatttccttttgaaatgttcactgcttgttt

SEQ ID NO: 599232 - DNA, 33 bp, Homo sapien
ttaatttccttttgaattgttcactgcttgttt

SEQ ID NO: 599233 - DNA, 33 bp, Homo sapien
tgcacatagaaacgaaaagctttggacaggagc

SEQ ID NO: 599234 - DNA, 33 bp, Homo sapien
tgcacatagaaacgaagagctttggacaggagc

SEQ ID NO: 599235 - DNA, 33 bp, Homo sapien
actcccaaccctggctcaacaatgtgaaactta

SEQ ID NO: 599236 - DNA, 33 bp, Homo sapien
actcccaaccctggcttaacaatgtgaaactta

SEQ ID NO: 599237 - DNA, 33 bp, Homo sapien
tagggcagagtagtgacgtcaaagctccttaca

SEQ ID NO: 599238 - DNA, 33 bp, Homo sapien
tagggcagagtagtgatgtcaaagctccttaca

SEQ ID NO: 599239 - DNA, 33 bp, Homo sapien
acactaagtttgacaactatttgtacaaaggga

SEQ ID NO: 599240 - DNA, 33 bp, Homo sapien
acactaagtttgacaattatttgtacaaaggga

SEQ ID NO: 599241 - DNA, 33 bp, Homo sapien
ggaggggtaggggacaggatctactgaggcacc

SEQ ID NO: 599242 - DNA, 33 bp, Homo sapien
ggaggggtaggggacatgatctactgaggcacc

SEQ ID NO: 599243 - DNA, 33 bp, Homo sapien
ttagccaattctttcacaatgctataatcttta

SEQ ID NO: 599244 - DNA, 33 bp, Homo sapien
ttagccaattctttcataatgctataatcttta

SEQ ID NO: 599245 - DNA, 33 bp, Homo sapien
caaggagacacccttcaaattccctgaaaagcc

SEQ ID NO: 599246 - DNA, 33 bp, Homo sapien
caaggagacacccttcgaattccctgaaaagcc

SEQ ID NO: 599247 - DNA, 33 bp, Homo sapien
cacagtgaagaaacagccacttttggtcagcca

SEQ ID NO: 599248 - DNA, 33 bp, Homo sapien
cacagtgaagaaacagtcacttttggtcagcca

SEQ ID NO: 599249 - DNA, 33 bp, Homo sapien
taggttacctccttcaacactgaccacccccac

SEQ ID NO: 599250 - DNA, 33 bp, Homo sapien
taggttacctccttcatcactgaccacccccac

SEQ ID NO: 599251 - DNA, 33 bp, Homo sapien
tgggacaaagagccgcaaggtggtgctattgtc

SEQ ID NO: 599252 - DNA, 33 bp, Homo sapien
tgggacaaagagccgcgaggtggtgctattgtc

SEQ ID NO: 599253 - DNA, 33 bp, Homo sapien
ataaaaacgaggccaaatatacagtcctccttg

SEQ ID NO: 599254 - DNA, 33 bp, Homo sapien
ataaaaacgaggccaactatacagtcctccttg

SEQ ID NO: 599255 - DNA, 33 bp, Homo sapien
attttggtatcagcgggagactgtggaaccaat

SEQ ID NO: 599256 - DNA, 33 bp, Homo sapien
attttggtatcagcggtagactgtggaaccaat

SEQ ID NO: 599257 - DNA, 33 bp, Homo sapien
cgttaatatgactgagcagctcagcttcaaaat

SEQ ID NO: 599258 - DNA, 33 bp, Homo sapien
cgttaatatgactgagtagctcagcttcaaaat

SEQ ID NO: 599259 - DNA, 33 bp, Homo sapien
gatgataaataaaaccacggaatttctatcaat

SEQ ID NO: 599260 - DNA, 33 bp, Homo sapien
gatgataaataaaaccgcggaatttctatcaat

SEQ ID NO: 599261 - DNA, 33 bp, Homo sapien
gcaggacagttccccacgcaagaagcgtctttt

SEQ ID NO: 599262 - DNA, 33 bp, Homo sapien
gcaggacagttccccaggcaagaagcgtctttt

SEQ ID NO: 599263 - DNA, 33 bp, Homo sapien
actcatagagacagaaagcagattaatggcagt

SEQ ID NO: 599264 - DNA, 33 bp, Homo sapien
actcatagagacagaacgcagattaatggcagt

SEQ ID NO: 599265 - DNA, 33 bp, Homo sapien
agtgtgcagttatgaccggagtgcagtgagcac

SEQ ID NO: 599266 - DNA, 33 bp, Homo sapien
agtgtgcagttatgactggagtgcagtgagcac

SEQ ID NO: 599267 - DNA, 33 bp, Homo sapien
gtgtaatatgtgtccccgagatgtttttgcctg

SEQ ID NO: 599268 - DNA, 33 bp, Homo sapien
gtgtaatatgtgtccctgagatgtttttgcctg

SEQ ID NO: 599269 - DNA, 33 bp, Homo sapien
tgctttggggggcaccaagttgttgccatgttc

SEQ ID NO: 599270 - DNA, 33 bp, Homo sapien
tgctttggggggcaccgagttgttgccatgttc

SEQ ID NO: 599271 - DNA, 33 bp, Homo sapien
ggagtgtgtttcctccactgcaaggtcagcccc

SEQ ID NO: 599272 - DNA, 33 bp, Homo sapien
ggagtgtgtttcctccgctgcaaggtcagcccc

SEQ ID NO: 599273 - DNA, 33 bp, Homo sapien
ctagatcttggcaacacgaggtttgaatcctga

SEQ ID NO: 599274 - DNA, 33 bp, Homo sapien
ctagatcttggcaacatgaggtttgaatcctga

SEQ ID NO: 599275 - DNA, 33 bp, Homo sapien
gcttagcaaaggcagacgtttcctgtcttatct

SEQ ID NO: 599276 - DNA, 33 bp, Homo sapien
gcttagcaaaggcagatgtttcctgtcttatct

SEQ ID NO: 599277 - DNA, 33 bp, Homo sapien
gatgaggaagatacacaaagacttggagcccac

SEQ ID NO: 599278 - DNA, 33 bp, Homo sapien
gatgaggaagatacacgaagacttggagcccac

SEQ ID NO: 599279 - DNA, 33 bp, Homo sapien
atgaacccacatggacgattatccctcagagtc

SEQ ID NO: 599280 - DNA, 33 bp, Homo sapien
atgaacccacatggactattatccctcagagtc

SEQ ID NO: 599281 - DNA, 33 bp, Homo sapien
gaggcagatgctgataccacccatttcacagat

SEQ ID NO: 599282 - DNA, 33 bp, Homo sapien
gaggcagatgctgatatcacccatttcacagat

SEQ ID NO: 599283 - DNA, 33 bp, Homo sapien
cagcttctgctgtgagacaaggtattcattaga

SEQ ID NO: 599284 - DNA, 33 bp, Homo sapien
cagcttctgctgtgaggcaaggtattcattaga

SEQ ID NO: 599285 - DNA, 33 bp, Homo sapien
ccacaccttgcacccagtatcacagccctgatt

SEQ ID NO: 599286 - DNA, 33 bp, Homo sapien
ccacaccttgcacccattatcacagccctgatt

SEQ ID NO: 599287 - DNA, 33 bp, Homo sapien
aggactcagtgatacaacacagaacaaacagtc

SEQ ID NO: 599288 - DNA, 33 bp, Homo sapien
aggactcagtgatacagcacagaacaaacagtc

SEQ ID NO: 599289 - DNA, 33 bp, Homo sapien
gatcagatgaactaacccatcaaatctccaaac

SEQ ID NO: 599290 - DNA, 33 bp, Homo sapien
gatcagatgaactaactcatcaaatctccaaac

SEQ ID NO: 599291 - DNA, 33 bp, Homo sapien
tggaagctaaacccacactcttaactgcacctc

SEQ ID NO: 599292 - DNA, 33 bp, Homo sapien
tggaagctaaacccacgctcttaactgcacctc

SEQ ID NO: 599293 - DNA, 33 bp, Homo sapien
cttctcgtgtgccagactcagctaacagatggc

SEQ ID NO: 599294 - DNA, 33 bp, Homo sapien
cttctcgtgtgccagattcagctaacagatggc

SEQ ID NO: 599295 - DNA, 33 bp, Homo sapien
ttgcctcacaacatcacgcgaatacaatccccg

SEQ ID NO: 599296 - DNA, 33 bp, Homo sapien
ttgcctcacaacatcaggcgaatacaatccccg

SEQ ID NO: 599297 - DNA, 33 bp, Homo sapien
atgtcaccttccctgacgatcctatttaaaatt

SEQ ID NO: 599298 - DNA, 33 bp, Homo sapien
atgtcaccttccctgatgatcctatttaaaatt

SEQ ID NO: 599299 - DNA, 33 bp, Homo sapien
tctccttaccactaacacttatgactccatgat

SEQ ID NO: 599300 - DNA, 33 bp, Homo sapien
tctccttaccactaacgcttatgactccatgat

SEQ ID NO: 599301 - DNA, 33 bp, Homo sapien
tcttcagatttgacaccaaaatgtacagccttg

SEQ ID NO: 599302 - DNA, 33 bp, Homo sapien
tcttcagatttgacactaaaatgtacagccttg

SEQ ID NO: 599303 - DNA, 33 bp, Homo sapien
gctctgggtggtaaccaagtgacactggggatt

SEQ ID NO: 599304 - DNA, 33 bp, Homo sapien
gctctgggtggtaaccgagtgacactggggatt

SEQ ID NO: 599305 - DNA, 33 bp, Homo sapien
tcacaggcactctaccactctgttcccagcctt

SEQ ID NO: 599306 - DNA, 33 bp, Homo sapien
tcacaggcactctaccgctctgttcccagcctt

SEQ ID NO: 599307 - DNA, 33 bp, Homo sapien
gaggacctggaaaccaactggaagagtcttagg

SEQ ID NO: 599308 - DNA, 33 bp, Homo sapien
gaggacctggaaaccagctggaagagtcttagg

SEQ ID NO: 599309 - DNA, 33 bp, Homo sapien
aagaacccagcggagacaggtctgatgagacac

SEQ ID NO: 599310 - DNA, 33 bp, Homo sapien
aagaacccagcggagataggtctgatgagacac

SEQ ID NO: 599311 - DNA, 33 bp, Homo sapien
ttgtgcacactaggataactttaacaggtatgt

SEQ ID NO: 599312 - DNA, 33 bp, Homo sapien
ttgtgcacactaggatgactttaacaggtatgt

SEQ ID NO: 599313 - DNA, 33 bp, Homo sapien
ccagcggaacacccccacggtgctgcgacctag

SEQ ID NO: 599314 - DNA, 33 bp, Homo sapien
ccagcggaacacccccccggtgctgcgacctag

SEQ ID NO: 599315 - DNA, 33 bp, Homo sapien
ccaggttgtctttttaccgttgaattgtaagag

SEQ ID NO: 599316 - DNA, 33 bp, Homo sapien
ccaggttgtctttttatcgttgaattgtaagag

SEQ ID NO: 599317 - DNA, 33 bp, Homo sapien
acaattccaccagcaacgtccaaagcttccaat

SEQ ID NO: 599318 - DNA, 33 bp, Homo sapien
acaattccaccagcaatgtccaaagcttccaat

SEQ ID NO: 599319 - DNA, 33 bp, Homo sapien
aaaaaaggtccacccccaacattggaggtcata

SEQ ID NO: 599320 - DNA, 33 bp, Homo sapien
aaaaaaggtccacccctaacattggaggtcata

SEQ ID NO: 599321 - DNA, 33 bp, Homo sapien
caatgggatgctcgatcatatccaagagattgg

SEQ ID NO: 599322 - DNA, 33 bp, Homo sapien
caatgggatgctcgattatatccaagagattgg

SEQ ID NO: 599323 - DNA, 33 bp, Homo sapien
tttgtgaactcactccagctaacagttgacatg

SEQ ID NO: 599324 - DNA, 33 bp, Homo sapien
tttgtgaactcactccggctaacagttgacatg

SEQ ID NO: 599325 - DNA, 33 bp, Homo sapien
agtgatttgcaggggcactgtggagtatttggg

SEQ ID NO: 599326 - DNA, 33 bp, Homo sapien
agtgatttgcaggggcgctgtggagtatttggg

SEQ ID NO: 599327 - DNA, 33 bp, Homo sapien
ttgcacgaaggtgctacattggccggcagctgc

SEQ ID NO: 599328 - DNA, 33 bp, Homo sapien
ttgcacgaaggtgctatattggccggcagctgc

SEQ ID NO: 599329 - DNA, 33 bp, Homo sapien
tctgtttcaggtactacgctagtctcttcccac

SEQ ID NO: 599330 - DNA, 33 bp, Homo sapien
tctgtttcaggtactatgctagtctcttcccac

SEQ ID NO: 599331 - DNA, 33 bp, Homo sapien
ctgcggtttcaaaagacagcaagtagggtttct

SEQ ID NO: 599332 - DNA, 33 bp, Homo sapien
ctgcggtttcaaaagatagcaagtagggtttct

SEQ ID NO: 599333 - DNA, 33 bp, Homo sapien
aagctgggagtaataagagagctggcctcatga

SEQ ID NO: 599334 - DNA, 33 bp, Homo sapien
aagctgggagtaataatagagctggcctcatga

SEQ ID NO: 599335 - DNA, 33 bp, Homo sapien
gcaggcgggtcccccaaaggataagattatgta

SEQ ID NO: 599336 - DNA, 33 bp, Homo sapien
gcaggcgggtcccccagaggataagattatgta

SEQ ID NO: 599337 - DNA, 33 bp, Homo sapien
aaaatggactcgtacaccaggcattattacttt

SEQ ID NO: 599338 - DNA, 33 bp, Homo sapien
aaaatggactcgtacagcaggcattattacttt

SEQ ID NO: 599339 - DNA, 33 bp, Homo sapien
tgaataaaatgctgtaaaaatatcagttcaagt

SEQ ID NO: 599340 - DNA, 33 bp, Homo sapien
tgaataaaatgctgtacaaatatcagttcaagt

SEQ ID NO: 599341 - DNA, 33 bp, Homo sapien
ttacaggcacacggtaagtacattccctccatc

SEQ ID NO: 599342 - DNA, 33 bp, Homo sapien
ttacaggcacacggtaggtacattccctccatc

SEQ ID NO: 599343 - DNA, 33 bp, Homo sapien
ttgaatttgagtctgcacactgtggactaccaa

SEQ ID NO: 599344 - DNA, 33 bp, Homo sapien
ttgaatttgagtctgcgcactgtggactaccaa

SEQ ID NO: 599345 - DNA, 33 bp, Homo sapien
tggtgcatccaggtgagaactgctggcttcaag

SEQ ID NO: 599346 - DNA, 33 bp, Homo sapien
tggtgcatccaggtgataactgctggcttcaag

SEQ ID NO: 599347 - DNA, 33 bp, Homo sapien
acatgcctaaagagtcacctttctgcaaacagc

SEQ ID NO: 599348 - DNA, 33 bp, Homo sapien
acatgcctaaagagtcgcctttctgcaaacagc

SEQ ID NO: 599349 - DNA, 33 bp, Homo sapien
gccccaactccatcccaaaagatgcaaggaagc

SEQ ID NO: 599350 - DNA, 33 bp, Homo sapien
gccccaactccatcccgaaagatgcaaggaagc

SEQ ID NO: 599351 - DNA, 33 bp, Homo sapien
tggggagggtctcctcactggttcccgatgccc

SEQ ID NO: 599352 - DNA, 33 bp, Homo sapien
tggggagggtctcctcgctggttcccgatgccc

SEQ ID NO: 599353 - DNA, 33 bp, Homo sapien
tcccattcttaccctccatgcagtgacttattt

SEQ ID NO: 599354 - DNA, 33 bp, Homo sapien
tcccattcttaccctctatgcagtgacttattt

SEQ ID NO: 599355 - DNA, 33 bp, Homo sapien
tgcttgagaggggaaactgccggtatgaaaaac

SEQ ID NO: 599356 - DNA, 33 bp, Homo sapien
tgcttgagaggggaaattgccggtatgaaaaac

SEQ ID NO: 599357 - DNA, 33 bp, Homo sapien
tgcccctcaacccccaaatccatcatccgtatt

SEQ ID NO: 599358 - DNA, 33 bp, Homo sapien
tgcccctcaacccccagatccatcatccgtatt

SEQ ID NO: 599359 - DNA, 33 bp, Homo sapien
tgtggtttagactgccaagtgcaacaagtttgc

SEQ ID NO: 599360 - DNA, 33 bp, Homo sapien
tgtggtttagactgccgagtgcaacaagtttgc

SEQ ID NO: 599361 - DNA, 33 bp, Homo sapien
ccctgcctcagctcaccatgtggttgacctctg

SEQ ID NO: 599362 - DNA, 33 bp, Homo sapien
ccctgcctcagctcactatgtggttgacctctg

SEQ ID NO: 599363 - DNA, 33 bp, Homo sapien
cagtacacactccgtaagaaaatgagctctgct

SEQ ID NO: 599364 - DNA, 33 bp, Homo sapien
cagtacacactccgtacgaaaatgagctctgct

SEQ ID NO: 599365 - DNA, 33 bp, Homo sapien
ctttgaagccctccaaatgcctcctcagggcct

SEQ ID NO: 599366 - DNA, 33 bp, Homo sapien
ctttgaagccctccaagtgcctcctcagggcct

SEQ ID NO: 599367 - DNA, 33 bp, Homo sapien
ggcggactttacccccaaacgtgaaatttgata

SEQ ID NO: 599368 - DNA, 33 bp, Homo sapien
ggcggactttaccccccaacgtgaaatttgata

SEQ ID NO: 599369 - DNA, 33 bp, Homo sapien
gttctgccgaaataaaccacagtttcactcctg

SEQ ID NO: 599370 - DNA, 33 bp, Homo sapien
gttctgccgaaataaatcacagtttcactcctg

SEQ ID NO: 599371 - DNA, 33 bp, Homo sapien
gtagcaaaaggagaaaaggctctgcggctggcc

SEQ ID NO: 599372 - DNA, 33 bp, Homo sapien
gtagcaaaaggagaaatggctctgcggctggcc

SEQ ID NO: 599373 - DNA, 33 bp, Homo sapien
catggaatgtacatgacgcagtatagccaccag

SEQ ID NO: 599374 - DNA, 33 bp, Homo sapien
catggaatgtacatgatgcagtatagccaccag

SEQ ID NO: 599375 - DNA, 33 bp, Homo sapien
tagaggccttgagcaaatgagtttaccactcag

SEQ ID NO: 599376 - DNA, 33 bp, Homo sapien
tagaggccttgagcaagtgagtttaccactcag

SEQ ID NO: 599377 - DNA, 33 bp, Homo sapien
atcatctcatttgggccctgtcctcccaccggg

SEQ ID NO: 599378 - DNA, 33 bp, Homo sapien
atcatctcatttgggctctgtcctcccaccggg

SEQ ID NO: 599379 - DNA, 33 bp, Homo sapien
gcacagtgcctgacaccgagaaatggcttcaca

SEQ ID NO: 599380 - DNA, 33 bp, Homo sapien
gcacagtgcctgacactgagaaatggcttcaca

SEQ ID NO: 599381 - DNA, 33 bp, Homo sapien
ccgccatctcacagatcaggaaaacggaggccc

SEQ ID NO: 599382 - DNA, 33 bp, Homo sapien
ccgccatctcacagatgaggaaaacggaggccc

SEQ ID NO: 599383 - DNA, 33 bp, Homo sapien
agctttcaatcaaccaacccttcttactgcact

SEQ ID NO: 599384 - DNA, 33 bp, Homo sapien
agctttcaatcaaccatcccttcttactgcact

SEQ ID NO: 599385 - DNA, 33 bp, Homo sapien
tggggcgctgagaatcaatgaaaccacaggcct

SEQ ID NO: 599386 - DNA, 33 bp, Homo sapien
tggggcgctgagaatcgatgaaaccacaggcct

SEQ ID NO: 599387 - DNA, 33 bp, Homo sapien
tgagcagcagctaaacagtgagacagggattca

SEQ ID NO: 599388 - DNA, 33 bp, Homo sapien
tgagcagcagctaaacggtgagacagggattca

SEQ ID NO: 599389 - DNA, 33 bp, Homo sapien
tggacagtagaagtgacgatactgccctcatga

SEQ ID NO: 599390 - DNA, 33 bp, Homo sapien
tggacagtagaagtgatgatactgccctcatga

SEQ ID NO: 599391 - DNA, 33 bp, Homo sapien
ggagtgaggagccacacaggcccaccgctggtt

SEQ ID NO: 599392 - DNA, 33 bp, Homo sapien
ggagtgaggagccacataggcccaccgctggtt

SEQ ID NO: 599393 - DNA, 33 bp, Homo sapien
gaccagctaaccaggaataattgcagagagcca

SEQ ID NO: 599394 - DNA, 33 bp, Homo sapien
gaccagctaaccaggagtaattgcagagagcca

SEQ ID NO: 599395 - DNA, 33 bp, Homo sapien
ctcagccttgtcacaactgacactttggccagg

SEQ ID NO: 599396 - DNA, 33 bp, Homo sapien
ctcagccttgtcacaattgacactttggccagg

SEQ ID NO: 599397 - DNA, 33 bp, Homo sapien
ctgaggcacttagcgtcaaagaggataatatct

SEQ ID NO: 599398 - DNA, 33 bp, Homo sapien
ctgaggcacttagcgtgaaagaggataatatct

SEQ ID NO: 599399 - DNA, 33 bp, Homo sapien
gagctgggtcttaacacctgagtaggacaagag

SEQ ID NO: 599400 - DNA, 33 bp, Homo sapien
gagctgggtcttaacatctgagtaggacaagag

SEQ ID NO: 599401 - DNA, 33 bp, Homo sapien
ctgtttaagccattcaaaagtctctggtttttt

SEQ ID NO: 599402 - DNA, 33 bp, Homo sapien
ctgtttaagccattcagaagtctctggtttttt

SEQ ID NO: 599403 - DNA, 33 bp, Homo sapien
cagtgcctcccttctaagactgttgtgaggata

SEQ ID NO: 599404 - DNA, 33 bp, Homo sapien
cagtgcctcccttctaggactgttgtgaggata

SEQ ID NO: 599405 - DNA, 33 bp, Homo sapien
cagcttggtaaattcaatagaatgtggaaaagg

SEQ ID NO: 599406 - DNA, 33 bp, Homo sapien
cagcttggtaaattcactagaatgtggaaaagg

SEQ ID NO: 599407 - DNA, 33 bp, Homo sapien
agaacagaagtgacgccatgtaagtcctgtggc

SEQ ID NO: 599408 - DNA, 33 bp, Homo sapien
agaacagaagtgacgctatgtaagtcctgtggc

SEQ ID NO: 599409 - DNA, 33 bp, Homo sapien
cctgccaggaaaacaacggctttgaatcggctg

SEQ ID NO: 599410 - DNA, 33 bp, Homo sapien
cctgccaggaaaacaatggctttgaatcggctg

SEQ ID NO: 599411 - DNA, 33 bp, Homo sapien
attgagtcaataccctaaagcctcgctaaaggt

SEQ ID NO: 599412 - DNA, 33 bp, Homo sapien
attgagtcaataccctgaagcctcgctaaaggt

SEQ ID NO: 599413 - DNA, 33 bp, Homo sapien
ctgcagcaaaacacacaagggcgcaaaggtgtc

SEQ ID NO: 599414 - DNA, 33 bp, Homo sapien
ctgcagcaaaacacacgagggcgcaaaggtgtc

SEQ ID NO: 599415 - DNA, 33 bp, Homo sapien
ggttcatcttcatcaccgtcttgtgggtgttgg

SEQ ID NO: 599416 - DNA, 33 bp, Homo sapien
ggttcatcttcatcactgtcttgtgggtgttgg

SEQ ID NO: 599417 - DNA, 33 bp, Homo sapien
acttgctcaatggaagactggcaatattggcct

SEQ ID NO: 599418 - DNA, 33 bp, Homo sapien
acttgctcaatggaaggctggcaatattggcct

SEQ ID NO: 599419 - DNA, 33 bp, Homo sapien
tccccactgtgcagagaagaaaactgaggcaga

SEQ ID NO: 599420 - DNA, 33 bp, Homo sapien
tccccactgtgcagaggagaaaactgaggcaga

SEQ ID NO: 599421 - DNA, 33 bp, Homo sapien
cgtgacctagtgtaaaccatgaatcattcccat

SEQ ID NO: 599422 - DNA, 33 bp, Homo sapien
cgtgacctagtgtaaatcatgaatcattcccat

SEQ ID NO: 599423 - DNA, 33 bp, Homo sapien
agagagagaggagagaagcttagagacaagcaa

SEQ ID NO: 599424 - DNA, 33 bp, Homo sapien
agagagagaggagagacgcttagagacaagcaa

SEQ ID NO: 599425 - DNA, 33 bp, Homo sapien
agataagtcaacgaaacgcaaggccagggaccc

SEQ ID NO: 599426 - DNA, 33 bp, Homo sapien
agataagtcaacgaaatgcaaggccagggaccc

SEQ ID NO: 599427 - DNA, 33 bp, Homo sapien
ctcaaaccatcacttcaaagattttcaatgagc

SEQ ID NO: 599428 - DNA, 33 bp, Homo sapien
ctcaaaccatcacttcgaagattttcaatgagc

SEQ ID NO: 599429 - DNA, 33 bp, Homo sapien
tcttcccataaaacgaatatttaagtgaagtcc

SEQ ID NO: 599430 - DNA, 33 bp, Homo sapien
tcttcccataaaacgagtatttaagtgaagtcc

SEQ ID NO: 599431 - DNA, 33 bp, Homo sapien
tcatgccaactcctaaaagggtgagctgctcaa

SEQ ID NO: 599432 - DNA, 33 bp, Homo sapien
tcatgccaactcctaagagggtgagctgctcaa

SEQ ID NO: 599433 - DNA, 33 bp, Homo sapien
caagcctgaaggcagaactttgccgcagagttg

SEQ ID NO: 599434 - DNA, 33 bp, Homo sapien
caagcctgaaggcagagctttgccgcagagttg

SEQ ID NO: 599435 - DNA, 33 bp, Homo sapien
aggcatgtgatgcatacggttttttcattattg

SEQ ID NO: 599436 - DNA, 33 bp, Homo sapien
aggcatgtgatgcatatggttttttcattattg

SEQ ID NO: 599437 - DNA, 33 bp, Homo sapien
gattcattgagttgccaaaggattgatgtaaca

SEQ ID NO: 599438 - DNA, 33 bp, Homo sapien
gattcattgagttgccgaaggattgatgtaaca

SEQ ID NO: 599439 - DNA, 33 bp, Homo sapien
ttaagagtatcaaccacgatggatttcctgttg

SEQ ID NO: 599440 - DNA, 33 bp, Homo sapien
ttaagagtatcaaccaggatggatttcctgttg

SEQ ID NO: 599441 - DNA, 33 bp, Homo sapien
gtgggggcaaggaaagaaacttaggaagtgaca

SEQ ID NO: 599442 - DNA, 33 bp, Homo sapien
gtgggggcaaggaaaggaacttaggaagtgaca

SEQ ID NO: 599443 - DNA, 33 bp, Homo sapien
gtgtctctttgaaaccagcaggagacaccaagc

SEQ ID NO: 599444 - DNA, 33 bp, Homo sapien
gtgtctctttgaaaccggcaggagacaccaagc

SEQ ID NO: 599445 - DNA, 33 bp, Homo sapien
gcagcctgcacaccacagtggatgactcatctg

SEQ ID NO: 599446 - DNA, 33 bp, Homo sapien
gcagcctgcacaccacggtggatgactcatctg

SEQ ID NO: 599447 - DNA, 33 bp, Homo sapien
atacatcagagcatcaagataggttaattttat

SEQ ID NO: 599448 - DNA, 33 bp, Homo sapien
atacatcagagcatcaggataggttaattttat

SEQ ID NO: 599449 - DNA, 33 bp, Homo sapien
atcctcacacacacaaagcaccatcgtgccaca

SEQ ID NO: 599450 - DNA, 33 bp, Homo sapien
atcctcacacacacaaggcaccatcgtgccaca

SEQ ID NO: 599451 - DNA, 33 bp, Homo sapien
gaccgtcttttcagaaggtccagcaaggcctcg

SEQ ID NO: 599452 - DNA, 33 bp, Homo sapien
gaccgtcttttcagaatgtccagcaaggcctcg

SEQ ID NO: 599453 - DNA, 33 bp, Homo sapien
gcaaaagagttggaagaatatcctgccttaaag

SEQ ID NO: 599454 - DNA, 33 bp, Homo sapien
gcaaaagagttggaagcatatcctgccttaaag

SEQ ID NO: 599455 - DNA, 33 bp, Homo sapien
ctgccttaaagctaataaaacaacctgacttgt

SEQ ID NO: 599456 - DNA, 33 bp, Homo sapien
ctgccttaaagctaatcaaacaacctgacttgt

SEQ ID NO: 599457 - DNA, 33 bp, Homo sapien
catttggcctccaaaccgtccccacaggagacc

SEQ ID NO: 599458 - DNA, 33 bp, Homo sapien
catttggcctccaaactgtccccacaggagacc

SEQ ID NO: 599459 - DNA, 33 bp, Homo sapien
gcaggcttgcttctccagccacttaacagagcc

SEQ ID NO: 599460 - DNA, 33 bp, Homo sapien
gcaggcttgcttctccggccacttaacagagcc

SEQ ID NO: 599461 - DNA, 33 bp, Homo sapien
tgacttctctcctcctcagatagcacattgaac

SEQ ID NO: 599462 - DNA, 33 bp, Homo sapien
tgacttctctcctccttagatagcacattgaac

SEQ ID NO: 599463 - DNA, 33 bp, Homo sapien
ttcatccgacctgaaaccacaaagccagtaaga

SEQ ID NO: 599464 - DNA, 33 bp, Homo sapien
ttcatccgacctgaaatcacaaagccagtaaga

SEQ ID NO: 599465 - DNA, 33 bp, Homo sapien
taaaaattggaactgccgattcctcaaggggaa

SEQ ID NO: 599466 - DNA, 33 bp, Homo sapien
taaaaattggaactgctgattcctcaaggggaa

SEQ ID NO: 599467 - DNA, 33 bp, Homo sapien
gctatacaatgggagtagtgatcaggacatttt

SEQ ID NO: 599468 - DNA, 33 bp, Homo sapien
gctatacaatgggagtggtgatcaggacatttt

SEQ ID NO: 599469 - DNA, 33 bp, Homo sapien
gcattaggttggccgaccacagcatcaacagct

SEQ ID NO: 599470 - DNA, 33 bp, Homo sapien
gcattaggttggccgagcacagcatcaacagct

SEQ ID NO: 599471 - DNA, 33 bp, Homo sapien
aagagatcattttaccagcttaattgagaggca

SEQ ID NO: 599472 - DNA, 33 bp, Homo sapien
aagagatcattttacccgcttaattgagaggca

SEQ ID NO: 599473 - DNA, 33 bp, Homo sapien
ctccgttccagacacaagatgctgaagacatgc

SEQ ID NO: 599474 - DNA, 33 bp, Homo sapien
ctccgttccagacacaggatgctgaagacatgc

SEQ ID NO: 599475 - DNA, 33 bp, Homo sapien
tggccacactcagagaatccaagtgaaagccct

SEQ ID NO: 599476 - DNA, 33 bp, Homo sapien
tggccacactcagagagtccaagtgaaagccct

SEQ ID NO: 599477 - DNA, 33 bp, Homo sapien
ctggctctgtggtcaccgcccccaggaatccac

SEQ ID NO: 599478 - DNA, 33 bp, Homo sapien
ctggctctgtggtcactgcccccaggaatccac

SEQ ID NO: 599479 - DNA, 33 bp, Homo sapien
agatcaaagatgtccgacggaaaggcaagggaa

SEQ ID NO: 599480 - DNA, 33 bp, Homo sapien
agatcaaagatgtccggcggaaaggcaagggaa

SEQ ID NO: 599481 - DNA, 33 bp, Homo sapien
cacagcaacattgtaacgtctacagagtaggaa

SEQ ID NO: 599482 - DNA, 33 bp, Homo sapien
cacagcaacattgtaaggtctacagagtaggaa

SEQ ID NO: 599483 - DNA, 33 bp, Homo sapien
tttctgatagctatgaaaacaccttttgatgat

SEQ ID NO: 599484 - DNA, 33 bp, Homo sapien
tttctgatagctatgagaacaccttttgatgat

SEQ ID NO: 599485 - DNA, 33 bp, Homo sapien
ggtgaaatcatcttatcacaggagccacacttt

SEQ ID NO: 599486 - DNA, 33 bp, Homo sapien
ggtgaaatcatcttattacaggagccacacttt

SEQ ID NO: 599487 - DNA, 33 bp, Homo sapien
tctttggggcacgtgcacagaagtggaatggct

SEQ ID NO: 599488 - DNA, 33 bp, Homo sapien
tctttggggcacgtgcgcagaagtggaatggct

SEQ ID NO: 599489 - DNA, 33 bp, Homo sapien
acagatcccacgtgaacaagtggaagagctgaa

SEQ ID NO: 599490 - DNA, 33 bp, Homo sapien
acagatcccacgtgaataagtggaagagctgaa

SEQ ID NO: 599491 - DNA, 33 bp, Homo sapien
cccttactgagtcttacggttctgcagctgctt

SEQ ID NO: 599492 - DNA, 33 bp, Homo sapien
cccttactgagtcttatggttctgcagctgctt

SEQ ID NO: 599493 - DNA, 33 bp, Homo sapien
tagcttagaggttgcgcagattcttcaattact

SEQ ID NO: 599494 - DNA, 33 bp, Homo sapien
tagcttagaggttgcgtagattcttcaattact

SEQ ID NO: 599495 - DNA, 33 bp, Homo sapien
ttcattcattcttcaaccaatacccattgagtg

SEQ ID NO: 599496 - DNA, 33 bp, Homo sapien
ttcattcattcttcaatcaatacccattgagtg

SEQ ID NO: 599497 - DNA, 33 bp, Homo sapien
agaaaattgcacatcagaggactggcctggcca

SEQ ID NO: 599498 - DNA, 33 bp, Homo sapien
agaaaattgcacatcataggactggcctggcca

SEQ ID NO: 599499 - DNA, 33 bp, Homo sapien
tgaatgaaagatcaaacgaatgaatgagtagtc

SEQ ID NO: 599500 - DNA, 33 bp, Homo sapien
tgaatgaaagatcaaatgaatgaatgagtagtc

SEQ ID NO: 599501 - DNA, 33 bp, Homo sapien; identical to SEQ ID NO: 599499

SEQ ID NO: 599502 - DNA, 33 bp, Homo sapien; identical to SEQ ID NO: 599500

SEQ ID NO: 599503 - DNA, 33 bp, Homo sapien
ggaactctgttagaaacgtagaactcttgaggc

SEQ ID NO: 599504 - DNA, 33 bp, Homo sapien
ggaactctgttagaaatgtagaactcttgaggc

SEQ ID NO: 599505 - DNA, 33 bp, Homo sapien
aaacacccactgtgaaagtcaaagtgtattatt

SEQ ID NO: 599506 - DNA, 33 bp, Homo sapien
aaacacccactgtgaatgtcaaagtgtattatt

SEQ ID NO: 599507 - DNA, 33 bp, Homo sapien
ccactagaagatgtaacgaagttatcaaaagct

SEQ ID NO: 599508 - DNA, 33 bp, Homo sapien
ccactagaagatgtaatgaagttatcaaaagct

SEQ ID NO: 599509 - DNA, 33 bp, Homo sapien
acctgatagattgttacagaaagatgttaggcc

SEQ ID NO: 599510 - DNA, 33 bp, Homo sapien
acctgatagattgttatagaaagatgttaggcc

SEQ ID NO: 599511 - DNA, 33 bp, Homo sapien
agagaacgctggccacggtgccttgatttttct

SEQ ID NO: 599512 - DNA, 33 bp, Homo sapien
agagaacgctggccactgtgccttgatttttct

SEQ ID NO: 599513 - DNA, 33 bp, Homo sapien
cagtcccagggaaatacgagtgaaggaaaagag

SEQ ID NO: 599514 - DNA, 33 bp, Homo sapien
cagtcccagggaaatatgagtgaaggaaaagag

SEQ ID NO: 599515 - DNA, 33 bp, Homo sapien
ctctgaccacctctacacagggaaagctctgca

SEQ ID NO: 599516 - DNA, 33 bp, Homo sapien
ctctgaccacctctacgcagggaaagctctgca

SEQ ID NO: 599517 - DNA, 33 bp, Homo sapien
cagttgctccaaacatcagcaaaaagctgttca

SEQ ID NO: 599518 - DNA, 33 bp, Homo sapien
cagttgctccaaacattagcaaaaagctgttca

SEQ ID NO: 599519 - DNA, 33 bp, Homo sapien
aaatcctactcttgcacaggactgtttcagaga

SEQ ID NO: 599520 - DNA, 33 bp, Homo sapien
aaatcctactcttgcataggactgtttcagaga

SEQ ID NO: 599521 - DNA, 33 bp, Homo sapien
aataacctaatggaacaacaatggatgacagta

SEQ ID NO: 599522 - DNA, 33 bp, Homo sapien
aataacctaatggaacgacaatggatgacagta

SEQ ID NO: 599523 - DNA, 33 bp, Homo sapien
ctttatcccaaacgtgaaatttatcatgattct

SEQ ID NO: 599524 - DNA, 33 bp, Homo sapien
ctttatcccaaacgtggaatttatcatgattct

SEQ ID NO: 599525 - DNA, 33 bp, Homo sapien
cgtcaccacaatacaagttaaacacatttccat

SEQ ID NO: 599526 - DNA, 33 bp, Homo sapien
cgtcaccacaatacaatttaaacacatttccat

SEQ ID NO: 599527 - DNA, 33 bp, Homo sapien
cttgacactcactgctcacatttgcaggcttta

SEQ ID NO: 599528 - DNA, 33 bp, Homo sapien
cttgacactcactgcttacatttgcaggcttta

SEQ ID NO: 599529 - DNA, 33 bp, Homo sapien
caggctttacttaatgccacttaaatctccctg

SEQ ID NO: 599530 - DNA, 33 bp, Homo sapien
caggctttacttaatgtcacttaaatctccctg

SEQ ID NO: 599531 - DNA, 33 bp, Homo sapien
taatggtttgacttaacgtgtgtgttatttttt

SEQ ID NO: 599532 - DNA, 33 bp, Homo sapien
taatggtttgacttaatgtgtgtgttatttttt

SEQ ID NO: 599533 - DNA, 33 bp, Homo sapien
aagcttagagtatgaacttagatttttctcatt

SEQ ID NO: 599534 - DNA, 33 bp, Homo sapien
aagcttagagtatgaatttagatttttctcatt

SEQ ID NO: 599535 - DNA, 33 bp, Homo sapien
ccacgctccatgtgccacatccagcaagctccc

SEQ ID NO: 599536 - DNA, 33 bp, Homo sapien
ccacgctccatgtgccgcatccagcaagctccc

SEQ ID NO: 599537 - DNA, 33 bp, Homo sapien
tcttggtcttcaccagcagagccgccatccaca

SEQ ID NO: 599538 - DNA, 33 bp, Homo sapien
tcttggtcttcaccagtagagccgccatccaca

SEQ ID NO: 599539 - DNA, 33 bp, Homo sapien
tgttaatctcatcaaccgaagtgctgttaaaac

SEQ ID NO: 599540 - DNA, 33 bp, Homo sapien
tgttaatctcatcaactgaagtgctgttaaaac

SEQ ID NO: 599541 - DNA, 33 bp, Homo sapien; identical to SEQ ID NO: 599539

SEQ ID NO: 599542 - DNA, 33 bp, Homo sapien; identical to SEQ ID NO: 599540

SEQ ID NO: 599543 - DNA, 33 bp, Homo sapien
cccagtctatccagtacgtgaggctggagaaga

SEQ ID NO: 599544 - DNA, 33 bp, Homo sapien
cccagtctatccagtatgtgaggctggagaaga

SEQ ID NO: 599545 - DNA, 33 bp, Homo sapien
ggggggccacagggaacaagtcacctgtccttt

SEQ ID NO: 599546 - DNA, 33 bp, Homo sapien
ggggggccacagggaataagtcacctgtccttt

SEQ ID NO: 599547 - DNA, 33 bp, Homo sapien
ccattggtccgtctaccgggccagcagcaggac

SEQ ID NO: 599548 - DNA, 33 bp, Homo sapien
ccattggtccgtctactgggccagcagcaggac

SEQ ID NO: 599549 - DNA, 33 bp, Homo sapien
gaatctgagaccgaaacctctggggcctgcccg

SEQ ID NO: 599550 - DNA, 33 bp, Homo sapien
gaatctgagaccgaaagctctggggcctgcccg

SEQ ID NO: 599551 - DNA, 33 bp, Homo sapien
ttgaatcaccacattcaccaagtggatcatttt

SEQ ID NO: 599552 - DNA, 33 bp, Homo sapien
ttgaatcaccacattcgccaagtggatcatttt

SEQ ID NO: 599553 - DNA, 33 bp, Homo sapien
gccagtatcgaaacgaacctaactacaaacttt

SEQ ID NO: 599554 - DNA, 33 bp, Homo sapien
gccagtatcgaaacgaccctaactacaaacttt

SEQ ID NO: 599555 - DNA, 33 bp, Homo sapien; identical to SEQ ID NO: 599553

SEQ ID NO: 599556 - DNA, 33 bp, Homo sapien; identical to SEQ ID NO: 599554

SEQ ID NO: 599557 - DNA, 33 bp, Homo sapien
gtcctgaggggacccaatgaaggccaggagggg

SEQ ID NO: 599558 - DNA, 33 bp, Homo sapien
gtcctgaggggacccagtgaaggccaggagggg

SEQ ID NO: 599559 - DNA, 33 bp, Homo sapien
ccacctggagcccaacacctagcacccagaggc

SEQ ID NO: 599560 - DNA, 33 bp, Homo sapien
ccacctggagcccaacgcctagcacccagaggc

SEQ ID NO: 599561 - DNA, 33 bp, Homo sapien
ctctgccagcgagcacagctggacgatgagcag

SEQ ID NO: 599562 - DNA, 33 bp, Homo sapien
ctctgccagcgagcacggctggacgatgagcag

SEQ ID NO: 599563 - DNA, 33 bp, Homo sapien; identical to SEQ ID NO: 599561

SEQ ID NO: 599564 - DNA, 33 bp, Homo sapien; identical to SEQ ID NO: 599562

SEQ ID NO: 599565 - DNA, 33 bp, Homo sapien
agttttctcctcttaaagaaatgacgtttacta

SEQ ID NO: 599566 - DNA, 33 bp, Homo sapien
agttttctcctcttaaggaaatgacgtttacta

SEQ ID NO: 599567 - DNA, 33 bp, Homo sapien; identical to SEQ ID NO: 599565

SEQ ID NO: 599568 - DNA, 33 bp, Homo sapien; identical to SEQ ID NO: 599566

SEQ ID NO: 599569 - DNA, 33 bp, Homo sapien
tctgatgcttcagagacggagacagcagcactc

SEQ ID NO: 599570 - DNA, 33 bp, Homo sapien
tctgatgcttcagagatggagacagcagcactc

SEQ ID NO: 599571 - DNA, 33 bp, Homo sapien
acagaacaaagaattaaagtccacaccaaataa

SEQ ID NO: 599572 - DNA, 33 bp, Homo sapien
acagaacaaagaattagagtccacaccaaataa

SEQ ID NO: 599573 - DNA, 33 bp, Homo sapien
atgcaagtccgtcccaatcaagtaacaagggct

SEQ ID NO: 599574 - DNA, 33 bp, Homo sapien
atgcaagtccgtcccagtcaagtaacaagggct

SEQ ID NO: 599575 - DNA, 33 bp, Homo sapien
accttacttttaaagcactgcattcatgtaaat

SEQ ID NO: 599576 - DNA, 33 bp, Homo sapien
accttacttttaaagcgctgcattcatgtaaat

SEQ ID NO: 599577 - DNA, 33 bp, Homo sapien
actgttcagtggaccgaacttcttagcagtttt

SEQ ID NO: 599578 - DNA, 33 bp, Homo sapien
actgttcagtggaccggacttcttagcagtttt

SEQ ID NO: 599579 - DNA, 33 bp, Homo sapien
aaaaatgaaaatgaaaactgaatgtcaactcct

SEQ ID NO: 599580 - DNA, 33 bp, Homo sapien
aaaaatgaaaatgaaacctgaatgtcaactcct

SEQ ID NO: 599581 - DNA, 33 bp, Homo sapien
aaccaagtgctaataactgatgcagtgctaata

SEQ ID NO: 599582 - DNA, 33 bp, Homo sapien
aaccaagtgctaataattgatgcagtgctaata

SEQ ID NO: 599583 - DNA, 33 bp, Homo sapien
tgcccaccaattacaacgggaaacatgaaaata

SEQ ID NO: 599584 - DNA, 33 bp, Homo sapien
tgcccaccaattacaatgggaaacatgaaaata

SEQ ID NO: 599585 - DNA, 33 bp, Homo sapien; identical to SEQ ID NO: 599583

SEQ ID NO: 599586 - DNA, 33 bp, Homo sapien; identical to SEQ ID NO: 599584

SEQ ID NO: 599587 - DNA, 33 bp, Homo sapien
gtcttcataaatcaataaacagacacacatttt

SEQ ID NO: 599588 - DNA, 33 bp, Homo sapien
gtcttcataaatcaatgaacagacacacatttt

SEQ ID NO: 599589 - DNA, 33 bp, Homo sapien
tcacttgaacttcaacaactgaaaatacaaaca

SEQ ID NO: 599590 - DNA, 33 bp, Homo sapien
tcacttgaacttcaacgactgaaaatacaaaca

SEQ ID NO: 599591 - DNA, 33 bp, Homo sapien
gatgcaagatcctgggaaattacaaaaaagata

SEQ ID NO: 599592 - DNA, 33 bp, Homo sapien
gatgcaagatcctggggaattacaaaaaagata

SEQ ID NO: 599593 - DNA, 33 bp, Homo sapien
tctctcaacatgtgccaatttcttcatctgaaa

SEQ ID NO: 599594 - DNA, 33 bp, Homo sapien
tctctcaacatgtgccgatttcttcatctgaaa

SEQ ID NO: 599595 - DNA, 33 bp, Homo sapien
tccagaatctgttacaataactcttcagaactg

SEQ ID NO: 599596 - DNA, 33 bp, Homo sapien
tccagaatctgttacagtaactcttcagaactg

SEQ ID NO: 599597 - DNA, 33 bp, Homo sapien
gccaagttctggggtaaatttgcttgcagcaat

SEQ ID NO: 599598 - DNA, 33 bp, Homo sapien
gccaagttctggggtagatttgcttgcagcaat

SEQ ID NO: 599599 - DNA, 33 bp, Homo sapien
cgaatgctgtgtctaaatattctgccaactcac

SEQ ID NO: 599600 - DNA, 33 bp, Homo sapien
cgaatgctgtgtctaagtattctgccaactcac

SEQ ID NO: 599601 - DNA, 33 bp, Homo sapien
ccatcactgtgatccaaggatgtgatacaatgg

SEQ ID NO: 599602 - DNA, 33 bp, Homo sapien
ccatcactgtgatccagggatgtgatacaatgg

SEQ ID NO: 599603 - DNA, 33 bp, Homo sapien
tgcaaccaaacctacaatatctctgagttatgc

SEQ ID NO: 599604 - DNA, 33 bp, Homo sapien
tgcaaccaaacctacagtatctctgagttatgc

SEQ ID NO: 599605 - DNA, 33 bp, Homo sapien
gtctaagtatgggtcaatcagagtctgtgcatg

SEQ ID NO: 599606 - DNA, 33 bp, Homo sapien
gtctaagtatgggtcagtcagagtctgtgcatg

SEQ ID NO: 599607 - DNA, 33 bp, Homo sapien
gggacatcttccatgcactttctttcctcattg

SEQ ID NO: 599608 - DNA, 33 bp, Homo sapien
gggacatcttccatgcgctttctttcctcattg

SEQ ID NO: 599609 - DNA, 33 bp, Homo sapien
agaagtcaatccctaaataaggaaactaataga

SEQ ID NO: 599610 - DNA, 33 bp, Homo sapien
agaagtcaatccctaagtaaggaaactaataga

SEQ ID NO: 599611 - DNA, 33 bp, Homo sapien
cccacctggcagtggacgaagacggggctgaga

SEQ ID NO: 599612 - DNA, 33 bp, Homo sapien
cccacctggcagtggatgaagacggggctgaga

SEQ ID NO: 599613 - DNA, 33 bp, Homo sapien
aagaggcttaggccaacgtagtggtttagagct

SEQ ID NO: 599614 - DNA, 33 bp, Homo sapien
aagaggcttaggccaatgtagtggtttagagct

SEQ ID NO: 599615 - DNA, 33 bp, Homo sapien
gcttgtcttgagttgacacagtcagcgcctctg

SEQ ID NO: 599616 - DNA, 33 bp, Homo sapien
gcttgtcttgagttgatacagtcagcgcctctg

SEQ ID NO: 599617 - DNA, 33 bp, Homo sapien
catgtactctttctcactctcctccctatcact

SEQ ID NO: 599618 - DNA, 33 bp, Homo sapien
catgtactctttctcagtctcctccctatcact

SEQ ID NO: 599619 - DNA, 33 bp, Homo sapien
cagctgctttcaaggacagcagaattcaaacgg

SEQ ID NO: 599620 - DNA, 33 bp, Homo sapien
cagctgctttcaaggagagcagaattcaaacgg

SEQ ID NO: 599621 - DNA, 33 bp, Homo sapien
taattttcatgattgaagtgttgaatataaatt

SEQ ID NO: 599622 - DNA, 33 bp, Homo sapien
taattttcatgattgaggtgttgaatataaatt

SEQ ID NO: 599623 - DNA, 33 bp, Homo sapien
tggagaggattttaaaatagttctgtggctgta

SEQ ID NO: 599624 - DNA, 33 bp, Homo sapien
tggagaggattttaaagtagttctgtggctgta

SEQ ID NO: 599625 - DNA, 33 bp, Homo sapien
tctagcaaattctcaacagactaggaaccccaa

SEQ ID NO: 599626 - DNA, 33 bp, Homo sapien
tctagcaaattctcaagagactaggaaccccaa

SEQ ID NO: 599627 - DNA, 33 bp, Homo sapien
tcggtaggtcaaggaagctttgcagcctgagtc

SEQ ID NO: 599628 - DNA, 33 bp, Homo sapien
tcggtaggtcaaggaatctttgcagcctgagtc

SEQ ID NO: 599629 - DNA, 33 bp, Homo sapien
tgctcagaaccattaaaccagtgattctcaaag

SEQ ID NO: 599630 - DNA, 33 bp, Homo sapien
tgctcagaaccattaagccagtgattctcaaag

SEQ ID NO: 599631 - DNA, 33 bp, Homo sapien
atccttccagctctaacagtctgaatctctatg

SEQ ID NO: 599632 - DNA, 33 bp, Homo sapien
atccttccagctctaatagtctgaatctctatg

SEQ ID NO: 599633 - DNA, 33 bp, Homo sapien
tcgctatgggagtttacccgagtcactctttct

SEQ ID NO: 599634 - DNA, 33 bp, Homo sapien
tcgctatgggagtttagccgagtcactctttct

SEQ ID NO: 599635 - DNA, 33 bp, Homo sapien
cacccatgaggagtacactagcaaggatgcctc

SEQ ID NO: 599636 - DNA, 33 bp, Homo sapien
cacccatgaggagtacgctagcaaggatgcctc

SEQ ID NO: 599637 - DNA, 33 bp, Homo sapien
catctcactccattcaaaatctcttctgctctc

SEQ ID NO: 599638 - DNA, 33 bp, Homo sapien
catctcactccattcagaatctcttctgctctc

SEQ ID NO: 599639 - DNA, 33 bp, Homo sapien
tgtaaatgacataggaagaaatagaggccaaga

SEQ ID NO: 599640 - DNA, 33 bp, Homo sapien
tgtaaatgacataggaggaaatagaggccaaga

SEQ ID NO: 599641 - DNA, 33 bp, Homo sapien
ctagcatttcctggcagcaaaacatcaggcaag

SEQ ID NO: 599642 - DNA, 33 bp, Homo sapien
ctagcatttcctggcatcaaaacatcaggcaag

SEQ ID NO: 599643 - DNA, 33 bp, Homo sapien
ctttgggatgtaaaaactgccttttcattctgg

SEQ ID NO: 599644 - DNA, 33 bp, Homo sapien
ctttgggatgtaaaaagtgccttttcattctgg

SEQ ID NO: 599645 - DNA, 33 bp, Homo sapien
tctcaattaccaaacaaaatcctaggtttcact

SEQ ID NO: 599646 - DNA, 33 bp, Homo sapien
tctcaattaccaaacagaatcctaggtttcact

SEQ ID NO: 599647 - DNA, 33 bp, Homo sapien
tttgccttcctgaacacgatggtttacttttca

SEQ ID NO: 599648 - DNA, 33 bp, Homo sapien
tttgccttcctgaacatgatggtttacttttca

SEQ ID NO: 599649 - DNA, 33 bp, Homo sapien; identical to SEQ ID NO: 599647

SEQ ID NO: 599650 - DNA, 33 bp, Homo sapien; identical to SEQ ID NO: 599648

SEQ ID NO: 599651 - DNA, 33 bp, Homo sapien
agtatttcacataagcaaatcatacagtatttg

SEQ ID NO: 599652 - DNA, 33 bp, Homo sapien
agtatttcacataagcgaatcatacagtatttg

SEQ ID NO: 599653 - DNA, 33 bp, Homo sapien
ttgctagatgatgtgaaaattctatttcggttt

SEQ ID NO: 599654 - DNA, 33 bp, Homo sapien
ttgctagatgatgtgataattctatttcggttt

SEQ ID NO: 599655 - DNA, 33 bp, Homo sapien
gtaattgccttcttaccgctccctcatagccct

SEQ ID NO: 599656 - DNA, 33 bp, Homo sapien
gtaattgccttcttactgctccctcatagccct

SEQ ID NO: 599657 - DNA, 33 bp, Homo sapien
ctcagaacaaaactcaatctccttaccatgtga

SEQ ID NO: 599658 - DNA, 33 bp, Homo sapien
ctcagaacaaaactcagtctccttaccatgtga

SEQ ID NO: 599659 - DNA, 33 bp, Homo sapien
ttttatttaatacaaaacagtggaatacacaca

SEQ ID NO: 599660 - DNA, 33 bp, Homo sapien
ttttatttaatacaaagcagtggaatacacaca

SEQ ID NO: 599661 - DNA, 33 bp, Homo sapien
tgacttggttggtgacagagtgaaaatggatca

SEQ ID NO: 599662 - DNA, 33 bp, Homo sapien
tgacttggttggtgacggagtgaaaatggatca

SEQ ID NO: 599663 - DNA, 33 bp, Homo sapien
taaactgctttaaataaaaatgagaggaagcaa

SEQ ID NO: 599664 - DNA, 33 bp, Homo sapien
taaactgctttaaatagaaatgagaggaagcaa

SEQ ID NO: 599665 - DNA, 33 bp, Homo sapien
ggcttatagccacactaaaatgctcttccaaat

SEQ ID NO: 599666 - DNA, 33 bp, Homo sapien
ggcttatagccacactgaaatgctcttccaaat

SEQ ID NO: 599667 - DNA, 33 bp, Homo sapien
cctaagtgcataagtacgttcttaagagggaca

SEQ ID NO: 599668 - DNA, 33 bp, Homo sapien
cctaagtgcataagtatgttcttaagagggaca

SEQ ID NO: 599669 - DNA, 33 bp, Homo sapien
atatagagtacctgcaataatgtaaaagccatc

SEQ ID NO: 599670 - DNA, 33 bp, Homo sapien
atatagagtacctgcagtaatgtaaaagccatc

SEQ ID NO: 599671 - DNA, 33 bp, Homo sapien
atggtgagttttctaaatacaagattccttctg

SEQ ID NO: 599672 - DNA, 33 bp, Homo sapien
atggtgagttttctaagtacaagattccttctg

SEQ ID NO: 599673 - DNA, 33 bp, Homo sapien
tctaccagaacagatcaaatacctcactaatta

SEQ ID NO: 599674 - DNA, 33 bp, Homo sapien
tctaccagaacagatccaatacctcactaatta

SEQ ID NO: 599675 - DNA, 33 bp, Homo sapien
tctgttcatctatttcaacatgagcaaaagtgc

SEQ ID NO: 599676 - DNA, 33 bp, Homo sapien
tctgttcatctatttcgacatgagcaaaagtgc

SEQ ID NO: 599677 - DNA, 33 bp, Homo sapien
gtcctaggcccagaaactccttcatcaagccag

SEQ ID NO: 599678 - DNA, 33 bp, Homo sapien
gtcctaggcccagaaattccttcatcaagccag

SEQ ID NO: 599679 - DNA, 33 bp, Homo sapien
cttaaaagtaccatcagacgaataaacaccctc

SEQ ID NO: 599680 - DNA, 33 bp, Homo sapien
cttaaaagtaccatcatacgaataaacaccctc

SEQ ID NO: 599681 - DNA, 33 bp, Homo sapien
ttctgaaagcaaaagagagtggaaaaatatgat

SEQ ID NO: 599682 - DNA, 33 bp, Homo sapien
ttctgaaagcaaaagatagtggaaaaatatgat

SEQ ID NO: 599683 - DNA, 33 bp, Homo sapien
acctaattacctgaaaaacccacattgccagtc

SEQ ID NO: 599684 - DNA, 33 bp, Homo sapien
acctaattacctgaaagacccacattgccagtc

SEQ ID NO: 599685 - DNA, 33 bp, Homo sapien
aatatgtttacagaaacggtgctattcactatt

SEQ ID NO: 599686 - DNA, 33 bp, Homo sapien
aatatgtttacagaaatggtgctattcactatt

SEQ ID NO: 599687 - DNA, 33 bp, Homo sapien
cattataaatgatgggaaaacacacatcctgcc

SEQ ID NO: 599688 - DNA, 33 bp, Homo sapien
cattataaatgatggggaaacacacatcctgcc

SEQ ID NO: 599689 - DNA, 33 bp, Homo sapien
ctttaaatgccacaggaaaatcatcagataaga

SEQ ID NO: 599690 - DNA, 33 bp, Homo sapien
ctttaaatgccacagggaaatcatcagataaga

SEQ ID NO: 599691 - DNA, 33 bp, Homo sapien
tgtgtatgtgagcacaaagtaaaagctgaaggt

SEQ ID NO: 599692 - DNA, 33 bp, Homo sapien
tgtgtatgtgagcacagagtaaaagctgaaggt

SEQ ID NO: 599693 - DNA, 33 bp, Homo sapien
gaagcagctcacaagacgtatggagacgattaa

SEQ ID NO: 599694 - DNA, 33 bp, Homo sapien
gaagcagctcacaagatgtatggagacgattaa

SEQ ID NO: 599695 - DNA, 33 bp, Homo sapien
gcaagattttgtcaccaagctgagcatttactg

SEQ ID NO: 599696 - DNA, 33 bp, Homo sapien
gcaagattttgtcacccagctgagcatttactg

SEQ ID NO: 599697 - DNA, 33 bp, Homo sapien
attaccttgagcacacagtgatttagggcagcc

SEQ ID NO: 599698 - DNA, 33 bp, Homo sapien
attaccttgagcacacggtgatttagggcagcc

SEQ ID NO: 599699 - DNA, 33 bp, Homo sapien
caccacaggtaccaacaaggtgaatggagcaaa

SEQ ID NO: 599700 - DNA, 33 bp, Homo sapien
caccacaggtaccaaccaggtgaatggagcaaa

SEQ ID NO: 599701 - DNA, 33 bp, Homo sapien
atagcctaagagtatacagacccctctcttttc

SEQ ID NO: 599702 - DNA, 33 bp, Homo sapien
atagcctaagagtatatagacccctctcttttc

SEQ ID NO: 599703 - DNA, 33 bp, Homo sapien
ggggaacaagacgaccaccctgacatccacgtg

SEQ ID NO: 599704 - DNA, 33 bp, Homo sapien
ggggaacaagacgaccgccctgacatccacgtg

SEQ ID NO: 599705 - DNA, 33 bp, Homo sapien
tctgcaccctactatagccctgactttacagct

SEQ ID NO: 599706 - DNA, 33 bp, Homo sapien
tctgcaccctactatatccctgactttacagct

SEQ ID NO: 599707 - DNA, 33 bp, Homo sapien
cagacagcgagggaaaaaaaggatgctggagaa

SEQ ID NO: 599708 - DNA, 33 bp, Homo sapien
cagacagcgagggaaacaaaggatgctggagaa

SEQ ID NO: 599709 - DNA, 33 bp, Homo sapien
ccttggggtaagtctcaccttggctttcttgct

SEQ ID NO: 599710 - DNA, 33 bp, Homo sapien
ccttggggtaagtctcgccttggctttcttgct

SEQ ID NO: 599711 - DNA, 33 bp, Homo sapien
taccgtgaattccaaacgtctatggccacctca

SEQ ID NO: 599712 - DNA, 33 bp, Homo sapien
taccgtgaattccaaatgtctatggccacctca

SEQ ID NO: 599713 - DNA, 33 bp, Homo sapien
gccacctcatgggcttaaaacagcagctgacga

SEQ ID NO: 599714 - DNA, 33 bp, Homo sapien
gccacctcatgggcttgaaacagcagctgacga

SEQ ID NO: 599715 - DNA, 33 bp, Homo sapien
cttgctgtgtgtagcccaactgataagggagga

SEQ ID NO: 599716 - DNA, 33 bp, Homo sapien
cttgctgtgtgtagcctaactgataagggagga

SEQ ID NO: 599717 - DNA, 33 bp, Homo sapien
gtcctggtttaaggaccgtcaggaagccacagc

SEQ ID NO: 599718 - DNA, 33 bp, Homo sapien
gtcctggtttaaggactgtcaggaagccacagc

SEQ ID NO: 599719 - DNA, 33 bp, Homo sapien
ttgtggctccaacccactcaactgacacagtgc

SEQ ID NO: 599720 - DNA, 33 bp, Homo sapien
ttgtggctccaacccattcaactgacacagtgc

SEQ ID NO: 599721 - DNA, 33 bp, Homo sapien
atcatttattcattcactaaacaaactgttaag

SEQ ID NO: 599722 - DNA, 33 bp, Homo sapien
atcatttattcattcattaaacaaactgttaag

SEQ ID NO: 599723 - DNA, 33 bp, Homo sapien
cccaagccttgttttccattcctgcaaaatggg

SEQ ID NO: 599724 - DNA, 33 bp, Homo sapien
cccaagccttgttttctattcctgcaaaatggg

SEQ ID NO: 599725 - DNA, 33 bp, Homo sapien
caatggtggtgccaaacgattttcctttaggct

SEQ ID NO: 599726 - DNA, 33 bp, Homo sapien
caatggtggtgccaaatgattttcctttaggct

SEQ ID NO: 599727 - DNA, 33 bp, Homo sapien
aatcagaggttgatccagcctaaggacaggagg

SEQ ID NO: 599728 - DNA, 33 bp, Homo sapien
aatcagaggttgatccggcctaaggacaggagg

SEQ ID NO: 599729 - DNA, 33 bp, Homo sapien
taaccatcagagtaaacgcttgctgaagcctaa

SEQ ID NO: 599730 - DNA, 33 bp, Homo sapien
taaccatcagagtaaatgcttgctgaagcctaa

SEQ ID NO: 599731 - DNA, 33 bp, Homo sapien
caggtcaggctgtatccaggtgcttagcacagt

SEQ ID NO: 599732 - DNA, 33 bp, Homo sapien
caggtcaggctgtatcgaggtgcttagcacagt

SEQ ID NO: 599733 - DNA, 33 bp, Homo sapien
cactttttcctctccccgacacttcactaggac

SEQ ID NO: 599734 - DNA, 33 bp, Homo sapien
cactttttcctctccctgacacttcactaggac

SEQ ID NO: 599735 - DNA, 33 bp, Homo sapien
gaggattaaaatatgaacaggcagacaatactt

SEQ ID NO: 599736 - DNA, 33 bp, Homo sapien
gaggattaaaatatgatcaggcagacaatactt

SEQ ID NO: 599737 - DNA, 33 bp, Homo sapien
tgctgccttgacatgcaatctcatttaaatgcc

SEQ ID NO: 599738 - DNA, 33 bp, Homo sapien
tgctgccttgacatgcgatctcatttaaatgcc

SEQ ID NO: 599739 - DNA, 33 bp, Homo sapien
ctacaaaggcagtgccaactcttccacatgacc

SEQ ID NO: 599740 - DNA, 33 bp, Homo sapien
ctacaaaggcagtgccgactcttccacatgacc

SEQ ID NO: 599741 - DNA, 33 bp, Homo sapien
aggggacgtggttcaccgaactgctgtttccct

SEQ ID NO: 599742 - DNA, 33 bp, Homo sapien
aggggacgtggttcactgaactgctgtttccct

SEQ ID NO: 599743 - DNA, 33 bp, Homo sapien
tgcttgcgattttccccattttgacctggtctt

SEQ ID NO: 599744 - DNA, 33 bp, Homo sapien
tgcttgcgattttccctattttgacctggtctt

SEQ ID NO: 599745 - DNA, 33 bp, Homo sapien
gtggcttcctttgggcccagagcatagaactgg

SEQ ID NO: 599746 - DNA, 33 bp, Homo sapien
gtggcttcctttgggctcagagcatagaactgg

SEQ ID NO: 599747 - DNA, 33 bp, Homo sapien
taacttgagaatggaaaaccaaatatcatacat

SEQ ID NO: 599748 - DNA, 33 bp, Homo sapien
taacttgagaatggaacaccaaatatcatacat

SEQ ID NO: 599749 - DNA, 33 bp, Homo sapien
agttccctgaacaaagcagtggtgatgcccaaa

SEQ ID NO: 599750 - DNA, 33 bp, Homo sapien
agttccctgaacaaagtagtggtgatgcccaaa

SEQ ID NO: 599751 - DNA, 33 bp, Homo sapien
tcagagtaattggctacaagtttaagagaggac

SEQ ID NO: 599752 - DNA, 33 bp, Homo sapien
tcagagtaattggctagaagtttaagagaggac

SEQ ID NO: 599753 - DNA, 33 bp, Homo sapien
ccttgaaattgtgacacgattcttaccaacaga

SEQ ID NO: 599754 - DNA, 33 bp, Homo sapien
ccttgaaattgtgacatgattcttaccaacaga

SEQ ID NO: 599755 - DNA, 33 bp, Homo sapien
cagcaagattctaggacgtataggatgggagct

SEQ ID NO: 599756 - DNA, 33 bp, Homo sapien
cagcaagattctaggatgtataggatgggagct

SEQ ID NO: 599757 - DNA, 33 bp, Homo sapien
aatctccatccagtccccaatttggaaggttgt

SEQ ID NO: 599758 - DNA, 33 bp, Homo sapien
aatctccatccagtcctcaatttggaaggttgt

SEQ ID NO: 599759 - DNA, 33 bp, Homo sapien
ctcctgggccctggaccgatttttcgttaataa

SEQ ID NO: 599760 - DNA, 33 bp, Homo sapien
ctcctgggccctggactgatttttcgttaataa

SEQ ID NO: 599761 - DNA, 33 bp, Homo sapien
gtaatgttcggaactcaaaatagtgacaaggat

SEQ ID NO: 599762 - DNA, 33 bp, Homo sapien
gtaatgttcggaactcgaaatagtgacaaggat

SEQ ID NO: 599763 - DNA, 33 bp, Homo sapien
gcattcttcacctaagaaaatagatgtgagccc

SEQ ID NO: 599764 - DNA, 33 bp, Homo sapien
gcattcttcacctaaggaaatagatgtgagccc

SEQ ID NO: 599765 - DNA, 33 bp, Homo sapien
gggtgttggcccaaaccggatctgggtccaatt

SEQ ID NO: 599766 - DNA, 33 bp, Homo sapien
gggtgttggcccaaactggatctgggtccaatt

SEQ ID NO: 599767 - DNA, 33 bp, Homo sapien
agacagcttgaagaacaaatctggcttatggca

SEQ ID NO: 599768 - DNA, 33 bp, Homo sapien
agacagcttgaagaaccaatctggcttatggca

SEQ ID NO: 599769 - DNA, 33 bp, Homo sapien
cctgcatctaacacacaccttcatagcataggc

SEQ ID NO: 599770 - DNA, 33 bp, Homo sapien
cctgcatctaacacacgccttcatagcataggc

SEQ ID NO: 599771 - DNA, 33 bp, Homo sapien
gctattagaagcaacacagagctgggaattggc

SEQ ID NO: 599772 - DNA, 33 bp, Homo sapien
gctattagaagcaacatagagctgggaattggc

SEQ ID NO: 599773 - DNA, 33 bp, Homo sapien
acatccctccactgctaaaattatttccccagg

SEQ ID NO: 599774 - DNA, 33 bp, Homo sapien
acatccctccactgctgaaattatttccccagg

SEQ ID NO: 599775 - DNA, 33 bp, Homo sapien
ccctggccctcagtagacactcaaaagtactta

SEQ ID NO: 599776 - DNA, 33 bp, Homo sapien
ccctggccctcagtagccactcaaaagtactta

SEQ ID NO: 599777 - DNA, 33 bp, Homo sapien
gtttgcatctcggttcaaccccttcaagcttta

SEQ ID NO: 599778 - DNA, 33 bp, Homo sapien
gtttgcatctcggttctaccccttcaagcttta

SEQ ID NO: 599779 - DNA, 33 bp, Homo sapien
aaactgagttccagaaatccttgtgcaaggtca

SEQ ID NO: 599780 - DNA, 33 bp, Homo sapien
aaactgagttccagaagtccttgtgcaaggtca

SEQ ID NO: 599781 - DNA, 33 bp, Homo sapien
gactcagatccctacaacactaggcacttaaga

SEQ ID NO: 599782 - DNA, 33 bp, Homo sapien
gactcagatccctacaccactaggcacttaaga

SEQ ID NO: 599783 - DNA, 33 bp, Homo sapien
aaccagcacaggagaccgaggtgtggccaggga

SEQ ID NO: 599784 - DNA, 33 bp, Homo sapien
aaccagcacaggagactgaggtgtggccaggga

SEQ ID NO: 599785 - DNA, 33 bp, Homo sapien
agggaaagccaggagaatatgactccctggaag

SEQ ID NO: 599786 - DNA, 33 bp, Homo sapien
agggaaagccaggagactatgactccctggaag

SEQ ID NO: 599787 - DNA, 33 bp, Homo sapien
tatattaaagaattgcacttggcctaaaagttc

SEQ ID NO: 599788 - DNA, 33 bp, Homo sapien
tatattaaagaattgcccttggcctaaaagttc

SEQ ID NO: 599789 - DNA, 33 bp, Homo sapien
tgtacagcatgtgaccacactgaatactgtaag

SEQ ID NO: 599790 - DNA, 33 bp, Homo sapien
tgtacagcatgtgaccgcactgaatactgtaag

SEQ ID NO: 599791 - DNA, 33 bp, Homo sapien
tatacaaacaactagacatacacacacatgcac

SEQ ID NO: 599792 - DNA, 33 bp, Homo sapien
tatacaaacaactagatatacacacacatgcac

SEQ ID NO: 599793 - DNA, 33 bp, Homo sapien
cggaaagtcacaagtccgactggcctttgcagt

SEQ ID NO: 599794 - DNA, 33 bp, Homo sapien
cggaaagtcacaagtctgactggcctttgcagt

SEQ ID NO: 599795 - DNA, 33 bp, Homo sapien
gtcccctactcggtcacgatcctcattcagagc

SEQ ID NO: 599796 - DNA, 33 bp, Homo sapien
gtcccctactcggtcatgatcctcattcagagc

SEQ ID NO: 599797 - DNA, 33 bp, Homo sapien
gctctccagttgcttccaggacagtggaaggag

SEQ ID NO: 599798 - DNA, 33 bp, Homo sapien
gctctccagttgcttctaggacagtggaaggag

SEQ ID NO: 599799 - DNA, 33 bp, Homo sapien
atagatccaagagtcacgataatctgaccactc

SEQ ID NO: 599800 - DNA, 33 bp, Homo sapien
atagatccaagagtcatgataatctgaccactc

SEQ ID NO: 599801 - DNA, 33 bp, Homo sapien
ctgatacctgagcagacagtgccttctctcagc

SEQ ID NO: 599802 - DNA, 33 bp, Homo sapien
ctgatacctgagcagatagtgccttctctcagc

SEQ ID NO: 599803 - DNA, 33 bp, Homo sapien
cctgggggagttcccacaagctatgaatgccct

SEQ ID NO: 599804 - DNA, 33 bp, Homo sapien
cctgggggagttcccagaagctatgaatgccct

SEQ ID NO: 599805 - DNA, 33 bp, Homo sapien
ctagatgtaaagtcacaattcttaggtgtcttc

SEQ ID NO: 599806 - DNA, 33 bp, Homo sapien
ctagatgtaaagtcacgattcttaggtgtcttc

SEQ ID NO: 599807 - DNA, 33 bp, Homo sapien
cctgtgccctggtacccactgcaaagaagaact

SEQ ID NO: 599808 - DNA, 33 bp, Homo sapien
cctgtgccctggtacctactgcaaagaagaact

SEQ ID NO: 599809 - DNA, 33 bp, Homo sapien
gcataaactctcattacaaaatatcagacatac

SEQ ID NO: 599810 - DNA, 33 bp, Homo sapien
gcataaactctcattataaaatatcagacatac

SEQ ID NO: 599811 - DNA, 33 bp, Homo sapien
ggccagagcctgagggaaggaggaatcgggaat

SEQ ID NO: 599812 - DNA, 33 bp, Homo sapien
ggccagagcctgaggggaggaggaatcgggaat

SEQ ID NO: 599813 - DNA, 33 bp, Homo sapien
tgatctttgtgacttgaactggcttcagcaaaa

SEQ ID NO: 599814 - DNA, 33 bp, Homo sapien
tgatctttgtgacttggactggcttcagcaaaa

SEQ ID NO: 599815 - DNA, 33 bp, Homo sapien
gctcaagcctataaacaaaatgcctggaaaaag

SEQ ID NO: 599816 - DNA, 33 bp, Homo sapien
gctcaagcctataaacgaaatgcctggaaaaag

SEQ ID NO: 599817 - DNA, 33 bp, Homo sapien
atacacttcttaataaacaacgggccaaagaag

SEQ ID NO: 599818 - DNA, 33 bp, Homo sapien
atacacttcttaataagcaacgggccaaagaag

SEQ ID NO: 599819 - DNA, 33 bp, Homo sapien
acaatacatattgtaaaccgtagaacaatcact

SEQ ID NO: 599820 - DNA, 33 bp, Homo sapien
acaatacatattgtaatccgtagaacaatcact

SEQ ID NO: 599821 - DNA, 33 bp, Homo sapien
aatacaatggtaatgacctgagtatttaaacat

SEQ ID NO: 599822 - DNA, 33 bp, Homo sapien
aatacaatggtaatgatctgagtatttaaacat

SEQ ID NO: 599823 - DNA, 33 bp, Homo sapien
tacacaacagcgagcccataacattataatacc

SEQ ID NO: 599824 - DNA, 33 bp, Homo sapien
tacacaacagcgagcctataacattataatacc

SEQ ID NO: 599825 - DNA, 33 bp, Homo sapien
tattttattatctgaaggtttaggtgtacagac

SEQ ID NO: 599826 - DNA, 33 bp, Homo sapien
tattttattatctgaatgtttaggtgtacagac

SEQ ID NO: 599827 - DNA, 33 bp, Homo sapien
gcagcttcatgttgacagacattgagaatgggt

SEQ ID NO: 599828 - DNA, 33 bp, Homo sapien
gcagcttcatgttgacggacattgagaatgggt

SEQ ID NO: 599829 - DNA, 33 bp, Homo sapien
ttgactcaagtttgcagaatcagttgccaacaa

SEQ ID NO: 599830 - DNA, 33 bp, Homo sapien
ttgactcaagtttgcataatcagttgccaacaa

SEQ ID NO: 599831 - DNA, 33 bp, Homo sapien
gccagtacattcctcacagagctgtttgagtat

SEQ ID NO: 599832 - DNA, 33 bp, Homo sapien
gccagtacattcctcatagagctgtttgagtat

SEQ ID NO: 599833 - DNA, 33 bp, Homo sapien
tcccctgtcactgactcaaatcccaccataaga

SEQ ID NO: 599834 - DNA, 33 bp, Homo sapien
tcccctgtcactgactgaaatcccaccataaga

SEQ ID NO: 599835 - DNA, 33 bp, Homo sapien
ctgattcatgacttcaacctgtcttgtttctgg

SEQ ID NO: 599836 - DNA, 33 bp, Homo sapien
ctgattcatgacttcagcctgtcttgtttctgg

SEQ ID NO: 599837 - DNA, 33 bp, Homo sapien
ctgacccatttagggtaaccatcttcagagatc

SEQ ID NO: 599838 - DNA, 33 bp, Homo sapien
ctgacccatttagggtcaccatcttcagagatc

SEQ ID NO: 599839 - DNA, 33 bp, Homo sapien
attaaaaacgagctcccaagagtgaaaatgaat

SEQ ID NO: 599840 - DNA, 33 bp, Homo sapien
attaaaaacgagctcctaagagtgaaaatgaat

SEQ ID NO: 599841 - DNA, 33 bp, Homo sapien
aaccaacataaccttccccagtcacatgaccgt

SEQ ID NO: 599842 - DNA, 33 bp, Homo sapien
aaccaacataaccttctccagtcacatgaccgt

SEQ ID NO: 599843 - DNA, 33 bp, Homo sapien
cagcccatgaaatcaacacccatgcccatgaag

SEQ ID NO: 599844 - DNA, 33 bp, Homo sapien
cagcccatgaaatcaatacccatgcccatgaag

SEQ ID NO: 599845 - DNA, 33 bp, Homo sapien
agctgggacacagataaaggaggtcactaggaa

SEQ ID NO: 599846 - DNA, 33 bp, Homo sapien
agctgggacacagatacaggaggtcactaggaa

SEQ ID NO: 599847 - DNA, 33 bp, Homo sapien
gactgggattatttgacgaacagggatgaaaac

SEQ ID NO: 599848 - DNA, 33 bp, Homo sapien
gactgggattatttgatgaacagggatgaaaac

SEQ ID NO: 599849 - DNA, 33 bp, Homo sapien
agcaatattcacacagcaattgagaagggatgg

SEQ ID NO: 599850 - DNA, 33 bp, Homo sapien
agcaatattcacacagtaattgagaagggatgg

SEQ ID NO: 599851 - DNA, 33 bp, Homo sapien
gaccacatgggatataaaatgaggtggggtgtt

SEQ ID NO: 599852 - DNA, 33 bp, Homo sapien
gaccacatgggatatataatgaggtggggtgtt

SEQ ID NO: 599853 - DNA, 33 bp, Homo sapien
cttccactgtccaccaagagatactccctagca

SEQ ID NO: 599854 - DNA, 33 bp, Homo sapien
cttccactgtccaccaggagatactccctagca

SEQ ID NO: 599855 - DNA, 33 bp, Homo sapien
gcacatttcaatagacacagaggagaaagaagg

SEQ ID NO: 599856 - DNA, 33 bp, Homo sapien
gcacatttcaatagacgcagaggagaaagaagg

SEQ ID NO: 599857 - DNA, 33 bp, Homo sapien
actatctgtacattcacctagaaaggctagata

SEQ ID NO: 599858 - DNA, 33 bp, Homo sapien
actatctgtacattcatctagaaaggctagata

SEQ ID NO: 599859 - DNA, 33 bp, Homo sapien
agagtcagctggtaccgacttgaaagagatgca

SEQ ID NO: 599860 - DNA, 33 bp, Homo sapien
agagtcagctggtacctacttgaaagagatgca

SEQ ID NO: 599861 - DNA, 33 bp, Homo sapien
ctcgcttattataagactatccagtgttcctta

SEQ ID NO: 599862 - DNA, 33 bp, Homo sapien
ctcgcttattataagattatccagtgttcctta

SEQ ID NO: 599863 - DNA, 33 bp, Homo sapien
tagtcagtcctactgaaagtcatccagggaatt

SEQ ID NO: 599864 - DNA, 33 bp, Homo sapien
tagtcagtcctactgagagtcatccagggaatt

SEQ ID NO: 599865 - DNA, 33 bp, Homo sapien
agagatagagaaagtacgagaagttggaagttt

SEQ ID NO: 599866 - DNA, 33 bp, Homo sapien
agagatagagaaagtatgagaagttggaagttt

SEQ ID NO: 599867 - DNA, 33 bp, Homo sapien
gtaggacaaaagtgtacgaagacatgaaagcct

SEQ ID NO: 599868 - DNA, 33 bp, Homo sapien
gtaggacaaaagtgtatgaagacatgaaagcct

SEQ ID NO: 599869 - DNA, 33 bp, Homo sapien
atacctatgtacagaacacactcaattttgcct

SEQ ID NO: 599870 - DNA, 33 bp, Homo sapien
atacctatgtacagaatacactcaattttgcct

SEQ ID NO: 599871 - DNA, 33 bp, Homo sapien
ctaattttccagccaaacaattgagaccattga

SEQ ID NO: 599872 - DNA, 33 bp, Homo sapien
ctaattttccagccaagcaattgagaccattga

SEQ ID NO: 599873 - DNA, 33 bp, Homo sapien
caatcactttggggaacaatctgagcgatattt

SEQ ID NO: 599874 - DNA, 33 bp, Homo sapien
caatcactttggggaataatctgagcgatattt

SEQ ID NO: 599875 - DNA, 33 bp, Homo sapien
aatagcacataaactcactctattcatgagaaa

SEQ ID NO: 599876 - DNA, 33 bp, Homo sapien
aatagcacataaactcgctctattcatgagaaa

SEQ ID NO: 599877 - DNA, 33 bp, Homo sapien
cttgaacgcattgccccgcttaatcctcatgat

SEQ ID NO: 599878 - DNA, 33 bp, Homo sapien
cttgaacgcattgccctgcttaatcctcatgat

SEQ ID NO: 599879 - DNA, 33 bp, Homo sapien
aacacctgaggcttaaaaccctcctgatacaat

SEQ ID NO: 599880 - DNA, 33 bp, Homo sapien
aacacctgaggcttaataccctcctgatacaat

SEQ ID NO: 599881 - DNA, 33 bp, Homo sapien
ttccaatagctgacaccggtgaatgaaaggaga

SEQ ID NO: 599882 - DNA, 33 bp, Homo sapien
ttccaatagctgacactggtgaatgaaaggaga

SEQ ID NO: 599883 - DNA, 33 bp, Homo sapien
tgtttccactggaaacaaactaatctggagaca

SEQ ID NO: 599884 - DNA, 33 bp, Homo sapien
tgtttccactggaaacgaactaatctggagaca

SEQ ID NO: 599885 - DNA, 33 bp, Homo sapien
ctggggtgagtaaacacagtaaaagacttagcc

SEQ ID NO: 599886 - DNA, 33 bp, Homo sapien
ctggggtgagtaaacatagtaaaagacttagcc

SEQ ID NO: 599887 - DNA, 33 bp, Homo sapien
ctttttgctccaaaggcaaagcggcacatttaa

SEQ ID NO: 599888 - DNA, 33 bp, Homo sapien
ctttttgctccaaaggtaaagcggcacatttaa

SEQ ID NO: 599889 - DNA, 33 bp, Homo sapien
aatggtctgtgcagcccagaagtctgatgacag

SEQ ID NO: 599890 - DNA, 33 bp, Homo sapien
aatggtctgtgcagcctagaagtctgatgacag

SEQ ID NO: 599891 - DNA, 33 bp, Homo sapien
ggtggcagagacataaacttgatgacatgattg

SEQ ID NO: 599892 - DNA, 33 bp, Homo sapien
ggtggcagagacataatcttgatgacatgattg

SEQ ID NO: 599893 - DNA, 33 bp, Homo sapien
tgagccattaccttgcactcccttggaaacaat

SEQ ID NO: 599894 - DNA, 33 bp, Homo sapien
tgagccattaccttgctctcccttggaaacaat

SEQ ID NO: 599895 - DNA, 33 bp, Homo sapien
gtgttcccatctgcaacgataagcaaggaagtc

SEQ ID NO: 599896 - DNA, 33 bp, Homo sapien
gtgttcccatctgcaatgataagcaaggaagtc

SEQ ID NO: 599897 - DNA, 33 bp, Homo sapien
agttggccaacaagccgggaaccaatcgatcct

SEQ ID NO: 599898 - DNA, 33 bp, Homo sapien
agttggccaacaagcctggaaccaatcgatcct

SEQ ID NO: 599899 - DNA, 33 bp, Homo sapien
tagctacccaataaaacaggccatattatgcct

SEQ ID NO: 599900 - DNA, 33 bp, Homo sapien
tagctacccaataaaataggccatattatgcct

SEQ ID NO: 599901 - DNA, 33 bp, Homo sapien
tccctcgaaggaaaaaacccattgatgattagg

SEQ ID NO: 599902 - DNA, 33 bp, Homo sapien
tccctcgaaggaaaaagcccattgatgattagg

SEQ ID NO: 599903 - DNA, 33 bp, Homo sapien
atcccactgagataacagggcagtaattaggag

SEQ ID NO: 599904 - DNA, 33 bp, Homo sapien
atcccactgagataacggggcagtaattaggag

SEQ ID NO: 599905 - DNA, 33 bp, Homo sapien
atagaaatatagaacacagaacgtaggacagaa

SEQ ID NO: 599906 - DNA, 33 bp, Homo sapien
atagaaatatagaacatagaacgtaggacagaa

SEQ ID NO: 599907 - DNA, 33 bp, Homo sapien
ggagaaataaacctgcaaaccaactaactaata

SEQ ID NO: 599908 - DNA, 33 bp, Homo sapien
ggagaaataaacctgcgaaccaactaactaata

SEQ ID NO: 599909 - DNA, 33 bp, Homo sapien
gcttggtgagttgagagaatggattctagcccc

SEQ ID NO: 599910 - DNA, 33 bp, Homo sapien
gcttggtgagttgagataatggattctagcccc

SEQ ID NO: 599911 - DNA, 33 bp, Homo sapien
gtccccaggagaagtacgtggaggaacttgcag

SEQ ID NO: 599912 - DNA, 33 bp, Homo sapien
gtccccaggagaagtatgtggaggaacttgcag

SEQ ID NO: 599913 - DNA, 33 bp, Homo sapien
tgaggcaatgtgactgaaacaaggactagcgta

SEQ ID NO: 599914 - DNA, 33 bp, Homo sapien
tgaggcaatgtgactggaacaaggactagcgta

SEQ ID NO: 599915 - DNA, 33 bp, Homo sapien
agacactttccttacacagcttttcaataaaga

SEQ ID NO: 599916 - DNA, 33 bp, Homo sapien
agacactttccttacatagcttttcaataaaga

SEQ ID NO: 599917 - DNA, 33 bp, Homo sapien
ttagaatgaatgaataaggcctggtatttaata

SEQ ID NO: 599918 - DNA, 33 bp, Homo sapien
ttagaatgaatgaatacggcctggtatttaata

SEQ ID NO: 599919 - DNA, 33 bp, Homo sapien
agggaaaaacatcagaagcccagcagggaggaa

SEQ ID NO: 599920 - DNA, 33 bp, Homo sapien
agggaaaaacatcagacgcccagcagggaggaa

SEQ ID NO: 599921 - DNA, 33 bp, Homo sapien
ctaagatgggttaataataagaagcaagtgaaa

SEQ ID NO: 599922 - DNA, 33 bp, Homo sapien
ctaagatgggttaatagtaagaagcaagtgaaa

SEQ ID NO: 599923 - DNA, 33 bp, Homo sapien
acatagtaggggctcaacgagaatcatcatcaa

SEQ ID NO: 599924 - DNA, 33 bp, Homo sapien
acatagtaggggctcagcgagaatcatcatcaa

SEQ ID NO: 599925 - DNA, 33 bp, Homo sapien
taagacccgaatgaaacgaaggagccagctgtg

SEQ ID NO: 599926 - DNA, 33 bp, Homo sapien
taagacccgaatgaaatgaaggagccagctgtg

SEQ ID NO: 599927 - DNA, 33 bp, Homo sapien
ctttcacttcacactgaaccctacaaatgacgt

SEQ ID NO: 599928 - DNA, 33 bp, Homo sapien
ctttcacttcacactggaccctacaaatgacgt

SEQ ID NO: 599929 - DNA, 33 bp, Homo sapien
ttaggatggagtgcagccatcctctgattggag

SEQ ID NO: 599930 - DNA, 33 bp, Homo sapien
ttaggatggagtgcagtcatcctctgattggag

SEQ ID NO: 599931 - DNA, 33 bp, Homo sapien
ttgttcgtacaataaacgtgagctatagttccc

SEQ ID NO: 599932 - DNA, 33 bp, Homo sapien
ttgttcgtacaataaatgtgagctatagttccc

SEQ ID NO: 599933 - DNA, 33 bp, Homo sapien
tatagattatgctttccaatccagtgctagaga

SEQ ID NO: 599934 - DNA, 33 bp, Homo sapien
tatagattatgctttctaatccagtgctagaga

SEQ ID NO: 599935 - DNA, 33 bp, Homo sapien
tagccatttttatcagcagcagtaactatttga

SEQ ID NO: 599936 - DNA, 33 bp, Homo sapien
tagccatttttatcaggagcagtaactatttga

SEQ ID NO: 599937 - DNA, 33 bp, Homo sapien
aattgtatttggtcacagctcagcattgattgt

SEQ ID NO: 599938 - DNA, 33 bp, Homo sapien
aattgtatttggtcacggctcagcattgattgt

SEQ ID NO: 599939 - DNA, 33 bp, Homo sapien
ttattagtactaaaaccgcctaaggattattat

SEQ ID NO: 599940 - DNA, 33 bp, Homo sapien
ttattagtactaaaactgcctaaggattattat

SEQ ID NO: 599941 - DNA, 33 bp, Homo sapien
gtcctcaagctataaacatattcaaaggaaggg

SEQ ID NO: 599942 - DNA, 33 bp, Homo sapien
gtcctcaagctataaatatattcaaaggaaggg

SEQ ID NO: 599943 - DNA, 33 bp, Homo sapien
caaagaatgagatgaacttatgcatactggtaa

SEQ ID NO: 599944 - DNA, 33 bp, Homo sapien
caaagaatgagatgaatttatgcatactggtaa

SEQ ID NO: 599945 - DNA, 33 bp, Homo sapien
ttattgggtcttcccacgcaccaggtaatatgg

SEQ ID NO: 599946 - DNA, 33 bp, Homo sapien
ttattgggtcttcccatgcaccaggtaatatgg

SEQ ID NO: 599947 - DNA, 33 bp, Homo sapien
gaccctgctcaggaagcccaatgtgttgtcagg

SEQ ID NO: 599948 - DNA, 33 bp, Homo sapien
gaccctgctcaggaaggccaatgtgttgtcagg

SEQ ID NO: 599949 - DNA, 33 bp, Homo sapien
gagagtgatggggagacatcagagggaagtcag

SEQ ID NO: 599950 - DNA, 33 bp, Homo sapien
gagagtgatggggagagatcagagggaagtcag

SEQ ID NO: 599951 - DNA, 33 bp, Homo sapien
gagaaaggtttcaatgcagtggcagagcagtct

SEQ ID NO: 599952 - DNA, 33 bp, Homo sapien
gagaaaggtttcaatggagtggcagagcagtct

SEQ ID NO: 599953 - DNA, 33 bp, Homo sapien
gcatcttcatggggaactgggtgcttttatgaa

SEQ ID NO: 599954 - DNA, 33 bp, Homo sapien
gcatcttcatggggaagtgggtgcttttatgaa

SEQ ID NO: 599955 - DNA, 33 bp, Homo sapien
ttaaacttccatacatgacttatttatctcaaa

SEQ ID NO: 599956 - DNA, 33 bp, Homo sapien
ttaaacttccatacattacttatttatctcaaa

SEQ ID NO: 599957 - DNA, 33 bp, Homo sapien
ggtatacctgctatggaaaagagccagaggata

SEQ ID NO: 599958 - DNA, 33 bp, Homo sapien
ggtatacctgctatgggaaagagccagaggata

SEQ ID NO: 599959 - DNA, 33 bp, Homo sapien
atttgagagtgcggtacggatggtatttccaaa

SEQ ID NO: 599960 - DNA, 33 bp, Homo sapien
atttgagagtgcggtagggatggtatttccaaa

SEQ ID NO: 599961 - DNA, 33 bp, Homo sapien
gaaaagtcgaaaacccaattcagttcctgcgag

SEQ ID NO: 599962 - DNA, 33 bp, Homo sapien
gaaaagtcgaaaacccgattcagttcctgcgag

SEQ ID NO: 599963 - DNA, 33 bp, Homo sapien
gaccttcagaatagtgaagtccacttgcattgc

SEQ ID NO: 599964 - DNA, 33 bp, Homo sapien
gaccttcagaatagtggagtccacttgcattgc

SEQ ID NO: 599965 - DNA, 33 bp, Homo sapien
tttacgaaggctcatacgctatcagacagctct

SEQ ID NO: 599966 - DNA, 33 bp, Homo sapien
tttacgaaggctcataggctatcagacagctct

SEQ ID NO: 599967 - DNA, 33 bp, Homo sapien
tcatcagtttcttgaacgcttgtacacacttat

SEQ ID NO: 599968 - DNA, 33 bp, Homo sapien
tcatcagtttcttgaatgcttgtacacacttat

SEQ ID NO: 599969 - DNA, 33 bp, Homo sapien
gatggcaaagccaggaataaacccaagcctagt

SEQ ID NO: 599970 - DNA, 33 bp, Homo sapien
gatggcaaagccaggagtaaacccaagcctagt

SEQ ID NO: 599971 - DNA, 33 bp, Homo sapien
gtgctagtgcagggaaatctttggaactctttc

SEQ ID NO: 599972 - DNA, 33 bp, Homo sapien
gtgctagtgcagggaactctttggaactctttc

SEQ ID NO: 599973 - DNA, 33 bp, Homo sapien
catattatgaagaggaactcctggcagggtgca

SEQ ID NO: 599974 - DNA, 33 bp, Homo sapien
catattatgaagaggatctcctggcagggtgca

SEQ ID NO: 599975 - DNA, 33 bp, Homo sapien
aattgggccctggaccccacagctgtgtagaga

SEQ ID NO: 599976 - DNA, 33 bp, Homo sapien
aattgggccctggacctcacagctgtgtagaga

SEQ ID NO: 599977 - DNA, 33 bp, Homo sapien
ctccacaattctcaacacttaatcaaaaactca

SEQ ID NO: 599978 - DNA, 33 bp, Homo sapien
ctccacaattctcaacccttaatcaaaaactca

SEQ ID NO: 599979 - DNA, 33 bp, Homo sapien
tctttcttattttgaacgtctgcactcctccaa

SEQ ID NO: 599980 - DNA, 33 bp, Homo sapien
tctttcttattttgaatgtctgcactcctccaa

SEQ ID NO: 599981 - DNA, 33 bp, Homo sapien
cctacacactaccttccaggcaatatacacagc

SEQ ID NO: 599982 - DNA, 33 bp, Homo sapien
cctacacactaccttctaggcaatatacacagc

SEQ ID NO: 599983 - DNA, 33 bp, Homo sapien
tatatctctgcttcctcagacatcagctctagg

SEQ ID NO: 599984 - DNA, 33 bp, Homo sapien
tatatctctgcttccttagacatcagctctagg

SEQ ID NO: 599985 - DNA, 33 bp, Homo sapien
agcacagagattattcaaggtgcttagaaacag

SEQ ID NO: 599986 - DNA, 33 bp, Homo sapien
agcacagagattattccaggtgcttagaaacag

SEQ ID NO: 599987 - DNA, 33 bp, Homo sapien
tcttttctgggcttcagcatctgtatctgtcaa

SEQ ID NO: 599988 - DNA, 33 bp, Homo sapien
tcttttctgggcttcatcatctgtatctgtcaa

SEQ ID NO: 599989 - DNA, 33 bp, Homo sapien
acaagcccttgttctaaatgtcttagactaaga

SEQ ID NO: 599990 - DNA, 33 bp, Homo sapien
acaagcccttgttctatatgtcttagactaaga

SEQ ID NO: 599991 - DNA, 33 bp, Homo sapien
aaccgcaatcacaataccttaagcccatatcaa

SEQ ID NO: 599992 - DNA, 33 bp, Homo sapien
aaccgcaatcacaatatcttaagcccatatcaa

SEQ ID NO: 599993 - DNA, 33 bp, Homo sapien
tagccagggattgaaccgctctgaatctcagtt

SEQ ID NO: 599994 - DNA, 33 bp, Homo sapien
tagccagggattgaactgctctgaatctcagtt

SEQ ID NO: 599995 - DNA, 33 bp, Homo sapien
aatgtaagggccaatagaatagaagttttgtct

SEQ ID NO: 599996 - DNA, 33 bp, Homo sapien
aatgtaagggccaatataatagaagttttgtct

SEQ ID NO: 599997 - DNA, 33 bp, Homo sapien
gattggccttggaaccaccgaggtctcattagc

SEQ ID NO: 599998 - DNA, 33 bp, Homo sapien
gattggccttggaaccgccgaggtctcattagc

SEQ ID NO: 599999 - DNA, 33 bp, Homo sapien
caccatcatctcctacaggtggcaaggagtctg

SEQ ID NO: 600000 - DNA, 33 bp, Homo sapien
caccatcatctcctacgggtggcaaggagtctg

SEQ ID NO: 600001 - DNA, 33 bp, Homo sapien
gcagtcttttcgactaaagcagcagtcctgttg

SEQ ID NO: 600002 - DNA, 33 bp, Homo sapien
gcagtcttttcgactagagcagcagtcctgttg

SEQ ID NO: 600003 - DNA, 33 bp, Homo sapien
gaaaggacaccattacaacaagagatcagtctc

SEQ ID NO: 600004 - DNA, 33 bp, Homo sapien
gaaaggacaccattacgacaagagatcagtctc

SEQ ID NO: 600005 - DNA, 33 bp, Homo sapien
aagtacccaaaatgcaagctgaatttccatttg

SEQ ID NO: 600006 - DNA, 33 bp, Homo sapien
aagtacccaaaatgcacgctgaatttccatttg

SEQ ID NO: 600007 - DNA, 33 bp, Homo sapien
aagaaaaagtcacaatcatggtgataatgaaga

SEQ ID NO: 600008 - DNA, 33 bp, Homo sapien
aagaaaaagtcacaatgatggtgataatgaaga

SEQ ID NO: 600009 - DNA, 33 bp, Homo sapien
gatgatgcaggaggggaaactctctagattact

SEQ ID NO: 600010 - DNA, 33 bp, Homo sapien
gatgatgcaggagggggaactctctagattact

SEQ ID NO: 600011 - DNA, 33 bp, Homo sapien
gggcaagagttgtaacaaggaagggaaagaaga

SEQ ID NO: 600012 - DNA, 33 bp, Homo sapien
gggcaagagttgtaacgaggaagggaaagaaga

SEQ ID NO: 600013 - DNA, 33 bp, Homo sapien
cagaaacaagactggaatacaaaaatagagact

SEQ ID NO: 600014 - DNA, 33 bp, Homo sapien
cagaaacaagactggagtacaaaaatagagact

SEQ ID NO: 600015 - DNA, 33 bp, Homo sapien
aagaaattgtgaatgcatagaaattaatcagag

SEQ ID NO: 600016 - DNA, 33 bp, Homo sapien
aagaaattgtgaatgcgtagaaattaatcagag

SEQ ID NO: 600017 - DNA, 33 bp, Homo sapien
ctttcaataacaaaaccaacagcttacagtggt

SEQ ID NO: 600018 - DNA, 33 bp, Homo sapien
ctttcaataacaaaactaacagcttacagtggt

SEQ ID NO: 600019 - DNA, 33 bp, Homo sapien
aaagttatcattgacacgagatgagcacaagtg

SEQ ID NO: 600020 - DNA, 33 bp, Homo sapien
aaagttatcattgacatgagatgagcacaagtg

SEQ ID NO: 600021 - DNA, 33 bp, Homo sapien
acaagggtaatgctaacgctaatgcccttgttg

SEQ ID NO: 600022 - DNA, 33 bp, Homo sapien
acaagggtaatgctaatgctaatgcccttgttg

SEQ ID NO: 600023 - DNA, 33 bp, Homo sapien
ttgtctggccttttccgccttaagcttaaattc

SEQ ID NO: 600024 - DNA, 33 bp, Homo sapien
ttgtctggccttttcctccttaagcttaaattc

SEQ ID NO: 600025 - DNA, 33 bp, Homo sapien
aatgtgggttggtgaaaaacttctagggagaag

SEQ ID NO: 600026 - DNA, 33 bp, Homo sapien
aatgtgggttggtgaagaacttctagggagaag

SEQ ID NO: 600027 - DNA, 33 bp, Homo sapien
aggtggttggccccaaattagctttccactctg

SEQ ID NO: 600028 - DNA, 33 bp, Homo sapien
aggtggttggccccaagttagctttccactctg

SEQ ID NO: 600029 - DNA, 33 bp, Homo sapien
gactagaaactcctcacgtctaggtcaccaata

SEQ ID NO: 600030 - DNA, 33 bp, Homo sapien
gactagaaactcctcaggtctaggtcaccaata

SEQ ID NO: 600031 - DNA, 33 bp, Homo sapien
tgctgactatctgatacgccaagcactgagcca

SEQ ID NO: 600032 - DNA, 33 bp, Homo sapien
tgctgactatctgatatgccaagcactgagcca

SEQ ID NO: 600033 - DNA, 33 bp, Homo sapien
ttcactgattcaaccccaagaagcaaatattta

SEQ ID NO: 600034 - DNA, 33 bp, Homo sapien
ttcactgattcaaccctaagaagcaaatattta

SEQ ID NO: 600035 - DNA, 33 bp, Homo sapien
tactccaatgcgatgcccctaactcagctgaga

SEQ ID NO: 600036 - DNA, 33 bp, Homo sapien
tactccaatgcgatgctcctaactcagctgaga

SEQ ID NO: 600037 - DNA, 33 bp, Homo sapien
attgattgagacatggaaggaaaaaaataaaaa

SEQ ID NO: 600038 - DNA, 33 bp, Homo sapien
attgattgagacatggcaggaaaaaaataaaaa

SEQ ID NO: 600039 - DNA, 33 bp, Homo sapien
gatggatggatggatgaatggagtgacttgctt

SEQ ID NO: 600040 - DNA, 33 bp, Homo sapien
gatggatggatggatggatggagtgacttgctt

SEQ ID NO: 600041 - DNA, 33 bp, Homo sapien
atggtaattattcctgaaagaatttggtccaat

SEQ ID NO: 600042 - DNA, 33 bp, Homo sapien
atggtaattattcctggaagaatttggtccaat

SEQ ID NO: 600043 - DNA, 33 bp, Homo sapien
gtcacagatgggaaaacgaagatctttttgaag

SEQ ID NO: 600044 - DNA, 33 bp, Homo sapien
gtcacagatgggaaaatgaagatctttttgaag

SEQ ID NO: 600045 - DNA, 33 bp, Homo sapien
tgttcctggtagtgtaagaaatagaacacaatt

SEQ ID NO: 600046 - DNA, 33 bp, Homo sapien
tgttcctggtagtgtaggaaatagaacacaatt

SEQ ID NO: 600047 - DNA, 33 bp, Homo sapien
tgactctagtacctggcacattgtagatactca

SEQ ID NO: 600048 - DNA, 33 bp, Homo sapien
tgactctagtacctggtacattgtagatactca

SEQ ID NO: 600049 - DNA, 33 bp, Homo sapien
cttttgattagttcaccgaaaagttttcttttg

SEQ ID NO: 600050 - DNA, 33 bp, Homo sapien
cttttgattagttcactgaaaagttttcttttg

SEQ ID NO: 600051 - DNA, 33 bp, Homo sapien
tcttccccttgcagagccagcaataactccttc

SEQ ID NO: 600052 - DNA, 33 bp, Homo sapien
tcttccccttgcagaggcagcaataactccttc

SEQ ID NO: 600053 - DNA, 33 bp, Homo sapien
ggtgggcaaggaaccagaccatgctgggaacag

SEQ ID NO: 600054 - DNA, 33 bp, Homo sapien
ggtgggcaaggaaccataccatgctgggaacag

SEQ ID NO: 600055 - DNA, 33 bp, Homo sapien
aaagagtacagttacaagcccggggcagagcct

SEQ ID NO: 600056 - DNA, 33 bp, Homo sapien
aaagagtacagttacaggcccggggcagagcct

SEQ ID NO: 600057 - DNA, 33 bp, Homo sapien
ctcagaggcagttatgcacccatatttataccc

SEQ ID NO: 600058 - DNA, 33 bp, Homo sapien
ctcagaggcagttatgtacccatatttataccc

SEQ ID NO: 600059 - DNA, 33 bp, Homo sapien
aatcggagattagggacgattgctgtgagagaa

SEQ ID NO: 600060 - DNA, 33 bp, Homo sapien
aatcggagattagggatgattgctgtgagagaa

SEQ ID NO: 600061 - DNA, 33 bp, Homo sapien
ggggcctgggcagtgaagaggagccagccaggt

SEQ ID NO: 600062 - DNA, 33 bp, Homo sapien
ggggcctgggcagtgaggaggagccagccaggt

SEQ ID NO: 600063 - DNA, 33 bp, Homo sapien
tctgatgccaatgtagaagtttgattgtattct

SEQ ID NO: 600064 - DNA, 33 bp, Homo sapien
tctgatgccaatgtaggagtttgattgtattct

SEQ ID NO: 600065 - DNA, 33 bp, Homo sapien
ggggggcaagatccaaactgaagtgcagggcca

SEQ ID NO: 600066 - DNA, 33 bp, Homo sapien
ggggggcaagatccaacctgaagtgcagggcca

SEQ ID NO: 600067 - DNA, 33 bp, Homo sapien
gtcatgagaactattacgtaaagcttcttagca

SEQ ID NO: 600068 - DNA, 33 bp, Homo sapien
gtcatgagaactattatgtaaagcttcttagca

SEQ ID NO: 600069 - DNA, 33 bp, Homo sapien
ataaaatgtttgcatgaagaaatccaaagatgt

SEQ ID NO: 600070 - DNA, 33 bp, Homo sapien
ataaaatgtttgcatgtagaaatccaaagatgt

SEQ ID NO: 600071 - DNA, 33 bp, Homo sapien
gcaggcttgatggtggaaaatgaatattctggc

SEQ ID NO: 600072 - DNA, 33 bp, Homo sapien
gcaggcttgatggtggtaaatgaatattctggc

SEQ ID NO: 600073 - DNA, 33 bp, Homo sapien
ggtgtttgccttgcaacccttggtagtctctgc

SEQ ID NO: 600074 - DNA, 33 bp, Homo sapien
ggtgtttgccttgcaagccttggtagtctctgc

SEQ ID NO: 600075 - DNA, 33 bp, Homo sapien
gggatgctggcttcaaagtccacaggaatggtg

SEQ ID NO: 600076 - DNA, 33 bp, Homo sapien
gggatgctggcttcaaggtccacaggaatggtg

SEQ ID NO: 600077 - DNA, 33 bp, Homo sapien
ggagaaggagcctgcaaaacaggttcaagggaa

SEQ ID NO: 600078 - DNA, 33 bp, Homo sapien
ggagaaggagcctgcagaacaggttcaagggaa

SEQ ID NO: 600079 - DNA, 33 bp, Homo sapien
ctatgccaaagcagacaatgcaaaaatgagttt

SEQ ID NO: 600080 - DNA, 33 bp, Homo sapien
ctatgccaaagcagaccatgcaaaaatgagttt

SEQ ID NO: 600081 - DNA, 33 bp, Homo sapien
ctctttgttgaacttaaagcagaactacaattc

SEQ ID NO: 600082 - DNA, 33 bp, Homo sapien
ctctttgttgaacttagagcagaactacaattc

SEQ ID NO: 600083 - DNA, 33 bp, Homo sapien
tgaaaacgttgagaaaagacattgcaagtaggg

SEQ ID NO: 600084 - DNA, 33 bp, Homo sapien
tgaaaacgttgagaaaggacattgcaagtaggg

SEQ ID NO: 600085 - DNA, 33 bp, Homo sapien
caggaaacagccctcaaattcatgcctggagac

SEQ ID NO: 600086 - DNA, 33 bp, Homo sapien
caggaaacagccctcagattcatgcctggagac

SEQ ID NO: 600087 - DNA, 33 bp, Homo sapien
tgttttacaaatgacgacaagaaggctcagaga

SEQ ID NO: 600088 - DNA, 33 bp, Homo sapien
tgttttacaaatgacgccaagaaggctcagaga

SEQ ID NO: 600089 - DNA, 33 bp, Homo sapien
gaagagagaaaagacacgattcttcaaatagct

SEQ ID NO: 600090 - DNA, 33 bp, Homo sapien
gaagagagaaaagacatgattcttcaaatagct

SEQ ID NO: 600091 - DNA, 33 bp, Homo sapien
aataattaaacatcccaaatgtcagttgtgcgg

SEQ ID NO: 600092 - DNA, 33 bp, Homo sapien
aataattaaacatcccgaatgtcagttgtgcgg

SEQ ID NO: 600093 - DNA, 33 bp, Homo sapien
ttttctaaactacccagccttgggcatttcttc

SEQ ID NO: 600094 - DNA, 33 bp, Homo sapien
ttttctaaactacccatccttgggcatttcttc

SEQ ID NO: 600095 - DNA, 33 bp, Homo sapien
tgagcaagtgactaaactgatctaagcttcagt

SEQ ID NO: 600096 - DNA, 33 bp, Homo sapien
tgagcaagtgactaaagtgatctaagcttcagt

SEQ ID NO: 600097 - DNA, 33 bp, Homo sapien
gttacctctctggagcaaagctcaagggccaaa

SEQ ID NO: 600098 - DNA, 33 bp, Homo sapien
gttacctctctggagccaagctcaagggccaaa

SEQ ID NO: 600099 - DNA, 33 bp, Homo sapien
cacctaacctactgaacatcctagcttagccta

SEQ ID NO: 600100 - DNA, 33 bp, Homo sapien
cacctaacctactgaatatcctagcttagccta

SEQ ID NO: 600101 - DNA, 33 bp, Homo sapien
agggagataaaacaagcctacatatatttgcat

SEQ ID NO: 600102 - DNA, 33 bp, Homo sapien
agggagataaaacaaggctacatatatttgcat

SEQ ID NO: 600103 - DNA, 33 bp, Homo sapien
gtgtaacacggcaagaactttcagaattatttg

SEQ ID NO: 600104 - DNA, 33 bp, Homo sapien
gtgtaacacggcaagagctttcagaattatttg

SEQ ID NO: 600105 - DNA, 33 bp, Homo sapien
gacaattattcttagagccatttgttaaccctg

SEQ ID NO: 600106 - DNA, 33 bp, Homo sapien
gacaattattcttagatccatttgttaaccctg

SEQ ID NO: 600107 - DNA, 33 bp, Homo sapien
actgaaaccctgagacccccaagcaacctgcca

SEQ ID NO: 600108 - DNA, 33 bp, Homo sapien
actgaaaccctgagactcccaagcaacctgcca

SEQ ID NO: 600109 - DNA, 33 bp, Homo sapien
gggttttggcgaatgaataggagttcttaactc

SEQ ID NO: 600110 - DNA, 33 bp, Homo sapien
gggttttggcgaatgagtaggagttcttaactc

SEQ ID NO: 600111 - DNA, 33 bp, Homo sapien
gagtgtaaatggcaaaacaagtgtctgattctt

SEQ ID NO: 600112 - DNA, 33 bp, Homo sapien
gagtgtaaatggcaaagcaagtgtctgattctt

SEQ ID NO: 600113 - DNA, 33 bp, Homo sapien
gatggccagagcccccaaccagggacagtgtcc

SEQ ID NO: 600114 - DNA, 33 bp, Homo sapien
gatggccagagccccccaccagggacagtgtcc

SEQ ID NO: 600115 - DNA, 33 bp, Homo sapien
cctgtggctcaggagccgagaaatggaggacac

SEQ ID NO: 600116 - DNA, 33 bp, Homo sapien
cctgtggctcaggagctgagaaatggaggacac

SEQ ID NO: 600117 - DNA, 33 bp, Homo sapien
tgctgctaaaaagccacgttcgggagcccctgc

SEQ ID NO: 600118 - DNA, 33 bp, Homo sapien
tgctgctaaaaagccatgttcgggagcccctgc

SEQ ID NO: 600119 - DNA, 33 bp, Homo sapien
attaagtcttaaaacacctttcagcctcagtgt

SEQ ID NO: 600120 - DNA, 33 bp, Homo sapien
attaagtcttaaaacatctttcagcctcagtgt

SEQ ID NO: 600121 - DNA, 33 bp, Homo sapien
acaggaatggaactcacgtctctttgttctcag

SEQ ID NO: 600122 - DNA, 33 bp, Homo sapien
acaggaatggaactcatgtctctttgttctcag

SEQ ID NO: 600123 - DNA, 33 bp, Homo sapien
ctaacaggctgtaggaagaggtatgtaatttcc

SEQ ID NO: 600124 - DNA, 33 bp, Homo sapien
ctaacaggctgtaggaggaggtatgtaatttcc

SEQ ID NO: 600125 - DNA, 33 bp, Homo sapien
cagtgacatcaaaatcaattcagtcccagtttt

SEQ ID NO: 600126 - DNA, 33 bp, Homo sapien
cagtgacatcaaaatcgattcagtcccagtttt

SEQ ID NO: 600127 - DNA, 33 bp, Homo sapien
tgtgtttccaagttaccaccacaatcccctgca

SEQ ID NO: 600128 - DNA, 33 bp, Homo sapien
tgtgtttccaagttactaccacaatcccctgca

SEQ ID NO: 600129 - DNA, 33 bp, Homo sapien
caagtaggctcttgcaatcaccaaggcgagaag

SEQ ID NO: 600130 - DNA, 33 bp, Homo sapien
caagtaggctcttgcagtcaccaaggcgagaag

SEQ ID NO: 600131 - DNA, 33 bp, Homo sapien
ttggatgcaactctagccacatggtatgcgctc

SEQ ID NO: 600132 - DNA, 33 bp, Homo sapien
ttggatgcaactctaggcacatggtatgcgctc

SEQ ID NO: 600133 - DNA, 33 bp, Homo sapien
cacacgcacaaaccacacatatgacactacaca

SEQ ID NO: 600134 - DNA, 33 bp, Homo sapien
cacacgcacaaaccacgcatatgacactacaca

SEQ ID NO: 600135 - DNA, 33 bp, Homo sapien
atgaaggaatgacggcaaatttatgtccatttt

SEQ ID NO: 600136 - DNA, 33 bp, Homo sapien
atgaaggaatgacggcgaatttatgtccatttt

SEQ ID NO: 600137 - DNA, 33 bp, Homo sapien
agaaagatctggggaaagatatgtaagatacat

SEQ ID NO: 600138 - DNA, 33 bp, Homo sapien
agaaagatctggggaaggatatgtaagatacat

SEQ ID NO: 600139 - DNA, 33 bp, Homo sapien
tttaaaaccatacggcaactctttgttctccat

SEQ ID NO: 600140 - DNA, 33 bp, Homo sapien
tttaaaaccatacggccactctttgttctccat

SEQ ID NO: 600141 - DNA, 33 bp, Homo sapien
acttaaatggccaaaacgcagtagcagcatctt

SEQ ID NO: 600142 - DNA, 33 bp, Homo sapien
acttaaatggccaaaatgcagtagcagcatctt

SEQ ID NO: 600143 - DNA, 33 bp, Homo sapien
tgagcatatctcataaataaggtgcctccatcc

SEQ ID NO: 600144 - DNA, 33 bp, Homo sapien
tgagcatatctcataagtaaggtgcctccatcc

SEQ ID NO: 600145 - DNA, 33 bp, Homo sapien
aaatggttgccaataacgggagttttgaaggtg

SEQ ID NO: 600146 - DNA, 33 bp, Homo sapien
aaatggttgccaataatgggagttttgaaggtg

SEQ ID NO: 600147 - DNA, 33 bp, Homo sapien
agctaattgcgataccactcagttgcttactac

SEQ ID NO: 600148 - DNA, 33 bp, Homo sapien
agctaattgcgatacctctcagttgcttactac

SEQ ID NO: 600149 - DNA, 33 bp, Homo sapien
catttaggtcaatatacgatcttcagaattccc

SEQ ID NO: 600150 - DNA, 33 bp, Homo sapien
catttaggtcaatataggatcttcagaattccc

SEQ ID NO: 600151 - DNA, 33 bp, Homo sapien
agggccacttttgcaacctcctattcagtgttg

SEQ ID NO: 600152 - DNA, 33 bp, Homo sapien
agggccacttttgcaatctcctattcagtgttg

SEQ ID NO: 600153 - DNA, 33 bp, Homo sapien
gtgttgatccaatgaccggtgtctttgtaagaa

SEQ ID NO: 600154 - DNA, 33 bp, Homo sapien
gtgttgatccaatgactggtgtctttgtaagaa

SEQ ID NO: 600155 - DNA, 33 bp, Homo sapien
tctatttagattgcacagtataatttagcctca

SEQ ID NO: 600156 - DNA, 33 bp, Homo sapien
tctatttagattgcactgtataatttagcctca

SEQ ID NO: 600157 - DNA, 33 bp, Homo sapien
ttaccaagctttcacaaattaggagatttcaaa

SEQ ID NO: 600158 - DNA, 33 bp, Homo sapien
ttaccaagctttcacagattaggagatttcaaa

SEQ ID NO: 600159 - DNA, 33 bp, Homo sapien
ggttctagctgggaccaatactgtactgtgtgc

SEQ ID NO: 600160 - DNA, 33 bp, Homo sapien
ggttctagctgggacctatactgtactgtgtgc

SEQ ID NO: 600161 - DNA, 33 bp, Homo sapien
aataagtaaaacacagaatacagcatgatatga

SEQ ID NO: 600162 - DNA, 33 bp, Homo sapien
aataagtaaaacacaggatacagcatgatatga

SEQ ID NO: 600163 - DNA, 33 bp, Homo sapien
gacaactcgatatccacagatctttgcccacac

SEQ ID NO: 600164 - DNA, 33 bp, Homo sapien
gacaactcgatatccatagatctttgcccacac

SEQ ID NO: 600165 - DNA, 33 bp, Homo sapien
tacactgtttgaaacccgatcgtaccattccca

SEQ ID NO: 600166 - DNA, 33 bp, Homo sapien
tacactgtttgaaacctgatcgtaccattccca

SEQ ID NO: 600167 - DNA, 33 bp, Homo sapien
gaccaccaccatttccgctagtctttggagatg

SEQ ID NO: 600168 - DNA, 33 bp, Homo sapien
gaccaccaccatttcctctagtctttggagatg

SEQ ID NO: 600169 - DNA, 33 bp, Homo sapien
gggacaatgtctgatacacaacagattgtcagt

SEQ ID NO: 600170 - DNA, 33 bp, Homo sapien
gggacaatgtctgatatacaacagattgtcagt

SEQ ID NO: 600171 - DNA, 33 bp, Homo sapien
tctctaaataaataaacaggtggtcaaggaagg

SEQ ID NO: 600172 - DNA, 33 bp, Homo sapien
tctctaaataaataaataggtggtcaaggaagg

SEQ ID NO: 600173 - DNA, 33 bp, Homo sapien
actctcactttctcaacgatgccttccccaact

SEQ ID NO: 600174 - DNA, 33 bp, Homo sapien
actctcactttctcaatgatgccttccccaact

SEQ ID NO: 600175 - DNA, 33 bp, Homo sapien
aatgcaaaataacatacgccctgatctaccatt

SEQ ID NO: 600176 - DNA, 33 bp, Homo sapien
aatgcaaaataacatatgccctgatctaccatt

SEQ ID NO: 600177 - DNA, 33 bp, Homo sapien
tcttattgactattggaaagatagaaaaggcgt

SEQ ID NO: 600178 - DNA, 33 bp, Homo sapien
tcttattgactattgggaagatagaaaaggcgt

SEQ ID NO: 600179 - DNA, 33 bp, Homo sapien
ctaagggttttgtaaccgcttcttgatctacgc

SEQ ID NO: 600180 - DNA, 33 bp, Homo sapien
ctaagggttttgtaactgcttcttgatctacgc

SEQ ID NO: 600181 - DNA, 33 bp, Homo sapien
atttcacaccagaggaaagactgcagatggaac

SEQ ID NO: 600182 - DNA, 33 bp, Homo sapien
atttcacaccagaggacagactgcagatggaac

SEQ ID NO: 600183 - DNA, 33 bp, Homo sapien
aattacctacgcaaataaacatatgagcacaag

SEQ ID NO: 600184 - DNA, 33 bp, Homo sapien
aattacctacgcaaatgaacatatgagcacaag

SEQ ID NO: 600185 - DNA, 33 bp, Homo sapien
atcacttccttgaccactcacccccaatcacaa

SEQ ID NO: 600186 - DNA, 33 bp, Homo sapien
atcacttccttgaccattcacccccaatcacaa

SEQ ID NO: 600187 - DNA, 33 bp, Homo sapien
tggagcagtaaaggaacgtcagagaaagttttc

SEQ ID NO: 600188 - DNA, 33 bp, Homo sapien
tggagcagtaaaggaatgtcagagaaagttttc

SEQ ID NO: 600189 - DNA, 33 bp, Homo sapien
aatgagatcatctttacggagcttatcacaatg

SEQ ID NO: 600190 - DNA, 33 bp, Homo sapien
aatgagatcatctttatggagcttatcacaatg

SEQ ID NO: 600191 - DNA, 33 bp, Homo sapien
agaggcagctgtatgacgggtgaaaattccact

SEQ ID NO: 600192 - DNA, 33 bp, Homo sapien
agaggcagctgtatgatgggtgaaaattccact

SEQ ID NO: 600193 - DNA, 33 bp, Homo sapien
ttcttcagtggcccacagtcatgcactaggaag

SEQ ID NO: 600194 - DNA, 33 bp, Homo sapien
ttcttcagtggcccacggtcatgcactaggaag

SEQ ID NO: 600195 - DNA, 33 bp, Homo sapien
gttcatatgtgaaaggaaagaaactgtcttaga

SEQ ID NO: 600196 - DNA, 33 bp, Homo sapien
gttcatatgtgaaagggaagaaactgtcttaga

SEQ ID NO: 600197 - DNA, 33 bp, Homo sapien
tggtttccatggagacaaaaaagcacttgctgg

SEQ ID NO: 600198 - DNA, 33 bp, Homo sapien
tggtttccatggagacgaaaaagcacttgctgg

SEQ ID NO: 600199 - DNA, 33 bp, Homo sapien
cttctaacagctgtcagattaacataccataag

SEQ ID NO: 600200 - DNA, 33 bp, Homo sapien
cttctaacagctgtcatattaacataccataag

SEQ ID NO: 600201 - DNA, 33 bp, Homo sapien
gtaatgaaagctgtgactaacaatacagttgtt

SEQ ID NO: 600202 - DNA, 33 bp, Homo sapien
gtaatgaaagctgtgagtaacaatacagttgtt

SEQ ID NO: 600203 - DNA, 33 bp, Homo sapien
gagatttgcaagtgcacctgtttcaagtgtgtt

SEQ ID NO: 600204 - DNA, 33 bp, Homo sapien
gagatttgcaagtgcagctgtttcaagtgtgtt

SEQ ID NO: 600205 - DNA, 33 bp, Homo sapien
aagactggagttagacagcctttgtttgcatct

SEQ ID NO: 600206 - DNA, 33 bp, Homo sapien
aagactggagttagacggcctttgtttgcatct

SEQ ID NO: 600207 - DNA, 33 bp, Homo sapien
ctcagttgcgattaaaaaatcaaaggctcacac

SEQ ID NO: 600208 - DNA, 33 bp, Homo sapien
ctcagttgcgattaaagaatcaaaggctcacac

SEQ ID NO: 600209 - DNA, 33 bp, Homo sapien
cacatcagctaacacaagctatttctagagtga

SEQ ID NO: 600210 - DNA, 33 bp, Homo sapien
cacatcagctaacacaggctatttctagagtga

SEQ ID NO: 600211 - DNA, 33 bp, Homo sapien
tgtgcagtatctggcacatgaagggcactcaac

SEQ ID NO: 600212 - DNA, 33 bp, Homo sapien
tgtgcagtatctggcatatgaagggcactcaac

SEQ ID NO: 600213 - DNA, 33 bp, Homo sapien
agctaggcattgctaaactaatttacgtgttgt

SEQ ID NO: 600214 - DNA, 33 bp, Homo sapien
agctaggcattgctaagctaatttacgtgttgt

SEQ ID NO: 600215 - DNA, 33 bp, Homo sapien
tgcttggcccagctgacagcgaggcagggcagg

SEQ ID NO: 600216 - DNA, 33 bp, Homo sapien
tgcttggcccagctgatagcgaggcagggcagg

SEQ ID NO: 600217 - DNA, 33 bp, Homo sapien
cttcactgtaagcttcccaaactcaacaaatat

SEQ ID NO: 600218 - DNA, 33 bp, Homo sapien
cttcactgtaagcttctcaaactcaacaaatat

SEQ ID NO: 600219 - DNA, 33 bp, Homo sapien
ttgtggccctgcagtacgtcaccttccttagag

SEQ ID NO: 600220 - DNA, 33 bp, Homo sapien
ttgtggccctgcagtatgtcaccttccttagag

SEQ ID NO: 600221 - DNA, 33 bp, Homo sapien
aggtggccaccccgcaggatcgccgcttcctcc

SEQ ID NO: 600222 - DNA, 33 bp, Homo sapien
aggtggccaccccgcatgatcgccgcttcctcc

SEQ ID NO: 600223 - DNA, 33 bp, Homo sapien
ttttggacctcaagaacgtgctaacagtcatcc

SEQ ID NO: 600224 - DNA, 33 bp, Homo sapien
ttttggacctcaagaatgtgctaacagtcatcc

SEQ ID NO: 600225 - DNA, 33 bp, Homo sapien
aggtagcataaaagacagccgttctcaagaggc

SEQ ID NO: 600226 - DNA, 33 bp, Homo sapien
aggtagcataaaagaccgccgttctcaagaggc

SEQ ID NO: 600227 - DNA, 33 bp, Homo sapien
ctctgtgaaggctgagccacagtgctacacccc

SEQ ID NO: 600228 - DNA, 33 bp, Homo sapien
ctctgtgaaggctgagtcacagtgctacacccc

SEQ ID NO: 600229 - DNA, 33 bp, Homo sapien
ctgtgtcttgcctgaaaaaaaccactgcctact

SEQ ID NO: 600230 - DNA, 33 bp, Homo sapien
ctgtgtcttgcctgaagaaaaccactgcctact

SEQ ID NO: 600231 - DNA, 33 bp, Homo sapien
atgactgcacagaaccacatttctgttgctagg

SEQ ID NO: 600232 - DNA, 33 bp, Homo sapien
atgactgcacagaaccgcatttctgttgctagg

SEQ ID NO: 600233 - DNA, 33 bp, Homo sapien
ggagagcgatggctcacgtgcttgattcagctg

SEQ ID NO: 600234 - DNA, 33 bp, Homo sapien
ggagagcgatggctcatgtgcttgattcagctg

SEQ ID NO: 600235 - DNA, 33 bp, Homo sapien
gggagaaactataacaaagaatcctagcagaaa

SEQ ID NO: 600236 - DNA, 33 bp, Homo sapien
gggagaaactataacagagaatcctagcagaaa

SEQ ID NO: 600237 - DNA, 33 bp, Homo sapien
cagccacagtgatactcaggaaaccagaggaat

SEQ ID NO: 600238 - DNA, 33 bp, Homo sapien
cagccacagtgatacttaggaaaccagaggaat

SEQ ID NO: 600239 - DNA, 33 bp, Homo sapien
ggccctggagtaggaacagacgtcggaacatga

SEQ ID NO: 600240 - DNA, 33 bp, Homo sapien
ggccctggagtaggaagagacgtcggaacatga

SEQ ID NO: 600241 - DNA, 33 bp, Homo sapien
acctagaacttgggaacagatatagtacacgaa

SEQ ID NO: 600242 - DNA, 33 bp, Homo sapien
acctagaacttgggaatagatatagtacacgaa

SEQ ID NO: 600243 - DNA, 33 bp, Homo sapien
gtgtactttgaaaccaatcagtgtaattaacca

SEQ ID NO: 600244 - DNA, 33 bp, Homo sapien
gtgtactttgaaaccagtcagtgtaattaacca

SEQ ID NO: 600245 - DNA, 33 bp, Homo sapien
taggttgattttcccaacaactcactttgaggg

SEQ ID NO: 600246 - DNA, 33 bp, Homo sapien
taggttgattttcccagcaactcactttgaggg

SEQ ID NO: 600247 - DNA, 33 bp, Homo sapien
tggtcaacctcttccacgagctggagaagatga

SEQ ID NO: 600248 - DNA, 33 bp, Homo sapien
tggtcaacctcttccatgagctggagaagatga

SEQ ID NO: 600249 - DNA, 33 bp, Homo sapien
tactctctgtccaccccagccctctcatcatgg

SEQ ID NO: 600250 - DNA, 33 bp, Homo sapien
tactctctgtccaccctagccctctcatcatgg

SEQ ID NO: 600251 - DNA, 33 bp, Homo sapien
tttaaatggggcctacaatgccgtggtaatgat

SEQ ID NO: 600252 - DNA, 33 bp, Homo sapien
tttaaatggggcctacgatgccgtggtaatgat

SEQ ID NO: 600253 - DNA, 33 bp, Homo sapien
gagatcacgatagatacgagaccttgaacctaa

SEQ ID NO: 600254 - DNA, 33 bp, Homo sapien
gagatcacgatagatatgagaccttgaacctaa

SEQ ID NO: 600255 - DNA, 33 bp, Homo sapien
agccctcatcgctacaaaaagatcttaaaaaat

SEQ ID NO: 600256 - DNA, 33 bp, Homo sapien
agccctcatcgctacagaaagatcttaaaaaat

SEQ ID NO: 600257 - DNA, 33 bp, Homo sapien
aaatgatcattcaccaatcaccgattactctcc

SEQ ID NO: 600258 - DNA, 33 bp, Homo sapien
aaatgatcattcaccagtcaccgattactctcc

SEQ ID NO: 600259 - DNA, 33 bp, Homo sapien
atccccaataaacccacgaagttcagcctgaac

SEQ ID NO: 600260 - DNA, 33 bp, Homo sapien
atccccaataaacccatgaagttcagcctgaac

SEQ ID NO: 600261 - DNA, 33 bp, Homo sapien
catcagcgttgggccaaagcaattaatgttcta

SEQ ID NO: 600262 - DNA, 33 bp, Homo sapien
catcagcgttgggccagagcaattaatgttcta

SEQ ID NO: 600263 - DNA, 33 bp, Homo sapien
tcacccctcagcatcactgagtcatgcacatgc

SEQ ID NO: 600264 - DNA, 33 bp, Homo sapien
tcacccctcagcatcattgagtcatgcacatgc

SEQ ID NO: 600265 - DNA, 33 bp, Homo sapien
tgcacatgcttattcacgtagtatttactgtac

SEQ ID NO: 600266 - DNA, 33 bp, Homo sapien
tgcacatgcttattcatgtagtatttactgtac

SEQ ID NO: 600267 - DNA, 33 bp, Homo sapien
tgtgctacttcaaaaacggtggccaggaaagga

SEQ ID NO: 600268 - DNA, 33 bp, Homo sapien
tgtgctacttcaaaaatggtggccaggaaagga

SEQ ID NO: 600269 - DNA, 33 bp, Homo sapien
tgccatacccagctaacgctttctcttttttgt

SEQ ID NO: 600270 - DNA, 33 bp, Homo sapien
tgccatacccagctaaggctttctcttttttgt

SEQ ID NO: 600271 - DNA, 33 bp, Homo sapien
ctggctactttcttgacgtcagcaaaagataga

SEQ ID NO: 600272 - DNA, 33 bp, Homo sapien
ctggctactttcttgatgtcagcaaaagataga

SEQ ID NO: 600273 - DNA, 33 bp, Homo sapien
catttccagtttttacaacatccagaatgacat

SEQ ID NO: 600274 - DNA, 33 bp, Homo sapien
catttccagtttttacgacatccagaatgacat

SEQ ID NO: 600275 - DNA, 33 bp, Homo sapien
aaatgtgactactagcagaaaggcctgaaatgt

SEQ ID NO: 600276 - DNA, 33 bp, Homo sapien
aaatgtgactactagcggaaaggcctgaaatgt

SEQ ID NO: 600277 - DNA, 33 bp, Homo sapien
aggaggctagtccaaaatgagaggtcctgttag

SEQ ID NO: 600278 - DNA, 33 bp, Homo sapien
aggaggctagtccaaagtgagaggtcctgttag

SEQ ID NO: 600279 - DNA, 33 bp, Homo sapien
gctaaaaggacatctacgctgatgaaatcgtct

SEQ ID NO: 600280 - DNA, 33 bp, Homo sapien
gctaaaaggacatctatgctgatgaaatcgtct

SEQ ID NO: 600281 - DNA, 33 bp, Homo sapien
acaccaccttctctaaacttttcttgtagagta

SEQ ID NO: 600282 - DNA, 33 bp, Homo sapien
acaccaccttctctaaccttttcttgtagagta

SEQ ID NO: 600283 - DNA, 33 bp, Homo sapien
cacctttctgttcagccagcaggttggaaatct

SEQ ID NO: 600284 - DNA, 33 bp, Homo sapien
cacctttctgttcagctagcaggttggaaatct

SEQ ID NO: 600285 - DNA, 33 bp, Homo sapien
atggaggaccaagaaacgcagtcaacaccctgc

SEQ ID NO: 600286 - DNA, 33 bp, Homo sapien
atggaggaccaagaaatgcagtcaacaccctgc

SEQ ID NO: 600287 - DNA, 33 bp, Homo sapien
tctgaggaaatccacacggtgtgacagaccggg

SEQ ID NO: 600288 - DNA, 33 bp, Homo sapien
tctgaggaaatccacatggtgtgacagaccggg

SEQ ID NO: 600289 - DNA, 33 bp, Homo sapien
cagtgtactgcaatgcacaatatcttatttaat

SEQ ID NO: 600290 - DNA, 33 bp, Homo sapien
cagtgtactgcaatgcgcaatatcttatttaat

SEQ ID NO: 600291 - DNA, 33 bp, Homo sapien
aaaagccggttaagtaccttctaaggcatggga

SEQ ID NO: 600292 - DNA, 33 bp, Homo sapien
aaaagccggttaagtatcttctaaggcatggga

SEQ ID NO: 600293 - DNA, 33 bp, Homo sapien
acatgaaggggcatagcagcagccttgccagtg

SEQ ID NO: 600294 - DNA, 33 bp, Homo sapien
acatgaaggggcataggagcagccttgccagtg

SEQ ID NO: 600295 - DNA, 33 bp, Homo sapien
tgaattgtcatcttgaacccaaatctctctcct

SEQ ID NO: 600296 - DNA, 33 bp, Homo sapien
tgaattgtcatcttgagcccaaatctctctcct

SEQ ID NO: 600297 - DNA, 33 bp, Homo sapien
aggtagagccaggaacgatcattaattaaacac

SEQ ID NO: 600298 - DNA, 33 bp, Homo sapien
aggtagagccaggaactatcattaattaaacac

SEQ ID NO: 600299 - DNA, 33 bp, Homo sapien
ttctggaccataaaatgagatgtgccatgaact

SEQ ID NO: 600300 - DNA, 33 bp, Homo sapien
ttctggaccataaaattagatgtgccatgaact

SEQ ID NO: 600301 - DNA, 33 bp, Homo sapien
ctatttgcatgatccaaaacaagttacctcaac

SEQ ID NO: 600302 - DNA, 33 bp, Homo sapien
ctatttgcatgatccagaacaagttacctcaac

SEQ ID NO: 600303 - DNA, 33 bp, Homo sapien
ttgagctcccatgctacgtgtgtgtttttaaaa

SEQ ID NO: 600304 - DNA, 33 bp, Homo sapien
ttgagctcccatgctatgtgtgtgtttttaaaa

SEQ ID NO: 600305 - DNA, 33 bp, Homo sapien
cttatacctgcattcaacagatgagaaaaccaa

SEQ ID NO: 600306 - DNA, 33 bp, Homo sapien
cttatacctgcattcagcagatgagaaaaccaa

SEQ ID NO: 600307 - DNA, 33 bp, Homo sapien
tgagggagatcatacaacatgggcctgttacct

SEQ ID NO: 600308 - DNA, 33 bp, Homo sapien
tgagggagatcatacagcatgggcctgttacct

SEQ ID NO: 600309 - DNA, 33 bp, Homo sapien
ggagagaagattagctaaagttttcccctatgt

SEQ ID NO: 600310 - DNA, 33 bp, Homo sapien
ggagagaagattagctcaagttttcccctatgt

SEQ ID NO: 600311 - DNA, 33 bp, Homo sapien
atctctttcctgctaaacacgatttcagtggtt

SEQ ID NO: 600312 - DNA, 33 bp, Homo sapien
atctctttcctgctaagcacgatttcagtggtt

SEQ ID NO: 600313 - DNA, 33 bp, Homo sapien
acaaccaaaccataccacttcacagctgaaggg

SEQ ID NO: 600314 - DNA, 33 bp, Homo sapien
acaaccaaaccataccgcttcacagctgaaggg

SEQ ID NO: 600315 - DNA, 33 bp, Homo sapien
gcacgtgtccctgttgaatgccatatagaaaag

SEQ ID NO: 600316 - DNA, 33 bp, Homo sapien
gcacgtgtccctgttggatgccatatagaaaag

SEQ ID NO: 600317 - DNA, 33 bp, Homo sapien
tctgcctttacaaaacacttctgtgctcattgt

SEQ ID NO: 600318 - DNA, 33 bp, Homo sapien
tctgcctttacaaaacgcttctgtgctcattgt

SEQ ID NO: 600319 - DNA, 33 bp, Homo sapien
tcagtgttctcctctgaaatgtgggcatcagag

SEQ ID NO: 600320 - DNA, 33 bp, Homo sapien
tcagtgttctcctctggaatgtgggcatcagag

SEQ ID NO: 600321 - DNA, 33 bp, Homo sapien
tgaatggattttttaaatgtggtgtctatatgc

SEQ ID NO: 600322 - DNA, 33 bp, Homo sapien
tgaatggattttttaagtgtggtgtctatatgc

SEQ ID NO: 600323 - DNA, 33 bp, Homo sapien
caattggatgagggcaaatgcttggtctgtgca

SEQ ID NO: 600324 - DNA, 33 bp, Homo sapien
caattggatgagggcacatgcttggtctgtgca

SEQ ID NO: 600325 - DNA, 33 bp, Homo sapien
cagagaaagctggggaagttggaatctaaaagg

SEQ ID NO: 600326 - DNA, 33 bp, Homo sapien
cagagaaagctggggaggttggaatctaaaagg

SEQ ID NO: 600327 - DNA, 33 bp, Homo sapien
actcaaaggtgtggaggagatgatgagtagtaa

SEQ ID NO: 600328 - DNA, 33 bp, Homo sapien
actcaaaggtgtggagtagatgatgagtagtaa

SEQ ID NO: 600329 - DNA, 33 bp, Homo sapien
agcgctgtttctttacaaattcaaacacaatgt

SEQ ID NO: 600330 - DNA, 33 bp, Homo sapien
agcgctgtttctttacgaattcaaacacaatgt

SEQ ID NO: 600331 - DNA, 33 bp, Homo sapien
gtcaaaggctggcttacagaccttagaggcagg

SEQ ID NO: 600332 - DNA, 33 bp, Homo sapien
gtcaaaggctggcttagagaccttagaggcagg

SEQ ID NO: 600333 - DNA, 33 bp, Homo sapien
ttgtttcattcattcaataaaatgttgttgact

SEQ ID NO: 600334 - DNA, 33 bp, Homo sapien
ttgtttcattcattcagtaaaatgttgttgact

SEQ ID NO: 600335 - DNA, 33 bp, Homo sapien
atgaatgaaacaagagccagttgggcttttcta

SEQ ID NO: 600336 - DNA, 33 bp, Homo sapien
atgaatgaaacaagagtcagttgggcttttcta

SEQ ID NO: 600337 - DNA, 33 bp, Homo sapien
gctggtttcgaaataccaatctgaggtgatccg

SEQ ID NO: 600338 - DNA, 33 bp, Homo sapien
gctggtttcgaaatactaatctgaggtgatccg

SEQ ID NO: 600339 - DNA, 33 bp, Homo sapien; identical to SEQ ID NO: 600337

SEQ ID NO: 600340 - DNA, 33 bp, Homo sapien; identical to SEQ ID NO: 600338

SEQ ID NO: 600341 - DNA, 33 bp, Homo sapien
ataaaatgactctccccacatccctgcctaaaa

SEQ ID NO: 600342 - DNA, 33 bp, Homo sapien
ataaaatgactctccctacatccctgcctaaaa

SEQ ID NO: 600343 - DNA, 33 bp, Homo sapien
tcccctattcaaagacaattttaagagactcac

SEQ ID NO: 600344 - DNA, 33 bp, Homo sapien
tcccctattcaaagacgattttaagagactcac

SEQ ID NO: 600345 - DNA, 33 bp, Homo sapien
ggccatttctgaaatacatgaccttatggggac

SEQ ID NO: 600346 - DNA, 33 bp, Homo sapien
ggccatttctgaaatatatgaccttatggggac

SEQ ID NO: 600347 - DNA, 33 bp, Homo sapien
aagagcttgtcttttgaattttattcttgggcg

SEQ ID NO: 600348 - DNA, 33 bp, Homo sapien
aagagcttgtcttttggattttattcttgggcg

SEQ ID NO: 600349 - DNA, 33 bp, Homo sapien
taatggttttgtaggccctctgttaactgaagc

SEQ ID NO: 600350 - DNA, 33 bp, Homo sapien
taatggttttgtaggctctctgttaactgaagc

SEQ ID NO: 600351 - DNA, 33 bp, Homo sapien
atctctgatgagatggaaaaatgctgaaaagct

SEQ ID NO: 600352 - DNA, 33 bp, Homo sapien
atctctgatgagatgggaaaatgctgaaaagct

SEQ ID NO: 600353 - DNA, 33 bp, Homo sapien
gtggtctccagctttccctgcaccgatcgatgc

SEQ ID NO: 600354 - DNA, 33 bp, Homo sapien
gtggtctccagctttctctgcaccgatcgatgc

SEQ ID NO: 600355 - DNA, 33 bp, Homo sapien
agcaagaaatactaccacaccccggcagaaagc

SEQ ID NO: 600356 - DNA, 33 bp, Homo sapien
agcaagaaatactaccgcaccccggcagaaagc

SEQ ID NO: 600357 - DNA, 33 bp, Homo sapien
ggaatcctccaatctacgcgagaaaccaaatgt

SEQ ID NO: 600358 - DNA, 33 bp, Homo sapien
ggaatcctccaatctatgcgagaaaccaaatgt

SEQ ID NO: 600359 - DNA, 33 bp, Homo sapien
ggggccaataatatgacctagcacagggatatt

SEQ ID NO: 600360 - DNA, 33 bp, Homo sapien
ggggccaataatatgatctagcacagggatatt

SEQ ID NO: 600361 - DNA, 33 bp, Homo sapien
ttgaactgcatgtaaaaccccaagctcaccatc

SEQ ID NO: 600362 - DNA, 33 bp, Homo sapien
ttgaactgcatgtaaacccccaagctcaccatc

SEQ ID NO: 600363 - DNA, 33 bp, Homo sapien
tgcccaccaagtccccaggctatcacgccttgg

SEQ ID NO: 600364 - DNA, 33 bp, Homo sapien
tgcccaccaagtcccccggctatcacgccttgg

SEQ ID NO: 600365 - DNA, 33 bp, Homo sapien
tgaaaagggtttgctaaagtgtattcactctct

SEQ ID NO: 600366 - DNA, 33 bp, Homo sapien
tgaaaagggtttgctagagtgtattcactctct

SEQ ID NO: 600367 - DNA, 33 bp, Homo sapien
aatgattctatcacccagaaagttacactggac

SEQ ID NO: 600368 - DNA, 33 bp, Homo sapien
aatgattctatcaccctgaaagttacactggac

SEQ ID NO: 600369 - DNA, 33 bp, Homo sapien
aaggaaaccaattcgcccctagacccttcagaa

SEQ ID NO: 600370 - DNA, 33 bp, Homo sapien
aaggaaaccaattcgctcctagacccttcagaa

SEQ ID NO: 600371 - DNA, 33 bp, Homo sapien
ggaccaatcactgtcaccagaggtattggatgc

SEQ ID NO: 600372 - DNA, 33 bp, Homo sapien
ggaccaatcactgtcatcagaggtattggatgc

SEQ ID NO: 600373 - DNA, 33 bp, Homo sapien
ctctattattgtgtcacctttgttttgtccaaa

SEQ ID NO: 600374 - DNA, 33 bp, Homo sapien
ctctattattgtgtcatctttgttttgtccaaa

SEQ ID NO: 600375 - DNA, 33 bp, Homo sapien
gtgctcctagaatgacccaggtttgattcaaag

SEQ ID NO: 600376 - DNA, 33 bp, Homo sapien
gtgctcctagaatgactcaggtttgattcaaag

SEQ ID NO: 600377 - DNA, 33 bp, Homo sapien
attatttgaccatagaaagaggtcaggatggat

SEQ ID NO: 600378 - DNA, 33 bp, Homo sapien
attatttgaccatagagagaggtcaggatggat

SEQ ID NO: 600379 - DNA, 33 bp, Homo sapien
cctccagcccttgtcaatcattaatctactctc

SEQ ID NO: 600380 - DNA, 33 bp, Homo sapien
cctccagcccttgtcagtcattaatctactctc

SEQ ID NO: 600381 - DNA, 33 bp, Homo sapien
atggcttcgtgaaagaaatgatgcctcagctga

SEQ ID NO: 600382 - DNA, 33 bp, Homo sapien
atggcttcgtgaaagagatgatgcctcagctga

SEQ ID NO: 600383 - DNA, 33 bp, Homo sapien
ctctgtaaacggaccaatcagcattctgtaaaa

SEQ ID NO: 600384 - DNA, 33 bp, Homo sapien
ctctgtaaacggaccagtcagcattctgtaaaa

SEQ ID NO: 600385 - DNA, 33 bp, Homo sapien
atgtgaccaggagagccagagggtgccaggtga

SEQ ID NO: 600386 - DNA, 33 bp, Homo sapien
atgtgaccaggagagcgagagggtgccaggtga

SEQ ID NO: 600387 - DNA, 33 bp, Homo sapien
ggagatgaagggcaataaatgaaaatgaagcaa

SEQ ID NO: 600388 - DNA, 33 bp, Homo sapien
ggagatgaagggcaatgaatgaaaatgaagcaa

SEQ ID NO: 600389 - DNA, 33 bp, Homo sapien
tagttttcacccctctaaagtccactgtgggcc

SEQ ID NO: 600390 - DNA, 33 bp, Homo sapien
tagttttcacccctctgaagtccactgtgggcc

SEQ ID NO: 600391 - DNA, 33 bp, Homo sapien
taaatcatctcaaagacccttacaggtgaggaa

SEQ ID NO: 600392 - DNA, 33 bp, Homo sapien
taaatcatctcaaagatccttacaggtgaggaa

SEQ ID NO: 600393 - DNA, 33 bp, Homo sapien
tccagagttggtatcaaattcagacgctgacgc

SEQ ID NO: 600394 - DNA, 33 bp, Homo sapien
tccagagttggtatcacattcagacgctgacgc

SEQ ID NO: 600395 - DNA, 33 bp, Homo sapien
tagctgaaatattacaactcatttcaaggagct

SEQ ID NO: 600396 - DNA, 33 bp, Homo sapien
tagctgaaatattacagctcatttcaaggagct

SEQ ID NO: 600397 - DNA, 33 bp, Homo sapien
tggaagtctggggaacacaggacaagagccact

SEQ ID NO: 600398 - DNA, 33 bp, Homo sapien
tggaagtctggggaacgcaggacaagagccact

SEQ ID NO: 600399 - DNA, 33 bp, Homo sapien
catagggagagctcaaactggcctgttggaaga

SEQ ID NO: 600400 - DNA, 33 bp, Homo sapien
catagggagagctcaagctggcctgttggaaga

SEQ ID NO: 600401 - DNA, 33 bp, Homo sapien
ccctgagccttaactaggtctgtgtccatctct

SEQ ID NO: 600402 - DNA, 33 bp, Homo sapien
ccctgagccttaactatgtctgtgtccatctct

SEQ ID NO: 600403 - DNA, 33 bp, Homo sapien
aataaacttaattacacggaaaattgctgccat

SEQ ID NO: 600404 - DNA, 33 bp, Homo sapien
aataaacttaattacatggaaaattgctgccat

SEQ ID NO: 600405 - DNA, 33 bp, Homo sapien
tggagaaaacagaagcaacgcttgagagatgga

SEQ ID NO: 600406 - DNA, 33 bp, Homo sapien
tggagaaaacagaagcgacgcttgagagatgga

SEQ ID NO: 600407 - DNA, 33 bp, Homo sapien
atcagattccaagccacgtctccttagctccag

SEQ ID NO: 600408 - DNA, 33 bp, Homo sapien
atcagattccaagccatgtctccttagctccag

SEQ ID NO: 600409 - DNA, 33 bp, Homo sapien
tgaatcatgatgaagccatatcctgccttgata

SEQ ID NO: 600410 - DNA, 33 bp, Homo sapien
tgaatcatgatgaagctatatcctgccttgata

SEQ ID NO: 600411 - DNA, 33 bp, Homo sapien
tccgtcttacagatgaggagaaaactgagcttc

SEQ ID NO: 600412 - DNA, 33 bp, Homo sapien
tccgtcttacagatgatgagaaaactgagcttc

SEQ ID NO: 600413 - DNA, 33 bp, Homo sapien
taatacagtcaattgcccctttcaaattacagt

SEQ ID NO: 600414 - DNA, 33 bp, Homo sapien
taatacagtcaattgctcctttcaaattacagt

SEQ ID NO: 600415 - DNA, 33 bp, Homo sapien
atagctggcaataaaaaaacctcataggcactg

SEQ ID NO: 600416 - DNA, 33 bp, Homo sapien
atagctggcaataaaagaacctcataggcactg

SEQ ID NO: 600417 - DNA, 33 bp, Homo sapien
ggtgcctacatttagcgctgggccctctcctgg

SEQ ID NO: 600418 - DNA, 33 bp, Homo sapien
ggtgcctacatttagctctgggccctctcctgg

SEQ ID NO: 600419 - DNA, 33 bp, Homo sapien
atattattcttttggaactactttcccccaaga

SEQ ID NO: 600420 - DNA, 33 bp, Homo sapien
atattattcttttggagctactttcccccaaga

SEQ ID NO: 600421 - DNA, 33 bp, Homo sapien
agaagtagtagagacccaagttcctaccatatt

SEQ ID NO: 600422 - DNA, 33 bp, Homo sapien
agaagtagtagagacctaagttcctaccatatt

SEQ ID NO: 600423 - DNA, 33 bp, Homo sapien
acatcagctgatataaacttaactcatgggccc

SEQ ID NO: 600424 - DNA, 33 bp, Homo sapien
acatcagctgatataaccttaactcatgggccc

SEQ ID NO: 600425 - DNA, 33 bp, Homo sapien
taaacagcaaaaactaactgaatcaccagagga

SEQ ID NO: 600426 - DNA, 33 bp, Homo sapien
taaacagcaaaaactagctgaatcaccagagga

SEQ ID NO: 600427 - DNA, 33 bp, Homo sapien
tcataaggaatgcacaacctagttccctcacat

SEQ ID NO: 600428 - DNA, 33 bp, Homo sapien
tcataaggaatgcacagcctagttccctcacat

SEQ ID NO: 600429 - DNA, 33 bp, Homo sapien
tgggtctgcctcattccctcacttgttccaagc

SEQ ID NO: 600430 - DNA, 33 bp, Homo sapien
tgggtctgcctcattctctcacttgttccaagc

SEQ ID NO: 600431 - DNA, 33 bp, Homo sapien
atggataaatttattgcagactttcagaagatg

SEQ ID NO: 600432 - DNA, 33 bp, Homo sapien
atggataaatttattgtagactttcagaagatg

SEQ ID NO: 600433 - DNA, 33 bp, Homo sapien
attcagaaatcaagccaggacaatatcacaagt

SEQ ID NO: 600434 - DNA, 33 bp, Homo sapien
attcagaaatcaagccgggacaatatcacaagt

SEQ ID NO: 600435 - DNA, 33 bp, Homo sapien
aatggatgctttgagcacaggacaggactgaga

SEQ ID NO: 600436 - DNA, 33 bp, Homo sapien
aatggatgctttgagcgcaggacaggactgaga

SEQ ID NO: 600437 - DNA, 33 bp, Homo sapien
caggcatgaggtcatcaagtcagccagatctct

SEQ ID NO: 600438 - DNA, 33 bp, Homo sapien
caggcatgaggtcatcgagtcagccagatctct

SEQ ID NO: 600439 - DNA, 33 bp, Homo sapien
ccattctgttcagagacgcaattgcagattcaa

SEQ ID NO: 600440 - DNA, 33 bp, Homo sapien
ccattctgttcagagatgcaattgcagattcaa

SEQ ID NO: 600441 - DNA, 33 bp, Homo sapien
tcaggaagcagctgagccatcgtaagagcctgg

SEQ ID NO: 600442 - DNA, 33 bp, Homo sapien
tcaggaagcagctgagtcatcgtaagagcctgg

SEQ ID NO: 600443 - DNA, 33 bp, Homo sapien
ctgccgtgtggagaagcaggattaccgtggact

SEQ ID NO: 600444 - DNA, 33 bp, Homo sapien
ctgccgtgtggagaaggaggattaccgtggact

SEQ ID NO: 600445 - DNA, 33 bp, Homo sapien
ggaaaccacaacatggcaaaaagtgcctgatag

SEQ ID NO: 600446 - DNA, 33 bp, Homo sapien
ggaaaccacaacatggtaaaaagtgcctgatag

SEQ ID NO: 600447 - DNA, 33 bp, Homo sapien
caagaaagagccgtctaaccagtgcttccagca

SEQ ID NO: 600448 - DNA, 33 bp, Homo sapien
caagaaagagccgtctcaccagtgcttccagca

SEQ ID NO: 600449 - DNA, 33 bp, Homo sapien
gtttgattgttgtgcaaagtttcttatagagca

SEQ ID NO: 600450 - DNA, 33 bp, Homo sapien
gtttgattgttgtgcagagtttcttatagagca

SEQ ID NO: 600451 - DNA, 33 bp, Homo sapien
aatgatattgccacataagccctactgaaacaa

SEQ ID NO: 600452 - DNA, 33 bp, Homo sapien
aatgatattgccacatgagccctactgaaacaa

SEQ ID NO: 600453 - DNA, 33 bp, Homo sapien
catcacatatagatggaacttcagaaaatctct

SEQ ID NO: 600454 - DNA, 33 bp, Homo sapien
catcacatatagatgggacttcagaaaatctct

SEQ ID NO: 600455 - DNA, 33 bp, Homo sapien
gttggggtgcctcatcgcccatctttctgcctg

SEQ ID NO: 600456 - DNA, 33 bp, Homo sapien
gttggggtgcctcatctcccatctttctgcctg

SEQ ID NO: 600457 - DNA, 33 bp, Homo sapien
atactcctagagtttcaagacgagatgggcaga

SEQ ID NO: 600458 - DNA, 33 bp, Homo sapien
atactcctagagtttccagacgagatgggcaga

SEQ ID NO: 600459 - DNA, 33 bp, Homo sapien
tgtcagctaagaataacaatcctacctacttcc

SEQ ID NO: 600460 - DNA, 33 bp, Homo sapien
tgtcagctaagaataataatcctacctacttcc

SEQ ID NO: 600461 - DNA, 33 bp, Homo sapien
caaaagcagttaagaaattctggaataagtccc

SEQ ID NO: 600462 - DNA, 33 bp, Homo sapien
caaaagcagttaagaatttctggaataagtccc

SEQ ID NO: 600463 - DNA, 33 bp, Homo sapien
ggtgagaattttccagacccaggcacctttgaa

SEQ ID NO: 600464 - DNA, 33 bp, Homo sapien
ggtgagaattttccaggcccaggcacctttgaa

SEQ ID NO: 600465 - DNA, 33 bp, Homo sapien
gtgaagcagacagtgaacaacctggaattacaa

SEQ ID NO: 600466 - DNA, 33 bp, Homo sapien
gtgaagcagacagtgaccaacctggaattacaa

SEQ ID NO: 600467 - DNA, 33 bp, Homo sapien
tgcagttctaaaattacgtaactggaagaggtg

SEQ ID NO: 600468 - DNA, 33 bp, Homo sapien
tgcagttctaaaattatgtaactggaagaggtg

SEQ ID NO: 600469 - DNA, 33 bp, Homo sapien
gaagctctttcctgcagaagtaatgcttgcact

SEQ ID NO: 600470 - DNA, 33 bp, Homo sapien
gaagctctttcctgcataagtaatgcttgcact

SEQ ID NO: 600471 - DNA, 33 bp, Homo sapien
aacttcacttcacatcaagggactatggccaaa

SEQ ID NO: 600472 - DNA, 33 bp, Homo sapien
aacttcacttcacatcgagggactatggccaaa

SEQ ID NO: 600473 - DNA, 33 bp, Homo sapien
ctcttacgtgggtagactcacacaacagtatgt

SEQ ID NO: 600474 - DNA, 33 bp, Homo sapien
ctcttacgtgggtagagtcacacaacagtatgt

SEQ ID NO: 600475 - DNA, 33 bp, Homo sapien
atagactcacacagtaagtatgttttacatccg

SEQ ID NO: 600476 - DNA, 33 bp, Homo sapien
atagactcacacagtatgtatgttttacatccg

SEQ ID NO: 600477 - DNA, 33 bp, Homo sapien
tttaggttgtttaatggaatgtagtaaattctc

SEQ ID NO: 600478 - DNA, 33 bp, Homo sapien
tttaggttgtttaatgtaatgtagtaaattctc

SEQ ID NO: 600479 - DNA, 33 bp, Homo sapien
tgatttccttccatataaaactgagcttttaaa

SEQ ID NO: 600480 - DNA, 33 bp, Homo sapien
tgatttccttccatatgaaactgagcttttaaa

SEQ ID NO: 600481 - DNA, 33 bp, Homo sapien; identical to SEQ ID NO: 600479

SEQ ID NO: 600482 - DNA, 33 bp, Homo sapien; identical to SEQ ID NO: 600480

SEQ ID NO: 600483 - DNA, 33 bp, Homo sapien
aattcctgagcccaaacgatcttcttgtttttg

SEQ ID NO: 600484 - DNA, 33 bp, Homo sapien
aattcctgagcccaaatgatcttcttgtttttg

SEQ ID NO: 600485 - DNA, 33 bp, Homo sapien
agcaaaagcagtcatacaatggcctggagttga

SEQ ID NO: 600486 - DNA, 33 bp, Homo sapien
agcaaaagcagtcatagaatggcctggagttga

SEQ ID NO: 600487 - DNA, 33 bp, Homo sapien
gcccggcgagaaccaccaacagtgtggtggaac

SEQ ID NO: 600488 - DNA, 33 bp, Homo sapien
gcccggcgagaaccacgaacagtgtggtggaac

SEQ ID NO: 600489 - DNA, 33 bp, Homo sapien
ggagttgccttacctgaaaatcctggagagggt

SEQ ID NO: 600490 - DNA, 33 bp, Homo sapien
ggagttgccttacctggaaatcctggagagggt

SEQ ID NO: 600491 - DNA, 33 bp, Homo sapien
agcatgcattctgaaccgataattccttccaag

SEQ ID NO: 600492 - DNA, 33 bp, Homo sapien
agcatgcattctgaactgataattccttccaag

SEQ ID NO: 600493 - DNA, 33 bp, Homo sapien
gaatcaccttctaacccgataggaccagggaga

SEQ ID NO: 600494 - DNA, 33 bp, Homo sapien
gaatcaccttctaacctgataggaccagggaga

SEQ ID NO: 600495 - DNA, 33 bp, Homo sapien
ccaagaaccgaggacaaataagtacaagggaac

SEQ ID NO: 600496 - DNA, 33 bp, Homo sapien
ccaagaaccgaggacagataagtacaagggaac

SEQ ID NO: 600497 - DNA, 33 bp, Homo sapien
acaggaatttatttgaagcatgctaccccaaac

SEQ ID NO: 600498 - DNA, 33 bp, Homo sapien
acaggaatttatttgaggcatgctaccccaaac

SEQ ID NO: 600499 - DNA, 33 bp, Homo sapien
agcagatctaagaaaactgggacaggttagtca

SEQ ID NO: 600500 - DNA, 33 bp, Homo sapien
agcagatctaagaaaagtgggacaggttagtca

SEQ ID NO: 600501 - DNA, 33 bp, Homo sapien
gctcccttagttccagacaacttctcaggaatc

SEQ ID NO: 600502 - DNA, 33 bp, Homo sapien
gctcccttagttccagccaacttctcaggaatc

SEQ ID NO: 600503 - DNA, 33 bp, Homo sapien
gctgacatccagtccacgttgttggccacatca

SEQ ID NO: 600504 - DNA, 33 bp, Homo sapien
gctgacatccagtccatgttgttggccacatca

SEQ ID NO: 600505 - DNA, 33 bp, Homo sapien
gtgtttggcataagaaattctgtctgtgaaaag

SEQ ID NO: 600506 - DNA, 33 bp, Homo sapien
gtgtttggcataagaagttctgtctgtgaaaag

SEQ ID NO: 600507 - DNA, 33 bp, Homo sapien
ttcctctccttttccaagtgtttggcataagaa

SEQ ID NO: 600508 - DNA, 33 bp, Homo sapien
ttcctctccttttccacgtgtttggcataagaa

SEQ ID NO: 600509 - DNA, 33 bp, Homo sapien
atgcacaaaagcatggaaaagaggtattgctat

SEQ ID NO: 600510 - DNA, 33 bp, Homo sapien
atgcacaaaagcatgggaaagaggtattgctat

SEQ ID NO: 600511 - DNA, 33 bp, Homo sapien
atgaaatggcctgtcaagttttttaatgaaatg

SEQ ID NO: 600512 - DNA, 33 bp, Homo sapien
atgaaatggcctgtcaggttttttaatgaaatg

SEQ ID NO: 600513 - DNA, 33 bp, Homo sapien
cctctatcccatccttaaaagtcaaacctcaag

SEQ ID NO: 600514 - DNA, 33 bp, Homo sapien
cctctatcccatccttgaaagtcaaacctcaag

SEQ ID NO: 600515 - DNA, 33 bp, Homo sapien
ctggattgagaggaaacccgaaatgagcaagct

SEQ ID NO: 600516 - DNA, 33 bp, Homo sapien
ctggattgagaggaaatccgaaatgagcaagct

SEQ ID NO: 600517 - DNA, 33 bp, Homo sapien
atccaatacaaagaccacttgtccacagcctcc

SEQ ID NO: 600518 - DNA, 33 bp, Homo sapien
atccaatacaaagaccgcttgtccacagcctcc

SEQ ID NO: 600519 - DNA, 33 bp, Homo sapien
aatataaatcatttaacctgcacaataaatcaa

SEQ ID NO: 600520 - DNA, 33 bp, Homo sapien
aatataaatcatttaatctgcacaataaatcaa

SEQ ID NO: 600521 - DNA, 33 bp, Homo sapien
gtccaactttgtgtcaatagaactgggatgtaa

SEQ ID NO: 600522 - DNA, 33 bp, Homo sapien
gtccaactttgtgtcagtagaactgggatgtaa

SEQ ID NO: 600523 - DNA, 33 bp, Homo sapien
gtccttttaccacttccatgacctctgctattt

SEQ ID NO: 600524 - DNA, 33 bp, Homo sapien
gtccttttaccacttctatgacctctgctattt

SEQ ID NO: 600525 - DNA, 33 bp, Homo sapien
aagctgagactctcaacgggcttatcagaaatc

SEQ ID NO: 600526 - DNA, 33 bp, Homo sapien
aagctgagactctcaatgggcttatcagaaatc

SEQ ID NO: 600527 - DNA, 33 bp, Homo sapien
ccaaaacacgattgtaactactcaagagtagat

SEQ ID NO: 600528 - DNA, 33 bp, Homo sapien
ccaaaacacgattgtatctactcaagagtagat

SEQ ID NO: 600529 - DNA, 33 bp, Homo sapien
agcctctgttactgcaagcaacccttgcccttt

SEQ ID NO: 600530 - DNA, 33 bp, Homo sapien
agcctctgttactgcaggcaacccttgcccttt

SEQ ID NO: 600531 - DNA, 33 bp, Homo sapien
cagggagccaaatcgaacctgtcaaaagggggg

SEQ ID NO: 600532 - DNA, 33 bp, Homo sapien
cagggagccaaatcgagcctgtcaaaagggggg

SEQ ID NO: 600533 - DNA, 33 bp, Homo sapien
tgctggagggaggagaccagccatcaacttcat

SEQ ID NO: 600534 - DNA, 33 bp, Homo sapien
tgctggagggaggagagcagccatcaacttcat

SEQ ID NO: 600535 - DNA, 33 bp, Homo sapien
gaaaccaaagtggaaaaaatgtttctgtcctta

SEQ ID NO: 600536 - DNA, 33 bp, Homo sapien
gaaaccaaagtggaaagaatgtttctgtcctta

SEQ ID NO: 600537 - DNA, 33 bp, Homo sapien
cgttataaacgccttgaaagaattaatgcacag

SEQ ID NO: 600538 - DNA, 33 bp, Homo sapien
cgttataaacgccttggaagaattaatgcacag

SEQ ID NO: 600539 - DNA, 33 bp, Homo sapien
agcttctgcttttgtaggtcctcgtgttacaaa

SEQ ID NO: 600540 - DNA, 33 bp, Homo sapien
agcttctgcttttgtatgtcctcgtgttacaaa

SEQ ID NO: 600541 - DNA, 33 bp, Homo sapien
aactagacagtgtgaaacctataaacagagcca

SEQ ID NO: 600542 - DNA, 33 bp, Homo sapien
aactagacagtgtgaagcctataaacagagcca

SEQ ID NO: 600543 - DNA, 33 bp, Homo sapien
gcttccatgatgtctgaaagatctgatcccgag

SEQ ID NO: 600544 - DNA, 33 bp, Homo sapien
gcttccatgatgtctgcaagatctgatcccgag

SEQ ID NO: 600545 - DNA, 33 bp, Homo sapien
atccataagctgggaaacataaattccacttcc

SEQ ID NO: 600546 - DNA, 33 bp, Homo sapien
atccataagctgggaagcataaattccacttcc

SEQ ID NO: 600547 - DNA, 33 bp, Homo sapien
taagtcaataacaggacgagaaatggtcccagg

SEQ ID NO: 600548 - DNA, 33 bp, Homo sapien
taagtcaataacaggatgagaaatggtcccagg

SEQ ID NO: 600549 - DNA, 33 bp, Homo sapien
ttgtcctgcctaccagcccagcactgtgtgggt

SEQ ID NO: 600550 - DNA, 33 bp, Homo sapien
ttgtcctgcctaccagtccagcactgtgtgggt

SEQ ID NO: 600551 - DNA, 33 bp, Homo sapien
atacagttgtcatggagaatacagactaatgta

SEQ ID NO: 600552 - DNA, 33 bp, Homo sapien
atacagttgtcatggataatacagactaatgta

SEQ ID NO: 600553 - DNA, 33 bp, Homo sapien
tcctttgcagcctccagaaggaacctagcgctg

SEQ ID NO: 600554 - DNA, 33 bp, Homo sapien
tcctttgcagcctccataaggaacctagcgctg

SEQ ID NO: 600555 - DNA, 33 bp, Homo sapien
tcagaactctatatccagaagctgaagaaggta

SEQ ID NO: 600556 - DNA, 33 bp, Homo sapien
tcagaactctatatccggaagctgaagaaggta

SEQ ID NO: 600557 - DNA, 33 bp, Homo sapien
ttctaagtcgtgactacattaatgatagttcat

SEQ ID NO: 600558 - DNA, 33 bp, Homo sapien
ttctaagtcgtgactatattaatgatagttcat

SEQ ID NO: 600559 - DNA, 33 bp, Homo sapien
ccaagctcttccctccactgctattgaccatgt

SEQ ID NO: 600560 - DNA, 33 bp, Homo sapien
ccaagctcttccctccgctgctattgaccatgt

SEQ ID NO: 600561 - DNA, 33 bp, Homo sapien
atatgaaggtgaaaaaaaacactcctccttcac

SEQ ID NO: 600562 - DNA, 33 bp, Homo sapien
atatgaaggtgaaaaagaacactcctccttcac

SEQ ID NO: 600563 - DNA, 33 bp, Homo sapien
tgatctcaggctgaaaagtggtagagcatgttc

SEQ ID NO: 600564 - DNA, 33 bp, Homo sapien
tgatctcaggctgaaaggtggtagagcatgttc

SEQ ID NO: 600565 - DNA, 33 bp, Homo sapien
gtgactaggttctagccaatgaaatgtgactgg

SEQ ID NO: 600566 - DNA, 33 bp, Homo sapien
gtgactaggttctagcgaatgaaatgtgactgg

SEQ ID NO: 600567 - DNA, 33 bp, Homo sapien
acttgccctggagttcaaaggcagttggatttt

SEQ ID NO: 600568 - DNA, 33 bp, Homo sapien
acttgccctggagttcgaaggcagttggatttt

SEQ ID NO: 600569 - DNA, 33 bp, Homo sapien
cttggcagagtctactaaagctcagcatatgca

SEQ ID NO: 600570 - DNA, 33 bp, Homo sapien
cttggcagagtctactgaagctcagcatatgca

SEQ ID NO: 600571 - DNA, 33 bp, Homo sapien
accacacaacctcataaaaagttctatttgaac

SEQ ID NO: 600572 - DNA, 33 bp, Homo sapien
accacacaacctcatagaaagttctatttgaac

SEQ ID NO: 600573 - DNA, 33 bp, Homo sapien
caaatatagtcaatcacccccagagactttcag

SEQ ID NO: 600574 - DNA, 33 bp, Homo sapien
caaatatagtcaatcatccccagagactttcag

SEQ ID NO: 600575 - DNA, 33 bp, Homo sapien
attggcataatcaaccaggggcctgcccagaac

SEQ ID NO: 600576 - DNA, 33 bp, Homo sapien
attggcataatcaaccgggggcctgcccagaac

SEQ ID NO: 600577 - DNA, 33 bp, Homo sapien
taagaagctgccttgaacactcatcagctggaa

SEQ ID NO: 600578 - DNA, 33 bp, Homo sapien
taagaagctgccttgagcactcatcagctggaa

SEQ ID NO: 600579 - DNA, 33 bp, Homo sapien
catcattataatagcacaatcagctgctctatt

SEQ ID NO: 600580 - DNA, 33 bp, Homo sapien
catcattataatagcataatcagctgctctatt

SEQ ID NO: 600581 - DNA, 33 bp, Homo sapien
ctggatgtgcaagatacgtgcactggtgatgca

SEQ ID NO: 600582 - DNA, 33 bp, Homo sapien
ctggatgtgcaagatatgtgcactggtgatgca

SEQ ID NO: 600583 - DNA, 33 bp, Homo sapien
atgggaagccaaaagcggagaaattcagagaat

SEQ ID NO: 600584 - DNA, 33 bp, Homo sapien
atgggaagccaaaagctgagaaattcagagaat

SEQ ID NO: 600585 - DNA, 33 bp, Homo sapien
gccaaacccatgcaaaagaggaactgcaaaatt

SEQ ID NO: 600586 - DNA, 33 bp, Homo sapien
gccaaacccatgcaaaggaggaactgcaaaatt

SEQ ID NO: 600587 - DNA, 33 bp, Homo sapien
tcagagtcctggttccaaatctcttactccatg

SEQ ID NO: 600588 - DNA, 33 bp, Homo sapien
tcagagtcctggttccgaatctcttactccatg

SEQ ID NO: 600589 - DNA, 33 bp, Homo sapien
tgtcaggggcttgccacgctgtatcacagtaaa

SEQ ID NO: 600590 - DNA, 33 bp, Homo sapien
tgtcaggggcttgccaggctgtatcacagtaaa

SEQ ID NO: 600591 - DNA, 33 bp, Homo sapien
tctcagaaagtggaacagctcctgtgaaattct

SEQ ID NO: 600592 - DNA, 33 bp, Homo sapien
tctcagaaagtggaacggctcctgtgaaattct

SEQ ID NO: 600593 - DNA, 33 bp, Homo sapien
agaggtgaatgcaaaacgacaagattgcagaaa

SEQ ID NO: 600594 - DNA, 33 bp, Homo sapien
agaggtgaatgcaaaatgacaagattgcagaaa

SEQ ID NO: 600595 - DNA, 33 bp, Homo sapien
ccaataaaactctatgcacaaaaacaggcagtg

SEQ ID NO: 600596 - DNA, 33 bp, Homo sapien
ccaataaaactctatggacaaaaacaggcagtg

SEQ ID NO: 600597 - DNA, 33 bp, Homo sapien
aagatgtttgtgcaaaatgcttctcactgtgtc

SEQ ID NO: 600598 - DNA, 33 bp, Homo sapien
aagatgtttgtgcaaagtgcttctcactgtgtc

SEQ ID NO: 600599 - DNA, 33 bp, Homo sapien
caactggaaagtgctacgtacatgggtagaatc

SEQ ID NO: 600600 - DNA, 33 bp, Homo sapien
caactggaaagtgctatgtacatgggtagaatc

SEQ ID NO: 600601 - DNA, 33 bp, Homo sapien
tcttcaaggtcttataaatagatgcgaggacca

SEQ ID NO: 600602 - DNA, 33 bp, Homo sapien
tcttcaaggtcttatagatagatgcgaggacca

SEQ ID NO: 600603 - DNA, 33 bp, Homo sapien
taaatgctttcaccacagagtgtaaaaatggca

SEQ ID NO: 600604 - DNA, 33 bp, Homo sapien
taaatgctttcaccacggagtgtaaaaatggca

SEQ ID NO: 600605 - DNA, 33 bp, Homo sapien
aaaaatcaataatccaacctaactctgttttat

SEQ ID NO: 600606 - DNA, 33 bp, Homo sapien
aaaaatcaataatccagcctaactctgttttat

SEQ ID NO: 600607 - DNA, 33 bp, Homo sapien
gagattaattttcagaacttgtgtttcatattt

SEQ ID NO: 600608 - DNA, 33 bp, Homo sapien
gagattaattttcagaccttgtgtttcatattt

SEQ ID NO: 600609 - DNA, 33 bp, Homo sapien
tgttcaagaaacaacaaaagtgaaggagttgat

SEQ ID NO: 600610 - DNA, 33 bp, Homo sapien
tgttcaagaaacaacagaagtgaaggagttgat

SEQ ID NO: 600611 - DNA, 33 bp, Homo sapien
ggaaggcattcagcagacaacactcacttcggc

SEQ ID NO: 600612 - DNA, 33 bp, Homo sapien
ggaaggcattcagcaggcaacactcacttcggc

SEQ ID NO: 600613 - DNA, 33 bp, Homo sapien
acctgggagtttccacagcacacagcaaccagc

SEQ ID NO: 600614 - DNA, 33 bp, Homo sapien
acctgggagtttccaccgcacacagcaaccagc

SEQ ID NO: 600615 - DNA, 33 bp, Homo sapien
ctctccctgaggacacacatctttgggccctga

SEQ ID NO: 600616 - DNA, 33 bp, Homo sapien
ctctccctgaggacacgcatctttgggccctga

SEQ ID NO: 600617 - DNA, 33 bp, Homo sapien
ttatgtcacatcaataaattttctacaatatca

SEQ ID NO: 600618 - DNA, 33 bp, Homo sapien
ttatgtcacatcaatacattttctacaatatca

SEQ ID NO: 600619 - DNA, 33 bp, Homo sapien
ggatgtacctggaagacaccacgctaagtgaaa

SEQ ID NO: 600620 - DNA, 33 bp, Homo sapien
ggatgtacctggaagataccacgctaagtgaaa

SEQ ID NO: 600621 - DNA, 33 bp, Homo sapien
tatattttgcttacaaaactggccaggttcata

SEQ ID NO: 600622 - DNA, 33 bp, Homo sapien
tatattttgcttacaacactggccaggttcata

SEQ ID NO: 600623 - DNA, 33 bp, Homo sapien
gattatgttaaaattaaatggcaaaaataaata

SEQ ID NO: 600624 - DNA, 33 bp, Homo sapien
gattatgttaaaattagatggcaaaaataaata

SEQ ID NO: 600625 - DNA, 33 bp, Homo sapien
tacaaccagtgactacaacaccatcctgttgac

SEQ ID NO: 600626 - DNA, 33 bp, Homo sapien
tacaaccagtgactaccacaccatcctgttgac

SEQ ID NO: 600627 - DNA, 33 bp, Homo sapien
ttatttatcttctcaaaattggttaagacctgg

SEQ ID NO: 600628 - DNA, 33 bp, Homo sapien
ttatttatcttctcaagattggttaagacctgg

SEQ ID NO: 600629 - DNA, 33 bp, Homo sapien
tttattgcctgggctcactttcctcatggacac

SEQ ID NO: 600630 - DNA, 33 bp, Homo sapien
tttattgcctgggctcgctttcctcatggacac

SEQ ID NO: 600631 - DNA, 33 bp, Homo sapien
tgtgtccccaaaatgacgttgaaatcctaacct

SEQ ID NO: 600632 - DNA, 33 bp, Homo sapien
tgtgtccccaaaatgatgttgaaatcctaacct

SEQ ID NO: 600633 - DNA, 33 bp, Homo sapien
tccgatgccttggaacccgaggcaggctggcac

SEQ ID NO: 600634 - DNA, 33 bp, Homo sapien
tccgatgccttggaactcgaggcaggctggcac

SEQ ID NO: 600635 - DNA, 33 bp, Homo sapien
agggggagaccacttcgcattgtacagagcctt

SEQ ID NO: 600636 - DNA, 33 bp, Homo sapien
agggggagaccacttctcattgtacagagcctt

SEQ ID NO: 600637 - DNA, 33 bp, Homo sapien
attctaggagaccaacacatatctcatttaatc

SEQ ID NO: 600638 - DNA, 33 bp, Homo sapien
attctaggagaccaacgcatatctcatttaatc

SEQ ID NO: 600639 - DNA, 33 bp, Homo sapien
tctgtaataataatcacggcaacatttatagaa

SEQ ID NO: 600640 - DNA, 33 bp, Homo sapien
tctgtaataataatcatggcaacatttatagaa

SEQ ID NO: 600641 - DNA, 33 bp, Homo sapien
tgatgcttctgagatccgaggttttaagtaact

SEQ ID NO: 600642 - DNA, 33 bp, Homo sapien
tgatgcttctgagatctgaggttttaagtaact

SEQ ID NO: 600643 - DNA, 33 bp, Homo sapien
ttttgagccctttctacgtggcattccaggctg

SEQ ID NO: 600644 - DNA, 33 bp, Homo sapien
ttttgagccctttctatgtggcattccaggctg

SEQ ID NO: 600645 - DNA, 33 bp, Homo sapien
gtttcataacctcagcaagcctcagtttgctca

SEQ ID NO: 600646 - DNA, 33 bp, Homo sapien
gtttcataacctcagcgagcctcagtttgctca

SEQ ID NO: 600647 - DNA, 33 bp, Homo sapien
actagccagagtgttacgaataatatcctatta

SEQ ID NO: 600648 - DNA, 33 bp, Homo sapien
actagccagagtgttatgaataatatcctatta

SEQ ID NO: 600649 - DNA, 33 bp, Homo sapien
ttgtcacaacagagacagggccaggatgaagta

SEQ ID NO: 600650 - DNA, 33 bp, Homo sapien
ttgtcacaacagagacggggccaggatgaagta

SEQ ID NO: 600651 - DNA, 33 bp, Homo sapien
gcagctacctctatgcgactatggcttctccac

SEQ ID NO: 600652 - DNA, 33 bp, Homo sapien
gcagctacctctatgctactatggcttctccac

SEQ ID NO: 600653 - DNA, 33 bp, Homo sapien
ggcaaaatgcatgtaccaaataaatgtattgct

SEQ ID NO: 600654 - DNA, 33 bp, Homo sapien
ggcaaaatgcatgtacgaaataaatgtattgct

SEQ ID NO: 600655 - DNA, 33 bp, Homo sapien
gactatgctagttaagacctgattggcttctgt

SEQ ID NO: 600656 - DNA, 33 bp, Homo sapien
gactatgctagttaaggcctgattggcttctgt

SEQ ID NO: 600657 - DNA, 33 bp, Homo sapien
aggatctaggcacattaaagcatttcagacttt

SEQ ID NO: 600658 - DNA, 33 bp, Homo sapien
aggatctaggcacattcaagcatttcagacttt

SEQ ID NO: 600659 - DNA, 33 bp, Homo sapien
ataccaggggaaagaacagaacatggcttactg

SEQ ID NO: 600660 - DNA, 33 bp, Homo sapien
ataccaggggaaagaatagaacatggcttactg

SEQ ID NO: 600661 - DNA, 33 bp, Homo sapien
ggtatagaaacaaatgaagatagaaacagagct

SEQ ID NO: 600662 - DNA, 33 bp, Homo sapien
ggtatagaaacaaatggagatagaaacagagct

SEQ ID NO: 600663 - DNA, 33 bp, Homo sapien
cctggaagcaatctcaaatagaatcttctccat

SEQ ID NO: 600664 - DNA, 33 bp, Homo sapien
cctggaagcaatctcagatagaatcttctccat

SEQ ID NO: 600665 - DNA, 33 bp, Homo sapien
aaagcacaaccatgaaactggtaaagagcatgt

SEQ ID NO: 600666 - DNA, 33 bp, Homo sapien
aaagcacaaccatgaagctggtaaagagcatgt

SEQ ID NO: 600667 - DNA, 33 bp, Homo sapien
acccagggaatgttaccgggggttgattccatg

SEQ ID NO: 600668 - DNA, 33 bp, Homo sapien
acccagggaatgttactgggggttgattccatg

SEQ ID NO: 600669 - DNA, 33 bp, Homo sapien
agagcttcttcctaaaagttgcttttcacggat

SEQ ID NO: 600670 - DNA, 33 bp, Homo sapien
agagcttcttcctaaaggttgcttttcacggat

SEQ ID NO: 600671 - DNA, 33 bp, Homo sapien
ggctgaggtgagagaacaacttgaggcaaggag

SEQ ID NO: 600672 - DNA, 33 bp, Homo sapien
ggctgaggtgagagaataacttgaggcaaggag

SEQ ID NO: 600673 - DNA, 33 bp, Homo sapien
caaagtttaggccagaagtctctgggttcaaat

SEQ ID NO: 600674 - DNA, 33 bp, Homo sapien
caaagtttaggccagatgtctctgggttcaaat

SEQ ID NO: 600675 - DNA, 33 bp, Homo sapien
atgaggaaactaaagcccagcatggtcatggac

SEQ ID NO: 600676 - DNA, 33 bp, Homo sapien
atgaggaaactaaagcgcagcatggtcatggac

SEQ ID NO: 600677 - DNA, 33 bp, Homo sapien
cgtatgtgagtgtgaacgtaagtaccaagcagg

SEQ ID NO: 600678 - DNA, 33 bp, Homo sapien
cgtatgtgagtgtgaatgtaagtaccaagcagg

SEQ ID NO: 600679 - DNA, 33 bp, Homo sapien
agttactgtcaaacaaacaattacaacactgct

SEQ ID NO: 600680 - DNA, 33 bp, Homo sapien
agttactgtcaaacaagcaattacaacactgct

SEQ ID NO: 600681 - DNA, 33 bp, Homo sapien
caccatcagtcatataagaggccatttacatcc

SEQ ID NO: 600682 - DNA, 33 bp, Homo sapien
caccatcagtcatataggaggccatttacatcc

SEQ ID NO: 600683 - DNA, 33 bp, Homo sapien
tagttaccatgtgctacaagctctctgcgctgg

SEQ ID NO: 600684 - DNA, 33 bp, Homo sapien
tagttaccatgtgctataagctctctgcgctgg

SEQ ID NO: 600685 - DNA, 33 bp, Homo sapien
acctccctgagtggacccttcctcctaaaccat

SEQ ID NO: 600686 - DNA, 33 bp, Homo sapien
acctccctgagtggactcttcctcctaaaccat

SEQ ID NO: 600687 - DNA, 33 bp, Homo sapien
ccattatctgcccataagaaattaactccacct

SEQ ID NO: 600688 - DNA, 33 bp, Homo sapien
ccattatctgcccataggaaattaactccacct

SEQ ID NO: 600689 - DNA, 33 bp, Homo sapien
catttatctcaaagacactgagaagtgtataat

SEQ ID NO: 600690 - DNA, 33 bp, Homo sapien
catttatctcaaagactctgagaagtgtataat

SEQ ID NO: 600691 - DNA, 33 bp, Homo sapien
tgcttttaccactcaacgatctttttcatgaaa

SEQ ID NO: 600692 - DNA, 33 bp, Homo sapien
tgcttttaccactcaatgatctttttcatgaaa

SEQ ID NO: 600693 - DNA, 33 bp, Homo sapien
aatagaagtgtcaacaggatcctaattaatgaa

SEQ ID NO: 600694 - DNA, 33 bp, Homo sapien
aatagaagtgtcaacatgatcctaattaatgaa

SEQ ID NO: 600695 - DNA, 33 bp, Homo sapien
ccgtggaaagggatgccgatttgtgagcttagg

SEQ ID NO: 600696 - DNA, 33 bp, Homo sapien
ccgtggaaagggatgctgatttgtgagcttagg

SEQ ID NO: 600697 - DNA, 33 bp, Homo sapien
actgaggctcagacagaagaatgacctatctaa

SEQ ID NO: 600698 - DNA, 33 bp, Homo sapien
actgaggctcagacaggagaatgacctatctaa

SEQ ID NO: 600699 - DNA, 33 bp, Homo sapien
aaagtcacacagaaaacatggagatagaagaga

SEQ ID NO: 600700 - DNA, 33 bp, Homo sapien
aaagtcacacagaaaagatggagatagaagaga

SEQ ID NO: 600701 - DNA, 33 bp, Homo sapien
atcactcacctcctccagcacccttcagcctag

SEQ ID NO: 600702 - DNA, 33 bp, Homo sapien
atcactcacctcctccggcacccttcagcctag

SEQ ID NO: 600703 - DNA, 33 bp, Homo sapien
tttctaaggtacacgacgggcagccagatacct

SEQ ID NO: 600704 - DNA, 33 bp, Homo sapien
tttctaaggtacacgatgggcagccagatacct

SEQ ID NO: 600705 - DNA, 33 bp, Homo sapien
tgaaatgaaaatccaaatggtgaactgatgaaa

SEQ ID NO: 600706 - DNA, 33 bp, Homo sapien
tgaaatgaaaatccaactggtgaactgatgaaa

SEQ ID NO: 600707 - DNA, 33 bp, Homo sapien
aggggaggatttgcaacgtgacatctagtacac

SEQ ID NO: 600708 - DNA, 33 bp, Homo sapien
aggggaggatttgcaaggtgacatctagtacac

SEQ ID NO: 600709 - DNA, 33 bp, Homo sapien
tttgaattaacttcaaaggcaaaacataaagta

SEQ ID NO: 600710 - DNA, 33 bp, Homo sapien
tttgaattaacttcaagggcaaaacataaagta

SEQ ID NO: 600711 - DNA, 33 bp, Homo sapien
gctggagaggtcagcaagagtcaggtcatgcag

SEQ ID NO: 600712 - DNA, 33 bp, Homo sapien
gctggagaggtcagcaggagtcaggtcatgcag

SEQ ID NO: 600713 - DNA, 33 bp, Homo sapien
tctcagacttgacacacgttagaatgacccaag

SEQ ID NO: 600714 - DNA, 33 bp, Homo sapien
tctcagacttgacacatgttagaatgacccaag

SEQ ID NO: 600715 - DNA, 33 bp, Homo sapien
aactcttcccgtccccaatctccttgtgcagtc

SEQ ID NO: 600716 - DNA, 33 bp, Homo sapien
aactcttcccgtccccgatctccttgtgcagtc

SEQ ID NO: 600717 - DNA, 33 bp, Homo sapien
ttcattcattttatcacgtacacaacttattct

SEQ ID NO: 600718 - DNA, 33 bp, Homo sapien
ttcattcattttatcatgtacacaacttattct

SEQ ID NO: 600719 - DNA, 33 bp, Homo sapien
ttgacagataataaaaccaaggctcagaggtga

SEQ ID NO: 600720 - DNA, 33 bp, Homo sapien
ttgacagataataaaagcaaggctcagaggtga

SEQ ID NO: 600721 - DNA, 33 bp, Homo sapien
agaaaacagaaactgaactcatagggttggatg

SEQ ID NO: 600722 - DNA, 33 bp, Homo sapien
agaaaacagaaactgacctcatagggttggatg

SEQ ID NO: 600723 - DNA, 33 bp, Homo sapien
cgagagagagtgtgaaagaggaacagttaaaca

SEQ ID NO: 600724 - DNA, 33 bp, Homo sapien
cgagagagagtgtgaaggaggaacagttaaaca

SEQ ID NO: 600725 - DNA, 33 bp, Homo sapien
ggcaacggtgcaagaaagaggcttatccgggga

SEQ ID NO: 600726 - DNA, 33 bp, Homo sapien
ggcaacggtgcaagaaggaggcttatccgggga

SEQ ID NO: 600727 - DNA, 33 bp, Homo sapien
catcctggaaaagaccaatttgaaagatgagga

SEQ ID NO: 600728 - DNA, 33 bp, Homo sapien
catcctggaaaagaccgatttgaaagatgagga

SEQ ID NO: 600729 - DNA, 33 bp, Homo sapien
aatttggcttattctaacatgagataccatgtg

SEQ ID NO: 600730 - DNA, 33 bp, Homo sapien
aatttggcttattctagcatgagataccatgtg

SEQ ID NO: 600731 - DNA, 33 bp, Homo sapien
ctctgattctcctaccccactcttttgtggcct

SEQ ID NO: 600732 - DNA, 33 bp, Homo sapien
ctctgattctcctacctcactcttttgtggcct

SEQ ID NO: 600733 - DNA, 33 bp, Homo sapien
aactcaatgttagataaagccaaatgtcaaaat

SEQ ID NO: 600734 - DNA, 33 bp, Homo sapien
aactcaatgttagatacagccaaatgtcaaaat

SEQ ID NO: 600735 - DNA, 33 bp, Homo sapien
ggaacgaggaccagaacacctgaatgggtagtt

SEQ ID NO: 600736 - DNA, 33 bp, Homo sapien
ggaacgaggaccagaatacctgaatgggtagtt

SEQ ID NO: 600737 - DNA, 33 bp, Homo sapien
ggtttagaacaagcaacgagagtcccccaccaa

SEQ ID NO: 600738 - DNA, 33 bp, Homo sapien
ggtttagaacaagcaatgagagtcccccaccaa

SEQ ID NO: 600739 - DNA, 33 bp, Homo sapien
attttatcacacctccaagataagtatcatatg

SEQ ID NO: 600740 - DNA, 33 bp, Homo sapien
attttatcacacctccgagataagtatcatatg

SEQ ID NO: 600741 - DNA, 33 bp, Homo sapien
tcctcctggaagtcacagtcagctgataagagc

SEQ ID NO: 600742 - DNA, 33 bp, Homo sapien
tcctcctggaagtcacggtcagctgataagagc

SEQ ID NO: 600743 - DNA, 33 bp, Homo sapien
gagagtggacagaatacgggcgagatgcttacg

SEQ ID NO: 600744 - DNA, 33 bp, Homo sapien
gagagtggacagaatatgggcgagatgcttacg

SEQ ID NO: 600745 - DNA, 33 bp, Homo sapien
aggcatcctgtgattcgatttatgtcttcaaag

SEQ ID NO: 600746 - DNA, 33 bp, Homo sapien
aggcatcctgtgattctatttatgtcttcaaag

SEQ ID NO: 600747 - DNA, 33 bp, Homo sapien
cagacactgggctatgaaagtcactcgatgaag

SEQ ID NO: 600748 - DNA, 33 bp, Homo sapien
cagacactgggctatgcaagtcactcgatgaag

SEQ ID NO: 600749 - DNA, 33 bp, Homo sapien
gactttactctcttcacggcaaattaaaaagcc

SEQ ID NO: 600750 - DNA, 33 bp, Homo sapien
gactttactctcttcatggcaaattaaaaagcc

SEQ ID NO: 600751 - DNA, 33 bp, Homo sapien
agtaagtcattaaagacgcagtatcgccggcca

SEQ ID NO: 600752 - DNA, 33 bp, Homo sapien
agtaagtcattaaagaggcagtatcgccggcca

SEQ ID NO: 600753 - DNA, 33 bp, Homo sapien
aaagataagctggagtaaagcctcctccatttg

SEQ ID NO: 600754 - DNA, 33 bp, Homo sapien
aaagataagctggagtcaagcctcctccatttg

SEQ ID NO: 600755 - DNA, 33 bp, Homo sapien
acaggctctattctgtaacaaattgaagtcttt

SEQ ID NO: 600756 - DNA, 33 bp, Homo sapien
acaggctctattctgtgacaaattgaagtcttt

SEQ ID NO: 600757 - DNA, 33 bp, Homo sapien
gaggctgtggtctctgaaaatgtgatggaggct

SEQ ID NO: 600758 - DNA, 33 bp, Homo sapien
gaggctgtggtctctggaaatgtgatggaggct

SEQ ID NO: 600759 - DNA, 33 bp, Homo sapien
ttgagcaaattctgaaaacaaggcaaaggtttt

SEQ ID NO: 600760 - DNA, 33 bp, Homo sapien
ttgagcaaattctgaagacaaggcaaaggtttt

SEQ ID NO: 600761 - DNA, 33 bp, Homo sapien
atcttggccccagtgcacagcaacctatatccc

SEQ ID NO: 600762 - DNA, 33 bp, Homo sapien
atcttggccccagtgcgcagcaacctatatccc

SEQ ID NO: 600763 - DNA, 33 bp, Homo sapien
ttaagataaatctccgcaagcctctgtgatcca

SEQ ID NO: 600764 - DNA, 33 bp, Homo sapien
ttaagataaatctccgtaagcctctgtgatcca

SEQ ID NO: 600765 - DNA, 33 bp, Homo sapien
acagagtacccaacaaccaggctgctcatgaca

SEQ ID NO: 600766 - DNA, 33 bp, Homo sapien
acagagtacccaacaatcaggctgctcatgaca

SEQ ID NO: 600767 - DNA, 33 bp, Homo sapien
caacaacaaatctccaatgaaatccaaattagg

SEQ ID NO: 600768 - DNA, 33 bp, Homo sapien
caacaacaaatctccagtgaaatccaaattagg

SEQ ID NO: 600769 - DNA, 33 bp, Homo sapien
gaagagcaggccgataagagaggaaaagggtca

SEQ ID NO: 600770 - DNA, 33 bp, Homo sapien
gaagagcaggccgataggagaggaaaagggtca

SEQ ID NO: 600771 - DNA, 33 bp, Homo sapien
cggcctgctcttcagcaaacaggagtttccttt

SEQ ID NO: 600772 - DNA, 33 bp, Homo sapien
cggcctgctcttcagcgaacaggagtttccttt

SEQ ID NO: 600773 - DNA, 33 bp, Homo sapien
ttccatagttttcaaacgcttgctgttatgatc

SEQ ID NO: 600774 - DNA, 33 bp, Homo sapien
ttccatagttttcaaatgcttgctgttatgatc

SEQ ID NO: 600775 - DNA, 33 bp, Homo sapien
ggcagcaaaatgagaacccaagagcagccaggg

SEQ ID NO: 600776 - DNA, 33 bp, Homo sapien
ggcagcaaaatgagaatccaagagcagccaggg

SEQ ID NO: 600777 - DNA, 33 bp, Homo sapien
ctggtacagcagttacaataacaagttcttcca

SEQ ID NO: 600778 - DNA, 33 bp, Homo sapien
ctggtacagcagttacgataacaagttcttcca

SEQ ID NO: 600779 - DNA, 33 bp, Homo sapien
gccatgagtagttgtaagtccaaggaggatggg

SEQ ID NO: 600780 - DNA, 33 bp, Homo sapien
gccatgagtagttgtaggtccaaggaggatggg

SEQ ID NO: 600781 - DNA, 33 bp, Homo sapien
ggtttataaacgtccaataacttttggcaagtt

SEQ ID NO: 600782 - DNA, 33 bp, Homo sapien
ggtttataaacgtccagtaacttttggcaagtt

SEQ ID NO: 600783 - DNA, 33 bp, Homo sapien
ttttggcaagttaataacatcatccctaagtga

SEQ ID NO: 600784 - DNA, 33 bp, Homo sapien
ttttggcaagttaatatcatcatccctaagtga

SEQ ID NO: 600785 - DNA, 33 bp, Homo sapien
gattacattgaagtagcaatttggggtagacac

SEQ ID NO: 600786 - DNA, 33 bp, Homo sapien
gattacattgaagtagtaatttggggtagacac

SEQ ID NO: 600787 - DNA, 33 bp, Homo sapien
acagcggcacactacacaactcagcaggggaaa

SEQ ID NO: 600788 - DNA, 33 bp, Homo sapien
acagcggcacactacagaactcagcaggggaaa

SEQ ID NO: 600789 - DNA, 33 bp, Homo sapien
aactggctcctgaattcaatctctgtatttgtg

SEQ ID NO: 600790 - DNA, 33 bp, Homo sapien
aactggctcctgaattgaatctctgtatttgtg

SEQ ID NO: 600791 - DNA, 33 bp, Homo sapien
aatactgaattcaggacggtggttactctgtgg

SEQ ID NO: 600792 - DNA, 33 bp, Homo sapien
aatactgaattcaggatggtggttactctgtgg

SEQ ID NO: 600793 - DNA, 33 bp, Homo sapien
caggctgggaatagagcaatgcttaataatatt

SEQ ID NO: 600794 - DNA, 33 bp, Homo sapien
caggctgggaatagagtaatgcttaataatatt

SEQ ID NO: 600795 - DNA, 33 bp, Homo sapien
aggcagcaccaatgaccggccccagcagaagtg

SEQ ID NO: 600796 - DNA, 33 bp, Homo sapien
aggcagcaccaatgactggccccagcagaagtg

SEQ ID NO: 600797 - DNA, 33 bp, Homo sapien
agccattgaaataggaacccaaaatggtcagtc

SEQ ID NO: 600798 - DNA, 33 bp, Homo sapien
agccattgaaataggagcccaaaatggtcagtc

SEQ ID NO: 600799 - DNA, 33 bp, Homo sapien
tggctttcaaagtaaccggtgagtatgggccat

SEQ ID NO: 600800 - DNA, 33 bp, Homo sapien
tggctttcaaagtaacgggtgagtatgggccat

SEQ ID NO: 600801 - DNA, 33 bp, Homo sapien
aatgacttaaatagtgaagaggagacagtttgc

SEQ ID NO: 600802 - DNA, 33 bp, Homo sapien
aatgacttaaatagtggagaggagacagtttgc

SEQ ID NO: 600803 - DNA, 33 bp, Homo sapien
ggcattttatgaagtgaaagagaatttggcact

SEQ ID NO: 600804 - DNA, 33 bp, Homo sapien
ggcattttatgaagtggaagagaatttggcact

SEQ ID NO: 600805 - DNA, 33 bp, Homo sapien
ccaagacttagcaaacgcggttgtctccaaagc

SEQ ID NO: 600806 - DNA, 33 bp, Homo sapien
ccaagacttagcaaactcggttgtctccaaagc

SEQ ID NO: 600807 - DNA, 33 bp, Homo sapien
tattgggttgtgaatgaacctagtgagcagttg

SEQ ID NO: 600808 - DNA, 33 bp, Homo sapien
tattgggttgtgaatgcacctagtgagcagttg

SEQ ID NO: 600809 - DNA, 33 bp, Homo sapien
cttgaatgattcaagaagtttgatcctgtagct

SEQ ID NO: 600810 - DNA, 33 bp, Homo sapien
cttgaatgattcaagatgtttgatcctgtagct

SEQ ID NO: 600811 - DNA, 33 bp, Homo sapien
tgctctaacctaaacacgtgctaaaatatcata

SEQ ID NO: 600812 - DNA, 33 bp, Homo sapien
tgctctaacctaaacatgtgctaaaatatcata

SEQ ID NO: 600813 - DNA, 33 bp, Homo sapien
taatcttcaacctgcacgtagtgtgagtggggt

SEQ ID NO: 600814 - DNA, 33 bp, Homo sapien
taatcttcaacctgcatgtagtgtgagtggggt

SEQ ID NO: 600815 - DNA, 33 bp, Homo sapien
aatgaagaggaatgtccaaaacacaattgctcc

SEQ ID NO: 600816 - DNA, 33 bp, Homo sapien
aatgaagaggaatgtcgaaaacacaattgctcc

SEQ ID NO: 600817 - DNA, 33 bp, Homo sapien
gggtctggtctcgatcacatgaaaagggctaaa

SEQ ID NO: 600818 - DNA, 33 bp, Homo sapien
gggtctggtctcgatcgcatgaaaagggctaaa

SEQ ID NO: 600819 - DNA, 33 bp, Homo sapien
agggccttctttccagcatactcaatatgccag

SEQ ID NO: 600820 - DNA, 33 bp, Homo sapien
agggccttctttccagtatactcaatatgccag

SEQ ID NO: 600821 - DNA, 33 bp, Homo sapien
aaaaagttcttcctacaactctacacggaagta

SEQ ID NO: 600822 - DNA, 33 bp, Homo sapien
aaaaagttcttcctacgactctacacggaagta

SEQ ID NO: 600823 - DNA, 33 bp, Homo sapien
agtggcaaatgcgtgacgaaaacaataaaaggt

SEQ ID NO: 600824 - DNA, 33 bp, Homo sapien
agtggcaaatgcgtgatgaaaacaataaaaggt

SEQ ID NO: 600825 - DNA, 33 bp, Homo sapien
cttgactcatagaaaccattgcacaataaatgt

SEQ ID NO: 600826 - DNA, 33 bp, Homo sapien
cttgactcatagaaacgattgcacaataaatgt

SEQ ID NO: 600827 - DNA, 33 bp, Homo sapien
ctcactggaaatccacacggggttagtttggcc

SEQ ID NO: 600828 - DNA, 33 bp, Homo sapien
ctcactggaaatccacgcggggttagtttggcc

SEQ ID NO: 600829 - DNA, 33 bp, Homo sapien
caaaagttaaatgcaccattggaaatctgtaac

SEQ ID NO: 600830 - DNA, 33 bp, Homo sapien
caaaagttaaatgcactattggaaatctgtaac

SEQ ID NO: 600831 - DNA, 33 bp, Homo sapien
tctggtctcctcatcgaaaaggctcggtactca

SEQ ID NO: 600832 - DNA, 33 bp, Homo sapien
tctggtctcctcatcggaaaggctcggtactca

SEQ ID NO: 600833 - DNA, 33 bp, Homo sapien
aactaccttattttggacatcctacttgggtgc

SEQ ID NO: 600834 - DNA, 33 bp, Homo sapien
aactaccttattttgggcatcctacttgggtgc

SEQ ID NO: 600835 - DNA, 33 bp, Homo sapien
caactcaagacactcaaaaagagttgttgaaaa

SEQ ID NO: 600836 - DNA, 33 bp, Homo sapien
caactcaagacactcagaaagagttgttgaaaa

SEQ ID NO: 600837 - DNA, 33 bp, Homo sapien
cctgaaagtacatcggacatcttcaggaactga

SEQ ID NO: 600838 - DNA, 33 bp, Homo sapien
cctgaaagtacatcgggcatcttcaggaactga

SEQ ID NO: 600839 - DNA, 33 bp, Homo sapien
ggggtgaagaaaatgacgactcaacggagattt

SEQ ID NO: 600840 - DNA, 33 bp, Homo sapien
ggggtgaagaaaatgatgactcaacggagattt

SEQ ID NO: 600841 - DNA, 33 bp, Homo sapien
ctagagattcaactcaaaaagtatctccttcat

SEQ ID NO: 600842 - DNA, 33 bp, Homo sapien
ctagagattcaactcacaaagtatctccttcat

SEQ ID NO: 600843 - DNA, 33 bp, Homo sapien
ttctcaggtttggtatcacttgtgtgtagcctt

SEQ ID NO: 600844 - DNA, 33 bp, Homo sapien
ttctcaggtttggtattacttgtgtgtagcctt

SEQ ID NO: 600845 - DNA, 33 bp, Homo sapien
aaaacttagggagtcaaactgtacaatgaaaat

SEQ ID NO: 600846 - DNA, 33 bp, Homo sapien
aaaacttagggagtcagactgtacaatgaaaat

SEQ ID NO: 600847 - DNA, 33 bp, Homo sapien
gaggaagggaaaagagccagacagcgatatgaa

SEQ ID NO: 600848 - DNA, 33 bp, Homo sapien
gaggaagggaaaagagtcagacagcgatatgaa

SEQ ID NO: 600849 - DNA, 33 bp, Homo sapien
tgggctccatgaagaagagaatttccctcaagt

SEQ ID NO: 600850 - DNA, 33 bp, Homo sapien
tgggctccatgaagaatagaatttccctcaagt

SEQ ID NO: 600851 - DNA, 33 bp, Homo sapien
gataccaagaagtgtacactagataaatctatt

SEQ ID NO: 600852 - DNA, 33 bp, Homo sapien
gataccaagaagtgtatactagataaatctatt

SEQ ID NO: 600853 - DNA, 33 bp, Homo sapien
ttcttgttcaccaatacagcaattaatttctgc

SEQ ID NO: 600854 - DNA, 33 bp, Homo sapien
ttcttgttcaccaatatagcaattaatttctgc

SEQ ID NO: 600855 - DNA, 33 bp, Homo sapien
attctcgcaaagttcacggtgagtttgggtgac

SEQ ID NO: 600856 - DNA, 33 bp, Homo sapien
attctcgcaaagttcatggtgagtttgggtgac

SEQ ID NO: 600857 - DNA, 33 bp, Homo sapien
atatgtcaggtgatgccgcagtaacaacctcca

SEQ ID NO: 600858 - DNA, 33 bp, Homo sapien
atatgtcaggtgatgctgcagtaacaacctcca

SEQ ID NO: 600859 - DNA, 33 bp, Homo sapien
ggccagctgcctatgaagaaataaagatagcct

SEQ ID NO: 600860 - DNA, 33 bp, Homo sapien
ggccagctgcctatgaggaaataaagatagcct

SEQ ID NO: 600861 - DNA, 33 bp, Homo sapien
cttctccccttaatgacggaaacccatgcattc

SEQ ID NO: 600862 - DNA, 33 bp, Homo sapien
cttctccccttaatgatggaaacccatgcattc

SEQ ID NO: 600863 - DNA, 33 bp, Homo sapien
tcttttcagtttgacagaatttctcttcctcct

SEQ ID NO: 600864 - DNA, 33 bp, Homo sapien
tcttttcagtttgacataatttctcttcctcct

SEQ ID NO: 600865 - DNA, 33 bp, Homo sapien
gcactgattttgtaagacgccccttaagaattg

SEQ ID NO: 600866 - DNA, 33 bp, Homo sapien
gcactgattttgtaaggcgccccttaagaattg

SEQ ID NO: 600867 - DNA, 33 bp, Homo sapien
tggaggaacattggcacattttgagaaaacatg

SEQ ID NO: 600868 - DNA, 33 bp, Homo sapien
tggaggaacattggcatattttgagaaaacatg

SEQ ID NO: 600869 - DNA, 33 bp, Homo sapien
cccggctccttacagaatatatggtacctagta

SEQ ID NO: 600870 - DNA, 33 bp, Homo sapien
cccggctccttacagagtatatggtacctagta

SEQ ID NO: 600871 - DNA, 33 bp, Homo sapien
ttctacctactaaaacaaaaagaatgattgtaa

SEQ ID NO: 600872 - DNA, 33 bp, Homo sapien
ttctacctactaaaacgaaaagaatgattgtaa

SEQ ID NO: 600873 - DNA, 33 bp, Homo sapien
cttcttctgaacgctgcaggacctcagttttcc

SEQ ID NO: 600874 - DNA, 33 bp, Homo sapien
cttcttctgaacgctgtaggacctcagttttcc

SEQ ID NO: 600875 - DNA, 33 bp, Homo sapien
ctaaaagttgggcagaagaaagagcctggggtc

SEQ ID NO: 600876 - DNA, 33 bp, Homo sapien
ctaaaagttgggcagaggaaagagcctggggtc

SEQ ID NO: 600877 - DNA, 33 bp, Homo sapien
agggaggtcaagtacaaatattcaggttgttga

SEQ ID NO: 600878 - DNA, 33 bp, Homo sapien
agggaggtcaagtacagatattcaggttgttga

SEQ ID NO: 600879 - DNA, 33 bp, Homo sapien
tccaggatgactgccacgttctttttctgagca

SEQ ID NO: 600880 - DNA, 33 bp, Homo sapien
tccaggatgactgccaggttctttttctgagca

SEQ ID NO: 600881 - DNA, 33 bp, Homo sapien
tgcaagactgagatgccgaaatccacacggaga

SEQ ID NO: 600882 - DNA, 33 bp, Homo sapien
tgcaagactgagatgctgaaatccacacggaga

SEQ ID NO: 600883 - DNA, 33 bp, Homo sapien
gcagtctatgaaggtgaaaagcaggaaagagta

SEQ ID NO: 600884 - DNA, 33 bp, Homo sapien
gcagtctatgaaggtggaaagcaggaaagagta

SEQ ID NO: 600885 - DNA, 33 bp, Homo sapien
aatactgaaccaaagaagccacacataaaagaa

SEQ ID NO: 600886 - DNA, 33 bp, Homo sapien
aatactgaaccaaagatgccacacataaaagaa

SEQ ID NO: 600887 - DNA, 33 bp, Homo sapien
ttcagtattattttgtaaagttcatccatgtcg

SEQ ID NO: 600888 - DNA, 33 bp, Homo sapien
ttcagtattattttgtgaagttcatccatgtcg

SEQ ID NO: 600889 - DNA, 33 bp, Homo sapien
gatgtgtaaactgtgaaatattcccacagtgga

SEQ ID NO: 600890 - DNA, 33 bp, Homo sapien
gatgtgtaaactgtgacatattcccacagtgga

SEQ ID NO: 600891 - DNA, 33 bp, Homo sapien
caaagtaatgtgagtacgatccctgcaaagttc

SEQ ID NO: 600892 - DNA, 33 bp, Homo sapien
caaagtaatgtgagtaggatccctgcaaagttc

SEQ ID NO: 600893 - DNA, 33 bp, Homo sapien
tgtctaaaaacaccaacggatctgccccatgcg

SEQ ID NO: 600894 - DNA, 33 bp, Homo sapien
tgtctaaaaacaccaatggatctgccccatgcg

SEQ ID NO: 600895 - DNA, 33 bp, Homo sapien
agtcaatcactgtatacacatgggcttcaaatg

SEQ ID NO: 600896 - DNA, 33 bp, Homo sapien
agtcaatcactgtatatacatgggcttcaaatg

SEQ ID NO: 600897 - DNA, 33 bp, Homo sapien
tatacatggtcagtcactcatctatagatttat

SEQ ID NO: 600898 - DNA, 33 bp, Homo sapien
tatacatggtcagtcattcatctatagatttat

SEQ ID NO: 600899 - DNA, 33 bp, Homo sapien
aactgtgaggctttcaaaaataagaattcactt

SEQ ID NO: 600900 - DNA, 33 bp, Homo sapien
aactgtgaggctttcagaaataagaattcactt

SEQ ID NO: 600901 - DNA, 33 bp, Homo sapien
tgaggtgttgcaaagcactggcttcagtcagag

SEQ ID NO: 600902 - DNA, 33 bp, Homo sapien
tgaggtgttgcaaagcgctggcttcagtcagag

SEQ ID NO: 600903 - DNA, 33 bp, Homo sapien
taaggaaatcactgcacggtggacaaagatata

SEQ ID NO: 600904 - DNA, 33 bp, Homo sapien
taaggaaatcactgcatggtggacaaagatata

SEQ ID NO: 600905 - DNA, 33 bp, Homo sapien
aagaccaaaaacataactggccatcagtaaaag

SEQ ID NO: 600906 - DNA, 33 bp, Homo sapien
aagaccaaaaacataagtggccatcagtaaaag

SEQ ID NO: 600907 - DNA, 33 bp, Homo sapien
agattataggtttgatgaaggattcaagatatt

SEQ ID NO: 600908 - DNA, 33 bp, Homo sapien
agattataggtttgattaaggattcaagatatt

SEQ ID NO: 600909 - DNA, 33 bp, Homo sapien
atcatcatggtatttacgatagtgagttctttg

SEQ ID NO: 600910 - DNA, 33 bp, Homo sapien
atcatcatggtatttatgatagtgagttctttg

SEQ ID NO: 600911 - DNA, 33 bp, Homo sapien
tgtctcattctactcacgcctctctgagtgtgt

SEQ ID NO: 600912 - DNA, 33 bp, Homo sapien
tgtctcattctactcatgcctctctgagtgtgt

SEQ ID NO: 600913 - DNA, 33 bp, Homo sapien
ccccagcatgggagaaaggaggccagacaagtg

SEQ ID NO: 600914 - DNA, 33 bp, Homo sapien
ccccagcatgggagaagggaggccagacaagtg

SEQ ID NO: 600915 - DNA, 33 bp, Homo sapien
agttttgagaaagggcgaaaaagtttgaataga

SEQ ID NO: 600916 - DNA, 33 bp, Homo sapien
agttttgagaaagggctaaaaagtttgaataga

SEQ ID NO: 600917 - DNA, 33 bp, Homo sapien
aaatgtaaaaccgtcaccatcagccataaatag

SEQ ID NO: 600918 - DNA, 33 bp, Homo sapien
aaatgtaaaaccgtcatcatcagccataaatag

SEQ ID NO: 600919 - DNA, 33 bp, Homo sapien
cttagtgataatggatcaaagcatttaagaccc

SEQ ID NO: 600920 - DNA, 33 bp, Homo sapien
cttagtgataatggattaaagcatttaagaccc

SEQ ID NO: 600921 - DNA, 33 bp, Homo sapien
cacccagatgttattaagaggctgcatctctag

SEQ ID NO: 600922 - DNA, 33 bp, Homo sapien
cacccagatgttattatgaggctgcatctctag

SEQ ID NO: 600923 - DNA, 33 bp, Homo sapien
cacacagtcactgaacactataggttggtggtc

SEQ ID NO: 600924 - DNA, 33 bp, Homo sapien
cacacagtcactgaacgctataggttggtggtc

SEQ ID NO: 600925 - DNA, 33 bp, Homo sapien
cgtctctatcttggccacaaacacttctgagca

SEQ ID NO: 600926 - DNA, 33 bp, Homo sapien
cgtctctatcttggccgcaaacacttctgagca

SEQ ID NO: 600927 - DNA, 33 bp, Homo sapien
cactcacacaagaggaagcagactatctgaata

SEQ ID NO: 600928 - DNA, 33 bp, Homo sapien
cactcacacaagaggacgcagactatctgaata

SEQ ID NO: 600929 - DNA, 33 bp, Homo sapien
ctacacagtaataaaacgaatgatctacaactg

SEQ ID NO: 600930 - DNA, 33 bp, Homo sapien
ctacacagtaataaaatgaatgatctacaactg

SEQ ID NO: 600931 - DNA, 33 bp, Homo sapien
gatgcctttatttatgcagcaagcatttattaa

SEQ ID NO: 600932 - DNA, 33 bp, Homo sapien
gatgcctttatttatgtagcaagcatttattaa

SEQ ID NO: 600933 - DNA, 33 bp, Homo sapien
gaaatgaaaaatgaatgatgacttgtctatagg

SEQ ID NO: 600934 - DNA, 33 bp, Homo sapien
gaaatgaaaaatgaattatgacttgtctatagg

SEQ ID NO: 600935 - DNA, 33 bp, Homo sapien
aaaagagaacaagacacaacatgacacagcaaa

SEQ ID NO: 600936 - DNA, 33 bp, Homo sapien
aaaagagaacaagacataacatgacacagcaaa

SEQ ID NO: 600937 - DNA, 33 bp, Homo sapien
tgatactcctatgacacgggtgaggcatatgtt

SEQ ID NO: 600938 - DNA, 33 bp, Homo sapien
tgatactcctatgacatgggtgaggcatatgtt

SEQ ID NO: 600939 - DNA, 33 bp, Homo sapien
gccttagcactctttcgacgagatctcattttg

SEQ ID NO: 600940 - DNA, 33 bp, Homo sapien
gccttagcactctttctacgagatctcattttg

SEQ ID NO: 600941 - DNA, 33 bp, Homo sapien
gaaaaacaaaagaaagaatgatgtctattccat

SEQ ID NO: 600942 - DNA, 33 bp, Homo sapien
gaaaaacaaaagaaaggatgatgtctattccat

SEQ ID NO: 600943 - DNA, 33 bp, Homo sapien
ccattccacaggccaaatggaggtccagcctca

SEQ ID NO: 600944 - DNA, 33 bp, Homo sapien
ccattccacaggccaagtggaggtccagcctca

SEQ ID NO: 600945 - DNA, 33 bp, Homo sapien
ttgctgtaattagagacgaggctgatgaggctc

SEQ ID NO: 600946 - DNA, 33 bp, Homo sapien
ttgctgtaattagagatgaggctgatgaggctc

SEQ ID NO: 600947 - DNA, 33 bp, Homo sapien
tgcaacacatgtaaacaatggcaatgagtcagg

SEQ ID NO: 600948 - DNA, 33 bp, Homo sapien
tgcaacacatgtaaacgatggcaatgagtcagg

SEQ ID NO: 600949 - DNA, 33 bp, Homo sapien
tttggggtagccagagacagttttcaaaaaccc

SEQ ID NO: 600950 - DNA, 33 bp, Homo sapien
tttggggtagccagaggcagttttcaaaaaccc

SEQ ID NO: 600951 - DNA, 33 bp, Homo sapien
ccatcctaggattccaaaagccatggaaggttt

SEQ ID NO: 600952 - DNA, 33 bp, Homo sapien
ccatcctaggattccagaagccatggaaggttt

SEQ ID NO: 600953 - DNA, 33 bp, Homo sapien
gtcttccattgaattgacaaaggggttccagcc

SEQ ID NO: 600954 - DNA, 33 bp, Homo sapien
gtcttccattgaattgccaaaggggttccagcc

SEQ ID NO: 600955 - DNA, 33 bp, Homo sapien
caaatggggaaactgaagctgacagcaggatca

SEQ ID NO: 600956 - DNA, 33 bp, Homo sapien
caaatggggaaactgaggctgacagcaggatca

SEQ ID NO: 600957 - DNA, 33 bp, Homo sapien
aaaaagggtgaatccaactgtggtggcagagaa

SEQ ID NO: 600958 - DNA, 33 bp, Homo sapien
aaaaagggtgaatccatctgtggtggcagagaa

SEQ ID NO: 600959 - DNA, 33 bp, Homo sapien
caatttccccaggatcacacagctcaaagatgg

SEQ ID NO: 600960 - DNA, 33 bp, Homo sapien
caatttccccaggatcgcacagctcaaagatgg

SEQ ID NO: 600961 - DNA, 33 bp, Homo sapien
tcatccgagcacgtgcaagcactgcggctgaga

SEQ ID NO: 600962 - DNA, 33 bp, Homo sapien
tcatccgagcacgtgcgagcactgcggctgaga

SEQ ID NO: 600963 - DNA, 33 bp, Homo sapien
tttgcaaagccagactaaactcagccctcctct

SEQ ID NO: 600964 - DNA, 33 bp, Homo sapien
tttgcaaagccagactgaactcagccctcctct

SEQ ID NO: 600965 - DNA, 33 bp, Homo sapien
gaaagattctagaggacgggatgcctggatctt

SEQ ID NO: 600966 - DNA, 33 bp, Homo sapien
gaaagattctagaggaggggatgcctggatctt

SEQ ID NO: 600967 - DNA, 33 bp, Homo sapien
gattgattgtaccacaaggtgactatggttaat

SEQ ID NO: 600968 - DNA, 33 bp, Homo sapien
gattgattgtaccacacggtgactatggttaat

SEQ ID NO: 600969 - DNA, 33 bp, Homo sapien
aactgacctagagtcactatgagagggaggaag

SEQ ID NO: 600970 - DNA, 33 bp, Homo sapien
aactgacctagagtcattatgagagggaggaag

SEQ ID NO: 600971 - DNA, 33 bp, Homo sapien
tcagcaggcaaatcccagcaccagtgtgcgctg

SEQ ID NO: 600972 - DNA, 33 bp, Homo sapien
tcagcaggcaaatcccggcaccagtgtgcgctg

SEQ ID NO: 600973 - DNA, 33 bp, Homo sapien
tcaaaatcccttgcaacgtgttcctgtggggct

SEQ ID NO: 600974 - DNA, 33 bp, Homo sapien
tcaaaatcccttgcaatgtgttcctgtggggct

SEQ ID NO: 600975 - DNA, 33 bp, Homo sapien
aagctcacgacagctaggagaggttcaagccat

SEQ ID NO: 600976 - DNA, 33 bp, Homo sapien
aagctcacgacagctatgagaggttcaagccat

SEQ ID NO: 600977 - DNA, 33 bp, Homo sapien
cactcgtgtagccctgcacatcctttttatgac

SEQ ID NO: 600978 - DNA, 33 bp, Homo sapien
cactcgtgtagccctggacatcctttttatgac

SEQ ID NO: 600979 - DNA, 33 bp, Homo sapien
cagaaaagcacatgtacggtttttcctgtgttc

SEQ ID NO: 600980 - DNA, 33 bp, Homo sapien
cagaaaagcacatgtatggtttttcctgtgttc

SEQ ID NO: 600981 - DNA, 33 bp, Homo sapien
tccagccatttaaaagaagcttatcgttttcag

SEQ ID NO: 600982 - DNA, 33 bp, Homo sapien
tccagccatttaaaagcagcttatcgttttcag

SEQ ID NO: 600983 - DNA, 33 bp, Homo sapien
cagactgtgctgggaactacgagttggtaatga

SEQ ID NO: 600984 - DNA, 33 bp, Homo sapien
cagactgtgctgggaagtacgagttggtaatga

SEQ ID NO: 600985 - DNA, 33 bp, Homo sapien
cagcgaaagtccaaataatgcagacaaaagtgg

SEQ ID NO: 600986 - DNA, 33 bp, Homo sapien
cagcgaaagtccaaatgatgcagacaaaagtgg

SEQ ID NO: 600987 - DNA, 33 bp, Homo sapien
ccccaacctggggccaaagcaactgtatgtccc

SEQ ID NO: 600988 - DNA, 33 bp, Homo sapien
ccccaacctggggccagagcaactgtatgtccc

SEQ ID NO: 600989 - DNA, 33 bp, Homo sapien
agccacgtacctatgcactcacatctaacaagt

SEQ ID NO: 600990 - DNA, 33 bp, Homo sapien
agccacgtacctatgcgctcacatctaacaagt

SEQ ID NO: 600991 - DNA, 33 bp, Homo sapien
cctgttttcagatgggaagaccaggacttggag

SEQ ID NO: 600992 - DNA, 33 bp, Homo sapien
cctgttttcagatggggagaccaggacttggag

SEQ ID NO: 600993 - DNA, 33 bp, Homo sapien
ggcccagagaaggacaaattttgagccaaataa

SEQ ID NO: 600994 - DNA, 33 bp, Homo sapien
ggcccagagaaggacatattttgagccaaataa

SEQ ID NO: 600995 - DNA, 33 bp, Homo sapien
ctatgacaaacagaccaaccaggaacagaaaga

SEQ ID NO: 600996 - DNA, 33 bp, Homo sapien
ctatgacaaacagaccgaccaggaacagaaaga

SEQ ID NO: 600997 - DNA, 33 bp, Homo sapien
actgttgacattagacagcaaagatggctaagc

SEQ ID NO: 600998 - DNA, 33 bp, Homo sapien
actgttgacattagacggcaaagatggctaagc

SEQ ID NO: 600999 - DNA, 33 bp, Homo sapien
tactgcagataaaaagcatggacttagaagcca

SEQ ID NO: 601000 - DNA, 33 bp, Homo sapien
tactgcagataaaaagtatggacttagaagcca

SEQ ID NO: 601001 - DNA, 33 bp, Homo sapien
gaattgcctggtcacagggtaaccgcatgttta

SEQ ID NO: 601002 - DNA, 33 bp, Homo sapien
gaattgcctggtcacatggtaaccgcatgttta

SEQ ID NO: 601003 - DNA, 33 bp, Homo sapien
tctgcctccgccccaacgaatcctctggtttat

SEQ ID NO: 601004 - DNA, 33 bp, Homo sapien
tctgcctccgccccaatgaatcctctggtttat

SEQ ID NO: 601005 - DNA, 33 bp, Homo sapien
gcatcctccttctaggaactacatcgtcttccg

SEQ ID NO: 601006 - DNA, 33 bp, Homo sapien
gcatcctccttctagggactacatcgtcttccg

SEQ ID NO: 601007 - DNA, 33 bp, Homo sapien
ctgcaggcttgaatccaaaacctgtgtgtgccc

SEQ ID NO: 601008 - DNA, 33 bp, Homo sapien
ctgcaggcttgaatccgaaacctgtgtgtgccc

SEQ ID NO: 601009 - DNA, 33 bp, Homo sapien
cagccttcctcttactgagcctttggtacatgt

SEQ ID NO: 601010 - DNA, 33 bp, Homo sapien
cagccttcctcttacttagcctttggtacatgt

SEQ ID NO: 601011 - DNA, 33 bp, Homo sapien
cttatatcttcttaaacttgccaatggcttctt

SEQ ID NO: 601012 - DNA, 33 bp, Homo sapien
cttatatcttcttaaatttgccaatggcttctt

SEQ ID NO: 601013 - DNA, 33 bp, Homo sapien
caaagaacttttaaaacggatcttatatcttct

SEQ ID NO: 601014 - DNA, 33 bp, Homo sapien
caaagaacttttaaaatggatcttatatcttct

SEQ ID NO: 601015 - DNA, 33 bp, Homo sapien
gtgaagtgatcttgaactatgaagtggctcaaa

SEQ ID NO: 601016 - DNA, 33 bp, Homo sapien
gtgaagtgatcttgaagtatgaagtggctcaaa

SEQ ID NO: 601017 - DNA, 33 bp, Homo sapien
ccaccacaactggcaacgtttttatttttttgt

SEQ ID NO: 601018 - DNA, 33 bp, Homo sapien
ccaccacaactggcaatgtttttatttttttgt

SEQ ID NO: 601019 - DNA, 33 bp, Homo sapien
agagaccatcaaaccaagatcattctgcctgtg

SEQ ID NO: 601020 - DNA, 33 bp, Homo sapien
agagaccatcaaaccacgatcattctgcctgtg

SEQ ID NO: 601021 - DNA, 33 bp, Homo sapien
ggggcggctgtgtgaaaggccgtcctgtttgag

SEQ ID NO: 601022 - DNA, 33 bp, Homo sapien
ggggcggctgtgtgaatggccgtcctgtttgag

SEQ ID NO: 601023 - DNA, 33 bp, Homo sapien
tgaatctgacatagtcacacctgcagagaactc

SEQ ID NO: 601024 - DNA, 33 bp, Homo sapien
tgaatctgacatagtcccacctgcagagaactc

SEQ ID NO: 601025 - DNA, 33 bp, Homo sapien
aagtaatccaataatacatgaaaagcacttgac

SEQ ID NO: 601026 - DNA, 33 bp, Homo sapien
aagtaatccaataatagatgaaaagcacttgac

SEQ ID NO: 601027 - DNA, 33 bp, Homo sapien
tgaagaaaattgtagtcaatgttgtgtggatac

SEQ ID NO: 601028 - DNA, 33 bp, Homo sapien
tgaagaaaattgtagttaatgttgtgtggatac

SEQ ID NO: 601029 - DNA, 33 bp, Homo sapien
ccaatctgagtccatcccatggctctactatct

SEQ ID NO: 601030 - DNA, 33 bp, Homo sapien
ccaatctgagtccatctcatggctctactatct

SEQ ID NO: 601031 - DNA, 33 bp, Homo sapien
taataatatattggccgaagtggttggtattag

SEQ ID NO: 601032 - DNA, 33 bp, Homo sapien
taataatatattggcctaagtggttggtattag

SEQ ID NO: 601033 - DNA, 33 bp, Homo sapien
tacttttttctagccacgtagtaatgtcacagc

SEQ ID NO: 601034 - DNA, 33 bp, Homo sapien
tacttttttctagccatgtagtaatgtcacagc

SEQ ID NO: 601035 - DNA, 33 bp, Homo sapien
tacccactaggaggaactggcaactaaataaac

SEQ ID NO: 601036 - DNA, 33 bp, Homo sapien
tacccactaggaggaagtggcaactaaataaac

SEQ ID NO: 601037 - DNA, 33 bp, Homo sapien
gaactttgaaattagaatccagtgtcctcattt

SEQ ID NO: 601038 - DNA, 33 bp, Homo sapien
gaactttgaaattagagtccagtgtcctcattt

SEQ ID NO: 601039 - DNA, 33 bp, Homo sapien
gaagggtccggggtccaagtcccattttgaggc

SEQ ID NO: 601040 - DNA, 33 bp, Homo sapien
gaagggtccggggtccgagtcccattttgaggc

SEQ ID NO: 601041 - DNA, 33 bp, Homo sapien
aaaatacgtctgtatcgatcagaggcctgaggt

SEQ ID NO: 601042 - DNA, 33 bp, Homo sapien
aaaatacgtctgtatctatcagaggcctgaggt

SEQ ID NO: 601043 - DNA, 33 bp, Homo sapien
aatagtgttgaattcacgactccaccactgaaa

SEQ ID NO: 601044 - DNA, 33 bp, Homo sapien
aatagtgttgaattcatgactccaccactgaaa

SEQ ID NO: 601045 - DNA, 33 bp, Homo sapien
ctccatcacatatgctaactgtacacctatgat

SEQ ID NO: 601046 - DNA, 33 bp, Homo sapien
ctccatcacatatgctcactgtacacctatgat

SEQ ID NO: 601047 - DNA, 33 bp, Homo sapien
cccaaatgatcacttacatgagtccaagtgtgc

SEQ ID NO: 601048 - DNA, 33 bp, Homo sapien
cccaaatgatcacttatatgagtccaagtgtgc

SEQ ID NO: 601049 - DNA, 33 bp, Homo sapien
tctgtattaagtctcacgcttttgatcccagaa

SEQ ID NO: 601050 - DNA, 33 bp, Homo sapien
tctgtattaagtctcatgcttttgatcccagaa

SEQ ID NO: 601051 - DNA, 33 bp, Homo sapien
ctgttcagaaaaagaaaccagagctgaagtgac

SEQ ID NO: 601052 - DNA, 33 bp, Homo sapien
ctgttcagaaaaagaagccagagctgaagtgac

SEQ ID NO: 601053 - DNA, 33 bp, Homo sapien
catcaacactccttacgctggttaaccctcaca

SEQ ID NO: 601054 - DNA, 33 bp, Homo sapien
catcaacactccttactctggttaaccctcaca

SEQ ID NO: 601055 - DNA, 33 bp, Homo sapien
gccccgaccgggccacaaaaccagtatccgtac

SEQ ID NO: 601056 - DNA, 33 bp, Homo sapien
gccccgaccgggccaccaaaccagtatccgtac

SEQ ID NO: 601057 - DNA, 33 bp, Homo sapien
cacagtagtaacctcaatgagattgtactattg

SEQ ID NO: 601058 - DNA, 33 bp, Homo sapien
cacagtagtaacctcagtgagattgtactattg

SEQ ID NO: 601059 - DNA, 33 bp, Homo sapien
gttcaaaaacaggcaaaccctacactatagtat

SEQ ID NO: 601060 - DNA, 33 bp, Homo sapien
gttcaaaaacaggcaacccctacactatagtat

SEQ ID NO: 601061 - DNA, 33 bp, Homo sapien
ctggtgggctcaatccacttcatccacacacca

SEQ ID NO: 601062 - DNA, 33 bp, Homo sapien
ctggtgggctcaatcctcttcatccacacacca

SEQ ID NO: 601063 - DNA, 33 bp, Homo sapien
tgtcacaggcttgaagaatctgtcactgactgg

SEQ ID NO: 601064 - DNA, 33 bp, Homo sapien
tgtcacaggcttgaagcatctgtcactgactgg

SEQ ID NO: 601065 - DNA, 33 bp, Homo sapien
ctcattccagtgcaacaaacttttcctagctgc

SEQ ID NO: 601066 - DNA, 33 bp, Homo sapien
ctcattccagtgcaaccaacttttcctagctgc

SEQ ID NO: 601067 - DNA, 33 bp, Homo sapien
aacaagaaaatttcacaacaaaacaaggtgact

SEQ ID NO: 601068 - DNA, 33 bp, Homo sapien
aacaagaaaatttcaccacaaaacaaggtgact

SEQ ID NO: 601069 - DNA, 33 bp, Homo sapien
tgcaaagtattgttaacgcacatgaccccagcc

SEQ ID NO: 601070 - DNA, 33 bp, Homo sapien
tgcaaagtattgttaatgcacatgaccccagcc

SEQ ID NO: 601071 - DNA, 33 bp, Homo sapien
ctctagaaagccaaaaccaatagaagagaaaag

SEQ ID NO: 601072 - DNA, 33 bp, Homo sapien
ctctagaaagccaaaatcaatagaagagaaaag

SEQ ID NO: 601073 - DNA, 33 bp, Homo sapien
ctttctagagaacgccaatgaatatagctgcct

SEQ ID NO: 601074 - DNA, 33 bp, Homo sapien
ctttctagagaacgccgatgaatatagctgcct

SEQ ID NO: 601075 - DNA, 33 bp, Homo sapien
tagaatacaaggactacgtttggagatctacag

SEQ ID NO: 601076 - DNA, 33 bp, Homo sapien
tagaatacaaggactatgtttggagatctacag

SEQ ID NO: 601077 - DNA, 33 bp, Homo sapien
ggaagagacttcagaaaccgtaggaacaatctc

SEQ ID NO: 601078 - DNA, 33 bp, Homo sapien
ggaagagacttcagaagccgtaggaacaatctc

SEQ ID NO: 601079 - DNA, 33 bp, Homo sapien
ttcctggcaaagcttacactaaggccttcaaca

SEQ ID NO: 601080 - DNA, 33 bp, Homo sapien
ttcctggcaaagcttagactaaggccttcaaca

SEQ ID NO: 601081 - DNA, 33 bp, Homo sapien
tagagcattcagcttacgcaaaacaccgtgaat

SEQ ID NO: 601082 - DNA, 33 bp, Homo sapien
tagagcattcagcttatgcaaaacaccgtgaat

SEQ ID NO: 601083 - DNA, 33 bp, Homo sapien
tgctctagcaccaaagcccatgttttccagggc

SEQ ID NO: 601084 - DNA, 33 bp, Homo sapien
tgctctagcaccaaagtccatgttttccagggc

SEQ ID NO: 601085 - DNA, 33 bp, Homo sapien
tccagggccttaaagaaaataaatgcttattca

SEQ ID NO: 601086 - DNA, 33 bp, Homo sapien
tccagggccttaaagagaataaatgcttattca

SEQ ID NO: 601087 - DNA, 33 bp, Homo sapien
ctgagaaactgagccaaaagaaatgagagggat

SEQ ID NO: 601088 - DNA, 33 bp, Homo sapien
ctgagaaactgagccagaagaaatgagagggat

SEQ ID NO: 601089 - DNA, 33 bp, Homo sapien
tttcacagaataggtcacactcgtaatgacact

SEQ ID NO: 601090 - DNA, 33 bp, Homo sapien
tttcacagaataggtcgcactcgtaatgacact

SEQ ID NO: 601091 - DNA, 33 bp, Homo sapien
tgctgcgtgacctaagacagggtttttctgcag

SEQ ID NO: 601092 - DNA, 33 bp, Homo sapien
tgctgcgtgacctaagtcagggtttttctgcag

SEQ ID NO: 601093 - DNA, 33 bp, Homo sapien
acaggcctgctagcaaaaagacagaacaatctt

SEQ ID NO: 601094 - DNA, 33 bp, Homo sapien
acaggcctgctagcaagaagacagaacaatctt

SEQ ID NO: 601095 - DNA, 33 bp, Homo sapien
atgagaagatgtcttgaaaagcacctgacaaga

SEQ ID NO: 601096 - DNA, 33 bp, Homo sapien
atgagaagatgtcttgcaaagcacctgacaaga

SEQ ID NO: 601097 - DNA, 33 bp, Homo sapien
cttggagatgagatgaagctctaggacaaggca

SEQ ID NO: 601098 - DNA, 33 bp, Homo sapien
cttggagatgagatgatgctctaggacaaggca

SEQ ID NO: 601099 - DNA, 33 bp, Homo sapien
actccccatccccgggaacagtcagagcatctt

SEQ ID NO: 601100 - DNA, 33 bp, Homo sapien
actccccatccccgggtacagtcagagcatctt

SEQ ID NO: 601101 - DNA, 33 bp, Homo sapien
catcctcaggtcgtggcagaatttagtggcaca

SEQ ID NO: 601102 - DNA, 33 bp, Homo sapien
catcctcaggtcgtggtagaatttagtggcaca

SEQ ID NO: 601103 - DNA, 33 bp, Homo sapien
acacacgtgaacactcaatatgatttagccgat

SEQ ID NO: 601104 - DNA, 33 bp, Homo sapien
acacacgtgaacactcgatatgatttagccgat

SEQ ID NO: 601105 - DNA, 33 bp, Homo sapien
agtagggaagatgaaacgagaccatgcacccag

SEQ ID NO: 601106 - DNA, 33 bp, Homo sapien
agtagggaagatgaaatgagaccatgcacccag

SEQ ID NO: 601107 - DNA, 33 bp, Homo sapien
taacaaatccactctcaccataatgaagccatt

SEQ ID NO: 601108 - DNA, 33 bp, Homo sapien
taacaaatccactctcgccataatgaagccatt

SEQ ID NO: 601109 - DNA, 33 bp, Homo sapien
gcccaacacttgtcaacactaggaggaccagaa

SEQ ID NO: 601110 - DNA, 33 bp, Homo sapien
gcccaacacttgtcaatactaggaggaccagaa

SEQ ID NO: 601111 - DNA, 33 bp, Homo sapien
tatgctgaaacaagccaccatatatgtttaatc

SEQ ID NO: 601112 - DNA, 33 bp, Homo sapien
tatgctgaaacaagccgccatatatgtttaatc

SEQ ID NO: 601113 - DNA, 33 bp, Homo sapien
caactatggctgtgaacgtgtattgcatgccca

SEQ ID NO: 601114 - DNA, 33 bp, Homo sapien
caactatggctgtgaatgtgtattgcatgccca

SEQ ID NO: 601115 - DNA, 33 bp, Homo sapien
atggcccgtttccccaaatccaccatatgggct

SEQ ID NO: 601116 - DNA, 33 bp, Homo sapien
atggcccgtttccccagatccaccatatgggct

SEQ ID NO: 601117 - DNA, 33 bp, Homo sapien
gccgaatgtctgatccccctcacctcctgcctc

SEQ ID NO: 601118 - DNA, 33 bp, Homo sapien
gccgaatgtctgatcctcctcacctcctgcctc

SEQ ID NO: 601119 - DNA, 33 bp, Homo sapien
tggccttcccaatagaccaagcatctgggggaa

SEQ ID NO: 601120 - DNA, 33 bp, Homo sapien
tggccttcccaatagatcaagcatctgggggaa

SEQ ID NO: 601121 - DNA, 33 bp, Homo sapien
tgctggaaggagttcagaagttagggtatgcat

SEQ ID NO: 601122 - DNA, 33 bp, Homo sapien
tgctggaaggagttcataagttagggtatgcat

SEQ ID NO: 601123 - DNA, 33 bp, Homo sapien
acctactatgtacacgaccatgagggcactttg

SEQ ID NO: 601124 - DNA, 33 bp, Homo sapien
acctactatgtacacggccatgagggcactttg

SEQ ID NO: 601125 - DNA, 33 bp, Homo sapien
ctgagggtattctgtgaaataggtttgtcacgt

SEQ ID NO: 601126 - DNA, 33 bp, Homo sapien
ctgagggtattctgtggaataggtttgtcacgt

SEQ ID NO: 601127 - DNA, 33 bp, Homo sapien
cccttgtgtgcacaggcattttcactttacaca

SEQ ID NO: 601128 - DNA, 33 bp, Homo sapien
cccttgtgtgcacagggattttcactttacaca

SEQ ID NO: 601129 - DNA, 33 bp, Homo sapien
gccccacttcggtgacacacactgactttagaa

SEQ ID NO: 601130 - DNA, 33 bp, Homo sapien
gccccacttcggtgacgcacactgactttagaa

SEQ ID NO: 601131 - DNA, 33 bp, Homo sapien
gataatggctgaaaacaacttgtaaacaaacaa

SEQ ID NO: 601132 - DNA, 33 bp, Homo sapien
gataatggctgaaaacgacttgtaaacaaacaa

SEQ ID NO: 601133 - DNA, 33 bp, Homo sapien
ctattcaagaccatgacgagacataaattagac

SEQ ID NO: 601134 - DNA, 33 bp, Homo sapien
ctattcaagaccatgatgagacataaattagac

SEQ ID NO: 601135 - DNA, 33 bp, Homo sapien
agagcgcgcccagcacaaatgttctttaccgtc

SEQ ID NO: 601136 - DNA, 33 bp, Homo sapien
agagcgcgcccagcacgaatgttctttaccgtc

SEQ ID NO: 601137 - DNA, 33 bp, Homo sapien
gctgggagaaactaggaaggatgggactgcagg

SEQ ID NO: 601138 - DNA, 33 bp, Homo sapien
gctgggagaaactagggaggatgggactgcagg

SEQ ID NO: 601139 - DNA, 33 bp, Homo sapien
ggcaatctaggaacggcatattgaaaacttgca

SEQ ID NO: 601140 - DNA, 33 bp, Homo sapien
ggcaatctaggaacgggatattgaaaacttgca

SEQ ID NO: 601141 - DNA, 33 bp, Homo sapien
tccaagattcaataagccttaattttaaagttc

SEQ ID NO: 601142 - DNA, 33 bp, Homo sapien
tccaagattcaataaggcttaattttaaagttc

SEQ ID NO: 601143 - DNA, 33 bp, Homo sapien
attgatctcattgcctaaaacctcaaccagtct

SEQ ID NO: 601144 - DNA, 33 bp, Homo sapien
attgatctcattgcctgaaacctcaaccagtct

SEQ ID NO: 601145 - DNA, 33 bp, Homo sapien
cctgtcactcctggagaatttggtgagctggtg

SEQ ID NO: 601146 - DNA, 33 bp, Homo sapien
cctgtcactcctggaggatttggtgagctggtg

SEQ ID NO: 601147 - DNA, 33 bp, Homo sapien
ccaagctggaaggggcaagagaagtccctcttt

SEQ ID NO: 601148 - DNA, 33 bp, Homo sapien
ccaagctggaaggggcgagagaagtccctcttt

SEQ ID NO: 601149 - DNA, 33 bp, Homo sapien
tgtttttgttcatgtacgtgcaagggcccttgt

SEQ ID NO: 601150 - DNA, 33 bp, Homo sapien
tgtttttgttcatgtatgtgcaagggcccttgt

SEQ ID NO: 601151 - DNA, 33 bp, Homo sapien
gtgccaccagctcagacgtgacagtccctttgc

SEQ ID NO: 601152 - DNA, 33 bp, Homo sapien
gtgccaccagctcagatgtgacagtccctttgc

SEQ ID NO: 601153 - DNA, 33 bp, Homo sapien
ggctcacctgtaaaacaaagcaacatgatgatg

SEQ ID NO: 601154 - DNA, 33 bp, Homo sapien
ggctcacctgtaaaacgaagcaacatgatgatg

SEQ ID NO: 601155 - DNA, 33 bp, Homo sapien
ttcacgattattccacagagagtccattttatg

SEQ ID NO: 601156 - DNA, 33 bp, Homo sapien
ttcacgattattccacggagagtccattttatg

SEQ ID NO: 601157 - DNA, 33 bp, Homo sapien
caagtgcagcgaagagaagagaattgtaagtca

SEQ ID NO: 601158 - DNA, 33 bp, Homo sapien
caagtgcagcgaagaggagagaattgtaagtca

SEQ ID NO: 601159 - DNA, 33 bp, Homo sapien
tctggcatatcacaccagcccccccaggctcag

SEQ ID NO: 601160 - DNA, 33 bp, Homo sapien
tctggcatatcacaccggcccccccaggctcag

SEQ ID NO: 601161 - DNA, 33 bp, Homo sapien
agggatttgctgttcccatctccctgcagtgag

SEQ ID NO: 601162 - DNA, 33 bp, Homo sapien
agggatttgctgttcctatctccctgcagtgag

SEQ ID NO: 601163 - DNA, 33 bp, Homo sapien
acagcagcactctcagaaactgaaaggggctca

SEQ ID NO: 601164 - DNA, 33 bp, Homo sapien
acagcagcactctcaggaactgaaaggggctca

SEQ ID NO: 601165 - DNA, 33 bp, Homo sapien
agatagctgctgcctcaagctgatttaggacct

SEQ ID NO: 601166 - DNA, 33 bp, Homo sapien
agatagctgctgcctcgagctgatttaggacct

SEQ ID NO: 601167 - DNA, 33 bp, Homo sapien
caattgttcttccccaatcactccattgctcct

SEQ ID NO: 601168 - DNA, 33 bp, Homo sapien
caattgttcttccccagtcactccattgctcct

SEQ ID NO: 601169 - DNA, 33 bp, Homo sapien
tcactacataaggacccgctgtaaccagtctga

SEQ ID NO: 601170 - DNA, 33 bp, Homo sapien
tcactacataaggacctgctgtaaccagtctga

SEQ ID NO: 601171 - DNA, 33 bp, Homo sapien
gggaagctttccttgcaaagggaatataatatc

SEQ ID NO: 601172 - DNA, 33 bp, Homo sapien
gggaagctttccttgcgaagggaatataatatc

SEQ ID NO: 601173 - DNA, 33 bp, Homo sapien
gcttcggctccgtttcaaaagtgtacacaccac

SEQ ID NO: 601174 - DNA, 33 bp, Homo sapien
gcttcggctccgtttccaaagtgtacacaccac

SEQ ID NO: 601175 - DNA, 33 bp, Homo sapien
gggcctaattatagacacccagaggtcactttc

SEQ ID NO: 601176 - DNA, 33 bp, Homo sapien
gggcctaattatagacgcccagaggtcactttc

SEQ ID NO: 601177 - DNA, 33 bp, Homo sapien
caccgtacaccaactacgggctgtggccaatga

SEQ ID NO: 601178 - DNA, 33 bp, Homo sapien
caccgtacaccaactatgggctgtggccaatga

SEQ ID NO: 601179 - DNA, 33 bp, Homo sapien
aggcagaacgcatggccgagacaaaggcatgaa

SEQ ID NO: 601180 - DNA, 33 bp, Homo sapien
aggcagaacgcatggctgagacaaaggcatgaa

SEQ ID NO: 601181 - DNA, 33 bp, Homo sapien
atctatctctaaaacaatggtttatctttcaag

SEQ ID NO: 601182 - DNA, 33 bp, Homo sapien
atctatctctaaaacattggtttatctttcaag

SEQ ID NO: 601183 - DNA, 33 bp, Homo sapien
aaggatgtgagtcagaaaaagtcagtgggtaca

SEQ ID NO: 601184 - DNA, 33 bp, Homo sapien
aaggatgtgagtcagacaaagtcagtgggtaca

SEQ ID NO: 601185 - DNA, 33 bp, Homo sapien
gtgcagaggctgaaaacggactgctggctggtc

SEQ ID NO: 601186 - DNA, 33 bp, Homo sapien
gtgcagaggctgaaaagggactgctggctggtc

SEQ ID NO: 601187 - DNA, 33 bp, Homo sapien
tcttgacttatttagcaactggttcactttgct

SEQ ID NO: 601188 - DNA, 33 bp, Homo sapien
tcttgacttatttagcgactggttcactttgct

SEQ ID NO: 601189 - DNA, 33 bp, Homo sapien
ggcggccatgctcgaacggtcaaaagttaggga

SEQ ID NO: 601190 - DNA, 33 bp, Homo sapien
ggcggccatgctcgaatggtcaaaagttaggga

SEQ ID NO: 601191 - DNA, 33 bp, Homo sapien
aggccgcagaagagaaagccgtgtggggatgga

SEQ ID NO: 601192 - DNA, 33 bp, Homo sapien
aggccgcagaagagaaggccgtgtggggatgga

SEQ ID NO: 601193 - DNA, 33 bp, Homo sapien
gtgcctgctgtttcaccgggtcccctgggtttc

SEQ ID NO: 601194 - DNA, 33 bp, Homo sapien
gtgcctgctgtttcactgggtcccctgggtttc

SEQ ID NO: 601195 - DNA, 33 bp, Homo sapien
tttagtaggtgaattacggccgctggcacctga

SEQ ID NO: 601196 - DNA, 33 bp, Homo sapien
tttagtaggtgaattatggccgctggcacctga

SEQ ID NO: 601197 - DNA, 33 bp, Homo sapien
gggaaactgtcgccacgattcaactacccccac

SEQ ID NO: 601198 - DNA, 33 bp, Homo sapien
gggaaactgtcgccactattcaactacccccac

SEQ ID NO: 601199 - DNA, 33 bp, Homo sapien
gcagggctccttgctcgacttaagtcttactcc

SEQ ID NO: 601200 - DNA, 33 bp, Homo sapien
gcagggctccttgctctacttaagtcttactcc

SEQ ID NO: 601201 - DNA, 33 bp, Homo sapien
cctcttttataacagcactactatggtttgaat

SEQ ID NO: 601202 - DNA, 33 bp, Homo sapien
cctcttttataacagcgctactatggtttgaat

SEQ ID NO: 601203 - DNA, 33 bp, Homo sapien
ccacgggacttgctcaagccaataaaatgtgaa

SEQ ID NO: 601204 - DNA, 33 bp, Homo sapien
ccacgggacttgctcaggccaataaaatgtgaa

SEQ ID NO: 601205 - DNA, 33 bp, Homo sapien
aaacctctactgctgaacagtgctgtgttgggg

SEQ ID NO: 601206 - DNA, 33 bp, Homo sapien
aaacctctactgctgatcagtgctgtgttgggg

SEQ ID NO: 601207 - DNA, 33 bp, Homo sapien
ccgatttaaggcgatacgcaaataccaccactt

SEQ ID NO: 601208 - DNA, 33 bp, Homo sapien
ccgatttaaggcgatatgcaaataccaccactt

SEQ ID NO: 601209 - DNA, 33 bp, Homo sapien
tttccaaatattttcactctggtttgttgagtc

SEQ ID NO: 601210 - DNA, 33 bp, Homo sapien
tttccaaatattttcagtctggtttgttgagtc

SEQ ID NO: 601211 - DNA, 33 bp, Homo sapien
gattactggaacaaggaataggtaagataatgc

SEQ ID NO: 601212 - DNA, 33 bp, Homo sapien
gattactggaacaagggataggtaagataatgc

SEQ ID NO: 601213 - DNA, 33 bp, Homo sapien
ggggtgtgtgctctgcagagtgtctggatggaa

SEQ ID NO: 601214 - DNA, 33 bp, Homo sapien
ggggtgtgtgctctgccgagtgtctggatggaa

SEQ ID NO: 601215 - DNA, 33 bp, Homo sapien
ctagaatattaactgacaggagtatattaggac

SEQ ID NO: 601216 - DNA, 33 bp, Homo sapien
ctagaatattaactgagaggagtatattaggac

SEQ ID NO: 601217 - DNA, 33 bp, Homo sapien
gggtcccttttgcctacgcagccctgctctgca

SEQ ID NO: 601218 - DNA, 33 bp, Homo sapien
gggtcccttttgcctatgcagccctgctctgca

SEQ ID NO: 601219 - DNA, 33 bp, Homo sapien
gagccagactgcattaggaattctattttccag

SEQ ID NO: 601220 - DNA, 33 bp, Homo sapien
gagccagactgcattatgaattctattttccag

SEQ ID NO: 601221 - DNA, 33 bp, Homo sapien
aacccatcagtgaatgcacaatgcttggatcag

SEQ ID NO: 601222 - DNA, 33 bp, Homo sapien
aacccatcagtgaatgtacaatgcttggatcag

SEQ ID NO: 601223 - DNA, 33 bp, Homo sapien
ccccagctgcagtttaccattttcaacatcccc

SEQ ID NO: 601224 - DNA, 33 bp, Homo sapien
ccccagctgcagtttatcattttcaacatcccc

SEQ ID NO: 601225 - DNA, 33 bp, Homo sapien
cttgagctgctgggaaaaatgccagggaccagg

SEQ ID NO: 601226 - DNA, 33 bp, Homo sapien
cttgagctgctgggaacaatgccagggaccagg

SEQ ID NO: 601227 - DNA, 33 bp, Homo sapien
tttctggtgtggggaaaaagtagaagatgcttt

SEQ ID NO: 601228 - DNA, 33 bp, Homo sapien
tttctggtgtggggaacaagtagaagatgcttt

SEQ ID NO: 601229 - DNA, 33 bp, Homo sapien
gcatcagtggctgccacgacaactagttttctt

SEQ ID NO: 601230 - DNA, 33 bp, Homo sapien
gcatcagtggctgccatgacaactagttttctt

SEQ ID NO: 601231 - DNA, 33 bp, Homo sapien
ttgataatcctagaaaagatgaccagctccttt

SEQ ID NO: 601232 - DNA, 33 bp, Homo sapien
ttgataatcctagaaacgatgaccagctccttt

SEQ ID NO: 601233 - DNA, 33 bp, Homo sapien
cccagtgaaataaagtaaattgcctgaagtcag

SEQ ID NO: 601234 - DNA, 33 bp, Homo sapien
cccagtgaaataaagtgaattgcctgaagtcag

SEQ ID NO: 601235 - DNA, 33 bp, Homo sapien
ctcagagtcctctccacaaatttatgtgttgga

SEQ ID NO: 601236 - DNA, 33 bp, Homo sapien
ctcagagtcctctccagaaatttatgtgttgga

SEQ ID NO: 601237 - DNA, 33 bp, Homo sapien
ggcctcacgtgctcgccgcacttagtcctcacc

SEQ ID NO: 601238 - DNA, 33 bp, Homo sapien
ggcctcacgtgctcgctgcacttagtcctcacc

SEQ ID NO: 601239 - DNA, 33 bp, Homo sapien
tactcatgtacatcaaaggatcaaggccgggcg

SEQ ID NO: 601240 - DNA, 33 bp, Homo sapien
tactcatgtacatcaacggatcaaggccgggcg

SEQ ID NO: 601241 - DNA, 33 bp, Homo sapien
ccagacgtgttttgcagtctcccagagagctct

SEQ ID NO: 601242 - DNA, 33 bp, Homo sapien
ccagacgtgttttgcattctcccagagagctct

SEQ ID NO: 601243 - DNA, 33 bp, Homo sapien
tgagatcacccagctcagaagaatcaaaacgcc

SEQ ID NO: 601244 - DNA, 33 bp, Homo sapien
tgagatcacccagctcggaagaatcaaaacgcc

SEQ ID NO: 601245 - DNA, 33 bp, Homo sapien
acagagagatcaaagaggggaataagatggaag

SEQ ID NO: 601246 - DNA, 33 bp, Homo sapien
acagagagatcaaagatgggaataagatggaag

SEQ ID NO: 601247 - DNA, 33 bp, Homo sapien
gggttcagcatacttcacttagagaatggaaaa

SEQ ID NO: 601248 - DNA, 33 bp, Homo sapien
gggttcagcatacttcgcttagagaatggaaaa

SEQ ID NO: 601249 - DNA, 33 bp, Homo sapien
ttcactgagcaaaaagacctccagccatgggca

SEQ ID NO: 601250 - DNA, 33 bp, Homo sapien
ttcactgagcaaaaagccctccagccatgggca

SEQ ID NO: 601251 - DNA, 33 bp, Homo sapien
gatgttacacgaaaccagatcggcagacgttgg

SEQ ID NO: 601252 - DNA, 33 bp, Homo sapien
gatgttacacgaaaccggatcggcagacgttgg

SEQ ID NO: 601253 - DNA, 33 bp, Homo sapien
gcagtggccatgtggcaatgttggaaccactgg

SEQ ID NO: 601254 - DNA, 33 bp, Homo sapien
gcagtggccatgtggcgatgttggaaccactgg

SEQ ID NO: 601255 - DNA, 33 bp, Homo sapien
gagggttacattgtaaagttcacagacacagtg

SEQ ID NO: 601256 - DNA, 33 bp, Homo sapien
gagggttacattgtaaggttcacagacacagtg

SEQ ID NO: 601257 - DNA, 33 bp, Homo sapien
ggggacagcagaccaacgtggagagtgaatcgc

SEQ ID NO: 601258 - DNA, 33 bp, Homo sapien
ggggacagcagaccaatgtggagagtgaatcgc

SEQ ID NO: 601259 - DNA, 33 bp, Homo sapien
tccccttcctccacacagtgcgtgccagaaagc

SEQ ID NO: 601260 - DNA, 33 bp, Homo sapien
tccccttcctccacacggtgcgtgccagaaagc

SEQ ID NO: 601261 - DNA, 33 bp, Homo sapien
aaactttatttacacaaagaaatggcaggctgg

SEQ ID NO: 601262 - DNA, 33 bp, Homo sapien
aaactttatttacacagagaaatggcaggctgg

SEQ ID NO: 601263 - DNA, 33 bp, Homo sapien
accaggaaccagcctacagaactaaagctagtg

SEQ ID NO: 601264 - DNA, 33 bp, Homo sapien
accaggaaccagcctatagaactaaagctagtg

SEQ ID NO: 601265 - DNA, 33 bp, Homo sapien
tgccacaggctgtgaacctcttgagagctaggc

SEQ ID NO: 601266 - DNA, 33 bp, Homo sapien
tgccacaggctgtgaatctcttgagagctaggc

SEQ ID NO: 601267 - DNA, 33 bp, Homo sapien
cttgctccaccaataacagtgcctgaacaaaga

SEQ ID NO: 601268 - DNA, 33 bp, Homo sapien
cttgctccaccaataatagtgcctgaacaaaga

SEQ ID NO: 601269 - DNA, 33 bp, Homo sapien
gcataaggtatattcgcattagtgttaatacaa

SEQ ID NO: 601270 - DNA, 33 bp, Homo sapien
gcataaggtatattcggattagtgttaatacaa

SEQ ID NO: 601271 - DNA, 33 bp, Homo sapien
agaaagtgaggcccaacggagcaagctcttgag

SEQ ID NO: 601272 - DNA, 33 bp, Homo sapien
agaaagtgaggcccaatggagcaagctcttgag

SEQ ID NO: 601273 - DNA, 33 bp, Homo sapien
gagggtcgctggggagcatttttagctaacttc

SEQ ID NO: 601274 - DNA, 33 bp, Homo sapien
gagggtcgctggggaggatttttagctaacttc

SEQ ID NO: 601275 - DNA, 33 bp, Homo sapien
agtttgcttagttatgaatggactatcaagaag

SEQ ID NO: 601276 - DNA, 33 bp, Homo sapien
agtttgcttagttatgtatggactatcaagaag

SEQ ID NO: 601277 - DNA, 33 bp, Homo sapien
ggccatactcgacctccctagctgcccaaagga

SEQ ID NO: 601278 - DNA, 33 bp, Homo sapien
ggccatactcgacctcgctagctgcccaaagga

SEQ ID NO: 601279 - DNA, 33 bp, Homo sapien
tagcgtatttatgtgccgataggaatgattcat

SEQ ID NO: 601280 - DNA, 33 bp, Homo sapien
tagcgtatttatgtgctgataggaatgattcat

SEQ ID NO: 601281 - DNA, 33 bp, Homo sapien
ttaagaaatggtagaaccacttggaattccctt

SEQ ID NO: 601282 - DNA, 33 bp, Homo sapien
ttaagaaatggtagaagcacttggaattccctt

SEQ ID NO: 601283 - DNA, 33 bp, Homo sapien
agagttgggtaagggcaaagagttgtgattacc

SEQ ID NO: 601284 - DNA, 33 bp, Homo sapien
agagttgggtaagggcgaagagttgtgattacc

SEQ ID NO: 601285 - DNA, 33 bp, Homo sapien
tgaagtagttcagatacataaacagttagagtt

SEQ ID NO: 601286 - DNA, 33 bp, Homo sapien
tgaagtagttcagatatataaacagttagagtt

SEQ ID NO: 601287 - DNA, 33 bp, Homo sapien
gaagtcgcccacataccgctcctgacgctaatt

SEQ ID NO: 601288 - DNA, 33 bp, Homo sapien
gaagtcgcccacatactgctcctgacgctaatt

SEQ ID NO: 601289 - DNA, 33 bp, Homo sapien
ccccgtgggctttgaaatgatcgctgacaatgg

SEQ ID NO: 601290 - DNA, 33 bp, Homo sapien
ccccgtgggctttgaagtgatcgctgacaatgg

SEQ ID NO: 601291 - DNA, 33 bp, Homo sapien
cctcactggccagaacacagtggtgcagcatgg

SEQ ID NO: 601292 - DNA, 33 bp, Homo sapien
cctcactggccagaacgcagtggtgcagcatgg

SEQ ID NO: 601293 - DNA, 33 bp, Homo sapien
aaatcctattttcttaacataaatccagttgac

SEQ ID NO: 601294 - DNA, 33 bp, Homo sapien
aaatcctattttcttagcataaatccagttgac

SEQ ID NO: 601295 - DNA, 33 bp, Homo sapien
cacgtcaccatcgctaccctccacacctactta

SEQ ID NO: 601296 - DNA, 33 bp, Homo sapien
cacgtcaccatcgctatcctccacacctactta

SEQ ID NO: 601297 - DNA, 33 bp, Homo sapien
gtatgtatccacccatcatgacaggatttccca

SEQ ID NO: 601298 - DNA, 33 bp, Homo sapien
gtatgtatccacccatgatgacaggatttccca

SEQ ID NO: 601299 - DNA, 33 bp, Homo sapien
ggtatctgggcacaagaagccactgctcgccag

SEQ ID NO: 601300 - DNA, 33 bp, Homo sapien
ggtatctgggcacaagcagccactgctcgccag

SEQ ID NO: 601301 - DNA, 33 bp, Homo sapien
gcagaagagatacaggaaggggaaatgagtcca

SEQ ID NO: 601302 - DNA, 33 bp, Homo sapien
gcagaagagatacagggaggggaaatgagtcca

SEQ ID NO: 601303 - DNA, 33 bp, Homo sapien
aaactcttaaactatgaacagtgtctaaatcga

SEQ ID NO: 601304 - DNA, 33 bp, Homo sapien
aaactcttaaactatgcacagtgtctaaatcga

SEQ ID NO: 601305 - DNA, 33 bp, Homo sapien
tgaagggaagattcatcagcagcgagggaagat

SEQ ID NO: 601306 - DNA, 33 bp, Homo sapien
tgaagggaagattcatgagcagcgagggaagat

SEQ ID NO: 601307 - DNA, 33 bp, Homo sapien
gatctcgtcatcattaaccttattgcatcctag

SEQ ID NO: 601308 - DNA, 33 bp, Homo sapien
gatctcgtcatcattacccttattgcatcctag

SEQ ID NO: 601309 - DNA, 33 bp, Homo sapien
gaaaaatagtgattgcagagacctcaaaaatga

SEQ ID NO: 601310 - DNA, 33 bp, Homo sapien
gaaaaatagtgattgccgagacctcaaaaatga

SEQ ID NO: 601311 - DNA, 33 bp, Homo sapien
ggactgatttggcaataaggcctctgtagctaa

SEQ ID NO: 601312 - DNA, 33 bp, Homo sapien
ggactgatttggcaatgaggcctctgtagctaa

SEQ ID NO: 601313 - DNA, 33 bp, Homo sapien
tccaccaggtgatgcaagctgtggtgataaact

SEQ ID NO: 601314 - DNA, 33 bp, Homo sapien
tccaccaggtgatgcaggctgtggtgataaact

SEQ ID NO: 601315 - DNA, 33 bp, Homo sapien
accggtccttagtaggaaggtctgaaagtagtt

SEQ ID NO: 601316 - DNA, 33 bp, Homo sapien
accggtccttagtagggaggtctgaaagtagtt

SEQ ID NO: 601317 - DNA, 33 bp, Homo sapien
gaggtctggattattacggtcatgaagaacagt

SEQ ID NO: 601318 - DNA, 33 bp, Homo sapien
gaggtctggattattatggtcatgaagaacagt

SEQ ID NO: 601319 - DNA, 33 bp, Homo sapien
caagcctgctccatctaaaccaagcactctcca

SEQ ID NO: 601320 - DNA, 33 bp, Homo sapien
caagcctgctccatctgaaccaagcactctcca

SEQ ID NO: 601321 - DNA, 33 bp, Homo sapien
tccagcacgttgtttacagttcaccaacagtgt

SEQ ID NO: 601322 - DNA, 33 bp, Homo sapien
tccagcacgttgtttatagttcaccaacagtgt

SEQ ID NO: 601323 - DNA, 33 bp, Homo sapien
tgttatatctattcagaatgttatgttgcaatt

SEQ ID NO: 601324 - DNA, 33 bp, Homo sapien
tgttatatctattcagtatgttatgttgcaatt

SEQ ID NO: 601325 - DNA, 33 bp, Homo sapien
agaattactcaacctccagtatcatagaaaaga

SEQ ID NO: 601326 - DNA, 33 bp, Homo sapien
agaattactcaacctctagtatcatagaaaaga

SEQ ID NO: 601327 - DNA, 33 bp, Homo sapien
gctatgctagagattacggatcctgatgaataa

SEQ ID NO: 601328 - DNA, 33 bp, Homo sapien
gctatgctagagattagggatcctgatgaataa

SEQ ID NO: 601329 - DNA, 33 bp, Homo sapien
agtatatttacatgagaaaccaaatgatagtta

SEQ ID NO: 601330 - DNA, 33 bp, Homo sapien
agtatatttacatgagcaaccaaatgatagtta

SEQ ID NO: 601331 - DNA, 33 bp, Homo sapien
tcatttctaacactatcaaagggagagagaatc

SEQ ID NO: 601332 - DNA, 33 bp, Homo sapien
tcatttctaacactatgaaagggagagagaatc

SEQ ID NO: 601333 - DNA, 33 bp, Homo sapien
caactacaaccagtcaatgaacattcattcatt

SEQ ID NO: 601334 - DNA, 33 bp, Homo sapien
caactacaaccagtcagtgaacattcattcatt

SEQ ID NO: 601335 - DNA, 33 bp, Homo sapien
acccttatgttatggaggaagaaactaaagccc

SEQ ID NO: 601336 - DNA, 33 bp, Homo sapien
acccttatgttatggatgaagaaactaaagccc

SEQ ID NO: 601337 - DNA, 33 bp, Homo sapien
cacttggatagtggtcacattttctgttgggac

SEQ ID NO: 601338 - DNA, 33 bp, Homo sapien
cacttggatagtggtcgcattttctgttgggac

SEQ ID NO: 601339 - DNA, 33 bp, Homo sapien
gtaaaaatgttctggaaagccaaaattgctgtg

SEQ ID NO: 601340 - DNA, 33 bp, Homo sapien
gtaaaaatgttctggagagccaaaattgctgtg

SEQ ID NO: 601341 - DNA, 33 bp, Homo sapien
aaataatctccttaaagctcttgccacatgatt

SEQ ID NO: 601342 - DNA, 33 bp, Homo sapien
aaataatctccttaaatctcttgccacatgatt

SEQ ID NO: 601343 - DNA, 33 bp, Homo sapien
atgaaatcattactgtaaacacacacgaaacct

SEQ ID NO: 601344 - DNA, 33 bp, Homo sapien
atgaaatcattactgtgaacacacacgaaacct

SEQ ID NO: 601345 - DNA, 33 bp, Homo sapien
cccatgactcccaggaaggtttgaaaataggag

SEQ ID NO: 601346 - DNA, 33 bp, Homo sapien
cccatgactcccaggatggtttgaaaataggag

SEQ ID NO: 601347 - DNA, 33 bp, Homo sapien
tgaagctgcctggagacaaaaggataaagtgga

SEQ ID NO: 601348 - DNA, 33 bp, Homo sapien
tgaagctgcctggagagaaaaggataaagtgga

SEQ ID NO: 601349 - DNA, 33 bp, Homo sapien
ccatattcccacatagaaaaagccacctaactg

SEQ ID NO: 601350 - DNA, 33 bp, Homo sapien
ccatattcccacataggaaaagccacctaactg

SEQ ID NO: 601351 - DNA, 33 bp, Homo sapien
cacaaattcattaataagtctaactctccttca

SEQ ID NO: 601352 - DNA, 33 bp, Homo sapien
cacaaattcattaatatgtctaactctccttca

SEQ ID NO: 601353 - DNA, 33 bp, Homo sapien
tacaaaggtgcagcaacatcatagtcattactg

SEQ ID NO: 601354 - DNA, 33 bp, Homo sapien
tacaaaggtgcagcaatatcatagtcattactg

SEQ ID NO: 601355 - DNA, 33 bp, Homo sapien
aaatatttaatggcaccgaactgtgtagctaaa

SEQ ID NO: 601356 - DNA, 33 bp, Homo sapien
aaatatttaatggcactgaactgtgtagctaaa

SEQ ID NO: 601357 - DNA, 33 bp, Homo sapien
gggaccaaactggataccaggttcccactattc

SEQ ID NO: 601358 - DNA, 33 bp, Homo sapien
gggaccaaactggatagcaggttcccactattc

SEQ ID NO: 601359 - DNA, 33 bp, Homo sapien
gtggaagtatgttatacgagagatacagcaaag

SEQ ID NO: 601360 - DNA, 33 bp, Homo sapien
gtggaagtatgttatatgagagatacagcaaag

SEQ ID NO: 601361 - DNA, 33 bp, Homo sapien
actgaaagccaatcaactgaatgatcaataacg

SEQ ID NO: 601362 - DNA, 33 bp, Homo sapien
actgaaagccaatcaattgaatgatcaataacg

SEQ ID NO: 601363 - DNA, 33 bp, Homo sapien
ctatggggccaagaataaaggtctacactctta

SEQ ID NO: 601364 - DNA, 33 bp, Homo sapien
ctatggggccaagaatgaaggtctacactctta

SEQ ID NO: 601365 - DNA, 33 bp, Homo sapien
gtggtgataaaaatcaactgatggtttttgtaa

SEQ ID NO: 601366 - DNA, 33 bp, Homo sapien
gtggtgataaaaatcagctgatggtttttgtaa

SEQ ID NO: 601367 - DNA, 33 bp, Homo sapien
agagtactagagataacagagtaactgatgtta

SEQ ID NO: 601368 - DNA, 33 bp, Homo sapien
agagtactagagataagagagtaactgatgtta

SEQ ID NO: 601369 - DNA, 33 bp, Homo sapien
tcactcaggacactaaaacagctaggtgccagg

SEQ ID NO: 601370 - DNA, 33 bp, Homo sapien
tcactcaggacactaagacagctaggtgccagg

SEQ ID NO: 601371 - DNA, 33 bp, Homo sapien
gtaaaggatcaaaagacggcagtgactttggtc

SEQ ID NO: 601372 - DNA, 33 bp, Homo sapien
gtaaaggatcaaaagatggcagtgactttggtc

SEQ ID NO: 601373 - DNA, 33 bp, Homo sapien
gttcagagctaccaagaaagccaagatttgaca

SEQ ID NO: 601374 - DNA, 33 bp, Homo sapien
gttcagagctaccaaggaagccaagatttgaca

SEQ ID NO: 601375 - DNA, 33 bp, Homo sapien
atcaaaggaaaaataaatacctgactgatgtgg

SEQ ID NO: 601376 - DNA, 33 bp, Homo sapien
atcaaaggaaaaataagtacctgactgatgtgg

SEQ ID NO: 601377 - DNA, 33 bp, Homo sapien
atcatccactatcaacagtaatcattattttaa

SEQ ID NO: 601378 - DNA, 33 bp, Homo sapien
atcatccactatcaacggtaatcattattttaa

SEQ ID NO: 601379 - DNA, 33 bp, Homo sapien
ccaggtcctcctctggcatacattaatctgtgt

SEQ ID NO: 601380 - DNA, 33 bp, Homo sapien
ccaggtcctcctctggtatacattaatctgtgt

SEQ ID NO: 601381 - DNA, 33 bp, Homo sapien
gtttatcttattatcacaggtctcacagaaagc

SEQ ID NO: 601382 - DNA, 33 bp, Homo sapien
gtttatcttattatcataggtctcacagaaagc

SEQ ID NO: 601383 - DNA, 33 bp, Homo sapien
aactagatgactaggaagaaaaattattttaat

SEQ ID NO: 601384 - DNA, 33 bp, Homo sapien
aactagatgactaggatgaaaaattattttaat

SEQ ID NO: 601385 - DNA, 33 bp, Homo sapien
ccatgccttcaaaacaagacagacccacaaagg

SEQ ID NO: 601386 - DNA, 33 bp, Homo sapien
ccatgccttcaaaacaggacagacccacaaagg

SEQ ID NO: 601387 - DNA, 33 bp, Homo sapien
ttttccccatggtcacactctcaacaagttata

SEQ ID NO: 601388 - DNA, 33 bp, Homo sapien
ttttccccatggtcacgctctcaacaagttata

SEQ ID NO: 601389 - DNA, 33 bp, Homo sapien
attcagtctttccagaaaatgaaattgttgcta

SEQ ID NO: 601390 - DNA, 33 bp, Homo sapien
attcagtctttccagataatgaaattgttgcta

SEQ ID NO: 601391 - DNA, 33 bp, Homo sapien
aatgaattttgtgatacacgagggtattactgg

SEQ ID NO: 601392 - DNA, 33 bp, Homo sapien
aatgaattttgtgatatacgagggtattactgg

SEQ ID NO: 601393 - DNA, 33 bp, Homo sapien
acacaaaaggaaagaacgtgctacaatttggca

SEQ ID NO: 601394 - DNA, 33 bp, Homo sapien
acacaaaaggaaagaatgtgctacaatttggca

SEQ ID NO: 601395 - DNA, 33 bp, Homo sapien
gagtgccccgacctgacgtcttcagctgagaac

SEQ ID NO: 601396 - DNA, 33 bp, Homo sapien
gagtgccccgacctgatgtcttcagctgagaac

SEQ ID NO: 601397 - DNA, 33 bp, Homo sapien
attttattgacagctcagagcaattaataaaga

SEQ ID NO: 601398 - DNA, 33 bp, Homo sapien
attttattgacagctcggagcaattaataaaga

SEQ ID NO: 601399 - DNA, 33 bp, Homo sapien
tgtgtaaacaatgaaaactcatgcagaaggtta

SEQ ID NO: 601400 - DNA, 33 bp, Homo sapien
tgtgtaaacaatgaaagctcatgcagaaggtta

SEQ ID NO: 601401 - DNA, 33 bp, Homo sapien
gtttcttccttgtctagtaaatgttctccaaag

SEQ ID NO: 601402 - DNA, 33 bp, Homo sapien
gtttcttccttgtctattaaatgttctccaaag

SEQ ID NO: 601403 - DNA, 33 bp, Homo sapien
tgtaaagatccagatacaattcttcagagttca

SEQ ID NO: 601404 - DNA, 33 bp, Homo sapien
tgtaaagatccagatagaattcttcagagttca

SEQ ID NO: 601405 - DNA, 33 bp, Homo sapien
taaaacttatctggaacagattcagtggtcaca

SEQ ID NO: 601406 - DNA, 33 bp, Homo sapien
taaaacttatctggaatagattcagtggtcaca

SEQ ID NO: 601407 - DNA, 33 bp, Homo sapien
atacctagctaacctaccctgtcttgactaata

SEQ ID NO: 601408 - DNA, 33 bp, Homo sapien
atacctagctaacctagcctgtcttgactaata

SEQ ID NO: 601409 - DNA, 33 bp, Homo sapien
ttctctgactagagaaatattaagttagtgggg

SEQ ID NO: 601410 - DNA, 33 bp, Homo sapien
ttctctgactagagaagtattaagttagtgggg

SEQ ID NO: 601411 - DNA, 33 bp, Homo sapien
caaattgttctgtaagaaattgtatcaggcaag

SEQ ID NO: 601412 - DNA, 33 bp, Homo sapien
caaattgttctgtaaggaattgtatcaggcaag

SEQ ID NO: 601413 - DNA, 33 bp, Homo sapien
aaccttacttcatgcccagaactgtttaaatag

SEQ ID NO: 601414 - DNA, 33 bp, Homo sapien
aaccttacttcatgcctagaactgtttaaatag

SEQ ID NO: 601415 - DNA, 33 bp, Homo sapien
tacatggttcttagaccccagtgtctcaaactt

SEQ ID NO: 601416 - DNA, 33 bp, Homo sapien
tacatggttcttagactccagtgtctcaaactt

SEQ ID NO: 601417 - DNA, 33 bp, Homo sapien
aagggacagtacacacagcattcaaggtaatgg

SEQ ID NO: 601418 - DNA, 33 bp, Homo sapien
aagggacagtacacactgcattcaaggtaatgg

SEQ ID NO: 601419 - DNA, 33 bp, Homo sapien
tgggttctttaacttacgtgtacattcacacac

SEQ ID NO: 601420 - DNA, 33 bp, Homo sapien
tgggttctttaacttatgtgtacattcacacac

SEQ ID NO: 601421 - DNA, 33 bp, Homo sapien
gtgccaaaaacctggacaactccaatcagaacc

SEQ ID NO: 601422 - DNA, 33 bp, Homo sapien
gtgccaaaaacctggataactccaatcagaacc

SEQ ID NO: 601423 - DNA, 33 bp, Homo sapien
aacctgaggaccaagaacctgaggagcctaccc

SEQ ID NO: 601424 - DNA, 33 bp, Homo sapien
aacctgaggaccaagagcctgaggagcctaccc

SEQ ID NO: 601425 - DNA, 33 bp, Homo sapien
gggaatatagattgaacgaacaggtgtgtttca

SEQ ID NO: 601426 - DNA, 33 bp, Homo sapien
gggaatatagattgaaggaacaggtgtgtttca

SEQ ID NO: 601427 - DNA, 33 bp, Homo sapien
cacaaaggaagacagcccttaacaactccacct

SEQ ID NO: 601428 - DNA, 33 bp, Homo sapien
cacaaaggaagacagctcttaacaactccacct

SEQ ID NO: 601429 - DNA, 33 bp, Homo sapien
agggaagcaaaaagtaaacatgatttctcctgc

SEQ ID NO: 601430 - DNA, 33 bp, Homo sapien
agggaagcaaaaagtagacatgatttctcctgc

SEQ ID NO: 601431 - DNA, 33 bp, Homo sapien
tgatataaacggtaaaagcttatctattcccaa

SEQ ID NO: 601432 - DNA, 33 bp, Homo sapien
tgatataaacggtaaaggcttatctattcccaa

SEQ ID NO: 601433 - DNA, 33 bp, Homo sapien
ccaggccctttgcagaaaagtttttggattcct

SEQ ID NO: 601434 - DNA, 33 bp, Homo sapien
ccaggccctttgcagagaagtttttggattcct

SEQ ID NO: 601435 - DNA, 33 bp, Homo sapien
ttatttcactctattgaatcttgcaactgcact

SEQ ID NO: 601436 - DNA, 33 bp, Homo sapien
ttatttcactctattggatcttgcaactgcact

SEQ ID NO: 601437 - DNA, 33 bp, Homo sapien
attggttaattatctacaccaagtcctacgata

SEQ ID NO: 601438 - DNA, 33 bp, Homo sapien
attggttaattatctataccaagtcctacgata

SEQ ID NO: 601439 - DNA, 33 bp, Homo sapien
tattgatgcatttctaaattatttctaatcttt

SEQ ID NO: 601440 - DNA, 33 bp, Homo sapien
tattgatgcatttctagattatttctaatcttt

SEQ ID NO: 601441 - DNA, 33 bp, Homo sapien
gcattagacatccaaagatctcatcccactgcc

SEQ ID NO: 601442 - DNA, 33 bp, Homo sapien
gcattagacatccaaatatctcatcccactgcc

SEQ ID NO: 601443 - DNA, 33 bp, Homo sapien
tgttctattatgtacgcagaccaaaagtacttt

SEQ ID NO: 601444 - DNA, 33 bp, Homo sapien
tgttctattatgtacgtagaccaaaagtacttt

SEQ ID NO: 601445 - DNA, 33 bp, Homo sapien
aggacggctcctaagacataaaatacagacttt

SEQ ID NO: 601446 - DNA, 33 bp, Homo sapien
aggacggctcctaagagataaaatacagacttt

SEQ ID NO: 601447 - DNA, 33 bp, Homo sapien
taataaatgaacgtgcggataaacattcttctt

SEQ ID NO: 601448 - DNA, 33 bp, Homo sapien
taataaatgaacgtgctgataaacattcttctt

SEQ ID NO: 601449 - DNA, 33 bp, Homo sapien
acagaggtatcactatcacaaagaatcctttcc

SEQ ID NO: 601450 - DNA, 33 bp, Homo sapien
acagaggtatcactattacaaagaatcctttcc

SEQ ID NO: 601451 - DNA, 33 bp, Homo sapien
accctactccagattacgacggctcacagtggg

SEQ ID NO: 601452 - DNA, 33 bp, Homo sapien
accctactccagattatgacggctcacagtggg

SEQ ID NO: 601453 - DNA, 33 bp, Homo sapien
catggttacaaatccaagctttagagtgagaca

SEQ ID NO: 601454 - DNA, 33 bp, Homo sapien
catggttacaaatccaggctttagagtgagaca

SEQ ID NO: 601455 - DNA, 33 bp, Homo sapien
acctccacccatctaacgaatacttaccaatca

SEQ ID NO: 601456 - DNA, 33 bp, Homo sapien
acctccacccatctaatgaatacttaccaatca

SEQ ID NO: 601457 - DNA, 33 bp, Homo sapien
tccaggtgaagctctcaatcatagtgctctgtc

SEQ ID NO: 601458 - DNA, 33 bp, Homo sapien
tccaggtgaagctctcgatcatagtgctctgtc

SEQ ID NO: 601459 - DNA, 33 bp, Homo sapien
aggctctagaagggacagctatcattttccctg

SEQ ID NO: 601460 - DNA, 33 bp, Homo sapien
aggctctagaagggacggctatcattttccctg

SEQ ID NO: 601461 - DNA, 33 bp, Homo sapien
acctatacatagccaaaacataccccgtataca

SEQ ID NO: 601462 - DNA, 33 bp, Homo sapien
acctatacatagccaacacataccccgtataca

SEQ ID NO: 601463 - DNA, 33 bp, Homo sapien
gtaaatcattaactcactgaagaaacaaacagg

SEQ ID NO: 601464 - DNA, 33 bp, Homo sapien
gtaaatcattaactcattgaagaaacaaacagg

SEQ ID NO: 601465 - DNA, 33 bp, Homo sapien
gatcaccttaaagaagcaacataaggctcaaag

SEQ ID NO: 601466 - DNA, 33 bp, Homo sapien
gatcaccttaaagaaggaacataaggctcaaag

SEQ ID NO: 601467 - DNA, 33 bp, Homo sapien
gagtttaaacccaaaacgattgaccaagaaata

SEQ ID NO: 601468 - DNA, 33 bp, Homo sapien
gagtttaaacccaaaatgattgaccaagaaata

SEQ ID NO: 601469 - DNA, 33 bp, Homo sapien
gttttccaacccagcaccatatttagatttgat

SEQ ID NO: 601470 - DNA, 33 bp, Homo sapien
gttttccaacccagcagcatatttagatttgat

SEQ ID NO: 601471 - DNA, 33 bp, Homo sapien
aaggatgtctggggacagaagtgtaagtgggga

SEQ ID NO: 601472 - DNA, 33 bp, Homo sapien
aaggatgtctggggacggaagtgtaagtgggga

SEQ ID NO: 601473 - DNA, 33 bp, Homo sapien
tccagcatagctaaaaaataagagataagatca

SEQ ID NO: 601474 - DNA, 33 bp, Homo sapien
tccagcatagctaaaagataagagataagatca

SEQ ID NO: 601475 - DNA, 33 bp, Homo sapien
attaaatttcacccccccatcgcttattgtaac

SEQ ID NO: 601476 - DNA, 33 bp, Homo sapien
attaaatttcaccccctcatcgcttattgtaac

SEQ ID NO: 601477 - DNA, 33 bp, Homo sapien
gtaattttgctggcaaacagtctatagtgaaaa

SEQ ID NO: 601478 - DNA, 33 bp, Homo sapien
gtaattttgctggcaagcagtctatagtgaaaa

SEQ ID NO: 601479 - DNA, 33 bp, Homo sapien
cctagcagtcctggcccatgtccgtttcccagt

SEQ ID NO: 601480 - DNA, 33 bp, Homo sapien
cctagcagtcctggcctatgtccgtttcccagt

SEQ ID NO: 601481 - DNA, 33 bp, Homo sapien
aaaggcagggataccaccttaactgggaatacc

SEQ ID NO: 601482 - DNA, 33 bp, Homo sapien
aaaggcagggataccatcttaactgggaatacc

SEQ ID NO: 601483 - DNA, 33 bp, Homo sapien
agagaaatgttttaaacgatacatcaaggctga

SEQ ID NO: 601484 - DNA, 33 bp, Homo sapien
agagaaatgttttaaatgatacatcaaggctga

SEQ ID NO: 601485 - DNA, 33 bp, Homo sapien
gtccataggaacctcacctgtattttgccattt

SEQ ID NO: 601486 - DNA, 33 bp, Homo sapien
gtccataggaacctcatctgtattttgccattt

SEQ ID NO: 601487 - DNA, 33 bp, Homo sapien
gctcatgtcacccaaaataccagagacagcctg

SEQ ID NO: 601488 - DNA, 33 bp, Homo sapien
gctcatgtcacccaaagtaccagagacagcctg

SEQ ID NO: 601489 - DNA, 33 bp, Homo sapien
tgtgacgcgatgccgacgcagagagcctggatg

SEQ ID NO: 601490 - DNA, 33 bp, Homo sapien
tgtgacgcgatgccgatgcagagagcctggatg

SEQ ID NO: 601491 - DNA, 33 bp, Homo sapien
gtacctagagttggccaagtactcctcaagatg

SEQ ID NO: 601492 - DNA, 33 bp, Homo sapien
gtacctagagttggccgagtactcctcaagatg

SEQ ID NO: 601493 - DNA, 33 bp, Homo sapien
gctgaactgggaagtaggtctaatgaagtctaa

SEQ ID NO: 601494 - DNA, 33 bp, Homo sapien
gctgaactgggaagtatgtctaatgaagtctaa

SEQ ID NO: 601495 - DNA, 33 bp, Homo sapien
attctgcaataatggcaatgttctgtttctata

SEQ ID NO: 601496 - DNA, 33 bp, Homo sapien
attctgcaataatggcgatgttctgtttctata

SEQ ID NO: 601497 - DNA, 33 bp, Homo sapien
tgggtctctatcctcaaaggtcttcatccagtt

SEQ ID NO: 601498 - DNA, 33 bp, Homo sapien
tgggtctctatcctcagaggtcttcatccagtt

SEQ ID NO: 601499 - DNA, 33 bp, Homo sapien
acacaaacctggatgcaatagcgtactacacac

SEQ ID NO: 601500 - DNA, 33 bp, Homo sapien
acacaaacctggatgcgatagcgtactacacac

SEQ ID NO: 601501 - DNA, 33 bp, Homo sapien
cgtataatatgatattcaataggtgggtcaaag

SEQ ID NO: 601502 - DNA, 33 bp, Homo sapien
cgtataatatgatatttaataggtgggtcaaag

SEQ ID NO: 601503 - DNA, 33 bp, Homo sapien
cagctggagaaaagacaaggcttgggagagcgg

SEQ ID NO: 601504 - DNA, 33 bp, Homo sapien
cagctggagaaaagacgaggcttgggagagcgg

SEQ ID NO: 601505 - DNA, 33 bp, Homo sapien
taaataacactgagaaactcttcacagggactc

SEQ ID NO: 601506 - DNA, 33 bp, Homo sapien
taaataacactgagaagctcttcacagggactc

SEQ ID NO: 601507 - DNA, 33 bp, Homo sapien
aagaataccactgctccaagaggttacctgcct

SEQ ID NO: 601508 - DNA, 33 bp, Homo sapien
aagaataccactgctcgaagaggttacctgcct

SEQ ID NO: 601509 - DNA, 33 bp, Homo sapien
gatcaccatcacttacaaggcagtaaaaaagca

SEQ ID NO: 601510 - DNA, 33 bp, Homo sapien
gatcaccatcacttacgaggcagtaaaaaagca

SEQ ID NO: 601511 - DNA, 33 bp, Homo sapien
cactaaaatattctcaagggggtcattgctctc

SEQ ID NO: 601512 - DNA, 33 bp, Homo sapien
cactaaaatattctcacgggggtcattgctctc

SEQ ID NO: 601513 - DNA, 33 bp, Homo sapien
tttcttatctttttctcaatttccccacattgt

SEQ ID NO: 601514 - DNA, 33 bp, Homo sapien
tttcttatctttttcttaatttccccacattgt

SEQ ID NO: 601515 - DNA, 33 bp, Homo sapien
caaatctaagttagggaagataaaagacagctt

SEQ ID NO: 601516 - DNA, 33 bp, Homo sapien
caaatctaagttagggcagataaaagacagctt

SEQ ID NO: 601517 - DNA, 33 bp, Homo sapien
ggtgacagaggggccacctagactggcgtgctt

SEQ ID NO: 601518 - DNA, 33 bp, Homo sapien
ggtgacagaggggccatctagactggcgtgctt

SEQ ID NO: 601519 - DNA, 33 bp, Homo sapien
atattgtctttccttaccgttcctggttcctta

SEQ ID NO: 601520 - DNA, 33 bp, Homo sapien
atattgtctttccttatcgttcctggttcctta

SEQ ID NO: 601521 - DNA, 33 bp, Homo sapien
ctttatcaaaacctacacttaaaatgctacatg

SEQ ID NO: 601522 - DNA, 33 bp, Homo sapien
ctttatcaaaacctacccttaaaatgctacatg

SEQ ID NO: 601523 - DNA, 33 bp, Homo sapien
gtcttaccagtgaaaaaccaacaatcttctgaa

SEQ ID NO: 601524 - DNA, 33 bp, Homo sapien
gtcttaccagtgaaaacccaacaatcttctgaa

SEQ ID NO: 601525 - DNA, 33 bp, Homo sapien
agagaagattcaaggtcaaagaattaggaccac

SEQ ID NO: 601526 - DNA, 33 bp, Homo sapien
agagaagattcaaggtgaaagaattaggaccac

SEQ ID NO: 601527 - DNA, 33 bp, Homo sapien
tgttgtgggtgcaccactgacttacccagtatt

SEQ ID NO: 601528 - DNA, 33 bp, Homo sapien
tgttgtgggtgcaccattgacttacccagtatt

SEQ ID NO: 601529 - DNA, 33 bp, Homo sapien
aggatgctgaaaggtacgtctttgttttcactt

SEQ ID NO: 601530 - DNA, 33 bp, Homo sapien
aggatgctgaaaggtatgtctttgttttcactt

SEQ ID NO: 601531 - DNA, 33 bp, Homo sapien
aacagcactcggcttcccaaaaaagagggggta

SEQ ID NO: 601532 - DNA, 33 bp, Homo sapien
aacagcactcggcttcgcaaaaaagagggggta

SEQ ID NO: 601533 - DNA, 33 bp, Homo sapien
atccaagcagtcactacggtttactgacatttt

SEQ ID NO: 601534 - DNA, 33 bp, Homo sapien
atccaagcagtcactatggtttactgacatttt

SEQ ID NO: 601535 - DNA, 33 bp, Homo sapien
aattcaatataggacactctgcgtttaacttat

SEQ ID NO: 601536 - DNA, 33 bp, Homo sapien
aattcaatataggacattctgcgtttaacttat

SEQ ID NO: 601537 - DNA, 33 bp, Homo sapien
ctcctaagttgaactagattgagcctttttttt

SEQ ID NO: 601538 - DNA, 33 bp, Homo sapien
ctcctaagttgaactatattgagcctttttttt

SEQ ID NO: 601539 - DNA, 33 bp, Homo sapien
tgctcatggagaatccaaaatggcaccagagtc

SEQ ID NO: 601540 - DNA, 33 bp, Homo sapien
tgctcatggagaatccgaaatggcaccagagtc

SEQ ID NO: 601541 - DNA, 33 bp, Homo sapien
gtataggacatctataccctttgactcagcaga

SEQ ID NO: 601542 - DNA, 33 bp, Homo sapien
gtataggacatctatagcctttgactcagcaga

SEQ ID NO: 601543 - DNA, 33 bp, Homo sapien
ctggagggaaggaacactgaatacctgtctgga

SEQ ID NO: 601544 - DNA, 33 bp, Homo sapien
ctggagggaaggaacattgaatacctgtctgga

SEQ ID NO: 601545 - DNA, 33 bp, Homo sapien
ccatctttatcctgacaaagccaagatagccca

SEQ ID NO: 601546 - DNA, 33 bp, Homo sapien
ccatctttatcctgaccaagccaagatagccca

SEQ ID NO: 601547 - DNA, 33 bp, Homo sapien
ccttagcagctgctacccctggcccgagaaatg

SEQ ID NO: 601548 - DNA, 33 bp, Homo sapien
ccttagcagctgctactcctggcccgagaaatg

SEQ ID NO: 601549 - DNA, 33 bp, Homo sapien
ttccaggtaggaaaagacctgacagataaagca

SEQ ID NO: 601550 - DNA, 33 bp, Homo sapien
ttccaggtaggaaaaggcctgacagataaagca

SEQ ID NO: 601551 - DNA, 33 bp, Homo sapien
taaccaactgccatgcaccaagaagagctcatt

SEQ ID NO: 601552 - DNA, 33 bp, Homo sapien
taaccaactgccatgcgccaagaagagctcatt

SEQ ID NO: 601553 - DNA, 33 bp, Homo sapien
tgctaacagctctaatcactgcatttgccatgg

SEQ ID NO: 601554 - DNA, 33 bp, Homo sapien
tgctaacagctctaattactgcatttgccatgg

SEQ ID NO: 601555 - DNA, 33 bp, Homo sapien
ccacagacagttgagaagacaattgctcccttt

SEQ ID NO: 601556 - DNA, 33 bp, Homo sapien
ccacagacagttgagaggacaattgctcccttt

SEQ ID NO: 601557 - DNA, 33 bp, Homo sapien
aagccctgctctaaaaccgacccagctcttagg

SEQ ID NO: 601558 - DNA, 33 bp, Homo sapien
aagccctgctctaaaatcgacccagctcttagg

SEQ ID NO: 601559 - DNA, 33 bp, Homo sapien
tgttctaagctatttcacctatgtcaataaaac

SEQ ID NO: 601560 - DNA, 33 bp, Homo sapien
tgttctaagctatttctcctatgtcaataaaac

SEQ ID NO: 601561 - DNA, 33 bp, Homo sapien
gctcaaactcataggacggttggtagcatttca

SEQ ID NO: 601562 - DNA, 33 bp, Homo sapien
gctcaaactcataggatggttggtagcatttca

SEQ ID NO: 601563 - DNA, 33 bp, Homo sapien
taggatctgtattcccaattttccttcagcctc

SEQ ID NO: 601564 - DNA, 33 bp, Homo sapien
taggatctgtattcccgattttccttcagcctc

SEQ ID NO: 601565 - DNA, 33 bp, Homo sapien
gaaacagtgcacaagaagctaaaaatacagccc

SEQ ID NO: 601566 - DNA, 33 bp, Homo sapien
gaaacagtgcacaagaggctaaaaatacagccc

SEQ ID NO: 601567 - DNA, 33 bp, Homo sapien
tggggcccttccaagcaagggggcctatgttga

SEQ ID NO: 601568 - DNA, 33 bp, Homo sapien
tggggcccttccaagcgagggggcctatgttga

SEQ ID NO: 601569 - DNA, 33 bp, Homo sapien
ctaagttccaataagaagcccagaggatccttg

SEQ ID NO: 601570 - DNA, 33 bp, Homo sapien
ctaagttccaataagaggcccagaggatccttg

SEQ ID NO: 601571 - DNA, 33 bp, Homo sapien
cgcgaggcagaagttacaatgtccgccaagcgg

SEQ ID NO: 601572 - DNA, 33 bp, Homo sapien
cgcgaggcagaagttataatgtccgccaagcgg

SEQ ID NO: 601573 - DNA, 33 bp, Homo sapien
ctttaggacattttcaaggtgtttttgtttgtt

SEQ ID NO: 601574 - DNA, 33 bp, Homo sapien
ctttaggacattttcacggtgtttttgtttgtt

SEQ ID NO: 601575 - DNA, 33 bp, Homo sapien
gaaagaggccatcgcaaaaaaatgtcagattgg

SEQ ID NO: 601576 - DNA, 33 bp, Homo sapien
gaaagaggccatcgcagaaaaatgtcagattgg

SEQ ID NO: 601577 - DNA, 33 bp, Homo sapien
caagttcaagatctaaataaatgaaaatcaggt

SEQ ID NO: 601578 - DNA, 33 bp, Homo sapien
caagttcaagatctaactaaatgaaaatcaggt

SEQ ID NO: 601579 - DNA, 33 bp, Homo sapien
gataatctggctcgaccctcctaatttcacaga

SEQ ID NO: 601580 - DNA, 33 bp, Homo sapien
gataatctggctcgactctcctaatttcacaga

SEQ ID NO: 601581 - DNA, 33 bp, Homo sapien
gttgggtttcaaatacagactggtgcccggtgg

SEQ ID NO: 601582 - DNA, 33 bp, Homo sapien
gttgggtttcaaatacggactggtgcccggtgg

SEQ ID NO: 601583 - DNA, 33 bp, Homo sapien
gcaggcaaggtcaggacgtgtaaggtcttgagg

SEQ ID NO: 601584 - DNA, 33 bp, Homo sapien
gcaggcaaggtcaggatgtgtaaggtcttgagg

SEQ ID NO: 601585 - DNA, 33 bp, Homo sapien
cttgcttatttagccaaagcttacatcagtttc

SEQ ID NO: 601586 - DNA, 33 bp, Homo sapien
cttgcttatttagccagagcttacatcagtttc

SEQ ID NO: 601587 - DNA, 33 bp, Homo sapien
ttctctgtaattgataagtactgggcaagtctg

SEQ ID NO: 601588 - DNA, 33 bp, Homo sapien
ttctctgtaattgatatgtactgggcaagtctg

SEQ ID NO: 601589 - DNA, 33 bp, Homo sapien
tgcacttatcataacacatgagcattgcaccaa

SEQ ID NO: 601590 - DNA, 33 bp, Homo sapien
tgcacttatcataacatatgagcattgcaccaa

SEQ ID NO: 601591 - DNA, 33 bp, Homo sapien
tacatacctttgctaacgctctagggcccttgt

SEQ ID NO: 601592 - DNA, 33 bp, Homo sapien
tacatacctttgctaatgctctagggcccttgt

SEQ ID NO: 601593 - DNA, 33 bp, Homo sapien
tatccctatacctttccctatcttgtatcaact

SEQ ID NO: 601594 - DNA, 33 bp, Homo sapien
tatccctatacctttctctatcttgtatcaact

SEQ ID NO: 601595 - DNA, 33 bp, Homo sapien
gggggaagtgagtaaacgtaatatatgtttggg

SEQ ID NO: 601596 - DNA, 33 bp, Homo sapien
gggggaagtgagtaaaggtaatatatgtttggg

SEQ ID NO: 601597 - DNA, 33 bp, Homo sapien
agaagccatcctgggcaaggattttcacttctc

SEQ ID NO: 601598 - DNA, 33 bp, Homo sapien
agaagccatcctgggcgaggattttcacttctc

SEQ ID NO: 601599 - DNA, 33 bp, Homo sapien
gaagcagcctaggggaaaaaaatatcttgtact

SEQ ID NO: 601600 - DNA, 33 bp, Homo sapien
gaagcagcctaggggagaaaaatatcttgtact

SEQ ID NO: 601601 - DNA, 33 bp, Homo sapien
ctttgtatggtatttaacaaggcatttatcaaa

SEQ ID NO: 601602 - DNA, 33 bp, Homo sapien
ctttgtatggtatttagcaaggcatttatcaaa

SEQ ID NO: 601603 - DNA, 33 bp, Homo sapien
aaaagaactaccacatcagctttgtatggtatt

SEQ ID NO: 601604 - DNA, 33 bp, Homo sapien
aaaagaactaccacatgagctttgtatggtatt

SEQ ID NO: 601605 - DNA, 33 bp, Homo sapien
cacttttacactctccactgtgctaggtgtggg

SEQ ID NO: 601606 - DNA, 33 bp, Homo sapien
cacttttacactctccgctgtgctaggtgtggg

SEQ ID NO: 601607 - DNA, 33 bp, Homo sapien
gagctgacttatgtgaaaatgtgctgtatgcta

SEQ ID NO: 601608 - DNA, 33 bp, Homo sapien
gagctgacttatgtgacaatgtgctgtatgcta

SEQ ID NO: 601609 - DNA, 33 bp, Homo sapien
ctgtaagttctgttcactaatcctgtcttccca

SEQ ID NO: 601610 - DNA, 33 bp, Homo sapien
ctgtaagttctgttcattaatcctgtcttccca

SEQ ID NO: 601611 - DNA, 33 bp, Homo sapien
ccttgggcagattactaaacttttatgagcctc

SEQ ID NO: 601612 - DNA, 33 bp, Homo sapien
ccttgggcagattactgaacttttatgagcctc

SEQ ID NO: 601613 - DNA, 33 bp, Homo sapien
catgtgccatcacacagtcccgtgatacaggag

SEQ ID NO: 601614 - DNA, 33 bp, Homo sapien
catgtgccatcacacattcccgtgatacaggag

SEQ ID NO: 601615 - DNA, 33 bp, Homo sapien
ttcctgtgcgtcattacgctgtggttctcatag

SEQ ID NO: 601616 - DNA, 33 bp, Homo sapien
ttcctgtgcgtcattaggctgtggttctcatag

SEQ ID NO: 601617 - DNA, 33 bp, Homo sapien
caaagatacttctgcacgtcacattcaagtgag

SEQ ID NO: 601618 - DNA, 33 bp, Homo sapien
caaagatacttctgcatgtcacattcaagtgag

SEQ ID NO: 601619 - DNA, 33 bp, Homo sapien
gtccctcgactactcaacctcagcttccccatc

SEQ ID NO: 601620 - DNA, 33 bp, Homo sapien
gtccctcgactactcagcctcagcttccccatc

SEQ ID NO: 601621 - DNA, 33 bp, Homo sapien
catccaggtgagaccacgtgacctgtaacagac

SEQ ID NO: 601622 - DNA, 33 bp, Homo sapien
catccaggtgagaccatgtgacctgtaacagac

SEQ ID NO: 601623 - DNA, 33 bp, Homo sapien
ggtaaaacacggggtaacaatttgcaatctagc

SEQ ID NO: 601624 - DNA, 33 bp, Homo sapien
ggtaaaacacggggtaccaatttgcaatctagc

SEQ ID NO: 601625 - DNA, 33 bp, Homo sapien
aatctctggattcccccacctggtccagtgctg

SEQ ID NO: 601626 - DNA, 33 bp, Homo sapien
aatctctggattccccgacctggtccagtgctg

SEQ ID NO: 601627 - DNA, 33 bp, Homo sapien
ggaaggtggtcagatacggggggctctggataa

SEQ ID NO: 601628 - DNA, 33 bp, Homo sapien
ggaaggtggtcagatatggggggctctggataa

SEQ ID NO: 601629 - DNA, 33 bp, Homo sapien
acagccacgggtgaccaggattctctcattctt

SEQ ID NO: 601630 - DNA, 33 bp, Homo sapien
acagccacgggtgaccgggattctctcattctt

SEQ ID NO: 601631 - DNA, 33 bp, Homo sapien
tgaacaaattgataagaattccaggtacgtggg

SEQ ID NO: 601632 - DNA, 33 bp, Homo sapien
tgaacaaattgataagcattccaggtacgtggg

SEQ ID NO: 601633 - DNA, 33 bp, Homo sapien
gatcttcttggcttgccacttatgttatggaac

SEQ ID NO: 601634 - DNA, 33 bp, Homo sapien
gatcttcttggcttgctacttatgttatggaac

SEQ ID NO: 601635 - DNA, 33 bp, Homo sapien
tttccactgccaagaccagaccacaaccgccag

SEQ ID NO: 601636 - DNA, 33 bp, Homo sapien
tttccactgccaagacgagaccacaaccgccag

SEQ ID NO: 601637 - DNA, 33 bp, Homo sapien
ttgcaaacagacctagcagtgcctcctcattct

SEQ ID NO: 601638 - DNA, 33 bp, Homo sapien
ttgcaaacagacctagtagtgcctcctcattct

SEQ ID NO: 601639 - DNA, 33 bp, Homo sapien
ctgacttcggagagtaacagctcttaaccacag

SEQ ID NO: 601640 - DNA, 33 bp, Homo sapien
ctgacttcggagagtatcagctcttaaccacag

SEQ ID NO: 601641 - DNA, 33 bp, Homo sapien
tcagtccagaccagtcaatttccaaatccagtg

SEQ ID NO: 601642 - DNA, 33 bp, Homo sapien
tcagtccagaccagtcgatttccaaatccagtg

SEQ ID NO: 601643 - DNA, 33 bp, Homo sapien
tctctttccctctgtacgtctgtctctttgact

SEQ ID NO: 601644 - DNA, 33 bp, Homo sapien
tctctttccctctgtatgtctgtctctttgact

SEQ ID NO: 601645 - DNA, 33 bp, Homo sapien
acctatatgttagaatcagcaaaggagtttaaa

SEQ ID NO: 601646 - DNA, 33 bp, Homo sapien
acctatatgttagaattagcaaaggagtttaaa

SEQ ID NO: 601647 - DNA, 33 bp, Homo sapien
ggcctcaggaatcagaagttgaggttgccagag

SEQ ID NO: 601648 - DNA, 33 bp, Homo sapien
ggcctcaggaatcagaggttgaggttgccagag

SEQ ID NO: 601649 - DNA, 33 bp, Homo sapien
ataggtcttttttcccccacctcactgtgacca

SEQ ID NO: 601650 - DNA, 33 bp, Homo sapien
ataggtcttttttccctcacctcactgtgacca

SEQ ID NO: 601651 - DNA, 33 bp, Homo sapien
tatcatgtccaacctcacatctattttaaagac

SEQ ID NO: 601652 - DNA, 33 bp, Homo sapien
tatcatgtccaacctcgcatctattttaaagac

SEQ ID NO: 601653 - DNA, 33 bp, Homo sapien
tttccagtcctggtcacggtaaacacatgtatc

SEQ ID NO: 601654 - DNA, 33 bp, Homo sapien
tttccagtcctggtcatggtaaacacatgtatc

SEQ ID NO: 601655 - DNA, 33 bp, Homo sapien
cctctgactggatcaccgggggcttcttgcctc

SEQ ID NO: 601656 - DNA, 33 bp, Homo sapien
cctctgactggatcactgggggcttcttgcctc

SEQ ID NO: 601657 - DNA, 33 bp, Homo sapien
cagtgtcccgggaaagcatggccttagacagga

SEQ ID NO: 601658 - DNA, 33 bp, Homo sapien
cagtgtcccgggaaagtatggccttagacagga

SEQ ID NO: 601659 - DNA, 33 bp, Homo sapien
tcattagctagtcccacagtcaaatgttgagtt

SEQ ID NO: 601660 - DNA, 33 bp, Homo sapien
tcattagctagtcccatagtcaaatgttgagtt

SEQ ID NO: 601661 - DNA, 33 bp, Homo sapien
taaagacagtttgaaaataagagctctgatatc

SEQ ID NO: 601662 - DNA, 33 bp, Homo sapien
taaagacagtttgaaagtaagagctctgatatc

SEQ ID NO: 601663 - DNA, 33 bp, Homo sapien
ccttccaggtttaaacagttctcttgccgcagc

SEQ ID NO: 601664 - DNA, 33 bp, Homo sapien
ccttccaggtttaaacggttctcttgccgcagc

SEQ ID NO: 601665 - DNA, 33 bp, Homo sapien
aatgctctgtggtttaaagttctgccagatgac

SEQ ID NO: 601666 - DNA, 33 bp, Homo sapien
aatgctctgtggtttacagttctgccagatgac

SEQ ID NO: 601667 - DNA, 33 bp, Homo sapien
cgcaagtcctcatgtcgctaggaagcttgtgat

SEQ ID NO: 601668 - DNA, 33 bp, Homo sapien
cgcaagtcctcatgtctctaggaagcttgtgat

SEQ ID NO: 601669 - DNA, 33 bp, Homo sapien
agcacaacctccacaacaggaatctggcaacag

SEQ ID NO: 601670 - DNA, 33 bp, Homo sapien
agcacaacctccacaataggaatctggcaacag

SEQ ID NO: 601671 - DNA, 33 bp, Homo sapien
cactctcacagcaggccgattaggtcggtgtcc

SEQ ID NO: 601672 - DNA, 33 bp, Homo sapien
cactctcacagcaggctgattaggtcggtgtcc

SEQ ID NO: 601673 - DNA, 33 bp, Homo sapien
ggaggtcctggccaagcaaggagcctttgtcgt

SEQ ID NO: 601674 - DNA, 33 bp, Homo sapien
ggaggtcctggccaagtaaggagcctttgtcgt

SEQ ID NO: 601675 - DNA, 33 bp, Homo sapien
tcaagtagaggtataccagcttcttcagctcca

SEQ ID NO: 601676 - DNA, 33 bp, Homo sapien
tcaagtagaggtatactagcttcttcagctcca

SEQ ID NO: 601677 - DNA, 33 bp, Homo sapien
tctttccgcacattacggcttatagatcagttc

SEQ ID NO: 601678 - DNA, 33 bp, Homo sapien
tctttccgcacattactgcttatagatcagttc

SEQ ID NO: 601679 - DNA, 33 bp, Homo sapien
gctcaacgtcttccaacggttctctgtcttact

SEQ ID NO: 601680 - DNA, 33 bp, Homo sapien
gctcaacgtcttccaatggttctctgtcttact

SEQ ID NO: 601681 - DNA, 33 bp, Homo sapien
acgtaagtatattttacagtgtgtaggtaatag

SEQ ID NO: 601682 - DNA, 33 bp, Homo sapien
acgtaagtatattttatagtgtgtaggtaatag

SEQ ID NO: 601683 - DNA, 33 bp, Homo sapien
catgttgggaatgcagcagtgaaagaaacagac

SEQ ID NO: 601684 - DNA, 33 bp, Homo sapien
catgttgggaatgcaggagtgaaagaaacagac

SEQ ID NO: 601685 - DNA, 33 bp, Homo sapien
actgtcatgaggagcagcttcagtaggtctcaa

SEQ ID NO: 601686 - DNA, 33 bp, Homo sapien
actgtcatgaggagcatcttcagtaggtctcaa

SEQ ID NO: 601687 - DNA, 33 bp, Homo sapien
gggcactctgggaacaaaagtggtgatgggact

SEQ ID NO: 601688 - DNA, 33 bp, Homo sapien
gggcactctgggaacagaagtggtgatgggact

SEQ ID NO: 601689 - DNA, 33 bp, Homo sapien
agctggacttcatgacacccagactctccagcc

SEQ ID NO: 601690 - DNA, 33 bp, Homo sapien
agctggacttcatgacgcccagactctccagcc

SEQ ID NO: 601691 - DNA, 33 bp, Homo sapien
ccttggtgttgaaggacggcaaaggagaagggc

SEQ ID NO: 601692 - DNA, 33 bp, Homo sapien
ccttggtgttgaaggatggcaaaggagaagggc

SEQ ID NO: 601693 - DNA, 33 bp, Homo sapien
agacctcatgacaccgaagatggtaagatgcat

SEQ ID NO: 601694 - DNA, 33 bp, Homo sapien
agacctcatgacaccggagatggtaagatgcat

SEQ ID NO: 601695 - DNA, 33 bp, Homo sapien
taaacacaagtacacacaacaagagaacagtct

SEQ ID NO: 601696 - DNA, 33 bp, Homo sapien
taaacacaagtacacataacaagagaacagtct

SEQ ID NO: 601697 - DNA, 33 bp, Homo sapien
catttccgatattagaagttcaaggccatgact

SEQ ID NO: 601698 - DNA, 33 bp, Homo sapien
catttccgatattagacgttcaaggccatgact

SEQ ID NO: 601699 - DNA, 33 bp, Homo sapien
gtaaaccaaaacaagaactgagtgtctcagagt

SEQ ID NO: 601700 - DNA, 33 bp, Homo sapien
gtaaaccaaaacaagacctgagtgtctcagagt

SEQ ID NO: 601701 - DNA, 33 bp, Homo sapien
gtgacaaagctgggacacaatacctttatgcat

SEQ ID NO: 601702 - DNA, 33 bp, Homo sapien
gtgacaaagctgggacgcaatacctttatgcat

SEQ ID NO: 601703 - DNA, 33 bp, Homo sapien; identical to SEQ ID NO: 601701

SEQ ID NO: 601704 - DNA, 33 bp, Homo sapien; identical to SEQ ID NO: 601702

SEQ ID NO: 601705 - DNA, 33 bp, Homo sapien
cctacatgggaggtgaaaccttaagcaaaacaa

SEQ ID NO: 601706 - DNA, 33 bp, Homo sapien
cctacatgggaggtgagaccttaagcaaaacaa

SEQ ID NO: 601707 - DNA, 33 bp, Homo sapien
ttcttaatgtcaattcacttaataggcagaggc

SEQ ID NO: 601708 - DNA, 33 bp, Homo sapien
ttcttaatgtcaattcgcttaataggcagaggc

SEQ ID NO: 601709 - DNA, 33 bp, Homo sapien
gtctatccggacaaacagaggattattcagcct

SEQ ID NO: 601710 - DNA, 33 bp, Homo sapien
gtctatccggacaaacggaggattattcagcct

SEQ ID NO: 601711 - DNA, 33 bp, Homo sapien
accagcttcaaagtaaaacagataggagtgcag

SEQ ID NO: 601712 - DNA, 33 bp, Homo sapien
accagcttcaaagtaagacagataggagtgcag

SEQ ID NO: 601713 - DNA, 33 bp, Homo sapien
gggtcagaatcaggaaaacctcattgtcttgat

SEQ ID NO: 601714 - DNA, 33 bp, Homo sapien
gggtcagaatcaggaagacctcattgtcttgat

SEQ ID NO: 601715 - DNA, 33 bp, Homo sapien
tgggctctttcctctagtacaccacacaagctc

SEQ ID NO: 601716 - DNA, 33 bp, Homo sapien
tgggctctttcctctattacaccacacaagctc

SEQ ID NO: 601717 - DNA, 33 bp, Homo sapien
agaaaaccaacagcaacgatgacaacattcggg

SEQ ID NO: 601718 - DNA, 33 bp, Homo sapien
agaaaaccaacagcaatgatgacaacattcggg

SEQ ID NO: 601719 - DNA, 33 bp, Homo sapien
aaacagagctggaaaacaggtgggatggaggag

SEQ ID NO: 601720 - DNA, 33 bp, Homo sapien
aaacagagctggaaaataggtgggatggaggag

SEQ ID NO: 601721 - DNA, 33 bp, Homo sapien
gagagaggggaaatgcgcagttctaagactcag

SEQ ID NO: 601722 - DNA, 33 bp, Homo sapien
gagagaggggaaatgctcagttctaagactcag

SEQ ID NO: 601723 - DNA, 33 bp, Homo sapien
taatcctcatgggcaactgtcacccatttcacc

SEQ ID NO: 601724 - DNA, 33 bp, Homo sapien
taatcctcatgggcaattgtcacccatttcacc

SEQ ID NO: 601725 - DNA, 33 bp, Homo sapien
caatcctgaagaaataagttggaactgtgcatc

SEQ ID NO: 601726 - DNA, 33 bp, Homo sapien
caatcctgaagaaataggttggaactgtgcatc

SEQ ID NO: 601727 - DNA, 33 bp, Homo sapien
tatccaaaaggcaaaacgtgctgtgttcaacat

SEQ ID NO: 601728 - DNA, 33 bp, Homo sapien
tatccaaaaggcaaaatgtgctgtgttcaacat

SEQ ID NO: 601729 - DNA, 33 bp, Homo sapien
tatgattctctttgtacagagttcaaaaatagg

SEQ ID NO: 601730 - DNA, 33 bp, Homo sapien
tatgattctctttgtatagagttcaaaaatagg

SEQ ID NO: 601731 - DNA, 33 bp, Homo sapien
catgaattaaagactcagaagggattcttatca

SEQ ID NO: 601732 - DNA, 33 bp, Homo sapien
catgaattaaagactcggaagggattcttatca

SEQ ID NO: 601733 - DNA, 33 bp, Homo sapien
ctagctaaaaagtcaaataaaaacactacagcc

SEQ ID NO: 601734 - DNA, 33 bp, Homo sapien
ctagctaaaaagtcaagtaaaaacactacagcc

SEQ ID NO: 601735 - DNA, 33 bp, Homo sapien
gttgcacttaacagcacggacagtatgatcccg

SEQ ID NO: 601736 - DNA, 33 bp, Homo sapien
gttgcacttaacagcatggacagtatgatcccg

SEQ ID NO: 601737 - DNA, 33 bp, Homo sapien
gctggacactctcttaggccctgggcacagtga

SEQ ID NO: 601738 - DNA, 33 bp, Homo sapien
gctggacactctcttatgccctgggcacagtga

SEQ ID NO: 601739 - DNA, 33 bp, Homo sapien
tctcatcaccaccaaactcctgtcttatcccat

SEQ ID NO: 601740 - DNA, 33 bp, Homo sapien
tctcatcaccaccaaagtcctgtcttatcccat

SEQ ID NO: 601741 - DNA, 33 bp, Homo sapien
taaattttaatagttacctgttggccaggcatg

SEQ ID NO: 601742 - DNA, 33 bp, Homo sapien
taaattttaatagttatctgttggccaggcatg

SEQ ID NO: 601743 - DNA, 33 bp, Homo sapien
ggttttggtagatttccatccatacagtacttt

SEQ ID NO: 601744 - DNA, 33 bp, Homo sapien
ggttttggtagatttctatccatacagtacttt

SEQ ID NO: 601745 - DNA, 33 bp, Homo sapien
ctaaattggccaggtaacattgaggatggacag

SEQ ID NO: 601746 - DNA, 33 bp, Homo sapien
ctaaattggccaggtagcattgaggatggacag

SEQ ID NO: 601747 - DNA, 33 bp, Homo sapien
aaggaccacactttgaatagcagagcagtagta

SEQ ID NO: 601748 - DNA, 33 bp, Homo sapien
aaggaccacactttgagtagcagagcagtagta

SEQ ID NO: 601749 - DNA, 33 bp, Homo sapien
tttacacaagtaaaacaatgcaggaaccagaca

SEQ ID NO: 601750 - DNA, 33 bp, Homo sapien
tttacacaagtaaaacgatgcaggaaccagaca

SEQ ID NO: 601751 - DNA, 33 bp, Homo sapien
tgatcaaagcataaaaggaagcatatgttttag

SEQ ID NO: 601752 - DNA, 33 bp, Homo sapien
tgatcaaagcataaaatgaagcatatgttttag

SEQ ID NO: 601753 - DNA, 33 bp, Homo sapien
ttgcaaatgcaactaacagggctttcttttagc

SEQ ID NO: 601754 - DNA, 33 bp, Homo sapien
ttgcaaatgcaactaagagggctttcttttagc

SEQ ID NO: 601755 - DNA, 33 bp, Homo sapien
catccccatcaaaagacagtcagagaacagact

SEQ ID NO: 601756 - DNA, 33 bp, Homo sapien
catccccatcaaaagatagtcagagaacagact

SEQ ID NO: 601757 - DNA, 33 bp, Homo sapien
ctgaggtcaagcagaacttcccatccccatcaa

SEQ ID NO: 601758 - DNA, 33 bp, Homo sapien
ctgaggtcaagcagaatttcccatccccatcaa

SEQ ID NO: 601759 - DNA, 33 bp, Homo sapien
ccaaagaatagtgaacaaaaacagtaacatttt

SEQ ID NO: 601760 - DNA, 33 bp, Homo sapien
ccaaagaatagtgaacgaaaacagtaacatttt

SEQ ID NO: 601761 - DNA, 33 bp, Homo sapien
cactctggtcatacaacgtttctaagactgctg

SEQ ID NO: 601762 - DNA, 33 bp, Homo sapien
cactctggtcatacaaggtttctaagactgctg

SEQ ID NO: 601763 - DNA, 33 bp, Homo sapien
atttcagctttgaaaaaatcagtgccttttctt

SEQ ID NO: 601764 - DNA, 33 bp, Homo sapien
atttcagctttgaaaatatcagtgccttttctt

SEQ ID NO: 601765 - DNA, 33 bp, Homo sapien
aaatacaaaaaaaaaaaagctggatgtgttggc

SEQ ID NO: 601766 - DNA, 33 bp, Homo sapien
aaatacaaaaaaaaaacagctggatgtgttggc

SEQ ID NO: 601767 - DNA, 33 bp, Homo sapien
catgtgctgttctcccacccagatctgccttga

SEQ ID NO: 601768 - DNA, 33 bp, Homo sapien
catgtgctgttctcccgcccagatctgccttga

SEQ ID NO: 601769 - DNA, 33 bp, Homo sapien
acttacaaacatcaaaatgacatcaaaggtagg

SEQ ID NO: 601770 - DNA, 33 bp, Homo sapien
acttacaaacatcaaactgacatcaaaggtagg

SEQ ID NO: 601771 - DNA, 33 bp, Homo sapien
gtctcagaacaagtggaaatgtggatgtggcct

SEQ ID NO: 601772 - DNA, 33 bp, Homo sapien
gtctcagaacaagtgggaatgtggatgtggcct

SEQ ID NO: 601773 - DNA, 33 bp, Homo sapien
agaagagtactgaaaacgaggacaaatacaatg

SEQ ID NO: 601774 - DNA, 33 bp, Homo sapien
agaagagtactgaaaatgaggacaaatacaatg

SEQ ID NO: 601775 - DNA, 33 bp, Homo sapien
cataggaattgcacaaggagggtaaaggatggg

SEQ ID NO: 601776 - DNA, 33 bp, Homo sapien
cataggaattgcacaatgagggtaaaggatggg

SEQ ID NO: 601777 - DNA, 33 bp, Homo sapien
gtctgcccacacagaaataggaaggcaccacag

SEQ ID NO: 601778 - DNA, 33 bp, Homo sapien
gtctgcccacacagaagtaggaaggcaccacag

SEQ ID NO: 601779 - DNA, 33 bp, Homo sapien
aggggtgcaggcaacaacaaggtcacgtatggc

SEQ ID NO: 601780 - DNA, 33 bp, Homo sapien
aggggtgcaggcaacagcaaggtcacgtatggc

SEQ ID NO: 601781 - DNA, 33 bp, Homo sapien
ctctgtgatttcctaacggggacatccccaggc

SEQ ID NO: 601782 - DNA, 33 bp, Homo sapien
ctctgtgatttcctaatggggacatccccaggc

SEQ ID NO: 601783 - DNA, 33 bp, Homo sapien
cttcacagggcgagtaccaacacgctctgcagc

SEQ ID NO: 601784 - DNA, 33 bp, Homo sapien
cttcacagggcgagtagcaacacgctctgcagc

SEQ ID NO: 601785 - DNA, 33 bp, Homo sapien
tagagacatcacattcaacaggacacagcctcc

SEQ ID NO: 601786 - DNA, 33 bp, Homo sapien
tagagacatcacattcgacaggacacagcctcc

SEQ ID NO: 601787 - DNA, 33 bp, Homo sapien
gagactggaacagaacagtggctctgcggccta

SEQ ID NO: 601788 - DNA, 33 bp, Homo sapien
gagactggaacagaacggtggctctgcggccta

SEQ ID NO: 601789 - DNA, 33 bp, Homo sapien
gaatctgggctccaggaactgcgggctggagac

SEQ ID NO: 601790 - DNA, 33 bp, Homo sapien
gaatctgggctccagggactgcgggctggagac

SEQ ID NO: 601791 - DNA, 33 bp, Homo sapien
gacatattctaacagccaggaattctggagaag

SEQ ID NO: 601792 - DNA, 33 bp, Homo sapien
gacatattctaacagctaggaattctggagaag

SEQ ID NO: 601793 - DNA, 33 bp, Homo sapien
ctcaccccctcgttgacgtggtcgtagatagcg

SEQ ID NO: 601794 - DNA, 33 bp, Homo sapien
ctcaccccctcgttgatgtggtcgtagatagcg

SEQ ID NO: 601795 - DNA, 33 bp, Homo sapien
ttgtctcacggcagaccgggactgtacacacct

SEQ ID NO: 601796 - DNA, 33 bp, Homo sapien
ttgtctcacggcagactgggactgtacacacct

SEQ ID NO: 601797 - DNA, 33 bp, Homo sapien
ttttgaccctttcaaacgatctgtgtatgtcca

SEQ ID NO: 601798 - DNA, 33 bp, Homo sapien
ttttgaccctttcaaatgatctgtgtatgtcca

SEQ ID NO: 601799 - DNA, 33 bp, Homo sapien
ctactggcttagaactaacttctgctgcccact

SEQ ID NO: 601800 - DNA, 33 bp, Homo sapien
ctactggcttagaactcacttctgctgcccact

SEQ ID NO: 601801 - DNA, 33 bp, Homo sapien
tgtggtaggagccccactggcggaaatgccagc

SEQ ID NO: 601802 - DNA, 33 bp, Homo sapien
tgtggtaggagccccagtggcggaaatgccagc

SEQ ID NO: 601803 - DNA, 33 bp, Homo sapien
tataaaatgaagagaccaaactttccatgaacg

SEQ ID NO: 601804 - DNA, 33 bp, Homo sapien
tataaaatgaagagacgaaactttccatgaacg

SEQ ID NO: 601805 - DNA, 33 bp, Homo sapien
caagttgcttcaactaccgaagccttagcttcc

SEQ ID NO: 601806 - DNA, 33 bp, Homo sapien
caagttgcttcaactatcgaagccttagcttcc

SEQ ID NO: 601807 - DNA, 33 bp, Homo sapien
cagaacagcaggaaaacaagccagtaacaagag

SEQ ID NO: 601808 - DNA, 33 bp, Homo sapien
cagaacagcaggaaaataagccagtaacaagag

SEQ ID NO: 601809 - DNA, 33 bp, Homo sapien
ccctttgccagctgacacgtgactgccttgact

SEQ ID NO: 601810 - DNA, 33 bp, Homo sapien
ccctttgccagctgacgcgtgactgccttgact

SEQ ID NO: 601811 - DNA, 33 bp, Homo sapien
acgtggaagaatagaacgacatgagaagaaggg

SEQ ID NO: 601812 - DNA, 33 bp, Homo sapien
acgtggaagaatagaaggacatgagaagaaggg

SEQ ID NO: 601813 - DNA, 33 bp, Homo sapien
aattatcacttcagccgcatttctactggtcgc

SEQ ID NO: 601814 - DNA, 33 bp, Homo sapien
aattatcacttcagcctcatttctactggtcgc

SEQ ID NO: 601815 - DNA, 33 bp, Homo sapien
ttgggcttctgtcctaatacaacttttagatgc

SEQ ID NO: 601816 - DNA, 33 bp, Homo sapien
ttgggcttctgtcctactacaacttttagatgc

SEQ ID NO: 601817 - DNA, 33 bp, Homo sapien
gcaatgattcagttccagccttcagggttttca

SEQ ID NO: 601818 - DNA, 33 bp, Homo sapien
gcaatgattcagttccggccttcagggttttca

SEQ ID NO: 601819 - DNA, 33 bp, Homo sapien
tgacctcaaaacatcacgtatgtgcctatcaca

SEQ ID NO: 601820 - DNA, 33 bp, Homo sapien
tgacctcaaaacatcatgtatgtgcctatcaca

SEQ ID NO: 601821 - DNA, 33 bp, Homo sapien
gttctttctgtgctcaagggaagaaggaaaccc

SEQ ID NO: 601822 - DNA, 33 bp, Homo sapien
gttctttctgtgctcatgggaagaaggaaaccc

SEQ ID NO: 601823 - DNA, 33 bp, Homo sapien
agggaaatccaaataaagttgatggattgtatc

SEQ ID NO: 601824 - DNA, 33 bp, Homo sapien
agggaaatccaaataaggttgatggattgtatc

SEQ ID NO: 601825 - DNA, 33 bp, Homo sapien
aaaggacatttgaacaccaatatgtaatagcag

SEQ ID NO: 601826 - DNA, 33 bp, Homo sapien
aaaggacatttgaacatcaatatgtaatagcag

SEQ ID NO: 601827 - DNA, 33 bp, Homo sapien
actcaccgcattagcaatatgaggcaaccagca

SEQ ID NO: 601828 - DNA, 33 bp, Homo sapien
actcaccgcattagcactatgaggcaaccagca

SEQ ID NO: 601829 - DNA, 33 bp, Homo sapien
aagttcctttatgcaccgcttctagttagtctt

SEQ ID NO: 601830 - DNA, 33 bp, Homo sapien
aagttcctttatgcactgcttctagttagtctt

SEQ ID NO: 601831 - DNA, 33 bp, Homo sapien
taacacgtaagtcagaaagaagtaaaagttaat

SEQ ID NO: 601832 - DNA, 33 bp, Homo sapien
taacacgtaagtcagatagaagtaaaagttaat

SEQ ID NO: 601833 - DNA, 33 bp, Homo sapien
ttggaaatagagtcaaatggtttctagactgga

SEQ ID NO: 601834 - DNA, 33 bp, Homo sapien
ttggaaatagagtcaagtggtttctagactgga

SEQ ID NO: 601835 - DNA, 33 bp, Homo sapien
tccttcccacagaaatcataagcctttctctcg

SEQ ID NO: 601836 - DNA, 33 bp, Homo sapien
tccttcccacagaaatgataagcctttctctcg

SEQ ID NO: 601837 - DNA, 33 bp, Homo sapien
tcaaaggagctatgtcagaaagaggagaaagaa

SEQ ID NO: 601838 - DNA, 33 bp, Homo sapien
tcaaaggagctatgtcggaaagaggagaaagaa

SEQ ID NO: 601839 - DNA, 33 bp, Homo sapien
ggtggatgttcattcaacgtgtttttctgagtg

SEQ ID NO: 601840 - DNA, 33 bp, Homo sapien
ggtggatgttcattcatcgtgtttttctgagtg

SEQ ID NO: 601841 - DNA, 33 bp, Homo sapien
tcaatatgcactgttacgtctttcagatttttt

SEQ ID NO: 601842 - DNA, 33 bp, Homo sapien
tcaatatgcactgttatgtctttcagatttttt

SEQ ID NO: 601843 - DNA, 33 bp, Homo sapien
cattttaaatcaagcacaagagctgcttgctga

SEQ ID NO: 601844 - DNA, 33 bp, Homo sapien
cattttaaatcaagcataagagctgcttgctga

SEQ ID NO: 601845 - DNA, 33 bp, Homo sapien
tcttttcggcccaggaacttctgttcatctgtc

SEQ ID NO: 601846 - DNA, 33 bp, Homo sapien
tcttttcggcccaggagcttctgttcatctgtc

SEQ ID NO: 601847 - DNA, 33 bp, Homo sapien
cattttaaaacagtacacttctgtgtgaatagg

SEQ ID NO: 601848 - DNA, 33 bp, Homo sapien
cattttaaaacagtacccttctgtgtgaatagg

SEQ ID NO: 601849 - DNA, 33 bp, Homo sapien
tgtccaggctagcagaatcctgtcacctacgag

SEQ ID NO: 601850 - DNA, 33 bp, Homo sapien
tgtccaggctagcagattcctgtcacctacgag

SEQ ID NO: 601851 - DNA, 33 bp, Homo sapien
aacctacgaaaagacaaagaacactgtagatat

SEQ ID NO: 601852 - DNA, 33 bp, Homo sapien
aacctacgaaaagacagagaacactgtagatat

SEQ ID NO: 601853 - DNA, 33 bp, Homo sapien
aataactttcttccttcaaaacatacacagtcc

SEQ ID NO: 601854 - DNA, 33 bp, Homo sapien
aataactttcttccttgaaaacatacacagtcc

SEQ ID NO: 601855 - DNA, 33 bp, Homo sapien
cagaggtagaaacgaacctaacataaattcagt

SEQ ID NO: 601856 - DNA, 33 bp, Homo sapien
cagaggtagaaacgaagctaacataaattcagt

SEQ ID NO: 601857 - DNA, 33 bp, Homo sapien
ggaagaactctgtttcaagaggaagcatttaga

SEQ ID NO: 601858 - DNA, 33 bp, Homo sapien
ggaagaactctgtttcgagaggaagcatttaga

SEQ ID NO: 601859 - DNA, 33 bp, Homo sapien
gcaacctcaggaatcacgacccaatctacagac

SEQ ID NO: 601860 - DNA, 33 bp, Homo sapien
gcaacctcaggaatcatgacccaatctacagac

SEQ ID NO: 601861 - DNA, 33 bp, Homo sapien
cttatattgactgccaatagcaaatgattaaat

SEQ ID NO: 601862 - DNA, 33 bp, Homo sapien
cttatattgactgccagtagcaaatgattaaat

SEQ ID NO: 601863 - DNA, 33 bp, Homo sapien
tgctatctgatactccaaaagtgagatggagtc

SEQ ID NO: 601864 - DNA, 33 bp, Homo sapien
tgctatctgatactccgaaagtgagatggagtc

SEQ ID NO: 601865 - DNA, 33 bp, Homo sapien
ggcaacacagtttgaacgtggtgaaacagggtg

SEQ ID NO: 601866 - DNA, 33 bp, Homo sapien
ggcaacacagtttgaatgtggtgaaacagggtg

SEQ ID NO: 601867 - DNA, 33 bp, Homo sapien
cacttgctagaggtaactgactcaccaccttta

SEQ ID NO: 601868 - DNA, 33 bp, Homo sapien
cacttgctagaggtaattgactcaccaccttta

SEQ ID NO: 601869 - DNA, 33 bp, Homo sapien
caaagcttcctacgacggagtgtcataaataga

SEQ ID NO: 601870 - DNA, 33 bp, Homo sapien
caaagcttcctacgactgagtgtcataaataga

SEQ ID NO: 601871 - DNA, 33 bp, Homo sapien
aaacatacttttaaacaaaacagtgggagatac

SEQ ID NO: 601872 - DNA, 33 bp, Homo sapien
aaacatacttttaaaccaaacagtgggagatac

SEQ ID NO: 601873 - DNA, 33 bp, Homo sapien
cctgtgattgattacactagaaaatcaaacatg

SEQ ID NO: 601874 - DNA, 33 bp, Homo sapien
cctgtgattgattacattagaaaatcaaacatg

SEQ ID NO: 601875 - DNA, 33 bp, Homo sapien
ccaacttccctgttacagattgtgagatgttga

SEQ ID NO: 601876 - DNA, 33 bp, Homo sapien
ccaacttccctgttacggattgtgagatgttga

SEQ ID NO: 601877 - DNA, 33 bp, Homo sapien
gtctctgactgatccccccctaagtccatagaa

SEQ ID NO: 601878 - DNA, 33 bp, Homo sapien
gtctctgactgatccctccctaagtccatagaa

SEQ ID NO: 601879 - DNA, 33 bp, Homo sapien
atgtttatttttaaaactcaggtctattgaggc

SEQ ID NO: 601880 - DNA, 33 bp, Homo sapien
atgtttatttttaaaagtcaggtctattgaggc

SEQ ID NO: 601881 - DNA, 33 bp, Homo sapien
taatgatgtttgacaccgtgcaaattgttgcca

SEQ ID NO: 601882 - DNA, 33 bp, Homo sapien
taatgatgtttgacactgtgcaaattgttgcca

SEQ ID NO: 601883 - DNA, 33 bp, Homo sapien
gatccccgcagtgcaaagtagagtgctttatta

SEQ ID NO: 601884 - DNA, 33 bp, Homo sapien
gatccccgcagtgcaaggtagagtgctttatta

SEQ ID NO: 601885 - DNA, 33 bp, Homo sapien
ctgatctggcggagtcaccccaggatgcccagt

SEQ ID NO: 601886 - DNA, 33 bp, Homo sapien
ctgatctggcggagtcgccccaggatgcccagt

SEQ ID NO: 601887 - DNA, 33 bp, Homo sapien; identical to SEQ ID NO: 601885

SEQ ID NO: 601888 - DNA, 33 bp, Homo sapien; identical to SEQ ID NO: 601886

SEQ ID NO: 601889 - DNA, 33 bp, Homo sapien
tcaaagaaatgaagtcaatggctgggcttgggg

SEQ ID NO: 601890 - DNA, 33 bp, Homo sapien
tcaaagaaatgaagtccatggctgggcttgggg

SEQ ID NO: 601891 - DNA, 33 bp, Homo sapien
tgcataagcaacttcaccttttcgtattgtttt

SEQ ID NO: 601892 - DNA, 33 bp, Homo sapien
tgcataagcaacttcatcttttcgtattgtttt

SEQ ID NO: 601893 - DNA, 33 bp, Homo sapien
ggaattgaggagtaaaaagaagacatagatgga

SEQ ID NO: 601894 - DNA, 33 bp, Homo sapien
ggaattgaggagtaaatagaagacatagatgga

SEQ ID NO: 601895 - DNA, 33 bp, Homo sapien
tcatagcaatgaacacaatgttaatgatgtagc

SEQ ID NO: 601896 - DNA, 33 bp, Homo sapien
tcatagcaatgaacacgatgttaatgatgtagc

SEQ ID NO: 601897 - DNA, 33 bp, Homo sapien
acaggtagaatctaaccgcttaatgaacatgag

SEQ ID NO: 601898 - DNA, 33 bp, Homo sapien
acaggtagaatctaactgcttaatgaacatgag

SEQ ID NO: 601899 - DNA, 33 bp, Homo sapien
tttataatacccaatacgacataaatgctatgt

SEQ ID NO: 601900 - DNA, 33 bp, Homo sapien
tttataatacccaatatgacataaatgctatgt

SEQ ID NO: 601901 - DNA, 33 bp, Homo sapien
caaaactcatactcaacctgttaaatcatatat

SEQ ID NO: 601902 - DNA, 33 bp, Homo sapien
caaaactcatactcaatctgttaaatcatatat

SEQ ID NO: 601903 - DNA, 33 bp, Homo sapien
acagaataagatttggaaaactcaaatgtatgt

SEQ ID NO: 601904 - DNA, 33 bp, Homo sapien
acagaataagatttgggaaactcaaatgtatgt

SEQ ID NO: 601905 - DNA, 33 bp, Homo sapien
gttgaattttaaaaagcagtgatccatagtgtt

SEQ ID NO: 601906 - DNA, 33 bp, Homo sapien
gttgaattttaaaaagtagtgatccatagtgtt

SEQ ID NO: 601907 - DNA, 33 bp, Homo sapien
agggcgttgtcatcaaagagactaaactgctgc

SEQ ID NO: 601908 - DNA, 33 bp, Homo sapien
agggcgttgtcatcaaggagactaaactgctgc

SEQ ID NO: 601909 - DNA, 33 bp, Homo sapien
aacacagatatgtaaaaaacaaactctaactaa

SEQ ID NO: 601910 - DNA, 33 bp, Homo sapien
aacacagatatgtaaacaacaaactctaactaa

SEQ ID NO: 601911 - DNA, 33 bp, Homo sapien
tttcaaaatttctaacacaaaatgagaataatc

SEQ ID NO: 601912 - DNA, 33 bp, Homo sapien
tttcaaaatttctaacgcaaaatgagaataatc

SEQ ID NO: 601913 - DNA, 33 bp, Homo sapien
tgcaaaggtttagaatcaagaggaagcaaggta

SEQ ID NO: 601914 - DNA, 33 bp, Homo sapien
tgcaaaggtttagaatgaagaggaagcaaggta

SEQ ID NO: 601915 - DNA, 33 bp, Homo sapien
tggaattataacacagaaaaaagccctgaagct

SEQ ID NO: 601916 - DNA, 33 bp, Homo sapien
tggaattataacacaggaaaaagccctgaagct

SEQ ID NO: 601917 - DNA, 33 bp, Homo sapien
agaacagactgaataaacaaggaagaagaaagt

SEQ ID NO: 601918 - DNA, 33 bp, Homo sapien
agaacagactgaataagcaaggaagaagaaagt

SEQ ID NO: 601919 - DNA, 33 bp, Homo sapien
aagtaaaacattaaaactgtcgaacagagtcat

SEQ ID NO: 601920 - DNA, 33 bp, Homo sapien
aagtaaaacattaaaattgtcgaacagagtcat

SEQ ID NO: 601921 - DNA, 33 bp, Homo sapien
aactgtgtgaccttcagcaagtgatttaacttc

SEQ ID NO: 601922 - DNA, 33 bp, Homo sapien
aactgtgtgaccttcatcaagtgatttaacttc

SEQ ID NO: 601923 - DNA, 33 bp, Homo sapien
ggggaatgaagtgaaaatctgcccactggctaa

SEQ ID NO: 601924 - DNA, 33 bp, Homo sapien
ggggaatgaagtgaaattctgcccactggctaa

SEQ ID NO: 601925 - DNA, 33 bp, Homo sapien
acatcactgtgaattaacatcttagtccaggaa

SEQ ID NO: 601926 - DNA, 33 bp, Homo sapien
acatcactgtgaattagcatcttagtccaggaa

SEQ ID NO: 601927 - DNA, 33 bp, Homo sapien
ggcattgaattcccccaactactttcatcttat

SEQ ID NO: 601928 - DNA, 33 bp, Homo sapien
ggcattgaattcccccgactactttcatcttat

SEQ ID NO: 601929 - DNA, 33 bp, Homo sapien
ggacatgtataaatccaataacaacagcctgac

SEQ ID NO: 601930 - DNA, 33 bp, Homo sapien
ggacatgtataaatcccataacaacagcctgac

SEQ ID NO: 601931 - DNA, 33 bp, Homo sapien
tcccctgatgcaatgaaagggtgagcaatttca

SEQ ID NO: 601932 - DNA, 33 bp, Homo sapien
tcccctgatgcaatgagagggtgagcaatttca

SEQ ID NO: 601933 - DNA, 33 bp, Homo sapien
ggatgaggtaagttacaactgctttaagttcac

SEQ ID NO: 601934 - DNA, 33 bp, Homo sapien
ggatgaggtaagttactactgctttaagttcac

SEQ ID NO: 601935 - DNA, 33 bp, Homo sapien
agaagttttatctgcacaagtctcagattccac

SEQ ID NO: 601936 - DNA, 33 bp, Homo sapien
agaagttttatctgcagaagtctcagattccac

SEQ ID NO: 601937 - DNA, 33 bp, Homo sapien
cttccagatgtttttcaagacctccttggtgtt

SEQ ID NO: 601938 - DNA, 33 bp, Homo sapien
cttccagatgtttttcgagacctccttggtgtt

SEQ ID NO: 601939 - DNA, 33 bp, Homo sapien
tgctcatctgtaatcacacactcacttttcttt

SEQ ID NO: 601940 - DNA, 33 bp, Homo sapien
tgctcatctgtaatcatacactcacttttcttt

SEQ ID NO: 601941 - DNA, 33 bp, Homo sapien
ggtccacatcacatgcacgctgttcaggaagga

SEQ ID NO: 601942 - DNA, 33 bp, Homo sapien
ggtccacatcacatgcccgctgttcaggaagga

SEQ ID NO: 601943 - DNA, 33 bp, Homo sapien
ctgaaggaggaagagacgaataaatgctcgggg

SEQ ID NO: 601944 - DNA, 33 bp, Homo sapien
ctgaaggaggaagagatgaataaatgctcgggg

SEQ ID NO: 601945 - DNA, 33 bp, Homo sapien
ggttcattcaatagcaccttagtctctgagttg

SEQ ID NO: 601946 - DNA, 33 bp, Homo sapien
ggttcattcaatagcatcttagtctctgagttg

SEQ ID NO: 601947 - DNA, 33 bp, Homo sapien
cacacacacacacacaaaacgggaggaaaagcc

SEQ ID NO: 601948 - DNA, 33 bp, Homo sapien
cacacacacacacacacaacgggaggaaaagcc

SEQ ID NO: 601949 - DNA, 33 bp, Homo sapien
tctatgagggaggttaccctagcaccgggcttc

SEQ ID NO: 601950 - DNA, 33 bp, Homo sapien
tctatgagggaggttatcctagcaccgggcttc

SEQ ID NO: 601951 - DNA, 33 bp, Homo sapien
ggggatgctgctggcaactggctgtagacagca

SEQ ID NO: 601952 - DNA, 33 bp, Homo sapien
ggggatgctgctggcatctggctgtagacagca

SEQ ID NO: 601953 - DNA, 33 bp, Homo sapien
tctgtcatccaaacaccgcagggtctgaccggg

SEQ ID NO: 601954 - DNA, 33 bp, Homo sapien
tctgtcatccaaacactgcagggtctgaccggg

SEQ ID NO: 601955 - DNA, 33 bp, Homo sapien
caggagagccactgtcacaaggccggagctctg

SEQ ID NO: 601956 - DNA, 33 bp, Homo sapien
caggagagccactgtcgcaaggccggagctctg

SEQ ID NO: 601957 - DNA, 33 bp, Homo sapien
tggtatgttgtcatcacgagaaaagtcagacta

SEQ ID NO: 601958 - DNA, 33 bp, Homo sapien
tggtatgttgtcatcatgagaaaagtcagacta

SEQ ID NO: 601959 - DNA, 33 bp, Homo sapien
ggactgggaccagtacacagaggttgctccaga

SEQ ID NO: 601960 - DNA, 33 bp, Homo sapien
ggactgggaccagtacgcagaggttgctccaga

SEQ ID NO: 601961 - DNA, 33 bp, Homo sapien
cataacatttgcatcaatgatgaaccacatata

SEQ ID NO: 601962 - DNA, 33 bp, Homo sapien
cataacatttgcatcactgatgaaccacatata

SEQ ID NO: 601963 - DNA, 33 bp, Homo sapien
accattctgtcatataaaggagcgggtcgatct

SEQ ID NO: 601964 - DNA, 33 bp, Homo sapien
accattctgtcatatagaggagcgggtcgatct

SEQ ID NO: 601965 - DNA, 33 bp, Homo sapien
tttttctagccagagtaaaataccttgacatga

SEQ ID NO: 601966 - DNA, 33 bp, Homo sapien
tttttctagccagagttaaataccttgacatga

SEQ ID NO: 601967 - DNA, 33 bp, Homo sapien
ctgttatctttagaatcaagctatcacagggag

SEQ ID NO: 601968 - DNA, 33 bp, Homo sapien
ctgttatctttagaattaagctatcacagggag

SEQ ID NO: 601969 - DNA, 33 bp, Homo sapien
agaagaagaacattaacgcctccatgtgacctg

SEQ ID NO: 601970 - DNA, 33 bp, Homo sapien
agaagaagaacattaatgcctccatgtgacctg

SEQ ID NO: 601971 - DNA, 33 bp, Homo sapien
cttttagcttccatgacagatttagcttctgtg

SEQ ID NO: 601972 - DNA, 33 bp, Homo sapien
cttttagcttccatgagagatttagcttctgtg

SEQ ID NO: 601973 - DNA, 33 bp, Homo sapien
gtttagaaggagagcactgatggctggagtacc

SEQ ID NO: 601974 - DNA, 33 bp, Homo sapien
gtttagaaggagagcattgatggctggagtacc

SEQ ID NO: 601975 - DNA, 33 bp, Homo sapien
gggtctggagtaaaaacgccagagctcaagccc

SEQ ID NO: 601976 - DNA, 33 bp, Homo sapien
gggtctggagtaaaaatgccagagctcaagccc

SEQ ID NO: 601977 - DNA, 33 bp, Homo sapien
gcaggtgctagccgccacctcagatggaatggg

SEQ ID NO: 601978 - DNA, 33 bp, Homo sapien
gcaggtgctagccgccgcctcagatggaatggg

SEQ ID NO: 601979 - DNA, 33 bp, Homo sapien
ggattacgggatagcccataacaaacaggggtc

SEQ ID NO: 601980 - DNA, 33 bp, Homo sapien
ggattacgggatagcctataacaaacaggggtc

SEQ ID NO: 601981 - DNA, 33 bp, Homo sapien
gcatgggggcctatgacggggctccttacccac

SEQ ID NO: 601982 - DNA, 33 bp, Homo sapien
gcatgggggcctatgatggggctccttacccac

SEQ ID NO: 601983 - DNA, 33 bp, Homo sapien
ggggacagagatggacaatgctcatccagccac

SEQ ID NO: 601984 - DNA, 33 bp, Homo sapien
ggggacagagatggacgatgctcatccagccac

SEQ ID NO: 601985 - DNA, 33 bp, Homo sapien
ctgccagctctgcaaaaggatttgccctagtgc

SEQ ID NO: 601986 - DNA, 33 bp, Homo sapien
ctgccagctctgcaaatggatttgccctagtgc

SEQ ID NO: 601987 - DNA, 33 bp, Homo sapien
cgagcagctaactgcacatcttcctgccagctc

SEQ ID NO: 601988 - DNA, 33 bp, Homo sapien
cgagcagctaactgcagatcttcctgccagctc

SEQ ID NO: 601989 - DNA, 33 bp, Homo sapien
ctggaactgggactcaaagggattttatttatt

SEQ ID NO: 601990 - DNA, 33 bp, Homo sapien
ctggaactgggactcagagggattttatttatt

SEQ ID NO: 601991 - DNA, 33 bp, Homo sapien
caccacccccttccaccgctgaggtaacatatt

SEQ ID NO: 601992 - DNA, 33 bp, Homo sapien
caccacccccttccactgctgaggtaacatatt

SEQ ID NO: 601993 - DNA, 33 bp, Homo sapien
tgctggggagcagaggaaagaaagaggtggtct

SEQ ID NO: 601994 - DNA, 33 bp, Homo sapien
tgctggggagcagagggaagaaagaggtggtct

SEQ ID NO: 601995 - DNA, 33 bp, Homo sapien
aactatgttaaagagaagtccagttggccgggc

SEQ ID NO: 601996 - DNA, 33 bp, Homo sapien
aactatgttaaagagaggtccagttggccgggc

SEQ ID NO: 601997 - DNA, 33 bp, Homo sapien
attttcactgagaggacggaagacctttaagtt

SEQ ID NO: 601998 - DNA, 33 bp, Homo sapien
attttcactgagaggagggaagacctttaagtt

SEQ ID NO: 601999 - DNA, 33 bp, Homo sapien
tcttaacgtgtataagacactttatggtttaaa

SEQ ID NO: 602000 - DNA, 33 bp, Homo sapien
tcttaacgtgtataaggcactttatggtttaaa

SEQ ID NO: 602001 - DNA, 33 bp, Homo sapien
attttccattggctctaacaaaaagaaactgga

SEQ ID NO: 602002 - DNA, 33 bp, Homo sapien
attttccattggctctgacaaaaagaaactgga

SEQ ID NO: 602003 - DNA, 33 bp, Homo sapien
tctcaggttgggtgaccatgtagacaagcagag

SEQ ID NO: 602004 - DNA, 33 bp, Homo sapien
tctcaggttgggtgactatgtagacaagcagag

SEQ ID NO: 602005 - DNA, 33 bp, Homo sapien
ataaattcctggttcacaaagtttgcacatttt

SEQ ID NO: 602006 - DNA, 33 bp, Homo sapien
ataaattcctggttcagaaagtttgcacatttt

SEQ ID NO: 602007 - DNA, 33 bp, Homo sapien
tctgccagaacgctcaagacatcccggcctggg

SEQ ID NO: 602008 - DNA, 33 bp, Homo sapien
tctgccagaacgctcaggacatcccggcctggg

SEQ ID NO: 602009 - DNA, 33 bp, Homo sapien
ctcctgggaccaagaccaggaaatctaaccaat

SEQ ID NO: 602010 - DNA, 33 bp, Homo sapien
ctcctgggaccaagacgaggaaatctaaccaat

SEQ ID NO: 602011 - DNA, 33 bp, Homo sapien
acttagggtctgtgtcaatgttcatgttggtca

SEQ ID NO: 602012 - DNA, 33 bp, Homo sapien
acttagggtctgtgtcgatgttcatgttggtca

SEQ ID NO: 602013 - DNA, 33 bp, Homo sapien
aagtcctcctcactcacgatggatttactaaca

SEQ ID NO: 602014 - DNA, 33 bp, Homo sapien
aagtcctcctcactcatgatggatttactaaca

SEQ ID NO: 602015 - DNA, 33 bp, Homo sapien
gggtgtcgctggaagacgactgtggaagtgttt

SEQ ID NO: 602016 - DNA, 33 bp, Homo sapien
gggtgtcgctggaagaggactgtggaagtgttt

SEQ ID NO: 602017 - DNA, 33 bp, Homo sapien
aacatctcctcatacaagtaagacctctccgtt

SEQ ID NO: 602018 - DNA, 33 bp, Homo sapien
aacatctcctcatacaggtaagacctctccgtt

SEQ ID NO: 602019 - DNA, 33 bp, Homo sapien
gacctctccgtttcaagttatgggaccctgggc

SEQ ID NO: 602020 - DNA, 33 bp, Homo sapien
gacctctccgtttcaatttatgggaccctgggc

SEQ ID NO: 602021 - DNA, 33 bp, Homo sapien
agcttgtccaaggaaactcacagcagagtgggg

SEQ ID NO: 602022 - DNA, 33 bp, Homo sapien
agcttgtccaaggaaattcacagcagagtgggg

SEQ ID NO: 602023 - DNA, 33 bp, Homo sapien
agttgccttgtaataccgcctcctgcctataat

SEQ ID NO: 602024 - DNA, 33 bp, Homo sapien
agttgccttgtaatactgcctcctgcctataat

SEQ ID NO: 602025 - DNA, 33 bp, Homo sapien
gttgctcacagccatacggaaggaattcaagca

SEQ ID NO: 602026 - DNA, 33 bp, Homo sapien
gttgctcacagccatatggaaggaattcaagca

SEQ ID NO: 602027 - DNA, 33 bp, Homo sapien
ggcagttctcatctgacggtgcggacatcggct

SEQ ID NO: 602028 - DNA, 33 bp, Homo sapien
ggcagttctcatctgatggtgcggacatcggct

SEQ ID NO: 602029 - DNA, 33 bp, Homo sapien
tggatcacctgggcataaaaagatgcacagaac

SEQ ID NO: 602030 - DNA, 33 bp, Homo sapien
tggatcacctgggcatgaaaagatgcacagaac

SEQ ID NO: 602031 - DNA, 33 bp, Homo sapien
taagatgttagcagcaggagcttctttaatcat

SEQ ID NO: 602032 - DNA, 33 bp, Homo sapien
taagatgttagcagcatgagcttctttaatcat

SEQ ID NO: 602033 - DNA, 33 bp, Homo sapien
cctctggacctgaacacgtgaagcaagattgtg

SEQ ID NO: 602034 - DNA, 33 bp, Homo sapien
cctctggacctgaacatgtgaagcaagattgtg

SEQ ID NO: 602035 - DNA, 33 bp, Homo sapien
attgcagattacataactgggattaagtgaggt

SEQ ID NO: 602036 - DNA, 33 bp, Homo sapien
attgcagattacataattgggattaagtgaggt

SEQ ID NO: 602037 - DNA, 33 bp, Homo sapien
ccaagaagatccaggcagaacagtagaagacga

SEQ ID NO: 602038 - DNA, 33 bp, Homo sapien
ccaagaagatccaggcggaacagtagaagacga

SEQ ID NO: 602039 - DNA, 33 bp, Homo sapien
agagccacttgtcccacgtcaccatttcatctc

SEQ ID NO: 602040 - DNA, 33 bp, Homo sapien
agagccacttgtcccatgtcaccatttcatctc

SEQ ID NO: 602041 - DNA, 33 bp, Homo sapien
accaagctctagtcccaaaaggactaacccagt

SEQ ID NO: 602042 - DNA, 33 bp, Homo sapien
accaagctctagtcccgaaaggactaacccagt

SEQ ID NO: 602043 - DNA, 33 bp, Homo sapien
aataaccattgtaataggaaagacagcccaaca

SEQ ID NO: 602044 - DNA, 33 bp, Homo sapien
aataaccattgtaatatgaaagacagcccaaca

SEQ ID NO: 602045 - DNA, 33 bp, Homo sapien
cagtaacatcttttccaatgaatagtctcagct

SEQ ID NO: 602046 - DNA, 33 bp, Homo sapien
cagtaacatcttttcctatgaatagtctcagct

SEQ ID NO: 602047 - DNA, 33 bp, Homo sapien
gggtccagacagggacagagaggcactggagag

SEQ ID NO: 602048 - DNA, 33 bp, Homo sapien
gggtccagacagggacggagaggcactggagag

SEQ ID NO: 602049 - DNA, 33 bp, Homo sapien
tttctaagcaagcaaccagcacatagtcatcac

SEQ ID NO: 602050 - DNA, 33 bp, Homo sapien
tttctaagcaagcaactagcacatagtcatcac

SEQ ID NO: 602051 - DNA, 33 bp, Homo sapien
ctaggtactggaaccaagtttgggacatggtat

SEQ ID NO: 602052 - DNA, 33 bp, Homo sapien
ctaggtactggaaccaggtttgggacatggtat

SEQ ID NO: 602053 - DNA, 33 bp, Homo sapien
tcgcctccaatgtaaactctgatgacaatgcag

SEQ ID NO: 602054 - DNA, 33 bp, Homo sapien
tcgcctccaatgtaaattctgatgacaatgcag

SEQ ID NO: 602055 - DNA, 33 bp, Homo sapien
cagcagcagacatgcaacaaagattgtagacta

SEQ ID NO: 602056 - DNA, 33 bp, Homo sapien
cagcagcagacatgcagcaaagattgtagacta

SEQ ID NO: 602057 - DNA, 33 bp, Homo sapien
tctgaggaccagagaagtcccgatgggggtcct

SEQ ID NO: 602058 - DNA, 33 bp, Homo sapien
tctgaggaccagagaattcccgatgggggtcct

SEQ ID NO: 602059 - DNA, 33 bp, Homo sapien
ggcatccagatggttacacaagacaataggctt

SEQ ID NO: 602060 - DNA, 33 bp, Homo sapien
ggcatccagatggttatacaagacaataggctt

SEQ ID NO: 602061 - DNA, 33 bp, Homo sapien
agctgaacctagccaaagaggcccctgctgtct

SEQ ID NO: 602062 - DNA, 33 bp, Homo sapien
agctgaacctagccaaggaggcccctgctgtct

SEQ ID NO: 602063 - DNA, 33 bp, Homo sapien
taagtgtggcataaggcaatggaaaacgctata

SEQ ID NO: 602064 - DNA, 33 bp, Homo sapien
taagtgtggcataaggtaatggaaaacgctata

SEQ ID NO: 602065 - DNA, 33 bp, Homo sapien
caatgagatgcctgtacaagtccagggaaagat

SEQ ID NO: 602066 - DNA, 33 bp, Homo sapien
caatgagatgcctgtataagtccagggaaagat

SEQ ID NO: 602067 - DNA, 33 bp, Homo sapien
ttttctattttagccgcataaccgcgaatgaac

SEQ ID NO: 602068 - DNA, 33 bp, Homo sapien
ttttctattttagccgtataaccgcgaatgaac

SEQ ID NO: 602069 - DNA, 33 bp, Homo sapien
aatataaataatcagtaaaaaaagtagtagtca

SEQ ID NO: 602070 - DNA, 33 bp, Homo sapien
aatataaataatcagttaaaaaagtagtagtca

SEQ ID NO: 602071 - DNA, 33 bp, Homo sapien
ctcctcggtgtagtacaaggaaggatcccatga

SEQ ID NO: 602072 - DNA, 33 bp, Homo sapien
ctcctcggtgtagtacgaggaaggatcccatga

SEQ ID NO: 602073 - DNA, 33 bp, Homo sapien
cctgcactttccaacacgctcttttgggtcatg

SEQ ID NO: 602074 - DNA, 33 bp, Homo sapien
cctgcactttccaacaggctcttttgggtcatg

SEQ ID NO: 602075 - DNA, 33 bp, Homo sapien
aggaagagagagaggaagtcagccggcagggag

SEQ ID NO: 602076 - DNA, 33 bp, Homo sapien
aggaagagagagaggaggtcagccggcagggag

SEQ ID NO: 602077 - DNA, 33 bp, Homo sapien
tgtgccagactagacaactgacccagtgtccca

SEQ ID NO: 602078 - DNA, 33 bp, Homo sapien
tgtgccagactagacatctgacccagtgtccca

SEQ ID NO: 602079 - DNA, 33 bp, Homo sapien
ggctacagaaacaggccgaaaagaacgtggaga

SEQ ID NO: 602080 - DNA, 33 bp, Homo sapien
ggctacagaaacaggctgaaaagaacgtggaga

SEQ ID NO: 602081 - DNA, 33 bp, Homo sapien
caagatccactaccagaataagaaacagctcat

SEQ ID NO: 602082 - DNA, 33 bp, Homo sapien
caagatccactaccagcataagaaacagctcat

SEQ ID NO: 602083 - DNA, 33 bp, Homo sapien
gcagtcagcgaagcaccaaggctgcgtctttct

SEQ ID NO: 602084 - DNA, 33 bp, Homo sapien
gcagtcagcgaagcacgaaggctgcgtctttct

SEQ ID NO: 602085 - DNA, 33 bp, Homo sapien
gaccatcacagcagaactacccagcaaactcat

SEQ ID NO: 602086 - DNA, 33 bp, Homo sapien
gaccatcacagcagaattacccagcaaactcat

SEQ ID NO: 602087 - DNA, 33 bp, Homo sapien
tatgcaaggcagaatgaaaccacaagtaatcca

SEQ ID NO: 602088 - DNA, 33 bp, Homo sapien
tatgcaaggcagaatggaaccacaagtaatcca

SEQ ID NO: 602089 - DNA, 33 bp, Homo sapien
agccatatgtttctcagtcactcgatacactgt

SEQ ID NO: 602090 - DNA, 33 bp, Homo sapien
agccatatgtttctcattcactcgatacactgt

SEQ ID NO: 602091 - DNA, 33 bp, Homo sapien
ccctgagaaacgtacaaggttcagtagcagcag

SEQ ID NO: 602092 - DNA, 33 bp, Homo sapien
ccctgagaaacgtacagggttcagtagcagcag

SEQ ID NO: 602093 - DNA, 33 bp, Homo sapien
ccacacactgtattagcaaggcggcacctcctg

SEQ ID NO: 602094 - DNA, 33 bp, Homo sapien
ccacacactgtattaggaaggcggcacctcctg

SEQ ID NO: 602095 - DNA, 33 bp, Homo sapien
aagtacaggagggtaagcgagagtcacagcatc

SEQ ID NO: 602096 - DNA, 33 bp, Homo sapien
aagtacaggagggtaatcgagagtcacagcatc

SEQ ID NO: 602097 - DNA, 33 bp, Homo sapien
aactctgtcttggctcactctcccttagaaaag

SEQ ID NO: 602098 - DNA, 33 bp, Homo sapien
aactctgtcttggctcgctctcccttagaaaag

SEQ ID NO: 602099 - DNA, 33 bp, Homo sapien
tgggagttaaacaggaaggtctcattagttaag

SEQ ID NO: 602100 - DNA, 33 bp, Homo sapien
tgggagttaaacaggagggtctcattagttaag

SEQ ID NO: 602101 - DNA, 33 bp, Homo sapien
ttcattcagtcagcgcagcattcactgagggcc

SEQ ID NO: 602102 - DNA, 33 bp, Homo sapien
ttcattcagtcagcgcggcattcactgagggcc

SEQ ID NO: 602103 - DNA, 33 bp, Homo sapien
ccattaaagttagtcacatggtgccactcagac

SEQ ID NO: 602104 - DNA, 33 bp, Homo sapien
ccattaaagttagtcagatggtgccactcagac

SEQ ID NO: 602105 - DNA, 33 bp, Homo sapien
tcagccaggactcacaatgggagaaacaaaatc

SEQ ID NO: 602106 - DNA, 33 bp, Homo sapien
tcagccaggactcacagtgggagaaacaaaatc

SEQ ID NO: 602107 - DNA, 33 bp, Homo sapien
atgagtaaccttgcaaatacttcatttcatgca

SEQ ID NO: 602108 - DNA, 33 bp, Homo sapien
atgagtaaccttgcaagtacttcatttcatgca

SEQ ID NO: 602109 - DNA, 33 bp, Homo sapien
gcttcccgaagtcaaaagaggcctacacttcgg

SEQ ID NO: 602110 - DNA, 33 bp, Homo sapien
gcttcccgaagtcaaaggaggcctacacttcgg

SEQ ID NO: 602111 - DNA, 33 bp, Homo sapien
catgagatccatccaccgcagatgatttgaaaa

SEQ ID NO: 602112 - DNA, 33 bp, Homo sapien
catgagatccatccactgcagatgatttgaaaa

SEQ ID NO: 602113 - DNA, 33 bp, Homo sapien
taatttgctacttcccagacaatttaagaagct

SEQ ID NO: 602114 - DNA, 33 bp, Homo sapien
taatttgctacttcccggacaatttaagaagct

SEQ ID NO: 602115 - DNA, 33 bp, Homo sapien
gccaagtggtttctctcactggttcttgacatt

SEQ ID NO: 602116 - DNA, 33 bp, Homo sapien
gccaagtggtttctcttactggttcttgacatt

SEQ ID NO: 602117 - DNA, 33 bp, Homo sapien
tctaggttgctaaaaaattcaaagatcaagttc

SEQ ID NO: 602118 - DNA, 33 bp, Homo sapien
tctaggttgctaaaaatttcaaagatcaagttc

SEQ ID NO: 602119 - DNA, 33 bp, Homo sapien
agttctatagcttggaagggcaaggctgtgctg

SEQ ID NO: 602120 - DNA, 33 bp, Homo sapien
agttctatagcttggaggggcaaggctgtgctg

SEQ ID NO: 602121 - DNA, 33 bp, Homo sapien
tcaggagaggtgccagaaatggatagagggtgt

SEQ ID NO: 602122 - DNA, 33 bp, Homo sapien
tcaggagaggtgccaggaatggatagagggtgt

SEQ ID NO: 602123 - DNA, 33 bp, Homo sapien
ctgtacatactgatcaagagcttgcttttttcc

SEQ ID NO: 602124 - DNA, 33 bp, Homo sapien
ctgtacatactgatcaggagcttgcttttttcc

SEQ ID NO: 602125 - DNA, 33 bp, Homo sapien
gccatcacgtccagcaaattttttatttttagt

SEQ ID NO: 602126 - DNA, 33 bp, Homo sapien
gccatcacgtccagcagattttttatttttagt

SEQ ID NO: 602127 - DNA, 33 bp, Homo sapien
aataactgacatagcaatagaatgggcctgaga

SEQ ID NO: 602128 - DNA, 33 bp, Homo sapien
aataactgacatagcagtagaatgggcctgaga

SEQ ID NO: 602129 - DNA, 33 bp, Homo sapien
aagcaacctaactcaacaacagcaggtgaattt

SEQ ID NO: 602130 - DNA, 33 bp, Homo sapien
aagcaacctaactcaataacagcaggtgaattt

SEQ ID NO: 602131 - DNA, 33 bp, Homo sapien
gagtccacaggcaagacgagggcgtagcaggcc

SEQ ID NO: 602132 - DNA, 33 bp, Homo sapien
gagtccacaggcaagatgagggcgtagcaggcc

SEQ ID NO: 602133 - DNA, 33 bp, Homo sapien
ttggttttccacacaacggcaggagacagtgca

SEQ ID NO: 602134 - DNA, 33 bp, Homo sapien
ttggttttccacacaatggcaggagacagtgca

SEQ ID NO: 602135 - DNA, 33 bp, Homo sapien
aatttcttttcagccccgaggtacatatttttt

SEQ ID NO: 602136 - DNA, 33 bp, Homo sapien
aatttcttttcagccctgaggtacatatttttt

SEQ ID NO: 602137 - DNA, 33 bp, Homo sapien
gcagagcgaagttcaaatatgcaggactgggaa

SEQ ID NO: 602138 - DNA, 33 bp, Homo sapien
gcagagcgaagttcaagtatgcaggactgggaa

SEQ ID NO: 602139 - DNA, 33 bp, Homo sapien
acacaccgggtggttaccatccttcccagagca

SEQ ID NO: 602140 - DNA, 33 bp, Homo sapien
acacaccgggtggttatcatccttcccagagca

SEQ ID NO: 602141 - DNA, 33 bp, Homo sapien
cacagttacccaaaacagtaattcaagcacgga

SEQ ID NO: 602142 - DNA, 33 bp, Homo sapien
cacagttacccaaaactgtaattcaagcacgga

SEQ ID NO: 602143 - DNA, 33 bp, Homo sapien
gattagatgagaagtgaacatggaaccttcggc

SEQ ID NO: 602144 - DNA, 33 bp, Homo sapien
gattagatgagaagtggacatggaaccttcggc

SEQ ID NO: 602145 - DNA, 33 bp, Homo sapien
ctaatgtcacttgtaacggtacaattcaaaata

SEQ ID NO: 602146 - DNA, 33 bp, Homo sapien
ctaatgtcacttgtaatggtacaattcaaaata

SEQ ID NO: 602147 - DNA, 33 bp, Homo sapien
cagggtgagaaccatacattcctgtgagtggat

SEQ ID NO: 602148 - DNA, 33 bp, Homo sapien
cagggtgagaaccatagattcctgtgagtggat

SEQ ID NO: 602149 - DNA, 33 bp, Homo sapien
aacgcagctcactggacgggggctggttccagt

SEQ ID NO: 602150 - DNA, 33 bp, Homo sapien
aacgcagctcactggatgggggctggttccagt

SEQ ID NO: 602151 - DNA, 33 bp, Homo sapien
tttggggaaggtatgacgataacctggtgttta

SEQ ID NO: 602152 - DNA, 33 bp, Homo sapien
tttggggaaggtatgatgataacctggtgttta

SEQ ID NO: 602153 - DNA, 33 bp, Homo sapien
tacttccttcaggagacgttggtttatgtgctt

SEQ ID NO: 602154 - DNA, 33 bp, Homo sapien
tacttccttcaggagatgttggtttatgtgctt

SEQ ID NO: 602155 - DNA, 33 bp, Homo sapien
ccattgtcacctgggacggctgtgaagaatggg

SEQ ID NO: 602156 - DNA, 33 bp, Homo sapien
ccattgtcacctgggatggctgtgaagaatggg

SEQ ID NO: 602157 - DNA, 33 bp, Homo sapien
gaagtatggaggggaagagtgtaagtttcttct

SEQ ID NO: 602158 - DNA, 33 bp, Homo sapien
gaagtatggaggggaatagtgtaagtttcttct

SEQ ID NO: 602159 - DNA, 33 bp, Homo sapien
tcctatccttctgctcactccacctggattact

SEQ ID NO: 602160 - DNA, 33 bp, Homo sapien
tcctatccttctgctcgctccacctggattact

SEQ ID NO: 602161 - DNA, 33 bp, Homo sapien
gtggcactacctaccccagaaggtcaagaaagt

SEQ ID NO: 602162 - DNA, 33 bp, Homo sapien
gtggcactacctacccgagaaggtcaagaaagt

SEQ ID NO: 602163 - DNA, 33 bp, Homo sapien
gtggcaaattcaaacacagttccattaacctac

SEQ ID NO: 602164 - DNA, 33 bp, Homo sapien
gtggcaaattcaaacatagttccattaacctac

SEQ ID NO: 602165 - DNA, 33 bp, Homo sapien
ttacctctgtgtatacaataaacttattctaat

SEQ ID NO: 602166 - DNA, 33 bp, Homo sapien
ttacctctgtgtataccataaacttattctaat

SEQ ID NO: 602167 - DNA, 33 bp, Homo sapien
ataaatgatcttctacacaggcttctaccaaaa

SEQ ID NO: 602168 - DNA, 33 bp, Homo sapien
ataaatgatcttctacgcaggcttctaccaaaa

SEQ ID NO: 602169 - DNA, 33 bp, Homo sapien
ttgaacccagcagtagcattttacgataacaat

SEQ ID NO: 602170 - DNA, 33 bp, Homo sapien
ttgaacccagcagtagtattttacgataacaat

SEQ ID NO: 602171 - DNA, 33 bp, Homo sapien
ttttttttcaccatccagaaggagacattcatc

SEQ ID NO: 602172 - DNA, 33 bp, Homo sapien
ttttttttcaccatccggaaggagacattcatc

SEQ ID NO: 602173 - DNA, 33 bp, Homo sapien
ccctcaaccagtgaagaatgagaagttggtggc

SEQ ID NO: 602174 - DNA, 33 bp, Homo sapien
ccctcaaccagtgaaggatgagaagttggtggc

SEQ ID NO: 602175 - DNA, 33 bp, Homo sapien
gaagcaggtcttaagacaagtatttaagttcaa

SEQ ID NO: 602176 - DNA, 33 bp, Homo sapien
gaagcaggtcttaagagaagtatttaagttcaa

SEQ ID NO: 602177 - DNA, 33 bp, Homo sapien
tccagacccatgaagaactgccaggaagaaaaa

SEQ ID NO: 602178 - DNA, 33 bp, Homo sapien
tccagacccatgaagagctgccaggaagaaaaa

SEQ ID NO: 602179 - DNA, 33 bp, Homo sapien
atggagttggagaatccaagacagtggatcaga

SEQ ID NO: 602180 - DNA, 33 bp, Homo sapien
atggagttggagaatctaagacagtggatcaga

SEQ ID NO: 602181 - DNA, 33 bp, Homo sapien
tgctagatatttcctgcaggtgtggtatgaagc

SEQ ID NO: 602182 - DNA, 33 bp, Homo sapien
tgctagatatttcctgtaggtgtggtatgaagc

SEQ ID NO: 602183 - DNA, 33 bp, Homo sapien
acgtctgattgaatcaacttccaggatccttat

SEQ ID NO: 602184 - DNA, 33 bp, Homo sapien
acgtctgattgaatcagcttccaggatccttat

SEQ ID NO: 602185 - DNA, 33 bp, Homo sapien; identical to SEQ ID NO: 602183

SEQ ID NO: 602186 - DNA, 33 bp, Homo sapien; identical to SEQ ID NO: 602184

SEQ ID NO: 602187 - DNA, 33 bp, Homo sapien
ataaagcagatgctaacgttctgtcccttttat

SEQ ID NO: 602188 - DNA, 33 bp, Homo sapien
ataaagcagatgctaatgttctgtcccttttat

SEQ ID NO: 602189 - DNA, 33 bp, Homo sapien
tgagtcctgtgaggtaagaccaccattatacag

SEQ ID NO: 602190 - DNA, 33 bp, Homo sapien
tgagtcctgtgaggtaggaccaccattatacag

SEQ ID NO: 602191 - DNA, 33 bp, Homo sapien
gctcatctttcctccaactgagatctgggtcca

SEQ ID NO: 602192 - DNA, 33 bp, Homo sapien
gctcatctttcctccacctgagatctgggtcca

SEQ ID NO: 602193 - DNA, 33 bp, Homo sapien
ttgttaaatacctctcccttccttcataatgcc

SEQ ID NO: 602194 - DNA, 33 bp, Homo sapien
ttgttaaatacctctctcttccttcataatgcc

SEQ ID NO: 602195 - DNA, 33 bp, Homo sapien
gttgccgacatcaaaacgggaaatcctagaatc

SEQ ID NO: 602196 - DNA, 33 bp, Homo sapien
gttgccgacatcaaaatgggaaatcctagaatc

SEQ ID NO: 602197 - DNA, 33 bp, Homo sapien
ccaagccgccaaacacagtagtactgctatggg

SEQ ID NO: 602198 - DNA, 33 bp, Homo sapien
ccaagccgccaaacacggtagtactgctatggg

SEQ ID NO: 602199 - DNA, 33 bp, Homo sapien
ggtccaagcgccccagcaaagccaacaccacag

SEQ ID NO: 602200 - DNA, 33 bp, Homo sapien
ggtccaagcgccccaggaaagccaacaccacag

SEQ ID NO: 602201 - DNA, 33 bp, Homo sapien
ccaggtgtaggatgtacggcacagtgcccctcg

SEQ ID NO: 602202 - DNA, 33 bp, Homo sapien
ccaggtgtaggatgtatggcacagtgcccctcg

SEQ ID NO: 602203 - DNA, 33 bp, Homo sapien
gctgggaggtaggatacgaggagccaagctttc

SEQ ID NO: 602204 - DNA, 33 bp, Homo sapien
gctgggaggtaggatatgaggagccaagctttc

SEQ ID NO: 602205 - DNA, 33 bp, Homo sapien
tggctctctatgccagaagaatggggggggcag

SEQ ID NO: 602206 - DNA, 33 bp, Homo sapien
tggctctctatgccaggagaatggggggggcag

SEQ ID NO: 602207 - DNA, 33 bp, Homo sapien
acactttatgtgatccaatgtgtaaaatattat

SEQ ID NO: 602208 - DNA, 33 bp, Homo sapien
acactttatgtgatccgatgtgtaaaatattat

SEQ ID NO: 602209 - DNA, 33 bp, Homo sapien
catgttcagaccaaaaacctgggaatcattctt

SEQ ID NO: 602210 - DNA, 33 bp, Homo sapien
catgttcagaccaaaagcctgggaatcattctt

SEQ ID NO: 602211 - DNA, 33 bp, Homo sapien
accatacctttatctacagctttcccccaggtc

SEQ ID NO: 602212 - DNA, 33 bp, Homo sapien
accatacctttatctatagctttcccccaggtc

SEQ ID NO: 602213 - DNA, 33 bp, Homo sapien
ctaataagaaaatcacacaatgtatgacctttt

SEQ ID NO: 602214 - DNA, 33 bp, Homo sapien
ctaataagaaaatcacccaatgtatgacctttt

SEQ ID NO: 602215 - DNA, 33 bp, Homo sapien
ccaaggtggcatggcaaaaatcagcagcttccc

SEQ ID NO: 602216 - DNA, 33 bp, Homo sapien
ccaaggtggcatggcagaaatcagcagcttccc

SEQ ID NO: 602217 - DNA, 33 bp, Homo sapien
attttagatgcttgatcagtgtctgagttttaa

SEQ ID NO: 602218 - DNA, 33 bp, Homo sapien
attttagatgcttgattagtgtctgagttttaa

SEQ ID NO: 602219 - DNA, 33 bp, Homo sapien
ccataatagctgtacacattttttatgttatat

SEQ ID NO: 602220 - DNA, 33 bp, Homo sapien
ccataatagctgtacatattttttatgttatat

SEQ ID NO: 602221 - DNA, 33 bp, Homo sapien
atggaaagaaaactgacggtgatataccaaact

SEQ ID NO: 602222 - DNA, 33 bp, Homo sapien
atggaaagaaaactgagggtgatataccaaact

SEQ ID NO: 602223 - DNA, 33 bp, Homo sapien
agctggagagacagaaaggagaaaacaggctat

SEQ ID NO: 602224 - DNA, 33 bp, Homo sapien
agctggagagacagaagggagaaaacaggctat

SEQ ID NO: 602225 - DNA, 33 bp, Homo sapien
aatttccaagctgagccctaaaggatgaataca

SEQ ID NO: 602226 - DNA, 33 bp, Homo sapien
aatttccaagctgagctctaaaggatgaataca

SEQ ID NO: 602227 - DNA, 33 bp, Homo sapien
cctgttctggatcccactccatcttacttctta

SEQ ID NO: 602228 - DNA, 33 bp, Homo sapien
cctgttctggatcccattccatcttacttctta

SEQ ID NO: 602229 - DNA, 33 bp, Homo sapien
ctctgagaagaagaaacgaacacaatctccttc

SEQ ID NO: 602230 - DNA, 33 bp, Homo sapien
ctctgagaagaagaaatgaacacaatctccttc

SEQ ID NO: 602231 - DNA, 33 bp, Homo sapien
cctttagtaatattccaaataacagcttcatca

SEQ ID NO: 602232 - DNA, 33 bp, Homo sapien
cctttagtaatattccgaataacagcttcatca

SEQ ID NO: 602233 - DNA, 33 bp, Homo sapien
gggcagaaaagcagtgcaccatgtggttttgtg

SEQ ID NO: 602234 - DNA, 33 bp, Homo sapien
gggcagaaaagcagtgtaccatgtggttttgtg

SEQ ID NO: 602235 - DNA, 33 bp, Homo sapien
gacagaacaagacaaacggcaggtggacttggg

SEQ ID NO: 602236 - DNA, 33 bp, Homo sapien
gacagaacaagacaaatggcaggtggacttggg

SEQ ID NO: 602237 - DNA, 33 bp, Homo sapien
accacactagcgtgagaagtgagctgcaattac

SEQ ID NO: 602238 - DNA, 33 bp, Homo sapien
accacactagcgtgaggagtgagctgcaattac

SEQ ID NO: 602239 - DNA, 33 bp, Homo sapien
ctccggtgacatagtacagtggatgtggctttg

SEQ ID NO: 602240 - DNA, 33 bp, Homo sapien
ctccggtgacatagtatagtggatgtggctttg

SEQ ID NO: 602241 - DNA, 33 bp, Homo sapien
aatacagggttggcaaatctgtcactatgctta

SEQ ID NO: 602242 - DNA, 33 bp, Homo sapien
aatacagggttggcaagtctgtcactatgctta

SEQ ID NO: 602243 - DNA, 33 bp, Homo sapien
gtgattcttgccttaaatatcgggtaggaagta

SEQ ID NO: 602244 - DNA, 33 bp, Homo sapien
gtgattcttgccttaagtatcgggtaggaagta

SEQ ID NO: 602245 - DNA, 33 bp, Homo sapien
ctcagagcctggagtacgggcacagataggatt

SEQ ID NO: 602246 - DNA, 33 bp, Homo sapien
ctcagagcctggagtaggggcacagataggatt

SEQ ID NO: 602247 - DNA, 33 bp, Homo sapien
gtcacgtttactgaacactgtccctatggcagc

SEQ ID NO: 602248 - DNA, 33 bp, Homo sapien
gtcacgtttactgaacgctgtccctatggcagc

SEQ ID NO: 602249 - DNA, 33 bp, Homo sapien
gtgctgagggcccttacaccaactagagcacct

SEQ ID NO: 602250 - DNA, 33 bp, Homo sapien
gtgctgagggcccttagaccaactagagcacct

SEQ ID NO: 602251 - DNA, 33 bp, Homo sapien
tgaggcctgctctgacaaccatatttaaaattg

SEQ ID NO: 602252 - DNA, 33 bp, Homo sapien
tgaggcctgctctgacgaccatatttaaaattg

SEQ ID NO: 602253 - DNA, 33 bp, Homo sapien
gttatacaaccaggaaatagctgagcctagatc

SEQ ID NO: 602254 - DNA, 33 bp, Homo sapien
gttatacaaccaggaagtagctgagcctagatc

SEQ ID NO: 602255 - DNA, 33 bp, Homo sapien
tatccattctgcaagacggcgttaaactcaaca

SEQ ID NO: 602256 - DNA, 33 bp, Homo sapien
tatccattctgcaagatggcgttaaactcaaca

SEQ ID NO: 602257 - DNA, 33 bp, Homo sapien
tttgagtttaacttccgcgccttgctttcctca

SEQ ID NO: 602258 - DNA, 33 bp, Homo sapien
tttgagtttaacttcctcgccttgctttcctca

SEQ ID NO: 602259 - DNA, 33 bp, Homo sapien
aaaaatcaatttgtatcaatgaggcagagcagg

SEQ ID NO: 602260 - DNA, 33 bp, Homo sapien
aaaaatcaatttgtattaatgaggcagagcagg

SEQ ID NO: 602261 - DNA, 33 bp, Homo sapien
ctgactgggaaaatagcagcggctcagagtaat

SEQ ID NO: 602262 - DNA, 33 bp, Homo sapien
ctgactgggaaaatagtagcggctcagagtaat

SEQ ID NO: 602263 - DNA, 33 bp, Homo sapien
aggaggaggggaggaacgtacacaaagtcaaac

SEQ ID NO: 602264 - DNA, 33 bp, Homo sapien
aggaggaggggaggaaggtacacaaagtcaaac

SEQ ID NO: 602265 - DNA, 33 bp, Homo sapien
tcccagcaccacgaagacagtaaaacatagaca

SEQ ID NO: 602266 - DNA, 33 bp, Homo sapien
tcccagcaccacgaaggcagtaaaacatagaca

SEQ ID NO: 602267 - DNA, 33 bp, Homo sapien
tagagtttgtaaggagcagaattctggagacac

SEQ ID NO: 602268 - DNA, 33 bp, Homo sapien
tagagtttgtaaggagtagaattctggagacac

SEQ ID NO: 602269 - DNA, 33 bp, Homo sapien
gcccagggtgccttaactctgcctgtcccttct

SEQ ID NO: 602270 - DNA, 33 bp, Homo sapien
gcccagggtgccttaagtctgcctgtcccttct

SEQ ID NO: 602271 - DNA, 33 bp, Homo sapien
agcccatggggcctgaagggaaatgaggcagct

SEQ ID NO: 602272 - DNA, 33 bp, Homo sapien
agcccatggggcctgacgggaaatgaggcagct

SEQ ID NO: 602273 - DNA, 33 bp, Homo sapien
attcttgcttgtcccaatgcttccgaaagcctg

SEQ ID NO: 602274 - DNA, 33 bp, Homo sapien
attcttgcttgtcccagtgcttccgaaagcctg

SEQ ID NO: 602275 - DNA, 33 bp, Homo sapien
gctgggaacatccacaaagaaagagaaaggggc

SEQ ID NO: 602276 - DNA, 33 bp, Homo sapien
gctgggaacatccacagagaaagagaaaggggc

SEQ ID NO: 602277 - DNA, 33 bp, Homo sapien
tgtgtatacactggacactcagagcaaacctct

SEQ ID NO: 602278 - DNA, 33 bp, Homo sapien
tgtgtatacactggacgctcagagcaaacctct

SEQ ID NO: 602279 - DNA, 33 bp, Homo sapien
gcctaaggggttcttacagaaatgaatgagaat

SEQ ID NO: 602280 - DNA, 33 bp, Homo sapien
gcctaaggggttcttatagaaatgaatgagaat

SEQ ID NO: 602281 - DNA, 33 bp, Homo sapien
aattcattttctgttcacttaagctaatttgaa

SEQ ID NO: 602282 - DNA, 33 bp, Homo sapien
aattcattttctgttcccttaagctaatttgaa

SEQ ID NO: 602283 - DNA, 33 bp, Homo sapien
taatgcggaccacaccagatgcatgggttccac

SEQ ID NO: 602284 - DNA, 33 bp, Homo sapien
taatgcggaccacaccggatgcatgggttccac

SEQ ID NO: 602285 - DNA, 33 bp, Homo sapien
cccaagttcctgtacccattctgtctacctgaa

SEQ ID NO: 602286 - DNA, 33 bp, Homo sapien
cccaagttcctgtacctattctgtctacctgaa

SEQ ID NO: 602287 - DNA, 33 bp, Homo sapien
cgttcagcaagaaatggcatgcattaatgaaaa

SEQ ID NO: 602288 - DNA, 33 bp, Homo sapien
cgttcagcaagaaatgtcatgcattaatgaaaa

SEQ ID NO: 602289 - DNA, 33 bp, Homo sapien
agctgtcaaagtccaaagcagtgtctaggcatg

SEQ ID NO: 602290 - DNA, 33 bp, Homo sapien
agctgtcaaagtccaacgcagtgtctaggcatg

SEQ ID NO: 602291 - DNA, 33 bp, Homo sapien
aaagctagaataccaacgggatgtggggaggat

SEQ ID NO: 602292 - DNA, 33 bp, Homo sapien
aaagctagaataccaatgggatgtggggaggat

SEQ ID NO: 602293 - DNA, 33 bp, Homo sapien
gaagagtggtttggtcaagaatcattaatggat

SEQ ID NO: 602294 - DNA, 33 bp, Homo sapien
gaagagtggtttggtcgagaatcattaatggat

SEQ ID NO: 602295 - DNA, 33 bp, Homo sapien
cttttgggagagagagaaagtcatatttattaa

SEQ ID NO: 602296 - DNA, 33 bp, Homo sapien
cttttgggagagagaggaagtcatatttattaa

SEQ ID NO: 602297 - DNA, 33 bp, Homo sapien
ccttcacctaaaagcccctcaaagcaaattcca

SEQ ID NO: 602298 - DNA, 33 bp, Homo sapien
ccttcacctaaaagcctctcaaagcaaattcca

SEQ ID NO: 602299 - DNA, 33 bp, Homo sapien
aaagacattcagtaaagagatgtgtggtcatcc

SEQ ID NO: 602300 - DNA, 33 bp, Homo sapien
aaagacattcagtaaatagatgtgtggtcatcc

SEQ ID NO: 602301 - DNA, 33 bp, Homo sapien
atatatattttgtgaccccatagctgccatagg

SEQ ID NO: 602302 - DNA, 33 bp, Homo sapien
atatatattttgtgacgccatagctgccatagg

SEQ ID NO: 602303 - DNA, 33 bp, Homo sapien
cacattgattatagcaatatttcacgaaaaatc

SEQ ID NO: 602304 - DNA, 33 bp, Homo sapien
cacattgattatagcagtatttcacgaaaaatc

SEQ ID NO: 602305 - DNA, 33 bp, Homo sapien
tttatccatacaaaacgaataatccttacttac

SEQ ID NO: 602306 - DNA, 33 bp, Homo sapien
tttatccatacaaaactaataatccttacttac

SEQ ID NO: 602307 - DNA, 33 bp, Homo sapien
gacattcttcacataaataggaaaaacatctta

SEQ ID NO: 602308 - DNA, 33 bp, Homo sapien
gacattcttcacataagtaggaaaaacatctta

SEQ ID NO: 602309 - DNA, 33 bp, Homo sapien
tgcctcacaatatgacactatcaagattcttcc

SEQ ID NO: 602310 - DNA, 33 bp, Homo sapien
tgcctcacaatatgacgctatcaagattcttcc

SEQ ID NO: 602311 - DNA, 33 bp, Homo sapien
cagctgtagcctgtcccagctgcaagtgctagg

SEQ ID NO: 602312 - DNA, 33 bp, Homo sapien
cagctgtagcctgtcctagctgcaagtgctagg

SEQ ID NO: 602313 - DNA, 33 bp, Homo sapien
aatcaatctcatgaagcctgctaggactgaata

SEQ ID NO: 602314 - DNA, 33 bp, Homo sapien
aatcaatctcatgaaggctgctaggactgaata

SEQ ID NO: 602315 - DNA, 33 bp, Homo sapien
tactttttcatgagacagcaagaatatgtgatt

SEQ ID NO: 602316 - DNA, 33 bp, Homo sapien
tactttttcatgagacggcaagaatatgtgatt

SEQ ID NO: 602317 - DNA, 33 bp, Homo sapien
aaacttatggttcctacggtcagatcctgcttt

SEQ ID NO: 602318 - DNA, 33 bp, Homo sapien
aaacttatggttcctatggtcagatcctgcttt

SEQ ID NO: 602319 - DNA, 33 bp, Homo sapien
actacacaaagccataccatttacttatttatt

SEQ ID NO: 602320 - DNA, 33 bp, Homo sapien
actacacaaagccatatcatttacttatttatt

SEQ ID NO: 602321 - DNA, 33 bp, Homo sapien
ccaaccattcccattaagtcctgtctcaatctt

SEQ ID NO: 602322 - DNA, 33 bp, Homo sapien
ccaaccattcccattatgtcctgtctcaatctt

SEQ ID NO: 602323 - DNA, 33 bp, Homo sapien
aggagagtgaagcacgaaaattggcatgaaccc

SEQ ID NO: 602324 - DNA, 33 bp, Homo sapien
aggagagtgaagcacggaaattggcatgaaccc

SEQ ID NO: 602325 - DNA, 33 bp, Homo sapien
cacacacgctacagtcagaaccaaaccaaagct

SEQ ID NO: 602326 - DNA, 33 bp, Homo sapien
cacacacgctacagtcggaaccaaaccaaagct

SEQ ID NO: 602327 - DNA, 33 bp, Homo sapien
cagcatgcagcactaacgtgggtgcctcccact

SEQ ID NO: 602328 - DNA, 33 bp, Homo sapien
cagcatgcagcactaatgtgggtgcctcccact

SEQ ID NO: 602329 - DNA, 33 bp, Homo sapien
cagccacaagcacaaaaactgctttttctaaag

SEQ ID NO: 602330 - DNA, 33 bp, Homo sapien
cagccacaagcacaaagactgctttttctaaag

SEQ ID NO: 602331 - DNA, 33 bp, Homo sapien
agcctgagcggggttcaccactggttcgcctgc

SEQ ID NO: 602332 - DNA, 33 bp, Homo sapien
agcctgagcggggttcgccactggttcgcctgc

SEQ ID NO: 602333 - DNA, 33 bp, Homo sapien
ggccctgtgaataggaaacaatggctgatagga

SEQ ID NO: 602334 - DNA, 33 bp, Homo sapien
ggccctgtgaataggagacaatggctgatagga

SEQ ID NO: 602335 - DNA, 33 bp, Homo sapien
tttggggatccataccagagcagtaaggcagtg

SEQ ID NO: 602336 - DNA, 33 bp, Homo sapien
tttggggatccatacctgagcagtaaggcagtg

SEQ ID NO: 602337 - DNA, 33 bp, Homo sapien
gttcgctggtctacatcagttttggagtcaggg

SEQ ID NO: 602338 - DNA, 33 bp, Homo sapien
gttcgctggtctacattagttttggagtcaggg

SEQ ID NO: 602339 - DNA, 33 bp, Homo sapien
cacctgcaaccctgaaatggagtaattaggtaa

SEQ ID NO: 602340 - DNA, 33 bp, Homo sapien
cacctgcaaccctgaactggagtaattaggtaa

SEQ ID NO: 602341 - DNA, 33 bp, Homo sapien
agggaagagggagaaacgcttgttggccaagaa

SEQ ID NO: 602342 - DNA, 33 bp, Homo sapien
agggaagagggagaaatgcttgttggccaagaa

SEQ ID NO: 602343 - DNA, 33 bp, Homo sapien
ctactaatctaatggaaaatgatgtttacaggg

SEQ ID NO: 602344 - DNA, 33 bp, Homo sapien
ctactaatctaatggagaatgatgtttacaggg

SEQ ID NO: 602345 - DNA, 33 bp, Homo sapien
gcagcctgcattgttacggaatgcacgatacgt

SEQ ID NO: 602346 - DNA, 33 bp, Homo sapien
gcagcctgcattgttatggaatgcacgatacgt

SEQ ID NO: 602347 - DNA, 33 bp, Homo sapien
actcttaataataacaatctaactaggtgccag

SEQ ID NO: 602348 - DNA, 33 bp, Homo sapien
actcttaataataacagtctaactaggtgccag

SEQ ID NO: 602349 - DNA, 33 bp, Homo sapien
aggttcaggcaagtaccgacaatagtacctagg

SEQ ID NO: 602350 - DNA, 33 bp, Homo sapien
aggttcaggcaagtacggacaatagtacctagg

SEQ ID NO: 602351 - DNA, 33 bp, Homo sapien
accactttggaaggaaagatgcttactgtgaca

SEQ ID NO: 602352 - DNA, 33 bp, Homo sapien
accactttggaaggaacgatgcttactgtgaca

SEQ ID NO: 602353 - DNA, 33 bp, Homo sapien
cacatcactgcatctacactggcaacagagctg

SEQ ID NO: 602354 - DNA, 33 bp, Homo sapien
cacatcactgcatctatactggcaacagagctg

SEQ ID NO: 602355 - DNA, 33 bp, Homo sapien
aaaagtcagagagaagaatttagtgtctaagaa

SEQ ID NO: 602356 - DNA, 33 bp, Homo sapien
aaaagtcagagagaagcatttagtgtctaagaa

SEQ ID NO: 602357 - DNA, 33 bp, Homo sapien
ggagagtgacaggaaacgaccatcaggaagtca

SEQ ID NO: 602358 - DNA, 33 bp, Homo sapien
ggagagtgacaggaaatgaccatcaggaagtca

SEQ ID NO: 602359 - DNA, 33 bp, Homo sapien
ggattaagaagaaagacggtcaagctgtaagac

SEQ ID NO: 602360 - DNA, 33 bp, Homo sapien
ggattaagaagaaagatggtcaagctgtaagac

SEQ ID NO: 602361 - DNA, 33 bp, Homo sapien
acattgctgactagaagtgaaagatgaattgct

SEQ ID NO: 602362 - DNA, 33 bp, Homo sapien
acattgctgactagaattgaaagatgaattgct

SEQ ID NO: 602363 - DNA, 33 bp, Homo sapien
gtaaaatcagttgaaacactcgatcagaaggca

SEQ ID NO: 602364 - DNA, 33 bp, Homo sapien
gtaaaatcagttgaaatactcgatcagaaggca

SEQ ID NO: 602365 - DNA, 33 bp, Homo sapien
atgttttcctgggatacattttttcttacacga

SEQ ID NO: 602366 - DNA, 33 bp, Homo sapien
atgttttcctgggatatattttttcttacacga

SEQ ID NO: 602367 - DNA, 33 bp, Homo sapien
ttcagaaaccagcacactagttaccccagaacc

SEQ ID NO: 602368 - DNA, 33 bp, Homo sapien
ttcagaaaccagcacattagttaccccagaacc

SEQ ID NO: 602369 - DNA, 33 bp, Homo sapien
gaagataaagtgaatacgctaagtcagtggtcc

SEQ ID NO: 602370 - DNA, 33 bp, Homo sapien
gaagataaagtgaatatgctaagtcagtggtcc

SEQ ID NO: 602371 - DNA, 33 bp, Homo sapien
gattgggcactgaaggaaacctcaaatttaagt

SEQ ID NO: 602372 - DNA, 33 bp, Homo sapien
gattgggcactgaagggaacctcaaatttaagt

SEQ ID NO: 602373 - DNA, 33 bp, Homo sapien
tattgtatcctagaaccaaagtgtttacaacat

SEQ ID NO: 602374 - DNA, 33 bp, Homo sapien
tattgtatcctagaactaaagtgtttacaacat

SEQ ID NO: 602375 - DNA, 33 bp, Homo sapien
aagaaatgaaacattacgaacacagtggaagct

SEQ ID NO: 602376 - DNA, 33 bp, Homo sapien
aagaaatgaaacattatgaacacagtggaagct

SEQ ID NO: 602377 - DNA, 33 bp, Homo sapien
gaagatttgtaattaacaatgcaattcaacaaa

SEQ ID NO: 602378 - DNA, 33 bp, Homo sapien
gaagatttgtaattaataatgcaattcaacaaa

SEQ ID NO: 602379 - DNA, 33 bp, Homo sapien
tttatggattcaaggcactaaggagagctgggt

SEQ ID NO: 602380 - DNA, 33 bp, Homo sapien
tttatggattcaaggcgctaaggagagctgggt

SEQ ID NO: 602381 - DNA, 33 bp, Homo sapien
gtagaaaatcctcaaaatccacaaagtaagtat

SEQ ID NO: 602382 - DNA, 33 bp, Homo sapien
gtagaaaatcctcaaactccacaaagtaagtat

SEQ ID NO: 602383 - DNA, 33 bp, Homo sapien
aaagaaaacccatcacagtaccattatcattgg

SEQ ID NO: 602384 - DNA, 33 bp, Homo sapien
aaagaaaacccatcacggtaccattatcattgg

SEQ ID NO: 602385 - DNA, 33 bp, Homo sapien
cgttttgcctctttcaagtttgggatttcacag

SEQ ID NO: 602386 - DNA, 33 bp, Homo sapien
cgttttgcctctttcaggtttgggatttcacag

SEQ ID NO: 602387 - DNA, 33 bp, Homo sapien
ggctaacacaaactcaataagagggaaatacaa

SEQ ID NO: 602388 - DNA, 33 bp, Homo sapien
ggctaacacaaactcagtaagagggaaatacaa

SEQ ID NO: 602389 - DNA, 33 bp, Homo sapien
gctgccttgtagctccaccatattctgtcgggt

SEQ ID NO: 602390 - DNA, 33 bp, Homo sapien
gctgccttgtagctccgccatattctgtcgggt

SEQ ID NO: 602391 - DNA, 33 bp, Homo sapien
gttgaaatatttggctgaattgcattccttttg

SEQ ID NO: 602392 - DNA, 33 bp, Homo sapien
gttgaaatatttggcttaattgcattccttttg

SEQ ID NO: 602393 - DNA, 33 bp, Homo sapien
ctaaatttatctactacctaccatcttgaaaac

SEQ ID NO: 602394 - DNA, 33 bp, Homo sapien
ctaaatttatctactatctaccatcttgaaaac

SEQ ID NO: 602395 - DNA, 33 bp, Homo sapien
catggggctgtcagaacatttaatatggggccc

SEQ ID NO: 602396 - DNA, 33 bp, Homo sapien
catggggctgtcagaatatttaatatggggccc

SEQ ID NO: 602397 - DNA, 33 bp, Homo sapien
gagatactttctggacaccaaaaagaaggctga

SEQ ID NO: 602398 - DNA, 33 bp, Homo sapien
gagatactttctggacgccaaaaagaaggctga

SEQ ID NO: 602399 - DNA, 33 bp, Homo sapien
agatgattctcactgaagccgcgtgatgatggg

SEQ ID NO: 602400 - DNA, 33 bp, Homo sapien
agatgattctcactgaggccgcgtgatgatggg

SEQ ID NO: 602401 - DNA, 33 bp, Homo sapien
tgactgtctgtgaacaccatttttaaaattctt

SEQ ID NO: 602402 - DNA, 33 bp, Homo sapien
tgactgtctgtgaacatcatttttaaaattctt

SEQ ID NO: 602403 - DNA, 33 bp, Homo sapien
cactgataattccttaacataaatactgtaatt

SEQ ID NO: 602404 - DNA, 33 bp, Homo sapien
cactgataattccttagcataaatactgtaatt

SEQ ID NO: 602405 - DNA, 33 bp, Homo sapien
cagtcttctcacttcactctcccaagtagctgg

SEQ ID NO: 602406 - DNA, 33 bp, Homo sapien
cagtcttctcacttcattctcccaagtagctgg

SEQ ID NO: 602407 - DNA, 33 bp, Homo sapien
tgtaacattcttctaaatagcccctgattgcag

SEQ ID NO: 602408 - DNA, 33 bp, Homo sapien
tgtaacattcttctaactagcccctgattgcag

SEQ ID NO: 602409 - DNA, 33 bp, Homo sapien
cacctatttgtctctaaatgtggtctttcagtc

SEQ ID NO: 602410 - DNA, 33 bp, Homo sapien
cacctatttgtctctatatgtggtctttcagtc

SEQ ID NO: 602411 - DNA, 33 bp, Homo sapien
gtcagttatttttggaatcaagtattcattttt

SEQ ID NO: 602412 - DNA, 33 bp, Homo sapien
gtcagttatttttggattcaagtattcattttt

SEQ ID NO: 602413 - DNA, 33 bp, Homo sapien
gtggtgcctgtggcacaatgtcttgcacgtcat

SEQ ID NO: 602414 - DNA, 33 bp, Homo sapien
gtggtgcctgtggcacgatgtcttgcacgtcat

SEQ ID NO: 602415 - DNA, 33 bp, Homo sapien
ctattccttagtatccagaggaaaaggaagctg

SEQ ID NO: 602416 - DNA, 33 bp, Homo sapien
ctattccttagtatccggaggaaaaggaagctg

SEQ ID NO: 602417 - DNA, 33 bp, Homo sapien
ttatgtgaaacgtagcaaataggcaaatctttg

SEQ ID NO: 602418 - DNA, 33 bp, Homo sapien
ttatgtgaaacgtagcgaataggcaaatctttg

SEQ ID NO: 602419 - DNA, 33 bp, Homo sapien
tgtcccaaccaacagacggtatttagcacctct

SEQ ID NO: 602420 - DNA, 33 bp, Homo sapien
tgtcccaaccaacagatggtatttagcacctct

SEQ ID NO: 602421 - DNA, 33 bp, Homo sapien
ggcactgccagacctacggtttctgtttgtttt

SEQ ID NO: 602422 - DNA, 33 bp, Homo sapien
ggcactgccagacctagggtttctgtttgtttt

SEQ ID NO: 602423 - DNA, 33 bp, Homo sapien
tttaagcaatcaaaaaaggtagaatcagggttt

SEQ ID NO: 602424 - DNA, 33 bp, Homo sapien
tttaagcaatcaaaaagggtagaatcagggttt

SEQ ID NO: 602425 - DNA, 33 bp, Homo sapien
attcactgctcctacactaagaagccatacctg

SEQ ID NO: 602426 - DNA, 33 bp, Homo sapien
attcactgctcctacagtaagaagccatacctg

SEQ ID NO: 602427 - DNA, 33 bp, Homo sapien
cctgtttcactcaagaaaaggagaaaaccccac

SEQ ID NO: 602428 - DNA, 33 bp, Homo sapien
cctgtttcactcaagagaaggagaaaaccccac

SEQ ID NO: 602429 - DNA, 33 bp, Homo sapien
tcctagcaccatgtgccctttatgtctgtagca

SEQ ID NO: 602430 - DNA, 33 bp, Homo sapien
tcctagcaccatgtgctctttatgtctgtagca

SEQ ID NO: 602431 - DNA, 33 bp, Homo sapien
tgggcgaatgagttaaactctggcactgctagt

SEQ ID NO: 602432 - DNA, 33 bp, Homo sapien
tgggcgaatgagttaacctctggcactgctagt

SEQ ID NO: 602433 - DNA, 33 bp, Homo sapien
ggtgaagaagtactcacaagcttacctgcaatc

SEQ ID NO: 602434 - DNA, 33 bp, Homo sapien
ggtgaagaagtactcataagcttacctgcaatc

SEQ ID NO: 602435 - DNA, 33 bp, Homo sapien
tgaatttcatattaaaaatgaagaacccggaca

SEQ ID NO: 602436 - DNA, 33 bp, Homo sapien
tgaatttcatattaaagatgaagaacccggaca

SEQ ID NO: 602437 - DNA, 33 bp, Homo sapien
agggaaaaaaaaatgcacgtttctgcaaagcac

SEQ ID NO: 602438 - DNA, 33 bp, Homo sapien
agggaaaaaaaaatgcccgtttctgcaaagcac

SEQ ID NO: 602439 - DNA, 33 bp, Homo sapien
gcaaatagaagagcaacggccggagcagcagaa

SEQ ID NO: 602440 - DNA, 33 bp, Homo sapien
gcaaatagaagagcaatggccggagcagcagaa

SEQ ID NO: 602441 - DNA, 33 bp, Homo sapien
ttttaaatgccaggccaaagatttgaggcttca

SEQ ID NO: 602442 - DNA, 33 bp, Homo sapien
ttttaaatgccaggccgaagatttgaggcttca

SEQ ID NO: 602443 - DNA, 33 bp, Homo sapien
cagtgcaagaaagccacgtaagctgtttgccca

SEQ ID NO: 602444 - DNA, 33 bp, Homo sapien
cagtgcaagaaagccatgtaagctgtttgccca

SEQ ID NO: 602445 - DNA, 33 bp, Homo sapien
atgtatttcagatttgcactcactttaaatgat

SEQ ID NO: 602446 - DNA, 33 bp, Homo sapien
atgtatttcagatttgtactcactttaaatgat

SEQ ID NO: 602447 - DNA, 33 bp, Homo sapien
cacagctactcagcagcaagttgtactctgacc

SEQ ID NO: 602448 - DNA, 33 bp, Homo sapien
cacagctactcagcaggaagttgtactctgacc

SEQ ID NO: 602449 - DNA, 33 bp, Homo sapien
ttcagaagacagctgtaaaacgtaaatgtgaat

SEQ ID NO: 602450 - DNA, 33 bp, Homo sapien
ttcagaagacagctgtgaaacgtaaatgtgaat

SEQ ID NO: 602451 - DNA, 33 bp, Homo sapien
catcccttttcaagtaaaatttcttccattcta

SEQ ID NO: 602452 - DNA, 33 bp, Homo sapien
catcccttttcaagtataatttcttccattcta

SEQ ID NO: 602453 - DNA, 33 bp, Homo sapien
agaaagtggctctcataatgaagctctgctgag

SEQ ID NO: 602454 - DNA, 33 bp, Homo sapien
agaaagtggctctcatgatgaagctctgctgag

SEQ ID NO: 602455 - DNA, 33 bp, Homo sapien
agatatatctatggacagaattgacaggacttt

SEQ ID NO: 602456 - DNA, 33 bp, Homo sapien
agatatatctatggacggaattgacaggacttt

SEQ ID NO: 602457 - DNA, 33 bp, Homo sapien
aagcaccacactataaccttttctatgccttgc

SEQ ID NO: 602458 - DNA, 33 bp, Homo sapien
aagcaccacactataatcttttctatgccttgc

SEQ ID NO: 602459 - DNA, 33 bp, Homo sapien
ctacctttcccactccccaagacacttgccttt

SEQ ID NO: 602460 - DNA, 33 bp, Homo sapien
ctacctttcccactcctcaagacacttgccttt

SEQ ID NO: 602461 - DNA, 33 bp, Homo sapien
atgttgactgatgggacacaataatggccctgc

SEQ ID NO: 602462 - DNA, 33 bp, Homo sapien
atgttgactgatgggatacaataatggccctgc

SEQ ID NO: 602463 - DNA, 33 bp, Homo sapien
ttattagcaagtgttcactgagagaagccaata

SEQ ID NO: 602464 - DNA, 33 bp, Homo sapien
ttattagcaagtgttcgctgagagaagccaata

SEQ ID NO: 602465 - DNA, 33 bp, Homo sapien
aaactggaaaaggaagccttaatcagagttccc

SEQ ID NO: 602466 - DNA, 33 bp, Homo sapien
aaactggaaaaggaaggcttaatcagagttccc

SEQ ID NO: 602467 - DNA, 33 bp, Homo sapien
atggaaaatgcagtcacctaatttcaggaaaca

SEQ ID NO: 602468 - DNA, 33 bp, Homo sapien
atggaaaatgcagtcagctaatttcaggaaaca

SEQ ID NO: 602469 - DNA, 33 bp, Homo sapien
agggtcttgcccaatacaggctctcagtaaaca

SEQ ID NO: 602470 - DNA, 33 bp, Homo sapien
agggtcttgcccaatataggctctcagtaaaca

SEQ ID NO: 602471 - DNA, 33 bp, Homo sapien
agccttagcagtcaaccagttcaatctatgctc

SEQ ID NO: 602472 - DNA, 33 bp, Homo sapien
agccttagcagtcaactagttcaatctatgctc

SEQ ID NO: 602473 - DNA, 33 bp, Homo sapien
gggtaatttttctgcaacagctgaggggccctt

SEQ ID NO: 602474 - DNA, 33 bp, Homo sapien
gggtaatttttctgcagcagctgaggggccctt

SEQ ID NO: 602475 - DNA, 33 bp, Homo sapien
cagacttgcttttgggaacgagctctgataaac

SEQ ID NO: 602476 - DNA, 33 bp, Homo sapien
cagacttgcttttggggacgagctctgataaac

SEQ ID NO: 602477 - DNA, 33 bp, Homo sapien
cataacagcaccttcaactcttttgtacttgaa

SEQ ID NO: 602478 - DNA, 33 bp, Homo sapien
cataacagcaccttcagctcttttgtacttgaa

SEQ ID NO: 602479 - DNA, 33 bp, Homo sapien
actatggaatccctaaaagaccttcaacttcat

SEQ ID NO: 602480 - DNA, 33 bp, Homo sapien
actatggaatccctaagagaccttcaacttcat

SEQ ID NO: 602481 - DNA, 33 bp, Homo sapien
agagttcatcctccacaagccatctttagcata

SEQ ID NO: 602482 - DNA, 33 bp, Homo sapien
agagttcatcctccacgagccatctttagcata

SEQ ID NO: 602483 - DNA, 33 bp, Homo sapien
ccatctgtttctcacaacgtaccccaggtcctc

SEQ ID NO: 602484 - DNA, 33 bp, Homo sapien
ccatctgtttctcacatcgtaccccaggtcctc

SEQ ID NO: 602485 - DNA, 33 bp, Homo sapien
tttgaggcattttatcccgagggtatactccat

SEQ ID NO: 602486 - DNA, 33 bp, Homo sapien
tttgaggcattttatctcgagggtatactccat

SEQ ID NO: 602487 - DNA, 33 bp, Homo sapien
ctctgccttaaacagaaacgtgttttacactgg

SEQ ID NO: 602488 - DNA, 33 bp, Homo sapien
ctctgccttaaacagacacgtgttttacactgg

SEQ ID NO: 602489 - DNA, 33 bp, Homo sapien
gcccagagaaatgcaaatggcccacggctgctg

SEQ ID NO: 602490 - DNA, 33 bp, Homo sapien
gcccagagaaatgcaagtggcccacggctgctg

SEQ ID NO: 602491 - DNA, 33 bp, Homo sapien
ggagagttggctttgcaagaagcagatgataag

SEQ ID NO: 602492 - DNA, 33 bp, Homo sapien
ggagagttggctttgcgagaagcagatgataag

SEQ ID NO: 602493 - DNA, 33 bp, Homo sapien
aaaggtgccatacaccaaactttctctcggggg

SEQ ID NO: 602494 - DNA, 33 bp, Homo sapien
aaaggtgccatacaccgaactttctctcggggg

SEQ ID NO: 602495 - DNA, 33 bp, Homo sapien; identical to SEQ ID NO: 602493

SEQ ID NO: 602496 - DNA, 33 bp, Homo sapien; identical to SEQ ID NO: 602494

SEQ ID NO: 602497 - DNA, 33 bp, Homo sapien
tctcttagaaggtagacgtgttcatgggaatca

SEQ ID NO: 602498 - DNA, 33 bp, Homo sapien
tctcttagaaggtagatgtgttcatgggaatca

SEQ ID NO: 602499 - DNA, 33 bp, Homo sapien; identical to SEQ ID NO: 602497

SEQ ID NO: 602500 - DNA, 33 bp, Homo sapien; identical to SEQ ID NO: 602498

SEQ ID NO: 602501 - DNA, 33 bp, Homo sapien
gttgcacctccaggaaatgatgaaacatccaca

SEQ ID NO: 602502 - DNA, 33 bp, Homo sapien
gttgcacctccaggaagtgatgaaacatccaca

SEQ ID NO: 602503 - DNA, 33 bp, Homo sapien; identical to SEQ ID NO: 602501

SEQ ID NO: 602504 - DNA, 33 bp, Homo sapien; identical to SEQ ID NO: 602502

SEQ ID NO: 602505 - DNA, 33 bp, Homo sapien
gtctgtatggtttaaaatattatcttgtttcca

SEQ ID NO: 602506 - DNA, 33 bp, Homo sapien
gtctgtatggtttaaattattatcttgtttcca

SEQ ID NO: 602507 - DNA, 33 bp, Homo sapien; identical to SEQ ID NO: 602505

SEQ ID NO: 602508 - DNA, 33 bp, Homo sapien; identical to SEQ ID NO: 602506

SEQ ID NO: 602509 - DNA, 33 bp, Homo sapien
cgctgctgacgataaacacccgaatcccctatt

SEQ ID NO: 602510 - DNA, 33 bp, Homo sapien
cgctgctgacgataaatacccgaatcccctatt

SEQ ID NO: 602511 - DNA, 33 bp, Homo sapien
tactattaaatgtgaaccagaattgacttttaa

SEQ ID NO: 602512 - DNA, 33 bp, Homo sapien
tactattaaatgtgaatcagaattgacttttaa

SEQ ID NO: 602513 - DNA, 33 bp, Homo sapien
atgtctaaacgtgactcaattgttgaacattat

SEQ ID NO: 602514 - DNA, 33 bp, Homo sapien
atgtctaaacgtgactgaattgttgaacattat

SEQ ID NO: 602515 - DNA, 33 bp, Homo sapien
acataaagattgagcacgtaatacacaaagttc

SEQ ID NO: 602516 - DNA, 33 bp, Homo sapien
acataaagattgagcatgtaatacacaaagttc

SEQ ID NO: 602517 - DNA, 33 bp, Homo sapien
cgcatggatgaggagaacactgtctgaaactct

SEQ ID NO: 602518 - DNA, 33 bp, Homo sapien
cgcatggatgaggagaccactgtctgaaactct

SEQ ID NO: 602519 - DNA, 33 bp, Homo sapien; identical to SEQ ID NO: 602517

SEQ ID NO: 602520 - DNA, 33 bp, Homo sapien; identical to SEQ ID NO: 602518

SEQ ID NO: 602521 - DNA, 33 bp, Homo sapien
agcaaaataaatcaggaccagaaagataaatac

SEQ ID NO: 602522 - DNA, 33 bp, Homo sapien
agcaaaataaatcaggtccagaaagataaatac

SEQ ID NO: 602523 - DNA, 33 bp, Homo sapien
atctcatcccactgtaaatcattttttaataga

SEQ ID NO: 602524 - DNA, 33 bp, Homo sapien
atctcatcccactgtacatcattttttaataga

SEQ ID NO: 602525 - DNA, 33 bp, Homo sapien
ccggctgctacttacacagtccttttgagtcag

SEQ ID NO: 602526 - DNA, 33 bp, Homo sapien
ccggctgctacttacatagtccttttgagtcag

SEQ ID NO: 602527 - DNA, 33 bp, Homo sapien
aagaagtaaagggcccaaatgcctgcagcacat

SEQ ID NO: 602528 - DNA, 33 bp, Homo sapien
aagaagtaaagggcccgaatgcctgcagcacat

SEQ ID NO: 602529 - DNA, 33 bp, Homo sapien
tttgtgcttcagataaaaaggaagacagagggt

SEQ ID NO: 602530 - DNA, 33 bp, Homo sapien
tttgtgcttcagataagaaggaagacagagggt

SEQ ID NO: 602531 - DNA, 33 bp, Homo sapien
cacaagtaaatatcagacctgggtcattctaag

SEQ ID NO: 602532 - DNA, 33 bp, Homo sapien
cacaagtaaatatcagccctgggtcattctaag

SEQ ID NO: 602533 - DNA, 33 bp, Homo sapien
ctcacttaatactcacaacaatcccatagaata

SEQ ID NO: 602534 - DNA, 33 bp, Homo sapien
ctcacttaatactcaccacaatcccatagaata

SEQ ID NO: 602535 - DNA, 33 bp, Homo sapien
tgtactatgaatgtgcactatatttttatactt

SEQ ID NO: 602536 - DNA, 33 bp, Homo sapien
tgtactatgaatgtgcgctatatttttatactt

SEQ ID NO: 602537 - DNA, 33 bp, Homo sapien
gaaaactggaaaaaaaatttccctgctggagtg

SEQ ID NO: 602538 - DNA, 33 bp, Homo sapien
gaaaactggaaaaaaagtttccctgctggagtg

SEQ ID NO: 602539 - DNA, 33 bp, Homo sapien
ggagactgaagcacaaatgtctcatttaaatgt

SEQ ID NO: 602540 - DNA, 33 bp, Homo sapien
ggagactgaagcacaagtgtctcatttaaatgt

SEQ ID NO: 602541 - DNA, 33 bp, Homo sapien
aggacattctggtatcaatttttttcctcttgt

SEQ ID NO: 602542 - DNA, 33 bp, Homo sapien
aggacattctggtatcgatttttttcctcttgt

SEQ ID NO: 602543 - DNA, 33 bp, Homo sapien
agctatatgtttggtaaccagattggcacttcg

SEQ ID NO: 602544 - DNA, 33 bp, Homo sapien
agctatatgtttggtacccagattggcacttcg

SEQ ID NO: 602545 - DNA, 33 bp, Homo sapien
ttaaccttgtcactgccgaggtaaaggcaccat

SEQ ID NO: 602546 - DNA, 33 bp, Homo sapien
ttaaccttgtcactgctgaggtaaaggcaccat

SEQ ID NO: 602547 - DNA, 33 bp, Homo sapien
tcaatgcctcacctcagccctttctcatctgag

SEQ ID NO: 602548 - DNA, 33 bp, Homo sapien
tcaatgcctcacctcatccctttctcatctgag

SEQ ID NO: 602549 - DNA, 33 bp, Homo sapien
ctttgcactcagagaacgccccatgctccacct

SEQ ID NO: 602550 - DNA, 33 bp, Homo sapien
ctttgcactcagagaatgccccatgctccacct

SEQ ID NO: 602551 - DNA, 33 bp, Homo sapien
ttttattgtggcaaagcatacatagcataaaat

SEQ ID NO: 602552 - DNA, 33 bp, Homo sapien
ttttattgtggcaaagtatacatagcataaaat

SEQ ID NO: 602553 - DNA, 33 bp, Homo sapien
gtggcttgtttctttccctgtctatcctagaaa

SEQ ID NO: 602554 - DNA, 33 bp, Homo sapien
gtggcttgtttctttctctgtctatcctagaaa

SEQ ID NO: 602555 - DNA, 33 bp, Homo sapien
cttggagccctcacacactattgatgggaatgt

SEQ ID NO: 602556 - DNA, 33 bp, Homo sapien
cttggagccctcacacgctattgatgggaatgt

SEQ ID NO: 602557 - DNA, 33 bp, Homo sapien
ccatcaatggccctgaaaaagtagccattcaaa

SEQ ID NO: 602558 - DNA, 33 bp, Homo sapien
ccatcaatggccctgagaaagtagccattcaaa

SEQ ID NO: 602559 - DNA, 33 bp, Homo sapien
ccagggcctgcacatcaatgaggtagcttctac

SEQ ID NO: 602560 - DNA, 33 bp, Homo sapien
ccagggcctgcacatcgatgaggtagcttctac

SEQ ID NO: 602561 - DNA, 33 bp, Homo sapien
cctgcacggctactacaagcccatcctgttcga

SEQ ID NO: 602562 - DNA, 33 bp, Homo sapien
cctgcacggctactacgagcccatcctgttcga

SEQ ID NO: 602563 - DNA, 33 bp, Homo sapien
ggccaccttcatctcccatgacaagatggtcat

SEQ ID NO: 602564 - DNA, 33 bp, Homo sapien
ggccaccttcatctcctatgacaagatggtcat

SEQ ID NO: 602565 - DNA, 33 bp, Homo sapien
ggatttgtccctggctaaccagctggccatgtg

SEQ ID NO: 602566 - DNA, 33 bp, Homo sapien
ggatttgtccctggctgaccagctggccatgtg

SEQ ID NO: 602567 - DNA, 33 bp, Homo sapien
gtagaaggcccagggacatgaacagatactaca

SEQ ID NO: 602568 - DNA, 33 bp, Homo sapien
gtagaaggcccagggatatgaacagatactaca

SEQ ID NO: 602569 - DNA, 33 bp, Homo sapien
gaaagaaatataccagaacattaacaagagtag

SEQ ID NO: 602570 - DNA, 33 bp, Homo sapien
gaaagaaatataccaggacattaacaagagtag

SEQ ID NO: 602571 - DNA, 33 bp, Homo sapien
gtgtactactggtgtacaatagagttataagct

SEQ ID NO: 602572 - DNA, 33 bp, Homo sapien
gtgtactactggtgtataatagagttataagct

SEQ ID NO: 602573 - DNA, 33 bp, Homo sapien
gaactaaaaaaggctcagactattcatgactta

SEQ ID NO: 602574 - DNA, 33 bp, Homo sapien
gaactaaaaaaggctcggactattcatgactta

SEQ ID NO: 602575 - DNA, 33 bp, Homo sapien
aagcatttatctagcaccagctgttggccaggg

SEQ ID NO: 602576 - DNA, 33 bp, Homo sapien
aagcatttatctagcatcagctgttggccaggg

SEQ ID NO: 602577 - DNA, 33 bp, Homo sapien
tgagttcccggcagaacactcgccgcccttgcc

SEQ ID NO: 602578 - DNA, 33 bp, Homo sapien
tgagttcccggcagaagactcgccgcccttgcc

SEQ ID NO: 602579 - DNA, 33 bp, Homo sapien
tcaatttggtgacatccagtagacacgttggcc

SEQ ID NO: 602580 - DNA, 33 bp, Homo sapien
tcaatttggtgacatcgagtagacacgttggcc

SEQ ID NO: 602581 - DNA, 33 bp, Homo sapien
agacacacactgtagggaattggctcctgcagc

SEQ ID NO: 602582 - DNA, 33 bp, Homo sapien
agacacacactgtaggtaattggctcctgcagc

SEQ ID NO: 602583 - DNA, 33 bp, Homo sapien
cccaattgagaagacacagaagcaagtcaggtg

SEQ ID NO: 602584 - DNA, 33 bp, Homo sapien
cccaattgagaagacagagaagcaagtcaggtg

SEQ ID NO: 602585 - DNA, 33 bp, Homo sapien
ccatgctgcacaggaaaggaagaatgtgacatg

SEQ ID NO: 602586 - DNA, 33 bp, Homo sapien
ccatgctgcacaggaagggaagaatgtgacatg

SEQ ID NO: 602587 - DNA, 33 bp, Homo sapien
agtcctgttggtaagaagccctgaggcccagct

SEQ ID NO: 602588 - DNA, 33 bp, Homo sapien
agtcctgttggtaagaggccctgaggcccagct

SEQ ID NO: 602589 - DNA, 33 bp, Homo sapien
tttggagtggagaccacaaaactgaaagcggta

SEQ ID NO: 602590 - DNA, 33 bp, Homo sapien
tttggagtggagaccataaaactgaaagcggta

SEQ ID NO: 602591 - DNA, 33 bp, Homo sapien
gggccttaggcacccacctaataccactgtagg

SEQ ID NO: 602592 - DNA, 33 bp, Homo sapien
gggccttaggcacccatctaataccactgtagg

SEQ ID NO: 602593 - DNA, 33 bp, Homo sapien
tgtacagatccggaggacagcagttggaaagga

SEQ ID NO: 602594 - DNA, 33 bp, Homo sapien
tgtacagatccggaggtcagcagttggaaagga

SEQ ID NO: 602595 - DNA, 33 bp, Homo sapien
ccagatgcacaatctccaagatcctccctctcc

SEQ ID NO: 602596 - DNA, 33 bp, Homo sapien
ccagatgcacaatctctaagatcctccctctcc

SEQ ID NO: 602597 - DNA, 33 bp, Homo sapien
ttctcggagtgacaaaactggaacacaatacct

SEQ ID NO: 602598 - DNA, 33 bp, Homo sapien
ttctcggagtgacaaagctggaacacaatacct

SEQ ID NO: 602599 - DNA, 33 bp, Homo sapien
gaaatatttactgttacgtttaccatttcgatc

SEQ ID NO: 602600 - DNA, 33 bp, Homo sapien
gaaatatttactgttatgtttaccatttcgatc

SEQ ID NO: 602601 - DNA, 33 bp, Homo sapien
gtcccatatgttagaagaagctatagaggaggt

SEQ ID NO: 602602 - DNA, 33 bp, Homo sapien
gtcccatatgttagaataagctatagaggaggt

SEQ ID NO: 602603 - DNA, 33 bp, Homo sapien
gatggagtaaacacaaaaaagaattgaacaggt

SEQ ID NO: 602604 - DNA, 33 bp, Homo sapien
gatggagtaaacacaacaaagaattgaacaggt

SEQ ID NO: 602605 - DNA, 33 bp, Homo sapien
aaggaaatgagaaatacagcctttgtctttcca

SEQ ID NO: 602606 - DNA, 33 bp, Homo sapien
aaggaaatgagaaatagagcctttgtctttcca

SEQ ID NO: 602607 - DNA, 33 bp, Homo sapien
gcagatgaaagcgacacgaaatactcaaacttc

SEQ ID NO: 602608 - DNA, 33 bp, Homo sapien
gcagatgaaagcgacatgaaatactcaaacttc

SEQ ID NO: 602609 - DNA, 33 bp, Homo sapien
ataaatcaaaccagaaactaaatccagctctag

SEQ ID NO: 602610 - DNA, 33 bp, Homo sapien
ataaatcaaaccagaagctaaatccagctctag

SEQ ID NO: 602611 - DNA, 33 bp, Homo sapien
ggaagttcctcaaaacactaaatacaactaccg

SEQ ID NO: 602612 - DNA, 33 bp, Homo sapien
ggaagttcctcaaaacgctaaatacaactaccg

SEQ ID NO: 602613 - DNA, 33 bp, Homo sapien
tccatgaagtctggcacggtgataaagtcccag

SEQ ID NO: 602614 - DNA, 33 bp, Homo sapien
tccatgaagtctggcatggtgataaagtcccag

SEQ ID NO: 602615 - DNA, 33 bp, Homo sapien
ttgctcctttgtaaagcagtgagatgaacctca

SEQ ID NO: 602616 - DNA, 33 bp, Homo sapien
ttgctcctttgtaaagtagtgagatgaacctca

SEQ ID NO: 602617 - DNA, 33 bp, Homo sapien
acctccattttgttcacccggccccatggatac

SEQ ID NO: 602618 - DNA, 33 bp, Homo sapien
acctccattttgttcatccggccccatggatac

SEQ ID NO: 602619 - DNA, 33 bp, Homo sapien
atgtgacagatgtggtaaatacctgccatgatg

SEQ ID NO: 602620 - DNA, 33 bp, Homo sapien
atgtgacagatgtggtgaatacctgccatgatg

SEQ ID NO: 602621 - DNA, 33 bp, Homo sapien
ctaaatcgtgcccccactgcttaaaactacaaa

SEQ ID NO: 602622 - DNA, 33 bp, Homo sapien
ctaaatcgtgcccccagtgcttaaaactacaaa

SEQ ID NO: 602623 - DNA, 33 bp, Homo sapien
gaagaagcaattttgaaaggtgggatcaaaagt

SEQ ID NO: 602624 - DNA, 33 bp, Homo sapien
gaagaagcaattttgagaggtgggatcaaaagt

SEQ ID NO: 602625 - DNA, 33 bp, Homo sapien
aatgactacctcttcacgttatacagtctaaaa

SEQ ID NO: 602626 - DNA, 33 bp, Homo sapien
aatgactacctcttcatgttatacagtctaaaa

SEQ ID NO: 602627 - DNA, 33 bp, Homo sapien
cttgagggctcaggatcatcagatagtttgaaa

SEQ ID NO: 602628 - DNA, 33 bp, Homo sapien
cttgagggctcaggattatcagatagtttgaaa

SEQ ID NO: 602629 - DNA, 33 bp, Homo sapien
gaaagattagacggcacagactaaatgtatgga

SEQ ID NO: 602630 - DNA, 33 bp, Homo sapien
gaaagattagacggcatagactaaatgtatgga

SEQ ID NO: 602631 - DNA, 33 bp, Homo sapien
tctctcagagtaatacacttggaaaaaatgttc

SEQ ID NO: 602632 - DNA, 33 bp, Homo sapien
tctctcagagtaatacgcttggaaaaaatgttc

SEQ ID NO: 602633 - DNA, 33 bp, Homo sapien
gatcaaatgtaggtcacgagaagagtgaagggt

SEQ ID NO: 602634 - DNA, 33 bp, Homo sapien
gatcaaatgtaggtcaggagaagagtgaagggt

SEQ ID NO: 602635 - DNA, 33 bp, Homo sapien
agcatggactacaagactcaccacaccccatct

SEQ ID NO: 602636 - DNA, 33 bp, Homo sapien
agcatggactacaagattcaccacaccccatct

SEQ ID NO: 602637 - DNA, 33 bp, Homo sapien
gagtacatatgccctaagcacaaggcacatcct

SEQ ID NO: 602638 - DNA, 33 bp, Homo sapien
gagtacatatgccctacgcacaaggcacatcct

SEQ ID NO: 602639 - DNA, 33 bp, Homo sapien
aatgtgatagctgataagaaacaattatttgct

SEQ ID NO: 602640 - DNA, 33 bp, Homo sapien
aatgtgatagctgataggaaacaattatttgct

SEQ ID NO: 602641 - DNA, 33 bp, Homo sapien
agtataagatacatacaagattttgaaaactta

SEQ ID NO: 602642 - DNA, 33 bp, Homo sapien
agtataagatacatacgagattttgaaaactta

SEQ ID NO: 602643 - DNA, 33 bp, Homo sapien
ctagacagggtggataaaccaatacaatcgttt

SEQ ID NO: 602644 - DNA, 33 bp, Homo sapien
ctagacagggtggatagaccaatacaatcgttt

SEQ ID NO: 602645 - DNA, 33 bp, Homo sapien
cagagctaacatgagaaattttcattacgtcag

SEQ ID NO: 602646 - DNA, 33 bp, Homo sapien
cagagctaacatgagacattttcattacgtcag

SEQ ID NO: 602647 - DNA, 33 bp, Homo sapien
tctctcccttcaaaaacgagacacatatgcaca

SEQ ID NO: 602648 - DNA, 33 bp, Homo sapien
tctctcccttcaaaaatgagacacatatgcaca

SEQ ID NO: 602649 - DNA, 33 bp, Homo sapien
gaatcccaactttgccactgaatagcttgtgtg

SEQ ID NO: 602650 - DNA, 33 bp, Homo sapien
gaatcccaactttgccgctgaatagcttgtgtg

SEQ ID NO: 602651 - DNA, 33 bp, Homo sapien
cccaagtctcacagcaataagggactcaggcaa

SEQ ID NO: 602652 - DNA, 33 bp, Homo sapien
cccaagtctcacagcagtaagggactcaggcaa

SEQ ID NO: 602653 - DNA, 33 bp, Homo sapien
tttaatactgttacaacatatctgtttctgata

SEQ ID NO: 602654 - DNA, 33 bp, Homo sapien
tttaatactgttacaagatatctgtttctgata

SEQ ID NO: 602655 - DNA, 33 bp, Homo sapien
gcaatagcattaggcaaaaaacgtggcatgtgt

SEQ ID NO: 602656 - DNA, 33 bp, Homo sapien
gcaatagcattaggcagaaaacgtggcatgtgt

SEQ ID NO: 602657 - DNA, 33 bp, Homo sapien
caggacaagttacagaaggaaactggggagcag

SEQ ID NO: 602658 - DNA, 33 bp, Homo sapien
caggacaagttacagagggaaactggggagcag

SEQ ID NO: 602659 - DNA, 33 bp, Homo sapien
ttctctgatctggtccactcattaaggctatag

SEQ ID NO: 602660 - DNA, 33 bp, Homo sapien
ttctctgatctggtccgctcattaaggctatag

SEQ ID NO: 602661 - DNA, 33 bp, Homo sapien
aaggtgggaaaaatgaggaggcatgtacaaggc

SEQ ID NO: 602662 - DNA, 33 bp, Homo sapien
aaggtgggaaaaatgatgaggcatgtacaaggc

SEQ ID NO: 602663 - DNA, 33 bp, Homo sapien
cacctgttaaaacctaaaggccaatgacaagtc

SEQ ID NO: 602664 - DNA, 33 bp, Homo sapien
cacctgttaaaacctagaggccaatgacaagtc

SEQ ID NO: 602665 - DNA, 33 bp, Homo sapien
actaaaccttgttccaaatctgatcagtcttca

SEQ ID NO: 602666 - DNA, 33 bp, Homo sapien
actaaaccttgttccacatctgatcagtcttca

SEQ ID NO: 602667 - DNA, 33 bp, Homo sapien
acatagaggagagagacgaataaaaagatactc

SEQ ID NO: 602668 - DNA, 33 bp, Homo sapien
acatagaggagagagatgaataaaaagatactc

SEQ ID NO: 602669 - DNA, 33 bp, Homo sapien
ttctgctgagatgaaaattaggtagaagcccta

SEQ ID NO: 602670 - DNA, 33 bp, Homo sapien
ttctgctgagatgaaagttaggtagaagcccta

SEQ ID NO: 602671 - DNA, 33 bp, Homo sapien
actctgtgtacaagaacgccaaagtaaaagcta

SEQ ID NO: 602672 - DNA, 33 bp, Homo sapien
actctgtgtacaagaatgccaaagtaaaagcta

SEQ ID NO: 602673 - DNA, 33 bp, Homo sapien
aaatgacttgccaaataagcagcatattcctac

SEQ ID NO: 602674 - DNA, 33 bp, Homo sapien
aaatgacttgccaaatgagcagcatattcctac

SEQ ID NO: 602675 - DNA, 33 bp, Homo sapien
ccacactgctactcaaaatgtgggcgacagatc

SEQ ID NO: 602676 - DNA, 33 bp, Homo sapien
ccacactgctactcaacatgtgggcgacagatc

SEQ ID NO: 602677 - DNA, 33 bp, Homo sapien
agagattcatacatacaaagatttcctgatagc

SEQ ID NO: 602678 - DNA, 33 bp, Homo sapien
agagattcatacatacgaagatttcctgatagc

SEQ ID NO: 602679 - DNA, 33 bp, Homo sapien
gggatgataggtcttcactcacatggtaacaaa

SEQ ID NO: 602680 - DNA, 33 bp, Homo sapien
gggatgataggtcttcgctcacatggtaacaaa

SEQ ID NO: 602681 - DNA, 33 bp, Homo sapien
atgtttggaaggaacacgtactagtctatgtga

SEQ ID NO: 602682 - DNA, 33 bp, Homo sapien
atgtttggaaggaacaggtactagtctatgtga

SEQ ID NO: 602683 - DNA, 33 bp, Homo sapien
actagtctatgtgacaaaacagactattttagg

SEQ ID NO: 602684 - DNA, 33 bp, Homo sapien
actagtctatgtgacagaacagactattttagg

SEQ ID NO: 602685 - DNA, 33 bp, Homo sapien
aaactagaagtgactaccattgcacttcggatc

SEQ ID NO: 602686 - DNA, 33 bp, Homo sapien
aaactagaagtgactatcattgcacttcggatc

SEQ ID NO: 602687 - DNA, 33 bp, Homo sapien
aaaagtggtgagattaagaaggattttaattct

SEQ ID NO: 602688 - DNA, 33 bp, Homo sapien
aaaagtggtgagattatgaaggattttaattct

SEQ ID NO: 602689 - DNA, 33 bp, Homo sapien
gcattttgccaaagccaactggctgcccgtagg

SEQ ID NO: 602690 - DNA, 33 bp, Homo sapien
gcattttgccaaagccgactggctgcccgtagg

SEQ ID NO: 602691 - DNA, 33 bp, Homo sapien
tggtttagactgaaccaaagggaactgatgtcg

SEQ ID NO: 602692 - DNA, 33 bp, Homo sapien
tggtttagactgaaccgaagggaactgatgtcg

SEQ ID NO: 602693 - DNA, 33 bp, Homo sapien
acccagagaaagaacacgagagagccaggaagg

SEQ ID NO: 602694 - DNA, 33 bp, Homo sapien
acccagagaaagaacaggagagagccaggaagg

SEQ ID NO: 602695 - DNA, 33 bp, Homo sapien
tgtccaggatgactccagatggggacagggcaa

SEQ ID NO: 602696 - DNA, 33 bp, Homo sapien
tgtccaggatgactccggatggggacagggcaa

SEQ ID NO: 602697 - DNA, 33 bp, Homo sapien
tggtttgtgtggtagcccttgcaaccgatacag

SEQ ID NO: 602698 - DNA, 33 bp, Homo sapien
tggtttgtgtggtagctcttgcaaccgatacag

SEQ ID NO: 602699 - DNA, 33 bp, Homo sapien
aaagcagatcagtgacaagggtccctaattccc

SEQ ID NO: 602700 - DNA, 33 bp, Homo sapien
aaagcagatcagtgacgagggtccctaattccc

SEQ ID NO: 602701 - DNA, 33 bp, Homo sapien
gttactggagcagaaaaggcaaggaaacagaga

SEQ ID NO: 602702 - DNA, 33 bp, Homo sapien
gttactggagcagaaagggcaaggaaacagaga

SEQ ID NO: 602703 - DNA, 33 bp, Homo sapien
gtaagagaaaattgaaataaaaatgctgagaat

SEQ ID NO: 602704 - DNA, 33 bp, Homo sapien
gtaagagaaaattgaagtaaaaatgctgagaat

SEQ ID NO: 602705 - DNA, 33 bp, Homo sapien
gccataaggcactgcaccgtagttggcaaggtt

SEQ ID NO: 602706 - DNA, 33 bp, Homo sapien
gccataaggcactgcatcgtagttggcaaggtt

SEQ ID NO: 602707 - DNA, 33 bp, Homo sapien
tgattccgtggaaaaaatactgattagtccaac

SEQ ID NO: 602708 - DNA, 33 bp, Homo sapien
tgattccgtggaaaaagtactgattagtccaac

SEQ ID NO: 602709 - DNA, 33 bp, Homo sapien
gtggctgaggggctgacgtccagtcactgctta

SEQ ID NO: 602710 - DNA, 33 bp, Homo sapien
gtggctgaggggctgatgtccagtcactgctta

SEQ ID NO: 602711 - DNA, 33 bp, Homo sapien
cacacacacatatgaacacacaaagaacatacc

SEQ ID NO: 602712 - DNA, 33 bp, Homo sapien
cacacacacatatgaatacacaaagaacatacc

SEQ ID NO: 602713 - DNA, 33 bp, Homo sapien
tgaaactctggactccaaaggcacagcttttcc

SEQ ID NO: 602714 - DNA, 33 bp, Homo sapien
tgaaactctggactccgaaggcacagcttttcc

SEQ ID NO: 602715 - DNA, 33 bp, Homo sapien
tcatgttcacattccccgccagagcaaagaagg

SEQ ID NO: 602716 - DNA, 33 bp, Homo sapien
tcatgttcacattccctgccagagcaaagaagg

SEQ ID NO: 602717 - DNA, 33 bp, Homo sapien
tcaaaggggcattggaagaagaggtggcaacat

SEQ ID NO: 602718 - DNA, 33 bp, Homo sapien
tcaaaggggcattggaggaagaggtggcaacat

SEQ ID NO: 602719 - DNA, 33 bp, Homo sapien
gagattttgaggaaataagcctgacatttggcc

SEQ ID NO: 602720 - DNA, 33 bp, Homo sapien
gagattttgaggaaatcagcctgacatttggcc

SEQ ID NO: 602721 - DNA, 33 bp, Homo sapien
gatttggaatcaatccggatacagaaacacata

SEQ ID NO: 602722 - DNA, 33 bp, Homo sapien
gatttggaatcaatcctgatacagaaacacata

SEQ ID NO: 602723 - DNA, 33 bp, Homo sapien
gatgtcttgaaagaatcagtgtgaaaatgagat

SEQ ID NO: 602724 - DNA, 33 bp, Homo sapien
gatgtcttgaaagaatgagtgtgaaaatgagat

SEQ ID NO: 602725 - DNA, 33 bp, Homo sapien
taatgcccagtaaaaaacaggaaagatgtcttg

SEQ ID NO: 602726 - DNA, 33 bp, Homo sapien
taatgcccagtaaaaagcaggaaagatgtcttg

SEQ ID NO: 602727 - DNA, 33 bp, Homo sapien
attgctcacctgtgaaatgattgccccacagtg

SEQ ID NO: 602728 - DNA, 33 bp, Homo sapien
attgctcacctgtgaagtgattgccccacagtg

SEQ ID NO: 602729 - DNA, 33 bp, Homo sapien
ccgttttctgcccaacaggagaataaaggaagc

SEQ ID NO: 602730 - DNA, 33 bp, Homo sapien
ccgttttctgcccaaccggagaataaaggaagc

SEQ ID NO: 602731 - DNA, 33 bp, Homo sapien
ccagaattctgcataaacacagtgtggatgcaa

SEQ ID NO: 602732 - DNA, 33 bp, Homo sapien
ccagaattctgcataagcacagtgtggatgcaa

SEQ ID NO: 602733 - DNA, 33 bp, Homo sapien
tccattttatcttccacgagtgtcctacacctg

SEQ ID NO: 602734 - DNA, 33 bp, Homo sapien
tccattttatcttccatgagtgtcctacacctg

SEQ ID NO: 602735 - DNA, 33 bp, Homo sapien
cgtccggtcccttctgaaactggggatcatcct

SEQ ID NO: 602736 - DNA, 33 bp, Homo sapien
cgtccggtcccttctggaactggggatcatcct

SEQ ID NO: 602737 - DNA, 33 bp, Homo sapien
cacaaagttgttagagaaatcagaagaaatttt

SEQ ID NO: 602738 - DNA, 33 bp, Homo sapien
cacaaagttgttagaggaatcagaagaaatttt

SEQ ID NO: 602739 - DNA, 33 bp, Homo sapien
ggatgtgaatctagaccatcctgaccccgtcat

SEQ ID NO: 602740 - DNA, 33 bp, Homo sapien
ggatgtgaatctagactatcctgaccccgtcat

SEQ ID NO: 602741 - DNA, 33 bp, Homo sapien
ccaacccttctgaagaccaggactcagagctca

SEQ ID NO: 602742 - DNA, 33 bp, Homo sapien
ccaacccttctgaagatcaggactcagagctca

SEQ ID NO: 602743 - DNA, 33 bp, Homo sapien
gcagcaaggctaccgaagagctcaggaccgtct

SEQ ID NO: 602744 - DNA, 33 bp, Homo sapien
gcagcaaggctaccgaggagctcaggaccgtct

SEQ ID NO: 602745 - DNA, 33 bp, Homo sapien
atggctcaacagacatcaccaggaaaacagaga

SEQ ID NO: 602746 - DNA, 33 bp, Homo sapien
atggctcaacagacatgaccaggaaaacagaga

SEQ ID NO: 602747 - DNA, 33 bp, Homo sapien
caccatctataagccccattttgtcaagaggga

SEQ ID NO: 602748 - DNA, 33 bp, Homo sapien
caccatctataagccctattttgtcaagaggga

SEQ ID NO: 602749 - DNA, 33 bp, Homo sapien
taaaagacacacatgcccatcttgtaaagagtc

SEQ ID NO: 602750 - DNA, 33 bp, Homo sapien
taaaagacacacatgctcatcttgtaaagagtc

SEQ ID NO: 602751 - DNA, 33 bp, Homo sapien
tttttttaaatgcagcaatatgtctccgtcttt

SEQ ID NO: 602752 - DNA, 33 bp, Homo sapien
tttttttaaatgcagccatatgtctccgtcttt

SEQ ID NO: 602753 - DNA, 33 bp, Homo sapien
tgtctccaggaggacaatcttcactcccaagag

SEQ ID NO: 602754 - DNA, 33 bp, Homo sapien
tgtctccaggaggacagtcttcactcccaagag

SEQ ID NO: 602755 - DNA, 33 bp, Homo sapien
ttgcgactgaagagaaagagatgtagagcattt

SEQ ID NO: 602756 - DNA, 33 bp, Homo sapien
ttgcgactgaagagaaggagatgtagagcattt

SEQ ID NO: 602757 - DNA, 33 bp, Homo sapien
atccattcatttcatacggtcgggaatccccac

SEQ ID NO: 602758 - DNA, 33 bp, Homo sapien
atccattcatttcatatggtcgggaatccccac

SEQ ID NO: 602759 - DNA, 33 bp, Homo sapien
cccagctcctagaacacggcctgatccagggaa

SEQ ID NO: 602760 - DNA, 33 bp, Homo sapien
cccagctcctagaacatggcctgatccagggaa

SEQ ID NO: 602761 - DNA, 33 bp, Homo sapien
acacagccctttgcccaaagccagacagtgaag

SEQ ID NO: 602762 - DNA, 33 bp, Homo sapien
acacagccctttgcccgaagccagacagtgaag

SEQ ID NO: 602763 - DNA, 33 bp, Homo sapien
caaatagagattcctcaatggtctctccaaatg

SEQ ID NO: 602764 - DNA, 33 bp, Homo sapien
caaatagagattcctccatggtctctccaaatg

SEQ ID NO: 602765 - DNA, 33 bp, Homo sapien
aaacgtgcacattaaaactgtaccacaaattca

SEQ ID NO: 602766 - DNA, 33 bp, Homo sapien
aaacgtgcacattaaagctgtaccacaaattca

SEQ ID NO: 602767 - DNA, 33 bp, Homo sapien
tggtttggaaaatagaagctcccatagcatcag

SEQ ID NO: 602768 - DNA, 33 bp, Homo sapien
tggtttggaaaatagaggctcccatagcatcag

SEQ ID NO: 602769 - DNA, 33 bp, Homo sapien
gggcctcagttgaaaaaaaaattctcaaatccc

SEQ ID NO: 602770 - DNA, 33 bp, Homo sapien
gggcctcagttgaaaagaaaattctcaaatccc

SEQ ID NO: 602771 - DNA, 33 bp, Homo sapien
gataggagaaggtttacaatgtcttcatggtct

SEQ ID NO: 602772 - DNA, 33 bp, Homo sapien
gataggagaaggtttagaatgtcttcatggtct

SEQ ID NO: 602773 - DNA, 33 bp, Homo sapien
agccatccatgtgccacgtttctgcaggcaaga

SEQ ID NO: 602774 - DNA, 33 bp, Homo sapien
agccatccatgtgccatgtttctgcaggcaaga

SEQ ID NO: 602775 - DNA, 33 bp, Homo sapien
agtcattggttgaccacctggctgtgacttcca

SEQ ID NO: 602776 - DNA, 33 bp, Homo sapien
agtcattggttgaccatctggctgtgacttcca

SEQ ID NO: 602777 - DNA, 33 bp, Homo sapien
ctcattttccattttacgaggtcagttctaggt

SEQ ID NO: 602778 - DNA, 33 bp, Homo sapien
ctcattttccattttatgaggtcagttctaggt

SEQ ID NO: 602779 - DNA, 33 bp, Homo sapien
attatccataactacccgatgaactaatggaat

SEQ ID NO: 602780 - DNA, 33 bp, Homo sapien
attatccataactacctgatgaactaatggaat

SEQ ID NO: 602781 - DNA, 33 bp, Homo sapien
tggttttagaaatggaaagcctacttagaggac

SEQ ID NO: 602782 - DNA, 33 bp, Homo sapien
tggttttagaaatggacagcctacttagaggac

SEQ ID NO: 602783 - DNA, 33 bp, Homo sapien
agagggctcttggaggaaagttgtaagagataa

SEQ ID NO: 602784 - DNA, 33 bp, Homo sapien
agagggctcttggagggaagttgtaagagataa

SEQ ID NO: 602785 - DNA, 33 bp, Homo sapien
tatcgtctagtggttcagaacatagattctggt

SEQ ID NO: 602786 - DNA, 33 bp, Homo sapien
tatcgtctagtggttcggaacatagattctggt

SEQ ID NO: 602787 - DNA, 33 bp, Homo sapien
agtagcagaagatgccaagaatcctgaactgat

SEQ ID NO: 602788 - DNA, 33 bp, Homo sapien
agtagcagaagatgccgagaatcctgaactgat

SEQ ID NO: 602789 - DNA, 33 bp, Homo sapien
gctgttcccaccttcaccagtcattggtaaaag

SEQ ID NO: 602790 - DNA, 33 bp, Homo sapien
gctgttcccaccttcatcagtcattggtaaaag

SEQ ID NO: 602791 - DNA, 33 bp, Homo sapien
gtggtttaggacaaataatgacttgaaatttat

SEQ ID NO: 602792 - DNA, 33 bp, Homo sapien
gtggtttaggacaaattatgacttgaaatttat

SEQ ID NO: 602793 - DNA, 33 bp, Homo sapien
tgttggagaatgaatacagaaatttgagattgc

SEQ ID NO: 602794 - DNA, 33 bp, Homo sapien
tgttggagaatgaatagagaaatttgagattgc

SEQ ID NO: 602795 - DNA, 33 bp, Homo sapien
tgggggagccagaggaacgatcatgccccacct

SEQ ID NO: 602796 - DNA, 33 bp, Homo sapien
tgggggagccagaggagcgatcatgccccacct

SEQ ID NO: 602797 - DNA, 33 bp, Homo sapien
aggcttcctgacttctcactgagctggccctgg

SEQ ID NO: 602798 - DNA, 33 bp, Homo sapien
aggcttcctgacttcttactgagctggccctgg

SEQ ID NO: 602799 - DNA, 33 bp, Homo sapien
tacaccctgcttcccaaactgctactgatgctg

SEQ ID NO: 602800 - DNA, 33 bp, Homo sapien
tacaccctgcttcccagactgctactgatgctg

SEQ ID NO: 602801 - DNA, 33 bp, Homo sapien
ctggccggctgttctaaattgagtgtgtgcatt

SEQ ID NO: 602802 - DNA, 33 bp, Homo sapien
ctggccggctgttctacattgagtgtgtgcatt

SEQ ID NO: 602803 - DNA, 33 bp, Homo sapien
gggggctgtaggtctgcactttggttgtgcctg

SEQ ID NO: 602804 - DNA, 33 bp, Homo sapien
gggggctgtaggtctgtactttggttgtgcctg

SEQ ID NO: 602805 - DNA, 33 bp, Homo sapien
tctcattgtgaccttaaggaaatcacttaattc

SEQ ID NO: 602806 - DNA, 33 bp, Homo sapien
tctcattgtgaccttacggaaatcacttaattc

SEQ ID NO: 602807 - DNA, 33 bp, Homo sapien
gcactgtggagaaaataagatggagagggaaca

SEQ ID NO: 602808 - DNA, 33 bp, Homo sapien
gcactgtggagaaaatcagatggagagggaaca

SEQ ID NO: 602809 - DNA, 33 bp, Homo sapien
gaacggaagggaatagaattttggatctgggag

SEQ ID NO: 602810 - DNA, 33 bp, Homo sapien
gaacggaagggaataggattttggatctgggag

SEQ ID NO: 602811 - DNA, 33 bp, Homo sapien
aagatgagaaagcatcaagagagccgcagggtt

SEQ ID NO: 602812 - DNA, 33 bp, Homo sapien
aagatgagaaagcatcgagagagccgcagggtt

SEQ ID NO: 602813 - DNA, 33 bp, Homo sapien
atgtggttcaaggagaaccttctgggtaaaaga

SEQ ID NO: 602814 - DNA, 33 bp, Homo sapien
atgtggttcaaggagacccttctgggtaaaaga

SEQ ID NO: 602815 - DNA, 33 bp, Homo sapien
caaaacagagagaggactaaacattcaagttac

SEQ ID NO: 602816 - DNA, 33 bp, Homo sapien
caaaacagagagaggattaaacattcaagttac

SEQ ID NO: 602817 - DNA, 33 bp, Homo sapien
gtgaaaggacacatccagcctgctggccatgat

SEQ ID NO: 602818 - DNA, 33 bp, Homo sapien
gtgaaaggacacatcccgcctgctggccatgat

SEQ ID NO: 602819 - DNA, 33 bp, Homo sapien
tcttgtaattccaatacccagagaaaatcgcca

SEQ ID NO: 602820 - DNA, 33 bp, Homo sapien
tcttgtaattccaatatccagagaaaatcgcca

SEQ ID NO: 602821 - DNA, 33 bp, Homo sapien
ttacttctgctacttcccgttcaaaattggtca

SEQ ID NO: 602822 - DNA, 33 bp, Homo sapien
ttacttctgctacttctcgttcaaaattggtca

SEQ ID NO: 602823 - DNA, 33 bp, Homo sapien
tacccacgctctctacactacctgcctgtgagt

SEQ ID NO: 602824 - DNA, 33 bp, Homo sapien
tacccacgctctctacgctacctgcctgtgagt

SEQ ID NO: 602825 - DNA, 33 bp, Homo sapien
tgggtcctctgactggccatttaatgtttatgc

SEQ ID NO: 602826 - DNA, 33 bp, Homo sapien
tgggtcctctgactggtcatttaatgtttatgc

SEQ ID NO: 602827 - DNA, 33 bp, Homo sapien
tttcttggatgaaaaaatgaatgcattcctgtc

SEQ ID NO: 602828 - DNA, 33 bp, Homo sapien
tttcttggatgaaaaagtgaatgcattcctgtc

SEQ ID NO: 602829 - DNA, 33 bp, Homo sapien
aggctaacaacctcaccaagattaaacccatct

SEQ ID NO: 602830 - DNA, 33 bp, Homo sapien
aggctaacaacctcacgaagattaaacccatct

SEQ ID NO: 602831 - DNA, 33 bp, Homo sapien
aagtagacagacaggaagggatgaggtactcaa

SEQ ID NO: 602832 - DNA, 33 bp, Homo sapien
aagtagacagacaggacgggatgaggtactcaa

SEQ ID NO: 602833 - DNA, 33 bp, Homo sapien
tcaccaatctctcccacatcgggtgaatgaggc

SEQ ID NO: 602834 - DNA, 33 bp, Homo sapien
tcaccaatctctcccatatcgggtgaatgaggc

SEQ ID NO: 602835 - DNA, 33 bp, Homo sapien
aatatttattgaatgacggaaatagtctttcta

SEQ ID NO: 602836 - DNA, 33 bp, Homo sapien
aatatttattgaatgagggaaatagtctttcta

SEQ ID NO: 602837 - DNA, 33 bp, Homo sapien
tatttaagggcaatggcagtaccggccccatgt

SEQ ID NO: 602838 - DNA, 33 bp, Homo sapien
tatttaagggcaatggtagtaccggccccatgt

SEQ ID NO: 602839 - DNA, 33 bp, Homo sapien
acctcaaacacctaccaagggctagcagtttat

SEQ ID NO: 602840 - DNA, 33 bp, Homo sapien
acctcaaacacctacccagggctagcagtttat

SEQ ID NO: 602841 - DNA, 33 bp, Homo sapien
caactgaggccataaaacaggatttaactattt

SEQ ID NO: 602842 - DNA, 33 bp, Homo sapien
caactgaggccataaatcaggatttaactattt

SEQ ID NO: 602843 - DNA, 33 bp, Homo sapien
aaaagatgaaaaggagccatgtaccaggaagga

SEQ ID NO: 602844 - DNA, 33 bp, Homo sapien
aaaagatgaaaaggaggcatgtaccaggaagga

SEQ ID NO: 602845 - DNA, 33 bp, Homo sapien
tcaagaaaatagattacattgcaagtcagtgag

SEQ ID NO: 602846 - DNA, 33 bp, Homo sapien
tcaagaaaatagattagattgcaagtcagtgag

SEQ ID NO: 602847 - DNA, 33 bp, Homo sapien
ttgtagatgaagaaagaagaaactgagggtcaa

SEQ ID NO: 602848 - DNA, 33 bp, Homo sapien
ttgtagatgaagaaagtagaaactgagggtcaa

SEQ ID NO: 602849 - DNA, 33 bp, Homo sapien
ctagataagtaataatagcccttgagatcagag

SEQ ID NO: 602850 - DNA, 33 bp, Homo sapien
ctagataagtaataattgcccttgagatcagag

SEQ ID NO: 602851 - DNA, 33 bp, Homo sapien
tgtgataatttgttacaaagcacacagaactaa

SEQ ID NO: 602852 - DNA, 33 bp, Homo sapien
tgtgataatttgttacgaagcacacagaactaa

SEQ ID NO: 602853 - DNA, 33 bp, Homo sapien
acagatgaaattacgaagtccagggagattgaa

SEQ ID NO: 602854 - DNA, 33 bp, Homo sapien
acagatgaaattacgatgtccagggagattgaa

SEQ ID NO: 602855 - DNA, 33 bp, Homo sapien
catttacttcaccagacgtacttagaacttaca

SEQ ID NO: 602856 - DNA, 33 bp, Homo sapien
catttacttcaccagatgtacttagaacttaca

SEQ ID NO: 602857 - DNA, 33 bp, Homo sapien
atggcatggggagaagaacatgactttaaagtt

SEQ ID NO: 602858 - DNA, 33 bp, Homo sapien
atggcatggggagaaggacatgactttaaagtt

SEQ ID NO: 602859 - DNA, 33 bp, Homo sapien
gccagctagtggcctacaatcccttctaaccag

SEQ ID NO: 602860 - DNA, 33 bp, Homo sapien
gccagctagtggcctagaatcccttctaaccag

SEQ ID NO: 602861 - DNA, 33 bp, Homo sapien
agcatactgttaggtaagaagcaggcattaatg

SEQ ID NO: 602862 - DNA, 33 bp, Homo sapien
agcatactgttaggtatgaagcaggcattaatg

SEQ ID NO: 602863 - DNA, 33 bp, Homo sapien
cacaccttgcccaagaaagctgtcccccgatct

SEQ ID NO: 602864 - DNA, 33 bp, Homo sapien
cacaccttgcccaagagagctgtcccccgatct

SEQ ID NO: 602865 - DNA, 33 bp, Homo sapien
cccacagaggcctgtacgcgactgacaatggct

SEQ ID NO: 602866 - DNA, 33 bp, Homo sapien
cccacagaggcctgtatgcgactgacaatggct

SEQ ID NO: 602867 - DNA, 33 bp, Homo sapien
cactatggccatcataaaacaagatttctttgg

SEQ ID NO: 602868 - DNA, 33 bp, Homo sapien
cactatggccatcatagaacaagatttctttgg

SEQ ID NO: 602869 - DNA, 33 bp, Homo sapien
atgccatcttgaaccaataatttcatttctctg

SEQ ID NO: 602870 - DNA, 33 bp, Homo sapien
atgccatcttgaaccagtaatttcatttctctg

SEQ ID NO: 602871 - DNA, 33 bp, Homo sapien
agccagtagtttgaaccctaagtgcaagagaag

SEQ ID NO: 602872 - DNA, 33 bp, Homo sapien
agccagtagtttgaactctaagtgcaagagaag

SEQ ID NO: 602873 - DNA, 33 bp, Homo sapien
caacgcagtctttgccagcttctctacaaaggg

SEQ ID NO: 602874 - DNA, 33 bp, Homo sapien
caacgcagtctttgccggcttctctacaaaggg

SEQ ID NO: 602875 - DNA, 33 bp, Homo sapien
ctaggattcccagataggctccaattcatcctt

SEQ ID NO: 602876 - DNA, 33 bp, Homo sapien
ctaggattcccagatatgctccaattcatcctt

SEQ ID NO: 602877 - DNA, 33 bp, Homo sapien
gggtatagacagattccagctgaatgctgcact

SEQ ID NO: 602878 - DNA, 33 bp, Homo sapien
gggtatagacagattctagctgaatgctgcact

SEQ ID NO: 602879 - DNA, 33 bp, Homo sapien
ggcctgtgccttccggaatagaatgaatcctat

SEQ ID NO: 602880 - DNA, 33 bp, Homo sapien
ggcctgtgccttccgggatagaatgaatcctat

SEQ ID NO: 602881 - DNA, 33 bp, Homo sapien
aactggattgcaggggacatgaaagcagtaacc

SEQ ID NO: 602882 - DNA, 33 bp, Homo sapien
aactggattgcaggggtcatgaaagcagtaacc

SEQ ID NO: 602883 - DNA, 33 bp, Homo sapien
ccttacctagtcatgacgccattcatattagag

SEQ ID NO: 602884 - DNA, 33 bp, Homo sapien
ccttacctagtcatgatgccattcatattagag

SEQ ID NO: 602885 - DNA, 33 bp, Homo sapien
atctttctttctctgaaaacatttaggattttc

SEQ ID NO: 602886 - DNA, 33 bp, Homo sapien
atctttctttctctgagaacatttaggattttc

SEQ ID NO: 602887 - DNA, 33 bp, Homo sapien
gcctcatgactttaaacataatctatgtgttaa

SEQ ID NO: 602888 - DNA, 33 bp, Homo sapien
gcctcatgactttaaatataatctatgtgttaa

SEQ ID NO: 602889 - DNA, 33 bp, Homo sapien
ctcaggttcaatcgccacctctttgctgatgat

SEQ ID NO: 602890 - DNA, 33 bp, Homo sapien
ctcaggttcaatcgccgcctctttgctgatgat

SEQ ID NO: 602891 - DNA, 33 bp, Homo sapien
atccaaggcaaattcaactccatatgctctctc

SEQ ID NO: 602892 - DNA, 33 bp, Homo sapien
atccaaggcaaattcacctccatatgctctctc

SEQ ID NO: 602893 - DNA, 33 bp, Homo sapien
gttctaggagcagcacaaggagcagagagagtg

SEQ ID NO: 602894 - DNA, 33 bp, Homo sapien
gttctaggagcagcacgaggagcagagagagtg

SEQ ID NO: 602895 - DNA, 33 bp, Homo sapien
ctggccatttcaaataacctacaaaagatgaac

SEQ ID NO: 602896 - DNA, 33 bp, Homo sapien
ctggccatttcaaataccctacaaaagatgaac

SEQ ID NO: 602897 - DNA, 33 bp, Homo sapien
tagatctctcttccaacggtcaaaattagaaag

SEQ ID NO: 602898 - DNA, 33 bp, Homo sapien
tagatctctcttccaatggtcaaaattagaaag

SEQ ID NO: 602899 - DNA, 33 bp, Homo sapien
ctccataactgcgagacaaaaaatctagctggt

SEQ ID NO: 602900 - DNA, 33 bp, Homo sapien
ctccataactgcgagagaaaaaatctagctggt

SEQ ID NO: 602901 - DNA, 33 bp, Homo sapien
tttctaaacactctgcccatttaaaagtgcaaa

SEQ ID NO: 602902 - DNA, 33 bp, Homo sapien
tttctaaacactctgctcatttaaaagtgcaaa

SEQ ID NO: 602903 - DNA, 33 bp, Homo sapien
gatgtccaagatcaagactctggctggtgaggg

SEQ ID NO: 602904 - DNA, 33 bp, Homo sapien
gatgtccaagatcaaggctctggctggtgaggg

SEQ ID NO: 602905 - DNA, 33 bp, Homo sapien
aaatggccttccaaaagatattcatgcctaatt

SEQ ID NO: 602906 - DNA, 33 bp, Homo sapien
aaatggccttccaaaatatattcatgcctaatt

SEQ ID NO: 602907 - DNA, 33 bp, Homo sapien
gggggtagaggtttgcctatgtgattaaatgaa

SEQ ID NO: 602908 - DNA, 33 bp, Homo sapien
gggggtagaggtttgcttatgtgattaaatgaa

SEQ ID NO: 602909 - DNA, 33 bp, Homo sapien
gctctttgcaccagaacggatgctctgtttcct

SEQ ID NO: 602910 - DNA, 33 bp, Homo sapien
gctctttgcaccagaatggatgctctgtttcct

SEQ ID NO: 602911 - DNA, 33 bp, Homo sapien
ggcactggggttagaacgatggctcaagacaga

SEQ ID NO: 602912 - DNA, 33 bp, Homo sapien
ggcactggggttagaatgatggctcaagacaga

SEQ ID NO: 602913 - DNA, 33 bp, Homo sapien
gtatggttgcttcatacatttgtttgtttgttt

SEQ ID NO: 602914 - DNA, 33 bp, Homo sapien
gtatggttgcttcatagatttgtttgtttgttt

SEQ ID NO: 602915 - DNA, 33 bp, Homo sapien
ctgggggctaaaattacaggtgatcggacaact

SEQ ID NO: 602916 - DNA, 33 bp, Homo sapien
ctgggggctaaaattagaggtgatcggacaact

SEQ ID NO: 602917 - DNA, 33 bp, Homo sapien
caacttcctagtactcacaaggaaaaaaatggc

SEQ ID NO: 602918 - DNA, 33 bp, Homo sapien
caacttcctagtactcgcaaggaaaaaaatggc

SEQ ID NO: 602919 - DNA, 33 bp, Homo sapien
ggagtgcaggatgggacgctgaacttggaaatc

SEQ ID NO: 602920 - DNA, 33 bp, Homo sapien
ggagtgcaggatgggatgctgaacttggaaatc

SEQ ID NO: 602921 - DNA, 33 bp, Homo sapien
aagaatgagaggaaggaatggttagaagagatg

SEQ ID NO: 602922 - DNA, 33 bp, Homo sapien
aagaatgagaggaagggatggttagaagagatg

SEQ ID NO: 602923 - DNA, 33 bp, Homo sapien
gatgtggatcatgagaatctataggacctggtg

SEQ ID NO: 602924 - DNA, 33 bp, Homo sapien
gatgtggatcatgagactctataggacctggtg

SEQ ID NO: 602925 - DNA, 33 bp, Homo sapien
gaggccataggatctccaggtgaaattgggcag

SEQ ID NO: 602926 - DNA, 33 bp, Homo sapien
gaggccataggatctctaggtgaaattgggcag

SEQ ID NO: 602927 - DNA, 33 bp, Homo sapien
ggtaaaagccaagtgcaatggagaatcgtgttg

SEQ ID NO: 602928 - DNA, 33 bp, Homo sapien
ggtaaaagccaagtgcgatggagaatcgtgttg

SEQ ID NO: 602929 - DNA, 33 bp, Homo sapien
acccaggagtagactacgacaaaaggtagaaga

SEQ ID NO: 602930 - DNA, 33 bp, Homo sapien
acccaggagtagactatgacaaaaggtagaaga

SEQ ID NO: 602931 - DNA, 33 bp, Homo sapien
catgataccctagcaccctcccagagaagaaag

SEQ ID NO: 602932 - DNA, 33 bp, Homo sapien
catgataccctagcactctcccagagaagaaag

SEQ ID NO: 602933 - DNA, 33 bp, Homo sapien
tgacttggctttcaaacaggtatgagtaagctt

SEQ ID NO: 602934 - DNA, 33 bp, Homo sapien
tgacttggctttcaaataggtatgagtaagctt

SEQ ID NO: 602935 - DNA, 33 bp, Homo sapien
tcttatgaagtcagcacatagaaagtcaaaaaa

SEQ ID NO: 602936 - DNA, 33 bp, Homo sapien
tcttatgaagtcagcatatagaaagtcaaaaaa

SEQ ID NO: 602937 - DNA, 33 bp, Homo sapien
tataaacttgtggatacgtcccctgctaataga

SEQ ID NO: 602938 - DNA, 33 bp, Homo sapien
tataaacttgtggatatgtcccctgctaataga

SEQ ID NO: 602939 - DNA, 33 bp, Homo sapien
tctctttcttccagcacgtgttctttaatgatt

SEQ ID NO: 602940 - DNA, 33 bp, Homo sapien
tctctttcttccagcatgtgttctttaatgatt

SEQ ID NO: 602941 - DNA, 33 bp, Homo sapien
tcctggattcagggccaacttacctggggaggg

SEQ ID NO: 602942 - DNA, 33 bp, Homo sapien
tcctggattcagggccgacttacctggggaggg

SEQ ID NO: 602943 - DNA, 33 bp, Homo sapien
tgaatatgggaagctaagtgtgatttcttgtat

SEQ ID NO: 602944 - DNA, 33 bp, Homo sapien
tgaatatgggaagctacgtgtgatttcttgtat

SEQ ID NO: 602945 - DNA, 33 bp, Homo sapien
tgcaatttctggagacacaccagtaagcttttc

SEQ ID NO: 602946 - DNA, 33 bp, Homo sapien
tgcaatttctggagacgcaccagtaagcttttc

SEQ ID NO: 602947 - DNA, 33 bp, Homo sapien
aattgcctactaagacaagccaaacaagatcac

SEQ ID NO: 602948 - DNA, 33 bp, Homo sapien
aattgcctactaagaccagccaaacaagatcac

SEQ ID NO: 602949 - DNA, 33 bp, Homo sapien
atccacaatgaggaaggataatggagctaccaa

SEQ ID NO: 602950 - DNA, 33 bp, Homo sapien
atccacaatgaggaagtataatggagctaccaa

SEQ ID NO: 602951 - DNA, 33 bp, Homo sapien
ggaatcaggattgaacaaaagatcttatgaaat

SEQ ID NO: 602952 - DNA, 33 bp, Homo sapien
ggaatcaggattgaacgaaagatcttatgaaat

SEQ ID NO: 602953 - DNA, 33 bp, Homo sapien
catgatctagataaggaaacagaccaagaagtg

SEQ ID NO: 602954 - DNA, 33 bp, Homo sapien
catgatctagataaggtaacagaccaagaagtg

SEQ ID NO: 602955 - DNA, 33 bp, Homo sapien
aggttaagtaactttccaagtggcgaacacagg

SEQ ID NO: 602956 - DNA, 33 bp, Homo sapien
aggttaagtaactttctaagtggcgaacacagg

SEQ ID NO: 602957 - DNA, 33 bp, Homo sapien
tggaggcagccgattacagcagaaaggcattct

SEQ ID NO: 602958 - DNA, 33 bp, Homo sapien
tggaggcagccgattagagcagaaaggcattct

SEQ ID NO: 602959 - DNA, 33 bp, Homo sapien
ttggaattgtatctcccatggccctggattctt

SEQ ID NO: 602960 - DNA, 33 bp, Homo sapien
ttggaattgtatctcctatggccctggattctt

SEQ ID NO: 602961 - DNA, 33 bp, Homo sapien
aatcaaggaagctccacgctcaggctctcagct

SEQ ID NO: 602962 - DNA, 33 bp, Homo sapien
aatcaaggaagctccatgctcaggctctcagct

SEQ ID NO: 602963 - DNA, 33 bp, Homo sapien
agatgaaaacgcttagaatgtggctggcacaaa

SEQ ID NO: 602964 - DNA, 33 bp, Homo sapien
agatgaaaacgcttaggatgtggctggcacaaa

SEQ ID NO: 602965 - DNA, 33 bp, Homo sapien
actcctccactcgctcaagtactctcaaatccc

SEQ ID NO: 602966 - DNA, 33 bp, Homo sapien
actcctccactcgctcgagtactctcaaatccc

SEQ ID NO: 602967 - DNA, 33 bp, Homo sapien
cagatgacctgagttcaaatgcggctctcctgc

SEQ ID NO: 602968 - DNA, 33 bp, Homo sapien
cagatgacctgagttccaatgcggctctcctgc

SEQ ID NO: 602969 - DNA, 33 bp, Homo sapien
ttctacacaatagttcactgaatgatatatcat

SEQ ID NO: 602970 - DNA, 33 bp, Homo sapien
ttctacacaatagttccctgaatgatatatcat

SEQ ID NO: 602971 - DNA, 33 bp, Homo sapien
gctttttgacgctgccagaagcattcagtaatc

SEQ ID NO: 602972 - DNA, 33 bp, Homo sapien
gctttttgacgctgccggaagcattcagtaatc

SEQ ID NO: 602973 - DNA, 33 bp, Homo sapien
ctaagtcttccctccaaaagtgtctaggattgg

SEQ ID NO: 602974 - DNA, 33 bp, Homo sapien
ctaagtcttccctccagaagtgtctaggattgg

SEQ ID NO: 602975 - DNA, 33 bp, Homo sapien
actatgtgcttaacaccggctaggtactcaggg

SEQ ID NO: 602976 - DNA, 33 bp, Homo sapien
actatgtgcttaacactggctaggtactcaggg

SEQ ID NO: 602977 - DNA, 33 bp, Homo sapien
actgaccagcatttacactccactattactagc

SEQ ID NO: 602978 - DNA, 33 bp, Homo sapien
actgaccagcatttacgctccactattactagc

SEQ ID NO: 602979 - DNA, 33 bp, Homo sapien
gtgctctgggggcggaaatgggtgatttagggc

SEQ ID NO: 602980 - DNA, 33 bp, Homo sapien
gtgctctgggggcggagatgggtgatttagggc

SEQ ID NO: 602981 - DNA, 33 bp, Homo sapien
cttagagtcacattaaaacaggaaaagggggct

SEQ ID NO: 602982 - DNA, 33 bp, Homo sapien
cttagagtcacattaagacaggaaaagggggct

SEQ ID NO: 602983 - DNA, 33 bp, Homo sapien
tcagtcactcatatcagctgagatgtaaactac

SEQ ID NO: 602984 - DNA, 33 bp, Homo sapien
tcagtcactcatatcatctgagatgtaaactac

SEQ ID NO: 602985 - DNA, 33 bp, Homo sapien
atttcccacactatctaacatttccatatgatg

SEQ ID NO: 602986 - DNA, 33 bp, Homo sapien
atttcccacactatcttacatttccatatgatg

SEQ ID NO: 602987 - DNA, 33 bp, Homo sapien
ctaagagacacttggaaatgtttgtcggtttca

SEQ ID NO: 602988 - DNA, 33 bp, Homo sapien
ctaagagacacttggagatgtttgtcggtttca

SEQ ID NO: 602989 - DNA, 33 bp, Homo sapien
ccagctccagaaaatacctttggcatggccaac

SEQ ID NO: 602990 - DNA, 33 bp, Homo sapien
ccagctccagaaaatatctttggcatggccaac

SEQ ID NO: 602991 - DNA, 33 bp, Homo sapien
cataacagcttgcactgacataatgtttactat

SEQ ID NO: 602992 - DNA, 33 bp, Homo sapien
cataacagcttgcacttacataatgtttactat

SEQ ID NO: 602993 - DNA, 33 bp, Homo sapien
aaataaagcaggatgacggtatagagatccacc

SEQ ID NO: 602994 - DNA, 33 bp, Homo sapien
aaataaagcaggatgagggtatagagatccacc

SEQ ID NO: 602995 - DNA, 33 bp, Homo sapien
gcagaagcctagatcagatgaggttttgcaaac

SEQ ID NO: 602996 - DNA, 33 bp, Homo sapien
gcagaagcctagatcatatgaggttttgcaaac

SEQ ID NO: 602997 - DNA, 33 bp, Homo sapien
cagaaatgtttcaggaagaaggagaactagcaa

SEQ ID NO: 602998 - DNA, 33 bp, Homo sapien
cagaaatgtttcaggaggaaggagaactagcaa

SEQ ID NO: 602999 - DNA, 33 bp, Homo sapien
gaagccaggccgcctacctgggctagtcctaga

SEQ ID NO: 603000 - DNA, 33 bp, Homo sapien
gaagccaggccgcctatctgggctagtcctaga

SEQ ID NO: 603001 - DNA, 33 bp, Homo sapien
tgcccttggacatcaaagctcctggttcttagg

SEQ ID NO: 603002 - DNA, 33 bp, Homo sapien
tgcccttggacatcaacgctcctggttcttagg

SEQ ID NO: 603003 - DNA, 33 bp, Homo sapien
ctcacagacgcaacaagaaataaagttttacca

SEQ ID NO: 603004 - DNA, 33 bp, Homo sapien
ctcacagacgcaacaataaataaagttttacca

SEQ ID NO: 603005 - DNA, 33 bp, Homo sapien
tgcctccactaagctcgcaaaaccagttgcaaa

SEQ ID NO: 603006 - DNA, 33 bp, Homo sapien
tgcctccactaagctctcaaaaccagttgcaaa

SEQ ID NO: 603007 - DNA, 33 bp, Homo sapien
aatattactgaaagcacggggtattcatgtcta

SEQ ID NO: 603008 - DNA, 33 bp, Homo sapien
aatattactgaaagcatggggtattcatgtcta

SEQ ID NO: 603009 - DNA, 33 bp, Homo sapien
attgagtgatattgacagagcacaggcactgtt

SEQ ID NO: 603010 - DNA, 33 bp, Homo sapien
attgagtgatattgacggagcacaggcactgtt

SEQ ID NO: 603011 - DNA, 33 bp, Homo sapien
tcactcaatgaaccaacgcccattttgcagatg

SEQ ID NO: 603012 - DNA, 33 bp, Homo sapien
tcactcaatgaaccaatgcccattttgcagatg

SEQ ID NO: 603013 - DNA, 33 bp, Homo sapien
gactcaccttgcagacaaaaaaggctttgagag

SEQ ID NO: 603014 - DNA, 33 bp, Homo sapien
gactcaccttgcagacgaaaaaggctttgagag

SEQ ID NO: 603015 - DNA, 33 bp, Homo sapien
ctgagggactagaaaacgcgcccagactgtgta

SEQ ID NO: 603016 - DNA, 33 bp, Homo sapien
ctgagggactagaaaatgcgcccagactgtgta

SEQ ID NO: 603017 - DNA, 33 bp, Homo sapien
attaggcagattgggagcaagttgacatgtgca

SEQ ID NO: 603018 - DNA, 33 bp, Homo sapien
attaggcagattgggatcaagttgacatgtgca

SEQ ID NO: 603019 - DNA, 33 bp, Homo sapien
tggcttaaaaagttcaatacatacatcctgcct

SEQ ID NO: 603020 - DNA, 33 bp, Homo sapien
tggcttaaaaagttcagtacatacatcctgcct

SEQ ID NO: 603021 - DNA, 33 bp, Homo sapien
cctagaaactactcagacaaatgtgtttagtga

SEQ ID NO: 603022 - DNA, 33 bp, Homo sapien
cctagaaactactcaggcaaatgtgtttagtga

SEQ ID NO: 603023 - DNA, 33 bp, Homo sapien
gtgacatcaggttttaagggagtagcaatctca

SEQ ID NO: 603024 - DNA, 33 bp, Homo sapien
gtgacatcaggttttaggggagtagcaatctca

SEQ ID NO: 603025 - DNA, 33 bp, Homo sapien
gtgccaggtactgttcaagcacttttcatggac

SEQ ID NO: 603026 - DNA, 33 bp, Homo sapien
gtgccaggtactgttcgagcacttttcatggac

SEQ ID NO: 603027 - DNA, 33 bp, Homo sapien
ctaacaccgccccttactaaccttgtgaccttg

SEQ ID NO: 603028 - DNA, 33 bp, Homo sapien
ctaacaccgccccttagtaaccttgtgaccttg

SEQ ID NO: 603029 - DNA, 33 bp, Homo sapien
gtcctcgcggaacgaacaggagaaagctttgat

SEQ ID NO: 603030 - DNA, 33 bp, Homo sapien
gtcctcgcggaacgaataggagaaagctttgat

SEQ ID NO: 603031 - DNA, 33 bp, Homo sapien
aagaaagaccttggaacgcaaagggacccaaga

SEQ ID NO: 603032 - DNA, 33 bp, Homo sapien
aagaaagaccttggaatgcaaagggacccaaga

SEQ ID NO: 603033 - DNA, 33 bp, Homo sapien
tgttctcaggagaaaacaatggagctagaatca

SEQ ID NO: 603034 - DNA, 33 bp, Homo sapien
tgttctcaggagaaaataatggagctagaatca

SEQ ID NO: 603035 - DNA, 33 bp, Homo sapien
ggaagggaaggaatgcactaagagtgatgagac

SEQ ID NO: 603036 - DNA, 33 bp, Homo sapien
ggaagggaaggaatgcgctaagagtgatgagac

SEQ ID NO: 603037 - DNA, 33 bp, Homo sapien
tgaggatgccctggaacagagtcttagaaaata

SEQ ID NO: 603038 - DNA, 33 bp, Homo sapien
tgaggatgccctggaagagagtcttagaaaata

SEQ ID NO: 603039 - DNA, 33 bp, Homo sapien
ggcaggagcaaagtgaaactggtcagatttgtg

SEQ ID NO: 603040 - DNA, 33 bp, Homo sapien
ggcaggagcaaagtgacactggtcagatttgtg

SEQ ID NO: 603041 - DNA, 33 bp, Homo sapien
aatacataagtggaaacgacctccaccccctta

SEQ ID NO: 603042 - DNA, 33 bp, Homo sapien
aatacataagtggaaatgacctccaccccctta

SEQ ID NO: 603043 - DNA, 33 bp, Homo sapien
ctacaaagatgtacaacttgaaagaacaaaact

SEQ ID NO: 603044 - DNA, 33 bp, Homo sapien
ctacaaagatgtacaagttgaaagaacaaaact

SEQ ID NO: 603045 - DNA, 33 bp, Homo sapien
tttttagcaatactcacctactctaaaatcaat

SEQ ID NO: 603046 - DNA, 33 bp, Homo sapien
tttttagcaatactcatctactctaaaatcaat

SEQ ID NO: 603047 - DNA, 33 bp, Homo sapien
tgcttacattaaaaaaaccataggtctgtgatg

SEQ ID NO: 603048 - DNA, 33 bp, Homo sapien
tgcttacattaaaaaagccataggtctgtgatg

SEQ ID NO: 603049 - DNA, 33 bp, Homo sapien
cccagccaagaagagtcaactcctagccaacct

SEQ ID NO: 603050 - DNA, 33 bp, Homo sapien
cccagccaagaagagtgaactcctagccaacct

SEQ ID NO: 603051 - DNA, 33 bp, Homo sapien
gattcctgtggaataacagcactgcgcactgtg

SEQ ID NO: 603052 - DNA, 33 bp, Homo sapien
gattcctgtggaataatagcactgcgcactgtg

SEQ ID NO: 603053 - DNA, 33 bp, Homo sapien
cctggtgccaagatcaatagggttctctttgat

SEQ ID NO: 603054 - DNA, 33 bp, Homo sapien
cctggtgccaagatcagtagggttctctttgat

SEQ ID NO: 603055 - DNA, 33 bp, Homo sapien
cctagcacttaggaaacgttaaatgaatagctg

SEQ ID NO: 603056 - DNA, 33 bp, Homo sapien
cctagcacttaggaaatgttaaatgaatagctg

SEQ ID NO: 603057 - DNA, 33 bp, Homo sapien
tgctctttcaagtctcacaggccatataccctt

SEQ ID NO: 603058 - DNA, 33 bp, Homo sapien
tgctctttcaagtctcgcaggccatataccctt

SEQ ID NO: 603059 - DNA, 33 bp, Homo sapien
aagattggtggaagaaagcactgtacctagtac

SEQ ID NO: 603060 - DNA, 33 bp, Homo sapien
aagattggtggaagaacgcactgtacctagtac

SEQ ID NO: 603061 - DNA, 33 bp, Homo sapien
aggttaggtaacatgaacgatgtcacacagcga

SEQ ID NO: 603062 - DNA, 33 bp, Homo sapien
aggttaggtaacatgaccgatgtcacacagcga

SEQ ID NO: 603063 - DNA, 33 bp, Homo sapien
acatatgccgtgtatccctttattcaaacattc

SEQ ID NO: 603064 - DNA, 33 bp, Homo sapien
acatatgccgtgtatctctttattcaaacattc

SEQ ID NO: 603065 - DNA, 33 bp, Homo sapien
tatatctttggaggaccgcaagagatagccagg

SEQ ID NO: 603066 - DNA, 33 bp, Homo sapien
tatatctttggaggactgcaagagatagccagg

SEQ ID NO: 603067 - DNA, 33 bp, Homo sapien
ctaagagggcataagaatagctgaaggatcaca

SEQ ID NO: 603068 - DNA, 33 bp, Homo sapien
ctaagagggcataagactagctgaaggatcaca

SEQ ID NO: 603069 - DNA, 33 bp, Homo sapien
cctggttcctaatccacgttgaccctcctacac

SEQ ID NO: 603070 - DNA, 33 bp, Homo sapien
cctggttcctaatccatgttgaccctcctacac

SEQ ID NO: 603071 - DNA, 33 bp, Homo sapien
ggactttccctcacccgaaagtgacaaagatga

SEQ ID NO: 603072 - DNA, 33 bp, Homo sapien
ggactttccctcaccctaaagtgacaaagatga

SEQ ID NO: 603073 - DNA, 33 bp, Homo sapien
gtcttagctaaatgaaatggaaactgtcctgaa

SEQ ID NO: 603074 - DNA, 33 bp, Homo sapien
gtcttagctaaatgaagtggaaactgtcctgaa

SEQ ID NO: 603075 - DNA, 33 bp, Homo sapien
ttgctgcccttagagacaattgttagcactttt

SEQ ID NO: 603076 - DNA, 33 bp, Homo sapien
ttgctgcccttagagataattgttagcactttt

SEQ ID NO: 603077 - DNA, 33 bp, Homo sapien
catctcagctgattcacccagtcacgctgcttt

SEQ ID NO: 603078 - DNA, 33 bp, Homo sapien
catctcagctgattcagccagtcacgctgcttt

SEQ ID NO: 603079 - DNA, 33 bp, Homo sapien
attaaaataattctgacggtgcagtttaaggtt

SEQ ID NO: 603080 - DNA, 33 bp, Homo sapien
attaaaataattctgatggtgcagtttaaggtt

SEQ ID NO: 603081 - DNA, 33 bp, Homo sapien
ggctaaatgatgacaaattggcagacttagagg

SEQ ID NO: 603082 - DNA, 33 bp, Homo sapien
ggctaaatgatgacaatttggcagacttagagg

SEQ ID NO: 603083 - DNA, 33 bp, Homo sapien
gaagaacatgtagatagaattgaagctgcctta

SEQ ID NO: 603084 - DNA, 33 bp, Homo sapien
gaagaacatgtagatataattgaagctgcctta

SEQ ID NO: 603085 - DNA, 33 bp, Homo sapien
ctgcctaagctcagaacaaataaagtgtggact

SEQ ID NO: 603086 - DNA, 33 bp, Homo sapien
ctgcctaagctcagaataaataaagtgtggact

SEQ ID NO: 603087 - DNA, 33 bp, Homo sapien
gccccttagctttaaacagacctacccgcgtgt

SEQ ID NO: 603088 - DNA, 33 bp, Homo sapien
gccccttagctttaaatagacctacccgcgtgt

SEQ ID NO: 603089 - DNA, 33 bp, Homo sapien
ttggatgtgcaccttacggctgtttatagcaat

SEQ ID NO: 603090 - DNA, 33 bp, Homo sapien
ttggatgtgcaccttatggctgtttatagcaat

SEQ ID NO: 603091 - DNA, 33 bp, Homo sapien
acttttagttagagaacgccagctctaggaagg

SEQ ID NO: 603092 - DNA, 33 bp, Homo sapien
acttttagttagagaatgccagctctaggaagg

SEQ ID NO: 603093 - DNA, 33 bp, Homo sapien
cagttatagttacaacagcacacatgtaattta

SEQ ID NO: 603094 - DNA, 33 bp, Homo sapien
cagttatagttacaacggcacacatgtaattta

SEQ ID NO: 603095 - DNA, 33 bp, Homo sapien
aaaggcaaccttcattaaacacaatgtattgga

SEQ ID NO: 603096 - DNA, 33 bp, Homo sapien
aaaggcaaccttcattgaacacaatgtattgga

SEQ ID NO: 603097 - DNA, 33 bp, Homo sapien
aaacaatggggaaaaacgtgagacttaactcag

SEQ ID NO: 603098 - DNA, 33 bp, Homo sapien
aaacaatggggaaaaatgtgagacttaactcag

SEQ ID NO: 603099 - DNA, 33 bp, Homo sapien
agcaacgagacttgaacgcatttaatagagcat

SEQ ID NO: 603100 - DNA, 33 bp, Homo sapien
agcaacgagacttgaatgcatttaatagagcat

SEQ ID NO: 603101 - DNA, 33 bp, Homo sapien
atgtctactgaagttcacatatcttcttgctgt

SEQ ID NO: 603102 - DNA, 33 bp, Homo sapien
atgtctactgaagttcgcatatcttcttgctgt

SEQ ID NO: 603103 - DNA, 33 bp, Homo sapien
ctctaagctgttcaaacagattaagctccccta

SEQ ID NO: 603104 - DNA, 33 bp, Homo sapien
ctctaagctgttcaaagagattaagctccccta

SEQ ID NO: 603105 - DNA, 33 bp, Homo sapien
aggtagcaaagcattacaaaagccaattatgag

SEQ ID NO: 603106 - DNA, 33 bp, Homo sapien
aggtagcaaagcattataaaagccaattatgag

SEQ ID NO: 603107 - DNA, 33 bp, Homo sapien
aaaaaattgacaagatcactaccaaggaggaat

SEQ ID NO: 603108 - DNA, 33 bp, Homo sapien
aaaaaattgacaagattactaccaaggaggaat

SEQ ID NO: 603109 - DNA, 33 bp, Homo sapien
agggatggagaggtgacattacaaaggggtagc

SEQ ID NO: 603110 - DNA, 33 bp, Homo sapien
agggatggagaggtgagattacaaaggggtagc

SEQ ID NO: 603111 - DNA, 33 bp, Homo sapien
gtaataaattttaattcaagtgctgtgtgttct

SEQ ID NO: 603112 - DNA, 33 bp, Homo sapien
gtaataaattttaatttaagtgctgtgtgttct

SEQ ID NO: 603113 - DNA, 33 bp, Homo sapien
gacaatcactccttcaactaagtcagtcctaca

SEQ ID NO: 603114 - DNA, 33 bp, Homo sapien
gacaatcactccttcagctaagtcagtcctaca

SEQ ID NO: 603115 - DNA, 33 bp, Homo sapien
gccttgggttcaagagactatcggtttggtgac

SEQ ID NO: 603116 - DNA, 33 bp, Homo sapien
gccttgggttcaagaggctatcggtttggtgac

SEQ ID NO: 603117 - DNA, 33 bp, Homo sapien
ttccactgagcttcacagtaaaggctgaccttt

SEQ ID NO: 603118 - DNA, 33 bp, Homo sapien
ttccactgagcttcacggtaaaggctgaccttt

SEQ ID NO: 603119 - DNA, 33 bp, Homo sapien
gaagatgatgggcttgaaaggaagaggaagttt

SEQ ID NO: 603120 - DNA, 33 bp, Homo sapien
gaagatgatgggcttggaaggaagaggaagttt

SEQ ID NO: 603121 - DNA, 33 bp, Homo sapien
tgtcccagttaattcacctgtggcttcagaggg

SEQ ID NO: 603122 - DNA, 33 bp, Homo sapien
tgtcccagttaattcagctgtggcttcagaggg

SEQ ID NO: 603123 - DNA, 33 bp, Homo sapien
cacgtccaggtcatgacaatgcaagaggtagat

SEQ ID NO: 603124 - DNA, 33 bp, Homo sapien
cacgtccaggtcatgataatgcaagaggtagat

SEQ ID NO: 603125 - DNA, 33 bp, Homo sapien
gagattagaaagagtacaagccaaatctagcga

SEQ ID NO: 603126 - DNA, 33 bp, Homo sapien
gagattagaaagagtagaagccaaatctagcga

SEQ ID NO: 603127 - DNA, 33 bp, Homo sapien
acttgaggaaaaggcccatgctgttagttccag

SEQ ID NO: 603128 - DNA, 33 bp, Homo sapien
acttgaggaaaaggcctatgctgttagttccag

SEQ ID NO: 603129 - DNA, 33 bp, Homo sapien
aggctttggcctctaccctttactctctccatt

SEQ ID NO: 603130 - DNA, 33 bp, Homo sapien
aggctttggcctctacgctttactctctccatt

SEQ ID NO: 603131 - DNA, 33 bp, Homo sapien
aaaactagctttcacaaaagaaattacgaaatt

SEQ ID NO: 603132 - DNA, 33 bp, Homo sapien
aaaactagctttcacagaagaaattacgaaatt

SEQ ID NO: 603133 - DNA, 33 bp, Homo sapien
taacaaatagagcctaagtttgaacatcaattg

SEQ ID NO: 603134 - DNA, 33 bp, Homo sapien
taacaaatagagcctatgtttgaacatcaattg

SEQ ID NO: 603135 - DNA, 33 bp, Homo sapien
gtactcatggacaaaaagatggcaactatagac

SEQ ID NO: 603136 - DNA, 33 bp, Homo sapien
gtactcatggacaaaaggatggcaactatagac

SEQ ID NO: 603137 - DNA, 33 bp, Homo sapien
ggcaactatagacaacagggactactagaggca

SEQ ID NO: 603138 - DNA, 33 bp, Homo sapien
ggcaactatagacaacggggactactagaggca

SEQ ID NO: 603139 - DNA, 33 bp, Homo sapien
ttttattatcacaaacagcagttaaggactcga

SEQ ID NO: 603140 - DNA, 33 bp, Homo sapien
ttttattatcacaaacggcagttaaggactcga

SEQ ID NO: 603141 - DNA, 33 bp, Homo sapien
tgagccctaattttacagcatgttggaacggct

SEQ ID NO: 603142 - DNA, 33 bp, Homo sapien
tgagccctaattttacggcatgttggaacggct

SEQ ID NO: 603143 - DNA, 33 bp, Homo sapien
atttgttctatgcaatgatactggctaagagta

SEQ ID NO: 603144 - DNA, 33 bp, Homo sapien
atttgttctatgcaattatactggctaagagta

SEQ ID NO: 603145 - DNA, 33 bp, Homo sapien
agtgcatattttggccactgttagagcaagggg

SEQ ID NO: 603146 - DNA, 33 bp, Homo sapien
agtgcatattttggccgctgttagagcaagggg

SEQ ID NO: 603147 - DNA, 33 bp, Homo sapien
taatcctacttattcccaaccagattgctagtt

SEQ ID NO: 603148 - DNA, 33 bp, Homo sapien
taatcctacttattcctaaccagattgctagtt

SEQ ID NO: 603149 - DNA, 33 bp, Homo sapien
ggagataatgtcagaaaaaacaaattgttggca

SEQ ID NO: 603150 - DNA, 33 bp, Homo sapien
ggagataatgtcagaagaaacaaattgttggca

SEQ ID NO: 603151 - DNA, 33 bp, Homo sapien
aaccattttcagtaccagaagtcaaatgcagat

SEQ ID NO: 603152 - DNA, 33 bp, Homo sapien
aaccattttcagtaccggaagtcaaatgcagat

SEQ ID NO: 603153 - DNA, 33 bp, Homo sapien
accttaggaaatggataagttcatcaaagatca

SEQ ID NO: 603154 - DNA, 33 bp, Homo sapien
accttaggaaatggatgagttcatcaaagatca

SEQ ID NO: 603155 - DNA, 33 bp, Homo sapien
tatgtaattgatgatagatattgtcttggtaaa

SEQ ID NO: 603156 - DNA, 33 bp, Homo sapien
tatgtaattgatgatatatattgtcttggtaaa

SEQ ID NO: 603157 - DNA, 33 bp, Homo sapien
aatcaaactacgtgcacatcaatgaataagctc

SEQ ID NO: 603158 - DNA, 33 bp, Homo sapien
aatcaaactacgtgcatatcaatgaataagctc

SEQ ID NO: 603159 - DNA, 33 bp, Homo sapien
attttggagtctaggaatccctggtttctatgg

SEQ ID NO: 603160 - DNA, 33 bp, Homo sapien
attttggagtctaggagtccctggtttctatgg

SEQ ID NO: 603161 - DNA, 33 bp, Homo sapien
ctagtgtatcaacacaaactgaatccttaaacc

SEQ ID NO: 603162 - DNA, 33 bp, Homo sapien
ctagtgtatcaacacagactgaatccttaaacc

SEQ ID NO: 603163 - DNA, 33 bp, Homo sapien
aaaatataacaagtacaacgtattaagagaaaa

SEQ ID NO: 603164 - DNA, 33 bp, Homo sapien
aaaatataacaagtacgacgtattaagagaaaa

SEQ ID NO: 603165 - DNA, 33 bp, Homo sapien
ctacaatgagtaacaacgtttgatctttgtgac

SEQ ID NO: 603166 - DNA, 33 bp, Homo sapien
ctacaatgagtaacaatgtttgatctttgtgac

SEQ ID NO: 603167 - DNA, 33 bp, Homo sapien
tattatttaaaagaaacgattgagaactgctac

SEQ ID NO: 603168 - DNA, 33 bp, Homo sapien
tattatttaaaagaaatgattgagaactgctac

SEQ ID NO: 603169 - DNA, 33 bp, Homo sapien
gacctcagagaccaagaaatctcctggcccttt

SEQ ID NO: 603170 - DNA, 33 bp, Homo sapien
gacctcagagaccaaggaatctcctggcccttt

SEQ ID NO: 603171 - DNA, 33 bp, Homo sapien
aaagccccagtgatacactcttgagataccatg

SEQ ID NO: 603172 - DNA, 33 bp, Homo sapien
aaagccccagtgatactctcttgagataccatg

SEQ ID NO: 603173 - DNA, 33 bp, Homo sapien
taggcttcagactgagaaaagcttattttagag

SEQ ID NO: 603174 - DNA, 33 bp, Homo sapien
taggcttcagactgaggaaagcttattttagag

SEQ ID NO: 603175 - DNA, 33 bp, Homo sapien
ggaggtttatatgacaacaataagaacaccaca

SEQ ID NO: 603176 - DNA, 33 bp, Homo sapien
ggaggtttatatgacagcaataagaacaccaca

SEQ ID NO: 603177 - DNA, 33 bp, Homo sapien
agaccatcctagctaacgcagtgaaatccaaaa

SEQ ID NO: 603178 - DNA, 33 bp, Homo sapien
agaccatcctagctaatgcagtgaaatccaaaa

SEQ ID NO: 603179 - DNA, 33 bp, Homo sapien
cctccaaagagcatcacgggctaggtgctgcaa

SEQ ID NO: 603180 - DNA, 33 bp, Homo sapien
cctccaaagagcatcatgggctaggtgctgcaa

SEQ ID NO: 603181 - DNA, 33 bp, Homo sapien
atatgaacaaaatgaacagaaatatgtgagttg

SEQ ID NO: 603182 - DNA, 33 bp, Homo sapien
atatgaacaaaatgaagagaaatatgtgagttg

SEQ ID NO: 603183 - DNA, 33 bp, Homo sapien
ctaattggaatttaatcagattaatcagaataa

SEQ ID NO: 603184 - DNA, 33 bp, Homo sapien
ctaattggaatttaatgagattaatcagaataa

SEQ ID NO: 603185 - DNA, 33 bp, Homo sapien
ctgtctctaactcaaaccatcttcaagttttcc

SEQ ID NO: 603186 - DNA, 33 bp, Homo sapien
ctgtctctaactcaaagcatcttcaagttttcc

SEQ ID NO: 603187 - DNA, 33 bp, Homo sapien
cttggagaagagcatacaaaagaaaagaaaaga

SEQ ID NO: 603188 - DNA, 33 bp, Homo sapien
cttggagaagagcatataaaagaaaagaaaaga

SEQ ID NO: 603189 - DNA, 33 bp, Homo sapien
cttgccagccatcatgccaagtgctaagttaca

SEQ ID NO: 603190 - DNA, 33 bp, Homo sapien
cttgccagccatcatggcaagtgctaagttaca

SEQ ID NO: 603191 - DNA, 33 bp, Homo sapien
gggttctgtttgcgacggtcacttgggcaacag

SEQ ID NO: 603192 - DNA, 33 bp, Homo sapien
gggttctgtttgcgactgtcacttgggcaacag

SEQ ID NO: 603193 - DNA, 33 bp, Homo sapien
ttcgcccagctttctcactcatcgtcctgcccc

SEQ ID NO: 603194 - DNA, 33 bp, Homo sapien
ttcgcccagctttctcgctcatcgtcctgcccc

SEQ ID NO: 603195 - DNA, 33 bp, Homo sapien
ctctgccacgctggaaaaggtgaatttactctg

SEQ ID NO: 603196 - DNA, 33 bp, Homo sapien
ctctgccacgctggaagaggtgaatttactctg

SEQ ID NO: 603197 - DNA, 33 bp, Homo sapien
ttccatgttacagataaggaaattgcagaacca

SEQ ID NO: 603198 - DNA, 33 bp, Homo sapien
ttccatgttacagatacggaaattgcagaacca

SEQ ID NO: 603199 - DNA, 33 bp, Homo sapien
gctagtcagtttaaacagctatgagggacagct

SEQ ID NO: 603200 - DNA, 33 bp, Homo sapien
gctagtcagtttaaacggctatgagggacagct

SEQ ID NO: 603201 - DNA, 33 bp, Homo sapien
atttagcaatctacctcagggtgacaatacgtg

SEQ ID NO: 603202 - DNA, 33 bp, Homo sapien
atttagcaatctaccttagggtgacaatacgtg

SEQ ID NO: 603203 - DNA, 33 bp, Homo sapien
ggcaagtgctctacaacgtttagctattattac

SEQ ID NO: 603204 - DNA, 33 bp, Homo sapien
ggcaagtgctctacaatgtttagctattattac

SEQ ID NO: 603205 - DNA, 33 bp, Homo sapien
tcttgaacacgttacaactttgtgccacagttt

SEQ ID NO: 603206 - DNA, 33 bp, Homo sapien
tcttgaacacgttacatctttgtgccacagttt

SEQ ID NO: 603207 - DNA, 33 bp, Homo sapien
atgcaggctaaacctacgctttggcttcccgac

SEQ ID NO: 603208 - DNA, 33 bp, Homo sapien
atgcaggctaaacctatgctttggcttcccgac

SEQ ID NO: 603209 - DNA, 33 bp, Homo sapien
aacagtaaacacaagacctacaacaactataat

SEQ ID NO: 603210 - DNA, 33 bp, Homo sapien
aacagtaaacacaagagctacaacaactataat

SEQ ID NO: 603211 - DNA, 33 bp, Homo sapien
acgtgccgtatgttcaatcagcttggcctctta

SEQ ID NO: 603212 - DNA, 33 bp, Homo sapien
acgtgccgtatgttcagtcagcttggcctctta

SEQ ID NO: 603213 - DNA, 33 bp, Homo sapien
tccttacccagcaagaagtacgtaatcagcagt

SEQ ID NO: 603214 - DNA, 33 bp, Homo sapien
tccttacccagcaagaggtacgtaatcagcagt

SEQ ID NO: 603215 - DNA, 33 bp, Homo sapien
acaaaatagctatcaaccgtccctttgcctcta

SEQ ID NO: 603216 - DNA, 33 bp, Homo sapien
acaaaatagctatcaatcgtccctttgcctcta

SEQ ID NO: 603217 - DNA, 33 bp, Homo sapien
ccagacttttcacaacaccagatccttctcatt

SEQ ID NO: 603218 - DNA, 33 bp, Homo sapien
ccagacttttcacaacgccagatccttctcatt

SEQ ID NO: 603219 - DNA, 33 bp, Homo sapien
gtgatggttggagaaacgggcacctggctttaa

SEQ ID NO: 603220 - DNA, 33 bp, Homo sapien
gtgatggttggagaaatgggcacctggctttaa

SEQ ID NO: 603221 - DNA, 33 bp, Homo sapien
ttgggttggagcagaaatcagttccaggatgga

SEQ ID NO: 603222 - DNA, 33 bp, Homo sapien
ttgggttggagcagaattcagttccaggatgga

SEQ ID NO: 603223 - DNA, 33 bp, Homo sapien
ttacctgctaggatccccaagttctctgtgcac

SEQ ID NO: 603224 - DNA, 33 bp, Homo sapien
ttacctgctaggatccgcaagttctctgtgcac

SEQ ID NO: 603225 - DNA, 33 bp, Homo sapien
ggtttctgttttaatacgctcagaagaatgaag

SEQ ID NO: 603226 - DNA, 33 bp, Homo sapien
ggtttctgttttaatatgctcagaagaatgaag

SEQ ID NO: 603227 - DNA, 33 bp, Homo sapien
aaggattctgaatagaaaaaacggtagagaata

SEQ ID NO: 603228 - DNA, 33 bp, Homo sapien
aaggattctgaatagataaaacggtagagaata

SEQ ID NO: 603229 - DNA, 33 bp, Homo sapien
ttatagttctcacactaacttcatttgactctc

SEQ ID NO: 603230 - DNA, 33 bp, Homo sapien
ttatagttctcacactgacttcatttgactctc

SEQ ID NO: 603231 - DNA, 33 bp, Homo sapien
caaataagtatggtcacggattccgagaaagac

SEQ ID NO: 603232 - DNA, 33 bp, Homo sapien
caaataagtatggtcatggattccgagaaagac

SEQ ID NO: 603233 - DNA, 33 bp, Homo sapien
tggcatgggaatgcaccgatacaaatgattaac

SEQ ID NO: 603234 - DNA, 33 bp, Homo sapien
tggcatgggaatgcactgatacaaatgattaac

SEQ ID NO: 603235 - DNA, 33 bp, Homo sapien
catagaaatccttaaaccagtggagctgctcac

SEQ ID NO: 603236 - DNA, 33 bp, Homo sapien
catagaaatccttaaatcagtggagctgctcac

SEQ ID NO: 603237 - DNA, 33 bp, Homo sapien
gttaataactaaactcgcagaaaacaatgatca

SEQ ID NO: 603238 - DNA, 33 bp, Homo sapien
gttaataactaaactctcagaaaacaatgatca

SEQ ID NO: 603239 - DNA, 33 bp, Homo sapien
gatggcgttgtgttcacctaggtcctgccatga

SEQ ID NO: 603240 - DNA, 33 bp, Homo sapien
gatggcgttgtgttcagctaggtcctgccatga

SEQ ID NO: 603241 - DNA, 33 bp, Homo sapien
taggatggcatcaccaaccgattccagaggcag

SEQ ID NO: 603242 - DNA, 33 bp, Homo sapien
taggatggcatcaccagccgattccagaggcag

SEQ ID NO: 603243 - DNA, 33 bp, Homo sapien
gagacagaaggccttgcagacagtttgattgga

SEQ ID NO: 603244 - DNA, 33 bp, Homo sapien
gagacagaaggccttgtagacagtttgattgga

SEQ ID NO: 603245 - DNA, 33 bp, Homo sapien
aaggaacttgtcctaccaggcattctgtaatca

SEQ ID NO: 603246 - DNA, 33 bp, Homo sapien
aaggaacttgtcctactaggcattctgtaatca

SEQ ID NO: 603247 - DNA, 33 bp, Homo sapien
tatttaagtcacaggaactaaaaggcatttggg

SEQ ID NO: 603248 - DNA, 33 bp, Homo sapien
tatttaagtcacaggatctaaaaggcatttggg

SEQ ID NO: 603249 - DNA, 33 bp, Homo sapien
aggtatactggtggaaaacattgcctttgtagg

SEQ ID NO: 603250 - DNA, 33 bp, Homo sapien
aggtatactggtggaagacattgcctttgtagg

SEQ ID NO: 603251 - DNA, 33 bp, Homo sapien
ggaccttaggcccacaagaagaaagacctcaca

SEQ ID NO: 603252 - DNA, 33 bp, Homo sapien
ggaccttaggcccacaggaagaaagacctcaca

SEQ ID NO: 603253 - DNA, 33 bp, Homo sapien
ggaaaggcaagctacaacaatattggatggaag

SEQ ID NO: 603254 - DNA, 33 bp, Homo sapien
ggaaaggcaagctacaccaatattggatggaag

SEQ ID NO: 603255 - DNA, 33 bp, Homo sapien
agtctgactttgagtccaccaggatcactcatt

SEQ ID NO: 603256 - DNA, 33 bp, Homo sapien
agtctgactttgagtctaccaggatcactcatt

SEQ ID NO: 603257 - DNA, 33 bp, Homo sapien
atattcagtgatatgacattgctagcttgaaat

SEQ ID NO: 603258 - DNA, 33 bp, Homo sapien
atattcagtgatatgatattgctagcttgaaat

SEQ ID NO: 603259 - DNA, 33 bp, Homo sapien
gtttactaaatataccactctctgtaccccgat

SEQ ID NO: 603260 - DNA, 33 bp, Homo sapien
gtttactaaatataccgctctctgtaccccgat

SEQ ID NO: 603261 - DNA, 33 bp, Homo sapien
catgtcacaaagcttacgaatttcactctcagc

SEQ ID NO: 603262 - DNA, 33 bp, Homo sapien
catgtcacaaagcttatgaatttcactctcagc

SEQ ID NO: 603263 - DNA, 33 bp, Homo sapien
ctgctaagtttgcatccatgtgggaaccgaggt

SEQ ID NO: 603264 - DNA, 33 bp, Homo sapien
ctgctaagtttgcatcgatgtgggaaccgaggt

SEQ ID NO: 603265 - DNA, 33 bp, Homo sapien
aaaaagagaagctaaaaagggtgacaatgatga

SEQ ID NO: 603266 - DNA, 33 bp, Homo sapien
aaaaagagaagctaaacagggtgacaatgatga

SEQ ID NO: 603267 - DNA, 33 bp, Homo sapien
gttgacataagttagcgctgacacagtgtcctg

SEQ ID NO: 603268 - DNA, 33 bp, Homo sapien
gttgacataagttagctctgacacagtgtcctg

SEQ ID NO: 603269 - DNA, 33 bp, Homo sapien
atagattccagaaaagactagcaaagtaggcag

SEQ ID NO: 603270 - DNA, 33 bp, Homo sapien
atagattccagaaaagtctagcaaagtaggcag

SEQ ID NO: 603271 - DNA, 33 bp, Homo sapien
attttccagatttggacagattttcagctaatc

SEQ ID NO: 603272 - DNA, 33 bp, Homo sapien
attttccagatttggatagattttcagctaatc

SEQ ID NO: 603273 - DNA, 33 bp, Homo sapien
aatgcttggccatccacgctgtctcgtccttct

SEQ ID NO: 603274 - DNA, 33 bp, Homo sapien
aatgcttggccatccatgctgtctcgtccttct

SEQ ID NO: 603275 - DNA, 33 bp, Homo sapien
cgcagaagtgagattacagacgtagggagagga

SEQ ID NO: 603276 - DNA, 33 bp, Homo sapien
cgcagaagtgagattatagacgtagggagagga

SEQ ID NO: 603277 - DNA, 33 bp, Homo sapien
ttcatcacacagcagacctaccaaagccaatgt

SEQ ID NO: 603278 - DNA, 33 bp, Homo sapien
ttcatcacacagcagatctaccaaagccaatgt

SEQ ID NO: 603279 - DNA, 33 bp, Homo sapien
tattaatgtagaagacacccaatattttatttt

SEQ ID NO: 603280 - DNA, 33 bp, Homo sapien
tattaatgtagaagacgcccaatattttatttt

SEQ ID NO: 603281 - DNA, 33 bp, Homo sapien
atatatatttttcacaatccctgaaagtaagta

SEQ ID NO: 603282 - DNA, 33 bp, Homo sapien
atatatatttttcacattccctgaaagtaagta

SEQ ID NO: 603283 - DNA, 33 bp, Homo sapien
aaataaaaagcccccaataatgatgcctatgtc

SEQ ID NO: 603284 - DNA, 33 bp, Homo sapien
aaataaaaagcccccagtaatgatgcctatgtc

SEQ ID NO: 603285 - DNA, 33 bp, Homo sapien
tataacaaaataacatcaaccaggtggcttata

SEQ ID NO: 603286 - DNA, 33 bp, Homo sapien
tataacaaaataacattaaccaggtggcttata

SEQ ID NO: 603287 - DNA, 33 bp, Homo sapien
tgcagtggccattatcaaacaattgaaggttca

SEQ ID NO: 603288 - DNA, 33 bp, Homo sapien
tgcagtggccattatccaacaattgaaggttca

SEQ ID NO: 603289 - DNA, 33 bp, Homo sapien
accaatcaggattggaaaaggtgtagaagccat

SEQ ID NO: 603290 - DNA, 33 bp, Homo sapien
accaatcaggattggagaaggtgtagaagccat

SEQ ID NO: 603291 - DNA, 33 bp, Homo sapien
aagaagaatgtagcacactagggaatttattac

SEQ ID NO: 603292 - DNA, 33 bp, Homo sapien
aagaagaatgtagcacgctagggaatttattac

SEQ ID NO: 603293 - DNA, 33 bp, Homo sapien
ccttgtttgctgagacaagagcccaaagagaag

SEQ ID NO: 603294 - DNA, 33 bp, Homo sapien
ccttgtttgctgagacgagagcccaaagagaag

SEQ ID NO: 603295 - DNA, 33 bp, Homo sapien
ccagagctggcgttgaagttggcctcagtctct

SEQ ID NO: 603296 - DNA, 33 bp, Homo sapien
ccagagctggcgttgatgttggcctcagtctct

SEQ ID NO: 603297 - DNA, 33 bp, Homo sapien
gccctaagagattgaccacaaggctaacttgcc

SEQ ID NO: 603298 - DNA, 33 bp, Homo sapien
gccctaagagattgactacaaggctaacttgcc

SEQ ID NO: 603299 - DNA, 33 bp, Homo sapien
acagtaggtgcttaataaatgtctgctaaataa

SEQ ID NO: 603300 - DNA, 33 bp, Homo sapien
acagtaggtgcttaatgaatgtctgctaaataa

SEQ ID NO: 603301 - DNA, 33 bp, Homo sapien
ggattggcgtgcctgaaagggttaagtggtact

SEQ ID NO: 603302 - DNA, 33 bp, Homo sapien
ggattggcgtgcctgagagggttaagtggtact

SEQ ID NO: 603303 - DNA, 33 bp, Homo sapien
taagcaatttttttcacggctacgcagctagaa

SEQ ID NO: 603304 - DNA, 33 bp, Homo sapien
taagcaatttttttcatggctacgcagctagaa

SEQ ID NO: 603305 - DNA, 33 bp, Homo sapien
gatgaaattcaagccaagacttactaaaaggat

SEQ ID NO: 603306 - DNA, 33 bp, Homo sapien
gatgaaattcaagccaggacttactaaaaggat

SEQ ID NO: 603307 - DNA, 33 bp, Homo sapien
taagggctggagacacaaatcatggtcagcaac

SEQ ID NO: 603308 - DNA, 33 bp, Homo sapien
taagggctggagacacgaatcatggtcagcaac

SEQ ID NO: 603309 - DNA, 33 bp, Homo sapien
gtgaaagtcttttacacggcagtgaacagtaaa

SEQ ID NO: 603310 - DNA, 33 bp, Homo sapien
gtgaaagtcttttacagggcagtgaacagtaaa

SEQ ID NO: 603311 - DNA, 33 bp, Homo sapien
gattctatagaggcgacaactctcagaaggttg

SEQ ID NO: 603312 - DNA, 33 bp, Homo sapien
gattctatagaggcgataactctcagaaggttg

SEQ ID NO: 603313 - DNA, 33 bp, Homo sapien
tttggttaaggtcccacgctgtaaaatagctct

SEQ ID NO: 603314 - DNA, 33 bp, Homo sapien
tttggttaaggtcccatgctgtaaaatagctct

SEQ ID NO: 603315 - DNA, 33 bp, Homo sapien
ccgatgtggctcttcaataatttcttatggtct

SEQ ID NO: 603316 - DNA, 33 bp, Homo sapien
ccgatgtggctcttcactaatttcttatggtct

SEQ ID NO: 603317 - DNA, 33 bp, Homo sapien
tgaacatctgctttgacataataaggaataact

SEQ ID NO: 603318 - DNA, 33 bp, Homo sapien
tgaacatctgctttgagataataaggaataact

SEQ ID NO: 603319 - DNA, 33 bp, Homo sapien
acaacagggcaagagaatcaattccatggaggt

SEQ ID NO: 603320 - DNA, 33 bp, Homo sapien
acaacagggcaagagagtcaattccatggaggt

SEQ ID NO: 603321 - DNA, 33 bp, Homo sapien
ttgaaggcattgccccaagttagaggtagttac

SEQ ID NO: 603322 - DNA, 33 bp, Homo sapien
ttgaaggcattgccccgagttagaggtagttac

SEQ ID NO: 603323 - DNA, 33 bp, Homo sapien
gtgaacaacagagaaaactcaagaagtggagca

SEQ ID NO: 603324 - DNA, 33 bp, Homo sapien
gtgaacaacagagaaagctcaagaagtggagca

SEQ ID NO: 603325 - DNA, 33 bp, Homo sapien
gtagatgaactgagatcaagtacgcaaaggctc

SEQ ID NO: 603326 - DNA, 33 bp, Homo sapien
gtagatgaactgagatgaagtacgcaaaggctc

SEQ ID NO: 603327 - DNA, 33 bp, Homo sapien
agccagcccgaggacacggatgagagaaccttg

SEQ ID NO: 603328 - DNA, 33 bp, Homo sapien
agccagcccgaggacatggatgagagaaccttg

SEQ ID NO: 603329 - DNA, 33 bp, Homo sapien
gtgtaaagggccagagacggagggagaattatt

SEQ ID NO: 603330 - DNA, 33 bp, Homo sapien
gtgtaaagggccagaggcggagggagaattatt

SEQ ID NO: 603331 - DNA, 33 bp, Homo sapien
gcatattattacttcacgtgacatttgtctccc

SEQ ID NO: 603332 - DNA, 33 bp, Homo sapien
gcatattattacttcatgtgacatttgtctccc

SEQ ID NO: 603333 - DNA, 33 bp, Homo sapien
aggatgtgatcagaatcaacacttaaaccccca

SEQ ID NO: 603334 - DNA, 33 bp, Homo sapien
aggatgtgatcagaattaacacttaaaccccca

SEQ ID NO: 603335 - DNA, 33 bp, Homo sapien
tcactgaatgccagctaaccagacaggtgaaac

SEQ ID NO: 603336 - DNA, 33 bp, Homo sapien
tcactgaatgccagcttaccagacaggtgaaac

SEQ ID NO: 603337 - DNA, 33 bp, Homo sapien
aactcatcaactcaccacttcccttatctcact

SEQ ID NO: 603338 - DNA, 33 bp, Homo sapien
aactcatcaactcacctcttcccttatctcact

SEQ ID NO: 603339 - DNA, 33 bp, Homo sapien
ctttcctatcagcttacgccttagccaaaggaa

SEQ ID NO: 603340 - DNA, 33 bp, Homo sapien
ctttcctatcagcttatgccttagccaaaggaa

SEQ ID NO: 603341 - DNA, 33 bp, Homo sapien
caaatggccttctgtacgtttcatgatttggga

SEQ ID NO: 603342 - DNA, 33 bp, Homo sapien
caaatggccttctgtatgtttcatgatttggga

SEQ ID NO: 603343 - DNA, 33 bp, Homo sapien
aaagggactttacataagcgattaagttaatgg

SEQ ID NO: 603344 - DNA, 33 bp, Homo sapien
aaagggactttacatacgcgattaagttaatgg

SEQ ID NO: 603345 - DNA, 33 bp, Homo sapien
ctcagggttggtgataagatgagtgtgaagtgc

SEQ ID NO: 603346 - DNA, 33 bp, Homo sapien
ctcagggttggtgataggatgagtgtgaagtgc

SEQ ID NO: 603347 - DNA, 33 bp, Homo sapien
atgtgtagtaataagaaaaaatatgggctttga

SEQ ID NO: 603348 - DNA, 33 bp, Homo sapien
atgtgtagtaataagacaaaatatgggctttga

SEQ ID NO: 603349 - DNA, 33 bp, Homo sapien
cccagtttgcagattaagtagggaatacaaaag

SEQ ID NO: 603350 - DNA, 33 bp, Homo sapien
cccagtttgcagattaggtagggaatacaaaag

SEQ ID NO: 603351 - DNA, 33 bp, Homo sapien
aaggcagaggttgagcacaacagcagaatcaaa

SEQ ID NO: 603352 - DNA, 33 bp, Homo sapien
aaggcagaggttgagcgcaacagcagaatcaaa

SEQ ID NO: 603353 - DNA, 33 bp, Homo sapien
aatcaggcattagctcaattttcataaggtgca

SEQ ID NO: 603354 - DNA, 33 bp, Homo sapien
aatcaggcattagctcgattttcataaggtgca

SEQ ID NO: 603355 - DNA, 33 bp, Homo sapien
gacatctaagcagtaacgaagagaagcctaaaa

SEQ ID NO: 603356 - DNA, 33 bp, Homo sapien
gacatctaagcagtaatgaagagaagcctaaaa

SEQ ID NO: 603357 - DNA, 33 bp, Homo sapien
ttatccattgatgggcacgtcggttgatttcat

SEQ ID NO: 603358 - DNA, 33 bp, Homo sapien
ttatccattgatgggcgcgtcggttgatttcat

SEQ ID NO: 603359 - DNA, 33 bp, Homo sapien
tagagatgaatggggacgtagagtgaatagcac

SEQ ID NO: 603360 - DNA, 33 bp, Homo sapien
tagagatgaatggggatgtagagtgaatagcac

SEQ ID NO: 603361 - DNA, 33 bp, Homo sapien
agcacagaacagtgcccgacacatagaaggtgc

SEQ ID NO: 603362 - DNA, 33 bp, Homo sapien
agcacagaacagtgcctgacacatagaaggtgc

SEQ ID NO: 603363 - DNA, 33 bp, Homo sapien
ttccagatgaaggtaaaggtctgtgggatgtat

SEQ ID NO: 603364 - DNA, 33 bp, Homo sapien
ttccagatgaaggtaagggtctgtgggatgtat

SEQ ID NO: 603365 - DNA, 33 bp, Homo sapien
ctgaacaacagggagaaatgccatctctactaa

SEQ ID NO: 603366 - DNA, 33 bp, Homo sapien
ctgaacaacagggagacatgccatctctactaa

SEQ ID NO: 603367 - DNA, 33 bp, Homo sapien
gtgatggctcactctaaaggaaggataatgtag

SEQ ID NO: 603368 - DNA, 33 bp, Homo sapien
gtgatggctcactctagaggaaggataatgtag

SEQ ID NO: 603369 - DNA, 33 bp, Homo sapien
ggatgagtttgtattcagaaagaaagccccagg

SEQ ID NO: 603370 - DNA, 33 bp, Homo sapien
ggatgagtttgtattcggaaagaaagccccagg

SEQ ID NO: 603371 - DNA, 33 bp, Homo sapien
atgtgctgtaagtagccccaatttactgatgaa

SEQ ID NO: 603372 - DNA, 33 bp, Homo sapien
atgtgctgtaagtagctccaatttactgatgaa

SEQ ID NO: 603373 - DNA, 33 bp, Homo sapien
tgacaactctttaaccactacatataagagaat

SEQ ID NO: 603374 - DNA, 33 bp, Homo sapien
tgacaactctttaacccctacatataagagaat

SEQ ID NO: 603375 - DNA, 33 bp, Homo sapien
tgacagtaacttagctaaaataagccacagaga

SEQ ID NO: 603376 - DNA, 33 bp, Homo sapien
tgacagtaacttagctgaaataagccacagaga

SEQ ID NO: 603377 - DNA, 33 bp, Homo sapien
cagcacttgttagcagcctaatcttaagcaaat

SEQ ID NO: 603378 - DNA, 33 bp, Homo sapien
cagcacttgttagcagtctaatcttaagcaaat

SEQ ID NO: 603379 - DNA, 33 bp, Homo sapien
caatgtttacatggcccatttgtttccggcctc

SEQ ID NO: 603380 - DNA, 33 bp, Homo sapien
caatgtttacatggccgatttgtttccggcctc

SEQ ID NO: 603381 - DNA, 33 bp, Homo sapien
tataaagatgtttactaaatgactgatacacaa

SEQ ID NO: 603382 - DNA, 33 bp, Homo sapien
tataaagatgtttactgaatgactgatacacaa

SEQ ID NO: 603383 - DNA, 33 bp, Homo sapien
ctagttttttgtagagacacgcatctcactatg

SEQ ID NO: 603384 - DNA, 33 bp, Homo sapien
ctagttttttgtagagccacgcatctcactatg

SEQ ID NO: 603385 - DNA, 33 bp, Homo sapien
agacagagcatcagtgcatttctgcaaagttac

SEQ ID NO: 603386 - DNA, 33 bp, Homo sapien
agacagagcatcagtgtatttctgcaaagttac

SEQ ID NO: 603387 - DNA, 33 bp, Homo sapien
agtctaaaaaacttacactacattgttgtgttt

SEQ ID NO: 603388 - DNA, 33 bp, Homo sapien
agtctaaaaaacttaccctacattgttgtgttt

SEQ ID NO: 603389 - DNA, 33 bp, Homo sapien
tgagtcagacatacccacactgcccctgctgtc

SEQ ID NO: 603390 - DNA, 33 bp, Homo sapien
tgagtcagacatacccgcactgcccctgctgtc

SEQ ID NO: 603391 - DNA, 33 bp, Homo sapien
tgctggaagtgtcacacggagaagagatgagca

SEQ ID NO: 603392 - DNA, 33 bp, Homo sapien
tgctggaagtgtcacatggagaagagatgagca

SEQ ID NO: 603393 - DNA, 33 bp, Homo sapien
tcaatggagatcatccacaggttgggaaacagt

SEQ ID NO: 603394 - DNA, 33 bp, Homo sapien
tcaatggagatcatccgcaggttgggaaacagt

SEQ ID NO: 603395 - DNA, 33 bp, Homo sapien
gtacctgtctcatacaactttgagcctgaaatc

SEQ ID NO: 603396 - DNA, 33 bp, Homo sapien
gtacctgtctcatacagctttgagcctgaaatc

SEQ ID NO: 603397 - DNA, 33 bp, Homo sapien
tgaccaaactcaacccaaaatcagaggcaaaag

SEQ ID NO: 603398 - DNA, 33 bp, Homo sapien
tgaccaaactcaacccgaaatcagaggcaaaag

SEQ ID NO: 603399 - DNA, 33 bp, Homo sapien
caccactgaaatagtaaaaggcaggaacttgat

SEQ ID NO: 603400 - DNA, 33 bp, Homo sapien
caccactgaaatagtacaaggcaggaacttgat

SEQ ID NO: 603401 - DNA, 33 bp, Homo sapien
ctacagatattaagagaagctcactgatggaac

SEQ ID NO: 603402 - DNA, 33 bp, Homo sapien
ctacagatattaagaggagctcactgatggaac

SEQ ID NO: 603403 - DNA, 33 bp, Homo sapien
taagtctggcttgctcactaactttgctcaatg

SEQ ID NO: 603404 - DNA, 33 bp, Homo sapien
taagtctggcttgctcgctaactttgctcaatg

SEQ ID NO: 603405 - DNA, 33 bp, Homo sapien
ggaacaaagttgagaacagaacaacttattatg

SEQ ID NO: 603406 - DNA, 33 bp, Homo sapien
ggaacaaagttgagaagagaacaacttattatg

SEQ ID NO: 603407 - DNA, 33 bp, Homo sapien
gcataggaagagctcaataaacttagtcattat

SEQ ID NO: 603408 - DNA, 33 bp, Homo sapien
gcataggaagagctcagtaaacttagtcattat

SEQ ID NO: 603409 - DNA, 33 bp, Homo sapien
acatccagagagtcaacgtgctttacttcgcag

SEQ ID NO: 603410 - DNA, 33 bp, Homo sapien
acatccagagagtcaatgtgctttacttcgcag

SEQ ID NO: 603411 - DNA, 33 bp, Homo sapien
caatgttctaggacagaatccataatctatggc

SEQ ID NO: 603412 - DNA, 33 bp, Homo sapien
caatgttctaggacaggatccataatctatggc

SEQ ID NO: 603413 - DNA, 33 bp, Homo sapien
gctgaggaagataacactgatttaggtgaagtg

SEQ ID NO: 603414 - DNA, 33 bp, Homo sapien
gctgaggaagataacagtgatttaggtgaagtg

SEQ ID NO: 603415 - DNA, 33 bp, Homo sapien
ggaggacagtcacttacaggcaaaggaatgtcc

SEQ ID NO: 603416 - DNA, 33 bp, Homo sapien
ggaggacagtcacttataggcaaaggaatgtcc

SEQ ID NO: 603417 - DNA, 33 bp, Homo sapien
ccccttggtcctctgcacctgttacttcctgca

SEQ ID NO: 603418 - DNA, 33 bp, Homo sapien
ccccttggtcctctgcgcctgttacttcctgca

SEQ ID NO: 603419 - DNA, 33 bp, Homo sapien
tgttgtggctgtgtagcaatggccacggtgtat

SEQ ID NO: 603420 - DNA, 33 bp, Homo sapien
tgttgtggctgtgtaggaatggccacggtgtat

SEQ ID NO: 603421 - DNA, 33 bp, Homo sapien
gcctgtgcagtggggaacaaaagtgatgacatt

SEQ ID NO: 603422 - DNA, 33 bp, Homo sapien
gcctgtgcagtggggagcaaaagtgatgacatt

SEQ ID NO: 603423 - DNA, 33 bp, Homo sapien
cgtacatgttgagattagaaaggtgagcaccaa

SEQ ID NO: 603424 - DNA, 33 bp, Homo sapien
cgtacatgttgagattggaaaggtgagcaccaa

SEQ ID NO: 603425 - DNA, 33 bp, Homo sapien
agtatatcacacatacagacaagaatggccacc

SEQ ID NO: 603426 - DNA, 33 bp, Homo sapien
agtatatcacacatacggacaagaatggccacc

SEQ ID NO: 603427 - DNA, 33 bp, Homo sapien
caggctttataacatccctcttcgtaggtcttc

SEQ ID NO: 603428 - DNA, 33 bp, Homo sapien
caggctttataacatctctcttcgtaggtcttc

SEQ ID NO: 603429 - DNA, 33 bp, Homo sapien
caggatctctgtctacacactcccattggtcct

SEQ ID NO: 603430 - DNA, 33 bp, Homo sapien
caggatctctgtctacgcactcccattggtcct

SEQ ID NO: 603431 - DNA, 33 bp, Homo sapien
gtatttctggatgagactaacatttgatttggt

SEQ ID NO: 603432 - DNA, 33 bp, Homo sapien
gtatttctggatgagattaacatttgatttggt

SEQ ID NO: 603433 - DNA, 33 bp, Homo sapien
gctgtcatgccaaaggacagtcttccagcgagg

SEQ ID NO: 603434 - DNA, 33 bp, Homo sapien
gctgtcatgccaaagggcagtcttccagcgagg

SEQ ID NO: 603435 - DNA, 33 bp, Homo sapien
caatttcctcagttccgcatggagttacaggca

SEQ ID NO: 603436 - DNA, 33 bp, Homo sapien
caatttcctcagttcctcatggagttacaggca

SEQ ID NO: 603437 - DNA, 33 bp, Homo sapien
ttccacttctgattggcagggcacgctgattgg

SEQ ID NO: 603438 - DNA, 33 bp, Homo sapien
ttccacttctgattggtagggcacgctgattgg

SEQ ID NO: 603439 - DNA, 33 bp, Homo sapien
cacgcatttctaaataagggcatagtaggaaga

SEQ ID NO: 603440 - DNA, 33 bp, Homo sapien
cacgcatttctaaatatgggcatagtaggaaga

SEQ ID NO: 603441 - DNA, 33 bp, Homo sapien
tgtaaatgacaacttcacttgttaggatgcaaa

SEQ ID NO: 603442 - DNA, 33 bp, Homo sapien
tgtaaatgacaacttctcttgttaggatgcaaa

SEQ ID NO: 603443 - DNA, 33 bp, Homo sapien
agtgagagctaaactacggttcgcaaaggcaga

SEQ ID NO: 603444 - DNA, 33 bp, Homo sapien
agtgagagctaaactatggttcgcaaaggcaga

SEQ ID NO: 603445 - DNA, 33 bp, Homo sapien
ctgcccctgtgatgtaccaagaccctcttacca

SEQ ID NO: 603446 - DNA, 33 bp, Homo sapien
ctgcccctgtgatgtatcaagaccctcttacca

SEQ ID NO: 603447 - DNA, 33 bp, Homo sapien
ttttcagggccttgccaagaaatagaaaagaaa

SEQ ID NO: 603448 - DNA, 33 bp, Homo sapien
ttttcagggccttgccgagaaatagaaaagaaa

SEQ ID NO: 603449 - DNA, 33 bp, Homo sapien
gctgttgaaaacagctaaaaattgaggcttcag

SEQ ID NO: 603450 - DNA, 33 bp, Homo sapien
gctgttgaaaacagctcaaaattgaggcttcag

SEQ ID NO: 603451 - DNA, 33 bp, Homo sapien
tggtgaccagcaggccagaaatgttgcccctct

SEQ ID NO: 603452 - DNA, 33 bp, Homo sapien
tggtgaccagcaggcctgaaatgttgcccctct

SEQ ID NO: 603453 - DNA, 33 bp, Homo sapien
acagcctcacattcaaaagcatggcaataaaaa

SEQ ID NO: 603454 - DNA, 33 bp, Homo sapien
acagcctcacattcaagagcatggcaataaaaa

SEQ ID NO: 603455 - DNA, 33 bp, Homo sapien
ttttacctgagcagtgaagattatcctgccaat

SEQ ID NO: 603456 - DNA, 33 bp, Homo sapien
ttttacctgagcagtggagattatcctgccaat

SEQ ID NO: 603457 - DNA, 33 bp, Homo sapien
aggttttgagatgagaagtgagtagatttggaa

SEQ ID NO: 603458 - DNA, 33 bp, Homo sapien
aggttttgagatgagatgtgagtagatttggaa

SEQ ID NO: 603459 - DNA, 33 bp, Homo sapien
ccatgaggtagacactcaataattatcaagtct

SEQ ID NO: 603460 - DNA, 33 bp, Homo sapien
ccatgaggtagacactgaataattatcaagtct

SEQ ID NO: 603461 - DNA, 33 bp, Homo sapien
cctgatgaccaacttgcagccgggtgccctcta

SEQ ID NO: 603462 - DNA, 33 bp, Homo sapien
cctgatgaccaacttggagccgggtgccctcta

SEQ ID NO: 603463 - DNA, 33 bp, Homo sapien
atcgaagttggaaggaaccatagaagtcctcca

SEQ ID NO: 603464 - DNA, 33 bp, Homo sapien
atcgaagttggaaggatccatagaagtcctcca

SEQ ID NO: 603465 - DNA, 33 bp, Homo sapien
tgaaagaagctttggcccttctcagccaggaga

SEQ ID NO: 603466 - DNA, 33 bp, Homo sapien
tgaaagaagctttggctcttctcagccaggaga

SEQ ID NO: 603467 - DNA, 33 bp, Homo sapien
tgcctcaatgtcaacaaatgactctggcttccc

SEQ ID NO: 603468 - DNA, 33 bp, Homo sapien
tgcctcaatgtcaacagatgactctggcttccc

SEQ ID NO: 603469 - DNA, 33 bp, Homo sapien
ttgggaaagtgttaaaatgccaggacttagcgt

SEQ ID NO: 603470 - DNA, 33 bp, Homo sapien
ttgggaaagtgttaaattgccaggacttagcgt

SEQ ID NO: 603471 - DNA, 33 bp, Homo sapien
taatacatgtatttcaagtaatcgaatttggtt

SEQ ID NO: 603472 - DNA, 33 bp, Homo sapien
taatacatgtatttcaggtaatcgaatttggtt

SEQ ID NO: 603473 - DNA, 33 bp, Homo sapien
gaagagtgaagaaagcaaagacaaaatttgcaa

SEQ ID NO: 603474 - DNA, 33 bp, Homo sapien
gaagagtgaagaaagcgaagacaaaatttgcaa

SEQ ID NO: 603475 - DNA, 33 bp, Homo sapien
gtgtaacctcagcgtacgtacttactctctcag

SEQ ID NO: 603476 - DNA, 33 bp, Homo sapien
gtgtaacctcagcgtaggtacttactctctcag

SEQ ID NO: 603477 - DNA, 33 bp, Homo sapien
ggcttttgagccctgcagaaaatcagctgtgtc

SEQ ID NO: 603478 - DNA, 33 bp, Homo sapien
ggcttttgagccctgcggaaaatcagctgtgtc

SEQ ID NO: 603479 - DNA, 33 bp, Homo sapien
tgagaaatgtgaaagaagcatggaagaatccca

SEQ ID NO: 603480 - DNA, 33 bp, Homo sapien
tgagaaatgtgaaagaggcatggaagaatccca

SEQ ID NO: 603481 - DNA, 33 bp, Homo sapien
agaagcaggagagagaatacggggaggtgccat

SEQ ID NO: 603482 - DNA, 33 bp, Homo sapien
agaagcaggagagagagtacggggaggtgccat

SEQ ID NO: 603483 - DNA, 33 bp, Homo sapien
ataagcaaagatcaccaagagtgagtatttaca

SEQ ID NO: 603484 - DNA, 33 bp, Homo sapien
ataagcaaagatcaccgagagtgagtatttaca

SEQ ID NO: 603485 - DNA, 33 bp, Homo sapien
gactccgtctcaaaacaaaataagaatattagc

SEQ ID NO: 603486 - DNA, 33 bp, Homo sapien
gactccgtctcaaaacgaaataagaatattagc

SEQ ID NO: 603487 - DNA, 33 bp, Homo sapien
tgtaaacgacagtgcaaggatgacacaaggatc

SEQ ID NO: 603488 - DNA, 33 bp, Homo sapien
tgtaaacgacagtgcagggatgacacaaggatc

SEQ ID NO: 603489 - DNA, 33 bp, Homo sapien
gttgctaatggttaaacattgggagattgcaca

SEQ ID NO: 603490 - DNA, 33 bp, Homo sapien
gttgctaatggttaaatattgggagattgcaca

SEQ ID NO: 603491 - DNA, 33 bp, Homo sapien
cataaccagatttgaacgggcactgtcactcac

SEQ ID NO: 603492 - DNA, 33 bp, Homo sapien
cataaccagatttgaatgggcactgtcactcac

SEQ ID NO: 603493 - DNA, 33 bp, Homo sapien
ttattagctacaatgaaatggattccttaatat

SEQ ID NO: 603494 - DNA, 33 bp, Homo sapien
ttattagctacaatgagatggattccttaatat

SEQ ID NO: 603495 - DNA, 33 bp, Homo sapien
cccttcacttctggaacatgcctcagggtcttt

SEQ ID NO: 603496 - DNA, 33 bp, Homo sapien
cccttcacttctggaatatgcctcagggtcttt

SEQ ID NO: 603497 - DNA, 33 bp, Homo sapien
agtactatgaagaaaacgaccgcagcacggtga

SEQ ID NO: 603498 - DNA, 33 bp, Homo sapien
agtactatgaagaaaatgaccgcagcacggtga

SEQ ID NO: 603499 - DNA, 33 bp, Homo sapien
cctcactgaaaggttccaaggatgtttcaacca

SEQ ID NO: 603500 - DNA, 33 bp, Homo sapien
cctcactgaaaggttctaaggatgtttcaacca

SEQ ID NO: 603501 - DNA, 33 bp, Homo sapien
atatacattcttcccaaggtcagactacagctt

SEQ ID NO: 603502 - DNA, 33 bp, Homo sapien
atatacattcttcccagggtcagactacagctt

SEQ ID NO: 603503 - DNA, 33 bp, Homo sapien
ttccagaatgaaaatcagaagaacaaagatcga

SEQ ID NO: 603504 - DNA, 33 bp, Homo sapien
ttccagaatgaaaatcggaagaacaaagatcga

SEQ ID NO: 603505 - DNA, 33 bp, Homo sapien
acaaatatctctggtgccaaatgatacagggaa

SEQ ID NO: 603506 - DNA, 33 bp, Homo sapien
acaaatatctctggtgtcaaatgatacagggaa

SEQ ID NO: 603507 - DNA, 33 bp, Homo sapien
ttttacagaatatgggacactagttagactggt

SEQ ID NO: 603508 - DNA, 33 bp, Homo sapien
ttttacagaatatggggcactagttagactggt

SEQ ID NO: 603509 - DNA, 33 bp, Homo sapien
tgaaggcaaaaagatacatggaaatctctaagc

SEQ ID NO: 603510 - DNA, 33 bp, Homo sapien
tgaaggcaaaaagatagatggaaatctctaagc

SEQ ID NO: 603511 - DNA, 33 bp, Homo sapien
ggtgcaggctagggaaggcgaatgaactggctg

SEQ ID NO: 603512 - DNA, 33 bp, Homo sapien
ggtgcaggctagggaatgcgaatgaactggctg

SEQ ID NO: 603513 - DNA, 33 bp, Homo sapien
aactgttctatcatcccgaagaaactccattat

SEQ ID NO: 603514 - DNA, 33 bp, Homo sapien
aactgttctatcatcctgaagaaactccattat

SEQ ID NO: 603515 - DNA, 33 bp, Homo sapien
ggttgtacaaacagaaccatatagtctctaacc

SEQ ID NO: 603516 - DNA, 33 bp, Homo sapien
ggttgtacaaacagaatcatatagtctctaacc

SEQ ID NO: 603517 - DNA, 33 bp, Homo sapien
acgataaaatttgctgacaatatcagatgctgg

SEQ ID NO: 603518 - DNA, 33 bp, Homo sapien
acgataaaatttgctggcaatatcagatgctgg

SEQ ID NO: 603519 - DNA, 33 bp, Homo sapien
gtaaggtgacaagtaactcttatttgtcaccct

SEQ ID NO: 603520 - DNA, 33 bp, Homo sapien
gtaaggtgacaagtaagtcttatttgtcaccct

SEQ ID NO: 603521 - DNA, 33 bp, Homo sapien
gtcagaaccgtgagaaagcaggggaggccaggc

SEQ ID NO: 603522 - DNA, 33 bp, Homo sapien
gtcagaaccgtgagaaggcaggggaggccaggc

SEQ ID NO: 603523 - DNA, 33 bp, Homo sapien
gtgccttcaacccggcagatcaaagatgaatgt

SEQ ID NO: 603524 - DNA, 33 bp, Homo sapien
gtgccttcaacccggcggatcaaagatgaatgt

SEQ ID NO: 603525 - DNA, 33 bp, Homo sapien
tggacaacaatgataagggtgcagactgtgagg

SEQ ID NO: 603526 - DNA, 33 bp, Homo sapien
tggacaacaatgataatggtgcagactgtgagg

SEQ ID NO: 603527 - DNA, 33 bp, Homo sapien
ttctacaaccagaaaggactcttcagccaagaa

SEQ ID NO: 603528 - DNA, 33 bp, Homo sapien
ttctacaaccagaaagtactcttcagccaagaa

SEQ ID NO: 603529 - DNA, 33 bp, Homo sapien
tttgcactttgcacaccatcagattactaagaa

SEQ ID NO: 603530 - DNA, 33 bp, Homo sapien
tttgcactttgcacactatcagattactaagaa

SEQ ID NO: 603531 - DNA, 33 bp, Homo sapien
tcctaagcacagacgacgttggttatcttctcc

SEQ ID NO: 603532 - DNA, 33 bp, Homo sapien
tcctaagcacagacgatgttggttatcttctcc

SEQ ID NO: 603533 - DNA, 33 bp, Homo sapien
accccacctatacaccaaccacagatgaatgtg

SEQ ID NO: 603534 - DNA, 33 bp, Homo sapien
accccacctatacacctaccacagatgaatgtg

SEQ ID NO: 603535 - DNA, 33 bp, Homo sapien
tcatgactcaacagtcaagaggtcttcccatga

SEQ ID NO: 603536 - DNA, 33 bp, Homo sapien
tcatgactcaacagtctagaggtcttcccatga

SEQ ID NO: 603537 - DNA, 33 bp, Homo sapien
tgtagacattcattgacgacctgtgctggaacc

SEQ ID NO: 603538 - DNA, 33 bp, Homo sapien
tgtagacattcattgaggacctgtgctggaacc

SEQ ID NO: 603539 - DNA, 33 bp, Homo sapien
ggtgactccagaatttaaaaatatgaccaatta

SEQ ID NO: 603540 - DNA, 33 bp, Homo sapien
ggtgactccagaattttaaaatatgaccaatta

SEQ ID NO: 603541 - DNA, 33 bp, Homo sapien
aatatgaccaattataaagtccaaacattttct

SEQ ID NO: 603542 - DNA, 33 bp, Homo sapien
aatatgaccaattatagagtccaaacattttct

SEQ ID NO: 603543 - DNA, 33 bp, Homo sapien
ggccactctgtcttcaagagacactccatctgt

SEQ ID NO: 603544 - DNA, 33 bp, Homo sapien
ggccactctgtcttcaggagacactccatctgt

SEQ ID NO: 603545 - DNA, 33 bp, Homo sapien
ggaaatggttcaaagccgactcttgtgccagat

SEQ ID NO: 603546 - DNA, 33 bp, Homo sapien
ggaaatggttcaaagctgactcttgtgccagat

SEQ ID NO: 603547 - DNA, 33 bp, Homo sapien
gtcagctacctctacaagctgagacatcatctg

SEQ ID NO: 603548 - DNA, 33 bp, Homo sapien
gtcagctacctctacaggctgagacatcatctg

SEQ ID NO: 603549 - DNA, 33 bp, Homo sapien
aaaagcatttgtaaaccgtgaaaacccttgtga

SEQ ID NO: 603550 - DNA, 33 bp, Homo sapien
aaaagcatttgtaaactgtgaaaacccttgtga

SEQ ID NO: 603551 - DNA, 33 bp, Homo sapien
atgctatggggaccaactgattctttgctaaaa

SEQ ID NO: 603552 - DNA, 33 bp, Homo sapien
atgctatggggaccaattgattctttgctaaaa

SEQ ID NO: 603553 - DNA, 33 bp, Homo sapien
tttaaaactatttttgaagaccaactcactttg

SEQ ID NO: 603554 - DNA, 33 bp, Homo sapien
tttaaaactatttttggagaccaactcactttg

SEQ ID NO: 603555 - DNA, 33 bp, Homo sapien
ttttttaattctctccacaattagagccaggcc

SEQ ID NO: 603556 - DNA, 33 bp, Homo sapien
ttttttaattctctccgcaattagagccaggcc

SEQ ID NO: 603557 - DNA, 33 bp, Homo sapien
acttccacagttgatggcaggaaaaaaaaaact

SEQ ID NO: 603558 - DNA, 33 bp, Homo sapien
acttccacagttgatgtcaggaaaaaaaaaact

SEQ ID NO: 603559 - DNA, 33 bp, Homo sapien
acgtgctctggcaccaagctgtttccaactcag

SEQ ID NO: 603560 - DNA, 33 bp, Homo sapien
acgtgctctggcaccaggctgtttccaactcag

SEQ ID NO: 603561 - DNA, 33 bp, Homo sapien
ggtcagaaccattcccaacagaacaagctgggt

SEQ ID NO: 603562 - DNA, 33 bp, Homo sapien
ggtcagaaccattcccgacagaacaagctgggt

SEQ ID NO: 603563 - DNA, 33 bp, Homo sapien
ctcagtgaggtccatacgaagaggctgaaatga

SEQ ID NO: 603564 - DNA, 33 bp, Homo sapien
ctcagtgaggtccatatgaagaggctgaaatga

SEQ ID NO: 603565 - DNA, 33 bp, Homo sapien
taaggcgcagctcctacaagtgataaatagatc

SEQ ID NO: 603566 - DNA, 33 bp, Homo sapien
taaggcgcagctcctagaagtgataaatagatc

SEQ ID NO: 603567 - DNA, 33 bp, Homo sapien
ctttggtgaaagaaccagattacagccctaaac

SEQ ID NO: 603568 - DNA, 33 bp, Homo sapien
ctttggtgaaagaaccggattacagccctaaac

SEQ ID NO: 603569 - DNA, 33 bp, Homo sapien
agagaccggggcttaaatccaggtatgttttct

SEQ ID NO: 603570 - DNA, 33 bp, Homo sapien
agagaccggggcttaagtccaggtatgttttct

SEQ ID NO: 603571 - DNA, 33 bp, Homo sapien
ttgatttcgttaatcactcaagaccaagaaaac

SEQ ID NO: 603572 - DNA, 33 bp, Homo sapien
ttgatttcgttaatcattcaagaccaagaaaac

SEQ ID NO: 603573 - DNA, 33 bp, Homo sapien
gaccttttccttgccgcacagatgggaataagg

SEQ ID NO: 603574 - DNA, 33 bp, Homo sapien
gaccttttccttgccgtacagatgggaataagg

SEQ ID NO: 603575 - DNA, 33 bp, Homo sapien
aacgagttagctgttacctcctctcagatgtca

SEQ ID NO: 603576 - DNA, 33 bp, Homo sapien
aacgagttagctgttatctcctctcagatgtca

SEQ ID NO: 603577 - DNA, 33 bp, Homo sapien
atccgatgttgtcaccactagacatgggtagtt

SEQ ID NO: 603578 - DNA, 33 bp, Homo sapien
atccgatgttgtcaccgctagacatgggtagtt

SEQ ID NO: 603579 - DNA, 33 bp, Homo sapien
catttcacagtgcaaacaatgaaggcagtgtca

SEQ ID NO: 603580 - DNA, 33 bp, Homo sapien
catttcacagtgcaaataatgaaggcagtgtca

SEQ ID NO: 603581 - DNA, 33 bp, Homo sapien
ttaaagaatttaacacagctcctaagaaaatac

SEQ ID NO: 603582 - DNA, 33 bp, Homo sapien
ttaaagaatttaacacggctcctaagaaaatac

SEQ ID NO: 603583 - DNA, 33 bp, Homo sapien
ctggcctgaactttcaaagacagttaagtacca

SEQ ID NO: 603584 - DNA, 33 bp, Homo sapien
ctggcctgaactttcacagacagttaagtacca

SEQ ID NO: 603585 - DNA, 33 bp, Homo sapien
gcagctgtccgtccacactgctgggaacacagc

SEQ ID NO: 603586 - DNA, 33 bp, Homo sapien
gcagctgtccgtccacgctgctgggaacacagc

SEQ ID NO: 603587 - DNA, 33 bp, Homo sapien
ataactcacttcatcccaatgctctgattaacc

SEQ ID NO: 603588 - DNA, 33 bp, Homo sapien
ataactcacttcatcctaatgctctgattaacc

SEQ ID NO: 603589 - DNA, 33 bp, Homo sapien
gtcattagaaatttaacggaaaattggcatcga

SEQ ID NO: 603590 - DNA, 33 bp, Homo sapien
gtcattagaaatttaatggaaaattggcatcga

SEQ ID NO: 603591 - DNA, 33 bp, Homo sapien
gtggtgagaaggccagaacaagattgtgaactc

SEQ ID NO: 603592 - DNA, 33 bp, Homo sapien
gtggtgagaaggccaggacaagattgtgaactc

SEQ ID NO: 603593 - DNA, 33 bp, Homo sapien
gtcatgtgatcgtgtaagccagagtgcctcaat

SEQ ID NO: 603594 - DNA, 33 bp, Homo sapien
gtcatgtgatcgtgtatgccagagtgcctcaat

SEQ ID NO: 603595 - DNA, 33 bp, Homo sapien
acaaaagctgctaggaaacgccttgaggagctc

SEQ ID NO: 603596 - DNA, 33 bp, Homo sapien
acaaaagctgctaggagacgccttgaggagctc

SEQ ID NO: 603597 - DNA, 33 bp, Homo sapien
gcacttccgagacctacgatgagatgaaaaaaa

SEQ ID NO: 603598 - DNA, 33 bp, Homo sapien
gcacttccgagacctatgatgagatgaaaaaaa

SEQ ID NO: 603599 - DNA, 33 bp, Homo sapien
aggaccaagcgtgccactgagtaattcattcat

SEQ ID NO: 603600 - DNA, 33 bp, Homo sapien
aggaccaagcgtgccagtgagtaattcattcat

SEQ ID NO: 603601 - DNA, 33 bp, Homo sapien
aggaacatttaaaagacgataaggcaatgaaca

SEQ ID NO: 603602 - DNA, 33 bp, Homo sapien
aggaacatttaaaagaggataaggcaatgaaca

SEQ ID NO: 603603 - DNA, 33 bp, Homo sapien
tccttcctgttagtcaaagctgcttgtgaggag

SEQ ID NO: 603604 - DNA, 33 bp, Homo sapien
tccttcctgttagtcacagctgcttgtgaggag

SEQ ID NO: 603605 - DNA, 33 bp, Homo sapien
tgatgagtgttgggtgaaggatgggaactttct

SEQ ID NO: 603606 - DNA, 33 bp, Homo sapien
tgatgagtgttgggtggaggatgggaactttct

SEQ ID NO: 603607 - DNA, 33 bp, Homo sapien
gcggtttatttctagaagtgtgctcttaaccac

SEQ ID NO: 603608 - DNA, 33 bp, Homo sapien
gcggtttatttctagatgtgtgctcttaaccac

SEQ ID NO: 603609 - DNA, 33 bp, Homo sapien
gcccggctggttgttcacagtcttaactaaaga

SEQ ID NO: 603610 - DNA, 33 bp, Homo sapien
gcccggctggttgttcgcagtcttaactaaaga

SEQ ID NO: 603611 - DNA, 33 bp, Homo sapien
gggcaaatgccacaaagaaaatgggagaggtac

SEQ ID NO: 603612 - DNA, 33 bp, Homo sapien
gggcaaatgccacaaataaaatgggagaggtac

SEQ ID NO: 603613 - DNA, 33 bp, Homo sapien
gagtactagagtttgcacccttgttaggaactc

SEQ ID NO: 603614 - DNA, 33 bp, Homo sapien
gagtactagagtttgctcccttgttaggaactc

SEQ ID NO: 603615 - DNA, 33 bp, Homo sapien
tttgtagaagccttcacgctcttatttgtcagt

SEQ ID NO: 603616 - DNA, 33 bp, Homo sapien
tttgtagaagccttcatgctcttatttgtcagt

SEQ ID NO: 603617 - DNA, 33 bp, Homo sapien
tcaacagtattttccacgatgaccactaaagtt

SEQ ID NO: 603618 - DNA, 33 bp, Homo sapien
tcaacagtattttccatgatgaccactaaagtt

SEQ ID NO: 603619 - DNA, 33 bp, Homo sapien
tttaaagggcaaagcacagattttagattgtga

SEQ ID NO: 603620 - DNA, 33 bp, Homo sapien
tttaaagggcaaagcagagattttagattgtga

SEQ ID NO: 603621 - DNA, 33 bp, Homo sapien
agaaaacatggacccactcaatctaaacagtta

SEQ ID NO: 603622 - DNA, 33 bp, Homo sapien
agaaaacatggacccattcaatctaaacagtta

SEQ ID NO: 603623 - DNA, 33 bp, Homo sapien
ctgaagggcaaatataacctcaaacacatttct

SEQ ID NO: 603624 - DNA, 33 bp, Homo sapien
ctgaagggcaaatataccctcaaacacatttct

SEQ ID NO: 603625 - DNA, 33 bp, Homo sapien
atctcatttgctttgacaaccacttcctgtttt

SEQ ID NO: 603626 - DNA, 33 bp, Homo sapien
atctcatttgctttgataaccacttcctgtttt

SEQ ID NO: 603627 - DNA, 33 bp, Homo sapien
gattagagctgtgagaaaaaaccaaagagaagg

SEQ ID NO: 603628 - DNA, 33 bp, Homo sapien
gattagagctgtgagacaaaaccaaagagaagg

SEQ ID NO: 603629 - DNA, 33 bp, Homo sapien
gcaaagtgtgagcaccaattctccaagaggcca

SEQ ID NO: 603630 - DNA, 33 bp, Homo sapien
gcaaagtgtgagcaccgattctccaagaggcca

SEQ ID NO: 603631 - DNA, 33 bp, Homo sapien
tgaaacctttgtttcaaatcagttggttgtatg

SEQ ID NO: 603632 - DNA, 33 bp, Homo sapien
tgaaacctttgtttcacatcagttggttgtatg

SEQ ID NO: 603633 - DNA, 33 bp, Homo sapien
catgtctcagtattcaagtctaagccagtgtgt

SEQ ID NO: 603634 - DNA, 33 bp, Homo sapien
catgtctcagtattcacgtctaagccagtgtgt

SEQ ID NO: 603635 - DNA, 33 bp, Homo sapien
attctccttgtgaagtcaaggagtacatactaa

SEQ ID NO: 603636 - DNA, 33 bp, Homo sapien
attctccttgtgaagttaaggagtacatactaa

SEQ ID NO: 603637 - DNA, 33 bp, Homo sapien
tcctcatgtttctagacggcttttaaaagtcac

SEQ ID NO: 603638 - DNA, 33 bp, Homo sapien
tcctcatgtttctagatggcttttaaaagtcac

SEQ ID NO: 603639 - DNA, 33 bp, Homo sapien
ctgaattgaacataagcccaatagaaggagcaa

SEQ ID NO: 603640 - DNA, 33 bp, Homo sapien
ctgaattgaacataagtccaatagaaggagcaa

SEQ ID NO: 603641 - DNA, 33 bp, Homo sapien
gtgcttgctacaagtcaaagttgcctcactcca

SEQ ID NO: 603642 - DNA, 33 bp, Homo sapien
gtgcttgctacaagtctaagttgcctcactcca

SEQ ID NO: 603643 - DNA, 33 bp, Homo sapien
cccttcttctgctgggaacgagtttcaggctct

SEQ ID NO: 603644 - DNA, 33 bp, Homo sapien
cccttcttctgctggggacgagtttcaggctct

SEQ ID NO: 603645 - DNA, 33 bp, Homo sapien
cagccttcagagttgacagcactgaacagagat

SEQ ID NO: 603646 - DNA, 33 bp, Homo sapien
cagccttcagagttgagagcactgaacagagat

SEQ ID NO: 603647 - DNA, 33 bp, Homo sapien
gagataaagttcatgcagagttttgtgggattg

SEQ ID NO: 603648 - DNA, 33 bp, Homo sapien
gagataaagttcatgcggagttttgtgggattg

SEQ ID NO: 603649 - DNA, 33 bp, Homo sapien
tcccctatgcttcccaatacctagtataggaca

SEQ ID NO: 603650 - DNA, 33 bp, Homo sapien
tcccctatgcttcccagtacctagtataggaca

SEQ ID NO: 603651 - DNA, 33 bp, Homo sapien
atagcatttagctacaacagcctgagtgaacaa

SEQ ID NO: 603652 - DNA, 33 bp, Homo sapien
atagcatttagctacagcagcctgagtgaacaa

SEQ ID NO: 603653 - DNA, 33 bp, Homo sapien
cttgaatacaggcagccgaataatacatggttg

SEQ ID NO: 603654 - DNA, 33 bp, Homo sapien
cttgaatacaggcagctgaataatacatggttg

SEQ ID NO: 603655 - DNA, 33 bp, Homo sapien
tacacaaatatatgaggcacccttctcactact

SEQ ID NO: 603656 - DNA, 33 bp, Homo sapien
tacacaaatatatgagtcacccttctcactact

SEQ ID NO: 603657 - DNA, 33 bp, Homo sapien
tgacatcctaattcctaaaagtatgtaccatct

SEQ ID NO: 603658 - DNA, 33 bp, Homo sapien
tgacatcctaattcctgaaagtatgtaccatct

SEQ ID NO: 603659 - DNA, 33 bp, Homo sapien
acttttggaggctaaccaaaggagccactagaa

SEQ ID NO: 603660 - DNA, 33 bp, Homo sapien
acttttggaggctaacgaaaggagccactagaa

SEQ ID NO: 603661 - DNA, 33 bp, Homo sapien
tctagtgggagagaacagacatcaaagacaata

SEQ ID NO: 603662 - DNA, 33 bp, Homo sapien
tctagtgggagagaaccgacatcaaagacaata

SEQ ID NO: 603663 - DNA, 33 bp, Homo sapien
gtgagacgcaaactcgaactaaaatccaggttt

SEQ ID NO: 603664 - DNA, 33 bp, Homo sapien
gtgagacgcaaactcggactaaaatccaggttt

SEQ ID NO: 603665 - DNA, 33 bp, Homo sapien
ggtgaagggagagcaaacatctcacgtggcagg

SEQ ID NO: 603666 - DNA, 33 bp, Homo sapien
ggtgaagggagagcaagcatctcacgtggcagg

SEQ ID NO: 603667 - DNA, 33 bp, Homo sapien
gaggttgacatagatggaatgagtgaagtgcag

SEQ ID NO: 603668 - DNA, 33 bp, Homo sapien
gaggttgacatagatgtaatgagtgaagtgcag

SEQ ID NO: 603669 - DNA, 33 bp, Homo sapien
agttattgtgacggttaaaagtgtttccacctg

SEQ ID NO: 603670 - DNA, 33 bp, Homo sapien
agttattgtgacggttgaaagtgtttccacctg

SEQ ID NO: 603671 - DNA, 33 bp, Homo sapien
gataagaagcaagtacagaaataaagaaacagg

SEQ ID NO: 603672 - DNA, 33 bp, Homo sapien
gataagaagcaagtacggaaataaagaaacagg

SEQ ID NO: 603673 - DNA, 33 bp, Homo sapien
ccaacactgggcataacgcttgtgtgcccaatg

SEQ ID NO: 603674 - DNA, 33 bp, Homo sapien
ccaacactgggcataatgcttgtgtgcccaatg

SEQ ID NO: 603675 - DNA, 33 bp, Homo sapien
gaactgatatccttcaatagagtggagaagact

SEQ ID NO: 603676 - DNA, 33 bp, Homo sapien
gaactgatatccttcagtagagtggagaagact

SEQ ID NO: 603677 - DNA, 33 bp, Homo sapien
aagccaagtgaattaacagaagagggtcaagtg

SEQ ID NO: 603678 - DNA, 33 bp, Homo sapien
aagccaagtgaattaatagaagagggtcaagtg

SEQ ID NO: 603679 - DNA, 33 bp, Homo sapien
catgaaagtcaagtgcaagacacacaatagctc

SEQ ID NO: 603680 - DNA, 33 bp, Homo sapien
catgaaagtcaagtgcgagacacacaatagctc

SEQ ID NO: 603681 - DNA, 33 bp, Homo sapien
cgtagcgatcagggtacgtggcttacaatgtag

SEQ ID NO: 603682 - DNA, 33 bp, Homo sapien
cgtagcgatcagggtatgtggcttacaatgtag

SEQ ID NO: 603683 - DNA, 33 bp, Homo sapien
gttctaggtgaagggacggagctatgaataaga

SEQ ID NO: 603684 - DNA, 33 bp, Homo sapien
gttctaggtgaagggatggagctatgaataaga

SEQ ID NO: 603685 - DNA, 33 bp, Homo sapien
ctttctgacctcaagaaccccttatggtcttcc

SEQ ID NO: 603686 - DNA, 33 bp, Homo sapien
ctttctgacctcaagatccccttatggtcttcc

SEQ ID NO: 603687 - DNA, 33 bp, Homo sapien
ggatgaaccatctaaaaatgaaacagctacaat

SEQ ID NO: 603688 - DNA, 33 bp, Homo sapien
ggatgaaccatctaaatatgaaacagctacaat

SEQ ID NO: 603689 - DNA, 33 bp, Homo sapien
aagaggtcagtaccatcaaatgaagcagcatga

SEQ ID NO: 603690 - DNA, 33 bp, Homo sapien
aagaggtcagtaccattaaatgaagcagcatga

SEQ ID NO: 603691 - DNA, 33 bp, Homo sapien
aattaacctttctcaaatacctattatatgcta

SEQ ID NO: 603692 - DNA, 33 bp, Homo sapien
aattaacctttctcaagtacctattatatgcta

SEQ ID NO: 603693 - DNA, 33 bp, Homo sapien
acaatattaagagaaacactgcctcacttcaat

SEQ ID NO: 603694 - DNA, 33 bp, Homo sapien
acaatattaagagaaagactgcctcacttcaat

SEQ ID NO: 603695 - DNA, 33 bp, Homo sapien
caaaagagatagttgcaaggggaaaagagagag

SEQ ID NO: 603696 - DNA, 33 bp, Homo sapien
caaaagagatagttgcgaggggaaaagagagag

SEQ ID NO: 603697 - DNA, 33 bp, Homo sapien
aggttcatgtatgctacagcttgtatcactcct

SEQ ID NO: 603698 - DNA, 33 bp, Homo sapien
aggttcatgtatgctatagcttgtatcactcct

SEQ ID NO: 603699 - DNA, 33 bp, Homo sapien
ccccagtcaaattctacgctttacctactttaa

SEQ ID NO: 603700 - DNA, 33 bp, Homo sapien
ccccagtcaaattctatgctttacctactttaa

SEQ ID NO: 603701 - DNA, 33 bp, Homo sapien
ctatttaaagctgtggaactagatgaaatcacc

SEQ ID NO: 603702 - DNA, 33 bp, Homo sapien
ctatttaaagctgtgggactagatgaaatcacc

SEQ ID NO: 603703 - DNA, 33 bp, Homo sapien
gtggaagttatacacacggcagtaagtgataca

SEQ ID NO: 603704 - DNA, 33 bp, Homo sapien
gtggaagttatacacatggcagtaagtgataca

SEQ ID NO: 603705 - DNA, 33 bp, Homo sapien
tctcaaaaatttaggacgttgagggtcgcagct

SEQ ID NO: 603706 - DNA, 33 bp, Homo sapien
tctcaaaaatttaggaggttgagggtcgcagct

SEQ ID NO: 603707 - DNA, 33 bp, Homo sapien
tgataagaaaaagagactaggaatcacatggcc

SEQ ID NO: 603708 - DNA, 33 bp, Homo sapien
tgataagaaaaagagagtaggaatcacatggcc

SEQ ID NO: 603709 - DNA, 33 bp, Homo sapien
caggctgagggctatacataacattactctctt

SEQ ID NO: 603710 - DNA, 33 bp, Homo sapien
caggctgagggctatatataacattactctctt

SEQ ID NO: 603711 - DNA, 33 bp, Homo sapien
ctaccatttccattgcaccatataagggcttgc

SEQ ID NO: 603712 - DNA, 33 bp, Homo sapien
ctaccatttccattgctccatataagggcttgc

SEQ ID NO: 603713 - DNA, 33 bp, Homo sapien
tttttttttttttgaccgagcaagttgaaggat

SEQ ID NO: 603714 - DNA, 33 bp, Homo sapien
tttttttttttttgactgagcaagttgaaggat

SEQ ID NO: 603715 - DNA, 33 bp, Homo sapien
tccttctcctgtacaagggatcccatcttgtct

SEQ ID NO: 603716 - DNA, 33 bp, Homo sapien
tccttctcctgtacaatggatcccatcttgtct

SEQ ID NO: 603717 - DNA, 33 bp, Homo sapien
tttcatgtatgtggtgaaaggagtatgttggag

SEQ ID NO: 603718 - DNA, 33 bp, Homo sapien
tttcatgtatgtggtggaaggagtatgttggag

SEQ ID NO: 603719 - DNA, 33 bp, Homo sapien
taagtggagaattaaactactgaaatagaatag

SEQ ID NO: 603720 - DNA, 33 bp, Homo sapien
taagtggagaattaaattactgaaatagaatag

SEQ ID NO: 603721 - DNA, 33 bp, Homo sapien
tgtggaattgagagcccaaatgataagcgatga

SEQ ID NO: 603722 - DNA, 33 bp, Homo sapien
tgtggaattgagagcctaaatgataagcgatga

SEQ ID NO: 603723 - DNA, 33 bp, Homo sapien
atgtcgctatgtacacagcctttctaatccttc

SEQ ID NO: 603724 - DNA, 33 bp, Homo sapien
atgtcgctatgtacactgcctttctaatccttc

SEQ ID NO: 603725 - DNA, 33 bp, Homo sapien
ggggcagtgagtcttaagtctgcatagggcttg

SEQ ID NO: 603726 - DNA, 33 bp, Homo sapien
ggggcagtgagtcttacgtctgcatagggcttg

SEQ ID NO: 603727 - DNA, 33 bp, Homo sapien
ctgtcacttagtaattcaaccacaatttatgaa

SEQ ID NO: 603728 - DNA, 33 bp, Homo sapien
ctgtcacttagtaatttaaccacaatttatgaa

SEQ ID NO: 603729 - DNA, 33 bp, Homo sapien
gaaaatggctactttacagttcctgcatttcca

SEQ ID NO: 603730 - DNA, 33 bp, Homo sapien
gaaaatggctactttatagttcctgcatttcca

SEQ ID NO: 603731 - DNA, 33 bp, Homo sapien
tgccaaagctaactcaactaaattactactgtc

SEQ ID NO: 603732 - DNA, 33 bp, Homo sapien
tgccaaagctaactcacctaaattactactgtc

SEQ ID NO: 603733 - DNA, 33 bp, Homo sapien
aacagaccttcatggaacatttaccattgtata

SEQ ID NO: 603734 - DNA, 33 bp, Homo sapien
aacagaccttcatggaccatttaccattgtata

SEQ ID NO: 603735 - DNA, 33 bp, Homo sapien
tcacactgtccctaggaaaataagcactcttgc

SEQ ID NO: 603736 - DNA, 33 bp, Homo sapien
tcacactgtccctagggaaataagcactcttgc

SEQ ID NO: 603737 - DNA, 33 bp, Homo sapien
agcaaaagaacaaatacgtatatggctttctat

SEQ ID NO: 603738 - DNA, 33 bp, Homo sapien
agcaaaagaacaaatatgtatatggctttctat

SEQ ID NO: 603739 - DNA, 33 bp, Homo sapien
tatggtaaataaattcaaacagaaccagattca

SEQ ID NO: 603740 - DNA, 33 bp, Homo sapien
tatggtaaataaattcgaacagaaccagattca

SEQ ID NO: 603741 - DNA, 33 bp, Homo sapien
agactaatgtaggtgagaactaggatcccttcc

SEQ ID NO: 603742 - DNA, 33 bp, Homo sapien
agactaatgtaggtgataactaggatcccttcc

SEQ ID NO: 603743 - DNA, 33 bp, Homo sapien
tagtttgatgtagtacaacttgttaacttttgc

SEQ ID NO: 603744 - DNA, 33 bp, Homo sapien
tagtttgatgtagtaccacttgttaacttttgc

SEQ ID NO: 603745 - DNA, 33 bp, Homo sapien
tgggcttttcacatacagccttcaaattggtga

SEQ ID NO: 603746 - DNA, 33 bp, Homo sapien
tgggcttttcacatacggccttcaaattggtga

SEQ ID NO: 603747 - DNA, 33 bp, Homo sapien
atgaattaacataggtaaagtgtttagaatagt

SEQ ID NO: 603748 - DNA, 33 bp, Homo sapien
atgaattaacataggttaagtgtttagaatagt

SEQ ID NO: 603749 - DNA, 33 bp, Homo sapien
ctcctcgttgccctggcatttctccaaatgttg

SEQ ID NO: 603750 - DNA, 33 bp, Homo sapien
ctcctcgttgccctggtatttctccaaatgttg

SEQ ID NO: 603751 - DNA, 33 bp, Homo sapien
tccatgaaattaggaacgatgttagccattata

SEQ ID NO: 603752 - DNA, 33 bp, Homo sapien
tccatgaaattaggaatgatgttagccattata

SEQ ID NO: 603753 - DNA, 33 bp, Homo sapien
taataatatttagtgccaagaaaccaaaatttt

SEQ ID NO: 603754 - DNA, 33 bp, Homo sapien
taataatatttagtgcgaagaaaccaaaatttt

SEQ ID NO: 603755 - DNA, 33 bp, Homo sapien
tgttcatagtttgtaaatctcatttattcattt

SEQ ID NO: 603756 - DNA, 33 bp, Homo sapien
tgttcatagtttgtaattctcatttattcattt

SEQ ID NO: 603757 - DNA, 33 bp, Homo sapien
taaatttagccctaggcatcacacttggctcat

SEQ ID NO: 603758 - DNA, 33 bp, Homo sapien
taaatttagccctaggtatcacacttggctcat

SEQ ID NO: 603759 - DNA, 33 bp, Homo sapien
gacatgtggcccttgacagatgagcattcaatg

SEQ ID NO: 603760 - DNA, 33 bp, Homo sapien
gacatgtggcccttgatagatgagcattcaatg

SEQ ID NO: 603761 - DNA, 33 bp, Homo sapien
gctcttctaccaactggataccttgttgtttgg

SEQ ID NO: 603762 - DNA, 33 bp, Homo sapien
gctcttctaccaactgtataccttgttgtttgg

SEQ ID NO: 603763 - DNA, 33 bp, Homo sapien
ttgccaagccataatacaggatcctgaaaagac

SEQ ID NO: 603764 - DNA, 33 bp, Homo sapien
ttgccaagccataatataggatcctgaaaagac

SEQ ID NO: 603765 - DNA, 33 bp, Homo sapien
gaactatatgtgcaaaatgatcggaagcaggaa

SEQ ID NO: 603766 - DNA, 33 bp, Homo sapien
gaactatatgtgcaaagtgatcggaagcaggaa

SEQ ID NO: 603767 - DNA, 33 bp, Homo sapien
ctcctggttaagagctcagagtttgtgaagagg

SEQ ID NO: 603768 - DNA, 33 bp, Homo sapien
ctcctggttaagagctgagagtttgtgaagagg

SEQ ID NO: 603769 - DNA, 33 bp, Homo sapien
ccttgatttctctgcaacagtgctttctgaaat

SEQ ID NO: 603770 - DNA, 33 bp, Homo sapien
ccttgatttctctgcaccagtgctttctgaaat

SEQ ID NO: 603771 - DNA, 33 bp, Homo sapien
ttcaagacataacacaccacatactcaaacaca

SEQ ID NO: 603772 - DNA, 33 bp, Homo sapien
ttcaagacataacacatcacatactcaaacaca

SEQ ID NO: 603773 - DNA, 33 bp, Homo sapien
ggttgcaagaggaaacaatgaaatcaatatggg

SEQ ID NO: 603774 - DNA, 33 bp, Homo sapien
ggttgcaagaggaaacgatgaaatcaatatggg

SEQ ID NO: 603775 - DNA, 33 bp, Homo sapien
cctactgggatccatacgtgacttgagattgac

SEQ ID NO: 603776 - DNA, 33 bp, Homo sapien
cctactgggatccatatgtgacttgagattgac

SEQ ID NO: 603777 - DNA, 33 bp, Homo sapien
ggtagtttgctggctaagagcaataaaggtgac

SEQ ID NO: 603778 - DNA, 33 bp, Homo sapien
ggtagtttgctggctaggagcaataaaggtgac

SEQ ID NO: 603779 - DNA, 33 bp, Homo sapien
gatgtgatgtagatcaggaagtcctagataatc

SEQ ID NO: 603780 - DNA, 33 bp, Homo sapien
gatgtgatgtagatcatgaagtcctagataatc

SEQ ID NO: 603781 - DNA, 33 bp, Homo sapien
tactctggagataggaaatttttcttgatcaag

SEQ ID NO: 603782 - DNA, 33 bp, Homo sapien
tactctggagataggagatttttcttgatcaag

SEQ ID NO: 603783 - DNA, 33 bp, Homo sapien
ccgtttactgtgttgacagattttgtttttggt

SEQ ID NO: 603784 - DNA, 33 bp, Homo sapien
ccgtttactgtgttgatagattttgtttttggt

SEQ ID NO: 603785 - DNA, 33 bp, Homo sapien
agcttcattaactgacaggacagcagaaaaggc

SEQ ID NO: 603786 - DNA, 33 bp, Homo sapien
agcttcattaactgacgggacagcagaaaaggc

SEQ ID NO: 603787 - DNA, 33 bp, Homo sapien
tccatttcatgaggcaccaagagccaaattcat

SEQ ID NO: 603788 - DNA, 33 bp, Homo sapien
tccatttcatgaggcagcaagagccaaattcat

SEQ ID NO: 603789 - DNA, 33 bp, Homo sapien
aagaagaatctgtggccacctttgtaatctacc

SEQ ID NO: 603790 - DNA, 33 bp, Homo sapien
aagaagaatctgtggctacctttgtaatctacc

SEQ ID NO: 603791 - DNA, 33 bp, Homo sapien
atatcaaggtctttaaaatactcgtgccccttt

SEQ ID NO: 603792 - DNA, 33 bp, Homo sapien
atatcaaggtctttaagatactcgtgccccttt

SEQ ID NO: 603793 - DNA, 33 bp, Homo sapien
agatgaggaaatttcaacacgaagaagttaaat

SEQ ID NO: 603794 - DNA, 33 bp, Homo sapien
agatgaggaaatttcagcacgaagaagttaaat

SEQ ID NO: 603795 - DNA, 33 bp, Homo sapien
agtatctataatcagacgtgtacctacgtaact

SEQ ID NO: 603796 - DNA, 33 bp, Homo sapien
agtatctataatcagatgtgtacctacgtaact

SEQ ID NO: 603797 - DNA, 33 bp, Homo sapien
gctatacgtaaatatgaaacctgaatatatgcc

SEQ ID NO: 603798 - DNA, 33 bp, Homo sapien
gctatacgtaaatatggaacctgaatatatgcc

SEQ ID NO: 603799 - DNA, 33 bp, Homo sapien
caggtagcatgtacagcatggatctacgggaca

SEQ ID NO: 603800 - DNA, 33 bp, Homo sapien
caggtagcatgtacagtatggatctacgggaca

SEQ ID NO: 603801 - DNA, 33 bp, Homo sapien
ataaaccttcaacgaacagttcgcatcatcatc

SEQ ID NO: 603802 - DNA, 33 bp, Homo sapien
ataaaccttcaacgaatagttcgcatcatcatc

SEQ ID NO: 603803 - DNA, 33 bp, Homo sapien
tgctcaaagcaggaagaaaaagggaccacagta

SEQ ID NO: 603804 - DNA, 33 bp, Homo sapien
tgctcaaagcaggaagcaaaagggaccacagta

SEQ ID NO: 603805 - DNA, 33 bp, Homo sapien
agcttttcagaagtcactacaggagctagctta

SEQ ID NO: 603806 - DNA, 33 bp, Homo sapien
agcttttcagaagtcattacaggagctagctta

SEQ ID NO: 603807 - DNA, 33 bp, Homo sapien
agtttttccacagtacaattttctcattggaaa

SEQ ID NO: 603808 - DNA, 33 bp, Homo sapien
agtttttccacagtacgattttctcattggaaa

SEQ ID NO: 603809 - DNA, 33 bp, Homo sapien
ggaccagcaacacctacggccttcctctccatt

SEQ ID NO: 603810 - DNA, 33 bp, Homo sapien
ggaccagcaacacctatggccttcctctccatt

SEQ ID NO: 603811 - DNA, 33 bp, Homo sapien
ccacttttggcttagaccaaccatgactcattc

SEQ ID NO: 603812 - DNA, 33 bp, Homo sapien
ccacttttggcttagatcaaccatgactcattc

SEQ ID NO: 603813 - DNA, 33 bp, Homo sapien
ctcatcgctatcttcccattctgcttaactttt

SEQ ID NO: 603814 - DNA, 33 bp, Homo sapien
ctcatcgctatcttcctattctgcttaactttt

SEQ ID NO: 603815 - DNA, 33 bp, Homo sapien
aaatgactctgattgcgctttggagaatgtaat

SEQ ID NO: 603816 - DNA, 33 bp, Homo sapien
aaatgactctgattgctctttggagaatgtaat

SEQ ID NO: 603817 - DNA, 33 bp, Homo sapien
attatatgtacaagggcagccctaagataatga

SEQ ID NO: 603818 - DNA, 33 bp, Homo sapien
attatatgtacaagggtagccctaagataatga

SEQ ID NO: 603819 - DNA, 33 bp, Homo sapien
gcctcatcctaggctacctgatccatcgaatag

SEQ ID NO: 603820 - DNA, 33 bp, Homo sapien
gcctcatcctaggctatctgatccatcgaatag

SEQ ID NO: 603821 - DNA, 33 bp, Homo sapien
tggagctgtgaggcaaatagcacatcttgcatg

SEQ ID NO: 603822 - DNA, 33 bp, Homo sapien
tggagctgtgaggcaagtagcacatcttgcatg

SEQ ID NO: 603823 - DNA, 33 bp, Homo sapien
gcgatcactatccacaatgccttgagttcagcc

SEQ ID NO: 603824 - DNA, 33 bp, Homo sapien
gcgatcactatccacactgccttgagttcagcc

SEQ ID NO: 603825 - DNA, 33 bp, Homo sapien
cagccactggtgtgcagcaaaaaggaaagttta

SEQ ID NO: 603826 - DNA, 33 bp, Homo sapien
cagccactggtgtgcatcaaaaaggaaagttta

SEQ ID NO: 603827 - DNA, 33 bp, Homo sapien
ctacagctcattccacagcaaagcttttcctaa

SEQ ID NO: 603828 - DNA, 33 bp, Homo sapien
ctacagctcattccacggcaaagcttttcctaa

SEQ ID NO: 603829 - DNA, 33 bp, Homo sapien
cctgtggcatcactatcaaagtccattgttatc

SEQ ID NO: 603830 - DNA, 33 bp, Homo sapien
cctgtggcatcactatgaaagtccattgttatc

SEQ ID NO: 603831 - DNA, 33 bp, Homo sapien
gagaaggatggcttcccagtacatactgctgct

SEQ ID NO: 603832 - DNA, 33 bp, Homo sapien
gagaaggatggcttcctagtacatactgctgct

SEQ ID NO: 603833 - DNA, 33 bp, Homo sapien
aaaggcgcacgggaagaccctaatgtgcccttc

SEQ ID NO: 603834 - DNA, 33 bp, Homo sapien
aaaggcgcacgggaaggccctaatgtgcccttc

SEQ ID NO: 603835 - DNA, 33 bp, Homo sapien
aaaacacggaaataacaattctaggtaaatttt

SEQ ID NO: 603836 - DNA, 33 bp, Homo sapien
aaaacacggaaataacgattctaggtaaatttt

SEQ ID NO: 603837 - DNA, 33 bp, Homo sapien
taagtgaaacaacagacggaaaggtagctgaca

SEQ ID NO: 603838 - DNA, 33 bp, Homo sapien
taagtgaaacaacagatggaaaggtagctgaca

SEQ ID NO: 603839 - DNA, 33 bp, Homo sapien
cctgctcacttcagaactgctagagaagaagtt

SEQ ID NO: 603840 - DNA, 33 bp, Homo sapien
cctgctcacttcagaattgctagagaagaagtt

SEQ ID NO: 603841 - DNA, 33 bp, Homo sapien
cacagggaggtggacaagtaccagcttagaact

SEQ ID NO: 603842 - DNA, 33 bp, Homo sapien
cacagggaggtggacaggtaccagcttagaact

SEQ ID NO: 603843 - DNA, 33 bp, Homo sapien
gtctccattctagttaccacgtttagcccatca

SEQ ID NO: 603844 - DNA, 33 bp, Homo sapien
gtctccattctagttatcacgtttagcccatca

SEQ ID NO: 603845 - DNA, 33 bp, Homo sapien
agccagtttttatctactaaacaagcatggtgg

SEQ ID NO: 603846 - DNA, 33 bp, Homo sapien
agccagtttttatctattaaacaagcatggtgg

SEQ ID NO: 603847 - DNA, 33 bp, Homo sapien
cttattaagaaatatgacataggtacaaagaag

SEQ ID NO: 603848 - DNA, 33 bp, Homo sapien
cttattaagaaatatgtcataggtacaaagaag

SEQ ID NO: 603849 - DNA, 33 bp, Homo sapien
aaactcaagaaagtgccataggaggtaggtcca

SEQ ID NO: 603850 - DNA, 33 bp, Homo sapien
aaactcaagaaagtgctataggaggtaggtcca

SEQ ID NO: 603851 - DNA, 33 bp, Homo sapien
ttgagtgctctagttaaagttttgaatggtctt

SEQ ID NO: 603852 - DNA, 33 bp, Homo sapien
ttgagtgctctagttacagttttgaatggtctt

SEQ ID NO: 603853 - DNA, 33 bp, Homo sapien
aatcatccaattctccaaagtcaaaatgaaaga

SEQ ID NO: 603854 - DNA, 33 bp, Homo sapien
aatcatccaattctcccaagtcaaaatgaaaga

SEQ ID NO: 603855 - DNA, 33 bp, Homo sapien
aaactcccctgttgcccccagaaaatctggctg

SEQ ID NO: 603856 - DNA, 33 bp, Homo sapien
aaactcccctgttgcctccagaaaatctggctg

SEQ ID NO: 603857 - DNA, 33 bp, Homo sapien
agcttgtgacttgaagcatagagaacctcttgt

SEQ ID NO: 603858 - DNA, 33 bp, Homo sapien
agcttgtgacttgaagtatagagaacctcttgt

SEQ ID NO: 603859 - DNA, 33 bp, Homo sapien
tcatgatcacctctgaatacagcaaagacaggg

SEQ ID NO: 603860 - DNA, 33 bp, Homo sapien
tcatgatcacctctgagtacagcaaagacaggg

SEQ ID NO: 603861 - DNA, 33 bp, Homo sapien
gagagcagagttctcacggatgggattagtgtc

SEQ ID NO: 603862 - DNA, 33 bp, Homo sapien
gagagcagagttctcatggatgggattagtgtc

SEQ ID NO: 603863 - DNA, 33 bp, Homo sapien
tgtaatgactagcccaaaaacaaacagtcgtaa

SEQ ID NO: 603864 - DNA, 33 bp, Homo sapien
tgtaatgactagcccagaaacaaacagtcgtaa

SEQ ID NO: 603865 - DNA, 33 bp, Homo sapien
ggccagagtacccccaatcttccacgaatgaag

SEQ ID NO: 603866 - DNA, 33 bp, Homo sapien
ggccagagtacccccagtcttccacgaatgaag

SEQ ID NO: 603867 - DNA, 33 bp, Homo sapien
atacaaagcaagaaatgagtgcaaaactccaag

SEQ ID NO: 603868 - DNA, 33 bp, Homo sapien
atacaaagcaagaaattagtgcaaaactccaag

SEQ ID NO: 603869 - DNA, 33 bp, Homo sapien
tccctttgtgaaacaaaaatgagagagaaaaat

SEQ ID NO: 603870 - DNA, 33 bp, Homo sapien
tccctttgtgaaacaagaatgagagagaaaaat

SEQ ID NO: 603871 - DNA, 33 bp, Homo sapien
aactctttcttacctcactgggataaagcttaa

SEQ ID NO: 603872 - DNA, 33 bp, Homo sapien
aactctttcttacctcgctgggataaagcttaa

SEQ ID NO: 603873 - DNA, 33 bp, Homo sapien
ggataaagcttaactaagaaggaaacttcactc

SEQ ID NO: 603874 - DNA, 33 bp, Homo sapien
ggataaagcttaactaggaaggaaacttcactc

SEQ ID NO: 603875 - DNA, 33 bp, Homo sapien
aagtctatccatccagaaagaagaggaaagaag

SEQ ID NO: 603876 - DNA, 33 bp, Homo sapien
aagtctatccatccagcaagaagaggaaagaag

SEQ ID NO: 603877 - DNA, 33 bp, Homo sapien
caactgccacttcccaatggctcttttcagtct

SEQ ID NO: 603878 - DNA, 33 bp, Homo sapien
caactgccacttcccattggctcttttcagtct

SEQ ID NO: 603879 - DNA, 33 bp, Homo sapien
gaatgggccaggaaagcaaagacacagaagaga

SEQ ID NO: 603880 - DNA, 33 bp, Homo sapien
gaatgggccaggaaaggaaagacacagaagaga

SEQ ID NO: 603881 - DNA, 33 bp, Homo sapien
aagtgggcattatccaagcaaaagaatgtggga

SEQ ID NO: 603882 - DNA, 33 bp, Homo sapien
aagtgggcattatccaggcaaaagaatgtggga

SEQ ID NO: 603883 - DNA, 33 bp, Homo sapien
ctgaatgttggccttaagaatacctatggtgat

SEQ ID NO: 603884 - DNA, 33 bp, Homo sapien
ctgaatgttggccttaggaatacctatggtgat

SEQ ID NO: 603885 - DNA, 33 bp, Homo sapien
cgtgttaggcagtggacatacaaatataaagta

SEQ ID NO: 603886 - DNA, 33 bp, Homo sapien
cgtgttaggcagtggagatacaaatataaagta

SEQ ID NO: 603887 - DNA, 33 bp, Homo sapien
aggaagagctcgttggcaaatcaaaggtgacaa

SEQ ID NO: 603888 - DNA, 33 bp, Homo sapien
aggaagagctcgttgggaaatcaaaggtgacaa

SEQ ID NO: 603889 - DNA, 33 bp, Homo sapien
cagggtagttacagaacaaggcttagcagtcag

SEQ ID NO: 603890 - DNA, 33 bp, Homo sapien
cagggtagttacagaataaggcttagcagtcag

SEQ ID NO: 603891 - DNA, 33 bp, Homo sapien
catcagagaggctatgcatcctgtccaaagtca

SEQ ID NO: 603892 - DNA, 33 bp, Homo sapien
catcagagaggctatgtatcctgtccaaagtca

SEQ ID NO: 603893 - DNA, 33 bp, Homo sapien
aaaaacctccaattaactgttcaaagcattctg

SEQ ID NO: 603894 - DNA, 33 bp, Homo sapien
aaaaacctccaattaattgttcaaagcattctg

SEQ ID NO: 603895 - DNA, 33 bp, Homo sapien
taaaatacacacttcacattctgccttccctga

SEQ ID NO: 603896 - DNA, 33 bp, Homo sapien
taaaatacacacttcatattctgccttccctga

SEQ ID NO: 603897 - DNA, 33 bp, Homo sapien
attacagaggattgagcagaacgatgaatttgt

SEQ ID NO: 603898 - DNA, 33 bp, Homo sapien
attacagaggattgagtagaacgatgaatttgt

SEQ ID NO: 603899 - DNA, 33 bp, Homo sapien
tatccataattcagaacagttccttgaagattt

SEQ ID NO: 603900 - DNA, 33 bp, Homo sapien
tatccataattcagaagagttccttgaagattt

SEQ ID NO: 603901 - DNA, 33 bp, Homo sapien
aaagtatttgtcctcagggagtttatcttttcc

SEQ ID NO: 603902 - DNA, 33 bp, Homo sapien
aaagtatttgtcctcatggagtttatcttttcc

SEQ ID NO: 603903 - DNA, 33 bp, Homo sapien
gtgctacaggttaatccactcaagctgttatgg

SEQ ID NO: 603904 - DNA, 33 bp, Homo sapien
gtgctacaggttaatctactcaagctgttatgg

SEQ ID NO: 603905 - DNA, 33 bp, Homo sapien
taattgctgggtggtagagtatttgtatcgtta

SEQ ID NO: 603906 - DNA, 33 bp, Homo sapien
taattgctgggtggtatagtatttgtatcgtta

SEQ ID NO: 603907 - DNA, 33 bp, Homo sapien
agctagttgtttaaaacctctcaaccatgatct

SEQ ID NO: 603908 - DNA, 33 bp, Homo sapien
agctagttgtttaaaatctctcaaccatgatct

SEQ ID NO: 603909 - DNA, 33 bp, Homo sapien
gctctacttttaggaactgactggctcaactag

SEQ ID NO: 603910 - DNA, 33 bp, Homo sapien
gctctacttttaggaattgactggctcaactag

SEQ ID NO: 603911 - DNA, 33 bp, Homo sapien
ggaggggaaaaaggaaaatgtctctctagaggt

SEQ ID NO: 603912 - DNA, 33 bp, Homo sapien
ggaggggaaaaaggaagatgtctctctagaggt

SEQ ID NO: 603913 - DNA, 33 bp, Homo sapien
aatggaagatggaagaaaggttagataagtttt

SEQ ID NO: 603914 - DNA, 33 bp, Homo sapien
aatggaagatggaagacaggttagataagtttt

SEQ ID NO: 603915 - DNA, 33 bp, Homo sapien
ttaagttctaccaggaagtatttatatgtgaaa

SEQ ID NO: 603916 - DNA, 33 bp, Homo sapien
ttaagttctaccaggaggtatttatatgtgaaa

SEQ ID NO: 603917 - DNA, 33 bp, Homo sapien
tcctaattctggcccaagtattccaagaaccat

SEQ ID NO: 603918 - DNA, 33 bp, Homo sapien
tcctaattctggcccaggtattccaagaaccat

SEQ ID NO: 603919 - DNA, 33 bp, Homo sapien
tcttttacagatgcacaaaagagagtaagctgt

SEQ ID NO: 603920 - DNA, 33 bp, Homo sapien
tcttttacagatgcacgaaagagagtaagctgt

SEQ ID NO: 603921 - DNA, 33 bp, Homo sapien
attggatttgttctcaggcaaattaattagttt

SEQ ID NO: 603922 - DNA, 33 bp, Homo sapien
attggatttgttctcatgcaaattaattagttt

SEQ ID NO: 603923 - DNA, 33 bp, Homo sapien
tacccagcagaagttacagttcattgatagcct

SEQ ID NO: 603924 - DNA, 33 bp, Homo sapien
tacccagcagaagttatagttcattgatagcct

SEQ ID NO: 603925 - DNA, 33 bp, Homo sapien
aagcagctgtactttgaagcttgtactcagatg

SEQ ID NO: 603926 - DNA, 33 bp, Homo sapien
aagcagctgtactttgcagcttgtactcagatg

SEQ ID NO: 603927 - DNA, 33 bp, Homo sapien
ttaaaatagccttgaaacaattaagctaaaggt

SEQ ID NO: 603928 - DNA, 33 bp, Homo sapien
ttaaaatagccttgaatcaattaagctaaaggt

SEQ ID NO: 603929 - DNA, 33 bp, Homo sapien
tttcttctacctttcccatctcatacttcattg

SEQ ID NO: 603930 - DNA, 33 bp, Homo sapien
tttcttctacctttcctatctcatacttcattg

SEQ ID NO: 603931 - DNA, 33 bp, Homo sapien
cgagaacatgggattcaaaatcaggtcccctga

SEQ ID NO: 603932 - DNA, 33 bp, Homo sapien
cgagaacatgggattcgaaatcaggtcccctga

SEQ ID NO: 603933 - DNA, 33 bp, Homo sapien
gtgaattgtgactgcaacttgcatgatagctgg

SEQ ID NO: 603934 - DNA, 33 bp, Homo sapien
gtgaattgtgactgcagcttgcatgatagctgg

SEQ ID NO: 603935 - DNA, 33 bp, Homo sapien
tagcaaaatgtatgaacaaagtattcaggggat

SEQ ID NO: 603936 - DNA, 33 bp, Homo sapien
tagcaaaatgtatgaagaaagtattcaggggat

SEQ ID NO: 603937 - DNA, 33 bp, Homo sapien
aaattggagctttgtcaagggtaataatgatgg

SEQ ID NO: 603938 - DNA, 33 bp, Homo sapien
aaattggagctttgtcgagggtaataatgatgg

SEQ ID NO: 603939 - DNA, 33 bp, Homo sapien
aatagcatggcttgaagtcaaaaaaagcacttg

SEQ ID NO: 603940 - DNA, 33 bp, Homo sapien
aatagcatggcttgaattcaaaaaaagcacttg

SEQ ID NO: 603941 - DNA, 33 bp, Homo sapien
tcagttctccacatggaaaccttctggcaacct

SEQ ID NO: 603942 - DNA, 33 bp, Homo sapien
tcagttctccacatggcaaccttctggcaacct

SEQ ID NO: 603943 - DNA, 33 bp, Homo sapien
ggcagacataatgctacaggagtggatggcgag

SEQ ID NO: 603944 - DNA, 33 bp, Homo sapien
ggcagacataatgctataggagtggatggcgag

SEQ ID NO: 603945 - DNA, 33 bp, Homo sapien
taggcaggttaagagtaacgttcttcttgtctg

SEQ ID NO: 603946 - DNA, 33 bp, Homo sapien
taggcaggttaagagttacgttcttcttgtctg

SEQ ID NO: 603947 - DNA, 33 bp, Homo sapien
cacagggtgacaggaaaaagtgccgagcaaagg

SEQ ID NO: 603948 - DNA, 33 bp, Homo sapien
cacagggtgacaggaagaagtgccgagcaaagg

SEQ ID NO: 603949 - DNA, 33 bp, Homo sapien
tcatctgtaatttctacgcatttggaacatgga

SEQ ID NO: 603950 - DNA, 33 bp, Homo sapien
tcatctgtaatttctatgcatttggaacatgga

SEQ ID NO: 603951 - DNA, 33 bp, Homo sapien
catgagggagagaaacagaaacaactgtgtatg

SEQ ID NO: 603952 - DNA, 33 bp, Homo sapien
catgagggagagaaacggaaacaactgtgtatg

SEQ ID NO: 603953 - DNA, 33 bp, Homo sapien
caagtaactcactactcaatgtctcaaccttct

SEQ ID NO: 603954 - DNA, 33 bp, Homo sapien
caagtaactcactacttaatgtctcaaccttct

SEQ ID NO: 603955 - DNA, 33 bp, Homo sapien
atctaatgccatgaaccactgactgaaaccaag

SEQ ID NO: 603956 - DNA, 33 bp, Homo sapien
atctaatgccatgaactactgactgaaaccaag

SEQ ID NO: 603957 - DNA, 33 bp, Homo sapien
gtggtcttctacattacctcataaatgccctgg

SEQ ID NO: 603958 - DNA, 33 bp, Homo sapien
gtggtcttctacattagctcataaatgccctgg

SEQ ID NO: 603959 - DNA, 33 bp, Homo sapien
ctacctcttactcttacgcaagtataaagactt

SEQ ID NO: 603960 - DNA, 33 bp, Homo sapien
ctacctcttactcttatgcaagtataaagactt

SEQ ID NO: 603961 - DNA, 33 bp, Homo sapien
gtgctacaaagctataataattggcttggtgcg

SEQ ID NO: 603962 - DNA, 33 bp, Homo sapien
gtgctacaaagctatagtaattggcttggtgcg

SEQ ID NO: 603963 - DNA, 33 bp, Homo sapien
tttgaatgacattttacacagcattgtagactg

SEQ ID NO: 603964 - DNA, 33 bp, Homo sapien
tttgaatgacattttagacagcattgtagactg

SEQ ID NO: 603965 - DNA, 33 bp, Homo sapien
ggaatccatctataccccaaaatcaaaatcaga

SEQ ID NO: 603966 - DNA, 33 bp, Homo sapien
ggaatccatctataccgcaaaatcaaaatcaga

SEQ ID NO: 603967 - DNA, 33 bp, Homo sapien
cctgggaaagggactccaattggctaacttaag

SEQ ID NO: 603968 - DNA, 33 bp, Homo sapien
cctgggaaagggactctaattggctaacttaag

SEQ ID NO: 603969 - DNA, 33 bp, Homo sapien
gtcaaaatgaacgtcacgatggtctgcccaaat

SEQ ID NO: 603970 - DNA, 33 bp, Homo sapien
gtcaaaatgaacgtcatgatggtctgcccaaat

SEQ ID NO: 603971 - DNA, 33 bp, Homo sapien
ggattcaagagttttcgcattcattcctgtcaa

SEQ ID NO: 603972 - DNA, 33 bp, Homo sapien
ggattcaagagttttctcattcattcctgtcaa

SEQ ID NO: 603973 - DNA, 33 bp, Homo sapien
ccccagctgcagtacaatcttctgagattcagc

SEQ ID NO: 603974 - DNA, 33 bp, Homo sapien
ccccagctgcagtacagtcttctgagattcagc

SEQ ID NO: 603975 - DNA, 33 bp, Homo sapien
aagcagagaaaatataatacagggaattgatta

SEQ ID NO: 603976 - DNA, 33 bp, Homo sapien
aagcagagaaaatatagtacagggaattgatta

SEQ ID NO: 603977 - DNA, 33 bp, Homo sapien
caactgggacaaaaagaaagagagatcaatcta

SEQ ID NO: 603978 - DNA, 33 bp, Homo sapien
caactgggacaaaaaggaagagagatcaatcta

SEQ ID NO: 603979 - DNA, 33 bp, Homo sapien
agaaatggatggaaaacaataaaggaaagcaaa

SEQ ID NO: 603980 - DNA, 33 bp, Homo sapien
agaaatggatggaaaataataaaggaaagcaaa

SEQ ID NO: 603981 - DNA, 33 bp, Homo sapien
gttctccacaaagtcaacaggcagtccatttct

SEQ ID NO: 603982 - DNA, 33 bp, Homo sapien
gttctccacaaagtcagcaggcagtccatttct

SEQ ID NO: 603983 - DNA, 33 bp, Homo sapien
gtgcagaggaaatggcaaattattcatgaaaga

SEQ ID NO: 603984 - DNA, 33 bp, Homo sapien
gtgcagaggaaatggcgaattattcatgaaaga

SEQ ID NO: 603985 - DNA, 33 bp, Homo sapien
aagctattactctcagaccatacattttgcata

SEQ ID NO: 603986 - DNA, 33 bp, Homo sapien
aagctattactctcaggccatacattttgcata

SEQ ID NO: 603987 - DNA, 33 bp, Homo sapien
gtatcctcatgttttacgatattttgcatgata

SEQ ID NO: 603988 - DNA, 33 bp, Homo sapien
gtatcctcatgttttatgatattttgcatgata

SEQ ID NO: 603989 - DNA, 33 bp, Homo sapien
cagtctaccatcttaactcgatttttgaactgg

SEQ ID NO: 603990 - DNA, 33 bp, Homo sapien
cagtctaccatcttaagtcgatttttgaactgg

SEQ ID NO: 603991 - DNA, 33 bp, Homo sapien
gtcattgccctaagcaaattaagtcaggaacag

SEQ ID NO: 603992 - DNA, 33 bp, Homo sapien
gtcattgccctaagcagattaagtcaggaacag

SEQ ID NO: 603993 - DNA, 33 bp, Homo sapien
cccatcaatcgggtataagaattcccttttctt

SEQ ID NO: 603994 - DNA, 33 bp, Homo sapien
cccatcaatcgggtatgagaattcccttttctt

SEQ ID NO: 603995 - DNA, 33 bp, Homo sapien
gtataattgtaccctgaacctatctccttcttt

SEQ ID NO: 603996 - DNA, 33 bp, Homo sapien
gtataattgtaccctggacctatctccttcttt

SEQ ID NO: 603997 - DNA, 33 bp, Homo sapien
tagcattgaatcaacaagaagttaggagaaacc

SEQ ID NO: 603998 - DNA, 33 bp, Homo sapien
tagcattgaatcaacaggaagttaggagaaacc

SEQ ID NO: 603999 - DNA, 33 bp, Homo sapien
ctgtgagcgccataaacaggaacactcaagacg

SEQ ID NO: 604000 - DNA, 33 bp, Homo sapien
ctgtgagcgccataaataggaacactcaagacg

SEQ ID NO: 604001 - DNA, 33 bp, Homo sapien
ctttgtcattgatctcaacaataagactattta

SEQ ID NO: 604002 - DNA, 33 bp, Homo sapien
ctttgtcattgatctcgacaataagactattta

SEQ ID NO: 604003 - DNA, 33 bp, Homo sapien
tattttaaatacaaaacgttcatgggccatcag

SEQ ID NO: 604004 - DNA, 33 bp, Homo sapien
tattttaaatacaaaatgttcatgggccatcag

SEQ ID NO: 604005 - DNA, 33 bp, Homo sapien
gcttagaaattgggacaaccacttccgtgttcc

SEQ ID NO: 604006 - DNA, 33 bp, Homo sapien
gcttagaaattgggaccaccacttccgtgttcc

SEQ ID NO: 604007 - DNA, 33 bp, Homo sapien; identical to SEQ ID NO: 604005

SEQ ID NO: 604008 - DNA, 33 bp, Homo sapien; identical to SEQ ID NO: 604006

SEQ ID NO: 604009 - DNA, 33 bp, Homo sapien
gatggagtctacaacaagcccgtggtattccac

SEQ ID NO: 604010 - DNA, 33 bp, Homo sapien
gatggagtctacaacaggcccgtggtattccac

SEQ ID NO: 604011 - DNA, 33 bp, Homo sapien; identical to SEQ ID NO: 604009

SEQ ID NO: 604012 - DNA, 33 bp, Homo sapien; identical to SEQ ID NO: 604010

SEQ ID NO: 604013 - DNA, 33 bp, Homo sapien
tgccctgacagttggaagagatcaagctcccaa

SEQ ID NO: 604014 - DNA, 33 bp, Homo sapien
tgccctgacagttggacgagatcaagctcccaa

SEQ ID NO: 604015 - DNA, 33 bp, Homo sapien
acaggaagtacaaagaagaaaacagaggaggtg

SEQ ID NO: 604016 - DNA, 33 bp, Homo sapien
acaggaagtacaaagatgaaaacagaggaggtg

SEQ ID NO: 604017 - DNA, 33 bp, Homo sapien
tctttgtacttcctgtcagtcaggcagaggacc

SEQ ID NO: 604018 - DNA, 33 bp, Homo sapien
tctttgtacttcctgttagtcaggcagaggacc

SEQ ID NO: 604019 - DNA, 33 bp, Homo sapien
gaatcatgggaaggaacggtcctctgcctgact

SEQ ID NO: 604020 - DNA, 33 bp, Homo sapien
gaatcatgggaaggaatggtcctctgcctgact

SEQ ID NO: 604021 - DNA, 33 bp, Homo sapien
caactattccattcaactgttccttcaggtcct

SEQ ID NO: 604022 - DNA, 33 bp, Homo sapien
caactattccattcaattgttccttcaggtcct

SEQ ID NO: 604023 - DNA, 33 bp, Homo sapien
tgaaagcatgcgatgacaagcacagtagctcgg

SEQ ID NO: 604024 - DNA, 33 bp, Homo sapien
tgaaagcatgcgatgagaagcacagtagctcgg

SEQ ID NO: 604025 - DNA, 33 bp, Homo sapien
cttatagctttatcgaccagaacttgaaatagt

SEQ ID NO: 604026 - DNA, 33 bp, Homo sapien
cttatagctttatcgatcagaacttgaaatagt

SEQ ID NO: 604027 - DNA, 33 bp, Homo sapien
ttccaaaagaatttcaatctcatctaggctata

SEQ ID NO: 604028 - DNA, 33 bp, Homo sapien
ttccaaaagaatttcagtctcatctaggctata

SEQ ID NO: 604029 - DNA, 33 bp, Homo sapien
aagattgtttctcaaacacttcacatcaccaac

SEQ ID NO: 604030 - DNA, 33 bp, Homo sapien
aagattgtttctcaaatacttcacatcaccaac

SEQ ID NO: 604031 - DNA, 33 bp, Homo sapien
gaccagaacctagttacgtggtgacacttaggt

SEQ ID NO: 604032 - DNA, 33 bp, Homo sapien
gaccagaacctagttatgtggtgacacttaggt

SEQ ID NO: 604033 - DNA, 33 bp, Homo sapien
cgcacatgacaatctcaaagaatttggaatgct

SEQ ID NO: 604034 - DNA, 33 bp, Homo sapien
cgcacatgacaatctcgaagaatttggaatgct

SEQ ID NO: 604035 - DNA, 33 bp, Homo sapien
gagaattttgtgaaacagtggaaactaagcagt

SEQ ID NO: 604036 - DNA, 33 bp, Homo sapien
gagaattttgtgaaacggtggaaactaagcagt

SEQ ID NO: 604037 - DNA, 33 bp, Homo sapien
agatttaatttctaaacgacatagtgaggatgg

SEQ ID NO: 604038 - DNA, 33 bp, Homo sapien
agatttaatttctaaatgacatagtgaggatgg

SEQ ID NO: 604039 - DNA, 33 bp, Homo sapien
aaaggcagtggcaaaaaaattggctgtgtcatt

SEQ ID NO: 604040 - DNA, 33 bp, Homo sapien
aaaggcagtggcaaaacaattggctgtgtcatt

SEQ ID NO: 604041 - DNA, 33 bp, Homo sapien
cattccaaacccatccaagcaaattacacagaa

SEQ ID NO: 604042 - DNA, 33 bp, Homo sapien
cattccaaacccatccgagcaaattacacagaa

SEQ ID NO: 604043 - DNA, 33 bp, Homo sapien
aataggaatttcattgacaaagtagagacaatt

SEQ ID NO: 604044 - DNA, 33 bp, Homo sapien
aataggaatttcattgtcaaagtagagacaatt

SEQ ID NO: 604045 - DNA, 33 bp, Homo sapien
ttctgagcctgaaaaaatctctctagagagcct

SEQ ID NO: 604046 - DNA, 33 bp, Homo sapien
ttctgagcctgaaaaattctctctagagagcct

SEQ ID NO: 604047 - DNA, 33 bp, Homo sapien
gaaaggagcgaatggaaccaacgctggtgtagg

SEQ ID NO: 604048 - DNA, 33 bp, Homo sapien
gaaaggagcgaatggagccaacgctggtgtagg

SEQ ID NO: 604049 - DNA, 33 bp, Homo sapien
ctctatgcattgggaacagttgtactcactttg

SEQ ID NO: 604050 - DNA, 33 bp, Homo sapien
ctctatgcattgggaagagttgtactcactttg

SEQ ID NO: 604051 - DNA, 33 bp, Homo sapien
ctttatgtatgccaaacattgttctcagtgctt

SEQ ID NO: 604052 - DNA, 33 bp, Homo sapien
ctttatgtatgccaaatattgttctcagtgctt

SEQ ID NO: 604053 - DNA, 33 bp, Homo sapien
acccttctagattgacagaactagtgagcagca

SEQ ID NO: 604054 - DNA, 33 bp, Homo sapien
acccttctagattgacggaactagtgagcagca

SEQ ID NO: 604055 - DNA, 33 bp, Homo sapien
taaatgtggtgatcacggaattatttttttagg

SEQ ID NO: 604056 - DNA, 33 bp, Homo sapien
taaatgtggtgatcactgaattatttttttagg

SEQ ID NO: 604057 - DNA, 33 bp, Homo sapien
gaattgcatgccaggacagtgttgatgaaccaa

SEQ ID NO: 604058 - DNA, 33 bp, Homo sapien
gaattgcatgccaggatagtgttgatgaaccaa

SEQ ID NO: 604059 - DNA, 33 bp, Homo sapien
aaggtctacagtagtacacaacaatgtcctggg

SEQ ID NO: 604060 - DNA, 33 bp, Homo sapien
aaggtctacagtagtatacaacaatgtcctggg

SEQ ID NO: 604061 - DNA, 33 bp, Homo sapien
atattggaaagaaagacgatgtgtaagagcatt

SEQ ID NO: 604062 - DNA, 33 bp, Homo sapien
atattggaaagaaagaggatgtgtaagagcatt

SEQ ID NO: 604063 - DNA, 33 bp, Homo sapien
gtactacaggagcactaagaagtccttttccaa

SEQ ID NO: 604064 - DNA, 33 bp, Homo sapien
gtactacaggagcactgagaagtccttttccaa

SEQ ID NO: 604065 - DNA, 33 bp, Homo sapien
ctacattgtatcaccaatcatataaaagtatca

SEQ ID NO: 604066 - DNA, 33 bp, Homo sapien
ctacattgtatcaccagtcatataaaagtatca

SEQ ID NO: 604067 - DNA, 33 bp, Homo sapien
cacaggacaggaaaaaaagcacacatagatcag

SEQ ID NO: 604068 - DNA, 33 bp, Homo sapien
cacaggacaggaaaaacagcacacatagatcag

SEQ ID NO: 604069 - DNA, 33 bp, Homo sapien
ccaaaaagtccagagggcaatctcagtgcacaa

SEQ ID NO: 604070 - DNA, 33 bp, Homo sapien
ccaaaaagtccagaggtcaatctcagtgcacaa

SEQ ID NO: 604071 - DNA, 33 bp, Homo sapien
aacagcttaggtcttacagtcacttgttatctc

SEQ ID NO: 604072 - DNA, 33 bp, Homo sapien
aacagcttaggtcttatagtcacttgttatctc

SEQ ID NO: 604073 - DNA, 33 bp, Homo sapien
gtggtcattgactctgaaaatgtgttctgtcct

SEQ ID NO: 604074 - DNA, 33 bp, Homo sapien
gtggtcattgactctgcaaatgtgttctgtcct

SEQ ID NO: 604075 - DNA, 33 bp, Homo sapien
tagcaagtgagagaaaatatcttatcggggtca

SEQ ID NO: 604076 - DNA, 33 bp, Homo sapien
tagcaagtgagagaaattatcttatcggggtca

SEQ ID NO: 604077 - DNA, 33 bp, Homo sapien
ttaatgttgatcagcaagaggacataaggttac

SEQ ID NO: 604078 - DNA, 33 bp, Homo sapien
ttaatgttgatcagcaggaggacataaggttac

SEQ ID NO: 604079 - DNA, 33 bp, Homo sapien
ctgtttgggaacactccaagtcccattctgacg

SEQ ID NO: 604080 - DNA, 33 bp, Homo sapien
ctgtttgggaacactcgaagtcccattctgacg

SEQ ID NO: 604081 - DNA, 33 bp, Homo sapien
tatatagctaaaggtgacctctgcaaccacttt

SEQ ID NO: 604082 - DNA, 33 bp, Homo sapien
tatatagctaaaggtggcctctgcaaccacttt

SEQ ID NO: 604083 - DNA, 33 bp, Homo sapien
ggtggcctggtgcaaactccttaacattgctaa

SEQ ID NO: 604084 - DNA, 33 bp, Homo sapien
ggtggcctggtgcaaattccttaacattgctaa

SEQ ID NO: 604085 - DNA, 33 bp, Homo sapien
ttccactaaatcccacggtctgcacctgccatt

SEQ ID NO: 604086 - DNA, 33 bp, Homo sapien
ttccactaaatcccactgtctgcacctgccatt

SEQ ID NO: 604087 - DNA, 33 bp, Homo sapien
aggtaaggaggcaaacggcgcttcccatcccac

SEQ ID NO: 604088 - DNA, 33 bp, Homo sapien
aggtaaggaggcaaactgcgcttcccatcccac

SEQ ID NO: 604089 - DNA, 33 bp, Homo sapien
agactgtgaaacctctcacatcagtaagtagta

SEQ ID NO: 604090 - DNA, 33 bp, Homo sapien
agactgtgaaacctctgacatcagtaagtagta

SEQ ID NO: 604091 - DNA, 33 bp, Homo sapien
ctctttctatgtgcaaagttctaagatgtaaaa

SEQ ID NO: 604092 - DNA, 33 bp, Homo sapien
ctctttctatgtgcaaggttctaagatgtaaaa

SEQ ID NO: 604093 - DNA, 33 bp, Homo sapien
caagatggtgatgaaaatgacttctggttgtcc

SEQ ID NO: 604094 - DNA, 33 bp, Homo sapien
caagatggtgatgaaagtgacttctggttgtcc

SEQ ID NO: 604095 - DNA, 33 bp, Homo sapien
agagctctacatcctacgacgtgagttctctaa

SEQ ID NO: 604096 - DNA, 33 bp, Homo sapien
agagctctacatcctaggacgtgagttctctaa

SEQ ID NO: 604097 - DNA, 33 bp, Homo sapien
ttctgtaggacatcaaaataatcagtttcctta

SEQ ID NO: 604098 - DNA, 33 bp, Homo sapien
ttctgtaggacatcaagataatcagtttcctta

SEQ ID NO: 604099 - DNA, 33 bp, Homo sapien
tgaattctcggcaaaaacatcctctgagtctga

SEQ ID NO: 604100 - DNA, 33 bp, Homo sapien
tgaattctcggcaaaaccatcctctgagtctga

SEQ ID NO: 604101 - DNA, 33 bp, Homo sapien
tggatttgataacaacactaatgcttgcttgta

SEQ ID NO: 604102 - DNA, 33 bp, Homo sapien
tggatttgataacaaccctaatgcttgcttgta

SEQ ID NO: 604103 - DNA, 33 bp, Homo sapien
aaagatcatctggaggccccagttccagtctag

SEQ ID NO: 604104 - DNA, 33 bp, Homo sapien
aaagatcatctggaggtcccagttccagtctag

SEQ ID NO: 604105 - DNA, 33 bp, Homo sapien
ccagatgtgcgcatcactatgtcttttgcaagt

SEQ ID NO: 604106 - DNA, 33 bp, Homo sapien
ccagatgtgcgcatcagtatgtcttttgcaagt

SEQ ID NO: 604107 - DNA, 33 bp, Homo sapien
agaggcatggaaggatcaaatgcccttgtcaat

SEQ ID NO: 604108 - DNA, 33 bp, Homo sapien
agaggcatggaaggattaaatgcccttgtcaat

SEQ ID NO: 604109 - DNA, 33 bp, Homo sapien
gtgtggttcattgatacacccagaggtgatgtc

SEQ ID NO: 604110 - DNA, 33 bp, Homo sapien
gtgtggttcattgatatacccagaggtgatgtc

SEQ ID NO: 604111 - DNA, 33 bp, Homo sapien
agatagataggaaattaaaaatattggcaagag

SEQ ID NO: 604112 - DNA, 33 bp, Homo sapien
agatagataggaaatttaaaatattggcaagag

SEQ ID NO: 604113 - DNA, 33 bp, Homo sapien
atgtaggtatgaggaccgggtttgaatacacac

SEQ ID NO: 604114 - DNA, 33 bp, Homo sapien
atgtaggtatgaggactgggtttgaatacacac

SEQ ID NO: 604115 - DNA, 33 bp, Homo sapien
gggcagtgggacatagacaaaggaaaatattaa

SEQ ID NO: 604116 - DNA, 33 bp, Homo sapien
gggcagtgggacatagtcaaaggaaaatattaa

SEQ ID NO: 604117 - DNA, 33 bp, Homo sapien
cttctgcaacatcaccagcggcactgttcttgt

SEQ ID NO: 604118 - DNA, 33 bp, Homo sapien
cttctgcaacatcaccggcggcactgttcttgt

SEQ ID NO: 604119 - DNA, 33 bp, Homo sapien
gtgatatctggggaaagtgaagcagagggaaag

SEQ ID NO: 604120 - DNA, 33 bp, Homo sapien
gtgatatctggggaaattgaagcagagggaaag

SEQ ID NO: 604121 - DNA, 33 bp, Homo sapien
gtgtggcctttgggaacagggtcaaatgaggcc

SEQ ID NO: 604122 - DNA, 33 bp, Homo sapien
gtgtggcctttgggaatagggtcaaatgaggcc

SEQ ID NO: 604123 - DNA, 33 bp, Homo sapien
actgacacttgtcctcacagaacatatatgcct

SEQ ID NO: 604124 - DNA, 33 bp, Homo sapien
actgacacttgtcctcgcagaacatatatgcct

SEQ ID NO: 604125 - DNA, 33 bp, Homo sapien
ttcaatcacataaagggccaggaaattgatgac

SEQ ID NO: 604126 - DNA, 33 bp, Homo sapien
ttcaatcacataaaggtccaggaaattgatgac

SEQ ID NO: 604127 - DNA, 33 bp, Homo sapien
gagcataacagagataaaacagcactcctgtag

SEQ ID NO: 604128 - DNA, 33 bp, Homo sapien
gagcataacagagatagaacagcactcctgtag

SEQ ID NO: 604129 - DNA, 33 bp, Homo sapien
tgtgctcttttccacactgactgttgctagtct

SEQ ID NO: 604130 - DNA, 33 bp, Homo sapien
tgtgctcttttccacattgactgttgctagtct

SEQ ID NO: 604131 - DNA, 33 bp, Homo sapien
aatctggtcttatagaactcagcagggaagaca

SEQ ID NO: 604132 - DNA, 33 bp, Homo sapien
aatctggtcttatagagctcagcagggaagaca

SEQ ID NO: 604133 - DNA, 33 bp, Homo sapien
caatttccctccagatcaccttccacacagtag

SEQ ID NO: 604134 - DNA, 33 bp, Homo sapien
caatttccctccagattaccttccacacagtag

SEQ ID NO: 604135 - DNA, 33 bp, Homo sapien
ttactgcaatacttgacgtagctaacttgccat

SEQ ID NO: 604136 - DNA, 33 bp, Homo sapien
ttactgcaatacttgatgtagctaacttgccat

SEQ ID NO: 604137 - DNA, 33 bp, Homo sapien
ttttaagaccccagaacgtgttttgagcaaaac

SEQ ID NO: 604138 - DNA, 33 bp, Homo sapien
ttttaagaccccagaatgtgttttgagcaaaac

SEQ ID NO: 604139 - DNA, 33 bp, Homo sapien
atttacagcctggaataagacaaataaatcttg

SEQ ID NO: 604140 - DNA, 33 bp, Homo sapien
atttacagcctggaatgagacaaataaatcttg

SEQ ID NO: 604141 - DNA, 33 bp, Homo sapien
aatcactcagaattgcgattgatggttgctgtt

SEQ ID NO: 604142 - DNA, 33 bp, Homo sapien
aatcactcagaattgctattgatggttgctgtt

SEQ ID NO: 604143 - DNA, 33 bp, Homo sapien
tgtgccactggacctcacaagataagtttaagc

SEQ ID NO: 604144 - DNA, 33 bp, Homo sapien
tgtgccactggacctcgcaagataagtttaagc

SEQ ID NO: 604145 - DNA, 33 bp, Homo sapien
aagatcttgagctttgaattcaggcagacctga

SEQ ID NO: 604146 - DNA, 33 bp, Homo sapien
aagatcttgagctttggattcaggcagacctga

SEQ ID NO: 604147 - DNA, 33 bp, Homo sapien
cattgtctatatttctcaccatcacatataggg

SEQ ID NO: 604148 - DNA, 33 bp, Homo sapien
cattgtctatatttctgaccatcacatataggg

SEQ ID NO: 604149 - DNA, 33 bp, Homo sapien
ctactaagtgagttaccggttataaaatacttc

SEQ ID NO: 604150 - DNA, 33 bp, Homo sapien
ctactaagtgagttactggttataaaatacttc

SEQ ID NO: 604151 - DNA, 33 bp, Homo sapien
cttgacttcttggcagcatgtgacactagcgac

SEQ ID NO: 604152 - DNA, 33 bp, Homo sapien
cttgacttcttggcagtatgtgacactagcgac

SEQ ID NO: 604153 - DNA, 33 bp, Homo sapien
agttgccaatcacctccaggctgccaattctac

SEQ ID NO: 604154 - DNA, 33 bp, Homo sapien
agttgccaatcacctctaggctgccaattctac

SEQ ID NO: 604155 - DNA, 33 bp, Homo sapien
gtatgtccgggtgtaccggggtacttaggtgta

SEQ ID NO: 604156 - DNA, 33 bp, Homo sapien
gtatgtccgggtgtactggggtacttaggtgta

SEQ ID NO: 604157 - DNA, 33 bp, Homo sapien
agtgtctaactgagccaactaacaccagctacg

SEQ ID NO: 604158 - DNA, 33 bp, Homo sapien
agtgtctaactgagccgactaacaccagctacg

SEQ ID NO: 604159 - DNA, 33 bp, Homo sapien
aagaaaatactcaaagaccagacatgtggacaa

SEQ ID NO: 604160 - DNA, 33 bp, Homo sapien
aagaaaatactcaaagcccagacatgtggacaa

SEQ ID NO: 604161 - DNA, 33 bp, Homo sapien
ggaggttgaaggagataagaactggaaagaaaa

SEQ ID NO: 604162 - DNA, 33 bp, Homo sapien
ggaggttgaaggagatgagaactggaaagaaaa

SEQ ID NO: 604163 - DNA, 33 bp, Homo sapien
tgagtgccatatttgcagaatgtagcgttggag

SEQ ID NO: 604164 - DNA, 33 bp, Homo sapien
tgagtgccatatttgcggaatgtagcgttggag

SEQ ID NO: 604165 - DNA, 33 bp, Homo sapien
agaaaacagaactggcaacagggtgcggtggct

SEQ ID NO: 604166 - DNA, 33 bp, Homo sapien
agaaaacagaactggcgacagggtgcggtggct

SEQ ID NO: 604167 - DNA, 33 bp, Homo sapien
catctcctaatgttcacagtgagtggatttggc

SEQ ID NO: 604168 - DNA, 33 bp, Homo sapien
catctcctaatgttcatagtgagtggatttggc

SEQ ID NO: 604169 - DNA, 33 bp, Homo sapien
actctcctccagaagcagatactgtaaaacgag

SEQ ID NO: 604170 - DNA, 33 bp, Homo sapien
actctcctccagaagcggatactgtaaaacgag

SEQ ID NO: 604171 - DNA, 33 bp, Homo sapien
tagtataattcctgacccaaagcaggcgctctg

SEQ ID NO: 604172 - DNA, 33 bp, Homo sapien
tagtataattcctgactcaaagcaggcgctctg

SEQ ID NO: 604173 - DNA, 33 bp, Homo sapien
gtatcaaatggacaagcagaaagataatcttta

SEQ ID NO: 604174 - DNA, 33 bp, Homo sapien
gtatcaaatggacaagtagaaagataatcttta

SEQ ID NO: 604175 - DNA, 33 bp, Homo sapien
agtgccaacgtagcaaaaagcaagaagtagaaa

SEQ ID NO: 604176 - DNA, 33 bp, Homo sapien
agtgccaacgtagcaagaagcaagaagtagaaa

SEQ ID NO: 604177 - DNA, 33 bp, Homo sapien
gggagacacaaaaccgacaagtaggtaactggg

SEQ ID NO: 604178 - DNA, 33 bp, Homo sapien
gggagacacaaaaccgccaagtaggtaactggg

SEQ ID NO: 604179 - DNA, 33 bp, Homo sapien
atgggtctgagaactaaagggtgaaagtagaag

SEQ ID NO: 604180 - DNA, 33 bp, Homo sapien
atgggtctgagaactacagggtgaaagtagaag

SEQ ID NO: 604181 - DNA, 33 bp, Homo sapien
caggctcccactttaacatcaaggtcgatccag

SEQ ID NO: 604182 - DNA, 33 bp, Homo sapien
caggctcccactttaatatcaaggtcgatccag

SEQ ID NO: 604183 - DNA, 33 bp, Homo sapien
ttggcttctggaggcaatatgctttactcctgg

SEQ ID NO: 604184 - DNA, 33 bp, Homo sapien
ttggcttctggaggcagtatgctttactcctgg

SEQ ID NO: 604185 - DNA, 33 bp, Homo sapien
ttctaatgtggtgacacggaaggctccagaaag

SEQ ID NO: 604186 - DNA, 33 bp, Homo sapien
ttctaatgtggtgacatggaaggctccagaaag

SEQ ID NO: 604187 - DNA, 33 bp, Homo sapien
aggataggagctcttcaaacacttgtggggccc

SEQ ID NO: 604188 - DNA, 33 bp, Homo sapien
aggataggagctcttccaacacttgtggggccc

SEQ ID NO: 604189 - DNA, 33 bp, Homo sapien
tccccagcctgggcaccgctatctgtcacagtg

SEQ ID NO: 604190 - DNA, 33 bp, Homo sapien
tccccagcctgggcactgctatctgtcacagtg

SEQ ID NO: 604191 - DNA, 33 bp, Homo sapien
agcctgggaaaagaccaaaacagcctgaagtga

SEQ ID NO: 604192 - DNA, 33 bp, Homo sapien
agcctgggaaaagaccgaaacagcctgaagtga

SEQ ID NO: 604193 - DNA, 33 bp, Homo sapien
ttctctagagtggaaacgacatagggattgata

SEQ ID NO: 604194 - DNA, 33 bp, Homo sapien
ttctctagagtggaaatgacatagggattgata

SEQ ID NO: 604195 - DNA, 33 bp, Homo sapien
taggcactaatatcccaataatgtagctagtag

SEQ ID NO: 604196 - DNA, 33 bp, Homo sapien
taggcactaatatcccgataatgtagctagtag

SEQ ID NO: 604197 - DNA, 33 bp, Homo sapien
ttggggagtcaacgctcagcaacccatcacagt

SEQ ID NO: 604198 - DNA, 33 bp, Homo sapien
ttggggagtcaacgctgagcaacccatcacagt

SEQ ID NO: 604199 - DNA, 33 bp, Homo sapien
aggcaacagaactggcaagtaccagagttggaa

SEQ ID NO: 604200 - DNA, 33 bp, Homo sapien
aggcaacagaactggcgagtaccagagttggaa

SEQ ID NO: 604201 - DNA, 33 bp, Homo sapien
cctgccttttaaatgccaatgtgtttgcttatc

SEQ ID NO: 604202 - DNA, 33 bp, Homo sapien
cctgccttttaaatgcgaatgtgtttgcttatc

SEQ ID NO: 604203 - DNA, 33 bp, Homo sapien
cttgtgcattgaggtacgaatgttgggagagag

SEQ ID NO: 604204 - DNA, 33 bp, Homo sapien
cttgtgcattgaggtatgaatgttgggagagag

SEQ ID NO: 604205 - DNA, 33 bp, Homo sapien
tatggatttcagccacacaatgatattttgctt

SEQ ID NO: 604206 - DNA, 33 bp, Homo sapien
tatggatttcagccacgcaatgatattttgctt

SEQ ID NO: 604207 - DNA, 33 bp, Homo sapien
taatcatttaccaaagacttcaccttttgatac

SEQ ID NO: 604208 - DNA, 33 bp, Homo sapien
taatcatttaccaaaggcttcaccttttgatac

SEQ ID NO: 604209 - DNA, 33 bp, Homo sapien
aactagtcttttagagaatatggagttcttact

SEQ ID NO: 604210 - DNA, 33 bp, Homo sapien
aactagtcttttagagtatatggagttcttact

SEQ ID NO: 604211 - DNA, 33 bp, Homo sapien
tattacaagttccctccctgtctctagtcctcc

SEQ ID NO: 604212 - DNA, 33 bp, Homo sapien
tattacaagttccctctctgtctctagtcctcc

SEQ ID NO: 604213 - DNA, 33 bp, Homo sapien
gccaaaaagccagggaacgaattttatggattt

SEQ ID NO: 604214 - DNA, 33 bp, Homo sapien
gccaaaaagccagggaccgaattttatggattt

SEQ ID NO: 604215 - DNA, 33 bp, Homo sapien
tgccttcaactcagaaagtctatcttctaccag

SEQ ID NO: 604216 - DNA, 33 bp, Homo sapien
tgccttcaactcagaacgtctatcttctaccag

SEQ ID NO: 604217 - DNA, 33 bp, Homo sapien
tcaggtctaggattgcaatagagctggtagaag

SEQ ID NO: 604218 - DNA, 33 bp, Homo sapien
tcaggtctaggattgcgatagagctggtagaag

SEQ ID NO: 604219 - DNA, 33 bp, Homo sapien
ctatgcagagagagagcccttccaagatccaca

SEQ ID NO: 604220 - DNA, 33 bp, Homo sapien
ctatgcagagagagagtccttccaagatccaca

SEQ ID NO: 604221 - DNA, 33 bp, Homo sapien
caaagagcaactccaaatcagggttaagaagga

SEQ ID NO: 604222 - DNA, 33 bp, Homo sapien
caaagagcaactccaagtcagggttaagaagga

SEQ ID NO: 604223 - DNA, 33 bp, Homo sapien
cacctgaaaatctatcacttatggtgctctaat

SEQ ID NO: 604224 - DNA, 33 bp, Homo sapien
cacctgaaaatctatcgcttatggtgctctaat

SEQ ID NO: 604225 - DNA, 33 bp, Homo sapien
atgtgaagggtttctccccaccaacaaataagc

SEQ ID NO: 604226 - DNA, 33 bp, Homo sapien
atgtgaagggtttctctccaccaacaaataagc

SEQ ID NO: 604227 - DNA, 33 bp, Homo sapien
atgcattaatcaagagactatggtgcaaggatt

SEQ ID NO: 604228 - DNA, 33 bp, Homo sapien
atgcattaatcaagaggctatggtgcaaggatt

SEQ ID NO: 604229 - DNA, 33 bp, Homo sapien
ctcttagaatttactcacctcttctatatgttc

SEQ ID NO: 604230 - DNA, 33 bp, Homo sapien
ctcttagaatttactcgcctcttctatatgttc

SEQ ID NO: 604231 - DNA, 33 bp, Homo sapien
caccttgagacttgaaagtgttgtttttctcta

SEQ ID NO: 604232 - DNA, 33 bp, Homo sapien
caccttgagacttgaaggtgttgtttttctcta

SEQ ID NO: 604233 - DNA, 33 bp, Homo sapien
aacaccagtgggggaaataacactctctcacag

SEQ ID NO: 604234 - DNA, 33 bp, Homo sapien
aacaccagtgggggaagtaacactctctcacag

SEQ ID NO: 604235 - DNA, 33 bp, Homo sapien
ggtggaatttagccaaagcaaaaaaatagtgtt

SEQ ID NO: 604236 - DNA, 33 bp, Homo sapien
ggtggaatttagccaacgcaaaaaaatagtgtt

SEQ ID NO: 604237 - DNA, 33 bp, Homo sapien
aattaataaccctacactggcttcaggtaaaag

SEQ ID NO: 604238 - DNA, 33 bp, Homo sapien
aattaataaccctacattggcttcaggtaaaag

SEQ ID NO: 604239 - DNA, 33 bp, Homo sapien
agggaacactcagacactagacttccatgtgac

SEQ ID NO: 604240 - DNA, 33 bp, Homo sapien
agggaacactcagacattagacttccatgtgac

SEQ ID NO: 604241 - DNA, 33 bp, Homo sapien
atctagatctattgcccgctacctttaggagac

SEQ ID NO: 604242 - DNA, 33 bp, Homo sapien
atctagatctattgcctgctacctttaggagac

SEQ ID NO: 604243 - DNA, 33 bp, Homo sapien
taataaaagcagcaaagataataagtagaagta

SEQ ID NO: 604244 - DNA, 33 bp, Homo sapien
taataaaagcagcaaatataataagtagaagta

SEQ ID NO: 604245 - DNA, 33 bp, Homo sapien
acacaagagcctttcaagactctgtgttacatt

SEQ ID NO: 604246 - DNA, 33 bp, Homo sapien
acacaagagcctttcaggactctgtgttacatt

SEQ ID NO: 604247 - DNA, 33 bp, Homo sapien
gaaatataaagtgggaagtctgcaaattcatgg

SEQ ID NO: 604248 - DNA, 33 bp, Homo sapien
gaaatataaagtgggaggtctgcaaattcatgg

SEQ ID NO: 604249 - DNA, 33 bp, Homo sapien
ccacttctattaaacacaggactgctctatttt

SEQ ID NO: 604250 - DNA, 33 bp, Homo sapien
ccacttctattaaacataggactgctctatttt

SEQ ID NO: 604251 - DNA, 33 bp, Homo sapien
gatatccagtttttcccgcagtatttattgaag

SEQ ID NO: 604252 - DNA, 33 bp, Homo sapien
gatatccagtttttcctgcagtatttattgaag

SEQ ID NO: 604253 - DNA, 33 bp, Homo sapien
aaactggatatctacacgtggaagaatgaaatc

SEQ ID NO: 604254 - DNA, 33 bp, Homo sapien
aaactggatatctacatgtggaagaatgaaatc

SEQ ID NO: 604255 - DNA, 33 bp, Homo sapien
tgcgtcatcctgtgaccagtgctaaaattgagg

SEQ ID NO: 604256 - DNA, 33 bp, Homo sapien
tgcgtcatcctgtgactagtgctaaaattgagg

SEQ ID NO: 604257 - DNA, 33 bp, Homo sapien
attgagggttgtattaagcagactcattcattc

SEQ ID NO: 604258 - DNA, 33 bp, Homo sapien
attgagggttgtattatgcagactcattcattc

SEQ ID NO: 604259 - DNA, 33 bp, Homo sapien
tgtgaggaagcccaaactagtccacatggagat

SEQ ID NO: 604260 - DNA, 33 bp, Homo sapien
tgtgaggaagcccaaattagtccacatggagat

SEQ ID NO: 604261 - DNA, 33 bp, Homo sapien
tcagcgaaatggtgtccagaggagcatctctgt

SEQ ID NO: 604262 - DNA, 33 bp, Homo sapien
tcagcgaaatggtgtctagaggagcatctctgt

SEQ ID NO: 604263 - DNA, 33 bp, Homo sapien
gggccactaagatccaagtttggccttgccaga

SEQ ID NO: 604264 - DNA, 33 bp, Homo sapien
gggccactaagatccaggtttggccttgccaga

SEQ ID NO: 604265 - DNA, 33 bp, Homo sapien
agcaggaggcagaaagccctgtctggaaagtct

SEQ ID NO: 604266 - DNA, 33 bp, Homo sapien
agcaggaggcagaaagtcctgtctggaaagtct

SEQ ID NO: 604267 - DNA, 33 bp, Homo sapien
gagaggagtattaacacctactttcagagattt

SEQ ID NO: 604268 - DNA, 33 bp, Homo sapien
gagaggagtattaacatctactttcagagattt

SEQ ID NO: 604269 - DNA, 33 bp, Homo sapien
catgctattgtctagaggtttgtgttctcctca

SEQ ID NO: 604270 - DNA, 33 bp, Homo sapien
catgctattgtctagatgtttgtgttctcctca

SEQ ID NO: 604271 - DNA, 33 bp, Homo sapien
ccatttatgtagctcacgactctgtgagttggc

SEQ ID NO: 604272 - DNA, 33 bp, Homo sapien
ccatttatgtagctcatgactctgtgagttggc

SEQ ID NO: 604273 - DNA, 33 bp, Homo sapien
aaactcttcaaagttcaaaatgtgccactaggt

SEQ ID NO: 604274 - DNA, 33 bp, Homo sapien
aaactcttcaaagttcgaaatgtgccactaggt

SEQ ID NO: 604275 - DNA, 33 bp, Homo sapien
ctgtgatttggtctggaaaacatgtaatgaaaa

SEQ ID NO: 604276 - DNA, 33 bp, Homo sapien
ctgtgatttggtctgggaaacatgtaatgaaaa

SEQ ID NO: 604277 - DNA, 33 bp, Homo sapien
catcagaatggggttaactttttggaggttggg

SEQ ID NO: 604278 - DNA, 33 bp, Homo sapien
catcagaatggggttacctttttggaggttggg

SEQ ID NO: 604279 - DNA, 33 bp, Homo sapien
gaggtgaacaaggggacctccaatagtgtgact

SEQ ID NO: 604280 - DNA, 33 bp, Homo sapien
gaggtgaacaaggggatctccaatagtgtgact

SEQ ID NO: 604281 - DNA, 33 bp, Homo sapien
tttccctcatctgcaacacaaagataatcatat

SEQ ID NO: 604282 - DNA, 33 bp, Homo sapien
tttccctcatctgcaatacaaagataatcatat

SEQ ID NO: 604283 - DNA, 33 bp, Homo sapien
agcaatttgactacgacctcacaggcatttttg

SEQ ID NO: 604284 - DNA, 33 bp, Homo sapien
agcaatttgactacgatctcacaggcatttttg

SEQ ID NO: 604285 - DNA, 33 bp, Homo sapien
catacattataataataagactagctaccattt

SEQ ID NO: 604286 - DNA, 33 bp, Homo sapien
catacattataataatgagactagctaccattt

SEQ ID NO: 604287 - DNA, 33 bp, Homo sapien
caccaatcagggatgcggaaataaatttgctga

SEQ ID NO: 604288 - DNA, 33 bp, Homo sapien
caccaatcagggatgctgaaataaatttgctga

SEQ ID NO: 604289 - DNA, 33 bp, Homo sapien
taggaagagataatctcaaacaacagtatatga

SEQ ID NO: 604290 - DNA, 33 bp, Homo sapien
taggaagagataatctgaaacaacagtatatga

SEQ ID NO: 604291 - DNA, 33 bp, Homo sapien
cctaatatctttccaaaaattccctttgtgctt

SEQ ID NO: 604292 - DNA, 33 bp, Homo sapien
cctaatatctttccaacaattccctttgtgctt

SEQ ID NO: 604293 - DNA, 33 bp, Homo sapien
aatggtgtctactttaaagggtggttgtgagag

SEQ ID NO: 604294 - DNA, 33 bp, Homo sapien
aatggtgtctactttatagggtggttgtgagag

SEQ ID NO: 604295 - DNA, 33 bp, Homo sapien
ccatagcaatgtctggaacctctaaaccatttt

SEQ ID NO: 604296 - DNA, 33 bp, Homo sapien
ccatagcaatgtctgggacctctaaaccatttt

SEQ ID NO: 604297 - DNA, 33 bp, Homo sapien
gacagagcatttttcccaaccagcacggtgggc

SEQ ID NO: 604298 - DNA, 33 bp, Homo sapien
gacagagcatttttcctaaccagcacggtgggc

SEQ ID NO: 604299 - DNA, 33 bp, Homo sapien
gatgttagcacgatgaacatgtatttaaaacat

SEQ ID NO: 604300 - DNA, 33 bp, Homo sapien
gatgttagcacgatgatcatgtatttaaaacat

SEQ ID NO: 604301 - DNA, 33 bp, Homo sapien
caggagcgtttggatacggagggacttttattt

SEQ ID NO: 604302 - DNA, 33 bp, Homo sapien
caggagcgtttggatatggagggacttttattt

SEQ ID NO: 604303 - DNA, 33 bp, Homo sapien
ggcagaccatggtgtgaaaaccactcagaccca

SEQ ID NO: 604304 - DNA, 33 bp, Homo sapien
ggcagaccatggtgtgcaaaccactcagaccca

SEQ ID NO: 604305 - DNA, 33 bp, Homo sapien
atgcgggccacaaggaagagccagtctggcacc

SEQ ID NO: 604306 - DNA, 33 bp, Homo sapien
atgcgggccacaaggaggagccagtctggcacc

SEQ ID NO: 604307 - DNA, 33 bp, Homo sapien
agtctggcacctacccaagtggactgaggcaag

SEQ ID NO: 604308 - DNA, 33 bp, Homo sapien
agtctggcacctacccgagtggactgaggcaag

SEQ ID NO: 604309 - DNA, 33 bp, Homo sapien
atatataatatcaaccaaaacagacagcagcca

SEQ ID NO: 604310 - DNA, 33 bp, Homo sapien
atatataatatcaaccgaaacagacagcagcca

SEQ ID NO: 604311 - DNA, 33 bp, Homo sapien
aagacccaggatgatgaagagtcactatccaga

SEQ ID NO: 604312 - DNA, 33 bp, Homo sapien
aagacccaggatgatggagagtcactatccaga

SEQ ID NO: 604313 - DNA, 33 bp, Homo sapien
gccactagaacataacaagctctaagagatcac

SEQ ID NO: 604314 - DNA, 33 bp, Homo sapien
gccactagaacataactagctctaagagatcac

SEQ ID NO: 604315 - DNA, 33 bp, Homo sapien
cctggacagtcatgacagcatcctcattggcct

SEQ ID NO: 604316 - DNA, 33 bp, Homo sapien
cctggacagtcatgacggcatcctcattggcct

SEQ ID NO: 604317 - DNA, 33 bp, Homo sapien
ggcccattttcagtataacggtctcgcagaatt

SEQ ID NO: 604318 - DNA, 33 bp, Homo sapien
ggcccattttcagtattacggtctcgcagaatt

SEQ ID NO: 604319 - DNA, 33 bp, Homo sapien
tcagattgcccactatcaagcaggttgtgctct

SEQ ID NO: 604320 - DNA, 33 bp, Homo sapien
tcagattgcccactattaagcaggttgtgctct

SEQ ID NO: 604321 - DNA, 33 bp, Homo sapien
cagactggaaggaatgaaagaatgagccatgag

SEQ ID NO: 604322 - DNA, 33 bp, Homo sapien
cagactggaaggaatggaagaatgagccatgag

SEQ ID NO: 604323 - DNA, 33 bp, Homo sapien
gctctcaactgacctacgtccagcttttcatga

SEQ ID NO: 604324 - DNA, 33 bp, Homo sapien
gctctcaactgacctatgtccagcttttcatga

SEQ ID NO: 604325 - DNA, 33 bp, Homo sapien
ctgcttcaccattttgaagtacaaacagctgta

SEQ ID NO: 604326 - DNA, 33 bp, Homo sapien
ctgcttcaccattttggagtacaaacagctgta

SEQ ID NO: 604327 - DNA, 33 bp, Homo sapien
tgtaaatggagtcccactattgtcaggccaggg

SEQ ID NO: 604328 - DNA, 33 bp, Homo sapien
tgtaaatggagtcccagtattgtcaggccaggg

SEQ ID NO: 604329 - DNA, 33 bp, Homo sapien
cagaatctttgatccacggggaagttctaaaca

SEQ ID NO: 604330 - DNA, 33 bp, Homo sapien
cagaatctttgatccatggggaagttctaaaca

SEQ ID NO: 604331 - DNA, 33 bp, Homo sapien
ctaccagccatgtcagacaagcttaaagataaa

SEQ ID NO: 604332 - DNA, 33 bp, Homo sapien
ctaccagccatgtcaggcaagcttaaagataaa

SEQ ID NO: 604333 - DNA, 33 bp, Homo sapien
gcagcaagattcaaacccaggtgagtctggctc

SEQ ID NO: 604334 - DNA, 33 bp, Homo sapien
gcagcaagattcaaactcaggtgagtctggctc

SEQ ID NO: 604335 - DNA, 33 bp, Homo sapien
agaggacaaggttcctgacactcagggcagagg

SEQ ID NO: 604336 - DNA, 33 bp, Homo sapien
agaggacaaggttccttacactcagggcagagg

SEQ ID NO: 604337 - DNA, 33 bp, Homo sapien
ggaataggctctgctgcagtagcaagtaaaccc

SEQ ID NO: 604338 - DNA, 33 bp, Homo sapien
ggaataggctctgctgtagtagcaagtaaaccc

SEQ ID NO: 604339 - DNA, 33 bp, Homo sapien
gctgtgccccttggaaatgtcaggctgtctgat

SEQ ID NO: 604340 - DNA, 33 bp, Homo sapien
gctgtgccccttggaagtgtcaggctgtctgat

SEQ ID NO: 604341 - DNA, 33 bp, Homo sapien
ggtgaaggatagggaaagttggtctccactccc

SEQ ID NO: 604342 - DNA, 33 bp, Homo sapien
ggtgaaggatagggaacgttggtctccactccc

SEQ ID NO: 604343 - DNA, 33 bp, Homo sapien
ggatggatttaaactaagttcaggaataatcta

SEQ ID NO: 604344 - DNA, 33 bp, Homo sapien
ggatggatttaaactatgttcaggaataatcta

SEQ ID NO: 604345 - DNA, 33 bp, Homo sapien
agcttggagagggtcccactggcggctctcaag

SEQ ID NO: 604346 - DNA, 33 bp, Homo sapien
agcttggagagggtcctactggcggctctcaag

SEQ ID NO: 604347 - DNA, 33 bp, Homo sapien
ggtatgtagataaagacgatctagctcaatagt

SEQ ID NO: 604348 - DNA, 33 bp, Homo sapien
ggtatgtagataaagatgatctagctcaatagt

SEQ ID NO: 604349 - DNA, 33 bp, Homo sapien
tatcatgatcatacacagataacagtgtctttc

SEQ ID NO: 604350 - DNA, 33 bp, Homo sapien
tatcatgatcatacacggataacagtgtctttc

SEQ ID NO: 604351 - DNA, 33 bp, Homo sapien
gactctgactctaagtcaaaaggcccaggaatc

SEQ ID NO: 604352 - DNA, 33 bp, Homo sapien
gactctgactctaagtgaaaaggcccaggaatc

SEQ ID NO: 604353 - DNA, 33 bp, Homo sapien
ttttctatcacctttcacctggggcctatgatt

SEQ ID NO: 604354 - DNA, 33 bp, Homo sapien
ttttctatcacctttcgcctggggcctatgatt

SEQ ID NO: 604355 - DNA, 33 bp, Homo sapien
aaattgacaaggaagacagaccaccccagtggg

SEQ ID NO: 604356 - DNA, 33 bp, Homo sapien
aaattgacaaggaagagagaccaccccagtggg

SEQ ID NO: 604357 - DNA, 33 bp, Homo sapien
catcttgttttattcaccttcacctccccagcc

SEQ ID NO: 604358 - DNA, 33 bp, Homo sapien
catcttgttttattcatcttcacctccccagcc

SEQ ID NO: 604359 - DNA, 33 bp, Homo sapien
cctagaattatccaaacatttgatccctaaaga

SEQ ID NO: 604360 - DNA, 33 bp, Homo sapien
cctagaattatccaaagatttgatccctaaaga

SEQ ID NO: 604361 - DNA, 33 bp, Homo sapien
gtccctcataagattgcagtaatgatgttattt

SEQ ID NO: 604362 - DNA, 33 bp, Homo sapien
gtccctcataagattgtagtaatgatgttattt

SEQ ID NO: 604363 - DNA, 33 bp, Homo sapien
tgtacactttcctgtcaaaaatttgaaaatggt

SEQ ID NO: 604364 - DNA, 33 bp, Homo sapien
tgtacactttcctgtcgaaaatttgaaaatggt

SEQ ID NO: 604365 - DNA, 33 bp, Homo sapien
gccaattagcagcaagaaagaggtgagctcaca

SEQ ID NO: 604366 - DNA, 33 bp, Homo sapien
gccaattagcagcaaggaagaggtgagctcaca

SEQ ID NO: 604367 - DNA, 33 bp, Homo sapien
cttggagctattggaaactattaggagaatgcc

SEQ ID NO: 604368 - DNA, 33 bp, Homo sapien
cttggagctattggaagctattaggagaatgcc

SEQ ID NO: 604369 - DNA, 33 bp, Homo sapien
agggacacccattggccgagcttgagtgagatg

SEQ ID NO: 604370 - DNA, 33 bp, Homo sapien
agggacacccattggctgagcttgagtgagatg

SEQ ID NO: 604371 - DNA, 33 bp, Homo sapien
ttaataatttgttggcaagaaatgtctattcct

SEQ ID NO: 604372 - DNA, 33 bp, Homo sapien
ttaataatttgttggccagaaatgtctattcct

SEQ ID NO: 604373 - DNA, 33 bp, Homo sapien
tcaatggggaaatccaggtttagttatccttct

SEQ ID NO: 604374 - DNA, 33 bp, Homo sapien
tcaatggggaaatccatgtttagttatccttct

SEQ ID NO: 604375 - DNA, 33 bp, Homo sapien
gctttagaacacagaagaggcaataatgaactc

SEQ ID NO: 604376 - DNA, 33 bp, Homo sapien
gctttagaacacagaataggcaataatgaactc

SEQ ID NO: 604377 - DNA, 33 bp, Homo sapien
aagaggtaaggtagacagaaggtcaggtgtgtc

SEQ ID NO: 604378 - DNA, 33 bp, Homo sapien
aagaggtaaggtagacggaaggtcaggtgtgtc

SEQ ID NO: 604379 - DNA, 33 bp, Homo sapien
actgttttcagaagacaaggatgaggcccattt

SEQ ID NO: 604380 - DNA, 33 bp, Homo sapien
actgttttcagaagacgaggatgaggcccattt

SEQ ID NO: 604381 - DNA, 33 bp, Homo sapien
aatacaagctcattgaaggccctggcccatgca

SEQ ID NO: 604382 - DNA, 33 bp, Homo sapien
aatacaagctcattgatggccctggcccatgca

SEQ ID NO: 604383 - DNA, 33 bp, Homo sapien
ggctgcttaccatatccataacacatcacgtgt

SEQ ID NO: 604384 - DNA, 33 bp, Homo sapien
ggctgcttaccatatctataacacatcacgtgt

SEQ ID NO: 604385 - DNA, 33 bp, Homo sapien
tctctctaaaatagttctctaagttgctctcct

SEQ ID NO: 604386 - DNA, 33 bp, Homo sapien
tctctctaaaatagttttctaagttgctctcct

SEQ ID NO: 604387 - DNA, 33 bp, Homo sapien
cttctgagttttaaacaactgtgcagaccaaat

SEQ ID NO: 604388 - DNA, 33 bp, Homo sapien
cttctgagttttaaactactgtgcagaccaaat

SEQ ID NO: 604389 - DNA, 33 bp, Homo sapien
cccttagtgaacatcacggtgcctgtccttcct

SEQ ID NO: 604390 - DNA, 33 bp, Homo sapien
cccttagtgaacatcatggtgcctgtccttcct

SEQ ID NO: 604391 - DNA, 33 bp, Homo sapien
ataaatgaatgtataacatatcaggtgttgata

SEQ ID NO: 604392 - DNA, 33 bp, Homo sapien
ataaatgaatgtataatatatcaggtgttgata

SEQ ID NO: 604393 - DNA, 33 bp, Homo sapien
ttgattcggaagctccacaatatcaccaggaac

SEQ ID NO: 604394 - DNA, 33 bp, Homo sapien
ttgattcggaagctccgcaatatcaccaggaac

SEQ ID NO: 604395 - DNA, 33 bp, Homo sapien
ataacagcaataataacagcaaatgtttgttta

SEQ ID NO: 604396 - DNA, 33 bp, Homo sapien
ataacagcaataataatagcaaatgtttgttta

SEQ ID NO: 604397 - DNA, 33 bp, Homo sapien
cctcatctgtccgataagactgatcaatatgac

SEQ ID NO: 604398 - DNA, 33 bp, Homo sapien
cctcatctgtccgatacgactgatcaatatgac

SEQ ID NO: 604399 - DNA, 33 bp, Homo sapien
aaccaataatatcaagaccctatgtgccaggcc

SEQ ID NO: 604400 - DNA, 33 bp, Homo sapien
aaccaataatatcaagtccctatgtgccaggcc

SEQ ID NO: 604401 - DNA, 33 bp, Homo sapien
aatgttagatgaatgaataaatcctgcattatg

SEQ ID NO: 604402 - DNA, 33 bp, Homo sapien
aatgttagatgaatgagtaaatcctgcattatg

SEQ ID NO: 604403 - DNA, 33 bp, Homo sapien
tcgagttgatgaaagagagcctttttaatgagt

SEQ ID NO: 604404 - DNA, 33 bp, Homo sapien
tcgagttgatgaaagatagcctttttaatgagt

SEQ ID NO: 604405 - DNA, 33 bp, Homo sapien
gtacatataaatacaactgattttggtaagttc

SEQ ID NO: 604406 - DNA, 33 bp, Homo sapien
gtacatataaatacaagtgattttggtaagttc

SEQ ID NO: 604407 - DNA, 33 bp, Homo sapien
ccccccgctcccaacactggtttcttcatttct

SEQ ID NO: 604408 - DNA, 33 bp, Homo sapien
ccccccgctcccaacattggtttcttcatttct

SEQ ID NO: 604409 - DNA, 33 bp, Homo sapien
gtggtgggaatgttccacgggcccccacagctc

SEQ ID NO: 604410 - DNA, 33 bp, Homo sapien
gtggtgggaatgttccgcgggcccccacagctc

SEQ ID NO: 604411 - DNA, 33 bp, Homo sapien
ctctctctcaccacaacgacagtccctctcagt

SEQ ID NO: 604412 - DNA, 33 bp, Homo sapien
ctctctctcaccacaatgacagtccctctcagt

SEQ ID NO: 604413 - DNA, 33 bp, Homo sapien
caggactaaaaagcgaatcaagtacccaggcca

SEQ ID NO: 604414 - DNA, 33 bp, Homo sapien
caggactaaaaagcgagtcaagtacccaggcca

SEQ ID NO: 604415 - DNA, 33 bp, Homo sapien
cctctgtctctttaccagaacaatgattacaaa

SEQ ID NO: 604416 - DNA, 33 bp, Homo sapien
cctctgtctctttaccggaacaatgattacaaa

SEQ ID NO: 604417 - DNA, 33 bp, Homo sapien
ttgatgtgatgtccaaagagtggccagtatgtg

SEQ ID NO: 604418 - DNA, 33 bp, Homo sapien
ttgatgtgatgtccaaggagtggccagtatgtg

SEQ ID NO: 604419 - DNA, 33 bp, Homo sapien
ttatcaatagtagtgacggatacttaaataata

SEQ ID NO: 604420 - DNA, 33 bp, Homo sapien
ttatcaatagtagtgatggatacttaaataata

SEQ ID NO: 604421 - DNA, 33 bp, Homo sapien
gacaggagcaccttgccgactctaaagtctcag

SEQ ID NO: 604422 - DNA, 33 bp, Homo sapien
gacaggagcaccttgctgactctaaagtctcag

SEQ ID NO: 604423 - DNA, 33 bp, Homo sapien
cgagacaccaaggctaagtcccagtccactcag

SEQ ID NO: 604424 - DNA, 33 bp, Homo sapien
cgagacaccaaggctaggtcccagtccactcag

SEQ ID NO: 604425 - DNA, 33 bp, Homo sapien
acagtaccgctaagtgaatccccattggcacct

SEQ ID NO: 604426 - DNA, 33 bp, Homo sapien
acagtaccgctaagtgcatccccattggcacct

SEQ ID NO: 604427 - DNA, 33 bp, Homo sapien
tctctattgcccacagaattaatcccagttcat

SEQ ID NO: 604428 - DNA, 33 bp, Homo sapien
tctctattgcccacaggattaatcccagttcat

SEQ ID NO: 604429 - DNA, 33 bp, Homo sapien
accacaatgctacaagactcagtttgctcacct

SEQ ID NO: 604430 - DNA, 33 bp, Homo sapien
accacaatgctacaagcctcagtttgctcacct

SEQ ID NO: 604431 - DNA, 33 bp, Homo sapien
agtttgaattctggcccggaaatgtactagctg

SEQ ID NO: 604432 - DNA, 33 bp, Homo sapien
agtttgaattctggcctggaaatgtactagctg

SEQ ID NO: 604433 - DNA, 33 bp, Homo sapien
ctggctcacagggaacagaaatttcactcttaa

SEQ ID NO: 604434 - DNA, 33 bp, Homo sapien
ctggctcacagggaacggaaatttcactcttaa

SEQ ID NO: 604435 - DNA, 33 bp, Homo sapien
gctgtcggattagtcaaggtgagacttggcaat

SEQ ID NO: 604436 - DNA, 33 bp, Homo sapien
gctgtcggattagtcagggtgagacttggcaat

SEQ ID NO: 604437 - DNA, 33 bp, Homo sapien
caccactctggaagaaacgaccagcgcattgta

SEQ ID NO: 604438 - DNA, 33 bp, Homo sapien
caccactctggaagaagcgaccagcgcattgta

SEQ ID NO: 604439 - DNA, 33 bp, Homo sapien
ttattcacacaagttaaaatttggaaataacct

SEQ ID NO: 604440 - DNA, 33 bp, Homo sapien
ttattcacacaagttacaatttggaaataacct

SEQ ID NO: 604441 - DNA, 33 bp, Homo sapien
tgacagctggagattacggccagatgtggtagc

SEQ ID NO: 604442 - DNA, 33 bp, Homo sapien
tgacagctggagattatggccagatgtggtagc

SEQ ID NO: 604443 - DNA, 33 bp, Homo sapien
caacactgacctgcagaagaaaacttactccct

SEQ ID NO: 604444 - DNA, 33 bp, Homo sapien
caacactgacctgcaggagaaaacttactccct

SEQ ID NO: 604445 - DNA, 33 bp, Homo sapien
atcatctttttctatcaaaggtggtgaatgtat

SEQ ID NO: 604446 - DNA, 33 bp, Homo sapien
atcatctttttctatccaaggtggtgaatgtat

SEQ ID NO: 604447 - DNA, 33 bp, Homo sapien
gggctttcctgctagacaagaaatgtttctgga

SEQ ID NO: 604448 - DNA, 33 bp, Homo sapien
gggctttcctgctagataagaaatgtttctgga

SEQ ID NO: 604449 - DNA, 33 bp, Homo sapien
agtattaccaactaccccaaaagctccatcccc

SEQ ID NO: 604450 - DNA, 33 bp, Homo sapien
agtattaccaactacctcaaaagctccatcccc

SEQ ID NO: 604451 - DNA, 33 bp, Homo sapien
agctgtgagtccattaaaaagattcctacagcc

SEQ ID NO: 604452 - DNA, 33 bp, Homo sapien
agctgtgagtccattagaaagattcctacagcc

SEQ ID NO: 604453 - DNA, 33 bp, Homo sapien
ttccttgtttgacaaccgggttgcttccaatat

SEQ ID NO: 604454 - DNA, 33 bp, Homo sapien
ttccttgtttgacaactgggttgcttccaatat

SEQ ID NO: 604455 - DNA, 33 bp, Homo sapien
ttctgctctgttttcccgagtcctgatgactgt

SEQ ID NO: 604456 - DNA, 33 bp, Homo sapien
ttctgctctgttttcctgagtcctgatgactgt

SEQ ID NO: 604457 - DNA, 33 bp, Homo sapien
ggaggaggaaaagaccacctcctacaggaaaga

SEQ ID NO: 604458 - DNA, 33 bp, Homo sapien
ggaggaggaaaagaccgcctcctacaggaaaga

SEQ ID NO: 604459 - DNA, 33 bp, Homo sapien
aggtgagtttcatgagcatgtgaccagtctgtg

SEQ ID NO: 604460 - DNA, 33 bp, Homo sapien
aggtgagtttcatgaggatgtgaccagtctgtg

SEQ ID NO: 604461 - DNA, 33 bp, Homo sapien
ctgtcctggaggtttaagtcttctcaactacag

SEQ ID NO: 604462 - DNA, 33 bp, Homo sapien
ctgtcctggaggtttaggtcttctcaactacag

SEQ ID NO: 604463 - DNA, 33 bp, Homo sapien
caaggcttgtagagcaaagagaaacaggggcaa

SEQ ID NO: 604464 - DNA, 33 bp, Homo sapien
caaggcttgtagagcagagagaaacaggggcaa

SEQ ID NO: 604465 - DNA, 33 bp, Homo sapien
cagggcactgaacatcacaggaatactaggaag

SEQ ID NO: 604466 - DNA, 33 bp, Homo sapien
cagggcactgaacatcgcaggaatactaggaag

SEQ ID NO: 604467 - DNA, 33 bp, Homo sapien
ttcagtgatggcaaaaagaaagttttgtttatt

SEQ ID NO: 604468 - DNA, 33 bp, Homo sapien
ttcagtgatggcaaaatgaaagttttgtttatt

SEQ ID NO: 604469 - DNA, 33 bp, Homo sapien
catcactgtaccttcaaaggatattatactgtt

SEQ ID NO: 604470 - DNA, 33 bp, Homo sapien
catcactgtaccttcagaggatattatactgtt

SEQ ID NO: 604471 - DNA, 33 bp, Homo sapien
tttctgtacagggagacagataaaaacagacag

SEQ ID NO: 604472 - DNA, 33 bp, Homo sapien
tttctgtacagggagatagataaaaacagacag

SEQ ID NO: 604473 - DNA, 33 bp, Homo sapien
tgcccagaagtacaggaaagttgcacttggtgc

SEQ ID NO: 604474 - DNA, 33 bp, Homo sapien
tgcccagaagtacaggcaagttgcacttggtgc

SEQ ID NO: 604475 - DNA, 33 bp, Homo sapien
gactccgctttctaggaatagcatactgaaccc

SEQ ID NO: 604476 - DNA, 33 bp, Homo sapien
gactccgctttctagggatagcatactgaaccc

SEQ ID NO: 604477 - DNA, 33 bp, Homo sapien
ctgcacctggccagaaactatgtctttctttgg

SEQ ID NO: 604478 - DNA, 33 bp, Homo sapien
ctgcacctggccagaacctatgtctttctttgg

SEQ ID NO: 604479 - DNA, 33 bp, Homo sapien
ctcagtaaaacaagtccctttctctccctgttg

SEQ ID NO: 604480 - DNA, 33 bp, Homo sapien
ctcagtaaaacaagtctctttctctccctgttg

SEQ ID NO: 604481 - DNA, 33 bp, Homo sapien
tgctctctggatgatcacacaagcggatgctgc

SEQ ID NO: 604482 - DNA, 33 bp, Homo sapien
tgctctctggatgatcgcacaagcggatgctgc

SEQ ID NO: 604483 - DNA, 33 bp, Homo sapien
gaaaggtgttatgccacgcagagacagtgaatt

SEQ ID NO: 604484 - DNA, 33 bp, Homo sapien
gaaaggtgttatgccatgcagagacagtgaatt

SEQ ID NO: 604485 - DNA, 33 bp, Homo sapien
aaccttgaggttagaaagagtttggtgtccaag

SEQ ID NO: 604486 - DNA, 33 bp, Homo sapien
aaccttgaggttagaatgagtttggtgtccaag

SEQ ID NO: 604487 - DNA, 33 bp, Homo sapien
gtgtcagaggaggttcaaaaaggatgactttaa

SEQ ID NO: 604488 - DNA, 33 bp, Homo sapien
gtgtcagaggaggttccaaaaggatgactttaa

SEQ ID NO: 604489 - DNA, 33 bp, Homo sapien
gcaaatactgtaggataacagctgaagaggctg

SEQ ID NO: 604490 - DNA, 33 bp, Homo sapien
gcaaatactgtaggatgacagctgaagaggctg

SEQ ID NO: 604491 - DNA, 33 bp, Homo sapien
aagcattgaaccagataaactatctctctgaca

SEQ ID NO: 604492 - DNA, 33 bp, Homo sapien
aagcattgaaccagatgaactatctctctgaca

SEQ ID NO: 604493 - DNA, 33 bp, Homo sapien
ccttgaagctggtgtcaaactgctgagttaacc

SEQ ID NO: 604494 - DNA, 33 bp, Homo sapien
ccttgaagctggtgtcgaactgctgagttaacc

SEQ ID NO: 604495 - DNA, 33 bp, Homo sapien
ccagacaccagacatcagacatcagataccaga

SEQ ID NO: 604496 - DNA, 33 bp, Homo sapien
ccagacaccagacatcggacatcagataccaga

SEQ ID NO: 604497 - DNA, 33 bp, Homo sapien
acactgctcttggaaaatgaggcctgaaaaccc

SEQ ID NO: 604498 - DNA, 33 bp, Homo sapien
acactgctcttggaaactgaggcctgaaaaccc

SEQ ID NO: 604499 - DNA, 33 bp, Homo sapien
tagaaaacctcaaacactagctttagaagaaga

SEQ ID NO: 604500 - DNA, 33 bp, Homo sapien
tagaaaacctcaaacattagctttagaagaaga

SEQ ID NO: 604501 - DNA, 33 bp, Homo sapien
cttattggctgttttccatggatgtgacgtcca

SEQ ID NO: 604502 - DNA, 33 bp, Homo sapien
cttattggctgttttctatggatgtgacgtcca

SEQ ID NO: 604503 - DNA, 33 bp, Homo sapien
attgtattgttatctacctcatttcttaggtct

SEQ ID NO: 604504 - DNA, 33 bp, Homo sapien
attgtattgttatctatctcatttcttaggtct

SEQ ID NO: 604505 - DNA, 33 bp, Homo sapien
tgtgcacttccttgcgcatcaattatacctcaa

SEQ ID NO: 604506 - DNA, 33 bp, Homo sapien
tgtgcacttccttgcgtatcaattatacctcaa

SEQ ID NO: 604507 - DNA, 33 bp, Homo sapien
atttctaaaatgccaacaggactgacaacactg

SEQ ID NO: 604508 - DNA, 33 bp, Homo sapien
atttctaaaatgccaataggactgacaacactg

SEQ ID NO: 604509 - DNA, 33 bp, Homo sapien
tccttcttttagtgacaatgaagctctccaatg

SEQ ID NO: 604510 - DNA, 33 bp, Homo sapien
tccttcttttagtgacgatgaagctctccaatg

SEQ ID NO: 604511 - DNA, 33 bp, Homo sapien
ggtgtgacagatagcacaagtatagagtacatg

SEQ ID NO: 604512 - DNA, 33 bp, Homo sapien
ggtgtgacagatagcagaagtatagagtacatg

SEQ ID NO: 604513 - DNA, 33 bp, Homo sapien
ttaagtcagcacgtgaagcgaacagtgtaagta

SEQ ID NO: 604514 - DNA, 33 bp, Homo sapien
ttaagtcagcacgtgaggcgaacagtgtaagta

SEQ ID NO: 604515 - DNA, 33 bp, Homo sapien
tttggtttctgtttctaaaaagtaattgccaag

SEQ ID NO: 604516 - DNA, 33 bp, Homo sapien
tttggtttctgtttctgaaaagtaattgccaag

SEQ ID NO: 604517 - DNA, 33 bp, Homo sapien
tatcttctatgcggcactagccaaaaaagaaga

SEQ ID NO: 604518 - DNA, 33 bp, Homo sapien
tatcttctatgcggcattagccaaaaaagaaga

SEQ ID NO: 604519 - DNA, 33 bp, Homo sapien
tatcttgaagcagtgcaattaatttcttcttcc

SEQ ID NO: 604520 - DNA, 33 bp, Homo sapien
tatcttgaagcagtgcgattaatttcttcttcc

SEQ ID NO: 604521 - DNA, 33 bp, Homo sapien
tatcttctatgttacgccatcctgagaacctgg

SEQ ID NO: 604522 - DNA, 33 bp, Homo sapien
tatcttctatgttacggcatcctgagaacctgg

SEQ ID NO: 604523 - DNA, 33 bp, Homo sapien
tatctgttataaactcaacaaatatagctcaga

SEQ ID NO: 604524 - DNA, 33 bp, Homo sapien
tatctgttataaactcgacaaatatagctcaga

SEQ ID NO: 604525 - DNA, 33 bp, Homo sapien
tgcatacataatcacaaatcttaccaacagctc

SEQ ID NO: 604526 - DNA, 33 bp, Homo sapien
tgcatacataatcacagatcttaccaacagctc

SEQ ID NO: 604527 - DNA, 33 bp, Homo sapien
gaggtttcgcaagacactaagaatggaaaatat

SEQ ID NO: 604528 - DNA, 33 bp, Homo sapien
gaggtttcgcaagacagtaagaatggaaaatat

SEQ ID NO: 604529 - DNA, 33 bp, Homo sapien
cattagaatcaccatcggagggatgtcaattcc

SEQ ID NO: 604530 - DNA, 33 bp, Homo sapien
cattagaatcaccatctgagggatgtcaattcc

SEQ ID NO: 604531 - DNA, 33 bp, Homo sapien
agacagatatcaagaaacccattttccatttct

SEQ ID NO: 604532 - DNA, 33 bp, Homo sapien
agacagatatcaagaatcccattttccatttct

SEQ ID NO: 604533 - DNA, 33 bp, Homo sapien
ttcatcattcatgtaacaccaattagtgcctcc

SEQ ID NO: 604534 - DNA, 33 bp, Homo sapien
ttcatcattcatgtaataccaattagtgcctcc

SEQ ID NO: 604535 - DNA, 33 bp, Homo sapien
ctacctaataagtgccaagcattgaacatatat

SEQ ID NO: 604536 - DNA, 33 bp, Homo sapien
ctacctaataagtgccgagcattgaacatatat

SEQ ID NO: 604537 - DNA, 33 bp, Homo sapien
gctccgaaagagagaacactgcgcaggcagcct

SEQ ID NO: 604538 - DNA, 33 bp, Homo sapien
gctccgaaagagagaagactgcgcaggcagcct

SEQ ID NO: 604539 - DNA, 33 bp, Homo sapien
acttaagctcttcctgcaactcagttttctcat

SEQ ID NO: 604540 - DNA, 33 bp, Homo sapien
acttaagctcttcctggaactcagttttctcat

SEQ ID NO: 604541 - DNA, 33 bp, Homo sapien
gaagggacttgcctgggcatacactaagtaatg

SEQ ID NO: 604542 - DNA, 33 bp, Homo sapien
gaagggacttgcctggtcatacactaagtaatg

SEQ ID NO: 604543 - DNA, 33 bp, Homo sapien
tgaagagtgtttacaaagctgcgagagccacca

SEQ ID NO: 604544 - DNA, 33 bp, Homo sapien
tgaagagtgtttacaaggctgcgagagccacca

SEQ ID NO: 604545 - DNA, 33 bp, Homo sapien
caagctctgaaatacaaggagtacaaggctgaa

SEQ ID NO: 604546 - DNA, 33 bp, Homo sapien
caagctctgaaatacacggagtacaaggctgaa

SEQ ID NO: 604547 - DNA, 33 bp, Homo sapien
tgctgggaaacagcaaaatcagtacctggcata

SEQ ID NO: 604548 - DNA, 33 bp, Homo sapien
tgctgggaaacagcaatatcagtacctggcata

SEQ ID NO: 604549 - DNA, 33 bp, Homo sapien
actttactgctgtaaactcactcaagccttata

SEQ ID NO: 604550 - DNA, 33 bp, Homo sapien
actttactgctgtaaattcactcaagccttata

SEQ ID NO: 604551 - DNA, 33 bp, Homo sapien
cttccagggactctcaacctagccagagaggtt

SEQ ID NO: 604552 - DNA, 33 bp, Homo sapien
cttccagggactctcagcctagccagagaggtt

SEQ ID NO: 604553 - DNA, 33 bp, Homo sapien
aaacaacaacaacaacaaacattcaggctggca

SEQ ID NO: 604554 - DNA, 33 bp, Homo sapien
aaacaacaacaacaacgaacattcaggctggca

SEQ ID NO: 604555 - DNA, 33 bp, Homo sapien
tgtctgctgtcagctcactgtgtggtgcccttt

SEQ ID NO: 604556 - DNA, 33 bp, Homo sapien
tgtctgctgtcagctcgctgtgtggtgcccttt

SEQ ID NO: 604557 - DNA, 33 bp, Homo sapien
agaagtttggcctgaccaccagcaggggccgtg

SEQ ID NO: 604558 - DNA, 33 bp, Homo sapien
agaagtttggcctgactaccagcaggggccgtg

SEQ ID NO: 604559 - DNA, 33 bp, Homo sapien
catgtctcccaagtcaaaggtgatttctgctgg

SEQ ID NO: 604560 - DNA, 33 bp, Homo sapien
catgtctcccaagtcagaggtgatttctgctgg

SEQ ID NO: 604561 - DNA, 33 bp, Homo sapien
aggccaaccaacttgcccaaagtcatagagtga

SEQ ID NO: 604562 - DNA, 33 bp, Homo sapien
aggccaaccaacttgctcaaagtcatagagtga

SEQ ID NO: 604563 - DNA, 33 bp, Homo sapien
aagcgctgtacgacaacaatcgaagcactgtgg

SEQ ID NO: 604564 - DNA, 33 bp, Homo sapien
aagcgctgtacgacaagaatcgaagcactgtgg

SEQ ID NO: 604565 - DNA, 33 bp, Homo sapien
tcagagcccggaacaaacaatcttgaaatcttg

SEQ ID NO: 604566 - DNA, 33 bp, Homo sapien
tcagagcccggaacaatcaatcttgaaatcttg

SEQ ID NO: 604567 - DNA, 33 bp, Homo sapien
agatgggttgctatcaacatggtagatggtgcc

SEQ ID NO: 604568 - DNA, 33 bp, Homo sapien
agatgggttgctatcagcatggtagatggtgcc

SEQ ID NO: 604569 - DNA, 33 bp, Homo sapien
actgtgacctgcagaacggcaggactgtggcca

SEQ ID NO: 604570 - DNA, 33 bp, Homo sapien
actgtgacctgcagaagggcaggactgtggcca

SEQ ID NO: 604571 - DNA, 33 bp, Homo sapien
tcctggtgagccagtcaaaactagaagcctggc

SEQ ID NO: 604572 - DNA, 33 bp, Homo sapien
tcctggtgagccagtcgaaactagaagcctggc

SEQ ID NO: 604573 - DNA, 33 bp, Homo sapien
gagacagcccagacccagagctgagccagactg

SEQ ID NO: 604574 - DNA, 33 bp, Homo sapien
gagacagcccagacccggagctgagccagactg

SEQ ID NO: 604575 - DNA, 33 bp, Homo sapien
ggtgcgaacctgtattaaacactgtccagcacc

SEQ ID NO: 604576 - DNA, 33 bp, Homo sapien
ggtgcgaacctgtattgaacactgtccagcacc

SEQ ID NO: 604577 - DNA, 33 bp, Homo sapien
tttctagcttttgaaaaccacatggtttgacta

SEQ ID NO: 604578 - DNA, 33 bp, Homo sapien
tttctagcttttgaaacccacatggtttgacta

SEQ ID NO: 604579 - DNA, 33 bp, Homo sapien
aatggaagcattcgtaactctttccaacctctt

SEQ ID NO: 604580 - DNA, 33 bp, Homo sapien
aatggaagcattcgtatctctttccaacctctt

SEQ ID NO: 604581 - DNA, 33 bp, Homo sapien
cttctaaaccctgttacaaagcttggctgccgg

SEQ ID NO: 604582 - DNA, 33 bp, Homo sapien
cttctaaaccctgttagaaagcttggctgccgg

SEQ ID NO: 604583 - DNA, 33 bp, Homo sapien
gaagaacagtttcaccaaaggaaataccaaatg

SEQ ID NO: 604584 - DNA, 33 bp, Homo sapien
gaagaacagtttcaccgaaggaaataccaaatg

SEQ ID NO: 604585 - DNA, 33 bp, Homo sapien
aaacagatatggagagcaccagatgaaaatatt

SEQ ID NO: 604586 - DNA, 33 bp, Homo sapien
aaacagatatggagaggaccagatgaaaatatt

SEQ ID NO: 604587 - DNA, 33 bp, Homo sapien
tctgaagtggcatcgcagagtcccatgacccta

SEQ ID NO: 604588 - DNA, 33 bp, Homo sapien
tctgaagtggcatcgccgagtcccatgacccta

SEQ ID NO: 604589 - DNA, 33 bp, Homo sapien
cacagacacgtctataaatctatccagagcaga

SEQ ID NO: 604590 - DNA, 33 bp, Homo sapien
cacagacacgtctatacatctatccagagcaga

SEQ ID NO: 604591 - DNA, 33 bp, Homo sapien
gtgtgtgcacccagaacgaatcctggagaacca

SEQ ID NO: 604592 - DNA, 33 bp, Homo sapien
gtgtgtgcacccagaatgaatcctggagaacca

SEQ ID NO: 604593 - DNA, 33 bp, Homo sapien
tgagctggccacatccactgtgagtctggggct

SEQ ID NO: 604594 - DNA, 33 bp, Homo sapien
tgagctggccacatccgctgtgagtctggggct

SEQ ID NO: 604595 - DNA, 33 bp, Homo sapien
ttggaggtatcaaaacagcccacatctagtttg

SEQ ID NO: 604596 - DNA, 33 bp, Homo sapien
ttggaggtatcaaaacggcccacatctagtttg

SEQ ID NO: 604597 - DNA, 33 bp, Homo sapien
gaggtctcgccttcaccgagcttagcggtatga

SEQ ID NO: 604598 - DNA, 33 bp, Homo sapien
gaggtctcgccttcactgagcttagcggtatga

SEQ ID NO: 604599 - DNA, 33 bp, Homo sapien
atgtctccggacctacagcttcttctgtaagcc

SEQ ID NO: 604600 - DNA, 33 bp, Homo sapien
atgtctccggacctacggcttcttctgtaagcc

SEQ ID NO: 604601 - DNA, 33 bp, Homo sapien
ccatgattgttacaaaaccgtattcagacacct

SEQ ID NO: 604602 - DNA, 33 bp, Homo sapien
ccatgattgttacaaagccgtattcagacacct

SEQ ID NO: 604603 - DNA, 33 bp, Homo sapien
agttccaggaaaaaaccggcttattctgggtga

SEQ ID NO: 604604 - DNA, 33 bp, Homo sapien
agttccaggaaaaaactggcttattctgggtga

SEQ ID NO: 604605 - DNA, 33 bp, Homo sapien
caagacagaaacaaagcaaaagtatctatctct

SEQ ID NO: 604606 - DNA, 33 bp, Homo sapien
caagacagaaacaaaggaaaagtatctatctct

SEQ ID NO: 604607 - DNA, 33 bp, Homo sapien
gccagaaggttctagaagggcggtcagttcttc

SEQ ID NO: 604608 - DNA, 33 bp, Homo sapien
gccagaaggttctagaggggcggtcagttcttc

SEQ ID NO: 604609 - DNA, 33 bp, Homo sapien
atgctttgaccaatagaatgtggcaaaagtgag

SEQ ID NO: 604610 - DNA, 33 bp, Homo sapien
atgctttgaccaataggatgtggcaaaagtgag

SEQ ID NO: 604611 - DNA, 33 bp, Homo sapien
gaaaggatgaatgaacagatattgagtgagtga

SEQ ID NO: 604612 - DNA, 33 bp, Homo sapien
gaaaggatgaatgaacggatattgagtgagtga

SEQ ID NO: 604613 - DNA, 33 bp, Homo sapien
aaggcggccccgacagccatgagtaatcgatct

SEQ ID NO: 604614 - DNA, 33 bp, Homo sapien
aaggcggccccgacaggcatgagtaatcgatct

SEQ ID NO: 604615 - DNA, 33 bp, Homo sapien
gtacccgctgcaatgaataaggctaatgacaga

SEQ ID NO: 604616 - DNA, 33 bp, Homo sapien
gtacccgctgcaatgagtaaggctaatgacaga

SEQ ID NO: 604617 - DNA, 33 bp, Homo sapien
gggtgctcttccgttcacaataaaaggctgagc

SEQ ID NO: 604618 - DNA, 33 bp, Homo sapien
gggtgctcttccgttcccaataaaaggctgagc

SEQ ID NO: 604619 - DNA, 33 bp, Homo sapien
caccaaagcacttggcaatttgtcacatggggt

SEQ ID NO: 604620 - DNA, 33 bp, Homo sapien
caccaaagcacttggcgatttgtcacatggggt

SEQ ID NO: 604621 - DNA, 33 bp, Homo sapien
atacttttactagaaaattatgtcactcagacc

SEQ ID NO: 604622 - DNA, 33 bp, Homo sapien
atacttttactagaaagttatgtcactcagacc

SEQ ID NO: 604623 - DNA, 33 bp, Homo sapien
aaggtcagcccagcgccgactgtcagagtgtgt

SEQ ID NO: 604624 - DNA, 33 bp, Homo sapien
aaggtcagcccagcgcggactgtcagagtgtgt

SEQ ID NO: 604625 - DNA, 33 bp, Homo sapien
gcaatctttaggatgacagcagttagcgggtac

SEQ ID NO: 604626 - DNA, 33 bp, Homo sapien
gcaatctttaggatgagagcagttagcgggtac

SEQ ID NO: 604627 - DNA, 33 bp, Homo sapien
cagtgagagaacagtccattgcagacccagatc

SEQ ID NO: 604628 - DNA, 33 bp, Homo sapien
cagtgagagaacagtcgattgcagacccagatc

SEQ ID NO: 604629 - DNA, 33 bp, Homo sapien
aaacaaacatggctaacgaaattccatcattct

SEQ ID NO: 604630 - DNA, 33 bp, Homo sapien
aaacaaacatggctaatgaaattccatcattct

SEQ ID NO: 604631 - DNA, 33 bp, Homo sapien
acagcccagtggggcaaataaacagatgacaga

SEQ ID NO: 604632 - DNA, 33 bp, Homo sapien
acagcccagtggggcagataaacagatgacaga

SEQ ID NO: 604633 - DNA, 33 bp, Homo sapien
tgttagcaaaaatagcagaagggccgagcgtgg

SEQ ID NO: 604634 - DNA, 33 bp, Homo sapien
tgttagcaaaaatagcggaagggccgagcgtgg

SEQ ID NO: 604635 - DNA, 33 bp, Homo sapien
acagacagcaaactcaaagaaataccttgagac

SEQ ID NO: 604636 - DNA, 33 bp, Homo sapien
acagacagcaaactcagagaaataccttgagac

SEQ ID NO: 604637 - DNA, 33 bp, Homo sapien
tcacggtgattgctctcacagtcaagtacgact

SEQ ID NO: 604638 - DNA, 33 bp, Homo sapien
tcacggtgattgctcttacagtcaagtacgact

SEQ ID NO: 604639 - DNA, 33 bp, Homo sapien
tggagtccgcttccacactgagcagaggacctg

SEQ ID NO: 604640 - DNA, 33 bp, Homo sapien
tggagtccgcttccacgctgagcagaggacctg

SEQ ID NO: 604641 - DNA, 33 bp, Homo sapien
gtaccttgttatggagaaaaattgaatccaaca

SEQ ID NO: 604642 - DNA, 33 bp, Homo sapien
gtaccttgttatggagcaaaattgaatccaaca

SEQ ID NO: 604643 - DNA, 33 bp, Homo sapien
ccctggctcaagcaaaagtcagcggctctgcgt

SEQ ID NO: 604644 - DNA, 33 bp, Homo sapien
ccctggctcaagcaaatgtcagcggctctgcgt

SEQ ID NO: 604645 - DNA, 33 bp, Homo sapien
cgcgcctcggagcggaagctcgttgtttttgag

SEQ ID NO: 604646 - DNA, 33 bp, Homo sapien
cgcgcctcggagcggacgctcgttgtttttgag

SEQ ID NO: 604647 - DNA, 33 bp, Homo sapien
tctaaatcccaaccgaacttcttccaacctcca

SEQ ID NO: 604648 - DNA, 33 bp, Homo sapien
tctaaatcccaaccgagcttcttccaacctcca

SEQ ID NO: 604649 - DNA, 33 bp, Homo sapien
acagtggaacggagccactgcataattgagaaa

SEQ ID NO: 604650 - DNA, 33 bp, Homo sapien
acagtggaacggagccgctgcataattgagaaa

SEQ ID NO: 604651 - DNA, 33 bp, Homo sapien
acaagcaattggtttgaacctcctgagatgggt

SEQ ID NO: 604652 - DNA, 33 bp, Homo sapien
acaagcaattggtttggacctcctgagatgggt

SEQ ID NO: 604653 - DNA, 33 bp, Homo sapien
aaattaaaaatgctaaatgtgttcattctcaac

SEQ ID NO: 604654 - DNA, 33 bp, Homo sapien
aaattaaaaatgctaagtgtgttcattctcaac

SEQ ID NO: 604655 - DNA, 33 bp, Homo sapien
tctttaagtcctcagacgccttcatctcgtcct

SEQ ID NO: 604656 - DNA, 33 bp, Homo sapien
tctttaagtcctcagatgccttcatctcgtcct

SEQ ID NO: 604657 - DNA, 33 bp, Homo sapien
aaagacataaacacaccacgatgccattacagt

SEQ ID NO: 604658 - DNA, 33 bp, Homo sapien
aaagacataaacacactacgatgccattacagt

SEQ ID NO: 604659 - DNA, 33 bp, Homo sapien
tcagtaatgggctttcaaatgaatgaatgaaca

SEQ ID NO: 604660 - DNA, 33 bp, Homo sapien
tcagtaatgggctttcgaatgaatgaatgaaca

SEQ ID NO: 604661 - DNA, 33 bp, Homo sapien
atgttcagataaaccaaatgccaacctgtaacc

SEQ ID NO: 604662 - DNA, 33 bp, Homo sapien
atgttcagataaaccagatgccaacctgtaacc

SEQ ID NO: 604663 - DNA, 33 bp, Homo sapien
ggttttaaaagaagtaaggtcaggtacagtagc

SEQ ID NO: 604664 - DNA, 33 bp, Homo sapien
ggttttaaaagaagtagggtcaggtacagtagc

SEQ ID NO: 604665 - DNA, 33 bp, Homo sapien
gtttaatgatgtttctcaataacaaatgatttg

SEQ ID NO: 604666 - DNA, 33 bp, Homo sapien
gtttaatgatgtttctgaataacaaatgatttg

SEQ ID NO: 604667 - DNA, 33 bp, Homo sapien
acacctctgctccagtaaatcctgtatcagctg

SEQ ID NO: 604668 - DNA, 33 bp, Homo sapien
acacctctgctccagtgaatcctgtatcagctg

SEQ ID NO: 604669 - DNA, 33 bp, Homo sapien
gtagctgcaaagatcaacaacgccactgtgtat

SEQ ID NO: 604670 - DNA, 33 bp, Homo sapien
gtagctgcaaagatcagcaacgccactgtgtat

SEQ ID NO: 604671 - DNA, 33 bp, Homo sapien
ctcaaggtatgctagacaaaaagaaacagcaaa

SEQ ID NO: 604672 - DNA, 33 bp, Homo sapien
ctcaaggtatgctagagaaaaagaaacagcaaa

SEQ ID NO: 604673 - DNA, 33 bp, Homo sapien
gacataaaagatgccacaggttagcccaccctg

SEQ ID NO: 604674 - DNA, 33 bp, Homo sapien
gacataaaagatgccataggttagcccaccctg

SEQ ID NO: 604675 - DNA, 33 bp, Homo sapien
agcagtgggtcagagacagacctttgttctctt

SEQ ID NO: 604676 - DNA, 33 bp, Homo sapien
agcagtgggtcagagatagacctttgttctctt

SEQ ID NO: 604677 - DNA, 33 bp, Homo sapien
agagagaatagattgtaaatgcttcttatcagc

SEQ ID NO: 604678 - DNA, 33 bp, Homo sapien
agagagaatagattgtgaatgcttcttatcagc

SEQ ID NO: 604679 - DNA, 33 bp, Homo sapien
tctccacaacctcttacaacccaggcattcctt

SEQ ID NO: 604680 - DNA, 33 bp, Homo sapien
tctccacaacctcttataacccaggcattcctt

SEQ ID NO: 604681 - DNA, 33 bp, Homo sapien
tctgcaagactttgacagaagagtcaggcctgt

SEQ ID NO: 604682 - DNA, 33 bp, Homo sapien
tctgcaagactttgacggaagagtcaggcctgt

SEQ ID NO: 604683 - DNA, 33 bp, Homo sapien
gtccatttccagcaaacgtgaagaattcctata

SEQ ID NO: 604684 - DNA, 33 bp, Homo sapien
gtccatttccagcaaatgtgaagaattcctata

SEQ ID NO: 604685 - DNA, 33 bp, Homo sapien
tttttaatccaagcgacgtttgtgaagagcaca

SEQ ID NO: 604686 - DNA, 33 bp, Homo sapien
tttttaatccaagcgatgtttgtgaagagcaca

SEQ ID NO: 604687 - DNA, 33 bp, Homo sapien
tcagaaaaaaatcagcacagaggaaagcgtata

SEQ ID NO: 604688 - DNA, 33 bp, Homo sapien
tcagaaaaaaatcagcgcagaggaaagcgtata

SEQ ID NO: 604689 - DNA, 33 bp, Homo sapien
ataagtataaaagccacgcgaaaaataatacgg

SEQ ID NO: 604690 - DNA, 33 bp, Homo sapien
ataagtataaaagccatgcgaaaaataatacgg

SEQ ID NO: 604691 - DNA, 33 bp, Homo sapien
agaagaatacaccggcagatgctgacaggtcat

SEQ ID NO: 604692 - DNA, 33 bp, Homo sapien
agaagaatacaccggcggatgctgacaggtcat

SEQ ID NO: 604693 - DNA, 33 bp, Homo sapien
tgtctataaacttcagacaataaatgttcctac

SEQ ID NO: 604694 - DNA, 33 bp, Homo sapien
tgtctataaacttcagtcaataaatgttcctac

SEQ ID NO: 604695 - DNA, 33 bp, Homo sapien
ttttaattactgtgggcagtctaaatcagattg

SEQ ID NO: 604696 - DNA, 33 bp, Homo sapien
ttttaattactgtgggtagtctaaatcagattg

SEQ ID NO: 604697 - DNA, 33 bp, Homo sapien
cagttaagaaagcttcaaaggacaaaaacaagg

SEQ ID NO: 604698 - DNA, 33 bp, Homo sapien
cagttaagaaagcttcgaaggacaaaaacaagg

SEQ ID NO: 604699 - DNA, 33 bp, Homo sapien
cttgataggtaacaaacgagactttcagtagca

SEQ ID NO: 604700 - DNA, 33 bp, Homo sapien
cttgataggtaacaaatgagactttcagtagca

SEQ ID NO: 604701 - DNA, 33 bp, Homo sapien
catttttctgaagagccgatgatttaagctata

SEQ ID NO: 604702 - DNA, 33 bp, Homo sapien
catttttctgaagagctgatgatttaagctata

SEQ ID NO: 604703 - DNA, 33 bp, Homo sapien
gctaaggataaggtaaatcagtctcatgccaga

SEQ ID NO: 604704 - DNA, 33 bp, Homo sapien
gctaaggataaggtaagtcagtctcatgccaga

SEQ ID NO: 604705 - DNA, 33 bp, Homo sapien
atgagcatagtgaacacaatccaagaagagggg

SEQ ID NO: 604706 - DNA, 33 bp, Homo sapien
atgagcatagtgaacataatccaagaagagggg

SEQ ID NO: 604707 - DNA, 33 bp, Homo sapien
gccctagccaggggtcacctttctctatccagc

SEQ ID NO: 604708 - DNA, 33 bp, Homo sapien
gccctagccaggggtcgcctttctctatccagc

SEQ ID NO: 604709 - DNA, 33 bp, Homo sapien
tttactgataaatgaactgtggcctaatgaggt

SEQ ID NO: 604710 - DNA, 33 bp, Homo sapien
tttactgataaatgaattgtggcctaatgaggt

SEQ ID NO: 604711 - DNA, 33 bp, Homo sapien
tcaccttatataggaaggcaaatgcttcatgag

SEQ ID NO: 604712 - DNA, 33 bp, Homo sapien
tcaccttatataggaatgcaaatgcttcatgag

SEQ ID NO: 604713 - DNA, 33 bp, Homo sapien
aaacaacactgaggtacagaaatgagatgtatg

SEQ ID NO: 604714 - DNA, 33 bp, Homo sapien
aaacaacactgaggtagagaaatgagatgtatg

SEQ ID NO: 604715 - DNA, 33 bp, Homo sapien
aagttggatgttaaaaatatttgtagaaatgta

SEQ ID NO: 604716 - DNA, 33 bp, Homo sapien
aagttggatgttaaaattatttgtagaaatgta

SEQ ID NO: 604717 - DNA, 33 bp, Homo sapien
aatgctgaggggaatagcacgtaaaaaggtaga

SEQ ID NO: 604718 - DNA, 33 bp, Homo sapien
aatgctgaggggaatatcacgtaaaaaggtaga

SEQ ID NO: 604719 - DNA, 33 bp, Homo sapien
acttctgtgcacataaatgtttatagatatata

SEQ ID NO: 604720 - DNA, 33 bp, Homo sapien
acttctgtgcacataagtgtttatagatatata

SEQ ID NO: 604721 - DNA, 33 bp, Homo sapien
agagtctatgcacacacggatacttttttactt

SEQ ID NO: 604722 - DNA, 33 bp, Homo sapien
agagtctatgcacacatggatacttttttactt

SEQ ID NO: 604723 - DNA, 33 bp, Homo sapien
gaactgagtagaggtcaacattcacctagagag

SEQ ID NO: 604724 - DNA, 33 bp, Homo sapien
gaactgagtagaggtcgacattcacctagagag

SEQ ID NO: 604725 - DNA, 33 bp, Homo sapien
aaaaaagacaaaacccactgttgtttcataggc

SEQ ID NO: 604726 - DNA, 33 bp, Homo sapien
aaaaaagacaaaacccgctgttgtttcataggc

SEQ ID NO: 604727 - DNA, 33 bp, Homo sapien
ggacacattctggggaagtcatctctcttccat

SEQ ID NO: 604728 - DNA, 33 bp, Homo sapien
ggacacattctggggaggtcatctctcttccat

SEQ ID NO: 604729 - DNA, 33 bp, Homo sapien
cttccggatatcaacactgattactctcctact

SEQ ID NO: 604730 - DNA, 33 bp, Homo sapien
cttccggatatcaacagtgattactctcctact

SEQ ID NO: 604731 - DNA, 33 bp, Homo sapien
tgtggcagggtatcaggcaaaaatgctttcatg

SEQ ID NO: 604732 - DNA, 33 bp, Homo sapien
tgtggcagggtatcagtcaaaaatgctttcatg

SEQ ID NO: 604733 - DNA, 33 bp, Homo sapien
ctgttaagcaagatcccaccactgctgcgggat

SEQ ID NO: 604734 - DNA, 33 bp, Homo sapien
ctgttaagcaagatcctaccactgctgcgggat

SEQ ID NO: 604735 - DNA, 33 bp, Homo sapien
ctcggctcacagtgcaagaggcttgtattttca

SEQ ID NO: 604736 - DNA, 33 bp, Homo sapien
ctcggctcacagtgcaggaggcttgtattttca

SEQ ID NO: 604737 - DNA, 33 bp, Homo sapien
aaaacactggctgaagaaacctttcagaatgat

SEQ ID NO: 604738 - DNA, 33 bp, Homo sapien
aaaacactggctgaaggaacctttcagaatgat

SEQ ID NO: 604739 - DNA, 33 bp, Homo sapien
agagagggacagaagcaaccaatgaacaataag

SEQ ID NO: 604740 - DNA, 33 bp, Homo sapien
agagagggacagaagcgaccaatgaacaataag

SEQ ID NO: 604741 - DNA, 33 bp, Homo sapien
tagtaagttctggagccaggagtcaaacttcag

SEQ ID NO: 604742 - DNA, 33 bp, Homo sapien
tagtaagttctggagctaggagtcaaacttcag

SEQ ID NO: 604743 - DNA, 33 bp, Homo sapien
gcctccggccacagacgaaaagctgcgctgtca

SEQ ID NO: 604744 - DNA, 33 bp, Homo sapien
gcctccggccacagactaaaagctgcgctgtca

SEQ ID NO: 604745 - DNA, 33 bp, Homo sapien
aatggaatgaatggccggagatctcaccatccc

SEQ ID NO: 604746 - DNA, 33 bp, Homo sapien
aatggaatgaatggcctgagatctcaccatccc

SEQ ID NO: 604747 - DNA, 33 bp, Homo sapien
ggctacttcttgctcacgctacatgtccatcat

SEQ ID NO: 604748 - DNA, 33 bp, Homo sapien
ggctacttcttgctcatgctacatgtccatcat

SEQ ID NO: 604749 - DNA, 33 bp, Homo sapien
aggagggaagacaaccagagcagagaggcacct

SEQ ID NO: 604750 - DNA, 33 bp, Homo sapien
aggagggaagacaaccggagcagagaggcacct

SEQ ID NO: 604751 - DNA, 33 bp, Homo sapien
tcctgctgtggtcgccaggcacaaggaaagaaa

SEQ ID NO: 604752 - DNA, 33 bp, Homo sapien
tcctgctgtggtcgccgggcacaaggaaagaaa

SEQ ID NO: 604753 - DNA, 33 bp, Homo sapien
ttcaaatatatgcctccactcttgaggtagcgg

SEQ ID NO: 604754 - DNA, 33 bp, Homo sapien
ttcaaatatatgcctctactcttgaggtagcgg

SEQ ID NO: 604755 - DNA, 33 bp, Homo sapien
ttgtatacagtcaatcacttgctactgcacaca

SEQ ID NO: 604756 - DNA, 33 bp, Homo sapien
ttgtatacagtcaatcgcttgctactgcacaca

SEQ ID NO: 604757 - DNA, 33 bp, Homo sapien
ctattctgtctactgaatatgtgaaactttaat

SEQ ID NO: 604758 - DNA, 33 bp, Homo sapien
ctattctgtctactgagtatgtgaaactttaat

SEQ ID NO: 604759 - DNA, 33 bp, Homo sapien
aatagccaggcctttcacttttcagtcaaaggg

SEQ ID NO: 604760 - DNA, 33 bp, Homo sapien
aatagccaggcctttcgcttttcagtcaaaggg

SEQ ID NO: 604761 - DNA, 33 bp, Homo sapien
tagttactggggtttaaggtctcagtatatgaa

SEQ ID NO: 604762 - DNA, 33 bp, Homo sapien
tagttactggggtttagggtctcagtatatgaa

SEQ ID NO: 604763 - DNA, 33 bp, Homo sapien
gataactaattgataacagccagtgtgtactgg

SEQ ID NO: 604764 - DNA, 33 bp, Homo sapien
gataactaattgataatagccagtgtgtactgg

SEQ ID NO: 604765 - DNA, 33 bp, Homo sapien
tgaggagtcatttacaataagcatgtatgcatg

SEQ ID NO: 604766 - DNA, 33 bp, Homo sapien
tgaggagtcatttacagtaagcatgtatgcatg

SEQ ID NO: 604767 - DNA, 33 bp, Homo sapien
gtaagcaagatttaaaacgtcaccaaaatgtaa

SEQ ID NO: 604768 - DNA, 33 bp, Homo sapien
gtaagcaagatttaaagcgtcaccaaaatgtaa

SEQ ID NO: 604769 - DNA, 33 bp, Homo sapien
aacactgctctgaacagctttggaagcgtcctt

SEQ ID NO: 604770 - DNA, 33 bp, Homo sapien
aacactgctctgaacatctttggaagcgtcctt

SEQ ID NO: 604771 - DNA, 33 bp, Homo sapien
gacctcctgactctgacattgaagcaagaaagt

SEQ ID NO: 604772 - DNA, 33 bp, Homo sapien
gacctcctgactctgagattgaagcaagaaagt

SEQ ID NO: 604773 - DNA, 33 bp, Homo sapien
ccctagcagaggtctaccagccatttccattcc

SEQ ID NO: 604774 - DNA, 33 bp, Homo sapien
ccctagcagaggtctatcagccatttccattcc

SEQ ID NO: 604775 - DNA, 33 bp, Homo sapien
atctgtctcagacgcaacttggtttacaaatct

SEQ ID NO: 604776 - DNA, 33 bp, Homo sapien
atctgtctcagacgcatcttggtttacaaatct

SEQ ID NO: 604777 - DNA, 33 bp, Homo sapien
acagttgaatgaaatacactcttgtgagcaaaa

SEQ ID NO: 604778 - DNA, 33 bp, Homo sapien
acagttgaatgaaatatactcttgtgagcaaaa

SEQ ID NO: 604779 - DNA, 33 bp, Homo sapien
ggataagggaaaagtacacaatggatgctgctt

SEQ ID NO: 604780 - DNA, 33 bp, Homo sapien
ggataagggaaaagtatacaatggatgctgctt

SEQ ID NO: 604781 - DNA, 33 bp, Homo sapien
ttcataaataactgaaagtcctatgcaatatta

SEQ ID NO: 604782 - DNA, 33 bp, Homo sapien
ttcataaataactgaatgtcctatgcaatatta

SEQ ID NO: 604783 - DNA, 33 bp, Homo sapien
atctattgccatgtccactctttcaagcacgtc

SEQ ID NO: 604784 - DNA, 33 bp, Homo sapien
atctattgccatgtccgctctttcaagcacgtc

SEQ ID NO: 604785 - DNA, 33 bp, Homo sapien
ttttgaagcaaggagaacgcaaagcaaaacaaa

SEQ ID NO: 604786 - DNA, 33 bp, Homo sapien
ttttgaagcaaggagagcgcaaagcaaaacaaa

SEQ ID NO: 604787 - DNA, 33 bp, Homo sapien
gcatcaagaaaattacaatggggatatcaagga

SEQ ID NO: 604788 - DNA, 33 bp, Homo sapien
gcatcaagaaaattacgatggggatatcaagga

SEQ ID NO: 604789 - DNA, 33 bp, Homo sapien
gattcctttccatagtcgtcatgagctaacaca

SEQ ID NO: 604790 - DNA, 33 bp, Homo sapien
gattcctttccatagttgtcatgagctaacaca

SEQ ID NO: 604791 - DNA, 33 bp, Homo sapien
tgtggacaccaggtcaagaagcagggagggcgc

SEQ ID NO: 604792 - DNA, 33 bp, Homo sapien
tgtggacaccaggtcaggaagcagggagggcgc

SEQ ID NO: 604793 - DNA, 33 bp, Homo sapien
gggaactcaggccacaacagcctacattagaca

SEQ ID NO: 604794 - DNA, 33 bp, Homo sapien
gggaactcaggccacagcagcctacattagaca

SEQ ID NO: 604795 - DNA, 33 bp, Homo sapien
gggagcccatatatcaacacacaaaggctcagt

SEQ ID NO: 604796 - DNA, 33 bp, Homo sapien
gggagcccatatatcagcacacaaaggctcagt

SEQ ID NO: 604797 - DNA, 33 bp, Homo sapien
ctggtgatggtctctcaccctgtcttaccagca

SEQ ID NO: 604798 - DNA, 33 bp, Homo sapien
ctggtgatggtctctcgccctgtcttaccagca

SEQ ID NO: 604799 - DNA, 33 bp, Homo sapien
ggaggcacgtaggaacaagcaatgagaagacca

SEQ ID NO: 604800 - DNA, 33 bp, Homo sapien
ggaggcacgtaggaaccagcaatgagaagacca

SEQ ID NO: 604801 - DNA, 33 bp, Homo sapien
tgagtcatgtatacacactcatggtaaatgact

SEQ ID NO: 604802 - DNA, 33 bp, Homo sapien
tgagtcatgtatacacgctcatggtaaatgact

SEQ ID NO: 604803 - DNA, 33 bp, Homo sapien
tatgctacaaagaacaccctccttcacgtaaaa

SEQ ID NO: 604804 - DNA, 33 bp, Homo sapien
tatgctacaaagaacatcctccttcacgtaaaa

SEQ ID NO: 604805 - DNA, 33 bp, Homo sapien
tagaagtacagtatacagagataagaatttaca

SEQ ID NO: 604806 - DNA, 33 bp, Homo sapien
tagaagtacagtatacggagataagaatttaca

SEQ ID NO: 604807 - DNA, 33 bp, Homo sapien
aacttcccagcagctcacaatcaagcacagcaa

SEQ ID NO: 604808 - DNA, 33 bp, Homo sapien
aacttcccagcagctcgcaatcaagcacagcaa

SEQ ID NO: 604809 - DNA, 33 bp, Homo sapien
caatgtagccttgaggcaattctgtagcttcct

SEQ ID NO: 604810 - DNA, 33 bp, Homo sapien
caatgtagccttgaggtaattctgtagcttcct

SEQ ID NO: 604811 - DNA, 33 bp, Homo sapien
atattccttgctgggaaaagaatttggcaatat

SEQ ID NO: 604812 - DNA, 33 bp, Homo sapien
atattccttgctgggataagaatttggcaatat

SEQ ID NO: 604813 - DNA, 33 bp, Homo sapien
gaaggtagtgagataaacagtcccacattcttc

SEQ ID NO: 604814 - DNA, 33 bp, Homo sapien
gaaggtagtgagataagcagtcccacattcttc

SEQ ID NO: 604815 - DNA, 33 bp, Homo sapien
ctctgcctactcttggacactttcccatgccat

SEQ ID NO: 604816 - DNA, 33 bp, Homo sapien
ctctgcctactcttgggcactttcccatgccat

SEQ ID NO: 604817 - DNA, 33 bp, Homo sapien
cacactgacttgaacactggctgtctagaaact

SEQ ID NO: 604818 - DNA, 33 bp, Homo sapien
cacactgacttgaacattggctgtctagaaact

SEQ ID NO: 604819 - DNA, 33 bp, Homo sapien
cttcaccacactcctaggacattgaattgctat

SEQ ID NO: 604820 - DNA, 33 bp, Homo sapien
cttcaccacactcctatgacattgaattgctat

SEQ ID NO: 604821 - DNA, 33 bp, Homo sapien
tggatactgcccctcaagcttgactaggacaca

SEQ ID NO: 604822 - DNA, 33 bp, Homo sapien
tggatactgcccctcaggcttgactaggacaca

SEQ ID NO: 604823 - DNA, 33 bp, Homo sapien
gcctcactatattgaccgggctactcttgaact

SEQ ID NO: 604824 - DNA, 33 bp, Homo sapien
gcctcactatattgactgggctactcttgaact

SEQ ID NO: 604825 - DNA, 33 bp, Homo sapien
aaagggacacaagaagactgtgtgagcacacag

SEQ ID NO: 604826 - DNA, 33 bp, Homo sapien
aaagggacacaagaaggctgtgtgagcacacag

SEQ ID NO: 604827 - DNA, 33 bp, Homo sapien
aattgcttccttaaagcccagatctccaaatgt

SEQ ID NO: 604828 - DNA, 33 bp, Homo sapien
aattgcttccttaaaggccagatctccaaatgt

SEQ ID NO: 604829 - DNA, 33 bp, Homo sapien
gcaatggctgttatgcactcccacactttcctc

SEQ ID NO: 604830 - DNA, 33 bp, Homo sapien
gcaatggctgttatgcgctcccacactttcctc

SEQ ID NO: 604831 - DNA, 33 bp, Homo sapien
cgggaaacgaggcttccatggcccctcctgctt

SEQ ID NO: 604832 - DNA, 33 bp, Homo sapien
cgggaaacgaggcttctatggcccctcctgctt

SEQ ID NO: 604833 - DNA, 33 bp, Homo sapien
tgtgcagattgggagaagattatcgagtaatag

SEQ ID NO: 604834 - DNA, 33 bp, Homo sapien
tgtgcagattgggagaggattatcgagtaatag

SEQ ID NO: 604835 - DNA, 33 bp, Homo sapien
ctgcccatgtcctggaccattctccacactgcg

SEQ ID NO: 604836 - DNA, 33 bp, Homo sapien
ctgcccatgtcctggatcattctccacactgcg

SEQ ID NO: 604837 - DNA, 33 bp, Homo sapien
agatggttaagaccaagcaattagtacagaggg

SEQ ID NO: 604838 - DNA, 33 bp, Homo sapien
agatggttaagaccaatcaattagtacagaggg

SEQ ID NO: 604839 - DNA, 33 bp, Homo sapien
ggtcttaaccatctgccgcactcacttattact

SEQ ID NO: 604840 - DNA, 33 bp, Homo sapien
ggtcttaaccatctgctgcactcacttattact

SEQ ID NO: 604841 - DNA, 33 bp, Homo sapien
agttttcaaagaaccgccatatagttttccaca

SEQ ID NO: 604842 - DNA, 33 bp, Homo sapien
agttttcaaagaaccgtcatatagttttccaca

SEQ ID NO: 604843 - DNA, 33 bp, Homo sapien
ctgttcacacagagtacaaagacaggcaccctc

SEQ ID NO: 604844 - DNA, 33 bp, Homo sapien
ctgttcacacagagtagaaagacaggcaccctc

SEQ ID NO: 604845 - DNA, 33 bp, Homo sapien
gggcagccaactgtggcagccggatccggcccc

SEQ ID NO: 604846 - DNA, 33 bp, Homo sapien
gggcagccaactgtggtagccggatccggcccc

SEQ ID NO: 604847 - DNA, 33 bp, Homo sapien
acatctgagacaaccacattgaagggcaacacc

SEQ ID NO: 604848 - DNA, 33 bp, Homo sapien
acatctgagacaaccagattgaagggcaacacc

SEQ ID NO: 604849 - DNA, 33 bp, Homo sapien
agcagaaaacctcataaaggaatcgtttcaatt

SEQ ID NO: 604850 - DNA, 33 bp, Homo sapien
agcagaaaacctcatagaggaatcgtttcaatt

SEQ ID NO: 604851 - DNA, 33 bp, Homo sapien
acaagaactgttttgccatgaaataaatggctc

SEQ ID NO: 604852 - DNA, 33 bp, Homo sapien
acaagaactgttttgctatgaaataaatggctc

SEQ ID NO: 604853 - DNA, 33 bp, Homo sapien
ttccacagttggaatcacacggtcagggctcta

SEQ ID NO: 604854 - DNA, 33 bp, Homo sapien
ttccacagttggaatcgcacggtcagggctcta

SEQ ID NO: 604855 - DNA, 33 bp, Homo sapien
ataagggctaacatagacacggagctgtcagag

SEQ ID NO: 604856 - DNA, 33 bp, Homo sapien
ataagggctaacatagtcacggagctgtcagag

SEQ ID NO: 604857 - DNA, 33 bp, Homo sapien
tggagctcgacagcaacctgtaccgcattggcc

SEQ ID NO: 604858 - DNA, 33 bp, Homo sapien
tggagctcgacagcaatctgtaccgcattggcc

SEQ ID NO: 604859 - DNA, 33 bp, Homo sapien
ttccctgactattctccgactgttctaggcacg

SEQ ID NO: 604860 - DNA, 33 bp, Homo sapien
ttccctgactattctctgactgttctaggcacg

SEQ ID NO: 604861 - DNA, 33 bp, Homo sapien
ctcgcttaggagatacactacattcacagcctg

SEQ ID NO: 604862 - DNA, 33 bp, Homo sapien
ctcgcttaggagatacgctacattcacagcctg

SEQ ID NO: 604863 - DNA, 33 bp, Homo sapien
acacacacaagagacaacactcgggcggccagt

SEQ ID NO: 604864 - DNA, 33 bp, Homo sapien
acacacacaagagacaccactcgggcggccagt

SEQ ID NO: 604865 - DNA, 33 bp, Homo sapien
cctggaagcttctgcaatgatgagcgtgtgcgt

SEQ ID NO: 604866 - DNA, 33 bp, Homo sapien
cctggaagcttctgcactgatgagcgtgtgcgt

SEQ ID NO: 604867 - DNA, 33 bp, Homo sapien
cagcaattaactgttacggtctttgtgcaggaa

SEQ ID NO: 604868 - DNA, 33 bp, Homo sapien
cagcaattaactgttagggtctttgtgcaggaa

SEQ ID NO: 604869 - DNA, 33 bp, Homo sapien
cccttcaagaagccaaagcccggacatcagaat

SEQ ID NO: 604870 - DNA, 33 bp, Homo sapien
cccttcaagaagccaaggcccggacatcagaat

SEQ ID NO: 604871 - DNA, 33 bp, Homo sapien
tacccaaggatccatcacggtggttctccagca

SEQ ID NO: 604872 - DNA, 33 bp, Homo sapien
tacccaaggatccatcgcggtggttctccagca

SEQ ID NO: 604873 - DNA, 33 bp, Homo sapien
acactgagtttacaagacaagaaagcaggtttg

SEQ ID NO: 604874 - DNA, 33 bp, Homo sapien
acactgagtttacaaggcaagaaagcaggtttg

SEQ ID NO: 604875 - DNA, 33 bp, Homo sapien
ccacccagcagtgggcaacatttactctttgga

SEQ ID NO: 604876 - DNA, 33 bp, Homo sapien
ccacccagcagtgggcgacatttactctttgga

SEQ ID NO: 604877 - DNA, 33 bp, Homo sapien
agactgttgttttcaaaagacatcgcgtattat

SEQ ID NO: 604878 - DNA, 33 bp, Homo sapien
agactgttgttttcaagagacatcgcgtattat

SEQ ID NO: 604879 - DNA, 33 bp, Homo sapien
agcaccctggagttcacagtaggatttattgac

SEQ ID NO: 604880 - DNA, 33 bp, Homo sapien
agcaccctggagttcagagtaggatttattgac

SEQ ID NO: 604881 - DNA, 33 bp, Homo sapien
ccagtgaagcccttcaaaaaccgatgggtaacc

SEQ ID NO: 604882 - DNA, 33 bp, Homo sapien
ccagtgaagcccttcagaaaccgatgggtaacc

SEQ ID NO: 604883 - DNA, 33 bp, Homo sapien
atagctcaggctgtcaacgtgaaagaccattgg

SEQ ID NO: 604884 - DNA, 33 bp, Homo sapien
atagctcaggctgtcagcgtgaaagaccattgg

SEQ ID NO: 604885 - DNA, 33 bp, Homo sapien
agcaacacaacgtttacgctctctcactctcct

SEQ ID NO: 604886 - DNA, 33 bp, Homo sapien
agcaacacaacgtttatgctctctcactctcct

SEQ ID NO: 604887 - DNA, 33 bp, Homo sapien
agattatcatgtggaccaaattaaaggcccctg

SEQ ID NO: 604888 - DNA, 33 bp, Homo sapien
agattatcatgtggacgaaattaaaggcccctg

SEQ ID NO: 604889 - DNA, 33 bp, Homo sapien
agaaaataaaacatcaatacatgttgccaccag

SEQ ID NO: 604890 - DNA, 33 bp, Homo sapien
agaaaataaaacatcagtacatgttgccaccag

SEQ ID NO: 604891 - DNA, 33 bp, Homo sapien
ttaatgaataaatcaaacaaccaatgagccagg

SEQ ID NO: 604892 - DNA, 33 bp, Homo sapien
ttaatgaataaatcaatcaaccaatgagccagg

SEQ ID NO: 604893 - DNA, 33 bp, Homo sapien
tgatcccctttgactcacccccaggttggaagc

SEQ ID NO: 604894 - DNA, 33 bp, Homo sapien
tgatcccctttgactcgcccccaggttggaagc

SEQ ID NO: 604895 - DNA, 33 bp, Homo sapien
gttaaagtcactttcaagttattgcaacaaaag

SEQ ID NO: 604896 - DNA, 33 bp, Homo sapien
gttaaagtcactttcaggttattgcaacaaaag

SEQ ID NO: 604897 - DNA, 33 bp, Homo sapien
gacgaaaggaacccaacggtttcaagatggctg

SEQ ID NO: 604898 - DNA, 33 bp, Homo sapien
gacgaaaggaacccaatggtttcaagatggctg

SEQ ID NO: 604899 - DNA, 33 bp, Homo sapien
agtgaaaaacaccagacgcaaagtagtgtaaat

SEQ ID NO: 604900 - DNA, 33 bp, Homo sapien
agtgaaaaacaccagatgcaaagtagtgtaaat

SEQ ID NO: 604901 - DNA, 33 bp, Homo sapien
ctcttatttcactgagaacactcttaaaatgtc

SEQ ID NO: 604902 - DNA, 33 bp, Homo sapien
ctcttatttcactgaggacactcttaaaatgtc

SEQ ID NO: 604903 - DNA, 33 bp, Homo sapien
ccctttctcaagtcccaactaaagagattttct

SEQ ID NO: 604904 - DNA, 33 bp, Homo sapien
ccctttctcaagtcccgactaaagagattttct

SEQ ID NO: 604905 - DNA, 33 bp, Homo sapien
gccacacataactaccaagtgcctgctgtgtgc

SEQ ID NO: 604906 - DNA, 33 bp, Homo sapien
gccacacataactaccgagtgcctgctgtgtgc

SEQ ID NO: 604907 - DNA, 33 bp, Homo sapien
ttaccctctgaatcaactggtctgtatcagggt

SEQ ID NO: 604908 - DNA, 33 bp, Homo sapien
ttaccctctgaatcaattggtctgtatcagggt

SEQ ID NO: 604909 - DNA, 33 bp, Homo sapien
tatctcattttttgtaggtctgtgataaagaac

SEQ ID NO: 604910 - DNA, 33 bp, Homo sapien
tatctcattttttgtatgtctgtgataaagaac

SEQ ID NO: 604911 - DNA, 33 bp, Homo sapien
ttctcctgtcccaccccgatggcatccatctgt

SEQ ID NO: 604912 - DNA, 33 bp, Homo sapien
ttctcctgtcccaccctgatggcatccatctgt

SEQ ID NO: 604913 - DNA, 33 bp, Homo sapien
catgcttcaaatgcaaaatgccaagtgctttgt

SEQ ID NO: 604914 - DNA, 33 bp, Homo sapien
catgcttcaaatgcaagatgccaagtgctttgt

SEQ ID NO: 604915 - DNA, 33 bp, Homo sapien
acactgtttgactgtaaaggccactgtgtgctg

SEQ ID NO: 604916 - DNA, 33 bp, Homo sapien
acactgtttgactgtacaggccactgtgtgctg

SEQ ID NO: 604917 - DNA, 33 bp, Homo sapien
tgggcagaaggtccgagaatgatgaacgatgct

SEQ ID NO: 604918 - DNA, 33 bp, Homo sapien
tgggcagaaggtccgataatgatgaacgatgct

SEQ ID NO: 604919 - DNA, 33 bp, Homo sapien
ctaagcaaagtccaagcacttaccccctaacac

SEQ ID NO: 604920 - DNA, 33 bp, Homo sapien
ctaagcaaagtccaagtacttaccccctaacac

SEQ ID NO: 604921 - DNA, 33 bp, Homo sapien
cagactttaccagatacgcaccagtctaaagcc

SEQ ID NO: 604922 - DNA, 33 bp, Homo sapien
cagactttaccagatatgcaccagtctaaagcc

SEQ ID NO: 604923 - DNA, 33 bp, Homo sapien
tttttagaatgggaagaaactgccaacaataat

SEQ ID NO: 604924 - DNA, 33 bp, Homo sapien
tttttagaatgggaaggaactgccaacaataat

SEQ ID NO: 604925 - DNA, 33 bp, Homo sapien
tgcgctgagtttcacactaagcaggcaggtaga

SEQ ID NO: 604926 - DNA, 33 bp, Homo sapien
tgcgctgagtttcacattaagcaggcaggtaga

SEQ ID NO: 604927 - DNA, 33 bp, Homo sapien
gggctaaaatggctcacgaaacaatgtttgtgc

SEQ ID NO: 604928 - DNA, 33 bp, Homo sapien
gggctaaaatggctcatgaaacaatgtttgtgc

SEQ ID NO: 604929 - DNA, 33 bp, Homo sapien
tacccccttcacaagacggctctcagtaagcct

SEQ ID NO: 604930 - DNA, 33 bp, Homo sapien
tacccccttcacaagatggctctcagtaagcct

SEQ ID NO: 604931 - DNA, 33 bp, Homo sapien
acagaatgaccctgagactaaatggagagagag

SEQ ID NO: 604932 - DNA, 33 bp, Homo sapien
acagaatgaccctgaggctaaatggagagagag

SEQ ID NO: 604933 - DNA, 33 bp, Homo sapien
taagaccccaaatcccagcttccaacagaagaa

SEQ ID NO: 604934 - DNA, 33 bp, Homo sapien
taagaccccaaatcccggcttccaacagaagaa

SEQ ID NO: 604935 - DNA, 33 bp, Homo sapien
ttatgactgttgacaaatagccaccttctccca

SEQ ID NO: 604936 - DNA, 33 bp, Homo sapien
ttatgactgttgacaagtagccaccttctccca

SEQ ID NO: 604937 - DNA, 33 bp, Homo sapien
ccttcagcagaagcaacggactctgaagggctg

SEQ ID NO: 604938 - DNA, 33 bp, Homo sapien
ccttcagcagaagcaatggactctgaagggctg

SEQ ID NO: 604939 - DNA, 33 bp, Homo sapien
tagttgtagccctgaactgttaattactgtttc

SEQ ID NO: 604940 - DNA, 33 bp, Homo sapien
tagttgtagccctgaattgttaattactgtttc

SEQ ID NO: 604941 - DNA, 33 bp, Homo sapien
gaattgaatggaaaagaatgggttacaaattac

SEQ ID NO: 604942 - DNA, 33 bp, Homo sapien
gaattgaatggaaaaggatgggttacaaattac

SEQ ID NO: 604943 - DNA, 33 bp, Homo sapien
ggccaaactccagcacaccgtcaggcacacagg

SEQ ID NO: 604944 - DNA, 33 bp, Homo sapien
ggccaaactccagcacgccgtcaggcacacagg

SEQ ID NO: 604945 - DNA, 33 bp, Homo sapien
gtccttgaggctctccacacttgctcttccttt

SEQ ID NO: 604946 - DNA, 33 bp, Homo sapien
gtccttgaggctctccgcacttgctcttccttt

SEQ ID NO: 604947 - DNA, 33 bp, Homo sapien
tcgggatccccaagagactatgagcttcttgaa

SEQ ID NO: 604948 - DNA, 33 bp, Homo sapien
tcgggatccccaagaggctatgagcttcttgaa

SEQ ID NO: 604949 - DNA, 33 bp, Homo sapien
tctgagggcaatggcaatccttgtgctgttggg

SEQ ID NO: 604950 - DNA, 33 bp, Homo sapien
tctgagggcaatggcagtccttgtgctgttggg

SEQ ID NO: 604951 - DNA, 33 bp, Homo sapien
tgggttttgaactacaactcattttggttccac

SEQ ID NO: 604952 - DNA, 33 bp, Homo sapien
tgggttttgaactacagctcattttggttccac

SEQ ID NO: 604953 - DNA, 33 bp, Homo sapien
attccgtcatttcctaaccacaagcacttgctc

SEQ ID NO: 604954 - DNA, 33 bp, Homo sapien
attccgtcatttcctagccacaagcacttgctc

SEQ ID NO: 604955 - DNA, 33 bp, Homo sapien
aatacagccctcaatacatgttggcaatgattt

SEQ ID NO: 604956 - DNA, 33 bp, Homo sapien
aatacagccctcaatatatgttggcaatgattt

SEQ ID NO: 604957 - DNA, 33 bp, Homo sapien
cgatgtatatagaaaacaacagcgaatgttgta

SEQ ID NO: 604958 - DNA, 33 bp, Homo sapien
cgatgtatatagaaaataacagcgaatgttgta

SEQ ID NO: 604959 - DNA, 33 bp, Homo sapien
tattagaataatttgacgaatcatttgcacttc

SEQ ID NO: 604960 - DNA, 33 bp, Homo sapien
tattagaataatttgatgaatcatttgcacttc

SEQ ID NO: 604961 - DNA, 33 bp, Homo sapien
gggagggggcactagcagcactcaagcattagt

SEQ ID NO: 604962 - DNA, 33 bp, Homo sapien
gggagggggcactagcggcactcaagcattagt

SEQ ID NO: 604963 - DNA, 33 bp, Homo sapien
tgttgcatctaccttgaaaatttgttgtttagt

SEQ ID NO: 604964 - DNA, 33 bp, Homo sapien
tgttgcatctaccttgcaaatttgttgtttagt

SEQ ID NO: 604965 - DNA, 33 bp, Homo sapien
ctacagacacgcgcaaccatgctcagctaattt

SEQ ID NO: 604966 - DNA, 33 bp, Homo sapien
ctacagacacgcgcaatcatgctcagctaattt

SEQ ID NO: 604967 - DNA, 33 bp, Homo sapien
actcttcagaggcaaacgttggacaggggaact

SEQ ID NO: 604968 - DNA, 33 bp, Homo sapien
actcttcagaggcaaatgttggacaggggaact

SEQ ID NO: 604969 - DNA, 33 bp, Homo sapien
gtattggaaggataggccagctaatatttgtaa

SEQ ID NO: 604970 - DNA, 33 bp, Homo sapien
gtattggaaggataggtcagctaatatttgtaa

SEQ ID NO: 604971 - DNA, 33 bp, Homo sapien
caaataaccaggcggacgctggccaagtgagag

SEQ ID NO: 604972 - DNA, 33 bp, Homo sapien
caaataaccaggcggatgctggccaagtgagag

SEQ ID NO: 604973 - DNA, 33 bp, Homo sapien
taatggatgaaatacccgcagccggtaaaccac

SEQ ID NO: 604974 - DNA, 33 bp, Homo sapien
taatggatgaaatacctgcagccggtaaaccac

SEQ ID NO: 604975 - DNA, 33 bp, Homo sapien
agatctcagctagtaacgagcaaatggatcgtt

SEQ ID NO: 604976 - DNA, 33 bp, Homo sapien
agatctcagctagtaatgagcaaatggatcgtt

SEQ ID NO: 604977 - DNA, 33 bp, Homo sapien
cttctttctccatgtgcagtaagtccacggaca

SEQ ID NO: 604978 - DNA, 33 bp, Homo sapien
cttctttctccatgtgtagtaagtccacggaca

SEQ ID NO: 604979 - DNA, 33 bp, Homo sapien
gatacaggaaatccaaacactgggcagtagttt

SEQ ID NO: 604980 - DNA, 33 bp, Homo sapien
gatacaggaaatccaaccactgggcagtagttt

SEQ ID NO: 604981 - DNA, 33 bp, Homo sapien
aaattgagaccttgaacatgactaggaacttgc

SEQ ID NO: 604982 - DNA, 33 bp, Homo sapien
aaattgagaccttgaagatgactaggaacttgc

SEQ ID NO: 604983 - DNA, 33 bp, Homo sapien
tagtaggcagtcaataaaacatcagtctctttt

SEQ ID NO: 604984 - DNA, 33 bp, Homo sapien
tagtaggcagtcaatacaacatcagtctctttt

SEQ ID NO: 604985 - DNA, 33 bp, Homo sapien
actcaaatttgagaaaacctagtgcagtggaat

SEQ ID NO: 604986 - DNA, 33 bp, Homo sapien
actcaaatttgagaaatcctagtgcagtggaat

SEQ ID NO: 604987 - DNA, 33 bp, Homo sapien
taattctgatggcaccacaggatgacagagttt

SEQ ID NO: 604988 - DNA, 33 bp, Homo sapien
taattctgatggcaccgcaggatgacagagttt

SEQ ID NO: 604989 - DNA, 33 bp, Homo sapien
gggtgatgttttgccgaagtgtctattgagttc

SEQ ID NO: 604990 - DNA, 33 bp, Homo sapien
gggtgatgttttgccggagtgtctattgagttc

SEQ ID NO: 604991 - DNA, 33 bp, Homo sapien
ttgtctttttaatgccactctagttaggaaatc

SEQ ID NO: 604992 - DNA, 33 bp, Homo sapien
ttgtctttttaatgccgctctagttaggaaatc

SEQ ID NO: 604993 - DNA, 33 bp, Homo sapien
ttcaatgacttcccacagcttttagaataaaaa

SEQ ID NO: 604994 - DNA, 33 bp, Homo sapien
ttcaatgacttcccacggcttttagaataaaaa

SEQ ID NO: 604995 - DNA, 33 bp, Homo sapien
gcctaaaagcagatgaactttatacttaatatt

SEQ ID NO: 604996 - DNA, 33 bp, Homo sapien
gcctaaaagcagatgagctttatacttaatatt

SEQ ID NO: 604997 - DNA, 33 bp, Homo sapien
ttagctcttgtctctacgtagcatgtgaggctg

SEQ ID NO: 604998 - DNA, 33 bp, Homo sapien
ttagctcttgtctctatgtagcatgtgaggctg

SEQ ID NO: 604999 - DNA, 33 bp, Homo sapien
gcagcctcctgagatcacatgttagatggaatc

SEQ ID NO: 605000 - DNA, 33 bp, Homo sapien
gcagcctcctgagatcgcatgttagatggaatc

SEQ ID NO: 605001 - DNA, 33 bp, Homo sapien
ggagattacacggtgaagtgggagaagtgtgga

SEQ ID NO: 605002 - DNA, 33 bp, Homo sapien
ggagattacacggtgacgtgggagaagtgtgga

SEQ ID NO: 605003 - DNA, 33 bp, Homo sapien
acaccctaggccccacacggttcaagtccacac

SEQ ID NO: 605004 - DNA, 33 bp, Homo sapien
acaccctaggccccacgcggttcaagtccacac

SEQ ID NO: 605005 - DNA, 33 bp, Homo sapien
ggcctagggtgtgccactgaaaacagaaccctg

SEQ ID NO: 605006 - DNA, 33 bp, Homo sapien
ggcctagggtgtgccattgaaaacagaaccctg

SEQ ID NO: 605007 - DNA, 33 bp, Homo sapien
ggcactacttcaatccccacttggagatgagga

SEQ ID NO: 605008 - DNA, 33 bp, Homo sapien
ggcactacttcaatccgcacttggagatgagga

SEQ ID NO: 605009 - DNA, 33 bp, Homo sapien
ctgattggcttgtttggaagggtctattttaga

SEQ ID NO: 605010 - DNA, 33 bp, Homo sapien
ctgattggcttgtttgtaagggtctattttaga

SEQ ID NO: 605011 - DNA, 33 bp, Homo sapien
gcgattgcgtgctatcaagagagagtcacaggg

SEQ ID NO: 605012 - DNA, 33 bp, Homo sapien
gcgattgcgtgctatcgagagagagtcacaggg

SEQ ID NO: 605013 - DNA, 33 bp, Homo sapien
tgcaattcaaatcaaaacttcattttcttcagc

SEQ ID NO: 605014 - DNA, 33 bp, Homo sapien
tgcaattcaaatcaaaccttcattttcttcagc

SEQ ID NO: 605015 - DNA, 33 bp, Homo sapien
cataaatgaagctgaaattaccagagaaatata

SEQ ID NO: 605016 - DNA, 33 bp, Homo sapien
cataaatgaagctgaagttaccagagaaatata

SEQ ID NO: 605017 - DNA, 33 bp, Homo sapien
cgtgtccttgggaagacggtgtgcgatgagatg

SEQ ID NO: 605018 - DNA, 33 bp, Homo sapien
cgtgtccttgggaagatggtgtgcgatgagatg

SEQ ID NO: 605019 - DNA, 33 bp, Homo sapien
gctgcaggatttgaccaaagagaagcctgaaac

SEQ ID NO: 605020 - DNA, 33 bp, Homo sapien
gctgcaggatttgaccgaagagaagcctgaaac

SEQ ID NO: 605021 - DNA, 33 bp, Homo sapien
aataagccacagaaaaataaaactaacagtggt

SEQ ID NO: 605022 - DNA, 33 bp, Homo sapien
aataagccacagaaaagtaaaactaacagtggt

SEQ ID NO: 605023 - DNA, 33 bp, Homo sapien
tcctgaacttctttgaacttgggtagccttcct

SEQ ID NO: 605024 - DNA, 33 bp, Homo sapien
tcctgaacttctttgaccttgggtagccttcct

SEQ ID NO: 605025 - DNA, 33 bp, Homo sapien
cttttgattctaaggcacgtattttaagttgca

SEQ ID NO: 605026 - DNA, 33 bp, Homo sapien
cttttgattctaaggctcgtattttaagttgca

SEQ ID NO: 605027 - DNA, 33 bp, Homo sapien
taaaatgacctgtctaccaaaaacagccttcag

SEQ ID NO: 605028 - DNA, 33 bp, Homo sapien
taaaatgacctgtctatcaaaaacagccttcag

SEQ ID NO: 605029 - DNA, 33 bp, Homo sapien
caagcagacattttggaaagattattcgtggaa

SEQ ID NO: 605030 - DNA, 33 bp, Homo sapien
caagcagacattttgggaagattattcgtggaa

SEQ ID NO: 605031 - DNA, 33 bp, Homo sapien
tgtccaaaggctcgagaaatgttggctctgccc

SEQ ID NO: 605032 - DNA, 33 bp, Homo sapien
tgtccaaaggctcgaggaatgttggctctgccc

SEQ ID NO: 605033 - DNA, 33 bp, Homo sapien
ggggtttctcctgctacgttttcataatgagtg

SEQ ID NO: 605034 - DNA, 33 bp, Homo sapien
ggggtttctcctgctaggttttcataatgagtg

SEQ ID NO: 605035 - DNA, 33 bp, Homo sapien
taggtaaatatagttcccttagcagcaagagca

SEQ ID NO: 605036 - DNA, 33 bp, Homo sapien
taggtaaatatagttctcttagcagcaagagca

SEQ ID NO: 605037 - DNA, 33 bp, Homo sapien
aaggggcacagttccacagagaggagttcagag

SEQ ID NO: 605038 - DNA, 33 bp, Homo sapien
aaggggcacagttccatagagaggagttcagag

SEQ ID NO: 605039 - DNA, 33 bp, Homo sapien
caggagaatgagtgaaaggggaaaattcatcct

SEQ ID NO: 605040 - DNA, 33 bp, Homo sapien
caggagaatgagtgaatggggaaaattcatcct

SEQ ID NO: 605041 - DNA, 33 bp, Homo sapien
gcccagcggctcattcgaaatgtaatgtatgtg

SEQ ID NO: 605042 - DNA, 33 bp, Homo sapien
gcccagcggctcattctaaatgtaatgtatgtg

SEQ ID NO: 605043 - DNA, 33 bp, Homo sapien
gtgtgtttctcatgtcaatcaagctgtgctgtc

SEQ ID NO: 605044 - DNA, 33 bp, Homo sapien
gtgtgtttctcatgtcgatcaagctgtgctgtc

SEQ ID NO: 605045 - DNA, 33 bp, Homo sapien
agaaatttgaggatccaaggaaaactactgggg

SEQ ID NO: 605046 - DNA, 33 bp, Homo sapien
agaaatttgaggatccgaggaaaactactgggg

SEQ ID NO: 605047 - DNA, 33 bp, Homo sapien
atgaaaagcatagatagggcaaaaatgaagccc

SEQ ID NO: 605048 - DNA, 33 bp, Homo sapien
atgaaaagcatagatatggcaaaaatgaagccc

SEQ ID NO: 605049 - DNA, 33 bp, Homo sapien
cccaggctttcaaaccaggcctgcagccattgt

SEQ ID NO: 605050 - DNA, 33 bp, Homo sapien
cccaggctttcaaaccgggcctgcagccattgt

SEQ ID NO: 605051 - DNA, 33 bp, Homo sapien
ccaactcctgggttcaaccaactggcaggtgtt

SEQ ID NO: 605052 - DNA, 33 bp, Homo sapien
ccaactcctgggttcagccaactggcaggtgtt

SEQ ID NO: 605053 - DNA, 33 bp, Homo sapien
cttctcctggacaccacactcttgaggtccctt

SEQ ID NO: 605054 - DNA, 33 bp, Homo sapien
cttctcctggacaccagactcttgaggtccctt

SEQ ID NO: 605055 - DNA, 33 bp, Homo sapien
ggccacagctattcacgatgattcatacccacc

SEQ ID NO: 605056 - DNA, 33 bp, Homo sapien
ggccacagctattcactatgattcatacccacc

SEQ ID NO: 605057 - DNA, 33 bp, Homo sapien
cagaagggagtggagaaccattatcagaagtga

SEQ ID NO: 605058 - DNA, 33 bp, Homo sapien
cagaagggagtggagagccattatcagaagtga

SEQ ID NO: 605059 - DNA, 33 bp, Homo sapien
aatgtttgctcattgacagtgggttctttaggc

SEQ ID NO: 605060 - DNA, 33 bp, Homo sapien
aatgtttgctcattgagagtgggttctttaggc

SEQ ID NO: 605061 - DNA, 33 bp, Homo sapien
gatggtaagactctgcactgtaaggactaaatt

SEQ ID NO: 605062 - DNA, 33 bp, Homo sapien
gatggtaagactctgcgctgtaaggactaaatt

SEQ ID NO: 605063 - DNA, 33 bp, Homo sapien
gactcctggttcacccactctggctttagcttg

SEQ ID NO: 605064 - DNA, 33 bp, Homo sapien
gactcctggttcacccgctctggctttagcttg

SEQ ID NO: 605065 - DNA, 33 bp, Homo sapien
ctaggagcagagcgccaccgatgacaggcccat

SEQ ID NO: 605066 - DNA, 33 bp, Homo sapien
ctaggagcagagcgccgccgatgacaggcccat

SEQ ID NO: 605067 - DNA, 33 bp, Homo sapien
tcatagcacctaccccacagaattgttatgagg

SEQ ID NO: 605068 - DNA, 33 bp, Homo sapien
tcatagcacctaccccgcagaattgttatgagg

SEQ ID NO: 605069 - DNA, 33 bp, Homo sapien
cagagtcaccgtgcaaagtgcagtgggcctgca

SEQ ID NO: 605070 - DNA, 33 bp, Homo sapien
cagagtcaccgtgcaaggtgcagtgggcctgca

SEQ ID NO: 605071 - DNA, 33 bp, Homo sapien
gcacccaaagcgccagcaagttagctccatgat

SEQ ID NO: 605072 - DNA, 33 bp, Homo sapien
gcacccaaagcgccagtaagttagctccatgat

SEQ ID NO: 605073 - DNA, 33 bp, Homo sapien
gggctgaaaccatcagccattcatagagtgtgt

SEQ ID NO: 605074 - DNA, 33 bp, Homo sapien
gggctgaaaccatcagtcattcatagagtgtgt

SEQ ID NO: 605075 - DNA, 33 bp, Homo sapien
gcagaacgggcaagtcaaatgtgaggatgcaga

SEQ ID NO: 605076 - DNA, 33 bp, Homo sapien
gcagaacgggcaagtcgaatgtgaggatgcaga

SEQ ID NO: 605077 - DNA, 33 bp, Homo sapien
tcctggaagatcacagactcctggctgagaaag

SEQ ID NO: 605078 - DNA, 33 bp, Homo sapien
tcctggaagatcacaggctcctggctgagaaag

SEQ ID NO: 605079 - DNA, 33 bp, Homo sapien
tacttcaagccactttaaaaccaagcctataaa

SEQ ID NO: 605080 - DNA, 33 bp, Homo sapien
tacttcaagccactttgaaaccaagcctataaa

SEQ ID NO: 605081 - DNA, 33 bp, Homo sapien
ctaaatcaactcttaacgttgacaggtagaaga

SEQ ID NO: 605082 - DNA, 33 bp, Homo sapien
ctaaatcaactcttaatgttgacaggtagaaga

SEQ ID NO: 605083 - DNA, 33 bp, Homo sapien
actctctctaaaggccagaaggcccgagcccca

SEQ ID NO: 605084 - DNA, 33 bp, Homo sapien
actctctctaaaggcccgaaggcccgagcccca

SEQ ID NO: 605085 - DNA, 33 bp, Homo sapien
ccaggggtccttggagaaaagcagagaaggaga

SEQ ID NO: 605086 - DNA, 33 bp, Homo sapien
ccaggggtccttggaggaaagcagagaaggaga

SEQ ID NO: 605087 - DNA, 33 bp, Homo sapien
tggcagctcacatttcaataagggagggtgctc

SEQ ID NO: 605088 - DNA, 33 bp, Homo sapien
tggcagctcacatttcgataagggagggtgctc

SEQ ID NO: 605089 - DNA, 33 bp, Homo sapien
gtggcaccgaaatcaacgcagtttcctttccac

SEQ ID NO: 605090 - DNA, 33 bp, Homo sapien
gtggcaccgaaatcaatgcagtttcctttccac

SEQ ID NO: 605091 - DNA, 33 bp, Homo sapien
aaagtggagaccttcgaaacaggggcagtaagg

SEQ ID NO: 605092 - DNA, 33 bp, Homo sapien
aaagtggagaccttcggaacaggggcagtaagg

SEQ ID NO: 605093 - DNA, 33 bp, Homo sapien
catttcgcatttcacaaagggaacatacagacc

SEQ ID NO: 605094 - DNA, 33 bp, Homo sapien
catttcgcatttcacagagggaacatacagacc

SEQ ID NO: 605095 - DNA, 33 bp, Homo sapien
tcagagcctattcatacggagccgactctgtgt

SEQ ID NO: 605096 - DNA, 33 bp, Homo sapien
tcagagcctattcatatggagccgactctgtgt

SEQ ID NO: 605097 - DNA, 33 bp, Homo sapien
tattttgaagcctgcacagggcctttggtgacc

SEQ ID NO: 605098 - DNA, 33 bp, Homo sapien
tattttgaagcctgcatagggcctttggtgacc

SEQ ID NO: 605099 - DNA, 33 bp, Homo sapien
taggagaggggattccacacttggagatgctgg

SEQ ID NO: 605100 - DNA, 33 bp, Homo sapien
taggagaggggattccgcacttggagatgctgg

SEQ ID NO: 605101 - DNA, 33 bp, Homo sapien
ttgttggttgctcatggagtccgtagaaagcca

SEQ ID NO: 605102 - DNA, 33 bp, Homo sapien
ttgttggttgctcatgtagtccgtagaaagcca

SEQ ID NO: 605103 - DNA, 33 bp, Homo sapien
gccactgcctttgaaactgccccaggaaaggag

SEQ ID NO: 605104 - DNA, 33 bp, Homo sapien
gccactgcctttgaaagtgccccaggaaaggag

SEQ ID NO: 605105 - DNA, 33 bp, Homo sapien
agtggcatcttagcagaatcaggaaccagaggt

SEQ ID NO: 605106 - DNA, 33 bp, Homo sapien
agtggcatcttagcagcatcaggaaccagaggt

SEQ ID NO: 605107 - DNA, 33 bp, Homo sapien
acaagtcccagctaaaaaaaacaagaaagcata

SEQ ID NO: 605108 - DNA, 33 bp, Homo sapien
acaagtcccagctaaagaaaacaagaaagcata

SEQ ID NO: 605109 - DNA, 33 bp, Homo sapien
cgcacgcaaactcgaaccttccggaagcagcag

SEQ ID NO: 605110 - DNA, 33 bp, Homo sapien
cgcacgcaaactcgaatcttccggaagcagcag

SEQ ID NO: 605111 - DNA, 33 bp, Homo sapien
tggaactgcgtgaagacctttgactggcaacca

SEQ ID NO: 605112 - DNA, 33 bp, Homo sapien
tggaactgcgtgaagagctttgactggcaacca

SEQ ID NO: 605113 - DNA, 33 bp, Homo sapien
gggatgaatgagttcaaagtcttgcaaaaggga

SEQ ID NO: 605114 - DNA, 33 bp, Homo sapien
gggatgaatgagttcagagtcttgcaaaaggga

SEQ ID NO: 605115 - DNA, 33 bp, Homo sapien
caagtgatgcaacaaacagtctggataaaacca

SEQ ID NO: 605116 - DNA, 33 bp, Homo sapien
caagtgatgcaacaaatagtctggataaaacca

SEQ ID NO: 605117 - DNA, 33 bp, Homo sapien
caaccaacaatagatacagacctccaaggaaca

SEQ ID NO: 605118 - DNA, 33 bp, Homo sapien
caaccaacaatagatatagacctccaaggaaca

SEQ ID NO: 605119 - DNA, 33 bp, Homo sapien
aggggcaggcagacgaacttgttctctctccta

SEQ ID NO: 605120 - DNA, 33 bp, Homo sapien
aggggcaggcagacgagcttgttctctctccta

SEQ ID NO: 605121 - DNA, 33 bp, Homo sapien
ctcagtgaggaatccaggagcaaatgtggggtc

SEQ ID NO: 605122 - DNA, 33 bp, Homo sapien
ctcagtgaggaatccatgagcaaatgtggggtc

SEQ ID NO: 605123 - DNA, 33 bp, Homo sapien
caagacacaacaaaacacagtcatatttctcct

SEQ ID NO: 605124 - DNA, 33 bp, Homo sapien
caagacacaacaaaacgcagtcatatttctcct

SEQ ID NO: 605125 - DNA, 33 bp, Homo sapien
ggtagtgcataaaggggccaatttacctttaga

SEQ ID NO: 605126 - DNA, 33 bp, Homo sapien
ggtagtgcataaagggtccaatttacctttaga

SEQ ID NO: 605127 - DNA, 33 bp, Homo sapien
aagaaaaaaatcacgcaacattgagaatttcca

SEQ ID NO: 605128 - DNA, 33 bp, Homo sapien
aagaaaaaaatcacgcgacattgagaatttcca

SEQ ID NO: 605129 - DNA, 33 bp, Homo sapien
agaaaccataaagtaaaaagtaatgacaggttt

SEQ ID NO: 605130 - DNA, 33 bp, Homo sapien
agaaaccataaagtaagaagtaatgacaggttt

SEQ ID NO: 605131 - DNA, 33 bp, Homo sapien
agaggtttcaagacacaaaaccagaaaccataa

SEQ ID NO: 605132 - DNA, 33 bp, Homo sapien
agaggtttcaagacaccaaaccagaaaccataa

SEQ ID NO: 605133 - DNA, 33 bp, Homo sapien
ctttgtccttacatacccaaaattttttgtgtc

SEQ ID NO: 605134 - DNA, 33 bp, Homo sapien
ctttgtccttacatactcaaaattttttgtgtc

SEQ ID NO: 605135 - DNA, 33 bp, Homo sapien
agtctcttatgtgaaacctttagccaatctgac

SEQ ID NO: 605136 - DNA, 33 bp, Homo sapien
agtctcttatgtgaaatctttagccaatctgac

SEQ ID NO: 605137 - DNA, 33 bp, Homo sapien
tcatattcttgcaagacgaaaagtttaccagtg

SEQ ID NO: 605138 - DNA, 33 bp, Homo sapien
tcatattcttgcaagaggaaaagtttaccagtg

SEQ ID NO: 605139 - DNA, 33 bp, Homo sapien
tctatgttgttaagccactgttgcttagggatt

SEQ ID NO: 605140 - DNA, 33 bp, Homo sapien
tctatgttgttaagcctctgttgcttagggatt

SEQ ID NO: 605141 - DNA, 33 bp, Homo sapien
gtgtctgctgggttagcatatgtcagaatagat

SEQ ID NO: 605142 - DNA, 33 bp, Homo sapien
gtgtctgctgggttagtatatgtcagaatagat

SEQ ID NO: 605143 - DNA, 33 bp, Homo sapien
tttgacatttgggaaactgaatcactattggca

SEQ ID NO: 605144 - DNA, 33 bp, Homo sapien
tttgacatttgggaaattgaatcactattggca

SEQ ID NO: 605145 - DNA, 33 bp, Homo sapien
tcaaagagcacaaacaatactcacatacacaga

SEQ ID NO: 605146 - DNA, 33 bp, Homo sapien
tcaaagagcacaaacagtactcacatacacaga

SEQ ID NO: 605147 - DNA, 33 bp, Homo sapien
ttagaaaactctgtccacttagttgtttcatct

SEQ ID NO: 605148 - DNA, 33 bp, Homo sapien
ttagaaaactctgtccgcttagttgtttcatct

SEQ ID NO: 605149 - DNA, 33 bp, Homo sapien
cgcctacataagccaacgaagcagtcaacaaac

SEQ ID NO: 605150 - DNA, 33 bp, Homo sapien
cgcctacataagccaatgaagcagtcaacaaac

SEQ ID NO: 605151 - DNA, 33 bp, Homo sapien
ggggtggtttcagagacagtaaggatacaggag

SEQ ID NO: 605152 - DNA, 33 bp, Homo sapien
ggggtggtttcagagagagtaaggatacaggag

SEQ ID NO: 605153 - DNA, 33 bp, Homo sapien
acagagcggggtcttaaggaatactgcaccaac

SEQ ID NO: 605154 - DNA, 33 bp, Homo sapien
acagagcggggtcttagggaatactgcaccaac

SEQ ID NO: 605155 - DNA, 33 bp, Homo sapien
caccctgtgggaagaaaatgggcagaagagttg

SEQ ID NO: 605156 - DNA, 33 bp, Homo sapien
caccctgtgggaagaacatgggcagaagagttg

SEQ ID NO: 605157 - DNA, 33 bp, Homo sapien
cagccctgtggctatacccatgagctctgggga

SEQ ID NO: 605158 - DNA, 33 bp, Homo sapien
cagccctgtggctatatccatgagctctgggga

SEQ ID NO: 605159 - DNA, 33 bp, Homo sapien
atctgaaattccaacacaactgaacgtcctgta

SEQ ID NO: 605160 - DNA, 33 bp, Homo sapien
atctgaaattccaacataactgaacgtcctgta

SEQ ID NO: 605161 - DNA, 33 bp, Homo sapien
tgttggttggcaagacagaaaaatccataaacc

SEQ ID NO: 605162 - DNA, 33 bp, Homo sapien
tgttggttggcaagacggaaaaatccataaacc

SEQ ID NO: 605163 - DNA, 33 bp, Homo sapien
tgtgatcaattaaacacgtgaaatgcttgtgag

SEQ ID NO: 605164 - DNA, 33 bp, Homo sapien
tgtgatcaattaaacatgtgaaatgcttgtgag

SEQ ID NO: 605165 - DNA, 33 bp, Homo sapien
gcttttataaaagagacctgagagactccctcg

SEQ ID NO: 605166 - DNA, 33 bp, Homo sapien
gcttttataaaagagagctgagagactccctcg

SEQ ID NO: 605167 - DNA, 33 bp, Homo sapien
agaaatgagctatcagccatgaaaggacacgga

SEQ ID NO: 605168 - DNA, 33 bp, Homo sapien
agaaatgagctatcagtcatgaaaggacacgga

SEQ ID NO: 605169 - DNA, 33 bp, Homo sapien
tctcattccagccagacgggcctctgggcacct

SEQ ID NO: 605170 - DNA, 33 bp, Homo sapien
tctcattccagccagatgggcctctgggcacct

SEQ ID NO: 605171 - DNA, 33 bp, Homo sapien
agtcaatgtcactgataacaaaactctggtagg

SEQ ID NO: 605172 - DNA, 33 bp, Homo sapien
agtcaatgtcactgatgacaaaactctggtagg

SEQ ID NO: 605173 - DNA, 33 bp, Homo sapien
aagcccaaatgttcaagcacacactcctttaat

SEQ ID NO: 605174 - DNA, 33 bp, Homo sapien
aagcccaaatgttcaatcacacactcctttaat

SEQ ID NO: 605175 - DNA, 33 bp, Homo sapien
atggaggagtttccagacccacgtgacactgaa

SEQ ID NO: 605176 - DNA, 33 bp, Homo sapien
atggaggagtttccaggcccacgtgacactgaa

SEQ ID NO: 605177 - DNA, 33 bp, Homo sapien
ggatgatgatgccatcacttttctctaattttt

SEQ ID NO: 605178 - DNA, 33 bp, Homo sapien
ggatgatgatgccatcgcttttctctaattttt

SEQ ID NO: 605179 - DNA, 33 bp, Homo sapien
tgacttttcaggaagcaatgctaagtctctcga

SEQ ID NO: 605180 - DNA, 33 bp, Homo sapien
tgacttttcaggaagcgatgctaagtctctcga

SEQ ID NO: 605181 - DNA, 33 bp, Homo sapien
atgcctctttgtacaacgaaggtcacctagctg

SEQ ID NO: 605182 - DNA, 33 bp, Homo sapien
atgcctctttgtacaatgaaggtcacctagctg

SEQ ID NO: 605183 - DNA, 33 bp, Homo sapien
aaaatgtgggatgaaaacacacaaggcccttta

SEQ ID NO: 605184 - DNA, 33 bp, Homo sapien
aaaatgtgggatgaaagcacacaaggcccttta

SEQ ID NO: 605185 - DNA, 33 bp, Homo sapien
acacgtcaccaagcctaactatttatttgtttt

SEQ ID NO: 605186 - DNA, 33 bp, Homo sapien
acacgtcaccaagcctgactatttatttgtttt

SEQ ID NO: 605187 - DNA, 33 bp, Homo sapien
acacttggctactggcaccttcagaagacagtg

SEQ ID NO: 605188 - DNA, 33 bp, Homo sapien
acacttggctactggcgccttcagaagacagtg

SEQ ID NO: 605189 - DNA, 33 bp, Homo sapien
caaagctagaaccacaaaaggggcttctgggaa

SEQ ID NO: 605190 - DNA, 33 bp, Homo sapien
caaagctagaaccacacaaggggcttctgggaa

SEQ ID NO: 605191 - DNA, 33 bp, Homo sapien
tgacccccactgtttacggttctctgcagatgt

SEQ ID NO: 605192 - DNA, 33 bp, Homo sapien
tgacccccactgtttatggttctctgcagatgt

SEQ ID NO: 605193 - DNA, 33 bp, Homo sapien
ttattaagaatctcaaaattgtaacagtagggc

SEQ ID NO: 605194 - DNA, 33 bp, Homo sapien
ttattaagaatctcaatattgtaacagtagggc

SEQ ID NO: 605195 - DNA, 33 bp, Homo sapien
atcatgtttgcgtgcacctgcttgtacaaacgt

SEQ ID NO: 605196 - DNA, 33 bp, Homo sapien
atcatgtttgcgtgcatctgcttgtacaaacgt

SEQ ID NO: 605197 - DNA, 33 bp, Homo sapien
acaaacacactgtacacgaacttacacacagac

SEQ ID NO: 605198 - DNA, 33 bp, Homo sapien
acaaacacactgtacatgaacttacacacagac

SEQ ID NO: 605199 - DNA, 33 bp, Homo sapien
ttctacagattctacacgcttcctagagttcct

SEQ ID NO: 605200 - DNA, 33 bp, Homo sapien
ttctacagattctacatgcttcctagagttcct

SEQ ID NO: 605201 - DNA, 33 bp, Homo sapien
caggtcaagatgactgcaagaaacctataatca

SEQ ID NO: 605202 - DNA, 33 bp, Homo sapien
caggtcaagatgactggaagaaacctataatca

SEQ ID NO: 605203 - DNA, 33 bp, Homo sapien
gcaagagaggagtttacgttgcctgctttgcaa

SEQ ID NO: 605204 - DNA, 33 bp, Homo sapien
gcaagagaggagtttatgttgcctgctttgcaa

SEQ ID NO: 605205 - DNA, 33 bp, Homo sapien
ttatctcatcagaaagcattttggcagctctgt

SEQ ID NO: 605206 - DNA, 33 bp, Homo sapien
ttatctcatcagaaagtattttggcagctctgt

SEQ ID NO: 605207 - DNA, 33 bp, Homo sapien
accactgaccacaaacaatgtgcccacctcagc

SEQ ID NO: 605208 - DNA, 33 bp, Homo sapien
accactgaccacaaacgatgtgcccacctcagc

SEQ ID NO: 605209 - DNA, 33 bp, Homo sapien
aaattatatcatacaaactacaatttccatttc

SEQ ID NO: 605210 - DNA, 33 bp, Homo sapien
aaattatatcatacaacctacaatttccatttc

SEQ ID NO: 605211 - DNA, 33 bp, Homo sapien
aaactgcagcatgatgcatttggcaagctgcag

SEQ ID NO: 605212 - DNA, 33 bp, Homo sapien
aaactgcagcatgatgtatttggcaagctgcag

SEQ ID NO: 605213 - DNA, 33 bp, Homo sapien
gcctttcttcacactgcagtagaggccgatatg

SEQ ID NO: 605214 - DNA, 33 bp, Homo sapien
gcctttcttcacactggagtagaggccgatatg

SEQ ID NO: 605215 - DNA, 33 bp, Homo sapien
gggagctcaaagcactaagtagggagaagaact

SEQ ID NO: 605216 - DNA, 33 bp, Homo sapien
gggagctcaaagcactcagtagggagaagaact

SEQ ID NO: 605217 - DNA, 33 bp, Homo sapien
actctaagctacttccacaagcaacccatcagc

SEQ ID NO: 605218 - DNA, 33 bp, Homo sapien
actctaagctacttccgcaagcaacccatcagc

SEQ ID NO: 605219 - DNA, 33 bp, Homo sapien
catgtggctggatttcaagtttcccagaaacag

SEQ ID NO: 605220 - DNA, 33 bp, Homo sapien
catgtggctggatttcgagtttcccagaaacag

SEQ ID NO: 605221 - DNA, 33 bp, Homo sapien
gtcatgagaaatgataataggtggggctgggaa

SEQ ID NO: 605222 - DNA, 33 bp, Homo sapien
gtcatgagaaatgatagtaggtggggctgggaa

SEQ ID NO: 605223 - DNA, 33 bp, Homo sapien
actttgaacctaagaactgggccccaaggtttc

SEQ ID NO: 605224 - DNA, 33 bp, Homo sapien
actttgaacctaagaattgggccccaaggtttc

SEQ ID NO: 605225 - DNA, 33 bp, Homo sapien
taccacctgaggctaacacatctagcaaattgc

SEQ ID NO: 605226 - DNA, 33 bp, Homo sapien
taccacctgaggctaatacatctagcaaattgc

SEQ ID NO: 605227 - DNA, 33 bp, Homo sapien
actaaatcagaaaaaaatgcattgaaataacaa

SEQ ID NO: 605228 - DNA, 33 bp, Homo sapien
actaaatcagaaaaaactgcattgaaataacaa

SEQ ID NO: 605229 - DNA, 33 bp, Homo sapien
ctccagtgtggaacttcaaggcagaactgtgcc

SEQ ID NO: 605230 - DNA, 33 bp, Homo sapien
ctccagtgtggaacttgaaggcagaactgtgcc

SEQ ID NO: 605231 - DNA, 33 bp, Homo sapien
atgagcatttgttggaaatctgcttgtgtgggt

SEQ ID NO: 605232 - DNA, 33 bp, Homo sapien
atgagcatttgttggatatctgcttgtgtgggt

SEQ ID NO: 605233 - DNA, 33 bp, Homo sapien
tccttctctgggaaacaggaacggcgccaatga

SEQ ID NO: 605234 - DNA, 33 bp, Homo sapien
tccttctctgggaaacgggaacggcgccaatga

SEQ ID NO: 605235 - DNA, 33 bp, Homo sapien
acaaagtcaagacaaacgccaactcaaaaggaa

SEQ ID NO: 605236 - DNA, 33 bp, Homo sapien
acaaagtcaagacaaatgccaactcaaaaggaa

SEQ ID NO: 605237 - DNA, 33 bp, Homo sapien
atgaccccacacctgaagggcttgaacgacaga

SEQ ID NO: 605238 - DNA, 33 bp, Homo sapien
atgaccccacacctgaggggcttgaacgacaga

SEQ ID NO: 605239 - DNA, 33 bp, Homo sapien
agtgatgaaatgctgacggtgtacacccagtag

SEQ ID NO: 605240 - DNA, 33 bp, Homo sapien
agtgatgaaatgctgatggtgtacacccagtag

SEQ ID NO: 605241 - DNA, 33 bp, Homo sapien
aggctgatctggctaaaggtcgtatctggccac

SEQ ID NO: 605242 - DNA, 33 bp, Homo sapien
aggctgatctggctaagggtcgtatctggccac

SEQ ID NO: 605243 - DNA, 33 bp, Homo sapien
tcctgctggggtggaaggttgtttgagccattg

SEQ ID NO: 605244 - DNA, 33 bp, Homo sapien
tcctgctggggtggaatgttgtttgagccattg

SEQ ID NO: 605245 - DNA, 33 bp, Homo sapien
gcatccccagtcctgaaagcagtgttctggaca

SEQ ID NO: 605246 - DNA, 33 bp, Homo sapien
gcatccccagtcctgagagcagtgttctggaca

SEQ ID NO: 605247 - DNA, 33 bp, Homo sapien
ggatagtgaggcacccagatagtgataagttcc

SEQ ID NO: 605248 - DNA, 33 bp, Homo sapien
ggatagtgaggcacccggatagtgataagttcc

SEQ ID NO: 605249 - DNA, 33 bp, Homo sapien
ctgccccagtctgagactcctgagagtggaagt

SEQ ID NO: 605250 - DNA, 33 bp, Homo sapien
ctgccccagtctgagattcctgagagtggaagt

SEQ ID NO: 605251 - DNA, 33 bp, Homo sapien
gaataagcaacaggcccgcacggatgtggagca

SEQ ID NO: 605252 - DNA, 33 bp, Homo sapien
gaataagcaacaggccggcacggatgtggagca

SEQ ID NO: 605253 - DNA, 33 bp, Homo sapien
tcatcacctgacctacaaaatatatggtttggt

SEQ ID NO: 605254 - DNA, 33 bp, Homo sapien
tcatcacctgacctacgaaatatatggtttggt

SEQ ID NO: 605255 - DNA, 33 bp, Homo sapien
cagatgtcagggtcctcaccattcaccgctgca

SEQ ID NO: 605256 - DNA, 33 bp, Homo sapien
cagatgtcagggtccttaccattcaccgctgca

SEQ ID NO: 605257 - DNA, 33 bp, Homo sapien
tcaacctctcacccagacgagaagggcatagag

SEQ ID NO: 605258 - DNA, 33 bp, Homo sapien
tcaacctctcacccaggcgagaagggcatagag

SEQ ID NO: 605259 - DNA, 33 bp, Homo sapien
gggattaataactggaatagataaggagctcaa

SEQ ID NO: 605260 - DNA, 33 bp, Homo sapien
gggattaataactggactagataaggagctcaa

SEQ ID NO: 605261 - DNA, 33 bp, Homo sapien
tacaggccaggaaaccaggcctcatgagtcatc

SEQ ID NO: 605262 - DNA, 33 bp, Homo sapien
tacaggccaggaaaccgggcctcatgagtcatc

SEQ ID NO: 605263 - DNA, 33 bp, Homo sapien
aacatcgtgtccaggacgcagcaattctccaag

SEQ ID NO: 605264 - DNA, 33 bp, Homo sapien
aacatcgtgtccaggatgcagcaattctccaag

SEQ ID NO: 605265 - DNA, 33 bp, Homo sapien
aggggaggacatagaacgcctagaaactgggtg

SEQ ID NO: 605266 - DNA, 33 bp, Homo sapien
aggggaggacatagaatgcctagaaactgggtg

SEQ ID NO: 605267 - DNA, 33 bp, Homo sapien
accagtaggttggataaatgtctggaaaggagg

SEQ ID NO: 605268 - DNA, 33 bp, Homo sapien
accagtaggttggatagatgtctggaaaggagg

SEQ ID NO: 605269 - DNA, 33 bp, Homo sapien
gcctagagagtccaaacttgacgacatattaga

SEQ ID NO: 605270 - DNA, 33 bp, Homo sapien
gcctagagagtccaaatttgacgacatattaga

SEQ ID NO: 605271 - DNA, 33 bp, Homo sapien
tgagcagtcaggagaaagaatactgggtccttg

SEQ ID NO: 605272 - DNA, 33 bp, Homo sapien
tgagcagtcaggagaaggaatactgggtccttg

SEQ ID NO: 605273 - DNA, 33 bp, Homo sapien
gcctcaaggtcataaaatgcatcattgactttt

SEQ ID NO: 605274 - DNA, 33 bp, Homo sapien
gcctcaaggtcataaactgcatcattgactttt

SEQ ID NO: 605275 - DNA, 33 bp, Homo sapien
tgggttagaggcccaaatgaagaaggttggagt

SEQ ID NO: 605276 - DNA, 33 bp, Homo sapien
tgggttagaggcccaactgaagaaggttggagt

SEQ ID NO: 605277 - DNA, 33 bp, Homo sapien
acccaatttctgataaacatctttgcccttcac

SEQ ID NO: 605278 - DNA, 33 bp, Homo sapien
acccaatttctgataagcatctttgcccttcac

SEQ ID NO: 605279 - DNA, 33 bp, Homo sapien
ccatagacagaccacccctgagcgctgctggtt

SEQ ID NO: 605280 - DNA, 33 bp, Homo sapien
ccatagacagaccacctctgagcgctgctggtt

SEQ ID NO: 605281 - DNA, 33 bp, Homo sapien
accaacggatgacgcaaaaatggaggaattttc

SEQ ID NO: 605282 - DNA, 33 bp, Homo sapien
accaacggatgacgcacaaatggaggaattttc

SEQ ID NO: 605283 - DNA, 33 bp, Homo sapien
gcctggcaaccgcctcggagagacaagttcaag

SEQ ID NO: 605284 - DNA, 33 bp, Homo sapien
gcctggcaaccgcctctgagagacaagttcaag

SEQ ID NO: 605285 - DNA, 33 bp, Homo sapien
agctcttgtcaataaacacggtgacacctgata

SEQ ID NO: 605286 - DNA, 33 bp, Homo sapien
agctcttgtcaataaagacggtgacacctgata

SEQ ID NO: 605287 - DNA, 33 bp, Homo sapien
cccctcccatcatgccaaacctggggacctgct

SEQ ID NO: 605288 - DNA, 33 bp, Homo sapien
cccctcccatcatgccgaacctggggacctgct

SEQ ID NO: 605289 - DNA, 33 bp, Homo sapien
ctgagaatggtttttaaggatgaacatttgcaa

SEQ ID NO: 605290 - DNA, 33 bp, Homo sapien
ctgagaatggtttttacggatgaacatttgcaa

SEQ ID NO: 605291 - DNA, 33 bp, Homo sapien
cgtctgtcggtgtctccagcttccagcacaatt

SEQ ID NO: 605292 - DNA, 33 bp, Homo sapien
cgtctgtcggtgtctctagcttccagcacaatt

SEQ ID NO: 605293 - DNA, 33 bp, Homo sapien
ccagtccacccctgtcagaatcctggctgggtg

SEQ ID NO: 605294 - DNA, 33 bp, Homo sapien
ccagtccacccctgtcggaatcctggctgggtg

SEQ ID NO: 605295 - DNA, 33 bp, Homo sapien
ggtgtgggggccagagaccaggttggtgagaac

SEQ ID NO: 605296 - DNA, 33 bp, Homo sapien
ggtgtgggggccagaggccaggttggtgagaac

SEQ ID NO: 605297 - DNA, 33 bp, Homo sapien
atctccctctggaatacgcttccagccccattt

SEQ ID NO: 605298 - DNA, 33 bp, Homo sapien
atctccctctggaatatgcttccagccccattt

SEQ ID NO: 605299 - DNA, 33 bp, Homo sapien
gcatcatgggcagtgaaccaagcattgtctatc

SEQ ID NO: 605300 - DNA, 33 bp, Homo sapien
gcatcatgggcagtgagccaagcattgtctatc

SEQ ID NO: 605301 - DNA, 33 bp, Homo sapien
ctaatgtttcaccattcaacctgatgtctactg

SEQ ID NO: 605302 - DNA, 33 bp, Homo sapien
ctaatgtttcaccattgaacctgatgtctactg

SEQ ID NO: 605303 - DNA, 33 bp, Homo sapien
gttctaagtaccagaaggatcctaagaatgaag

SEQ ID NO: 605304 - DNA, 33 bp, Homo sapien
gttctaagtaccagaatgatcctaagaatgaag

SEQ ID NO: 605305 - DNA, 33 bp, Homo sapien
aaataagaagagtaaacggtgttctggcattca

SEQ ID NO: 605306 - DNA, 33 bp, Homo sapien
aaataagaagagtaaatggtgttctggcattca

SEQ ID NO: 605307 - DNA, 33 bp, Homo sapien
ggaagtctatagcggacgatttttgtatatttc

SEQ ID NO: 605308 - DNA, 33 bp, Homo sapien
ggaagtctatagcggatgatttttgtatatttc

SEQ ID NO: 605309 - DNA, 33 bp, Homo sapien
taattcctagagagagaaaatgactttcacatg

SEQ ID NO: 605310 - DNA, 33 bp, Homo sapien
taattcctagagagagcaaatgactttcacatg

SEQ ID NO: 605311 - DNA, 33 bp, Homo sapien
agtggtgctaggaggaacctctgcgttacgggc

SEQ ID NO: 605312 - DNA, 33 bp, Homo sapien
agtggtgctaggaggagcctctgcgttacgggc

SEQ ID NO: 605313 - DNA, 33 bp, Homo sapien
tgtccccagcattttaccacacaccagaacaca

SEQ ID NO: 605314 - DNA, 33 bp, Homo sapien
tgtccccagcattttatcacacaccagaacaca

SEQ ID NO: 605315 - DNA, 33 bp, Homo sapien
gataattaaaatcaaaagagaaagtgtttattg

SEQ ID NO: 605316 - DNA, 33 bp, Homo sapien
gataattaaaatcaaaggagaaagtgtttattg

SEQ ID NO: 605317 - DNA, 33 bp, Homo sapien
ggccccaaagttcacacgacatcatagaatagc

SEQ ID NO: 605318 - DNA, 33 bp, Homo sapien
ggccccaaagttcacatgacatcatagaatagc

SEQ ID NO: 605319 - DNA, 33 bp, Homo sapien
tgcgcttaacgggtcacaagactcttgctttgt

SEQ ID NO: 605320 - DNA, 33 bp, Homo sapien
tgcgcttaacgggtcataagactcttgctttgt

SEQ ID NO: 605321 - DNA, 33 bp, Homo sapien
cagactgtgccaacaccagaatgccaggctcca

SEQ ID NO: 605322 - DNA, 33 bp, Homo sapien
cagactgtgccaacactagaatgccaggctcca

SEQ ID NO: 605323 - DNA, 33 bp, Homo sapien
tgtcgtagggctgtcacgctgatcagggacact

SEQ ID NO: 605324 - DNA, 33 bp, Homo sapien
tgtcgtagggctgtcatgctgatcagggacact

SEQ ID NO: 605325 - DNA, 33 bp, Homo sapien
gcctgggctccgcaaacaacggctgccatctcc

SEQ ID NO: 605326 - DNA, 33 bp, Homo sapien
gcctgggctccgcaaataacggctgccatctcc

SEQ ID NO: 605327 - DNA, 33 bp, Homo sapien
gaaaattggaaagcgcaatgaagaggaagaaaa

SEQ ID NO: 605328 - DNA, 33 bp, Homo sapien
gaaaattggaaagcgcgatgaagaggaagaaaa

SEQ ID NO: 605329 - DNA, 33 bp, Homo sapien
tgaaatgtttacaaaaatatcaggtagaggaat

SEQ ID NO: 605330 - DNA, 33 bp, Homo sapien
tgaaatgtttacaaaattatcaggtagaggaat

SEQ ID NO: 605331 - DNA, 33 bp, Homo sapien
agaagccactgagaagcagacatggttttatcc

SEQ ID NO: 605332 - DNA, 33 bp, Homo sapien
agaagccactgagaagtagacatggttttatcc

SEQ ID NO: 605333 - DNA, 33 bp, Homo sapien
ggttgaaacaatacaacttgccttctgcagcga

SEQ ID NO: 605334 - DNA, 33 bp, Homo sapien
ggttgaaacaatacaatttgccttctgcagcga

SEQ ID NO: 605335 - DNA, 33 bp, Homo sapien
aatatttttgactttacgagccatgcttcttgg

SEQ ID NO: 605336 - DNA, 33 bp, Homo sapien
aatatttttgactttatgagccatgcttcttgg

SEQ ID NO: 605337 - DNA, 33 bp, Homo sapien
aaatcaatgagagaaacggagataacctcatgg

SEQ ID NO: 605338 - DNA, 33 bp, Homo sapien
aaatcaatgagagaaatggagataacctcatgg

SEQ ID NO: 605339 - DNA, 33 bp, Homo sapien
gccactgctccatgagaccctttgcagtcctgc

SEQ ID NO: 605340 - DNA, 33 bp, Homo sapien
gccactgctccatgaggccctttgcagtcctgc

SEQ ID NO: 605341 - DNA, 33 bp, Homo sapien
acccacctcaggtacgccagctaaatagtaata

SEQ ID NO: 605342 - DNA, 33 bp, Homo sapien
acccacctcaggtacgtcagctaaatagtaata

SEQ ID NO: 605343 - DNA, 33 bp, Homo sapien
cctctgcctattcctcactgataacaacagaga

SEQ ID NO: 605344 - DNA, 33 bp, Homo sapien
cctctgcctattcctcgctgataacaacagaga

SEQ ID NO: 605345 - DNA, 33 bp, Homo sapien
agggacccactttgtacctgtggaaatagaaga

SEQ ID NO: 605346 - DNA, 33 bp, Homo sapien
agggacccactttgtagctgtggaaatagaaga

SEQ ID NO: 605347 - DNA, 33 bp, Homo sapien
aactcagatgtgaggagaggggctggagttgca

SEQ ID NO: 605348 - DNA, 33 bp, Homo sapien
aactcagatgtgaggataggggctggagttgca

SEQ ID NO: 605349 - DNA, 33 bp, Homo sapien
tccctccctaaatgacagatccatgctgttagt

SEQ ID NO: 605350 - DNA, 33 bp, Homo sapien
tccctccctaaatgaccgatccatgctgttagt

SEQ ID NO: 605351 - DNA, 33 bp, Homo sapien
cctcgatttccttatcgatatgagggcggcgag

SEQ ID NO: 605352 - DNA, 33 bp, Homo sapien
cctcgatttccttatctatatgagggcggcgag

SEQ ID NO: 605353 - DNA, 33 bp, Homo sapien
tggtctttgtcctctacgaggctgtggtccagg

SEQ ID NO: 605354 - DNA, 33 bp, Homo sapien
tggtctttgtcctctatgaggctgtggtccagg

SEQ ID NO: 605355 - DNA, 33 bp, Homo sapien
tacacgcacctgcacacgccgaggagaccacag

SEQ ID NO: 605356 - DNA, 33 bp, Homo sapien
tacacgcacctgcacatgccgaggagaccacag

SEQ ID NO: 605357 - DNA, 33 bp, Homo sapien
tcagcaggtggccacacgcaatgtcctacagcc

SEQ ID NO: 605358 - DNA, 33 bp, Homo sapien
tcagcaggtggccacatgcaatgtcctacagcc

SEQ ID NO: 605359 - DNA, 33 bp, Homo sapien
cccagccctgccaggacgagcttagagtgccgg

SEQ ID NO: 605360 - DNA, 33 bp, Homo sapien
cccagccctgccaggatgagcttagagtgccgg

SEQ ID NO: 605361 - DNA, 33 bp, Homo sapien
cagcaaggtcaaaggccagtgaatcaaatgaga

SEQ ID NO: 605362 - DNA, 33 bp, Homo sapien
cagcaaggtcaaaggcgagtgaatcaaatgaga

SEQ ID NO: 605363 - DNA, 33 bp, Homo sapien
tggagcctatgggaaaatgcctggcacatagca

SEQ ID NO: 605364 - DNA, 33 bp, Homo sapien
tggagcctatgggaaattgcctggcacatagca

SEQ ID NO: 605365 - DNA, 33 bp, Homo sapien
ctggctctggtttttacggtggaggacctctgg

SEQ ID NO: 605366 - DNA, 33 bp, Homo sapien
ctggctctggtttttatggtggaggacctctgg

SEQ ID NO: 605367 - DNA, 33 bp, Homo sapien
ggtggtgaccagtgtacacaaacagtcacaaga

SEQ ID NO: 605368 - DNA, 33 bp, Homo sapien
ggtggtgaccagtgtatacaaacagtcacaaga

SEQ ID NO: 605369 - DNA, 33 bp, Homo sapien
ccaagttactcaggctcaaatcccagatgctac

SEQ ID NO: 605370 - DNA, 33 bp, Homo sapien
ccaagttactcaggcttaaatcccagatgctac

SEQ ID NO: 605371 - DNA, 33 bp, Homo sapien
cagagccgaattcaccagccttcctgttcaccc

SEQ ID NO: 605372 - DNA, 33 bp, Homo sapien
cagagccgaattcaccggccttcctgttcaccc

SEQ ID NO: 605373 - DNA, 33 bp, Homo sapien
gagcccgcctggctcaaaaatcccttcccatct

SEQ ID NO: 605374 - DNA, 33 bp, Homo sapien
gagcccgcctggctcacaaatcccttcccatct

SEQ ID NO: 605375 - DNA, 33 bp, Homo sapien
gttatgggagtcaagaaatcacctttgagtgta

SEQ ID NO: 605376 - DNA, 33 bp, Homo sapien
gttatgggagtcaagatatcacctttgagtgta

SEQ ID NO: 605377 - DNA, 33 bp, Homo sapien
gccaaattgttcctgacggggtatggtctttat

SEQ ID NO: 605378 - DNA, 33 bp, Homo sapien
gccaaattgttcctgatggggtatggtctttat

SEQ ID NO: 605379 - DNA, 33 bp, Homo sapien
ggcttcattctctggacgttctgattcaggtgg

SEQ ID NO: 605380 - DNA, 33 bp, Homo sapien
ggcttcattctctggatgttctgattcaggtgg

SEQ ID NO: 605381 - DNA, 33 bp, Homo sapien
tcaattccatagaatggacaccaagcatttaca

SEQ ID NO: 605382 - DNA, 33 bp, Homo sapien
tcaattccatagaatgtacaccaagcatttaca

SEQ ID NO: 605383 - DNA, 33 bp, Homo sapien
ctcccacaaggaaggactatcctgatcttgcag

SEQ ID NO: 605384 - DNA, 33 bp, Homo sapien
ctcccacaaggaaggagtatcctgatcttgcag

SEQ ID NO: 605385 - DNA, 33 bp, Homo sapien
atttggtttctggctacatggtgtgctcactgt

SEQ ID NO: 605386 - DNA, 33 bp, Homo sapien
atttggtttctggctatatggtgtgctcactgt

SEQ ID NO: 605387 - DNA, 33 bp, Homo sapien
ccttgactgagccaaacgagagcaggtactctc

SEQ ID NO: 605388 - DNA, 33 bp, Homo sapien
ccttgactgagccaaatgagagcaggtactctc

SEQ ID NO: 605389 - DNA, 33 bp, Homo sapien
gcctctcaaagggaagaaaggggaccgcaggaa

SEQ ID NO: 605390 - DNA, 33 bp, Homo sapien
gcctctcaaagggaaggaaggggaccgcaggaa

SEQ ID NO: 605391 - DNA, 33 bp, Homo sapien
gagggaactggcttacgctgttggcacatttcc

SEQ ID NO: 605392 - DNA, 33 bp, Homo sapien
gagggaactggcttactctgttggcacatttcc

SEQ ID NO: 605393 - DNA, 33 bp, Homo sapien
gactatttcgcaggcaataaagtatggttctga

SEQ ID NO: 605394 - DNA, 33 bp, Homo sapien
gactatttcgcaggcattaaagtatggttctga

SEQ ID NO: 605395 - DNA, 33 bp, Homo sapien
ctggctccgggtctcacaaggctgcagtcaggg

SEQ ID NO: 605396 - DNA, 33 bp, Homo sapien
ctggctccgggtctcataaggctgcagtcaggg

SEQ ID NO: 605397 - DNA, 33 bp, Homo sapien
acaaaagactaacaaaggctgtgagagttatga

SEQ ID NO: 605398 - DNA, 33 bp, Homo sapien
acaaaagactaacaaatgctgtgagagttatga

SEQ ID NO: 605399 - DNA, 33 bp, Homo sapien
atgcgggtaaccacacgaggcagagaatgaggg

SEQ ID NO: 605400 - DNA, 33 bp, Homo sapien
atgcgggtaaccacactaggcagagaatgaggg

SEQ ID NO: 605401 - DNA, 33 bp, Homo sapien
gcactgccatttctcacccaggcagagatgctt

SEQ ID NO: 605402 - DNA, 33 bp, Homo sapien
gcactgccatttctcatccaggcagagatgctt

SEQ ID NO: 605403 - DNA, 33 bp, Homo sapien
gatctcttttgaggtacaatccacattttactg

SEQ ID NO: 605404 - DNA, 33 bp, Homo sapien
gatctcttttgaggtataatccacattttactg

SEQ ID NO: 605405 - DNA, 33 bp, Homo sapien
gcctgggttgggactaaagaaggcttctgatgg

SEQ ID NO: 605406 - DNA, 33 bp, Homo sapien
gcctgggttgggactagagaaggcttctgatgg

SEQ ID NO: 605407 - DNA, 33 bp, Homo sapien
tacttttgtacgagtcaagatgcaactgcttta

SEQ ID NO: 605408 - DNA, 33 bp, Homo sapien
tacttttgtacgagtccagatgcaactgcttta

SEQ ID NO: 605409 - DNA, 33 bp, Homo sapien
tctgagagatgtatgaagaagagttaagtttag

SEQ ID NO: 605410 - DNA, 33 bp, Homo sapien
tctgagagatgtatgaggaagagttaagtttag

SEQ ID NO: 605411 - DNA, 33 bp, Homo sapien
atgtggatataataatcaaaaccttaagcagct

SEQ ID NO: 605412 - DNA, 33 bp, Homo sapien
atgtggatataataatgaaaaccttaagcagct

SEQ ID NO: 605413 - DNA, 33 bp, Homo sapien
gtctgcatggcagccaagatgaactcaatgaac

SEQ ID NO: 605414 - DNA, 33 bp, Homo sapien
gtctgcatggcagccaggatgaactcaatgaac

SEQ ID NO: 605415 - DNA, 33 bp, Homo sapien
ccatgaagaaggcctaccaggaagagctgagcc

SEQ ID NO: 605416 - DNA, 33 bp, Homo sapien
ccatgaagaaggcctatcaggaagagctgagcc

SEQ ID NO: 605417 - DNA, 33 bp, Homo sapien
ccctcgcactgggtctcaccttgcaccttcttc

SEQ ID NO: 605418 - DNA, 33 bp, Homo sapien
ccctcgcactgggtcttaccttgcaccttcttc

SEQ ID NO: 605419 - DNA, 33 bp, Homo sapien
cacgaggcagaatacaatgaacaggaacgggct

SEQ ID NO: 605420 - DNA, 33 bp, Homo sapien
cacgaggcagaatacactgaacaggaacgggct

SEQ ID NO: 605421 - DNA, 33 bp, Homo sapien
ggtccttccatcctaacgtcagcagtagtgggc

SEQ ID NO: 605422 - DNA, 33 bp, Homo sapien
ggtccttccatcctaatgtcagcagtagtgggc

SEQ ID NO: 605423 - DNA, 33 bp, Homo sapien
aggaggcaccaaattcaacagctacagaaggag

SEQ ID NO: 605424 - DNA, 33 bp, Homo sapien
aggaggcaccaaattcgacagctacagaaggag

SEQ ID NO: 605425 - DNA, 33 bp, Homo sapien
ggtgtgcacacacacaagttgtcagaggcacca

SEQ ID NO: 605426 - DNA, 33 bp, Homo sapien
ggtgtgcacacacacaggttgtcagaggcacca

SEQ ID NO: 605427 - DNA, 33 bp, Homo sapien
tgacaggaatttgatacaggttgctccaatttg

SEQ ID NO: 605428 - DNA, 33 bp, Homo sapien
tgacaggaatttgatataggttgctccaatttg

SEQ ID NO: 605429 - DNA, 33 bp, Homo sapien
ggttcacggagttctaataacatctttattaag

SEQ ID NO: 605430 - DNA, 33 bp, Homo sapien
ggttcacggagttctattaacatctttattaag

SEQ ID NO: 605431 - DNA, 33 bp, Homo sapien
acttgccctccagccaaaacagtttattgtgcg

SEQ ID NO: 605432 - DNA, 33 bp, Homo sapien
acttgccctccagccagaacagtttattgtgcg

SEQ ID NO: 605433 - DNA, 33 bp, Homo sapien
cttgctggtggagaaaattctggaaactggtac

SEQ ID NO: 605434 - DNA, 33 bp, Homo sapien
cttgctggtggagaaacttctggaaactggtac

SEQ ID NO: 605435 - DNA, 33 bp, Homo sapien
gtgtaagctattagtacggcaacaggatcagat

SEQ ID NO: 605436 - DNA, 33 bp, Homo sapien
gtgtaagctattagtatggcaacaggatcagat

SEQ ID NO: 605437 - DNA, 33 bp, Homo sapien
cataaattctattgacacctggtacttggtaaa

SEQ ID NO: 605438 - DNA, 33 bp, Homo sapien
cataaattctattgactcctggtacttggtaaa

SEQ ID NO: 605439 - DNA, 33 bp, Homo sapien
catctgctgacgtcacgcctatgtaacaggcac

SEQ ID NO: 605440 - DNA, 33 bp, Homo sapien
catctgctgacgtcactcctatgtaacaggcac

SEQ ID NO: 605441 - DNA, 33 bp, Homo sapien
gactcagagaccttaactcatttgccaaggaca

SEQ ID NO: 605442 - DNA, 33 bp, Homo sapien
gactcagagaccttaattcatttgccaaggaca

SEQ ID NO: 605443 - DNA, 33 bp, Homo sapien
tggaagcagagggtagaaaaaggagcaagtaag

SEQ ID NO: 605444 - DNA, 33 bp, Homo sapien
tggaagcagagggtaggaaaaggagcaagtaag

SEQ ID NO: 605445 - DNA, 33 bp, Homo sapien
agggaaagcacatggaaaattagggagaaaggc

SEQ ID NO: 605446 - DNA, 33 bp, Homo sapien
agggaaagcacatggagaattagggagaaaggc

SEQ ID NO: 605447 - DNA, 33 bp, Homo sapien
ccactagacttcttaaaaggccagggaagactt

SEQ ID NO: 605448 - DNA, 33 bp, Homo sapien
ccactagacttcttaagaggccagggaagactt

SEQ ID NO: 605449 - DNA, 33 bp, Homo sapien
agcaagggccttttccacaagcatcatctgttc

SEQ ID NO: 605450 - DNA, 33 bp, Homo sapien
agcaagggccttttccgcaagcatcatctgttc

SEQ ID NO: 605451 - DNA, 33 bp, Homo sapien
atggccccgaggacacaagcaggatagaccgag

SEQ ID NO: 605452 - DNA, 33 bp, Homo sapien
atggccccgaggacacgagcaggatagaccgag

SEQ ID NO: 605453 - DNA, 33 bp, Homo sapien
ggggttcagcaaaataactataaacagaaggac

SEQ ID NO: 605454 - DNA, 33 bp, Homo sapien
ggggttcagcaaaatagctataaacagaaggac

SEQ ID NO: 605455 - DNA, 33 bp, Homo sapien
gactctagggggcacaaaccagctcttggaggt

SEQ ID NO: 605456 - DNA, 33 bp, Homo sapien
gactctagggggcacagaccagctcttggaggt

SEQ ID NO: 605457 - DNA, 33 bp, Homo sapien
gtgtgtgctcttttgcaactggcttccttttca

SEQ ID NO: 605458 - DNA, 33 bp, Homo sapien
gtgtgtgctcttttgcgactggcttccttttca

SEQ ID NO: 605459 - DNA, 33 bp, Homo sapien
tgggatgttggaaagcactagcaagaggattcc

SEQ ID NO: 605460 - DNA, 33 bp, Homo sapien
tgggatgttggaaagcgctagcaagaggattcc

SEQ ID NO: 605461 - DNA, 33 bp, Homo sapien
ttggccctcagctttaaagggggaataaaatac

SEQ ID NO: 605462 - DNA, 33 bp, Homo sapien
ttggccctcagctttagagggggaataaaatac

SEQ ID NO: 605463 - DNA, 33 bp, Homo sapien
tgcaaagatcctcttacgtgatgggacgctgga

SEQ ID NO: 605464 - DNA, 33 bp, Homo sapien
tgcaaagatcctcttatgtgatgggacgctgga

SEQ ID NO: 605465 - DNA, 33 bp, Homo sapien
atgcaactacgttataccagaaaatgtggattc

SEQ ID NO: 605466 - DNA, 33 bp, Homo sapien
atgcaactacgttatagcagaaaatgtggattc

SEQ ID NO: 605467 - DNA, 33 bp, Homo sapien
cagttagttcagttccacttttcctgagcacaa

SEQ ID NO: 605468 - DNA, 33 bp, Homo sapien
cagttagttcagttccgcttttcctgagcacaa

SEQ ID NO: 605469 - DNA, 33 bp, Homo sapien
cgggaggtatcagtacaagtcaccctgcccctc

SEQ ID NO: 605470 - DNA, 33 bp, Homo sapien
cgggaggtatcagtaccagtcaccctgcccctc

SEQ ID NO: 605471 - DNA, 33 bp, Homo sapien
tttaaaatagcagaggaaaaaaagttatcttca

SEQ ID NO: 605472 - DNA, 33 bp, Homo sapien
tttaaaatagcagagggaaaaaagttatcttca

SEQ ID NO: 605473 - DNA, 33 bp, Homo sapien
caagtaacagaagataggaagtaacagaaagtg

SEQ ID NO: 605474 - DNA, 33 bp, Homo sapien
caagtaacagaagatatgaagtaacagaaagtg

SEQ ID NO: 605475 - DNA, 33 bp, Homo sapien
actgggcccttttaagccattaagcacctgatg

SEQ ID NO: 605476 - DNA, 33 bp, Homo sapien
actgggcccttttaagtcattaagcacctgatg

SEQ ID NO: 605477 - DNA, 33 bp, Homo sapien
gttccagccgtgcagaagtgtggaggtgtgagc

SEQ ID NO: 605478 - DNA, 33 bp, Homo sapien
gttccagccgtgcagaggtgtggaggtgtgagc

SEQ ID NO: 605479 - DNA, 33 bp, Homo sapien
ctgatagaaaacaaacaaagatagactgacaga

SEQ ID NO: 605480 - DNA, 33 bp, Homo sapien
ctgatagaaaacaaaccaagatagactgacaga

SEQ ID NO: 605481 - DNA, 33 bp, Homo sapien
ctttctcatcttaggaaataggagtattgttca

SEQ ID NO: 605482 - DNA, 33 bp, Homo sapien
ctttctcatcttaggacataggagtattgttca

SEQ ID NO: 605483 - DNA, 33 bp, Homo sapien
cccttgtctttcagtgcatcatttggcagtgtt

SEQ ID NO: 605484 - DNA, 33 bp, Homo sapien
cccttgtctttcagtgtatcatttggcagtgtt

SEQ ID NO: 605485 - DNA, 33 bp, Homo sapien
agttgccagtgtcaacaagaggcagaaccagaa

SEQ ID NO: 605486 - DNA, 33 bp, Homo sapien
agttgccagtgtcaacgagaggcagaaccagaa

SEQ ID NO: 605487 - DNA, 33 bp, Homo sapien
caggaagaaggactggcaagattgaaagcacga

SEQ ID NO: 605488 - DNA, 33 bp, Homo sapien
caggaagaaggactgggaagattgaaagcacga

SEQ ID NO: 605489 - DNA, 33 bp, Homo sapien
ccaggcttcagtgatcccatctccttaacttct

SEQ ID NO: 605490 - DNA, 33 bp, Homo sapien
ccaggcttcagtgatctcatctccttaacttct

SEQ ID NO: 605491 - DNA, 33 bp, Homo sapien
tgtgcagtttctaaaactgagaactttcctacc

SEQ ID NO: 605492 - DNA, 33 bp, Homo sapien
tgtgcagtttctaaaattgagaactttcctacc

SEQ ID NO: 605493 - DNA, 33 bp, Homo sapien
ttccagaacgagaaaccaggacggaagcaggca

SEQ ID NO: 605494 - DNA, 33 bp, Homo sapien
ttccagaacgagaaacgaggacggaagcaggca

SEQ ID NO: 605495 - DNA, 33 bp, Homo sapien
aggaggaagattcgcaagtgtaaaagaaagctg

SEQ ID NO: 605496 - DNA, 33 bp, Homo sapien
aggaggaagattcgcaggtgtaaaagaaagctg

SEQ ID NO: 605497 - DNA, 33 bp, Homo sapien
acccaaaatttgccacagggagtgatggcacag

SEQ ID NO: 605498 - DNA, 33 bp, Homo sapien
acccaaaatttgccaccgggagtgatggcacag

SEQ ID NO: 605499 - DNA, 33 bp, Homo sapien
cgacctatatgaagaacgtgaaggggccctgaa

SEQ ID NO: 605500 - DNA, 33 bp, Homo sapien
cgacctatatgaagaatgtgaaggggccctgaa

SEQ ID NO: 605501 - DNA, 33 bp, Homo sapien
tatattgcagtttatcaattttttccttttatg

SEQ ID NO: 605502 - DNA, 33 bp, Homo sapien
tatattgcagtttatcgattttttccttttatg

SEQ ID NO: 605503 - DNA, 33 bp, Homo sapien
cactgatcacgaaagcacacgttccaaaaaatg

SEQ ID NO: 605504 - DNA, 33 bp, Homo sapien
cactgatcacgaaagcgcacgttccaaaaaatg

SEQ ID NO: 605505 - DNA, 33 bp, Homo sapien
gccttgggcctttgcccatcactatagcactgc

SEQ ID NO: 605506 - DNA, 33 bp, Homo sapien
gccttgggcctttgcctatcactatagcactgc

SEQ ID NO: 605507 - DNA, 33 bp, Homo sapien
acatgaccatgaagacggaaggagaaacgtgga

SEQ ID NO: 605508 - DNA, 33 bp, Homo sapien
acatgaccatgaagactgaaggagaaacgtgga

SEQ ID NO: 605509 - DNA, 33 bp, Homo sapien
gtgtgagtgaatcagggatgcagctggtggtga

SEQ ID NO: 605510 - DNA, 33 bp, Homo sapien
gtgtgagtgaatcaggtatgcagctggtggtga

SEQ ID NO: 605511 - DNA, 33 bp, Homo sapien
gaacaaaaacaggctaaagagaaggatttccta

SEQ ID NO: 605512 - DNA, 33 bp, Homo sapien
gaacaaaaacaggctacagagaaggatttccta

SEQ ID NO: 605513 - DNA, 33 bp, Homo sapien
gaatatttcactttgccataacactttgcattg

SEQ ID NO: 605514 - DNA, 33 bp, Homo sapien
gaatatttcactttgctataacactttgcattg

SEQ ID NO: 605515 - DNA, 33 bp, Homo sapien
ttggccagcctgcaaccgagtgggagcccaggg

SEQ ID NO: 605516 - DNA, 33 bp, Homo sapien
ttggccagcctgcaactgagtgggagcccaggg

SEQ ID NO: 605517 - DNA, 33 bp, Homo sapien
gctaggctttcatcacagtaggatagggaaggc

SEQ ID NO: 605518 - DNA, 33 bp, Homo sapien
gctaggctttcatcacggtaggatagggaaggc

SEQ ID NO: 605519 - DNA, 33 bp, Homo sapien
tgcttgaacctagtaaatcaaggttgcggtgag

SEQ ID NO: 605520 - DNA, 33 bp, Homo sapien
tgcttgaacctagtaagtcaaggttgcggtgag

SEQ ID NO: 605521 - DNA, 33 bp, Homo sapien
ccacacactctccctccctctgagctccagggt

SEQ ID NO: 605522 - DNA, 33 bp, Homo sapien
ccacacactctccctctctctgagctccagggt

SEQ ID NO: 605523 - DNA, 33 bp, Homo sapien
atgatttcaagaaaagccctaggtgtcccccat

SEQ ID NO: 605524 - DNA, 33 bp, Homo sapien
atgatttcaagaaaagtcctaggtgtcccccat

SEQ ID NO: 605525 - DNA, 33 bp, Homo sapien
ggaaaatattttcacagacatcaaaattcaaaa

SEQ ID NO: 605526 - DNA, 33 bp, Homo sapien
ggaaaatattttcacatacatcaaaattcaaaa

SEQ ID NO: 605527 - DNA, 33 bp, Homo sapien
gtacaagttagtgctactagaaaataagagcct

SEQ ID NO: 605528 - DNA, 33 bp, Homo sapien
gtacaagttagtgctagtagaaaataagagcct

SEQ ID NO: 605529 - DNA, 33 bp, Homo sapien
tctgctacttggccctaactcttgggcaggaaa

SEQ ID NO: 605530 - DNA, 33 bp, Homo sapien
tctgctacttggcccttactcttgggcaggaaa

SEQ ID NO: 605531 - DNA, 33 bp, Homo sapien; identical to SEQ ID NO: 605529

SEQ ID NO: 605532 - DNA, 33 bp, Homo sapien; identical to SEQ ID NO: 605530

SEQ ID NO: 605533 - DNA, 33 bp, Homo sapien
tggcatggcagattctaactaaccaaatgcacc

SEQ ID NO: 605534 - DNA, 33 bp, Homo sapien
tggcatggcagattctgactaaccaaatgcacc

SEQ ID NO: 605535 - DNA, 33 bp, Homo sapien
tacaagcaaacaaacaagatggttttagatctg

SEQ ID NO: 605536 - DNA, 33 bp, Homo sapien
tacaagcaaacaaacaggatggttttagatctg

SEQ ID NO: 605537 - DNA, 33 bp, Homo sapien; identical to SEQ ID NO: 605535

SEQ ID NO: 605538 - DNA, 33 bp, Homo sapien; identical to SEQ ID NO: 605536

SEQ ID NO: 605539 - DNA, 33 bp, Homo sapien
attacgtttattttatcagtggaatactcagtt

SEQ ID NO: 605540 - DNA, 33 bp, Homo sapien
attacgtttattttattagtggaatactcagtt

SEQ ID NO: 605541 - DNA, 33 bp, Homo sapien
catagagggatctgaaatcgtccgggagggctt

SEQ ID NO: 605542 - DNA, 33 bp, Homo sapien
catagagggatctgaattcgtccgggagggctt

SEQ ID NO: 605543 - DNA, 33 bp, Homo sapien
aggattaggcctgaaccgtggaattccaggcag

SEQ ID NO: 605544 - DNA, 33 bp, Homo sapien
aggattaggcctgaacggtggaattccaggcag

SEQ ID NO: 605545 - DNA, 33 bp, Homo sapien
ctcccaaaagagcaacgaccacaagcatatgag

SEQ ID NO: 605546 - DNA, 33 bp, Homo sapien
ctcccaaaagagcaactaccacaagcatatgag

SEQ ID NO: 605547 - DNA, 33 bp, Homo sapien
acaacagagtttgtaaccatatatatatatata

SEQ ID NO: 605548 - DNA, 33 bp, Homo sapien
acaacagagtttgtaatcatatatatatatata

SEQ ID NO: 605549 - DNA, 33 bp, Homo sapien
tggccagtggctagtgcacaggaggatgtccag

SEQ ID NO: 605550 - DNA, 33 bp, Homo sapien
tggccagtggctagtgtacaggaggatgtccag

SEQ ID NO: 605551 - DNA, 33 bp, Homo sapien
tccaatggtgaaaggaacatcgcagtgcctacc

SEQ ID NO: 605552 - DNA, 33 bp, Homo sapien
tccaatggtgaaaggagcatcgcagtgcctacc

SEQ ID NO: 605553 - DNA, 33 bp, Homo sapien
gtttggttcctaaagacataggtgccacaactt

SEQ ID NO: 605554 - DNA, 33 bp, Homo sapien
gtttggttcctaaagatataggtgccacaactt

SEQ ID NO: 605555 - DNA, 33 bp, Homo sapien
ttcttttcaaggataacccaaagggccatgagg

SEQ ID NO: 605556 - DNA, 33 bp, Homo sapien
ttcttttcaaggataatccaaagggccatgagg

SEQ ID NO: 605557 - DNA, 33 bp, Homo sapien
gtccccatgccacagacgtggaagatgacggtt

SEQ ID NO: 605558 - DNA, 33 bp, Homo sapien
gtccccatgccacagatgtggaagatgacggtt

SEQ ID NO: 605559 - DNA, 33 bp, Homo sapien
tccctcacgtctctgaacctcaatttcccaaca

SEQ ID NO: 605560 - DNA, 33 bp, Homo sapien
tccctcacgtctctgagcctcaatttcccaaca

SEQ ID NO: 605561 - DNA, 33 bp, Homo sapien
acataaaatacactgacagcttatgagcaaaaa

SEQ ID NO: 605562 - DNA, 33 bp, Homo sapien
acataaaatacactgatagcttatgagcaaaaa

SEQ ID NO: 605563 - DNA, 33 bp, Homo sapien
gctctaggtagaaagacatgtggacacaagttc

SEQ ID NO: 605564 - DNA, 33 bp, Homo sapien
gctctaggtagaaagagatgtggacacaagttc

SEQ ID NO: 605565 - DNA, 33 bp, Homo sapien
gctcttgtaattgaaaagggatagataatctgg

SEQ ID NO: 605566 - DNA, 33 bp, Homo sapien
gctcttgtaattgaaaggggatagataatctgg

SEQ ID NO: 605567 - DNA, 33 bp, Homo sapien
tgaaatagagcatgaacattcacttatgggcag

SEQ ID NO: 605568 - DNA, 33 bp, Homo sapien
tgaaatagagcatgaatattcacttatgggcag

SEQ ID NO: 605569 - DNA, 33 bp, Homo sapien
tgattattttatcttacgtgaaaatgcagatta

SEQ ID NO: 605570 - DNA, 33 bp, Homo sapien
tgattattttatcttatgtgaaaatgcagatta

SEQ ID NO: 605571 - DNA, 33 bp, Homo sapien
agtctgtattttcctacctcttttgtgcatggg

SEQ ID NO: 605572 - DNA, 33 bp, Homo sapien
agtctgtattttcctatctcttttgtgcatggg

SEQ ID NO: 605573 - DNA, 33 bp, Homo sapien
tgccctgcctcagaaacgtcaacaaaggccatg

SEQ ID NO: 605574 - DNA, 33 bp, Homo sapien
tgccctgcctcagaaatgtcaacaaaggccatg

SEQ ID NO: 605575 - DNA, 33 bp, Homo sapien
actatttcatattgagcaatgaggggtatgaag

SEQ ID NO: 605576 - DNA, 33 bp, Homo sapien
actatttcatattgaggaatgaggggtatgaag

SEQ ID NO: 605577 - DNA, 33 bp, Homo sapien
ttattagcttcttccaaaatacttttgcaggtg

SEQ ID NO: 605578 - DNA, 33 bp, Homo sapien
ttattagcttcttccagaatacttttgcaggtg

SEQ ID NO: 605579 - DNA, 33 bp, Homo sapien
ctggaatcaaaatgccagacttcaatcctggtt

SEQ ID NO: 605580 - DNA, 33 bp, Homo sapien
ctggaatcaaaatgccggacttcaatcctggtt

SEQ ID NO: 605581 - DNA, 33 bp, Homo sapien
atagctcaaagaaatgaacagtagtgtatttgt

SEQ ID NO: 605582 - DNA, 33 bp, Homo sapien
atagctcaaagaaatgcacagtagtgtatttgt

SEQ ID NO: 605583 - DNA, 33 bp, Homo sapien
ttagtgagaccacaataaaagtgtgtaaaatat

SEQ ID NO: 605584 - DNA, 33 bp, Homo sapien
ttagtgagaccacaatgaaagtgtgtaaaatat

SEQ ID NO: 605585 - DNA, 33 bp, Homo sapien
gaaaattgtggccaaagacagaaataggaatca

SEQ ID NO: 605586 - DNA, 33 bp, Homo sapien
gaaaattgtggccaaatacagaaataggaatca

SEQ ID NO: 605587 - DNA, 33 bp, Homo sapien
acatttgccaaatatcaatcaagaacaaagaca

SEQ ID NO: 605588 - DNA, 33 bp, Homo sapien
acatttgccaaatatccatcaagaacaaagaca

SEQ ID NO: 605589 - DNA, 33 bp, Homo sapien
tgtctttccttcatgcacctataactctttcat

SEQ ID NO: 605590 - DNA, 33 bp, Homo sapien
tgtctttccttcatgcccctataactctttcat

SEQ ID NO: 605591 - DNA, 33 bp, Homo sapien
gatcctacttctagccaataaaatgacaccctc

SEQ ID NO: 605592 - DNA, 33 bp, Homo sapien
gatcctacttctagccgataaaatgacaccctc

SEQ ID NO: 605593 - DNA, 33 bp, Homo sapien
tctgcaggctcatttaaacccacttttaattac

SEQ ID NO: 605594 - DNA, 33 bp, Homo sapien
tctgcaggctcatttatacccacttttaattac

SEQ ID NO: 605595 - DNA, 33 bp, Homo sapien
ccatttctggcactaaactaagtgtgatcatgt

SEQ ID NO: 605596 - DNA, 33 bp, Homo sapien
ccatttctggcactaagctaagtgtgatcatgt

SEQ ID NO: 605597 - DNA, 33 bp, Homo sapien
taaatgagtaaccacaaggtctgtccacagctg

SEQ ID NO: 605598 - DNA, 33 bp, Homo sapien
taaatgagtaaccacagggtctgtccacagctg

SEQ ID NO: 605599 - DNA, 33 bp, Homo sapien
agttgtattccagggtcacagaactccatctct

SEQ ID NO: 605600 - DNA, 33 bp, Homo sapien
agttgtattccagggtgacagaactccatctct

SEQ ID NO: 605601 - DNA, 33 bp, Homo sapien
tgaaaccttacacttacgatttgtggtagactt

SEQ ID NO: 605602 - DNA, 33 bp, Homo sapien
tgaaaccttacacttatgatttgtggtagactt

SEQ ID NO: 605603 - DNA, 33 bp, Homo sapien
tgtctctgaatggaaaatgtggtcctccagagg

SEQ ID NO: 605604 - DNA, 33 bp, Homo sapien
tgtctctgaatggaaagtgtggtcctccagagg

SEQ ID NO: 605605 - DNA, 33 bp, Homo sapien
ggatgccctcctgcaccgatgcctctggaggac

SEQ ID NO: 605606 - DNA, 33 bp, Homo sapien
ggatgccctcctgcactgatgcctctggaggac

SEQ ID NO: 605607 - DNA, 33 bp, Homo sapien
taagacctgaaacctggagtgaatgctcagccc

SEQ ID NO: 605608 - DNA, 33 bp, Homo sapien
taagacctgaaacctgtagtgaatgctcagccc

SEQ ID NO: 605609 - DNA, 33 bp, Homo sapien
atgtgccagacagcaaaacaaagcataggcctg

SEQ ID NO: 605610 - DNA, 33 bp, Homo sapien
atgtgccagacagcaagacaaagcataggcctg

SEQ ID NO: 605611 - DNA, 33 bp, Homo sapien
cctctgccaatgcccaagaaagctggaatgctc

SEQ ID NO: 605612 - DNA, 33 bp, Homo sapien
cctctgccaatgcccaggaaagctggaatgctc

SEQ ID NO: 605613 - DNA, 33 bp, Homo sapien
tccagcatcaggaatactaataaagggtcccca

SEQ ID NO: 605614 - DNA, 33 bp, Homo sapien
tccagcatcaggaatattaataaagggtcccca

SEQ ID NO: 605615 - DNA, 33 bp, Homo sapien
ctaatttattcctaccaagtaaaacatggctca

SEQ ID NO: 605616 - DNA, 33 bp, Homo sapien
ctaatttattcctaccgagtaaaacatggctca

SEQ ID NO: 605617 - DNA, 33 bp, Homo sapien
agtgcagccatgcagacggttattccagctctg

SEQ ID NO: 605618 - DNA, 33 bp, Homo sapien
agtgcagccatgcagatggttattccagctctg

SEQ ID NO: 605619 - DNA, 33 bp, Homo sapien; identical to SEQ ID NO: 605617

SEQ ID NO: 605620 - DNA, 33 bp, Homo sapien; identical to SEQ ID NO: 605618

SEQ ID NO: 605621 - DNA, 33 bp, Homo sapien; identical to SEQ ID NO: 605617

SEQ ID NO: 605622 - DNA, 33 bp, Homo sapien; identical to SEQ ID NO: 605618

SEQ ID NO: 605623 - DNA, 33 bp, Homo sapien
atatcttctcagcaaccggccgcagtctcttct

SEQ ID NO: 605624 - DNA, 33 bp, Homo sapien
atatcttctcagcaactggccgcagtctcttct

SEQ ID NO: 605625 - DNA, 33 bp, Homo sapien
gaccttggacaaagaacttaaccactctgagtt

SEQ ID NO: 605626 - DNA, 33 bp, Homo sapien
gaccttggacaaagaatttaaccactctgagtt

SEQ ID NO: 605627 - DNA, 33 bp, Homo sapien
caggttccagatcctacagattaggccagactg

SEQ ID NO: 605628 - DNA, 33 bp, Homo sapien
caggttccagatcctatagattaggccagactg

SEQ ID NO: 605629 - DNA, 33 bp, Homo sapien
ccgagacaaaggtggaagagaaaagctgcagag

SEQ ID NO: 605630 - DNA, 33 bp, Homo sapien
ccgagacaaaggtggaggagaaaagctgcagag

SEQ ID NO: 605631 - DNA, 33 bp, Homo sapien
tattccagatctccaacgttacaggcgagaacc

SEQ ID NO: 605632 - DNA, 33 bp, Homo sapien
tattccagatctccaatgttacaggcgagaacc

SEQ ID NO: 605633 - DNA, 33 bp, Homo sapien
tcccagtgaggccataagaacctgtgacagcac

SEQ ID NO: 605634 - DNA, 33 bp, Homo sapien
tcccagtgaggccataggaacctgtgacagcac

SEQ ID NO: 605635 - DNA, 33 bp, Homo sapien
tggagtttggccagaaataactgacttgaaatc

SEQ ID NO: 605636 - DNA, 33 bp, Homo sapien
tggagtttggccagaagtaactgacttgaaatc

SEQ ID NO: 605637 - DNA, 33 bp, Homo sapien
ccaccagcttagcaatcaggagatcccggagct

SEQ ID NO: 605638 - DNA, 33 bp, Homo sapien
ccaccagcttagcaatgaggagatcccggagct

SEQ ID NO: 605639 - DNA, 33 bp, Homo sapien
agattaaaatgcagtcaacgaaaaagggccccc

SEQ ID NO: 605640 - DNA, 33 bp, Homo sapien
agattaaaatgcagtcgacgaaaaagggccccc

SEQ ID NO: 605641 - DNA, 33 bp, Homo sapien
accaggccttcatcacaccaggagagagtgcct

SEQ ID NO: 605642 - DNA, 33 bp, Homo sapien
accaggccttcatcacgccaggagagagtgcct

SEQ ID NO: 605643 - DNA, 33 bp, Homo sapien
tcattccggtttcagaagaagtgtgctacaggt

SEQ ID NO: 605644 - DNA, 33 bp, Homo sapien
tcattccggtttcagatgaagtgtgctacaggt

SEQ ID NO: 605645 - DNA, 33 bp, Homo sapien
aacaccattcccaacactgtggctagacagagg

SEQ ID NO: 605646 - DNA, 33 bp, Homo sapien
aacaccattcccaacattgtggctagacagagg

SEQ ID NO: 605647 - DNA, 33 bp, Homo sapien
cacttacgatcaggacagcgagcctattcagac

SEQ ID NO: 605648 - DNA, 33 bp, Homo sapien
cacttacgatcaggacggcgagcctattcagac

SEQ ID NO: 605649 - DNA, 33 bp, Homo sapien
gatgttctgagacctacgagaccaagacggccc

SEQ ID NO: 605650 - DNA, 33 bp, Homo sapien
gatgttctgagacctatgagaccaagacggccc

SEQ ID NO: 605651 - DNA, 33 bp, Homo sapien
tcggggtggtctttggaaagcactatcatccaa

SEQ ID NO: 605652 - DNA, 33 bp, Homo sapien
tcggggtggtctttgggaagcactatcatccaa

SEQ ID NO: 605653 - DNA, 33 bp, Homo sapien
cagagccgagtcaagccgagctgggcagctgcc

SEQ ID NO: 605654 - DNA, 33 bp, Homo sapien
cagagccgagtcaagctgagctgggcagctgcc

SEQ ID NO: 605655 - DNA, 33 bp, Homo sapien
tagtgtgtgggagtgaaagtgaatgtatgtgtg

SEQ ID NO: 605656 - DNA, 33 bp, Homo sapien
tagtgtgtgggagtgagagtgaatgtatgtgtg

SEQ ID NO: 605657 - DNA, 33 bp, Homo sapien
tccccaggctctcaaccgtctccctcggagtct

SEQ ID NO: 605658 - DNA, 33 bp, Homo sapien
tccccaggctctcaactgtctccctcggagtct

SEQ ID NO: 605659 - DNA, 33 bp, Homo sapien
agtacttactgcctacaatcatgttcttaaaac

SEQ ID NO: 605660 - DNA, 33 bp, Homo sapien
agtacttactgcctacgatcatgttcttaaaac

SEQ ID NO: 605661 - DNA, 33 bp, Homo sapien
atttctcaggaacaaccgggaaaagccagtggg

SEQ ID NO: 605662 - DNA, 33 bp, Homo sapien
atttctcaggaacaacggggaaaagccagtggg

SEQ ID NO: 605663 - DNA, 33 bp, Homo sapien
aacagcttcctgagaacgcagagataggattta

SEQ ID NO: 605664 - DNA, 33 bp, Homo sapien
aacagcttcctgagaatgcagagataggattta

SEQ ID NO: 605665 - DNA, 33 bp, Homo sapien
cgtgacacttagccaccactttattgggatctg

SEQ ID NO: 605666 - DNA, 33 bp, Homo sapien
cgtgacacttagccactactttattgggatctg

SEQ ID NO: 605667 - DNA, 33 bp, Homo sapien
cagccatgtgaacaaacagatatagaataattc

SEQ ID NO: 605668 - DNA, 33 bp, Homo sapien
cagccatgtgaacaaatagatatagaataattc

SEQ ID NO: 605669 - DNA, 33 bp, Homo sapien
tcctccatggttaccaatgacctcctgaagagc

SEQ ID NO: 605670 - DNA, 33 bp, Homo sapien
tcctccatggttaccagtgacctcctgaagagc

SEQ ID NO: 605671 - DNA, 33 bp, Homo sapien
cggagcaaaaggaagaagcatgcggggaggcgc

SEQ ID NO: 605672 - DNA, 33 bp, Homo sapien
cggagcaaaaggaagaggcatgcggggaggcgc

SEQ ID NO: 605673 - DNA, 33 bp, Homo sapien
cattgaccataagctacatacggtgaaaaggct

SEQ ID NO: 605674 - DNA, 33 bp, Homo sapien
cattgaccataagctatatacggtgaaaaggct

SEQ ID NO: 605675 - DNA, 33 bp, Homo sapien
atagggggctggacgcaaagatctgaacctgag

SEQ ID NO: 605676 - DNA, 33 bp, Homo sapien
atagggggctggacgcgaagatctgaacctgag

SEQ ID NO: 605677 - DNA, 33 bp, Homo sapien
aggtagacatccgcgaagtcagatgctttccaa

SEQ ID NO: 605678 - DNA, 33 bp, Homo sapien
aggtagacatccgcgaggtcagatgctttccaa

SEQ ID NO: 605679 - DNA, 33 bp, Homo sapien
gtttattgggccacaaaggaaagtcactggtcc

SEQ ID NO: 605680 - DNA, 33 bp, Homo sapien
gtttattgggccacaagggaaagtcactggtcc

SEQ ID NO: 605681 - DNA, 33 bp, Homo sapien
ctctgcccgagctctacgcattcaccgcctgca

SEQ ID NO: 605682 - DNA, 33 bp, Homo sapien
ctctgcccgagctctatgcattcaccgcctgca

SEQ ID NO: 605683 - DNA, 33 bp, Homo sapien
gaacccctgttccccacgtaagctggtcccagc

SEQ ID NO: 605684 - DNA, 33 bp, Homo sapien
gaacccctgttccccatgtaagctggtcccagc

SEQ ID NO: 605685 - DNA, 33 bp, Homo sapien
aacagagggaggaagacctgccagcaagaacag

SEQ ID NO: 605686 - DNA, 33 bp, Homo sapien
aacagagggaggaagatctgccagcaagaacag

SEQ ID NO: 605687 - DNA, 33 bp, Homo sapien
tcattgcatactttcacctttttcctgattatt

SEQ ID NO: 605688 - DNA, 33 bp, Homo sapien
tcattgcatactttcagctttttcctgattatt

SEQ ID NO: 605689 - DNA, 33 bp, Homo sapien
acggtgactaatttcgacctgcacttgcctcac

SEQ ID NO: 605690 - DNA, 33 bp, Homo sapien
acggtgactaatttcggcctgcacttgcctcac

SEQ ID NO: 605691 - DNA, 33 bp, Homo sapien
aggaagacttgaattacgtacagaaatgtaaaa

SEQ ID NO: 605692 - DNA, 33 bp, Homo sapien
aggaagacttgaattatgtacagaaatgtaaaa

SEQ ID NO: 605693 - DNA, 33 bp, Homo sapien
ctctaaatcccaccaacggtatcccaagaagat

SEQ ID NO: 605694 - DNA, 33 bp, Homo sapien
ctctaaatcccaccaatggtatcccaagaagat

SEQ ID NO: 605695 - DNA, 33 bp, Homo sapien
ggtaactggcgagagaaaagagcctttgcctct

SEQ ID NO: 605696 - DNA, 33 bp, Homo sapien
ggtaactggcgagagacaagagcctttgcctct

SEQ ID NO: 605697 - DNA, 33 bp, Homo sapien
catctgttatcacaggaaatggcgcttttatta

SEQ ID NO: 605698 - DNA, 33 bp, Homo sapien
catctgttatcacaggcaatggcgcttttatta

SEQ ID NO: 605699 - DNA, 33 bp, Homo sapien
gaaataaaaaatctgcacataaatcttacaagt

SEQ ID NO: 605700 - DNA, 33 bp, Homo sapien
gaaataaaaaatctgcccataaatcttacaagt

SEQ ID NO: 605701 - DNA, 33 bp, Homo sapien
agttaagaaacgattgccaaggccatgcatggt

SEQ ID NO: 605702 - DNA, 33 bp, Homo sapien
agttaagaaacgattgtcaaggccatgcatggt

SEQ ID NO: 605703 - DNA, 33 bp, Homo sapien
tgtttttcgtgccaaaatatgataagaggcttt

SEQ ID NO: 605704 - DNA, 33 bp, Homo sapien
tgtttttcgtgccaaagtatgataagaggcttt

SEQ ID NO: 605705 - DNA, 33 bp, Homo sapien
gatctctctccaagcacagtcttcattatgatc

SEQ ID NO: 605706 - DNA, 33 bp, Homo sapien
gatctctctccaagcatagtcttcattatgatc

SEQ ID NO: 605707 - DNA, 33 bp, Homo sapien
tatagtaagatacacacaacatcaaattcacca

SEQ ID NO: 605708 - DNA, 33 bp, Homo sapien
tatagtaagatacacataacatcaaattcacca

SEQ ID NO: 605709 - DNA, 33 bp, Homo sapien
aaggtgtgggaagagaaaagacgctggcctggg

SEQ ID NO: 605710 - DNA, 33 bp, Homo sapien
aaggtgtgggaagagagaagacgctggcctggg

SEQ ID NO: 605711 - DNA, 33 bp, Homo sapien
acaatgtgaaataaaacgatactataaccagga

SEQ ID NO: 605712 - DNA, 33 bp, Homo sapien
acaatgtgaaataaaatgatactataaccagga

SEQ ID NO: 605713 - DNA, 33 bp, Homo sapien
gaagattcgggagagggaagtcatcatgaccga

SEQ ID NO: 605714 - DNA, 33 bp, Homo sapien
gaagattcgggagaggtaagtcatcatgaccga

SEQ ID NO: 605715 - DNA, 33 bp, Homo sapien
ctgggacattcctgccaggagagagtcaggccc

SEQ ID NO: 605716 - DNA, 33 bp, Homo sapien
ctgggacattcctgccgggagagagtcaggccc

SEQ ID NO: 605717 - DNA, 33 bp, Homo sapien
ttccctgctctgacaacagccctacagggatgc

SEQ ID NO: 605718 - DNA, 33 bp, Homo sapien
ttccctgctctgacaatagccctacagggatgc

SEQ ID NO: 605719 - DNA, 33 bp, Homo sapien
ccctcaccgaatggcagctgggttccaaaatac

SEQ ID NO: 605720 - DNA, 33 bp, Homo sapien
ccctcaccgaatggcatctgggttccaaaatac

SEQ ID NO: 605721 - DNA, 33 bp, Homo sapien
acccgtttaatgcaaaatcttcattccctcctc

SEQ ID NO: 605722 - DNA, 33 bp, Homo sapien
acccgtttaatgcaaactcttcattccctcctc

SEQ ID NO: 605723 - DNA, 33 bp, Homo sapien
agtgagggttcaccaaactgtgatgaggcatct

SEQ ID NO: 605724 - DNA, 33 bp, Homo sapien
agtgagggttcaccaacctgtgatgaggcatct

SEQ ID NO: 605725 - DNA, 33 bp, Homo sapien
cgctaaaaaggcgacaagaaccggtgaaagtaa

SEQ ID NO: 605726 - DNA, 33 bp, Homo sapien
cgctaaaaaggcgacaggaaccggtgaaagtaa

SEQ ID NO: 605727 - DNA, 33 bp, Homo sapien
actcaaccgaaatgggcatgaaagttgaaatgg

SEQ ID NO: 605728 - DNA, 33 bp, Homo sapien
actcaaccgaaatgggtatgaaagttgaaatgg

SEQ ID NO: 605729 - DNA, 33 bp, Homo sapien
tattatatattactgcacatcatgctgggggag

SEQ ID NO: 605730 - DNA, 33 bp, Homo sapien
tattatatattactgcgcatcatgctgggggag

SEQ ID NO: 605731 - DNA, 33 bp, Homo sapien
cagtcagaagctttgagcaacatccttaaaggc

SEQ ID NO: 605732 - DNA, 33 bp, Homo sapien
cagtcagaagctttgatcaacatccttaaaggc

SEQ ID NO: 605733 - DNA, 33 bp, Homo sapien
cagcgcccggccgagggaatttttagtgagtca

SEQ ID NO: 605734 - DNA, 33 bp, Homo sapien
cagcgcccggccgaggtaatttttagtgagtca

SEQ ID NO: 605735 - DNA, 33 bp, Homo sapien
ggatgagatcattaggaagagaaaagaactggc

SEQ ID NO: 605736 - DNA, 33 bp, Homo sapien
ggatgagatcattagggagagaaaagaactggc

SEQ ID NO: 605737 - DNA, 33 bp, Homo sapien
acccgtatcccactcactatcaagaagcaactc

SEQ ID NO: 605738 - DNA, 33 bp, Homo sapien
acccgtatcccactcattatcaagaagcaactc

SEQ ID NO: 605739 - DNA, 33 bp, Homo sapien
tctgatgaccttgttacgttacacagaggagaa

SEQ ID NO: 605740 - DNA, 33 bp, Homo sapien
tctgatgaccttgttatgttacacagaggagaa

SEQ ID NO: 605741 - DNA, 33 bp, Homo sapien
tttgagtacctgacacgctgtaagccaagcact

SEQ ID NO: 605742 - DNA, 33 bp, Homo sapien
tttgagtacctgacactctgtaagccaagcact

SEQ ID NO: 605743 - DNA, 33 bp, Homo sapien
ggataagcatctttacaaggggtcatctgtgcg

SEQ ID NO: 605744 - DNA, 33 bp, Homo sapien
ggataagcatctttacgaggggtcatctgtgcg

SEQ ID NO: 605745 - DNA, 33 bp, Homo sapien
gtgaaagagaaacagaaagactggggataggtt

SEQ ID NO: 605746 - DNA, 33 bp, Homo sapien
gtgaaagagaaacagatagactggggataggtt

SEQ ID NO: 605747 - DNA, 33 bp, Homo sapien
gctggtcaccggccataatctcggacaagtctt

SEQ ID NO: 605748 - DNA, 33 bp, Homo sapien
gctggtcaccggccatgatctcggacaagtctt

SEQ ID NO: 605749 - DNA, 33 bp, Homo sapien
acaggctgaaatgttacctggaggcctcaggca

SEQ ID NO: 605750 - DNA, 33 bp, Homo sapien
acaggctgaaatgttatctggaggcctcaggca

SEQ ID NO: 605751 - DNA, 33 bp, Homo sapien
cgagctgcagtgggcaaatggattcacatccag

SEQ ID NO: 605752 - DNA, 33 bp, Homo sapien
cgagctgcagtgggcagatggattcacatccag

SEQ ID NO: 605753 - DNA, 33 bp, Homo sapien
agagtaatgaacaagcactcgtttcaagaagct

SEQ ID NO: 605754 - DNA, 33 bp, Homo sapien
agagtaatgaacaagcgctcgtttcaagaagct

SEQ ID NO: 605755 - DNA, 33 bp, Homo sapien
tggaaagtgtttcaaacggtcagtaactggcta

SEQ ID NO: 605756 - DNA, 33 bp, Homo sapien
tggaaagtgtttcaaatggtcagtaactggcta

SEQ ID NO: 605757 - DNA, 33 bp, Homo sapien
acaaaaggtgctggaacaatcgattaaccttat

SEQ ID NO: 605758 - DNA, 33 bp, Homo sapien
acaaaaggtgctggaataatcgattaaccttat

SEQ ID NO: 605759 - DNA, 33 bp, Homo sapien
gcagccggacgccgggaatctggcgccacctgg

SEQ ID NO: 605760 - DNA, 33 bp, Homo sapien
gcagccggacgccggggatctggcgccacctgg

SEQ ID NO: 605761 - DNA, 33 bp, Homo sapien
tttctccttttagttccatcagttgttgcttca

SEQ ID NO: 605762 - DNA, 33 bp, Homo sapien
tttctccttttagttctatcagttgttgcttca

SEQ ID NO: 605763 - DNA, 33 bp, Homo sapien
caaaatcaaacattcactcatggtaaaaactct

SEQ ID NO: 605764 - DNA, 33 bp, Homo sapien
caaaatcaaacattcattcatggtaaaaactct

SEQ ID NO: 605765 - DNA, 33 bp, Homo sapien
tgttctagatgcacagaaggctcccaacacaga

SEQ ID NO: 605766 - DNA, 33 bp, Homo sapien
tgttctagatgcacagtaggctcccaacacaga

SEQ ID NO: 605767 - DNA, 33 bp, Homo sapien
cctccggaggttaataagaccctctgtgtgcaa

SEQ ID NO: 605768 - DNA, 33 bp, Homo sapien
cctccggaggttaataggaccctctgtgtgcaa

SEQ ID NO: 605769 - DNA, 33 bp, Homo sapien
atgtgtgcataggcaaatgttcatgcatgtatg

SEQ ID NO: 605770 - DNA, 33 bp, Homo sapien
atgtgtgcataggcaagtgttcatgcatgtatg

SEQ ID NO: 605771 - DNA, 33 bp, Homo sapien
agagatgtctcaaagccaaacctaagaaagtga

SEQ ID NO: 605772 - DNA, 33 bp, Homo sapien
agagatgtctcaaagcgaaacctaagaaagtga

SEQ ID NO: 605773 - DNA, 33 bp, Homo sapien
gggatggtacctgctacgtaccaagtcttgtgt

SEQ ID NO: 605774 - DNA, 33 bp, Homo sapien
gggatggtacctgctatgtaccaagtcttgtgt

SEQ ID NO: 605775 - DNA, 33 bp, Homo sapien
ttctttctagcaatacaaaaatggaatatcgct

SEQ ID NO: 605776 - DNA, 33 bp, Homo sapien
ttctttctagcaataccaaaatggaatatcgct

SEQ ID NO: 605777 - DNA, 33 bp, Homo sapien
ttcactgactatcttcaaagtcaacctcaaatt

SEQ ID NO: 605778 - DNA, 33 bp, Homo sapien
ttcactgactatcttctaagtcaacctcaaatt

SEQ ID NO: 605779 - DNA, 33 bp, Homo sapien
ctgtggggagattcaccgcgcagactccaggtg

SEQ ID NO: 605780 - DNA, 33 bp, Homo sapien
ctgtggggagattcacggcgcagactccaggtg

SEQ ID NO: 605781 - DNA, 33 bp, Homo sapien
tccgggggcttatggggagttctgggcatctag

SEQ ID NO: 605782 - DNA, 33 bp, Homo sapien
tccgggggcttatgggtagttctgggcatctag

SEQ ID NO: 605783 - DNA, 33 bp, Homo sapien
gcctatttaagatacaccccatacttcagatgt

SEQ ID NO: 605784 - DNA, 33 bp, Homo sapien
gcctatttaagatacatcccatacttcagatgt

SEQ ID NO: 605785 - DNA, 33 bp, Homo sapien
aattgacacattctccactggcctgcttgcctg

SEQ ID NO: 605786 - DNA, 33 bp, Homo sapien
aattgacacattctccgctggcctgcttgcctg

SEQ ID NO: 605787 - DNA, 33 bp, Homo sapien
gtgcttaggaagggcccagacatgttcttcaag

SEQ ID NO: 605788 - DNA, 33 bp, Homo sapien
gtgcttaggaagggcctagacatgttcttcaag

SEQ ID NO: 605789 - DNA, 33 bp, Homo sapien
taggcgggtacgcggggagatgcatttgtattc

SEQ ID NO: 605790 - DNA, 33 bp, Homo sapien
taggcgggtacgcgggtagatgcatttgtattc

SEQ ID NO: 605791 - DNA, 33 bp, Homo sapien
attaggttaaagtcacacagccaatgggcagga

SEQ ID NO: 605792 - DNA, 33 bp, Homo sapien
attaggttaaagtcacgcagccaatgggcagga

SEQ ID NO: 605793 - DNA, 33 bp, Homo sapien
ctgtgccttcatgggccctcctttggctttgca

SEQ ID NO: 605794 - DNA, 33 bp, Homo sapien
ctgtgccttcatgggctctcctttggctttgca

SEQ ID NO: 605795 - DNA, 33 bp, Homo sapien
tagcggtttaaaataacagggatgtgagctctt

SEQ ID NO: 605796 - DNA, 33 bp, Homo sapien
tagcggtttaaaataatagggatgtgagctctt

SEQ ID NO: 605797 - DNA, 33 bp, Homo sapien
agacctgagcttcttaagggccaggaagtgtgt

SEQ ID NO: 605798 - DNA, 33 bp, Homo sapien
agacctgagcttcttaggggccaggaagtgtgt

SEQ ID NO: 605799 - DNA, 33 bp, Homo sapien
ggggactccaaggcagacgaccagtatctaatg

SEQ ID NO: 605800 - DNA, 33 bp, Homo sapien
ggggactccaaggcaggcgaccagtatctaatg

SEQ ID NO: 605801 - DNA, 33 bp, Homo sapien
cagacaaggggtatgcaaggaaaagatcttaga

SEQ ID NO: 605802 - DNA, 33 bp, Homo sapien
cagacaaggggtatgcgaggaaaagatcttaga

SEQ ID NO: 605803 - DNA, 33 bp, Homo sapien
gcttaaggtaaaagcccactggtcaccctggct

SEQ ID NO: 605804 - DNA, 33 bp, Homo sapien
gcttaaggtaaaagcctactggtcaccctggct

SEQ ID NO: 605805 - DNA, 33 bp, Homo sapien
acccaggagcagagcaaggcgctttggttgggg

SEQ ID NO: 605806 - DNA, 33 bp, Homo sapien
acccaggagcagagcacggcgctttggttgggg

SEQ ID NO: 605807 - DNA, 33 bp, Homo sapien
ttcttctcctgtgaaacgggggtgacctttgtg

SEQ ID NO: 605808 - DNA, 33 bp, Homo sapien
ttcttctcctgtgaaatgggggtgacctttgtg

SEQ ID NO: 605809 - DNA, 33 bp, Homo sapien
taataaaggttggtaacggtgacatatgaatac

SEQ ID NO: 605810 - DNA, 33 bp, Homo sapien
taataaaggttggtaatggtgacatatgaatac

SEQ ID NO: 605811 - DNA, 33 bp, Homo sapien
gcagcttgagcaaagacggggagtcagcaagtg

SEQ ID NO: 605812 - DNA, 33 bp, Homo sapien
gcagcttgagcaaagatggggagtcagcaagtg

SEQ ID NO: 605813 - DNA, 33 bp, Homo sapien
ctaggcttccagctgccgagccggggaagtccc

SEQ ID NO: 605814 - DNA, 33 bp, Homo sapien
ctaggcttccagctgctgagccggggaagtccc

SEQ ID NO: 605815 - DNA, 33 bp, Homo sapien
agggtgtaaggctgggacattagggacaaataa

SEQ ID NO: 605816 - DNA, 33 bp, Homo sapien
agggtgtaaggctggggcattagggacaaataa

SEQ ID NO: 605817 - DNA, 33 bp, Homo sapien
atgctgtctgcaaccacctgcagttttcctatc

SEQ ID NO: 605818 - DNA, 33 bp, Homo sapien
atgctgtctgcaaccagctgcagttttcctatc

SEQ ID NO: 605819 - DNA, 33 bp, Homo sapien
tgggactgtggcttcccgagaacaagggctgct

SEQ ID NO: 605820 - DNA, 33 bp, Homo sapien
tgggactgtggcttcctgagaacaagggctgct

SEQ ID NO: 605821 - DNA, 33 bp, Homo sapien
atcagagtaatacctgccaattattggaaagta

SEQ ID NO: 605822 - DNA, 33 bp, Homo sapien
atcagagtaatacctgtcaattattggaaagta

SEQ ID NO: 605823 - DNA, 33 bp, Homo sapien
agggcaaatgctgaaacgcctggcagagcagag

SEQ ID NO: 605824 - DNA, 33 bp, Homo sapien
agggcaaatgctgaaaggcctggcagagcagag

SEQ ID NO: 605825 - DNA, 33 bp, Homo sapien
cattcatcactccatccacttgccaggcctggg

SEQ ID NO: 605826 - DNA, 33 bp, Homo sapien
cattcatcactccatctacttgccaggcctggg

SEQ ID NO: 605827 - DNA, 33 bp, Homo sapien
ttgatgacacaatgtacgaatgcaaatacccct

SEQ ID NO: 605828 - DNA, 33 bp, Homo sapien
ttgatgacacaatgtatgaatgcaaatacccct

SEQ ID NO: 605829 - DNA, 33 bp, Homo sapien
tggtgggaaagacagacccagataatgctggga

SEQ ID NO: 605830 - DNA, 33 bp, Homo sapien
tggtgggaaagacagatccagataatgctggga

SEQ ID NO: 605831 - DNA, 33 bp, Homo sapien
ttaaatatagttgccccgagccggcaaaaaatt

SEQ ID NO: 605832 - DNA, 33 bp, Homo sapien
ttaaatatagttgccctgagccggcaaaaaatt

SEQ ID NO: 605833 - DNA, 33 bp, Homo sapien
tgaaaggatgagtaaacgtttgtagccaggtcc

SEQ ID NO: 605834 - DNA, 33 bp, Homo sapien
tgaaaggatgagtaaaggtttgtagccaggtcc

SEQ ID NO: 605835 - DNA, 33 bp, Homo sapien
aataaatacatagccactaaaataaaaaggtcc

SEQ ID NO: 605836 - DNA, 33 bp, Homo sapien
aataaatacatagccagtaaaataaaaaggtcc

SEQ ID NO: 605837 - DNA, 33 bp, Homo sapien
tatgagctagtttataagacatcctcatgccac

SEQ ID NO: 605838 - DNA, 33 bp, Homo sapien
tatgagctagtttataggacatcctcatgccac

SEQ ID NO: 605839 - DNA, 33 bp, Homo sapien
taggtaagacagtccaacctggcactcagcaag

SEQ ID NO: 605840 - DNA, 33 bp, Homo sapien
taggtaagacagtccaccctggcactcagcaag

SEQ ID NO: 605841 - DNA, 33 bp, Homo sapien
ggaactgctccctaacgcctgttgctctggccc

SEQ ID NO: 605842 - DNA, 33 bp, Homo sapien
ggaactgctccctaactcctgttgctctggccc

SEQ ID NO: 605843 - DNA, 33 bp, Homo sapien
tgggtttaaagtgcgtcaagtgtctggaaagca

SEQ ID NO: 605844 - DNA, 33 bp, Homo sapien
tgggtttaaagtgcgtgaagtgtctggaaagca

SEQ ID NO: 605845 - DNA, 33 bp, Homo sapien
tgggctgggtgtggcacctctatcattccatgc

SEQ ID NO: 605846 - DNA, 33 bp, Homo sapien
tgggctgggtgtggcatctctatcattccatgc

SEQ ID NO: 605847 - DNA, 33 bp, Homo sapien
ccctggtcctcctgaacgtttacaacagatgac

SEQ ID NO: 605848 - DNA, 33 bp, Homo sapien
ccctggtcctcctgaatgtttacaacagatgac

SEQ ID NO: 605849 - DNA, 33 bp, Homo sapien
ggtgcttggtctctgcaaagtcaaaggcctgac

SEQ ID NO: 605850 - DNA, 33 bp, Homo sapien
ggtgcttggtctctgcgaagtcaaaggcctgac

SEQ ID NO: 605851 - DNA, 33 bp, Homo sapien
tggtttttcatgtacaaaatgaggcgacgaccc

SEQ ID NO: 605852 - DNA, 33 bp, Homo sapien
tggtttttcatgtacagaatgaggcgacgaccc

SEQ ID NO: 605853 - DNA, 33 bp, Homo sapien
aggtttatagatctgcacttcacaggaaacccc

SEQ ID NO: 605854 - DNA, 33 bp, Homo sapien
aggtttatagatctgcgcttcacaggaaacccc

SEQ ID NO: 605855 - DNA, 33 bp, Homo sapien
ccaggtatgtagctgacgtgtaatatctcattt

SEQ ID NO: 605856 - DNA, 33 bp, Homo sapien
ccaggtatgtagctgatgtgtaatatctcattt

SEQ ID NO: 605857 - DNA, 33 bp, Homo sapien
gcatcttttctcattaactccagtgactatgaa

SEQ ID NO: 605858 - DNA, 33 bp, Homo sapien
gcatcttttctcattagctccagtgactatgaa

SEQ ID NO: 605859 - DNA, 33 bp, Homo sapien
ttacctttcttaaaggaaataaagccggtcagg

SEQ ID NO: 605860 - DNA, 33 bp, Homo sapien
ttacctttcttaaaggtaataaagccggtcagg

SEQ ID NO: 605861 - DNA, 33 bp, Homo sapien
gtaagaatcagagagaactatgcacggccccag

SEQ ID NO: 605862 - DNA, 33 bp, Homo sapien
gtaagaatcagagagacctatgcacggccccag

SEQ ID NO: 605863 - DNA, 33 bp, Homo sapien
cactgagtcacagaaaaggctgagacagaaacc

SEQ ID NO: 605864 - DNA, 33 bp, Homo sapien
cactgagtcacagaaacggctgagacagaaacc

SEQ ID NO: 605865 - DNA, 33 bp, Homo sapien
agtgtctgttcccaccacctgagactgtcttta

SEQ ID NO: 605866 - DNA, 33 bp, Homo sapien
agtgtctgttcccaccgcctgagactgtcttta

SEQ ID NO: 605867 - DNA, 33 bp, Homo sapien
gcagggcctgtctggggagaaaacatggccacc

SEQ ID NO: 605868 - DNA, 33 bp, Homo sapien
gcagggcctgtctgggtagaaaacatggccacc

SEQ ID NO: 605869 - DNA, 33 bp, Homo sapien
ttccacagacggaaaacgaggctaatcccgaag

SEQ ID NO: 605870 - DNA, 33 bp, Homo sapien
ttccacagacggaaaatgaggctaatcccgaag

SEQ ID NO: 605871 - DNA, 33 bp, Homo sapien
accctaaaaagaagaaagaggtgacgtgtcaca

SEQ ID NO: 605872 - DNA, 33 bp, Homo sapien
accctaaaaagaagaatgaggtgacgtgtcaca

SEQ ID NO: 605873 - DNA, 33 bp, Homo sapien
aggcctcacatattcacctcttgctgcttcttt

SEQ ID NO: 605874 - DNA, 33 bp, Homo sapien
aggcctcacatattcatctcttgctgcttcttt

SEQ ID NO: 605875 - DNA, 33 bp, Homo sapien
caggaaataccataacccattgcagcaccccca

SEQ ID NO: 605876 - DNA, 33 bp, Homo sapien
caggaaataccataactcattgcagcaccccca

SEQ ID NO: 605877 - DNA, 33 bp, Homo sapien
atgtggcaacatctcacgatagctttttctaac

SEQ ID NO: 605878 - DNA, 33 bp, Homo sapien
atgtggcaacatctcatgatagctttttctaac

SEQ ID NO: 605879 - DNA, 33 bp, Homo sapien
aggtgggacggatttacatcagatcagagtggg

SEQ ID NO: 605880 - DNA, 33 bp, Homo sapien
aggtgggacggatttatatcagatcagagtggg

SEQ ID NO: 605881 - DNA, 33 bp, Homo sapien
atgcaactattaaaaaaccacaatcagccagca

SEQ ID NO: 605882 - DNA, 33 bp, Homo sapien
atgcaactattaaaaatccacaatcagccagca

SEQ ID NO: 605883 - DNA, 33 bp, Homo sapien
catgtaattggagttacgcgttgtttgctctgc

SEQ ID NO: 605884 - DNA, 33 bp, Homo sapien
catgtaattggagttatgcgttgtttgctctgc

SEQ ID NO: 605885 - DNA, 33 bp, Homo sapien
catgaaaaggacaggcaactgaaacacacaaca

SEQ ID NO: 605886 - DNA, 33 bp, Homo sapien
catgaaaaggacaggcgactgaaacacacaaca

SEQ ID NO: 605887 - DNA, 33 bp, Homo sapien
cccgtcagggatctaaccagcttaaagtgatgg

SEQ ID NO: 605888 - DNA, 33 bp, Homo sapien
cccgtcagggatctaatcagcttaaagtgatgg

SEQ ID NO: 605889 - DNA, 33 bp, Homo sapien
agcttcagaaattcagcaatggatggtctcagc

SEQ ID NO: 605890 - DNA, 33 bp, Homo sapien
agcttcagaaattcaggaatggatggtctcagc

SEQ ID NO: 605891 - DNA, 33 bp, Homo sapien
atcctcctcttagtcacgttcttcgttttcatt

SEQ ID NO: 605892 - DNA, 33 bp, Homo sapien
atcctcctcttagtcatgttcttcgttttcatt

SEQ ID NO: 605893 - DNA, 33 bp, Homo sapien
ggaaagaatcgctaagaaatacagaatgcttca

SEQ ID NO: 605894 - DNA, 33 bp, Homo sapien
ggaaagaatcgctaagcaatacagaatgcttca

SEQ ID NO: 605895 - DNA, 33 bp, Homo sapien
actgagagctcaccacaatgctgaagctaggca

SEQ ID NO: 605896 - DNA, 33 bp, Homo sapien
actgagagctcaccacgatgctgaagctaggca

SEQ ID NO: 605897 - DNA, 33 bp, Homo sapien
gtaagggaagccctccaaatgtcttgaagccca

SEQ ID NO: 605898 - DNA, 33 bp, Homo sapien
gtaagggaagccctccgaatgtcttgaagccca

SEQ ID NO: 605899 - DNA, 33 bp, Homo sapien
ccatgaagcctcgccacgaaaataaacagatgc

SEQ ID NO: 605900 - DNA, 33 bp, Homo sapien
ccatgaagcctcgccatgaaaataaacagatgc

SEQ ID NO: 605901 - DNA, 33 bp, Homo sapien
aaagacacgtgtgaaacggacacagcaggtgta

SEQ ID NO: 605902 - DNA, 33 bp, Homo sapien
aaagacacgtgtgaaatggacacagcaggtgta

SEQ ID NO: 605903 - DNA, 33 bp, Homo sapien
gcaacagaagttttgaagcagggaagagcccaa

SEQ ID NO: 605904 - DNA, 33 bp, Homo sapien
gcaacagaagttttgaggcagggaagagcccaa

SEQ ID NO: 605905 - DNA, 33 bp, Homo sapien
atctaacctgtcattcaagcaccctgtgaccag

SEQ ID NO: 605906 - DNA, 33 bp, Homo sapien
atctaacctgtcattcgagcaccctgtgaccag

SEQ ID NO: 605907 - DNA, 33 bp, Homo sapien
gttgcactgaaacaatgatcgaaatagtcaaac

SEQ ID NO: 605908 - DNA, 33 bp, Homo sapien
gttgcactgaaacaattatcgaaatagtcaaac

SEQ ID NO: 605909 - DNA, 33 bp, Homo sapien
tccctagagacatgacactgctctttcgggagc

SEQ ID NO: 605910 - DNA, 33 bp, Homo sapien
tccctagagacatgacgctgctctttcgggagc

SEQ ID NO: 605911 - DNA, 33 bp, Homo sapien
cactgtgtttgagaaacgccagcgaggaactgg

SEQ ID NO: 605912 - DNA, 33 bp, Homo sapien
cactgtgtttgagaaatgccagcgaggaactgg

SEQ ID NO: 605913 - DNA, 33 bp, Homo sapien
ccaaacggtgaacagagtattcttcccacgtga

SEQ ID NO: 605914 - DNA, 33 bp, Homo sapien
ccaaacggtgaacagattattcttcccacgtga

SEQ ID NO: 605915 - DNA, 33 bp, Homo sapien
ttgtttccagaagcccaaaggagaacttggaga

SEQ ID NO: 605916 - DNA, 33 bp, Homo sapien
ttgtttccagaagcccgaaggagaacttggaga

SEQ ID NO: 605917 - DNA, 33 bp, Homo sapien
ctgctcataatttttgcacctcggtgaccatca

SEQ ID NO: 605918 - DNA, 33 bp, Homo sapien
ctgctcataatttttgtacctcggtgaccatca

SEQ ID NO: 605919 - DNA, 33 bp, Homo sapien
aatcccaggactatgcaagacgtgggaatcatg

SEQ ID NO: 605920 - DNA, 33 bp, Homo sapien
aatcccaggactatgcgagacgtgggaatcatg

SEQ ID NO: 605921 - DNA, 33 bp, Homo sapien
gttccctttacttggaaatttttgtgtccttct

SEQ ID NO: 605922 - DNA, 33 bp, Homo sapien
gttccctttacttggacatttttgtgtccttct

SEQ ID NO: 605923 - DNA, 33 bp, Homo sapien
tgaaactctcactagcagaaagacaggaaacgt

SEQ ID NO: 605924 - DNA, 33 bp, Homo sapien
tgaaactctcactagcggaaagacaggaaacgt

SEQ ID NO: 605925 - DNA, 33 bp, Homo sapien
acttttcaggatgtgcacacaatgtgaagatat

SEQ ID NO: 605926 - DNA, 33 bp, Homo sapien
acttttcaggatgtgcgcacaatgtgaagatat

SEQ ID NO: 605927 - DNA, 33 bp, Homo sapien
aagctagaaaacaccacgctggacattgaactt

SEQ ID NO: 605928 - DNA, 33 bp, Homo sapien
aagctagaaaacaccatgctggacattgaactt

SEQ ID NO: 605929 - DNA, 33 bp, Homo sapien
tggggatagagggaaaaaggattctgagctagg

SEQ ID NO: 605930 - DNA, 33 bp, Homo sapien
tggggatagagggaaacaggattctgagctagg

SEQ ID NO: 605931 - DNA, 33 bp, Homo sapien
ggaatatttttttatcactgtccatgttttgaa

SEQ ID NO: 605932 - DNA, 33 bp, Homo sapien
ggaatatttttttatcgctgtccatgttttgaa

SEQ ID NO: 605933 - DNA, 33 bp, Homo sapien
gaaatgagctctggccaagaatgctacgggaaa

SEQ ID NO: 605934 - DNA, 33 bp, Homo sapien
gaaatgagctctggccgagaatgctacgggaaa

SEQ ID NO: 605935 - DNA, 33 bp, Homo sapien
aattgtaagtagttgccataataaaggcaaaca

SEQ ID NO: 605936 - DNA, 33 bp, Homo sapien
aattgtaagtagttgctataataaaggcaaaca

SEQ ID NO: 605937 - DNA, 33 bp, Homo sapien
gcgaatgaactgggacaagttattctttttgtg

SEQ ID NO: 605938 - DNA, 33 bp, Homo sapien
gcgaatgaactgggacgagttattctttttgtg

SEQ ID NO: 605939 - DNA, 33 bp, Homo sapien
gtcacgggactcagaacggagcaacgctctcca

SEQ ID NO: 605940 - DNA, 33 bp, Homo sapien
gtcacgggactcagaatggagcaacgctctcca

SEQ ID NO: 605941 - DNA, 33 bp, Homo sapien
tgagaccttgtctctgaaaaaaaagtactcttg

SEQ ID NO: 605942 - DNA, 33 bp, Homo sapien
tgagaccttgtctctggaaaaaaagtactcttg

SEQ ID NO: 605943 - DNA, 33 bp, Homo sapien
tcaagtttctcttttgcagtaaatgatctagat

SEQ ID NO: 605944 - DNA, 33 bp, Homo sapien
tcaagtttctcttttgtagtaaatgatctagat

SEQ ID NO: 605945 - DNA, 33 bp, Homo sapien
cattgtcctgctcacagtaaatatttgctgatg

SEQ ID NO: 605946 - DNA, 33 bp, Homo sapien
cattgtcctgctcacattaaatatttgctgatg

SEQ ID NO: 605947 - DNA, 33 bp, Homo sapien
ggtcctcagcagtcccaatgagccttctcggac

SEQ ID NO: 605948 - DNA, 33 bp, Homo sapien
ggtcctcagcagtcccgatgagccttctcggac

SEQ ID NO: 605949 - DNA, 33 bp, Homo sapien
tacgtggctacgaggcactgctgctgggtttcc

SEQ ID NO: 605950 - DNA, 33 bp, Homo sapien
tacgtggctacgaggcgctgctgctgggtttcc

SEQ ID NO: 605951 - DNA, 33 bp, Homo sapien
actgagtaggtggtgacggctttacagaaatag

SEQ ID NO: 605952 - DNA, 33 bp, Homo sapien
actgagtaggtggtgatggctttacagaaatag

SEQ ID NO: 605953 - DNA, 33 bp, Homo sapien
ggaagaatggttactccacggtgtatttttttt

SEQ ID NO: 605954 - DNA, 33 bp, Homo sapien
ggaagaatggttactctacggtgtatttttttt

SEQ ID NO: 605955 - DNA, 33 bp, Homo sapien
tagtgactgctggaaacgtaagaggagtgtgtg

SEQ ID NO: 605956 - DNA, 33 bp, Homo sapien
tagtgactgctggaaatgtaagaggagtgtgtg

SEQ ID NO: 605957 - DNA, 33 bp, Homo sapien
cgggcttttatcttaaaggaacatgcgtatgag

SEQ ID NO: 605958 - DNA, 33 bp, Homo sapien
cgggcttttatcttaacggaacatgcgtatgag

SEQ ID NO: 605959 - DNA, 33 bp, Homo sapien
gcttatgagagtaaaacggtcaatgtttcacac

SEQ ID NO: 605960 - DNA, 33 bp, Homo sapien
gcttatgagagtaaaagggtcaatgtttcacac

SEQ ID NO: 605961 - DNA, 33 bp, Homo sapien
gtctggtccatattaaacactaagaacatgtta

SEQ ID NO: 605962 - DNA, 33 bp, Homo sapien
gtctggtccatattaagcactaagaacatgtta

SEQ ID NO: 605963 - DNA, 33 bp, Homo sapien
aggagccagaaatacaagttgtctcacagatgc

SEQ ID NO: 605964 - DNA, 33 bp, Homo sapien
aggagccagaaatacaggttgtctcacagatgc

SEQ ID NO: 605965 - DNA, 33 bp, Homo sapien
gtatctgctttccactaaagtatgcttagcaca

SEQ ID NO: 605966 - DNA, 33 bp, Homo sapien
gtatctgctttccactgaagtatgcttagcaca

SEQ ID NO: 605967 - DNA, 33 bp, Homo sapien
ccatcctcaaagactcaaattcagcaaaggccc

SEQ ID NO: 605968 - DNA, 33 bp, Homo sapien
ccatcctcaaagactcgaattcagcaaaggccc

SEQ ID NO: 605969 - DNA, 33 bp, Homo sapien
cctgcagaatcactgacgtcaaagtgagggctg

SEQ ID NO: 605970 - DNA, 33 bp, Homo sapien
cctgcagaatcactgatgtcaaagtgagggctg

SEQ ID NO: 605971 - DNA, 33 bp, Homo sapien
tgaagcaagatttgggaacttcttcctgctcgc

SEQ ID NO: 605972 - DNA, 33 bp, Homo sapien
tgaagcaagatttggggacttcttcctgctcgc

SEQ ID NO: 605973 - DNA, 33 bp, Homo sapien
acaggtgagttgggccagatcaaagaagggccc

SEQ ID NO: 605974 - DNA, 33 bp, Homo sapien
acaggtgagttgggccggatcaaagaagggccc

SEQ ID NO: 605975 - DNA, 33 bp, Homo sapien
caggaagatgccagaccggagcctccgtcatca

SEQ ID NO: 605976 - DNA, 33 bp, Homo sapien
caggaagatgccagactggagcctccgtcatca

SEQ ID NO: 605977 - DNA, 33 bp, Homo sapien
tgtaacatagtaacaaagctcaacacttagagc

SEQ ID NO: 605978 - DNA, 33 bp, Homo sapien
tgtaacatagtaacaatgctcaacacttagagc

SEQ ID NO: 605979 - DNA, 33 bp, Homo sapien
tcctcccaaatcgttacaactacagccacctct

SEQ ID NO: 605980 - DNA, 33 bp, Homo sapien
tcctcccaaatcgttagaactacagccacctct

SEQ ID NO: 605981 - DNA, 33 bp, Homo sapien
ccctacagtagccttacaacaagtagacaggac

SEQ ID NO: 605982 - DNA, 33 bp, Homo sapien
ccctacagtagccttataacaagtagacaggac

SEQ ID NO: 605983 - DNA, 33 bp, Homo sapien
gtggagatgctggcaacaagaaggaccagatca

SEQ ID NO: 605984 - DNA, 33 bp, Homo sapien
gtggagatgctggcaataagaaggaccagatca

SEQ ID NO: 605985 - DNA, 33 bp, Homo sapien
tactcttaacagctcacctataaccaagctaac

SEQ ID NO: 605986 - DNA, 33 bp, Homo sapien
tactcttaacagctcagctataaccaagctaac

SEQ ID NO: 605987 - DNA, 33 bp, Homo sapien
tcaatgttcaactcaccggttaattggagaagc

SEQ ID NO: 605988 - DNA, 33 bp, Homo sapien
tcaatgttcaactcactggttaattggagaagc

SEQ ID NO: 605989 - DNA, 33 bp, Homo sapien
tgggcggtccaataccactttattagtcagaga

SEQ ID NO: 605990 - DNA, 33 bp, Homo sapien
tgggcggtccaataccgctttattagtcagaga

SEQ ID NO: 605991 - DNA, 33 bp, Homo sapien
catgtcttacataaataactttgcatgcctgta

SEQ ID NO: 605992 - DNA, 33 bp, Homo sapien
catgtcttacataaatcactttgcatgcctgta

SEQ ID NO: 605993 - DNA, 33 bp, Homo sapien
ttttttcagaagtcaaccacattgtccatacac

SEQ ID NO: 605994 - DNA, 33 bp, Homo sapien
ttttttcagaagtcaagcacattgtccatacac

SEQ ID NO: 605995 - DNA, 33 bp, Homo sapien
tcctctctctcacccaatcttagaggctttgga

SEQ ID NO: 605996 - DNA, 33 bp, Homo sapien
tcctctctctcacccagtcttagaggctttgga

SEQ ID NO: 605997 - DNA, 33 bp, Homo sapien
atatagagcaaatagaacatctggcattattta

SEQ ID NO: 605998 - DNA, 33 bp, Homo sapien
atatagagcaaatagatcatctggcattattta

SEQ ID NO: 605999 - DNA, 33 bp, Homo sapien
gaagcagaaggtcaagcccgtagccaggaaaat

SEQ ID NO: 606000 - DNA, 33 bp, Homo sapien
gaagcagaaggtcaagtccgtagccaggaaaat

SEQ ID NO: 606001 - DNA, 33 bp, Homo sapien
taaatgtggagggggaaatacaacttaattagt

SEQ ID NO: 606002 - DNA, 33 bp, Homo sapien
taaatgtggagggggagatacaacttaattagt

SEQ ID NO: 606003 - DNA, 33 bp, Homo sapien
agacagacagtgagtaagaaaaagctgttgtct

SEQ ID NO: 606004 - DNA, 33 bp, Homo sapien
agacagacagtgagtatgaaaaagctgttgtct

SEQ ID NO: 606005 - DNA, 33 bp, Homo sapien
ccccttctgtctgaccaatgcagctgtaccttt

SEQ ID NO: 606006 - DNA, 33 bp, Homo sapien
ccccttctgtctgaccgatgcagctgtaccttt

SEQ ID NO: 606007 - DNA, 33 bp, Homo sapien
ttcttttcctgtgataaatacttaaaaatagga

SEQ ID NO: 606008 - DNA, 33 bp, Homo sapien
ttcttttcctgtgatacatacttaaaaatagga

SEQ ID NO: 606009 - DNA, 33 bp, Homo sapien
gactacagaaatgcttcaaaacaagtattatga

SEQ ID NO: 606010 - DNA, 33 bp, Homo sapien
gactacagaaatgctttaaaacaagtattatga

SEQ ID NO: 606011 - DNA, 33 bp, Homo sapien
aaaggagtacaatgaaaagagttaagccaagtg

SEQ ID NO: 606012 - DNA, 33 bp, Homo sapien
aaaggagtacaatgaagagagttaagccaagtg

SEQ ID NO: 606013 - DNA, 33 bp, Homo sapien
gccacaaaaccattgccaattataactaattaa

SEQ ID NO: 606014 - DNA, 33 bp, Homo sapien
gccacaaaaccattgcgaattataactaattaa

SEQ ID NO: 606015 - DNA, 33 bp, Homo sapien
gtaggctccaggaccaagtcatccctacaacgc

SEQ ID NO: 606016 - DNA, 33 bp, Homo sapien
gtaggctccaggaccacgtcatccctacaacgc

SEQ ID NO: 606017 - DNA, 33 bp, Homo sapien
atgaagatactaccacaaagtgagataatagct

SEQ ID NO: 606018 - DNA, 33 bp, Homo sapien
atgaagatactaccacgaagtgagataatagct

SEQ ID NO: 606019 - DNA, 33 bp, Homo sapien
tctgtatgccattccaacaatggtaacttcttg

SEQ ID NO: 606020 - DNA, 33 bp, Homo sapien
tctgtatgccattccaccaatggtaacttcttg

SEQ ID NO: 606021 - DNA, 33 bp, Homo sapien
gagattaatatgttcaagtgtgaaattgtcagc

SEQ ID NO: 606022 - DNA, 33 bp, Homo sapien
gagattaatatgttcaggtgtgaaattgtcagc

SEQ ID NO: 606023 - DNA, 33 bp, Homo sapien
tagacagaggcacacaatctgactccaaagaaa

SEQ ID NO: 606024 - DNA, 33 bp, Homo sapien
tagacagaggcacacagtctgactccaaagaaa

SEQ ID NO: 606025 - DNA, 33 bp, Homo sapien
acagtaaacagtattacaaaggcaagagagttt

SEQ ID NO: 606026 - DNA, 33 bp, Homo sapien
acagtaaacagtattagaaaggcaagagagttt

SEQ ID NO: 606027 - DNA, 33 bp, Homo sapien
taccttcagcaaactgaagagattgtggagaat

SEQ ID NO: 606028 - DNA, 33 bp, Homo sapien
taccttcagcaaactggagagattgtggagaat

SEQ ID NO: 606029 - DNA, 33 bp, Homo sapien
ttatacggaggcatagaaaaataaaaagcatag

SEQ ID NO: 606030 - DNA, 33 bp, Homo sapien
ttatacggaggcataggaaaataaaaagcatag

SEQ ID NO: 606031 - DNA, 33 bp, Homo sapien
accttgcttttctcatcatacttatagcttcca

SEQ ID NO: 606032 - DNA, 33 bp, Homo sapien
accttgcttttctcattatacttatagcttcca

SEQ ID NO: 606033 - DNA, 33 bp, Homo sapien
gaaaaaatgtgggcaaaggtttatgtataagga

SEQ ID NO: 606034 - DNA, 33 bp, Homo sapien
gaaaaaatgtgggcaagggtttatgtataagga

SEQ ID NO: 606035 - DNA, 33 bp, Homo sapien
agcaaagcatctcttacatgttcaacacccagc

SEQ ID NO: 606036 - DNA, 33 bp, Homo sapien
agcaaagcatctcttatatgttcaacacccagc

SEQ ID NO: 606037 - DNA, 33 bp, Homo sapien
gatacattttgattccaacataagtacatacat

SEQ ID NO: 606038 - DNA, 33 bp, Homo sapien
gatacattttgattccgacataagtacatacat

SEQ ID NO: 606039 - DNA, 33 bp, Homo sapien
gattgtttagaccttaacgtctgacccagtttt

SEQ ID NO: 606040 - DNA, 33 bp, Homo sapien
gattgtttagaccttagcgtctgacccagtttt

SEQ ID NO: 606041 - DNA, 33 bp, Homo sapien
acgctagatcacctacaccattaggtcttaacc

SEQ ID NO: 606042 - DNA, 33 bp, Homo sapien
acgctagatcacctacgccattaggtcttaacc

SEQ ID NO: 606043 - DNA, 33 bp, Homo sapien
ttctttgtgttggcctaaaatgcatacaatttt

SEQ ID NO: 606044 - DNA, 33 bp, Homo sapien
ttctttgtgttggcctgaaatgcatacaatttt

SEQ ID NO: 606045 - DNA, 33 bp, Homo sapien
cttgccgactttgctaaggaacgagccagtcta

SEQ ID NO: 606046 - DNA, 33 bp, Homo sapien
cttgccgactttgctatggaacgagccagtcta

SEQ ID NO: 606047 - DNA, 33 bp, Homo sapien
aatgtgatgcttcaaaatccacatgatctagat

SEQ ID NO: 606048 - DNA, 33 bp, Homo sapien
aatgtgatgcttcaaattccacatgatctagat

SEQ ID NO: 606049 - DNA, 33 bp, Homo sapien
acacctctaaaatgtacgtggctccaatctggc

SEQ ID NO: 606050 - DNA, 33 bp, Homo sapien
acacctctaaaatgtatgtggctccaatctggc

SEQ ID NO: 606051 - DNA, 33 bp, Homo sapien
tcagtctttctcgtgacacctgatcatggggcc

SEQ ID NO: 606052 - DNA, 33 bp, Homo sapien
tcagtctttctcgtgatacctgatcatggggcc

SEQ ID NO: 606053 - DNA, 33 bp, Homo sapien
ccacggatatttcactcaacaaatactgatgga

SEQ ID NO: 606054 - DNA, 33 bp, Homo sapien
ccacggatatttcacttaacaaatactgatgga

SEQ ID NO: 606055 - DNA, 33 bp, Homo sapien
tatatgtccactcggcactatttccttcttcac

SEQ ID NO: 606056 - DNA, 33 bp, Homo sapien
tatatgtccactcggcgctatttccttcttcac

SEQ ID NO: 606057 - DNA, 33 bp, Homo sapien
cctttgttagattaggaaagcaatgttttccga

SEQ ID NO: 606058 - DNA, 33 bp, Homo sapien
cctttgttagattagggaagcaatgttttccga

SEQ ID NO: 606059 - DNA, 33 bp, Homo sapien
agtcccaggcattttacgttgcatttgtgtcaa

SEQ ID NO: 606060 - DNA, 33 bp, Homo sapien
agtcccaggcattttatgttgcatttgtgtcaa

SEQ ID NO: 606061 - DNA, 33 bp, Homo sapien
tattataattttacaaatcacttttcatgtaca

SEQ ID NO: 606062 - DNA, 33 bp, Homo sapien
tattataattttacaagtcacttttcatgtaca

SEQ ID NO: 606063 - DNA, 33 bp, Homo sapien
tagcctgaatcttcaaccacctctcttttctca

SEQ ID NO: 606064 - DNA, 33 bp, Homo sapien
tagcctgaatcttcaatcacctctcttttctca

SEQ ID NO: 606065 - DNA, 33 bp, Homo sapien
tttccaaatgaaaggacatagacataaaaggcc

SEQ ID NO: 606066 - DNA, 33 bp, Homo sapien
tttccaaatgaaaggagatagacataaaaggcc

SEQ ID NO: 606067 - DNA, 33 bp, Homo sapien
cttccttcctttctcaatccaagaacatcatgt

SEQ ID NO: 606068 - DNA, 33 bp, Homo sapien
cttccttcctttctcactccaagaacatcatgt

SEQ ID NO: 606069 - DNA, 33 bp, Homo sapien
ggtgttggcttgtaaaatcagatgctttgacta

SEQ ID NO: 606070 - DNA, 33 bp, Homo sapien
ggtgttggcttgtaaagtcagatgctttgacta

SEQ ID NO: 606071 - DNA, 33 bp, Homo sapien
taacctcctacaagaagcaatacactctgctgc

SEQ ID NO: 606072 - DNA, 33 bp, Homo sapien
taacctcctacaagaatcaatacactctgctgc

SEQ ID NO: 606073 - DNA, 33 bp, Homo sapien
cttaataatggtcaaacaggagatgcttattat

SEQ ID NO: 606074 - DNA, 33 bp, Homo sapien
cttaataatggtcaaataggagatgcttattat

SEQ ID NO: 606075 - DNA, 33 bp, Homo sapien
atctgccaatattacaaacagaagaatcgtggt

SEQ ID NO: 606076 - DNA, 33 bp, Homo sapien
atctgccaatattacacacagaagaatcgtggt

SEQ ID NO: 606077 - DNA, 33 bp, Homo sapien
atcctgaaggatgtccacatgaagtcattagga

SEQ ID NO: 606078 - DNA, 33 bp, Homo sapien
atcctgaaggatgtccgcatgaagtcattagga

SEQ ID NO: 606079 - DNA, 33 bp, Homo sapien
gaggctttgtcccagacattttagcctgagtct

SEQ ID NO: 606080 - DNA, 33 bp, Homo sapien
gaggctttgtcccagatattttagcctgagtct

SEQ ID NO: 606081 - DNA, 33 bp, Homo sapien
gcagctttcccagaacaatccagccggcacggt

SEQ ID NO: 606082 - DNA, 33 bp, Homo sapien
gcagctttcccagaaccatccagccggcacggt

SEQ ID NO: 606083 - DNA, 33 bp, Homo sapien
cactgtcaaagtcagaagagacgaccttgtgct

SEQ ID NO: 606084 - DNA, 33 bp, Homo sapien
cactgtcaaagtcagaggagacgaccttgtgct

SEQ ID NO: 606085 - DNA, 33 bp, Homo sapien
tctagagcaaaagggaaattgacaggatgctgg

SEQ ID NO: 606086 - DNA, 33 bp, Homo sapien
tctagagcaaaagggagattgacaggatgctgg

SEQ ID NO: 606087 - DNA, 33 bp, Homo sapien
tctgaggttggtgtaccccagtgaggttgtgtg

SEQ ID NO: 606088 - DNA, 33 bp, Homo sapien
tctgaggttggtgtactccagtgaggttgtgtg

SEQ ID NO: 606089 - DNA, 33 bp, Homo sapien
tctctggttgattgtaataacttaaaagccctg

SEQ ID NO: 606090 - DNA, 33 bp, Homo sapien
tctctggttgattgtagtaacttaaaagccctg

SEQ ID NO: 606091 - DNA, 33 bp, Homo sapien
tatcctgaacttccaaccttgtggtttagaaag

SEQ ID NO: 606092 - DNA, 33 bp, Homo sapien
tatcctgaacttccaatcttgtggtttagaaag

SEQ ID NO: 606093 - DNA, 33 bp, Homo sapien
ttacttgccagacaaacggactttgggcacatg

SEQ ID NO: 606094 - DNA, 33 bp, Homo sapien
ttacttgccagacaaatggactttgggcacatg

SEQ ID NO: 606095 - DNA, 33 bp, Homo sapien
aaacagaacaaaaaaaccaagtatttacagaga

SEQ ID NO: 606096 - DNA, 33 bp, Homo sapien
aaacagaacaaaaaaatcaagtatttacagaga

SEQ ID NO: 606097 - DNA, 33 bp, Homo sapien
agacatgagtcatcgaaaggctatctaaaccga

SEQ ID NO: 606098 - DNA, 33 bp, Homo sapien
agacatgagtcatcgagaggctatctaaaccga

SEQ ID NO: 606099 - DNA, 33 bp, Homo sapien
tgcaaatcaatcttcccgaggcaatttcctgtt

SEQ ID NO: 606100 - DNA, 33 bp, Homo sapien
tgcaaatcaatcttcctgaggcaatttcctgtt

SEQ ID NO: 606101 - DNA, 33 bp, Homo sapien
attagggcaaaaacatgagggttgaagtgaagt

SEQ ID NO: 606102 - DNA, 33 bp, Homo sapien
attagggcaaaaacattagggttgaagtgaagt

SEQ ID NO: 606103 - DNA, 33 bp, Homo sapien
tgacccaatcacagccaaccagatcaacgagag

SEQ ID NO: 606104 - DNA, 33 bp, Homo sapien
tgacccaatcacagcctaccagatcaacgagag

SEQ ID NO: 606105 - DNA, 33 bp, Homo sapien
caaatactgtctttgaaatttgaaatacaggat

SEQ ID NO: 606106 - DNA, 33 bp, Homo sapien
caaatactgtctttgacatttgaaatacaggat

SEQ ID NO: 606107 - DNA, 33 bp, Homo sapien
gctgccttccaaataaccataactttggtggga

SEQ ID NO: 606108 - DNA, 33 bp, Homo sapien
gctgccttccaaataatcataactttggtggga

SEQ ID NO: 606109 - DNA, 33 bp, Homo sapien
ctaaaggcataaaaaaacgttgaattatagcag

SEQ ID NO: 606110 - DNA, 33 bp, Homo sapien
ctaaaggcataaaaaaccgttgaattatagcag

SEQ ID NO: 606111 - DNA, 33 bp, Homo sapien
tgttacagctcctttcacacccatggttcagtg

SEQ ID NO: 606112 - DNA, 33 bp, Homo sapien
tgttacagctcctttcgcacccatggttcagtg

SEQ ID NO: 606113 - DNA, 33 bp, Homo sapien
ccgtttgccactgggaagcaggaacaaacataa

SEQ ID NO: 606114 - DNA, 33 bp, Homo sapien
ccgtttgccactgggaggcaggaacaaacataa

SEQ ID NO: 606115 - DNA, 33 bp, Homo sapien
tattctttttgttacaaacagtcctattatact

SEQ ID NO: 606116 - DNA, 33 bp, Homo sapien
tattctttttgttacagacagtcctattatact

SEQ ID NO: 606117 - DNA, 33 bp, Homo sapien
acaataaacactaagacagaggtagatgccatg

SEQ ID NO: 606118 - DNA, 33 bp, Homo sapien
acaataaacactaagatagaggtagatgccatg

SEQ ID NO: 606119 - DNA, 33 bp, Homo sapien
ctctatttagaagtacacactacacaagtacat

SEQ ID NO: 606120 - DNA, 33 bp, Homo sapien
ctctatttagaagtacgcactacacaagtacat

SEQ ID NO: 606121 - DNA, 33 bp, Homo sapien; identical to SEQ ID NO: 606119

SEQ ID NO: 606122 - DNA, 33 bp, Homo sapien; identical to SEQ ID NO: 606120

SEQ ID NO: 606123 - DNA, 33 bp, Homo sapien
tgtgttcttttgttaacgtgtagagttctcctt

SEQ ID NO: 606124 - DNA, 33 bp, Homo sapien
tgtgttcttttgttaatgtgtagagttctcctt

SEQ ID NO: 606125 - DNA, 33 bp, Homo sapien; identical to SEQ ID NO: 606123

SEQ ID NO: 606126 - DNA, 33 bp, Homo sapien; identical to SEQ ID NO: 606124

SEQ ID NO: 606127 - DNA, 33 bp, Homo sapien
actgaaatgaatgtaaatgtggatatgacaact

SEQ ID NO: 606128 - DNA, 33 bp, Homo sapien
actgaaatgaatgtaagtgtggatatgacaact

SEQ ID NO: 606129 - DNA, 33 bp, Homo sapien
ctcaaaccatttgctccatatctgatgtatttg

SEQ ID NO: 606130 - DNA, 33 bp, Homo sapien
ctcaaaccatttgctcgatatctgatgtatttg

SEQ ID NO: 606131 - DNA, 33 bp, Homo sapien
ctctcaagcagagggaacttaactttattaaat

SEQ ID NO: 606132 - DNA, 33 bp, Homo sapien
ctctcaagcagagggagcttaactttattaaat

SEQ ID NO: 606133 - DNA, 33 bp, Homo sapien
actaatgaatatctcaaagaggaaggtagggta

SEQ ID NO: 606134 - DNA, 33 bp, Homo sapien
actaatgaatatctcagagaggaaggtagggta

SEQ ID NO: 606135 - DNA, 33 bp, Homo sapien
ccgtgtctctctctctaaaaaaaagtctcttac

SEQ ID NO: 606136 - DNA, 33 bp, Homo sapien
ccgtgtctctctctctcaaaaaaagtctcttac

SEQ ID NO: 606137 - DNA, 33 bp, Homo sapien
tttgcatacttaaaaacggttaaaatgatatat

SEQ ID NO: 606138 - DNA, 33 bp, Homo sapien
tttgcatacttaaaaatggttaaaatgatatat

SEQ ID NO: 606139 - DNA, 33 bp, Homo sapien
ggataagtgaccataaaggggcttggtggagtg

SEQ ID NO: 606140 - DNA, 33 bp, Homo sapien
ggataagtgaccataatggggcttggtggagtg

SEQ ID NO: 606141 - DNA, 33 bp, Homo sapien
ctgtttaggtcaatgtaaagaagaggctgaggg

SEQ ID NO: 606142 - DNA, 33 bp, Homo sapien
ctgtttaggtcaatgtgaagaagaggctgaggg

SEQ ID NO: 606143 - DNA, 33 bp, Homo sapien
acacaaccaaaggtcacatttgtatagcggttt

SEQ ID NO: 606144 - DNA, 33 bp, Homo sapien
acacaaccaaaggtcagatttgtatagcggttt

SEQ ID NO: 606145 - DNA, 33 bp, Homo sapien
tgttgagtatcatgaaatcttcctatttggagc

SEQ ID NO: 606146 - DNA, 33 bp, Homo sapien
tgttgagtatcatgaagtcttcctatttggagc

SEQ ID NO: 606147 - DNA, 33 bp, Homo sapien
tttagtgtaagtaatgcaggaaggatacaaagg

SEQ ID NO: 606148 - DNA, 33 bp, Homo sapien
tttagtgtaagtaatgtaggaaggatacaaagg

SEQ ID NO: 606149 - DNA, 33 bp, Homo sapien
ttagaaatggtcttaacaaggtattttcaatat

SEQ ID NO: 606150 - DNA, 33 bp, Homo sapien
ttagaaatggtcttaagaaggtattttcaatat

SEQ ID NO: 606151 - DNA, 33 bp, Homo sapien
cttgctaaacaggttacggctcttctgtccaag

SEQ ID NO: 606152 - DNA, 33 bp, Homo sapien
cttgctaaacaggttatggctcttctgtccaag

SEQ ID NO: 606153 - DNA, 33 bp, Homo sapien
atcaggaaaatccaaactggaggatatgataga

SEQ ID NO: 606154 - DNA, 33 bp, Homo sapien
atcaggaaaatccaaattggaggatatgataga

SEQ ID NO: 606155 - DNA, 33 bp, Homo sapien
actccctcatgtctaccgcggcatatgtggagt

SEQ ID NO: 606156 - DNA, 33 bp, Homo sapien
actccctcatgtctactgcggcatatgtggagt

SEQ ID NO: 606157 - DNA, 33 bp, Homo sapien
ttccctcgacgtctcaacatttgtccctagatc

SEQ ID NO: 606158 - DNA, 33 bp, Homo sapien
ttccctcgacgtctcaccatttgtccctagatc

SEQ ID NO: 606159 - DNA, 33 bp, Homo sapien
aaaaaaaaagtgaggcaagagagaccgtctcta

SEQ ID NO: 606160 - DNA, 33 bp, Homo sapien
aaaaaaaaagtgaggcgagagagaccgtctcta

SEQ ID NO: 606161 - DNA, 33 bp, Homo sapien
cccttcccccacaaaaagtacatagaaatggtc

SEQ ID NO: 606162 - DNA, 33 bp, Homo sapien
cccttcccccacaaaacgtacatagaaatggtc

SEQ ID NO: 606163 - DNA, 33 bp, Homo sapien
tcctccatttccttcactcagtcatccaatcac

SEQ ID NO: 606164 - DNA, 33 bp, Homo sapien
tcctccatttccttcattcagtcatccaatcac

SEQ ID NO: 606165 - DNA, 33 bp, Homo sapien
agtatccatctgaagacagtgtaatgccagcca

SEQ ID NO: 606166 - DNA, 33 bp, Homo sapien
agtatccatctgaagatagtgtaatgccagcca

SEQ ID NO: 606167 - DNA, 33 bp, Homo sapien
ttgctaagtacagtaaccctgtgggtccactta

SEQ ID NO: 606168 - DNA, 33 bp, Homo sapien
ttgctaagtacagtaatcctgtgggtccactta

SEQ ID NO: 606169 - DNA, 33 bp, Homo sapien
aatgagcattagcacaactgtctaaaatagtca

SEQ ID NO: 606170 - DNA, 33 bp, Homo sapien
aatgagcattagcacagctgtctaaaatagtca

SEQ ID NO: 606171 - DNA, 33 bp, Homo sapien
agaaatataacaaaaaacacttactagaagtca

SEQ ID NO: 606172 - DNA, 33 bp, Homo sapien
agaaatataacaaaaaccacttactagaagtca

SEQ ID NO: 606173 - DNA, 33 bp, Homo sapien
tgtgttacagggctcccgaacctggtcagccta

SEQ ID NO: 606174 - DNA, 33 bp, Homo sapien
tgtgttacagggctcctgaacctggtcagccta

SEQ ID NO: 606175 - DNA, 33 bp, Homo sapien
ccaaaacaatagagaacggtgaggactgaagtg

SEQ ID NO: 606176 - DNA, 33 bp, Homo sapien
ccaaaacaatagagaatggtgaggactgaagtg

SEQ ID NO: 606177 - DNA, 33 bp, Homo sapien
caaaataccaggtaaacgccaaagagattacca

SEQ ID NO: 606178 - DNA, 33 bp, Homo sapien
caaaataccaggtaaaggccaaagagattacca

SEQ ID NO: 606179 - DNA, 33 bp, Homo sapien
aaaatttcatcatcgggagagtatatttgttac

SEQ ID NO: 606180 - DNA, 33 bp, Homo sapien
aaaatttcatcatcggtagagtatatttgttac

SEQ ID NO: 606181 - DNA, 33 bp, Homo sapien
ggtaaagtgcctccaaagttggcatcagtgcct

SEQ ID NO: 606182 - DNA, 33 bp, Homo sapien
ggtaaagtgcctccaatgttggcatcagtgcct

SEQ ID NO: 606183 - DNA, 33 bp, Homo sapien
tgaaaaccgtttcttacactagttatggcctag

SEQ ID NO: 606184 - DNA, 33 bp, Homo sapien
tgaaaaccgtttcttatactagttatggcctag

SEQ ID NO: 606185 - DNA, 33 bp, Homo sapien
tgcagagtagcacaaaagagacaagaaaataag

SEQ ID NO: 606186 - DNA, 33 bp, Homo sapien
tgcagagtagcacaaaggagacaagaaaataag

SEQ ID NO: 606187 - DNA, 33 bp, Homo sapien
atgggcagagccatccagatgtaaaaggctatt

SEQ ID NO: 606188 - DNA, 33 bp, Homo sapien
atgggcagagccatcccgatgtaaaaggctatt

SEQ ID NO: 606189 - DNA, 33 bp, Homo sapien
tgcctctcacctgtaacctagccaagatactgg

SEQ ID NO: 606190 - DNA, 33 bp, Homo sapien
tgcctctcacctgtaatctagccaagatactgg

SEQ ID NO: 606191 - DNA, 33 bp, Homo sapien
taagggtgtttgaaggcatttttctgggtaatt

SEQ ID NO: 606192 - DNA, 33 bp, Homo sapien
taagggtgtttgaagggatttttctgggtaatt

SEQ ID NO: 606193 - DNA, 33 bp, Homo sapien
caggacagcactgaagacacagtgaacaaaaag

SEQ ID NO: 606194 - DNA, 33 bp, Homo sapien
caggacagcactgaagtcacagtgaacaaaaag

SEQ ID NO: 606195 - DNA, 33 bp, Homo sapien
aggtgacccatagatccatactgaattcactgc

SEQ ID NO: 606196 - DNA, 33 bp, Homo sapien
aggtgacccatagatcgatactgaattcactgc

SEQ ID NO: 606197 - DNA, 33 bp, Homo sapien
gggactccacgtacaacggcccccgagactatc

SEQ ID NO: 606198 - DNA, 33 bp, Homo sapien
gggactccacgtacaatggcccccgagactatc

SEQ ID NO: 606199 - DNA, 33 bp, Homo sapien
taatgtagctaaaatacgtagtgtgacctttga

SEQ ID NO: 606200 - DNA, 33 bp, Homo sapien
taatgtagctaaaatatgtagtgtgacctttga

SEQ ID NO: 606201 - DNA, 33 bp, Homo sapien
aggagcattgctcatacgggccggaatgtcctg

SEQ ID NO: 606202 - DNA, 33 bp, Homo sapien
aggagcattgctcatatgggccggaatgtcctg

SEQ ID NO: 606203 - DNA, 33 bp, Homo sapien
ggcagctgaaaaaacaggagcagagagacataa

SEQ ID NO: 606204 - DNA, 33 bp, Homo sapien
ggcagctgaaaaaacatgagcagagagacataa

SEQ ID NO: 606205 - DNA, 33 bp, Homo sapien
gtagctgggagcgtgccgatgcatgttcctaac

SEQ ID NO: 606206 - DNA, 33 bp, Homo sapien
gtagctgggagcgtgctgatgcatgttcctaac

SEQ ID NO: 606207 - DNA, 33 bp, Homo sapien
acttagaaatgagccaccatcgaaaataataaa

SEQ ID NO: 606208 - DNA, 33 bp, Homo sapien
acttagaaatgagccatcatcgaaaataataaa

SEQ ID NO: 606209 - DNA, 33 bp, Homo sapien
ggctttgaaaagcgaaaagacagagaaaggcag

SEQ ID NO: 606210 - DNA, 33 bp, Homo sapien
ggctttgaaaagcgaagagacagagaaaggcag

SEQ ID NO: 606211 - DNA, 33 bp, Homo sapien
tcgacaaatgtgattcccatcctttccaggtgg

SEQ ID NO: 606212 - DNA, 33 bp, Homo sapien
tcgacaaatgtgattctcatcctttccaggtgg

SEQ ID NO: 606213 - DNA, 33 bp, Homo sapien
gtcgtgctcactgaggcccctactcacagggct

SEQ ID NO: 606214 - DNA, 33 bp, Homo sapien
gtcgtgctcactgaggtccctactcacagggct

SEQ ID NO: 606215 - DNA, 33 bp, Homo sapien
cttctaggcccgaaacaaaggtgccagaagagg

SEQ ID NO: 606216 - DNA, 33 bp, Homo sapien
cttctaggcccgaaacgaaggtgccagaagagg

SEQ ID NO: 606217 - DNA, 33 bp, Homo sapien
ggcctagaagtaaatacatatgcgctgctgctc

SEQ ID NO: 606218 - DNA, 33 bp, Homo sapien
ggcctagaagtaaatatatatgcgctgctgctc

SEQ ID NO: 606219 - DNA, 33 bp, Homo sapien
ggtgacgaagagctacaacccgagacatggtac

SEQ ID NO: 606220 - DNA, 33 bp, Homo sapien
ggtgacgaagagctacgacccgagacatggtac

SEQ ID NO: 606221 - DNA, 33 bp, Homo sapien
aggaagagccagctacccgaggaactttcaggc

SEQ ID NO: 606222 - DNA, 33 bp, Homo sapien
aggaagagccagctactcgaggaactttcaggc

SEQ ID NO: 606223 - DNA, 33 bp, Homo sapien
gcaacattagactccccgcttaactcccggaag

SEQ ID NO: 606224 - DNA, 33 bp, Homo sapien
gcaacattagactcccggcttaactcccggaag

SEQ ID NO: 606225 - DNA, 33 bp, Homo sapien
gaatagaaactaaggccgagtcacccatctacg

SEQ ID NO: 606226 - DNA, 33 bp, Homo sapien
gaatagaaactaaggctgagtcacccatctacg

SEQ ID NO: 606227 - DNA, 33 bp, Homo sapien
aagacagttgtcccacaaagacacctggagcag

SEQ ID NO: 606228 - DNA, 33 bp, Homo sapien
aagacagttgtcccacgaagacacctggagcag

SEQ ID NO: 606229 - DNA, 33 bp, Homo sapien
acagagaggaaggtacagacctacatggagacc

SEQ ID NO: 606230 - DNA, 33 bp, Homo sapien
acagagaggaaggtacggacctacatggagacc

SEQ ID NO: 606231 - DNA, 33 bp, Homo sapien
catttgtaagattcggcattcttgtagaactta

SEQ ID NO: 606232 - DNA, 33 bp, Homo sapien
catttgtaagattcggtattcttgtagaactta

SEQ ID NO: 606233 - DNA, 33 bp, Homo sapien
gattttctcttcaatacgcagtaagtttcttgc

SEQ ID NO: 606234 - DNA, 33 bp, Homo sapien
gattttctcttcaatatgcagtaagtttcttgc

SEQ ID NO: 606235 - DNA, 33 bp, Homo sapien
actgcattgagaaaaacacatcattctggacta

SEQ ID NO: 606236 - DNA, 33 bp, Homo sapien
actgcattgagaaaaagacatcattctggacta

SEQ ID NO: 606237 - DNA, 33 bp, Homo sapien; identical to SEQ ID NO: 606235

SEQ ID NO: 606238 - DNA, 33 bp, Homo sapien; identical to SEQ ID NO: 606236

SEQ ID NO: 606239 - DNA, 33 bp, Homo sapien; identical to SEQ ID NO: 606235

SEQ ID NO: 606240 - DNA, 33 bp, Homo sapien; identical to SEQ ID NO: 606236

SEQ ID NO: 606241 - DNA, 33 bp, Homo sapien
tcccagttcggctaccgactgtgtgatcttgat

SEQ ID NO: 606242 - DNA, 33 bp, Homo sapien
tcccagttcggctacctactgtgtgatcttgat

SEQ ID NO: 606243 - DNA, 33 bp, Homo sapien
ccatggaaaaggcagcaagtattcaagggatgt

SEQ ID NO: 606244 - DNA, 33 bp, Homo sapien
ccatggaaaaggcagcgagtattcaagggatgt

SEQ ID NO: 606245 - DNA, 33 bp, Homo sapien
tccatcagcctctgtacgtataagattaatgcc

SEQ ID NO: 606246 - DNA, 33 bp, Homo sapien
tccatcagcctctgtatgtataagattaatgcc

SEQ ID NO: 606247 - DNA, 33 bp, Homo sapien
gaatcaatacatatcaacctgttcacgactgtc

SEQ ID NO: 606248 - DNA, 33 bp, Homo sapien
gaatcaatacatatcaccctgttcacgactgtc

SEQ ID NO: 606249 - DNA, 33 bp, Homo sapien
ggctgtctcaaataaccaactaacacggtttct

SEQ ID NO: 606250 - DNA, 33 bp, Homo sapien
ggctgtctcaaataactaactaacacggtttct

SEQ ID NO: 606251 - DNA, 33 bp, Homo sapien
gccgtgacacgaccaccggccttctggattgtg

SEQ ID NO: 606252 - DNA, 33 bp, Homo sapien
gccgtgacacgaccactggccttctggattgtg

SEQ ID NO: 606253 - DNA, 33 bp, Homo sapien
agtttggttctggacactggactatctgatacc

SEQ ID NO: 606254 - DNA, 33 bp, Homo sapien
agtttggttctggacattggactatctgatacc

SEQ ID NO: 606255 - DNA, 33 bp, Homo sapien
catgttgatatggccccctcttttaacagtttc

SEQ ID NO: 606256 - DNA, 33 bp, Homo sapien
catgttgatatggccctctcttttaacagtttc

SEQ ID NO: 606257 - DNA, 33 bp, Homo sapien
aaattcagtgacataaaaaattccattccttgg

SEQ ID NO: 606258 - DNA, 33 bp, Homo sapien
aaattcagtgacataagaaattccattccttgg

SEQ ID NO: 606259 - DNA, 33 bp, Homo sapien
aaaatagggatataaccagctctggtgatcaca

SEQ ID NO: 606260 - DNA, 33 bp, Homo sapien
aaaatagggatataactagctctggtgatcaca

SEQ ID NO: 606261 - DNA, 33 bp, Homo sapien
cagtgccctttgtaacagaaggccaagactggg

SEQ ID NO: 606262 - DNA, 33 bp, Homo sapien
cagtgccctttgtaacggaaggccaagactggg

SEQ ID NO: 606263 - DNA, 33 bp, Homo sapien
aacacatcttagcccacgacccggcacacaggc

SEQ ID NO: 606264 - DNA, 33 bp, Homo sapien
aacacatcttagcccatgacccggcacacaggc

SEQ ID NO: 606265 - DNA, 33 bp, Homo sapien
gggagaaacaatccacactgataagtcactgag

SEQ ID NO: 606266 - DNA, 33 bp, Homo sapien
gggagaaacaatccacgctgataagtcactgag

SEQ ID NO: 606267 - DNA, 33 bp, Homo sapien
gagccaggcaaggtcacgctgcagtgagagtga

SEQ ID NO: 606268 - DNA, 33 bp, Homo sapien
gagccaggcaaggtcatgctgcagtgagagtga

SEQ ID NO: 606269 - DNA, 33 bp, Homo sapien
gtttaagtttgggcaactcttgatgcttctcag

SEQ ID NO: 606270 - DNA, 33 bp, Homo sapien
gtttaagtttgggcaagtcttgatgcttctcag

SEQ ID NO: 606271 - DNA, 33 bp, Homo sapien
ccagtcacagcaactccgaactggagaaacaga

SEQ ID NO: 606272 - DNA, 33 bp, Homo sapien
ccagtcacagcaactctgaactggagaaacaga

SEQ ID NO: 606273 - DNA, 33 bp, Homo sapien
tcctactggcttaaacagtgaactaatggttta

SEQ ID NO: 606274 - DNA, 33 bp, Homo sapien
tcctactggcttaaacggtgaactaatggttta

SEQ ID NO: 606275 - DNA, 33 bp, Homo sapien
caaagctaactaaacaaaacagctcatctcaac

SEQ ID NO: 606276 - DNA, 33 bp, Homo sapien
caaagctaactaaacagaacagctcatctcaac

SEQ ID NO: 606277 - DNA, 33 bp, Homo sapien
tgtaaagaaaaataaacgtgatgcatgtacacg

SEQ ID NO: 606278 - DNA, 33 bp, Homo sapien
tgtaaagaaaaataaatgtgatgcatgtacacg

SEQ ID NO: 606279 - DNA, 33 bp, Homo sapien
tcagtgaaagtaatggccataaatatcaaattt

SEQ ID NO: 606280 - DNA, 33 bp, Homo sapien
tcagtgaaagtaatgggcataaatatcaaattt

SEQ ID NO: 606281 - DNA, 33 bp, Homo sapien
gctcctgcttcttcagaccactcttcagcccgt

SEQ ID NO: 606282 - DNA, 33 bp, Homo sapien
gctcctgcttcttcagcccactcttcagcccgt

SEQ ID NO: 606283 - DNA, 33 bp, Homo sapien; identical to SEQ ID NO: 606281

SEQ ID NO: 606284 - DNA, 33 bp, Homo sapien; identical to SEQ ID NO: 606282

SEQ ID NO: 606285 - DNA, 33 bp, Homo sapien
aggaaactctgataaaagatgtggcctatgatt

SEQ ID NO: 606286 - DNA, 33 bp, Homo sapien
aggaaactctgataaaggatgtggcctatgatt

SEQ ID NO: 606287 - DNA, 33 bp, Homo sapien
tacaaaaattagctaaacacagtggcacgtgcc

SEQ ID NO: 606288 - DNA, 33 bp, Homo sapien
tacaaaaattagctaagcacagtggcacgtgcc

SEQ ID NO: 606289 - DNA, 33 bp, Homo sapien
cttttccaaccttaccaaatctctcctcaaagc

SEQ ID NO: 606290 - DNA, 33 bp, Homo sapien
cttttccaaccttaccgaatctctcctcaaagc

SEQ ID NO: 606291 - DNA, 33 bp, Homo sapien
taagtgaataagatgacataagacagaatataa

SEQ ID NO: 606292 - DNA, 33 bp, Homo sapien
taagtgaataagatgatataagacagaatataa

SEQ ID NO: 606293 - DNA, 33 bp, Homo sapien
attgagtgcacagaaaagatttaacacagtagg

SEQ ID NO: 606294 - DNA, 33 bp, Homo sapien
attgagtgcacagaaatgatttaacacagtagg

SEQ ID NO: 606295 - DNA, 33 bp, Homo sapien
taatcagcgaacagcacaacatttggatatcaa

SEQ ID NO: 606296 - DNA, 33 bp, Homo sapien
taatcagcgaacagcagaacatttggatatcaa

SEQ ID NO: 606297 - DNA, 33 bp, Homo sapien
cttttctgagggcaagaaccaatgttatttgtt

SEQ ID NO: 606298 - DNA, 33 bp, Homo sapien
cttttctgagggcaaggaccaatgttatttgtt

SEQ ID NO: 606299 - DNA, 33 bp, Homo sapien
gaggttttcagtgaacacctactgaccaagcca

SEQ ID NO: 606300 - DNA, 33 bp, Homo sapien
gaggttttcagtgaacgcctactgaccaagcca

SEQ ID NO: 606301 - DNA, 33 bp, Homo sapien
cctcaaagatctcacaatctggtcccattagct

SEQ ID NO: 606302 - DNA, 33 bp, Homo sapien
cctcaaagatctcacagtctggtcccattagct

SEQ ID NO: 606303 - DNA, 33 bp, Homo sapien
gctgcctgagaaatggaagatgagaaacgagta

SEQ ID NO: 606304 - DNA, 33 bp, Homo sapien
gctgcctgagaaatggtagatgagaaacgagta

SEQ ID NO: 606305 - DNA, 33 bp, Homo sapien
tgcctaatattcactacctgatttagttctccc

SEQ ID NO: 606306 - DNA, 33 bp, Homo sapien
tgcctaatattcactatctgatttagttctccc

SEQ ID NO: 606307 - DNA, 33 bp, Homo sapien
tgctgagcaatgctgacactatgtcaacaccac

SEQ ID NO: 606308 - DNA, 33 bp, Homo sapien
tgctgagcaatgctgatactatgtcaacaccac

SEQ ID NO: 606309 - DNA, 33 bp, Homo sapien
tgagttagtacagccacgagatttctttgcctg

SEQ ID NO: 606310 - DNA, 33 bp, Homo sapien
tgagttagtacagccatgagatttctttgcctg

SEQ ID NO: 606311 - DNA, 33 bp, Homo sapien
acttatgagcatgagaagtgatggtgatgtgac

SEQ ID NO: 606312 - DNA, 33 bp, Homo sapien
acttatgagcatgagaggtgatggtgatgtgac

SEQ ID NO: 606313 - DNA, 33 bp, Homo sapien
gtgaatgccctttatgcagaagcagggtaacct

SEQ ID NO: 606314 - DNA, 33 bp, Homo sapien
gtgaatgccctttatgtagaagcagggtaacct

SEQ ID NO: 606315 - DNA, 33 bp, Homo sapien
gaatgctattgggatccagtagggagagagtgg

SEQ ID NO: 606316 - DNA, 33 bp, Homo sapien
gaatgctattgggatctagtagggagagagtgg

SEQ ID NO: 606317 - DNA, 33 bp, Homo sapien
ggagctgccttcaagaggagttgttgcatagag

SEQ ID NO: 606318 - DNA, 33 bp, Homo sapien
ggagctgccttcaagatgagttgttgcatagag

SEQ ID NO: 606319 - DNA, 33 bp, Homo sapien
cagattcagtgcacagaaaggcaagtgaggacc

SEQ ID NO: 606320 - DNA, 33 bp, Homo sapien
cagattcagtgcacaggaaggcaagtgaggacc

SEQ ID NO: 606321 - DNA, 33 bp, Homo sapien
agagaagaaagccagaaatcagagggtactgca

SEQ ID NO: 606322 - DNA, 33 bp, Homo sapien
agagaagaaagccagagatcagagggtactgca

SEQ ID NO: 606323 - DNA, 33 bp, Homo sapien
gcttgacacacagtagaccttcaacagatccta

SEQ ID NO: 606324 - DNA, 33 bp, Homo sapien
gcttgacacacagtaggccttcaacagatccta

SEQ ID NO: 606325 - DNA, 33 bp, Homo sapien
tgaaaaagttgagatacagaggaccacagactg

SEQ ID NO: 606326 - DNA, 33 bp, Homo sapien
tgaaaaagttgagatagagaggaccacagactg

SEQ ID NO: 606327 - DNA, 33 bp, Homo sapien
gtgatgcagggaagagaagagcagtggacttat

SEQ ID NO: 606328 - DNA, 33 bp, Homo sapien
gtgatgcagggaagaggagagcagtggacttat

SEQ ID NO: 606329 - DNA, 33 bp, Homo sapien
ctgtcctctggccaggaatttgtgcttctccca

SEQ ID NO: 606330 - DNA, 33 bp, Homo sapien
ctgtcctctggccaggcatttgtgcttctccca

SEQ ID NO: 606331 - DNA, 33 bp, Homo sapien
cccagcccgagagagaactttcaaacacacagt

SEQ ID NO: 606332 - DNA, 33 bp, Homo sapien
cccagcccgagagagagctttcaaacacacagt

SEQ ID NO: 606333 - DNA, 33 bp, Homo sapien
tggaaagggagtaggaataataacagacaccaa

SEQ ID NO: 606334 - DNA, 33 bp, Homo sapien
tggaaagggagtaggagtaataacagacaccaa

SEQ ID NO: 606335 - DNA, 33 bp, Homo sapien
tattcatatggagccacatactctattgttgaa

SEQ ID NO: 606336 - DNA, 33 bp, Homo sapien
tattcatatggagccatatactctattgttgaa

SEQ ID NO: 606337 - DNA, 33 bp, Homo sapien
tatttatgtgtcgcaaacaatacagaaggttac

SEQ ID NO: 606338 - DNA, 33 bp, Homo sapien
tatttatgtgtcgcaagcaatacagaaggttac

SEQ ID NO: 606339 - DNA, 33 bp, Homo sapien
ttgtacagaaaagagtcaacacagctggcctga

SEQ ID NO: 606340 - DNA, 33 bp, Homo sapien
ttgtacagaaaagagttaacacagctggcctga

SEQ ID NO: 606341 - DNA, 33 bp, Homo sapien
tctatgctatctttcacgattccttacagctca

SEQ ID NO: 606342 - DNA, 33 bp, Homo sapien
tctatgctatctttcatgattccttacagctca

SEQ ID NO: 606343 - DNA, 33 bp, Homo sapien
ctctcctcttgactcaacagtgactctcttcaa

SEQ ID NO: 606344 - DNA, 33 bp, Homo sapien
ctctcctcttgactcagcagtgactctcttcaa

SEQ ID NO: 606345 - DNA, 33 bp, Homo sapien
acaggaaagaaaggaactgaccaccacattgca

SEQ ID NO: 606346 - DNA, 33 bp, Homo sapien
acaggaaagaaaggaattgaccaccacattgca

SEQ ID NO: 606347 - DNA, 33 bp, Homo sapien
ggagcccagtacaaaacaggcctacataaagtt

SEQ ID NO: 606348 - DNA, 33 bp, Homo sapien
ggagcccagtacaaaagaggcctacataaagtt

SEQ ID NO: 606349 - DNA, 33 bp, Homo sapien
ggattccatattcttcactgtcctatgaaaatg

SEQ ID NO: 606350 - DNA, 33 bp, Homo sapien
ggattccatattcttcgctgtcctatgaaaatg

SEQ ID NO: 606351 - DNA, 33 bp, Homo sapien
actcaaatttgcatacactatgtactctgggct

SEQ ID NO: 606352 - DNA, 33 bp, Homo sapien
actcaaatttgcatacgctatgtactctgggct

SEQ ID NO: 606353 - DNA, 33 bp, Homo sapien
aaaggaagagggtggtcacaagtagaaaagaga

SEQ ID NO: 606354 - DNA, 33 bp, Homo sapien
aaaggaagagggtggtgacaagtagaaaagaga

SEQ ID NO: 606355 - DNA, 33 bp, Homo sapien
gctctggaagtaccgccaacattgacctgcata

SEQ ID NO: 606356 - DNA, 33 bp, Homo sapien
gctctggaagtaccgctaacattgacctgcata

SEQ ID NO: 606357 - DNA, 33 bp, Homo sapien
cctagcaattaaaaaaaagaactgctgacaggc

SEQ ID NO: 606358 - DNA, 33 bp, Homo sapien
cctagcaattaaaaaacagaactgctgacaggc

SEQ ID NO: 606359 - DNA, 33 bp, Homo sapien
acttgtttctggcatacgtagatcaaaacttaa

SEQ ID NO: 606360 - DNA, 33 bp, Homo sapien
acttgtttctggcatatgtagatcaaaacttaa

SEQ ID NO: 606361 - DNA, 33 bp, Homo sapien
gtgcaggtagaaacacacttgcctcagaggctg

SEQ ID NO: 606362 - DNA, 33 bp, Homo sapien
gtgcaggtagaaacacgcttgcctcagaggctg

SEQ ID NO: 606363 - DNA, 33 bp, Homo sapien
ctactgtgaaaaagaacgaaagtcaacgtggag

SEQ ID NO: 606364 - DNA, 33 bp, Homo sapien
ctactgtgaaaaagaatgaaagtcaacgtggag

SEQ ID NO: 606365 - DNA, 33 bp, Homo sapien
gcatggccgccaagcgcaggagcccagggttcg

SEQ ID NO: 606366 - DNA, 33 bp, Homo sapien
gcatggccgccaagcgtaggagcccagggttcg

SEQ ID NO: 606367 - DNA, 33 bp, Homo sapien
gcagacatgtaacataagcaacagcagaaggat

SEQ ID NO: 606368 - DNA, 33 bp, Homo sapien
gcagacatgtaacatacgcaacagcagaaggat

SEQ ID NO: 606369 - DNA, 33 bp, Homo sapien
gtaaaccttggctctaccacttttcatctaggg

SEQ ID NO: 606370 - DNA, 33 bp, Homo sapien
gtaaaccttggctctagcacttttcatctaggg

SEQ ID NO: 606371 - DNA, 33 bp, Homo sapien
ccattcattctcagcaatcattcattcatcatt

SEQ ID NO: 606372 - DNA, 33 bp, Homo sapien
ccattcattctcagcagtcattcattcatcatt

SEQ ID NO: 606373 - DNA, 33 bp, Homo sapien
gctcttcaggtatgacaggtcctttccagcata

SEQ ID NO: 606374 - DNA, 33 bp, Homo sapien
gctcttcaggtatgacgggtcctttccagcata

SEQ ID NO: 606375 - DNA, 33 bp, Homo sapien
ctggagctgtgagatacagaaattgccagcagc

SEQ ID NO: 606376 - DNA, 33 bp, Homo sapien
ctggagctgtgagatatagaaattgccagcagc

SEQ ID NO: 606377 - DNA, 33 bp, Homo sapien
agggaaggtttgacccagatggcagagcctaca

SEQ ID NO: 606378 - DNA, 33 bp, Homo sapien
agggaaggtttgacccggatggcagagcctaca

SEQ ID NO: 606379 - DNA, 33 bp, Homo sapien
tatgtgtgcagaactgaaaacggaaccgaagaa

SEQ ID NO: 606380 - DNA, 33 bp, Homo sapien
tatgtgtgcagaactggaaacggaaccgaagaa

SEQ ID NO: 606381 - DNA, 33 bp, Homo sapien
ccaaagaaactagccccattcttgcaacaagca

SEQ ID NO: 606382 - DNA, 33 bp, Homo sapien
ccaaagaaactagccctattcttgcaacaagca

SEQ ID NO: 606383 - DNA, 33 bp, Homo sapien
tgcctggctgttctgacggagagtcaaggagat

SEQ ID NO: 606384 - DNA, 33 bp, Homo sapien
tgcctggctgttctgatggagagtcaaggagat

SEQ ID NO: 606385 - DNA, 33 bp, Homo sapien
tatcactgtgtacataagaaatcactcctccaa

SEQ ID NO: 606386 - DNA, 33 bp, Homo sapien
tatcactgtgtacataggaaatcactcctccaa

SEQ ID NO: 606387 - DNA, 33 bp, Homo sapien
acacaaactggggctacagagattctccaagga

SEQ ID NO: 606388 - DNA, 33 bp, Homo sapien
acacaaactggggctatagagattctccaagga

SEQ ID NO: 606389 - DNA, 33 bp, Homo sapien
ccaggaaagaccgagaccataggttggggtcac

SEQ ID NO: 606390 - DNA, 33 bp, Homo sapien
ccaggaaagaccgagagcataggttggggtcac

SEQ ID NO: 606391 - DNA, 33 bp, Homo sapien
gagcgcagtggagtcaagccttagtgaacaagt

SEQ ID NO: 606392 - DNA, 33 bp, Homo sapien
gagcgcagtggagtcaggccttagtgaacaagt

SEQ ID NO: 606393 - DNA, 33 bp, Homo sapien
agtggtgtccccgtgaacacttactgagagcca

SEQ ID NO: 606394 - DNA, 33 bp, Homo sapien
agtggtgtccccgtgagcacttactgagagcca

SEQ ID NO: 606395 - DNA, 33 bp, Homo sapien
agatctacaaatctgacgggattaagagcctgt

SEQ ID NO: 606396 - DNA, 33 bp, Homo sapien
agatctacaaatctgatgggattaagagcctgt

SEQ ID NO: 606397 - DNA, 33 bp, Homo sapien; identical to SEQ ID NO: 606395

SEQ ID NO: 606398 - DNA, 33 bp, Homo sapien; identical to SEQ ID NO: 606396

SEQ ID NO: 606399 - DNA, 33 bp, Homo sapien
gccccggagtcaaagccgattctcggaccagtc

SEQ ID NO: 606400 - DNA, 33 bp, Homo sapien
gccccggagtcaaagctgattctcggaccagtc

SEQ ID NO: 606401 - DNA, 33 bp, Homo sapien
caaaatggatcccataaaggtaattcaaaggac

SEQ ID NO: 606402 - DNA, 33 bp, Homo sapien
caaaatggatcccatagaggtaattcaaaggac

SEQ ID NO: 606403 - DNA, 33 bp, Homo sapien
aagatcatggaaaatacgggttgcgaaaaaact

SEQ ID NO: 606404 - DNA, 33 bp, Homo sapien
aagatcatggaaaatatgggttgcgaaaaaact

SEQ ID NO: 606405 - DNA, 33 bp, Homo sapien
tggatttgaaaacttaataaggctaagacgtcc

SEQ ID NO: 606406 - DNA, 33 bp, Homo sapien
tggatttgaaaacttagtaaggctaagacgtcc

SEQ ID NO: 606407 - DNA, 33 bp, Homo sapien
tgaatatctgttatgaataggtgctatgctagg

SEQ ID NO: 606408 - DNA, 33 bp, Homo sapien
tgaatatctgttatgattaggtgctatgctagg

SEQ ID NO: 606409 - DNA, 33 bp, Homo sapien
atagcagatatcaactaaacaattaacagagta

SEQ ID NO: 606410 - DNA, 33 bp, Homo sapien
atagcagatatcaactgaacaattaacagagta

SEQ ID NO: 606411 - DNA, 33 bp, Homo sapien
ccataccttacctgaaaaaggcatctgtggagt

SEQ ID NO: 606412 - DNA, 33 bp, Homo sapien
ccataccttacctgaacaaggcatctgtggagt

SEQ ID NO: 606413 - DNA, 33 bp, Homo sapien
tcccactctggcaaggcaggcaaagttcttaat

SEQ ID NO: 606414 - DNA, 33 bp, Homo sapien
tcccactctggcaaggtaggcaaagttcttaat

SEQ ID NO: 606415 - DNA, 33 bp, Homo sapien
taggaagtgaaacgtacgatattcttcctggcc

SEQ ID NO: 606416 - DNA, 33 bp, Homo sapien
taggaagtgaaacgtatgatattcttcctggcc

SEQ ID NO: 606417 - DNA, 33 bp, Homo sapien
aaagaggaacaaactcaacccaaagttagcaga

SEQ ID NO: 606418 - DNA, 33 bp, Homo sapien
aaagaggaacaaactcgacccaaagttagcaga

SEQ ID NO: 606419 - DNA, 33 bp, Homo sapien
ctttactggttaagtacagggtcaccagagaaa

SEQ ID NO: 606420 - DNA, 33 bp, Homo sapien
ctttactggttaagtatagggtcaccagagaaa

SEQ ID NO: 606421 - DNA, 33 bp, Homo sapien
tccccaaacttgtagccgaggaagagcaattag

SEQ ID NO: 606422 - DNA, 33 bp, Homo sapien
tccccaaacttgtagctgaggaagagcaattag

SEQ ID NO: 606423 - DNA, 33 bp, Homo sapien
tgatcttcaacctgcacagcaataacatcttat

SEQ ID NO: 606424 - DNA, 33 bp, Homo sapien
tgatcttcaacctgcagagcaataacatcttat

SEQ ID NO: 606425 - DNA, 33 bp, Homo sapien
ggaggtttaatgggacagggtcagatatgcctt

SEQ ID NO: 606426 - DNA, 33 bp, Homo sapien
ggaggtttaatgggacggggtcagatatgcctt

SEQ ID NO: 606427 - DNA, 33 bp, Homo sapien
ggtaaatcatttctgacacttttcagattcttt

SEQ ID NO: 606428 - DNA, 33 bp, Homo sapien
ggtaaatcatttctgagacttttcagattcttt

SEQ ID NO: 606429 - DNA, 33 bp, Homo sapien
gctggcggtagaagtaacttggcggacgccgct

SEQ ID NO: 606430 - DNA, 33 bp, Homo sapien
gctggcggtagaagtagcttggcggacgccgct

SEQ ID NO: 606431 - DNA, 33 bp, Homo sapien
ctttcacaaggccagcaatatccactacattta

SEQ ID NO: 606432 - DNA, 33 bp, Homo sapien
ctttcacaaggccagcgatatccactacattta

SEQ ID NO: 606433 - DNA, 33 bp, Homo sapien; identical to SEQ ID NO: 606431

SEQ ID NO: 606434 - DNA, 33 bp, Homo sapien; identical to SEQ ID NO: 606432

SEQ ID NO: 606435 - DNA, 33 bp, Homo sapien
ccatctggtaagaccactgacccagcgtgctgc

SEQ ID NO: 606436 - DNA, 33 bp, Homo sapien
ccatctggtaagaccattgacccagcgtgctgc

SEQ ID NO: 606437 - DNA, 33 bp, Homo sapien
aacattgagctctctaagagaacgagagcccgc

SEQ ID NO: 606438 - DNA, 33 bp, Homo sapien
aacattgagctctctaggagaacgagagcccgc

SEQ ID NO: 606439 - DNA, 33 bp, Homo sapien
gtgctaagtggtgtaacaggtaaaatgggagtg

SEQ ID NO: 606440 - DNA, 33 bp, Homo sapien
gtgctaagtggtgtaataggtaaaatgggagtg

SEQ ID NO: 606441 - DNA, 33 bp, Homo sapien
agcgattatctaaagccaaagaaaagaatctgc

SEQ ID NO: 606442 - DNA, 33 bp, Homo sapien
agcgattatctaaagcgaaagaaaagaatctgc

SEQ ID NO: 606443 - DNA, 33 bp, Homo sapien
aaatcatgacaaattgaaggactcaaattttac

SEQ ID NO: 606444 - DNA, 33 bp, Homo sapien
aaatcatgacaaattggaggactcaaattttac

SEQ ID NO: 606445 - DNA, 33 bp, Homo sapien
aataaaagctagaaacagatcttatagtgatag

SEQ ID NO: 606446 - DNA, 33 bp, Homo sapien
aataaaagctagaaacggatcttatagtgatag

SEQ ID NO: 606447 - DNA, 33 bp, Homo sapien
cttccaagtccagataatagaaactgccctgct

SEQ ID NO: 606448 - DNA, 33 bp, Homo sapien
cttccaagtccagatagtagaaactgccctgct

SEQ ID NO: 606449 - DNA, 33 bp, Homo sapien
gcagaccatcactagacattaggcagcgcccag

SEQ ID NO: 606450 - DNA, 33 bp, Homo sapien
gcagaccatcactagatattaggcagcgcccag

SEQ ID NO: 606451 - DNA, 33 bp, Homo sapien
tttctgatgccctgacgcctcagaagaagacct

SEQ ID NO: 606452 - DNA, 33 bp, Homo sapien
tttctgatgccctgactcctcagaagaagacct

SEQ ID NO: 606453 - DNA, 33 bp, Homo sapien
gcaagcatcctatatccaccacatgcttctgta

SEQ ID NO: 606454 - DNA, 33 bp, Homo sapien
gcaagcatcctatatctaccacatgcttctgta

SEQ ID NO: 606455 - DNA, 33 bp, Homo sapien
tgtccctgccagagtaaagtcttttcattttgc

SEQ ID NO: 606456 - DNA, 33 bp, Homo sapien
tgtccctgccagagtacagtcttttcattttgc

SEQ ID NO: 606457 - DNA, 33 bp, Homo sapien
gaggcttttcaggatacaacagtgtcctagtta

SEQ ID NO: 606458 - DNA, 33 bp, Homo sapien
gaggcttttcaggatagaacagtgtcctagtta

SEQ ID NO: 606459 - DNA, 33 bp, Homo sapien
gaaataagccaatggaaagtcacctgcaatcct

SEQ ID NO: 606460 - DNA, 33 bp, Homo sapien
gaaataagccaatggagagtcacctgcaatcct

SEQ ID NO: 606461 - DNA, 33 bp, Homo sapien
agtaaatctaaaaacacaaagcagatcggtggt

SEQ ID NO: 606462 - DNA, 33 bp, Homo sapien
agtaaatctaaaaacagaaagcagatcggtggt

SEQ ID NO: 606463 - DNA, 33 bp, Homo sapien
ttactaaacagatgtaaatgaaaagatacacta

SEQ ID NO: 606464 - DNA, 33 bp, Homo sapien
ttactaaacagatgtagatgaaaagatacacta

SEQ ID NO: 606465 - DNA, 33 bp, Homo sapien
gctgcgcatggggcagcaatgtaaggagtactc

SEQ ID NO: 606466 - DNA, 33 bp, Homo sapien
gctgcgcatggggcaggaatgtaaggagtactc

SEQ ID NO: 606467 - DNA, 33 bp, Homo sapien
caaacattgctcttacacagaaagtactgattg

SEQ ID NO: 606468 - DNA, 33 bp, Homo sapien
caaacattgctcttacgcagaaagtactgattg

SEQ ID NO: 606469 - DNA, 33 bp, Homo sapien
aaacctgatgtttctaaagcaaaggaagggctt

SEQ ID NO: 606470 - DNA, 33 bp, Homo sapien
aaacctgatgtttctagagcaaaggaagggctt

SEQ ID NO: 606471 - DNA, 33 bp, Homo sapien
caggatcacaaattctcaacgcatcctactctt

SEQ ID NO: 606472 - DNA, 33 bp, Homo sapien
caggatcacaaattctgaacgcatcctactctt

SEQ ID NO: 606473 - DNA, 33 bp, Homo sapien
tcggctcttgcttagaaaggccattgtaagcat

SEQ ID NO: 606474 - DNA, 33 bp, Homo sapien
tcggctcttgcttagagaggccattgtaagcat

SEQ ID NO: 606475 - DNA, 33 bp, Homo sapien
tgtctgaaattacccacgcaaaatctcagtgac

SEQ ID NO: 606476 - DNA, 33 bp, Homo sapien
tgtctgaaattacccatgcaaaatctcagtgac

SEQ ID NO: 606477 - DNA, 33 bp, Homo sapien
ctgtgaaatggttgaactagatgattccagcat

SEQ ID NO: 606478 - DNA, 33 bp, Homo sapien
ctgtgaaatggttgaagtagatgattccagcat

SEQ ID NO: 606479 - DNA, 33 bp, Homo sapien
agggtgctggacttgccgaaagctcttctggtg

SEQ ID NO: 606480 - DNA, 33 bp, Homo sapien
agggtgctggacttgctgaaagctcttctggtg

SEQ ID NO: 606481 - DNA, 33 bp, Homo sapien
catgcaccatcaggaaaactgctctcttggcag

SEQ ID NO: 606482 - DNA, 33 bp, Homo sapien
catgcaccatcaggaatactgctctcttggcag

SEQ ID NO: 606483 - DNA, 33 bp, Homo sapien
tggggaggctgcagcaaaagaggagtttagggt

SEQ ID NO: 606484 - DNA, 33 bp, Homo sapien
tggggaggctgcagcagaagaggagtttagggt

SEQ ID NO: 606485 - DNA, 33 bp, Homo sapien
gggcacacatttgggtaaagaaattgttccgga

SEQ ID NO: 606486 - DNA, 33 bp, Homo sapien
gggcacacatttgggtgaagaaattgttccgga

SEQ ID NO: 606487 - DNA, 33 bp, Homo sapien
tgaagggaccagactcacttctggccatggggg

SEQ ID NO: 606488 - DNA, 33 bp, Homo sapien
tgaagggaccagactctcttctggccatggggg

SEQ ID NO: 606489 - DNA, 33 bp, Homo sapien
ttggatctgatgacacaaagccagttttcacac

SEQ ID NO: 606490 - DNA, 33 bp, Homo sapien
ttggatctgatgacaccaagccagttttcacac

SEQ ID NO: 606491 - DNA, 33 bp, Homo sapien
agaagaggaacgatcacgtattcaatgatgact

SEQ ID NO: 606492 - DNA, 33 bp, Homo sapien
agaagaggaacgatcatgtattcaatgatgact

SEQ ID NO: 606493 - DNA, 33 bp, Homo sapien
ctaatgaagcttgaacacagtttgtcatccaaa

SEQ ID NO: 606494 - DNA, 33 bp, Homo sapien
ctaatgaagcttgaacgcagtttgtcatccaaa

SEQ ID NO: 606495 - DNA, 33 bp, Homo sapien
aggcgctgcactgagactatcacatctaattct

SEQ ID NO: 606496 - DNA, 33 bp, Homo sapien
aggcgctgcactgagattatcacatctaattct

SEQ ID NO: 606497 - DNA, 33 bp, Homo sapien
ttcagcaaatgcagtcacttaataaggatattg

SEQ ID NO: 606498 - DNA, 33 bp, Homo sapien
ttcagcaaatgcagtcccttaataaggatattg

SEQ ID NO: 606499 - DNA, 33 bp, Homo sapien
tgttgcaatgagagcaacaaggtttctgagtga

SEQ ID NO: 606500 - DNA, 33 bp, Homo sapien
tgttgcaatgagagcagcaaggtttctgagtga

SEQ ID NO: 606501 - DNA, 33 bp, Homo sapien
ctggatgtgtcacacaatgcccagctctgaggg

SEQ ID NO: 606502 - DNA, 33 bp, Homo sapien
ctggatgtgtcacacagtgcccagctctgaggg

SEQ ID NO: 606503 - DNA, 33 bp, Homo sapien
gactcactgtgtagacagattctgaaggatgct

SEQ ID NO: 606504 - DNA, 33 bp, Homo sapien
gactcactgtgtagacggattctgaaggatgct

SEQ ID NO: 606505 - DNA, 33 bp, Homo sapien
gcttcggcttttcccacgatgatagcaagtagg

SEQ ID NO: 606506 - DNA, 33 bp, Homo sapien
gcttcggcttttcccatgatgatagcaagtagg

SEQ ID NO: 606507 - DNA, 33 bp, Homo sapien
ccctgctgctctggaacaaggtacgggatcagt

SEQ ID NO: 606508 - DNA, 33 bp, Homo sapien
ccctgctgctctggaagaaggtacgggatcagt

SEQ ID NO: 606509 - DNA, 33 bp, Homo sapien
tgggctggtggctgacaataggcagtgctgggg

SEQ ID NO: 606510 - DNA, 33 bp, Homo sapien
tgggctggtggctgacgataggcagtgctgggg

SEQ ID NO: 606511 - DNA, 33 bp, Homo sapien
ttttctgtgcagggaacggatttgagaacttcc

SEQ ID NO: 606512 - DNA, 33 bp, Homo sapien
ttttctgtgcagggaatggatttgagaacttcc

SEQ ID NO: 606513 - DNA, 33 bp, Homo sapien
cccctgctgcagaacaaggatgccatctggccc

SEQ ID NO: 606514 - DNA, 33 bp, Homo sapien
cccctgctgcagaacagggatgccatctggccc

SEQ ID NO: 606515 - DNA, 33 bp, Homo sapien
ttgtggtcgttttaaaagtgtttcagaagtgag

SEQ ID NO: 606516 - DNA, 33 bp, Homo sapien
ttgtggtcgttttaaaggtgtttcagaagtgag

SEQ ID NO: 606517 - DNA, 33 bp, Homo sapien
cctctgattctattccaacgatggagggcagac

SEQ ID NO: 606518 - DNA, 33 bp, Homo sapien
cctctgattctattccgacgatggagggcagac

SEQ ID NO: 606519 - DNA, 33 bp, Homo sapien
ggaactgaacacagctaaagtagagagccagaa

SEQ ID NO: 606520 - DNA, 33 bp, Homo sapien
ggaactgaacacagctgaagtagagagccagaa

SEQ ID NO: 606521 - DNA, 33 bp, Homo sapien
tatggaccatatagaaagttcactggactgcct

SEQ ID NO: 606522 - DNA, 33 bp, Homo sapien
tatggaccatatagaacgttcactggactgcct

SEQ ID NO: 606523 - DNA, 33 bp, Homo sapien
ttgggcctcactttgtaaaagtccaggaaatta

SEQ ID NO: 606524 - DNA, 33 bp, Homo sapien
ttgggcctcactttgtgaaagtccaggaaatta

SEQ ID NO: 606525 - DNA, 33 bp, Homo sapien
aaactctggctcaataaataaaaaaccacatca

SEQ ID NO: 606526 - DNA, 33 bp, Homo sapien
aaactctggctcaatatataaaaaaccacatca

SEQ ID NO: 606527 - DNA, 33 bp, Homo sapien
ctgcaggtaaccacaccgtccaataagagccta

SEQ ID NO: 606528 - DNA, 33 bp, Homo sapien
ctgcaggtaaccacactgtccaataagagccta

SEQ ID NO: 606529 - DNA, 33 bp, Homo sapien
aactctacagactggacgaggccacaggtggac

SEQ ID NO: 606530 - DNA, 33 bp, Homo sapien
aactctacagactggatgaggccacaggtggac

SEQ ID NO: 606531 - DNA, 33 bp, Homo sapien
agggagctttgactcacggtggaaggcgaagtg

SEQ ID NO: 606532 - DNA, 33 bp, Homo sapien
agggagctttgactcatggtggaaggcgaagtg

SEQ ID NO: 606533 - DNA, 33 bp, Homo sapien
gaggagggagaagcgacgggcttcattaggaac

SEQ ID NO: 606534 - DNA, 33 bp, Homo sapien
gaggagggagaagcgatgggcttcattaggaac

SEQ ID NO: 606535 - DNA, 33 bp, Homo sapien
cttttacgaagtgaggcccaaggtttgaacaga

SEQ ID NO: 606536 - DNA, 33 bp, Homo sapien
cttttacgaagtgaggtccaaggtttgaacaga

SEQ ID NO: 606537 - DNA, 33 bp, Homo sapien
tgtccactagttacaagaagtatcctgtgaaag

SEQ ID NO: 606538 - DNA, 33 bp, Homo sapien
tgtccactagttacaataagtatcctgtgaaag

SEQ ID NO: 606539 - DNA, 33 bp, Homo sapien
tggctggacaatgccaactccttcgacagactc

SEQ ID NO: 606540 - DNA, 33 bp, Homo sapien
tggctggacaatgccagctccttcgacagactc

SEQ ID NO: 606541 - DNA, 33 bp, Homo sapien
agacaaccaccatcccaactgtcacagcatagg

SEQ ID NO: 606542 - DNA, 33 bp, Homo sapien
agacaaccaccatcccgactgtcacagcatagg

SEQ ID NO: 606543 - DNA, 33 bp, Homo sapien
tttgggatgagagggacgataaagccatgcagg

SEQ ID NO: 606544 - DNA, 33 bp, Homo sapien
tttgggatgagagggaggataaagccatgcagg

SEQ ID NO: 606545 - DNA, 33 bp, Homo sapien
actttcgggcttctcacattgtgtaatatgcta

SEQ ID NO: 606546 - DNA, 33 bp, Homo sapien
actttcgggcttctcagattgtgtaatatgcta

SEQ ID NO: 606547 - DNA, 33 bp, Homo sapien
cccttccagccacctaccttcttcgatctgttt

SEQ ID NO: 606548 - DNA, 33 bp, Homo sapien
cccttccagccacctatcttcttcgatctgttt

SEQ ID NO: 606549 - DNA, 33 bp, Homo sapien
cagagcagctgcctcaaggagagacccgtccct

SEQ ID NO: 606550 - DNA, 33 bp, Homo sapien
cagagcagctgcctcagggagagacccgtccct

SEQ ID NO: 606551 - DNA, 33 bp, Homo sapien
ccccgggggtccgaacaaacaggcggctccacc

SEQ ID NO: 606552 - DNA, 33 bp, Homo sapien
ccccgggggtccgaaccaacaggcggctccacc

SEQ ID NO: 606553 - DNA, 33 bp, Homo sapien
atgcgaacgcctgaagcaagatgggcttgatgt

SEQ ID NO: 606554 - DNA, 33 bp, Homo sapien
atgcgaacgcctgaaggaagatgggcttgatgt

SEQ ID NO: 606555 - DNA, 33 bp, Homo sapien
ttgttgctaaacgtgcaaaaccctctgacatag

SEQ ID NO: 606556 - DNA, 33 bp, Homo sapien
ttgttgctaaacgtgcgaaaccctctgacatag

SEQ ID NO: 606557 - DNA, 33 bp, Homo sapien
atgaggaagtttcacactgctattaaaatattg

SEQ ID NO: 606558 - DNA, 33 bp, Homo sapien
atgaggaagtttcacattgctattaaaatattg

SEQ ID NO: 606559 - DNA, 33 bp, Homo sapien
catcaccttaaggtcagcttctcaatctgggtc

SEQ ID NO: 606560 - DNA, 33 bp, Homo sapien
catcaccttaaggtcatcttctcaatctgggtc

SEQ ID NO: 606561 - DNA, 33 bp, Homo sapien
gtcttgttgttcatgtaaatgttcttgaagtcc

SEQ ID NO: 606562 - DNA, 33 bp, Homo sapien
gtcttgttgttcatgtcaatgttcttgaagtcc

SEQ ID NO: 606563 - DNA, 33 bp, Homo sapien
atttctgcatttggcaaaagggtgtaatgctcc

SEQ ID NO: 606564 - DNA, 33 bp, Homo sapien
atttctgcatttggcataagggtgtaatgctcc

SEQ ID NO: 606565 - DNA, 33 bp, Homo sapien
ccagaaaagaacaaagcatcctccgccccggac

SEQ ID NO: 606566 - DNA, 33 bp, Homo sapien
ccagaaaagaacaaagtatcctccgccccggac

SEQ ID NO: 606567 - DNA, 33 bp, Homo sapien
tgtttttcaggcctcaaacggctgctagggcct

SEQ ID NO: 606568 - DNA, 33 bp, Homo sapien
tgtttttcaggcctcacacggctgctagggcct

SEQ ID NO: 606569 - DNA, 33 bp, Homo sapien
tgcctatttattgaccacatactaagagctgga

SEQ ID NO: 606570 - DNA, 33 bp, Homo sapien
tgcctatttattgaccgcatactaagagctgga

SEQ ID NO: 606571 - DNA, 33 bp, Homo sapien
ggcgcatcagtgaccacgactggatactgctgt

SEQ ID NO: 606572 - DNA, 33 bp, Homo sapien
ggcgcatcagtgaccatgactggatactgctgt

SEQ ID NO: 606573 - DNA, 33 bp, Homo sapien
cataaagaatgctcccaccgcagcaggagaaaa

SEQ ID NO: 606574 - DNA, 33 bp, Homo sapien
cataaagaatgctcccgccgcagcaggagaaaa

SEQ ID NO: 606575 - DNA, 33 bp, Homo sapien
agtcagaaaacttatccacatccaggcagcctg

SEQ ID NO: 606576 - DNA, 33 bp, Homo sapien
agtcagaaaacttatctacatccaggcagcctg

SEQ ID NO: 606577 - DNA, 33 bp, Homo sapien
cctcctgggctgaagcgatcctgccatctcaac

SEQ ID NO: 606578 - DNA, 33 bp, Homo sapien
cctcctgggctgaagctatcctgccatctcaac

SEQ ID NO: 606579 - DNA, 33 bp, Homo sapien
ggaggtcagatacgaaccagccacctccacttt

SEQ ID NO: 606580 - DNA, 33 bp, Homo sapien
ggaggtcagatacgaagcagccacctccacttt

SEQ ID NO: 606581 - DNA, 33 bp, Homo sapien
tgttgtgtgacttggcactgagtccacttgcct

SEQ ID NO: 606582 - DNA, 33 bp, Homo sapien
tgttgtgtgacttggcgctgagtccacttgcct

SEQ ID NO: 606583 - DNA, 33 bp, Homo sapien
caatctggagctaggacgagttcccaaatcaac

SEQ ID NO: 606584 - DNA, 33 bp, Homo sapien
caatctggagctaggatgagttcccaaatcaac

SEQ ID NO: 606585 - DNA, 33 bp, Homo sapien
aggggagcttagagtaagtaagaaaagaagaaa

SEQ ID NO: 606586 - DNA, 33 bp, Homo sapien
aggggagcttagagtatgtaagaaaagaagaaa

SEQ ID NO: 606587 - DNA, 33 bp, Homo sapien
cccaaagatgtcccagccctgatccctggtagc

SEQ ID NO: 606588 - DNA, 33 bp, Homo sapien
cccaaagatgtcccagtcctgatccctggtagc

SEQ ID NO: 606589 - DNA, 33 bp, Homo sapien
ggtaagcactcatatacgttgaatgagtgaatg

SEQ ID NO: 606590 - DNA, 33 bp, Homo sapien
ggtaagcactcatatatgttgaatgagtgaatg

SEQ ID NO: 606591 - DNA, 33 bp, Homo sapien
cgtaggcactctgccggagattaagggcaggga

SEQ ID NO: 606592 - DNA, 33 bp, Homo sapien
cgtaggcactctgccgtagattaagggcaggga

SEQ ID NO: 606593 - DNA, 33 bp, Homo sapien
ctaccaccctgttggcaaatcctggacacactg

SEQ ID NO: 606594 - DNA, 33 bp, Homo sapien
ctaccaccctgttggcgaatcctggacacactg

SEQ ID NO: 606595 - DNA, 33 bp, Homo sapien
ggtcacactttagtgacgttatcagttaattgt

SEQ ID NO: 606596 - DNA, 33 bp, Homo sapien
ggtcacactttagtgatgttatcagttaattgt

SEQ ID NO: 606597 - DNA, 33 bp, Homo sapien
ctggctcgtcaaagtaactgtaggagcaagagt

SEQ ID NO: 606598 - DNA, 33 bp, Homo sapien
ctggctcgtcaaagtacctgtaggagcaagagt

SEQ ID NO: 606599 - DNA, 33 bp, Homo sapien
ctggcattctgaagcacagaaatctgctgaagc

SEQ ID NO: 606600 - DNA, 33 bp, Homo sapien
ctggcattctgaagcatagaaatctgctgaagc

SEQ ID NO: 606601 - DNA, 33 bp, Homo sapien
tgcactttgatgcttacgagaacatctctctgg

SEQ ID NO: 606602 - DNA, 33 bp, Homo sapien
tgcactttgatgcttatgagaacatctctctgg

SEQ ID NO: 606603 - DNA, 33 bp, Homo sapien
tttacgttgacttgtcacagactttaatttctc

SEQ ID NO: 606604 - DNA, 33 bp, Homo sapien
tttacgttgacttgtcccagactttaatttctc

SEQ ID NO: 606605 - DNA, 33 bp, Homo sapien
tttgatgcacttcaataagcatttaagctatta

SEQ ID NO: 606606 - DNA, 33 bp, Homo sapien
tttgatgcacttcaatgagcatttaagctatta

SEQ ID NO: 606607 - DNA, 33 bp, Homo sapien
agatttctcatcttaaaaaacaatctctctctg

SEQ ID NO: 606608 - DNA, 33 bp, Homo sapien
agatttctcatcttaacaaacaatctctctctg

SEQ ID NO: 606609 - DNA, 33 bp, Homo sapien
atcctttgttaggccagaatgttagtgtaaatt

SEQ ID NO: 606610 - DNA, 33 bp, Homo sapien
atcctttgttaggccataatgttagtgtaaatt

SEQ ID NO: 606611 - DNA, 33 bp, Homo sapien
cttcatctttgtgacccgatagcaacagtgaca

SEQ ID NO: 606612 - DNA, 33 bp, Homo sapien
cttcatctttgtgacctgatagcaacagtgaca

SEQ ID NO: 606613 - DNA, 33 bp, Homo sapien
taagtccatcagtcaacagcagatatcctaacc

SEQ ID NO: 606614 - DNA, 33 bp, Homo sapien
taagtccatcagtcaatagcagatatcctaacc

SEQ ID NO: 606615 - DNA, 33 bp, Homo sapien
agtagttatgtttcagcacttcttgttacaaga

SEQ ID NO: 606616 - DNA, 33 bp, Homo sapien
agtagttatgtttcaggacttcttgttacaaga

SEQ ID NO: 606617 - DNA, 33 bp, Homo sapien
caggagaaacgtgagaagcaaaaaaatcttcct

SEQ ID NO: 606618 - DNA, 33 bp, Homo sapien
caggagaaacgtgagaggcaaaaaaatcttcct

SEQ ID NO: 606619 - DNA, 33 bp, Homo sapien
gctccactggctaaaccgaatgaccactcatct

SEQ ID NO: 606620 - DNA, 33 bp, Homo sapien
gctccactggctaaactgaatgaccactcatct

SEQ ID NO: 606621 - DNA, 33 bp, Homo sapien
ggttgttattcagtaacagcttgccctacacta

SEQ ID NO: 606622 - DNA, 33 bp, Homo sapien
ggttgttattcagtaatagcttgccctacacta

SEQ ID NO: 606623 - DNA, 33 bp, Homo sapien
cccagcacacttccgacgcgtgactctgctagt

SEQ ID NO: 606624 - DNA, 33 bp, Homo sapien
cccagcacacttccgatgcgtgactctgctagt

SEQ ID NO: 606625 - DNA, 33 bp, Homo sapien
tgattcagtttaaaaacgacaatagcattcgtt

SEQ ID NO: 606626 - DNA, 33 bp, Homo sapien
tgattcagtttaaaaatgacaatagcattcgtt

SEQ ID NO: 606627 - DNA, 33 bp, Homo sapien
gtaccgaacacattgccgaaaaggaccattttt

SEQ ID NO: 606628 - DNA, 33 bp, Homo sapien
gtaccgaacacattgctgaaaaggaccattttt

SEQ ID NO: 606629 - DNA, 33 bp, Homo sapien
tgtactgtttagtggccgaatgatactcatgct

SEQ ID NO: 606630 - DNA, 33 bp, Homo sapien
tgtactgtttagtggctgaatgatactcatgct

SEQ ID NO: 606631 - DNA, 33 bp, Homo sapien
aggtgctagacctcccaaaggttgcagaaaccc

SEQ ID NO: 606632 - DNA, 33 bp, Homo sapien
aggtgctagacctcccgaaggttgcagaaaccc

SEQ ID NO: 606633 - DNA, 33 bp, Homo sapien
acacatggcaccgtgcacaagtcatcagccagg

SEQ ID NO: 606634 - DNA, 33 bp, Homo sapien
acacatggcaccgtgcgcaagtcatcagccagg

SEQ ID NO: 606635 - DNA, 33 bp, Homo sapien
ctgtggctctaatgtaataacgtggttccattt

SEQ ID NO: 606636 - DNA, 33 bp, Homo sapien
ctgtggctctaatgtattaacgtggttccattt

SEQ ID NO: 606637 - DNA, 33 bp, Homo sapien
tgtcactttttggccactggcattcccttcctt

SEQ ID NO: 606638 - DNA, 33 bp, Homo sapien
tgtcactttttggccattggcattcccttcctt

SEQ ID NO: 606639 - DNA, 33 bp, Homo sapien
aaccctgaaaggaaaccctctgtggtctaaatg

SEQ ID NO: 606640 - DNA, 33 bp, Homo sapien
aaccctgaaaggaaactctctgtggtctaaatg

SEQ ID NO: 606641 - DNA, 33 bp, Homo sapien
ccatacctttctccacaagctgcctccagcgcc

SEQ ID NO: 606642 - DNA, 33 bp, Homo sapien
ccatacctttctccacgagctgcctccagcgcc

SEQ ID NO: 606643 - DNA, 33 bp, Homo sapien
gtctgcagttggcaacaagacgggcaaaatgct

SEQ ID NO: 606644 - DNA, 33 bp, Homo sapien
gtctgcagttggcaacgagacgggcaaaatgct

SEQ ID NO: 606645 - DNA, 33 bp, Homo sapien
caaaatgctttcgataacttgttcaaatccatc

SEQ ID NO: 606646 - DNA, 33 bp, Homo sapien
caaaatgctttcgatatcttgttcaaatccatc

SEQ ID NO: 606647 - DNA, 33 bp, Homo sapien
cctggcagatgttgtaacctgtacacacctgcc

SEQ ID NO: 606648 - DNA, 33 bp, Homo sapien
cctggcagatgttgtatcctgtacacacctgcc

SEQ ID NO: 606649 - DNA, 33 bp, Homo sapien
tctgcaaatgaggtgacgctatttaccttgcag

SEQ ID NO: 606650 - DNA, 33 bp, Homo sapien
tctgcaaatgaggtgatgctatttaccttgcag

SEQ ID NO: 606651 - DNA, 33 bp, Homo sapien
tcaggaacagaggatacggccagtcagtgttgg

SEQ ID NO: 606652 - DNA, 33 bp, Homo sapien
tcaggaacagaggatatggccagtcagtgttgg

SEQ ID NO: 606653 - DNA, 33 bp, Homo sapien
gtattgacattcgctcacttcgtgcttgcgctc

SEQ ID NO: 606654 - DNA, 33 bp, Homo sapien
gtattgacattcgctcgcttcgtgcttgcgctc

SEQ ID NO: 606655 - DNA, 33 bp, Homo sapien
gccaccaagtgggtaacgaagacaatgtcgcca

SEQ ID NO: 606656 - DNA, 33 bp, Homo sapien
gccaccaagtgggtaatgaagacaatgtcgcca

SEQ ID NO: 606657 - DNA, 33 bp, Homo sapien
aggacccgggataaaacgtgagtggaggtaatc

SEQ ID NO: 606658 - DNA, 33 bp, Homo sapien
aggacccgggataaaatgtgagtggaggtaatc

SEQ ID NO: 606659 - DNA, 33 bp, Homo sapien
atctagcaaagatatccgaagccctaaggcgac

SEQ ID NO: 606660 - DNA, 33 bp, Homo sapien
atctagcaaagatatcggaagccctaaggcgac

SEQ ID NO: 606661 - DNA, 33 bp, Homo sapien
tctttttatgccttaacggtgccatttgttgca

SEQ ID NO: 606662 - DNA, 33 bp, Homo sapien
tctttttatgccttaatggtgccatttgttgca

SEQ ID NO: 606663 - DNA, 33 bp, Homo sapien
tgtccttggaaagaccagggatgactcatttgt

SEQ ID NO: 606664 - DNA, 33 bp, Homo sapien
tgtccttggaaagaccggggatgactcatttgt

SEQ ID NO: 606665 - DNA, 33 bp, Homo sapien
tgtagtacatttgattcaacaacgggaaacagc

SEQ ID NO: 606666 - DNA, 33 bp, Homo sapien
tgtagtacatttgatttaacaacgggaaacagc

SEQ ID NO: 606667 - DNA, 33 bp, Homo sapien
attcaatgatacagcaactcttgatacttgaga

SEQ ID NO: 606668 - DNA, 33 bp, Homo sapien
attcaatgatacagcagctcttgatacttgaga

SEQ ID NO: 606669 - DNA, 33 bp, Homo sapien
gcaagtggcagaacaacggacttttcccatttg

SEQ ID NO: 606670 - DNA, 33 bp, Homo sapien
gcaagtggcagaacaatggacttttcccatttg

SEQ ID NO: 606671 - DNA, 33 bp, Homo sapien
agaaacattcttggaaattatgaataagatatt

SEQ ID NO: 606672 - DNA, 33 bp, Homo sapien
agaaacattcttggaagttatgaataagatatt

SEQ ID NO: 606673 - DNA, 33 bp, Homo sapien
gaaagacaggtgtggcagcagttcctggtgaga

SEQ ID NO: 606674 - DNA, 33 bp, Homo sapien
gaaagacaggtgtggccgcagttcctggtgaga

SEQ ID NO: 606675 - DNA, 33 bp, Homo sapien
gcggcagtagaaataacgatgcatgagcttaaa

SEQ ID NO: 606676 - DNA, 33 bp, Homo sapien
gcggcagtagaaataatgatgcatgagcttaaa

SEQ ID NO: 606677 - DNA, 33 bp, Homo sapien
cgaggatgaaaacacacacggttctgaagatcc

SEQ ID NO: 606678 - DNA, 33 bp, Homo sapien
cgaggatgaaaacacagacggttctgaagatcc

SEQ ID NO: 606679 - DNA, 33 bp, Homo sapien
actttgtgtttaatcccggaagtcacaatttag

SEQ ID NO: 606680 - DNA, 33 bp, Homo sapien
actttgtgtttaatcctggaagtcacaatttag

SEQ ID NO: 606681 - DNA, 33 bp, Homo sapien
gagggctcacacttcccaatttacaaaaatgta

SEQ ID NO: 606682 - DNA, 33 bp, Homo sapien
gagggctcacacttcctaatttacaaaaatgta

SEQ ID NO: 606683 - DNA, 33 bp, Homo sapien
tatttaaatgcagtgccaagggtttcatttaac

SEQ ID NO: 606684 - DNA, 33 bp, Homo sapien
tatttaaatgcagtgctaagggtttcatttaac

SEQ ID NO: 606685 - DNA, 33 bp, Homo sapien
aatgcagaaggtgggaacgcaatatttagagct

SEQ ID NO: 606686 - DNA, 33 bp, Homo sapien
aatgcagaaggtgggagcgcaatatttagagct

SEQ ID NO: 606687 - DNA, 33 bp, Homo sapien
ctaggacactcaaatacgcaactgtgattacat

SEQ ID NO: 606688 - DNA, 33 bp, Homo sapien
ctaggacactcaaatatgcaactgtgattacat

SEQ ID NO: 606689 - DNA, 33 bp, Homo sapien
tacacccttcgaagccaggacagggaagagaaa

SEQ ID NO: 606690 - DNA, 33 bp, Homo sapien
tacacccttcgaagccgggacagggaagagaaa

SEQ ID NO: 606691 - DNA, 33 bp, Homo sapien
ttcctgtctgtttttgcaggttggtttccatat

SEQ ID NO: 606692 - DNA, 33 bp, Homo sapien
ttcctgtctgtttttgtaggttggtttccatat

SEQ ID NO: 606693 - DNA, 33 bp, Homo sapien
gggcagggccagttcaaggcggttcctcctttc

SEQ ID NO: 606694 - DNA, 33 bp, Homo sapien
gggcagggccagttcagggcggttcctcctttc

SEQ ID NO: 606695 - DNA, 33 bp, Homo sapien
agtgcaccaccagatacggagtgcttgtggtaa

SEQ ID NO: 606696 - DNA, 33 bp, Homo sapien
agtgcaccaccagatatggagtgcttgtggtaa

SEQ ID NO: 606697 - DNA, 33 bp, Homo sapien
caacttcattatttccacttgctcaggaattga

SEQ ID NO: 606698 - DNA, 33 bp, Homo sapien
caacttcattatttcctcttgctcaggaattga

SEQ ID NO: 606699 - DNA, 33 bp, Homo sapien
caagcgcaggccttaacgcacacttgctccaga

SEQ ID NO: 606700 - DNA, 33 bp, Homo sapien
caagcgcaggccttaatgcacacttgctccaga

SEQ ID NO: 606701 - DNA, 33 bp, Homo sapien
agcaaaaacaatacaaaatctagcactggtgga

SEQ ID NO: 606702 - DNA, 33 bp, Homo sapien
agcaaaaacaatacaacatctagcactggtgga

SEQ ID NO: 606703 - DNA, 33 bp, Homo sapien
cagtggggggccacaacggagccttggagtgtg

SEQ ID NO: 606704 - DNA, 33 bp, Homo sapien
cagtggggggccacaatggagccttggagtgtg

SEQ ID NO: 606705 - DNA, 33 bp, Homo sapien
aggtgagcaaggcagtaaaattacagagcaaaa

SEQ ID NO: 606706 - DNA, 33 bp, Homo sapien
aggtgagcaaggcagttaaattacagagcaaaa

SEQ ID NO: 606707 - DNA, 33 bp, Homo sapien
aggcttaagttcagaaaaagtttattgttgccc

SEQ ID NO: 606708 - DNA, 33 bp, Homo sapien
aggcttaagttcagaagaagtttattgttgccc

SEQ ID NO: 606709 - DNA, 33 bp, Homo sapien
tcctccaaaccctccaaaagcctcatgttagca

SEQ ID NO: 606710 - DNA, 33 bp, Homo sapien
tcctccaaaccctccagaagcctcatgttagca

SEQ ID NO: 606711 - DNA, 33 bp, Homo sapien
agccagtgcagtcagacgagccctgaagtgtgg

SEQ ID NO: 606712 - DNA, 33 bp, Homo sapien
agccagtgcagtcagaggagccctgaagtgtgg

SEQ ID NO: 606713 - DNA, 33 bp, Homo sapien
aggaaaacaggacaccactcagtctgagagtga

SEQ ID NO: 606714 - DNA, 33 bp, Homo sapien
aggaaaacaggacaccgctcagtctgagagtga

SEQ ID NO: 606715 - DNA, 33 bp, Homo sapien
agcttgaactgacctcactgtttccttttcaat

SEQ ID NO: 606716 - DNA, 33 bp, Homo sapien
agcttgaactgacctcgctgtttccttttcaat

SEQ ID NO: 606717 - DNA, 33 bp, Homo sapien
cctttgcttaagacggcatctatgtctgtaact

SEQ ID NO: 606718 - DNA, 33 bp, Homo sapien
cctttgcttaagacgggatctatgtctgtaact

SEQ ID NO: 606719 - DNA, 33 bp, Homo sapien
gggactgagactgaccagctttagtttagtcct

SEQ ID NO: 606720 - DNA, 33 bp, Homo sapien
gggactgagactgaccggctttagtttagtcct

SEQ ID NO: 606721 - DNA, 33 bp, Homo sapien
aagccctgtaaataaacgaaggcacttctttgg

SEQ ID NO: 606722 - DNA, 33 bp, Homo sapien
aagccctgtaaataaatgaaggcacttctttgg

SEQ ID NO: 606723 - DNA, 33 bp, Homo sapien; identical to SEQ ID NO: 606721

SEQ ID NO: 606724 - DNA, 33 bp, Homo sapien; identical to SEQ ID NO: 606722

SEQ ID NO: 606725 - DNA, 33 bp, Homo sapien
ctggctatctattccccgctcacacacccagct

SEQ ID NO: 606726 - DNA, 33 bp, Homo sapien
ctggctatctattccctgctcacacacccagct

SEQ ID NO: 606727 - DNA, 33 bp, Homo sapien
cccagaggaacccagcagaaccgttgcatcccc

SEQ ID NO: 606728 - DNA, 33 bp, Homo sapien
cccagaggaacccagcggaaccgttgcatcccc

SEQ ID NO: 606729 - DNA, 33 bp, Homo sapien
ctgcttagaccatccccgaggtaccctgcctca

SEQ ID NO: 606730 - DNA, 33 bp, Homo sapien
ctgcttagaccatccctgaggtaccctgcctca

SEQ ID NO: 606731 - DNA, 33 bp, Homo sapien
gcaaaaaatggaatgaaatgaagaaaaaggcta

SEQ ID NO: 606732 - DNA, 33 bp, Homo sapien
gcaaaaaatggaatgagatgaagaaaaaggcta

SEQ ID NO: 606733 - DNA, 33 bp, Homo sapien
tctctcggcaaggtgcgctttactttctgcaga

SEQ ID NO: 606734 - DNA, 33 bp, Homo sapien
tctctcggcaaggtgctctttactttctgcaga

SEQ ID NO: 606735 - DNA, 33 bp, Homo sapien
caatctggaggaagtcagacaaaggatccgttt

SEQ ID NO: 606736 - DNA, 33 bp, Homo sapien
caatctggaggaagtcggacaaaggatccgttt

SEQ ID NO: 606737 - DNA, 33 bp, Homo sapien
gccgagcttaggtccaatgaagaggatcagagg

SEQ ID NO: 606738 - DNA, 33 bp, Homo sapien
gccgagcttaggtccagtgaagaggatcagagg

SEQ ID NO: 606739 - DNA, 33 bp, Homo sapien
atgaacgtcatagaaacggaattacagcatgct

SEQ ID NO: 606740 - DNA, 33 bp, Homo sapien
atgaacgtcatagaaatggaattacagcatgct

SEQ ID NO: 606741 - DNA, 33 bp, Homo sapien
caagcccttcctcaatcacatccttccgttgag

SEQ ID NO: 606742 - DNA, 33 bp, Homo sapien
caagcccttcctcaattacatccttccgttgag

SEQ ID NO: 606743 - DNA, 33 bp, Homo sapien
ctgttctgagcacagacggtagtcaaaatctca

SEQ ID NO: 606744 - DNA, 33 bp, Homo sapien
ctgttctgagcacagagggtagtcaaaatctca

SEQ ID NO: 606745 - DNA, 33 bp, Homo sapien
cttaatttttaattccccatgcctgctgacagg

SEQ ID NO: 606746 - DNA, 33 bp, Homo sapien
cttaatttttaattcctcatgcctgctgacagg

SEQ ID NO: 606747 - DNA, 33 bp, Homo sapien
acctttatgcttcaacgcattattttcttacca

SEQ ID NO: 606748 - DNA, 33 bp, Homo sapien
acctttatgcttcaactcattattttcttacca

SEQ ID NO: 606749 - DNA, 33 bp, Homo sapien
tcttgcagcgctgcagaaaggatggccacgttc

SEQ ID NO: 606750 - DNA, 33 bp, Homo sapien
tcttgcagcgctgcaggaaggatggccacgttc

SEQ ID NO: 606751 - DNA, 33 bp, Homo sapien
atgcctgtatctatgcccgtggacgttggagta

SEQ ID NO: 606752 - DNA, 33 bp, Homo sapien
atgcctgtatctatgcgcgtggacgttggagta

SEQ ID NO: 606753 - DNA, 33 bp, Homo sapien
ggaaggaggtttcagccgagcaatgtcccagaa

SEQ ID NO: 606754 - DNA, 33 bp, Homo sapien
ggaaggaggtttcagctgagcaatgtcccagaa

SEQ ID NO: 606755 - DNA, 33 bp, Homo sapien
agccagagtccagagaccttacacggaaagcac

SEQ ID NO: 606756 - DNA, 33 bp, Homo sapien
agccagagtccagagatcttacacggaaagcac

SEQ ID NO: 606757 - DNA, 33 bp, Homo sapien
gtctggatcccgattcactttctgaaggagaca

SEQ ID NO: 606758 - DNA, 33 bp, Homo sapien
gtctggatcccgattcgctttctgaaggagaca

SEQ ID NO: 606759 - DNA, 33 bp, Homo sapien
ggcctgtcgattgcacaactgaactttctcctc

SEQ ID NO: 606760 - DNA, 33 bp, Homo sapien
ggcctgtcgattgcaccactgaactttctcctc

SEQ ID NO: 606761 - DNA, 33 bp, Homo sapien
gcacctccctcgcagggacaaggccgctcaaga

SEQ ID NO: 606762 - DNA, 33 bp, Homo sapien
gcacctccctcgcaggtacaaggccgctcaaga

SEQ ID NO: 606763 - DNA, 33 bp, Homo sapien
catctgaagctccaaaaaattttcagcctttgt

SEQ ID NO: 606764 - DNA, 33 bp, Homo sapien
catctgaagctccaaacaattttcagcctttgt

SEQ ID NO: 606765 - DNA, 33 bp, Homo sapien
atcctgaaaatccaagcccaggttgacctttgg

SEQ ID NO: 606766 - DNA, 33 bp, Homo sapien
atcctgaaaatccaagtccaggttgacctttgg

SEQ ID NO: 606767 - DNA, 33 bp, Homo sapien
gatctcagcggagtaagacacccggcatcggtc

SEQ ID NO: 606768 - DNA, 33 bp, Homo sapien
gatctcagcggagtaatacacccggcatcggtc

SEQ ID NO: 606769 - DNA, 33 bp, Homo sapien
cctggcccagtttccaatctgtaagcttcagat

SEQ ID NO: 606770 - DNA, 33 bp, Homo sapien
cctggcccagtttccagtctgtaagcttcagat

SEQ ID NO: 606771 - DNA, 33 bp, Homo sapien
gggttctgattctctgaagaacactcgtgaaga

SEQ ID NO: 606772 - DNA, 33 bp, Homo sapien
gggttctgattctctggagaacactcgtgaaga

SEQ ID NO: 606773 - DNA, 33 bp, Homo sapien
tcaccgtgtctgagaaaaggatggtttgcagag

SEQ ID NO: 606774 - DNA, 33 bp, Homo sapien
tcaccgtgtctgagaagaggatggtttgcagag

SEQ ID NO: 606775 - DNA, 33 bp, Homo sapien
ctacactgaacaaatacgtcgactgatgagtaa

SEQ ID NO: 606776 - DNA, 33 bp, Homo sapien
ctacactgaacaaatatgtcgactgatgagtaa

SEQ ID NO: 606777 - DNA, 33 bp, Homo sapien
tgttatttagttcggcactcactgtgtccccag

SEQ ID NO: 606778 - DNA, 33 bp, Homo sapien
tgttatttagttcggcgctcactgtgtccccag

SEQ ID NO: 606779 - DNA, 33 bp, Homo sapien
agccctcatggtcatcactgtcatttgaagagc

SEQ ID NO: 606780 - DNA, 33 bp, Homo sapien
agccctcatggtcatcgctgtcatttgaagagc

SEQ ID NO: 606781 - DNA, 33 bp, Homo sapien
ggggggaggtcttggcacgagaaagacacttgc

SEQ ID NO: 606782 - DNA, 33 bp, Homo sapien
ggggggaggtcttggcgcgagaaagacacttgc

SEQ ID NO: 606783 - DNA, 33 bp, Homo sapien
gcggctccactggaaccggaaggattgcgtggg

SEQ ID NO: 606784 - DNA, 33 bp, Homo sapien
gcggctccactggaacgggaaggattgcgtggg

SEQ ID NO: 606785 - DNA, 33 bp, Homo sapien
atatacgcgtatttataaaaccactaacacaag

SEQ ID NO: 606786 - DNA, 33 bp, Homo sapien
atatacgcgtatttatgaaaccactaacacaag

SEQ ID NO: 606787 - DNA, 33 bp, Homo sapien
ccgaggctggattcctaaaactttgacctgcct

SEQ ID NO: 606788 - DNA, 33 bp, Homo sapien
ccgaggctggattcctgaaactttgacctgcct

SEQ ID NO: 606789 - DNA, 33 bp, Homo sapien
tttttgtccacttgaaacttgtctagtgctttt

SEQ ID NO: 606790 - DNA, 33 bp, Homo sapien
tttttgtccacttgaagcttgtctagtgctttt

SEQ ID NO: 606791 - DNA, 33 bp, Homo sapien
aaggtcgagccttcgaataccggagagtctaca

SEQ ID NO: 606792 - DNA, 33 bp, Homo sapien
aaggtcgagccttcgagtaccggagagtctaca

SEQ ID NO: 606793 - DNA, 33 bp, Homo sapien
cgccagcctggtgcgaaaggtcagggactaggc

SEQ ID NO: 606794 - DNA, 33 bp, Homo sapien
cgccagcctggtgcgagaggtcagggactaggc

SEQ ID NO: 606795 - DNA, 33 bp, Homo sapien
cccatagtacatctgacacaagcactacaagga

SEQ ID NO: 606796 - DNA, 33 bp, Homo sapien
cccatagtacatctgagacaagcactacaagga

SEQ ID NO: 606797 - DNA, 33 bp, Homo sapien
ggagcaaatcaccctgacacaaaagtagttcta

SEQ ID NO: 606798 - DNA, 33 bp, Homo sapien
ggagcaaatcaccctgtcacaaaagtagttcta

SEQ ID NO: 606799 - DNA, 33 bp, Homo sapien
agcagggctctctgctaaacttgcctctccatg

SEQ ID NO: 606800 - DNA, 33 bp, Homo sapien
agcagggctctctgctgaacttgcctctccatg

SEQ ID NO: 606801 - DNA, 33 bp, Homo sapien
agttggcccctgttccgacacagtccaaatcca

SEQ ID NO: 606802 - DNA, 33 bp, Homo sapien
agttggcccctgttcctacacagtccaaatcca

SEQ ID NO: 606803 - DNA, 33 bp, Homo sapien
atctaggcctgccgggaaccaacagctggcggt

SEQ ID NO: 606804 - DNA, 33 bp, Homo sapien
atctaggcctgccgggcaccaacagctggcggt

SEQ ID NO: 606805 - DNA, 33 bp, Homo sapien
ggacccctacttagcacgtgatcccctgtccag

SEQ ID NO: 606806 - DNA, 33 bp, Homo sapien
ggacccctacttagcatgtgatcccctgtccag

SEQ ID NO: 606807 - DNA, 33 bp, Homo sapien
ctggggctgacgtgcacgtgctcaagttgacac

SEQ ID NO: 606808 - DNA, 33 bp, Homo sapien
ctggggctgacgtgcatgtgctcaagttgacac

SEQ ID NO: 606809 - DNA, 33 bp, Homo sapien
taccaggtatccttgaacgtgagcgtccttggc

SEQ ID NO: 606810 - DNA, 33 bp, Homo sapien
taccaggtatccttgagcgtgagcgtccttggc

SEQ ID NO: 606811 - DNA, 33 bp, Homo sapien
ttttccactgtttctcagaattccttatcggct

SEQ ID NO: 606812 - DNA, 33 bp, Homo sapien
ttttccactgtttctccgaattccttatcggct

SEQ ID NO: 606813 - DNA, 33 bp, Homo sapien
cacctggcatctggcacgatcaacgttgtgtgg

SEQ ID NO: 606814 - DNA, 33 bp, Homo sapien
cacctggcatctggcatgatcaacgttgtgtgg

SEQ ID NO: 606815 - DNA, 33 bp, Homo sapien
cgagtcagctggagtactaatgcctgcgttgac

SEQ ID NO: 606816 - DNA, 33 bp, Homo sapien
cgagtcagctggagtagtaatgcctgcgttgac

SEQ ID NO: 606817 - DNA, 33 bp, Homo sapien
gccagtgtacaatttccgaaaactagctctctt

SEQ ID NO: 606818 - DNA, 33 bp, Homo sapien
gccagtgtacaatttctgaaaactagctctctt

SEQ ID NO: 606819 - DNA, 33 bp, Homo sapien
agaatgataggaacacacctagttaaccttgtc

SEQ ID NO: 606820 - DNA, 33 bp, Homo sapien
agaatgataggaacacgcctagttaaccttgtc

SEQ ID NO: 606821 - DNA, 33 bp, Homo sapien
tgaagaccctgcagaaaagccggcaccaccagg

SEQ ID NO: 606822 - DNA, 33 bp, Homo sapien
tgaagaccctgcagaagagccggcaccaccagg

SEQ ID NO: 606823 - DNA, 33 bp, Homo sapien
atcagggcagtgcttacacctccagagtcaggg

SEQ ID NO: 606824 - DNA, 33 bp, Homo sapien
atcagggcagtgcttatacctccagagtcaggg

SEQ ID NO: 606825 - DNA, 33 bp, Homo sapien
ctgctggatcccgagaagagagaaagaagccca

SEQ ID NO: 606826 - DNA, 33 bp, Homo sapien
ctgctggatcccgagatgagagaaagaagccca

SEQ ID NO: 606827 - DNA, 33 bp, Homo sapien
ctctttgccactcaaacaggtataaccatgata

SEQ ID NO: 606828 - DNA, 33 bp, Homo sapien
ctctttgccactcaaataggtataaccatgata

SEQ ID NO: 606829 - DNA, 33 bp, Homo sapien
ctggtcctggataatcaattccacagcactcag

SEQ ID NO: 606830 - DNA, 33 bp, Homo sapien
ctggtcctggataatcgattccacagcactcag

SEQ ID NO: 606831 - DNA, 33 bp, Homo sapien
ggaagctgtgattaacaacgggtgacgtgcaaa

SEQ ID NO: 606832 - DNA, 33 bp, Homo sapien
ggaagctgtgattaactacgggtgacgtgcaaa

SEQ ID NO: 606833 - DNA, 33 bp, Homo sapien
tgtctcctggtttccactgaggatagtgataca

SEQ ID NO: 606834 - DNA, 33 bp, Homo sapien
tgtctcctggtttccattgaggatagtgataca

SEQ ID NO: 606835 - DNA, 33 bp, Homo sapien
tcctatgtttgaggtacgggattatgctctctt

SEQ ID NO: 606836 - DNA, 33 bp, Homo sapien
tcctatgtttgaggtatgggattatgctctctt

SEQ ID NO: 606837 - DNA, 33 bp, Homo sapien
caccatccttcataacagaagaggggcctgcag

SEQ ID NO: 606838 - DNA, 33 bp, Homo sapien
caccatccttcataacggaagaggggcctgcag

SEQ ID NO: 606839 - DNA, 33 bp, Homo sapien
cctcaccagttctgcaaggtaggattcattgct

SEQ ID NO: 606840 - DNA, 33 bp, Homo sapien
cctcaccagttctgcatggtaggattcattgct

SEQ ID NO: 606841 - DNA, 33 bp, Homo sapien
acatcctcctccccacaagtttctcccaacagc

SEQ ID NO: 606842 - DNA, 33 bp, Homo sapien
acatcctcctccccacgagtttctcccaacagc

SEQ ID NO: 606843 - DNA, 33 bp, Homo sapien
ggcagacaaacttcccagaaaataacaacaatt

SEQ ID NO: 606844 - DNA, 33 bp, Homo sapien
ggcagacaaacttcccggaaaataacaacaatt

SEQ ID NO: 606845 - DNA, 33 bp, Homo sapien
acaaatagcaatgacaagaagaagaattagtag

SEQ ID NO: 606846 - DNA, 33 bp, Homo sapien
acaaatagcaatgacaggaagaagaattagtag

SEQ ID NO: 606847 - DNA, 33 bp, Homo sapien
taagaagaagaagaacgaaagaaaagcgcccag

SEQ ID NO: 606848 - DNA, 33 bp, Homo sapien
taagaagaagaagaactaaagaaaagcgcccag

SEQ ID NO: 606849 - DNA, 33 bp, Homo sapien
aggtttgatggaagacggaactggctaattcat

SEQ ID NO: 606850 - DNA, 33 bp, Homo sapien
aggtttgatggaagactgaactggctaattcat

SEQ ID NO: 606851 - DNA, 33 bp, Homo sapien
atgcccacagattgccaaaagttccttccagtc

SEQ ID NO: 606852 - DNA, 33 bp, Homo sapien
atgcccacagattgcctaaagttccttccagtc

SEQ ID NO: 606853 - DNA, 33 bp, Homo sapien
ggtgatggcctggagtcacatggcagggaatgc

SEQ ID NO: 606854 - DNA, 33 bp, Homo sapien
ggtgatggcctggagttacatggcagggaatgc

SEQ ID NO: 606855 - DNA, 33 bp, Homo sapien
ggaatatggtagatgcccaataaatgtgtaccc

SEQ ID NO: 606856 - DNA, 33 bp, Homo sapien
ggaatatggtagatgctcaataaatgtgtaccc

SEQ ID NO: 606857 - DNA, 33 bp, Homo sapien
gcatctcttttgcaaaaattcatctgctgctga

SEQ ID NO: 606858 - DNA, 33 bp, Homo sapien
gcatctcttttgcaaacattcatctgctgctga

SEQ ID NO: 606859 - DNA, 33 bp, Homo sapien
ctgaagtcagagaaagaagggttcccattaaat

SEQ ID NO: 606860 - DNA, 33 bp, Homo sapien
ctgaagtcagagaaagcagggttcccattaaat

SEQ ID NO: 606861 - DNA, 33 bp, Homo sapien
acagtaatgctggggaagaaatagttaaatcct

SEQ ID NO: 606862 - DNA, 33 bp, Homo sapien
acagtaatgctggggatgaaatagttaaatcct

SEQ ID NO: 606863 - DNA, 33 bp, Homo sapien
ctgccacttcccgacacgtgatttgttgccacc

SEQ ID NO: 606864 - DNA, 33 bp, Homo sapien
ctgccacttcccgacatgtgatttgttgccacc

SEQ ID NO: 606865 - DNA, 33 bp, Homo sapien
ctgcttccagtttctcaaacattccagtcttcc

SEQ ID NO: 606866 - DNA, 33 bp, Homo sapien
ctgcttccagtttctcgaacattccagtcttcc

SEQ ID NO: 606867 - DNA, 33 bp, Homo sapien
caacgtgtagtggagaccgcactggatggagag

SEQ ID NO: 606868 - DNA, 33 bp, Homo sapien
caacgtgtagtggagatcgcactggatggagag

SEQ ID NO: 606869 - DNA, 33 bp, Homo sapien
ccaaacctccaggctacacccgcttcgtctgcg

SEQ ID NO: 606870 - DNA, 33 bp, Homo sapien
ccaaacctccaggctatacccgcttcgtctgcg

SEQ ID NO: 606871 - DNA, 33 bp, Homo sapien
tctccgcacccccaagaagaagagaggaggcca

SEQ ID NO: 606872 - DNA, 33 bp, Homo sapien
tctccgcacccccaagtagaagagaggaggcca

SEQ ID NO: 606873 - DNA, 33 bp, Homo sapien
tttttgtcatttttataaactatctccaactct

SEQ ID NO: 606874 - DNA, 33 bp, Homo sapien
tttttgtcatttttatgaactatctccaactct

SEQ ID NO: 606875 - DNA, 33 bp, Homo sapien
atggttggatcaatgaacaaaaaacttctttca

SEQ ID NO: 606876 - DNA, 33 bp, Homo sapien
atggttggatcaatgagcaaaaaacttctttca

SEQ ID NO: 606877 - DNA, 33 bp, Homo sapien
tctttctcaaacctgtaaagcagtctgaggtgg

SEQ ID NO: 606878 - DNA, 33 bp, Homo sapien
tctttctcaaacctgtgaagcagtctgaggtgg

SEQ ID NO: 606879 - DNA, 33 bp, Homo sapien
tctgcctgttctgaagaaaacttctgtctcgcc

SEQ ID NO: 606880 - DNA, 33 bp, Homo sapien
tctgcctgttctgaagcaaacttctgtctcgcc

SEQ ID NO: 606881 - DNA, 33 bp, Homo sapien
gttcggtctcagtaaacgccactcgcccctgcc

SEQ ID NO: 606882 - DNA, 33 bp, Homo sapien
gttcggtctcagtaaatgccactcgcccctgcc

SEQ ID NO: 606883 - DNA, 33 bp, Homo sapien
agacccgcattcggccaactgccccgtgtattg

SEQ ID NO: 606884 - DNA, 33 bp, Homo sapien
agacccgcattcggccgactgccccgtgtattg

SEQ ID NO: 606885 - DNA, 33 bp, Homo sapien
acttcgcatagtttcacgccaaggccacacatg

SEQ ID NO: 606886 - DNA, 33 bp, Homo sapien
acttcgcatagtttcatgccaaggccacacatg

SEQ ID NO: 606887 - DNA, 33 bp, Homo sapien
tgggaaataaaatgtcacgtggaggccttaaaa

SEQ ID NO: 606888 - DNA, 33 bp, Homo sapien
tgggaaataaaatgtcccgtggaggccttaaaa

SEQ ID NO: 606889 - DNA, 33 bp, Homo sapien
gtgggactcaaacccaacgcttcacacacatca

SEQ ID NO: 606890 - DNA, 33 bp, Homo sapien
gtgggactcaaacccagcgcttcacacacatca

SEQ ID NO: 606891 - DNA, 33 bp, Homo sapien
gggaggcaaaggtgatcaacctcctgtctgctc

SEQ ID NO: 606892 - DNA, 33 bp, Homo sapien
gggaggcaaaggtgattaacctcctgtctgctc

SEQ ID NO: 606893 - DNA, 33 bp, Homo sapien
cagtggaagcagactgcaggcaaacgacacctg

SEQ ID NO: 606894 - DNA, 33 bp, Homo sapien
cagtggaagcagactgtaggcaaacgacacctg

SEQ ID NO: 606895 - DNA, 33 bp, Homo sapien
gtaatgtaaaatgttgaataaacaagatgtaac

SEQ ID NO: 606896 - DNA, 33 bp, Homo sapien
gtaatgtaaaatgttgcataaacaagatgtaac

SEQ ID NO: 606897 - DNA, 33 bp, Homo sapien
agcaccatcaatccgcaaaactttggcctccca

SEQ ID NO: 606898 - DNA, 33 bp, Homo sapien
agcaccatcaatccgcgaaactttggcctccca

SEQ ID NO: 606899 - DNA, 33 bp, Homo sapien
caggaaactcgccttcaaccaagaaggtcccca

SEQ ID NO: 606900 - DNA, 33 bp, Homo sapien
caggaaactcgccttcgaccaagaaggtcccca

SEQ ID NO: 606901 - DNA, 33 bp, Homo sapien
tgctgatgcattttgaatatctttaggattcaa

SEQ ID NO: 606902 - DNA, 33 bp, Homo sapien
tgctgatgcattttgagtatctttaggattcaa

SEQ ID NO: 606903 - DNA, 33 bp, Homo sapien
ttctttaccatattcactgaaaatacgtagaca

SEQ ID NO: 606904 - DNA, 33 bp, Homo sapien
ttctttaccatattcattgaaaatacgtagaca

SEQ ID NO: 606905 - DNA, 33 bp, Homo sapien
gagtttgtgaaattcgaagtaaaatatgtgcaa

SEQ ID NO: 606906 - DNA, 33 bp, Homo sapien
gagtttgtgaaattcggagtaaaatatgtgcaa

SEQ ID NO: 606907 - DNA, 33 bp, Homo sapien
ctatttctgtcatctccaaagttgtaatacttc

SEQ ID NO: 606908 - DNA, 33 bp, Homo sapien
ctatttctgtcatctctaaagttgtaatacttc

SEQ ID NO: 606909 - DNA, 33 bp, Homo sapien
tcagagggcgtcttgaccagagttgcattatta

SEQ ID NO: 606910 - DNA, 33 bp, Homo sapien
tcagagggcgtcttgagcagagttgcattatta

SEQ ID NO: 606911 - DNA, 33 bp, Homo sapien
taaattgggcattaatcatcttgcaaactttct

SEQ ID NO: 606912 - DNA, 33 bp, Homo sapien
taaattgggcattaattatcttgcaaactttct

SEQ ID NO: 606913 - DNA, 33 bp, Homo sapien
atacaagaaatatgcactcagtgtagaacaacc

SEQ ID NO: 606914 - DNA, 33 bp, Homo sapien
atacaagaaatatgcattcagtgtagaacaacc

SEQ ID NO: 606915 - DNA, 33 bp, Homo sapien
tcagggtctctagtcacggattccctgggaacc

SEQ ID NO: 606916 - DNA, 33 bp, Homo sapien
tcagggtctctagtcatggattccctgggaacc

SEQ ID NO: 606917 - DNA, 33 bp, Homo sapien
tcagatcatcttgtaccggcctctatgtttgaa

SEQ ID NO: 606918 - DNA, 33 bp, Homo sapien
tcagatcatcttgtactggcctctatgtttgaa

SEQ ID NO: 606919 - DNA, 33 bp, Homo sapien
tcaacacactttcttcacaacccatcggcaaac

SEQ ID NO: 606920 - DNA, 33 bp, Homo sapien
tcaacacactttcttcccaacccatcggcaaac

SEQ ID NO: 606921 - DNA, 33 bp, Homo sapien
tgccctattgccaagaaccacgtccagactgca

SEQ ID NO: 606922 - DNA, 33 bp, Homo sapien
tgccctattgccaagagccacgtccagactgca

SEQ ID NO: 606923 - DNA, 33 bp, Homo sapien
tttctcatcagtaaagaacaaagttgaacctga

SEQ ID NO: 606924 - DNA, 33 bp, Homo sapien
tttctcatcagtaaaggacaaagttgaacctga

SEQ ID NO: 606925 - DNA, 33 bp, Homo sapien
gtctcctctgaagttgaagtaggcacgacttgt

SEQ ID NO: 606926 - DNA, 33 bp, Homo sapien
gtctcctctgaagttggagtaggcacgacttgt

SEQ ID NO: 606927 - DNA, 33 bp, Homo sapien
gagtgaagtgtgttaacgtcttccatccgattg

SEQ ID NO: 606928 - DNA, 33 bp, Homo sapien
gagtgaagtgtgttaaggtcttccatccgattg

SEQ ID NO: 606929 - DNA, 33 bp, Homo sapien
tgtagcctgaaagcaacaggttataccacatag

SEQ ID NO: 606930 - DNA, 33 bp, Homo sapien
tgtagcctgaaagcaataggttataccacatag

SEQ ID NO: 606931 - DNA, 33 bp, Homo sapien
tccagaggtggtactaagaacaacagtgagctg

SEQ ID NO: 606932 - DNA, 33 bp, Homo sapien
tccagaggtggtactaggaacaacagtgagctg

SEQ ID NO: 606933 - DNA, 33 bp, Homo sapien
gagggtgcctgttgtacacttagcatggcacca

SEQ ID NO: 606934 - DNA, 33 bp, Homo sapien
gagggtgcctgttgtatacttagcatggcacca

SEQ ID NO: 606935 - DNA, 33 bp, Homo sapien
actccagaattacacccggtaagcctctactac

SEQ ID NO: 606936 - DNA, 33 bp, Homo sapien
actccagaattacacctggtaagcctctactac

SEQ ID NO: 606937 - DNA, 33 bp, Homo sapien
gactgagaacaggaaggatgtaggcggagcggc

SEQ ID NO: 606938 - DNA, 33 bp, Homo sapien
gactgagaacaggaagtatgtaggcggagcggc

SEQ ID NO: 606939 - DNA, 33 bp, Homo sapien
cataaaagaatcgagtaaagaaggtaaatcaca

SEQ ID NO: 606940 - DNA, 33 bp, Homo sapien
cataaaagaatcgagtgaagaaggtaaatcaca

SEQ ID NO: 606941 - DNA, 33 bp, Homo sapien
ggcattaaagaattgagtatgactctcaaaagg

SEQ ID NO: 606942 - DNA, 33 bp, Homo sapien
ggcattaaagaattgattatgactctcaaaagg

SEQ ID NO: 606943 - DNA, 33 bp, Homo sapien
tagtagagtgaggaacagaactacatgattatc

SEQ ID NO: 606944 - DNA, 33 bp, Homo sapien
tagtagagtgaggaacggaactacatgattatc

SEQ ID NO: 606945 - DNA, 33 bp, Homo sapien
tgttgattatcagtaacgctttcttcagtgacg

SEQ ID NO: 606946 - DNA, 33 bp, Homo sapien
tgttgattatcagtaatgctttcttcagtgacg

SEQ ID NO: 606947 - DNA, 33 bp, Homo sapien
ctcttgtagcatcaacgctagaaatgaatctca

SEQ ID NO: 606948 - DNA, 33 bp, Homo sapien
ctcttgtagcatcaactctagaaatgaatctca

SEQ ID NO: 606949 - DNA, 33 bp, Homo sapien
actcccaaacaaatctgagaatggttccgcagg

SEQ ID NO: 606950 - DNA, 33 bp, Homo sapien
actcccaaacaaatcttagaatggttccgcagg

SEQ ID NO: 606951 - DNA, 33 bp, Homo sapien
cttctttttctatagacggccagcactggcatg

SEQ ID NO: 606952 - DNA, 33 bp, Homo sapien
cttctttttctatagatggccagcactggcatg

SEQ ID NO: 606953 - DNA, 33 bp, Homo sapien
ttgctgccataacaaaatacacgagcctagtgg

SEQ ID NO: 606954 - DNA, 33 bp, Homo sapien
ttgctgccataacaaagtacacgagcctagtgg

SEQ ID NO: 606955 - DNA, 33 bp, Homo sapien
tacattggaggaaggcaagagtaggtacaagaa

SEQ ID NO: 606956 - DNA, 33 bp, Homo sapien
tacattggaggaaggctagagtaggtacaagaa

SEQ ID NO: 606957 - DNA, 33 bp, Homo sapien
tttaggaaatcgcctcactctttggggaaaata

SEQ ID NO: 606958 - DNA, 33 bp, Homo sapien
tttaggaaatcgcctcgctctttggggaaaata

SEQ ID NO: 606959 - DNA, 33 bp, Homo sapien
gggtaatccatgctaacaggagaactgtggggg

SEQ ID NO: 606960 - DNA, 33 bp, Homo sapien
gggtaatccatgctaagaggagaactgtggggg

SEQ ID NO: 606961 - DNA, 33 bp, Homo sapien
aatttcattttccaacgatttatggctattaat

SEQ ID NO: 606962 - DNA, 33 bp, Homo sapien
aatttcattttccaactatttatggctattaat

SEQ ID NO: 606963 - DNA, 33 bp, Homo sapien
ggcctctgctgttgaccggttggatacttggca

SEQ ID NO: 606964 - DNA, 33 bp, Homo sapien
ggcctctgctgttgactggttggatacttggca

SEQ ID NO: 606965 - DNA, 33 bp, Homo sapien
gatgctgaggctcggaaggattgactgcactgg

SEQ ID NO: 606966 - DNA, 33 bp, Homo sapien
gatgctgaggctcggagggattgactgcactgg

SEQ ID NO: 606967 - DNA, 33 bp, Homo sapien
aatcttatgcctaacaaaatgatttgagagtgc

SEQ ID NO: 606968 - DNA, 33 bp, Homo sapien
aatcttatgcctaacacaatgatttgagagtgc

SEQ ID NO: 606969 - DNA, 33 bp, Homo sapien
ttagatcattgtggtcagaaaaggtacgtggta

SEQ ID NO: 606970 - DNA, 33 bp, Homo sapien
ttagatcattgtggtcggaaaaggtacgtggta

SEQ ID NO: 606971 - DNA, 33 bp, Homo sapien
acatatacaaccttccaagactgaatcacgaag

SEQ ID NO: 606972 - DNA, 33 bp, Homo sapien
acatatacaaccttccgagactgaatcacgaag

SEQ ID NO: 606973 - DNA, 33 bp, Homo sapien
cttgttgattctccaacgagacctctgttgaaa

SEQ ID NO: 606974 - DNA, 33 bp, Homo sapien
cttgttgattctccaatgagacctctgttgaaa

SEQ ID NO: 606975 - DNA, 33 bp, Homo sapien
ttaaccatgagtcactcagccacatccttattt

SEQ ID NO: 606976 - DNA, 33 bp, Homo sapien
ttaaccatgagtcacttagccacatccttattt

SEQ ID NO: 606977 - DNA, 33 bp, Homo sapien
tccaaatctcactgcaagtggccaaaagtaacc

SEQ ID NO: 606978 - DNA, 33 bp, Homo sapien
tccaaatctcactgcaggtggccaaaagtaacc

SEQ ID NO: 606979 - DNA, 33 bp, Homo sapien
atgaaggcgcgctttcaagtaagcgagtgagga

SEQ ID NO: 606980 - DNA, 33 bp, Homo sapien
atgaaggcgcgctttcgagtaagcgagtgagga

SEQ ID NO: 606981 - DNA, 33 bp, Homo sapien
agtcttctttgtatccccaataaccacatggtg

SEQ ID NO: 606982 - DNA, 33 bp, Homo sapien
agtcttctttgtatcctcaataaccacatggtg

SEQ ID NO: 606983 - DNA, 33 bp, Homo sapien
cctcacaaaaaaaatacgttcttcactgaagac

SEQ ID NO: 606984 - DNA, 33 bp, Homo sapien
cctcacaaaaaaaatatgttcttcactgaagac

SEQ ID NO: 606985 - DNA, 33 bp, Homo sapien
gaagagaagaaacttaaatttgcagagctcaca

SEQ ID NO: 606986 - DNA, 33 bp, Homo sapien
gaagagaagaaacttacatttgcagagctcaca

SEQ ID NO: 606987 - DNA, 33 bp, Homo sapien
tccctacagcctctagaataaatgtcgaactgt

SEQ ID NO: 606988 - DNA, 33 bp, Homo sapien
tccctacagcctctaggataaatgtcgaactgt

SEQ ID NO: 606989 - DNA, 33 bp, Homo sapien
atggacgctaaaatgcagatataaaaatgttcc

SEQ ID NO: 606990 - DNA, 33 bp, Homo sapien
atggacgctaaaatgcggatataaaaatgttcc

SEQ ID NO: 606991 - DNA, 33 bp, Homo sapien
tccacactggaccgccacatcccagttaccgaa

SEQ ID NO: 606992 - DNA, 33 bp, Homo sapien
tccacactggaccgccgcatcccagttaccgaa

SEQ ID NO: 606993 - DNA, 33 bp, Homo sapien
cagagagggaaagcaaagtactagccaatgtgg

SEQ ID NO: 606994 - DNA, 33 bp, Homo sapien
cagagagggaaagcaatgtactagccaatgtgg

SEQ ID NO: 606995 - DNA, 33 bp, Homo sapien
ggacactcagtctcacacattacccggctctct

SEQ ID NO: 606996 - DNA, 33 bp, Homo sapien
ggacactcagtctcacgcattacccggctctct

SEQ ID NO: 606997 - DNA, 33 bp, Homo sapien
tcatatttgattagaaatgtatgtagatggctt

SEQ ID NO: 606998 - DNA, 33 bp, Homo sapien
tcatatttgattagaactgtatgtagatggctt

SEQ ID NO: 606999 - DNA, 33 bp, Homo sapien
tacataccccaacttcacattacacttttagtt

SEQ ID NO: 607000 - DNA, 33 bp, Homo sapien
tacataccccaacttcgcattacacttttagtt

SEQ ID NO: 607001 - DNA, 33 bp, Homo sapien
cccaccattcagggtaaaagtttccacgccatc

SEQ ID NO: 607002 - DNA, 33 bp, Homo sapien
cccaccattcagggtagaagtttccacgccatc

SEQ ID NO: 607003 - DNA, 33 bp, Homo sapien
tccttttgttgagttagagagcagtttttcaag

SEQ ID NO: 607004 - DNA, 33 bp, Homo sapien
tccttttgttgagttatagagcagtttttcaag

SEQ ID NO: 607005 - DNA, 33 bp, Homo sapien
aaacacttgagaaaaaccttcttgtctatactg

SEQ ID NO: 607006 - DNA, 33 bp, Homo sapien
aaacacttgagaaaaatcttcttgtctatactg

SEQ ID NO: 607007 - DNA, 33 bp, Homo sapien
cacacacttccatatacacattggccatttact

SEQ ID NO: 607008 - DNA, 33 bp, Homo sapien
cacacacttccatatatacattggccatttact

SEQ ID NO: 607009 - DNA, 33 bp, Homo sapien
atggaaatcgttataccatatcattgagacaag

SEQ ID NO: 607010 - DNA, 33 bp, Homo sapien
atggaaatcgttatactatatcattgagacaag

SEQ ID NO: 607011 - DNA, 33 bp, Homo sapien
cctacagacttactgacatgcaaaactgtgtgt

SEQ ID NO: 607012 - DNA, 33 bp, Homo sapien
cctacagacttactgatatgcaaaactgtgtgt

SEQ ID NO: 607013 - DNA, 33 bp, Homo sapien
gtgtgtgctgcaaagacggatactatgcggtcc

SEQ ID NO: 607014 - DNA, 33 bp, Homo sapien
gtgtgtgctgcaaagatggatactatgcggtcc

SEQ ID NO: 607015 - DNA, 33 bp, Homo sapien
gttccaggaaacgtctcacctccatgtgcagat

SEQ ID NO: 607016 - DNA, 33 bp, Homo sapien
gttccaggaaacgtcttacctccatgtgcagat

SEQ ID NO: 607017 - DNA, 33 bp, Homo sapien
tttccaaggggccaaacggtccatagcagttag

SEQ ID NO: 607018 - DNA, 33 bp, Homo sapien
tttccaaggggccaaatggtccatagcagttag

SEQ ID NO: 607019 - DNA, 33 bp, Homo sapien
gcccgtttaaacacacacctccataacaaacgg

SEQ ID NO: 607020 - DNA, 33 bp, Homo sapien
gcccgtttaaacacacgcctccataacaaacgg

SEQ ID NO: 607021 - DNA, 33 bp, Homo sapien
tccagttgatggctaagtgggctttcctggtgt

SEQ ID NO: 607022 - DNA, 33 bp, Homo sapien
tccagttgatggctaattgggctttcctggtgt

SEQ ID NO: 607023 - DNA, 33 bp, Homo sapien
ctcggcacggcagtacagaacgactcccagatg

SEQ ID NO: 607024 - DNA, 33 bp, Homo sapien
ctcggcacggcagtacggaacgactcccagatg

SEQ ID NO: 607025 - DNA, 33 bp, Homo sapien
ttgggccttttatggaaccctcattggctaggc

SEQ ID NO: 607026 - DNA, 33 bp, Homo sapien
ttgggccttttatggagccctcattggctaggc

SEQ ID NO: 607027 - DNA, 33 bp, Homo sapien
aaaggaaaaggtgaagaacgtctgttaaacgcc

SEQ ID NO: 607028 - DNA, 33 bp, Homo sapien
aaaggaaaaggtgaaggacgtctgttaaacgcc

SEQ ID NO: 607029 - DNA, 33 bp, Homo sapien
tcgacacagagcacgacgggaagctctaagagg

SEQ ID NO: 607030 - DNA, 33 bp, Homo sapien
tcgacacagagcacgatgggaagctctaagagg

SEQ ID NO: 607031 - DNA, 33 bp, Homo sapien
ctggggcccttaatgccgcacaccagagcctcc

SEQ ID NO: 607032 - DNA, 33 bp, Homo sapien
ctggggcccttaatgctgcacaccagagcctcc

SEQ ID NO: 607033 - DNA, 33 bp, Homo sapien
cacacccaaccactaaaggacaagagttggcac

SEQ ID NO: 607034 - DNA, 33 bp, Homo sapien
cacacccaaccactaagggacaagagttggcac

SEQ ID NO: 607035 - DNA, 33 bp, Homo sapien
ggatcccttgagagacaacatgaacacagccag

SEQ ID NO: 607036 - DNA, 33 bp, Homo sapien
ggatcccttgagagacgacatgaacacagccag

SEQ ID NO: 607037 - DNA, 33 bp, Homo sapien
ctttgttttatcctccccatcctcacaactttg

SEQ ID NO: 607038 - DNA, 33 bp, Homo sapien
ctttgttttatcctcctcatcctcacaactttg

SEQ ID NO: 607039 - DNA, 33 bp, Homo sapien
tcaacaggtcccaggaaagtctggctcatttca

SEQ ID NO: 607040 - DNA, 33 bp, Homo sapien
tcaacaggtcccaggagagtctggctcatttca

SEQ ID NO: 607041 - DNA, 33 bp, Homo sapien
actagggccacttccccctagatgcaggacact

SEQ ID NO: 607042 - DNA, 33 bp, Homo sapien
actagggccacttccctctagatgcaggacact

SEQ ID NO: 607043 - DNA, 33 bp, Homo sapien
aggtaaaatgtttccacgctggtaaaagccaag

SEQ ID NO: 607044 - DNA, 33 bp, Homo sapien
aggtaaaatgtttccatgctggtaaaagccaag

SEQ ID NO: 607045 - DNA, 33 bp, Homo sapien
gtaatctctgtggaccaatctgtggctaactgc

SEQ ID NO: 607046 - DNA, 33 bp, Homo sapien
gtaatctctgtggaccgatctgtggctaactgc

SEQ ID NO: 607047 - DNA, 33 bp, Homo sapien
gagagtccctactccaatcttcctcagaagaat

SEQ ID NO: 607048 - DNA, 33 bp, Homo sapien
gagagtccctactccagtcttcctcagaagaat

SEQ ID NO: 607049 - DNA, 33 bp, Homo sapien
aggaaatcccagggcacgtttacagaacaggaa

SEQ ID NO: 607050 - DNA, 33 bp, Homo sapien
aggaaatcccagggcatgtttacagaacaggaa

SEQ ID NO: 607051 - DNA, 33 bp, Homo sapien
agtagtgtagccaggaagatggaaggagtttac

SEQ ID NO: 607052 - DNA, 33 bp, Homo sapien
agtagtgtagccaggaggatggaaggagtttac

SEQ ID NO: 607053 - DNA, 33 bp, Homo sapien
caagatgagcctaaaacgtcttgttgagtcttg

SEQ ID NO: 607054 - DNA, 33 bp, Homo sapien
caagatgagcctaaaatgtcttgttgagtcttg

SEQ ID NO: 607055 - DNA, 33 bp, Homo sapien
acttctgacttacagaactgagtttgtggtaat

SEQ ID NO: 607056 - DNA, 33 bp, Homo sapien
acttctgacttacagagctgagtttgtggtaat

SEQ ID NO: 607057 - DNA, 33 bp, Homo sapien
agatctgctagattaaccttactgaagaagagc

SEQ ID NO: 607058 - DNA, 33 bp, Homo sapien
agatctgctagattaagcttactgaagaagagc

SEQ ID NO: 607059 - DNA, 33 bp, Homo sapien
gcacgctgggtgaccaaaactcccgacgcccct

SEQ ID NO: 607060 - DNA, 33 bp, Homo sapien
gcacgctgggtgaccacaactcccgacgcccct

SEQ ID NO: 607061 - DNA, 33 bp, Homo sapien
gacatctttgctagtcaagcttcttttcccctc

SEQ ID NO: 607062 - DNA, 33 bp, Homo sapien
gacatctttgctagtccagcttcttttcccctc

SEQ ID NO: 607063 - DNA, 33 bp, Homo sapien
tttccttcaattccccactttgaaacttcaaac

SEQ ID NO: 607064 - DNA, 33 bp, Homo sapien
tttccttcaattccccgctttgaaacttcaaac

SEQ ID NO: 607065 - DNA, 33 bp, Homo sapien
agaaaatctttgaaaccgccctctgacttggaa

SEQ ID NO: 607066 - DNA, 33 bp, Homo sapien
agaaaatctttgaaactgccctctgacttggaa

SEQ ID NO: 607067 - DNA, 33 bp, Homo sapien
aacccgagacaaggaacctcagctctcttagcc

SEQ ID NO: 607068 - DNA, 33 bp, Homo sapien
aacccgagacaaggaagctcagctctcttagcc

SEQ ID NO: 607069 - DNA, 33 bp, Homo sapien
ggtggcatttattacacgtgttatgggctcgga

SEQ ID NO: 607070 - DNA, 33 bp, Homo sapien
ggtggcatttattacatgtgttatgggctcgga

SEQ ID NO: 607071 - DNA, 33 bp, Homo sapien
actcctcagggacgtcgccaacccagtgatgct

SEQ ID NO: 607072 - DNA, 33 bp, Homo sapien
actcctcagggacgtctccaacccagtgatgct

SEQ ID NO: 607073 - DNA, 33 bp, Homo sapien
ctggacctgataggaagtcagaagtcaaggttt

SEQ ID NO: 607074 - DNA, 33 bp, Homo sapien
ctggacctgataggaattcagaagtcaaggttt

SEQ ID NO: 607075 - DNA, 33 bp, Homo sapien
ttgtctcacggacaacaatgagcgcagagctac

SEQ ID NO: 607076 - DNA, 33 bp, Homo sapien
ttgtctcacggacaacgatgagcgcagagctac

SEQ ID NO: 607077 - DNA, 33 bp, Homo sapien
ggagacggaggattacaaggattcacagatagc

SEQ ID NO: 607078 - DNA, 33 bp, Homo sapien
ggagacggaggattacgaggattcacagatagc

SEQ ID NO: 607079 - DNA, 33 bp, Homo sapien
ccccagccccggctgacggaaactgggatgctg

SEQ ID NO: 607080 - DNA, 33 bp, Homo sapien
ccccagccccggctgatggaaactgggatgctg

SEQ ID NO: 607081 - DNA, 33 bp, Homo sapien
tgcttaacctctctgaaccatagcatcctcccc

SEQ ID NO: 607082 - DNA, 33 bp, Homo sapien
tgcttaacctctctgagccatagcatcctcccc

SEQ ID NO: 607083 - DNA, 33 bp, Homo sapien
gagtctcacagccaaacacctgaatcctaagct

SEQ ID NO: 607084 - DNA, 33 bp, Homo sapien
gagtctcacagccaaatacctgaatcctaagct

SEQ ID NO: 607085 - DNA, 33 bp, Homo sapien
ctgataacagtcacggaagctaatgtgtactga

SEQ ID NO: 607086 - DNA, 33 bp, Homo sapien
ctgataacagtcacggcagctaatgtgtactga

SEQ ID NO: 607087 - DNA, 33 bp, Homo sapien
agcagggacatgttccggaggtttcggagaaaa

SEQ ID NO: 607088 - DNA, 33 bp, Homo sapien
agcagggacatgttcctgaggtttcggagaaaa

SEQ ID NO: 607089 - DNA, 33 bp, Homo sapien
ccctggagcaagctacagactagacgagggatc

SEQ ID NO: 607090 - DNA, 33 bp, Homo sapien
ccctggagcaagctacggactagacgagggatc

SEQ ID NO: 607091 - DNA, 33 bp, Homo sapien
aatttcatcagtccaaactacagggccccagcc

SEQ ID NO: 607092 - DNA, 33 bp, Homo sapien
aatttcatcagtccaagctacagggccccagcc

SEQ ID NO: 607093 - DNA, 33 bp, Homo sapien
tctgagcaaagctgctaaagtggggatagggag

SEQ ID NO: 607094 - DNA, 33 bp, Homo sapien
tctgagcaaagctgctgaagtggggatagggag

SEQ ID NO: 607095 - DNA, 33 bp, Homo sapien
ctgatgatgttttgacacatgaattcacttttc

SEQ ID NO: 607096 - DNA, 33 bp, Homo sapien
ctgatgatgttttgactcatgaattcacttttc

SEQ ID NO: 607097 - DNA, 33 bp, Homo sapien
aggggcattgtgaagtcaaatgtgatgaacaga

SEQ ID NO: 607098 - DNA, 33 bp, Homo sapien
aggggcattgtgaagttaaatgtgatgaacaga

SEQ ID NO: 607099 - DNA, 33 bp, Homo sapien
tttagagaaagcttccacaaacaaggttaaaca

SEQ ID NO: 607100 - DNA, 33 bp, Homo sapien
tttagagaaagcttccgcaaacaaggttaaaca

SEQ ID NO: 607101 - DNA, 33 bp, Homo sapien
tgtgcatcacaaagtggcaaaacaaaacaaagc

SEQ ID NO: 607102 - DNA, 33 bp, Homo sapien
tgtgcatcacaaagtgtcaaaacaaaacaaagc

SEQ ID NO: 607103 - DNA, 33 bp, Homo sapien
cgtggcagagggactcacattaggagcctccca

SEQ ID NO: 607104 - DNA, 33 bp, Homo sapien
cgtggcagagggactcgcattaggagcctccca

SEQ ID NO: 607105 - DNA, 33 bp, Homo sapien
gcaggctctgtccaaactgtagcaaaagctgcc

SEQ ID NO: 607106 - DNA, 33 bp, Homo sapien
gcaggctctgtccaaattgtagcaaaagctgcc

SEQ ID NO: 607107 - DNA, 33 bp, Homo sapien
tccgttaaccatcaagaacaggtctatttctgt

SEQ ID NO: 607108 - DNA, 33 bp, Homo sapien
tccgttaaccatcaaggacaggtctatttctgt

SEQ ID NO: 607109 - DNA, 33 bp, Homo sapien
ggccttacagaaaccactatcatcatctccatt

SEQ ID NO: 607110 - DNA, 33 bp, Homo sapien
ggccttacagaaaccattatcatcatctccatt

SEQ ID NO: 607111 - DNA, 33 bp, Homo sapien
ttcagttgttataaaccaacactaaccctcgcc

SEQ ID NO: 607112 - DNA, 33 bp, Homo sapien
ttcagttgttataaacgaacactaaccctcgcc

SEQ ID NO: 607113 - DNA, 33 bp, Homo sapien
gtcagaggcactcacaaaagcgacaaggtgggg

SEQ ID NO: 607114 - DNA, 33 bp, Homo sapien
gtcagaggcactcacagaagcgacaaggtgggg

SEQ ID NO: 607115 - DNA, 33 bp, Homo sapien
tcctgagagcccgtagaatggtacttggcacat

SEQ ID NO: 607116 - DNA, 33 bp, Homo sapien
tcctgagagcccgtagcatggtacttggcacat

SEQ ID NO: 607117 - DNA, 33 bp, Homo sapien
gcccaggcagggacgacctgtagaccgagaggc

SEQ ID NO: 607118 - DNA, 33 bp, Homo sapien
gcccaggcagggacgatctgtagaccgagaggc

SEQ ID NO: 607119 - DNA, 33 bp, Homo sapien
ggagggagtaaggggacagaagaaaagatgctt

SEQ ID NO: 607120 - DNA, 33 bp, Homo sapien
ggagggagtaaggggagagaagaaaagatgctt

SEQ ID NO: 607121 - DNA, 33 bp, Homo sapien
aacttgctcattagcaatagctgacggcacctt

SEQ ID NO: 607122 - DNA, 33 bp, Homo sapien
aacttgctcattagcagtagctgacggcacctt

SEQ ID NO: 607123 - DNA, 33 bp, Homo sapien
tcccctttgctcgttacgtactttctgtgaaca

SEQ ID NO: 607124 - DNA, 33 bp, Homo sapien
tcccctttgctcgttatgtactttctgtgaaca

SEQ ID NO: 607125 - DNA, 33 bp, Homo sapien
gctgaggctacaaagcaatcatttcttcaatat

SEQ ID NO: 607126 - DNA, 33 bp, Homo sapien
gctgaggctacaaagcgatcatttcttcaatat

SEQ ID NO: 607127 - DNA, 33 bp, Homo sapien
cctggtcctgactacccgaggcaccattggttg

SEQ ID NO: 607128 - DNA, 33 bp, Homo sapien
cctggtcctgactacctgaggcaccattggttg

SEQ ID NO: 607129 - DNA, 33 bp, Homo sapien
ggtagactccaggttcaagatggagataggaga

SEQ ID NO: 607130 - DNA, 33 bp, Homo sapien
ggtagactccaggttccagatggagataggaga

SEQ ID NO: 607131 - DNA, 33 bp, Homo sapien
cacacggaacgcgtaggaaacacatgtcagact

SEQ ID NO: 607132 - DNA, 33 bp, Homo sapien
cacacggaacgcgtagtaaacacatgtcagact

SEQ ID NO: 607133 - DNA, 33 bp, Homo sapien
ggaattagcacctaacacagaacttaccatgta

SEQ ID NO: 607134 - DNA, 33 bp, Homo sapien
ggaattagcacctaacgcagaacttaccatgta

SEQ ID NO: 607135 - DNA, 33 bp, Homo sapien
gatgaagggagcccagcatttttagcgcagtga

SEQ ID NO: 607136 - DNA, 33 bp, Homo sapien
gatgaagggagcccaggatttttagcgcagtga

SEQ ID NO: 607137 - DNA, 33 bp, Homo sapien
aagaagacaacttgaaaaggctacaaactgtat

SEQ ID NO: 607138 - DNA, 33 bp, Homo sapien
aagaagacaacttgaagaggctacaaactgtat

SEQ ID NO: 607139 - DNA, 33 bp, Homo sapien
cttctatcaacattcacgcgcaggttgttgtgg

SEQ ID NO: 607140 - DNA, 33 bp, Homo sapien
cttctatcaacattcatgcgcaggttgttgtgg

SEQ ID NO: 607141 - DNA, 33 bp, Homo sapien
agaggagagtaagacactgtataaatggtattt

SEQ ID NO: 607142 - DNA, 33 bp, Homo sapien
agaggagagtaagacagtgtataaatggtattt

SEQ ID NO: 607143 - DNA, 33 bp, Homo sapien
ccaacacgtacctgtcacctgtctgtactccca

SEQ ID NO: 607144 - DNA, 33 bp, Homo sapien
ccaacacgtacctgtcgcctgtctgtactccca

SEQ ID NO: 607145 - DNA, 33 bp, Homo sapien
caactttcctagagaccctggcctgcaaagtca

SEQ ID NO: 607146 - DNA, 33 bp, Homo sapien
caactttcctagagactctggcctgcaaagtca

SEQ ID NO: 607147 - DNA, 33 bp, Homo sapien
ttgaaaccgggttaagcctccaacagcaccacc

SEQ ID NO: 607148 - DNA, 33 bp, Homo sapien
ttgaaaccgggttaaggctccaacagcaccacc

SEQ ID NO: 607149 - DNA, 33 bp, Homo sapien
tctggcaagagtgtaaagagcagattccgctga

SEQ ID NO: 607150 - DNA, 33 bp, Homo sapien
tctggcaagagtgtaaggagcagattccgctga

SEQ ID NO: 607151 - DNA, 33 bp, Homo sapien
ctcagcttgggcaaggacacgggcgtcgtgaat

SEQ ID NO: 607152 - DNA, 33 bp, Homo sapien
ctcagcttgggcaagggcacgggcgtcgtgaat

SEQ ID NO: 607153 - DNA, 33 bp, Homo sapien
taggcccaccttgtcccaaatgggcagcattgg

SEQ ID NO: 607154 - DNA, 33 bp, Homo sapien
taggcccaccttgtcctaaatgggcagcattgg

SEQ ID NO: 607155 - DNA, 33 bp, Homo sapien
aggtcacattggttgccatatctgttatgagct

SEQ ID NO: 607156 - DNA, 33 bp, Homo sapien
aggtcacattggttgctatatctgttatgagct

SEQ ID NO: 607157 - DNA, 33 bp, Homo sapien
gtcaatacgtgatacccctggatgggataattt

SEQ ID NO: 607158 - DNA, 33 bp, Homo sapien
gtcaatacgtgatacctctggatgggataattt

SEQ ID NO: 607159 - DNA, 33 bp, Homo sapien
taaccagcagggaagacacagaaacatcgagca

SEQ ID NO: 607160 - DNA, 33 bp, Homo sapien
taaccagcagggaagatacagaaacatcgagca

SEQ ID NO: 607161 - DNA, 33 bp, Homo sapien
gaaataacaaggtctacgggaattatgaggcag

SEQ ID NO: 607162 - DNA, 33 bp, Homo sapien
gaaataacaaggtctatgggaattatgaggcag

SEQ ID NO: 607163 - DNA, 33 bp, Homo sapien
tgcctgtgcccccaggaatgcgtgtcttcccac

SEQ ID NO: 607164 - DNA, 33 bp, Homo sapien
tgcctgtgcccccagggatgcgtgtcttcccac

SEQ ID NO: 607165 - DNA, 33 bp, Homo sapien
atttaggagacgtgacaaacaccgaccaataca

SEQ ID NO: 607166 - DNA, 33 bp, Homo sapien
atttaggagacgtgaccaacaccgaccaataca

SEQ ID NO: 607167 - DNA, 33 bp, Homo sapien
aacgcatgggcggaacacacaatgagaaatgta

SEQ ID NO: 607168 - DNA, 33 bp, Homo sapien
aacgcatgggcggaacgcacaatgagaaatgta

SEQ ID NO: 607169 - DNA, 33 bp, Homo sapien
ggtgaatggatacacgaacagcagtaattgaca

SEQ ID NO: 607170 - DNA, 33 bp, Homo sapien
ggtgaatggatacacggacagcagtaattgaca

SEQ ID NO: 607171 - DNA, 33 bp, Homo sapien
aaatgtgttaaaaaaacatgatatggtagactg

SEQ ID NO: 607172 - DNA, 33 bp, Homo sapien
aaatgtgttaaaaaaagatgatatggtagactg

SEQ ID NO: 607173 - DNA, 33 bp, Homo sapien
ccgtaaaaatcctaccaccagctcgtggaaaag

SEQ ID NO: 607174 - DNA, 33 bp, Homo sapien
ccgtaaaaatcctaccgccagctcgtggaaaag

SEQ ID NO: 607175 - DNA, 33 bp, Homo sapien
gtgtaaccaatgaggcaaatgccgggaagcgct

SEQ ID NO: 607176 - DNA, 33 bp, Homo sapien
gtgtaaccaatgaggcgaatgccgggaagcgct

SEQ ID NO: 607177 - DNA, 33 bp, Homo sapien
acctgatgggacttaaatgggtaaatgtcatct

SEQ ID NO: 607178 - DNA, 33 bp, Homo sapien
acctgatgggacttaactgggtaaatgtcatct

SEQ ID NO: 607179 - DNA, 33 bp, Homo sapien
tccagatattaatgccgaatgtagttgggttac

SEQ ID NO: 607180 - DNA, 33 bp, Homo sapien
tccagatattaatgcctaatgtagttgggttac

SEQ ID NO: 607181 - DNA, 33 bp, Homo sapien
tggtggttttgatctacaaagttgccacaaacc

SEQ ID NO: 607182 - DNA, 33 bp, Homo sapien
tggtggttttgatctataaagttgccacaaacc

SEQ ID NO: 607183 - DNA, 33 bp, Homo sapien
tgcctacatgatgaagcctccgtaaaaatccct

SEQ ID NO: 607184 - DNA, 33 bp, Homo sapien
tgcctacatgatgaagtctccgtaaaaatccct

SEQ ID NO: 607185 - DNA, 33 bp, Homo sapien
gagaccacaggacacaccgcaagtgcttgtaaa

SEQ ID NO: 607186 - DNA, 33 bp, Homo sapien
gagaccacaggacacatcgcaagtgcttgtaaa

SEQ ID NO: 607187 - DNA, 33 bp, Homo sapien
cctcatcttactggccacctcctccaagaagcc

SEQ ID NO: 607188 - DNA, 33 bp, Homo sapien
cctcatcttactggccgcctcctccaagaagcc

SEQ ID NO: 607189 - DNA, 33 bp, Homo sapien
aaatccttagcataaccctacaccagcagtgga

SEQ ID NO: 607190 - DNA, 33 bp, Homo sapien
aaatccttagcataacgctacaccagcagtgga

SEQ ID NO: 607191 - DNA, 33 bp, Homo sapien
accaacttagtgccacagaagctcaactgtctc

SEQ ID NO: 607192 - DNA, 33 bp, Homo sapien
accaacttagtgccacggaagctcaactgtctc

SEQ ID NO: 607193 - DNA, 33 bp, Homo sapien
gggatgtttccagaaacgggctctctgaaggct

SEQ ID NO: 607194 - DNA, 33 bp, Homo sapien
gggatgtttccagaaatgggctctctgaaggct

SEQ ID NO: 607195 - DNA, 33 bp, Homo sapien
tcattataaccatccaaactcttcaaatgtatt

SEQ ID NO: 607196 - DNA, 33 bp, Homo sapien
tcattataaccatccagactcttcaaatgtatt

SEQ ID NO: 607197 - DNA, 33 bp, Homo sapien
atttcaaacagaagaacgttgatgaggaaagtc

SEQ ID NO: 607198 - DNA, 33 bp, Homo sapien
atttcaaacagaagaatgttgatgaggaaagtc

SEQ ID NO: 607199 - DNA, 33 bp, Homo sapien
agaataatagcaccaacgtgacaacctcaaagt

SEQ ID NO: 607200 - DNA, 33 bp, Homo sapien
agaataatagcaccaatgtgacaacctcaaagt

SEQ ID NO: 607201 - DNA, 33 bp, Homo sapien
ggaaagacaggactcccgccaaacacaattcca

SEQ ID NO: 607202 - DNA, 33 bp, Homo sapien
ggaaagacaggactcctgccaaacacaattcca

SEQ ID NO: 607203 - DNA, 33 bp, Homo sapien
attatgaaagtacctacggaaagacaggactcc

SEQ ID NO: 607204 - DNA, 33 bp, Homo sapien
attatgaaagtacctatggaaagacaggactcc

SEQ ID NO: 607205 - DNA, 33 bp, Homo sapien
cgatctacttcccctccccacggatttggcttt

SEQ ID NO: 607206 - DNA, 33 bp, Homo sapien
cgatctacttcccctctccacggatttggcttt

SEQ ID NO: 607207 - DNA, 33 bp, Homo sapien
gtagatcgaatcacacacttttaaaggatgaat

SEQ ID NO: 607208 - DNA, 33 bp, Homo sapien
gtagatcgaatcacacgcttttaaaggatgaat

SEQ ID NO: 607209 - DNA, 33 bp, Homo sapien
ttgccaggcaaagaaccgaagagcagagttcgc

SEQ ID NO: 607210 - DNA, 33 bp, Homo sapien
ttgccaggcaaagaacggaagagcagagttcgc

SEQ ID NO: 607211 - DNA, 33 bp, Homo sapien
ggagacagacagatcccgatgggaggatattct

SEQ ID NO: 607212 - DNA, 33 bp, Homo sapien
ggagacagacagatcctgatgggaggatattct

SEQ ID NO: 607213 - DNA, 33 bp, Homo sapien
tttttaatggaaatatcacatcatgtctgcaca

SEQ ID NO: 607214 - DNA, 33 bp, Homo sapien
tttttaatggaaatattacatcatgtctgcaca

SEQ ID NO: 607215 - DNA, 33 bp, Homo sapien
ggagtgttgcattcagcaagggtaaaggaggtg

SEQ ID NO: 607216 - DNA, 33 bp, Homo sapien
ggagtgttgcattcaggaagggtaaaggaggtg

SEQ ID NO: 607217 - DNA, 33 bp, Homo sapien
gtgagaggaggaaagaaaacagacttctggttt

SEQ ID NO: 607218 - DNA, 33 bp, Homo sapien
gtgagaggaggaaagagaacagacttctggttt

SEQ ID NO: 607219 - DNA, 33 bp, Homo sapien
tctctttctgtgctaggaagataggggtcctgg

SEQ ID NO: 607220 - DNA, 33 bp, Homo sapien
tctctttctgtgctagtaagataggggtcctgg

SEQ ID NO: 607221 - DNA, 33 bp, Homo sapien
ccagccctgcaggttgaacctcggaatgtgact

SEQ ID NO: 607222 - DNA, 33 bp, Homo sapien
ccagccctgcaggttggacctcggaatgtgact

SEQ ID NO: 607223 - DNA, 33 bp, Homo sapien
gagatgggaagcctgacgcgcccccgttgcacc

SEQ ID NO: 607224 - DNA, 33 bp, Homo sapien
gagatgggaagcctgatgcgcccccgttgcacc

SEQ ID NO: 607225 - DNA, 33 bp, Homo sapien
tgttgaacacctgtggaacctacttgctctcta

SEQ ID NO: 607226 - DNA, 33 bp, Homo sapien
tgttgaacacctgtgggacctacttgctctcta

SEQ ID NO: 607227 - DNA, 33 bp, Homo sapien
agcagcccaacaaaacacatcctgcaggggagt

SEQ ID NO: 607228 - DNA, 33 bp, Homo sapien
agcagcccaacaaaacgcatcctgcaggggagt

SEQ ID NO: 607229 - DNA, 33 bp, Homo sapien
ctcgataccaagaaaccgggtgcaaggccaggc

SEQ ID NO: 607230 - DNA, 33 bp, Homo sapien
ctcgataccaagaaactgggtgcaaggccaggc

SEQ ID NO: 607231 - DNA, 33 bp, Homo sapien
tggggccccgagctgacgtaggtaggcttggga

SEQ ID NO: 607232 - DNA, 33 bp, Homo sapien
tggggccccgagctgatgtaggtaggcttggga

SEQ ID NO: 607233 - DNA, 33 bp, Homo sapien
ttgactaggtgaacacaatgtctggaccttcct

SEQ ID NO: 607234 - DNA, 33 bp, Homo sapien
ttgactaggtgaacaccatgtctggaccttcct

SEQ ID NO: 607235 - DNA, 33 bp, Homo sapien
tgggaactcatttcccactgggccagcccacag

SEQ ID NO: 607236 - DNA, 33 bp, Homo sapien
tgggaactcatttcccgctgggccagcccacag

SEQ ID NO: 607237 - DNA, 33 bp, Homo sapien
gctgtgcttgagaaaacgcaaacaggctattag

SEQ ID NO: 607238 - DNA, 33 bp, Homo sapien
gctgtgcttgagaaaatgcaaacaggctattag

SEQ ID NO: 607239 - DNA, 33 bp, Homo sapien
gggctgtggcctgcaacgtgggagttatggagg

SEQ ID NO: 607240 - DNA, 33 bp, Homo sapien
gggctgtggcctgcaatgtgggagttatggagg

SEQ ID NO: 607241 - DNA, 33 bp, Homo sapien
gctctgtgtctacctgaagacctcagccctctg

SEQ ID NO: 607242 - DNA, 33 bp, Homo sapien
gctctgtgtctacctggagacctcagccctctg

SEQ ID NO: 607243 - DNA, 33 bp, Homo sapien
ggacatggccaccgtcacgggggaagtggttgg

SEQ ID NO: 607244 - DNA, 33 bp, Homo sapien
ggacatggccaccgtcgcgggggaagtggttgg

SEQ ID NO: 607245 - DNA, 33 bp, Homo sapien
cttttaactcaacctccctgctccctgggtgtc

SEQ ID NO: 607246 - DNA, 33 bp, Homo sapien
cttttaactcaacctcgctgctccctgggtgtc

SEQ ID NO: 607247 - DNA, 33 bp, Homo sapien
cctgcccgcccgctccacttctgttaagtgaat

SEQ ID NO: 607248 - DNA, 33 bp, Homo sapien
cctgcccgcccgctccgcttctgttaagtgaat

SEQ ID NO: 607249 - DNA, 33 bp, Homo sapien
tatcaattttggggtaagacgcattgtatttta

SEQ ID NO: 607250 - DNA, 33 bp, Homo sapien
tatcaattttggggtaggacgcattgtatttta

SEQ ID NO: 607251 - DNA, 33 bp, Homo sapien
tttcatgagccattaacgggtgtgcggaccccc

SEQ ID NO: 607252 - DNA, 33 bp, Homo sapien
tttcatgagccattaatgggtgtgcggaccccc

SEQ ID NO: 607253 - DNA, 33 bp, Homo sapien
ggaaacacgcaatgcaagggagatttcatgagc

SEQ ID NO: 607254 - DNA, 33 bp, Homo sapien
ggaaacacgcaatgcaggggagatttcatgagc

SEQ ID NO: 607255 - DNA, 33 bp, Homo sapien
atgtaagctggtggcgacagccagagaaatagc

SEQ ID NO: 607256 - DNA, 33 bp, Homo sapien
atgtaagctggtggcggcagccagagaaatagc

SEQ ID NO: 607257 - DNA, 33 bp, Homo sapien
gatgacagcacaggcacctggtgagtttcctgg

SEQ ID NO: 607258 - DNA, 33 bp, Homo sapien
gatgacagcacaggcatctggtgagtttcctgg

SEQ ID NO: 607259 - DNA, 33 bp, Homo sapien
aggtccctttagctgaccaccgtccatatcatc

SEQ ID NO: 607260 - DNA, 33 bp, Homo sapien
aggtccctttagctgatcaccgtccatatcatc

SEQ ID NO: 607261 - DNA, 33 bp, Homo sapien
gaaccaggaggacttcactggtggagctggcag

SEQ ID NO: 607262 - DNA, 33 bp, Homo sapien
gaaccaggaggacttcgctggtggagctggcag

SEQ ID NO: 607263 - DNA, 33 bp, Homo sapien
tcgtgccctgagaagaaattaaaggcttactca

SEQ ID NO: 607264 - DNA, 33 bp, Homo sapien
tcgtgccctgagaagatattaaaggcttactca

SEQ ID NO: 607265 - DNA, 33 bp, Homo sapien
gagctctgagaacttccagacagcctcgctgga

SEQ ID NO: 607266 - DNA, 33 bp, Homo sapien
gagctctgagaacttcgagacagcctcgctgga

SEQ ID NO: 607267 - DNA, 33 bp, Homo sapien
aattcagggtgaactcaattcctataggcttgg

SEQ ID NO: 607268 - DNA, 33 bp, Homo sapien
aattcagggtgaactcgattcctataggcttgg

SEQ ID NO: 607269 - DNA, 33 bp, Homo sapien
tcaaacccgcagaaaaattgcaggaatactaca

SEQ ID NO: 607270 - DNA, 33 bp, Homo sapien
tcaaacccgcagaaaagttgcaggaatactaca

SEQ ID NO: 607271 - DNA, 33 bp, Homo sapien
agtgtgtttaggtgaactgtcctttataaaacc

SEQ ID NO: 607272 - DNA, 33 bp, Homo sapien
agtgtgtttaggtgaagtgtcctttataaaacc

SEQ ID NO: 607273 - DNA, 33 bp, Homo sapien
cagataggcagggacacaaagagagtgaagagg

SEQ ID NO: 607274 - DNA, 33 bp, Homo sapien
cagataggcagggacagaaagagagtgaagagg

SEQ ID NO: 607275 - DNA, 33 bp, Homo sapien
acaaaattcagcacgcaacgacataaaaattta

SEQ ID NO: 607276 - DNA, 33 bp, Homo sapien
acaaaattcagcacgcgacgacataaaaattta

SEQ ID NO: 607277 - DNA, 33 bp, Homo sapien
tttttaaacatccaggccagttgtcctgtagaa

SEQ ID NO: 607278 - DNA, 33 bp, Homo sapien
tttttaaacatccaggtcagttgtcctgtagaa

SEQ ID NO: 607279 - DNA, 33 bp, Homo sapien
ctctccagatgagagaaggtgtggattacgatg

SEQ ID NO: 607280 - DNA, 33 bp, Homo sapien
ctctccagatgagagacggtgtggattacgatg

SEQ ID NO: 607281 - DNA, 33 bp, Homo sapien
ttcgtgagggaaatgaaggaaagcacgctgggg

SEQ ID NO: 607282 - DNA, 33 bp, Homo sapien
ttcgtgagggaaatgagggaaagcacgctgggg

SEQ ID NO: 607283 - DNA, 33 bp, Homo sapien
actgaggctgaaagaaattatgcagcttctcca

SEQ ID NO: 607284 - DNA, 33 bp, Homo sapien
actgaggctgaaagaagttatgcagcttctcca

SEQ ID NO: 607285 - DNA, 33 bp, Homo sapien
tagcaacttggtagaactgtgagtgatacatga

SEQ ID NO: 607286 - DNA, 33 bp, Homo sapien
tagcaacttggtagaattgtgagtgatacatga

SEQ ID NO: 607287 - DNA, 33 bp, Homo sapien
ttgtatctttgaagagactcaataggattatat

SEQ ID NO: 607288 - DNA, 33 bp, Homo sapien
ttgtatctttgaagagtctcaataggattatat

SEQ ID NO: 607289 - DNA, 33 bp, Homo sapien
gaaggaactggagacaatcacatggaagaagcc

SEQ ID NO: 607290 - DNA, 33 bp, Homo sapien
gaaggaactggagacagtcacatggaagaagcc

SEQ ID NO: 607291 - DNA, 33 bp, Homo sapien
agcacattcgtccacactgcccgtgggagatcc

SEQ ID NO: 607292 - DNA, 33 bp, Homo sapien
agcacattcgtccacattgcccgtgggagatcc

SEQ ID NO: 607293 - DNA, 33 bp, Homo sapien
tgcccacaatgaataactatctcacataaacac

SEQ ID NO: 607294 - DNA, 33 bp, Homo sapien
tgcccacaatgaataattatctcacataaacac

SEQ ID NO: 607295 - DNA, 33 bp, Homo sapien
tgaggttccagactccacactgtgctctcctgc

SEQ ID NO: 607296 - DNA, 33 bp, Homo sapien
tgaggttccagactccgcactgtgctctcctgc

SEQ ID NO: 607297 - DNA, 33 bp, Homo sapien
gttcgcattctcatcacgaatattatttgcagt

SEQ ID NO: 607298 - DNA, 33 bp, Homo sapien
gttcgcattctcatcatgaatattatttgcagt

SEQ ID NO: 607299 - DNA, 33 bp, Homo sapien
aggagcattcagaggaggactggccaggaggag

SEQ ID NO: 607300 - DNA, 33 bp, Homo sapien
aggagcattcagaggatgactggccaggaggag

SEQ ID NO: 607301 - DNA, 33 bp, Homo sapien
gaataagaaaaacatacgaacaaggcaaacagc

SEQ ID NO: 607302 - DNA, 33 bp, Homo sapien
gaataagaaaaacatatgaacaaggcaaacagc

SEQ ID NO: 607303 - DNA, 33 bp, Homo sapien
tccatagaaagaattacaggaagggttcaaaaa

SEQ ID NO: 607304 - DNA, 33 bp, Homo sapien
tccatagaaagaattagaggaagggttcaaaaa

SEQ ID NO: 607305 - DNA, 33 bp, Homo sapien
gttctgtgtctgatgacgctaacatccaaacct

SEQ ID NO: 607306 - DNA, 33 bp, Homo sapien
gttctgtgtctgatgatgctaacatccaaacct

SEQ ID NO: 607307 - DNA, 33 bp, Homo sapien
gccaaatgcggtcatcacaaaggaagatcagat

SEQ ID NO: 607308 - DNA, 33 bp, Homo sapien
gccaaatgcggtcatcgcaaaggaagatcagat

SEQ ID NO: 607309 - DNA, 33 bp, Homo sapien
aggaaaatacaaaccggagaacttcaagtgaaa

SEQ ID NO: 607310 - DNA, 33 bp, Homo sapien
aggaaaatacaaaccgtagaacttcaagtgaaa

SEQ ID NO: 607311 - DNA, 33 bp, Homo sapien
ttgttcagtgattaagactgccatactgtggaa

SEQ ID NO: 607312 - DNA, 33 bp, Homo sapien
ttgttcagtgattaagtctgccatactgtggaa

SEQ ID NO: 607313 - DNA, 33 bp, Homo sapien
gaagacagaatgtttcaaatgcagcttccctga

SEQ ID NO: 607314 - DNA, 33 bp, Homo sapien
gaagacagaatgtttcgaatgcagcttccctga

SEQ ID NO: 607315 - DNA, 33 bp, Homo sapien
aactgtgagagaagacactgctgttgatttagg

SEQ ID NO: 607316 - DNA, 33 bp, Homo sapien
aactgtgagagaagacgctgctgttgatttagg

SEQ ID NO: 607317 - DNA, 33 bp, Homo sapien
ctcttctctatgttgacctctccacgtggctac

SEQ ID NO: 607318 - DNA, 33 bp, Homo sapien
ctcttctctatgttgatctctccacgtggctac

SEQ ID NO: 607319 - DNA, 33 bp, Homo sapien
aaatcaacagccaagaaacgcttacaatagcct

SEQ ID NO: 607320 - DNA, 33 bp, Homo sapien
aaatcaacagccaagatacgcttacaatagcct

SEQ ID NO: 607321 - DNA, 33 bp, Homo sapien
agctttccatatttcaagtattgagacaagtaa

SEQ ID NO: 607322 - DNA, 33 bp, Homo sapien
agctttccatatttcaggtattgagacaagtaa

SEQ ID NO: 607323 - DNA, 33 bp, Homo sapien
aatgtgatagtattaaaagtcagggcccttagg

SEQ ID NO: 607324 - DNA, 33 bp, Homo sapien
aatgtgatagtattaagagtcagggcccttagg

SEQ ID NO: 607325 - DNA, 33 bp, Homo sapien
aagagcatatcttggtaaagaaatcaaagaaca

SEQ ID NO: 607326 - DNA, 33 bp, Homo sapien
aagagcatatcttggtgaagaaatcaaagaaca

SEQ ID NO: 607327 - DNA, 33 bp, Homo sapien
acaaacaacatgattaaaaaataagccaaagac

SEQ ID NO: 607328 - DNA, 33 bp, Homo sapien
acaaacaacatgattacaaaataagccaaagac

SEQ ID NO: 607329 - DNA, 33 bp, Homo sapien
tgtgcaggatcccacagtggtcagcgccaaccc

SEQ ID NO: 607330 - DNA, 33 bp, Homo sapien
tgtgcaggatcccacattggtcagcgccaaccc

SEQ ID NO: 607331 - DNA, 33 bp, Homo sapien
cctagaaaactcattcaatgacacgcgcttccc

SEQ ID NO: 607332 - DNA, 33 bp, Homo sapien
cctagaaaactcattcgatgacacgcgcttccc

SEQ ID NO: 607333 - DNA, 33 bp, Homo sapien
gaatcatggaagcaaactgcaggaattcttaat

SEQ ID NO: 607334 - DNA, 33 bp, Homo sapien
gaatcatggaagcaaattgcaggaattcttaat

SEQ ID NO: 607335 - DNA, 33 bp, Homo sapien
agagtgcagacatagacgtataatagtcaacct

SEQ ID NO: 607336 - DNA, 33 bp, Homo sapien
agagtgcagacatagaggtataatagtcaacct

SEQ ID NO: 607337 - DNA, 33 bp, Homo sapien
atgtcagaacaagtgtcaactgagactgtccca

SEQ ID NO: 607338 - DNA, 33 bp, Homo sapien
atgtcagaacaagtgttaactgagactgtccca

SEQ ID NO: 607339 - DNA, 33 bp, Homo sapien
atatggtcaccattgccataacaaactaaatat

SEQ ID NO: 607340 - DNA, 33 bp, Homo sapien
atatggtcaccattgctataacaaactaaatat

SEQ ID NO: 607341 - DNA, 33 bp, Homo sapien
gctaaaagagggttaaagtgattgtgtgtttta

SEQ ID NO: 607342 - DNA, 33 bp, Homo sapien
gctaaaagagggttaaggtgattgtgtgtttta

SEQ ID NO: 607343 - DNA, 33 bp, Homo sapien
agttacacaaattctacgctcattgctggcact

SEQ ID NO: 607344 - DNA, 33 bp, Homo sapien
agttacacaaattctatgctcattgctggcact

SEQ ID NO: 607345 - DNA, 33 bp, Homo sapien
actttagtttttgccaactgcatatggaatgga

SEQ ID NO: 607346 - DNA, 33 bp, Homo sapien
actttagtttttgccagctgcatatggaatgga

SEQ ID NO: 607347 - DNA, 33 bp, Homo sapien
gggcgggtgaggatgcacttccctttttcacga

SEQ ID NO: 607348 - DNA, 33 bp, Homo sapien
gggcgggtgaggatgctcttccctttttcacga

SEQ ID NO: 607349 - DNA, 33 bp, Homo sapien
agctcactcctttacaagccattcccttttaag

SEQ ID NO: 607350 - DNA, 33 bp, Homo sapien
agctcactcctttacaggccattcccttttaag

SEQ ID NO: 607351 - DNA, 33 bp, Homo sapien
gggctaggacaggtaacaagtgagcaggagtct

SEQ ID NO: 607352 - DNA, 33 bp, Homo sapien
gggctaggacaggtaagaagtgagcaggagtct

SEQ ID NO: 607353 - DNA, 33 bp, Homo sapien
cactccagtaagtgtacacattgatcaggggac

SEQ ID NO: 607354 - DNA, 33 bp, Homo sapien
cactccagtaagtgtatacattgatcaggggac

SEQ ID NO: 607355 - DNA, 33 bp, Homo sapien
gctacaggaagtccaaactggagggtgcttagg

SEQ ID NO: 607356 - DNA, 33 bp, Homo sapien
gctacaggaagtccaagctggagggtgcttagg

SEQ ID NO: 607357 - DNA, 33 bp, Homo sapien
aagtcattttgaagacacacttctggaatgaac

SEQ ID NO: 607358 - DNA, 33 bp, Homo sapien
aagtcattttgaagacgcacttctggaatgaac

SEQ ID NO: 607359 - DNA, 33 bp, Homo sapien
cagtaaagttcacagaccaatggagcaagtgag

SEQ ID NO: 607360 - DNA, 33 bp, Homo sapien
cagtaaagttcacagatcaatggagcaagtgag

SEQ ID NO: 607361 - DNA, 33 bp, Homo sapien
tttcagtggatgaatacgagttcgccaaagtgg

SEQ ID NO: 607362 - DNA, 33 bp, Homo sapien
tttcagtggatgaataggagttcgccaaagtgg

SEQ ID NO: 607363 - DNA, 33 bp, Homo sapien
ctgagcaagaaacttcacagtctgagttcagta

SEQ ID NO: 607364 - DNA, 33 bp, Homo sapien
ctgagcaagaaacttcgcagtctgagttcagta

SEQ ID NO: 607365 - DNA, 33 bp, Homo sapien
taagcaaacaatcaggcaaccaatgagccaaac

SEQ ID NO: 607366 - DNA, 33 bp, Homo sapien
taagcaaacaatcaggtaaccaatgagccaaac

SEQ ID NO: 607367 - DNA, 33 bp, Homo sapien
ggaagagcaaggggaaccggggaataaagagct

SEQ ID NO: 607368 - DNA, 33 bp, Homo sapien
ggaagagcaaggggaagcggggaataaagagct

SEQ ID NO: 607369 - DNA, 33 bp, Homo sapien
cagcgatcttctcgccaccttccctctccatag

SEQ ID NO: 607370 - DNA, 33 bp, Homo sapien
cagcgatcttctcgccgccttccctctccatag

SEQ ID NO: 607371 - DNA, 33 bp, Homo sapien
cgggggcacagaatcacctccagttaagctgct

SEQ ID NO: 607372 - DNA, 33 bp, Homo sapien
cgggggcacagaatcatctccagttaagctgct

SEQ ID NO: 607373 - DNA, 33 bp, Homo sapien
tgggacgttcctgaacactcgttgtttgaccat

SEQ ID NO: 607374 - DNA, 33 bp, Homo sapien
tgggacgttcctgaacgctcgttgtttgaccat

SEQ ID NO: 607375 - DNA, 33 bp, Homo sapien
aactgccacaaacttgaactcttaaatcaccac

SEQ ID NO: 607376 - DNA, 33 bp, Homo sapien
aactgccacaaacttggactcttaaatcaccac

SEQ ID NO: 607377 - DNA, 33 bp, Homo sapien
gacagggtacttaacccctctgatccttcctat

SEQ ID NO: 607378 - DNA, 33 bp, Homo sapien
gacagggtacttaacctctctgatccttcctat

SEQ ID NO: 607379 - DNA, 33 bp, Homo sapien
ccataaatatctgttgaaagaaatgattcatcc

SEQ ID NO: 607380 - DNA, 33 bp, Homo sapien
ccataaatatctgttggaagaaatgattcatcc

SEQ ID NO: 607381 - DNA, 33 bp, Homo sapien
ccattttctctcctccccagcttggctctgcag

SEQ ID NO: 607382 - DNA, 33 bp, Homo sapien
ccattttctctcctcctcagcttggctctgcag

SEQ ID NO: 607383 - DNA, 33 bp, Homo sapien
tggctgtccattcaggcagggagctccccatta

SEQ ID NO: 607384 - DNA, 33 bp, Homo sapien
tggctgtccattcaggtagggagctccccatta

SEQ ID NO: 607385 - DNA, 33 bp, Homo sapien
gggaacaaatcaaagcaattcatgtgccgccca

SEQ ID NO: 607386 - DNA, 33 bp, Homo sapien
gggaacaaatcaaagcgattcatgtgccgccca

SEQ ID NO: 607387 - DNA, 33 bp, Homo sapien
tggacagcaacccgggaaaggcatccactccag

SEQ ID NO: 607388 - DNA, 33 bp, Homo sapien
tggacagcaacccggggaaggcatccactccag

SEQ ID NO: 607389 - DNA, 33 bp, Homo sapien
tgttttctaaagcaccaacttttctgtaaggcc

SEQ ID NO: 607390 - DNA, 33 bp, Homo sapien
tgttttctaaagcaccgacttttctgtaaggcc

SEQ ID NO: 607391 - DNA, 33 bp, Homo sapien
tttgagcactgaactcaagggataaatggggaa

SEQ ID NO: 607392 - DNA, 33 bp, Homo sapien
tttgagcactgaactcgagggataaatggggaa

SEQ ID NO: 607393 - DNA, 33 bp, Homo sapien
gagcggcaactcccagaaacggtgacatctgcc

SEQ ID NO: 607394 - DNA, 33 bp, Homo sapien
gagcggcaactcccaggaacggtgacatctgcc

SEQ ID NO: 607395 - DNA, 33 bp, Homo sapien
tcctaatcctgaaaacaggtagtgaggacactt

SEQ ID NO: 607396 - DNA, 33 bp, Homo sapien
tcctaatcctgaaaacgggtagtgaggacactt

SEQ ID NO: 607397 - DNA, 33 bp, Homo sapien
ttttgggggccataaccgagcccatagcatggg

SEQ ID NO: 607398 - DNA, 33 bp, Homo sapien
ttttgggggccataactgagcccatagcatggg

SEQ ID NO: 607399 - DNA, 33 bp, Homo sapien
aaagcccctggaaaaacgacgtgaaatagctgc

SEQ ID NO: 607400 - DNA, 33 bp, Homo sapien
aaagcccctggaaaaatgacgtgaaatagctgc

SEQ ID NO: 607401 - DNA, 33 bp, Homo sapien
cactctggagtgtctaagcacatagctagatgg

SEQ ID NO: 607402 - DNA, 33 bp, Homo sapien
cactctggagtgtctatgcacatagctagatgg

SEQ ID NO: 607403 - DNA, 33 bp, Homo sapien
gtgtcttcactaatcacgtttccgggagacttg

SEQ ID NO: 607404 - DNA, 33 bp, Homo sapien
gtgtcttcactaatcatgtttccgggagacttg

SEQ ID NO: 607405 - DNA, 33 bp, Homo sapien
actgacagagaacctcaacattctctggtagga

SEQ ID NO: 607406 - DNA, 33 bp, Homo sapien
actgacagagaacctcgacattctctggtagga

SEQ ID NO: 607407 - DNA, 33 bp, Homo sapien
agtcagatgaaacccaacaacctcatccagcga

SEQ ID NO: 607408 - DNA, 33 bp, Homo sapien
agtcagatgaaacccagcaacctcatccagcga

SEQ ID NO: 607409 - DNA, 33 bp, Homo sapien
tgccagcaggagaaaccgaggctcaacaaaagg

SEQ ID NO: 607410 - DNA, 33 bp, Homo sapien
tgccagcaggagaaactgaggctcaacaaaagg

SEQ ID NO: 607411 - DNA, 33 bp, Homo sapien
tggtcatcaccaataacgtgccgttgcaaactg

SEQ ID NO: 607412 - DNA, 33 bp, Homo sapien
tggtcatcaccaataatgtgccgttgcaaactg

SEQ ID NO: 607413 - DNA, 33 bp, Homo sapien
atgctgagatgttcgacctttacccgagggaaa

SEQ ID NO: 607414 - DNA, 33 bp, Homo sapien
atgctgagatgttcgatctttacccgagggaaa

SEQ ID NO: 607415 - DNA, 33 bp, Homo sapien
aatgtgctgccacatcaaaacctactagaaaaa

SEQ ID NO: 607416 - DNA, 33 bp, Homo sapien
aatgtgctgccacatcgaaacctactagaaaaa

SEQ ID NO: 607417 - DNA, 33 bp, Homo sapien
cctgagaaaggggagacggtagtgagaatgtgg

SEQ ID NO: 607418 - DNA, 33 bp, Homo sapien
cctgagaaaggggagatggtagtgagaatgtgg

SEQ ID NO: 607419 - DNA, 33 bp, Homo sapien
cactgggccctaggcaaaccacattctcactac

SEQ ID NO: 607420 - DNA, 33 bp, Homo sapien
cactgggccctaggcagaccacattctcactac

SEQ ID NO: 607421 - DNA, 33 bp, Homo sapien
tgttgctttaaacccacatattttgttgcaatt

SEQ ID NO: 607422 - DNA, 33 bp, Homo sapien
tgttgctttaaacccatatattttgttgcaatt

SEQ ID NO: 607423 - DNA, 33 bp, Homo sapien
agcaccccatcaacgaacgaagggaagccccag

SEQ ID NO: 607424 - DNA, 33 bp, Homo sapien
agcaccccatcaacgagcgaagggaagccccag

SEQ ID NO: 607425 - DNA, 33 bp, Homo sapien
gatgacagcagcccccaacctgcagcttggcct

SEQ ID NO: 607426 - DNA, 33 bp, Homo sapien
gatgacagcagcccccgacctgcagcttggcct

SEQ ID NO: 607427 - DNA, 33 bp, Homo sapien
ccgggaaaaagactaacgcggctgagctgagca

SEQ ID NO: 607428 - DNA, 33 bp, Homo sapien
ccgggaaaaagactaatgcggctgagctgagca

SEQ ID NO: 607429 - DNA, 33 bp, Homo sapien
gccactggagattttacgcggaagaaggacaat

SEQ ID NO: 607430 - DNA, 33 bp, Homo sapien
gccactggagattttatgcggaagaaggacaat

SEQ ID NO: 607431 - DNA, 33 bp, Homo sapien
tctgtgcccggttgaaagcccgcggttattacc

SEQ ID NO: 607432 - DNA, 33 bp, Homo sapien
tctgtgcccggttgaatgcccgcggttattacc

SEQ ID NO: 607433 - DNA, 33 bp, Homo sapien
ctgcctccctgcagacaagccttccagggcaga

SEQ ID NO: 607434 - DNA, 33 bp, Homo sapien
ctgcctccctgcagacgagccttccagggcaga

SEQ ID NO: 607435 - DNA, 33 bp, Homo sapien
atgaggccgctgggtacatgagcaaagaaccta

SEQ ID NO: 607436 - DNA, 33 bp, Homo sapien
atgaggccgctgggtatatgagcaaagaaccta

SEQ ID NO: 607437 - DNA, 33 bp, Homo sapien
tatttgaagttagaaacagagctgatagaatta

SEQ ID NO: 607438 - DNA, 33 bp, Homo sapien
tatttgaagttagaaagagagctgatagaatta

SEQ ID NO: 607439 - DNA, 33 bp, Homo sapien
ggcttcagtgtttctcacttgctgatccctctg

SEQ ID NO: 607440 - DNA, 33 bp, Homo sapien
ggcttcagtgtttctcgcttgctgatccctctg

SEQ ID NO: 607441 - DNA, 33 bp, Homo sapien
taacttacactattacaagatcccacagtaggc

SEQ ID NO: 607442 - DNA, 33 bp, Homo sapien
taacttacactattacgagatcccacagtaggc

SEQ ID NO: 607443 - DNA, 33 bp, Homo sapien
tgaggtcaagggacccaccccagctcaggaggg

SEQ ID NO: 607444 - DNA, 33 bp, Homo sapien
tgaggtcaagggacccgccccagctcaggaggg

SEQ ID NO: 607445 - DNA, 33 bp, Homo sapien
agctccagcacttagccaggtgaccttgttcag

SEQ ID NO: 607446 - DNA, 33 bp, Homo sapien
agctccagcacttagcgaggtgaccttgttcag

SEQ ID NO: 607447 - DNA, 33 bp, Homo sapien
cccacgaggctggaagaagagctccatctgacc

SEQ ID NO: 607448 - DNA, 33 bp, Homo sapien
cccacgaggctggaaggagagctccatctgacc

SEQ ID NO: 607449 - DNA, 33 bp, Homo sapien
aaaagaaacttttgacgatacgagaggaaactc

SEQ ID NO: 607450 - DNA, 33 bp, Homo sapien
aaaagaaacttttgactatacgagaggaaactc

SEQ ID NO: 607451 - DNA, 33 bp, Homo sapien
cttttcaacaacagcaaaagagtaatacacacc

SEQ ID NO: 607452 - DNA, 33 bp, Homo sapien
cttttcaacaacagcacaagagtaatacacacc

SEQ ID NO: 607453 - DNA, 33 bp, Homo sapien
tctttgtctactaagcacaatatcagagccatc

SEQ ID NO: 607454 - DNA, 33 bp, Homo sapien
tctttgtctactaagctcaatatcagagccatc

SEQ ID NO: 607455 - DNA, 33 bp, Homo sapien
cacccagacttaattgcatagttgttgacttac

SEQ ID NO: 607456 - DNA, 33 bp, Homo sapien
cacccagacttaattgtatagttgttgacttac

SEQ ID NO: 607457 - DNA, 33 bp, Homo sapien
tagctgagcttctaatcagtgaggataatgatt

SEQ ID NO: 607458 - DNA, 33 bp, Homo sapien
tagctgagcttctaattagtgaggataatgatt

SEQ ID NO: 607459 - DNA, 33 bp, Homo sapien
ggcggctctgacctcccgatgcgtttctccagg

SEQ ID NO: 607460 - DNA, 33 bp, Homo sapien
ggcggctctgacctccggatgcgtttctccagg

SEQ ID NO: 607461 - DNA, 33 bp, Homo sapien
aggcgcggagaggggaacttcccaggcggctct

SEQ ID NO: 607462 - DNA, 33 bp, Homo sapien
aggcgcggagaggggaccttcccaggcggctct

SEQ ID NO: 607463 - DNA, 33 bp, Homo sapien
tggccttccagccagggcaaagctgattaagcc

SEQ ID NO: 607464 - DNA, 33 bp, Homo sapien
tggccttccagccaggtcaaagctgattaagcc

SEQ ID NO: 607465 - DNA, 33 bp, Homo sapien
ccaggaaagagcccataaactgggggtagcatc

SEQ ID NO: 607466 - DNA, 33 bp, Homo sapien
ccaggaaagagcccatgaactgggggtagcatc

SEQ ID NO: 607467 - DNA, 33 bp, Homo sapien
ccagattggaattgcacggcgatctcgaagctt

SEQ ID NO: 607468 - DNA, 33 bp, Homo sapien
ccagattggaattgcatggcgatctcgaagctt

SEQ ID NO: 607469 - DNA, 33 bp, Homo sapien
ttcagaaaggagctgaaattgagcgaggcccta

SEQ ID NO: 607470 - DNA, 33 bp, Homo sapien
ttcagaaaggagctgagattgagcgaggcccta

SEQ ID NO: 607471 - DNA, 33 bp, Homo sapien
tggtagcaagaaggcaatcaagttttgagtcat

SEQ ID NO: 607472 - DNA, 33 bp, Homo sapien
tggtagcaagaaggcagtcaagttttgagtcat

SEQ ID NO: 607473 - DNA, 33 bp, Homo sapien
ctgagattggtccgataagagtaataccagcct

SEQ ID NO: 607474 - DNA, 33 bp, Homo sapien
ctgagattggtccgatcagagtaataccagcct

SEQ ID NO: 607475 - DNA, 33 bp, Homo sapien
aaaatctggataataacggtagccacctgctca

SEQ ID NO: 607476 - DNA, 33 bp, Homo sapien
aaaatctggataataatggtagccacctgctca

SEQ ID NO: 607477 - DNA, 33 bp, Homo sapien
gccctatgatacaaggccctaccaagagcacca

SEQ ID NO: 607478 - DNA, 33 bp, Homo sapien
gccctatgatacaaggtcctaccaagagcacca

SEQ ID NO: 607479 - DNA, 33 bp, Homo sapien
gttgaaactggaaggaaacaaatgtcagagagc

SEQ ID NO: 607480 - DNA, 33 bp, Homo sapien
gttgaaactggaaggagacaaatgtcagagagc

SEQ ID NO: 607481 - DNA, 33 bp, Homo sapien
cacagcctggtgaggcaaacagtttcgttgagt

SEQ ID NO: 607482 - DNA, 33 bp, Homo sapien
cacagcctggtgaggccaacagtttcgttgagt

SEQ ID NO: 607483 - DNA, 33 bp, Homo sapien
tattaataactggactaagggtatttaaatctt

SEQ ID NO: 607484 - DNA, 33 bp, Homo sapien
tattaataactggactcagggtatttaaatctt

SEQ ID NO: 607485 - DNA, 33 bp, Homo sapien
ttttcataataatcccaaaatatcatgtgcctt

SEQ ID NO: 607486 - DNA, 33 bp, Homo sapien
ttttcataataatcccgaaatatcatgtgcctt

SEQ ID NO: 607487 - DNA, 33 bp, Homo sapien
tgaggagaggcattgaagaagacatttttgcaa

SEQ ID NO: 607488 - DNA, 33 bp, Homo sapien
tgaggagaggcattgacgaagacatttttgcaa

SEQ ID NO: 607489 - DNA, 33 bp, Homo sapien
aagcctacttaccaaaagggtaccatgtggacc

SEQ ID NO: 607490 - DNA, 33 bp, Homo sapien
aagcctacttaccaaaggggtaccatgtggacc

SEQ ID NO: 607491 - DNA, 33 bp, Homo sapien
gctgctggagacagaacagaactgagcacaaag

SEQ ID NO: 607492 - DNA, 33 bp, Homo sapien
gctgctggagacagaagagaactgagcacaaag

SEQ ID NO: 607493 - DNA, 33 bp, Homo sapien
ttctgcaatcaagccaagacccttcagacaggg

SEQ ID NO: 607494 - DNA, 33 bp, Homo sapien
ttctgcaatcaagccaggacccttcagacaggg

SEQ ID NO: 607495 - DNA, 33 bp, Homo sapien
atgttatgttgatggaaggactgacacaaagat

SEQ ID NO: 607496 - DNA, 33 bp, Homo sapien
atgttatgttgatggagggactgacacaaagat

SEQ ID NO: 607497 - DNA, 33 bp, Homo sapien
agacttgattattgtacgaagccgttgagtttg

SEQ ID NO: 607498 - DNA, 33 bp, Homo sapien
agacttgattattgtatgaagccgttgagtttg

SEQ ID NO: 607499 - DNA, 33 bp, Homo sapien
gaaaagaggtttttcacagagttaagttatgag

SEQ ID NO: 607500 - DNA, 33 bp, Homo sapien
gaaaagaggtttttcatagagttaagttatgag

SEQ ID NO: 607501 - DNA, 33 bp, Homo sapien
caaacaccagttgccaagcacttcacagcctct

SEQ ID NO: 607502 - DNA, 33 bp, Homo sapien
caaacaccagttgccaggcacttcacagcctct

SEQ ID NO: 607503 - DNA, 33 bp, Homo sapien
cttgtgagctcatgccgctgagtgagtcccttc

SEQ ID NO: 607504 - DNA, 33 bp, Homo sapien
cttgtgagctcatgcctctgagtgagtcccttc

SEQ ID NO: 607505 - DNA, 33 bp, Homo sapien
tgttctgaagacaataaaagatggaatgtactg

SEQ ID NO: 607506 - DNA, 33 bp, Homo sapien
tgttctgaagacaatagaagatggaatgtactg

SEQ ID NO: 607507 - DNA, 33 bp, Homo sapien
tctcaaatcaaaggtcaacgccttcaagaaggc

SEQ ID NO: 607508 - DNA, 33 bp, Homo sapien
tctcaaatcaaaggtcgacgccttcaagaaggc

SEQ ID NO: 607509 - DNA, 33 bp, Homo sapien
ggggtttggcgagaacagtgattccattggggt

SEQ ID NO: 607510 - DNA, 33 bp, Homo sapien
ggggtttggcgagaacggtgattccattggggt

SEQ ID NO: 607511 - DNA, 33 bp, Homo sapien
ccaaagctgactaatacgatgggggacatttta

SEQ ID NO: 607512 - DNA, 33 bp, Homo sapien
ccaaagctgactaatatgatgggggacatttta

SEQ ID NO: 607513 - DNA, 33 bp, Homo sapien
aaaaaaaaagataaacacatgagtcaaatgtcc

SEQ ID NO: 607514 - DNA, 33 bp, Homo sapien
aaaaaaaaagataaacgcatgagtcaaatgtcc

SEQ ID NO: 607515 - DNA, 33 bp, Homo sapien
ggaaaaaatcatacacaagtagccagataggca

SEQ ID NO: 607516 - DNA, 33 bp, Homo sapien
ggaaaaaatcatacacgagtagccagataggca

SEQ ID NO: 607517 - DNA, 33 bp, Homo sapien
ccaggtcatccagaaaaagctgtcctcgtgggg

SEQ ID NO: 607518 - DNA, 33 bp, Homo sapien
ccaggtcatccagaaagagctgtcctcgtgggg

SEQ ID NO: 607519 - DNA, 33 bp, Homo sapien
atggtattttatctcaagatctcattgtatctt

SEQ ID NO: 607520 - DNA, 33 bp, Homo sapien
atggtattttatctcatgatctcattgtatctt

SEQ ID NO: 607521 - DNA, 33 bp, Homo sapien
gatacctgagcacacaagttccagctcctctac

SEQ ID NO: 607522 - DNA, 33 bp, Homo sapien
gatacctgagcacacaggttccagctcctctac

SEQ ID NO: 607523 - DNA, 33 bp, Homo sapien
gcttgtctttttcaaccctgaagtccagtccgg

SEQ ID NO: 607524 - DNA, 33 bp, Homo sapien
gcttgtctttttcaactctgaagtccagtccgg

SEQ ID NO: 607525 - DNA, 33 bp, Homo sapien
aattcagttgtaactaaatcacctttaaggtaa

SEQ ID NO: 607526 - DNA, 33 bp, Homo sapien
aattcagttgtaactatatcacctttaaggtaa

SEQ ID NO: 607527 - DNA, 33 bp, Homo sapien
gtgacaaagcctgatacagaagagtatgtgctg

SEQ ID NO: 607528 - DNA, 33 bp, Homo sapien
gtgacaaagcctgatatagaagagtatgtgctg

SEQ ID NO: 607529 - DNA, 33 bp, Homo sapien
gaggcgtgtgacatggaagtaagtttgccaaaa

SEQ ID NO: 607530 - DNA, 33 bp, Homo sapien
gaggcgtgtgacatgggagtaagtttgccaaaa

SEQ ID NO: 607531 - DNA, 33 bp, Homo sapien
ctaaacagtagcaggcccgtccatttcctctgc

SEQ ID NO: 607532 - DNA, 33 bp, Homo sapien
ctaaacagtagcaggcgcgtccatttcctctgc

SEQ ID NO: 607533 - DNA, 33 bp, Homo sapien
cacaggagttacaaaaccttcagagtccctgtg

SEQ ID NO: 607534 - DNA, 33 bp, Homo sapien
cacaggagttacaaaatcttcagagtccctgtg

SEQ ID NO: 607535 - DNA, 33 bp, Homo sapien
cttcaggtgtggggcccgaatcaaggaagaaat

SEQ ID NO: 607536 - DNA, 33 bp, Homo sapien
cttcaggtgtggggcctgaatcaaggaagaaat

SEQ ID NO: 607537 - DNA, 33 bp, Homo sapien
agacgactttgaggacagaagccttgtgttgag

SEQ ID NO: 607538 - DNA, 33 bp, Homo sapien
agacgactttgaggacggaagccttgtgttgag

SEQ ID NO: 607539 - DNA, 33 bp, Homo sapien
aagccgtgtgcctatcaaaagctccaggcctgt

SEQ ID NO: 607540 - DNA, 33 bp, Homo sapien
aagccgtgtgcctatccaaagctccaggcctgt

SEQ ID NO: 607541 - DNA, 33 bp, Homo sapien
acagggtatgtgaaaccgaggagtgcagaggga

SEQ ID NO: 607542 - DNA, 33 bp, Homo sapien
acagggtatgtgaaacggaggagtgcagaggga

SEQ ID NO: 607543 - DNA, 33 bp, Homo sapien
ccttctgcctctgtcaacagaagccctaagaca

SEQ ID NO: 607544 - DNA, 33 bp, Homo sapien
ccttctgcctctgtcatcagaagccctaagaca

SEQ ID NO: 607545 - DNA, 33 bp, Homo sapien
gtgttttattgggcaaaccgtcctttctgcgtc

SEQ ID NO: 607546 - DNA, 33 bp, Homo sapien
gtgttttattgggcaagccgtcctttctgcgtc

SEQ ID NO: 607547 - DNA, 33 bp, Homo sapien
tgagtgaataaaagcaatcccaaaaagtatgat

SEQ ID NO: 607548 - DNA, 33 bp, Homo sapien
tgagtgaataaaagcagtcccaaaaagtatgat

SEQ ID NO: 607549 - DNA, 33 bp, Homo sapien
caggcctgggcaaaaacctcttctttccctggg

SEQ ID NO: 607550 - DNA, 33 bp, Homo sapien
caggcctgggcaaaaatctcttctttccctggg

SEQ ID NO: 607551 - DNA, 33 bp, Homo sapien
tcccgtttgtgtttgccctccatccttaaccca

SEQ ID NO: 607552 - DNA, 33 bp, Homo sapien
tcccgtttgtgtttgcgctccatccttaaccca

SEQ ID NO: 607553 - DNA, 33 bp, Homo sapien
cgccagacccacagacacggatccaagccatct

SEQ ID NO: 607554 - DNA, 33 bp, Homo sapien
cgccagacccacagactcggatccaagccatct

SEQ ID NO: 607555 - DNA, 33 bp, Homo sapien
actgctcacttacccgaacaagcctggggcccc

SEQ ID NO: 607556 - DNA, 33 bp, Homo sapien
actgctcacttacccgcacaagcctggggcccc

SEQ ID NO: 607557 - DNA, 33 bp, Homo sapien
atagcaggtgcttagccctttcttgctgctctc

SEQ ID NO: 607558 - DNA, 33 bp, Homo sapien
atagcaggtgcttagctctttcttgctgctctc

SEQ ID NO: 607559 - DNA, 33 bp, Homo sapien
accacagggggtataacgtggggataaaaggag

SEQ ID NO: 607560 - DNA, 33 bp, Homo sapien
accacagggggtataatgtggggataaaaggag

SEQ ID NO: 607561 - DNA, 33 bp, Homo sapien
gatcatcctccttgataacagtgcttgataaaa

SEQ ID NO: 607562 - DNA, 33 bp, Homo sapien
gatcatcctccttgatgacagtgcttgataaaa

SEQ ID NO: 607563 - DNA, 33 bp, Homo sapien
gagccagtttctacaacggagctaaggatcccc

SEQ ID NO: 607564 - DNA, 33 bp, Homo sapien
gagccagtttctacaatggagctaaggatcccc

SEQ ID NO: 607565 - DNA, 33 bp, Homo sapien
ggtcagatttgaatccagcacttagctcaggcc

SEQ ID NO: 607566 - DNA, 33 bp, Homo sapien
ggtcagatttgaatccggcacttagctcaggcc

SEQ ID NO: 607567 - DNA, 33 bp, Homo sapien
gtcgcagagacaatcacggtacctggcgtgtgg

SEQ ID NO: 607568 - DNA, 33 bp, Homo sapien
gtcgcagagacaatcatggtacctggcgtgtgg

SEQ ID NO: 607569 - DNA, 33 bp, Homo sapien
acaaacaaacaaaaaacgatttctcctctgtct

SEQ ID NO: 607570 - DNA, 33 bp, Homo sapien
acaaacaaacaaaaaaggatttctcctctgtct

SEQ ID NO: 607571 - DNA, 33 bp, Homo sapien
ccctcctccaccccaaatctgtggatgctccat

SEQ ID NO: 607572 - DNA, 33 bp, Homo sapien
ccctcctccaccccaagtctgtggatgctccat

SEQ ID NO: 607573 - DNA, 33 bp, Homo sapien
aggagcgatgaaagaacgagtgaaaaagcactg

SEQ ID NO: 607574 - DNA, 33 bp, Homo sapien
aggagcgatgaaagaatgagtgaaaaagcactg

SEQ ID NO: 607575 - DNA, 33 bp, Homo sapien
taaatcacggcagagaatcaaggacagagagat

SEQ ID NO: 607576 - DNA, 33 bp, Homo sapien
taaatcacggcagagattcaaggacagagagat

SEQ ID NO: 607577 - DNA, 33 bp, Homo sapien
gtaacaaagaccacaaactcggtggcctaaaac

SEQ ID NO: 607578 - DNA, 33 bp, Homo sapien
gtaacaaagaccacaagctcggtggcctaaaac

SEQ ID NO: 607579 - DNA, 33 bp, Homo sapien
tgggacttggacagccactggagatgacgctga

SEQ ID NO: 607580 - DNA, 33 bp, Homo sapien
tgggacttggacagccgctggagatgacgctga

SEQ ID NO: 607581 - DNA, 33 bp, Homo sapien
cctcctccactacaaacggcaaccctagactcc

SEQ ID NO: 607582 - DNA, 33 bp, Homo sapien
cctcctccactacaaatggcaaccctagactcc

SEQ ID NO: 607583 - DNA, 33 bp, Homo sapien
ccagtattcttttgacacagggacaaggtaaca

SEQ ID NO: 607584 - DNA, 33 bp, Homo sapien
ccagtattcttttgacgcagggacaaggtaaca

SEQ ID NO: 607585 - DNA, 33 bp, Homo sapien
acacgatagaatatgacatggcatgaaaagaag

SEQ ID NO: 607586 - DNA, 33 bp, Homo sapien
acacgatagaatatgatatggcatgaaaagaag

SEQ ID NO: 607587 - DNA, 33 bp, Homo sapien
agatgcacgcttctcacggtcaaaagcagaaca

SEQ ID NO: 607588 - DNA, 33 bp, Homo sapien
agatgcacgcttctcatggtcaaaagcagaaca

SEQ ID NO: 607589 - DNA, 33 bp, Homo sapien
ctcacctcctgctgtacgttcacatggatctca

SEQ ID NO: 607590 - DNA, 33 bp, Homo sapien
ctcacctcctgctgtatgttcacatggatctca

SEQ ID NO: 607591 - DNA, 33 bp, Homo sapien
tgcggaccatggaggccccggttgtgtggccga

SEQ ID NO: 607592 - DNA, 33 bp, Homo sapien
tgcggaccatggaggcgccggttgtgtggccga

SEQ ID NO: 607593 - DNA, 33 bp, Homo sapien
gccgtgttatgccaccaatatgaaatgtacaga

SEQ ID NO: 607594 - DNA, 33 bp, Homo sapien
gccgtgttatgccaccgatatgaaatgtacaga

SEQ ID NO: 607595 - DNA, 33 bp, Homo sapien
aggccatgaaaaccatcagaccgtcggggagac

SEQ ID NO: 607596 - DNA, 33 bp, Homo sapien
aggccatgaaaaccatgagaccgtcggggagac

SEQ ID NO: 607597 - DNA, 33 bp, Homo sapien
agcatttggcacctgacgaagatggccacccac

SEQ ID NO: 607598 - DNA, 33 bp, Homo sapien
agcatttggcacctgaggaagatggccacccac

SEQ ID NO: 607599 - DNA, 33 bp, Homo sapien
gacacagacacggacccgagggtgacagttgag

SEQ ID NO: 607600 - DNA, 33 bp, Homo sapien
gacacagacacggacctgagggtgacagttgag

SEQ ID NO: 607601 - DNA, 33 bp, Homo sapien
ccgctacctccaggtgcatttgagccaaggccc

SEQ ID NO: 607602 - DNA, 33 bp, Homo sapien
ccgctacctccaggtgtatttgagccaaggccc

SEQ ID NO: 607603 - DNA, 33 bp, Homo sapien
aaagtttcaatgacccaatgatgttatccaagt

SEQ ID NO: 607604 - DNA, 33 bp, Homo sapien
aaagtttcaatgacccgatgatgttatccaagt

SEQ ID NO: 607605 - DNA, 33 bp, Homo sapien
ctctttaaccgaagccacctttaactccatcgt

SEQ ID NO: 607606 - DNA, 33 bp, Homo sapien
ctctttaaccgaagccgcctttaactccatcgt

SEQ ID NO: 607607 - DNA, 33 bp, Homo sapien
gggggctgtggtataacgaatcttagctgagca

SEQ ID NO: 607608 - DNA, 33 bp, Homo sapien
gggggctgtggtataatgaatcttagctgagca

SEQ ID NO: 607609 - DNA, 33 bp, Homo sapien
ctgtgtgttagcagaacattaacatacttcaca

SEQ ID NO: 607610 - DNA, 33 bp, Homo sapien
ctgtgtgttagcagaatattaacatacttcaca

SEQ ID NO: 607611 - DNA, 33 bp, Homo sapien
tggccggcatagctaacgtatgttctccctcca

SEQ ID NO: 607612 - DNA, 33 bp, Homo sapien
tggccggcatagctaatgtatgttctccctcca

SEQ ID NO: 607613 - DNA, 33 bp, Homo sapien
tgagggtgttatctcactaaagcctcacaaccc

SEQ ID NO: 607614 - DNA, 33 bp, Homo sapien
tgagggtgttatctcattaaagcctcacaaccc

SEQ ID NO: 607615 - DNA, 33 bp, Homo sapien
tgggtttgaaataaccagaggcgatcttaagaa

SEQ ID NO: 607616 - DNA, 33 bp, Homo sapien
tgggtttgaaataaccggaggcgatcttaagaa

SEQ ID NO: 607617 - DNA, 33 bp, Homo sapien
aaaatgatttcttccacagcggcgggtcgtcag

SEQ ID NO: 607618 - DNA, 33 bp, Homo sapien
aaaatgatttcttccagagcggcgggtcgtcag

SEQ ID NO: 607619 - DNA, 33 bp, Homo sapien
ccagttgggcccaaagcacagttgtctctcagt

SEQ ID NO: 607620 - DNA, 33 bp, Homo sapien
ccagttgggcccaaagtacagttgtctctcagt

SEQ ID NO: 607621 - DNA, 33 bp, Homo sapien
taacccactcatctcaagatccttaacttaatc

SEQ ID NO: 607622 - DNA, 33 bp, Homo sapien
taacccactcatctcaggatccttaacttaatc

SEQ ID NO: 607623 - DNA, 33 bp, Homo sapien
cgagcacccattatacactctacatcagtcgag

SEQ ID NO: 607624 - DNA, 33 bp, Homo sapien
cgagcacccattatacgctctacatcagtcgag

SEQ ID NO: 607625 - DNA, 33 bp, Homo sapien
tggccaggtgccaacaaaaggaaggcaggaaat

SEQ ID NO: 607626 - DNA, 33 bp, Homo sapien
tggccaggtgccaacagaaggaaggcaggaaat

SEQ ID NO: 607627 - DNA, 33 bp, Homo sapien
tgtgtgccaaaagatccgaacccagggcggtgg

SEQ ID NO: 607628 - DNA, 33 bp, Homo sapien
tgtgtgccaaaagatctgaacccagggcggtgg

SEQ ID NO: 607629 - DNA, 33 bp, Homo sapien
ttttgtttgaagttgccaaccatttttgcaaaa

SEQ ID NO: 607630 - DNA, 33 bp, Homo sapien
ttttgtttgaagttgctaaccatttttgcaaaa

SEQ ID NO: 607631 - DNA, 33 bp, Homo sapien
ttaaaacgcatcataaaggcagtagcaatctat

SEQ ID NO: 607632 - DNA, 33 bp, Homo sapien
ttaaaacgcatcataagggcagtagcaatctat

SEQ ID NO: 607633 - DNA, 33 bp, Homo sapien
gaccacatgcttggcaacttaaaatgctctgag

SEQ ID NO: 607634 - DNA, 33 bp, Homo sapien
gaccacatgcttggcagcttaaaatgctctgag

SEQ ID NO: 607635 - DNA, 33 bp, Homo sapien
tccagagtgctgtctcaaacaccatgtgggcta

SEQ ID NO: 607636 - DNA, 33 bp, Homo sapien
tccagagtgctgtctcgaacaccatgtgggcta

SEQ ID NO: 607637 - DNA, 33 bp, Homo sapien
tccctaagacataggacggggaaccaagaagtc

SEQ ID NO: 607638 - DNA, 33 bp, Homo sapien
tccctaagacataggatggggaaccaagaagtc

SEQ ID NO: 607639 - DNA, 33 bp, Homo sapien
ttgttgctgtattttgcagtcatttactgggca

SEQ ID NO: 607640 - DNA, 33 bp, Homo sapien
ttgttgctgtattttgtagtcatttactgggca

SEQ ID NO: 607641 - DNA, 33 bp, Homo sapien
ctgcactaggctgtgaccccggacctgtctctg

SEQ ID NO: 607642 - DNA, 33 bp, Homo sapien
ctgcactaggctgtgatcccggacctgtctctg

SEQ ID NO: 607643 - DNA, 33 bp, Homo sapien
cgagtggtgctccaaacagaattagatgagatc

SEQ ID NO: 607644 - DNA, 33 bp, Homo sapien
cgagtggtgctccaaatagaattagatgagatc

SEQ ID NO: 607645 - DNA, 33 bp, Homo sapien
cacctacacacacttacgcttacttatatctac

SEQ ID NO: 607646 - DNA, 33 bp, Homo sapien
cacctacacacacttatgcttacttatatctac

SEQ ID NO: 607647 - DNA, 33 bp, Homo sapien
aagagcatatcctacgaacacaggaaaaaagag

SEQ ID NO: 607648 - DNA, 33 bp, Homo sapien
aagagcatatcctacgcacacaggaaaaaagag

SEQ ID NO: 607649 - DNA, 33 bp, Homo sapien
acgcgtcatggccaagaatctgagtaaagtttc

SEQ ID NO: 607650 - DNA, 33 bp, Homo sapien
acgcgtcatggccaaggatctgagtaaagtttc

SEQ ID NO: 607651 - DNA, 33 bp, Homo sapien
ccggtaccaaaatgcacgtacatggaggtgggc

SEQ ID NO: 607652 - DNA, 33 bp, Homo sapien
ccggtaccaaaatgcaggtacatggaggtgggc

SEQ ID NO: 607653 - DNA, 33 bp, Homo sapien
ccctccagaaaggtcacgtgctttgtagagcct

SEQ ID NO: 607654 - DNA, 33 bp, Homo sapien
ccctccagaaaggtcatgtgctttgtagagcct

SEQ ID NO: 607655 - DNA, 33 bp, Homo sapien
tcatcaacaacgtaaaccttcaccaagatgaaa

SEQ ID NO: 607656 - DNA, 33 bp, Homo sapien
tcatcaacaacgtaaatcttcaccaagatgaaa

SEQ ID NO: 607657 - DNA, 33 bp, Homo sapien
gtcacaccataaccatcagttaccataaaccat

SEQ ID NO: 607658 - DNA, 33 bp, Homo sapien
gtcacaccataaccatgagttaccataaaccat

SEQ ID NO: 607659 - DNA, 33 bp, Homo sapien
gtgaaagttgttatcaatatttcaggagaaggc

SEQ ID NO: 607660 - DNA, 33 bp, Homo sapien
gtgaaagttgttatcagtatttcaggagaaggc

SEQ ID NO: 607661 - DNA, 33 bp, Homo sapien
gcctgaaccttatctaagaattatggtcccaag

SEQ ID NO: 607662 - DNA, 33 bp, Homo sapien
gcctgaaccttatctacgaattatggtcccaag

SEQ ID NO: 607663 - DNA, 33 bp, Homo sapien
aaatgagtatttcaaccgagccaggtggctgcc

SEQ ID NO: 607664 - DNA, 33 bp, Homo sapien
aaatgagtatttcaactgagccaggtggctgcc

SEQ ID NO: 607665 - DNA, 33 bp, Homo sapien
caagattgcatctccccagaaggtgcagtggaa

SEQ ID NO: 607666 - DNA, 33 bp, Homo sapien
caagattgcatctcccgagaaggtgcagtggaa

SEQ ID NO: 607667 - DNA, 33 bp, Homo sapien
cgagtcccctgatggcagccagaagacgtctct

SEQ ID NO: 607668 - DNA, 33 bp, Homo sapien
cgagtcccctgatggcggccagaagacgtctct

SEQ ID NO: 607669 - DNA, 33 bp, Homo sapien
gggaggtagctcgaaacatacagagtgttcgca

SEQ ID NO: 607670 - DNA, 33 bp, Homo sapien
gggaggtagctcgaaatatacagagtgttcgca

SEQ ID NO: 607671 - DNA, 33 bp, Homo sapien
acagatgccaagtttacaaaacatacaagtgca

SEQ ID NO: 607672 - DNA, 33 bp, Homo sapien
acagatgccaagtttataaaacatacaagtgca

SEQ ID NO: 607673 - DNA, 33 bp, Homo sapien
atggatgttttgaatcccaacccaatgtggttt

SEQ ID NO: 607674 - DNA, 33 bp, Homo sapien
atggatgttttgaatcgcaacccaatgtggttt

SEQ ID NO: 607675 - DNA, 33 bp, Homo sapien
taacacaccacctaagcccagtcactgaaagtt

SEQ ID NO: 607676 - DNA, 33 bp, Homo sapien
taacacaccacctaagtccagtcactgaaagtt

SEQ ID NO: 607677 - DNA, 33 bp, Homo sapien
ccctgtatttccatcaaatatggtagagaagga

SEQ ID NO: 607678 - DNA, 33 bp, Homo sapien
ccctgtatttccatcagatatggtagagaagga

SEQ ID NO: 607679 - DNA, 33 bp, Homo sapien
cccggcacaactcggtcaacaccccaagcaggc

SEQ ID NO: 607680 - DNA, 33 bp, Homo sapien
cccggcacaactcggttaacaccccaagcaggc

SEQ ID NO: 607681 - DNA, 33 bp, Homo sapien
cctgcaggtgtcccaaatcctccaacggctaaa

SEQ ID NO: 607682 - DNA, 33 bp, Homo sapien
cctgcaggtgtcccaagtcctccaacggctaaa

SEQ ID NO: 607683 - DNA, 33 bp, Homo sapien
cccatcaaatatggcgcagaaggatacaacgtc

SEQ ID NO: 607684 - DNA, 33 bp, Homo sapien
cccatcaaatatggcggagaaggatacaacgtc

SEQ ID NO: 607685 - DNA, 33 bp, Homo sapien
gaggacaggagtgagccacggatgccgagtgtg

SEQ ID NO: 607686 - DNA, 33 bp, Homo sapien
gaggacaggagtgagctacggatgccgagtgtg

SEQ ID NO: 607687 - DNA, 33 bp, Homo sapien
gggcttcacaaaaaccaggcagtggtgcaaatg

SEQ ID NO: 607688 - DNA, 33 bp, Homo sapien
gggcttcacaaaaaccgggcagtggtgcaaatg

SEQ ID NO: 607689 - DNA, 33 bp, Homo sapien
cgagtgctgtgcagacgccggaactgttctccc

SEQ ID NO: 607690 - DNA, 33 bp, Homo sapien
cgagtgctgtgcagactccggaactgttctccc

SEQ ID NO: 607691 - DNA, 33 bp, Homo sapien
ccagcatgggagaaaactgtaagccagcatcac

SEQ ID NO: 607692 - DNA, 33 bp, Homo sapien
ccagcatgggagaaaattgtaagccagcatcac

SEQ ID NO: 607693 - DNA, 33 bp, Homo sapien; identical to SEQ ID NO: 607691

SEQ ID NO: 607694 - DNA, 33 bp, Homo sapien; identical to SEQ ID NO: 607692

SEQ ID NO: 607695 - DNA, 33 bp, Homo sapien
cccccgctactgtgcaaccgccgtgacgacagg

SEQ ID NO: 607696 - DNA, 33 bp, Homo sapien
cccccgctactgtgcagccgccgtgacgacagg

SEQ ID NO: 607697 - DNA, 33 bp, Homo sapien
tttaggatttacaaaccacaggctcacagcacc

SEQ ID NO: 607698 - DNA, 33 bp, Homo sapien
tttaggatttacaaactacaggctcacagcacc

SEQ ID NO: 607699 - DNA, 33 bp, Homo sapien
agactctgaggccagaagctagagtgtggctcc

SEQ ID NO: 607700 - DNA, 33 bp, Homo sapien
agactctgaggccagacgctagagtgtggctcc

SEQ ID NO: 607701 - DNA, 33 bp, Homo sapien
acggactttcttgagacgattaggcccagggcc

SEQ ID NO: 607702 - DNA, 33 bp, Homo sapien
acggactttcttgagatgattaggcccagggcc

SEQ ID NO: 607703 - DNA, 33 bp, Homo sapien
cagcggcctcagatggcacctgcagactgagca

SEQ ID NO: 607704 - DNA, 33 bp, Homo sapien
cagcggcctcagatggtacctgcagactgagca

SEQ ID NO: 607705 - DNA, 33 bp, Homo sapien
ttatgtctgctgaatggaagatcccatagccat

SEQ ID NO: 607706 - DNA, 33 bp, Homo sapien
ttatgtctgctgaatgtaagatcccatagccat

SEQ ID NO: 607707 - DNA, 33 bp, Homo sapien
tcagacaatcctctacacttggaaatttgagtt

SEQ ID NO: 607708 - DNA, 33 bp, Homo sapien
tcagacaatcctctactcttggaaatttgagtt

SEQ ID NO: 607709 - DNA, 33 bp, Homo sapien
gatgcaaggaaaattgcaactcgagaagcaatt

SEQ ID NO: 607710 - DNA, 33 bp, Homo sapien
gatgcaaggaaaattgtaactcgagaagcaatt

SEQ ID NO: 607711 - DNA, 33 bp, Homo sapien
accagcgccagtccagaagtcaaattcaaatgc

SEQ ID NO: 607712 - DNA, 33 bp, Homo sapien
accagcgccagtccaggagtcaaattcaaatgc

SEQ ID NO: 607713 - DNA, 33 bp, Homo sapien
gcacgttctgatgctcacttctggtctgtttcc

SEQ ID NO: 607714 - DNA, 33 bp, Homo sapien
gcacgttctgatgctcgcttctggtctgtttcc

SEQ ID NO: 607715 - DNA, 33 bp, Homo sapien
agtaaatagacaaggacgcttcacgagtccatg

SEQ ID NO: 607716 - DNA, 33 bp, Homo sapien
agtaaatagacaaggatgcttcacgagtccatg

SEQ ID NO: 607717 - DNA, 33 bp, Homo sapien
aggcacatagaggagcaatgacatcatcacaac

SEQ ID NO: 607718 - DNA, 33 bp, Homo sapien
aggcacatagaggagcgatgacatcatcacaac

SEQ ID NO: 607719 - DNA, 33 bp, Homo sapien
ccaagagcagtgactacgagaaagccttgaagg

SEQ ID NO: 607720 - DNA, 33 bp, Homo sapien
ccaagagcagtgactatgagaaagccttgaagg

SEQ ID NO: 607721 - DNA, 33 bp, Homo sapien
agccttgaaggaccaaattccagggagaaagga

SEQ ID NO: 607722 - DNA, 33 bp, Homo sapien
agccttgaaggaccaagttccagggagaaagga

SEQ ID NO: 607723 - DNA, 33 bp, Homo sapien
tctgtgaatttcaatgcatgcaaattttatctc

SEQ ID NO: 607724 - DNA, 33 bp, Homo sapien
tctgtgaatttcaatgtatgcaaattttatctc

SEQ ID NO: 607725 - DNA, 33 bp, Homo sapien
gaccctgaaagaaaaggccacgacatggcccga

SEQ ID NO: 607726 - DNA, 33 bp, Homo sapien
gaccctgaaagaaaagtccacgacatggcccga

SEQ ID NO: 607727 - DNA, 33 bp, Homo sapien
cggccctggggactcaaaacagcctgacatggc

SEQ ID NO: 607728 - DNA, 33 bp, Homo sapien
cggccctggggactcagaacagcctgacatggc

SEQ ID NO: 607729 - DNA, 33 bp, Homo sapien
gactccgggttttttgaagctcagtgagcagca

SEQ ID NO: 607730 - DNA, 33 bp, Homo sapien
gactccgggttttttgtagctcagtgagcagca

SEQ ID NO: 607731 - DNA, 33 bp, Homo sapien
agtggaaattggtcccaagtcacccaaagtcca

SEQ ID NO: 607732 - DNA, 33 bp, Homo sapien
agtggaaattggtcccgagtcacccaaagtcca

SEQ ID NO: 607733 - DNA, 33 bp, Homo sapien
agtggaacgaggaagccgaaaaccgagtgttgg

SEQ ID NO: 607734 - DNA, 33 bp, Homo sapien
agtggaacgaggaagctgaaaaccgagtgttgg

SEQ ID NO: 607735 - DNA, 33 bp, Homo sapien
agtggcttgacttgtacggatttggaagcttcg

SEQ ID NO: 607736 - DNA, 33 bp, Homo sapien
agtggcttgacttgtatggatttggaagcttcg

SEQ ID NO: 607737 - DNA, 33 bp, Homo sapien
ggagaccaatgtttctaaagccagcagcagaag

SEQ ID NO: 607738 - DNA, 33 bp, Homo sapien
ggagaccaatgtttctgaagccagcagcagaag

SEQ ID NO: 607739 - DNA, 33 bp, Homo sapien
ctaaataagtttgacaaacgctgaccaaatcct

SEQ ID NO: 607740 - DNA, 33 bp, Homo sapien
ctaaataagtttgacagacgctgaccaaatcct

SEQ ID NO: 607741 - DNA, 33 bp, Homo sapien
aatatactcttactcaacgtaattcacgcatgt

SEQ ID NO: 607742 - DNA, 33 bp, Homo sapien
aatatactcttactcagcgtaattcacgcatgt

SEQ ID NO: 607743 - DNA, 33 bp, Homo sapien
ttaaataacattgatccaaatttttattgcagc

SEQ ID NO: 607744 - DNA, 33 bp, Homo sapien
ttaaataacattgatcgaaatttttattgcagc

SEQ ID NO: 607745 - DNA, 33 bp, Homo sapien
aaaaacatatttagtaaatgagtcaattgtgta

SEQ ID NO: 607746 - DNA, 33 bp, Homo sapien
aaaaacatatttagtatatgagtcaattgtgta

SEQ ID NO: 607747 - DNA, 33 bp, Homo sapien
gctggtcttcttaaaacatggcagaaaggaggg

SEQ ID NO: 607748 - DNA, 33 bp, Homo sapien
gctggtcttcttaaaagatggcagaaaggaggg

SEQ ID NO: 607749 - DNA, 33 bp, Homo sapien
tgtctcttcaggaaccaaatcatgggctgtgtc

SEQ ID NO: 607750 - DNA, 33 bp, Homo sapien
tgtctcttcaggaaccgaatcatgggctgtgtc

SEQ ID NO: 607751 - DNA, 33 bp, Homo sapien
gcatcatgggactaccaaagttattatcagagt

SEQ ID NO: 607752 - DNA, 33 bp, Homo sapien
gcatcatgggactaccgaagttattatcagagt

SEQ ID NO: 607753 - DNA, 33 bp, Homo sapien
gtaaaggttgacgaccactatgctgactacgcc

SEQ ID NO: 607754 - DNA, 33 bp, Homo sapien
gtaaaggttgacgaccgctatgctgactacgcc

SEQ ID NO: 607755 - DNA, 33 bp, Homo sapien
agtgacggtgacatctaactctataaggcttta

SEQ ID NO: 607756 - DNA, 33 bp, Homo sapien
agtgacggtgacatctcactctataaggcttta

SEQ ID NO: 607757 - DNA, 33 bp, Homo sapien
caacaccctcgcagttaaaaacacaagttccaa

SEQ ID NO: 607758 - DNA, 33 bp, Homo sapien
caacaccctcgcagtttaaaacacaagttccaa

SEQ ID NO: 607759 - DNA, 33 bp, Homo sapien
tatggagtcttaaagcactgtttgcaagtttct

SEQ ID NO: 607760 - DNA, 33 bp, Homo sapien
tatggagtcttaaagcgctgtttgcaagtttct

SEQ ID NO: 607761 - DNA, 33 bp, Homo sapien
ctgtgtgggccgaagacgacctgaataacctct

SEQ ID NO: 607762 - DNA, 33 bp, Homo sapien
ctgtgtgggccgaagatgacctgaataacctct

SEQ ID NO: 607763 - DNA, 33 bp, Homo sapien
tgcagggaccacttaccgagagccttccctttc

SEQ ID NO: 607764 - DNA, 33 bp, Homo sapien
tgcagggaccacttactgagagccttccctttc

SEQ ID NO: 607765 - DNA, 33 bp, Homo sapien
gtttcagttggagagactagacatggagttatg

SEQ ID NO: 607766 - DNA, 33 bp, Homo sapien
gtttcagttggagagattagacatggagttatg

SEQ ID NO: 607767 - DNA, 33 bp, Homo sapien
tgcacctgggcagagaagtgtagaggagagatg

SEQ ID NO: 607768 - DNA, 33 bp, Homo sapien
tgcacctgggcagagaggtgtagaggagagatg

SEQ ID NO: 607769 - DNA, 33 bp, Homo sapien
gtaaatcaggaaggaacgtgttagacaagtacg

SEQ ID NO: 607770 - DNA, 33 bp, Homo sapien
gtaaatcaggaaggaatgtgttagacaagtacg

SEQ ID NO: 607771 - DNA, 33 bp, Homo sapien
ttcaattacatctcaactcagaggcaggagggg

SEQ ID NO: 607772 - DNA, 33 bp, Homo sapien
ttcaattacatctcaagtcagaggcaggagggg

SEQ ID NO: 607773 - DNA, 33 bp, Homo sapien
tgcttctcccgctcccaagacatgaataatcaa

SEQ ID NO: 607774 - DNA, 33 bp, Homo sapien
tgcttctcccgctcccgagacatgaataatcaa

SEQ ID NO: 607775 - DNA, 33 bp, Homo sapien
aaggaaatgaggattccaggctccctgcctcac

SEQ ID NO: 607776 - DNA, 33 bp, Homo sapien
aaggaaatgaggattctaggctccctgcctcac

SEQ ID NO: 607777 - DNA, 33 bp, Homo sapien
aatgcctttccctctacggaccgagcagaaaga

SEQ ID NO: 607778 - DNA, 33 bp, Homo sapien
aatgcctttccctctatggaccgagcagaaaga

SEQ ID NO: 607779 - DNA, 33 bp, Homo sapien
caggtctgttcgttgacccagtgtgcctgacct

SEQ ID NO: 607780 - DNA, 33 bp, Homo sapien
caggtctgttcgttgagccagtgtgcctgacct

SEQ ID NO: 607781 - DNA, 33 bp, Homo sapien
ttgtcctctaactccacccaatcaatcatgagg

SEQ ID NO: 607782 - DNA, 33 bp, Homo sapien
ttgtcctctaactccatccaatcaatcatgagg

SEQ ID NO: 607783 - DNA, 33 bp, Homo sapien
ttagaggattcctgcacgttaggataaaggaga

SEQ ID NO: 607784 - DNA, 33 bp, Homo sapien
ttagaggattcctgcaggttaggataaaggaga

SEQ ID NO: 607785 - DNA, 33 bp, Homo sapien
gggtagatggtgcaaacacacttgtcatccctg

SEQ ID NO: 607786 - DNA, 33 bp, Homo sapien
gggtagatggtgcaaatacacttgtcatccctg

SEQ ID NO: 607787 - DNA, 33 bp, Homo sapien
ggcagagagtggaatgaacagaggccacaacac

SEQ ID NO: 607788 - DNA, 33 bp, Homo sapien
ggcagagagtggaatgtacagaggccacaacac

SEQ ID NO: 607789 - DNA, 33 bp, Homo sapien
taggggagtagtcaatcatgtattcgcctggca

SEQ ID NO: 607790 - DNA, 33 bp, Homo sapien
taggggagtagtcaattatgtattcgcctggca

SEQ ID NO: 607791 - DNA, 33 bp, Homo sapien
ttcacttggccaaaagaaagaaattaggctgca

SEQ ID NO: 607792 - DNA, 33 bp, Homo sapien
ttcacttggccaaaaggaagaaattaggctgca

SEQ ID NO: 607793 - DNA, 33 bp, Homo sapien
ggcccctctatctgaaagtgggtagaggccaag

SEQ ID NO: 607794 - DNA, 33 bp, Homo sapien
ggcccctctatctgaatgtgggtagaggccaag

SEQ ID NO: 607795 - DNA, 33 bp, Homo sapien
ttgcgagttcaatgtaaaaggcaaggagaagac

SEQ ID NO: 607796 - DNA, 33 bp, Homo sapien
ttgcgagttcaatgtagaaggcaaggagaagac

SEQ ID NO: 607797 - DNA, 33 bp, Homo sapien
gtgaacttttctcatccagtcctgaggtttcca

SEQ ID NO: 607798 - DNA, 33 bp, Homo sapien
gtgaacttttctcatcgagtcctgaggtttcca

SEQ ID NO: 607799 - DNA, 33 bp, Homo sapien
cagcgttgagggcttccaaatttacactcccga

SEQ ID NO: 607800 - DNA, 33 bp, Homo sapien
cagcgttgagggcttcgaaatttacactcccga

SEQ ID NO: 607801 - DNA, 33 bp, Homo sapien
tactattaacccttccactgacttgacaatgca

SEQ ID NO: 607802 - DNA, 33 bp, Homo sapien
tactattaacccttccgctgacttgacaatgca

SEQ ID NO: 607803 - DNA, 33 bp, Homo sapien
atcggtaacttggacactcagttccctgaggac

SEQ ID NO: 607804 - DNA, 33 bp, Homo sapien
atcggtaacttggacattcagttccctgaggac

SEQ ID NO: 607805 - DNA, 33 bp, Homo sapien
gagctagatgagttgcaagtgtttgaatcttgc

SEQ ID NO: 607806 - DNA, 33 bp, Homo sapien
gagctagatgagttgcgagtgtttgaatcttgc

SEQ ID NO: 607807 - DNA, 33 bp, Homo sapien
tgctaggagaactccaatacttggctttgaacc

SEQ ID NO: 607808 - DNA, 33 bp, Homo sapien
tgctaggagaactccagtacttggctttgaacc

SEQ ID NO: 607809 - DNA, 33 bp, Homo sapien
tccactttcttccgccaatcacctacagatccc

SEQ ID NO: 607810 - DNA, 33 bp, Homo sapien
tccactttcttccgccgatcacctacagatccc

SEQ ID NO: 607811 - DNA, 33 bp, Homo sapien
ggaagcttcagtattcaagccagctgtttcctt

SEQ ID NO: 607812 - DNA, 33 bp, Homo sapien
ggaagcttcagtattccagccagctgtttcctt

SEQ ID NO: 607813 - DNA, 33 bp, Homo sapien
acttctgggttctcagcatatggttttgggtct

SEQ ID NO: 607814 - DNA, 33 bp, Homo sapien
acttctgggttctcagtatatggttttgggtct

SEQ ID NO: 607815 - DNA, 33 bp, Homo sapien
agaagccaaaacctggcaagtatcacaggctgg

SEQ ID NO: 607816 - DNA, 33 bp, Homo sapien
agaagccaaaacctggtaagtatcacaggctgg

SEQ ID NO: 607817 - DNA, 33 bp, Homo sapien
tcagctcaggctgttacgacaaaaataccacag

SEQ ID NO: 607818 - DNA, 33 bp, Homo sapien
tcagctcaggctgttatgacaaaaataccacag

SEQ ID NO: 607819 - DNA, 33 bp, Homo sapien
caagtacaactcacacaagtggtggagtgatga

SEQ ID NO: 607820 - DNA, 33 bp, Homo sapien
caagtacaactcacacgagtggtggagtgatga

SEQ ID NO: 607821 - DNA, 33 bp, Homo sapien
ctcacgctgccagtaacgacatacccaagattg

SEQ ID NO: 607822 - DNA, 33 bp, Homo sapien
ctcacgctgccagtaatgacatacccaagattg

SEQ ID NO: 607823 - DNA, 33 bp, Homo sapien
atattaaatattaagcacagtttcacacaaaat

SEQ ID NO: 607824 - DNA, 33 bp, Homo sapien
atattaaatattaagcgcagtttcacacaaaat

SEQ ID NO: 607825 - DNA, 33 bp, Homo sapien
ctttgccctccccgataaacgtcatcccgagtt

SEQ ID NO: 607826 - DNA, 33 bp, Homo sapien
ctttgccctccccgatgaacgtcatcccgagtt

SEQ ID NO: 607827 - DNA, 33 bp, Homo sapien
aattgtgcactttgaaggatgaattttatggtt

SEQ ID NO: 607828 - DNA, 33 bp, Homo sapien
aattgtgcactttgaatgatgaattttatggtt

SEQ ID NO: 607829 - DNA, 33 bp, Homo sapien
agctgtaatacagacacgcacaggatgcagctg

SEQ ID NO: 607830 - DNA, 33 bp, Homo sapien
agctgtaatacagacaggcacaggatgcagctg

SEQ ID NO: 607831 - DNA, 33 bp, Homo sapien
atctcgcccactaatacctcacacagtaaaact

SEQ ID NO: 607832 - DNA, 33 bp, Homo sapien
atctcgcccactaatatctcacacagtaaaact

SEQ ID NO: 607833 - DNA, 33 bp, Homo sapien
ccattcgaacatatgccaatgaaatgtgtggaa

SEQ ID NO: 607834 - DNA, 33 bp, Homo sapien
ccattcgaacatatgctaatgaaatgtgtggaa

SEQ ID NO: 607835 - DNA, 33 bp, Homo sapien
cggaataaaatatttcccatgcaaaaattctca

SEQ ID NO: 607836 - DNA, 33 bp, Homo sapien
cggaataaaatatttctcatgcaaaaattctca

SEQ ID NO: 607837 - DNA, 33 bp, Homo sapien
atgtccacgtcagaaagctgctgaatatcttcg

SEQ ID NO: 607838 - DNA, 33 bp, Homo sapien
atgtccacgtcagaaatctgctgaatatcttcg

SEQ ID NO: 607839 - DNA, 33 bp, Homo sapien
agtgagtgcccccttaaagctcttgctattaaa

SEQ ID NO: 607840 - DNA, 33 bp, Homo sapien
agtgagtgcccccttacagctcttgctattaaa

SEQ ID NO: 607841 - DNA, 33 bp, Homo sapien
gtaagtatttccgctcccaggaagtctgcatta

SEQ ID NO: 607842 - DNA, 33 bp, Homo sapien
gtaagtatttccgctctcaggaagtctgcatta

SEQ ID NO: 607843 - DNA, 33 bp, Homo sapien
gtcccttaaggagaacgctcaggaaagtaagta

SEQ ID NO: 607844 - DNA, 33 bp, Homo sapien
gtcccttaaggagaactctcaggaaagtaagta

SEQ ID NO: 607845 - DNA, 33 bp, Homo sapien
caaagtgtgaatgataaacctttcctatccttt

SEQ ID NO: 607846 - DNA, 33 bp, Homo sapien
caaagtgtgaatgatacacctttcctatccttt

SEQ ID NO: 607847 - DNA, 33 bp, Homo sapien
gtgcaacccgttaacccgaattctacatgaaag

SEQ ID NO: 607848 - DNA, 33 bp, Homo sapien
gtgcaacccgttaacctgaattctacatgaaag

SEQ ID NO: 607849 - DNA, 33 bp, Homo sapien
aaactcatacaagttaaaattttccattctttg

SEQ ID NO: 607850 - DNA, 33 bp, Homo sapien
aaactcatacaagttacaattttccattctttg

SEQ ID NO: 607851 - DNA, 33 bp, Homo sapien
ttttttgttgttgttcaaagaagtgattacatt

SEQ ID NO: 607852 - DNA, 33 bp, Homo sapien
ttttttgttgttgttcgaagaagtgattacatt

SEQ ID NO: 607853 - DNA, 33 bp, Homo sapien
ctacaaaaacttagataatcgagtctcaaatct

SEQ ID NO: 607854 - DNA, 33 bp, Homo sapien
ctacaaaaacttagatgatcgagtctcaaatct

SEQ ID NO: 607855 - DNA, 33 bp, Homo sapien
tcagaattactgaagcagctcaataaaactaaa

SEQ ID NO: 607856 - DNA, 33 bp, Homo sapien
tcagaattactgaagcggctcaataaaactaaa

SEQ ID NO: 607857 - DNA, 33 bp, Homo sapien
taaagttaaaggcaaaatttacacacgattttc

SEQ ID NO: 607858 - DNA, 33 bp, Homo sapien
taaagttaaaggcaaagtttacacacgattttc

SEQ ID NO: 607859 - DNA, 33 bp, Homo sapien
ccctaggtgcctactaccgctatgtctgacagc

SEQ ID NO: 607860 - DNA, 33 bp, Homo sapien
ccctaggtgcctactatcgctatgtctgacagc

SEQ ID NO: 607861 - DNA, 33 bp, Homo sapien; identical to SEQ ID NO: 607859

SEQ ID NO: 607862 - DNA, 33 bp, Homo sapien; identical to SEQ ID NO: 607860

SEQ ID NO: 607863 - DNA, 33 bp, Homo sapien
aataagtcaaactaaacgcataaatcagaatta

SEQ ID NO: 607864 - DNA, 33 bp, Homo sapien
aataagtcaaactaaaggcataaatcagaatta

SEQ ID NO: 607865 - DNA, 33 bp, Homo sapien; identical to SEQ ID NO: 607863

SEQ ID NO: 607866 - DNA, 33 bp, Homo sapien; identical to SEQ ID NO: 607864

SEQ ID NO: 607867 - DNA, 33 bp, Homo sapien; identical to SEQ ID NO: 607863

SEQ ID NO: 607868 - DNA, 33 bp, Homo sapien; identical to SEQ ID NO: 607864

SEQ ID NO: 607869 - DNA, 33 bp, Homo sapien
ttgcgcattcctagtaagcaaaaaaatttgtta

SEQ ID NO: 607870 - DNA, 33 bp, Homo sapien
ttgcgcattcctagtacgcaaaaaaatttgtta

SEQ ID NO: 607871 - DNA, 33 bp, Homo sapien
acataagactcacacactgggattttgtttact

SEQ ID NO: 607872 - DNA, 33 bp, Homo sapien
acataagactcacacattgggattttgtttact

SEQ ID NO: 607873 - DNA, 33 bp, Homo sapien
attcagagtagcataaaatttggctaaaagcca

SEQ ID NO: 607874 - DNA, 33 bp, Homo sapien
attcagagtagcataagatttggctaaaagcca

SEQ ID NO: 607875 - DNA, 33 bp, Homo sapien
cacttttggattcttacggactgtgagttagtc

SEQ ID NO: 607876 - DNA, 33 bp, Homo sapien
cacttttggattcttatggactgtgagttagtc

SEQ ID NO: 607877 - DNA, 33 bp, Homo sapien
taagatggccactacccgaacttacaggtgcca

SEQ ID NO: 607878 - DNA, 33 bp, Homo sapien
taagatggccactaccggaacttacaggtgcca

SEQ ID NO: 607879 - DNA, 33 bp, Homo sapien
tatttactgtatgatcacattcacacgatgttt

SEQ ID NO: 607880 - DNA, 33 bp, Homo sapien
tatttactgtatgatcgcattcacacgatgttt

SEQ ID NO: 607881 - DNA, 33 bp, Homo sapien
gagagttccagttcaaggcacccttgccagcat

SEQ ID NO: 607882 - DNA, 33 bp, Homo sapien
gagagttccagttcaatgcacccttgccagcat

SEQ ID NO: 607883 - DNA, 33 bp, Homo sapien
ggtaaacagacgagaacgctaggagtggaagaa

SEQ ID NO: 607884 - DNA, 33 bp, Homo sapien
ggtaaacagacgagaatgctaggagtggaagaa

SEQ ID NO: 607885 - DNA, 33 bp, Homo sapien
gctcaggtcctgacgccacccttccctactcag

SEQ ID NO: 607886 - DNA, 33 bp, Homo sapien
gctcaggtcctgacgctacccttccctactcag

SEQ ID NO: 607887 - DNA, 33 bp, Homo sapien
taaaagctattaaggaaaagaatgatcaatcaa

SEQ ID NO: 607888 - DNA, 33 bp, Homo sapien
taaaagctattaaggagaagaatgatcaatcaa

SEQ ID NO: 607889 - DNA, 33 bp, Homo sapien
acccagacagagggaacgaatgaattacaccac

SEQ ID NO: 607890 - DNA, 33 bp, Homo sapien
acccagacagagggaatgaatgaattacaccac

SEQ ID NO: 607891 - DNA, 33 bp, Homo sapien
tagcacctgtgcttacccgttccacttgaacct

SEQ ID NO: 607892 - DNA, 33 bp, Homo sapien
tagcacctgtgcttactcgttccacttgaacct

SEQ ID NO: 607893 - DNA, 33 bp, Homo sapien
gctgttctgcagctgaagtagaagcgtgttttg

SEQ ID NO: 607894 - DNA, 33 bp, Homo sapien
gctgttctgcagctgacgtagaagcgtgttttg

SEQ ID NO: 607895 - DNA, 33 bp, Homo sapien
ccaactctcgagcaggcatttaatgtttggagt

SEQ ID NO: 607896 - DNA, 33 bp, Homo sapien
ccaactctcgagcaggtatttaatgtttggagt

SEQ ID NO: 607897 - DNA, 33 bp, Homo sapien
catgctgttctgttcacgaagtgcaccaatcca

SEQ ID NO: 607898 - DNA, 33 bp, Homo sapien
catgctgttctgttcatgaagtgcaccaatcca

SEQ ID NO: 607899 - DNA, 33 bp, Homo sapien
atttgctaactcagcacatgttcatggagcacc

SEQ ID NO: 607900 - DNA, 33 bp, Homo sapien
atttgctaactcagcatatgttcatggagcacc

SEQ ID NO: 607901 - DNA, 33 bp, Homo sapien
ggaggaggcattgacaagagatgatctcagggc

SEQ ID NO: 607902 - DNA, 33 bp, Homo sapien
ggaggaggcattgacaggagatgatctcagggc

SEQ ID NO: 607903 - DNA, 33 bp, Homo sapien
tgtcctggtctagaaccgtctgccctgagatca

SEQ ID NO: 607904 - DNA, 33 bp, Homo sapien
tgtcctggtctagaactgtctgccctgagatca

SEQ ID NO: 607905 - DNA, 33 bp, Homo sapien
cttttcattttcgtcaactgtatatcttatttg

SEQ ID NO: 607906 - DNA, 33 bp, Homo sapien
cttttcattttcgtcatctgtatatcttatttg

SEQ ID NO: 607907 - DNA, 33 bp, Homo sapien
tgctaaaatcaggttgcaaatccagcccgccac

SEQ ID NO: 607908 - DNA, 33 bp, Homo sapien
tgctaaaatcaggttgtaaatccagcccgccac

SEQ ID NO: 607909 - DNA, 33 bp, Homo sapien
tgatccgcccttctcgccctctcaaaatgttgg

SEQ ID NO: 607910 - DNA, 33 bp, Homo sapien
tgatccgcccttctcggcctctcaaaatgttgg

SEQ ID NO: 607911 - DNA, 33 bp, Homo sapien
gagatgcttaggagggacagtggagttcttggc

SEQ ID NO: 607912 - DNA, 33 bp, Homo sapien
gagatgcttaggaggggcagtggagttcttggc

SEQ ID NO: 607913 - DNA, 33 bp, Homo sapien
cttgagccacctttcgaagcctcaggaaggacc

SEQ ID NO: 607914 - DNA, 33 bp, Homo sapien
cttgagccacctttcggagcctcaggaaggacc

SEQ ID NO: 607915 - DNA, 33 bp, Homo sapien
gctgaaagaagaaaagaatggtcccgaatgagc

SEQ ID NO: 607916 - DNA, 33 bp, Homo sapien
gctgaaagaagaaaaggatggtcccgaatgagc

SEQ ID NO: 607917 - DNA, 33 bp, Homo sapien
ttgggagcagccttcccaagcatctgacccttt

SEQ ID NO: 607918 - DNA, 33 bp, Homo sapien
ttgggagcagccttcctaagcatctgacccttt

SEQ ID NO: 607919 - DNA, 33 bp, Homo sapien
tgaaccatctgcgatccagctgataggtttctg

SEQ ID NO: 607920 - DNA, 33 bp, Homo sapien
tgaaccatctgcgatctagctgataggtttctg

SEQ ID NO: 607921 - DNA, 33 bp, Homo sapien
agctgcacacaggttacgaatacaaacgatgat

SEQ ID NO: 607922 - DNA, 33 bp, Homo sapien
agctgcacacaggttatgaatacaaacgatgat

SEQ ID NO: 607923 - DNA, 33 bp, Homo sapien
cagcagaagaaagccaatctattgagaataatc

SEQ ID NO: 607924 - DNA, 33 bp, Homo sapien
cagcagaagaaagccagtctattgagaataatc

SEQ ID NO: 607925 - DNA, 33 bp, Homo sapien
tggaggggttttcaaaatcttccgtacataaga

SEQ ID NO: 607926 - DNA, 33 bp, Homo sapien
tggaggggttttcaaagtcttccgtacataaga

SEQ ID NO: 607927 - DNA, 33 bp, Homo sapien
gatagctcaagttcgaaagaccaggtttcaaac

SEQ ID NO: 607928 - DNA, 33 bp, Homo sapien
gatagctcaagttcgagagaccaggtttcaaac

SEQ ID NO: 607929 - DNA, 33 bp, Homo sapien
caaagcctggaacttacaatgtttgaaacctgg

SEQ ID NO: 607930 - DNA, 33 bp, Homo sapien
caaagcctggaacttataatgtttgaaacctgg

SEQ ID NO: 607931 - DNA, 33 bp, Homo sapien
tctttttgaagcatggaaaacaaatcttttatg

SEQ ID NO: 607932 - DNA, 33 bp, Homo sapien
tctttttgaagcatgggaaacaaatcttttatg

SEQ ID NO: 607933 - DNA, 33 bp, Homo sapien
agatgtatttttctgacactccgttgctgaatt

SEQ ID NO: 607934 - DNA, 33 bp, Homo sapien
agatgtatttttctgatactccgttgctgaatt

SEQ ID NO: 607935 - DNA, 33 bp, Homo sapien
gcatttttaacatggcccagggatacacaagag

SEQ ID NO: 607936 - DNA, 33 bp, Homo sapien
gcatttttaacatggctcagggatacacaagag

SEQ ID NO: 607937 - DNA, 33 bp, Homo sapien
aatgcagggccttcaaaagattttctcagatga

SEQ ID NO: 607938 - DNA, 33 bp, Homo sapien
aatgcagggccttcaagagattttctcagatga

SEQ ID NO: 607939 - DNA, 33 bp, Homo sapien
agactcagaaaaagcaagggctgaggggaagta

SEQ ID NO: 607940 - DNA, 33 bp, Homo sapien
agactcagaaaaagcaggggctgaggggaagta

SEQ ID NO: 607941 - DNA, 33 bp, Homo sapien
tgatgttacctctggccattccaagtatttttt

SEQ ID NO: 607942 - DNA, 33 bp, Homo sapien
tgatgttacctctggctattccaagtatttttt

SEQ ID NO: 607943 - DNA, 33 bp, Homo sapien
gtagtagctattgataataacagaaattgaata

SEQ ID NO: 607944 - DNA, 33 bp, Homo sapien
gtagtagctattgatagtaacagaaattgaata

SEQ ID NO: 607945 - DNA, 33 bp, Homo sapien
aactcttgcctacacagtctggcttcctttctg

SEQ ID NO: 607946 - DNA, 33 bp, Homo sapien
aactcttgcctacacattctggcttcctttctg

SEQ ID NO: 607947 - DNA, 33 bp, Homo sapien
ttaatctgggtaaagaacaacaatttatacttc

SEQ ID NO: 607948 - DNA, 33 bp, Homo sapien
ttaatctgggtaaagagcaacaatttatacttc

SEQ ID NO: 607949 - DNA, 33 bp, Homo sapien
tttctccagatgtgccaataccatttattaaat

SEQ ID NO: 607950 - DNA, 33 bp, Homo sapien
tttctccagatgtgccgataccatttattaaat

SEQ ID NO: 607951 - DNA, 33 bp, Homo sapien
taaaggtaaatccatgccataaaagttgtaata

SEQ ID NO: 607952 - DNA, 33 bp, Homo sapien
taaaggtaaatccatgtcataaaagttgtaata

SEQ ID NO: 607953 - DNA, 33 bp, Homo sapien
tatttgttatatgaagaaataagcaatcatatc

SEQ ID NO: 607954 - DNA, 33 bp, Homo sapien
tatttgttatatgaaggaataagcaatcatatc

SEQ ID NO: 607955 - DNA, 33 bp, Homo sapien
caaaattaaaccttcaaatattctagagaccac

SEQ ID NO: 607956 - DNA, 33 bp, Homo sapien
caaaattaaaccttcagatattctagagaccac

SEQ ID NO: 607957 - DNA, 33 bp, Homo sapien
ttggaacagctggctgaaaactaaacttgctcg

SEQ ID NO: 607958 - DNA, 33 bp, Homo sapien
ttggaacagctggctggaaactaaacttgctcg

SEQ ID NO: 607959 - DNA, 33 bp, Homo sapien
ctgcactctggcgcgaatcccacagctgccacg

SEQ ID NO: 607960 - DNA, 33 bp, Homo sapien
ctgcactctggcgcgagtcccacagctgccacg

SEQ ID NO: 607961 - DNA, 33 bp, Homo sapien
tgtttgattcgccacaaatttctccaattatgt

SEQ ID NO: 607962 - DNA, 33 bp, Homo sapien
tgtttgattcgccacatatttctccaattatgt

SEQ ID NO: 607963 - DNA, 33 bp, Homo sapien
aactaaatccaggatcaagggctagattaaaat

SEQ ID NO: 607964 - DNA, 33 bp, Homo sapien
aactaaatccaggatcgagggctagattaaaat

SEQ ID NO: 607965 - DNA, 33 bp, Homo sapien
gaatagtgaggagctacgaggaagacaaaacag

SEQ ID NO: 607966 - DNA, 33 bp, Homo sapien
gaatagtgaggagctatgaggaagacaaaacag

SEQ ID NO: 607967 - DNA, 33 bp, Homo sapien
actgtctggaataaacacatttccttgacttct

SEQ ID NO: 607968 - DNA, 33 bp, Homo sapien
actgtctggaataaacgcatttccttgacttct

SEQ ID NO: 607969 - DNA, 33 bp, Homo sapien
gatctcctgtgccagacggtccaggcagagcgg

SEQ ID NO: 607970 - DNA, 33 bp, Homo sapien
gatctcctgtgccagatggtccaggcagagcgg

SEQ ID NO: 607971 - DNA, 33 bp, Homo sapien
gactgtgaatttgaacaacgtcttcagtgtggt

SEQ ID NO: 607972 - DNA, 33 bp, Homo sapien
gactgtgaatttgaaccacgtcttcagtgtggt

SEQ ID NO: 607973 - DNA, 33 bp, Homo sapien
atatcttttgtgggagcacccaattcaacccac

SEQ ID NO: 607974 - DNA, 33 bp, Homo sapien
atatcttttgtgggaggacccaattcaacccac

SEQ ID NO: 607975 - DNA, 33 bp, Homo sapien
atgcatcagttttctccacttgaactccacctt

SEQ ID NO: 607976 - DNA, 33 bp, Homo sapien
atgcatcagttttctctacttgaactccacctt

SEQ ID NO: 607977 - DNA, 33 bp, Homo sapien
ctgcgagactgtttcacagatgctcaagacacc

SEQ ID NO: 607978 - DNA, 33 bp, Homo sapien
ctgcgagactgtttcatagatgctcaagacacc

SEQ ID NO: 607979 - DNA, 33 bp, Homo sapien
agcttcttggatttcacagcgacatctcagttt

SEQ ID NO: 607980 - DNA, 33 bp, Homo sapien
agcttcttggatttcagagcgacatctcagttt

SEQ ID NO: 607981 - DNA, 33 bp, Homo sapien
ggattcattcattcagccaacactgaacacaga

SEQ ID NO: 607982 - DNA, 33 bp, Homo sapien
ggattcattcattcaggcaacactgaacacaga

SEQ ID NO: 607983 - DNA, 33 bp, Homo sapien
ttgatcctgaagtggacctagagttggagggac

SEQ ID NO: 607984 - DNA, 33 bp, Homo sapien
ttgatcctgaagtggatctagagttggagggac

SEQ ID NO: 607985 - DNA, 33 bp, Homo sapien
ttgcaactaagagtcacgattggccgggcacag

SEQ ID NO: 607986 - DNA, 33 bp, Homo sapien
ttgcaactaagagtcatgattggccgggcacag

SEQ ID NO: 607987 - DNA, 33 bp, Homo sapien
tttggtagctcataaaatcatcaggaatactgc

SEQ ID NO: 607988 - DNA, 33 bp, Homo sapien
tttggtagctcataaattcatcaggaatactgc

SEQ ID NO: 607989 - DNA, 33 bp, Homo sapien
acaaacaacctgagggcacaatgacttcagtga

SEQ ID NO: 607990 - DNA, 33 bp, Homo sapien
acaaacaacctgagggtacaatgacttcagtga

SEQ ID NO: 607991 - DNA, 33 bp, Homo sapien
tgcactctggtgagaccgaaaggtgtccatgtg

SEQ ID NO: 607992 - DNA, 33 bp, Homo sapien
tgcactctggtgagactgaaaggtgtccatgtg

SEQ ID NO: 607993 - DNA, 33 bp, Homo sapien
gtacaaggcagtcaaacctgttgacctgctggc

SEQ ID NO: 607994 - DNA, 33 bp, Homo sapien
gtacaaggcagtcaaatctgttgacctgctggc

SEQ ID NO: 607995 - DNA, 33 bp, Homo sapien
aacttaacctttttcagtcaatgatgtatgcag

SEQ ID NO: 607996 - DNA, 33 bp, Homo sapien
aacttaacctttttcattcaatgatgtatgcag

SEQ ID NO: 607997 - DNA, 33 bp, Homo sapien
ttaaaatctttcgcaaacttgaaaatgccctaa

SEQ ID NO: 607998 - DNA, 33 bp, Homo sapien
ttaaaatctttcgcaagcttgaaaatgccctaa

SEQ ID NO: 607999 - DNA, 33 bp, Homo sapien
gaggattataagaagacggggttgggacacaga

SEQ ID NO: 608000 - DNA, 33 bp, Homo sapien
gaggattataagaagagggggttgggacacaga

SEQ ID NO: 608001 - DNA, 33 bp, Homo sapien
caacaccacgtgcaaaaaccgatgcagacttgt

SEQ ID NO: 608002 - DNA, 33 bp, Homo sapien
caacaccacgtgcaaagaccgatgcagacttgt

SEQ ID NO: 608003 - DNA, 33 bp, Homo sapien
ttccatcctcaacctaccacacgcatcagtgac

SEQ ID NO: 608004 - DNA, 33 bp, Homo sapien
ttccatcctcaacctatcacacgcatcagtgac

SEQ ID NO: 608005 - DNA, 33 bp, Homo sapien
tgtcttttattgtgagaccgcgtccttccaaaa

SEQ ID NO: 608006 - DNA, 33 bp, Homo sapien
tgtcttttattgtgaggccgcgtccttccaaaa

SEQ ID NO: 608007 - DNA, 33 bp, Homo sapien
ggtttaatcctccagccactgtttacagagaac

SEQ ID NO: 608008 - DNA, 33 bp, Homo sapien
ggtttaatcctccagcgactgtttacagagaac

SEQ ID NO: 608009 - DNA, 33 bp, Homo sapien
ataactccaaaatttaccaaagacattagtgag

SEQ ID NO: 608010 - DNA, 33 bp, Homo sapien
ataactccaaaatttatcaaagacattagtgag

SEQ ID NO: 608011 - DNA, 33 bp, Homo sapien
ctgtcaaatcatagacacttactcagcaaaggg

SEQ ID NO: 608012 - DNA, 33 bp, Homo sapien
ctgtcaaatcatagactcttactcagcaaaggg

SEQ ID NO: 608013 - DNA, 33 bp, Homo sapien
cacagccttgctaacaaccaacacacgccctcc

SEQ ID NO: 608014 - DNA, 33 bp, Homo sapien
cacagccttgctaacagccaacacacgccctcc

SEQ ID NO: 608015 - DNA, 33 bp, Homo sapien
atttggactatgggaacatcacccagcatgaag

SEQ ID NO: 608016 - DNA, 33 bp, Homo sapien
atttggactatgggaatatcacccagcatgaag

SEQ ID NO: 608017 - DNA, 33 bp, Homo sapien
gactgcatcatttaagaattaaactggccccta

SEQ ID NO: 608018 - DNA, 33 bp, Homo sapien
gactgcatcatttaaggattaaactggccccta

SEQ ID NO: 608019 - DNA, 33 bp, Homo sapien
ggggcctctgcgctgcaaactccagcgaacacg

SEQ ID NO: 608020 - DNA, 33 bp, Homo sapien
ggggcctctgcgctgcgaactccagcgaacacg

SEQ ID NO: 608021 - DNA, 33 bp, Homo sapien
atcgtaaccattttaaatagacggttcaggggc

SEQ ID NO: 608022 - DNA, 33 bp, Homo sapien
atcgtaaccattttaagtagacggttcaggggc

SEQ ID NO: 608023 - DNA, 33 bp, Homo sapien
caggagggccatgctaaacagggataccctcct

SEQ ID NO: 608024 - DNA, 33 bp, Homo sapien
caggagggccatgctacacagggataccctcct

SEQ ID NO: 608025 - DNA, 33 bp, Homo sapien
ggtttgcagcagatccacgatggtttccctgtt

SEQ ID NO: 608026 - DNA, 33 bp, Homo sapien
ggtttgcagcagatccgcgatggtttccctgtt

SEQ ID NO: 608027 - DNA, 33 bp, Homo sapien
ggaaggaaaattctcacggcaaaatgttaggac

SEQ ID NO: 608028 - DNA, 33 bp, Homo sapien
ggaaggaaaattctcatggcaaaatgttaggac

SEQ ID NO: 608029 - DNA, 33 bp, Homo sapien
tgcatgttgtaattaccgccgtgcacatttatt

SEQ ID NO: 608030 - DNA, 33 bp, Homo sapien
tgcatgttgtaattactgccgtgcacatttatt

SEQ ID NO: 608031 - DNA, 33 bp, Homo sapien
cagtggagacggggacaggtcctgtgatggtta

SEQ ID NO: 608032 - DNA, 33 bp, Homo sapien
cagtggagacggggacgggtcctgtgatggtta

SEQ ID NO: 608033 - DNA, 33 bp, Homo sapien
ttccacatctgtaaaacgagaggggactgtgct

SEQ ID NO: 608034 - DNA, 33 bp, Homo sapien
ttccacatctgtaaaatgagaggggactgtgct

SEQ ID NO: 608035 - DNA, 33 bp, Homo sapien
gcctttccagtctctacgctacacgttttgcat

SEQ ID NO: 608036 - DNA, 33 bp, Homo sapien
gcctttccagtctctatgctacacgttttgcat

SEQ ID NO: 608037 - DNA, 33 bp, Homo sapien
ccaaaaaacacccagacaactagataggaaaaa

SEQ ID NO: 608038 - DNA, 33 bp, Homo sapien
ccaaaaaacacccagagaactagataggaaaaa

SEQ ID NO: 608039 - DNA, 33 bp, Homo sapien
ctcccgaaaaggaataacgctgaatcgtcacag

SEQ ID NO: 608040 - DNA, 33 bp, Homo sapien
ctcccgaaaaggaatagcgctgaatcgtcacag

SEQ ID NO: 608041 - DNA, 33 bp, Homo sapien
ccaggagacttcccctaagagagcctccacagg

SEQ ID NO: 608042 - DNA, 33 bp, Homo sapien
ccaggagacttcccctgagagagcctccacagg

SEQ ID NO: 608043 - DNA, 33 bp, Homo sapien
ctgactttcatcatttcaaacaatggagagaca

SEQ ID NO: 608044 - DNA, 33 bp, Homo sapien
ctgactttcatcatttgaaacaatggagagaca

SEQ ID NO: 608045 - DNA, 33 bp, Homo sapien
tcgaagccatctttcaactcctgctatttgatg

SEQ ID NO: 608046 - DNA, 33 bp, Homo sapien
tcgaagccatctttcagctcctgctatttgatg

SEQ ID NO: 608047 - DNA, 33 bp, Homo sapien
ccagaaagaaaaaaaacgccacagtgctgagtt

SEQ ID NO: 608048 - DNA, 33 bp, Homo sapien
ccagaaagaaaaaaaaggccacagtgctgagtt

SEQ ID NO: 608049 - DNA, 33 bp, Homo sapien
gcccacatgcagcatcacaaacatgagagctgc

SEQ ID NO: 608050 - DNA, 33 bp, Homo sapien
gcccacatgcagcatcgcaaacatgagagctgc

SEQ ID NO: 608051 - DNA, 33 bp, Homo sapien
aagttaaataatggccaacttcattggaccctg

SEQ ID NO: 608052 - DNA, 33 bp, Homo sapien
aagttaaataatggcctacttcattggaccctg

SEQ ID NO: 608053 - DNA, 33 bp, Homo sapien
gattgtctgccttacactatcgcctcccgggga

SEQ ID NO: 608054 - DNA, 33 bp, Homo sapien
gattgtctgccttacattatcgcctcccgggga

SEQ ID NO: 608055 - DNA, 33 bp, Homo sapien
aatgtgactgcttcttaaaattcccaccctcac

SEQ ID NO: 608056 - DNA, 33 bp, Homo sapien
aatgtgactgcttcttcaaattcccaccctcac

SEQ ID NO: 608057 - DNA, 33 bp, Homo sapien
tccacccactccccaccaaccaaaggcacaagc

SEQ ID NO: 608058 - DNA, 33 bp, Homo sapien
tccacccactccccactaaccaaaggcacaagc

SEQ ID NO: 608059 - DNA, 33 bp, Homo sapien
tcgttgaatgctcacaatgacccaatgggatga

SEQ ID NO: 608060 - DNA, 33 bp, Homo sapien
tcgttgaatgctcacagtgacccaatgggatga

SEQ ID NO: 608061 - DNA, 33 bp, Homo sapien
cagttctgttggtgagaccatctcttagtttta

SEQ ID NO: 608062 - DNA, 33 bp, Homo sapien
cagttctgttggtgaggccatctcttagtttta

SEQ ID NO: 608063 - DNA, 33 bp, Homo sapien
ctaagacacatcacaccagtgaaagtcaaagaa

SEQ ID NO: 608064 - DNA, 33 bp, Homo sapien
ctaagacacatcacacgagtgaaagtcaaagaa

SEQ ID NO: 608065 - DNA, 33 bp, Homo sapien
ctaacctgttttaatcccatcaattgagttgtt

SEQ ID NO: 608066 - DNA, 33 bp, Homo sapien
ctaacctgttttaatctcatcaattgagttgtt

SEQ ID NO: 608067 - DNA, 33 bp, Homo sapien
aaagtgctccaaatcactagttattagggaaat

SEQ ID NO: 608068 - DNA, 33 bp, Homo sapien
aaagtgctccaaatcattagttattagggaaat

SEQ ID NO: 608069 - DNA, 33 bp, Homo sapien
aattttactcaaacagaacttgccaagattaaa

SEQ ID NO: 608070 - DNA, 33 bp, Homo sapien
aattttactcaaacaggacttgccaagattaaa

SEQ ID NO: 608071 - DNA, 33 bp, Homo sapien
tgtaacatgacaggataaatcattagagtcaac

SEQ ID NO: 608072 - DNA, 33 bp, Homo sapien
tgtaacatgacaggatcaatcattagagtcaac

SEQ ID NO: 608073 - DNA, 33 bp, Homo sapien
aagcgatacgggtttacaggaaacactactgaa

SEQ ID NO: 608074 - DNA, 33 bp, Homo sapien
aagcgatacgggtttagaggaaacactactgaa

SEQ ID NO: 608075 - DNA, 33 bp, Homo sapien
caataaaaaggaacaactgttggtacaagccat

SEQ ID NO: 608076 - DNA, 33 bp, Homo sapien
caataaaaaggaacaagtgttggtacaagccat

SEQ ID NO: 608077 - DNA, 33 bp, Homo sapien
agccataacttgggaaaatctcatggtaattat

SEQ ID NO: 608078 - DNA, 33 bp, Homo sapien
agccataacttgggaagatctcatggtaattat

SEQ ID NO: 608079 - DNA, 33 bp, Homo sapien
atggatggagcagtaacggtatagggactaggg

SEQ ID NO: 608080 - DNA, 33 bp, Homo sapien
atggatggagcagtaagggtatagggactaggg

SEQ ID NO: 608081 - DNA, 33 bp, Homo sapien
ggaatgctaaatactcaagaccacgctggttgg

SEQ ID NO: 608082 - DNA, 33 bp, Homo sapien
ggaatgctaaatactccagaccacgctggttgg

SEQ ID NO: 608083 - DNA, 33 bp, Homo sapien
cataagctcccttccacgccctgataaaacaag

SEQ ID NO: 608084 - DNA, 33 bp, Homo sapien
cataagctcccttccatgccctgataaaacaag

SEQ ID NO: 608085 - DNA, 33 bp, Homo sapien
tactatgggtcataaagtcaggaaggactatgc

SEQ ID NO: 608086 - DNA, 33 bp, Homo sapien
tactatgggtcataaattcaggaaggactatgc

SEQ ID NO: 608087 - DNA, 33 bp, Homo sapien
actatgtctgcctccaataacctataaactttt

SEQ ID NO: 608088 - DNA, 33 bp, Homo sapien
actatgtctgcctccactaacctataaactttt

SEQ ID NO: 608089 - DNA, 33 bp, Homo sapien
tactagggagacttggcagggtttgtagtaaag

SEQ ID NO: 608090 - DNA, 33 bp, Homo sapien
tactagggagacttggtagggtttgtagtaaag

SEQ ID NO: 608091 - DNA, 33 bp, Homo sapien
acagcttccactgttcaaaacaacctggcattg

SEQ ID NO: 608092 - DNA, 33 bp, Homo sapien
acagcttccactgttcgaaacaacctggcattg

SEQ ID NO: 608093 - DNA, 33 bp, Homo sapien
ggcatggagaatgtgacgtggctggatcctgcc

SEQ ID NO: 608094 - DNA, 33 bp, Homo sapien
ggcatggagaatgtgaggtggctggatcctgcc

SEQ ID NO: 608095 - DNA, 33 bp, Homo sapien
agcaaaattattttccccaactcatataatcag

SEQ ID NO: 608096 - DNA, 33 bp, Homo sapien
agcaaaattattttcctcaactcatataatcag

SEQ ID NO: 608097 - DNA, 33 bp, Homo sapien
ttttcctacaaggttaggtaccaaaggaagagc

SEQ ID NO: 608098 - DNA, 33 bp, Homo sapien
ttttcctacaaggttatgtaccaaaggaagagc

SEQ ID NO: 608099 - DNA, 33 bp, Homo sapien
tttatttggaatttcacgaatgtagaatactta

SEQ ID NO: 608100 - DNA, 33 bp, Homo sapien
tttatttggaatttcatgaatgtagaatactta

SEQ ID NO: 608101 - DNA, 33 bp, Homo sapien
cccacccacatcctgacattggtaagagcagta

SEQ ID NO: 608102 - DNA, 33 bp, Homo sapien
cccacccacatcctgatattggtaagagcagta

SEQ ID NO: 608103 - DNA, 33 bp, Homo sapien
atttcccattttcaagcagagctaacacagctt

SEQ ID NO: 608104 - DNA, 33 bp, Homo sapien
atttcccattttcaaggagagctaacacagctt

SEQ ID NO: 608105 - DNA, 33 bp, Homo sapien
gctcttgctccttctcacacaaatctaaaattt

SEQ ID NO: 608106 - DNA, 33 bp, Homo sapien
gctcttgctccttctcgcacaaatctaaaattt

SEQ ID NO: 608107 - DNA, 33 bp, Homo sapien
atcagtgacaacatcaatccagagtgtagtaat

SEQ ID NO: 608108 - DNA, 33 bp, Homo sapien
atcagtgacaacatcagtccagagtgtagtaat

SEQ ID NO: 608109 - DNA, 33 bp, Homo sapien
accaaatggtataaaaaacaggaatttattgtt

SEQ ID NO: 608110 - DNA, 33 bp, Homo sapien
accaaatggtataaaagacaggaatttattgtt

SEQ ID NO: 608111 - DNA, 33 bp, Homo sapien
aggccttctcttgtgagccccatgctatatgtt

SEQ ID NO: 608112 - DNA, 33 bp, Homo sapien
aggccttctcttgtgatccccatgctatatgtt

SEQ ID NO: 608113 - DNA, 33 bp, Homo sapien
ccatcctgctggtagacgtggggcaggttatca

SEQ ID NO: 608114 - DNA, 33 bp, Homo sapien
ccatcctgctggtagatgtggggcaggttatca

SEQ ID NO: 608115 - DNA, 33 bp, Homo sapien
tttgttagtggtaaacaaggttttctgtgtgtg

SEQ ID NO: 608116 - DNA, 33 bp, Homo sapien
tttgttagtggtaaacgaggttttctgtgtgtg

SEQ ID NO: 608117 - DNA, 33 bp, Homo sapien
gctccaaaagataactaaacaattctcaactgt

SEQ ID NO: 608118 - DNA, 33 bp, Homo sapien
gctccaaaagataactgaacaattctcaactgt

SEQ ID NO: 608119 - DNA, 33 bp, Homo sapien
agagatgtgcttggacaactgccttcacgcagg

SEQ ID NO: 608120 - DNA, 33 bp, Homo sapien
agagatgtgcttggacgactgccttcacgcagg

SEQ ID NO: 608121 - DNA, 33 bp, Homo sapien
tgggagcccgttgctaaggtactaggagagctg

SEQ ID NO: 608122 - DNA, 33 bp, Homo sapien
tgggagcccgttgctagggtactaggagagctg

SEQ ID NO: 608123 - DNA, 33 bp, Homo sapien
tgtgagaataagcatgaagagtcttgcttttaa

SEQ ID NO: 608124 - DNA, 33 bp, Homo sapien
tgtgagaataagcatgcagagtcttgcttttaa

SEQ ID NO: 608125 - DNA, 33 bp, Homo sapien
aaaacagaaacaaaaccgtatgtggacactgat

SEQ ID NO: 608126 - DNA, 33 bp, Homo sapien
aaaacagaaacaaaactgtatgtggacactgat

SEQ ID NO: 608127 - DNA, 33 bp, Homo sapien
tgctaagtgtgctctcacgaccagtccatccag

SEQ ID NO: 608128 - DNA, 33 bp, Homo sapien
tgctaagtgtgctctcgcgaccagtccatccag

SEQ ID NO: 608129 - DNA, 33 bp, Homo sapien
ttgcatgaggtttacacggctcttggtgattaa

SEQ ID NO: 608130 - DNA, 33 bp, Homo sapien
ttgcatgaggtttacatggctcttggtgattaa

SEQ ID NO: 608131 - DNA, 33 bp, Homo sapien
aagacgtattaattggcagcccaaatcatctca

SEQ ID NO: 608132 - DNA, 33 bp, Homo sapien
aagacgtattaattggtagcccaaatcatctca

SEQ ID NO: 608133 - DNA, 33 bp, Homo sapien
ctgggagagagatgaacggtacgcctgtgggaa

SEQ ID NO: 608134 - DNA, 33 bp, Homo sapien
ctgggagagagatgaatggtacgcctgtgggaa

SEQ ID NO: 608135 - DNA, 33 bp, Homo sapien
ggtcagcatcaaagccagattagctccccagct

SEQ ID NO: 608136 - DNA, 33 bp, Homo sapien
ggtcagcatcaaagccggattagctccccagct

SEQ ID NO: 608137 - DNA, 33 bp, Homo sapien
ctcgttttaaatcaaggattggccacctcctac

SEQ ID NO: 608138 - DNA, 33 bp, Homo sapien
ctcgttttaaatcaagtattggccacctcctac

SEQ ID NO: 608139 - DNA, 33 bp, Homo sapien
ggagggaagataaggaaacagatggtgaatgtg

SEQ ID NO: 608140 - DNA, 33 bp, Homo sapien
ggagggaagataaggacacagatggtgaatgtg

SEQ ID NO: 608141 - DNA, 33 bp, Homo sapien
accaggggcagctttacggaggttaccttttca

SEQ ID NO: 608142 - DNA, 33 bp, Homo sapien
accaggggcagctttatggaggttaccttttca

SEQ ID NO: 608143 - DNA, 33 bp, Homo sapien
caaaatgggaatgatacgaatgcccactattcc

SEQ ID NO: 608144 - DNA, 33 bp, Homo sapien
caaaatgggaatgatatgaatgcccactattcc

SEQ ID NO: 608145 - DNA, 33 bp, Homo sapien
actttcaaatagaaaacgaaactgggcatctct

SEQ ID NO: 608146 - DNA, 33 bp, Homo sapien
actttcaaatagaaaatgaaactgggcatctct

SEQ ID NO: 608147 - DNA, 33 bp, Homo sapien
ggctctccccggggcaaaagaactccaagccga

SEQ ID NO: 608148 - DNA, 33 bp, Homo sapien
ggctctccccggggcagaagaactccaagccga

SEQ ID NO: 608149 - DNA, 33 bp, Homo sapien
ttaggttcagtttacaaatttcctgcacagtcc

SEQ ID NO: 608150 - DNA, 33 bp, Homo sapien
ttaggttcagtttacagatttcctgcacagtcc

SEQ ID NO: 608151 - DNA, 33 bp, Homo sapien
tggctgcctcaggcataaaaacattcctgggct

SEQ ID NO: 608152 - DNA, 33 bp, Homo sapien
tggctgcctcaggcatgaaaacattcctgggct

SEQ ID NO: 608153 - DNA, 33 bp, Homo sapien
caggaggtcacatccccgagtttccctgagttt

SEQ ID NO: 608154 - DNA, 33 bp, Homo sapien
caggaggtcacatccctgagtttccctgagttt

SEQ ID NO: 608155 - DNA, 33 bp, Homo sapien
gctggatccttgcaaacaggagtgtcacccaac

SEQ ID NO: 608156 - DNA, 33 bp, Homo sapien
gctggatccttgcaaataggagtgtcacccaac

SEQ ID NO: 608157 - DNA, 33 bp, Homo sapien
ctgggaccagcaccccaatatgcatgatccgtg

SEQ ID NO: 608158 - DNA, 33 bp, Homo sapien
ctgggaccagcacccccatatgcatgatccgtg

SEQ ID NO: 608159 - DNA, 33 bp, Homo sapien
atgcagaaacgtccataatctaaaaatatcaaa

SEQ ID NO: 608160 - DNA, 33 bp, Homo sapien
atgcagaaacgtccatgatctaaaaatatcaaa

SEQ ID NO: 608161 - DNA, 33 bp, Homo sapien
gagttgccttgagaacaaagtccagggaggaaa

SEQ ID NO: 608162 - DNA, 33 bp, Homo sapien
gagttgccttgagaacgaagtccagggaggaaa

SEQ ID NO: 608163 - DNA, 33 bp, Homo sapien
acgaccgcagtggccgaaactcgggactccgcg

SEQ ID NO: 608164 - DNA, 33 bp, Homo sapien
acgaccgcagtggccggaactcgggactccgcg

SEQ ID NO: 608165 - DNA, 33 bp, Homo sapien
tcaacaaatataataaagtgaaatcagcaagag

SEQ ID NO: 608166 - DNA, 33 bp, Homo sapien
tcaacaaatataataaggtgaaatcagcaagag

SEQ ID NO: 608167 - DNA, 33 bp, Homo sapien
tgaggcagcttgacaactgggatagtgtctctt

SEQ ID NO: 608168 - DNA, 33 bp, Homo sapien
tgaggcagcttgacaattgggatagtgtctctt

SEQ ID NO: 608169 - DNA, 33 bp, Homo sapien
agtgatatctttctaccaagagagatgtctatg

SEQ ID NO: 608170 - DNA, 33 bp, Homo sapien
agtgatatctttctacgaagagagatgtctatg

SEQ ID NO: 608171 - DNA, 33 bp, Homo sapien
acacgatgctcctaaacgtgtatgtacctctta

SEQ ID NO: 608172 - DNA, 33 bp, Homo sapien
acacgatgctcctaaatgtgtatgtacctctta

SEQ ID NO: 608173 - DNA, 33 bp, Homo sapien
agtttgcttgtcgttacattcagggagtttcaa

SEQ ID NO: 608174 - DNA, 33 bp, Homo sapien
agtttgcttgtcgttatattcagggagtttcaa

SEQ ID NO: 608175 - DNA, 33 bp, Homo sapien
taccaaagagaacaaactgtgagataatagatt

SEQ ID NO: 608176 - DNA, 33 bp, Homo sapien
taccaaagagaacaaattgtgagataatagatt

SEQ ID NO: 608177 - DNA, 33 bp, Homo sapien
tttctggcacaatgtaccatcttggaacaccag

SEQ ID NO: 608178 - DNA, 33 bp, Homo sapien
tttctggcacaatgtagcatcttggaacaccag

SEQ ID NO: 608179 - DNA, 33 bp, Homo sapien
gaaacttcagtggtaaaactttgatacagaatc

SEQ ID NO: 608180 - DNA, 33 bp, Homo sapien
gaaacttcagtggtaagactttgatacagaatc

SEQ ID NO: 608181 - DNA, 33 bp, Homo sapien
tatataaactcatcccaaagccccgttcacctc

SEQ ID NO: 608182 - DNA, 33 bp, Homo sapien
tatataaactcatcccgaagccccgttcacctc

SEQ ID NO: 608183 - DNA, 33 bp, Homo sapien
gatgaaacggcgaccgcatgtgggccactgggc

SEQ ID NO: 608184 - DNA, 33 bp, Homo sapien
gatgaaacggcgaccggatgtgggccactgggc

SEQ ID NO: 608185 - DNA, 33 bp, Homo sapien
gaatctttgaaaaaataacacggcacgcccaat

SEQ ID NO: 608186 - DNA, 33 bp, Homo sapien
gaatctttgaaaaaatcacacggcacgcccaat

SEQ ID NO: 608187 - DNA, 33 bp, Homo sapien
gaaaaaagaaaaaaaaagttgagcaaggagact

SEQ ID NO: 608188 - DNA, 33 bp, Homo sapien
gaaaaaagaaaaaaaacgttgagcaaggagact

SEQ ID NO: 608189 - DNA, 33 bp, Homo sapien
ttgtgctcattttccccggctctcccacacatg

SEQ ID NO: 608190 - DNA, 33 bp, Homo sapien
ttgtgctcattttccctggctctcccacacatg

SEQ ID NO: 608191 - DNA, 33 bp, Homo sapien
atgaagcttttgaatccaaactagatatcaagc

SEQ ID NO: 608192 - DNA, 33 bp, Homo sapien
atgaagcttttgaatcgaaactagatatcaagc

SEQ ID NO: 608193 - DNA, 33 bp, Homo sapien
ttcacattttagtgtacactgtggtttccagag

SEQ ID NO: 608194 - DNA, 33 bp, Homo sapien
ttcacattttagtgtatactgtggtttccagag

SEQ ID NO: 608195 - DNA, 33 bp, Homo sapien
tttgtgaggtacatgaaaaaaggaactgactgt

SEQ ID NO: 608196 - DNA, 33 bp, Homo sapien
tttgtgaggtacatgagaaaaggaactgactgt

SEQ ID NO: 608197 - DNA, 33 bp, Homo sapien
cctgactgattcaccacagtgggggcacaaggc

SEQ ID NO: 608198 - DNA, 33 bp, Homo sapien
cctgactgattcaccagagtgggggcacaaggc

SEQ ID NO: 608199 - DNA, 33 bp, Homo sapien
gctggcctcatgctacacatcagaatgagaccc

SEQ ID NO: 608200 - DNA, 33 bp, Homo sapien
gctggcctcatgctacccatcagaatgagaccc

SEQ ID NO: 608201 - DNA, 33 bp, Homo sapien
ggggctgcacccttgcaatgacactttcttaat

SEQ ID NO: 608202 - DNA, 33 bp, Homo sapien
ggggctgcacccttgccatgacactttcttaat

SEQ ID NO: 608203 - DNA, 33 bp, Homo sapien
tgccttctctaaactgcaggcaccaaagaaaca

SEQ ID NO: 608204 - DNA, 33 bp, Homo sapien
tgccttctctaaactgtaggcaccaaagaaaca

SEQ ID NO: 608205 - DNA, 33 bp, Homo sapien
ctcccaagagcagaggacaagattggggattct

SEQ ID NO: 608206 - DNA, 33 bp, Homo sapien
ctcccaagagcagaggtcaagattggggattct

SEQ ID NO: 608207 - DNA, 33 bp, Homo sapien
gtagaaagcatgactaagccactgacactccct

SEQ ID NO: 608208 - DNA, 33 bp, Homo sapien
gtagaaagcatgactaggccactgacactccct

SEQ ID NO: 608209 - DNA, 33 bp, Homo sapien
gttctgaagcctgacaagagtataattttagat

SEQ ID NO: 608210 - DNA, 33 bp, Homo sapien
gttctgaagcctgacaggagtataattttagat

SEQ ID NO: 608211 - DNA, 33 bp, Homo sapien
ttgaaaagtggggtatcaaccagctcttcagaa

SEQ ID NO: 608212 - DNA, 33 bp, Homo sapien
ttgaaaagtggggtattaaccagctcttcagaa

SEQ ID NO: 608213 - DNA, 33 bp, Homo sapien
gtattccagtactcacaatttctatttgttcag

SEQ ID NO: 608214 - DNA, 33 bp, Homo sapien
gtattccagtactcacgatttctatttgttcag

SEQ ID NO: 608215 - DNA, 33 bp, Homo sapien
aaaaagctcctagagaatcatagacctgggcat

SEQ ID NO: 608216 - DNA, 33 bp, Homo sapien
aaaaagctcctagagagtcatagacctgggcat

SEQ ID NO: 608217 - DNA, 33 bp, Homo sapien
ccccccacagcgtcctaaaagggcctctgcact

SEQ ID NO: 608218 - DNA, 33 bp, Homo sapien
ccccccacagcgtcctgaaagggcctctgcact

SEQ ID NO: 608219 - DNA, 33 bp, Homo sapien
ctctacagaggccggcaagatacaggaagggca

SEQ ID NO: 608220 - DNA, 33 bp, Homo sapien
ctctacagaggccggcgagatacaggaagggca

SEQ ID NO: 608221 - DNA, 33 bp, Homo sapien
aagatgccaggttctaacagaaggcatttttct

SEQ ID NO: 608222 - DNA, 33 bp, Homo sapien
aagatgccaggttctatcagaaggcatttttct

SEQ ID NO: 608223 - DNA, 33 bp, Homo sapien
ccccccgctgttcctacgctggttccctcattc

SEQ ID NO: 608224 - DNA, 33 bp, Homo sapien
ccccccgctgttcctatgctggttccctcattc

SEQ ID NO: 608225 - DNA, 33 bp, Homo sapien
caacctaacatagaaactgatttttttacattt

SEQ ID NO: 608226 - DNA, 33 bp, Homo sapien
caacctaacatagaaagtgatttttttacattt

SEQ ID NO: 608227 - DNA, 33 bp, Homo sapien
ggtgctagggccatgccgagacctgttcagtgc

SEQ ID NO: 608228 - DNA, 33 bp, Homo sapien
ggtgctagggccatgctgagacctgttcagtgc

SEQ ID NO: 608229 - DNA, 33 bp, Homo sapien
gtacaactggttgccccaagacacagagctgcc

SEQ ID NO: 608230 - DNA, 33 bp, Homo sapien
gtacaactggttgcccgaagacacagagctgcc

SEQ ID NO: 608231 - DNA, 33 bp, Homo sapien
gccaatctaacagaaccgtcaggattgctgata

SEQ ID NO: 608232 - DNA, 33 bp, Homo sapien
gccaatctaacagaactgtcaggattgctgata

SEQ ID NO: 608233 - DNA, 33 bp, Homo sapien
tggctctgcccttcccagatgttctgtgatggg

SEQ ID NO: 608234 - DNA, 33 bp, Homo sapien
tggctctgcccttcccggatgttctgtgatggg

SEQ ID NO: 608235 - DNA, 33 bp, Homo sapien
gagagacacgttcacacccacattgttggcacc

SEQ ID NO: 608236 - DNA, 33 bp, Homo sapien
gagagacacgttcacatccacattgttggcacc

SEQ ID NO: 608237 - DNA, 33 bp, Homo sapien
cctgtaatccctgcacgatggaaggatgaggca

SEQ ID NO: 608238 - DNA, 33 bp, Homo sapien
cctgtaatccctgcactatggaaggatgaggca

SEQ ID NO: 608239 - DNA, 33 bp, Homo sapien
gggaggacccgctctgaaaaggatggaactcga

SEQ ID NO: 608240 - DNA, 33 bp, Homo sapien
gggaggacccgctctggaaaggatggaactcga

SEQ ID NO: 608241 - DNA, 33 bp, Homo sapien
gccacgctgtctcaccagcttctacttcccgtt

SEQ ID NO: 608242 - DNA, 33 bp, Homo sapien
gccacgctgtctcaccggcttctacttcccgtt

SEQ ID NO: 608243 - DNA, 33 bp, Homo sapien
ccatggttcctcctccactatactggctccttg

SEQ ID NO: 608244 - DNA, 33 bp, Homo sapien
ccatggttcctcctcctctatactggctccttg

SEQ ID NO: 608245 - DNA, 33 bp, Homo sapien
taacaaacgttctatcaactatgtagcttgaac

SEQ ID NO: 608246 - DNA, 33 bp, Homo sapien
taacaaacgttctatcgactatgtagcttgaac

SEQ ID NO: 608247 - DNA, 33 bp, Homo sapien
gcaatgaggtaagacacgaaggtggtaataaat

SEQ ID NO: 608248 - DNA, 33 bp, Homo sapien
gcaatgaggtaagacatgaaggtggtaataaat

SEQ ID NO: 608249 - DNA, 33 bp, Homo sapien
ttaactctctacagacagacaggaagagggccc

SEQ ID NO: 608250 - DNA, 33 bp, Homo sapien
ttaactctctacagacggacaggaagagggccc

SEQ ID NO: 608251 - DNA, 33 bp, Homo sapien
gggaggacatatttccagataccctgaaaataa

SEQ ID NO: 608252 - DNA, 33 bp, Homo sapien
gggaggacatatttccggataccctgaaaataa

SEQ ID NO: 608253 - DNA, 33 bp, Homo sapien
aagtggaagggacgacaggaactctggtctagt

SEQ ID NO: 608254 - DNA, 33 bp, Homo sapien
aagtggaagggacgacgggaactctggtctagt

SEQ ID NO: 608255 - DNA, 33 bp, Homo sapien
taaggcccaggaaggaagtaccatgtcagagtg

SEQ ID NO: 608256 - DNA, 33 bp, Homo sapien
taaggcccaggaaggaggtaccatgtcagagtg

SEQ ID NO: 608257 - DNA, 33 bp, Homo sapien
caggcgtggggcataacgcacttagtgacactt

SEQ ID NO: 608258 - DNA, 33 bp, Homo sapien
caggcgtggggcataatgcacttagtgacactt

SEQ ID NO: 608259 - DNA, 33 bp, Homo sapien
aacattgtctgggataacaccacctgcctgcct

SEQ ID NO: 608260 - DNA, 33 bp, Homo sapien
aacattgtctgggataccaccacctgcctgcct

SEQ ID NO: 608261 - DNA, 33 bp, Homo sapien
ccaggaacctgggcaggaaaagaaccatagggt

SEQ ID NO: 608262 - DNA, 33 bp, Homo sapien
ccaggaacctgggcagtaaaagaaccatagggt

SEQ ID NO: 608263 - DNA, 33 bp, Homo sapien
ggagtggcccagaagcactaagctgtgcagatc

SEQ ID NO: 608264 - DNA, 33 bp, Homo sapien
ggagtggcccagaagcgctaagctgtgcagatc

SEQ ID NO: 608265 - DNA, 33 bp, Homo sapien
gactcctggagcaggaatccggatctgcacagc

SEQ ID NO: 608266 - DNA, 33 bp, Homo sapien
gactcctggagcaggattccggatctgcacagc

SEQ ID NO: 608267 - DNA, 33 bp, Homo sapien
aaaggtcagaaccaaccggtcacctagagattc

SEQ ID NO: 608268 - DNA, 33 bp, Homo sapien
aaaggtcagaaccaactggtcacctagagattc

SEQ ID NO: 608269 - DNA, 33 bp, Homo sapien
cattgttattctgtcgcattaagaatgtcataa

SEQ ID NO: 608270 - DNA, 33 bp, Homo sapien
cattgttattctgtcgtattaagaatgtcataa

SEQ ID NO: 608271 - DNA, 33 bp, Homo sapien
ctcatgtaagaagataaacagaggacggtggat

SEQ ID NO: 608272 - DNA, 33 bp, Homo sapien
ctcatgtaagaagatacacagaggacggtggat

SEQ ID NO: 608273 - DNA, 33 bp, Homo sapien
tccacaacaccgacgacggaggagagactagga

SEQ ID NO: 608274 - DNA, 33 bp, Homo sapien
tccacaacaccgacgatggaggagagactagga

SEQ ID NO: 608275 - DNA, 33 bp, Homo sapien
attagcaggtgggctcaatgcaatcacaacatg

SEQ ID NO: 608276 - DNA, 33 bp, Homo sapien
attagcaggtgggctcgatgcaatcacaacatg

SEQ ID NO: 608277 - DNA, 33 bp, Homo sapien
gatcacaaaccggggcactgaaaataacagaca

SEQ ID NO: 608278 - DNA, 33 bp, Homo sapien
gatcacaaaccggggcgctgaaaataacagaca

SEQ ID NO: 608279 - DNA, 33 bp, Homo sapien
gagtttattcttgatcacctgcttttaggaccc

SEQ ID NO: 608280 - DNA, 33 bp, Homo sapien
gagtttattcttgatcgcctgcttttaggaccc

SEQ ID NO: 608281 - DNA, 33 bp, Homo sapien
cttcatctgaagcaggaaagtcgacgaagcgcc

SEQ ID NO: 608282 - DNA, 33 bp, Homo sapien
cttcatctgaagcagggaagtcgacgaagcgcc

SEQ ID NO: 608283 - DNA, 33 bp, Homo sapien
tgaacataagtgtgtccaaaatatgcgcaaata

SEQ ID NO: 608284 - DNA, 33 bp, Homo sapien
tgaacataagtgtgtctaaaatatgcgcaaata

SEQ ID NO: 608285 - DNA, 33 bp, Homo sapien
gctgcctgctccttgaaggccatgatgtgacct

SEQ ID NO: 608286 - DNA, 33 bp, Homo sapien
gctgcctgctccttgagggccatgatgtgacct

SEQ ID NO: 608287 - DNA, 33 bp, Homo sapien
tcacagcttatggaaaatgatgcagaaacactt

SEQ ID NO: 608288 - DNA, 33 bp, Homo sapien
tcacagcttatggaaagtgatgcagaaacactt

SEQ ID NO: 608289 - DNA, 33 bp, Homo sapien
ctggtccggtgcaccacgcattgcaacgacaaa

SEQ ID NO: 608290 - DNA, 33 bp, Homo sapien
ctggtccggtgcaccatgcattgcaacgacaaa

SEQ ID NO: 608291 - DNA, 33 bp, Homo sapien; identical to SEQ ID NO: 608289

SEQ ID NO: 608292 - DNA, 33 bp, Homo sapien; identical to SEQ ID NO: 608290

SEQ ID NO: 608293 - DNA, 33 bp, Homo sapien
cagcaaccttaacccaagagagtatcctggagg

SEQ ID NO: 608294 - DNA, 33 bp, Homo sapien
cagcaaccttaacccacgagagtatcctggagg

SEQ ID NO: 608295 - DNA, 33 bp, Homo sapien
caaacgcaccccccgcaccacagtggaaagtcc

SEQ ID NO: 608296 - DNA, 33 bp, Homo sapien
caaacgcaccccccgcgccacagtggaaagtcc

SEQ ID NO: 608297 - DNA, 33 bp, Homo sapien
taaccaactgcttccaagctacacacctgtaca

SEQ ID NO: 608298 - DNA, 33 bp, Homo sapien
taaccaactgcttccaggctacacacctgtaca

SEQ ID NO: 608299 - DNA, 33 bp, Homo sapien
ctctaccataagagacaccacaaggacccagag

SEQ ID NO: 608300 - DNA, 33 bp, Homo sapien
ctctaccataagagaccccacaaggacccagag

SEQ ID NO: 608301 - DNA, 33 bp, Homo sapien
gtcccgtttcaggcaacgcagtcacttgcactg

SEQ ID NO: 608302 - DNA, 33 bp, Homo sapien
gtcccgtttcaggcaatgcagtcacttgcactg

SEQ ID NO: 608303 - DNA, 33 bp, Homo sapien
tctgccttctttctggacagtggtctttcagaa

SEQ ID NO: 608304 - DNA, 33 bp, Homo sapien
tctgccttctttctggccagtggtctttcagaa

SEQ ID NO: 608305 - DNA, 33 bp, Homo sapien
tcattcaaaaactatcacaaaaaatgaacatct

SEQ ID NO: 608306 - DNA, 33 bp, Homo sapien
tcattcaaaaactatcgcaaaaaatgaacatct

SEQ ID NO: 608307 - DNA, 33 bp, Homo sapien
acctaaaatattcaccaacaaatagactgtact

SEQ ID NO: 608308 - DNA, 33 bp, Homo sapien
acctaaaatattcaccgacaaatagactgtact

SEQ ID NO: 608309 - DNA, 33 bp, Homo sapien
cggtagaaatccaggtaaccatcttggacatta

SEQ ID NO: 608310 - DNA, 33 bp, Homo sapien
cggtagaaatccaggtgaccatcttggacatta

SEQ ID NO: 608311 - DNA, 33 bp, Homo sapien
caccagtcctgactaacgtgtgtatgtttagta

SEQ ID NO: 608312 - DNA, 33 bp, Homo sapien
caccagtcctgactaatgtgtgtatgtttagta

SEQ ID NO: 608313 - DNA, 33 bp, Homo sapien
gtgccgaccgcttcacacagattgtcttgttaa

SEQ ID NO: 608314 - DNA, 33 bp, Homo sapien
gtgccgaccgcttcacgcagattgtcttgttaa

SEQ ID NO: 608315 - DNA, 33 bp, Homo sapien
agaaactctaaatccaaggtgacatcgtggcac

SEQ ID NO: 608316 - DNA, 33 bp, Homo sapien
agaaactctaaatccagggtgacatcgtggcac

SEQ ID NO: 608317 - DNA, 33 bp, Homo sapien
agaatttgtgactataagcaatttaatattact

SEQ ID NO: 608318 - DNA, 33 bp, Homo sapien
agaatttgtgactataggcaatttaatattact

SEQ ID NO: 608319 - DNA, 33 bp, Homo sapien
cagctgggacagctgccctcggctccatgtggt

SEQ ID NO: 608320 - DNA, 33 bp, Homo sapien
cagctgggacagctgctctcggctccatgtggt

SEQ ID NO: 608321 - DNA, 33 bp, Homo sapien
gccgtcagatggtggcagaatgtccaagatgac

SEQ ID NO: 608322 - DNA, 33 bp, Homo sapien
gccgtcagatggtggcggaatgtccaagatgac

SEQ ID NO: 608323 - DNA, 33 bp, Homo sapien
gctgcgtaacaaacacaccattgaaacaacact

SEQ ID NO: 608324 - DNA, 33 bp, Homo sapien
gctgcgtaacaaacacgccattgaaacaacact

SEQ ID NO: 608325 - DNA, 33 bp, Homo sapien
gagtggtgagtggggggagtgaacctaagagtc

SEQ ID NO: 608326 - DNA, 33 bp, Homo sapien
gagtggtgagtgggggtagtgaacctaagagtc

SEQ ID NO: 608327 - DNA, 33 bp, Homo sapien
gttctctctttcccagacggcctctcaggatcc

SEQ ID NO: 608328 - DNA, 33 bp, Homo sapien
gttctctctttcccagccggcctctcaggatcc

SEQ ID NO: 608329 - DNA, 33 bp, Homo sapien
caccacgcaatatcaactgtccccctttgtggg

SEQ ID NO: 608330 - DNA, 33 bp, Homo sapien
caccacgcaatatcaagtgtccccctttgtggg

SEQ ID NO: 608331 - DNA, 33 bp, Homo sapien
agcccacccggctgagaacaaactggctctcct

SEQ ID NO: 608332 - DNA, 33 bp, Homo sapien
agcccacccggctgaggacaaactggctctcct

SEQ ID NO: 608333 - DNA, 33 bp, Homo sapien
agtctgcagagcacacagcttcaccccatttta

SEQ ID NO: 608334 - DNA, 33 bp, Homo sapien
agtctgcagagcacacggcttcaccccatttta

SEQ ID NO: 608335 - DNA, 33 bp, Homo sapien
ccagcgacctggagcgacacctcattatgcctg

SEQ ID NO: 608336 - DNA, 33 bp, Homo sapien
ccagcgacctggagcggcacctcattatgcctg

SEQ ID NO: 608337 - DNA, 33 bp, Homo sapien
gggtccagggagtgcccaaagtgtctagaaggc

SEQ ID NO: 608338 - DNA, 33 bp, Homo sapien
gggtccagggagtgcctaaagtgtctagaaggc

SEQ ID NO: 608339 - DNA, 33 bp, Homo sapien
tgtcaaagggtcctgcagagagtggaagagtcc

SEQ ID NO: 608340 - DNA, 33 bp, Homo sapien
tgtcaaagggtcctgcggagagtggaagagtcc

SEQ ID NO: 608341 - DNA, 33 bp, Homo sapien
cctggaagtgaaatcaccattttgttggatatt

SEQ ID NO: 608342 - DNA, 33 bp, Homo sapien
cctggaagtgaaatcatcattttgttggatatt

SEQ ID NO: 608343 - DNA, 33 bp, Homo sapien
tggacaacatggtctcccaaagcgttggggcta

SEQ ID NO: 608344 - DNA, 33 bp, Homo sapien
tggacaacatggtctcgcaaagcgttggggcta

SEQ ID NO: 608345 - DNA, 33 bp, Homo sapien
ccagggaaaacagtgcaacagctcctcaaaaaa

SEQ ID NO: 608346 - DNA, 33 bp, Homo sapien
ccagggaaaacagtgcgacagctcctcaaaaaa

SEQ ID NO: 608347 - DNA, 33 bp, Homo sapien
ctcaggcctgtcaggacactcttctgtgagact

SEQ ID NO: 608348 - DNA, 33 bp, Homo sapien
ctcaggcctgtcaggagactcttctgtgagact

SEQ ID NO: 608349 - DNA, 33 bp, Homo sapien
aatactatttcagaagcaagatcaaaaacccgc

SEQ ID NO: 608350 - DNA, 33 bp, Homo sapien
aatactatttcagaaggaagatcaaaaacccgc

SEQ ID NO: 608351 - DNA, 33 bp, Homo sapien
ggcatctgtggaccccagacagggacggtcagt

SEQ ID NO: 608352 - DNA, 33 bp, Homo sapien
ggcatctgtggaccccggacagggacggtcagt

SEQ ID NO: 608353 - DNA, 33 bp, Homo sapien
cctgctttgtacactccgagaaaggcttattgg

SEQ ID NO: 608354 - DNA, 33 bp, Homo sapien
cctgctttgtacactctgagaaaggcttattgg

SEQ ID NO: 608355 - DNA, 33 bp, Homo sapien
gaggcaaaagttggagaaaatagttctagaaaa

SEQ ID NO: 608356 - DNA, 33 bp, Homo sapien
gaggcaaaagttggagtaaatagttctagaaaa

SEQ ID NO: 608357 - DNA, 33 bp, Homo sapien
ccgtcaatattcaaccacttcaactcacagaaa

SEQ ID NO: 608358 - DNA, 33 bp, Homo sapien
ccgtcaatattcaaccgcttcaactcacagaaa

SEQ ID NO: 608359 - DNA, 33 bp, Homo sapien
tgtgactctgtcctcaacatttgccaaaggagc

SEQ ID NO: 608360 - DNA, 33 bp, Homo sapien
tgtgactctgtcctcagcatttgccaaaggagc

SEQ ID NO: 608361 - DNA, 33 bp, Homo sapien
gggatatctggtcacaccgaaaggcaaggaatc

SEQ ID NO: 608362 - DNA, 33 bp, Homo sapien
gggatatctggtcacatcgaaaggcaaggaatc

SEQ ID NO: 608363 - DNA, 33 bp, Homo sapien
cgcagcagtatgtaaacgaatgggtgtgtctat

SEQ ID NO: 608364 - DNA, 33 bp, Homo sapien
cgcagcagtatgtaaatgaatgggtgtgtctat

SEQ ID NO: 608365 - DNA, 33 bp, Homo sapien
cctgctcattccatgcgacggtaaaatgctgag

SEQ ID NO: 608366 - DNA, 33 bp, Homo sapien
cctgctcattccatgctacggtaaaatgctgag

SEQ ID NO: 608367 - DNA, 33 bp, Homo sapien
tccaacccaacctggacgcagccccaggctcta

SEQ ID NO: 608368 - DNA, 33 bp, Homo sapien
tccaacccaacctggatgcagccccaggctcta

SEQ ID NO: 608369 - DNA, 33 bp, Homo sapien
tggggggtgttcgcgacaaaggcaacactttaa

SEQ ID NO: 608370 - DNA, 33 bp, Homo sapien
tggggggtgttcgcgataaaggcaacactttaa

SEQ ID NO: 608371 - DNA, 33 bp, Homo sapien
aggatatgcgtgctacactggaaggcattttgg

SEQ ID NO: 608372 - DNA, 33 bp, Homo sapien
aggatatgcgtgctacgctggaaggcattttgg

SEQ ID NO: 608373 - DNA, 33 bp, Homo sapien
ttaggttactgaaatacgtctgaggaggctgtg

SEQ ID NO: 608374 - DNA, 33 bp, Homo sapien
ttaggttactgaaatatgtctgaggaggctgtg

SEQ ID NO: 608375 - DNA, 33 bp, Homo sapien
aggaagcccagcttgacgctcgttaacagagtg

SEQ ID NO: 608376 - DNA, 33 bp, Homo sapien
aggaagcccagcttgatgctcgttaacagagtg

SEQ ID NO: 608377 - DNA, 33 bp, Homo sapien
tgtaacttcaggcacaagtatcctttacttcat

SEQ ID NO: 608378 - DNA, 33 bp, Homo sapien
tgtaacttcaggcacaggtatcctttacttcat

SEQ ID NO: 608379 - DNA, 33 bp, Homo sapien
gaaatggttctttagaaatagctcaatagagaa

SEQ ID NO: 608380 - DNA, 33 bp, Homo sapien
gaaatggttctttagagatagctcaatagagaa

SEQ ID NO: 608381 - DNA, 33 bp, Homo sapien
ttcttctaaaactcatcaggcgatattatgaaa

SEQ ID NO: 608382 - DNA, 33 bp, Homo sapien
ttcttctaaaactcatgaggcgatattatgaaa

SEQ ID NO: 608383 - DNA, 33 bp, Homo sapien
aaaagttcctctctataaataactgcatcacgc

SEQ ID NO: 608384 - DNA, 33 bp, Homo sapien
aaaagttcctctctattaataactgcatcacgc

SEQ ID NO: 608385 - DNA, 33 bp, Homo sapien
aaggagaaacgtccccacgcagactgctgtgcc

SEQ ID NO: 608386 - DNA, 33 bp, Homo sapien
aaggagaaacgtccccgcgcagactgctgtgcc

SEQ ID NO: 608387 - DNA, 33 bp, Homo sapien
attatttgttggataaaagaacaaatgactgaa

SEQ ID NO: 608388 - DNA, 33 bp, Homo sapien
attatttgttggataagagaacaaatgactgaa

SEQ ID NO: 608389 - DNA, 33 bp, Homo sapien
caaatgactgaaattacggccaacaaaagaaaa

SEQ ID NO: 608390 - DNA, 33 bp, Homo sapien
caaatgactgaaattatggccaacaaaagaaaa

SEQ ID NO: 608391 - DNA, 33 bp, Homo sapien
cttctctgtctacacaacaccgcataagcacat

SEQ ID NO: 608392 - DNA, 33 bp, Homo sapien
cttctctgtctacacagcaccgcataagcacat

SEQ ID NO: 608393 - DNA, 33 bp, Homo sapien
catcacctgaagaagaaatcgagacgcagtcca

SEQ ID NO: 608394 - DNA, 33 bp, Homo sapien
catcacctgaagaagagatcgagacgcagtcca

SEQ ID NO: 608395 - DNA, 33 bp, Homo sapien
caatgtgaaaacagtacgcagagagactggagg

SEQ ID NO: 608396 - DNA, 33 bp, Homo sapien
caatgtgaaaacagtatgcagagagactggagg

SEQ ID NO: 608397 - DNA, 33 bp, Homo sapien
cctggcaccaggtggcagcatatacaggtctta

SEQ ID NO: 608398 - DNA, 33 bp, Homo sapien
cctggcaccaggtggccgcatatacaggtctta

SEQ ID NO: 608399 - DNA, 33 bp, Homo sapien
tgtaaggaggacatgagcattccacccagtgag

SEQ ID NO: 608400 - DNA, 33 bp, Homo sapien
tgtaaggaggacatgatcattccacccagtgag

SEQ ID NO: 608401 - DNA, 33 bp, Homo sapien
gcacccggcgggctagacactgtacatgcaacc

SEQ ID NO: 608402 - DNA, 33 bp, Homo sapien
gcacccggcgggctaggcactgtacatgcaacc

SEQ ID NO: 608403 - DNA, 33 bp, Homo sapien
aaggacacatgtctcacaaggcgtccccgtcgc

SEQ ID NO: 608404 - DNA, 33 bp, Homo sapien
aaggacacatgtctcagaaggcgtccccgtcgc

SEQ ID NO: 608405 - DNA, 33 bp, Homo sapien
gcagaaacatgtggtacctgagacccaaaccag

SEQ ID NO: 608406 - DNA, 33 bp, Homo sapien
gcagaaacatgtggtatctgagacccaaaccag

SEQ ID NO: 608407 - DNA, 33 bp, Homo sapien
actcagctcattctaacacatggtgatactccc

SEQ ID NO: 608408 - DNA, 33 bp, Homo sapien
actcagctcattctaagacatggtgatactccc

SEQ ID NO: 608409 - DNA, 33 bp, Homo sapien
agcttctactgactacactgcgttatgtttctc

SEQ ID NO: 608410 - DNA, 33 bp, Homo sapien
agcttctactgactacgctgcgttatgtttctc

SEQ ID NO: 608411 - DNA, 33 bp, Homo sapien
cttctctgggtttccaatcttcctctgtggagt

SEQ ID NO: 608412 - DNA, 33 bp, Homo sapien
cttctctgggtttccagtcttcctctgtggagt

SEQ ID NO: 608413 - DNA, 33 bp, Homo sapien
tacgtgtcctgatgaaaccacatcagtcatttc

SEQ ID NO: 608414 - DNA, 33 bp, Homo sapien
tacgtgtcctgatgaagccacatcagtcatttc

SEQ ID NO: 608415 - DNA, 33 bp, Homo sapien
aagggatatatctccaactgactctcaaatggt

SEQ ID NO: 608416 - DNA, 33 bp, Homo sapien
aagggatatatctccagctgactctcaaatggt

SEQ ID NO: 608417 - DNA, 33 bp, Homo sapien
tgatgttcctgccaaaaattatcaatcagaatc

SEQ ID NO: 608418 - DNA, 33 bp, Homo sapien
tgatgttcctgccaaacattatcaatcagaatc

SEQ ID NO: 608419 - DNA, 33 bp, Homo sapien
cttgtttgcgtgatagacatgatgaaagcggtg

SEQ ID NO: 608420 - DNA, 33 bp, Homo sapien
cttgtttgcgtgataggcatgatgaaagcggtg

SEQ ID NO: 608421 - DNA, 33 bp, Homo sapien
agtgggaatttatgtaaagtcactcatccaggc

SEQ ID NO: 608422 - DNA, 33 bp, Homo sapien
agtgggaatttatgtagagtcactcatccaggc

SEQ ID NO: 608423 - DNA, 33 bp, Homo sapien
aggggacttgaggacacagcagggccagcaagg

SEQ ID NO: 608424 - DNA, 33 bp, Homo sapien
aggggacttgaggacagagcagggccagcaagg

SEQ ID NO: 608425 - DNA, 33 bp, Homo sapien
ctctgctcattttgtcactaaagggtttctgtg

SEQ ID NO: 608426 - DNA, 33 bp, Homo sapien
ctctgctcattttgtcgctaaagggtttctgtg

SEQ ID NO: 608427 - DNA, 33 bp, Homo sapien
aaagcaccagaagcccaattaacctccccaaag

SEQ ID NO: 608428 - DNA, 33 bp, Homo sapien
aaagcaccagaagcccgattaacctccccaaag

SEQ ID NO: 608429 - DNA, 33 bp, Homo sapien
gacaagcaagacaacacgagtgaacaagcgacc

SEQ ID NO: 608430 - DNA, 33 bp, Homo sapien
gacaagcaagacaacatgagtgaacaagcgacc

SEQ ID NO: 608431 - DNA, 33 bp, Homo sapien
cctcatcaatgggaagaatcaacatcgtaaaaa

SEQ ID NO: 608432 - DNA, 33 bp, Homo sapien
cctcatcaatgggaagcatcaacatcgtaaaaa

SEQ ID NO: 608433 - DNA, 33 bp, Homo sapien; identical to SEQ ID NO: 608431

SEQ ID NO: 608434 - DNA, 33 bp, Homo sapien; identical to SEQ ID NO: 608432

SEQ ID NO: 608435 - DNA, 33 bp, Homo sapien
ctgctcaaggaagtaacagaatataaacaaagg

SEQ ID NO: 608436 - DNA, 33 bp, Homo sapien
ctgctcaaggaagtaagagaatataaacaaagg

SEQ ID NO: 608437 - DNA, 33 bp, Homo sapien
agtagtatcaaccacacgaagaacagaaactga

SEQ ID NO: 608438 - DNA, 33 bp, Homo sapien
agtagtatcaaccacatgaagaacagaaactga

SEQ ID NO: 608439 - DNA, 33 bp, Homo sapien
ctcagcatgatttctcacccacggattaataaa

SEQ ID NO: 608440 - DNA, 33 bp, Homo sapien
ctcagcatgatttctcgcccacggattaataaa

SEQ ID NO: 608441 - DNA, 33 bp, Homo sapien
acctgcagtaactcccagactcggagcacaagc

SEQ ID NO: 608442 - DNA, 33 bp, Homo sapien
acctgcagtaactcccggactcggagcacaagc

SEQ ID NO: 608443 - DNA, 33 bp, Homo sapien
acaactctccaagaaacttaagaaagccccatt

SEQ ID NO: 608444 - DNA, 33 bp, Homo sapien
acaactctccaagaaatttaagaaagccccatt

SEQ ID NO: 608445 - DNA, 33 bp, Homo sapien
gtgatctacacataggacaatctctatcaaaat

SEQ ID NO: 608446 - DNA, 33 bp, Homo sapien
gtgatctacacatagggcaatctctatcaaaat

SEQ ID NO: 608447 - DNA, 33 bp, Homo sapien
gcatcatttgtgaaataacccactgtaatgtgg

SEQ ID NO: 608448 - DNA, 33 bp, Homo sapien
gcatcatttgtgaaatgacccactgtaatgtgg

SEQ ID NO: 608449 - DNA, 33 bp, Homo sapien
cgctgtgaatgagatgaagtttattttcattaa

SEQ ID NO: 608450 - DNA, 33 bp, Homo sapien
cgctgtgaatgagatgcagtttattttcattaa

SEQ ID NO: 608451 - DNA, 33 bp, Homo sapien
tgagaatgtacggtgacgcagctggtgtggaaa

SEQ ID NO: 608452 - DNA, 33 bp, Homo sapien
tgagaatgtacggtgatgcagctggtgtggaaa

SEQ ID NO: 608453 - DNA, 33 bp, Homo sapien
aatagtagtagaccacaagacacagctgaacag

SEQ ID NO: 608454 - DNA, 33 bp, Homo sapien
aatagtagtagaccacgagacacagctgaacag

SEQ ID NO: 608455 - DNA, 33 bp, Homo sapien
attcggacaaacgttaccaggatcccaaataca

SEQ ID NO: 608456 - DNA, 33 bp, Homo sapien
attcggacaaacgttatcaggatcccaaataca

SEQ ID NO: 608457 - DNA, 33 bp, Homo sapien
cctggcagcttttctcaagttatgggagtctag

SEQ ID NO: 608458 - DNA, 33 bp, Homo sapien
cctggcagcttttctcgagttatgggagtctag

SEQ ID NO: 608459 - DNA, 33 bp, Homo sapien
gcctttttcagaaagtaaattattccattttga

SEQ ID NO: 608460 - DNA, 33 bp, Homo sapien
gcctttttcagaaagttaattattccattttga

SEQ ID NO: 608461 - DNA, 33 bp, Homo sapien
gtctgtactgtttataggaattgcaagaacagg

SEQ ID NO: 608462 - DNA, 33 bp, Homo sapien
gtctgtactgtttatatgaattgcaagaacagg

SEQ ID NO: 608463 - DNA, 33 bp, Homo sapien
tggttaaaggactacacgtgcctgtcccttcat

SEQ ID NO: 608464 - DNA, 33 bp, Homo sapien
tggttaaaggactacatgtgcctgtcccttcat

SEQ ID NO: 608465 - DNA, 33 bp, Homo sapien
gatccgttcaacggacacagctagaaaaaggaa

SEQ ID NO: 608466 - DNA, 33 bp, Homo sapien
gatccgttcaacggacgcagctagaaaaaggaa

SEQ ID NO: 608467 - DNA, 33 bp, Homo sapien
cagcacagcaccttcccagacggatccaagtta

SEQ ID NO: 608468 - DNA, 33 bp, Homo sapien
cagcacagcaccttccgagacggatccaagtta

SEQ ID NO: 608469 - DNA, 33 bp, Homo sapien
cctgctccaagtatctcaaaacgttactggtga

SEQ ID NO: 608470 - DNA, 33 bp, Homo sapien
cctgctccaagtatctgaaaacgttactggtga

SEQ ID NO: 608471 - DNA, 33 bp, Homo sapien
cccaggacttcataaagtggagaaaaatgtggc

SEQ ID NO: 608472 - DNA, 33 bp, Homo sapien
cccaggacttcataaattggagaaaaatgtggc

SEQ ID NO: 608473 - DNA, 33 bp, Homo sapien
aagcaaaacttctggaggaaaatctgggtgaac

SEQ ID NO: 608474 - DNA, 33 bp, Homo sapien
aagcaaaacttctggatgaaaatctgggtgaac

SEQ ID NO: 608475 - DNA, 33 bp, Homo sapien
taacaaatatgggagacgagctggacccagaaa

SEQ ID NO: 608476 - DNA, 33 bp, Homo sapien
taacaaatatgggagatgagctggacccagaaa

SEQ ID NO: 608477 - DNA, 33 bp, Homo sapien
acaacacagatctatacgaatgtggcagtgaca

SEQ ID NO: 608478 - DNA, 33 bp, Homo sapien
acaacacagatctatatgaatgtggcagtgaca

SEQ ID NO: 608479 - DNA, 33 bp, Homo sapien
gaggctgaagtgaagcaccctatgcaaatgtct

SEQ ID NO: 608480 - DNA, 33 bp, Homo sapien
gaggctgaagtgaagctccctatgcaaatgtct

SEQ ID NO: 608481 - DNA, 33 bp, Homo sapien
aacagctcaaggcccacggtggtcagagacaag

SEQ ID NO: 608482 - DNA, 33 bp, Homo sapien
aacagctcaaggcccatggtggtcagagacaag

SEQ ID NO: 608483 - DNA, 33 bp, Homo sapien
tgccatcacttgcagaagtattgaaatctaacc

SEQ ID NO: 608484 - DNA, 33 bp, Homo sapien
tgccatcacttgcagatgtattgaaatctaacc

SEQ ID NO: 608485 - DNA, 33 bp, Homo sapien
tgtggaatggataagcaaatgtttcgatagatg

SEQ ID NO: 608486 - DNA, 33 bp, Homo sapien
tgtggaatggataagcgaatgtttcgatagatg

SEQ ID NO: 608487 - DNA, 33 bp, Homo sapien
aagggaagtcttttaacgttgcaccattgactt

SEQ ID NO: 608488 - DNA, 33 bp, Homo sapien
aagggaagtcttttaatgttgcaccattgactt

SEQ ID NO: 608489 - DNA, 33 bp, Homo sapien
cccccatgtgagttataacacttgatgaatgaa

SEQ ID NO: 608490 - DNA, 33 bp, Homo sapien
cccccatgtgagttatcacacttgatgaatgaa

SEQ ID NO: 608491 - DNA, 33 bp, Homo sapien
aatttcttctttctgacgctacgatgcttctgg

SEQ ID NO: 608492 - DNA, 33 bp, Homo sapien
aatttcttctttctgaggctacgatgcttctgg

SEQ ID NO: 608493 - DNA, 33 bp, Homo sapien
cagcaatgtgacatcacggtatacaaagcgcca

SEQ ID NO: 608494 - DNA, 33 bp, Homo sapien
cagcaatgtgacatcatggtatacaaagcgcca

SEQ ID NO: 608495 - DNA, 33 bp, Homo sapien
agactcaggaggaaaacccccaacacctacaat

SEQ ID NO: 608496 - DNA, 33 bp, Homo sapien
agactcaggaggaaaatccccaacacctacaat

SEQ ID NO: 608497 - DNA, 33 bp, Homo sapien
gcgcccaggcagctaacctatcctaaatgcaca

SEQ ID NO: 608498 - DNA, 33 bp, Homo sapien
gcgcccaggcagctaatctatcctaaatgcaca

SEQ ID NO: 608499 - DNA, 33 bp, Homo sapien
gcttgtattactttgacgaaaaatggagaattc

SEQ ID NO: 608500 - DNA, 33 bp, Homo sapien
gcttgtattactttgaggaaaaatggagaattc

SEQ ID NO: 608501 - DNA, 33 bp, Homo sapien
ggaaccgagtcgaggccccggcctgcgcagatc

SEQ ID NO: 608502 - DNA, 33 bp, Homo sapien
ggaaccgagtcgaggctccggcctgcgcagatc

SEQ ID NO: 608503 - DNA, 33 bp, Homo sapien
atgcgaatgctatttaaccgagctgcaagtagc

SEQ ID NO: 608504 - DNA, 33 bp, Homo sapien
atgcgaatgctatttagccgagctgcaagtagc

SEQ ID NO: 608505 - DNA, 33 bp, Homo sapien
agcaggcacctgagagacgcgggtggaatgagg

SEQ ID NO: 608506 - DNA, 33 bp, Homo sapien
agcaggcacctgagagccgcgggtggaatgagg

SEQ ID NO: 608507 - DNA, 33 bp, Homo sapien
ctctcaacccaaggagactacccagagtggcat

SEQ ID NO: 608508 - DNA, 33 bp, Homo sapien
ctctcaacccaaggagcctacccagagtggcat

SEQ ID NO: 608509 - DNA, 33 bp, Homo sapien
tgcctgaatgcctgctaagatttcgtaagtgat

SEQ ID NO: 608510 - DNA, 33 bp, Homo sapien
tgcctgaatgcctgctgagatttcgtaagtgat

SEQ ID NO: 608511 - DNA, 33 bp, Homo sapien
ttcttgaatggtgataacttttcagaggtttaa

SEQ ID NO: 608512 - DNA, 33 bp, Homo sapien
ttcttgaatggtgataccttttcagaggtttaa

SEQ ID NO: 608513 - DNA, 33 bp, Homo sapien
ccacttaatagttgaccgacagaaataaatggt

SEQ ID NO: 608514 - DNA, 33 bp, Homo sapien
ccacttaatagttgactgacagaaataaatggt

SEQ ID NO: 608515 - DNA, 33 bp, Homo sapien
agctcctcgagtcacaaacagtcacagctcgga

SEQ ID NO: 608516 - DNA, 33 bp, Homo sapien
agctcctcgagtcacagacagtcacagctcgga

SEQ ID NO: 608517 - DNA, 33 bp, Homo sapien
acatcctgtaagataacgtaaggaaataccact

SEQ ID NO: 608518 - DNA, 33 bp, Homo sapien
acatcctgtaagataatgtaaggaaataccact

SEQ ID NO: 608519 - DNA, 33 bp, Homo sapien
agctctttaatattaacgcggtttgaatccttc

SEQ ID NO: 608520 - DNA, 33 bp, Homo sapien
agctctttaatattaatgcggtttgaatccttc

SEQ ID NO: 608521 - DNA, 33 bp, Homo sapien
aacctcaaaaacattacggtcaatgaaagaagc

SEQ ID NO: 608522 - DNA, 33 bp, Homo sapien
aacctcaaaaacattatggtcaatgaaagaagc

SEQ ID NO: 608523 - DNA, 33 bp, Homo sapien
aatgtttttgaggttcaccggtattgtagcacg

SEQ ID NO: 608524 - DNA, 33 bp, Homo sapien
aatgtttttgaggttcgccggtattgtagcacg

SEQ ID NO: 608525 - DNA, 33 bp, Homo sapien
ttctcatcaagagagaatcagaaaaattgccag

SEQ ID NO: 608526 - DNA, 33 bp, Homo sapien
ttctcatcaagagagattcagaaaaattgccag

SEQ ID NO: 608527 - DNA, 33 bp, Homo sapien
ctgttcgcctctaataccccagccctccgtcct

SEQ ID NO: 608528 - DNA, 33 bp, Homo sapien
ctgttcgcctctaatatcccagccctccgtcct

SEQ ID NO: 608529 - DNA, 33 bp, Homo sapien
atactgtttctttaacaaagtcttgctctggcg

SEQ ID NO: 608530 - DNA, 33 bp, Homo sapien
atactgtttctttaacgaagtcttgctctggcg

SEQ ID NO: 608531 - DNA, 33 bp, Homo sapien
gctgctaagacaaagacgagaccaccctcggat

SEQ ID NO: 608532 - DNA, 33 bp, Homo sapien
gctgctaagacaaagatgagaccaccctcggat

SEQ ID NO: 608533 - DNA, 33 bp, Homo sapien
agctgaacaaagcacccgatagaggtaaatact

SEQ ID NO: 608534 - DNA, 33 bp, Homo sapien
agctgaacaaagcacctgatagaggtaaatact

SEQ ID NO: 608535 - DNA, 33 bp, Homo sapien
tcccatcccaatgtaacgactgatggttgagca

SEQ ID NO: 608536 - DNA, 33 bp, Homo sapien
tcccatcccaatgtaatgactgatggttgagca

SEQ ID NO: 608537 - DNA, 33 bp, Homo sapien
cgggacttttcccccaactgctggaacagtttt

SEQ ID NO: 608538 - DNA, 33 bp, Homo sapien
cgggacttttcccccagctgctggaacagtttt

SEQ ID NO: 608539 - DNA, 33 bp, Homo sapien
gatattcattgtaccacaatattaagacaatct

SEQ ID NO: 608540 - DNA, 33 bp, Homo sapien
gatattcattgtaccataatattaagacaatct

SEQ ID NO: 608541 - DNA, 33 bp, Homo sapien
gtggcaggtggttgaacgtacacttcacaggcc

SEQ ID NO: 608542 - DNA, 33 bp, Homo sapien
gtggcaggtggttgaatgtacacttcacaggcc

SEQ ID NO: 608543 - DNA, 33 bp, Homo sapien
caaagacggatttaagaaacagtcacaactgtg

SEQ ID NO: 608544 - DNA, 33 bp, Homo sapien
caaagacggatttaaggaacagtcacaactgtg

SEQ ID NO: 608545 - DNA, 33 bp, Homo sapien
tttttgttgagaaattaaagtgccatacaattg

SEQ ID NO: 608546 - DNA, 33 bp, Homo sapien
tttttgttgagaaattgaagtgccatacaattg

SEQ ID NO: 608547 - DNA, 33 bp, Homo sapien
ggccttgtcttgttgccgactcccctgccagac

SEQ ID NO: 608548 - DNA, 33 bp, Homo sapien
ggccttgtcttgttgctgactcccctgccagac

SEQ ID NO: 608549 - DNA, 33 bp, Homo sapien
gagtggattttatggcggatgaattatctctcc

SEQ ID NO: 608550 - DNA, 33 bp, Homo sapien
gagtggattttatggctgatgaattatctctcc

SEQ ID NO: 608551 - DNA, 33 bp, Homo sapien
caatcaagattcagaacgggttcagctgcctgc

SEQ ID NO: 608552 - DNA, 33 bp, Homo sapien
caatcaagattcagaatgggttcagctgcctgc

SEQ ID NO: 608553 - DNA, 33 bp, Homo sapien
aggcaatgctctcaaacgcaggtaatgaaatgc

SEQ ID NO: 608554 - DNA, 33 bp, Homo sapien
aggcaatgctctcaaatgcaggtaatgaaatgc

SEQ ID NO: 608555 - DNA, 33 bp, Homo sapien
ccggggctctgctgcacggtgcctgaaccctct

SEQ ID NO: 608556 - DNA, 33 bp, Homo sapien
ccggggctctgctgcatggtgcctgaaccctct

SEQ ID NO: 608557 - DNA, 33 bp, Homo sapien
agccaatgttcatcacacgccaggcaagtgcac

SEQ ID NO: 608558 - DNA, 33 bp, Homo sapien
agccaatgttcatcactcgccaggcaagtgcac

SEQ ID NO: 608559 - DNA, 33 bp, Homo sapien
cttttatttctgctaaatgagagcctaaaatcc

SEQ ID NO: 608560 - DNA, 33 bp, Homo sapien
cttttatttctgctaactgagagcctaaaatcc

SEQ ID NO: 608561 - DNA, 33 bp, Homo sapien
ccattgcaagttcaggaccaaagatgatgacag

SEQ ID NO: 608562 - DNA, 33 bp, Homo sapien
ccattgcaagttcaggtccaaagatgatgacag

SEQ ID NO: 608563 - DNA, 33 bp, Homo sapien
ttagggtccaggtggccagcgaggtggtcagtt

SEQ ID NO: 608564 - DNA, 33 bp, Homo sapien
ttagggtccaggtggctagcgaggtggtcagtt

SEQ ID NO: 608565 - DNA, 33 bp, Homo sapien
cctgcgcctttagcacagaaggccgtaacagca

SEQ ID NO: 608566 - DNA, 33 bp, Homo sapien
cctgcgcctttagcacggaaggccgtaacagca

SEQ ID NO: 608567 - DNA, 33 bp, Homo sapien
tatgacaggtgtgtacagatgtaagggtatgtg

SEQ ID NO: 608568 - DNA, 33 bp, Homo sapien
tatgacaggtgtgtacggatgtaagggtatgtg

SEQ ID NO: 608569 - DNA, 33 bp, Homo sapien
ttgcgttttctccccccgctctagtggcggttg

SEQ ID NO: 608570 - DNA, 33 bp, Homo sapien
ttgcgttttctccccctgctctagtggcggttg

SEQ ID NO: 608571 - DNA, 33 bp, Homo sapien
ggaaggataggacaacaatgggctgcagcaagg

SEQ ID NO: 608572 - DNA, 33 bp, Homo sapien
ggaaggataggacaacgatgggctgcagcaagg

SEQ ID NO: 608573 - DNA, 33 bp, Homo sapien
tagcttttgttttccccgaggatctcaaatcct

SEQ ID NO: 608574 - DNA, 33 bp, Homo sapien
tagcttttgttttccctgaggatctcaaatcct

SEQ ID NO: 608575 - DNA, 33 bp, Homo sapien
ctcggtgtcctacaagcacatactgcccttccc

SEQ ID NO: 608576 - DNA, 33 bp, Homo sapien
ctcggtgtcctacaagtacatactgcccttccc

SEQ ID NO: 608577 - DNA, 33 bp, Homo sapien
aaaagcttttcctcacagccagaaaaccaacta

SEQ ID NO: 608578 - DNA, 33 bp, Homo sapien
aaaagcttttcctcacggccagaaaaccaacta

SEQ ID NO: 608579 - DNA, 33 bp, Homo sapien
aatcaaggacaaaaacgagaatgagacgtgatg

SEQ ID NO: 608580 - DNA, 33 bp, Homo sapien
aatcaaggacaaaaactagaatgagacgtgatg

SEQ ID NO: 608581 - DNA, 33 bp, Homo sapien
agaaattgctgatgcaacccaagtctacagcga

SEQ ID NO: 608582 - DNA, 33 bp, Homo sapien
agaaattgctgatgcagcccaagtctacagcga

SEQ ID NO: 608583 - DNA, 33 bp, Homo sapien
atgcttacctttgtaacgcagggtgtctcttct

SEQ ID NO: 608584 - DNA, 33 bp, Homo sapien
atgcttacctttgtaatgcagggtgtctcttct

SEQ ID NO: 608585 - DNA, 33 bp, Homo sapien
acaccggacagaagtgaaaagaaggaacactgt

SEQ ID NO: 608586 - DNA, 33 bp, Homo sapien
acaccggacagaagtggaaagaaggaacactgt

SEQ ID NO: 608587 - DNA, 33 bp, Homo sapien
tttacaaaaaagctacaagaaagaacaagagtt

SEQ ID NO: 608588 - DNA, 33 bp, Homo sapien
tttacaaaaaagctactagaaagaacaagagtt

SEQ ID NO: 608589 - DNA, 33 bp, Homo sapien
gggctttcttgttggcaaacacatggctatggc

SEQ ID NO: 608590 - DNA, 33 bp, Homo sapien
gggctttcttgttggcgaacacatggctatggc

SEQ ID NO: 608591 - DNA, 33 bp, Homo sapien
aaggcctcaggttgtacagtcaggtgagcctgg

SEQ ID NO: 608592 - DNA, 33 bp, Homo sapien
aaggcctcaggttgtagagtcaggtgagcctgg

SEQ ID NO: 608593 - DNA, 33 bp, Homo sapien
ctccaggagtgacaccaccaggactcagcaggg

SEQ ID NO: 608594 - DNA, 33 bp, Homo sapien
ctccaggagtgacaccgccaggactcagcaggg

SEQ ID NO: 608595 - DNA, 33 bp, Homo sapien
gcaaatcctgaacgtgcagccgatgaagggctg

SEQ ID NO: 608596 - DNA, 33 bp, Homo sapien
gcaaatcctgaacgtgtagccgatgaagggctg

SEQ ID NO: 608597 - DNA, 33 bp, Homo sapien
gctggcaaggtagcaagtccacagaccgggagc

SEQ ID NO: 608598 - DNA, 33 bp, Homo sapien
gctggcaaggtagcaattccacagaccgggagc

SEQ ID NO: 608599 - DNA, 33 bp, Homo sapien
attgggactcagcatcacagccttctgatttcc

SEQ ID NO: 608600 - DNA, 33 bp, Homo sapien
attgggactcagcatcgcagccttctgatttcc

SEQ ID NO: 608601 - DNA, 33 bp, Homo sapien
ggacagcgtgctccaactaccgcacctgctggg

SEQ ID NO: 608602 - DNA, 33 bp, Homo sapien
ggacagcgtgctccaagtaccgcacctgctggg

SEQ ID NO: 608603 - DNA, 33 bp, Homo sapien
aagcaagcttaaagtcactaaggactttccaga

SEQ ID NO: 608604 - DNA, 33 bp, Homo sapien
aagcaagcttaaagtcgctaaggactttccaga

SEQ ID NO: 608605 - DNA, 33 bp, Homo sapien
ctagtgagcaagaaataaacacaatgggagaaa

SEQ ID NO: 608606 - DNA, 33 bp, Homo sapien
ctagtgagcaagaaatgaacacaatgggagaaa

SEQ ID NO: 608607 - DNA, 33 bp, Homo sapien
cccttcgaagccggatcactgatgagtcagggc

SEQ ID NO: 608608 - DNA, 33 bp, Homo sapien
cccttcgaagccggatgactgatgagtcagggc

SEQ ID NO: 608609 - DNA, 33 bp, Homo sapien
cttgacatcaaaacagcctcggaatccaacaac

SEQ ID NO: 608610 - DNA, 33 bp, Homo sapien
cttgacatcaaaacaggctcggaatccaacaac

SEQ ID NO: 608611 - DNA, 33 bp, Homo sapien
aggatcataggagtccaagaagaaagtcaagtc

SEQ ID NO: 608612 - DNA, 33 bp, Homo sapien
aggatcataggagtccgagaagaaagtcaagtc

SEQ ID NO: 608613 - DNA, 33 bp, Homo sapien
gactttacggtaacagcagggatcttatgatta

SEQ ID NO: 608614 - DNA, 33 bp, Homo sapien
gactttacggtaacaggagggatcttatgatta

SEQ ID NO: 608615 - DNA, 33 bp, Homo sapien
acagcactcgtttgcacaactgaaactgtgcac

SEQ ID NO: 608616 - DNA, 33 bp, Homo sapien
acagcactcgtttgcataactgaaactgtgcac

SEQ ID NO: 608617 - DNA, 33 bp, Homo sapien
gatcgctggcccattacggtgtcaggaatgtgc

SEQ ID NO: 608618 - DNA, 33 bp, Homo sapien
gatcgctggcccattatggtgtcaggaatgtgc

SEQ ID NO: 608619 - DNA, 33 bp, Homo sapien
ctctggaggagccttccattgagaggggtcagg

SEQ ID NO: 608620 - DNA, 33 bp, Homo sapien
ctctggaggagccttctattgagaggggtcagg

SEQ ID NO: 608621 - DNA, 33 bp, Homo sapien
aacgtagagtcacaaacaatatgtctaattacg

SEQ ID NO: 608622 - DNA, 33 bp, Homo sapien
aacgtagagtcacaaataatatgtctaattacg

SEQ ID NO: 608623 - DNA, 33 bp, Homo sapien
cagagtggggccgactcaggaagactgaaaggg

SEQ ID NO: 608624 - DNA, 33 bp, Homo sapien
cagagtggggccgactgaggaagactgaaaggg

SEQ ID NO: 608625 - DNA, 33 bp, Homo sapien
aggctctttgctttcaaaatcaaagttacaacg

SEQ ID NO: 608626 - DNA, 33 bp, Homo sapien
aggctctttgctttcacaatcaaagttacaacg

SEQ ID NO: 608627 - DNA, 33 bp, Homo sapien
gcctgggaggcgctccagattaggacacgcatc

SEQ ID NO: 608628 - DNA, 33 bp, Homo sapien
gcctgggaggcgctccggattaggacacgcatc

SEQ ID NO: 608629 - DNA, 33 bp, Homo sapien
gtcttcatttttaaaaggggataggaatgcctg

SEQ ID NO: 608630 - DNA, 33 bp, Homo sapien
gtcttcatttttaaaatgggataggaatgcctg

SEQ ID NO: 608631 - DNA, 33 bp, Homo sapien
agtacagactgtgggccaagttctgtgcaaatc

SEQ ID NO: 608632 - DNA, 33 bp, Homo sapien
agtacagactgtgggctaagttctgtgcaaatc

SEQ ID NO: 608633 - DNA, 33 bp, Homo sapien
cattaaggagggcgtgcagtagtaccttgtttg

SEQ ID NO: 608634 - DNA, 33 bp, Homo sapien
cattaaggagggcgtgtagtagtaccttgtttg

SEQ ID NO: 608635 - DNA, 33 bp, Homo sapien
agaatttggcttcaccagggagagttgatgagg

SEQ ID NO: 608636 - DNA, 33 bp, Homo sapien
agaatttggcttcaccggggagagttgatgagg

SEQ ID NO: 608637 - DNA, 33 bp, Homo sapien
cacagccctgggaaacacctttcaaatttgaac

SEQ ID NO: 608638 - DNA, 33 bp, Homo sapien
cacagccctgggaaacgcctttcaaatttgaac

SEQ ID NO: 608639 - DNA, 33 bp, Homo sapien
tcttgcccatctggaaactaggaactggcctct

SEQ ID NO: 608640 - DNA, 33 bp, Homo sapien
tcttgcccatctggaagctaggaactggcctct

SEQ ID NO: 608641 - DNA, 33 bp, Homo sapien
ggggttgttcccaggcaataggtgaatttatac

SEQ ID NO: 608642 - DNA, 33 bp, Homo sapien
ggggttgttcccaggcgataggtgaatttatac

SEQ ID NO: 608643 - DNA, 33 bp, Homo sapien
ctgtggctttgtagtacaggtttgatgagctag

SEQ ID NO: 608644 - DNA, 33 bp, Homo sapien
ctgtggctttgtagtataggtttgatgagctag

SEQ ID NO: 608645 - DNA, 33 bp, Homo sapien
ataagctatcccggaaaatcttcatttatccat

SEQ ID NO: 608646 - DNA, 33 bp, Homo sapien
ataagctatcccggaacatcttcatttatccat

SEQ ID NO: 608647 - DNA, 33 bp, Homo sapien
tatttactgaaacgagaaaatgttttcattgcg

SEQ ID NO: 608648 - DNA, 33 bp, Homo sapien
tatttactgaaacgagcaaatgttttcattgcg

SEQ ID NO: 608649 - DNA, 33 bp, Homo sapien
gtccatttccttcttcactgattccttcattta

SEQ ID NO: 608650 - DNA, 33 bp, Homo sapien
gtccatttccttcttcgctgattccttcattta

SEQ ID NO: 608651 - DNA, 33 bp, Homo sapien
gccatgtatcaagcacaggtcctggaccaggtg

SEQ ID NO: 608652 - DNA, 33 bp, Homo sapien
gccatgtatcaagcacgggtcctggaccaggtg

SEQ ID NO: 608653 - DNA, 33 bp, Homo sapien
gggcgatttagaagccaaagtattgcagaatca

SEQ ID NO: 608654 - DNA, 33 bp, Homo sapien
gggcgatttagaagccgaagtattgcagaatca

SEQ ID NO: 608655 - DNA, 33 bp, Homo sapien
gctgaggtgagcaaggacagtggacgtcactgc

SEQ ID NO: 608656 - DNA, 33 bp, Homo sapien
gctgaggtgagcaagggcagtggacgtcactgc

SEQ ID NO: 608657 - DNA, 33 bp, Homo sapien
aggacggcgtccaaccggaaaggtcctttgtgt

SEQ ID NO: 608658 - DNA, 33 bp, Homo sapien
aggacggcgtccaacctgaaaggtcctttgtgt

SEQ ID NO: 608659 - DNA, 33 bp, Homo sapien
atcaacttgaaaatcaatattgctacatgttta

SEQ ID NO: 608660 - DNA, 33 bp, Homo sapien
atcaacttgaaaatcagtattgctacatgttta

SEQ ID NO: 608661 - DNA, 33 bp, Homo sapien
gacacgaccaagccacagggaccgagatggcaa

SEQ ID NO: 608662 - DNA, 33 bp, Homo sapien
gacacgaccaagccacggggaccgagatggcaa

SEQ ID NO: 608663 - DNA, 33 bp, Homo sapien
gtgacacgcagcttcacgtggctgggccagctt

SEQ ID NO: 608664 - DNA, 33 bp, Homo sapien
gtgacacgcagcttcatgtggctgggccagctt

SEQ ID NO: 608665 - DNA, 33 bp, Homo sapien
aacttgaagtgggccaagcacaatctgcgggtc

SEQ ID NO: 608666 - DNA, 33 bp, Homo sapien
aacttgaagtgggccaggcacaatctgcgggtc

SEQ ID NO: 608667 - DNA, 33 bp, Homo sapien
ggaaggaatgggaccacctgagatgaaatcatg

SEQ ID NO: 608668 - DNA, 33 bp, Homo sapien
ggaaggaatgggaccagctgagatgaaatcatg

SEQ ID NO: 608669 - DNA, 33 bp, Homo sapien
gacggccacacttgacagagcaggaggaggcca

SEQ ID NO: 608670 - DNA, 33 bp, Homo sapien
gacggccacacttgacggagcaggaggaggcca

SEQ ID NO: 608671 - DNA, 33 bp, Homo sapien
ttgctggaggagagagaccggggtacaggtggg

SEQ ID NO: 608672 - DNA, 33 bp, Homo sapien
ttgctggaggagagaggccggggtacaggtggg

SEQ ID NO: 608673 - DNA, 33 bp, Homo sapien
cacacattcaacaacccaataagggagttatta

SEQ ID NO: 608674 - DNA, 33 bp, Homo sapien
cacacattcaacaacctaataagggagttatta

SEQ ID NO: 608675 - DNA, 33 bp, Homo sapien
aagctctcagctgcaacaagagacctgaaagca

SEQ ID NO: 608676 - DNA, 33 bp, Homo sapien
aagctctcagctgcaagaagagacctgaaagca

SEQ ID NO: 608677 - DNA, 33 bp, Homo sapien
ggaggatccccttctccagctcagatcatgccg

SEQ ID NO: 608678 - DNA, 33 bp, Homo sapien
ggaggatccccttctctagctcagatcatgccg

SEQ ID NO: 608679 - DNA, 33 bp, Homo sapien
tcttggcgtttacatacatgaggaaatgcacac

SEQ ID NO: 608680 - DNA, 33 bp, Homo sapien
tcttggcgtttacatatatgaggaaatgcacac

SEQ ID NO: 608681 - DNA, 33 bp, Homo sapien
ctagttcttccaaaagcacaaaccacagagact

SEQ ID NO: 608682 - DNA, 33 bp, Homo sapien
ctagttcttccaaaagtacaaaccacagagact

SEQ ID NO: 608683 - DNA, 33 bp, Homo sapien
ggctttcttagcatgacgccagtggcaaaaaca

SEQ ID NO: 608684 - DNA, 33 bp, Homo sapien
ggctttcttagcatgatgccagtggcaaaaaca

SEQ ID NO: 608685 - DNA, 33 bp, Homo sapien
agcaaatggcagggacaactaagacccaacctt

SEQ ID NO: 608686 - DNA, 33 bp, Homo sapien
agcaaatggcagggacgactaagacccaacctt

SEQ ID NO: 608687 - DNA, 33 bp, Homo sapien
agcctctggtcatcaaacatctgttctccatgt

SEQ ID NO: 608688 - DNA, 33 bp, Homo sapien
agcctctggtcatcaaccatctgttctccatgt

SEQ ID NO: 608689 - DNA, 33 bp, Homo sapien
aggagagatctgaggcagccctttcaagttacg

SEQ ID NO: 608690 - DNA, 33 bp, Homo sapien
aggagagatctgaggctgccctttcaagttacg

SEQ ID NO: 608691 - DNA, 33 bp, Homo sapien
tccagcctggatattccagtccttttcatcatt

SEQ ID NO: 608692 - DNA, 33 bp, Homo sapien
tccagcctggatattctagtccttttcatcatt

SEQ ID NO: 608693 - DNA, 33 bp, Homo sapien
acgcatctatctttcccgaccgttgtatccccg

SEQ ID NO: 608694 - DNA, 33 bp, Homo sapien
acgcatctatctttcctgaccgttgtatccccg

SEQ ID NO: 608695 - DNA, 33 bp, Homo sapien
tctggtaaagtgacgcacagtggccctggtagc

SEQ ID NO: 608696 - DNA, 33 bp, Homo sapien
tctggtaaagtgacgcgcagtggccctggtagc

SEQ ID NO: 608697 - DNA, 33 bp, Homo sapien
caaaaacaaaaacaccagcagttgtcatgttaa

SEQ ID NO: 608698 - DNA, 33 bp, Homo sapien
caaaaacaaaaacaccggcagttgtcatgttaa

SEQ ID NO: 608699 - DNA, 33 bp, Homo sapien
tatttaaatctcaggacggccagaacttctcag

SEQ ID NO: 608700 - DNA, 33 bp, Homo sapien
tatttaaatctcaggatggccagaacttctcag

SEQ ID NO: 608701 - DNA, 33 bp, Homo sapien
aagtcggggccaagtccaagcactgtcacagcc

SEQ ID NO: 608702 - DNA, 33 bp, Homo sapien
aagtcggggccaagtcgaagcactgtcacagcc

SEQ ID NO: 608703 - DNA, 33 bp, Homo sapien
attattcacaatacccaacaggtgggagcaacc

SEQ ID NO: 608704 - DNA, 33 bp, Homo sapien
attattcacaatacccgacaggtgggagcaacc

SEQ ID NO: 608705 - DNA, 33 bp, Homo sapien
agccacacagagtgcacgtggtttggagcaact

SEQ ID NO: 608706 - DNA, 33 bp, Homo sapien
agccacacagagtgcatgtggtttggagcaact

SEQ ID NO: 608707 - DNA, 33 bp, Homo sapien
ctgggaggagaacaagactagacgggaatcctg

SEQ ID NO: 608708 - DNA, 33 bp, Homo sapien
ctgggaggagaacaagcctagacgggaatcctg

SEQ ID NO: 608709 - DNA, 33 bp, Homo sapien
gaataaatgatggttacgagatgggtctgcatt

SEQ ID NO: 608710 - DNA, 33 bp, Homo sapien
gaataaatgatggttatgagatgggtctgcatt

SEQ ID NO: 608711 - DNA, 33 bp, Homo sapien
taacacacaacctaacaccatccacaggatcgg

SEQ ID NO: 608712 - DNA, 33 bp, Homo sapien
taacacacaacctaaccccatccacaggatcgg

SEQ ID NO: 608713 - DNA, 33 bp, Homo sapien
acctgtgcttttttggaattcccttgttgcagc

SEQ ID NO: 608714 - DNA, 33 bp, Homo sapien
acctgtgcttttttgggattcccttgttgcagc

SEQ ID NO: 608715 - DNA, 33 bp, Homo sapien
gttctttataggaatacggaagtggatgaaaac

SEQ ID NO: 608716 - DNA, 33 bp, Homo sapien
gttctttataggaatatggaagtggatgaaaac

SEQ ID NO: 608717 - DNA, 33 bp, Homo sapien
gctgaagatacactaacagcaaagcagacagac

SEQ ID NO: 608718 - DNA, 33 bp, Homo sapien
gctgaagatacactaagagcaaagcagacagac

SEQ ID NO: 608719 - DNA, 33 bp, Homo sapien
tccgggttgagcacacaatggtctgagcaagtg

SEQ ID NO: 608720 - DNA, 33 bp, Homo sapien
tccgggttgagcacacgatggtctgagcaagtg

SEQ ID NO: 608721 - DNA, 33 bp, Homo sapien
ctcatctacaaaatgcagagatggggcttaatt

SEQ ID NO: 608722 - DNA, 33 bp, Homo sapien
ctcatctacaaaatgcggagatggggcttaatt

SEQ ID NO: 608723 - DNA, 33 bp, Homo sapien
cgtgtctctgttgtgaagcggcctgatgtctaa

SEQ ID NO: 608724 - DNA, 33 bp, Homo sapien
cgtgtctctgttgtgaggcggcctgatgtctaa

SEQ ID NO: 608725 - DNA, 33 bp, Homo sapien
accatctttcagaagcgctctggggtgcagggc

SEQ ID NO: 608726 - DNA, 33 bp, Homo sapien
accatctttcagaagctctctggggtgcagggc

SEQ ID NO: 608727 - DNA, 33 bp, Homo sapien
tattataccacttatcaatcatgaggacttgaa

SEQ ID NO: 608728 - DNA, 33 bp, Homo sapien
tattataccacttatccatcatgaggacttgaa

SEQ ID NO: 608729 - DNA, 33 bp, Homo sapien
ttttgggttattatacactggtagctaaccact

SEQ ID NO: 608730 - DNA, 33 bp, Homo sapien
ttttgggttattatacgctggtagctaaccact

SEQ ID NO: 608731 - DNA, 33 bp, Homo sapien
caaataagtgaaggaaaccctccagccagtgtt

SEQ ID NO: 608732 - DNA, 33 bp, Homo sapien
caaataagtgaaggaacccctccagccagtgtt

SEQ ID NO: 608733 - DNA, 33 bp, Homo sapien
tccccaccaaacatcaagattgtcaaggagctt

SEQ ID NO: 608734 - DNA, 33 bp, Homo sapien
tccccaccaaacatcaggattgtcaaggagctt

SEQ ID NO: 608735 - DNA, 33 bp, Homo sapien
ttgagatcagcctccaaatatgattttttgcct

SEQ ID NO: 608736 - DNA, 33 bp, Homo sapien
ttgagatcagcctccagatatgattttttgcct

SEQ ID NO: 608737 - DNA, 33 bp, Homo sapien
cttgaactcttggcctcaaataattcatctacc

SEQ ID NO: 608738 - DNA, 33 bp, Homo sapien
cttgaactcttggcctgaaataattcatctacc

SEQ ID NO: 608739 - DNA, 33 bp, Homo sapien
gcaccaacattccccaagaaggaagatgaccca

SEQ ID NO: 608740 - DNA, 33 bp, Homo sapien
gcaccaacattccccaggaaggaagatgaccca

SEQ ID NO: 608741 - DNA, 33 bp, Homo sapien
acctagatggccctacaatgagtcagtgttgac

SEQ ID NO: 608742 - DNA, 33 bp, Homo sapien
acctagatggccctacgatgagtcagtgttgac

SEQ ID NO: 608743 - DNA, 33 bp, Homo sapien
gacatttggagttgcacagacacgaccattgag

SEQ ID NO: 608744 - DNA, 33 bp, Homo sapien
gacatttggagttgcatagacacgaccattgag

SEQ ID NO: 608745 - DNA, 33 bp, Homo sapien
ccatcagacatttataccagaattttatacatt

SEQ ID NO: 608746 - DNA, 33 bp, Homo sapien
ccatcagacatttatatcagaattttatacatt

SEQ ID NO: 608747 - DNA, 33 bp, Homo sapien
gaaataataaagagcacctaacaaaaacttgca

SEQ ID NO: 608748 - DNA, 33 bp, Homo sapien
gaaataataaagagcagctaacaaaaacttgca

SEQ ID NO: 608749 - DNA, 33 bp, Homo sapien
gccattcaattcaaccacttcagtgaaatagac

SEQ ID NO: 608750 - DNA, 33 bp, Homo sapien
gccattcaattcaaccccttcagtgaaatagac

SEQ ID NO: 608751 - DNA, 33 bp, Homo sapien
tcagcttcttaaggtacaaaacaggcttatcaa

SEQ ID NO: 608752 - DNA, 33 bp, Homo sapien
tcagcttcttaaggtagaaaacaggcttatcaa

SEQ ID NO: 608753 - DNA, 33 bp, Homo sapien
ggttgttgctataaaccgttggttccagtggct

SEQ ID NO: 608754 - DNA, 33 bp, Homo sapien
ggttgttgctataaactgttggttccagtggct

SEQ ID NO: 608755 - DNA, 33 bp, Homo sapien
ctgacctcccctttgacgttcagacttgtacat

SEQ ID NO: 608756 - DNA, 33 bp, Homo sapien
ctgacctcccctttgatgttcagacttgtacat

SEQ ID NO: 608757 - DNA, 33 bp, Homo sapien
agtgactttcaaactccagtgcgcgtctgggtc

SEQ ID NO: 608758 - DNA, 33 bp, Homo sapien
agtgactttcaaactctagtgcgcgtctgggtc

SEQ ID NO: 608759 - DNA, 33 bp, Homo sapien
tgtatttatgttaagcaattggctcatttgatt

SEQ ID NO: 608760 - DNA, 33 bp, Homo sapien
tgtatttatgttaagcgattggctcatttgatt

SEQ ID NO: 608761 - DNA, 33 bp, Homo sapien
aggcagggtgctggccaaactcgcccttcctca

SEQ ID NO: 608762 - DNA, 33 bp, Homo sapien
aggcagggtgctggccgaactcgcccttcctca

SEQ ID NO: 608763 - DNA, 33 bp, Homo sapien
cagagaagtgcatcaacattaatattcaagggt

SEQ ID NO: 608764 - DNA, 33 bp, Homo sapien
cagagaagtgcatcaagattaatattcaagggt

SEQ ID NO: 608765 - DNA, 33 bp, Homo sapien
acatcaggcactggccagctattttaagacatt

SEQ ID NO: 608766 - DNA, 33 bp, Homo sapien
acatcaggcactggccggctattttaagacatt

SEQ ID NO: 608767 - DNA, 33 bp, Homo sapien
agatgtacatgtcaggccatttttttgatattt

SEQ ID NO: 608768 - DNA, 33 bp, Homo sapien
agatgtacatgtcaggtcatttttttgatattt

SEQ ID NO: 608769 - DNA, 33 bp, Homo sapien
caaaataaaagccagaaaaaggtgtgaaagggg

SEQ ID NO: 608770 - DNA, 33 bp, Homo sapien
caaaataaaagccagataaaggtgtgaaagggg

SEQ ID NO: 608771 - DNA, 33 bp, Homo sapien
aggtcaatctctatccagctacactgtgcatta

SEQ ID NO: 608772 - DNA, 33 bp, Homo sapien
aggtcaatctctatccggctacactgtgcatta

SEQ ID NO: 608773 - DNA, 33 bp, Homo sapien
gcaaatccaggactcacacaatgcactgaggag

SEQ ID NO: 608774 - DNA, 33 bp, Homo sapien
gcaaatccaggactcagacaatgcactgaggag

SEQ ID NO: 608775 - DNA, 33 bp, Homo sapien
tgtgtggccctgtcaccgagatactgcctgctc

SEQ ID NO: 608776 - DNA, 33 bp, Homo sapien
tgtgtggccctgtcactgagatactgcctgctc

SEQ ID NO: 608777 - DNA, 33 bp, Homo sapien
agacagaaaagtaagcagatggagcaggacaca

SEQ ID NO: 608778 - DNA, 33 bp, Homo sapien
agacagaaaagtaagccgatggagcaggacaca

SEQ ID NO: 608779 - DNA, 33 bp, Homo sapien
aggaggtgttcaagggaaatggaccgatccctg

SEQ ID NO: 608780 - DNA, 33 bp, Homo sapien
aggaggtgttcaaggggaatggaccgatccctg

SEQ ID NO: 608781 - DNA, 33 bp, Homo sapien
tgaccaccccccagataaaaaagagcaggagat

SEQ ID NO: 608782 - DNA, 33 bp, Homo sapien
tgaccaccccccagatgaaaaagagcaggagat

SEQ ID NO: 608783 - DNA, 33 bp, Homo sapien
tgccagtcccctgaacagactttgctcagcacc

SEQ ID NO: 608784 - DNA, 33 bp, Homo sapien
tgccagtcccctgaacggactttgctcagcacc

SEQ ID NO: 608785 - DNA, 33 bp, Homo sapien
ccagaaccttctcggcacctactgtctggtctt

SEQ ID NO: 608786 - DNA, 33 bp, Homo sapien
ccagaaccttctcggcgcctactgtctggtctt

SEQ ID NO: 608787 - DNA, 33 bp, Homo sapien
cttttagtaattaaacacaccaaattaatcatg

SEQ ID NO: 608788 - DNA, 33 bp, Homo sapien
cttttagtaattaaacgcaccaaattaatcatg

SEQ ID NO: 608789 - DNA, 33 bp, Homo sapien
ttaataaaccactgcccctgagaaacgacggaa

SEQ ID NO: 608790 - DNA, 33 bp, Homo sapien
ttaataaaccactgccgctgagaaacgacggaa

SEQ ID NO: 608791 - DNA, 33 bp, Homo sapien
ttatctggagcttacaaattcatttacttgggt

SEQ ID NO: 608792 - DNA, 33 bp, Homo sapien
ttatctggagcttacagattcatttacttgggt

SEQ ID NO: 608793 - DNA, 33 bp, Homo sapien
tcattgcttgaatagaaggcaattgaatggata

SEQ ID NO: 608794 - DNA, 33 bp, Homo sapien
tcattgcttgaatagatggcaattgaatggata

SEQ ID NO: 608795 - DNA, 33 bp, Homo sapien
ggcaattgaatggatacagatcaggtcatgggc

SEQ ID NO: 608796 - DNA, 33 bp, Homo sapien
ggcaattgaatggatatagatcaggtcatgggc

SEQ ID NO: 608797 - DNA, 33 bp, Homo sapien
aggagtgtgggtgatgaaagatcctggtttccg

SEQ ID NO: 608798 - DNA, 33 bp, Homo sapien
aggagtgtgggtgatggaagatcctggtttccg

SEQ ID NO: 608799 - DNA, 33 bp, Homo sapien
tgaatgccgtaccacaatctgtcccctccatcg

SEQ ID NO: 608800 - DNA, 33 bp, Homo sapien
tgaatgccgtaccacactctgtcccctccatcg

SEQ ID NO: 608801 - DNA, 33 bp, Homo sapien
cacatgcctctgacaccggcaccataggaattt

SEQ ID NO: 608802 - DNA, 33 bp, Homo sapien
cacatgcctctgacactggcaccataggaattt

SEQ ID NO: 608803 - DNA, 33 bp, Homo sapien
tctgtagattgaaaaccatgagctcacatcatt

SEQ ID NO: 608804 - DNA, 33 bp, Homo sapien
tctgtagattgaaaactatgagctcacatcatt

SEQ ID NO: 608805 - DNA, 33 bp, Homo sapien
aaggcaaacaacattaaatcttgaggctggaga

SEQ ID NO: 608806 - DNA, 33 bp, Homo sapien
aaggcaaacaacattacatcttgaggctggaga

SEQ ID NO: 608807 - DNA, 33 bp, Homo sapien
acaagcccttctatcaaaatttagcaaaatgag

SEQ ID NO: 608808 - DNA, 33 bp, Homo sapien
acaagcccttctatcagaatttagcaaaatgag

SEQ ID NO: 608809 - DNA, 33 bp, Homo sapien
aagcttttctctgcctaaatttgcataatggtc

SEQ ID NO: 608810 - DNA, 33 bp, Homo sapien
aagcttttctctgcctgaatttgcataatggtc

SEQ ID NO: 608811 - DNA, 33 bp, Homo sapien
gaaatgagctatgtgacaaattccttttctgct

SEQ ID NO: 608812 - DNA, 33 bp, Homo sapien
gaaatgagctatgtgagaaattccttttctgct

SEQ ID NO: 608813 - DNA, 33 bp, Homo sapien
gttgtgaggaagtacaatcaaccacgcagaggg

SEQ ID NO: 608814 - DNA, 33 bp, Homo sapien
gttgtgaggaagtacagtcaaccacgcagaggg

SEQ ID NO: 608815 - DNA, 33 bp, Homo sapien
cttgaggctgttataaaccaaggaagtgacact

SEQ ID NO: 608816 - DNA, 33 bp, Homo sapien
cttgaggctgttataacccaaggaagtgacact

SEQ ID NO: 608817 - DNA, 33 bp, Homo sapien
tgttcctttaaccccccgattgcaccctgaatc

SEQ ID NO: 608818 - DNA, 33 bp, Homo sapien
tgttcctttaaccccctgattgcaccctgaatc

SEQ ID NO: 608819 - DNA, 33 bp, Homo sapien
gcacatacggtgtccacgccttaagcacacact

SEQ ID NO: 608820 - DNA, 33 bp, Homo sapien
gcacatacggtgtccatgccttaagcacacact

SEQ ID NO: 608821 - DNA, 33 bp, Homo sapien
atgacaagtcttttccactatgactgttctaga

SEQ ID NO: 608822 - DNA, 33 bp, Homo sapien
atgacaagtcttttccgctatgactgttctaga

SEQ ID NO: 608823 - DNA, 33 bp, Homo sapien
tctgctgcagtccaggccatgctgtaggaaaag

SEQ ID NO: 608824 - DNA, 33 bp, Homo sapien
tctgctgcagtccaggtcatgctgtaggaaaag

SEQ ID NO: 608825 - DNA, 33 bp, Homo sapien
acttcatggagcttaagtagttctcaatgcaat

SEQ ID NO: 608826 - DNA, 33 bp, Homo sapien
acttcatggagcttaattagttctcaatgcaat

SEQ ID NO: 608827 - DNA, 33 bp, Homo sapien
tattgagtagctcctccgaagatttgtcagacc

SEQ ID NO: 608828 - DNA, 33 bp, Homo sapien
tattgagtagctcctctgaagatttgtcagacc

SEQ ID NO: 608829 - DNA, 33 bp, Homo sapien
ggggctttataagaaaatgccaactcctttccc

SEQ ID NO: 608830 - DNA, 33 bp, Homo sapien
ggggctttataagaaactgccaactcctttccc

SEQ ID NO: 608831 - DNA, 33 bp, Homo sapien
cccgacgtacacataccaaaggacccagaaatc

SEQ ID NO: 608832 - DNA, 33 bp, Homo sapien
cccgacgtacacatactaaaggacccagaaatc

SEQ ID NO: 608833 - DNA, 33 bp, Homo sapien
tacggtattagcaatgaattttttcacagatgc

SEQ ID NO: 608834 - DNA, 33 bp, Homo sapien
tacggtattagcaatggattttttcacagatgc

SEQ ID NO: 608835 - DNA, 33 bp, Homo sapien
tgtttcaaaagagagagagcaagatttgggata

SEQ ID NO: 608836 - DNA, 33 bp, Homo sapien
tgtttcaaaagagagatagcaagatttgggata

SEQ ID NO: 608837 - DNA, 33 bp, Homo sapien
gccctttcagagtttacgcttgcttggaagcct

SEQ ID NO: 608838 - DNA, 33 bp, Homo sapien
gccctttcagagtttatgcttgcttggaagcct

SEQ ID NO: 608839 - DNA, 33 bp, Homo sapien
gctctgtctttgtgcccctttcttgcaagtgct

SEQ ID NO: 608840 - DNA, 33 bp, Homo sapien
gctctgtctttgtgcctctttcttgcaagtgct

SEQ ID NO: 608841 - DNA, 33 bp, Homo sapien
ggctactggactgtgaagtactagtgagatgga

SEQ ID NO: 608842 - DNA, 33 bp, Homo sapien
ggctactggactgtgatgtactagtgagatgga

SEQ ID NO: 608843 - DNA, 33 bp, Homo sapien
ggcaacctatggaaggacaaagcctagcaatgg

SEQ ID NO: 608844 - DNA, 33 bp, Homo sapien
ggcaacctatggaagggcaaagcctagcaatgg

SEQ ID NO: 608845 - DNA, 33 bp, Homo sapien
cacttatgatagacaacgatgcagaatgaaaat

SEQ ID NO: 608846 - DNA, 33 bp, Homo sapien
cacttatgatagacaatgatgcagaatgaaaat

SEQ ID NO: 608847 - DNA, 33 bp, Homo sapien
gtgaggaacctgatcacataatgaggatgatca

SEQ ID NO: 608848 - DNA, 33 bp, Homo sapien
gtgaggaacctgatcagataatgaggatgatca

SEQ ID NO: 608849 - DNA, 33 bp, Homo sapien
tggggactcagtgggacgaaggatgtgaatgtg

SEQ ID NO: 608850 - DNA, 33 bp, Homo sapien
tggggactcagtgggatgaaggatgtgaatgtg

SEQ ID NO: 608851 - DNA, 33 bp, Homo sapien
cctggatcccggaggacgaattctgatttctcc

SEQ ID NO: 608852 - DNA, 33 bp, Homo sapien
cctggatcccggaggatgaattctgatttctcc

SEQ ID NO: 608853 - DNA, 33 bp, Homo sapien
tgtctatctgtcttcacatcaaatcttgggatt

SEQ ID NO: 608854 - DNA, 33 bp, Homo sapien
tgtctatctgtcttcatatcaaatcttgggatt

SEQ ID NO: 608855 - DNA, 33 bp, Homo sapien
actagtaagtcaaagacggggccattttctgtg

SEQ ID NO: 608856 - DNA, 33 bp, Homo sapien
actagtaagtcaaagatggggccattttctgtg

SEQ ID NO: 608857 - DNA, 33 bp, Homo sapien
cagtgtggagtggcaaacagataaggcagtctt

SEQ ID NO: 608858 - DNA, 33 bp, Homo sapien
cagtgtggagtggcaaccagataaggcagtctt

SEQ ID NO: 608859 - DNA, 33 bp, Homo sapien
ctgtaattccctggacaactagacggaccaaaa

SEQ ID NO: 608860 - DNA, 33 bp, Homo sapien
ctgtaattccctggactactagacggaccaaaa

SEQ ID NO: 608861 - DNA, 33 bp, Homo sapien
cccttcaatttgcatacattttatggtgtctgt

SEQ ID NO: 608862 - DNA, 33 bp, Homo sapien
cccttcaatttgcatatattttatggtgtctgt

SEQ ID NO: 608863 - DNA, 33 bp, Homo sapien
ggtggtagttggagtcacagattgagagatcac

SEQ ID NO: 608864 - DNA, 33 bp, Homo sapien
ggtggtagttggagtcgcagattgagagatcac

SEQ ID NO: 608865 - DNA, 33 bp, Homo sapien
tgaggaacacgcaaacactcaaactgcccagaa

SEQ ID NO: 608866 - DNA, 33 bp, Homo sapien
tgaggaacacgcaaacgctcaaactgcccagaa

SEQ ID NO: 608867 - DNA, 33 bp, Homo sapien
tccacagctggcaaaacgaacgtgatcagcacg

SEQ ID NO: 608868 - DNA, 33 bp, Homo sapien
tccacagctggcaaaatgaacgtgatcagcacg

SEQ ID NO: 608869 - DNA, 33 bp, Homo sapien
gtgatctgtgtattccactgtttttgtccagtg

SEQ ID NO: 608870 - DNA, 33 bp, Homo sapien
gtgatctgtgtattccgctgtttttgtccagtg

SEQ ID NO: 608871 - DNA, 33 bp, Homo sapien
acgaggaatgaaattcactcacagatcagggcc

SEQ ID NO: 608872 - DNA, 33 bp, Homo sapien
acgaggaatgaaattcgctcacagatcagggcc

SEQ ID NO: 608873 - DNA, 33 bp, Homo sapien
aaagcacttgttttcccaaatcattctcataga

SEQ ID NO: 608874 - DNA, 33 bp, Homo sapien
aaagcacttgttttccgaaatcattctcataga

SEQ ID NO: 608875 - DNA, 33 bp, Homo sapien
ggagaatgaactctataaaagcaatttttttct

SEQ ID NO: 608876 - DNA, 33 bp, Homo sapien
ggagaatgaactctattaaagcaatttttttct

SEQ ID NO: 608877 - DNA, 33 bp, Homo sapien
tggcactgtccccaccgcattagtcagatcctg

SEQ ID NO: 608878 - DNA, 33 bp, Homo sapien
tggcactgtccccacctcattagtcagatcctg

SEQ ID NO: 608879 - DNA, 33 bp, Homo sapien
acattatggtaaccaactggattaatttgtatt

SEQ ID NO: 608880 - DNA, 33 bp, Homo sapien
acattatggtaaccaattggattaatttgtatt

SEQ ID NO: 608881 - DNA, 33 bp, Homo sapien
aacggctctgtgctgcccgcgctgtcattagtg

SEQ ID NO: 608882 - DNA, 33 bp, Homo sapien
aacggctctgtgctgctcgcgctgtcattagtg

SEQ ID NO: 608883 - DNA, 33 bp, Homo sapien
gattggaaattgataagaacgatgctggtgaca

SEQ ID NO: 608884 - DNA, 33 bp, Homo sapien
gattggaaattgataataacgatgctggtgaca

SEQ ID NO: 608885 - DNA, 33 bp, Homo sapien
cagtttcgcttttctgaacatttacctacctgg

SEQ ID NO: 608886 - DNA, 33 bp, Homo sapien
cagtttcgcttttctggacatttacctacctgg

SEQ ID NO: 608887 - DNA, 33 bp, Homo sapien
accaactttactcggaaacttgccaggtaggta

SEQ ID NO: 608888 - DNA, 33 bp, Homo sapien
accaactttactcggagacttgccaggtaggta

SEQ ID NO: 608889 - DNA, 33 bp, Homo sapien
tcttggcagtaaagacagagaaatcagaaaggg

SEQ ID NO: 608890 - DNA, 33 bp, Homo sapien
tcttggcagtaaagacggagaaatcagaaaggg

SEQ ID NO: 608891 - DNA, 33 bp, Homo sapien
ccaggcctgagcctaccggtgtcttatccccat

SEQ ID NO: 608892 - DNA, 33 bp, Homo sapien
ccaggcctgagcctactggtgtcttatccccat

SEQ ID NO: 608893 - DNA, 33 bp, Homo sapien
gatctctgcccattaactgcagactgctatgac

SEQ ID NO: 608894 - DNA, 33 bp, Homo sapien
gatctctgcccattaattgcagactgctatgac

SEQ ID NO: 608895 - DNA, 33 bp, Homo sapien
ggagatgagtcatattaaagcaagacgcttcct

SEQ ID NO: 608896 - DNA, 33 bp, Homo sapien
ggagatgagtcatatttaagcaagacgcttcct

SEQ ID NO: 608897 - DNA, 33 bp, Homo sapien
agaaactattgctcaagtcaagggaaggcccca

SEQ ID NO: 608898 - DNA, 33 bp, Homo sapien
agaaactattgctcaattcaagggaaggcccca

SEQ ID NO: 608899 - DNA, 33 bp, Homo sapien
gcaatggcggactgaacacagcagctggcccct

SEQ ID NO: 608900 - DNA, 33 bp, Homo sapien
gcaatggcggactgaatacagcagctggcccct

SEQ ID NO: 608901 - DNA, 33 bp, Homo sapien
tgatgatgtaacagcaacaagggtaaggaaaaa

SEQ ID NO: 608902 - DNA, 33 bp, Homo sapien
tgatgatgtaacagcagcaagggtaaggaaaaa

SEQ ID NO: 608903 - DNA, 33 bp, Homo sapien
ctttctcggccatatccactgtgtgcctcaaac

SEQ ID NO: 608904 - DNA, 33 bp, Homo sapien
ctttctcggccatatctactgtgtgcctcaaac

SEQ ID NO: 608905 - DNA, 33 bp, Homo sapien
tgaatgccaatttggacgcagcacaaaaacaaa

SEQ ID NO: 608906 - DNA, 33 bp, Homo sapien
tgaatgccaatttggatgcagcacaaaaacaaa

SEQ ID NO: 608907 - DNA, 33 bp, Homo sapien
gtcaaagctttttgaaataacagaggtttctgt

SEQ ID NO: 608908 - DNA, 33 bp, Homo sapien
gtcaaagctttttgaagtaacagaggtttctgt

SEQ ID NO: 608909 - DNA, 33 bp, Homo sapien
agctcgtctctcttcaatcatctgtaggggcag

SEQ ID NO: 608910 - DNA, 33 bp, Homo sapien
agctcgtctctcttcagtcatctgtaggggcag

SEQ ID NO: 608911 - DNA, 33 bp, Homo sapien
aatgcacttcaattacactctgctggtcataac

SEQ ID NO: 608912 - DNA, 33 bp, Homo sapien
aatgcacttcaattacgctctgctggtcataac

SEQ ID NO: 608913 - DNA, 33 bp, Homo sapien
ggagttcctcgtaatagaactcatgcttacttg

SEQ ID NO: 608914 - DNA, 33 bp, Homo sapien
ggagttcctcgtaatataactcatgcttacttg

SEQ ID NO: 608915 - DNA, 33 bp, Homo sapien
tagatctgagttggaacaacaatagaaggtgga

SEQ ID NO: 608916 - DNA, 33 bp, Homo sapien
tagatctgagttggaataacaatagaaggtgga

SEQ ID NO: 608917 - DNA, 33 bp, Homo sapien
ctctcagagaatgcaactgttcatttgcttagt

SEQ ID NO: 608918 - DNA, 33 bp, Homo sapien
ctctcagagaatgcaattgttcatttgcttagt

SEQ ID NO: 608919 - DNA, 33 bp, Homo sapien
tgggagactaattctaagagagaagctctgttc

SEQ ID NO: 608920 - DNA, 33 bp, Homo sapien
tgggagactaattctaggagagaagctctgttc

SEQ ID NO: 608921 - DNA, 33 bp, Homo sapien
gaaataggccggctaacacttgtggacaagaag

SEQ ID NO: 608922 - DNA, 33 bp, Homo sapien
gaaataggccggctaagacttgtggacaagaag

SEQ ID NO: 608923 - DNA, 33 bp, Homo sapien
aggaaagaaagtccgaaagcacatgggtcagct

SEQ ID NO: 608924 - DNA, 33 bp, Homo sapien
aggaaagaaagtccgagagcacatgggtcagct

SEQ ID NO: 608925 - DNA, 33 bp, Homo sapien
gcagagctcaggtggaccagtagcgttctgtgg

SEQ ID NO: 608926 - DNA, 33 bp, Homo sapien
gcagagctcaggtggatcagtagcgttctgtgg

SEQ ID NO: 608927 - DNA, 33 bp, Homo sapien
aaactaatactaatgacaatagtgtgtaagaaa

SEQ ID NO: 608928 - DNA, 33 bp, Homo sapien
aaactaatactaatgagaatagtgtgtaagaaa

SEQ ID NO: 608929 - DNA, 33 bp, Homo sapien
atgaacctatgaaccaaaagtacagctacgatt

SEQ ID NO: 608930 - DNA, 33 bp, Homo sapien
atgaacctatgaaccagaagtacagctacgatt

SEQ ID NO: 608931 - DNA, 33 bp, Homo sapien
tctgatttccaacacacggcaaagtggcccagg

SEQ ID NO: 608932 - DNA, 33 bp, Homo sapien
tctgatttccaacacatggcaaagtggcccagg

SEQ ID NO: 608933 - DNA, 33 bp, Homo sapien
cttctgtataacattacagtgaaagctctagct

SEQ ID NO: 608934 - DNA, 33 bp, Homo sapien
cttctgtataacattatagtgaaagctctagct

SEQ ID NO: 608935 - DNA, 33 bp, Homo sapien
taattgcaattttggaatagggaaatgtttctt

SEQ ID NO: 608936 - DNA, 33 bp, Homo sapien
taattgcaattttggagtagggaaatgtttctt

SEQ ID NO: 608937 - DNA, 33 bp, Homo sapien
tgccttacaacaaagcgccacgtccatcctcct

SEQ ID NO: 608938 - DNA, 33 bp, Homo sapien
tgccttacaacaaagctccacgtccatcctcct

SEQ ID NO: 608939 - DNA, 33 bp, Homo sapien
gtcctgctttaagtccaaaaatataaaatgcaa

SEQ ID NO: 608940 - DNA, 33 bp, Homo sapien
gtcctgctttaagtccgaaaatataaaatgcaa

SEQ ID NO: 608941 - DNA, 33 bp, Homo sapien
gagagaggtaacttaccccatcattttaccttt

SEQ ID NO: 608942 - DNA, 33 bp, Homo sapien
gagagaggtaacttactccatcattttaccttt

SEQ ID NO: 608943 - DNA, 33 bp, Homo sapien
atttgcgtaggttaaacggcttaatattgcccc

SEQ ID NO: 608944 - DNA, 33 bp, Homo sapien
atttgcgtaggttaaatggcttaatattgcccc

SEQ ID NO: 608945 - DNA, 33 bp, Homo sapien
tgagctttcaattgccacacctggattggatga

SEQ ID NO: 608946 - DNA, 33 bp, Homo sapien
tgagctttcaattgccgcacctggattggatga

SEQ ID NO: 608947 - DNA, 33 bp, Homo sapien
agctcccagcttctcactgaaatagtgctcctg

SEQ ID NO: 608948 - DNA, 33 bp, Homo sapien
agctcccagcttctcattgaaatagtgctcctg

SEQ ID NO: 608949 - DNA, 33 bp, Homo sapien
tgaggatttatgccgagctccagacgtacagga

SEQ ID NO: 608950 - DNA, 33 bp, Homo sapien
tgaggatttatgccgatctccagacgtacagga

SEQ ID NO: 608951 - DNA, 33 bp, Homo sapien
gtatgtgtatacagtacgtgttgcagcgtgtat

SEQ ID NO: 608952 - DNA, 33 bp, Homo sapien
gtatgtgtatacagtatgtgttgcagcgtgtat

SEQ ID NO: 608953 - DNA, 33 bp, Homo sapien
gtgatgccttttacaactctgaaaagttagtat

SEQ ID NO: 608954 - DNA, 33 bp, Homo sapien
gtgatgccttttacaattctgaaaagttagtat

SEQ ID NO: 608955 - DNA, 33 bp, Homo sapien
gaaccatttatgaagccgatagttcttccgcat

SEQ ID NO: 608956 - DNA, 33 bp, Homo sapien
gaaccatttatgaagctgatagttcttccgcat

SEQ ID NO: 608957 - DNA, 33 bp, Homo sapien
tgacagctgtgcacgacgatgggggaacttggt

SEQ ID NO: 608958 - DNA, 33 bp, Homo sapien
tgacagctgtgcacgatgatgggggaacttggt

SEQ ID NO: 608959 - DNA, 33 bp, Homo sapien
tgaacgcaggtaattaagtctggaagtttagtg

SEQ ID NO: 608960 - DNA, 33 bp, Homo sapien
tgaacgcaggtaattacgtctggaagtttagtg

SEQ ID NO: 608961 - DNA, 33 bp, Homo sapien
caaaacagtgaaaaaacgcatgtctgttgttta

SEQ ID NO: 608962 - DNA, 33 bp, Homo sapien
caaaacagtgaaaaaatgcatgtctgttgttta

SEQ ID NO: 608963 - DNA, 33 bp, Homo sapien
cacgccgtcgtgctgcacctctgacaatcaaag

SEQ ID NO: 608964 - DNA, 33 bp, Homo sapien
cacgccgtcgtgctgcgcctctgacaatcaaag

SEQ ID NO: 608965 - DNA, 33 bp, Homo sapien
agaagactcaagaacaagcagacgagaaagacc

SEQ ID NO: 608966 - DNA, 33 bp, Homo sapien
agaagactcaagaacaggcagacgagaaagacc

SEQ ID NO: 608967 - DNA, 33 bp, Homo sapien
gtctcttagcacccacagctctatcccttccac

SEQ ID NO: 608968 - DNA, 33 bp, Homo sapien
gtctcttagcacccacggctctatcccttccac

SEQ ID NO: 608969 - DNA, 33 bp, Homo sapien
caccctcaggaaaccacagttaggagctaattc

SEQ ID NO: 608970 - DNA, 33 bp, Homo sapien
caccctcaggaaaccatagttaggagctaattc

SEQ ID NO: 608971 - DNA, 33 bp, Homo sapien
ctgattgatctttgtgcaagcatctgccttaag

SEQ ID NO: 608972 - DNA, 33 bp, Homo sapien
ctgattgatctttgtgtaagcatctgccttaag

SEQ ID NO: 608973 - DNA, 33 bp, Homo sapien
tgggtacagaccaggagattcaggacagatgct

SEQ ID NO: 608974 - DNA, 33 bp, Homo sapien
tgggtacagaccaggatattcaggacagatgct

SEQ ID NO: 608975 - DNA, 33 bp, Homo sapien
aaaataaatttgacacaacacatgaagaagaaa

SEQ ID NO: 608976 - DNA, 33 bp, Homo sapien
aaaataaatttgacacgacacatgaagaagaaa

SEQ ID NO: 608977 - DNA, 33 bp, Homo sapien
cattcctaattcttcactaattcttcaatccct

SEQ ID NO: 608978 - DNA, 33 bp, Homo sapien
cattcctaattcttcagtaattcttcaatccct

SEQ ID NO: 608979 - DNA, 33 bp, Homo sapien
aaacaattatcaataacagagcaatccacttca

SEQ ID NO: 608980 - DNA, 33 bp, Homo sapien
aaacaattatcaataagagagcaatccacttca

SEQ ID NO: 608981 - DNA, 33 bp, Homo sapien
gcaacacaaagaacaaaatatggctaaacacaa

SEQ ID NO: 608982 - DNA, 33 bp, Homo sapien
gcaacacaaagaacaagatatggctaaacacaa

SEQ ID NO: 608983 - DNA, 33 bp, Homo sapien
ttctgggttccagatacgacgggtgagggagag

SEQ ID NO: 608984 - DNA, 33 bp, Homo sapien
ttctgggttccagatatgacgggtgagggagag

SEQ ID NO: 608985 - DNA, 33 bp, Homo sapien
gagtaatccctactgagagaagagaggagctgg

SEQ ID NO: 608986 - DNA, 33 bp, Homo sapien
gagtaatccctactgatagaagagaggagctgg

SEQ ID NO: 608987 - DNA, 33 bp, Homo sapien
cctcaagattgtcacactactaacccagagtaa

SEQ ID NO: 608988 - DNA, 33 bp, Homo sapien
cctcaagattgtcacattactaacccagagtaa

SEQ ID NO: 608989 - DNA, 33 bp, Homo sapien
tattcaattttgtagacgaaattatccaactct

SEQ ID NO: 608990 - DNA, 33 bp, Homo sapien
tattcaattttgtagatgaaattatccaactct

SEQ ID NO: 608991 - DNA, 33 bp, Homo sapien
agggtttgtcctgggaccattcattgataaaca

SEQ ID NO: 608992 - DNA, 33 bp, Homo sapien
agggtttgtcctgggagcattcattgataaaca

SEQ ID NO: 608993 - DNA, 33 bp, Homo sapien
ggaaacagacttccctcaatgtctccagagagg

SEQ ID NO: 608994 - DNA, 33 bp, Homo sapien
ggaaacagacttccctgaatgtctccagagagg

SEQ ID NO: 608995 - DNA, 33 bp, Homo sapien
attatccaaaccaggacctgctgagactaaaag

SEQ ID NO: 608996 - DNA, 33 bp, Homo sapien
attatccaaaccaggatctgctgagactaaaag

SEQ ID NO: 608997 - DNA, 33 bp, Homo sapien
ggaagcactgagaacacacctgatgagtgtttc

SEQ ID NO: 608998 - DNA, 33 bp, Homo sapien
ggaagcactgagaacatacctgatgagtgtttc

SEQ ID NO: 608999 - DNA, 33 bp, Homo sapien
caaattacaaaacatacgatgagtgagagaaaa

SEQ ID NO: 609000 - DNA, 33 bp, Homo sapien
caaattacaaaacatatgatgagtgagagaaaa

SEQ ID NO: 609001 - DNA, 33 bp, Homo sapien
aatgttacacgcccacaaaattaacaatgctga

SEQ ID NO: 609002 - DNA, 33 bp, Homo sapien
aatgttacacgcccacgaaattaacaatgctga

SEQ ID NO: 609003 - DNA, 33 bp, Homo sapien
tctagagagtctctaaatgagttgacctttttt

SEQ ID NO: 609004 - DNA, 33 bp, Homo sapien
tctagagagtctctaagtgagttgacctttttt

SEQ ID NO: 609005 - DNA, 33 bp, Homo sapien
gggacagggcataaggccaacgttagaagacta

SEQ ID NO: 609006 - DNA, 33 bp, Homo sapien
gggacagggcataaggtcaacgttagaagacta

SEQ ID NO: 609007 - DNA, 33 bp, Homo sapien
caacgtagtcagcacacgcccatcttcagatgt

SEQ ID NO: 609008 - DNA, 33 bp, Homo sapien
caacgtagtcagcacatgcccatcttcagatgt

SEQ ID NO: 609009 - DNA, 33 bp, Homo sapien
tcagatcagctctcacagtctaagcatcacttc

SEQ ID NO: 609010 - DNA, 33 bp, Homo sapien
tcagatcagctctcacggtctaagcatcacttc

SEQ ID NO: 609011 - DNA, 33 bp, Homo sapien
gtaggaaaatcctagacgctgagagactcactc

SEQ ID NO: 609012 - DNA, 33 bp, Homo sapien
gtaggaaaatcctagatgctgagagactcactc

SEQ ID NO: 609013 - DNA, 33 bp, Homo sapien
ctggtcttttgatccaaacactttcatatctga

SEQ ID NO: 609014 - DNA, 33 bp, Homo sapien
ctggtcttttgatccagacactttcatatctga

SEQ ID NO: 609015 - DNA, 33 bp, Homo sapien
tctggtaaatgaatcaaactttaattgcatttt

SEQ ID NO: 609016 - DNA, 33 bp, Homo sapien
tctggtaaatgaatcacactttaattgcatttt

SEQ ID NO: 609017 - DNA, 33 bp, Homo sapien
gcaataggaaccaaaaagaagaggagatagctc

SEQ ID NO: 609018 - DNA, 33 bp, Homo sapien
gcaataggaaccaaaaggaagaggagatagctc

SEQ ID NO: 609019 - DNA, 33 bp, Homo sapien
tcccacctcagtctcacaaaatattgggattac

SEQ ID NO: 609020 - DNA, 33 bp, Homo sapien
tcccacctcagtctcataaaatattgggattac

SEQ ID NO: 609021 - DNA, 33 bp, Homo sapien
attggatcagaccgtaggtattgaaaaggacct

SEQ ID NO: 609022 - DNA, 33 bp, Homo sapien
attggatcagaccgtatgtattgaaaaggacct

SEQ ID NO: 609023 - DNA, 33 bp, Homo sapien
aagctggcttctgtcccatttggccaagaggtc

SEQ ID NO: 609024 - DNA, 33 bp, Homo sapien
aagctggcttctgtcctatttggccaagaggtc

SEQ ID NO: 609025 - DNA, 33 bp, Homo sapien
tgtttgtcaaaacttaaagaacaaagcatatat

SEQ ID NO: 609026 - DNA, 33 bp, Homo sapien
tgtttgtcaaaacttatagaacaaagcatatat

SEQ ID NO: 609027 - DNA, 33 bp, Homo sapien
caaaaccacatcgtctcaatcgttgtagcttta

SEQ ID NO: 609028 - DNA, 33 bp, Homo sapien
caaaaccacatcgtcttaatcgttgtagcttta

SEQ ID NO: 609029 - DNA, 33 bp, Homo sapien
ttcactatttgttataaaactgaagaatgggac

SEQ ID NO: 609030 - DNA, 33 bp, Homo sapien
ttcactatttgttatacaactgaagaatgggac

SEQ ID NO: 609031 - DNA, 33 bp, Homo sapien
gagactgtcagaaaacaggagtgagatgggaat

SEQ ID NO: 609032 - DNA, 33 bp, Homo sapien
gagactgtcagaaaacgggagtgagatgggaat

SEQ ID NO: 609033 - DNA, 33 bp, Homo sapien
atctcccccattgacacaggcgcaaagacacta

SEQ ID NO: 609034 - DNA, 33 bp, Homo sapien
atctcccccattgacataggcgcaaagacacta

SEQ ID NO: 609035 - DNA, 33 bp, Homo sapien
gagcttggaacagaaccggccctgccttgtgaa

SEQ ID NO: 609036 - DNA, 33 bp, Homo sapien
gagcttggaacagaactggccctgccttgtgaa

SEQ ID NO: 609037 - DNA, 33 bp, Homo sapien
ctgtagtggtacctccaaaggtgtcttgttaaa

SEQ ID NO: 609038 - DNA, 33 bp, Homo sapien
ctgtagtggtacctccgaaggtgtcttgttaaa

SEQ ID NO: 609039 - DNA, 33 bp, Homo sapien
tgtgcagtcttccaggaaatgccaagaatttta

SEQ ID NO: 609040 - DNA, 33 bp, Homo sapien
tgtgcagtcttccaggcaatgccaagaatttta

SEQ ID NO: 609041 - DNA, 33 bp, Homo sapien
gacacgtgaccttgaacggcggcttccccgtgt

SEQ ID NO: 609042 - DNA, 33 bp, Homo sapien
gacacgtgaccttgaatggcggcttccccgtgt

SEQ ID NO: 609043 - DNA, 33 bp, Homo sapien
ctgctgttaaccttccaccattaacctttggtg

SEQ ID NO: 609044 - DNA, 33 bp, Homo sapien
ctgctgttaaccttccgccattaacctttggtg

SEQ ID NO: 609045 - DNA, 33 bp, Homo sapien
acagccactgctgtaacgacgatgaagttgccc

SEQ ID NO: 609046 - DNA, 33 bp, Homo sapien
acagccactgctgtaatgacgatgaagttgccc

SEQ ID NO: 609047 - DNA, 33 bp, Homo sapien
ggagtcatttctcagaactctatcgacgtattt

SEQ ID NO: 609048 - DNA, 33 bp, Homo sapien
ggagtcatttctcagagctctatcgacgtattt

SEQ ID NO: 609049 - DNA, 33 bp, Homo sapien
actccattaagaaggcagaatgtcaccacgtta

SEQ ID NO: 609050 - DNA, 33 bp, Homo sapien
actccattaagaaggcggaatgtcaccacgtta

SEQ ID NO: 609051 - DNA, 33 bp, Homo sapien
cacgtttccgggaccacgcactgcagcagctga

SEQ ID NO: 609052 - DNA, 33 bp, Homo sapien
cacgtttccgggaccatgcactgcagcagctga

SEQ ID NO: 609053 - DNA, 33 bp, Homo sapien
cggatttcttttgtgaacttttctgtgtctgat

SEQ ID NO: 609054 - DNA, 33 bp, Homo sapien
cggatttcttttgtgagcttttctgtgtctgat

SEQ ID NO: 609055 - DNA, 33 bp, Homo sapien
acgcacaaggttaaaaaaagaggcacctgcaat

SEQ ID NO: 609056 - DNA, 33 bp, Homo sapien
acgcacaaggttaaaacaagaggcacctgcaat

SEQ ID NO: 609057 - DNA, 33 bp, Homo sapien
ccatcttcccaaggccacgggtaaaagcaaagc

SEQ ID NO: 609058 - DNA, 33 bp, Homo sapien
ccatcttcccaaggccgcgggtaaaagcaaagc

SEQ ID NO: 609059 - DNA, 33 bp, Homo sapien
acaaatctttgtctcacagtcagtttcctgaga

SEQ ID NO: 609060 - DNA, 33 bp, Homo sapien
acaaatctttgtctcagagtcagtttcctgaga

SEQ ID NO: 609061 - DNA, 33 bp, Homo sapien
tgaaacattaagctctaaacttttcaaatatag

SEQ ID NO: 609062 - DNA, 33 bp, Homo sapien
tgaaacattaagctctgaacttttcaaatatag

SEQ ID NO: 609063 - DNA, 33 bp, Homo sapien
cttcagtgttgctgacacatagggttggtcttg

SEQ ID NO: 609064 - DNA, 33 bp, Homo sapien
cttcagtgttgctgacgcatagggttggtcttg

SEQ ID NO: 609065 - DNA, 33 bp, Homo sapien
cggtgactcttgcttccgaactgctccttgttg

SEQ ID NO: 609066 - DNA, 33 bp, Homo sapien
cggtgactcttgcttctgaactgctccttgttg

SEQ ID NO: 609067 - DNA, 33 bp, Homo sapien
ctttgctctatttttcaccgttttcatagcatt

SEQ ID NO: 609068 - DNA, 33 bp, Homo sapien
ctttgctctatttttcgccgttttcatagcatt

SEQ ID NO: 609069 - DNA, 33 bp, Homo sapien
tcaattgctgttttcaggatagtgctgtgactt

SEQ ID NO: 609070 - DNA, 33 bp, Homo sapien
tcaattgctgttttcatgatagtgctgtgactt

SEQ ID NO: 609071 - DNA, 33 bp, Homo sapien
ttgagaatcactgaaacgactaagtggatgaag

SEQ ID NO: 609072 - DNA, 33 bp, Homo sapien
ttgagaatcactgaaatgactaagtggatgaag

SEQ ID NO: 609073 - DNA, 33 bp, Homo sapien
agatgatttgaaaatacatgttctgagcagaca

SEQ ID NO: 609074 - DNA, 33 bp, Homo sapien
agatgatttgaaaatatatgttctgagcagaca

SEQ ID NO: 609075 - DNA, 33 bp, Homo sapien
agctgaaattctagaaaaaatgtctagtggaat

SEQ ID NO: 609076 - DNA, 33 bp, Homo sapien
agctgaaattctagaagaaatgtctagtggaat

SEQ ID NO: 609077 - DNA, 33 bp, Homo sapien
aagactccatgaggcacgtcataaaagaaatgc

SEQ ID NO: 609078 - DNA, 33 bp, Homo sapien
aagactccatgaggcatgtcataaaagaaatgc

SEQ ID NO: 609079 - DNA, 33 bp, Homo sapien
tttgggtaacaacatacataattctcactaacc

SEQ ID NO: 609080 - DNA, 33 bp, Homo sapien
tttgggtaacaacatatataattctcactaacc

SEQ ID NO: 609081 - DNA, 33 bp, Homo sapien
gatttcctctaggcccaaaattcgcttctgctg

SEQ ID NO: 609082 - DNA, 33 bp, Homo sapien
gatttcctctaggcccgaaattcgcttctgctg

SEQ ID NO: 609083 - DNA, 33 bp, Homo sapien
acctctgggaaactcccgcacagggcccaccag

SEQ ID NO: 609084 - DNA, 33 bp, Homo sapien
acctctgggaaactcctgcacagggcccaccag

SEQ ID NO: 609085 - DNA, 33 bp, Homo sapien
acatctgacttcagaaacacacgtcttaggatt

SEQ ID NO: 609086 - DNA, 33 bp, Homo sapien
acatctgacttcagaagcacacgtcttaggatt

SEQ ID NO: 609087 - DNA, 33 bp, Homo sapien
gccataatgggcaagtaactgccttctctgctt

SEQ ID NO: 609088 - DNA, 33 bp, Homo sapien
gccataatgggcaagtcactgccttctctgctt

SEQ ID NO: 609089 - DNA, 33 bp, Homo sapien
atagtagcatcttgcacagtgacctggcatgac

SEQ ID NO: 609090 - DNA, 33 bp, Homo sapien
atagtagcatcttgcatagtgacctggcatgac

SEQ ID NO: 609091 - DNA, 33 bp, Homo sapien
ggtggtccaggttcaacttcctcattgcaatac

SEQ ID NO: 609092 - DNA, 33 bp, Homo sapien
ggtggtccaggttcaagttcctcattgcaatac

SEQ ID NO: 609093 - DNA, 33 bp, Homo sapien
ctatggactctgatcaatcaccttcccctattt

SEQ ID NO: 609094 - DNA, 33 bp, Homo sapien
ctatggactctgatcagtcaccttcccctattt

SEQ ID NO: 609095 - DNA, 33 bp, Homo sapien
cctgtaaacagctgacaattgactatttctgcc

SEQ ID NO: 609096 - DNA, 33 bp, Homo sapien
cctgtaaacagctgacgattgactatttctgcc

SEQ ID NO: 609097 - DNA, 33 bp, Homo sapien
aactacttgctcttcccagaaggaccagtctcc

SEQ ID NO: 609098 - DNA, 33 bp, Homo sapien
aactacttgctcttcctagaaggaccagtctcc

SEQ ID NO: 609099 - DNA, 33 bp, Homo sapien
tggatcaaacctggacactatcacttcttggcc

SEQ ID NO: 609100 - DNA, 33 bp, Homo sapien
tggatcaaacctggactctatcacttcttggcc

SEQ ID NO: 609101 - DNA, 33 bp, Homo sapien
tactttttgagctcaacactgcattgttaacac

SEQ ID NO: 609102 - DNA, 33 bp, Homo sapien
tactttttgagctcaatactgcattgttaacac

SEQ ID NO: 609103 - DNA, 33 bp, Homo sapien
actactcttttgtcaacgcttcaagagaaagac

SEQ ID NO: 609104 - DNA, 33 bp, Homo sapien
actactcttttgtcaatgcttcaagagaaagac

SEQ ID NO: 609105 - DNA, 33 bp, Homo sapien
atccctacagcaccgcaaagggacgtcatagac

SEQ ID NO: 609106 - DNA, 33 bp, Homo sapien
atccctacagcaccgcgaagggacgtcatagac

SEQ ID NO: 609107 - DNA, 33 bp, Homo sapien
gctctgacaaagagaaatgacctgcgtcttctc

SEQ ID NO: 609108 - DNA, 33 bp, Homo sapien
gctctgacaaagagaactgacctgcgtcttctc

SEQ ID NO: 609109 - DNA, 33 bp, Homo sapien
aggtggagcatttctgcagttattttctaagtc

SEQ ID NO: 609110 - DNA, 33 bp, Homo sapien
aggtggagcatttctgtagttattttctaagtc

SEQ ID NO: 609111 - DNA, 33 bp, Homo sapien
gaagtgtctcagtgcccataaggatgtgtccag

SEQ ID NO: 609112 - DNA, 33 bp, Homo sapien
gaagtgtctcagtgcctataaggatgtgtccag

SEQ ID NO: 609113 - DNA, 33 bp, Homo sapien
gaattggatttcctaaaagctggacatttcctc

SEQ ID NO: 609114 - DNA, 33 bp, Homo sapien
gaattggatttcctaagagctggacatttcctc

SEQ ID NO: 609115 - DNA, 33 bp, Homo sapien
ataaattgtgacactacgaaaattaaggaaacg

SEQ ID NO: 609116 - DNA, 33 bp, Homo sapien
ataaattgtgacactatgaaaattaaggaaacg

SEQ ID NO: 609117 - DNA, 33 bp, Homo sapien
attgactgagctctgcacacaacacgcttctga

SEQ ID NO: 609118 - DNA, 33 bp, Homo sapien
attgactgagctctgcgcacaacacgcttctga

SEQ ID NO: 609119 - DNA, 33 bp, Homo sapien
taaaccttacagaacacgtgtgcatctcaatgc

SEQ ID NO: 609120 - DNA, 33 bp, Homo sapien
taaaccttacagaacatgtgtgcatctcaatgc

SEQ ID NO: 609121 - DNA, 33 bp, Homo sapien
atccatgcaggtgctcggagaacgtgagcattc

SEQ ID NO: 609122 - DNA, 33 bp, Homo sapien
atccatgcaggtgctctgagaacgtgagcattc

SEQ ID NO: 609123 - DNA, 33 bp, Homo sapien
gagaatcatcacccatgaaatgctcaaaaactt

SEQ ID NO: 609124 - DNA, 33 bp, Homo sapien
gagaatcatcacccattaaatgctcaaaaactt

SEQ ID NO: 609125 - DNA, 33 bp, Homo sapien
acccgtatctgccaagaactcattttctccatg

SEQ ID NO: 609126 - DNA, 33 bp, Homo sapien
acccgtatctgccaaggactcattttctccatg

SEQ ID NO: 609127 - DNA, 33 bp, Homo sapien
ttccagaagtcctcaacggaattacaggccagc

SEQ ID NO: 609128 - DNA, 33 bp, Homo sapien
ttccagaagtcctcaagggaattacaggccagc

SEQ ID NO: 609129 - DNA, 33 bp, Homo sapien
aggagccacggcagccagatgtcatgtggtgtc

SEQ ID NO: 609130 - DNA, 33 bp, Homo sapien
aggagccacggcagccggatgtcatgtggtgtc

SEQ ID NO: 609131 - DNA, 33 bp, Homo sapien
ggcttacaactgctgaggccaacaaaaaggaga

SEQ ID NO: 609132 - DNA, 33 bp, Homo sapien
ggcttacaactgctgatgccaacaaaaaggaga

SEQ ID NO: 609133 - DNA, 33 bp, Homo sapien
ttcttctataaggtcacgaattccattcacaag

SEQ ID NO: 609134 - DNA, 33 bp, Homo sapien
ttcttctataaggtcatgaattccattcacaag

SEQ ID NO: 609135 - DNA, 33 bp, Homo sapien
tcagagtcagataggacactgattttggaattc

SEQ ID NO: 609136 - DNA, 33 bp, Homo sapien
tcagagtcagataggatactgattttggaattc

SEQ ID NO: 609137 - DNA, 33 bp, Homo sapien
ttgattaataggagctcaatcaataggacttct

SEQ ID NO: 609138 - DNA, 33 bp, Homo sapien
ttgattaataggagctgaatcaataggacttct

SEQ ID NO: 609139 - DNA, 33 bp, Homo sapien
tctctgaaggagagtacgtaaggaagtctctgc

SEQ ID NO: 609140 - DNA, 33 bp, Homo sapien
tctctgaaggagagtatgtaaggaagtctctgc

SEQ ID NO: 609141 - DNA, 33 bp, Homo sapien
tccactgagaataaaccagctagtaacaatgag

SEQ ID NO: 609142 - DNA, 33 bp, Homo sapien
tccactgagaataaacgagctagtaacaatgag

SEQ ID NO: 609143 - DNA, 33 bp, Homo sapien
cctcaattgagccagaagagatttgtagcaatg

SEQ ID NO: 609144 - DNA, 33 bp, Homo sapien
cctcaattgagccagaggagatttgtagcaatg

SEQ ID NO: 609145 - DNA, 33 bp, Homo sapien
tttattctaatacataactcctagaaagtccca

SEQ ID NO: 609146 - DNA, 33 bp, Homo sapien
tttattctaatacatatctcctagaaagtccca

SEQ ID NO: 609147 - DNA, 33 bp, Homo sapien
gaaaaacactggcttcaattcctgggataccat

SEQ ID NO: 609148 - DNA, 33 bp, Homo sapien
gaaaaacactggcttcgattcctgggataccat

SEQ ID NO: 609149 - DNA, 33 bp, Homo sapien
gcagctcacatcaaaacggtgctgtgaggttgc

SEQ ID NO: 609150 - DNA, 33 bp, Homo sapien
gcagctcacatcaaaatggtgctgtgaggttgc

SEQ ID NO: 609151 - DNA, 33 bp, Homo sapien
gctgccatctctgtaaagctcaggctacatctg

SEQ ID NO: 609152 - DNA, 33 bp, Homo sapien
gctgccatctctgtaaggctcaggctacatctg

SEQ ID NO: 609153 - DNA, 33 bp, Homo sapien
aggctattggaccccaaagattccacaggcata

SEQ ID NO: 609154 - DNA, 33 bp, Homo sapien
aggctattggaccccagagattccacaggcata

SEQ ID NO: 609155 - DNA, 33 bp, Homo sapien
aatcagttttagaggaacatttcaaccatttta

SEQ ID NO: 609156 - DNA, 33 bp, Homo sapien
aatcagttttagaggagcatttcaaccatttta

SEQ ID NO: 609157 - DNA, 33 bp, Homo sapien
gggcaagaggaagatcaagttcgagggaaaaca

SEQ ID NO: 609158 - DNA, 33 bp, Homo sapien
gggcaagaggaagatcgagttcgagggaaaaca

SEQ ID NO: 609159 - DNA, 33 bp, Homo sapien
ttgtagtcttgcaaaacaccgtgagaaccctaa

SEQ ID NO: 609160 - DNA, 33 bp, Homo sapien
ttgtagtcttgcaaaataccgtgagaaccctaa

SEQ ID NO: 609161 - DNA, 33 bp, Homo sapien
atcaaaagtccagagaacataagtgttacttcc

SEQ ID NO: 609162 - DNA, 33 bp, Homo sapien
atcaaaagtccagagagcataagtgttacttcc

SEQ ID NO: 609163 - DNA, 33 bp, Homo sapien
ggaaaatatctcaagcaaaataaccatggcttg

SEQ ID NO: 609164 - DNA, 33 bp, Homo sapien
ggaaaatatctcaagcgaaataaccatggcttg

SEQ ID NO: 609165 - DNA, 33 bp, Homo sapien
ataaatggaaaagctaataactgacttcatcaa

SEQ ID NO: 609166 - DNA, 33 bp, Homo sapien
ataaatggaaaagctagtaactgacttcatcaa

SEQ ID NO: 609167 - DNA, 33 bp, Homo sapien
agtttactgtaaaagcaaccactgtgaatgaca

SEQ ID NO: 609168 - DNA, 33 bp, Homo sapien
agtttactgtaaaagcgaccactgtgaatgaca

SEQ ID NO: 609169 - DNA, 33 bp, Homo sapien
ccagcagctgggcaagacatcggcggcagtgaa

SEQ ID NO: 609170 - DNA, 33 bp, Homo sapien
ccagcagctgggcaaggcatcggcggcagtgaa

SEQ ID NO: 609171 - DNA, 33 bp, Homo sapien
caaccattcagtgaccggagcttagatctcctg

SEQ ID NO: 609172 - DNA, 33 bp, Homo sapien
caaccattcagtgacctgagcttagatctcctg

SEQ ID NO: 609173 - DNA, 33 bp, Homo sapien
ctctcatcctatgtccaaagctctatgtcatgg

SEQ ID NO: 609174 - DNA, 33 bp, Homo sapien
ctctcatcctatgtccgaagctctatgtcatgg

SEQ ID NO: 609175 - DNA, 33 bp, Homo sapien
cgctaagaagaaaccgcaggtctaaccatgatg

SEQ ID NO: 609176 - DNA, 33 bp, Homo sapien
cgctaagaagaaaccggaggtctaaccatgatg

SEQ ID NO: 609177 - DNA, 33 bp, Homo sapien
ctaaccatgatgtcataagaatgattgtttaga

SEQ ID NO: 609178 - DNA, 33 bp, Homo sapien
ctaaccatgatgtcattagaatgattgtttaga

SEQ ID NO: 609179 - DNA, 33 bp, Homo sapien
cctgggtgcaactatccctgcagctttgcagaa

SEQ ID NO: 609180 - DNA, 33 bp, Homo sapien
cctgggtgcaactatctctgcagctttgcagaa

SEQ ID NO: 609181 - DNA, 33 bp, Homo sapien
aatccaccaggatggacgcttctctgagtctca

SEQ ID NO: 609182 - DNA, 33 bp, Homo sapien
aatccaccaggatggatgcttctctgagtctca

SEQ ID NO: 609183 - DNA, 33 bp, Homo sapien
gagcttctgcctttcacaacctggcaatgacat

SEQ ID NO: 609184 - DNA, 33 bp, Homo sapien
gagcttctgcctttcataacctggcaatgacat

SEQ ID NO: 609185 - DNA, 33 bp, Homo sapien
ggtcggggaagaagaaagtgttgatgtgggggt

SEQ ID NO: 609186 - DNA, 33 bp, Homo sapien
ggtcggggaagaagaacgtgttgatgtgggggt

SEQ ID NO: 609187 - DNA, 33 bp, Homo sapien
gacctcagtcagtttacagtccccggagctcac

SEQ ID NO: 609188 - DNA, 33 bp, Homo sapien
gacctcagtcagtttatagtccccggagctcac

SEQ ID NO: 609189 - DNA, 33 bp, Homo sapien
tcctcctagctgccaacgcgatctgtccactat

SEQ ID NO: 609190 - DNA, 33 bp, Homo sapien
tcctcctagctgccaatgcgatctgtccactat

SEQ ID NO: 609191 - DNA, 33 bp, Homo sapien
ggtcaatattgtaacacggttatgactaaaaat

SEQ ID NO: 609192 - DNA, 33 bp, Homo sapien
ggtcaatattgtaacatggttatgactaaaaat

SEQ ID NO: 609193 - DNA, 33 bp, Homo sapien
gtggtaaatagagaaaatgcttagaatgtagac

SEQ ID NO: 609194 - DNA, 33 bp, Homo sapien
gtggtaaatagagaaattgcttagaatgtagac

SEQ ID NO: 609195 - DNA, 33 bp, Homo sapien
caggccaggtcagataactcatgtgcaggacac

SEQ ID NO: 609196 - DNA, 33 bp, Homo sapien
caggccaggtcagatacctcatgtgcaggacac

SEQ ID NO: 609197 - DNA, 33 bp, Homo sapien
ggagcaatcagggaaaccatagaacagagaggt

SEQ ID NO: 609198 - DNA, 33 bp, Homo sapien
ggagcaatcagggaaatcatagaacagagaggt

SEQ ID NO: 609199 - DNA, 33 bp, Homo sapien
ccagtgcctgcctcacaatcacacagctcatta

SEQ ID NO: 609200 - DNA, 33 bp, Homo sapien
ccagtgcctgcctcacgatcacacagctcatta

SEQ ID NO: 609201 - DNA, 33 bp, Homo sapien
cattaacaacaccaggaccccctcatcacgcct

SEQ ID NO: 609202 - DNA, 33 bp, Homo sapien
cattaacaacaccaggtccccctcatcacgcct

SEQ ID NO: 609203 - DNA, 33 bp, Homo sapien
tgtggtactttgtgccaacagacacatgaagct

SEQ ID NO: 609204 - DNA, 33 bp, Homo sapien
tgtggtactttgtgccgacagacacatgaagct

SEQ ID NO: 609205 - DNA, 33 bp, Homo sapien
caactttctaatgtaacgcagagtaaattctaa

SEQ ID NO: 609206 - DNA, 33 bp, Homo sapien
caactttctaatgtaatgcagagtaaattctaa

SEQ ID NO: 609207 - DNA, 33 bp, Homo sapien
gaaagctctgagactccacctcaaggcaagaat

SEQ ID NO: 609208 - DNA, 33 bp, Homo sapien
gaaagctctgagactcgacctcaaggcaagaat

SEQ ID NO: 609209 - DNA, 33 bp, Homo sapien
acagctagctcagcccagaacttaaacagccat

SEQ ID NO: 609210 - DNA, 33 bp, Homo sapien
acagctagctcagcccggaacttaaacagccat

SEQ ID NO: 609211 - DNA, 33 bp, Homo sapien
ccctatggctgaaggacggccggcctttgtctg

SEQ ID NO: 609212 - DNA, 33 bp, Homo sapien
ccctatggctgaaggatggccggcctttgtctg

SEQ ID NO: 609213 - DNA, 33 bp, Homo sapien
caatggggagaattcgaatgttcacaaaggaat

SEQ ID NO: 609214 - DNA, 33 bp, Homo sapien
caatggggagaattcggatgttcacaaaggaat

SEQ ID NO: 609215 - DNA, 33 bp, Homo sapien
ggcccagggtctagtacatagaaaggcaagttg

SEQ ID NO: 609216 - DNA, 33 bp, Homo sapien
ggcccagggtctagtatatagaaaggcaagttg

SEQ ID NO: 609217 - DNA, 33 bp, Homo sapien
ggcacagaggaaaataagatgtgcacccacaaa

SEQ ID NO: 609218 - DNA, 33 bp, Homo sapien
ggcacagaggaaaataggatgtgcacccacaaa

SEQ ID NO: 609219 - DNA, 33 bp, Homo sapien
gacatttcaccagcacaaatgagggaccaggct

SEQ ID NO: 609220 - DNA, 33 bp, Homo sapien
gacatttcaccagcacgaatgagggaccaggct

SEQ ID NO: 609221 - DNA, 33 bp, Homo sapien
aattaaaacaggaaacaagagtcagagaagaga

SEQ ID NO: 609222 - DNA, 33 bp, Homo sapien
aattaaaacaggaaactagagtcagagaagaga

SEQ ID NO: 609223 - DNA, 33 bp, Homo sapien
gaagaagatttcctataagaacagcaaagaaaa

SEQ ID NO: 609224 - DNA, 33 bp, Homo sapien
gaagaagatttcctattagaacagcaaagaaaa

SEQ ID NO: 609225 - DNA, 33 bp, Homo sapien
gccctcgactagtttagatttgggggctgcagg

SEQ ID NO: 609226 - DNA, 33 bp, Homo sapien
gccctcgactagtttatatttgggggctgcagg

SEQ ID NO: 609227 - DNA, 33 bp, Homo sapien
attaggaatgacctcaaaaaagtggacactttc

SEQ ID NO: 609228 - DNA, 33 bp, Homo sapien
attaggaatgacctcagaaaagtggacactttc

SEQ ID NO: 609229 - DNA, 33 bp, Homo sapien
ggtcaggtcaacacacccttgagtcatcctagg

SEQ ID NO: 609230 - DNA, 33 bp, Homo sapien
ggtcaggtcaacacactcttgagtcatcctagg

SEQ ID NO: 609231 - DNA, 33 bp, Homo sapien
agcctggtcatatggcacagtacattgattttg

SEQ ID NO: 609232 - DNA, 33 bp, Homo sapien
agcctggtcatatggcgcagtacattgattttg

SEQ ID NO: 609233 - DNA, 33 bp, Homo sapien
ggaactaaataaacccagcaatatatataaaat

SEQ ID NO: 609234 - DNA, 33 bp, Homo sapien
ggaactaaataaacccggcaatatatataaaat

SEQ ID NO: 609235 - DNA, 33 bp, Homo sapien
atgacactgaaactagacaaagacagtggaaaa

SEQ ID NO: 609236 - DNA, 33 bp, Homo sapien
atgacactgaaactaggcaaagacagtggaaaa

SEQ ID NO: 609237 - DNA, 33 bp, Homo sapien
cacctgcacactgtcacggaagcacaccggcac

SEQ ID NO: 609238 - DNA, 33 bp, Homo sapien
cacctgcacactgtcatggaagcacaccggcac

SEQ ID NO: 609239 - DNA, 33 bp, Homo sapien
agtcgccaaaacccagcagccgcaaacaacaca

SEQ ID NO: 609240 - DNA, 33 bp, Homo sapien
agtcgccaaaacccagtagccgcaaacaacaca

SEQ ID NO: 609241 - DNA, 33 bp, Homo sapien
gcctttgaattcgcccaaaggcatccggcagac

SEQ ID NO: 609242 - DNA, 33 bp, Homo sapien
gcctttgaattcgcccgaaggcatccggcagac

SEQ ID NO: 609243 - DNA, 33 bp, Homo sapien
cctgatgctctgtcaacgttttgctgaaatctt

SEQ ID NO: 609244 - DNA, 33 bp, Homo sapien
cctgatgctctgtcaatgttttgctgaaatctt

SEQ ID NO: 609245 - DNA, 33 bp, Homo sapien
cattatctcctgtgtaggaaaccgcaaggagca

SEQ ID NO: 609246 - DNA, 33 bp, Homo sapien
cattatctcctgtgtatgaaaccgcaaggagca

SEQ ID NO: 609247 - DNA, 33 bp, Homo sapien
gcttagcagagtgtaacgttaagtagcacatct

SEQ ID NO: 609248 - DNA, 33 bp, Homo sapien
gcttagcagagtgtaatgttaagtagcacatct

SEQ ID NO: 609249 - DNA, 33 bp, Homo sapien
tattatgaataaagacagctagtttagaacgat

SEQ ID NO: 609250 - DNA, 33 bp, Homo sapien
tattatgaataaagacggctagtttagaacgat

SEQ ID NO: 609251 - DNA, 33 bp, Homo sapien
agcagatccgtatggaatcataagaaaattctg

SEQ ID NO: 609252 - DNA, 33 bp, Homo sapien
agcagatccgtatggagtcataagaaaattctg

SEQ ID NO: 609253 - DNA, 33 bp, Homo sapien
aagaacaagacaaaaaacagtgaagatatgaaa

SEQ ID NO: 609254 - DNA, 33 bp, Homo sapien
aagaacaagacaaaaaccagtgaagatatgaaa

SEQ ID NO: 609255 - DNA, 33 bp, Homo sapien
tcttacattgcaactaccctggtgaatgtatca

SEQ ID NO: 609256 - DNA, 33 bp, Homo sapien
tcttacattgcaactatcctggtgaatgtatca

SEQ ID NO: 609257 - DNA, 33 bp, Homo sapien
gtaatcttatctctcaataaataccaaaattaa

SEQ ID NO: 609258 - DNA, 33 bp, Homo sapien
gtaatcttatctctcagtaaataccaaaattaa

SEQ ID NO: 609259 - DNA, 33 bp, Homo sapien
gtgcgtgccatgtgtccaccgggcccttccatg

SEQ ID NO: 609260 - DNA, 33 bp, Homo sapien
gtgcgtgccatgtgtctaccgggcccttccatg

SEQ ID NO: 609261 - DNA, 33 bp, Homo sapien
gcagatggttcccatcactgtctcagagggctc

SEQ ID NO: 609262 - DNA, 33 bp, Homo sapien
gcagatggttcccatcgctgtctcagagggctc

SEQ ID NO: 609263 - DNA, 33 bp, Homo sapien
tccaagtcctgctcaacgtttcctgagtccacc

SEQ ID NO: 609264 - DNA, 33 bp, Homo sapien
tccaagtcctgctcaatgtttcctgagtccacc

SEQ ID NO: 609265 - DNA, 33 bp, Homo sapien
tgatcttgggtctccacggtttcatgaggagct

SEQ ID NO: 609266 - DNA, 33 bp, Homo sapien
tgatcttgggtctccatggtttcatgaggagct

SEQ ID NO: 609267 - DNA, 33 bp, Homo sapien
ggtctgtgactgcggacgtcatgttatgggaag

SEQ ID NO: 609268 - DNA, 33 bp, Homo sapien
ggtctgtgactgcggatgtcatgttatgggaag

SEQ ID NO: 609269 - DNA, 33 bp, Homo sapien
gtggccatgtgggaaactgttcctacaaatgcc

SEQ ID NO: 609270 - DNA, 33 bp, Homo sapien
gtggccatgtgggaaagtgttcctacaaatgcc

SEQ ID NO: 609271 - DNA, 33 bp, Homo sapien
tggctgccccatggtccaagatggccacgtgtg

SEQ ID NO: 609272 - DNA, 33 bp, Homo sapien
tggctgccccatggtctaagatggccacgtgtg

SEQ ID NO: 609273 - DNA, 33 bp, Homo sapien
aggttacagtgactgacagaagcaagggacacc

SEQ ID NO: 609274 - DNA, 33 bp, Homo sapien
aggttacagtgactgagagaagcaagggacacc

SEQ ID NO: 609275 - DNA, 33 bp, Homo sapien
ttttccttttttaggcactgacggaagcacgat

SEQ ID NO: 609276 - DNA, 33 bp, Homo sapien
ttttccttttttaggcgctgacggaagcacgat

SEQ ID NO: 609277 - DNA, 33 bp, Homo sapien
attgttagtgagaaaccgtgaaaactcaggaga

SEQ ID NO: 609278 - DNA, 33 bp, Homo sapien
attgttagtgagaaactgtgaaaactcaggaga

SEQ ID NO: 609279 - DNA, 33 bp, Homo sapien
aggttgaggtgttggacgaggttctggcttgcc

SEQ ID NO: 609280 - DNA, 33 bp, Homo sapien
aggttgaggtgttggatgaggttctggcttgcc

SEQ ID NO: 609281 - DNA, 33 bp, Homo sapien
ggaggcttgttcttgacgggggcgatagcgtct

SEQ ID NO: 609282 - DNA, 33 bp, Homo sapien
ggaggcttgttcttgatgggggcgatagcgtct

SEQ ID NO: 609283 - DNA, 33 bp, Homo sapien
ttctctaagcagcctactaatggctgtgcacat

SEQ ID NO: 609284 - DNA, 33 bp, Homo sapien
ttctctaagcagcctagtaatggctgtgcacat

SEQ ID NO: 609285 - DNA, 33 bp, Homo sapien
cttttgacatgcaaggacataggatacacgtgt

SEQ ID NO: 609286 - DNA, 33 bp, Homo sapien
cttttgacatgcaaggtcataggatacacgtgt

SEQ ID NO: 609287 - DNA, 33 bp, Homo sapien
cgagtgctgccatcaacgtcgtggtactagaat

SEQ ID NO: 609288 - DNA, 33 bp, Homo sapien
cgagtgctgccatcaatgtcgtggtactagaat

SEQ ID NO: 609289 - DNA, 33 bp, Homo sapien
tgaaggaaatcaaatccaccctctcggaccatt

SEQ ID NO: 609290 - DNA, 33 bp, Homo sapien
tgaaggaaatcaaatctaccctctcggaccatt

SEQ ID NO: 609291 - DNA, 33 bp, Homo sapien
agttggctcttggtaacaagtagggatctttcc

SEQ ID NO: 609292 - DNA, 33 bp, Homo sapien
agttggctcttggtaagaagtagggatctttcc

SEQ ID NO: 609293 - DNA, 33 bp, Homo sapien
cacaacttcatgaatacgcaaaaagccacagag

SEQ ID NO: 609294 - DNA, 33 bp, Homo sapien
cacaacttcatgaatatgcaaaaagccacagag

SEQ ID NO: 609295 - DNA, 33 bp, Homo sapien
ttcctctttctgtttaaggtgggacgcccaagg

SEQ ID NO: 609296 - DNA, 33 bp, Homo sapien
ttcctctttctgtttagggtgggacgcccaagg

SEQ ID NO: 609297 - DNA, 33 bp, Homo sapien
gtcacgtgctgcgtgcagaattgctcattttgc

SEQ ID NO: 609298 - DNA, 33 bp, Homo sapien
gtcacgtgctgcgtgcggaattgctcattttgc

SEQ ID NO: 609299 - DNA, 33 bp, Homo sapien
attcagagttgcacaacgtactggagtccaaat

SEQ ID NO: 609300 - DNA, 33 bp, Homo sapien
attcagagttgcacaaggtactggagtccaaat

SEQ ID NO: 609301 - DNA, 33 bp, Homo sapien
accctgagaacatatcaagatactattgtatct

SEQ ID NO: 609302 - DNA, 33 bp, Homo sapien
accctgagaacatatcgagatactattgtatct

SEQ ID NO: 609303 - DNA, 33 bp, Homo sapien
aggcatccttggaggaagagacacctttgcact

SEQ ID NO: 609304 - DNA, 33 bp, Homo sapien
aggcatccttggaggaggagacacctttgcact

SEQ ID NO: 609305 - DNA, 33 bp, Homo sapien
gccatgacgcacctccgatctcgctcccatacg

SEQ ID NO: 609306 - DNA, 33 bp, Homo sapien
gccatgacgcacctcctatctcgctcccatacg

SEQ ID NO: 609307 - DNA, 33 bp, Homo sapien
catctcaaataccatacacacacacacgacaca

SEQ ID NO: 609308 - DNA, 33 bp, Homo sapien
catctcaaataccatagacacacacacgacaca

SEQ ID NO: 609309 - DNA, 33 bp, Homo sapien
caaagcacatccggcacctcacgcaaggccgta

SEQ ID NO: 609310 - DNA, 33 bp, Homo sapien
caaagcacatccggcatctcacgcaaggccgta

SEQ ID NO: 609311 - DNA, 33 bp, Homo sapien
gaggcaagagaacaaaatcacatcaatggggtt

SEQ ID NO: 609312 - DNA, 33 bp, Homo sapien
gaggcaagagaacaaagtcacatcaatggggtt

SEQ ID NO: 609313 - DNA, 33 bp, Homo sapien
catgcacgcatatgccccacactcatatacctg

SEQ ID NO: 609314 - DNA, 33 bp, Homo sapien
catgcacgcatatgcctcacactcatatacctg

SEQ ID NO: 609315 - DNA, 33 bp, Homo sapien
tgaagtctttattgacacatattcaagcttgtg

SEQ ID NO: 609316 - DNA, 33 bp, Homo sapien
tgaagtctttattgacgcatattcaagcttgtg

SEQ ID NO: 609317 - DNA, 33 bp, Homo sapien
aacttttattgaagtgaacgtgtacagcaacag

SEQ ID NO: 609318 - DNA, 33 bp, Homo sapien
aacttttattgaagtggacgtgtacagcaacag

SEQ ID NO: 609319 - DNA, 33 bp, Homo sapien
agcccagggaagagaaaataaaccaggagaaca

SEQ ID NO: 609320 - DNA, 33 bp, Homo sapien
agcccagggaagagaagataaaccaggagaaca

SEQ ID NO: 609321 - DNA, 33 bp, Homo sapien
atgctcttatcacagaagatcccacggcaacac

SEQ ID NO: 609322 - DNA, 33 bp, Homo sapien
atgctcttatcacagaggatcccacggcaacac

SEQ ID NO: 609323 - DNA, 33 bp, Homo sapien
tatccaattatccatcactccctccattgatcc

SEQ ID NO: 609324 - DNA, 33 bp, Homo sapien
tatccaattatccatcgctccctccattgatcc

SEQ ID NO: 609325 - DNA, 33 bp, Homo sapien
tataacagaggagatgcattgattaaagatggt

SEQ ID NO: 609326 - DNA, 33 bp, Homo sapien
tataacagaggagatgtattgattaaagatggt

SEQ ID NO: 609327 - DNA, 33 bp, Homo sapien
ttaggtcagatggaaacgtggcattaggatagc

SEQ ID NO: 609328 - DNA, 33 bp, Homo sapien
ttaggtcagatggaaaggtggcattaggatagc

SEQ ID NO: 609329 - DNA, 33 bp, Homo sapien
gggatcctggaagagaaaaggaatgtccgtgaa

SEQ ID NO: 609330 - DNA, 33 bp, Homo sapien
gggatcctggaagagagaaggaatgtccgtgaa

SEQ ID NO: 609331 - DNA, 33 bp, Homo sapien
ggaaatcaacaagacacggcagataactggatg

SEQ ID NO: 609332 - DNA, 33 bp, Homo sapien
ggaaatcaacaagacatggcagataactggatg

SEQ ID NO: 609333 - DNA, 33 bp, Homo sapien
ggctgcatccacatcaaaaacacctttgtaaaa

SEQ ID NO: 609334 - DNA, 33 bp, Homo sapien
ggctgcatccacatcacaaacacctttgtaaaa

SEQ ID NO: 609335 - DNA, 33 bp, Homo sapien
tgagcctgtcctggaacgacttcactttctcag

SEQ ID NO: 609336 - DNA, 33 bp, Homo sapien
tgagcctgtcctggaatgacttcactttctcag

SEQ ID NO: 609337 - DNA, 33 bp, Homo sapien
acttacaaaggcttacaaagtgctgcagggtct

SEQ ID NO: 609338 - DNA, 33 bp, Homo sapien
acttacaaaggcttacgaagtgctgcagggtct

SEQ ID NO: 609339 - DNA, 33 bp, Homo sapien
taaatatagtcttccccctcaaattcaagacct

SEQ ID NO: 609340 - DNA, 33 bp, Homo sapien
taaatatagtcttccctctcaaattcaagacct

SEQ ID NO: 609341 - DNA, 33 bp, Homo sapien
caccatctggtcacaactgatggcccatctgac

SEQ ID NO: 609342 - DNA, 33 bp, Homo sapien
caccatctggtcacaattgatggcccatctgac

SEQ ID NO: 609343 - DNA, 33 bp, Homo sapien
ggcaccagcataagtcaatccgagtgggtcatg

SEQ ID NO: 609344 - DNA, 33 bp, Homo sapien
ggcaccagcataagtcgatccgagtgggtcatg

SEQ ID NO: 609345 - DNA, 33 bp, Homo sapien
gggcttgacatgaacacagcctggttatttatc

SEQ ID NO: 609346 - DNA, 33 bp, Homo sapien
gggcttgacatgaacatagcctggttatttatc

SEQ ID NO: 609347 - DNA, 33 bp, Homo sapien
gagaaaactcagagaacatgattatgtgaagac

SEQ ID NO: 609348 - DNA, 33 bp, Homo sapien
gagaaaactcagagaatatgattatgtgaagac

SEQ ID NO: 609349 - DNA, 33 bp, Homo sapien
gatttgtatttagctaccaagtaattttgcaga

SEQ ID NO: 609350 - DNA, 33 bp, Homo sapien
gatttgtatttagctatcaagtaattttgcaga

SEQ ID NO: 609351 - DNA, 33 bp, Homo sapien
ttcctaaaagtgaaacaaaccttgcgctctaca

SEQ ID NO: 609352 - DNA, 33 bp, Homo sapien
ttcctaaaagtgaaacgaaccttgcgctctaca

SEQ ID NO: 609353 - DNA, 33 bp, Homo sapien
accctgatgattttggcaaaatggctccaagaa

SEQ ID NO: 609354 - DNA, 33 bp, Homo sapien
accctgatgattttggtaaaatggctccaagaa

SEQ ID NO: 609355 - DNA, 33 bp, Homo sapien
tctgtagaaaacctgccgagggaagagctcaca

SEQ ID NO: 609356 - DNA, 33 bp, Homo sapien
tctgtagaaaacctgctgagggaagagctcaca

SEQ ID NO: 609357 - DNA, 33 bp, Homo sapien
ccaagaaacacacagcccgttcataactttcta

SEQ ID NO: 609358 - DNA, 33 bp, Homo sapien
ccaagaaacacacagctcgttcataactttcta

SEQ ID NO: 609359 - DNA, 33 bp, Homo sapien
gtctccaggagggataacgagtgcaaagcaact

SEQ ID NO: 609360 - DNA, 33 bp, Homo sapien
gtctccaggagggataccgagtgcaaagcaact

SEQ ID NO: 609361 - DNA, 33 bp, Homo sapien
agatctccttgtcccaaatcagtgcaaccttgc

SEQ ID NO: 609362 - DNA, 33 bp, Homo sapien
agatctccttgtcccatatcagtgcaaccttgc

SEQ ID NO: 609363 - DNA, 33 bp, Homo sapien
ggaggagttgggcttccaggagaaccaagagct

SEQ ID NO: 609364 - DNA, 33 bp, Homo sapien
ggaggagttgggcttcgaggagaaccaagagct

SEQ ID NO: 609365 - DNA, 33 bp, Homo sapien
gaatctcaattcaagtcactccaacaagtgggc

SEQ ID NO: 609366 - DNA, 33 bp, Homo sapien
gaatctcaattcaagttactccaacaagtgggc

SEQ ID NO: 609367 - DNA, 33 bp, Homo sapien
gtcattcatggtgcaacggtgagatgtgaacct

SEQ ID NO: 609368 - DNA, 33 bp, Homo sapien
gtcattcatggtgcaatggtgagatgtgaacct

SEQ ID NO: 609369 - DNA, 33 bp, Homo sapien
tgtgaagtgtacattcaagtcttttgcctgctt

SEQ ID NO: 609370 - DNA, 33 bp, Homo sapien
tgtgaagtgtacattcgagtcttttgcctgctt

SEQ ID NO: 609371 - DNA, 33 bp, Homo sapien
aaacttttagaagataacatgggagaaaacgta

SEQ ID NO: 609372 - DNA, 33 bp, Homo sapien
aaacttttagaagatagcatgggagaaaacgta

SEQ ID NO: 609373 - DNA, 33 bp, Homo sapien
agctctgtcactaaccagccctgtgtgtgagca

SEQ ID NO: 609374 - DNA, 33 bp, Homo sapien
agctctgtcactaacctgccctgtgtgtgagca

SEQ ID NO: 609375 - DNA, 33 bp, Homo sapien
ctggggctctgtgccacggggtagaaaggctac

SEQ ID NO: 609376 - DNA, 33 bp, Homo sapien
ctggggctctgtgccagggggtagaaaggctac

SEQ ID NO: 609377 - DNA, 33 bp, Homo sapien
tgtggtgcattgttgacgagtgttaggccttga

SEQ ID NO: 609378 - DNA, 33 bp, Homo sapien
tgtggtgcattgttgatgagtgttaggccttga

SEQ ID NO: 609379 - DNA, 33 bp, Homo sapien
taagtacaatgtaaacaatcagcaaagtttgca

SEQ ID NO: 609380 - DNA, 33 bp, Homo sapien
taagtacaatgtaaacgatcagcaaagtttgca

SEQ ID NO: 609381 - DNA, 33 bp, Homo sapien
agatgctcagtacagggcatggtaccccgacgt

SEQ ID NO: 609382 - DNA, 33 bp, Homo sapien
agatgctcagtacaggtcatggtaccccgacgt

SEQ ID NO: 609383 - DNA, 33 bp, Homo sapien
tgttctgggacttcagaatggccaacggcagcc

SEQ ID NO: 609384 - DNA, 33 bp, Homo sapien
tgttctgggacttcaggatggccaacggcagcc

SEQ ID NO: 609385 - DNA, 33 bp, Homo sapien
ctattagatcctacagaaagacttccactggcc

SEQ ID NO: 609386 - DNA, 33 bp, Homo sapien
ctattagatcctacaggaagacttccactggcc

SEQ ID NO: 609387 - DNA, 33 bp, Homo sapien
aaggtatgtgccatatcaatacaatgctgggat

SEQ ID NO: 609388 - DNA, 33 bp, Homo sapien
aaggtatgtgccatatgaatacaatgctgggat

SEQ ID NO: 609389 - DNA, 33 bp, Homo sapien
atcattgttggccttacgggttcacctgcatga

SEQ ID NO: 609390 - DNA, 33 bp, Homo sapien
atcattgttggccttaggggttcacctgcatga

SEQ ID NO: 609391 - DNA, 33 bp, Homo sapien
cgtgaagctgtgctgacggagtgcttttcagtt

SEQ ID NO: 609392 - DNA, 33 bp, Homo sapien
cgtgaagctgtgctgatggagtgcttttcagtt

SEQ ID NO: 609393 - DNA, 33 bp, Homo sapien
acttggttccaaaggcacttctcaccggaaatc

SEQ ID NO: 609394 - DNA, 33 bp, Homo sapien
acttggttccaaaggctcttctcaccggaaatc

SEQ ID NO: 609395 - DNA, 33 bp, Homo sapien
gacccagggtacaacacactcaggatgcgatag

SEQ ID NO: 609396 - DNA, 33 bp, Homo sapien
gacccagggtacaacagactcaggatgcgatag

SEQ ID NO: 609397 - DNA, 33 bp, Homo sapien
cacacattcctctcacaagcatttataaggata

SEQ ID NO: 609398 - DNA, 33 bp, Homo sapien
cacacattcctctcaccagcatttataaggata

SEQ ID NO: 609399 - DNA, 33 bp, Homo sapien
tgtggagagaaggttaaagttccaagatgtgtg

SEQ ID NO: 609400 - DNA, 33 bp, Homo sapien
tgtggagagaaggttacagttccaagatgtgtg

SEQ ID NO: 609401 - DNA, 33 bp, Homo sapien
aaattctacctctagacgcaggcagtacagctt

SEQ ID NO: 609402 - DNA, 33 bp, Homo sapien
aaattctacctctagatgcaggcagtacagctt

SEQ ID NO: 609403 - DNA, 33 bp, Homo sapien
gagtaagtggcatccacaaacaagtatacgagt

SEQ ID NO: 609404 - DNA, 33 bp, Homo sapien
gagtaagtggcatccagaaacaagtatacgagt

SEQ ID NO: 609405 - DNA, 33 bp, Homo sapien
aggttcaggatagaaactcaactttctgcaacg

SEQ ID NO: 609406 - DNA, 33 bp, Homo sapien
aggttcaggatagaaattcaactttctgcaacg

SEQ ID NO: 609407 - DNA, 33 bp, Homo sapien
ggcaattgcaaaacgacatttggctgagttggt

SEQ ID NO: 609408 - DNA, 33 bp, Homo sapien
ggcaattgcaaaacgatatttggctgagttggt

SEQ ID NO: 609409 - DNA, 33 bp, Homo sapien
caggccaaaagcctggaaatggaaaccggcaag

SEQ ID NO: 609410 - DNA, 33 bp, Homo sapien
caggccaaaagcctgggaatggaaaccggcaag

SEQ ID NO: 609411 - DNA, 33 bp, Homo sapien
actttggaaatggataaaagagctacataggta

SEQ ID NO: 609412 - DNA, 33 bp, Homo sapien
actttggaaatggatagaagagctacataggta

SEQ ID NO: 609413 - DNA, 33 bp, Homo sapien
agtgacaaggtctgcaccttaaaagttctcatt

SEQ ID NO: 609414 - DNA, 33 bp, Homo sapien
agtgacaaggtctgcatcttaaaagttctcatt

SEQ ID NO: 609415 - DNA, 33 bp, Homo sapien
cagatgctaagaaattaaagatcttgaggtgag

SEQ ID NO: 609416 - DNA, 33 bp, Homo sapien
cagatgctaagaaattcaagatcttgaggtgag

SEQ ID NO: 609417 - DNA, 33 bp, Homo sapien
cacgtccttcctgtacactaggagaaacacacc

SEQ ID NO: 609418 - DNA, 33 bp, Homo sapien
cacgtccttcctgtacgctaggagaaacacacc

SEQ ID NO: 609419 - DNA, 33 bp, Homo sapien
ctagaactctcataaccctggatggattgcaca

SEQ ID NO: 609420 - DNA, 33 bp, Homo sapien
ctagaactctcataactctggatggattgcaca

SEQ ID NO: 609421 - DNA, 33 bp, Homo sapien
agcagcaatttaattacgcaaacctgatctaag

SEQ ID NO: 609422 - DNA, 33 bp, Homo sapien
agcagcaatttaattatgcaaacctgatctaag

SEQ ID NO: 609423 - DNA, 33 bp, Homo sapien
acatccacagtgcgaaacccgagacatcagaga

SEQ ID NO: 609424 - DNA, 33 bp, Homo sapien
acatccacagtgcgaaccccgagacatcagaga

SEQ ID NO: 609425 - DNA, 33 bp, Homo sapien
gggactgccatgcagacggagctttcttctaat

SEQ ID NO: 609426 - DNA, 33 bp, Homo sapien
gggactgccatgcagagggagctttcttctaat

SEQ ID NO: 609427 - DNA, 33 bp, Homo sapien
ggtgcagcctggtgaacactttcttcccgcaag

SEQ ID NO: 609428 - DNA, 33 bp, Homo sapien
ggtgcagcctggtgaatactttcttcccgcaag

SEQ ID NO: 609429 - DNA, 33 bp, Homo sapien
accttcaggcagatgccgatagaagaggacctg

SEQ ID NO: 609430 - DNA, 33 bp, Homo sapien
accttcaggcagatgctgatagaagaggacctg

SEQ ID NO: 609431 - DNA, 33 bp, Homo sapien
aaacctcctctgcaagaagtaagtctatggcac

SEQ ID NO: 609432 - DNA, 33 bp, Homo sapien
aaacctcctctgcaaggagtaagtctatggcac

SEQ ID NO: 609433 - DNA, 33 bp, Homo sapien
gatgcacagtcctgccccgttctgctgtttgca

SEQ ID NO: 609434 - DNA, 33 bp, Homo sapien
gatgcacagtcctgcctcgttctgctgtttgca

SEQ ID NO: 609435 - DNA, 33 bp, Homo sapien
ctgggatttaatgaaacaatatggatcaaggcc

SEQ ID NO: 609436 - DNA, 33 bp, Homo sapien
ctgggatttaatgaaataatatggatcaaggcc

SEQ ID NO: 609437 - DNA, 33 bp, Homo sapien
aagcaaggctagcagacgtgcaggtagatggaa

SEQ ID NO: 609438 - DNA, 33 bp, Homo sapien
aagcaaggctagcagatgtgcaggtagatggaa

SEQ ID NO: 609439 - DNA, 33 bp, Homo sapien
gtgacgttcattgcatgacttggcataaacatg

SEQ ID NO: 609440 - DNA, 33 bp, Homo sapien
gtgacgttcattgcattacttggcataaacatg

SEQ ID NO: 609441 - DNA, 33 bp, Homo sapien
gacacacacgagcccacaaccggatgctcctca

SEQ ID NO: 609442 - DNA, 33 bp, Homo sapien
gacacacacgagcccataaccggatgctcctca

SEQ ID NO: 609443 - DNA, 33 bp, Homo sapien
gcggaggatgttttagaatttgggagcaaagcc

SEQ ID NO: 609444 - DNA, 33 bp, Homo sapien
gcggaggatgttttaggatttgggagcaaagcc

SEQ ID NO: 609445 - DNA, 33 bp, Homo sapien
aagtgtctggtgtatgcacccattctctggatg

SEQ ID NO: 609446 - DNA, 33 bp, Homo sapien
aagtgtctggtgtatgtacccattctctggatg

SEQ ID NO: 609447 - DNA, 33 bp, Homo sapien
atttgtatgtctaaagcagtattttgtcttcat

SEQ ID NO: 609448 - DNA, 33 bp, Homo sapien
atttgtatgtctaaaggagtattttgtcttcat

SEQ ID NO: 609449 - DNA, 33 bp, Homo sapien
tttttgaagccaggaacgagacttaggacccag

SEQ ID NO: 609450 - DNA, 33 bp, Homo sapien
tttttgaagccaggaatgagacttaggacccag

SEQ ID NO: 609451 - DNA, 33 bp, Homo sapien
gggccagtggcagatacaggttagcagagctga

SEQ ID NO: 609452 - DNA, 33 bp, Homo sapien
gggccagtggcagatataggttagcagagctga

SEQ ID NO: 609453 - DNA, 33 bp, Homo sapien
catgtttttctggacgaagtttgcaaaattcct

SEQ ID NO: 609454 - DNA, 33 bp, Homo sapien
catgtttttctggacgcagtttgcaaaattcct

SEQ ID NO: 609455 - DNA, 33 bp, Homo sapien
gtgattttagggtaaacgctcctctcttgtgct

SEQ ID NO: 609456 - DNA, 33 bp, Homo sapien
gtgattttagggtaaatgctcctctcttgtgct

SEQ ID NO: 609457 - DNA, 33 bp, Homo sapien
tgctctccctcctgaacgtagcagcgtcatcct

SEQ ID NO: 609458 - DNA, 33 bp, Homo sapien
tgctctccctcctgaatgtagcagcgtcatcct

SEQ ID NO: 609459 - DNA, 33 bp, Homo sapien
ccactgcatttagggaataagccgggccttcac

SEQ ID NO: 609460 - DNA, 33 bp, Homo sapien
ccactgcatttagggagtaagccgggccttcac

SEQ ID NO: 609461 - DNA, 33 bp, Homo sapien
gacatcattgtatagaagggtttccacatccac

SEQ ID NO: 609462 - DNA, 33 bp, Homo sapien
gacatcattgtatagacgggtttccacatccac

SEQ ID NO: 609463 - DNA, 33 bp, Homo sapien
aaagctgttacactcacggttttggctcattac

SEQ ID NO: 609464 - DNA, 33 bp, Homo sapien
aaagctgttacactcatggttttggctcattac

SEQ ID NO: 609465 - DNA, 33 bp, Homo sapien; identical to SEQ ID NO: 609463

SEQ ID NO: 609466 - DNA, 33 bp, Homo sapien; identical to SEQ ID NO: 609464

SEQ ID NO: 609467 - DNA, 33 bp, Homo sapien
tggatgagggctctcaactacccagcagggcag

SEQ ID NO: 609468 - DNA, 33 bp, Homo sapien
tggatgagggctctcagctacccagcagggcag

SEQ ID NO: 609469 - DNA, 33 bp, Homo sapien
cctgaggtcgcccctgcagaggcgtggagatgt

SEQ ID NO: 609470 - DNA, 33 bp, Homo sapien
cctgaggtcgcccctgtagaggcgtggagatgt

SEQ ID NO: 609471 - DNA, 33 bp, Homo sapien
ggacgaggtgtcctgaagtctccactcccgctg

SEQ ID NO: 609472 - DNA, 33 bp, Homo sapien
ggacgaggtgtcctgaggtctccactcccgctg

SEQ ID NO: 609473 - DNA, 33 bp, Homo sapien
tttggagaatgtgtaccgggcaccagccttggc

SEQ ID NO: 609474 - DNA, 33 bp, Homo sapien
tttggagaatgtgtactgggcaccagccttggc

SEQ ID NO: 609475 - DNA, 33 bp, Homo sapien
agaggagaacaagtaggaaaagtgcatctcaga

SEQ ID NO: 609476 - DNA, 33 bp, Homo sapien
agaggagaacaagtagtaaaagtgcatctcaga

SEQ ID NO: 609477 - DNA, 33 bp, Homo sapien
gtcacatgacattcccaattccagagaggagaa

SEQ ID NO: 609478 - DNA, 33 bp, Homo sapien
gtcacatgacattcccgattccagagaggagaa

SEQ ID NO: 609479 - DNA, 33 bp, Homo sapien
atttgtcagacgaccacgctcggatgtcacagg

SEQ ID NO: 609480 - DNA, 33 bp, Homo sapien
atttgtcagacgaccatgctcggatgtcacagg

SEQ ID NO: 609481 - DNA, 33 bp, Homo sapien
cagctgtgctggggtcaccttctgcagacacag

SEQ ID NO: 609482 - DNA, 33 bp, Homo sapien
cagctgtgctggggtcgccttctgcagacacag

SEQ ID NO: 609483 - DNA, 33 bp, Homo sapien
agagaaggacattttcacatttccccaaacctt

SEQ ID NO: 609484 - DNA, 33 bp, Homo sapien
agagaaggacattttcgcatttccccaaacctt

SEQ ID NO: 609485 - DNA, 33 bp, Homo sapien
cacaggagtgcgtcaacagaggatgtgatggcc

SEQ ID NO: 609486 - DNA, 33 bp, Homo sapien
cacaggagtgcgtcaagagaggatgtgatggcc

SEQ ID NO: 609487 - DNA, 33 bp, Homo sapien
tatgtccataaaagacaagcccggagaggcagg

SEQ ID NO: 609488 - DNA, 33 bp, Homo sapien
tatgtccataaaagacgagcccggagaggcagg

SEQ ID NO: 609489 - DNA, 33 bp, Homo sapien
aggcggtgatgggcgaccattgttcagggaggg

SEQ ID NO: 609490 - DNA, 33 bp, Homo sapien
aggcggtgatgggcgatcattgttcagggaggg

SEQ ID NO: 609491 - DNA, 33 bp, Homo sapien
ggtctcgctgattctcccactttcaaggcttga

SEQ ID NO: 609492 - DNA, 33 bp, Homo sapien
ggtctcgctgattctctcactttcaaggcttga

SEQ ID NO: 609493 - DNA, 33 bp, Homo sapien
aggaaagagggtctccaagctgtcaagtggggc

SEQ ID NO: 609494 - DNA, 33 bp, Homo sapien
aggaaagagggtctccgagctgtcaagtggggc

SEQ ID NO: 609495 - DNA, 33 bp, Homo sapien
ccctaaaagccttcaacggatgggggaaaacat

SEQ ID NO: 609496 - DNA, 33 bp, Homo sapien
ccctaaaagccttcaatggatgggggaaaacat

SEQ ID NO: 609497 - DNA, 33 bp, Homo sapien
atgttgaaactaaaaacgtattcgtgatcaggg

SEQ ID NO: 609498 - DNA, 33 bp, Homo sapien
atgttgaaactaaaaatgtattcgtgatcaggg

SEQ ID NO: 609499 - DNA, 33 bp, Homo sapien
actgaccggtcactacacacacttcaaccttta

SEQ ID NO: 609500 - DNA, 33 bp, Homo sapien
actgaccggtcactacgcacacttcaaccttta

SEQ ID NO: 609501 - DNA, 33 bp, Homo sapien
accagacttccaaacaagcccatggcacacaaa

SEQ ID NO: 609502 - DNA, 33 bp, Homo sapien
accagacttccaaacaggcccatggcacacaaa

SEQ ID NO: 609503 - DNA, 33 bp, Homo sapien
aggctccattccagacacttgcagtggggagag

SEQ ID NO: 609504 - DNA, 33 bp, Homo sapien
aggctccattccagactcttgcagtggggagag

SEQ ID NO: 609505 - DNA, 33 bp, Homo sapien
tttccccatgattagaatcgggctgtgggtgtt

SEQ ID NO: 609506 - DNA, 33 bp, Homo sapien
tttccccatgattagactcgggctgtgggtgtt

SEQ ID NO: 609507 - DNA, 33 bp, Homo sapien
aaacgcatgtctccgacgctgaagaatccaagt

SEQ ID NO: 609508 - DNA, 33 bp, Homo sapien
aaacgcatgtctccgatgctgaagaatccaagt

SEQ ID NO: 609509 - DNA, 33 bp, Homo sapien
agcctaaaggacaaacacatctatcagtccaca

SEQ ID NO: 609510 - DNA, 33 bp, Homo sapien
agcctaaaggacaaacgcatctatcagtccaca

SEQ ID NO: 609511 - DNA, 33 bp, Homo sapien
agagctaacatacctgacaacccggtaaataaa

SEQ ID NO: 609512 - DNA, 33 bp, Homo sapien
agagctaacatacctggcaacccggtaaataaa

SEQ ID NO: 609513 - DNA, 33 bp, Homo sapien
ccgagccccgtgttaactgcagaagaaattagc

SEQ ID NO: 609514 - DNA, 33 bp, Homo sapien
ccgagccccgtgttaattgcagaagaaattagc

SEQ ID NO: 609515 - DNA, 33 bp, Homo sapien
ctttgctgccgataacactggctccgcacatca

SEQ ID NO: 609516 - DNA, 33 bp, Homo sapien
ctttgctgccgataacgctggctccgcacatca

SEQ ID NO: 609517 - DNA, 33 bp, Homo sapien
aatcacaacgtaagaacgtgtgctcgggacccg

SEQ ID NO: 609518 - DNA, 33 bp, Homo sapien
aatcacaacgtaagaatgtgtgctcgggacccg

SEQ ID NO: 609519 - DNA, 33 bp, Homo sapien
gccccatctttatcacacccggaaatgaaaggt

SEQ ID NO: 609520 - DNA, 33 bp, Homo sapien
gccccatctttatcacgcccggaaatgaaaggt

SEQ ID NO: 609521 - DNA, 33 bp, Homo sapien
tgaccccaactctgcccataggcgggcggaagt

SEQ ID NO: 609522 - DNA, 33 bp, Homo sapien
tgaccccaactctgccgataggcgggcggaagt

SEQ ID NO: 609523 - DNA, 33 bp, Homo sapien
atctgaaaccacattcactttcctctcaccagg

SEQ ID NO: 609524 - DNA, 33 bp, Homo sapien
atctgaaaccacattcgctttcctctcaccagg

SEQ ID NO: 609525 - DNA, 33 bp, Homo sapien
gcgcctgtggtcacggaacgcggtaggggcagc

SEQ ID NO: 609526 - DNA, 33 bp, Homo sapien
gcgcctgtggtcacggcacgcggtaggggcagc

SEQ ID NO: 609527 - DNA, 33 bp, Homo sapien
cagcgggaaaaagtgacggcactctggggcccc

SEQ ID NO: 609528 - DNA, 33 bp, Homo sapien
cagcgggaaaaagtgatggcactctggggcccc

SEQ ID NO: 609529 - DNA, 33 bp, Homo sapien
gggtattgagggatgacgaggagctcaccagaa

SEQ ID NO: 609530 - DNA, 33 bp, Homo sapien
gggtattgagggatgatgaggagctcaccagaa

SEQ ID NO: 609531 - DNA, 33 bp, Homo sapien
ggacacatacatctccacgcagactgctgccac

SEQ ID NO: 609532 - DNA, 33 bp, Homo sapien
ggacacatacatctccgcgcagactgctgccac

SEQ ID NO: 609533 - DNA, 33 bp, Homo sapien
tggggaagaaagtgtcaccaacagcccccaggc

SEQ ID NO: 609534 - DNA, 33 bp, Homo sapien
tggggaagaaagtgtcgccaacagcccccaggc

SEQ ID NO: 609535 - DNA, 33 bp, Homo sapien
ctgtcctggaaatgcccctgctggcccagacct

SEQ ID NO: 609536 - DNA, 33 bp, Homo sapien
ctgtcctggaaatgcctctgctggcccagacct

SEQ ID NO: 609537 - DNA, 33 bp, Homo sapien
gcagggtctggcttgaccttgagaagcagcacc

SEQ ID NO: 609538 - DNA, 33 bp, Homo sapien
gcagggtctggcttgatcttgagaagcagcacc

SEQ ID NO: 609539 - DNA, 33 bp, Homo sapien
tgaggcacaggacctacaaagatgcaggccact

SEQ ID NO: 609540 - DNA, 33 bp, Homo sapien
tgaggcacaggacctataaagatgcaggccact

SEQ ID NO: 609541 - DNA, 33 bp, Homo sapien
aggtggtgatagagacagagtcagctgggtaaa

SEQ ID NO: 609542 - DNA, 33 bp, Homo sapien
aggtggtgatagagaccgagtcagctgggtaaa

SEQ ID NO: 609543 - DNA, 33 bp, Homo sapien
acagtgtgaatatgccaggaaaagggagggttc

SEQ ID NO: 609544 - DNA, 33 bp, Homo sapien
acagtgtgaatatgccgggaaaagggagggttc

SEQ ID NO: 609545 - DNA, 33 bp, Homo sapien
catccacaaactgaacaccttttccatcttaac

SEQ ID NO: 609546 - DNA, 33 bp, Homo sapien
catccacaaactgaacgccttttccatcttaac

SEQ ID NO: 609547 - DNA, 33 bp, Homo sapien
gaatacatgaacagaaatggattttgattgatg

SEQ ID NO: 609548 - DNA, 33 bp, Homo sapien
gaatacatgaacagaagtggattttgattgatg

SEQ ID NO: 609549 - DNA, 33 bp, Homo sapien
agggccagaaagcactgacgtctctgggctatg

SEQ ID NO: 609550 - DNA, 33 bp, Homo sapien
agggccagaaagcacttacgtctctgggctatg

SEQ ID NO: 609551 - DNA, 33 bp, Homo sapien
aatctcagctttgcaacagccttcatatgcgag

SEQ ID NO: 609552 - DNA, 33 bp, Homo sapien
aatctcagctttgcaatagccttcatatgcgag

SEQ ID NO: 609553 - DNA, 33 bp, Homo sapien
gcctaacatgaggccacggctgaacatctggct

SEQ ID NO: 609554 - DNA, 33 bp, Homo sapien
gcctaacatgaggccagggctgaacatctggct

SEQ ID NO: 609555 - DNA, 33 bp, Homo sapien
taagagtgtgagcatacggcacagtctattcct

SEQ ID NO: 609556 - DNA, 33 bp, Homo sapien
taagagtgtgagcatatggcacagtctattcct

SEQ ID NO: 609557 - DNA, 33 bp, Homo sapien
aacagccaggaggaccagaatgagcaggtctga

SEQ ID NO: 609558 - DNA, 33 bp, Homo sapien
aacagccaggaggaccggaatgagcaggtctga

SEQ ID NO: 609559 - DNA, 33 bp, Homo sapien
cacctccagtcctggaaacacaagcaaacagtg

SEQ ID NO: 609560 - DNA, 33 bp, Homo sapien
cacctccagtcctggacacacaagcaaacagtg

SEQ ID NO: 609561 - DNA, 33 bp, Homo sapien
tggtgggcgccaactccctgctcctgaatgagg

SEQ ID NO: 609562 - DNA, 33 bp, Homo sapien
tggtgggcgccaactctctgctcctgaatgagg

SEQ ID NO: 609563 - DNA, 33 bp, Homo sapien
agcctccaaagatcaccgtcctgtgagcaaacc

SEQ ID NO: 609564 - DNA, 33 bp, Homo sapien
agcctccaaagatcactgtcctgtgagcaaacc

SEQ ID NO: 609565 - DNA, 33 bp, Homo sapien
aggtctttcctggatccaagagagatttcacta

SEQ ID NO: 609566 - DNA, 33 bp, Homo sapien
aggtctttcctggatctaagagagatttcacta

SEQ ID NO: 609567 - DNA, 33 bp, Homo sapien
ttgtgaggaaaatttgcatctcctttttctagg

SEQ ID NO: 609568 - DNA, 33 bp, Homo sapien
ttgtgaggaaaatttgtatctcctttttctagg

SEQ ID NO: 609569 - DNA, 33 bp, Homo sapien
tgctacactacagagaaggagtccacagggcag

SEQ ID NO: 609570 - DNA, 33 bp, Homo sapien
tgctacactacagagagggagtccacagggcag

SEQ ID NO: 609571 - DNA, 33 bp, Homo sapien
tcagatggacgcagctcacagatggtgccccgg

SEQ ID NO: 609572 - DNA, 33 bp, Homo sapien
tcagatggacgcagctgacagatggtgccccgg

SEQ ID NO: 609573 - DNA, 33 bp, Homo sapien
caggaaaaggcaaacacgcccagagcactggct

SEQ ID NO: 609574 - DNA, 33 bp, Homo sapien
caggaaaaggcaaacaggcccagagcactggct

SEQ ID NO: 609575 - DNA, 33 bp, Homo sapien
tctcaaagagtcggcagctcaggaaggtgcccc

SEQ ID NO: 609576 - DNA, 33 bp, Homo sapien
tctcaaagagtcggcatctcaggaaggtgcccc

SEQ ID NO: 609577 - DNA, 33 bp, Homo sapien
gatcccacgtaacagacacaccctgctggattt

SEQ ID NO: 609578 - DNA, 33 bp, Homo sapien
gatcccacgtaacagatacaccctgctggattt

SEQ ID NO: 609579 - DNA, 33 bp, Homo sapien
ggggactggagagaaactgacctctgcggtgct

SEQ ID NO: 609580 - DNA, 33 bp, Homo sapien
ggggactggagagaaattgacctctgcggtgct

SEQ ID NO: 609581 - DNA, 33 bp, Homo sapien
tcccgaggtgtgagcaacgctccttcttggccc

SEQ ID NO: 609582 - DNA, 33 bp, Homo sapien
tcccgaggtgtgagcagcgctccttcttggccc

SEQ ID NO: 609583 - DNA, 33 bp, Homo sapien
cctcagaatccgagaacgaagagacctcacggt

SEQ ID NO: 609584 - DNA, 33 bp, Homo sapien
cctcagaatccgagaatgaagagacctcacggt

SEQ ID NO: 609585 - DNA, 33 bp, Homo sapien
tccgctgcagggtccaacgccgcccaggtctct

SEQ ID NO: 609586 - DNA, 33 bp, Homo sapien
tccgctgcagggtccagcgccgcccaggtctct

SEQ ID NO: 609587 - DNA, 33 bp, Homo sapien
cttctggaaaccaggcaattaggtgaaaatcga

SEQ ID NO: 609588 - DNA, 33 bp, Homo sapien
cttctggaaaccaggcgattaggtgaaaatcga

SEQ ID NO: 609589 - DNA, 33 bp, Homo sapien
acataaaactgaggcaatctctcagaaagcaga

SEQ ID NO: 609590 - DNA, 33 bp, Homo sapien
acataaaactgaggcagtctctcagaaagcaga

SEQ ID NO: 609591 - DNA, 33 bp, Homo sapien
aacctcctgaaatagcagaaaatgaagaagaaa

SEQ ID NO: 609592 - DNA, 33 bp, Homo sapien
aacctcctgaaatagcggaaaatgaagaagaaa

SEQ ID NO: 609593 - DNA, 33 bp, Homo sapien
cccgtgagagtactcaccaagcccagaaaatga

SEQ ID NO: 609594 - DNA, 33 bp, Homo sapien
cccgtgagagtactcatcaagcccagaaaatga

SEQ ID NO: 609595 - DNA, 33 bp, Homo sapien
gctccaagtccgtctggagtgtgatcagatggc

SEQ ID NO: 609596 - DNA, 33 bp, Homo sapien
gctccaagtccgtctgtagtgtgatcagatggc

SEQ ID NO: 609597 - DNA, 33 bp, Homo sapien
gatgtacccccggccacgactgcccctgtggcg

SEQ ID NO: 609598 - DNA, 33 bp, Homo sapien
gatgtacccccggccatgactgcccctgtggcg

SEQ ID NO: 609599 - DNA, 33 bp, Homo sapien
cagcacctcactgttaagatgtacccccggcca

SEQ ID NO: 609600 - DNA, 33 bp, Homo sapien
cagcacctcactgttaggatgtacccccggcca

SEQ ID NO: 609601 - DNA, 33 bp, Homo sapien
acagtgagcatatgtacaactggacgctgggca

SEQ ID NO: 609602 - DNA, 33 bp, Homo sapien
acagtgagcatatgtagaactggacgctgggca

SEQ ID NO: 609603 - DNA, 33 bp, Homo sapien
aaaggaaaatggtggacgagaaaggtttctgag

SEQ ID NO: 609604 - DNA, 33 bp, Homo sapien
aaaggaaaatggtggatgagaaaggtttctgag

SEQ ID NO: 609605 - DNA, 33 bp, Homo sapien
cttattgacacgtttacgccttacagttcagac

SEQ ID NO: 609606 - DNA, 33 bp, Homo sapien
cttattgacacgtttatgccttacagttcagac

SEQ ID NO: 609607 - DNA, 33 bp, Homo sapien
caataaagtaaatatcacgatcaagagagtgac

SEQ ID NO: 609608 - DNA, 33 bp, Homo sapien
caataaagtaaatatcgcgatcaagagagtgac

SEQ ID NO: 609609 - DNA, 33 bp, Homo sapien
tggcgtgaggaagaacactgcgattgtaaactc

SEQ ID NO: 609610 - DNA, 33 bp, Homo sapien
tggcgtgaggaagaacgctgcgattgtaaactc

SEQ ID NO: 609611 - DNA, 33 bp, Homo sapien
tcccactgcttagtgaacaaaagtgggcttacc

SEQ ID NO: 609612 - DNA, 33 bp, Homo sapien
tcccactgcttagtgagcaaaagtgggcttacc

SEQ ID NO: 609613 - DNA, 33 bp, Homo sapien
accgtcactggcccacactctcagccagggaca

SEQ ID NO: 609614 - DNA, 33 bp, Homo sapien
accgtcactggcccacgctctcagccagggaca

SEQ ID NO: 609615 - DNA, 33 bp, Homo sapien
cactcctgatggaaagccttgtgtgggccaagc

SEQ ID NO: 609616 - DNA, 33 bp, Homo sapien
cactcctgatggaaaggcttgtgtgggccaagc

SEQ ID NO: 609617 - DNA, 33 bp, Homo sapien
ggcgcccaggagctcacgaaccgcagctggcca

SEQ ID NO: 609618 - DNA, 33 bp, Homo sapien
ggcgcccaggagctcaggaaccgcagctggcca

SEQ ID NO: 609619 - DNA, 33 bp, Homo sapien
tcatttgattgggcagccacgggaatggcacac

SEQ ID NO: 609620 - DNA, 33 bp, Homo sapien
tcatttgattgggcagtcacgggaatggcacac

SEQ ID NO: 609621 - DNA, 33 bp, Homo sapien
gtttgaattggatacaaggaatagggagccaca

SEQ ID NO: 609622 - DNA, 33 bp, Homo sapien
gtttgaattggatacagggaatagggagccaca

SEQ ID NO: 609623 - DNA, 33 bp, Homo sapien
ggaccaaccgagttaacaacattgtcctgcata

SEQ ID NO: 609624 - DNA, 33 bp, Homo sapien
ggaccaaccgagttaataacattgtcctgcata

SEQ ID NO: 609625 - DNA, 33 bp, Homo sapien
gtccagcttcatagagacactatgtcctcaagt

SEQ ID NO: 609626 - DNA, 33 bp, Homo sapien
gtccagcttcatagaggcactatgtcctcaagt

SEQ ID NO: 609627 - DNA, 33 bp, Homo sapien
agtccaaattgcagacacagggaacaaacgcta

SEQ ID NO: 609628 - DNA, 33 bp, Homo sapien
agtccaaattgcagactcagggaacaaacgcta

SEQ ID NO: 609629 - DNA, 33 bp, Homo sapien
agtcaaatctctgaaacacaaagtgaggagagg

SEQ ID NO: 609630 - DNA, 33 bp, Homo sapien
agtcaaatctctgaaatacaaagtgaggagagg

SEQ ID NO: 609631 - DNA, 33 bp, Homo sapien
ttgaactcttctcgaaactccagaggaagcgcc

SEQ ID NO: 609632 - DNA, 33 bp, Homo sapien
ttgaactcttctcgaagctccagaggaagcgcc

SEQ ID NO: 609633 - DNA, 33 bp, Homo sapien
ataaaatttgggactacaccatgtgcatgcaaa

SEQ ID NO: 609634 - DNA, 33 bp, Homo sapien
ataaaatttgggactataccatgtgcatgcaaa

SEQ ID NO: 609635 - DNA, 33 bp, Homo sapien
agctatattcaaagcaaaatgaaagttctaggg

SEQ ID NO: 609636 - DNA, 33 bp, Homo sapien
agctatattcaaagcagaatgaaagttctaggg

SEQ ID NO: 609637 - DNA, 33 bp, Homo sapien
gggggagacccaatgacagatcaaagagatgga

SEQ ID NO: 609638 - DNA, 33 bp, Homo sapien
gggggagacccaatgagagatcaaagagatgga

SEQ ID NO: 609639 - DNA, 33 bp, Homo sapien
tacttgaaatttaaccaaacgtcagcagagagc

SEQ ID NO: 609640 - DNA, 33 bp, Homo sapien
tacttgaaatttaaccgaacgtcagcagagagc

SEQ ID NO: 609641 - DNA, 33 bp, Homo sapien
ccaagctttccaacacaagaccacgctgctgtc

SEQ ID NO: 609642 - DNA, 33 bp, Homo sapien
ccaagctttccaacacgagaccacgctgctgtc

SEQ ID NO: 609643 - DNA, 33 bp, Homo sapien
gagatggcaagggtgacacgctggagaaatcgc

SEQ ID NO: 609644 - DNA, 33 bp, Homo sapien
gagatggcaagggtgatacgctggagaaatcgc

SEQ ID NO: 609645 - DNA, 33 bp, Homo sapien
ataagtgaaacccccaaggtgcctatggcctgt

SEQ ID NO: 609646 - DNA, 33 bp, Homo sapien
ataagtgaaacccccacggtgcctatggcctgt

SEQ ID NO: 609647 - DNA, 33 bp, Homo sapien
aagagtgagctgagcaaatcaactcggcagggc

SEQ ID NO: 609648 - DNA, 33 bp, Homo sapien
aagagtgagctgagcagatcaactcggcagggc

SEQ ID NO: 609649 - DNA, 33 bp, Homo sapien
tctgctgctaagcccagagagtgaatatttaat

SEQ ID NO: 609650 - DNA, 33 bp, Homo sapien
tctgctgctaagcccatagagtgaatatttaat

SEQ ID NO: 609651 - DNA, 33 bp, Homo sapien
aaatgggtcagtcctgaagttgcctccaaggta

SEQ ID NO: 609652 - DNA, 33 bp, Homo sapien
aaatgggtcagtcctgcagttgcctccaaggta

SEQ ID NO: 609653 - DNA, 33 bp, Homo sapien
accttatcaatgagcaataatatagtgaaagga

SEQ ID NO: 609654 - DNA, 33 bp, Homo sapien
accttatcaatgagcagtaatatagtgaaagga

SEQ ID NO: 609655 - DNA, 33 bp, Homo sapien
gccttcaaggatgcagaaaatccccaacagagt

SEQ ID NO: 609656 - DNA, 33 bp, Homo sapien
gccttcaaggatgcagcaaatccccaacagagt

SEQ ID NO: 609657 - DNA, 33 bp, Homo sapien
tcagaacggggccgcgcagccctctctgggtgt

SEQ ID NO: 609658 - DNA, 33 bp, Homo sapien
tcagaacggggccgcggagccctctctgggtgt

SEQ ID NO: 609659 - DNA, 33 bp, Homo sapien
ttcctcagtaacataaagagacagaattcctga

SEQ ID NO: 609660 - DNA, 33 bp, Homo sapien
ttcctcagtaacataaggagacagaattcctga

SEQ ID NO: 609661 - DNA, 33 bp, Homo sapien
gtgaataaacaaagcacgttctgtgttcaacgg

SEQ ID NO: 609662 - DNA, 33 bp, Homo sapien
gtgaataaacaaagcatgttctgtgttcaacgg

SEQ ID NO: 609663 - DNA, 33 bp, Homo sapien
caaggaattaggttaaagtgcttcagattctta

SEQ ID NO: 609664 - DNA, 33 bp, Homo sapien
caaggaattaggttaaggtgcttcagattctta

SEQ ID NO: 609665 - DNA, 33 bp, Homo sapien
ctgaacatgagctcacaatctcaaatcacaaaa

SEQ ID NO: 609666 - DNA, 33 bp, Homo sapien
ctgaacatgagctcactatctcaaatcacaaaa

SEQ ID NO: 609667 - DNA, 33 bp, Homo sapien
accccagatcagagaacggcgaaaatgcagtgg

SEQ ID NO: 609668 - DNA, 33 bp, Homo sapien
accccagatcagagaatggcgaaaatgcagtgg

SEQ ID NO: 609669 - DNA, 33 bp, Homo sapien
attgaaaacaaaaagagagtaggcaaatcaaat

SEQ ID NO: 609670 - DNA, 33 bp, Homo sapien
attgaaaacaaaaagatagtaggcaaatcaaat

SEQ ID NO: 609671 - DNA, 33 bp, Homo sapien
gccttcttcaatattccaagcctccttccatta

SEQ ID NO: 609672 - DNA, 33 bp, Homo sapien
gccttcttcaatattcgaagcctccttccatta

SEQ ID NO: 609673 - DNA, 33 bp, Homo sapien
agtggtttcactccagacagcgatatgggtcct

SEQ ID NO: 609674 - DNA, 33 bp, Homo sapien
agtggtttcactccaggcagcgatatgggtcct

SEQ ID NO: 609675 - DNA, 33 bp, Homo sapien
atatgcaattcaaaaacctggaaacttaaatgc

SEQ ID NO: 609676 - DNA, 33 bp, Homo sapien
atatgcaattcaaaaatctggaaacttaaatgc

SEQ ID NO: 609677 - DNA, 33 bp, Homo sapien
tttgtgtctaagcccacggtcattttctgtagg

SEQ ID NO: 609678 - DNA, 33 bp, Homo sapien
tttgtgtctaagcccatggtcattttctgtagg

SEQ ID NO: 609679 - DNA, 33 bp, Homo sapien
aagaagccccgaagacaacgaggagccacgtaa

SEQ ID NO: 609680 - DNA, 33 bp, Homo sapien
aagaagccccgaagacgacgaggagccacgtaa

SEQ ID NO: 609681 - DNA, 33 bp, Homo sapien
atccagacaaaggcaaacaagagggagctggga

SEQ ID NO: 609682 - DNA, 33 bp, Homo sapien
atccagacaaaggcaagcaagagggagctggga

SEQ ID NO: 609683 - DNA, 33 bp, Homo sapien
tttctgaaatctcagacgtagagctgtgtgcat

SEQ ID NO: 609684 - DNA, 33 bp, Homo sapien
tttctgaaatctcagatgtagagctgtgtgcat

SEQ ID NO: 609685 - DNA, 33 bp, Homo sapien
gtagacgagagccccccctttctgaaatctcag

SEQ ID NO: 609686 - DNA, 33 bp, Homo sapien
gtagacgagagccccctctttctgaaatctcag

SEQ ID NO: 609687 - DNA, 33 bp, Homo sapien
gctctcgtctacatccaaagcaggggcagctgt

SEQ ID NO: 609688 - DNA, 33 bp, Homo sapien
gctctcgtctacatccgaagcaggggcagctgt

SEQ ID NO: 609689 - DNA, 33 bp, Homo sapien
ataggcagcacctattcaacaggatgctgactc

SEQ ID NO: 609690 - DNA, 33 bp, Homo sapien
ataggcagcacctattgaacaggatgctgactc

SEQ ID NO: 609691 - DNA, 33 bp, Homo sapien
aggagagctgggcgcacagtcagcacccaggac

SEQ ID NO: 609692 - DNA, 33 bp, Homo sapien
aggagagctgggcgcagagtcagcacccaggac

SEQ ID NO: 609693 - DNA, 33 bp, Homo sapien
gacgcccacgtcgtacaaaagtgatggtagagg

SEQ ID NO: 609694 - DNA, 33 bp, Homo sapien
gacgcccacgtcgtactaaagtgatggtagagg

SEQ ID NO: 609695 - DNA, 33 bp, Homo sapien
cctgtaagatgggacactgtcattcccaagcct

SEQ ID NO: 609696 - DNA, 33 bp, Homo sapien
cctgtaagatgggacagtgtcattcccaagcct

SEQ ID NO: 609697 - DNA, 33 bp, Homo sapien
tttaattgattggaaagatgaagctgatcctct

SEQ ID NO: 609698 - DNA, 33 bp, Homo sapien
tttaattgattggaaatatgaagctgatcctct

SEQ ID NO: 609699 - DNA, 33 bp, Homo sapien
acggaggagaagcctccattttcgcagatctta

SEQ ID NO: 609700 - DNA, 33 bp, Homo sapien
acggaggagaagcctctattttcgcagatctta

SEQ ID NO: 609701 - DNA, 33 bp, Homo sapien
aacacgagtgcaggccaacctgggcgtcccgag

SEQ ID NO: 609702 - DNA, 33 bp, Homo sapien
aacacgagtgcaggccgacctgggcgtcccgag

SEQ ID NO: 609703 - DNA, 33 bp, Homo sapien
cagttgagcacttttacacactagctgcaaagg

SEQ ID NO: 609704 - DNA, 33 bp, Homo sapien
cagttgagcacttttagacactagctgcaaagg

SEQ ID NO: 609705 - DNA, 33 bp, Homo sapien
tcttaaacactaaatacgcaatgaccaaacact

SEQ ID NO: 609706 - DNA, 33 bp, Homo sapien
tcttaaacactaaatatgcaatgaccaaacact

SEQ ID NO: 609707 - DNA, 33 bp, Homo sapien
ggagacttaggcaggcaaagagtttagacaggt

SEQ ID NO: 609708 - DNA, 33 bp, Homo sapien
ggagacttaggcaggccaagagtttagacaggt

SEQ ID NO: 609709 - DNA, 33 bp, Homo sapien
gaacaaggccacttagccctcacaggccagggt

SEQ ID NO: 609710 - DNA, 33 bp, Homo sapien
gaacaaggccacttagtcctcacaggccagggt

SEQ ID NO: 609711 - DNA, 33 bp, Homo sapien
tatggtcgataaagagacaaataatggatgaac

SEQ ID NO: 609712 - DNA, 33 bp, Homo sapien
tatggtcgataaagagtcaaataatggatgaac

SEQ ID NO: 609713 - DNA, 33 bp, Homo sapien
ccaaatgtgttactgaaaaccaactgcctgaag

SEQ ID NO: 609714 - DNA, 33 bp, Homo sapien
ccaaatgtgttactgagaaccaactgcctgaag

SEQ ID NO: 609715 - DNA, 33 bp, Homo sapien
gaaaccagcctcagaaaacatctggaaaaggat

SEQ ID NO: 609716 - DNA, 33 bp, Homo sapien
gaaaccagcctcagaagacatctggaaaaggat

SEQ ID NO: 609717 - DNA, 33 bp, Homo sapien
agtggccgttatagaacggtgtggtatttgcat

SEQ ID NO: 609718 - DNA, 33 bp, Homo sapien
agtggccgttatagaatggtgtggtatttgcat

SEQ ID NO: 609719 - DNA, 33 bp, Homo sapien
cctcctgcagggctgcactgatttctgagggat

SEQ ID NO: 609720 - DNA, 33 bp, Homo sapien
cctcctgcagggctgcgctgatttctgagggat

SEQ ID NO: 609721 - DNA, 33 bp, Homo sapien
ccccactgatgaatgccgaagtgtttcccgtca

SEQ ID NO: 609722 - DNA, 33 bp, Homo sapien
ccccactgatgaatgctgaagtgtttcccgtca

SEQ ID NO: 609723 - DNA, 33 bp, Homo sapien
tccatcattataaagactcctcatattggcctg

SEQ ID NO: 609724 - DNA, 33 bp, Homo sapien
tccatcattataaagattcctcatattggcctg

SEQ ID NO: 609725 - DNA, 33 bp, Homo sapien
caacagcatctttaacgggcataatggaatctg

SEQ ID NO: 609726 - DNA, 33 bp, Homo sapien
caacagcatctttaactggcataatggaatctg

SEQ ID NO: 609727 - DNA, 33 bp, Homo sapien
aggcagctgcgggagaagagcaaacacgttgcc

SEQ ID NO: 609728 - DNA, 33 bp, Homo sapien
aggcagctgcgggagatgagcaaacacgttgcc

SEQ ID NO: 609729 - DNA, 33 bp, Homo sapien
gtgtcgtggcagatacaaggtctcacggaagtc

SEQ ID NO: 609730 - DNA, 33 bp, Homo sapien
gtgtcgtggcagataccaggtctcacggaagtc

SEQ ID NO: 609731 - DNA, 33 bp, Homo sapien
atctctccctgtgaacactgcgcccggagcaaa

SEQ ID NO: 609732 - DNA, 33 bp, Homo sapien
atctctccctgtgaactctgcgcccggagcaaa

SEQ ID NO: 609733 - DNA, 33 bp, Homo sapien
tgcattttgtgggtaaaaaagccagagctgctg

SEQ ID NO: 609734 - DNA, 33 bp, Homo sapien
tgcattttgtgggtaacaaagccagagctgctg

SEQ ID NO: 609735 - DNA, 33 bp, Homo sapien
tgtgcacgtccaccaccgaacatcactctatgc

SEQ ID NO: 609736 - DNA, 33 bp, Homo sapien
tgtgcacgtccaccactgaacatcactctatgc

SEQ ID NO: 609737 - DNA, 33 bp, Homo sapien
ccaggctgttatgcacaaaagcagcacccaggg

SEQ ID NO: 609738 - DNA, 33 bp, Homo sapien
ccaggctgttatgcacgaaagcagcacccaggg

SEQ ID NO: 609739 - DNA, 33 bp, Homo sapien
gtgagccgctgaccaacgtctttatttatattc

SEQ ID NO: 609740 - DNA, 33 bp, Homo sapien
gtgagccgctgaccaatgtctttatttatattc

SEQ ID NO: 609741 - DNA, 33 bp, Homo sapien
gttgccctaactcccactgctttacagaaagtt

SEQ ID NO: 609742 - DNA, 33 bp, Homo sapien
gttgccctaactcccattgctttacagaaagtt

SEQ ID NO: 609743 - DNA, 33 bp, Homo sapien
tagtgatatcggagttcaaattacttgaaatag

SEQ ID NO: 609744 - DNA, 33 bp, Homo sapien
tagtgatatcggagtttaaattacttgaaatag

SEQ ID NO: 609745 - DNA, 33 bp, Homo sapien
cgcagggcgtatgaaaacgtcacgaaacccgtt

SEQ ID NO: 609746 - DNA, 33 bp, Homo sapien
cgcagggcgtatgaaaccgtcacgaaacccgtt

SEQ ID NO: 609747 - DNA, 33 bp, Homo sapien
tggtgtgatcatactcaatttagcctggaactc

SEQ ID NO: 609748 - DNA, 33 bp, Homo sapien
tggtgtgatcatactcgatttagcctggaactc

SEQ ID NO: 609749 - DNA, 33 bp, Homo sapien
gaatacagtcatcacaagcggtagacaggcaat

SEQ ID NO: 609750 - DNA, 33 bp, Homo sapien
gaatacagtcatcacaggcggtagacaggcaat

SEQ ID NO: 609751 - DNA, 33 bp, Homo sapien
ctgcctctaaacccgaagtcttcaagcctgact

SEQ ID NO: 609752 - DNA, 33 bp, Homo sapien
ctgcctctaaacccgacgtcttcaagcctgact

SEQ ID NO: 609753 - DNA, 33 bp, Homo sapien
cctgcaggcggccttcacaatatctgacgttag

SEQ ID NO: 609754 - DNA, 33 bp, Homo sapien
cctgcaggcggccttcgcaatatctgacgttag

SEQ ID NO: 609755 - DNA, 33 bp, Homo sapien
cggtctgcagctcagacacctttaggggtagcc

SEQ ID NO: 609756 - DNA, 33 bp, Homo sapien
cggtctgcagctcagagacctttaggggtagcc

SEQ ID NO: 609757 - DNA, 33 bp, Homo sapien
tttgcatagactaaaacccaggaaggacaggca

SEQ ID NO: 609758 - DNA, 33 bp, Homo sapien
tttgcatagactaaaatccaggaaggacaggca

SEQ ID NO: 609759 - DNA, 33 bp, Homo sapien
gttcccttgtttgtgacgtggcaaccttgatgg

SEQ ID NO: 609760 - DNA, 33 bp, Homo sapien
gttcccttgtttgtgatgtggcaaccttgatgg

SEQ ID NO: 609761 - DNA, 33 bp, Homo sapien
ggtgccgtcggccaagaaaggaaggtccagcag

SEQ ID NO: 609762 - DNA, 33 bp, Homo sapien
ggtgccgtcggccaagtaaggaaggtccagcag

SEQ ID NO: 609763 - DNA, 33 bp, Homo sapien
atatttcaaaaatgacgaaatctgagtggtagg

SEQ ID NO: 609764 - DNA, 33 bp, Homo sapien
atatttcaaaaatgactaaatctgagtggtagg

SEQ ID NO: 609765 - DNA, 33 bp, Homo sapien
accttgctttaacaaacgtgtctttgatattga

SEQ ID NO: 609766 - DNA, 33 bp, Homo sapien
accttgctttaacaaatgtgtctttgatattga

SEQ ID NO: 609767 - DNA, 33 bp, Homo sapien
tttgtagtctccagaactgcgaatgaaataaat

SEQ ID NO: 609768 - DNA, 33 bp, Homo sapien
tttgtagtctccagaagtgcgaatgaaataaat

SEQ ID NO: 609769 - DNA, 33 bp, Homo sapien
attggtcagaaagcgaacacaggcagtatgaaa

SEQ ID NO: 609770 - DNA, 33 bp, Homo sapien
attggtcagaaagcgaccacaggcagtatgaaa

SEQ ID NO: 609771 - DNA, 33 bp, Homo sapien
gtcacatccaaaatgaaggaagttttatccaaa

SEQ ID NO: 609772 - DNA, 33 bp, Homo sapien
gtcacatccaaaatgacggaagttttatccaaa

SEQ ID NO: 609773 - DNA, 33 bp, Homo sapien
caattcaactcaacaacgaggaagtgaatttcc

SEQ ID NO: 609774 - DNA, 33 bp, Homo sapien
caattcaactcaacaatgaggaagtgaatttcc

SEQ ID NO: 609775 - DNA, 33 bp, Homo sapien
cacttcccattgcctgcagaggtcactgaaaga

SEQ ID NO: 609776 - DNA, 33 bp, Homo sapien
cacttcccattgcctgtagaggtcactgaaaga

SEQ ID NO: 609777 - DNA, 33 bp, Homo sapien
ctatgagacataagacgcaacaactgtgccatg

SEQ ID NO: 609778 - DNA, 33 bp, Homo sapien
ctatgagacataagactcaacaactgtgccatg

SEQ ID NO: 609779 - DNA, 33 bp, Homo sapien
tgtgccatgtgcttggacagtttaatgcaaata

SEQ ID NO: 609780 - DNA, 33 bp, Homo sapien
tgtgccatgtgcttgggcagtttaatgcaaata

SEQ ID NO: 609781 - DNA, 33 bp, Homo sapien
aaaaaagagagccttaacattaaataaatcaat

SEQ ID NO: 609782 - DNA, 33 bp, Homo sapien
aaaaaagagagccttagcattaaataaatcaat

SEQ ID NO: 609783 - DNA, 33 bp, Homo sapien
tttaaaatgaaagtgcaaagttctgtgtatgag

SEQ ID NO: 609784 - DNA, 33 bp, Homo sapien
tttaaaatgaaagtgcgaagttctgtgtatgag

SEQ ID NO: 609785 - DNA, 33 bp, Homo sapien
cttcttgggcattggaagattctagtgtttttc

SEQ ID NO: 609786 - DNA, 33 bp, Homo sapien
cttcttgggcattggacgattctagtgtttttc

SEQ ID NO: 609787 - DNA, 33 bp, Homo sapien
acgtggtttggggacaaaagtctgtctacatgt

SEQ ID NO: 609788 - DNA, 33 bp, Homo sapien
acgtggtttggggacacaagtctgtctacatgt

SEQ ID NO: 609789 - DNA, 33 bp, Homo sapien
tggggaagaagcagggccaagatcagaacgtgg

SEQ ID NO: 609790 - DNA, 33 bp, Homo sapien
tggggaagaagcagggtcaagatcagaacgtgg

SEQ ID NO: 609791 - DNA, 33 bp, Homo sapien
tcttcccctctccccaaactgacgaaggcatca

SEQ ID NO: 609792 - DNA, 33 bp, Homo sapien
tcttcccctctccccagactgacgaaggcatca

SEQ ID NO: 609793 - DNA, 33 bp, Homo sapien
cttctgctggaaccacagccggtccaaaaggct

SEQ ID NO: 609794 - DNA, 33 bp, Homo sapien
cttctgctggaaccacggccggtccaaaaggct

SEQ ID NO: 609795 - DNA, 33 bp, Homo sapien
tggaatttcagataaacaacccatcgttgtcgg

SEQ ID NO: 609796 - DNA, 33 bp, Homo sapien
tggaatttcagataaataacccatcgttgtcgg

SEQ ID NO: 609797 - DNA, 33 bp, Homo sapien
gacaagtatagcccagacaataattgcaatgcc

SEQ ID NO: 609798 - DNA, 33 bp, Homo sapien
gacaagtatagcccagccaataattgcaatgcc

SEQ ID NO: 609799 - DNA, 33 bp, Homo sapien
ggcttcagatgaacaagggacaggtttctagac

SEQ ID NO: 609800 - DNA, 33 bp, Homo sapien
ggcttcagatgaacaatggacaggtttctagac

SEQ ID NO: 609801 - DNA, 33 bp, Homo sapien
ttctggtgtttccgaactgggggctttattgag

SEQ ID NO: 609802 - DNA, 33 bp, Homo sapien
ttctggtgtttccgaattgggggctttattgag

SEQ ID NO: 609803 - DNA, 33 bp, Homo sapien
catcatctatctggagaaagcccaggctgagaa

SEQ ID NO: 609804 - DNA, 33 bp, Homo sapien
catcatctatctggaggaagcccaggctgagaa

SEQ ID NO: 609805 - DNA, 33 bp, Homo sapien
tcgtcctctgaacctccgagcgtctgggcttct

SEQ ID NO: 609806 - DNA, 33 bp, Homo sapien
tcgtcctctgaacctctgagcgtctgggcttct

SEQ ID NO: 609807 - DNA, 33 bp, Homo sapien
tacttcaaggctgttacgctcaggatcattaga

SEQ ID NO: 609808 - DNA, 33 bp, Homo sapien
tacttcaaggctgttatgctcaggatcattaga

SEQ ID NO: 609809 - DNA, 33 bp, Homo sapien
tgcaattgaggcaacaactctcgtacacgggct

SEQ ID NO: 609810 - DNA, 33 bp, Homo sapien
tgcaattgaggcaacagctctcgtacacgggct

SEQ ID NO: 609811 - DNA, 33 bp, Homo sapien
gggaacactgtgctcccagactcaggtcagcgt

SEQ ID NO: 609812 - DNA, 33 bp, Homo sapien
gggaacactgtgctccgagactcaggtcagcgt

SEQ ID NO: 609813 - DNA, 33 bp, Homo sapien
agtgaccttggctgaaacacctcatccttcact

SEQ ID NO: 609814 - DNA, 33 bp, Homo sapien
agtgaccttggctgaaccacctcatccttcact

SEQ ID NO: 609815 - DNA, 33 bp, Homo sapien
ttcctctcccttacaaagcctttttacatcgct

SEQ ID NO: 609816 - DNA, 33 bp, Homo sapien
ttcctctcccttacaaggcctttttacatcgct

SEQ ID NO: 609817 - DNA, 33 bp, Homo sapien
gacctttcccctgcaacatatctgaggaagtgc

SEQ ID NO: 609818 - DNA, 33 bp, Homo sapien
gacctttcccctgcaagatatctgaggaagtgc

SEQ ID NO: 609819 - DNA, 33 bp, Homo sapien
tttggtacaacagttacggaggaggtggtgtga

SEQ ID NO: 609820 - DNA, 33 bp, Homo sapien
tttggtacaacagttatggaggaggtggtgtga

SEQ ID NO: 609821 - DNA, 33 bp, Homo sapien
tgacaatctgggaatgcattatcttcaataagt

SEQ ID NO: 609822 - DNA, 33 bp, Homo sapien
tgacaatctgggaatgtattatcttcaataagt

SEQ ID NO: 609823 - DNA, 33 bp, Homo sapien
gatacctggatgaacacggccaatttcacctac

SEQ ID NO: 609824 - DNA, 33 bp, Homo sapien
gatacctggatgaacatggccaatttcacctac

SEQ ID NO: 609825 - DNA, 33 bp, Homo sapien
tattccaagcttcttacaggtttacaggtgact

SEQ ID NO: 609826 - DNA, 33 bp, Homo sapien
tattccaagcttcttagaggtttacaggtgact

SEQ ID NO: 609827 - DNA, 33 bp, Homo sapien
aagtcataaactcctcagaaaggccaggcggag

SEQ ID NO: 609828 - DNA, 33 bp, Homo sapien
aagtcataaactcctcggaaaggccaggcggag

SEQ ID NO: 609829 - DNA, 33 bp, Homo sapien
gactgccccttgctaacgtgtttctgtaaacga

SEQ ID NO: 609830 - DNA, 33 bp, Homo sapien
gactgccccttgctaatgtgtttctgtaaacga

SEQ ID NO: 609831 - DNA, 33 bp, Homo sapien
aggctgtgaagattaacccagaactaagtaaag

SEQ ID NO: 609832 - DNA, 33 bp, Homo sapien
aggctgtgaagattaatccagaactaagtaaag

SEQ ID NO: 609833 - DNA, 33 bp, Homo sapien
aagtacaaactaggacacaatacactgatgatt

SEQ ID NO: 609834 - DNA, 33 bp, Homo sapien
aagtacaaactaggactcaatacactgatgatt

SEQ ID NO: 609835 - DNA, 33 bp, Homo sapien
tctggaaaaaatactacgttgttcaattgttct

SEQ ID NO: 609836 - DNA, 33 bp, Homo sapien
tctggaaaaaatactatgttgttcaattgttct

SEQ ID NO: 609837 - DNA, 33 bp, Homo sapien
aattgaggcactacgcgatgagaacggcatgtt

SEQ ID NO: 609838 - DNA, 33 bp, Homo sapien
aattgaggcactacgctatgagaacggcatgtt

SEQ ID NO: 609839 - DNA, 33 bp, Homo sapien
gcgaggcttacaggaagccaagaggaagtgttg

SEQ ID NO: 609840 - DNA, 33 bp, Homo sapien
gcgaggcttacaggaatccaagaggaagtgttg

SEQ ID NO: 609841 - DNA, 33 bp, Homo sapien
gagctgagcttcctcacctagaattgctgaaca

SEQ ID NO: 609842 - DNA, 33 bp, Homo sapien
gagctgagcttcctcatctagaattgctgaaca

SEQ ID NO: 609843 - DNA, 33 bp, Homo sapien
tgtaatcttagtggcacgaacaaaacagataat

SEQ ID NO: 609844 - DNA, 33 bp, Homo sapien
tgtaatcttagtggcaggaacaaaacagataat

SEQ ID NO: 609845 - DNA, 33 bp, Homo sapien
gggtctgtgagtgcagaaatgtcatacgcttgg

SEQ ID NO: 609846 - DNA, 33 bp, Homo sapien
gggtctgtgagtgcaggaatgtcatacgcttgg

SEQ ID NO: 609847 - DNA, 33 bp, Homo sapien
ttcctcccaagacttacgcaaagaggccagagt

SEQ ID NO: 609848 - DNA, 33 bp, Homo sapien
ttcctcccaagacttatgcaaagaggccagagt

SEQ ID NO: 609849 - DNA, 33 bp, Homo sapien
gattatgtgtgaagaaaattcaaggtaatctac

SEQ ID NO: 609850 - DNA, 33 bp, Homo sapien
gattatgtgtgaagaacattcaaggtaatctac

SEQ ID NO: 609851 - DNA, 33 bp, Homo sapien
gagtggtttctcatcacattcccagccccggct

SEQ ID NO: 609852 - DNA, 33 bp, Homo sapien
gagtggtttctcatcatattcccagccccggct

SEQ ID NO: 609853 - DNA, 33 bp, Homo sapien
caccctctgaataagcgcctccccaccagtgtg

SEQ ID NO: 609854 - DNA, 33 bp, Homo sapien
caccctctgaataagctcctccccaccagtgtg

SEQ ID NO: 609855 - DNA, 33 bp, Homo sapien
atcagcatgttttggacacaatgtctgtgctag

SEQ ID NO: 609856 - DNA, 33 bp, Homo sapien
atcagcatgttttggatacaatgtctgtgctag

SEQ ID NO: 609857 - DNA, 33 bp, Homo sapien
catctctcttctgagccctttccaacaaagggc

SEQ ID NO: 609858 - DNA, 33 bp, Homo sapien
catctctcttctgagcgctttccaacaaagggc

SEQ ID NO: 609859 - DNA, 33 bp, Homo sapien
aaggccacagtccctgcaacggatgaggaggga

SEQ ID NO: 609860 - DNA, 33 bp, Homo sapien
aaggccacagtccctgtaacggatgaggaggga

SEQ ID NO: 609861 - DNA, 33 bp, Homo sapien
ataagcagtctggctcgcgtccaagcctgggta

SEQ ID NO: 609862 - DNA, 33 bp, Homo sapien
ataagcagtctggctctcgtccaagcctgggta

SEQ ID NO: 609863 - DNA, 33 bp, Homo sapien
attactgtaactactgcagcatgttatcctatt

SEQ ID NO: 609864 - DNA, 33 bp, Homo sapien
attactgtaactactgtagcatgttatcctatt

SEQ ID NO: 609865 - DNA, 33 bp, Homo sapien
gtggctagaaatagaaagacatcccgtgttggc

SEQ ID NO: 609866 - DNA, 33 bp, Homo sapien
gtggctagaaatagaaggacatcccgtgttggc

SEQ ID NO: 609867 - DNA, 33 bp, Homo sapien
gggatcataaagaccactctggcaaggtgccag

SEQ ID NO: 609868 - DNA, 33 bp, Homo sapien
gggatcataaagaccattctggcaaggtgccag

SEQ ID NO: 609869 - DNA, 33 bp, Homo sapien
tcaacaccatgcctacagattgcctcagccaaa

SEQ ID NO: 609870 - DNA, 33 bp, Homo sapien
tcaacaccatgcctacggattgcctcagccaaa

SEQ ID NO: 609871 - DNA, 33 bp, Homo sapien
cgtgtgccttgctctgaaagttcatcagactca

SEQ ID NO: 609872 - DNA, 33 bp, Homo sapien
cgtgtgccttgctctgtaagttcatcagactca

SEQ ID NO: 609873 - DNA, 33 bp, Homo sapien
agagcccgcaaagtgaagactattatggcagga

SEQ ID NO: 609874 - DNA, 33 bp, Homo sapien
agagcccgcaaagtgaggactattatggcagga

SEQ ID NO: 609875 - DNA, 33 bp, Homo sapien
actcatcgcccaagacactgaggtagaagcttt

SEQ ID NO: 609876 - DNA, 33 bp, Homo sapien
actcatcgcccaagacgctgaggtagaagcttt

SEQ ID NO: 609877 - DNA, 33 bp, Homo sapien
gcaggccaagctggcaagatggataaagggttg

SEQ ID NO: 609878 - DNA, 33 bp, Homo sapien
gcaggccaagctggcaggatggataaagggttg

SEQ ID NO: 609879 - DNA, 33 bp, Homo sapien
ccagtcctgtgggcaacggtccctcctgatccc

SEQ ID NO: 609880 - DNA, 33 bp, Homo sapien
ccagtcctgtgggcaatggtccctcctgatccc

SEQ ID NO: 609881 - DNA, 33 bp, Homo sapien
ggagaccctcctggcacgacttctctatccacc

SEQ ID NO: 609882 - DNA, 33 bp, Homo sapien
ggagaccctcctggcatgacttctctatccacc

SEQ ID NO: 609883 - DNA, 33 bp, Homo sapien
cctctgtgagaagaagcctcccagggaatgtca

SEQ ID NO: 609884 - DNA, 33 bp, Homo sapien
cctctgtgagaagaaggctcccagggaatgtca

SEQ ID NO: 609885 - DNA, 33 bp, Homo sapien
ttgtcagtggagctcaagtggttggaaggtgac

SEQ ID NO: 609886 - DNA, 33 bp, Homo sapien
ttgtcagtggagctcaggtggttggaaggtgac

SEQ ID NO: 609887 - DNA, 33 bp, Homo sapien
aaacctctttccttcaaaaattactcggtctca

SEQ ID NO: 609888 - DNA, 33 bp, Homo sapien
aaacctctttccttcataaattactcggtctca

SEQ ID NO: 609889 - DNA, 33 bp, Homo sapien
agcagcatttactcaacggcttccaagacacag

SEQ ID NO: 609890 - DNA, 33 bp, Homo sapien
agcagcatttactcaagggcttccaagacacag

SEQ ID NO: 609891 - DNA, 33 bp, Homo sapien
ggtcctggagataaggacagacgacccagaata

SEQ ID NO: 609892 - DNA, 33 bp, Homo sapien
ggtcctggagataagggcagacgacccagaata

SEQ ID NO: 609893 - DNA, 33 bp, Homo sapien
agtattagtagggtgcactccacagatagcact

SEQ ID NO: 609894 - DNA, 33 bp, Homo sapien
agtattagtagggtgcgctccacagatagcact

SEQ ID NO: 609895 - DNA, 33 bp, Homo sapien
ccatgactcatccatccacttacccaactcatt

SEQ ID NO: 609896 - DNA, 33 bp, Homo sapien
ccatgactcatccatctacttacccaactcatt

SEQ ID NO: 609897 - DNA, 33 bp, Homo sapien
taaattagggaacaacagaatttataaacattg

SEQ ID NO: 609898 - DNA, 33 bp, Homo sapien
taaattagggaacaactgaatttataaacattg

SEQ ID NO: 609899 - DNA, 33 bp, Homo sapien
caccagcacaagctgactaaaccccaaagagct

SEQ ID NO: 609900 - DNA, 33 bp, Homo sapien
caccagcacaagctgattaaaccccaaagagct

SEQ ID NO: 609901 - DNA, 33 bp, Homo sapien
gctggtgtggggaagccgcgttatgatctgata

SEQ ID NO: 609902 - DNA, 33 bp, Homo sapien
gctggtgtggggaagctgcgttatgatctgata

SEQ ID NO: 609903 - DNA, 33 bp, Homo sapien
ctccccacttctctctgaaagctggatgcagct

SEQ ID NO: 609904 - DNA, 33 bp, Homo sapien
ctccccacttctctcttaaagctggatgcagct

SEQ ID NO: 609905 - DNA, 33 bp, Homo sapien
ctcctcccaggcagaaacacaagagcacccgtc

SEQ ID NO: 609906 - DNA, 33 bp, Homo sapien
ctcctcccaggcagaaccacaagagcacccgtc

SEQ ID NO: 609907 - DNA, 33 bp, Homo sapien
gaggaacgccaatagcaatgaaaccagattctt

SEQ ID NO: 609908 - DNA, 33 bp, Homo sapien
gaggaacgccaatagcgatgaaaccagattctt

SEQ ID NO: 609909 - DNA, 33 bp, Homo sapien
tttgatccactgtgacaatctccatcttttaat

SEQ ID NO: 609910 - DNA, 33 bp, Homo sapien
tttgatccactgtgactatctccatcttttaat

SEQ ID NO: 609911 - DNA, 33 bp, Homo sapien
ccattgatctacttgccaatgggtttattgcag

SEQ ID NO: 609912 - DNA, 33 bp, Homo sapien
ccattgatctacttgctaatgggtttattgcag

SEQ ID NO: 609913 - DNA, 33 bp, Homo sapien
catttattcatagccaaataatgttcactacat

SEQ ID NO: 609914 - DNA, 33 bp, Homo sapien
catttattcatagccagataatgttcactacat

SEQ ID NO: 609915 - DNA, 33 bp, Homo sapien
gagggggtgttgggaaatgattggattccagat

SEQ ID NO: 609916 - DNA, 33 bp, Homo sapien
gagggggtgttgggaagtgattggattccagat

SEQ ID NO: 609917 - DNA, 33 bp, Homo sapien
gttggggctgtgctccaactcgaggctagtttt

SEQ ID NO: 609918 - DNA, 33 bp, Homo sapien
gttggggctgtgctccgactcgaggctagtttt

SEQ ID NO: 609919 - DNA, 33 bp, Homo sapien
gaggatatttttcttaaagacccaaatgtcaga

SEQ ID NO: 609920 - DNA, 33 bp, Homo sapien
gaggatatttttcttagagacccaaatgtcaga

SEQ ID NO: 609921 - DNA, 33 bp, Homo sapien
accttcaaatggataaaggccatagggagctta

SEQ ID NO: 609922 - DNA, 33 bp, Homo sapien
accttcaaatggataatggccatagggagctta

SEQ ID NO: 609923 - DNA, 33 bp, Homo sapien
gtctgagacgttaaggcacatatctgtgtgaaa

SEQ ID NO: 609924 - DNA, 33 bp, Homo sapien
gtctgagacgttaaggtacatatctgtgtgaaa

SEQ ID NO: 609925 - DNA, 33 bp, Homo sapien
agagataagcctggtccagagcacagccggcct

SEQ ID NO: 609926 - DNA, 33 bp, Homo sapien
agagataagcctggtcgagagcacagccggcct

SEQ ID NO: 609927 - DNA, 33 bp, Homo sapien
aaaaggcagccataagacagtccgcaggcaggc

SEQ ID NO: 609928 - DNA, 33 bp, Homo sapien
aaaaggcagccataaggcagtccgcaggcaggc

SEQ ID NO: 609929 - DNA, 33 bp, Homo sapien
caggaacagttatcaactcatccctgtctcctc

SEQ ID NO: 609930 - DNA, 33 bp, Homo sapien
caggaacagttatcaattcatccctgtctcctc

SEQ ID NO: 609931 - DNA, 33 bp, Homo sapien
tcacaccaaagactaacatcagaaatgtgctgg

SEQ ID NO: 609932 - DNA, 33 bp, Homo sapien
tcacaccaaagactaatatcagaaatgtgctgg

SEQ ID NO: 609933 - DNA, 33 bp, Homo sapien
taacattaatcatcaccggtcatttctagtttc

SEQ ID NO: 609934 - DNA, 33 bp, Homo sapien
taacattaatcatcactggtcatttctagtttc

SEQ ID NO: 609935 - DNA, 33 bp, Homo sapien
caacagtgacccccaacgttaccagaactctga

SEQ ID NO: 609936 - DNA, 33 bp, Homo sapien
caacagtgacccccaatgttaccagaactctga

SEQ ID NO: 609937 - DNA, 33 bp, Homo sapien
aagtttcaaatgaacacgtcgagttccaggaaa

SEQ ID NO: 609938 - DNA, 33 bp, Homo sapien
aagtttcaaatgaacatgtcgagttccaggaaa

SEQ ID NO: 609939 - DNA, 33 bp, Homo sapien
gctgtcacaggcaagacgctgcagacccaccgg

SEQ ID NO: 609940 - DNA, 33 bp, Homo sapien
gctgtcacaggcaagatgctgcagacccaccgg

SEQ ID NO: 609941 - DNA, 33 bp, Homo sapien
gagtgacctgtgccagaaaggtggtgcttcgga

SEQ ID NO: 609942 - DNA, 33 bp, Homo sapien
gagtgacctgtgccaggaaggtggtgcttcgga

SEQ ID NO: 609943 - DNA, 33 bp, Homo sapien
tttcttacaggttttcaaagctagtagtggggg

SEQ ID NO: 609944 - DNA, 33 bp, Homo sapien
tttcttacaggttttccaagctagtagtggggg

SEQ ID NO: 609945 - DNA, 33 bp, Homo sapien
attaccggaaaaaaatcagctcaaaatccgtca

SEQ ID NO: 609946 - DNA, 33 bp, Homo sapien
attaccggaaaaaaattagctcaaaatccgtca

SEQ ID NO: 609947 - DNA, 33 bp, Homo sapien
atcagccactttagaactgcagaggcatttcca

SEQ ID NO: 609948 - DNA, 33 bp, Homo sapien
atcagccactttagaattgcagaggcatttcca

SEQ ID NO: 609949 - DNA, 33 bp, Homo sapien
agctgatttctgagacaatcctagttagtgaca

SEQ ID NO: 609950 - DNA, 33 bp, Homo sapien
agctgatttctgagacgatcctagttagtgaca

SEQ ID NO: 609951 - DNA, 33 bp, Homo sapien
tgcacgaaggtaagagaagaccaggcagacgtg

SEQ ID NO: 609952 - DNA, 33 bp, Homo sapien
tgcacgaaggtaagaggagaccaggcagacgtg

SEQ ID NO: 609953 - DNA, 33 bp, Homo sapien
atcaggttattgtcaacgactttctaaactgtc

SEQ ID NO: 609954 - DNA, 33 bp, Homo sapien
atcaggttattgtcaatgactttctaaactgtc

SEQ ID NO: 609955 - DNA, 33 bp, Homo sapien
agacagcaggaaagaacgccgataagagagaga

SEQ ID NO: 609956 - DNA, 33 bp, Homo sapien
agacagcaggaaagaatgccgataagagagaga

SEQ ID NO: 609957 - DNA, 33 bp, Homo sapien
cacagttattccaaagcctgtttcctcttattt

SEQ ID NO: 609958 - DNA, 33 bp, Homo sapien
cacagttattccaaaggctgtttcctcttattt

SEQ ID NO: 609959 - DNA, 33 bp, Homo sapien
tcacccacctgaacacacagcagccgagatgac

SEQ ID NO: 609960 - DNA, 33 bp, Homo sapien
tcacccacctgaacactcagcagccgagatgac

SEQ ID NO: 609961 - DNA, 33 bp, Homo sapien
ctactttgcacataagcccaagtaaacctgtga

SEQ ID NO: 609962 - DNA, 33 bp, Homo sapien
ctactttgcacataagtccaagtaaacctgtga

SEQ ID NO: 609963 - DNA, 33 bp, Homo sapien
atatacctcttattacaacctggaaattaccac

SEQ ID NO: 609964 - DNA, 33 bp, Homo sapien
atatacctcttattaccacctggaaattaccac

SEQ ID NO: 609965 - DNA, 33 bp, Homo sapien
tattgatatttaactcccactctgacagcaaga

SEQ ID NO: 609966 - DNA, 33 bp, Homo sapien
tattgatatttaactctcactctgacagcaaga

SEQ ID NO: 609967 - DNA, 33 bp, Homo sapien
agacggctctcaccgaagagaggagtgggctgt

SEQ ID NO: 609968 - DNA, 33 bp, Homo sapien
agacggctctcaccgaggagaggagtgggctgt

SEQ ID NO: 609969 - DNA, 33 bp, Homo sapien
gagggtcaagttgaaactaggagagattaataa

SEQ ID NO: 609970 - DNA, 33 bp, Homo sapien
gagggtcaagttgaaagtaggagagattaataa

SEQ ID NO: 609971 - DNA, 33 bp, Homo sapien
agattatcaccactaaacatgccttacacaaag

SEQ ID NO: 609972 - DNA, 33 bp, Homo sapien
agattatcaccactaagcatgccttacacaaag

SEQ ID NO: 609973 - DNA, 33 bp, Homo sapien
tgaattgcaggtgcccacaggtgaatcagcaga

SEQ ID NO: 609974 - DNA, 33 bp, Homo sapien
tgaattgcaggtgcccgcaggtgaatcagcaga

SEQ ID NO: 609975 - DNA, 33 bp, Homo sapien
tctttccctgccaggcacagctcgagtgaattg

SEQ ID NO: 609976 - DNA, 33 bp, Homo sapien
tctttccctgccaggcgcagctcgagtgaattg

SEQ ID NO: 609977 - DNA, 33 bp, Homo sapien
tctcaggaaactcccccaattgtgcctgtgggt

SEQ ID NO: 609978 - DNA, 33 bp, Homo sapien
tctcaggaaactcccctaattgtgcctgtgggt

SEQ ID NO: 609979 - DNA, 33 bp, Homo sapien
gggaacattgctacccaagtggaaacagtaagc

SEQ ID NO: 609980 - DNA, 33 bp, Homo sapien
gggaacattgctacccgagtggaaacagtaagc

SEQ ID NO: 609981 - DNA, 33 bp, Homo sapien
ggccggttccataaaaccagcacaggtgtaatc

SEQ ID NO: 609982 - DNA, 33 bp, Homo sapien
ggccggttccataaaatcagcacaggtgtaatc

SEQ ID NO: 609983 - DNA, 33 bp, Homo sapien
ttgagcgctgtctgtacacctggcagtatcccc

SEQ ID NO: 609984 - DNA, 33 bp, Homo sapien
ttgagcgctgtctgtatacctggcagtatcccc

SEQ ID NO: 609985 - DNA, 33 bp, Homo sapien
ggcttctataaggatcccacgagccactctgta

SEQ ID NO: 609986 - DNA, 33 bp, Homo sapien
ggcttctataaggatctcacgagccactctgta

SEQ ID NO: 609987 - DNA, 33 bp, Homo sapien
agagaattgctaacaaacctacactacaagaaa

SEQ ID NO: 609988 - DNA, 33 bp, Homo sapien
agagaattgctaacaagcctacactacaagaaa

SEQ ID NO: 609989 - DNA, 33 bp, Homo sapien
actcaaacctttctccacaacagtaaacaacca

SEQ ID NO: 609990 - DNA, 33 bp, Homo sapien
actcaaacctttctccgcaacagtaaacaacca

SEQ ID NO: 609991 - DNA, 33 bp, Homo sapien
ttctgttaactcaatccgataaatggatgcctt

SEQ ID NO: 609992 - DNA, 33 bp, Homo sapien
ttctgttaactcaatctgataaatggatgcctt

SEQ ID NO: 609993 - DNA, 33 bp, Homo sapien
atactggcctcaaaacaattcgggaagtatctt

SEQ ID NO: 609994 - DNA, 33 bp, Homo sapien
atactggcctcaaaacgattcgggaagtatctt

SEQ ID NO: 609995 - DNA, 33 bp, Homo sapien
aacttaagggcacctcgatcttagatttccagg

SEQ ID NO: 609996 - DNA, 33 bp, Homo sapien
aacttaagggcacctctatcttagatttccagg

SEQ ID NO: 609997 - DNA, 33 bp, Homo sapien
acaacactggaatacaatagcgatgggagtgat

SEQ ID NO: 609998 - DNA, 33 bp, Homo sapien
acaacactggaatacagtagcgatgggagtgat

SEQ ID NO: 609999 - DNA, 33 bp, Homo sapien
acaggcttgacagacccccggacatttggccag

SEQ ID NO: 610000 - DNA, 33 bp, Homo sapien
acaggcttgacagacctccggacatttggccag

SEQ ID NO: 610001 - DNA, 33 bp, Homo sapien
ctgtcaagcctgtgaccattgggcaggatgctc

SEQ ID NO: 610002 - DNA, 33 bp, Homo sapien
ctgtcaagcctgtgactattgggcaggatgctc

SEQ ID NO: 610003 - DNA, 33 bp, Homo sapien
tgcttagagaaaagccacccaggcaagggtcag

SEQ ID NO: 610004 - DNA, 33 bp, Homo sapien
tgcttagagaaaagccgcccaggcaagggtcag

SEQ ID NO: 610005 - DNA, 33 bp, Homo sapien
agagacgctcatggtacgaggagctttgatttc

SEQ ID NO: 610006 - DNA, 33 bp, Homo sapien
agagacgctcatggtaggaggagctttgatttc

SEQ ID NO: 610007 - DNA, 33 bp, Homo sapien
tttgacaagtctgagaggaacaggaaaacggcc

SEQ ID NO: 610008 - DNA, 33 bp, Homo sapien
tttgacaagtctgagatgaacaggaaaacggcc

SEQ ID NO: 610009 - DNA, 33 bp, Homo sapien
caggataattagaggaaaaaatacaacgtgtca

SEQ ID NO: 610010 - DNA, 33 bp, Homo sapien
caggataattagaggagaaaatacaacgtgtca

SEQ ID NO: 610011 - DNA, 33 bp, Homo sapien
caccttaatagtggcccgagccaaattttaaca

SEQ ID NO: 610012 - DNA, 33 bp, Homo sapien
caccttaatagtggccggagccaaattttaaca

SEQ ID NO: 610013 - DNA, 33 bp, Homo sapien
caccacattgccaaaccaaaaaattaaaaccgt

SEQ ID NO: 610014 - DNA, 33 bp, Homo sapien
caccacattgccaaactaaaaaattaaaaccgt

SEQ ID NO: 610015 - DNA, 33 bp, Homo sapien
acaacataccaaaactcactcgagaagacatag

SEQ ID NO: 610016 - DNA, 33 bp, Homo sapien
acaacataccaaaacttactcgagaagacatag

SEQ ID NO: 610017 - DNA, 33 bp, Homo sapien
agatctctattgcctaaattggtctcaaactct

SEQ ID NO: 610018 - DNA, 33 bp, Homo sapien
agatctctattgcctagattggtctcaaactct

SEQ ID NO: 610019 - DNA, 33 bp, Homo sapien
atccaagatcactgaccgcgataaaaaatgtaa

SEQ ID NO: 610020 - DNA, 33 bp, Homo sapien
atccaagatcactgactgcgataaaaaatgtaa

SEQ ID NO: 610021 - DNA, 33 bp, Homo sapien
gcagttgtttaaagcaatgacgtcatataggtc

SEQ ID NO: 610022 - DNA, 33 bp, Homo sapien
gcagttgtttaaagcagtgacgtcatataggtc

SEQ ID NO: 610023 - DNA, 33 bp, Homo sapien
cctggaaatagacgaaagctccctcgactgcaa

SEQ ID NO: 610024 - DNA, 33 bp, Homo sapien
cctggaaatagacgaaggctccctcgactgcaa

SEQ ID NO: 610025 - DNA, 33 bp, Homo sapien
tgtgaagctaaggaaccgggagaagaaggcacg

SEQ ID NO: 610026 - DNA, 33 bp, Homo sapien
tgtgaagctaaggaactgggagaagaaggcacg

SEQ ID NO: 610027 - DNA, 33 bp, Homo sapien
gtctgcactcctacccagatgatggcagagtga

SEQ ID NO: 610028 - DNA, 33 bp, Homo sapien
gtctgcactcctacccggatgatggcagagtga

SEQ ID NO: 610029 - DNA, 33 bp, Homo sapien
gtgattgtgacgagggcccagaaaggaaaaaga

SEQ ID NO: 610030 - DNA, 33 bp, Homo sapien
gtgattgtgacgagggtccagaaaggaaaaaga

SEQ ID NO: 610031 - DNA, 33 bp, Homo sapien
gcccctttcttgagcacggctatcctcagacct

SEQ ID NO: 610032 - DNA, 33 bp, Homo sapien
gcccctttcttgagcagggctatcctcagacct

SEQ ID NO: 610033 - DNA, 33 bp, Homo sapien
atgccaaaatataaggcaagaaaatgagacagc

SEQ ID NO: 610034 - DNA, 33 bp, Homo sapien
atgccaaaatataagggaagaaaatgagacagc

SEQ ID NO: 610035 - DNA, 33 bp, Homo sapien
agtcttcctactatgacatgatatgattatttt

SEQ ID NO: 610036 - DNA, 33 bp, Homo sapien
agtcttcctactatgatatgatatgattatttt

SEQ ID NO: 610037 - DNA, 33 bp, Homo sapien
ccaggaatgtagacacaaagtgcggccccccag

SEQ ID NO: 610038 - DNA, 33 bp, Homo sapien
ccaggaatgtagacaccaagtgcggccccccag

SEQ ID NO: 610039 - DNA, 33 bp, Homo sapien
gtgctgtaccggttccaatcttcgtggtggcag

SEQ ID NO: 610040 - DNA, 33 bp, Homo sapien
gtgctgtaccggttcccatcttcgtggtggcag

SEQ ID NO: 610041 - DNA, 33 bp, Homo sapien
ctaggagtgctgcattcaacccgtctactcttt

SEQ ID NO: 610042 - DNA, 33 bp, Homo sapien
ctaggagtgctgcatttaacccgtctactcttt

SEQ ID NO: 610043 - DNA, 33 bp, Homo sapien
agccagcttgtgggcaaccctggattaagaggt

SEQ ID NO: 610044 - DNA, 33 bp, Homo sapien
agccagcttgtgggcagccctggattaagaggt

SEQ ID NO: 610045 - DNA, 33 bp, Homo sapien
gaagaagaggacaaagacagtttcttatcatct

SEQ ID NO: 610046 - DNA, 33 bp, Homo sapien
gaagaagaggacaaaggcagtttcttatcatct

SEQ ID NO: 610047 - DNA, 33 bp, Homo sapien
ggtcagttccctgatgcagcacttgagtggtac

SEQ ID NO: 610048 - DNA, 33 bp, Homo sapien
ggtcagttccctgatggagcacttgagtggtac

SEQ ID NO: 610049 - DNA, 33 bp, Homo sapien
tccggctccagtttacgcaggattcctctgacc

SEQ ID NO: 610050 - DNA, 33 bp, Homo sapien
tccggctccagtttactcaggattcctctgacc

SEQ ID NO: 610051 - DNA, 33 bp, Homo sapien
gtggagctgaagaggacgagtgttatgagacac

SEQ ID NO: 610052 - DNA, 33 bp, Homo sapien
gtggagctgaagaggatgagtgttatgagacac

SEQ ID NO: 610053 - DNA, 33 bp, Homo sapien
atatcaaatctaaacacactaagtgctcaaaat

SEQ ID NO: 610054 - DNA, 33 bp, Homo sapien
atatcaaatctaaacagactaagtgctcaaaat

SEQ ID NO: 610055 - DNA, 33 bp, Homo sapien
tctcagggttctgaaacagaaagatgtcctgtg

SEQ ID NO: 610056 - DNA, 33 bp, Homo sapien
tctcagggttctgaaatagaaagatgtcctgtg

SEQ ID NO: 610057 - DNA, 33 bp, Homo sapien
tgtagcatagctagaaatacaacaggagaccac

SEQ ID NO: 610058 - DNA, 33 bp, Homo sapien
tgtagcatagctagaagtacaacaggagaccac

SEQ ID NO: 610059 - DNA, 33 bp, Homo sapien
gagatgaggacacatcaccatcattcaggacat

SEQ ID NO: 610060 - DNA, 33 bp, Homo sapien
gagatgaggacacatcgccatcattcaggacat

SEQ ID NO: 610061 - DNA, 33 bp, Homo sapien
ttcaggacattgttaaaggaaatctgccatgca

SEQ ID NO: 610062 - DNA, 33 bp, Homo sapien
ttcaggacattgttaagggaaatctgccatgca

SEQ ID NO: 610063 - DNA, 33 bp, Homo sapien
cggggctgtctccacacgaaatctctttcacca

SEQ ID NO: 610064 - DNA, 33 bp, Homo sapien
cggggctgtctccacatgaaatctctttcacca

SEQ ID NO: 610065 - DNA, 33 bp, Homo sapien
caagcatagctcacctaaaagaatagacatggg

SEQ ID NO: 610066 - DNA, 33 bp, Homo sapien
caagcatagctcacctgaaagaatagacatggg

SEQ ID NO: 610067 - DNA, 33 bp, Homo sapien
aaacacacagagacacactctccaaacaccaca

SEQ ID NO: 610068 - DNA, 33 bp, Homo sapien
aaacacacagagacacgctctccaaacaccaca

SEQ ID NO: 610069 - DNA, 33 bp, Homo sapien
ttgcattgcacatggacagtgttccaagcttct

SEQ ID NO: 610070 - DNA, 33 bp, Homo sapien
ttgcattgcacatggatagtgttccaagcttct

SEQ ID NO: 610071 - DNA, 33 bp, Homo sapien
ttcataatgataaaaaggccaaatcaatggggt

SEQ ID NO: 610072 - DNA, 33 bp, Homo sapien
ttcataatgataaaaatgccaaatcaatggggt

SEQ ID NO: 610073 - DNA, 33 bp, Homo sapien
ccacagctaagcacatgagagtccaactggaaa

SEQ ID NO: 610074 - DNA, 33 bp, Homo sapien
ccacagctaagcacattagagtccaactggaaa

SEQ ID NO: 610075 - DNA, 33 bp, Homo sapien
cagctttcctgctacaagaaaattcaatcccaa

SEQ ID NO: 610076 - DNA, 33 bp, Homo sapien
cagctttcctgctacatgaaaattcaatcccaa

SEQ ID NO: 610077 - DNA, 33 bp, Homo sapien
ttttacagctgcaagaacttcctccaaggaacc

SEQ ID NO: 610078 - DNA, 33 bp, Homo sapien
ttttacagctgcaagaccttcctccaaggaacc

SEQ ID NO: 610079 - DNA, 33 bp, Homo sapien
tatgtgtaagataaacacagaagcagaagttgg

SEQ ID NO: 610080 - DNA, 33 bp, Homo sapien
tatgtgtaagataaacgcagaagcagaagttgg

SEQ ID NO: 610081 - DNA, 33 bp, Homo sapien
aagtcaggaaaaaatcacaccagttctacacaa

SEQ ID NO: 610082 - DNA, 33 bp, Homo sapien
aagtcaggaaaaaatcgcaccagttctacacaa

SEQ ID NO: 610083 - DNA, 33 bp, Homo sapien
ttgcagctcagcatcacggaagagctggctcct

SEQ ID NO: 610084 - DNA, 33 bp, Homo sapien
ttgcagctcagcatcagggaagagctggctcct

SEQ ID NO: 610085 - DNA, 33 bp, Homo sapien
ctgagacgcagaccccaggacggatgagaaaga

SEQ ID NO: 610086 - DNA, 33 bp, Homo sapien
ctgagacgcagaccccgggacggatgagaaaga

SEQ ID NO: 610087 - DNA, 33 bp, Homo sapien
agcctgtctgaggaccagggttgccgggacaga

SEQ ID NO: 610088 - DNA, 33 bp, Homo sapien
agcctgtctgaggaccggggttgccgggacaga

SEQ ID NO: 610089 - DNA, 33 bp, Homo sapien
gttttgtgagaaatcccgcgatgataaattgca

SEQ ID NO: 610090 - DNA, 33 bp, Homo sapien
gttttgtgagaaatcctgcgatgataaattgca

SEQ ID NO: 610091 - DNA, 33 bp, Homo sapien
aaatggtttctatccaagggaagcgaagcacca

SEQ ID NO: 610092 - DNA, 33 bp, Homo sapien
aaatggtttctatccatgggaagcgaagcacca

SEQ ID NO: 610093 - DNA, 33 bp, Homo sapien
tcattcaaaattataccaagctttgtaaagaaa

SEQ ID NO: 610094 - DNA, 33 bp, Homo sapien
tcattcaaaattatacgaagctttgtaaagaaa

SEQ ID NO: 610095 - DNA, 33 bp, Homo sapien
ctccactggctcctcacgcgtacgagaagaccg

SEQ ID NO: 610096 - DNA, 33 bp, Homo sapien
ctccactggctcctcatgcgtacgagaagaccg

SEQ ID NO: 610097 - DNA, 33 bp, Homo sapien
tgacctcgcgtttatacccagggattcttggtt

SEQ ID NO: 610098 - DNA, 33 bp, Homo sapien
tgacctcgcgtttatatccagggattcttggtt

SEQ ID NO: 610099 - DNA, 33 bp, Homo sapien
tcccattaagacaaatgacttcgactcatgaag

SEQ ID NO: 610100 - DNA, 33 bp, Homo sapien
tcccattaagacaaattacttcgactcatgaag

SEQ ID NO: 610101 - DNA, 33 bp, Homo sapien
gcagaaacataggacaatatttctccagaaaga

SEQ ID NO: 610102 - DNA, 33 bp, Homo sapien
gcagaaacataggacagtatttctccagaaaga

SEQ ID NO: 610103 - DNA, 33 bp, Homo sapien
agagtggcaagattcacgtaagaggcacaagag

SEQ ID NO: 610104 - DNA, 33 bp, Homo sapien
agagtggcaagattcatgtaagaggcacaagag

SEQ ID NO: 610105 - DNA, 33 bp, Homo sapien
gagatgtcacaatcaacattctttttcacaaat

SEQ ID NO: 610106 - DNA, 33 bp, Homo sapien
gagatgtcacaatcaatattctttttcacaaat

SEQ ID NO: 610107 - DNA, 33 bp, Homo sapien
tatgtggtggattcccaaggtgtgactgcagcg

SEQ ID NO: 610108 - DNA, 33 bp, Homo sapien
tatgtggtggattcccgaggtgtgactgcagcg

SEQ ID NO: 610109 - DNA, 33 bp, Homo sapien
atggagcacctgccacagccgaagaaacattgg

SEQ ID NO: 610110 - DNA, 33 bp, Homo sapien
atggagcacctgccacggccgaagaaacattgg

SEQ ID NO: 610111 - DNA, 33 bp, Homo sapien
taagtaatcacttgtgcaatggctgcggacgcc

SEQ ID NO: 610112 - DNA, 33 bp, Homo sapien
taagtaatcacttgtgtaatggctgcggacgcc

SEQ ID NO: 610113 - DNA, 33 bp, Homo sapien
gccctggaaggaatcccggactccatggcttaa

SEQ ID NO: 610114 - DNA, 33 bp, Homo sapien
gccctggaaggaatcctggactccatggcttaa

SEQ ID NO: 610115 - DNA, 33 bp, Homo sapien
agaaagccagatggaagtcagggctgcttagac

SEQ ID NO: 610116 - DNA, 33 bp, Homo sapien
agaaagccagatggaattcagggctgcttagac

SEQ ID NO: 610117 - DNA, 33 bp, Homo sapien
gagcccctgatgtgaaccccggcgctacacctt

SEQ ID NO: 610118 - DNA, 33 bp, Homo sapien
gagcccctgatgtgaatcccggcgctacacctt

SEQ ID NO: 610119 - DNA, 33 bp, Homo sapien
gatgctgccctgtagacggcctgcctttgacct

SEQ ID NO: 610120 - DNA, 33 bp, Homo sapien
gatgctgccctgtagatggcctgcctttgacct

SEQ ID NO: 610121 - DNA, 33 bp, Homo sapien
caaacaaatggtgaagcctcatcataaatatca

SEQ ID NO: 610122 - DNA, 33 bp, Homo sapien
caaacaaatggtgaaggctcatcataaatatca

SEQ ID NO: 610123 - DNA, 33 bp, Homo sapien
tcgaacccaacagggcgcatatttgtcctatgg

SEQ ID NO: 610124 - DNA, 33 bp, Homo sapien
tcgaacccaacagggctcatatttgtcctatgg

SEQ ID NO: 610125 - DNA, 33 bp, Homo sapien
agcgcacctgtgatatgaaatacgacagctcgc

SEQ ID NO: 610126 - DNA, 33 bp, Homo sapien
agcgcacctgtgatattaaatacgacagctcgc

SEQ ID NO: 610127 - DNA, 33 bp, Homo sapien
ttctggccgatgagaactggcttgaaacgcagg

SEQ ID NO: 610128 - DNA, 33 bp, Homo sapien
ttctggccgatgagaagtggcttgaaacgcagg

SEQ ID NO: 610129 - DNA, 33 bp, Homo sapien
attagatgagtatagaaaagaacaaaacccatc

SEQ ID NO: 610130 - DNA, 33 bp, Homo sapien
attagatgagtatagagaagaacaaaacccatc

SEQ ID NO: 610131 - DNA, 33 bp, Homo sapien
acagggttcacaccacaattataccttcttacc

SEQ ID NO: 610132 - DNA, 33 bp, Homo sapien
acagggttcacaccacgattataccttcttacc

SEQ ID NO: 610133 - DNA, 33 bp, Homo sapien
agacgtcacagctgcacagaacagtaggaccca

SEQ ID NO: 610134 - DNA, 33 bp, Homo sapien
agacgtcacagctgcagagaacagtaggaccca

SEQ ID NO: 610135 - DNA, 33 bp, Homo sapien
cttcacacatggcaccactgtttatttcatctc

SEQ ID NO: 610136 - DNA, 33 bp, Homo sapien
cttcacacatggcaccgctgtttatttcatctc

SEQ ID NO: 610137 - DNA, 33 bp, Homo sapien
ttagactctactcctcaaagagcgccactggtc

SEQ ID NO: 610138 - DNA, 33 bp, Homo sapien
ttagactctactcctcgaagagcgccactggtc

SEQ ID NO: 610139 - DNA, 33 bp, Homo sapien
aaagaattaacattagaaagggtggaactatgg

SEQ ID NO: 610140 - DNA, 33 bp, Homo sapien
aaagaattaacattaggaagggtggaactatgg

SEQ ID NO: 610141 - DNA, 33 bp, Homo sapien
tgctgcgactttggaccaagagtagatctgttt

SEQ ID NO: 610142 - DNA, 33 bp, Homo sapien
tgctgcgactttggactaagagtagatctgttt

SEQ ID NO: 610143 - DNA, 33 bp, Homo sapien
tctgtataaccttcgcagccactgcccccgtgc

SEQ ID NO: 610144 - DNA, 33 bp, Homo sapien
tctgtataaccttcgcggccactgcccccgtgc

SEQ ID NO: 610145 - DNA, 33 bp, Homo sapien
gggaggacctcgggcgcaaaaagtgtcttcagg

SEQ ID NO: 610146 - DNA, 33 bp, Homo sapien
gggaggacctcgggcggaaaaagtgtcttcagg

SEQ ID NO: 610147 - DNA, 33 bp, Homo sapien
gttttatttaaacgtggataggccagaaatgaa

SEQ ID NO: 610148 - DNA, 33 bp, Homo sapien
gttttatttaaacgtgtataggccagaaatgaa

SEQ ID NO: 610149 - DNA, 33 bp, Homo sapien
cacaaaacttaaggcacgaaggaaatattgata

SEQ ID NO: 610150 - DNA, 33 bp, Homo sapien
cacaaaacttaaggcatgaaggaaatattgata

SEQ ID NO: 610151 - DNA, 33 bp, Homo sapien
aagacaagtagcttcgcagaaaaatgggtaaag

SEQ ID NO: 610152 - DNA, 33 bp, Homo sapien
aagacaagtagcttcgtagaaaaatgggtaaag

SEQ ID NO: 610153 - DNA, 33 bp, Homo sapien
agcagcactgaaaagacgcgtgaactccatcac

SEQ ID NO: 610154 - DNA, 33 bp, Homo sapien
agcagcactgaaaagatgcgtgaactccatcac

SEQ ID NO: 610155 - DNA, 33 bp, Homo sapien
tttcagaacattggagactcaccaaaggcttgc

SEQ ID NO: 610156 - DNA, 33 bp, Homo sapien
tttcagaacattggaggctcaccaaaggcttgc

SEQ ID NO: 610157 - DNA, 33 bp, Homo sapien
acactggctgtaataccgacagaatatcagggt

SEQ ID NO: 610158 - DNA, 33 bp, Homo sapien
acactggctgtaatactgacagaatatcagggt

SEQ ID NO: 610159 - DNA, 33 bp, Homo sapien
tgattcgcccacctcccaaagtgtaatctgaaa

SEQ ID NO: 610160 - DNA, 33 bp, Homo sapien
tgattcgcccacctccgaaagtgtaatctgaaa

SEQ ID NO: 610161 - DNA, 33 bp, Homo sapien
tggtcaaggatacgtacgtaacaggttacagga

SEQ ID NO: 610162 - DNA, 33 bp, Homo sapien
tggtcaaggatacgtatgtaacaggttacagga

SEQ ID NO: 610163 - DNA, 33 bp, Homo sapien
gtatatgagcaagagacggcacaacaggcaaac

SEQ ID NO: 610164 - DNA, 33 bp, Homo sapien
gtatatgagcaagagatggcacaacaggcaaac

SEQ ID NO: 610165 - DNA, 33 bp, Homo sapien
atgagatcatgggtcacggaaccaagggggttt

SEQ ID NO: 610166 - DNA, 33 bp, Homo sapien
atgagatcatgggtcagggaaccaagggggttt

SEQ ID NO: 610167 - DNA, 33 bp, Homo sapien
gcctaaagattacacaaattctacgtaattagc

SEQ ID NO: 610168 - DNA, 33 bp, Homo sapien
gcctaaagattacacagattctacgtaattagc

SEQ ID NO: 610169 - DNA, 33 bp, Homo sapien
gcactttgcttcagagcccacacctgtctcttc

SEQ ID NO: 610170 - DNA, 33 bp, Homo sapien
gcactttgcttcagagtccacacctgtctcttc

SEQ ID NO: 610171 - DNA, 33 bp, Homo sapien
gcccttgtccactctcaagggtctgctttccag

SEQ ID NO: 610172 - DNA, 33 bp, Homo sapien
gcccttgtccactctcgagggtctgctttccag

SEQ ID NO: 610173 - DNA, 33 bp, Homo sapien
acggccctcacgctgacgactctggagctgttt

SEQ ID NO: 610174 - DNA, 33 bp, Homo sapien
acggccctcacgctgatgactctggagctgttt

SEQ ID NO: 610175 - DNA, 33 bp, Homo sapien
gtaacaacagaggccaaaacatgtttgctgctg

SEQ ID NO: 610176 - DNA, 33 bp, Homo sapien
gtaacaacagaggccagaacatgtttgctgctg

SEQ ID NO: 610177 - DNA, 33 bp, Homo sapien
gtcttcttacaaataccattaagcttgtcaaga

SEQ ID NO: 610178 - DNA, 33 bp, Homo sapien
gtcttcttacaaatactattaagcttgtcaaga

SEQ ID NO: 610179 - DNA, 33 bp, Homo sapien
tccttcaggttgggaacaagaccgcagcctcag

SEQ ID NO: 610180 - DNA, 33 bp, Homo sapien
tccttcaggttgggaataagaccgcagcctcag

SEQ ID NO: 610181 - DNA, 33 bp, Homo sapien
ctctgttgacgttgcactgaggagccctgagca

SEQ ID NO: 610182 - DNA, 33 bp, Homo sapien
ctctgttgacgttgcattgaggagccctgagca

SEQ ID NO: 610183 - DNA, 33 bp, Homo sapien
agtctatggctttaatgataaggtgctgcatat

SEQ ID NO: 610184 - DNA, 33 bp, Homo sapien
agtctatggctttaattataaggtgctgcatat

SEQ ID NO: 610185 - DNA, 33 bp, Homo sapien
atggagcttatgatccactggggaagagacaga

SEQ ID NO: 610186 - DNA, 33 bp, Homo sapien
atggagcttatgatccgctggggaagagacaga

SEQ ID NO: 610187 - DNA, 33 bp, Homo sapien
aacaaacacaaagctacccataaggaaacgtac

SEQ ID NO: 610188 - DNA, 33 bp, Homo sapien
aacaaacacaaagctatccataaggaaacgtac

SEQ ID NO: 610189 - DNA, 33 bp, Homo sapien
ttgtttcactcggggacccgagattcttaacgc

SEQ ID NO: 610190 - DNA, 33 bp, Homo sapien
ttgtttcactcggggatccgagattcttaacgc

SEQ ID NO: 610191 - DNA, 33 bp, Homo sapien
cccggtcgacgcagcaactgagagtggctctgt

SEQ ID NO: 610192 - DNA, 33 bp, Homo sapien
cccggtcgacgcagcacctgagagtggctctgt

SEQ ID NO: 610193 - DNA, 33 bp, Homo sapien
gaatgattttcctgcccagcatttgtgcttttc

SEQ ID NO: 610194 - DNA, 33 bp, Homo sapien
gaatgattttcctgcctagcatttgtgcttttc

SEQ ID NO: 610195 - DNA, 33 bp, Homo sapien
ttgtttgggggatagacggagcaataaagcagt

SEQ ID NO: 610196 - DNA, 33 bp, Homo sapien
ttgtttgggggatagatggagcaataaagcagt

SEQ ID NO: 610197 - DNA, 33 bp, Homo sapien
gaggaaacatcgtcccactgtaggcccggcgga

SEQ ID NO: 610198 - DNA, 33 bp, Homo sapien
gaggaaacatcgtcccgctgtaggcccggcgga

SEQ ID NO: 610199 - DNA, 33 bp, Homo sapien
aaaaagacaagcagaccagcagaaaaaccggca

SEQ ID NO: 610200 - DNA, 33 bp, Homo sapien
aaaaagacaagcagacgagcagaaaaaccggca

SEQ ID NO: 610201 - DNA, 33 bp, Homo sapien
ctgttgccatggataccgccaggaaaagctcca

SEQ ID NO: 610202 - DNA, 33 bp, Homo sapien
ctgttgccatggatactgccaggaaaagctcca

SEQ ID NO: 610203 - DNA, 33 bp, Homo sapien
taccaaaatacaactaaaaggcacactctccca

SEQ ID NO: 610204 - DNA, 33 bp, Homo sapien
taccaaaatacaactacaaggcacactctccca

SEQ ID NO: 610205 - DNA, 33 bp, Homo sapien
aggaaatgtcaatcaacacctccgataaacatc

SEQ ID NO: 610206 - DNA, 33 bp, Homo sapien
aggaaatgtcaatcaatacctccgataaacatc

SEQ ID NO: 610207 - DNA, 33 bp, Homo sapien
ttgctaaatcctgctcagagaaagctgccaata

SEQ ID NO: 610208 - DNA, 33 bp, Homo sapien
ttgctaaatcctgctcggagaaagctgccaata

SEQ ID NO: 610209 - DNA, 33 bp, Homo sapien
tcttaaaatgcaaggacgctcatagtgtttgcc

SEQ ID NO: 610210 - DNA, 33 bp, Homo sapien
tcttaaaatgcaaggatgctcatagtgtttgcc

SEQ ID NO: 610211 - DNA, 33 bp, Homo sapien
agtggaagtttgagggcactctcacaaaatgat

SEQ ID NO: 610212 - DNA, 33 bp, Homo sapien
agtggaagtttgaggggactctcacaaaatgat

SEQ ID NO: 610213 - DNA, 33 bp, Homo sapien
ggaaaggctgtgacaaatacaaacgaccagtca

SEQ ID NO: 610214 - DNA, 33 bp, Homo sapien
ggaaaggctgtgacaactacaaacgaccagtca

SEQ ID NO: 610215 - DNA, 33 bp, Homo sapien
tggttatgcggcaccagcagagcaaggctcggc

SEQ ID NO: 610216 - DNA, 33 bp, Homo sapien
tggttatgcggcaccatcagagcaaggctcggc

SEQ ID NO: 610217 - DNA, 33 bp, Homo sapien
ggtctgtgggctgatccgaatcctttccatgag

SEQ ID NO: 610218 - DNA, 33 bp, Homo sapien
ggtctgtgggctgatctgaatcctttccatgag

SEQ ID NO: 610219 - DNA, 33 bp, Homo sapien
atgggcaggcgcttataaaggaagaaagcagag

SEQ ID NO: 610220 - DNA, 33 bp, Homo sapien
atgggcaggcgcttatcaaggaagaaagcagag

SEQ ID NO: 610221 - DNA, 33 bp, Homo sapien
ggattacaggagttaaacaagactgccaaggac

SEQ ID NO: 610222 - DNA, 33 bp, Homo sapien
ggattacaggagttaagcaagactgccaaggac

SEQ ID NO: 610223 - DNA, 33 bp, Homo sapien
taccccgggggtcagcacatattttctgtaaag

SEQ ID NO: 610224 - DNA, 33 bp, Homo sapien
taccccgggggtcagcgcatattttctgtaaag

SEQ ID NO: 610225 - DNA, 33 bp, Homo sapien
gctacttatgctcaagcccttttctcagggtgc

SEQ ID NO: 610226 - DNA, 33 bp, Homo sapien
gctacttatgctcaagtccttttctcagggtgc

SEQ ID NO: 610227 - DNA, 33 bp, Homo sapien
tgtttgttcctccgcaaagcccgagcttcctct

SEQ ID NO: 610228 - DNA, 33 bp, Homo sapien
tgtttgttcctccgcagagcccgagcttcctct

SEQ ID NO: 610229 - DNA, 33 bp, Homo sapien
tggcagtgccgggccacggtaggtacgtgaaga

SEQ ID NO: 610230 - DNA, 33 bp, Homo sapien
tggcagtgccgggccatggtaggtacgtgaaga

SEQ ID NO: 610231 - DNA, 33 bp, Homo sapien
gcccaaagaaaagagacatcctgagatggaggg

SEQ ID NO: 610232 - DNA, 33 bp, Homo sapien
gcccaaagaaaagagagatcctgagatggaggg

SEQ ID NO: 610233 - DNA, 33 bp, Homo sapien
cttggtgcctggtaaccggagctgactcgcatg

SEQ ID NO: 610234 - DNA, 33 bp, Homo sapien
cttggtgcctggtaacgggagctgactcgcatg

SEQ ID NO: 610235 - DNA, 33 bp, Homo sapien
agaatgggctttgaggcagtggatttgagtctg

SEQ ID NO: 610236 - DNA, 33 bp, Homo sapien
agaatgggctttgaggtagtggatttgagtctg

SEQ ID NO: 610237 - DNA, 33 bp, Homo sapien
catcttgtatatttcccgctgtagacccagagt

SEQ ID NO: 610238 - DNA, 33 bp, Homo sapien
catcttgtatatttcctgctgtagacccagagt

SEQ ID NO: 610239 - DNA, 33 bp, Homo sapien
gtcggcacctgctgaactcgcctccagctgacc

SEQ ID NO: 610240 - DNA, 33 bp, Homo sapien
gtcggcacctgctgaattcgcctccagctgacc

SEQ ID NO: 610241 - DNA, 33 bp, Homo sapien
ccacgaggtctgacaccactcaaaatgacagag

SEQ ID NO: 610242 - DNA, 33 bp, Homo sapien
ccacgaggtctgacactactcaaaatgacagag

SEQ ID NO: 610243 - DNA, 33 bp, Homo sapien
tatttcttacatctccagcggcaggaagtgcag

SEQ ID NO: 610244 - DNA, 33 bp, Homo sapien
tatttcttacatctccggcggcaggaagtgcag

SEQ ID NO: 610245 - DNA, 33 bp, Homo sapien
gggtgcatgtcattgcccgtgtgcaacaaggct

SEQ ID NO: 610246 - DNA, 33 bp, Homo sapien
gggtgcatgtcattgctcgtgtgcaacaaggct

SEQ ID NO: 610247 - DNA, 33 bp, Homo sapien
gatcagataaattggtaaacttgatagcaagtc

SEQ ID NO: 610248 - DNA, 33 bp, Homo sapien
gatcagataaattggtcaacttgatagcaagtc

SEQ ID NO: 610249 - DNA, 33 bp, Homo sapien
ttgatagcaagtctaaatattgagtgtaaacga

SEQ ID NO: 610250 - DNA, 33 bp, Homo sapien
ttgatagcaagtctaagtattgagtgtaaacga

SEQ ID NO: 610251 - DNA, 33 bp, Homo sapien
aatgctagatacaatacgctttaaagatctttc

SEQ ID NO: 610252 - DNA, 33 bp, Homo sapien
aatgctagatacaatatgctttaaagatctttc

SEQ ID NO: 610253 - DNA, 33 bp, Homo sapien
agacttcaggttctgacgatgtggagagggtct

SEQ ID NO: 610254 - DNA, 33 bp, Homo sapien
agacttcaggttctgatgatgtggagagggtct

SEQ ID NO: 610255 - DNA, 33 bp, Homo sapien
gtgcaattgtgcaaccgcaacatctctcagttt

SEQ ID NO: 610256 - DNA, 33 bp, Homo sapien
gtgcaattgtgcaacctcaacatctctcagttt

SEQ ID NO: 610257 - DNA, 33 bp, Homo sapien
gaagtgtgtgcctgtcacttgaggctcaacaag

SEQ ID NO: 610258 - DNA, 33 bp, Homo sapien
gaagtgtgtgcctgtcccttgaggctcaacaag

SEQ ID NO: 610259 - DNA, 33 bp, Homo sapien
acataagagactgcaacttatttatcagattct

SEQ ID NO: 610260 - DNA, 33 bp, Homo sapien
acataagagactgcaatttatttatcagattct

SEQ ID NO: 610261 - DNA, 33 bp, Homo sapien
agtttggtctatttcaatcgaatgggttttttt

SEQ ID NO: 610262 - DNA, 33 bp, Homo sapien
agtttggtctatttcagtcgaatgggttttttt

SEQ ID NO: 610263 - DNA, 33 bp, Homo sapien
ttaaaatgtcatgccaatgaattcgaaaattta

SEQ ID NO: 610264 - DNA, 33 bp, Homo sapien
ttaaaatgtcatgccagtgaattcgaaaattta

SEQ ID NO: 610265 - DNA, 33 bp, Homo sapien
cgtagatcctggaatcccttacttagatctttg

SEQ ID NO: 610266 - DNA, 33 bp, Homo sapien
cgtagatcctggaatctcttacttagatctttg

SEQ ID NO: 610267 - DNA, 33 bp, Homo sapien
actcattaaatcttcacaaaagcccagtgctga

SEQ ID NO: 610268 - DNA, 33 bp, Homo sapien
actcattaaatcttcataaaagcccagtgctga

SEQ ID NO: 610269 - DNA, 33 bp, Homo sapien
gtgcaccctcatgctcaatgccacgtggaagct

SEQ ID NO: 610270 - DNA, 33 bp, Homo sapien
gtgcaccctcatgctccatgccacgtggaagct

SEQ ID NO: 610271 - DNA, 33 bp, Homo sapien
ccaagtgaaatttagacgatgaggcgagggtaa

SEQ ID NO: 610272 - DNA, 33 bp, Homo sapien
ccaagtgaaatttagatgatgaggcgagggtaa

SEQ ID NO: 610273 - DNA, 33 bp, Homo sapien; identical to SEQ ID NO: 610271

SEQ ID NO: 610274 - DNA, 33 bp, Homo sapien; identical to SEQ ID NO: 610272

SEQ ID NO: 610275 - DNA, 33 bp, Homo sapien
cactcagacacggcgacggccccggattttgtg

SEQ ID NO: 610276 - DNA, 33 bp, Homo sapien
cactcagacacggcgatggccccggattttgtg

SEQ ID NO: 610277 - DNA, 33 bp, Homo sapien
agaccagaggagactacggcccatcagtcagac

SEQ ID NO: 610278 - DNA, 33 bp, Homo sapien
agaccagaggagactatggcccatcagtcagac

SEQ ID NO: 610279 - DNA, 33 bp, Homo sapien
gggacatctgatgaacaagcctgagaggttgct

SEQ ID NO: 610280 - DNA, 33 bp, Homo sapien
gggacatctgatgaacgagcctgagaggttgct

SEQ ID NO: 610281 - DNA, 33 bp, Homo sapien
acacagacacgcagacggtacagacataagacc

SEQ ID NO: 610282 - DNA, 33 bp, Homo sapien
acacagacacgcagactgtacagacataagacc

SEQ ID NO: 610283 - DNA, 33 bp, Homo sapien
agctgtggaggatgacaggtgttgggggcccac

SEQ ID NO: 610284 - DNA, 33 bp, Homo sapien
agctgtggaggatgacgggtgttgggggcccac

SEQ ID NO: 610285 - DNA, 33 bp, Homo sapien
gaactcttatgacaacagtaagaagtcagctaa

SEQ ID NO: 610286 - DNA, 33 bp, Homo sapien
gaactcttatgacaacggtaagaagtcagctaa

SEQ ID NO: 610287 - DNA, 33 bp, Homo sapien
tactgtccacaaagacaatccaaaagaatctta

SEQ ID NO: 610288 - DNA, 33 bp, Homo sapien
tactgtccacaaagacgatccaaaagaatctta

SEQ ID NO: 610289 - DNA, 33 bp, Homo sapien
catgtgtttcctgagcaatggatgtgggcacgg

SEQ ID NO: 610290 - DNA, 33 bp, Homo sapien
catgtgtttcctgagcgatggatgtgggcacgg

SEQ ID NO: 610291 - DNA, 33 bp, Homo sapien
gaacatcctcatggaacagtagccatgctgcag

SEQ ID NO: 610292 - DNA, 33 bp, Homo sapien
gaacatcctcatggaatagtagccatgctgcag

SEQ ID NO: 610293 - DNA, 33 bp, Homo sapien
tgtccccagcctgacacgaatctctggcaaaca

SEQ ID NO: 610294 - DNA, 33 bp, Homo sapien
tgtccccagcctgacatgaatctctggcaaaca

SEQ ID NO: 610295 - DNA, 33 bp, Homo sapien
tcttctccttatcgcactctctatgatgcataa

SEQ ID NO: 610296 - DNA, 33 bp, Homo sapien
tcttctccttatcgcagtctctatgatgcataa

SEQ ID NO: 610297 - DNA, 33 bp, Homo sapien
gctccctcagcacatacaacaaagaagtccccc

SEQ ID NO: 610298 - DNA, 33 bp, Homo sapien
gctccctcagcacatagaacaaagaagtccccc

SEQ ID NO: 610299 - DNA, 33 bp, Homo sapien
ttgctttggggtcttcacactgacttcttgtct

SEQ ID NO: 610300 - DNA, 33 bp, Homo sapien
ttgctttggggtcttcgcactgacttcttgtct

SEQ ID NO: 610301 - DNA, 33 bp, Homo sapien
gctctgagttgaacacaaatatatttctgttgt

SEQ ID NO: 610302 - DNA, 33 bp, Homo sapien
gctctgagttgaacacgaatatatttctgttgt

SEQ ID NO: 610303 - DNA, 33 bp, Homo sapien
tcatctcccggctcgcagcctcgaagggcttta

SEQ ID NO: 610304 - DNA, 33 bp, Homo sapien
tcatctcccggctcgcggcctcgaagggcttta

SEQ ID NO: 610305 - DNA, 33 bp, Homo sapien
aaatttcaccttaaccacagacagggctccagg

SEQ ID NO: 610306 - DNA, 33 bp, Homo sapien
aaatttcaccttaaccccagacagggctccagg

SEQ ID NO: 610307 - DNA, 33 bp, Homo sapien
agaggagaaatagacaatcacagtgagagatct

SEQ ID NO: 610308 - DNA, 33 bp, Homo sapien
agaggagaaatagacagtcacagtgagagatct

SEQ ID NO: 610309 - DNA, 33 bp, Homo sapien
acagatgttcgccagacgcaatgggaaaaccag

SEQ ID NO: 610310 - DNA, 33 bp, Homo sapien
acagatgttcgccagatgcaatgggaaaaccag

SEQ ID NO: 610311 - DNA, 33 bp, Homo sapien
tccaggagctgttatcactaccagtttctggca

SEQ ID NO: 610312 - DNA, 33 bp, Homo sapien
tccaggagctgttatcgctaccagtttctggca

SEQ ID NO: 610313 - DNA, 33 bp, Homo sapien
ttcaagcgtcttctccaccttgaccctgccacc

SEQ ID NO: 610314 - DNA, 33 bp, Homo sapien
ttcaagcgtcttctccgccttgaccctgccacc

SEQ ID NO: 610315 - DNA, 33 bp, Homo sapien
ttttttatttcagtacacttttattgcttttaa

SEQ ID NO: 610316 - DNA, 33 bp, Homo sapien
ttttttatttcagtacgcttttattgcttttaa

SEQ ID NO: 610317 - DNA, 33 bp, Homo sapien
tactcaggaccctcacaagccgtgcaggtgtgc

SEQ ID NO: 610318 - DNA, 33 bp, Homo sapien
tactcaggaccctcacgagccgtgcaggtgtgc

SEQ ID NO: 610319 - DNA, 33 bp, Homo sapien
cctcagcagtcaggaccggcctctccgattctt

SEQ ID NO: 610320 - DNA, 33 bp, Homo sapien
cctcagcagtcaggactggcctctccgattctt

SEQ ID NO: 610321 - DNA, 33 bp, Homo sapien
ccgcagggttttcataaagctaaaagaatttgg

SEQ ID NO: 610322 - DNA, 33 bp, Homo sapien
ccgcagggttttcatagagctaaaagaatttgg

SEQ ID NO: 610323 - DNA, 33 bp, Homo sapien
ccaatgcgtaggtttacgagctgtcattagctg

SEQ ID NO: 610324 - DNA, 33 bp, Homo sapien
ccaatgcgtaggtttatgagctgtcattagctg

SEQ ID NO: 610325 - DNA, 33 bp, Homo sapien
aggtgctgggattcataaacagaggaaaactga

SEQ ID NO: 610326 - DNA, 33 bp, Homo sapien
aggtgctgggattcatgaacagaggaaaactga

SEQ ID NO: 610327 - DNA, 33 bp, Homo sapien
atgagctggaagacagacgaggagatattttta

SEQ ID NO: 610328 - DNA, 33 bp, Homo sapien
atgagctggaagacaggcgaggagatattttta

SEQ ID NO: 610329 - DNA, 33 bp, Homo sapien
ataagtaaaaatcaaactgaacactcaaaagct

SEQ ID NO: 610330 - DNA, 33 bp, Homo sapien
ataagtaaaaatcaaattgaacactcaaaagct

SEQ ID NO: 610331 - DNA, 33 bp, Homo sapien
gccagccgtgactctcacagccggcctgggctg

SEQ ID NO: 610332 - DNA, 33 bp, Homo sapien
gccagccgtgactctcgcagccggcctgggctg

SEQ ID NO: 610333 - DNA, 33 bp, Homo sapien
gactccttcttcccacactgctacagcctctgc

SEQ ID NO: 610334 - DNA, 33 bp, Homo sapien
gactccttcttcccacgctgctacagcctctgc

SEQ ID NO: 610335 - DNA, 33 bp, Homo sapien
cacagcccgatctccaaagacagtggcgtgtta

SEQ ID NO: 610336 - DNA, 33 bp, Homo sapien
cacagcccgatctccagagacagtggcgtgtta

SEQ ID NO: 610337 - DNA, 33 bp, Homo sapien
aataatagcatactaaccactaaccactgggta

SEQ ID NO: 610338 - DNA, 33 bp, Homo sapien
aataatagcatactaatcactaaccactgggta

SEQ ID NO: 610339 - DNA, 33 bp, Homo sapien
cattgtgcctggaggacagacagaagcaggtgg

SEQ ID NO: 610340 - DNA, 33 bp, Homo sapien
cattgtgcctggaggagagacagaagcaggtgg

SEQ ID NO: 610341 - DNA, 33 bp, Homo sapien
caccctcaggtacaaacatgtgcagtcaggcag

SEQ ID NO: 610342 - DNA, 33 bp, Homo sapien
caccctcaggtacaaatatgtgcagtcaggcag

SEQ ID NO: 610343 - DNA, 33 bp, Homo sapien
cttcatcctcttcatccccccgaaggtgtccag

SEQ ID NO: 610344 - DNA, 33 bp, Homo sapien
cttcatcctcttcatctccccgaaggtgtccag

SEQ ID NO: 610345 - DNA, 33 bp, Homo sapien
ctgataagtgggaagacgacagcagaaaccatg

SEQ ID NO: 610346 - DNA, 33 bp, Homo sapien
ctgataagtgggaagatgacagcagaaaccatg

SEQ ID NO: 610347 - DNA, 33 bp, Homo sapien
acttttttgaaagagaaaatacaatgtgcaaaa

SEQ ID NO: 610348 - DNA, 33 bp, Homo sapien
acttttttgaaagagagaatacaatgtgcaaaa

SEQ ID NO: 610349 - DNA, 33 bp, Homo sapien
agtctatggtgagatcaaggtttcacaggttct

SEQ ID NO: 610350 - DNA, 33 bp, Homo sapien
agtctatggtgagatcgaggtttcacaggttct

SEQ ID NO: 610351 - DNA, 33 bp, Homo sapien
aggcctacacatgaaaagaatgacagagacaac

SEQ ID NO: 610352 - DNA, 33 bp, Homo sapien
aggcctacacatgaaaggaatgacagagacaac

SEQ ID NO: 610353 - DNA, 33 bp, Homo sapien
ttcaaaagaatctttccatgaagccctttctta

SEQ ID NO: 610354 - DNA, 33 bp, Homo sapien
ttcaaaagaatctttcgatgaagccctttctta

SEQ ID NO: 610355 - DNA, 33 bp, Homo sapien
ttttcaataactacaacttgcaaaagttatcaa

SEQ ID NO: 610356 - DNA, 33 bp, Homo sapien
ttttcaataactacaatttgcaaaagttatcaa

SEQ ID NO: 610357 - DNA, 33 bp, Homo sapien
ttagaattcaggtatgaaagcactaggagttat

SEQ ID NO: 610358 - DNA, 33 bp, Homo sapien
ttagaattcaggtatgcaagcactaggagttat

SEQ ID NO: 610359 - DNA, 33 bp, Homo sapien
aggtctgtagcttatgcaacagtgctaaaatgt

SEQ ID NO: 610360 - DNA, 33 bp, Homo sapien
aggtctgtagcttatgtaacagtgctaaaatgt

SEQ ID NO: 610361 - DNA, 33 bp, Homo sapien
tctgagaacggtgtcccgaacgtgctccccagc

SEQ ID NO: 610362 - DNA, 33 bp, Homo sapien
tctgagaacggtgtcctgaacgtgctccccagc

SEQ ID NO: 610363 - DNA, 33 bp, Homo sapien
aggtatcgcccaattaagaaatcggaaaaacaa

SEQ ID NO: 610364 - DNA, 33 bp, Homo sapien
aggtatcgcccaattaggaaatcggaaaaacaa

SEQ ID NO: 610365 - DNA, 33 bp, Homo sapien
cctatgttccccagccacaagtcccagatcaca

SEQ ID NO: 610366 - DNA, 33 bp, Homo sapien
cctatgttccccagccgcaagtcccagatcaca

SEQ ID NO: 610367 - DNA, 33 bp, Homo sapien
gggtgtgcatagttacaccttcatgctacctca

SEQ ID NO: 610368 - DNA, 33 bp, Homo sapien
gggtgtgcatagttaccccttcatgctacctca

SEQ ID NO: 610369 - DNA, 33 bp, Homo sapien
agatcagctggaaccaagatggacaactggagt

SEQ ID NO: 610370 - DNA, 33 bp, Homo sapien
agatcagctggaaccacgatggacaactggagt

SEQ ID NO: 610371 - DNA, 33 bp, Homo sapien
tgtagggatgtaacccagaaaaggagcaggaaa

SEQ ID NO: 610372 - DNA, 33 bp, Homo sapien
tgtagggatgtaacccggaaaaggagcaggaaa

SEQ ID NO: 610373 - DNA, 33 bp, Homo sapien
ggtcaactgcttacaaataatgaaatacaacaa

SEQ ID NO: 610374 - DNA, 33 bp, Homo sapien
ggtcaactgcttacaactaatgaaatacaacaa

SEQ ID NO: 610375 - DNA, 33 bp, Homo sapien
gaggaggttcaataaaacgttactggggtcagg

SEQ ID NO: 610376 - DNA, 33 bp, Homo sapien
gaggaggttcaataaagcgttactggggtcagg

SEQ ID NO: 610377 - DNA, 33 bp, Homo sapien
ttttctactaaaaggagaagtcttgtaatgact

SEQ ID NO: 610378 - DNA, 33 bp, Homo sapien
ttttctactaaaaggataagtcttgtaatgact

SEQ ID NO: 610379 - DNA, 33 bp, Homo sapien
atctttatctagcgacacatcatcaaaaattca

SEQ ID NO: 610380 - DNA, 33 bp, Homo sapien
atctttatctagcgacccatcatcaaaaattca

SEQ ID NO: 610381 - DNA, 33 bp, Homo sapien
tactgaaagtcactgacgcaaccacttgtaaag

SEQ ID NO: 610382 - DNA, 33 bp, Homo sapien
tactgaaagtcactgatgcaaccacttgtaaag

SEQ ID NO: 610383 - DNA, 33 bp, Homo sapien
ttaaaaaggaatcaacaacatttctccattccc

SEQ ID NO: 610384 - DNA, 33 bp, Homo sapien
ttaaaaaggaatcaacgacatttctccattccc

SEQ ID NO: 610385 - DNA, 33 bp, Homo sapien
ctgcactctagaaacacatcatgtgccgagcga

SEQ ID NO: 610386 - DNA, 33 bp, Homo sapien
ctgcactctagaaacagatcatgtgccgagcga

SEQ ID NO: 610387 - DNA, 33 bp, Homo sapien
tgtgtccagcctccaacgtgctactccaaactc

SEQ ID NO: 610388 - DNA, 33 bp, Homo sapien
tgtgtccagcctccaatgtgctactccaaactc

SEQ ID NO: 610389 - DNA, 33 bp, Homo sapien
gcaaatgttttcccaaagggccaaatatcaagg

SEQ ID NO: 610390 - DNA, 33 bp, Homo sapien
gcaaatgttttcccaaggggccaaatatcaagg

SEQ ID NO: 610391 - DNA, 33 bp, Homo sapien
cctccccacaagcacacatcaaggatggaggaa

SEQ ID NO: 610392 - DNA, 33 bp, Homo sapien
cctccccacaagcacatatcaaggatggaggaa

SEQ ID NO: 610393 - DNA, 33 bp, Homo sapien
gtagcaaccaagtaccacaaactaggcagtttc

SEQ ID NO: 610394 - DNA, 33 bp, Homo sapien
gtagcaaccaagtaccgcaaactaggcagtttc

SEQ ID NO: 610395 - DNA, 33 bp, Homo sapien
tcttagtaaaataaaacgtctgtcaggcgacaa

SEQ ID NO: 610396 - DNA, 33 bp, Homo sapien
tcttagtaaaataaaatgtctgtcaggcgacaa

SEQ ID NO: 610397 - DNA, 33 bp, Homo sapien
tgatttgattcaacaccgagtcggcacagacac

SEQ ID NO: 610398 - DNA, 33 bp, Homo sapien
tgatttgattcaacacggagtcggcacagacac

SEQ ID NO: 610399 - DNA, 33 bp, Homo sapien
catggaaaggagggaacgcgtgtaacgtgagca

SEQ ID NO: 610400 - DNA, 33 bp, Homo sapien
catggaaaggagggaatgcgtgtaacgtgagca

SEQ ID NO: 610401 - DNA, 33 bp, Homo sapien
aacctcaaaaggctgacatctctagtcacaatg

SEQ ID NO: 610402 - DNA, 33 bp, Homo sapien
aacctcaaaaggctgatatctctagtcacaatg

SEQ ID NO: 610403 - DNA, 33 bp, Homo sapien
ccacgaagaagtagtcaacagcggccttgttca

SEQ ID NO: 610404 - DNA, 33 bp, Homo sapien
ccacgaagaagtagtcgacagcggccttgttca

SEQ ID NO: 610405 - DNA, 33 bp, Homo sapien
gccatgtgtccagtacaacttatctaaggtagg

SEQ ID NO: 610406 - DNA, 33 bp, Homo sapien
gccatgtgtccagtacgacttatctaaggtagg

SEQ ID NO: 610407 - DNA, 33 bp, Homo sapien
tcaggacggaaatggaaatgcggggaggaacat

SEQ ID NO: 610408 - DNA, 33 bp, Homo sapien
tcaggacggaaatggatatgcggggaggaacat

SEQ ID NO: 610409 - DNA, 33 bp, Homo sapien
gaaacatagccaggtacgaatgtcagctcacca

SEQ ID NO: 610410 - DNA, 33 bp, Homo sapien
gaaacatagccaggtatgaatgtcagctcacca

SEQ ID NO: 610411 - DNA, 33 bp, Homo sapien
ctgtgaataccagcacaatcgattctatcagga

SEQ ID NO: 610412 - DNA, 33 bp, Homo sapien
ctgtgaataccagcacgatcgattctatcagga

SEQ ID NO: 610413 - DNA, 33 bp, Homo sapien
tggtcatctcagtgtccagtggctgacctgcac

SEQ ID NO: 610414 - DNA, 33 bp, Homo sapien
tggtcatctcagtgtctagtggctgacctgcac

SEQ ID NO: 610415 - DNA, 33 bp, Homo sapien
ccacgttgttgaacacacagaacccgttggcag

SEQ ID NO: 610416 - DNA, 33 bp, Homo sapien
ccacgttgttgaacacgcagaacccgttggcag

SEQ ID NO: 610417 - DNA, 33 bp, Homo sapien
tgctaggatagtgctaagattacagaagacact

SEQ ID NO: 610418 - DNA, 33 bp, Homo sapien
tgctaggatagtgctaggattacagaagacact

SEQ ID NO: 610419 - DNA, 33 bp, Homo sapien
tgacaggagatggacaatggatgtggagtggat

SEQ ID NO: 610420 - DNA, 33 bp, Homo sapien
tgacaggagatggacagtggatgtggagtggat

SEQ ID NO: 610421 - DNA, 33 bp, Homo sapien
aataattccacattaccgggaaattgagaaaca

SEQ ID NO: 610422 - DNA, 33 bp, Homo sapien
aataattccacattactgggaaattgagaaaca

SEQ ID NO: 610423 - DNA, 33 bp, Homo sapien
ctgaagctgctcgtcacgaccagttggcgatgc

SEQ ID NO: 610424 - DNA, 33 bp, Homo sapien
ctgaagctgctcgtcatgaccagttggcgatgc

SEQ ID NO: 610425 - DNA, 33 bp, Homo sapien
tccgacagctgcacctcaggacagcgatgtggg

SEQ ID NO: 610426 - DNA, 33 bp, Homo sapien
tccgacagctgcacctgaggacagcgatgtggg

SEQ ID NO: 610427 - DNA, 33 bp, Homo sapien
gcgcttgtgtaaactcaaaatctcagtggctgt

SEQ ID NO: 610428 - DNA, 33 bp, Homo sapien
gcgcttgtgtaaactcgaaatctcagtggctgt

SEQ ID NO: 610429 - DNA, 33 bp, Homo sapien
tgtttccataagatgcaaggaacaggtcacgta

SEQ ID NO: 610430 - DNA, 33 bp, Homo sapien
tgtttccataagatgcgaggaacaggtcacgta

SEQ ID NO: 610431 - DNA, 33 bp, Homo sapien
ggggagagaggctgaactggccagaagtggccc

SEQ ID NO: 610432 - DNA, 33 bp, Homo sapien
ggggagagaggctgaattggccagaagtggccc

SEQ ID NO: 610433 - DNA, 33 bp, Homo sapien
ttggctgagaaaatacagggaactgtgctgggc

SEQ ID NO: 610434 - DNA, 33 bp, Homo sapien
ttggctgagaaaatacggggaactgtgctgggc

SEQ ID NO: 610435 - DNA, 33 bp, Homo sapien
agagctggtccagaaacaagggaacatggagga

SEQ ID NO: 610436 - DNA, 33 bp, Homo sapien
agagctggtccagaaagaagggaacatggagga

SEQ ID NO: 610437 - DNA, 33 bp, Homo sapien
aactgtgtgagcagcaatagtgtaattccagcc

SEQ ID NO: 610438 - DNA, 33 bp, Homo sapien
aactgtgtgagcagcattagtgtaattccagcc

SEQ ID NO: 610439 - DNA, 33 bp, Homo sapien
ccctcagctttagtcacggagcccagaggattt

SEQ ID NO: 610440 - DNA, 33 bp, Homo sapien
ccctcagctttagtcatggagcccagaggattt

SEQ ID NO: 610441 - DNA, 33 bp, Homo sapien
gcccagagtcgcatgaaggggtctttaagagag

SEQ ID NO: 610442 - DNA, 33 bp, Homo sapien
gcccagagtcgcatgagggggtctttaagagag

SEQ ID NO: 610443 - DNA, 33 bp, Homo sapien
ggctggccagccaccaactccgcaaagggacac

SEQ ID NO: 610444 - DNA, 33 bp, Homo sapien
ggctggccagccaccagctccgcaaagggacac

SEQ ID NO: 610445 - DNA, 33 bp, Homo sapien
tcagtgacttatggtaaatgacttagcagcttt

SEQ ID NO: 610446 - DNA, 33 bp, Homo sapien
tcagtgacttatggtagatgacttagcagcttt

SEQ ID NO: 610447 - DNA, 33 bp, Homo sapien
tgcggcctccctgcaccggaacgatctgggatg

SEQ ID NO: 610448 - DNA, 33 bp, Homo sapien
tgcggcctccctgcactggaacgatctgggatg

SEQ ID NO: 610449 - DNA, 33 bp, Homo sapien
tcatctccaaaagacccgacctcctaataccat

SEQ ID NO: 610450 - DNA, 33 bp, Homo sapien
tcatctccaaaagacctgacctcctaataccat

SEQ ID NO: 610451 - DNA, 33 bp, Homo sapien
ttcaggagagccataaaagtaaaaatatttcat

SEQ ID NO: 610452 - DNA, 33 bp, Homo sapien
ttcaggagagccataacagtaaaaatatttcat

SEQ ID NO: 610453 - DNA, 33 bp, Homo sapien
accactcggatcccggacaaggacacaggtaac

SEQ ID NO: 610454 - DNA, 33 bp, Homo sapien
accactcggatcccgggcaaggacacaggtaac

SEQ ID NO: 610455 - DNA, 33 bp, Homo sapien
aaatgcacaactgatcacagtaaccctctgctc

SEQ ID NO: 610456 - DNA, 33 bp, Homo sapien
aaatgcacaactgatcgcagtaaccctctgctc

SEQ ID NO: 610457 - DNA, 33 bp, Homo sapien
cccactgttgccatgacgacgaccagccagctg

SEQ ID NO: 610458 - DNA, 33 bp, Homo sapien
cccactgttgccatgatgacgaccagccagctg

SEQ ID NO: 610459 - DNA, 33 bp, Homo sapien
agcagcagaaagtaccaaaccgagcagtacaca

SEQ ID NO: 610460 - DNA, 33 bp, Homo sapien
agcagcagaaagtaccgaaccgagcagtacaca

SEQ ID NO: 610461 - DNA, 33 bp, Homo sapien
gggagggacgcatatgaacttctgggttgtgac

SEQ ID NO: 610462 - DNA, 33 bp, Homo sapien
gggagggacgcatatggacttctgggttgtgac

SEQ ID NO: 610463 - DNA, 33 bp, Homo sapien
tgtattaaggctttcacaggagttgtaactagc

SEQ ID NO: 610464 - DNA, 33 bp, Homo sapien
tgtattaaggctttcataggagttgtaactagc

SEQ ID NO: 610465 - DNA, 33 bp, Homo sapien
ccaatctaccttttcaacaacagtatacaaggg

SEQ ID NO: 610466 - DNA, 33 bp, Homo sapien
ccaatctaccttttcaccaacagtatacaaggg

SEQ ID NO: 610467 - DNA, 33 bp, Homo sapien
gattggcttttgatcccgagtcttttcaccaaa

SEQ ID NO: 610468 - DNA, 33 bp, Homo sapien
gattggcttttgatcctgagtcttttcaccaaa

SEQ ID NO: 610469 - DNA, 33 bp, Homo sapien
acgcaatcacttgggcgccggatatcccctctt

SEQ ID NO: 610470 - DNA, 33 bp, Homo sapien
acgcaatcacttgggctccggatatcccctctt

SEQ ID NO: 610471 - DNA, 33 bp, Homo sapien
tgtgcctgataacgtaataacaccagtggagac

SEQ ID NO: 610472 - DNA, 33 bp, Homo sapien
tgtgcctgataacgtagtaacaccagtggagac

SEQ ID NO: 610473 - DNA, 33 bp, Homo sapien
tttacattctttacacggtacagggactgtgga

SEQ ID NO: 610474 - DNA, 33 bp, Homo sapien
tttacattctttacactgtacagggactgtgga

SEQ ID NO: 610475 - DNA, 33 bp, Homo sapien
tttagggttccgagtaccttttcattcaagacg

SEQ ID NO: 610476 - DNA, 33 bp, Homo sapien
tttagggttccgagtatcttttcattcaagacg

SEQ ID NO: 610477 - DNA, 33 bp, Homo sapien
ggagaacacactcatcagaatacactccaaaat

SEQ ID NO: 610478 - DNA, 33 bp, Homo sapien
ggagaacacactcatcggaatacactccaaaat

SEQ ID NO: 610479 - DNA, 33 bp, Homo sapien
cctaccatcctgaacgcaccttacatccaaagc

SEQ ID NO: 610480 - DNA, 33 bp, Homo sapien
cctaccatcctgaacgtaccttacatccaaagc

SEQ ID NO: 610481 - DNA, 33 bp, Homo sapien
gtgaaacagggttataatagtccctctggaaga

SEQ ID NO: 610482 - DNA, 33 bp, Homo sapien
gtgaaacagggttatagtagtccctctggaaga

SEQ ID NO: 610483 - DNA, 33 bp, Homo sapien
tctgtgccatggtatagatatgtgctctgtgtc

SEQ ID NO: 610484 - DNA, 33 bp, Homo sapien
tctgtgccatggtatatatatgtgctctgtgtc

SEQ ID NO: 610485 - DNA, 33 bp, Homo sapien
ctatttctatcagaagacacagatatcaaaaaa

SEQ ID NO: 610486 - DNA, 33 bp, Homo sapien
ctatttctatcagaaggcacagatatcaaaaaa

SEQ ID NO: 610487 - DNA, 33 bp, Homo sapien
gtgtattcacgttcccaggagaactctggactt

SEQ ID NO: 610488 - DNA, 33 bp, Homo sapien
gtgtattcacgttcccgggagaactctggactt

SEQ ID NO: 610489 - DNA, 33 bp, Homo sapien
tgccagtgttagtagacgtagatgctgcctctt

SEQ ID NO: 610490 - DNA, 33 bp, Homo sapien
tgccagtgttagtagatgtagatgctgcctctt

SEQ ID NO: 610491 - DNA, 33 bp, Homo sapien
atggagcgacgcagaacgagcgcaccttgagga

SEQ ID NO: 610492 - DNA, 33 bp, Homo sapien
atggagcgacgcagaatgagcgcaccttgagga

SEQ ID NO: 610493 - DNA, 33 bp, Homo sapien
cacaaagccaggaatacgagatgcactaacaaa

SEQ ID NO: 610494 - DNA, 33 bp, Homo sapien
cacaaagccaggaatatgagatgcactaacaaa

SEQ ID NO: 610495 - DNA, 33 bp, Homo sapien
ttatgacatcctcaaacgaatgttcaataggtc

SEQ ID NO: 610496 - DNA, 33 bp, Homo sapien
ttatgacatcctcaaatgaatgttcaataggtc

SEQ ID NO: 610497 - DNA, 33 bp, Homo sapien
tagtgtgaatggtgaaagatcaggagattatgt

SEQ ID NO: 610498 - DNA, 33 bp, Homo sapien
tagtgtgaatggtgaaggatcaggagattatgt

SEQ ID NO: 610499 - DNA, 33 bp, Homo sapien
cgggtaggaacttctacaggacacaggtataca

SEQ ID NO: 610500 - DNA, 33 bp, Homo sapien
cgggtaggaacttctataggacacaggtataca

SEQ ID NO: 610501 - DNA, 33 bp, Homo sapien
tgtcactgtcacatacacagatgttccctgtct

SEQ ID NO: 610502 - DNA, 33 bp, Homo sapien
tgtcactgtcacatacgcagatgttccctgtct

SEQ ID NO: 610503 - DNA, 33 bp, Homo sapien; identical to SEQ ID NO: 610501

SEQ ID NO: 610504 - DNA, 33 bp, Homo sapien; identical to SEQ ID NO: 610502

SEQ ID NO: 610505 - DNA, 33 bp, Homo sapien
gtaattcttgagtccaatcaaaactgaaccaca

SEQ ID NO: 610506 - DNA, 33 bp, Homo sapien
gtaattcttgagtccagtcaaaactgaaccaca

SEQ ID NO: 610507 - DNA, 33 bp, Homo sapien
agagtttatcagagcccaagaatagacttgtgg

SEQ ID NO: 610508 - DNA, 33 bp, Homo sapien
agagtttatcagagcctaagaatagacttgtgg

SEQ ID NO: 610509 - DNA, 33 bp, Homo sapien
gggagaaacagatacccaaacacctagtcacaa

SEQ ID NO: 610510 - DNA, 33 bp, Homo sapien
gggagaaacagatacctaaacacctagtcacaa

SEQ ID NO: 610511 - DNA, 33 bp, Homo sapien
atagcatactcgattacataggacagaaaccgt

SEQ ID NO: 610512 - DNA, 33 bp, Homo sapien
atagcatactcgattatataggacagaaaccgt

SEQ ID NO: 610513 - DNA, 33 bp, Homo sapien
attctctgctcaatttaaaaaaattcttccatt

SEQ ID NO: 610514 - DNA, 33 bp, Homo sapien
attctctgctcaattttaaaaaattcttccatt

SEQ ID NO: 610515 - DNA, 33 bp, Homo sapien
gcatttgagaagtaacagagactgcagttaggc

SEQ ID NO: 610516 - DNA, 33 bp, Homo sapien
gcatttgagaagtaacggagactgcagttaggc

SEQ ID NO: 610517 - DNA, 33 bp, Homo sapien
tttcacatgaactaccccccacctcaatgtacg

SEQ ID NO: 610518 - DNA, 33 bp, Homo sapien
tttcacatgaactacctcccacctcaatgtacg

SEQ ID NO: 610519 - DNA, 33 bp, Homo sapien
aggagtagcagccccggcactaaagttgaaagt

SEQ ID NO: 610520 - DNA, 33 bp, Homo sapien
aggagtagcagccccgtcactaaagttgaaagt

SEQ ID NO: 610521 - DNA, 33 bp, Homo sapien
tcttcttctgaagagacagaaaaagtctgtttt

SEQ ID NO: 610522 - DNA, 33 bp, Homo sapien
tcttcttctgaagagagagaaaaagtctgtttt

SEQ ID NO: 610523 - DNA, 33 bp, Homo sapien
ataaacttgttagatcaaaagtcacttatgcac

SEQ ID NO: 610524 - DNA, 33 bp, Homo sapien
ataaacttgttagatcgaaagtcacttatgcac

SEQ ID NO: 610525 - DNA, 33 bp, Homo sapien
catacctggtaaaacactgtgtctagggatgcc

SEQ ID NO: 610526 - DNA, 33 bp, Homo sapien
catacctggtaaaacattgtgtctagggatgcc

SEQ ID NO: 610527 - DNA, 33 bp, Homo sapien
attaggaagtgcaacacaaaagtcagtttaggt

SEQ ID NO: 610528 - DNA, 33 bp, Homo sapien
attaggaagtgcaacagaaaagtcagtttaggt

SEQ ID NO: 610529 - DNA, 33 bp, Homo sapien
tattgccttcctgatacaacgcccacatcctct

SEQ ID NO: 610530 - DNA, 33 bp, Homo sapien
tattgccttcctgatataacgcccacatcctct

SEQ ID NO: 610531 - DNA, 33 bp, Homo sapien
gcattttatacttgtcaacagcgttcatcagct

SEQ ID NO: 610532 - DNA, 33 bp, Homo sapien
gcattttatacttgtctacagcgttcatcagct

SEQ ID NO: 610533 - DNA, 33 bp, Homo sapien
ttgaaaggaagaaccaaaacagagatcgtctgt

SEQ ID NO: 610534 - DNA, 33 bp, Homo sapien
ttgaaaggaagaaccacaacagagatcgtctgt

SEQ ID NO: 610535 - DNA, 33 bp, Homo sapien
tcgctatctcttcttacatagacgtgtttaaat

SEQ ID NO: 610536 - DNA, 33 bp, Homo sapien
tcgctatctcttcttatatagacgtgtttaaat

SEQ ID NO: 610537 - DNA, 33 bp, Homo sapien
cacaagagggatcaaacaattactcaagtcatg

SEQ ID NO: 610538 - DNA, 33 bp, Homo sapien
cacaagagggatcaaagaattactcaagtcatg

SEQ ID NO: 610539 - DNA, 33 bp, Homo sapien
taagtaaaagaataaaataatgaccaccattga

SEQ ID NO: 610540 - DNA, 33 bp, Homo sapien
taagtaaaagaataaactaatgaccaccattga

SEQ ID NO: 610541 - DNA, 33 bp, Homo sapien
ggagaggtttgaactactagctggtgtatttaa

SEQ ID NO: 610542 - DNA, 33 bp, Homo sapien
ggagaggtttgaactagtagctggtgtatttaa

SEQ ID NO: 610543 - DNA, 33 bp, Homo sapien
gtttcaaaagacagggaaagccaatccaaacat

SEQ ID NO: 610544 - DNA, 33 bp, Homo sapien
gtttcaaaagacagggcaagccaatccaaacat

SEQ ID NO: 610545 - DNA, 33 bp, Homo sapien
tacttgcacacctcccaagattactcacccttg

SEQ ID NO: 610546 - DNA, 33 bp, Homo sapien
tacttgcacacctcccgagattactcacccttg

SEQ ID NO: 610547 - DNA, 33 bp, Homo sapien
ctttacagaaacacaaatgatggtttgcaaaat

SEQ ID NO: 610548 - DNA, 33 bp, Homo sapien
ctttacagaaacacaactgatggtttgcaaaat

SEQ ID NO: 610549 - DNA, 33 bp, Homo sapien
ggtcacaactggacagcctacaatctgtcatct

SEQ ID NO: 610550 - DNA, 33 bp, Homo sapien
ggtcacaactggacaggctacaatctgtcatct

SEQ ID NO: 610551 - DNA, 33 bp, Homo sapien
tggctctgctagaccccatagaagttgcaaata

SEQ ID NO: 610552 - DNA, 33 bp, Homo sapien
tggctctgctagacccgatagaagttgcaaata

SEQ ID NO: 610553 - DNA, 33 bp, Homo sapien
taactaagagtaaaagcctggtttgctggttct

SEQ ID NO: 610554 - DNA, 33 bp, Homo sapien
taactaagagtaaaaggctggtttgctggttct

SEQ ID NO: 610555 - DNA, 33 bp, Homo sapien
agaacctagaagaggacgaaattcagctcatgg

SEQ ID NO: 610556 - DNA, 33 bp, Homo sapien
agaacctagaagaggaggaaattcagctcatgg

SEQ ID NO: 610557 - DNA, 33 bp, Homo sapien
taatgagactcaaatagaatgcaaattgcctga

SEQ ID NO: 610558 - DNA, 33 bp, Homo sapien
taatgagactcaaatataatgcaaattgcctga

SEQ ID NO: 610559 - DNA, 33 bp, Homo sapien
cttcaccaattcaacaatcatcccaatcctggg

SEQ ID NO: 610560 - DNA, 33 bp, Homo sapien
cttcaccaattcaacagtcatcccaatcctggg

SEQ ID NO: 610561 - DNA, 33 bp, Homo sapien
aaatgaaaaaatgtcacgccttctctgtgaatg

SEQ ID NO: 610562 - DNA, 33 bp, Homo sapien
aaatgaaaaaatgtcatgccttctctgtgaatg

SEQ ID NO: 610563 - DNA, 33 bp, Homo sapien
acaagaatcgactggaacccaaaatttggaaaa

SEQ ID NO: 610564 - DNA, 33 bp, Homo sapien
acaagaatcgactggagcccaaaatttggaaaa

SEQ ID NO: 610565 - DNA, 33 bp, Homo sapien
taactcacattggccaatagaataagaccagag

SEQ ID NO: 610566 - DNA, 33 bp, Homo sapien
taactcacattggccagtagaataagaccagag

SEQ ID NO: 610567 - DNA, 33 bp, Homo sapien
tgactctgatttgaaccatgtaactcacattgg

SEQ ID NO: 610568 - DNA, 33 bp, Homo sapien
tgactctgatttgaacgatgtaactcacattgg

SEQ ID NO: 610569 - DNA, 33 bp, Homo sapien
tgagggtaacagggacactaaaaaatgttagag

SEQ ID NO: 610570 - DNA, 33 bp, Homo sapien
tgagggtaacagggaccctaaaaaatgttagag

SEQ ID NO: 610571 - DNA, 33 bp, Homo sapien
agtataaaagccctcaagtgtgttttgcaagca

SEQ ID NO: 610572 - DNA, 33 bp, Homo sapien
agtataaaagccctcacgtgtgttttgcaagca

SEQ ID NO: 610573 - DNA, 33 bp, Homo sapien
attacaaagcggctgacgtaggcacaatactgt

SEQ ID NO: 610574 - DNA, 33 bp, Homo sapien
attacaaagcggctgaggtaggcacaatactgt

SEQ ID NO: 610575 - DNA, 33 bp, Homo sapien
ttaaacaattggataaaacaggaaacatgagtc

SEQ ID NO: 610576 - DNA, 33 bp, Homo sapien
ttaaacaattggataagacaggaaacatgagtc

SEQ ID NO: 610577 - DNA, 33 bp, Homo sapien
gttataaagcaatttacaacatcaaacaaagcc

SEQ ID NO: 610578 - DNA, 33 bp, Homo sapien
gttataaagcaatttataacatcaaacaaagcc

SEQ ID NO: 610579 - DNA, 33 bp, Homo sapien
aggtaagaaaaggagaagtgtcattttctgttt

SEQ ID NO: 610580 - DNA, 33 bp, Homo sapien
aggtaagaaaaggagaggtgtcattttctgttt

SEQ ID NO: 610581 - DNA, 33 bp, Homo sapien
aaaggaacaacaaaaacaagcacaacatcgttg

SEQ ID NO: 610582 - DNA, 33 bp, Homo sapien
aaaggaacaacaaaaagaagcacaacatcgttg

SEQ ID NO: 610583 - DNA, 33 bp, Homo sapien
gtggttaatgttatgaagaaacacaacatgaat

SEQ ID NO: 610584 - DNA, 33 bp, Homo sapien
gtggttaatgttatgaggaaacacaacatgaat

SEQ ID NO: 610585 - DNA, 33 bp, Homo sapien
tagatttaagtgaggcaagggagctggactaat

SEQ ID NO: 610586 - DNA, 33 bp, Homo sapien
tagatttaagtgaggcgagggagctggactaat

SEQ ID NO: 610587 - DNA, 33 bp, Homo sapien
gcccagtgtgaaatacaacccgggaaagtgctg

SEQ ID NO: 610588 - DNA, 33 bp, Homo sapien
gcccagtgtgaaatacgacccgggaaagtgctg

SEQ ID NO: 610589 - DNA, 33 bp, Homo sapien
atcaatttggacaaccccttagacattttttgt

SEQ ID NO: 610590 - DNA, 33 bp, Homo sapien
atcaatttggacaacctcttagacattttttgt

SEQ ID NO: 610591 - DNA, 33 bp, Homo sapien
ataactgaggtagtcacccaaataacttagagc

SEQ ID NO: 610592 - DNA, 33 bp, Homo sapien
ataactgaggtagtcatccaaataacttagagc

SEQ ID NO: 610593 - DNA, 33 bp, Homo sapien
aaacacaattaaccgacgttgcagatatttcat

SEQ ID NO: 610594 - DNA, 33 bp, Homo sapien
aaacacaattaaccgatgttgcagatatttcat

SEQ ID NO: 610595 - DNA, 33 bp, Homo sapien
ctggtggctcatctccacttgaggagaatcagg

SEQ ID NO: 610596 - DNA, 33 bp, Homo sapien
ctggtggctcatctccgcttgaggagaatcagg

SEQ ID NO: 610597 - DNA, 33 bp, Homo sapien
ttagtgtgcagaattacacataatggggaaagg

SEQ ID NO: 610598 - DNA, 33 bp, Homo sapien
ttagtgtgcagaattatacataatggggaaagg

SEQ ID NO: 610599 - DNA, 33 bp, Homo sapien
ctctaagtgagaaacacaaaggatatggcataa

SEQ ID NO: 610600 - DNA, 33 bp, Homo sapien
ctctaagtgagaaacagaaaggatatggcataa

SEQ ID NO: 610601 - DNA, 33 bp, Homo sapien
tgtcaatataaacagaagatttggaacccttgc

SEQ ID NO: 610602 - DNA, 33 bp, Homo sapien
tgtcaatataaacagacgatttggaacccttgc

SEQ ID NO: 610603 - DNA, 33 bp, Homo sapien
tgtaaaatagtttcgacggtttcctgtttctta

SEQ ID NO: 610604 - DNA, 33 bp, Homo sapien
tgtaaaatagtttcgatggtttcctgtttctta

SEQ ID NO: 610605 - DNA, 33 bp, Homo sapien
cctgttgatctgtgaccatttggaactgctaga

SEQ ID NO: 610606 - DNA, 33 bp, Homo sapien
cctgttgatctgtgactatttggaactgctaga

SEQ ID NO: 610607 - DNA, 33 bp, Homo sapien
tcatttatatgcaatgccagaagcttagaagaa

SEQ ID NO: 610608 - DNA, 33 bp, Homo sapien
tcatttatatgcaatgtcagaagcttagaagaa

SEQ ID NO: 610609 - DNA, 33 bp, Homo sapien
gctgagcaagggactcagaactccattttggcc

SEQ ID NO: 610610 - DNA, 33 bp, Homo sapien
gctgagcaagggactcggaactccattttggcc

SEQ ID NO: 610611 - DNA, 33 bp, Homo sapien
cacttgataaatgatcaatggtggctatttaag

SEQ ID NO: 610612 - DNA, 33 bp, Homo sapien
cacttgataaatgatccatggtggctatttaag

SEQ ID NO: 610613 - DNA, 33 bp, Homo sapien
cacatattataaaacaagagccctccctaattt

SEQ ID NO: 610614 - DNA, 33 bp, Homo sapien
cacatattataaaacaggagccctccctaattt

SEQ ID NO: 610615 - DNA, 33 bp, Homo sapien
aatgtaattaaaatgcaatgtataaaatagatt

SEQ ID NO: 610616 - DNA, 33 bp, Homo sapien
aatgtaattaaaatgccatgtataaaatagatt

SEQ ID NO: 610617 - DNA, 33 bp, Homo sapien
aaagattaattatgtacgcctaatgagataaca

SEQ ID NO: 610618 - DNA, 33 bp, Homo sapien
aaagattaattatgtatgcctaatgagataaca

SEQ ID NO: 610619 - DNA, 33 bp, Homo sapien
caaattggagaaatgcaagttttctgttgtgat

SEQ ID NO: 610620 - DNA, 33 bp, Homo sapien
caaattggagaaatgctagttttctgttgtgat

SEQ ID NO: 610621 - DNA, 33 bp, Homo sapien
ttggttcatttattcacgcatcaaatatttatt

SEQ ID NO: 610622 - DNA, 33 bp, Homo sapien
ttggttcatttattcatgcatcaaatatttatt

SEQ ID NO: 610623 - DNA, 33 bp, Homo sapien
aagtgcagtataggaacttcaaaggaattccaa

SEQ ID NO: 610624 - DNA, 33 bp, Homo sapien
aagtgcagtataggaagttcaaaggaattccaa

SEQ ID NO: 610625 - DNA, 33 bp, Homo sapien
gtttaaaatcagatcactgaaggtttaatttac

SEQ ID NO: 610626 - DNA, 33 bp, Homo sapien
gtttaaaatcagatcattgaaggtttaatttac

SEQ ID NO: 610627 - DNA, 33 bp, Homo sapien
cttgtgaaggtgttaggaaatgagaacgctcat

SEQ ID NO: 610628 - DNA, 33 bp, Homo sapien
cttgtgaaggtgttagtaaatgagaacgctcat

SEQ ID NO: 610629 - DNA, 33 bp, Homo sapien
tcaagtgtggcacccaagtattgtgattctaat

SEQ ID NO: 610630 - DNA, 33 bp, Homo sapien
tcaagtgtggcacccaggtattgtgattctaat

SEQ ID NO: 610631 - DNA, 33 bp, Homo sapien
ttaacttgcccacaatcaactggtgtgatcagg

SEQ ID NO: 610632 - DNA, 33 bp, Homo sapien
ttaacttgcccacaattaactggtgtgatcagg

SEQ ID NO: 610633 - DNA, 33 bp, Homo sapien
gatctcaaataggacccagttctgactttatat

SEQ ID NO: 610634 - DNA, 33 bp, Homo sapien
gatctcaaataggaccgagttctgactttatat

SEQ ID NO: 610635 - DNA, 33 bp, Homo sapien
gtcaaacctgaaaactcagatcccagcaccaat

SEQ ID NO: 610636 - DNA, 33 bp, Homo sapien
gtcaaacctgaaaactgagatcccagcaccaat

SEQ ID NO: 610637 - DNA, 33 bp, Homo sapien
acgctggtcttcccaccatgaatgctgaggcag

SEQ ID NO: 610638 - DNA, 33 bp, Homo sapien
acgctggtcttcccactatgaatgctgaggcag

SEQ ID NO: 610639 - DNA, 33 bp, Homo sapien
gccacacaaggtccaaatctcttatcattcaga

SEQ ID NO: 610640 - DNA, 33 bp, Homo sapien
gccacacaaggtccaagtctcttatcattcaga

SEQ ID NO: 610641 - DNA, 33 bp, Homo sapien
acatagcaaggaatcaaactcgttaggacctct

SEQ ID NO: 610642 - DNA, 33 bp, Homo sapien
acatagcaaggaatcacactcgttaggacctct

SEQ ID NO: 610643 - DNA, 33 bp, Homo sapien
atgcctccggagagaaactcacaccaatacact

SEQ ID NO: 610644 - DNA, 33 bp, Homo sapien
atgcctccggagagaacctcacaccaatacact

SEQ ID NO: 610645 - DNA, 33 bp, Homo sapien
tgttgccaagtagttagaaacagattgcaatgc

SEQ ID NO: 610646 - DNA, 33 bp, Homo sapien
tgttgccaagtagttataaacagattgcaatgc

SEQ ID NO: 610647 - DNA, 33 bp, Homo sapien
tcaagaggtcatctctcaccatggtttgccaag

SEQ ID NO: 610648 - DNA, 33 bp, Homo sapien
tcaagaggtcatctcttaccatggtttgccaag

SEQ ID NO: 610649 - DNA, 33 bp, Homo sapien
ttgaaaacattatcgacgtgtcttctctcatga

SEQ ID NO: 610650 - DNA, 33 bp, Homo sapien
ttgaaaacattatcgatgtgtcttctctcatga

SEQ ID NO: 610651 - DNA, 33 bp, Homo sapien
ttcatttcagtcttaaaaaagttctatcctatg

SEQ ID NO: 610652 - DNA, 33 bp, Homo sapien
ttcatttcagtcttaataaagttctatcctatg

SEQ ID NO: 610653 - DNA, 33 bp, Homo sapien
caagactgccaagataacaggatccagagaggc

SEQ ID NO: 610654 - DNA, 33 bp, Homo sapien
caagactgccaagatagcaggatccagagaggc

SEQ ID NO: 610655 - DNA, 33 bp, Homo sapien
agagtgctgacatgaagtaaatctggttaaatg

SEQ ID NO: 610656 - DNA, 33 bp, Homo sapien
agagtgctgacatgaattaaatctggttaaatg

SEQ ID NO: 610657 - DNA, 33 bp, Homo sapien
ggattccttctatagcacttttctcatctcaag

SEQ ID NO: 610658 - DNA, 33 bp, Homo sapien
ggattccttctatagcgcttttctcatctcaag

SEQ ID NO: 610659 - DNA, 33 bp, Homo sapien
caaactgagttttagtgacagaaggtgacttga

SEQ ID NO: 610660 - DNA, 33 bp, Homo sapien
caaactgagttttagttacagaaggtgacttga

SEQ ID NO: 610661 - DNA, 33 bp, Homo sapien
ctgccctttctgcctacacctgggatctgtcaa

SEQ ID NO: 610662 - DNA, 33 bp, Homo sapien
ctgccctttctgcctatacctgggatctgtcaa

SEQ ID NO: 610663 - DNA, 33 bp, Homo sapien
taaatggggaaataacggcttttcaaggttatt

SEQ ID NO: 610664 - DNA, 33 bp, Homo sapien
taaatggggaaataactgcttttcaaggttatt

SEQ ID NO: 610665 - DNA, 33 bp, Homo sapien
cctagtgtgcaagaaacattattgatgtcttat

SEQ ID NO: 610666 - DNA, 33 bp, Homo sapien
cctagtgtgcaagaaatattattgatgtcttat

SEQ ID NO: 610667 - DNA, 33 bp, Homo sapien
ggtaaacctaggcctacggttgccatcaatata

SEQ ID NO: 610668 - DNA, 33 bp, Homo sapien
ggtaaacctaggcctatggttgccatcaatata

SEQ ID NO: 610669 - DNA, 33 bp, Homo sapien
ctattgcagtatggaaagatccagagtgcttgc

SEQ ID NO: 610670 - DNA, 33 bp, Homo sapien
ctattgcagtatggaaggatccagagtgcttgc

SEQ ID NO: 610671 - DNA, 33 bp, Homo sapien
cctgagattagcaatcacacatggtttatttta

SEQ ID NO: 610672 - DNA, 33 bp, Homo sapien
cctgagattagcaatcgcacatggtttatttta

SEQ ID NO: 610673 - DNA, 33 bp, Homo sapien
ccaacctcagtagatccaaggacattaatcaga

SEQ ID NO: 610674 - DNA, 33 bp, Homo sapien
ccaacctcagtagatctaaggacattaatcaga

SEQ ID NO: 610675 - DNA, 33 bp, Homo sapien
attataaatgaatccacgtactcatagcacagc

SEQ ID NO: 610676 - DNA, 33 bp, Homo sapien
attataaatgaatccatgtactcatagcacagc

SEQ ID NO: 610677 - DNA, 33 bp, Homo sapien
ttttgttatggtagcacatagatacattgctcc

SEQ ID NO: 610678 - DNA, 33 bp, Homo sapien
ttttgttatggtagcagatagatacattgctcc

SEQ ID NO: 610679 - DNA, 33 bp, Homo sapien
ccgcagttttgaaggtcaagaggtattctaccc

SEQ ID NO: 610680 - DNA, 33 bp, Homo sapien
ccgcagttttgaaggtgaagaggtattctaccc

SEQ ID NO: 610681 - DNA, 33 bp, Homo sapien
aaaaatgcaaaggaaagttagcaccactctaaa

SEQ ID NO: 610682 - DNA, 33 bp, Homo sapien
aaaaatgcaaaggaaatttagcaccactctaaa

SEQ ID NO: 610683 - DNA, 33 bp, Homo sapien
aactgcacatgtcacccagagatttcctgtggg

SEQ ID NO: 610684 - DNA, 33 bp, Homo sapien
aactgcacatgtcacctagagatttcctgtggg

SEQ ID NO: 610685 - DNA, 33 bp, Homo sapien
agaccctcctggcaagcaagttaatggcattta

SEQ ID NO: 610686 - DNA, 33 bp, Homo sapien
agaccctcctggcaaggaagttaatggcattta

SEQ ID NO: 610687 - DNA, 33 bp, Homo sapien
ggaggaatatggtcaaataataggtctaccact

SEQ ID NO: 610688 - DNA, 33 bp, Homo sapien
ggaggaatatggtcaagtaataggtctaccact

SEQ ID NO: 610689 - DNA, 33 bp, Homo sapien
ttttggtacagccagaacttctaatttactcag

SEQ ID NO: 610690 - DNA, 33 bp, Homo sapien
ttttggtacagccagagcttctaatttactcag

SEQ ID NO: 610691 - DNA, 33 bp, Homo sapien
aaaaatagtccctacaggaatttcacagctata

SEQ ID NO: 610692 - DNA, 33 bp, Homo sapien
aaaaatagtccctacatgaatttcacagctata

SEQ ID NO: 610693 - DNA, 33 bp, Homo sapien
ctctttgtggtcacacactctgtaataagactt

SEQ ID NO: 610694 - DNA, 33 bp, Homo sapien
ctctttgtggtcacactctctgtaataagactt

SEQ ID NO: 610695 - DNA, 33 bp, Homo sapien
ctttaataatttctaccgaagtttgccctttgt

SEQ ID NO: 610696 - DNA, 33 bp, Homo sapien
ctttaataatttctactgaagtttgccctttgt

SEQ ID NO: 610697 - DNA, 33 bp, Homo sapien
gagaatgataaaaacaatattcatggcagtaat

SEQ ID NO: 610698 - DNA, 33 bp, Homo sapien
gagaatgataaaaacagtattcatggcagtaat

SEQ ID NO: 610699 - DNA, 33 bp, Homo sapien
ttttgtaaaatgggtaataagtgaatggatttc

SEQ ID NO: 610700 - DNA, 33 bp, Homo sapien
ttttgtaaaatgggtagtaagtgaatggatttc

SEQ ID NO: 610701 - DNA, 33 bp, Homo sapien
ggaaaaaaattatctaggctggaataggccagg

SEQ ID NO: 610702 - DNA, 33 bp, Homo sapien
ggaaaaaaattatctatgctggaataggccagg

SEQ ID NO: 610703 - DNA, 33 bp, Homo sapien
tcccatttcctgcagaacatcccattaatccac

SEQ ID NO: 610704 - DNA, 33 bp, Homo sapien
tcccatttcctgcagagcatcccattaatccac

SEQ ID NO: 610705 - DNA, 33 bp, Homo sapien
tcgccaagcatatttaagtgaaatgtacggccc

SEQ ID NO: 610706 - DNA, 33 bp, Homo sapien
tcgccaagcatatttatgtgaaatgtacggccc

SEQ ID NO: 610707 - DNA, 33 bp, Homo sapien
ccctgtccctttggcccaccttgtctctgtgcg

SEQ ID NO: 610708 - DNA, 33 bp, Homo sapien
ccctgtccctttggcctaccttgtctctgtgcg

SEQ ID NO: 610709 - DNA, 33 bp, Homo sapien
ggaagagaagccaggacgcaggcccaagcagct

SEQ ID NO: 610710 - DNA, 33 bp, Homo sapien
ggaagagaagccaggatgcaggcccaagcagct

SEQ ID NO: 610711 - DNA, 33 bp, Homo sapien
gagtctcaaagtacagacaacactgtagcatca

SEQ ID NO: 610712 - DNA, 33 bp, Homo sapien
gagtctcaaagtacagccaacactgtagcatca

SEQ ID NO: 610713 - DNA, 33 bp, Homo sapien
tttgtttttttcatcaaagtggttagttagcat

SEQ ID NO: 610714 - DNA, 33 bp, Homo sapien
tttgtttttttcatcacagtggttagttagcat

SEQ ID NO: 610715 - DNA, 33 bp, Homo sapien
tgatcctacatggaccacatccacagcttatcc

SEQ ID NO: 610716 - DNA, 33 bp, Homo sapien
tgatcctacatggaccgcatccacagcttatcc

SEQ ID NO: 610717 - DNA, 33 bp, Homo sapien
agaaactcaagcagtcacttattgtcaaatgta

SEQ ID NO: 610718 - DNA, 33 bp, Homo sapien
agaaactcaagcagtcgcttattgtcaaatgta

SEQ ID NO: 610719 - DNA, 33 bp, Homo sapien
gttttaaatcccataacatagtttgaattaaaa

SEQ ID NO: 610720 - DNA, 33 bp, Homo sapien
gttttaaatcccataagatagtttgaattaaaa

SEQ ID NO: 610721 - DNA, 33 bp, Homo sapien
tgttaatgttttctaactacttggtattgttaa

SEQ ID NO: 610722 - DNA, 33 bp, Homo sapien
tgttaatgttttctaagtacttggtattgttaa

SEQ ID NO: 610723 - DNA, 33 bp, Homo sapien
ggtgaatcacacataccagggacttttggggtg

SEQ ID NO: 610724 - DNA, 33 bp, Homo sapien
ggtgaatcacacatacgagggacttttggggtg

SEQ ID NO: 610725 - DNA, 33 bp, Homo sapien
agatcctttccccagcacttcgatttgtcagtt

SEQ ID NO: 610726 - DNA, 33 bp, Homo sapien
agatcctttccccagcgcttcgatttgtcagtt

SEQ ID NO: 610727 - DNA, 33 bp, Homo sapien
tatcgtgcttaacaaaagtaatggggactgttc

SEQ ID NO: 610728 - DNA, 33 bp, Homo sapien
tatcgtgcttaacaaaggtaatggggactgttc

SEQ ID NO: 610729 - DNA, 33 bp, Homo sapien
aggtatgtttagggaaccacctatataggctcg

SEQ ID NO: 610730 - DNA, 33 bp, Homo sapien
aggtatgtttagggaatcacctatataggctcg

SEQ ID NO: 610731 - DNA, 33 bp, Homo sapien
atggtccattggggaggacatgtggagatgctg

SEQ ID NO: 610732 - DNA, 33 bp, Homo sapien
atggtccattggggagtacatgtggagatgctg

SEQ ID NO: 610733 - DNA, 33 bp, Homo sapien
acttaagactttaccacgaggacataatccagg

SEQ ID NO: 610734 - DNA, 33 bp, Homo sapien
acttaagactttaccatgaggacataatccagg

SEQ ID NO: 610735 - DNA, 33 bp, Homo sapien
aaaatgaaaactttcaacatacttccttggtac

SEQ ID NO: 610736 - DNA, 33 bp, Homo sapien
aaaatgaaaactttcagcatacttccttggtac

SEQ ID NO: 610737 - DNA, 33 bp, Homo sapien
ttttatttgggtagaaaaatttagacggcaggt

SEQ ID NO: 610738 - DNA, 33 bp, Homo sapien
ttttatttgggtagaagaatttagacggcaggt

SEQ ID NO: 610739 - DNA, 33 bp, Homo sapien
gtatggagtattataacattactgtaacaatag

SEQ ID NO: 610740 - DNA, 33 bp, Homo sapien
gtatggagtattataagattactgtaacaatag

SEQ ID NO: 610741 - DNA, 33 bp, Homo sapien
tccagcttcataatacacattaataataatgaa

SEQ ID NO: 610742 - DNA, 33 bp, Homo sapien
tccagcttcataatacgcattaataataatgaa

SEQ ID NO: 610743 - DNA, 33 bp, Homo sapien
agagtgaaaacaatcacagaaaaatacttgtca

SEQ ID NO: 610744 - DNA, 33 bp, Homo sapien
agagtgaaaacaatcagagaaaaatacttgtca

SEQ ID NO: 610745 - DNA, 33 bp, Homo sapien
cagtgctcctaagtgactaagatgaaaagggca

SEQ ID NO: 610746 - DNA, 33 bp, Homo sapien
cagtgctcctaagtgattaagatgaaaagggca

SEQ ID NO: 610747 - DNA, 33 bp, Homo sapien
atttgcttctgttcatgaataaaacacctacca

SEQ ID NO: 610748 - DNA, 33 bp, Homo sapien
atttgcttctgttcattaataaaacacctacca

SEQ ID NO: 610749 - DNA, 33 bp, Homo sapien
ccacatgatactaccacaaatgtttaccaagtt

SEQ ID NO: 610750 - DNA, 33 bp, Homo sapien
ccacatgatactaccagaaatgtttaccaagtt

SEQ ID NO: 610751 - DNA, 33 bp, Homo sapien
ctgtcttcaatgctaacacaaatgtcctgaaaa

SEQ ID NO: 610752 - DNA, 33 bp, Homo sapien
ctgtcttcaatgctaatacaaatgtcctgaaaa

SEQ ID NO: 610753 - DNA, 33 bp, Homo sapien
tggtctccatgaactaaaaggggttaccataaa

SEQ ID NO: 610754 - DNA, 33 bp, Homo sapien
tggtctccatgaactataaggggttaccataaa

SEQ ID NO: 610755 - DNA, 33 bp, Homo sapien
tttggggtatttataacagtcagcgcaggaatg

SEQ ID NO: 610756 - DNA, 33 bp, Homo sapien
tttggggtatttataatagtcagcgcaggaatg

SEQ ID NO: 610757 - DNA, 33 bp, Homo sapien
aggtgcagttctgttcacgctgtttccttactt

SEQ ID NO: 610758 - DNA, 33 bp, Homo sapien
aggtgcagttctgttcgcgctgtttccttactt

SEQ ID NO: 610759 - DNA, 33 bp, Homo sapien
tagatgaaccttacagaatctgaagcatgcaaa

SEQ ID NO: 610760 - DNA, 33 bp, Homo sapien
tagatgaaccttacagcatctgaagcatgcaaa

SEQ ID NO: 610761 - DNA, 33 bp, Homo sapien
ctgacttatatttacaaatttccctggtattgt

SEQ ID NO: 610762 - DNA, 33 bp, Homo sapien
ctgacttatatttacagatttccctggtattgt

SEQ ID NO: 610763 - DNA, 33 bp, Homo sapien
gttacaatagttgcaacagaccaacaatttcta

SEQ ID NO: 610764 - DNA, 33 bp, Homo sapien
gttacaatagttgcaatagaccaacaatttcta

SEQ ID NO: 610765 - DNA, 33 bp, Homo sapien
atgttccaggaaacaactcataaaaggcatttg

SEQ ID NO: 610766 - DNA, 33 bp, Homo sapien
atgttccaggaaacaagtcataaaaggcatttg

SEQ ID NO: 610767 - DNA, 33 bp, Homo sapien
acctttgacctaaagacgttgctatattcacat

SEQ ID NO: 610768 - DNA, 33 bp, Homo sapien
acctttgacctaaagatgttgctatattcacat

SEQ ID NO: 610769 - DNA, 33 bp, Homo sapien
taaaaattgacctacaagattcagttttatgaa

SEQ ID NO: 610770 - DNA, 33 bp, Homo sapien
taaaaattgacctacaggattcagttttatgaa

SEQ ID NO: 610771 - DNA, 33 bp, Homo sapien
tagttttggcacttagcatttactaacaatatg

SEQ ID NO: 610772 - DNA, 33 bp, Homo sapien
tagttttggcacttaggatttactaacaatatg

SEQ ID NO: 610773 - DNA, 33 bp, Homo sapien
gaatagcagaccagtgccaaattacaggagttc

SEQ ID NO: 610774 - DNA, 33 bp, Homo sapien
gaatagcagaccagtggcaaattacaggagttc

SEQ ID NO: 610775 - DNA, 33 bp, Homo sapien
tcagtcaaatattctgcagaaagacaaccactg

SEQ ID NO: 610776 - DNA, 33 bp, Homo sapien
tcagtcaaatattctggagaaagacaaccactg

SEQ ID NO: 610777 - DNA, 33 bp, Homo sapien
atagcatcaaactaggaaccagaatgcccacgg

SEQ ID NO: 610778 - DNA, 33 bp, Homo sapien
atagcatcaaactagggaccagaatgcccacgg

SEQ ID NO: 610779 - DNA, 33 bp, Homo sapien
aataccaagtgaaactaaaaagagcatgtggga

SEQ ID NO: 610780 - DNA, 33 bp, Homo sapien
aataccaagtgaaactgaaaagagcatgtggga

SEQ ID NO: 610781 - DNA, 33 bp, Homo sapien
tcagatgtgttaacgaaacattatcaacactag

SEQ ID NO: 610782 - DNA, 33 bp, Homo sapien
tcagatgtgttaacgacacattatcaacactag

SEQ ID NO: 610783 - DNA, 33 bp, Homo sapien
attggtaaagatactgcagcagaaataaatgaa

SEQ ID NO: 610784 - DNA, 33 bp, Homo sapien
attggtaaagatactgtagcagaaataaatgaa

SEQ ID NO: 610785 - DNA, 33 bp, Homo sapien
atatagacttctgacaaggggatcctaaacagc

SEQ ID NO: 610786 - DNA, 33 bp, Homo sapien
atatagacttctgacagggggatcctaaacagc

SEQ ID NO: 610787 - DNA, 33 bp, Homo sapien
ctcctgaactatttaccggtcagcatcacgaaa

SEQ ID NO: 610788 - DNA, 33 bp, Homo sapien
ctcctgaactatttactggtcagcatcacgaaa

SEQ ID NO: 610789 - DNA, 33 bp, Homo sapien
tactaatttcagttcacggtatgagttggaggg

SEQ ID NO: 610790 - DNA, 33 bp, Homo sapien
tactaatttcagttcatggtatgagttggaggg

SEQ ID NO: 610791 - DNA, 33 bp, Homo sapien
ggaagtgctccagtaactattttggagacaaaa

SEQ ID NO: 610792 - DNA, 33 bp, Homo sapien
ggaagtgctccagtaattattttggagacaaaa

SEQ ID NO: 610793 - DNA, 33 bp, Homo sapien
taatcacttctcacccaactgcatagctaagac

SEQ ID NO: 610794 - DNA, 33 bp, Homo sapien
taatcacttctcacccgactgcatagctaagac

SEQ ID NO: 610795 - DNA, 33 bp, Homo sapien
ttcccctgtgttaaaggatgattaaacttgtta

SEQ ID NO: 610796 - DNA, 33 bp, Homo sapien
ttcccctgtgttaaagtatgattaaacttgtta

SEQ ID NO: 610797 - DNA, 33 bp, Homo sapien
gaatgcacccatttaaagttatgtttctccatt

SEQ ID NO: 610798 - DNA, 33 bp, Homo sapien
gaatgcacccatttaacgttatgtttctccatt

SEQ ID NO: 610799 - DNA, 33 bp, Homo sapien
tttctctgtcacaatacgcaaatttcaagtgtt

SEQ ID NO: 610800 - DNA, 33 bp, Homo sapien
tttctctgtcacaatatgcaaatttcaagtgtt

SEQ ID NO: 610801 - DNA, 33 bp, Homo sapien
gggtcagcgttgtccaatggaactataatgcaa

SEQ ID NO: 610802 - DNA, 33 bp, Homo sapien
gggtcagcgttgtccagtggaactataatgcaa

SEQ ID NO: 610803 - DNA, 33 bp, Homo sapien
cactttggcccacaaacacagtctcaattttca

SEQ ID NO: 610804 - DNA, 33 bp, Homo sapien
cactttggcccacaaatacagtctcaattttca

SEQ ID NO: 610805 - DNA, 33 bp, Homo sapien
gtttacgagttcatcacagaataaaattcgtat

SEQ ID NO: 610806 - DNA, 33 bp, Homo sapien
gtttacgagttcatcatagaataaaattcgtat

SEQ ID NO: 610807 - DNA, 33 bp, Homo sapien
agaaatgatgacatcaaacctggctttgcctat

SEQ ID NO: 610808 - DNA, 33 bp, Homo sapien
agaaatgatgacatcagacctggctttgcctat

SEQ ID NO: 610809 - DNA, 33 bp, Homo sapien
tatcctttgatctgcagaattcattttttcaca

SEQ ID NO: 610810 - DNA, 33 bp, Homo sapien
tatcctttgatctgcataattcattttttcaca

SEQ ID NO: 610811 - DNA, 33 bp, Homo sapien
agtagagaacattgaaaataatctgtgtatttt

SEQ ID NO: 610812 - DNA, 33 bp, Homo sapien
agtagagaacattgaagataatctgtgtatttt

SEQ ID NO: 610813 - DNA, 33 bp, Homo sapien
aaaaagttattgaaaaaggagtactgaactcaa

SEQ ID NO: 610814 - DNA, 33 bp, Homo sapien
aaaaagttattgaaaagggagtactgaactcaa

SEQ ID NO: 610815 - DNA, 33 bp, Homo sapien
cataaaagcttacaaaatcaaaaagagaatgag

SEQ ID NO: 610816 - DNA, 33 bp, Homo sapien
cataaaagcttacaaagtcaaaaagagaatgag

SEQ ID NO: 610817 - DNA, 33 bp, Homo sapien
acataaatgaacttacactattcatggactcta

SEQ ID NO: 610818 - DNA, 33 bp, Homo sapien
acataaatgaacttacgctattcatggactcta

SEQ ID NO: 610819 - DNA, 33 bp, Homo sapien
caggtacaagcttagccaagaactttctaaaca

SEQ ID NO: 610820 - DNA, 33 bp, Homo sapien
caggtacaagcttagcgaagaactttctaaaca

SEQ ID NO: 610821 - DNA, 33 bp, Homo sapien
caggtcctaagagaaacggaagaatctggtata

SEQ ID NO: 610822 - DNA, 33 bp, Homo sapien
caggtcctaagagaaatggaagaatctggtata

SEQ ID NO: 610823 - DNA, 33 bp, Homo sapien
aaaaatggaagtaatcaaggccagctgggtgtg

SEQ ID NO: 610824 - DNA, 33 bp, Homo sapien
aaaaatggaagtaatcgaggccagctgggtgtg

SEQ ID NO: 610825 - DNA, 33 bp, Homo sapien
cccactccaggttaccgccttctaatcatagaa

SEQ ID NO: 610826 - DNA, 33 bp, Homo sapien
cccactccaggttacctccttctaatcatagaa

SEQ ID NO: 610827 - DNA, 33 bp, Homo sapien
gccagctcacttaaagaaattttatatgaatca

SEQ ID NO: 610828 - DNA, 33 bp, Homo sapien
gccagctcacttaaaggaattttatatgaatca

SEQ ID NO: 610829 - DNA, 33 bp, Homo sapien
atcaccatgttcaaaaatcaattttaccataaa

SEQ ID NO: 610830 - DNA, 33 bp, Homo sapien
atcaccatgttcaaaactcaattttaccataaa

SEQ ID NO: 610831 - DNA, 33 bp, Homo sapien
atttctgcatcatccaactttataacaaaagct

SEQ ID NO: 610832 - DNA, 33 bp, Homo sapien
atttctgcatcatccagctttataacaaaagct

SEQ ID NO: 610833 - DNA, 33 bp, Homo sapien
gatattatgctaggcactcatagacaatacatt

SEQ ID NO: 610834 - DNA, 33 bp, Homo sapien
gatattatgctaggcagtcatagacaatacatt

SEQ ID NO: 610835 - DNA, 33 bp, Homo sapien
attattttaaaagttgaatgtagaaagcataat

SEQ ID NO: 610836 - DNA, 33 bp, Homo sapien
attattttaaaagttggatgtagaaagcataat

SEQ ID NO: 610837 - DNA, 33 bp, Homo sapien
acgtctgcataaaatacccatgtaaatccacac

SEQ ID NO: 610838 - DNA, 33 bp, Homo sapien
acgtctgcataaaatagccatgtaaatccacac

SEQ ID NO: 610839 - DNA, 33 bp, Homo sapien
gcccttccagcttcataagaaccatacagatga

SEQ ID NO: 610840 - DNA, 33 bp, Homo sapien
gcccttccagcttcatcagaaccatacagatga

SEQ ID NO: 610841 - DNA, 33 bp, Homo sapien
aggctaaacaaatgacccaataaggaaggtact

SEQ ID NO: 610842 - DNA, 33 bp, Homo sapien
aggctaaacaaatgactcaataaggaaggtact

SEQ ID NO: 610843 - DNA, 33 bp, Homo sapien
gctctcattttcaagaaaacacacgaaagagtc

SEQ ID NO: 610844 - DNA, 33 bp, Homo sapien
gctctcattttcaagataacacacgaaagagtc

SEQ ID NO: 610845 - DNA, 33 bp, Homo sapien
tgcattgtcacatgggcaaaataatccagtgaa

SEQ ID NO: 610846 - DNA, 33 bp, Homo sapien
tgcattgtcacatgggtaaaataatccagtgaa

SEQ ID NO: 610847 - DNA, 33 bp, Homo sapien
agtagtttctctagtacggatatttttggcaaa

SEQ ID NO: 610848 - DNA, 33 bp, Homo sapien
agtagtttctctagtatggatatttttggcaaa

SEQ ID NO: 610849 - DNA, 33 bp, Homo sapien
ctcctacctctctggcccttttctcttgaacac

SEQ ID NO: 610850 - DNA, 33 bp, Homo sapien
ctcctacctctctggcgcttttctcttgaacac

SEQ ID NO: 610851 - DNA, 33 bp, Homo sapien
gatgctcagtttcataataaatgcctgccttgg

SEQ ID NO: 610852 - DNA, 33 bp, Homo sapien
gatgctcagtttcatagtaaatgcctgccttgg

SEQ ID NO: 610853 - DNA, 33 bp, Homo sapien
gttgggaattgaagaacagtacggtctacagaa

SEQ ID NO: 610854 - DNA, 33 bp, Homo sapien
gttgggaattgaagaatagtacggtctacagaa

SEQ ID NO: 610855 - DNA, 33 bp, Homo sapien
gaacctggcttgcttccacccatattaatctca

SEQ ID NO: 610856 - DNA, 33 bp, Homo sapien
gaacctggcttgcttctacccatattaatctca

SEQ ID NO: 610857 - DNA, 33 bp, Homo sapien
aagaagactgtcaccacatgcaggatctttgac

SEQ ID NO: 610858 - DNA, 33 bp, Homo sapien
aagaagactgtcaccagatgcaggatctttgac

SEQ ID NO: 610859 - DNA, 33 bp, Homo sapien
tgagagtttggaaatacgaatctctgaactagg

SEQ ID NO: 610860 - DNA, 33 bp, Homo sapien
tgagagtttggaaatatgaatctctgaactagg

SEQ ID NO: 610861 - DNA, 33 bp, Homo sapien
tgttttagattttgtgaacatccaatttgtaag

SEQ ID NO: 610862 - DNA, 33 bp, Homo sapien
tgttttagattttgtggacatccaatttgtaag

SEQ ID NO: 610863 - DNA, 33 bp, Homo sapien
gaatatacgtatcttgaaaaacatcagttccat

SEQ ID NO: 610864 - DNA, 33 bp, Homo sapien
gaatatacgtatcttgcaaaacatcagttccat

SEQ ID NO: 610865 - DNA, 33 bp, Homo sapien
atatgaagaagtgttacgaggaaaaaatgcagt

SEQ ID NO: 610866 - DNA, 33 bp, Homo sapien
atatgaagaagtgttatgaggaaaaaatgcagt

SEQ ID NO: 610867 - DNA, 33 bp, Homo sapien
gtactctgactgtgacaccatattttaaacaag

SEQ ID NO: 610868 - DNA, 33 bp, Homo sapien
gtactctgactgtgactccatattttaaacaag

SEQ ID NO: 610869 - DNA, 33 bp, Homo sapien
ataggaattattcaggaaacattttgaacatga

SEQ ID NO: 610870 - DNA, 33 bp, Homo sapien
ataggaattattcagggaacattttgaacatga

SEQ ID NO: 610871 - DNA, 33 bp, Homo sapien
acttttgcaatagttacgatgagttgatgatag

SEQ ID NO: 610872 - DNA, 33 bp, Homo sapien
acttttgcaatagttatgatgagttgatgatag

SEQ ID NO: 610873 - DNA, 33 bp, Homo sapien
tgtaaatggtggcacacggtttttagtaaacag

SEQ ID NO: 610874 - DNA, 33 bp, Homo sapien
tgtaaatggtggcacatggtttttagtaaacag

SEQ ID NO: 610875 - DNA, 33 bp, Homo sapien
ggttcacctgcataatcagtccaaagtaagcat

SEQ ID NO: 610876 - DNA, 33 bp, Homo sapien
ggttcacctgcataattagtccaaagtaagcat

SEQ ID NO: 610877 - DNA, 33 bp, Homo sapien
caaaattcctcgcacagaaatataacctttttg

SEQ ID NO: 610878 - DNA, 33 bp, Homo sapien
caaaattcctcgcacataaatataacctttttg

SEQ ID NO: 610879 - DNA, 33 bp, Homo sapien
tacaatagaaaaaccgaatatatttttattgag

SEQ ID NO: 610880 - DNA, 33 bp, Homo sapien
tacaatagaaaaaccggatatatttttattgag

SEQ ID NO: 610881 - DNA, 33 bp, Homo sapien
gccctcatccccttaaatgcaaacttatgttaa

SEQ ID NO: 610882 - DNA, 33 bp, Homo sapien
gccctcatccccttaagtgcaaacttatgttaa

SEQ ID NO: 610883 - DNA, 33 bp, Homo sapien
gttgcaaggagttactaaaaacaagattagagt

SEQ ID NO: 610884 - DNA, 33 bp, Homo sapien
gttgcaaggagttactgaaaacaagattagagt

SEQ ID NO: 610885 - DNA, 33 bp, Homo sapien
aaaatgtggcatctaacagaaatcctaaaatgc

SEQ ID NO: 610886 - DNA, 33 bp, Homo sapien
aaaatgtggcatctaagagaaatcctaaaatgc

SEQ ID NO: 610887 - DNA, 33 bp, Homo sapien
cattattttatttgaaactttcttgtgatactc

SEQ ID NO: 610888 - DNA, 33 bp, Homo sapien
cattattttatttgaatctttcttgtgatactc

SEQ ID NO: 610889 - DNA, 33 bp, Homo sapien
aattctgagcaattgcaaaaactcacaaacaac

SEQ ID NO: 610890 - DNA, 33 bp, Homo sapien
aattctgagcaattgcgaaaactcacaaacaac

SEQ ID NO: 610891 - DNA, 33 bp, Homo sapien
gatttgacagaacttacggttaaagctaatgat

SEQ ID NO: 610892 - DNA, 33 bp, Homo sapien
gatttgacagaacttatggttaaagctaatgat

SEQ ID NO: 610893 - DNA, 33 bp, Homo sapien
catgaattacgatcacaaaaatagcatcaagat

SEQ ID NO: 610894 - DNA, 33 bp, Homo sapien
catgaattacgatcacgaaaatagcatcaagat

SEQ ID NO: 610895 - DNA, 33 bp, Homo sapien
aaattatattgctcacagtaacaaaatatttag

SEQ ID NO: 610896 - DNA, 33 bp, Homo sapien
aaattatattgctcactgtaacaaaatatttag

SEQ ID NO: 610897 - DNA, 33 bp, Homo sapien
tcatgttcctcacttacgatgatatctctggga

SEQ ID NO: 610898 - DNA, 33 bp, Homo sapien
tcatgttcctcacttatgatgatatctctggga

SEQ ID NO: 610899 - DNA, 33 bp, Homo sapien
tgaatttgtctccaaactggtttgcattctttc

SEQ ID NO: 610900 - DNA, 33 bp, Homo sapien
tgaatttgtctccaaagtggtttgcattctttc

SEQ ID NO: 610901 - DNA, 33 bp, Homo sapien
acttgtgagattggggaaaaagtcctatatttt

SEQ ID NO: 610902 - DNA, 33 bp, Homo sapien
acttgtgagattgggggaaaagtcctatatttt

SEQ ID NO: 610903 - DNA, 33 bp, Homo sapien
aaacaacataaaattcactttcttaacaatttt

SEQ ID NO: 610904 - DNA, 33 bp, Homo sapien
aaacaacataaaattcgctttcttaacaatttt

SEQ ID NO: 610905 - DNA, 33 bp, Homo sapien
ggcttcaggatgagtgaatagaaaattattgtt

SEQ ID NO: 610906 - DNA, 33 bp, Homo sapien
ggcttcaggatgagtgcatagaaaattattgtt

SEQ ID NO: 610907 - DNA, 33 bp, Homo sapien
acttttgagcttaacaacatatgatgcagctgc

SEQ ID NO: 610908 - DNA, 33 bp, Homo sapien
acttttgagcttaacagcatatgatgcagctgc

SEQ ID NO: 610909 - DNA, 33 bp, Homo sapien
tcttagaatgagactcaactgacattttgaagg

SEQ ID NO: 610910 - DNA, 33 bp, Homo sapien
tcttagaatgagactcgactgacattttgaagg

SEQ ID NO: 610911 - DNA, 33 bp, Homo sapien
ttttaaaaagatatcaatgagtaagggaatatt

SEQ ID NO: 610912 - DNA, 33 bp, Homo sapien
ttttaaaaagatatcagtgagtaagggaatatt

SEQ ID NO: 610913 - DNA, 33 bp, Homo sapien
ttgcctttaatgtttaacatccacacttatttg

SEQ ID NO: 610914 - DNA, 33 bp, Homo sapien
ttgcctttaatgtttaccatccacacttatttg

SEQ ID NO: 610915 - DNA, 33 bp, Homo sapien
gtgacaggacagtcagaccttggtaaaaatcac

SEQ ID NO: 610916 - DNA, 33 bp, Homo sapien
gtgacaggacagtcaggccttggtaaaaatcac

SEQ ID NO: 610917 - DNA, 33 bp, Homo sapien
ccaacgaggtgcaacagatttttcttttaactt

SEQ ID NO: 610918 - DNA, 33 bp, Homo sapien
ccaacgaggtgcaacatatttttcttttaactt

SEQ ID NO: 610919 - DNA, 33 bp, Homo sapien
tgaatggcatagcaagacacttatctgttcaaa

SEQ ID NO: 610920 - DNA, 33 bp, Homo sapien
tgaatggcatagcaagtcacttatctgttcaaa

SEQ ID NO: 610921 - DNA, 33 bp, Homo sapien
gccttgctaggtggaaagaagtggctctgtcaa

SEQ ID NO: 610922 - DNA, 33 bp, Homo sapien
gccttgctaggtggaaggaagtggctctgtcaa

SEQ ID NO: 610923 - DNA, 33 bp, Homo sapien
atgaagctacatttaacagggcttggcctgaaa

SEQ ID NO: 610924 - DNA, 33 bp, Homo sapien
atgaagctacatttaatagggcttggcctgaaa

SEQ ID NO: 610925 - DNA, 33 bp, Homo sapien
gagaatgggttaaacagcaactctcaggtaaac

SEQ ID NO: 610926 - DNA, 33 bp, Homo sapien
gagaatgggttaaacatcaactctcaggtaaac

SEQ ID NO: 610927 - DNA, 33 bp, Homo sapien
tggcttgaactctccaaaatgggagcttaggta

SEQ ID NO: 610928 - DNA, 33 bp, Homo sapien
tggcttgaactctccataatgggagcttaggta

SEQ ID NO: 610929 - DNA, 33 bp, Homo sapien
atcttactagagctgacggttttaagtgtggca

SEQ ID NO: 610930 - DNA, 33 bp, Homo sapien
atcttactagagctgatggttttaagtgtggca

SEQ ID NO: 610931 - DNA, 33 bp, Homo sapien
aagaaaacatagaaggaactccttgatgagagg

SEQ ID NO: 610932 - DNA, 33 bp, Homo sapien
aagaaaacatagaaggtactccttgatgagagg

SEQ ID NO: 610933 - DNA, 33 bp, Homo sapien
tattagaggagtataaaccacaaaatgttatta

SEQ ID NO: 610934 - DNA, 33 bp, Homo sapien
tattagaggagtataagccacaaaatgttatta

SEQ ID NO: 610935 - DNA, 33 bp, Homo sapien
ttataactgatccaaccccaaaattaattacaa

SEQ ID NO: 610936 - DNA, 33 bp, Homo sapien
ttataactgatccaactccaaaattaattacaa

SEQ ID NO: 610937 - DNA, 33 bp, Homo sapien
tagatacaggcaaggagctgaaatatttacaga

SEQ ID NO: 610938 - DNA, 33 bp, Homo sapien
tagatacaggcaaggatctgaaatatttacaga

SEQ ID NO: 610939 - DNA, 33 bp, Homo sapien
tgacattttactgctagccaatgagtaaatcat

SEQ ID NO: 610940 - DNA, 33 bp, Homo sapien
tgacattttactgctatccaatgagtaaatcat

SEQ ID NO: 610941 - DNA, 33 bp, Homo sapien
ggtaactcaggcaaaggctattacaattagggc

SEQ ID NO: 610942 - DNA, 33 bp, Homo sapien
ggtaactcaggcaaagtctattacaattagggc

SEQ ID NO: 610943 - DNA, 33 bp, Homo sapien
gtttcagataaactgacgcttgagggtttttgt

SEQ ID NO: 610944 - DNA, 33 bp, Homo sapien
gtttcagataaactgatgcttgagggtttttgt

SEQ ID NO: 610945 - DNA, 33 bp, Homo sapien
taggtaaagatgtgccaaaatggtggtttgctg

SEQ ID NO: 610946 - DNA, 33 bp, Homo sapien
taggtaaagatgtgccgaaatggtggtttgctg

SEQ ID NO: 610947 - DNA, 33 bp, Homo sapien
acccacaaactaacaaatgttccagggaagtcc

SEQ ID NO: 610948 - DNA, 33 bp, Homo sapien
acccacaaactaacaattgttccagggaagtcc

SEQ ID NO: 610949 - DNA, 33 bp, Homo sapien
tgatgaaaagttccaactgatgccatggacttc

SEQ ID NO: 610950 - DNA, 33 bp, Homo sapien
tgatgaaaagttccaagtgatgccatggacttc

SEQ ID NO: 610951 - DNA, 33 bp, Homo sapien
gtgataagcaatatgacgagagagacttctgat

SEQ ID NO: 610952 - DNA, 33 bp, Homo sapien
gtgataagcaatatgatgagagagacttctgat

SEQ ID NO: 610953 - DNA, 33 bp, Homo sapien
atctacattatttgcaccaattttaagcatgac

SEQ ID NO: 610954 - DNA, 33 bp, Homo sapien
atctacattatttgcatcaattttaagcatgac

SEQ ID NO: 610955 - DNA, 33 bp, Homo sapien
tcagagagagagaagacggtggttggagttttg

SEQ ID NO: 610956 - DNA, 33 bp, Homo sapien
tcagagagagagaagatggtggttggagttttg

SEQ ID NO: 610957 - DNA, 33 bp, Homo sapien
gcattaaatagcaagacggcaaatgaacctcag

SEQ ID NO: 610958 - DNA, 33 bp, Homo sapien
gcattaaatagcaagatggcaaatgaacctcag

SEQ ID NO: 610959 - DNA, 33 bp, Homo sapien
aagcagaatattcaagccaagagaagtgtaagt

SEQ ID NO: 610960 - DNA, 33 bp, Homo sapien
aagcagaatattcaagtcaagagaagtgtaagt

SEQ ID NO: 610961 - DNA, 33 bp, Homo sapien
tctccaaaattctgaaaggcagtatatcatata

SEQ ID NO: 610962 - DNA, 33 bp, Homo sapien
tctccaaaattctgaacggcagtatatcatata

SEQ ID NO: 610963 - DNA, 33 bp, Homo sapien
agttggacggactgtaaaatgtcaatattattg

SEQ ID NO: 610964 - DNA, 33 bp, Homo sapien
agttggacggactgtacaatgtcaatattattg

SEQ ID NO: 610965 - DNA, 33 bp, Homo sapien
ttctccaacatataatcacagaaacaacacaat

SEQ ID NO: 610966 - DNA, 33 bp, Homo sapien
ttctccaacatataatgacagaaacaacacaat

SEQ ID NO: 610967 - DNA, 33 bp, Homo sapien
atgtctcattttgctccctttgcatattgccct

SEQ ID NO: 610968 - DNA, 33 bp, Homo sapien
atgtctcattttgctctctttgcatattgccct

SEQ ID NO: 610969 - DNA, 33 bp, Homo sapien
cgactactatgaataacttacatcagggctagg

SEQ ID NO: 610970 - DNA, 33 bp, Homo sapien
cgactactatgaataatttacatcagggctagg

SEQ ID NO: 610971 - DNA, 33 bp, Homo sapien
ttataatctggttacacatccacttaggttaca

SEQ ID NO: 610972 - DNA, 33 bp, Homo sapien
ttataatctggttacatatccacttaggttaca

SEQ ID NO: 610973 - DNA, 33 bp, Homo sapien
tcaagttagtctagcaggaagagagatgattaa

SEQ ID NO: 610974 - DNA, 33 bp, Homo sapien
tcaagttagtctagcatgaagagagatgattaa

SEQ ID NO: 610975 - DNA, 33 bp, Homo sapien
gacatggtcttactaactctgccatccagtttg

SEQ ID NO: 610976 - DNA, 33 bp, Homo sapien
gacatggtcttactaattctgccatccagtttg

SEQ ID NO: 610977 - DNA, 33 bp, Homo sapien
cactcataaatcagaaactcaatttgaaccctg

SEQ ID NO: 610978 - DNA, 33 bp, Homo sapien
cactcataaatcagaagctcaatttgaaccctg

SEQ ID NO: 610979 - DNA, 33 bp, Homo sapien
atttccgatgagtgcaaattataccaccttttt

SEQ ID NO: 610980 - DNA, 33 bp, Homo sapien
atttccgatgagtgcatattataccaccttttt

SEQ ID NO: 610981 - DNA, 33 bp, Homo sapien
atttcattcaatacaaagtgttaaaaagtccca

SEQ ID NO: 610982 - DNA, 33 bp, Homo sapien
atttcattcaatacaaggtgttaaaaagtccca

SEQ ID NO: 610983 - DNA, 33 bp, Homo sapien
catagagaatagcagacgaacaaccacttgcag

SEQ ID NO: 610984 - DNA, 33 bp, Homo sapien
catagagaatagcagatgaacaaccacttgcag

SEQ ID NO: 610985 - DNA, 33 bp, Homo sapien
gatcatttggctatacaaaattgacaataaaga

SEQ ID NO: 610986 - DNA, 33 bp, Homo sapien
gatcatttggctatacgaaattgacaataaaga

SEQ ID NO: 610987 - DNA, 33 bp, Homo sapien
agagctctcagggaaccggtgaccactttggtc

SEQ ID NO: 610988 - DNA, 33 bp, Homo sapien
agagctctcagggaactggtgaccactttggtc

SEQ ID NO: 610989 - DNA, 33 bp, Homo sapien
tggcacaaagctcccagagcaagaatttataaa

SEQ ID NO: 610990 - DNA, 33 bp, Homo sapien
tggcacaaagctcccatagcaagaatttataaa

SEQ ID NO: 610991 - DNA, 33 bp, Homo sapien
atagaacttcaactgacgagtaataaaggctca

SEQ ID NO: 610992 - DNA, 33 bp, Homo sapien
atagaacttcaactgatgagtaataaaggctca

SEQ ID NO: 610993 - DNA, 33 bp, Homo sapien
tggatatgatgtaaaaagtgataagtgtggtaa

SEQ ID NO: 610994 - DNA, 33 bp, Homo sapien
tggatatgatgtaaaaggtgataagtgtggtaa

SEQ ID NO: 610995 - DNA, 33 bp, Homo sapien
ccaaccttggctgttacgagtattttagaagct

SEQ ID NO: 610996 - DNA, 33 bp, Homo sapien
ccaaccttggctgttatgagtattttagaagct

SEQ ID NO: 610997 - DNA, 33 bp, Homo sapien
tccttcattttcaaaagcctctcagtttggatg

SEQ ID NO: 610998 - DNA, 33 bp, Homo sapien
tccttcattttcaaaatcctctcagtttggatg

SEQ ID NO: 610999 - DNA, 33 bp, Homo sapien
ctttagaactcacaaacggcactttcttttcca

SEQ ID NO: 611000 - DNA, 33 bp, Homo sapien
ctttagaactcacaaatggcactttcttttcca

SEQ ID NO: 611001 - DNA, 33 bp, Homo sapien
gttatttggattttccaatagcaaacaatctgg

SEQ ID NO: 611002 - DNA, 33 bp, Homo sapien
gttatttggattttccgatagcaaacaatctgg

SEQ ID NO: 611003 - DNA, 33 bp, Homo sapien
ctatggaatcgatgcaatgatcagaaatctcat

SEQ ID NO: 611004 - DNA, 33 bp, Homo sapien
ctatggaatcgatgcagtgatcagaaatctcat

SEQ ID NO: 611005 - DNA, 33 bp, Homo sapien
tcctttcattttccataaacacgtggtgagacc

SEQ ID NO: 611006 - DNA, 33 bp, Homo sapien
tcctttcattttccatgaacacgtggtgagacc

SEQ ID NO: 611007 - DNA, 33 bp, Homo sapien
acgcagcacttattcaccttagaaggaagatct

SEQ ID NO: 611008 - DNA, 33 bp, Homo sapien
acgcagcacttattcatcttagaaggaagatct

SEQ ID NO: 611009 - DNA, 33 bp, Homo sapien
agagctctacatgagtcaaactgttctgattgc

SEQ ID NO: 611010 - DNA, 33 bp, Homo sapien
agagctctacatgagtgaaactgttctgattgc

SEQ ID NO: 611011 - DNA, 33 bp, Homo sapien
tggatcacatcacttaacttgtttgagtcacac

SEQ ID NO: 611012 - DNA, 33 bp, Homo sapien
tggatcacatcacttaccttgtttgagtcacac

SEQ ID NO: 611013 - DNA, 33 bp, Homo sapien
catagggtgaggtataagaaaggagctgaagat

SEQ ID NO: 611014 - DNA, 33 bp, Homo sapien
catagggtgaggtataggaaaggagctgaagat

SEQ ID NO: 611015 - DNA, 33 bp, Homo sapien
tatttatccaagaatacggaacactcagattct

SEQ ID NO: 611016 - DNA, 33 bp, Homo sapien
tatttatccaagaatatggaacactcagattct

SEQ ID NO: 611017 - DNA, 33 bp, Homo sapien
ctcagattctgagggcagattgtacatgtgatt

SEQ ID NO: 611018 - DNA, 33 bp, Homo sapien
ctcagattctgagggctgattgtacatgtgatt

SEQ ID NO: 611019 - DNA, 33 bp, Homo sapien
ggtgtctgaagagaggcaatcttgtgggactaa

SEQ ID NO: 611020 - DNA, 33 bp, Homo sapien
ggtgtctgaagagagggaatcttgtgggactaa

SEQ ID NO: 611021 - DNA, 33 bp, Homo sapien
taagtgctcatttcaccggaaaataaattcctg

SEQ ID NO: 611022 - DNA, 33 bp, Homo sapien
taagtgctcatttcactggaaaataaattcctg

SEQ ID NO: 611023 - DNA, 33 bp, Homo sapien
tgtcaacaatcaacaacgtgttaagcatcttaa

SEQ ID NO: 611024 - DNA, 33 bp, Homo sapien
tgtcaacaatcaacaatgtgttaagcatcttaa

SEQ ID NO: 611025 - DNA, 33 bp, Homo sapien
aaacaaaacaaaacataagaataaactgcaaat

SEQ ID NO: 611026 - DNA, 33 bp, Homo sapien
aaacaaaacaaaacatcagaataaactgcaaat

SEQ ID NO: 611027 - DNA, 33 bp, Homo sapien
catgctgttctctacaccatggtaagaggacgg

SEQ ID NO: 611028 - DNA, 33 bp, Homo sapien
catgctgttctctacatcatggtaagaggacgg

SEQ ID NO: 611029 - DNA, 33 bp, Homo sapien
aaagcatgtaattataagtgtgtaaaaagtcag

SEQ ID NO: 611030 - DNA, 33 bp, Homo sapien
aaagcatgtaattataggtgtgtaaaaagtcag

SEQ ID NO: 611031 - DNA, 33 bp, Homo sapien
ataccaagctacaatacacatctgaagacttac

SEQ ID NO: 611032 - DNA, 33 bp, Homo sapien
ataccaagctacaatatacatctgaagacttac

SEQ ID NO: 611033 - DNA, 33 bp, Homo sapien
ctatcatatatttcaaccttctgttaccaatga

SEQ ID NO: 611034 - DNA, 33 bp, Homo sapien
ctatcatatatttcaatcttctgttaccaatga

SEQ ID NO: 611035 - DNA, 33 bp, Homo sapien
aagaatgctgtatggagaatttttttctttagt

SEQ ID NO: 611036 - DNA, 33 bp, Homo sapien
aagaatgctgtatggataatttttttctttagt

SEQ ID NO: 611037 - DNA, 33 bp, Homo sapien
accttacccccaactaggtgagaagctagaaca

SEQ ID NO: 611038 - DNA, 33 bp, Homo sapien
accttacccccaactatgtgagaagctagaaca

SEQ ID NO: 611039 - DNA, 33 bp, Homo sapien
accatttcggtatccaccacgtgttaggacttc

SEQ ID NO: 611040 - DNA, 33 bp, Homo sapien
accatttcggtatccatcacgtgttaggacttc

SEQ ID NO: 611041 - DNA, 33 bp, Homo sapien
ttactttgtcgtaaaaaggaatgaaacaccgat

SEQ ID NO: 611042 - DNA, 33 bp, Homo sapien
ttactttgtcgtaaaagggaatgaaacaccgat

SEQ ID NO: 611043 - DNA, 33 bp, Homo sapien
caccatggtacattctcaccagcaataaatgag

SEQ ID NO: 611044 - DNA, 33 bp, Homo sapien
caccatggtacattctgaccagcaataaatgag

SEQ ID NO: 611045 - DNA, 33 bp, Homo sapien
cttgcttttaacccaacttcttaattcagaaca

SEQ ID NO: 611046 - DNA, 33 bp, Homo sapien
cttgcttttaacccaatttcttaattcagaaca

SEQ ID NO: 611047 - DNA, 33 bp, Homo sapien
tttagttgagtatgaaaagtagagctagcaaca

SEQ ID NO: 611048 - DNA, 33 bp, Homo sapien
tttagttgagtatgaagagtagagctagcaaca

SEQ ID NO: 611049 - DNA, 33 bp, Homo sapien
gtataaatggaagaaccagattcacaaggaaaa

SEQ ID NO: 611050 - DNA, 33 bp, Homo sapien
gtataaatggaagaacgagattcacaaggaaaa

SEQ ID NO: 611051 - DNA, 33 bp, Homo sapien
ggctgtgcagctagtcaatcctcagtttattta

SEQ ID NO: 611052 - DNA, 33 bp, Homo sapien
ggctgtgcagctagtctatcctcagtttattta

SEQ ID NO: 611053 - DNA, 33 bp, Homo sapien
gtctgacaggagataactggacacttttggggg

SEQ ID NO: 611054 - DNA, 33 bp, Homo sapien
gtctgacaggagataattggacacttttggggg

SEQ ID NO: 611055 - DNA, 33 bp, Homo sapien
tctgttgctgcatgacagaaagaaaatggtcaa

SEQ ID NO: 611056 - DNA, 33 bp, Homo sapien
tctgttgctgcatgacggaaagaaaatggtcaa

SEQ ID NO: 611057 - DNA, 33 bp, Homo sapien
aaaaacagtgtcttgtaaagtataaattcagta

SEQ ID NO: 611058 - DNA, 33 bp, Homo sapien
aaaaacagtgtcttgtgaagtataaattcagta

SEQ ID NO: 611059 - DNA, 33 bp, Homo sapien
aaggtgaggaattgagactaataaatcaatcta

SEQ ID NO: 611060 - DNA, 33 bp, Homo sapien
aaggtgaggaattgaggctaataaatcaatcta

SEQ ID NO: 611061 - DNA, 33 bp, Homo sapien
gtatcttatttcccagacataatgaagaggtca

SEQ ID NO: 611062 - DNA, 33 bp, Homo sapien
gtatcttatttcccaggcataatgaagaggtca

SEQ ID NO: 611063 - DNA, 33 bp, Homo sapien
acagattttcatatacaaatgcagtggctgtgg

SEQ ID NO: 611064 - DNA, 33 bp, Homo sapien
acagattttcatatacgaatgcagtggctgtgg

SEQ ID NO: 611065 - DNA, 33 bp, Homo sapien
aatataacttctttgaaccaaaatacttaaaaa

SEQ ID NO: 611066 - DNA, 33 bp, Homo sapien
aatataacttctttgagccaaaatacttaaaaa

SEQ ID NO: 611067 - DNA, 33 bp, Homo sapien
gtgagtctggctatcaaaactgaaacgtcctca

SEQ ID NO: 611068 - DNA, 33 bp, Homo sapien
gtgagtctggctatcataactgaaacgtcctca

SEQ ID NO: 611069 - DNA, 33 bp, Homo sapien
tttcactttccaggccacaacaactaccaatct

SEQ ID NO: 611070 - DNA, 33 bp, Homo sapien
tttcactttccaggccgcaacaactaccaatct

SEQ ID NO: 611071 - DNA, 33 bp, Homo sapien
agaaattcacatcacaaccaactcttacttgaa

SEQ ID NO: 611072 - DNA, 33 bp, Homo sapien
agaaattcacatcacagccaactcttacttgaa

SEQ ID NO: 611073 - DNA, 33 bp, Homo sapien
ttcattcggccaaagcaacaattgatgtggtat

SEQ ID NO: 611074 - DNA, 33 bp, Homo sapien
ttcattcggccaaagcgacaattgatgtggtat

SEQ ID NO: 611075 - DNA, 33 bp, Homo sapien
cttaaaatatgcacataatcttggcagcatatg

SEQ ID NO: 611076 - DNA, 33 bp, Homo sapien
cttaaaatatgcacattatcttggcagcatatg

SEQ ID NO: 611077 - DNA, 33 bp, Homo sapien
aacctatacaatggtagcatggccataaatctt

SEQ ID NO: 611078 - DNA, 33 bp, Homo sapien
aacctatacaatggtatcatggccataaatctt

SEQ ID NO: 611079 - DNA, 33 bp, Homo sapien
ctctaagtctctgtaacaaagatttggggttaa

SEQ ID NO: 611080 - DNA, 33 bp, Homo sapien
ctctaagtctctgtaagaaagatttggggttaa

SEQ ID NO: 611081 - DNA, 33 bp, Homo sapien
aatcacatccagtttggataaataaaagttaat

SEQ ID NO: 611082 - DNA, 33 bp, Homo sapien
aatcacatccagtttgtataaataaaagttaat

SEQ ID NO: 611083 - DNA, 33 bp, Homo sapien
tgtaataaggtaataaagactgtttcagtggta

SEQ ID NO: 611084 - DNA, 33 bp, Homo sapien
tgtaataaggtaataaggactgtttcagtggta

SEQ ID NO: 611085 - DNA, 33 bp, Homo sapien
cctgctttgtctccacagatgagtgactttggc

SEQ ID NO: 611086 - DNA, 33 bp, Homo sapien
cctgctttgtctccacggatgagtgactttggc

SEQ ID NO: 611087 - DNA, 33 bp, Homo sapien
caaggtctctgctcacaaaataaagacagaact

SEQ ID NO: 611088 - DNA, 33 bp, Homo sapien
caaggtctctgctcacgaaataaagacagaact

SEQ ID NO: 611089 - DNA, 33 bp, Homo sapien
ccttcaaaatgtcctcgccttacggtatgcctg

SEQ ID NO: 611090 - DNA, 33 bp, Homo sapien
ccttcaaaatgtcctctccttacggtatgcctg

SEQ ID NO: 611091 - DNA, 33 bp, Homo sapien
caccagtaatagaaaactctacattcattgcta

SEQ ID NO: 611092 - DNA, 33 bp, Homo sapien
caccagtaatagaaaattctacattcattgcta

SEQ ID NO: 611093 - DNA, 33 bp, Homo sapien
ttctttccactctcacaatatattcaccaaaga

SEQ ID NO: 611094 - DNA, 33 bp, Homo sapien
ttctttccactctcacgatatattcaccaaaga

SEQ ID NO: 611095 - DNA, 33 bp, Homo sapien
tctaattaaaagaagcgagagattgcatagtaa

SEQ ID NO: 611096 - DNA, 33 bp, Homo sapien
tctaattaaaagaagctagagattgcatagtaa

SEQ ID NO: 611097 - DNA, 33 bp, Homo sapien
aaaatggccttcagccactagccagctaggaat

SEQ ID NO: 611098 - DNA, 33 bp, Homo sapien
aaaatggccttcagccgctagccagctaggaat

SEQ ID NO: 611099 - DNA, 33 bp, Homo sapien
ttcttggtatcaaagtaaatattttgcactatt

SEQ ID NO: 611100 - DNA, 33 bp, Homo sapien
ttcttggtatcaaagtgaatattttgcactatt

SEQ ID NO: 611101 - DNA, 33 bp, Homo sapien
tagtaattgagagtacagactgaagactgcatt

SEQ ID NO: 611102 - DNA, 33 bp, Homo sapien
tagtaattgagagtacggactgaagactgcatt

SEQ ID NO: 611103 - DNA, 33 bp, Homo sapien
actgaaagtaacaaaggcctaaaatgtattaag

SEQ ID NO: 611104 - DNA, 33 bp, Homo sapien
actgaaagtaacaaagtcctaaaatgtattaag

SEQ ID NO: 611105 - DNA, 33 bp, Homo sapien
ttttagaattagcaagaactttaactctttgga

SEQ ID NO: 611106 - DNA, 33 bp, Homo sapien
ttttagaattagcaaggactttaactctttgga

SEQ ID NO: 611107 - DNA, 33 bp, Homo sapien
catatggtagttatcacgtaagcatttcaaatt

SEQ ID NO: 611108 - DNA, 33 bp, Homo sapien
catatggtagttatcatgtaagcatttcaaatt

SEQ ID NO: 611109 - DNA, 33 bp, Homo sapien
tccatccaccaagattcaactacacagtgagac

SEQ ID NO: 611110 - DNA, 33 bp, Homo sapien
tccatccaccaagatttaactacacagtgagac

SEQ ID NO: 611111 - DNA, 33 bp, Homo sapien
ggaaagtaatagggtcaaatacccagaagttca

SEQ ID NO: 611112 - DNA, 33 bp, Homo sapien
ggaaagtaatagggtccaatacccagaagttca

SEQ ID NO: 611113 - DNA, 33 bp, Homo sapien
tagggaattgacaaaacaaagaaaacagcccaa

SEQ ID NO: 611114 - DNA, 33 bp, Homo sapien
tagggaattgacaaaagaaagaaaacagcccaa

SEQ ID NO: 611115 - DNA, 33 bp, Homo sapien
gttgcaaagtagttaacagtcattgaaaggcag

SEQ ID NO: 611116 - DNA, 33 bp, Homo sapien
gttgcaaagtagttaagagtcattgaaaggcag

SEQ ID NO: 611117 - DNA, 33 bp, Homo sapien
tgagaaagtatttggactagagatatgtgatag

SEQ ID NO: 611118 - DNA, 33 bp, Homo sapien
tgagaaagtatttggattagagatatgtgatag

SEQ ID NO: 611119 - DNA, 33 bp, Homo sapien
gaaaggtagggcagaaacctttatgcattttca

SEQ ID NO: 611120 - DNA, 33 bp, Homo sapien
gaaaggtagggcagaaccctttatgcattttca

SEQ ID NO: 611121 - DNA, 33 bp, Homo sapien
tttatttttcagtgtccacctattccaaagttc

SEQ ID NO: 611122 - DNA, 33 bp, Homo sapien
tttatttttcagtgtctacctattccaaagttc

SEQ ID NO: 611123 - DNA, 33 bp, Homo sapien
aatataaatgctacaacctcgataagataaaca

SEQ ID NO: 611124 - DNA, 33 bp, Homo sapien
aatataaatgctacaagctcgataagataaaca

SEQ ID NO: 611125 - DNA, 33 bp, Homo sapien
cattttataccagaagacaatgaagaaaagtct

SEQ ID NO: 611126 - DNA, 33 bp, Homo sapien
cattttataccagaagtcaatgaagaaaagtct

SEQ ID NO: 611127 - DNA, 33 bp, Homo sapien
ctggacagaaatagcaagctaagtaaaagtgaa

SEQ ID NO: 611128 - DNA, 33 bp, Homo sapien
ctggacagaaatagcaggctaagtaaaagtgaa

SEQ ID NO: 611129 - DNA, 33 bp, Homo sapien
gtgactagtctcgtatcactgtcagcgtcctct

SEQ ID NO: 611130 - DNA, 33 bp, Homo sapien
gtgactagtctcgtattactgtcagcgtcctct

SEQ ID NO: 611131 - DNA, 33 bp, Homo sapien
aataaagaattgttccagactttgaacgattct

SEQ ID NO: 611132 - DNA, 33 bp, Homo sapien
aataaagaattgttcccgactttgaacgattct

SEQ ID NO: 611133 - DNA, 33 bp, Homo sapien
gattctatctactctcaaaaacagttgaatgtc

SEQ ID NO: 611134 - DNA, 33 bp, Homo sapien
gattctatctactctcgaaaacagttgaatgtc

SEQ ID NO: 611135 - DNA, 33 bp, Homo sapien
acctaatttcataccactagatatttgacaaaa

SEQ ID NO: 611136 - DNA, 33 bp, Homo sapien
acctaatttcataccagtagatatttgacaaaa

SEQ ID NO: 611137 - DNA, 33 bp, Homo sapien
atatttgacatgaaaacaaaagaacaagaaact

SEQ ID NO: 611138 - DNA, 33 bp, Homo sapien
atatttgacatgaaaagaaaagaacaagaaact

SEQ ID NO: 611139 - DNA, 33 bp, Homo sapien
actttaagaaagccccaatatcagtgagcctca

SEQ ID NO: 611140 - DNA, 33 bp, Homo sapien
actttaagaaagccccgatatcagtgagcctca

SEQ ID NO: 611141 - DNA, 33 bp, Homo sapien
aatatgagattgccgacctacttactgacagaa

SEQ ID NO: 611142 - DNA, 33 bp, Homo sapien
aatatgagattgccgatctacttactgacagaa

SEQ ID NO: 611143 - DNA, 33 bp, Homo sapien
tggggcttctgcacccacttttttctgtcagta

SEQ ID NO: 611144 - DNA, 33 bp, Homo sapien
tggggcttctgcacccgcttttttctgtcagta

SEQ ID NO: 611145 - DNA, 33 bp, Homo sapien
ctcttactgttcttccaacctgtactttctcta

SEQ ID NO: 611146 - DNA, 33 bp, Homo sapien
ctcttactgttcttccgacctgtactttctcta

SEQ ID NO: 611147 - DNA, 33 bp, Homo sapien
ataggggtcaacacaacgtgatagaaggaatag

SEQ ID NO: 611148 - DNA, 33 bp, Homo sapien
ataggggtcaacacaaggtgatagaaggaatag

SEQ ID NO: 611149 - DNA, 33 bp, Homo sapien
ataaagcaccaggaaaaaaatgtgcttgagcat

SEQ ID NO: 611150 - DNA, 33 bp, Homo sapien
ataaagcaccaggaaacaaatgtgcttgagcat

SEQ ID NO: 611151 - DNA, 33 bp, Homo sapien
cacatacctcaaacaaaattttcctgacccttt

SEQ ID NO: 611152 - DNA, 33 bp, Homo sapien
cacatacctcaaacaacattttcctgacccttt

SEQ ID NO: 611153 - DNA, 33 bp, Homo sapien
atctggcactctgactaactagatgtgtttcag

SEQ ID NO: 611154 - DNA, 33 bp, Homo sapien
atctggcactctgactgactagatgtgtttcag

SEQ ID NO: 611155 - DNA, 33 bp, Homo sapien
ctgtctgttttgtgaacaaagttttattggaac

SEQ ID NO: 611156 - DNA, 33 bp, Homo sapien
ctgtctgttttgtgaataaagttttattggaac

SEQ ID NO: 611157 - DNA, 33 bp, Homo sapien
aactgaagaagacagaacaagtaatttactagt

SEQ ID NO: 611158 - DNA, 33 bp, Homo sapien
aactgaagaagacagatcaagtaatttactagt

SEQ ID NO: 611159 - DNA, 33 bp, Homo sapien
tgtttttaattaatgaagtgtcacatatgtttc

SEQ ID NO: 611160 - DNA, 33 bp, Homo sapien
tgtttttaattaatgacgtgtcacatatgtttc

SEQ ID NO: 611161 - DNA, 33 bp, Homo sapien
gaagtcctcttgtgacccttacttcggattttt

SEQ ID NO: 611162 - DNA, 33 bp, Homo sapien
gaagtcctcttgtgactcttacttcggattttt

SEQ ID NO: 611163 - DNA, 33 bp, Homo sapien
tgagcatattcagagaaattgaaaaaaaatgaa

SEQ ID NO: 611164 - DNA, 33 bp, Homo sapien
tgagcatattcagagacattgaaaaaaaatgaa

SEQ ID NO: 611165 - DNA, 33 bp, Homo sapien
taacctaattttggaactgacaagccataattt

SEQ ID NO: 611166 - DNA, 33 bp, Homo sapien
taacctaattttggaagtgacaagccataattt

SEQ ID NO: 611167 - DNA, 33 bp, Homo sapien
tgcaaacactgaactcacgggaaaacaaggtcc

SEQ ID NO: 611168 - DNA, 33 bp, Homo sapien
tgcaaacactgaactcgcgggaaaacaaggtcc

SEQ ID NO: 611169 - DNA, 33 bp, Homo sapien
tgatagggaactgctacgttagattggttagcc

SEQ ID NO: 611170 - DNA, 33 bp, Homo sapien
tgatagggaactgctatgttagattggttagcc

SEQ ID NO: 611171 - DNA, 33 bp, Homo sapien
aaactcattatgttccaaaaaacaggaaaataa

SEQ ID NO: 611172 - DNA, 33 bp, Homo sapien
aaactcattatgttccgaaaaacaggaaaataa

SEQ ID NO: 611173 - DNA, 33 bp, Homo sapien
actcaacctctctctacgtggctgctcctcaaa

SEQ ID NO: 611174 - DNA, 33 bp, Homo sapien
actcaacctctctctatgtggctgctcctcaaa

SEQ ID NO: 611175 - DNA, 33 bp, Homo sapien
cagatacagggagagacgtaagggtggagataa

SEQ ID NO: 611176 - DNA, 33 bp, Homo sapien
cagatacagggagagatgtaagggtggagataa

SEQ ID NO: 611177 - DNA, 33 bp, Homo sapien
agaaagcacctttacccctccgctagcaatttg

SEQ ID NO: 611178 - DNA, 33 bp, Homo sapien
agaaagcacctttaccgctccgctagcaatttg

SEQ ID NO: 611179 - DNA, 33 bp, Homo sapien
cttttgatggtttgaccatggagtattagttta

SEQ ID NO: 611180 - DNA, 33 bp, Homo sapien
cttttgatggtttgactatggagtattagttta

SEQ ID NO: 611181 - DNA, 33 bp, Homo sapien
gaaaattgactaatacacaaactctctttttca

SEQ ID NO: 611182 - DNA, 33 bp, Homo sapien
gaaaattgactaatactcaaactctctttttca

SEQ ID NO: 611183 - DNA, 33 bp, Homo sapien
ttcatttagcgaaggacgaaattgaggttcaca

SEQ ID NO: 611184 - DNA, 33 bp, Homo sapien
ttcatttagcgaaggaggaaattgaggttcaca

SEQ ID NO: 611185 - DNA, 33 bp, Homo sapien
atcttgtttccagctaacagaagggtatttgaa

SEQ ID NO: 611186 - DNA, 33 bp, Homo sapien
atcttgtttccagctagcagaagggtatttgaa

SEQ ID NO: 611187 - DNA, 33 bp, Homo sapien
tatttgtaatattgtcacttagatagctcatgg

SEQ ID NO: 611188 - DNA, 33 bp, Homo sapien
tatttgtaatattgtcgcttagatagctcatgg

SEQ ID NO: 611189 - DNA, 33 bp, Homo sapien
tgttccaattagaccacagtaaggttgttaaaa

SEQ ID NO: 611190 - DNA, 33 bp, Homo sapien
tgttccaattagaccatagtaaggttgttaaaa

SEQ ID NO: 611191 - DNA, 33 bp, Homo sapien
tcattggttggatatgaaactctcggcggggct

SEQ ID NO: 611192 - DNA, 33 bp, Homo sapien
tcattggttggatatggaactctcggcggggct

SEQ ID NO: 611193 - DNA, 33 bp, Homo sapien
aatgcactgatgtttacacaggatctttcgaat

SEQ ID NO: 611194 - DNA, 33 bp, Homo sapien
aatgcactgatgtttagacaggatctttcgaat

SEQ ID NO: 611195 - DNA, 33 bp, Homo sapien
agaacttcatagataaataagttaaactgccat

SEQ ID NO: 611196 - DNA, 33 bp, Homo sapien
agaacttcatagataagtaagttaaactgccat

SEQ ID NO: 611197 - DNA, 33 bp, Homo sapien
tatttccagtccttacaaacattctgctgtatc

SEQ ID NO: 611198 - DNA, 33 bp, Homo sapien
tatttccagtccttacgaacattctgctgtatc

SEQ ID NO: 611199 - DNA, 33 bp, Homo sapien
attatgggtcaggaaacttagtaagtgagctta

SEQ ID NO: 611200 - DNA, 33 bp, Homo sapien
attatgggtcaggaaatttagtaagtgagctta

SEQ ID NO: 611201 - DNA, 33 bp, Homo sapien
tattgaagaatgacatcagaaaccaatatctgg

SEQ ID NO: 611202 - DNA, 33 bp, Homo sapien
tattgaagaatgacattagaaaccaatatctgg

SEQ ID NO: 611203 - DNA, 33 bp, Homo sapien
agcatctctgaaatccaaaactaacacagagga

SEQ ID NO: 611204 - DNA, 33 bp, Homo sapien
agcatctctgaaatccgaaactaacacagagga

SEQ ID NO: 611205 - DNA, 33 bp, Homo sapien
catgcaaagtatccaactgaaaaggcttttaat

SEQ ID NO: 611206 - DNA, 33 bp, Homo sapien
catgcaaagtatccaattgaaaaggcttttaat

SEQ ID NO: 611207 - DNA, 33 bp, Homo sapien
gatattttgaaggcaaatataataaacaatagc

SEQ ID NO: 611208 - DNA, 33 bp, Homo sapien
gatattttgaaggcaattataataaacaatagc

SEQ ID NO: 611209 - DNA, 33 bp, Homo sapien
acatgattcaatttcaccaatagatctagttct

SEQ ID NO: 611210 - DNA, 33 bp, Homo sapien
acatgattcaatttcatcaatagatctagttct

SEQ ID NO: 611211 - DNA, 33 bp, Homo sapien
gcaggttgtgcagtagaaaaactctagaagtca

SEQ ID NO: 611212 - DNA, 33 bp, Homo sapien
gcaggttgtgcagtaggaaaactctagaagtca

SEQ ID NO: 611213 - DNA, 33 bp, Homo sapien
aaactggcataattgacgtgaaagtaagattgt

SEQ ID NO: 611214 - DNA, 33 bp, Homo sapien
aaactggcataattgatgtgaaagtaagattgt

SEQ ID NO: 611215 - DNA, 33 bp, Homo sapien
tacaactcaataccttaaagcataaatcaaaca

SEQ ID NO: 611216 - DNA, 33 bp, Homo sapien
tacaactcaataccttgaagcataaatcaaaca

SEQ ID NO: 611217 - DNA, 33 bp, Homo sapien
aggaaacagaatgctacatgcaaaaggcatgca

SEQ ID NO: 611218 - DNA, 33 bp, Homo sapien
aggaaacagaatgctatatgcaaaaggcatgca

SEQ ID NO: 611219 - DNA, 33 bp, Homo sapien
cactaactctctaagggaatatcttttgtcatc

SEQ ID NO: 611220 - DNA, 33 bp, Homo sapien
cactaactctctaaggtaatatcttttgtcatc

SEQ ID NO: 611221 - DNA, 33 bp, Homo sapien
ctactaaaacctaaaaatttggaagatgttata

SEQ ID NO: 611222 - DNA, 33 bp, Homo sapien
ctactaaaacctaaaagtttggaagatgttata

SEQ ID NO: 611223 - DNA, 33 bp, Homo sapien
tctcatttcccgcaagacaaccagttgacagaa

SEQ ID NO: 611224 - DNA, 33 bp, Homo sapien
tctcatttcccgcaaggcaaccagttgacagaa

SEQ ID NO: 611225 - DNA, 33 bp, Homo sapien
agatttcatttgtggccgaggaaaaaagaggtg

SEQ ID NO: 611226 - DNA, 33 bp, Homo sapien
agatttcatttgtggctgaggaaaaaagaggtg

SEQ ID NO: 611227 - DNA, 33 bp, Homo sapien
tctgcatttctttacaaccctggactaaagctt

SEQ ID NO: 611228 - DNA, 33 bp, Homo sapien
tctgcatttctttacatccctggactaaagctt

SEQ ID NO: 611229 - DNA, 33 bp, Homo sapien
ggggttctgatcagggaaaaaagaatttggcta

SEQ ID NO: 611230 - DNA, 33 bp, Homo sapien
ggggttctgatcagggcaaaaagaatttggcta

SEQ ID NO: 611231 - DNA, 33 bp, Homo sapien
ctccattatccatagacaggaaaagacgtgaat

SEQ ID NO: 611232 - DNA, 33 bp, Homo sapien
ctccattatccatagagaggaaaagacgtgaat

SEQ ID NO: 611233 - DNA, 33 bp, Homo sapien
tctatggataatggagaacacgctcagctcttc

SEQ ID NO: 611234 - DNA, 33 bp, Homo sapien
tctatggataatggagtacacgctcagctcttc

SEQ ID NO: 611235 - DNA, 33 bp, Homo sapien
gtgttaacccactggaaagacagttcaatgttg

SEQ ID NO: 611236 - DNA, 33 bp, Homo sapien
gtgttaacccactggagagacagttcaatgttg

SEQ ID NO: 611237 - DNA, 33 bp, Homo sapien
aagtagataaaggtaacggaattggtttccaga

SEQ ID NO: 611238 - DNA, 33 bp, Homo sapien
aagtagataaaggtaatggaattggtttccaga

SEQ ID NO: 611239 - DNA, 33 bp, Homo sapien
actgctttgtccacataacttagcaatgagaag

SEQ ID NO: 611240 - DNA, 33 bp, Homo sapien
actgctttgtccacatcacttagcaatgagaag

SEQ ID NO: 611241 - DNA, 33 bp, Homo sapien
agagagactgaggaagccagactcttttaaaac

SEQ ID NO: 611242 - DNA, 33 bp, Homo sapien
agagagactgaggaaggcagactcttttaaaac

SEQ ID NO: 611243 - DNA, 33 bp, Homo sapien
taagtttagtgataacaccatttctctcatgtc

SEQ ID NO: 611244 - DNA, 33 bp, Homo sapien
taagtttagtgataacgccatttctctcatgtc

SEQ ID NO: 611245 - DNA, 33 bp, Homo sapien
gcattagactcctttcaaaaagcccagatatag

SEQ ID NO: 611246 - DNA, 33 bp, Homo sapien
gcattagactcctttcgaaaagcccagatatag

SEQ ID NO: 611247 - DNA, 33 bp, Homo sapien
gagaaatcagttcattaaaagcctacctattga

SEQ ID NO: 611248 - DNA, 33 bp, Homo sapien
gagaaatcagttcattgaaagcctacctattga

SEQ ID NO: 611249 - DNA, 33 bp, Homo sapien
gacaaactacttatgaccgaatctgaatcccaa

SEQ ID NO: 611250 - DNA, 33 bp, Homo sapien
gacaaactacttatgatcgaatctgaatcccaa

SEQ ID NO: 611251 - DNA, 33 bp, Homo sapien
tggaagtgaactaaaacggaacttgctaaaata

SEQ ID NO: 611252 - DNA, 33 bp, Homo sapien
tggaagtgaactaaaatggaacttgctaaaata

SEQ ID NO: 611253 - DNA, 33 bp, Homo sapien
gcatgaatgattagtaaaaagcatatagttaca

SEQ ID NO: 611254 - DNA, 33 bp, Homo sapien
gcatgaatgattagtacaaagcatatagttaca

SEQ ID NO: 611255 - DNA, 33 bp, Homo sapien
agtgaagatcaaatggcactgagcaattggcat

SEQ ID NO: 611256 - DNA, 33 bp, Homo sapien
agtgaagatcaaatggtactgagcaattggcat

SEQ ID NO: 611257 - DNA, 33 bp, Homo sapien
aagtctattattaccacgtcctcttaactagac

SEQ ID NO: 611258 - DNA, 33 bp, Homo sapien
aagtctattattaccatgtcctcttaactagac

SEQ ID NO: 611259 - DNA, 33 bp, Homo sapien
ttatcagctttactgaaatttctcatttgctcc

SEQ ID NO: 611260 - DNA, 33 bp, Homo sapien
ttatcagctttactgagatttctcatttgctcc

SEQ ID NO: 611261 - DNA, 33 bp, Homo sapien
atatcatttgtattaacacctattgacaggcac

SEQ ID NO: 611262 - DNA, 33 bp, Homo sapien
atatcatttgtattaagacctattgacaggcac

SEQ ID NO: 611263 - DNA, 33 bp, Homo sapien
atctcaaatttttacaaacgatagagtctagcg

SEQ ID NO: 611264 - DNA, 33 bp, Homo sapien
atctcaaatttttacagacgatagagtctagcg

SEQ ID NO: 611265 - DNA, 33 bp, Homo sapien
ccctaaagatctcaccaatccataaataccgag

SEQ ID NO: 611266 - DNA, 33 bp, Homo sapien
ccctaaagatctcaccgatccataaataccgag

SEQ ID NO: 611267 - DNA, 33 bp, Homo sapien
gccccagcactaacataagtaccccacagagac

SEQ ID NO: 611268 - DNA, 33 bp, Homo sapien
gccccagcactaacatgagtaccccacagagac

SEQ ID NO: 611269 - DNA, 33 bp, Homo sapien
tacctgttgtgcttagaaagtaaaatattgacc

SEQ ID NO: 611270 - DNA, 33 bp, Homo sapien
tacctgttgtgcttaggaagtaaaatattgacc

SEQ ID NO: 611271 - DNA, 33 bp, Homo sapien
agaaaattacctcccacgtaatgacgagttcag

SEQ ID NO: 611272 - DNA, 33 bp, Homo sapien
agaaaattacctcccatgtaatgacgagttcag

SEQ ID NO: 611273 - DNA, 33 bp, Homo sapien
agcgtgaaagggaatacgtggtcagttcaactt

SEQ ID NO: 611274 - DNA, 33 bp, Homo sapien
agcgtgaaagggaatatgtggtcagttcaactt

SEQ ID NO: 611275 - DNA, 33 bp, Homo sapien
cgcttctgagcattcagaccttttctcatccat

SEQ ID NO: 611276 - DNA, 33 bp, Homo sapien
cgcttctgagcattcataccttttctcatccat

SEQ ID NO: 611277 - DNA, 33 bp, Homo sapien
tgctttcatttctgtaaacaaaccttgatgatt

SEQ ID NO: 611278 - DNA, 33 bp, Homo sapien
tgctttcatttctgtagacaaaccttgatgatt

SEQ ID NO: 611279 - DNA, 33 bp, Homo sapien
ctattcaacagtcctagcctactagcctgttgt

SEQ ID NO: 611280 - DNA, 33 bp, Homo sapien
ctattcaacagtcctatcctactagcctgttgt

SEQ ID NO: 611281 - DNA, 33 bp, Homo sapien
tgacaaataaaacttccgaaagctgctttagaa

SEQ ID NO: 611282 - DNA, 33 bp, Homo sapien
tgacaaataaaacttctgaaagctgctttagaa

SEQ ID NO: 611283 - DNA, 33 bp, Homo sapien
gcctctggaaggagagaagatttatccctatta

SEQ ID NO: 611284 - DNA, 33 bp, Homo sapien
gcctctggaaggagagtagatttatccctatta

SEQ ID NO: 611285 - DNA, 33 bp, Homo sapien
cctgaatagacaagaagcctgagtaagaaacaa

SEQ ID NO: 611286 - DNA, 33 bp, Homo sapien
cctgaatagacaagaatcctgagtaagaaacaa

SEQ ID NO: 611287 - DNA, 33 bp, Homo sapien
gtgtgaccagagagtggagaagctgtgctaaaa

SEQ ID NO: 611288 - DNA, 33 bp, Homo sapien
gtgtgaccagagagtgtagaagctgtgctaaaa

SEQ ID NO: 611289 - DNA, 33 bp, Homo sapien
atatttgttttgaactcaactcaaccacaaaac

SEQ ID NO: 611290 - DNA, 33 bp, Homo sapien
atatttgttttgaactgaactcaaccacaaaac

SEQ ID NO: 611291 - DNA, 33 bp, Homo sapien
tttctctgagattcaggattggaaatgtttaga

SEQ ID NO: 611292 - DNA, 33 bp, Homo sapien
tttctctgagattcagtattggaaatgtttaga

SEQ ID NO: 611293 - DNA, 33 bp, Homo sapien
aggagcttcacaaggcacttgaccaatctaaaa

SEQ ID NO: 611294 - DNA, 33 bp, Homo sapien
aggagcttcacaaggcgcttgaccaatctaaaa

SEQ ID NO: 611295 - DNA, 33 bp, Homo sapien
aagctgagagtgaagacacggtttgcccaagtt

SEQ ID NO: 611296 - DNA, 33 bp, Homo sapien
aagctgagagtgaagatacggtttgcccaagtt

SEQ ID NO: 611297 - DNA, 33 bp, Homo sapien
tatcttcctgtatgtaataacttgggcaaaccg

SEQ ID NO: 611298 - DNA, 33 bp, Homo sapien
tatcttcctgtatgtagtaacttgggcaaaccg

SEQ ID NO: 611299 - DNA, 33 bp, Homo sapien
tgggaaattatttaaacgagttgatcatcaaac

SEQ ID NO: 611300 - DNA, 33 bp, Homo sapien
tgggaaattatttaaatgagttgatcatcaaac

SEQ ID NO: 611301 - DNA, 33 bp, Homo sapien
aacatcaaaatgaatacccaaaacacttctaac

SEQ ID NO: 611302 - DNA, 33 bp, Homo sapien
aacatcaaaatgaatatccaaaacacttctaac

SEQ ID NO: 611303 - DNA, 33 bp, Homo sapien
tttgaggacctgcttaacataaatagaataaaa

SEQ ID NO: 611304 - DNA, 33 bp, Homo sapien
tttgaggacctgcttatcataaatagaataaaa

SEQ ID NO: 611305 - DNA, 33 bp, Homo sapien
catgtaactgttgttacgattttccttgcaact

SEQ ID NO: 611306 - DNA, 33 bp, Homo sapien
catgtaactgttgttatgattttccttgcaact

SEQ ID NO: 611307 - DNA, 33 bp, Homo sapien
tagaagggaccttgacaactcatctagtccggc

SEQ ID NO: 611308 - DNA, 33 bp, Homo sapien
tagaagggaccttgacgactcatctagtccggc

SEQ ID NO: 611309 - DNA, 33 bp, Homo sapien
gggaaaggtgactctaactgatgattcactaca

SEQ ID NO: 611310 - DNA, 33 bp, Homo sapien
gggaaaggtgactctatctgatgattcactaca

SEQ ID NO: 611311 - DNA, 33 bp, Homo sapien
tgtagaaattccatgacataaaacctgaagtga

SEQ ID NO: 611312 - DNA, 33 bp, Homo sapien
tgtagaaattccatgatataaaacctgaagtga

SEQ ID NO: 611313 - DNA, 33 bp, Homo sapien
atagtacataaagtagaaagctgaaaagcattc

SEQ ID NO: 611314 - DNA, 33 bp, Homo sapien
atagtacataaagtaggaagctgaaaagcattc

SEQ ID NO: 611315 - DNA, 33 bp, Homo sapien
tgcaatcgccatgcacggcgtgaagaataaggg

SEQ ID NO: 611316 - DNA, 33 bp, Homo sapien
tgcaatcgccatgcactgcgtgaagaataaggg

SEQ ID NO: 611317 - DNA, 33 bp, Homo sapien
ttgcagaataattaccagaaccttgctatctac

SEQ ID NO: 611318 - DNA, 33 bp, Homo sapien
ttgcagaataattaccggaaccttgctatctac

SEQ ID NO: 611319 - DNA, 33 bp, Homo sapien
ggctatataggataccacaacaactctctggtt

SEQ ID NO: 611320 - DNA, 33 bp, Homo sapien
ggctatataggataccgcaacaactctctggtt

SEQ ID NO: 611321 - DNA, 33 bp, Homo sapien
ctatgtctctctcttacctatctagacacacac

SEQ ID NO: 611322 - DNA, 33 bp, Homo sapien
ctatgtctctctcttatctatctagacacacac

SEQ ID NO: 611323 - DNA, 33 bp, Homo sapien
gaattttacagtgaacaccttatagccactaac

SEQ ID NO: 611324 - DNA, 33 bp, Homo sapien
gaattttacagtgaacgccttatagccactaac

SEQ ID NO: 611325 - DNA, 33 bp, Homo sapien
taaaattcaactttgcggaatttcgaaacttat

SEQ ID NO: 611326 - DNA, 33 bp, Homo sapien
taaaattcaactttgctgaatttcgaaacttat

SEQ ID NO: 611327 - DNA, 33 bp, Homo sapien
aaagtgatgcttaggacagcaacgagtgtttac

SEQ ID NO: 611328 - DNA, 33 bp, Homo sapien
aaagtgatgcttaggatagcaacgagtgtttac

SEQ ID NO: 611329 - DNA, 33 bp, Homo sapien
gttatcgttcaagaaaccatggcacactgtagt

SEQ ID NO: 611330 - DNA, 33 bp, Homo sapien
gttatcgttcaagaaatcatggcacactgtagt

SEQ ID NO: 611331 - DNA, 33 bp, Homo sapien
gccaatgatatgagagaagaataaggtgagagc

SEQ ID NO: 611332 - DNA, 33 bp, Homo sapien
gccaatgatatgagagcagaataaggtgagagc

SEQ ID NO: 611333 - DNA, 33 bp, Homo sapien
tatagtggcaacaacacggagaatggatttgaa

SEQ ID NO: 611334 - DNA, 33 bp, Homo sapien
tatagtggcaacaacatggagaatggatttgaa

SEQ ID NO: 611335 - DNA, 33 bp, Homo sapien
tatcaagggcttacaactgttgtcagaataata

SEQ ID NO: 611336 - DNA, 33 bp, Homo sapien
tatcaagggcttacaattgttgtcagaataata

SEQ ID NO: 611337 - DNA, 33 bp, Homo sapien
ctcagaccatattcaccctagagctgttttcct

SEQ ID NO: 611338 - DNA, 33 bp, Homo sapien
ctcagaccatattcactctagagctgttttcct

SEQ ID NO: 611339 - DNA, 33 bp, Homo sapien
cccacttttctagagagataacatggttcactt

SEQ ID NO: 611340 - DNA, 33 bp, Homo sapien
cccacttttctagagatataacatggttcactt

SEQ ID NO: 611341 - DNA, 33 bp, Homo sapien
cccagcattttcacttaaaactgttctcttctt

SEQ ID NO: 611342 - DNA, 33 bp, Homo sapien
cccagcattttcacttgaaactgttctcttctt

SEQ ID NO: 611343 - DNA, 33 bp, Homo sapien
cccatgtaaatgcagaagaaagcaagctccaag

SEQ ID NO: 611344 - DNA, 33 bp, Homo sapien
cccatgtaaatgcagacgaaagcaagctccaag

SEQ ID NO: 611345 - DNA, 33 bp, Homo sapien
ttagtttatgtcagtcactatgcttagaagtgt

SEQ ID NO: 611346 - DNA, 33 bp, Homo sapien
ttagtttatgtcagtcgctatgcttagaagtgt

SEQ ID NO: 611347 - DNA, 33 bp, Homo sapien
caaaatgtcttgattacgctgtgcagtacccag

SEQ ID NO: 611348 - DNA, 33 bp, Homo sapien
caaaatgtcttgattatgctgtgcagtacccag

SEQ ID NO: 611349 - DNA, 33 bp, Homo sapien
ttcttggaaatgatccacgtgcccactggaaac

SEQ ID NO: 611350 - DNA, 33 bp, Homo sapien
ttcttggaaatgatccgcgtgcccactggaaac

SEQ ID NO: 611351 - DNA, 33 bp, Homo sapien
gcagcagcaataaacccacactaaggcgtacct

SEQ ID NO: 611352 - DNA, 33 bp, Homo sapien
gcagcagcaataaacctacactaaggcgtacct

SEQ ID NO: 611353 - DNA, 33 bp, Homo sapien
agtctagtccagaccactcaactggtgcttgag

SEQ ID NO: 611354 - DNA, 33 bp, Homo sapien
agtctagtccagaccattcaactggtgcttgag

SEQ ID NO: 611355 - DNA, 33 bp, Homo sapien
aacatttctgctaaaagatcaacatacaagcaa

SEQ ID NO: 611356 - DNA, 33 bp, Homo sapien
aacatttctgctaaaatatcaacatacaagcaa

SEQ ID NO: 611357 - DNA, 33 bp, Homo sapien
tgaaaacaaggggacaatcagtgaattatttct

SEQ ID NO: 611358 - DNA, 33 bp, Homo sapien
tgaaaacaaggggacagtcagtgaattatttct

SEQ ID NO: 611359 - DNA, 33 bp, Homo sapien
gtcaggaatatctgaacgaatctaaattttggc

SEQ ID NO: 611360 - DNA, 33 bp, Homo sapien
gtcaggaatatctgaatgaatctaaattttggc

SEQ ID NO: 611361 - DNA, 33 bp, Homo sapien
ttgagactatgttgaacgatcatagtgacgtgc

SEQ ID NO: 611362 - DNA, 33 bp, Homo sapien
ttgagactatgttgaatgatcatagtgacgtgc

SEQ ID NO: 611363 - DNA, 33 bp, Homo sapien
atagtgtaacagttcacatctatctcttttctc

SEQ ID NO: 611364 - DNA, 33 bp, Homo sapien
atagtgtaacagttcatatctatctcttttctc

SEQ ID NO: 611365 - DNA, 33 bp, Homo sapien
cccaaagttggatgacagaaggatcaaattatt

SEQ ID NO: 611366 - DNA, 33 bp, Homo sapien
cccaaagttggatgacggaaggatcaaattatt

SEQ ID NO: 611367 - DNA, 33 bp, Homo sapien
gttagagttccataaacgctagattcaaatatt

SEQ ID NO: 611368 - DNA, 33 bp, Homo sapien
gttagagttccataaatgctagattcaaatatt

SEQ ID NO: 611369 - DNA, 33 bp, Homo sapien
tcctaaatctatctgacgtttatttctctgttg

SEQ ID NO: 611370 - DNA, 33 bp, Homo sapien
tcctaaatctatctgatgtttatttctctgttg

SEQ ID NO: 611371 - DNA, 33 bp, Homo sapien
gtgctttgcttaattcacaggacagatatggat

SEQ ID NO: 611372 - DNA, 33 bp, Homo sapien
gtgctttgcttaattcgcaggacagatatggat

SEQ ID NO: 611373 - DNA, 33 bp, Homo sapien
gaccacacagcagggtaaatatgactgaagtgt

SEQ ID NO: 611374 - DNA, 33 bp, Homo sapien
gaccacacagcagggtgaatatgactgaagtgt

SEQ ID NO: 611375 - DNA, 33 bp, Homo sapien
ttcctctgtaagagaaactgccttagagcgtgt

SEQ ID NO: 611376 - DNA, 33 bp, Homo sapien
ttcctctgtaagagaatctgccttagagcgtgt

SEQ ID NO: 611377 - DNA, 33 bp, Homo sapien
tgagttgcactgggaaacttagaactacaagaa

SEQ ID NO: 611378 - DNA, 33 bp, Homo sapien
tgagttgcactgggaaccttagaactacaagaa

SEQ ID NO: 611379 - DNA, 33 bp, Homo sapien
tggtagcaaggaacaacgtactggaaattgaaa

SEQ ID NO: 611380 - DNA, 33 bp, Homo sapien
tggtagcaaggaacaatgtactggaaattgaaa

SEQ ID NO: 611381 - DNA, 33 bp, Homo sapien
tcattgaaatgttcaccctttgataccataatt

SEQ ID NO: 611382 - DNA, 33 bp, Homo sapien
tcattgaaatgttcactctttgataccataatt

SEQ ID NO: 611383 - DNA, 33 bp, Homo sapien
ggcctatggaatttaactggaaacacgaagagt

SEQ ID NO: 611384 - DNA, 33 bp, Homo sapien
ggcctatggaatttaattggaaacacgaagagt

SEQ ID NO: 611385 - DNA, 33 bp, Homo sapien
ctagcacttcatgttaagagtttatatctctaa

SEQ ID NO: 611386 - DNA, 33 bp, Homo sapien
ctagcacttcatgttatgagtttatatctctaa

SEQ ID NO: 611387 - DNA, 33 bp, Homo sapien
attgtaatataactgacctctcaaaaaatttca

SEQ ID NO: 611388 - DNA, 33 bp, Homo sapien
attgtaatataactgagctctcaaaaaatttca

SEQ ID NO: 611389 - DNA, 33 bp, Homo sapien
ggtggacgtgagtaaaagatttgggaagctagt

SEQ ID NO: 611390 - DNA, 33 bp, Homo sapien
ggtggacgtgagtaaacgatttgggaagctagt

SEQ ID NO: 611391 - DNA, 33 bp, Homo sapien
caccctagtaaacctgaaggtactgcagaagac

SEQ ID NO: 611392 - DNA, 33 bp, Homo sapien
caccctagtaaacctggaggtactgcagaagac

SEQ ID NO: 611393 - DNA, 33 bp, Homo sapien
aagccaatggtaaccactagatatatttattgt

SEQ ID NO: 611394 - DNA, 33 bp, Homo sapien
aagccaatggtaaccagtagatatatttattgt

SEQ ID NO: 611395 - DNA, 33 bp, Homo sapien
ataaataagaagtgaacaaacaagagccacgtt

SEQ ID NO: 611396 - DNA, 33 bp, Homo sapien
ataaataagaagtgaagaaacaagagccacgtt

SEQ ID NO: 611397 - DNA, 33 bp, Homo sapien
ctgaggttggactgaaacttaatgaactgaact

SEQ ID NO: 611398 - DNA, 33 bp, Homo sapien
ctgaggttggactgaaccttaatgaactgaact

SEQ ID NO: 611399 - DNA, 33 bp, Homo sapien
gagcactccatgaaccaatgctagtgcttaaac

SEQ ID NO: 611400 - DNA, 33 bp, Homo sapien
gagcactccatgaaccgatgctagtgcttaaac

SEQ ID NO: 611401 - DNA, 33 bp, Homo sapien
tagagagtctgccacaatctcatagatctggta

SEQ ID NO: 611402 - DNA, 33 bp, Homo sapien
tagagagtctgccacagtctcatagatctggta

SEQ ID NO: 611403 - DNA, 33 bp, Homo sapien
taactgcaattcagtacccttcgtattatctga

SEQ ID NO: 611404 - DNA, 33 bp, Homo sapien
taactgcaattcagtagccttcgtattatctga

SEQ ID NO: 611405 - DNA, 33 bp, Homo sapien
tgaatttaggcttccggatctttttaatgaaca

SEQ ID NO: 611406 - DNA, 33 bp, Homo sapien
tgaatttaggcttccgtatctttttaatgaaca

SEQ ID NO: 611407 - DNA, 33 bp, Homo sapien
ttttttaatatttgagcccgaggtaagagtgtg

SEQ ID NO: 611408 - DNA, 33 bp, Homo sapien
ttttttaatatttgagtccgaggtaagagtgtg

SEQ ID NO: 611409 - DNA, 33 bp, Homo sapien
atgttgaaaagaactacgtagaacctgagttga

SEQ ID NO: 611410 - DNA, 33 bp, Homo sapien
atgttgaaaagaactaggtagaacctgagttga

SEQ ID NO: 611411 - DNA, 33 bp, Homo sapien
gagatatgaagagataaaaagggacactttaaa

SEQ ID NO: 611412 - DNA, 33 bp, Homo sapien
gagatatgaagagatagaaagggacactttaaa

SEQ ID NO: 611413 - DNA, 33 bp, Homo sapien
attagcaagccagataacagaagcaaacagtac

SEQ ID NO: 611414 - DNA, 33 bp, Homo sapien
attagcaagccagatagcagaagcaaacagtac

SEQ ID NO: 611415 - DNA, 33 bp, Homo sapien
acaaatatccacacaaagtatgtagtttaacaa

SEQ ID NO: 611416 - DNA, 33 bp, Homo sapien
acaaatatccacacaaggtatgtagtttaacaa

SEQ ID NO: 611417 - DNA, 33 bp, Homo sapien
tgccagttgtcagtcacctctcaattacccatg

SEQ ID NO: 611418 - DNA, 33 bp, Homo sapien
tgccagttgtcagtcatctctcaattacccatg

SEQ ID NO: 611419 - DNA, 33 bp, Homo sapien
tgaacactgtagaaaactgaaataaaaatcatc

SEQ ID NO: 611420 - DNA, 33 bp, Homo sapien
tgaacactgtagaaaagtgaaataaaaatcatc

SEQ ID NO: 611421 - DNA, 33 bp, Homo sapien
gttcaggcaatgaaaactcagggaagggaccag

SEQ ID NO: 611422 - DNA, 33 bp, Homo sapien
gttcaggcaatgaaaattcagggaagggaccag

SEQ ID NO: 611423 - DNA, 33 bp, Homo sapien
ggggaatacaaagagacgtaaaatgctggagct

SEQ ID NO: 611424 - DNA, 33 bp, Homo sapien
ggggaatacaaagagatgtaaaatgctggagct

SEQ ID NO: 611425 - DNA, 33 bp, Homo sapien
tatagacaccatatcaatcagggaacaatcaga

SEQ ID NO: 611426 - DNA, 33 bp, Homo sapien
tatagacaccatatcagtcagggaacaatcaga

SEQ ID NO: 611427 - DNA, 33 bp, Homo sapien
aatagtaccttcttcacgatgagagagtaagtt

SEQ ID NO: 611428 - DNA, 33 bp, Homo sapien
aatagtaccttcttcaggatgagagagtaagtt

SEQ ID NO: 611429 - DNA, 33 bp, Homo sapien
gtagaaagtcttccaacgaatggttgaatttaa

SEQ ID NO: 611430 - DNA, 33 bp, Homo sapien
gtagaaagtcttccaaggaatggttgaatttaa

SEQ ID NO: 611431 - DNA, 33 bp, Homo sapien
gccaaaagagtgctcacatggtttattgcatga

SEQ ID NO: 611432 - DNA, 33 bp, Homo sapien
gccaaaagagtgctcagatggtttattgcatga

SEQ ID NO: 611433 - DNA, 33 bp, Homo sapien
taacaggaaatcaacaaggtaaagaataatttt

SEQ ID NO: 611434 - DNA, 33 bp, Homo sapien
taacaggaaatcaacagggtaaagaataatttt

SEQ ID NO: 611435 - DNA, 33 bp, Homo sapien
gcaatgccaagaagaaatcatcaaaattattct

SEQ ID NO: 611436 - DNA, 33 bp, Homo sapien
gcaatgccaagaagaagtcatcaaaattattct

SEQ ID NO: 611437 - DNA, 33 bp, Homo sapien
aattgtgtagataggaagaaaattaatggcttt

SEQ ID NO: 611438 - DNA, 33 bp, Homo sapien
aattgtgtagataggaggaaaattaatggcttt

SEQ ID NO: 611439 - DNA, 33 bp, Homo sapien
taccatagtctattgaaaaatgcagttacagac

SEQ ID NO: 611440 - DNA, 33 bp, Homo sapien
taccatagtctattgataaatgcagttacagac

SEQ ID NO: 611441 - DNA, 33 bp, Homo sapien
ataggaatacagcaaactaaaatgccacaaaag

SEQ ID NO: 611442 - DNA, 33 bp, Homo sapien
ataggaatacagcaaagtaaaatgccacaaaag

SEQ ID NO: 611443 - DNA, 33 bp, Homo sapien
gatccctagacctccacagacttttgaatttgc

SEQ ID NO: 611444 - DNA, 33 bp, Homo sapien
gatccctagacctccatagacttttgaatttgc

SEQ ID NO: 611445 - DNA, 33 bp, Homo sapien
tcatatatgaagggaacaccaactggctaacag

SEQ ID NO: 611446 - DNA, 33 bp, Homo sapien
tcatatatgaagggaataccaactggctaacag

SEQ ID NO: 611447 - DNA, 33 bp, Homo sapien
ggcatttataaaaacaatcaatggcattgcagt

SEQ ID NO: 611448 - DNA, 33 bp, Homo sapien
ggcatttataaaaacagtcaatggcattgcagt

SEQ ID NO: 611449 - DNA, 33 bp, Homo sapien
tgactttcaacaactcacatattttttggtctc

SEQ ID NO: 611450 - DNA, 33 bp, Homo sapien
tgactttcaacaactcccatattttttggtctc

SEQ ID NO: 611451 - DNA, 33 bp, Homo sapien
caatatctacctaataccagcttccagagaagt

SEQ ID NO: 611452 - DNA, 33 bp, Homo sapien
caatatctacctaatatcagcttccagagaagt

SEQ ID NO: 611453 - DNA, 33 bp, Homo sapien
acataggcaaagatccaaacagacactttacca

SEQ ID NO: 611454 - DNA, 33 bp, Homo sapien
acataggcaaagatccgaacagacactttacca

SEQ ID NO: 611455 - DNA, 33 bp, Homo sapien
tagtcaaattgtgacaatagtacagagtgttcc

SEQ ID NO: 611456 - DNA, 33 bp, Homo sapien
tagtcaaattgtgacagtagtacagagtgttcc

SEQ ID NO: 611457 - DNA, 33 bp, Homo sapien
attctttgcttccaacaagagaggaccacacat

SEQ ID NO: 611458 - DNA, 33 bp, Homo sapien
attctttgcttccaaccagagaggaccacacat

SEQ ID NO: 611459 - DNA, 33 bp, Homo sapien
agacacaatacctgagaagctcatgataaagaa

SEQ ID NO: 611460 - DNA, 33 bp, Homo sapien
agacacaatacctgagtagctcatgataaagaa

SEQ ID NO: 611461 - DNA, 33 bp, Homo sapien
aatgctttatgtgtgaaatcagcaataagacca

SEQ ID NO: 611462 - DNA, 33 bp, Homo sapien
aatgctttatgtgtgagatcagcaataagacca

SEQ ID NO: 611463 - DNA, 33 bp, Homo sapien
actgatctgagactaaagtggtatagaaaagaa

SEQ ID NO: 611464 - DNA, 33 bp, Homo sapien
actgatctgagactaaggtggtatagaaaagaa

SEQ ID NO: 611465 - DNA, 33 bp, Homo sapien
gtgctttcactttcgaacaaaagtccatctaaa

SEQ ID NO: 611466 - DNA, 33 bp, Homo sapien
gtgctttcactttcgagcaaaagtccatctaaa

SEQ ID NO: 611467 - DNA, 33 bp, Homo sapien
tcatttcttttctgaacgagtagaaactgaact

SEQ ID NO: 611468 - DNA, 33 bp, Homo sapien
tcatttcttttctgaatgagtagaaactgaact

SEQ ID NO: 611469 - DNA, 33 bp, Homo sapien
ataacttggtggtgtaaaaagcatcattttgag

SEQ ID NO: 611470 - DNA, 33 bp, Homo sapien
ataacttggtggtgtagaaagcatcattttgag

SEQ ID NO: 611471 - DNA, 33 bp, Homo sapien
atatccaattcctaaaatacctcagtactggtg

SEQ ID NO: 611472 - DNA, 33 bp, Homo sapien
atatccaattcctaaattacctcagtactggtg

SEQ ID NO: 611473 - DNA, 33 bp, Homo sapien
ttcttctttactcccaaattcttacatgctgcc

SEQ ID NO: 611474 - DNA, 33 bp, Homo sapien
ttcttctttactcccagattcttacatgctgcc

SEQ ID NO: 611475 - DNA, 33 bp, Homo sapien
ttctcttcatggaacacataattttttggcttg

SEQ ID NO: 611476 - DNA, 33 bp, Homo sapien
ttctcttcatggaacagataattttttggcttg

SEQ ID NO: 611477 - DNA, 33 bp, Homo sapien
tatttttcactccataataccctcttttctaga

SEQ ID NO: 611478 - DNA, 33 bp, Homo sapien
tatttttcactccatattaccctcttttctaga

SEQ ID NO: 611479 - DNA, 33 bp, Homo sapien
agtttaatgttctgaaacttctttggtgaatag

SEQ ID NO: 611480 - DNA, 33 bp, Homo sapien
agtttaatgttctgaagcttctttggtgaatag

SEQ ID NO: 611481 - DNA, 33 bp, Homo sapien
tccaagatggtacacccaggaacttggcacaga

SEQ ID NO: 611482 - DNA, 33 bp, Homo sapien
tccaagatggtacacctaggaacttggcacaga

SEQ ID NO: 611483 - DNA, 33 bp, Homo sapien
tgactgaagaaaggaacacactcccattccagt

SEQ ID NO: 611484 - DNA, 33 bp, Homo sapien
tgactgaagaaaggaatacactcccattccagt

SEQ ID NO: 611485 - DNA, 33 bp, Homo sapien
caaaggcgttacaggaagctctatcagcaagtg

SEQ ID NO: 611486 - DNA, 33 bp, Homo sapien
caaaggcgttacaggacgctctatcagcaagtg

SEQ ID NO: 611487 - DNA, 33 bp, Homo sapien
tgttttgttttccatacgcagtggaagtcatag

SEQ ID NO: 611488 - DNA, 33 bp, Homo sapien
tgttttgttttccatatgcagtggaagtcatag

SEQ ID NO: 611489 - DNA, 33 bp, Homo sapien
agacctgtttttatatcagcctgcaacattctt

SEQ ID NO: 611490 - DNA, 33 bp, Homo sapien
agacctgtttttatattagcctgcaacattctt

SEQ ID NO: 611491 - DNA, 33 bp, Homo sapien
aggaaaacctcactgaagaccaccgtaccttca

SEQ ID NO: 611492 - DNA, 33 bp, Homo sapien
aggaaaacctcactgaggaccaccgtaccttca

SEQ ID NO: 611493 - DNA, 33 bp, Homo sapien
tctttatttagtcacccgaatttagacaatact

SEQ ID NO: 611494 - DNA, 33 bp, Homo sapien
tctttatttagtcacctgaatttagacaatact

SEQ ID NO: 611495 - DNA, 33 bp, Homo sapien
gtcaggtactacctaccgagcatttactctggg

SEQ ID NO: 611496 - DNA, 33 bp, Homo sapien
gtcaggtactacctactgagcatttactctggg

SEQ ID NO: 611497 - DNA, 33 bp, Homo sapien
agggtttcgcagcagacagaagcaaccaggagg

SEQ ID NO: 611498 - DNA, 33 bp, Homo sapien
agggtttcgcagcagagagaagcaaccaggagg

SEQ ID NO: 611499 - DNA, 33 bp, Homo sapien
caaaaaagactgttacaacgtttcctgaatatt

SEQ ID NO: 611500 - DNA, 33 bp, Homo sapien
caaaaaagactgttacgacgtttcctgaatatt

SEQ ID NO: 611501 - DNA, 33 bp, Homo sapien
cttttaggtatgtttacggtttcatgtgagacc

SEQ ID NO: 611502 - DNA, 33 bp, Homo sapien
cttttaggtatgtttatggtttcatgtgagacc

SEQ ID NO: 611503 - DNA, 33 bp, Homo sapien
tgaccagcttaacttagatcaggtgaaaaccac

SEQ ID NO: 611504 - DNA, 33 bp, Homo sapien
tgaccagcttaacttatatcaggtgaaaaccac

SEQ ID NO: 611505 - DNA, 33 bp, Homo sapien
tgggcctggactatacaatccagtttaaattat

SEQ ID NO: 611506 - DNA, 33 bp, Homo sapien
tgggcctggactatacgatccagtttaaattat

SEQ ID NO: 611507 - DNA, 33 bp, Homo sapien
aaaggaatcattacaacggtaggggtagttgac

SEQ ID NO: 611508 - DNA, 33 bp, Homo sapien
aaaggaatcattacaatggtaggggtagttgac

SEQ ID NO: 611509 - DNA, 33 bp, Homo sapien
tgacattctgtgaaagaaaacagtactagctat

SEQ ID NO: 611510 - DNA, 33 bp, Homo sapien
tgacattctgtgaaaggaaacagtactagctat

SEQ ID NO: 611511 - DNA, 33 bp, Homo sapien
tgtctctttgaacttacgaagatgaaagaaggt

SEQ ID NO: 611512 - DNA, 33 bp, Homo sapien
tgtctctttgaacttatgaagatgaaagaaggt

SEQ ID NO: 611513 - DNA, 33 bp, Homo sapien
aggaaacccatttttaaatccctgccagagtgt

SEQ ID NO: 611514 - DNA, 33 bp, Homo sapien
aggaaacccatttttacatccctgccagagtgt

SEQ ID NO: 611515 - DNA, 33 bp, Homo sapien
ttttttttctctgcaccgtaaaatatgtgaagt

SEQ ID NO: 611516 - DNA, 33 bp, Homo sapien
ttttttttctctgcactgtaaaatatgtgaagt

SEQ ID NO: 611517 - DNA, 33 bp, Homo sapien
tttcctactcctattacgcctattcttgaacaa

SEQ ID NO: 611518 - DNA, 33 bp, Homo sapien
tttcctactcctattatgcctattcttgaacaa

SEQ ID NO: 611519 - DNA, 33 bp, Homo sapien
acagaatataacgtcaaggaaatctcgagaaag

SEQ ID NO: 611520 - DNA, 33 bp, Homo sapien
acagaatataacgtcacggaaatctcgagaaag

SEQ ID NO: 611521 - DNA, 33 bp, Homo sapien
ctgcaattaatttacaatgataatggctgtaga

SEQ ID NO: 611522 - DNA, 33 bp, Homo sapien
ctgcaattaatttacattgataatggctgtaga

SEQ ID NO: 611523 - DNA, 33 bp, Homo sapien
gtaataaatagtgaggacatactttctctttaa

SEQ ID NO: 611524 - DNA, 33 bp, Homo sapien
gtaataaatagtgagggcatactttctctttaa

SEQ ID NO: 611525 - DNA, 33 bp, Homo sapien
caatgtgttggcttaagataacctacatttatt

SEQ ID NO: 611526 - DNA, 33 bp, Homo sapien
caatgtgttggcttaatataacctacatttatt

SEQ ID NO: 611527 - DNA, 33 bp, Homo sapien
tttgacaccaataaaacggagtgccactgaagg

SEQ ID NO: 611528 - DNA, 33 bp, Homo sapien
tttgacaccaataaaatggagtgccactgaagg

SEQ ID NO: 611529 - DNA, 33 bp, Homo sapien
ctccacagcttataccactttcatcaccagaat

SEQ ID NO: 611530 - DNA, 33 bp, Homo sapien
ctccacagcttatacctctttcatcaccagaat

SEQ ID NO: 611531 - DNA, 33 bp, Homo sapien
ttgttgggagccactacattctggaggattttt

SEQ ID NO: 611532 - DNA, 33 bp, Homo sapien
ttgttgggagccactatattctggaggattttt

SEQ ID NO: 611533 - DNA, 33 bp, Homo sapien
tgctataagcttggaggataagagaggcaagtt

SEQ ID NO: 611534 - DNA, 33 bp, Homo sapien
tgctataagcttggagtataagagaggcaagtt

SEQ ID NO: 611535 - DNA, 33 bp, Homo sapien
aagtattggctgtaggaaaaactaatttggtga

SEQ ID NO: 611536 - DNA, 33 bp, Homo sapien
aagtattggctgtagggaaaactaatttggtga

SEQ ID NO: 611537 - DNA, 33 bp, Homo sapien
atgaatttgacataacacaaaattttcacccat

SEQ ID NO: 611538 - DNA, 33 bp, Homo sapien
atgaatttgacataacgcaaaattttcacccat

SEQ ID NO: 611539 - DNA, 33 bp, Homo sapien
acggagccagtgaacacgccaaagaacgtatat

SEQ ID NO: 611540 - DNA, 33 bp, Homo sapien
acggagccagtgaacaggccaaagaacgtatat

SEQ ID NO: 611541 - DNA, 33 bp, Homo sapien
ggagtgtatggggtcgcccaagtgaattcacct

SEQ ID NO: 611542 - DNA, 33 bp, Homo sapien
ggagtgtatggggtcgtccaagtgaattcacct

SEQ ID NO: 611543 - DNA, 33 bp, Homo sapien
tcttgtggaaaatagacctactcttgttctgcc

SEQ ID NO: 611544 - DNA, 33 bp, Homo sapien
tcttgtggaaaatagagctactcttgttctgcc

SEQ ID NO: 611545 - DNA, 33 bp, Homo sapien
caactaatgaaagtcaagggtttccatttcaag

SEQ ID NO: 611546 - DNA, 33 bp, Homo sapien
caactaatgaaagtcaggggtttccatttcaag

SEQ ID NO: 611547 - DNA, 33 bp, Homo sapien
tggggagctagttggggatgagtaaggcaggaa

SEQ ID NO: 611548 - DNA, 33 bp, Homo sapien
tggggagctagttgggtatgagtaaggcaggaa

SEQ ID NO: 611549 - DNA, 33 bp, Homo sapien
ttgctaggtcaagggagatgctccttcctacct

SEQ ID NO: 611550 - DNA, 33 bp, Homo sapien
ttgctaggtcaagggatatgctccttcctacct

SEQ ID NO: 611551 - DNA, 33 bp, Homo sapien
gattttcataaatttaacaaagtgctcaaacta

SEQ ID NO: 611552 - DNA, 33 bp, Homo sapien
gattttcataaatttaccaaagtgctcaaacta

SEQ ID NO: 611553 - DNA, 33 bp, Homo sapien
taacccaagatggtaacatactctgctgtcact

SEQ ID NO: 611554 - DNA, 33 bp, Homo sapien
taacccaagatggtaatatactctgctgtcact

SEQ ID NO: 611555 - DNA, 33 bp, Homo sapien
gtgaataaataagccaacaagggccattttatc

SEQ ID NO: 611556 - DNA, 33 bp, Homo sapien
gtgaataaataagccagcaagggccattttatc

SEQ ID NO: 611557 - DNA, 33 bp, Homo sapien
ctcagactcacccttcaccttttaaatggagat

SEQ ID NO: 611558 - DNA, 33 bp, Homo sapien
ctcagactcacccttcgccttttaaatggagat

SEQ ID NO: 611559 - DNA, 33 bp, Homo sapien
ttccaggtttgttacaatcttaagaatctacac

SEQ ID NO: 611560 - DNA, 33 bp, Homo sapien
ttccaggtttgttacagtcttaagaatctacac

SEQ ID NO: 611561 - DNA, 33 bp, Homo sapien
cttctgaaaccttacaatcaatcgttagtaaaa

SEQ ID NO: 611562 - DNA, 33 bp, Homo sapien
cttctgaaaccttacagtcaatcgttagtaaaa

SEQ ID NO: 611563 - DNA, 33 bp, Homo sapien
aacaaggactgtgaaactgctgattttatccca

SEQ ID NO: 611564 - DNA, 33 bp, Homo sapien
aacaaggactgtgaaattgctgattttatccca

SEQ ID NO: 611565 - DNA, 33 bp, Homo sapien
ttgcttgggtgccttaacagtaatgttcattaa

SEQ ID NO: 611566 - DNA, 33 bp, Homo sapien
ttgcttgggtgccttagcagtaatgttcattaa

SEQ ID NO: 611567 - DNA, 33 bp, Homo sapien
gcctggggaaacttgccgaccggaaaggaagac

SEQ ID NO: 611568 - DNA, 33 bp, Homo sapien
gcctggggaaacttgctgaccggaaaggaagac

SEQ ID NO: 611569 - DNA, 33 bp, Homo sapien
aattctaacaacttccagagaaattatattata

SEQ ID NO: 611570 - DNA, 33 bp, Homo sapien
aattctaacaacttccggagaaattatattata

SEQ ID NO: 611571 - DNA, 33 bp, Homo sapien
ctcagcttttagcagcaatggcttttctaggga

SEQ ID NO: 611572 - DNA, 33 bp, Homo sapien
ctcagcttttagcagcgatggcttttctaggga

SEQ ID NO: 611573 - DNA, 33 bp, Homo sapien
tgtctatagctaaataacgagttggttacctgg

SEQ ID NO: 611574 - DNA, 33 bp, Homo sapien
tgtctatagctaaatagcgagttggttacctgg

SEQ ID NO: 611575 - DNA, 33 bp, Homo sapien
ataagcgctgcaacaacaggctcaaagcagcca

SEQ ID NO: 611576 - DNA, 33 bp, Homo sapien
ataagcgctgcaacaataggctcaaagcagcca

SEQ ID NO: 611577 - DNA, 33 bp, Homo sapien
tgtgtgttttattctcaagttagacttagacac

SEQ ID NO: 611578 - DNA, 33 bp, Homo sapien
tgtgtgttttattctccagttagacttagacac

SEQ ID NO: 611579 - DNA, 33 bp, Homo sapien
gggttagctgcagtcaatagttctgatacatcc

SEQ ID NO: 611580 - DNA, 33 bp, Homo sapien
gggttagctgcagtcagtagttctgatacatcc

SEQ ID NO: 611581 - DNA, 33 bp, Homo sapien
aatccccagtatctcacaacgtgtctctatttg

SEQ ID NO: 611582 - DNA, 33 bp, Homo sapien
aatccccagtatctcagaacgtgtctctatttg

SEQ ID NO: 611583 - DNA, 33 bp, Homo sapien
gcttactatgtgtaccaaattatgttagaatga

SEQ ID NO: 611584 - DNA, 33 bp, Homo sapien
gcttactatgtgtaccgaattatgttagaatga

SEQ ID NO: 611585 - DNA, 33 bp, Homo sapien
atacgatgtttgcccaactaatttaggagttaa

SEQ ID NO: 611586 - DNA, 33 bp, Homo sapien
atacgatgtttgcccagctaatttaggagttaa

SEQ ID NO: 611587 - DNA, 33 bp, Homo sapien
tatatcgatgaggaaaaaatcagagcgtttatg

SEQ ID NO: 611588 - DNA, 33 bp, Homo sapien
tatatcgatgaggaaacaatcagagcgtttatg

SEQ ID NO: 611589 - DNA, 33 bp, Homo sapien
tcaataagcttttctacgattctctgtcaatag

SEQ ID NO: 611590 - DNA, 33 bp, Homo sapien
tcaataagcttttctatgattctctgtcaatag

SEQ ID NO: 611591 - DNA, 33 bp, Homo sapien
ggttctgaaggtcatggcataagcatctgtgtg

SEQ ID NO: 611592 - DNA, 33 bp, Homo sapien
ggttctgaaggtcatgtcataagcatctgtgtg

SEQ ID NO: 611593 - DNA, 33 bp, Homo sapien
ttttgcagcagagcacaagtaggcagaaaatta

SEQ ID NO: 611594 - DNA, 33 bp, Homo sapien
ttttgcagcagagcactagtaggcagaaaatta

SEQ ID NO: 611595 - DNA, 33 bp, Homo sapien
gtactctgggtagtaaaattgtttcctatgggg

SEQ ID NO: 611596 - DNA, 33 bp, Homo sapien
gtactctgggtagtaacattgtttcctatgggg

SEQ ID NO: 611597 - DNA, 33 bp, Homo sapien
atcttaaactggcacaataatagtcattcaata

SEQ ID NO: 611598 - DNA, 33 bp, Homo sapien
atcttaaactggcacagtaatagtcattcaata

SEQ ID NO: 611599 - DNA, 33 bp, Homo sapien
tttattgttagtataactattagccaaattcac

SEQ ID NO: 611600 - DNA, 33 bp, Homo sapien
tttattgttagtataattattagccaaattcac

SEQ ID NO: 611601 - DNA, 33 bp, Homo sapien
ccatgtgatatgaatacaggttttgttttgcat

SEQ ID NO: 611602 - DNA, 33 bp, Homo sapien
ccatgtgatatgaatataggttttgttttgcat

SEQ ID NO: 611603 - DNA, 33 bp, Homo sapien
atttaatttagtcaaacgatgcaaaacaaaacc

SEQ ID NO: 611604 - DNA, 33 bp, Homo sapien
atttaatttagtcaaatgatgcaaaacaaaacc

SEQ ID NO: 611605 - DNA, 33 bp, Homo sapien
ttccctgaatgctttacagaactttatagagct

SEQ ID NO: 611606 - DNA, 33 bp, Homo sapien
ttccctgaatgctttagagaactttatagagct

SEQ ID NO: 611607 - DNA, 33 bp, Homo sapien
gctaagataacctcacactcaaaatcacatgaa

SEQ ID NO: 611608 - DNA, 33 bp, Homo sapien
gctaagataacctcacgctcaaaatcacatgaa

SEQ ID NO: 611609 - DNA, 33 bp, Homo sapien
tttttctttaactattaaactatgcaatccata

SEQ ID NO: 611610 - DNA, 33 bp, Homo sapien
tttttctttaactatttaactatgcaatccata

SEQ ID NO: 611611 - DNA, 33 bp, Homo sapien
taatgctacgtttgatcaacagttctcaatttg

SEQ ID NO: 611612 - DNA, 33 bp, Homo sapien
taatgctacgtttgatgaacagttctcaatttg

SEQ ID NO: 611613 - DNA, 33 bp, Homo sapien
tacagagtacttgaaacacggctagtccaaagt

SEQ ID NO: 611614 - DNA, 33 bp, Homo sapien
tacagagtacttgaaatacggctagtccaaagt

SEQ ID NO: 611615 - DNA, 33 bp, Homo sapien
acgcccacatagagtacgagataaagggctaag

SEQ ID NO: 611616 - DNA, 33 bp, Homo sapien
acgcccacatagagtaggagataaagggctaag

SEQ ID NO: 611617 - DNA, 33 bp, Homo sapien
aagaggatcctattccactcatttttcttattt

SEQ ID NO: 611618 - DNA, 33 bp, Homo sapien
aagaggatcctattcccctcatttttcttattt

SEQ ID NO: 611619 - DNA, 33 bp, Homo sapien
acattcgatcttgggaaaattagtatgtttctc

SEQ ID NO: 611620 - DNA, 33 bp, Homo sapien
acattcgatcttgggacaattagtatgtttctc

SEQ ID NO: 611621 - DNA, 33 bp, Homo sapien
gtgaccctgtagagcacagagagcctgtgttta

SEQ ID NO: 611622 - DNA, 33 bp, Homo sapien
gtgaccctgtagagcatagagagcctgtgttta

SEQ ID NO: 611623 - DNA, 33 bp, Homo sapien
tggtttgtatgtgccacattttgtttaaccagt

SEQ ID NO: 611624 - DNA, 33 bp, Homo sapien
tggtttgtatgtgccatattttgtttaaccagt

SEQ ID NO: 611625 - DNA, 33 bp, Homo sapien
gaagttcaagtttccactgagttatgactgggc

SEQ ID NO: 611626 - DNA, 33 bp, Homo sapien
gaagttcaagtttccagtgagttatgactgggc

SEQ ID NO: 611627 - DNA, 33 bp, Homo sapien
tctaggatttctaggaggtcaatgccaaatcac

SEQ ID NO: 611628 - DNA, 33 bp, Homo sapien
tctaggatttctaggatgtcaatgccaaatcac

SEQ ID NO: 611629 - DNA, 33 bp, Homo sapien
tgtaatgcaggaaacaaaagagtagatgcaata

SEQ ID NO: 611630 - DNA, 33 bp, Homo sapien
tgtaatgcaggaaacagaagagtagatgcaata

SEQ ID NO: 611631 - DNA, 33 bp, Homo sapien
ctcacgaaatttttgcacagaccaaacccttac

SEQ ID NO: 611632 - DNA, 33 bp, Homo sapien
ctcacgaaatttttgcgcagaccaaacccttac

SEQ ID NO: 611633 - DNA, 33 bp, Homo sapien
ggggatctataccctcactaagcaagttataca

SEQ ID NO: 611634 - DNA, 33 bp, Homo sapien
ggggatctataccctcgctaagcaagttataca

SEQ ID NO: 611635 - DNA, 33 bp, Homo sapien
ctcctggtattgaaaaaaatggcatcctgcacc

SEQ ID NO: 611636 - DNA, 33 bp, Homo sapien
ctcctggtattgaaaacaatggcatcctgcacc

SEQ ID NO: 611637 - DNA, 33 bp, Homo sapien
aaacgttacctgaaaaaacaaggattctttcac

SEQ ID NO: 611638 - DNA, 33 bp, Homo sapien
aaacgttacctgaaaagacaaggattctttcac

SEQ ID NO: 611639 - DNA, 33 bp, Homo sapien
tggctttacagcatgaactaagaaacataagcc

SEQ ID NO: 611640 - DNA, 33 bp, Homo sapien
tggctttacagcatgatctaagaaacataagcc

SEQ ID NO: 611641 - DNA, 33 bp, Homo sapien
gggcgttcctttttgaacagtgcccattccctt

SEQ ID NO: 611642 - DNA, 33 bp, Homo sapien
gggcgttcctttttgagcagtgcccattccctt

SEQ ID NO: 611643 - DNA, 33 bp, Homo sapien; identical to SEQ ID NO: 611641

SEQ ID NO: 611644 - DNA, 33 bp, Homo sapien; identical to SEQ ID NO: 611642

SEQ ID NO: 611645 - DNA, 33 bp, Homo sapien
aatacaactcaggaccaaaagcttataaaagca

SEQ ID NO: 611646 - DNA, 33 bp, Homo sapien
aatacaactcaggaccgaaagcttataaaagca

SEQ ID NO: 611647 - DNA, 33 bp, Homo sapien
tgagacagagaagttacgtgacctatgcaatgt

SEQ ID NO: 611648 - DNA, 33 bp, Homo sapien
tgagacagagaagttatgtgacctatgcaatgt

SEQ ID NO: 611649 - DNA, 33 bp, Homo sapien
atgacagtcaatgagacatcccagcagctacca

SEQ ID NO: 611650 - DNA, 33 bp, Homo sapien
atgacagtcaatgagagatcccagcagctacca

SEQ ID NO: 611651 - DNA, 33 bp, Homo sapien
ggttcagcatattaccaagtatttattgtatcc

SEQ ID NO: 611652 - DNA, 33 bp, Homo sapien
ggttcagcatattaccgagtatttattgtatcc

SEQ ID NO: 611653 - DNA, 33 bp, Homo sapien
tcttcttctccaccacacaggaggcaactggtt

SEQ ID NO: 611654 - DNA, 33 bp, Homo sapien
tcttcttctccaccacgcaggaggcaactggtt

SEQ ID NO: 611655 - DNA, 33 bp, Homo sapien
cggatgtggaggggtaagtcaatgtacgaaggt

SEQ ID NO: 611656 - DNA, 33 bp, Homo sapien
cggatgtggaggggtacgtcaatgtacgaaggt

SEQ ID NO: 611657 - DNA, 33 bp, Homo sapien
attcccacctattccactacagtgttgtttgcg

SEQ ID NO: 611658 - DNA, 33 bp, Homo sapien
attcccacctattccattacagtgttgtttgcg

SEQ ID NO: 611659 - DNA, 33 bp, Homo sapien
acgtgtggatagtgaacactggaaatgtggcta

SEQ ID NO: 611660 - DNA, 33 bp, Homo sapien
acgtgtggatagtgaatactggaaatgtggcta

SEQ ID NO: 611661 - DNA, 33 bp, Homo sapien
aattgtgaggatttctcaaatgatctacagtag

SEQ ID NO: 611662 - DNA, 33 bp, Homo sapien
aattgtgaggatttctgaaatgatctacagtag

SEQ ID NO: 611663 - DNA, 33 bp, Homo sapien
agaattttttatatcaacatggacgttttccat

SEQ ID NO: 611664 - DNA, 33 bp, Homo sapien
agaattttttatatcatcatggacgttttccat

SEQ ID NO: 611665 - DNA, 33 bp, Homo sapien
atttatgttcacttacgaaggcccctcagacat

SEQ ID NO: 611666 - DNA, 33 bp, Homo sapien
atttatgttcacttactaaggcccctcagacat

SEQ ID NO: 611667 - DNA, 33 bp, Homo sapien
ttatatcactttaataccttgccaaatacatcc

SEQ ID NO: 611668 - DNA, 33 bp, Homo sapien
ttatatcactttaatatcttgccaaatacatcc

SEQ ID NO: 611669 - DNA, 33 bp, Homo sapien
cacaacatcacaaaaaattaagaccaacagagc

SEQ ID NO: 611670 - DNA, 33 bp, Homo sapien
cacaacatcacaaaaatttaagaccaacagagc

SEQ ID NO: 611671 - DNA, 33 bp, Homo sapien
agccaacataacagacaaaagtatcttaaatcc

SEQ ID NO: 611672 - DNA, 33 bp, Homo sapien
agccaacataacagacgaaagtatcttaaatcc

SEQ ID NO: 611673 - DNA, 33 bp, Homo sapien
tttcttctttattggcgctcagacacgtttttt

SEQ ID NO: 611674 - DNA, 33 bp, Homo sapien
tttcttctttattggctctcagacacgtttttt

SEQ ID NO: 611675 - DNA, 33 bp, Homo sapien
ataacttgagtattcactatggagtaatgaaga

SEQ ID NO: 611676 - DNA, 33 bp, Homo sapien
ataacttgagtattcagtatggagtaatgaaga

SEQ ID NO: 611677 - DNA, 33 bp, Homo sapien
tggtgctctggtgtccgcaactatagataacac

SEQ ID NO: 611678 - DNA, 33 bp, Homo sapien
tggtgctctggtgtcctcaactatagataacac

SEQ ID NO: 611679 - DNA, 33 bp, Homo sapien
tagaatagtgtaggcaaaggaaacagtatgaat

SEQ ID NO: 611680 - DNA, 33 bp, Homo sapien
tagaatagtgtaggcacaggaaacagtatgaat

SEQ ID NO: 611681 - DNA, 33 bp, Homo sapien
atttatctcattatctaagaactttgctacata

SEQ ID NO: 611682 - DNA, 33 bp, Homo sapien
atttatctcattatctgagaactttgctacata

SEQ ID NO: 611683 - DNA, 33 bp, Homo sapien
agtacagagtttgtaaagcctgaaaatataggc

SEQ ID NO: 611684 - DNA, 33 bp, Homo sapien
agtacagagtttgtaacgcctgaaaatataggc

SEQ ID NO: 611685 - DNA, 33 bp, Homo sapien
ctgctgtgcacagagaataaaaggaagtaaaat

SEQ ID NO: 611686 - DNA, 33 bp, Homo sapien
ctgctgtgcacagagagtaaaaggaagtaaaat

SEQ ID NO: 611687 - DNA, 33 bp, Homo sapien
cccaactaccagggtaaaaatgaagcatgttaa

SEQ ID NO: 611688 - DNA, 33 bp, Homo sapien
cccaactaccagggtataaatgaagcatgttaa

SEQ ID NO: 611689 - DNA, 33 bp, Homo sapien
caaagcaggcaaaggagcattctagcataaaga

SEQ ID NO: 611690 - DNA, 33 bp, Homo sapien
caaagcaggcaaaggatcattctagcataaaga

SEQ ID NO: 611691 - DNA, 33 bp, Homo sapien
cttggtatgaaaatgaagtctccatactaaaca

SEQ ID NO: 611692 - DNA, 33 bp, Homo sapien
cttggtatgaaaatgaggtctccatactaaaca

SEQ ID NO: 611693 - DNA, 33 bp, Homo sapien
tactgctactatctggcatcacctattcaattc

SEQ ID NO: 611694 - DNA, 33 bp, Homo sapien
tactgctactatctggtatcacctattcaattc

SEQ ID NO: 611695 - DNA, 33 bp, Homo sapien
gaaagttggttgggcactctatacaagctgttc

SEQ ID NO: 611696 - DNA, 33 bp, Homo sapien
gaaagttggttgggcagtctatacaagctgttc

SEQ ID NO: 611697 - DNA, 33 bp, Homo sapien
ctctaacacagacttacaatgatagtaaataca

SEQ ID NO: 611698 - DNA, 33 bp, Homo sapien
ctctaacacagacttataatgatagtaaataca

SEQ ID NO: 611699 - DNA, 33 bp, Homo sapien
aaaagataatcattgaagtaggtcctattatca

SEQ ID NO: 611700 - DNA, 33 bp, Homo sapien
aaaagataatcattgaggtaggtcctattatca

SEQ ID NO: 611701 - DNA, 33 bp, Homo sapien
cttaaataagcgtatcaccctttaacaaggaag

SEQ ID NO: 611702 - DNA, 33 bp, Homo sapien
cttaaataagcgtatcgccctttaacaaggaag

SEQ ID NO: 611703 - DNA, 33 bp, Homo sapien
ttgcctgcatttcagaagtcgctctccaaagtc

SEQ ID NO: 611704 - DNA, 33 bp, Homo sapien
ttgcctgcatttcagaggtcgctctccaaagtc

SEQ ID NO: 611705 - DNA, 33 bp, Homo sapien
catgccttgtggatcaactgagatttaaatatg

SEQ ID NO: 611706 - DNA, 33 bp, Homo sapien
catgccttgtggatcagctgagatttaaatatg

SEQ ID NO: 611707 - DNA, 33 bp, Homo sapien
agataagacttaatcacagcagaaattatgcgt

SEQ ID NO: 611708 - DNA, 33 bp, Homo sapien
agataagacttaatcatagcagaaattatgcgt

SEQ ID NO: 611709 - DNA, 33 bp, Homo sapien
tcatactcttcctccaatagattaagcgtctaa

SEQ ID NO: 611710 - DNA, 33 bp, Homo sapien
tcatactcttcctccagtagattaagcgtctaa

SEQ ID NO: 611711 - DNA, 33 bp, Homo sapien
caatcatcatcctcaaatagtcacttattgggc

SEQ ID NO: 611712 - DNA, 33 bp, Homo sapien
caatcatcatcctcaagtagtcacttattgggc

SEQ ID NO: 611713 - DNA, 33 bp, Homo sapien
tttcttgaaaatatctaacaaacctttgcccat

SEQ ID NO: 611714 - DNA, 33 bp, Homo sapien
tttcttgaaaatatcttacaaacctttgcccat

SEQ ID NO: 611715 - DNA, 33 bp, Homo sapien
aaccattacttttttaacacaatgtcgagttca

SEQ ID NO: 611716 - DNA, 33 bp, Homo sapien
aaccattacttttttatcacaatgtcgagttca

SEQ ID NO: 611717 - DNA, 33 bp, Homo sapien
tcatctatctttgtaacgagaaatgtctgctat

SEQ ID NO: 611718 - DNA, 33 bp, Homo sapien
tcatctatctttgtaatgagaaatgtctgctat

SEQ ID NO: 611719 - DNA, 33 bp, Homo sapien
gatggaaaaataatgacgtttatcagcatcatc

SEQ ID NO: 611720 - DNA, 33 bp, Homo sapien
gatggaaaaataatgaggtttatcagcatcatc

SEQ ID NO: 611721 - DNA, 33 bp, Homo sapien
tacctagagaattagccgattttctcacatgct

SEQ ID NO: 611722 - DNA, 33 bp, Homo sapien
tacctagagaattagctgattttctcacatgct

SEQ ID NO: 611723 - DNA, 33 bp, Homo sapien
ggtcttgtcgggaagaacattgacttttcctgt

SEQ ID NO: 611724 - DNA, 33 bp, Homo sapien
ggtcttgtcgggaagagcattgacttttcctgt

SEQ ID NO: 611725 - DNA, 33 bp, Homo sapien
gctggaattgactgcacgattagttccttttta

SEQ ID NO: 611726 - DNA, 33 bp, Homo sapien
gctggaattgactgcaggattagttccttttta

SEQ ID NO: 611727 - DNA, 33 bp, Homo sapien
ggcataggcaacatggacactcaagatttatat

SEQ ID NO: 611728 - DNA, 33 bp, Homo sapien
ggcataggcaacatgggcactcaagatttatat

SEQ ID NO: 611729 - DNA, 33 bp, Homo sapien
taattcaggcaattgacagcagtgaaatccatc

SEQ ID NO: 611730 - DNA, 33 bp, Homo sapien
taattcaggcaattgagagcagtgaaatccatc

SEQ ID NO: 611731 - DNA, 33 bp, Homo sapien
ctgctacgaagcctaaatgtcaagcatatacac

SEQ ID NO: 611732 - DNA, 33 bp, Homo sapien
ctgctacgaagcctaagtgtcaagcatatacac

SEQ ID NO: 611733 - DNA, 33 bp, Homo sapien
cacattctagtctatgaaactgtgtaaatgaag

SEQ ID NO: 611734 - DNA, 33 bp, Homo sapien
cacattctagtctatggaactgtgtaaatgaag

SEQ ID NO: 611735 - DNA, 33 bp, Homo sapien
agagcctggttggtaacgattatacagtcaggg

SEQ ID NO: 611736 - DNA, 33 bp, Homo sapien
agagcctggttggtaatgattatacagtcaggg

SEQ ID NO: 611737 - DNA, 33 bp, Homo sapien
ccaatatgaacaggacagcttcgatgttgagaa

SEQ ID NO: 611738 - DNA, 33 bp, Homo sapien
ccaatatgaacaggacggcttcgatgttgagaa

SEQ ID NO: 611739 - DNA, 33 bp, Homo sapien
gaagaaggtcattaggaaaactggaaggaagag

SEQ ID NO: 611740 - DNA, 33 bp, Homo sapien
gaagaaggtcattagggaaactggaaggaagag

SEQ ID NO: 611741 - DNA, 33 bp, Homo sapien
ggtaaaccaacgaaacagaaatgcaaggaggca

SEQ ID NO: 611742 - DNA, 33 bp, Homo sapien
ggtaaaccaacgaaacggaaatgcaaggaggca

SEQ ID NO: 611743 - DNA, 33 bp, Homo sapien
tatccaccaggtcttaagtaatctcattatatt

SEQ ID NO: 611744 - DNA, 33 bp, Homo sapien
tatccaccaggtcttatgtaatctcattatatt

SEQ ID NO: 611745 - DNA, 33 bp, Homo sapien
tcaaatttaggttcatcaagttctgcctttatt

SEQ ID NO: 611746 - DNA, 33 bp, Homo sapien
tcaaatttaggttcattaagttctgcctttatt

SEQ ID NO: 611747 - DNA, 33 bp, Homo sapien
gcaaactggaccaagactatcacttttattttt

SEQ ID NO: 611748 - DNA, 33 bp, Homo sapien
gcaaactggaccaagattatcacttttattttt

SEQ ID NO: 611749 - DNA, 33 bp, Homo sapien
tttcagtatttgtgaacaccaaaagcatgttca

SEQ ID NO: 611750 - DNA, 33 bp, Homo sapien
tttcagtatttgtgaagaccaaaagcatgttca

SEQ ID NO: 611751 - DNA, 33 bp, Homo sapien
tagattctctattgtcactcgcctaacagagaa

SEQ ID NO: 611752 - DNA, 33 bp, Homo sapien
tagattctctattgtctctcgcctaacagagaa

SEQ ID NO: 611753 - DNA, 33 bp, Homo sapien
tctgctctctgaagcacgcctctgctatggctg

SEQ ID NO: 611754 - DNA, 33 bp, Homo sapien
tctgctctctgaagcatgcctctgctatggctg

SEQ ID NO: 611755 - DNA, 33 bp, Homo sapien
cttgcagtctctgggaactatcctactatcctt

SEQ ID NO: 611756 - DNA, 33 bp, Homo sapien
cttgcagtctctgggagctatcctactatcctt

SEQ ID NO: 611757 - DNA, 33 bp, Homo sapien
ttcattcttgtagttcaaaagaatctcttctct

SEQ ID NO: 611758 - DNA, 33 bp, Homo sapien
ttcattcttgtagttccaaagaatctcttctct

SEQ ID NO: 611759 - DNA, 33 bp, Homo sapien
aaattcttgaagcccaaattttcaattcttctc

SEQ ID NO: 611760 - DNA, 33 bp, Homo sapien
aaattcttgaagcccacattttcaattcttctc

SEQ ID NO: 611761 - DNA, 33 bp, Homo sapien
tattcttacacacgtaggtagtactaaaccaaa

SEQ ID NO: 611762 - DNA, 33 bp, Homo sapien
tattcttacacacgtatgtagtactaaaccaaa

SEQ ID NO: 611763 - DNA, 33 bp, Homo sapien
gtagaattgtaggctgcaatcaatccttctttg

SEQ ID NO: 611764 - DNA, 33 bp, Homo sapien
gtagaattgtaggctggaatcaatccttctttg

SEQ ID NO: 611765 - DNA, 33 bp, Homo sapien
tgttaactctattttaccattttgaggaattgt

SEQ ID NO: 611766 - DNA, 33 bp, Homo sapien
tgttaactctattttagcattttgaggaattgt

SEQ ID NO: 611767 - DNA, 33 bp, Homo sapien
cctgttattggtcagaatagctaccaaaatagg

SEQ ID NO: 611768 - DNA, 33 bp, Homo sapien
cctgttattggtcagagtagctaccaaaatagg

SEQ ID NO: 611769 - DNA, 33 bp, Homo sapien
ctgttgactcttcactcaataaaatcatatgaa

SEQ ID NO: 611770 - DNA, 33 bp, Homo sapien
ctgttgactcttcacttaataaaatcatatgaa

SEQ ID NO: 611771 - DNA, 33 bp, Homo sapien
atagtaaacaaatacacatatcacatgtcaggt

SEQ ID NO: 611772 - DNA, 33 bp, Homo sapien
atagtaaacaaatacatatatcacatgtcaggt

SEQ ID NO: 611773 - DNA, 33 bp, Homo sapien
tacaccaagcccacacaaatataaacaatctac

SEQ ID NO: 611774 - DNA, 33 bp, Homo sapien
tacaccaagcccacacgaatataaacaatctac

SEQ ID NO: 611775 - DNA, 33 bp, Homo sapien
cctcgtaccctccaaacgcataaggagttttct

SEQ ID NO: 611776 - DNA, 33 bp, Homo sapien
cctcgtaccctccaaatgcataaggagttttct

SEQ ID NO: 611777 - DNA, 33 bp, Homo sapien
actaaacttgactctacaagctagattatttgg

SEQ ID NO: 611778 - DNA, 33 bp, Homo sapien
actaaacttgactctataagctagattatttgg

SEQ ID NO: 611779 - DNA, 33 bp, Homo sapien
ctcttcgtaggagaaacaacactgagtccatga

SEQ ID NO: 611780 - DNA, 33 bp, Homo sapien
ctcttcgtaggagaaataacactgagtccatga

SEQ ID NO: 611781 - DNA, 33 bp, Homo sapien
tcaaaagatcagaaagcccagtctatcactgat

SEQ ID NO: 611782 - DNA, 33 bp, Homo sapien
tcaaaagatcagaaagtccagtctatcactgat

SEQ ID NO: 611783 - DNA, 33 bp, Homo sapien
ccttatttatgttcacagactgaccagacaaaa

SEQ ID NO: 611784 - DNA, 33 bp, Homo sapien
ccttatttatgttcactgactgaccagacaaaa

SEQ ID NO: 611785 - DNA, 33 bp, Homo sapien
tgttttcaagtagctacagaagaatgttttaga

SEQ ID NO: 611786 - DNA, 33 bp, Homo sapien
tgttttcaagtagctatagaagaatgttttaga

SEQ ID NO: 611787 - DNA, 33 bp, Homo sapien
cttctccccacatataaaaaaaggaggagaaac

SEQ ID NO: 611788 - DNA, 33 bp, Homo sapien
cttctccccacatatataaaaaggaggagaaac

SEQ ID NO: 611789 - DNA, 33 bp, Homo sapien
aaactgtaccttaaaacaactagtgctcagagg

SEQ ID NO: 611790 - DNA, 33 bp, Homo sapien
aaactgtaccttaaaagaactagtgctcagagg

SEQ ID NO: 611791 - DNA, 33 bp, Homo sapien
ttaaggaagactgaagcctagtgtgacagaaaa

SEQ ID NO: 611792 - DNA, 33 bp, Homo sapien
ttaaggaagactgaaggctagtgtgacagaaaa

SEQ ID NO: 611793 - DNA, 33 bp, Homo sapien
ctctcaggaccctccaaaggaatgtaatttatt

SEQ ID NO: 611794 - DNA, 33 bp, Homo sapien
ctctcaggaccctccagaggaatgtaatttatt

SEQ ID NO: 611795 - DNA, 33 bp, Homo sapien
tcttgacagtttatgacacgctgatgggatgaa

SEQ ID NO: 611796 - DNA, 33 bp, Homo sapien
tcttgacagtttatgatacgctgatgggatgaa

SEQ ID NO: 611797 - DNA, 33 bp, Homo sapien
catctcccccaaagtacaggcaagtagtccttg

SEQ ID NO: 611798 - DNA, 33 bp, Homo sapien
catctcccccaaagtataggcaagtagtccttg

SEQ ID NO: 611799 - DNA, 33 bp, Homo sapien
tgtttgattgccctaactattcaggaggatgaa

SEQ ID NO: 611800 - DNA, 33 bp, Homo sapien
tgtttgattgccctaattattcaggaggatgaa

SEQ ID NO: 611801 - DNA, 33 bp, Homo sapien
ccatcacaaacaagtaccactgttaattgaatt

SEQ ID NO: 611802 - DNA, 33 bp, Homo sapien
ccatcacaaacaagtatcactgttaattgaatt

SEQ ID NO: 611803 - DNA, 33 bp, Homo sapien
ccagagtgagttctaaacaaaattgtgcaggtt

SEQ ID NO: 611804 - DNA, 33 bp, Homo sapien
ccagagtgagttctaagcaaaattgtgcaggtt

SEQ ID NO: 611805 - DNA, 33 bp, Homo sapien
gactgtccattagaacagaatggtaggccaaag

SEQ ID NO: 611806 - DNA, 33 bp, Homo sapien
gactgtccattagaacggaatggtaggccaaag

SEQ ID NO: 611807 - DNA, 33 bp, Homo sapien
cagagttggagaatcaaaggagaaagtgcctta

SEQ ID NO: 611808 - DNA, 33 bp, Homo sapien
cagagttggagaatcagaggagaaagtgcctta

SEQ ID NO: 611809 - DNA, 33 bp, Homo sapien
cttagcaaagagaatacagctgaaacaagaatc

SEQ ID NO: 611810 - DNA, 33 bp, Homo sapien
cttagcaaagagaatatagctgaaacaagaatc

SEQ ID NO: 611811 - DNA, 33 bp, Homo sapien
gctgttggggatataaatctggaatgaaaatta

SEQ ID NO: 611812 - DNA, 33 bp, Homo sapien
gctgttggggatataattctggaatgaaaatta

SEQ ID NO: 611813 - DNA, 33 bp, Homo sapien
aaatttaggcacataacctaatattagttcagg

SEQ ID NO: 611814 - DNA, 33 bp, Homo sapien
aaatttaggcacataagctaatattagttcagg

SEQ ID NO: 611815 - DNA, 33 bp, Homo sapien
ttatcaaccaaatgtgcactcatgtatttcttt

SEQ ID NO: 611816 - DNA, 33 bp, Homo sapien
ttatcaaccaaatgtggactcatgtatttcttt

SEQ ID NO: 611817 - DNA, 33 bp, Homo sapien
acttcagaatcctttaggtccagttcttctctg

SEQ ID NO: 611818 - DNA, 33 bp, Homo sapien
acttcagaatcctttatgtccagttcttctctg

SEQ ID NO: 611819 - DNA, 33 bp, Homo sapien
tcttttattgagcaacaagctgtgtgtatttaa

SEQ ID NO: 611820 - DNA, 33 bp, Homo sapien
tcttttattgagcaactagctgtgtgtatttaa

SEQ ID NO: 611821 - DNA, 33 bp, Homo sapien
ttggaaattgtagaaaatgggagaacgttgttg

SEQ ID NO: 611822 - DNA, 33 bp, Homo sapien
ttggaaattgtagaaactgggagaacgttgttg

SEQ ID NO: 611823 - DNA, 33 bp, Homo sapien
ttgtcatgctgcttcaagtttacttaacttttg

SEQ ID NO: 611824 - DNA, 33 bp, Homo sapien
ttgtcatgctgcttcacgtttacttaacttttg

SEQ ID NO: 611825 - DNA, 33 bp, Homo sapien
cacctgttcttttttgcagtcaagttgggatgt

SEQ ID NO: 611826 - DNA, 33 bp, Homo sapien
cacctgttcttttttgtagtcaagttgggatgt

SEQ ID NO: 611827 - DNA, 33 bp, Homo sapien
gtggagacaggactaacacaatggttcccaact

SEQ ID NO: 611828 - DNA, 33 bp, Homo sapien
gtggagacaggactaagacaatggttcccaact

SEQ ID NO: 611829 - DNA, 33 bp, Homo sapien
ataatactgtctaccaccagaagtgcaatgacc

SEQ ID NO: 611830 - DNA, 33 bp, Homo sapien
ataatactgtctaccagcagaagtgcaatgacc

SEQ ID NO: 611831 - DNA, 33 bp, Homo sapien
taaagttctgtgagtcaaagtaactttccccag

SEQ ID NO: 611832 - DNA, 33 bp, Homo sapien
taaagttctgtgagtcgaagtaactttccccag

SEQ ID NO: 611833 - DNA, 33 bp, Homo sapien
acagctaaaggtaggaatacattaggctcattt

SEQ ID NO: 611834 - DNA, 33 bp, Homo sapien
acagctaaaggtaggagtacattaggctcattt

SEQ ID NO: 611835 - DNA, 33 bp, Homo sapien
gggatttgctgtcaaaataaaattactactcta

SEQ ID NO: 611836 - DNA, 33 bp, Homo sapien
gggatttgctgtcaaagtaaaattactactcta

SEQ ID NO: 611837 - DNA, 33 bp, Homo sapien
atcattttgcctggcagatggtttcaacaaccc

SEQ ID NO: 611838 - DNA, 33 bp, Homo sapien
atcattttgcctggcatatggtttcaacaaccc

SEQ ID NO: 611839 - DNA, 33 bp, Homo sapien
gaagatactgaactcaaatccctgttagggtga

SEQ ID NO: 611840 - DNA, 33 bp, Homo sapien
gaagatactgaactcatatccctgttagggtga

SEQ ID NO: 611841 - DNA, 33 bp, Homo sapien
atattatatgattccacgttgatatggtttggc

SEQ ID NO: 611842 - DNA, 33 bp, Homo sapien
atattatatgattccatgttgatatggtttggc

SEQ ID NO: 611843 - DNA, 33 bp, Homo sapien
catccctgtggccttacattaaaatgttccatg

SEQ ID NO: 611844 - DNA, 33 bp, Homo sapien
catccctgtggccttatattaaaatgttccatg

SEQ ID NO: 611845 - DNA, 33 bp, Homo sapien
taattacatagctgtacgcggttctctccaatc

SEQ ID NO: 611846 - DNA, 33 bp, Homo sapien
taattacatagctgtatgcggttctctccaatc

SEQ ID NO: 611847 - DNA, 33 bp, Homo sapien
aggcactgctgtttcaatatgggccttcccaaa

SEQ ID NO: 611848 - DNA, 33 bp, Homo sapien
aggcactgctgtttcagtatgggccttcccaaa

SEQ ID NO: 611849 - DNA, 33 bp, Homo sapien
gtgcatggccaaaaaacgcaatgggactgactt

SEQ ID NO: 611850 - DNA, 33 bp, Homo sapien
gtgcatggccaaaaaatgcaatgggactgactt

SEQ ID NO: 611851 - DNA, 33 bp, Homo sapien
tataaaaaagacaaaaaaggcctgtggtactcc

SEQ ID NO: 611852 - DNA, 33 bp, Homo sapien
tataaaaaagacaaaagaggcctgtggtactcc

SEQ ID NO: 611853 - DNA, 33 bp, Homo sapien
caggtcatttactacactgactattgccaaatt

SEQ ID NO: 611854 - DNA, 33 bp, Homo sapien
caggtcatttactacattgactattgccaaatt

SEQ ID NO: 611855 - DNA, 33 bp, Homo sapien
tgtcaaaaacaaatctgaagtcatggtgaattg

SEQ ID NO: 611856 - DNA, 33 bp, Homo sapien
tgtcaaaaacaaatcttaagtcatggtgaattg

SEQ ID NO: 611857 - DNA, 33 bp, Homo sapien
tttgaacgtcaaccaccgtagaaggggctatat

SEQ ID NO: 611858 - DNA, 33 bp, Homo sapien
tttgaacgtcaaccactgtagaaggggctatat

SEQ ID NO: 611859 - DNA, 33 bp, Homo sapien
ctaattccaagaaacccagctattggcattcta

SEQ ID NO: 611860 - DNA, 33 bp, Homo sapien
ctaattccaagaaacctagctattggcattcta

SEQ ID NO: 611861 - DNA, 33 bp, Homo sapien
ataactgaaacatataaatagggtagttagtga

SEQ ID NO: 611862 - DNA, 33 bp, Homo sapien
ataactgaaacatatacatagggtagttagtga

SEQ ID NO: 611863 - DNA, 33 bp, Homo sapien
actgcttacctcaagacatggccgtattttgtc

SEQ ID NO: 611864 - DNA, 33 bp, Homo sapien
actgcttacctcaagagatggccgtattttgtc

SEQ ID NO: 611865 - DNA, 33 bp, Homo sapien
agtaaacgttcaggacccagcagttgcatttta

SEQ ID NO: 611866 - DNA, 33 bp, Homo sapien
agtaaacgttcaggactcagcagttgcatttta

SEQ ID NO: 611867 - DNA, 33 bp, Homo sapien
ttgatcatcttgtgaaataaatggagcattgca

SEQ ID NO: 611868 - DNA, 33 bp, Homo sapien
ttgatcatcttgtgaagtaaatggagcattgca

SEQ ID NO: 611869 - DNA, 33 bp, Homo sapien
ttaattcatgtcgccaacgtcctaaatgaaagt

SEQ ID NO: 611870 - DNA, 33 bp, Homo sapien
ttaattcatgtcgccagcgtcctaaatgaaagt

SEQ ID NO: 611871 - DNA, 33 bp, Homo sapien
aatctatgtttgaatgccacagtcgaatccact

SEQ ID NO: 611872 - DNA, 33 bp, Homo sapien
aatctatgtttgaatgtcacagtcgaatccact

SEQ ID NO: 611873 - DNA, 33 bp, Homo sapien
gctggaaccaactcatcaattatgttgaaagga

SEQ ID NO: 611874 - DNA, 33 bp, Homo sapien
gctggaaccaactcattaattatgttgaaagga

SEQ ID NO: 611875 - DNA, 33 bp, Homo sapien
atccataaagggaccaaaagcagtgaccactcc

SEQ ID NO: 611876 - DNA, 33 bp, Homo sapien
atccataaagggaccacaagcagtgaccactcc

SEQ ID NO: 611877 - DNA, 33 bp, Homo sapien
aactgactgcttaactaagtaaatgggaaaaaa

SEQ ID NO: 611878 - DNA, 33 bp, Homo sapien
aactgactgcttaactgagtaaatgggaaaaaa

SEQ ID NO: 611879 - DNA, 33 bp, Homo sapien
acagcctagcaaaaacaagataaactacaaatg

SEQ ID NO: 611880 - DNA, 33 bp, Homo sapien
acagcctagcaaaaacgagataaactacaaatg

SEQ ID NO: 611881 - DNA, 33 bp, Homo sapien
tgctatgaagataaaacgaggcagagtagaaat

SEQ ID NO: 611882 - DNA, 33 bp, Homo sapien
tgctatgaagataaaatgaggcagagtagaaat

SEQ ID NO: 611883 - DNA, 33 bp, Homo sapien
aacgtgattgagtgtccatttaagcctacttgt

SEQ ID NO: 611884 - DNA, 33 bp, Homo sapien
aacgtgattgagtgtctatttaagcctacttgt

SEQ ID NO: 611885 - DNA, 33 bp, Homo sapien
actatcttgccgcttgaaaaacattttatattg

SEQ ID NO: 611886 - DNA, 33 bp, Homo sapien
actatcttgccgcttggaaaacattttatattg

SEQ ID NO: 611887 - DNA, 33 bp, Homo sapien
tgaattatccctaaaaattaaccatagattttc

SEQ ID NO: 611888 - DNA, 33 bp, Homo sapien
tgaattatccctaaaagttaaccatagattttc

SEQ ID NO: 611889 - DNA, 33 bp, Homo sapien
tgaacagctagctgaacaccttctatacagtag

SEQ ID NO: 611890 - DNA, 33 bp, Homo sapien
tgaacagctagctgaataccttctatacagtag

SEQ ID NO: 611891 - DNA, 33 bp, Homo sapien
aggattcttaagtccacaattccctaatctgcc

SEQ ID NO: 611892 - DNA, 33 bp, Homo sapien
aggattcttaagtccataattccctaatctgcc

SEQ ID NO: 611893 - DNA, 33 bp, Homo sapien
actctcgtgatatggccagttagacttttcatc

SEQ ID NO: 611894 - DNA, 33 bp, Homo sapien
actctcgtgatatggctagttagacttttcatc

SEQ ID NO: 611895 - DNA, 33 bp, Homo sapien
ttcagaaacctctgtacaggataatatatgact

SEQ ID NO: 611896 - DNA, 33 bp, Homo sapien
ttcagaaacctctgtataggataatatatgact

SEQ ID NO: 611897 - DNA, 33 bp, Homo sapien
actcttttattatagcacctgttttatagcatt

SEQ ID NO: 611898 - DNA, 33 bp, Homo sapien
actcttttattatagcgcctgttttatagcatt

SEQ ID NO: 611899 - DNA, 33 bp, Homo sapien
tctaattcaggtctgcaaggcctcattctctca

SEQ ID NO: 611900 - DNA, 33 bp, Homo sapien
tctaattcaggtctgcgaggcctcattctctca

SEQ ID NO: 611901 - DNA, 33 bp, Homo sapien
gtattctaaaaggaaccggtgatatggattcca

SEQ ID NO: 611902 - DNA, 33 bp, Homo sapien
gtattctaaaaggaactggtgatatggattcca

SEQ ID NO: 611903 - DNA, 33 bp, Homo sapien
tgtaaattgggatacagcagcagagagttaaat

SEQ ID NO: 611904 - DNA, 33 bp, Homo sapien
tgtaaattgggatacatcagcagagagttaaat

SEQ ID NO: 611905 - DNA, 33 bp, Homo sapien
ttttctttcatttgaacttaacagatgccaaga

SEQ ID NO: 611906 - DNA, 33 bp, Homo sapien
ttttctttcatttgaatttaacagatgccaaga

SEQ ID NO: 611907 - DNA, 33 bp, Homo sapien
ttgtttccacctttagaatgacaagctatttct

SEQ ID NO: 611908 - DNA, 33 bp, Homo sapien
ttgtttccacctttagtatgacaagctatttct

SEQ ID NO: 611909 - DNA, 33 bp, Homo sapien
ttaactatgtgcaaagcaggaagtttaaaaagt

SEQ ID NO: 611910 - DNA, 33 bp, Homo sapien
ttaactatgtgcaaagtaggaagtttaaaaagt

SEQ ID NO: 611911 - DNA, 33 bp, Homo sapien
taaagaaggtcctttacagctgaagcaaggctt

SEQ ID NO: 611912 - DNA, 33 bp, Homo sapien
taaagaaggtcctttagagctgaagcaaggctt

SEQ ID NO: 611913 - DNA, 33 bp, Homo sapien
taaatcatactgaaacacctactactttttaaa

SEQ ID NO: 611914 - DNA, 33 bp, Homo sapien
taaatcatactgaaactcctactactttttaaa

SEQ ID NO: 611915 - DNA, 33 bp, Homo sapien
tttctgtttatttgccaattaatagagaggaga

SEQ ID NO: 611916 - DNA, 33 bp, Homo sapien
tttctgtttatttgccgattaatagagaggaga

SEQ ID NO: 611917 - DNA, 33 bp, Homo sapien
tttagaatcacacaagccaggtttaaatcccag

SEQ ID NO: 611918 - DNA, 33 bp, Homo sapien
tttagaatcacacaaggcaggtttaaatcccag

SEQ ID NO: 611919 - DNA, 33 bp, Homo sapien
atttttattttacttgaaacctgtattgatttt

SEQ ID NO: 611920 - DNA, 33 bp, Homo sapien
atttttattttacttgcaacctgtattgatttt

SEQ ID NO: 611921 - DNA, 33 bp, Homo sapien
ggaaaacacggattcacgcacactgagttcttc

SEQ ID NO: 611922 - DNA, 33 bp, Homo sapien
ggaaaacacggattcatgcacactgagttcttc

SEQ ID NO: 611923 - DNA, 33 bp, Homo sapien
acaagatgttaaggaaccaaaagattatcactg

SEQ ID NO: 611924 - DNA, 33 bp, Homo sapien
acaagatgttaaggaagcaaaagattatcactg

SEQ ID NO: 611925 - DNA, 33 bp, Homo sapien
caatgagagaaagcaaccgaggcctgttttatt

SEQ ID NO: 611926 - DNA, 33 bp, Homo sapien
caatgagagaaagcaatcgaggcctgttttatt

SEQ ID NO: 611927 - DNA, 33 bp, Homo sapien
gagctatccagataaacgtccatccactgaaat

SEQ ID NO: 611928 - DNA, 33 bp, Homo sapien
gagctatccagataaatgtccatccactgaaat

SEQ ID NO: 611929 - DNA, 33 bp, Homo sapien
tttcctgtttgctctacgctctctcataactat

SEQ ID NO: 611930 - DNA, 33 bp, Homo sapien
tttcctgtttgctctatgctctctcataactat

SEQ ID NO: 611931 - DNA, 33 bp, Homo sapien
aggtatttgttctgcacaggtatttattattgt

SEQ ID NO: 611932 - DNA, 33 bp, Homo sapien
aggtatttgttctgcataggtatttattattgt

SEQ ID NO: 611933 - DNA, 33 bp, Homo sapien
acaactcattgcagcaaatatgttacttcaaca

SEQ ID NO: 611934 - DNA, 33 bp, Homo sapien
acaactcattgcagcagatatgttacttcaaca

SEQ ID NO: 611935 - DNA, 33 bp, Homo sapien
tggggaacttggtgaacgcccatgcagtttttg

SEQ ID NO: 611936 - DNA, 33 bp, Homo sapien
tggggaacttggtgaatgcccatgcagtttttg

SEQ ID NO: 611937 - DNA, 33 bp, Homo sapien
attgacagaaacattgcattttgcctggatttc

SEQ ID NO: 611938 - DNA, 33 bp, Homo sapien
attgacagaaacattgtattttgcctggatttc

SEQ ID NO: 611939 - DNA, 33 bp, Homo sapien
aatctacctctgttaaccttcgcaattatcgga

SEQ ID NO: 611940 - DNA, 33 bp, Homo sapien
aatctacctctgttaatcttcgcaattatcgga

SEQ ID NO: 611941 - DNA, 33 bp, Homo sapien
tgtatagcttggatcacatctgaagttctgtat

SEQ ID NO: 611942 - DNA, 33 bp, Homo sapien
tgtatagcttggatcatatctgaagttctgtat

SEQ ID NO: 611943 - DNA, 33 bp, Homo sapien
aggctactgaagagaacggacccttgctaggaa

SEQ ID NO: 611944 - DNA, 33 bp, Homo sapien
aggctactgaagagaatggacccttgctaggaa

SEQ ID NO: 611945 - DNA, 33 bp, Homo sapien
tggataaaacaagtgaagctatcatggtttttc

SEQ ID NO: 611946 - DNA, 33 bp, Homo sapien
tggataaaacaagtgaggctatcatggtttttc

SEQ ID NO: 611947 - DNA, 33 bp, Homo sapien
gcaaagttaataaaaacgcgaaagtattgtgtc

SEQ ID NO: 611948 - DNA, 33 bp, Homo sapien
gcaaagttaataaaaatgcgaaagtattgtgtc

SEQ ID NO: 611949 - DNA, 33 bp, Homo sapien
ttgaacaatctgtatgaaggaggaagaaagtac

SEQ ID NO: 611950 - DNA, 33 bp, Homo sapien
ttgaacaatctgtatgtaggaggaagaaagtac

SEQ ID NO: 611951 - DNA, 33 bp, Homo sapien
agatagccgtaatacaaaaactgatgtaagcca

SEQ ID NO: 611952 - DNA, 33 bp, Homo sapien
agatagccgtaatacagaaactgatgtaagcca

SEQ ID NO: 611953 - DNA, 33 bp, Homo sapien
aatttagatcatatcaagacacccctttgtcta

SEQ ID NO: 611954 - DNA, 33 bp, Homo sapien
aatttagatcatatcatgacacccctttgtcta

SEQ ID NO: 611955 - DNA, 33 bp, Homo sapien
actagcacctgacaggacatcggttggttttgt

SEQ ID NO: 611956 - DNA, 33 bp, Homo sapien
actagcacctgacagggcatcggttggttttgt

SEQ ID NO: 611957 - DNA, 33 bp, Homo sapien
gtcattgcagtttaaacatcgaatggggggaca

SEQ ID NO: 611958 - DNA, 33 bp, Homo sapien
gtcattgcagtttaaatatcgaatggggggaca

SEQ ID NO: 611959 - DNA, 33 bp, Homo sapien
atacagttgttaaatcaactcagataaacatgt

SEQ ID NO: 611960 - DNA, 33 bp, Homo sapien
atacagttgttaaatccactcagataaacatgt

SEQ ID NO: 611961 - DNA, 33 bp, Homo sapien
cccttgtgaaagcttccaaaaataactgaaaga

SEQ ID NO: 611962 - DNA, 33 bp, Homo sapien
cccttgtgaaagcttctaaaaataactgaaaga

SEQ ID NO: 611963 - DNA, 33 bp, Homo sapien
actaacaggtttaaagaatctgcacagggtcat

SEQ ID NO: 611964 - DNA, 33 bp, Homo sapien
actaacaggtttaaagcatctgcacagggtcat

SEQ ID NO: 611965 - DNA, 33 bp, Homo sapien
atagttgggttctgaacatatgttaaaggtaaa

SEQ ID NO: 611966 - DNA, 33 bp, Homo sapien
atagttgggttctgaatatatgttaaaggtaaa

SEQ ID NO: 611967 - DNA, 33 bp, Homo sapien
acctgccatcaggctagggtctactactccctc

SEQ ID NO: 611968 - DNA, 33 bp, Homo sapien
acctgccatcaggctatggtctactactccctc

SEQ ID NO: 611969 - DNA, 33 bp, Homo sapien
ctccctgggaagtttcaacagaatgtacaccaa

SEQ ID NO: 611970 - DNA, 33 bp, Homo sapien
ctccctgggaagtttccacagaatgtacaccaa

SEQ ID NO: 611971 - DNA, 33 bp, Homo sapien
caggttctgttttcaccctctgacctttcatgc

SEQ ID NO: 611972 - DNA, 33 bp, Homo sapien
caggttctgttttcactctctgacctttcatgc

SEQ ID NO: 611973 - DNA, 33 bp, Homo sapien
actgcagcattatctcgcattcatctagtggtc

SEQ ID NO: 611974 - DNA, 33 bp, Homo sapien
actgcagcattatctctcattcatctagtggtc

SEQ ID NO: 611975 - DNA, 33 bp, Homo sapien
tccagatcacatcaaaacaccactgtaatctta

SEQ ID NO: 611976 - DNA, 33 bp, Homo sapien
tccagatcacatcaaatcaccactgtaatctta

SEQ ID NO: 611977 - DNA, 33 bp, Homo sapien
aggaatgcttttttccaaaggccagaatgacag

SEQ ID NO: 611978 - DNA, 33 bp, Homo sapien
aggaatgcttttttccgaaggccagaatgacag

SEQ ID NO: 611979 - DNA, 33 bp, Homo sapien
gaagccttttacttcacataattccatttgtct

SEQ ID NO: 611980 - DNA, 33 bp, Homo sapien
gaagccttttacttcatataattccatttgtct

SEQ ID NO: 611981 - DNA, 33 bp, Homo sapien
cagcagtggagagacaatcttaccacatatata

SEQ ID NO: 611982 - DNA, 33 bp, Homo sapien
cagcagtggagagacagtcttaccacatatata

SEQ ID NO: 611983 - DNA, 33 bp, Homo sapien
gtgcagagtattcctcagacagatacttactta

SEQ ID NO: 611984 - DNA, 33 bp, Homo sapien
gtgcagagtattcctcggacagatacttactta

SEQ ID NO: 611985 - DNA, 33 bp, Homo sapien
aaacagggtcactttacactgggaatatttctt

SEQ ID NO: 611986 - DNA, 33 bp, Homo sapien
aaacagggtcactttatactgggaatatttctt

SEQ ID NO: 611987 - DNA, 33 bp, Homo sapien
gggccaaattctatccagagctattttacttca

SEQ ID NO: 611988 - DNA, 33 bp, Homo sapien
gggccaaattctatccggagctattttacttca

SEQ ID NO: 611989 - DNA, 33 bp, Homo sapien
catcaaatgccaatgacaggaaaagagctgtat

SEQ ID NO: 611990 - DNA, 33 bp, Homo sapien
catcaaatgccaatgataggaaaagagctgtat

SEQ ID NO: 611991 - DNA, 33 bp, Homo sapien
acacacataattgtagcccaatgattacatgaa

SEQ ID NO: 611992 - DNA, 33 bp, Homo sapien
acacacataattgtagtccaatgattacatgaa

SEQ ID NO: 611993 - DNA, 33 bp, Homo sapien
ctagtgaacgagccaccttttccatgaagaggt

SEQ ID NO: 611994 - DNA, 33 bp, Homo sapien
ctagtgaacgagccactttttccatgaagaggt

SEQ ID NO: 611995 - DNA, 33 bp, Homo sapien
gatgctggcggcagagaaaatctactccgtgaa

SEQ ID NO: 611996 - DNA, 33 bp, Homo sapien
gatgctggcggcagaggaaatctactccgtgaa

SEQ ID NO: 611997 - DNA, 33 bp, Homo sapien
caggtaggaattcaacccagagtgggcagatgt

SEQ ID NO: 611998 - DNA, 33 bp, Homo sapien
caggtaggaattcaactcagagtgggcagatgt

SEQ ID NO: 611999 - DNA, 33 bp, Homo sapien
acattgcaaagtaaaccgcaaatatccatatgt

SEQ ID NO: 612000 - DNA, 33 bp, Homo sapien
acattgcaaagtaaactgcaaatatccatatgt

SEQ ID NO: 612001 - DNA, 33 bp, Homo sapien
aattcatgagacacaactcttatgaaatggatg

SEQ ID NO: 612002 - DNA, 33 bp, Homo sapien
aattcatgagacacaattcttatgaaatggatg

SEQ ID NO: 612003 - DNA, 33 bp, Homo sapien
catggcaattaacttaacaaatggctatcttaa

SEQ ID NO: 612004 - DNA, 33 bp, Homo sapien
catggcaattaacttaccaaatggctatcttaa

SEQ ID NO: 612005 - DNA, 33 bp, Homo sapien
ttggtaagtgatatacaaaactgaataaagagg

SEQ ID NO: 612006 - DNA, 33 bp, Homo sapien
ttggtaagtgatatacgaaactgaataaagagg

SEQ ID NO: 612007 - DNA, 33 bp, Homo sapien
acattcaggaaggaaccgagtggagaacagcca

SEQ ID NO: 612008 - DNA, 33 bp, Homo sapien
acattcaggaaggaacggagtggagaacagcca

SEQ ID NO: 612009 - DNA, 33 bp, Homo sapien
atacaataatgcttcacaccagtgttttcacca

SEQ ID NO: 612010 - DNA, 33 bp, Homo sapien
atacaataatgcttcataccagtgttttcacca

SEQ ID NO: 612011 - DNA, 33 bp, Homo sapien
aacagccatgaaagagaaatcacaagatgaggg

SEQ ID NO: 612012 - DNA, 33 bp, Homo sapien
aacagccatgaaagaggaatcacaagatgaggg

SEQ ID NO: 612013 - DNA, 33 bp, Homo sapien
gtttcagttacttgtaccataaaaatcctgttt

SEQ ID NO: 612014 - DNA, 33 bp, Homo sapien
gtttcagttacttgtatcataaaaatcctgttt

SEQ ID NO: 612015 - DNA, 33 bp, Homo sapien
tcacttaaattatctacagtcagtttcagttac

SEQ ID NO: 612016 - DNA, 33 bp, Homo sapien
tcacttaaattatctagagtcagtttcagttac

SEQ ID NO: 612017 - DNA, 33 bp, Homo sapien
cagaggaaagaagccaaggtagagtgaaaggta

SEQ ID NO: 612018 - DNA, 33 bp, Homo sapien
cagaggaaagaagccagggtagagtgaaaggta

SEQ ID NO: 612019 - DNA, 33 bp, Homo sapien
tacatcacatttgttaactcaggcctacaaaat

SEQ ID NO: 612020 - DNA, 33 bp, Homo sapien
tacatcacatttgttacctcaggcctacaaaat

SEQ ID NO: 612021 - DNA, 33 bp, Homo sapien
tggagggagctcacccaaaagatgtcctagaac

SEQ ID NO: 612022 - DNA, 33 bp, Homo sapien
tggagggagctcacccgaaagatgtcctagaac

SEQ ID NO: 612023 - DNA, 33 bp, Homo sapien
ttccagcacaaattgaccacattaggctattat

SEQ ID NO: 612024 - DNA, 33 bp, Homo sapien
ttccagcacaaattgagcacattaggctattat

SEQ ID NO: 612025 - DNA, 33 bp, Homo sapien
tttcttgatattctcacgaatgtgttcttctgg

SEQ ID NO: 612026 - DNA, 33 bp, Homo sapien
tttcttgatattctcaggaatgtgttcttctgg

SEQ ID NO: 612027 - DNA, 33 bp, Homo sapien
ctaattctacagaggacgaaacggaggcacaga

SEQ ID NO: 612028 - DNA, 33 bp, Homo sapien
ctaattctacagaggatgaaacggaggcacaga

SEQ ID NO: 612029 - DNA, 33 bp, Homo sapien
caactattgaaagtccagcaatgtgctagttgc

SEQ ID NO: 612030 - DNA, 33 bp, Homo sapien
caactattgaaagtccggcaatgtgctagttgc

SEQ ID NO: 612031 - DNA, 33 bp, Homo sapien
gaaaggaatgaaggtacagactctaaggagaag

SEQ ID NO: 612032 - DNA, 33 bp, Homo sapien
gaaaggaatgaaggtagagactctaaggagaag

SEQ ID NO: 612033 - DNA, 33 bp, Homo sapien
tcattatctctcaacaatctcattttacaagtg

SEQ ID NO: 612034 - DNA, 33 bp, Homo sapien
tcattatctctcaacattctcattttacaagtg

SEQ ID NO: 612035 - DNA, 33 bp, Homo sapien
tacataaataaacgacaacattttcctatacca

SEQ ID NO: 612036 - DNA, 33 bp, Homo sapien
tacataaataaacgacgacattttcctatacca

SEQ ID NO: 612037 - DNA, 33 bp, Homo sapien
acacaattttgtgaaaatatcaccactatccac

SEQ ID NO: 612038 - DNA, 33 bp, Homo sapien
acacaattttgtgaaactatcaccactatccac

SEQ ID NO: 612039 - DNA, 33 bp, Homo sapien
agtatgaatatatgccaagtcctgtgaatcctc

SEQ ID NO: 612040 - DNA, 33 bp, Homo sapien
agtatgaatatatgccgagtcctgtgaatcctc

SEQ ID NO: 612041 - DNA, 33 bp, Homo sapien
taatgactatctcaaaggaaaaccaaccattct

SEQ ID NO: 612042 - DNA, 33 bp, Homo sapien
taatgactatctcaaatgaaaaccaaccattct

SEQ ID NO: 612043 - DNA, 33 bp, Homo sapien
tcattcgtattgtgaacttaagtatatcaagaa

SEQ ID NO: 612044 - DNA, 33 bp, Homo sapien
tcattcgtattgtgaagttaagtatatcaagaa

SEQ ID NO: 612045 - DNA, 33 bp, Homo sapien
agaaaaatggagcagaacacagagagtttgcct

SEQ ID NO: 612046 - DNA, 33 bp, Homo sapien
agaaaaatggagcagagcacagagagtttgcct

SEQ ID NO: 612047 - DNA, 33 bp, Homo sapien
cgtggggctgtatcaaggtatcctactctgacc

SEQ ID NO: 612048 - DNA, 33 bp, Homo sapien
cgtggggctgtatcaatgtatcctactctgacc

SEQ ID NO: 612049 - DNA, 33 bp, Homo sapien
gcttcattatgtgtggcacaaatgcatgatggc

SEQ ID NO: 612050 - DNA, 33 bp, Homo sapien
gcttcattatgtgtgggacaaatgcatgatggc

SEQ ID NO: 612051 - DNA, 33 bp, Homo sapien
agagtttacttcccaaatgaaaattgttgctct

SEQ ID NO: 612052 - DNA, 33 bp, Homo sapien
agagtttacttcccaagtgaaaattgttgctct

SEQ ID NO: 612053 - DNA, 33 bp, Homo sapien
gcactgaattgacaaacagcaggcatccttaga

SEQ ID NO: 612054 - DNA, 33 bp, Homo sapien
gcactgaattgacaaagagcaggcatccttaga

SEQ ID NO: 612055 - DNA, 33 bp, Homo sapien
agatgggtgaggattcagaaagaccatggactg

SEQ ID NO: 612056 - DNA, 33 bp, Homo sapien
agatgggtgaggattcggaaagaccatggactg

SEQ ID NO: 612057 - DNA, 33 bp, Homo sapien
agtcttccaggaaaaacaatttgaacttgattt

SEQ ID NO: 612058 - DNA, 33 bp, Homo sapien
agtcttccaggaaaaagaatttgaacttgattt

SEQ ID NO: 612059 - DNA, 33 bp, Homo sapien
ttaagaaggagtggtacaatcaaagtagataca

SEQ ID NO: 612060 - DNA, 33 bp, Homo sapien
ttaagaaggagtggtataatcaaagtagataca

SEQ ID NO: 612061 - DNA, 33 bp, Homo sapien
tcatgtgtgtacctaacagccgttgcttcctgc

SEQ ID NO: 612062 - DNA, 33 bp, Homo sapien
tcatgtgtgtacctaagagccgttgcttcctgc

SEQ ID NO: 612063 - DNA, 33 bp, Homo sapien
gtacctgggagctaaaacattcctcttgttgaa

SEQ ID NO: 612064 - DNA, 33 bp, Homo sapien
gtacctgggagctaaagcattcctcttgttgaa

SEQ ID NO: 612065 - DNA, 33 bp, Homo sapien
cagtttatcctacaaacaaaattgtttccaaaa

SEQ ID NO: 612066 - DNA, 33 bp, Homo sapien
cagtttatcctacaaataaaattgtttccaaaa

SEQ ID NO: 612067 - DNA, 33 bp, Homo sapien
taaattactggcagctcaattgctcgcttatac

SEQ ID NO: 612068 - DNA, 33 bp, Homo sapien
taaattactggcagcttaattgctcgcttatac

SEQ ID NO: 612069 - DNA, 33 bp, Homo sapien
agaaagggtatggtagcaggctaagtgacagtg

SEQ ID NO: 612070 - DNA, 33 bp, Homo sapien
agaaagggtatggtagtaggctaagtgacagtg

SEQ ID NO: 612071 - DNA, 33 bp, Homo sapien
gtgaaatttatgttcaatccgtagatttgggtg

SEQ ID NO: 612072 - DNA, 33 bp, Homo sapien
gtgaaatttatgttcattccgtagatttgggtg

SEQ ID NO: 612073 - DNA, 33 bp, Homo sapien
cagggtgtatgtggaccagtgagagagccagac

SEQ ID NO: 612074 - DNA, 33 bp, Homo sapien
cagggtgtatgtggactagtgagagagccagac

SEQ ID NO: 612075 - DNA, 33 bp, Homo sapien
tgtcatgtggctaagaactgctgtttgaaaagc

SEQ ID NO: 612076 - DNA, 33 bp, Homo sapien
tgtcatgtggctaagagctgctgtttgaaaagc

SEQ ID NO: 612077 - DNA, 33 bp, Homo sapien
acacacacaatgcatacccaggtgatagtaaca

SEQ ID NO: 612078 - DNA, 33 bp, Homo sapien
acacacacaatgcatatccaggtgatagtaaca

SEQ ID NO: 612079 - DNA, 33 bp, Homo sapien
gcctcatgcatcttcacagagatttgtttccaa

SEQ ID NO: 612080 - DNA, 33 bp, Homo sapien
gcctcatgcatcttcagagagatttgtttccaa

SEQ ID NO: 612081 - DNA, 33 bp, Homo sapien
ggtgggcagaattacccacactatttacatggc

SEQ ID NO: 612082 - DNA, 33 bp, Homo sapien
ggtgggcagaattaccgacactatttacatggc

SEQ ID NO: 612083 - DNA, 33 bp, Homo sapien
cataatcttaggaccaatgagtaacccggaatg

SEQ ID NO: 612084 - DNA, 33 bp, Homo sapien
cataatcttaggaccagtgagtaacccggaatg

SEQ ID NO: 612085 - DNA, 33 bp, Homo sapien
agaaataatattcaaacttaaaccatactctga

SEQ ID NO: 612086 - DNA, 33 bp, Homo sapien
agaaataatattcaaagttaaaccatactctga

SEQ ID NO: 612087 - DNA, 33 bp, Homo sapien
aaggtattcaataagcactagttccctttctcc

SEQ ID NO: 612088 - DNA, 33 bp, Homo sapien
aaggtattcaataagcgctagttccctttctcc

SEQ ID NO: 612089 - DNA, 33 bp, Homo sapien
ccctttctcctacagaagtaagtgctggtatga

SEQ ID NO: 612090 - DNA, 33 bp, Homo sapien
ccctttctcctacagacgtaagtgctggtatga

SEQ ID NO: 612091 - DNA, 33 bp, Homo sapien
ccagttgtattttcaccgtaacttgtttgtgtt

SEQ ID NO: 612092 - DNA, 33 bp, Homo sapien
ccagttgtattttcactgtaacttgtttgtgtt

SEQ ID NO: 612093 - DNA, 33 bp, Homo sapien
tcttagaagattgatacgctcatctatgtaaag

SEQ ID NO: 612094 - DNA, 33 bp, Homo sapien
tcttagaagattgatatgctcatctatgtaaag

SEQ ID NO: 612095 - DNA, 33 bp, Homo sapien
tcccaaagtgctatgacggcaggcgtgagccat

SEQ ID NO: 612096 - DNA, 33 bp, Homo sapien
tcccaaagtgctatgatggcaggcgtgagccat

SEQ ID NO: 612097 - DNA, 33 bp, Homo sapien
ttagaggagacctggaaaagtatatatctgatt

SEQ ID NO: 612098 - DNA, 33 bp, Homo sapien
ttagaggagacctggagaagtatatatctgatt

SEQ ID NO: 612099 - DNA, 33 bp, Homo sapien
ttattacagtagctgacaaaagtaatacatcag

SEQ ID NO: 612100 - DNA, 33 bp, Homo sapien
ttattacagtagctgagaaaagtaatacatcag

SEQ ID NO: 612101 - DNA, 33 bp, Homo sapien
ctctgcctcactcttacaaacccttgtcatcgg

SEQ ID NO: 612102 - DNA, 33 bp, Homo sapien
ctctgcctcactcttagaaacccttgtcatcgg

SEQ ID NO: 612103 - DNA, 33 bp, Homo sapien
tatgttttcctgacaaggattctaatttggatg

SEQ ID NO: 612104 - DNA, 33 bp, Homo sapien
tatgttttcctgacaatgattctaatttggatg

SEQ ID NO: 612105 - DNA, 33 bp, Homo sapien
ttttgtcccttaattacggatgtttgccttcat

SEQ ID NO: 612106 - DNA, 33 bp, Homo sapien
ttttgtcccttaattatggatgtttgccttcat

SEQ ID NO: 612107 - DNA, 33 bp, Homo sapien
cagagaactaagaaatcaaagttgcaaagatga

SEQ ID NO: 612108 - DNA, 33 bp, Homo sapien
cagagaactaagaaatgaaagttgcaaagatga

SEQ ID NO: 612109 - DNA, 33 bp, Homo sapien
aaacagacatcacaaaatcactgaactagaaaa

SEQ ID NO: 612110 - DNA, 33 bp, Homo sapien
aaacagacatcacaaattcactgaactagaaaa

SEQ ID NO: 612111 - DNA, 33 bp, Homo sapien
atcaaatgtaatagacaacaaaaaacgaaatgg

SEQ ID NO: 612112 - DNA, 33 bp, Homo sapien
atcaaatgtaatagacgacaaaaaacgaaatgg

SEQ ID NO: 612113 - DNA, 33 bp, Homo sapien
cagggaccttcgaacaagaacatctgtagagtc

SEQ ID NO: 612114 - DNA, 33 bp, Homo sapien
cagggaccttcgaacacgaacatctgtagagtc

SEQ ID NO: 612115 - DNA, 33 bp, Homo sapien
tctgttgccagacttacagaatatatttgccat

SEQ ID NO: 612116 - DNA, 33 bp, Homo sapien
tctgttgccagacttatagaatatatttgccat

SEQ ID NO: 612117 - DNA, 33 bp, Homo sapien
atgcataaattacacaacccagggtcaacaccc

SEQ ID NO: 612118 - DNA, 33 bp, Homo sapien
atgcataaattacacatcccagggtcaacaccc

SEQ ID NO: 612119 - DNA, 33 bp, Homo sapien
taaacaaatgctgtaactgagaaacttagcaac

SEQ ID NO: 612120 - DNA, 33 bp, Homo sapien
taaacaaatgctgtaattgagaaacttagcaac

SEQ ID NO: 612121 - DNA, 33 bp, Homo sapien
ttgtgaaatcaacttactaagcattagttgaat

SEQ ID NO: 612122 - DNA, 33 bp, Homo sapien
ttgtgaaatcaacttagtaagcattagttgaat

SEQ ID NO: 612123 - DNA, 33 bp, Homo sapien
tgaaatgttgaagagacgtatctgcactctcat

SEQ ID NO: 612124 - DNA, 33 bp, Homo sapien
tgaaatgttgaagagatgtatctgcactctcat

SEQ ID NO: 612125 - DNA, 33 bp, Homo sapien
tttaaacctataatgacggtaatgaccctttgc

SEQ ID NO: 612126 - DNA, 33 bp, Homo sapien
tttaaacctataatgatggtaatgaccctttgc

SEQ ID NO: 612127 - DNA, 33 bp, Homo sapien
ccaggaactgcaagaactaaatagcactgatga

SEQ ID NO: 612128 - DNA, 33 bp, Homo sapien
ccaggaactgcaagaattaaatagcactgatga

SEQ ID NO: 612129 - DNA, 33 bp, Homo sapien
ctttcctgctgattaaatcccgaagccaagact

SEQ ID NO: 612130 - DNA, 33 bp, Homo sapien
ctttcctgctgattaagtcccgaagccaagact

SEQ ID NO: 612131 - DNA, 33 bp, Homo sapien
taagagagcagtttaacactgtggcaaacactc

SEQ ID NO: 612132 - DNA, 33 bp, Homo sapien
taagagagcagtttaatactgtggcaaacactc

SEQ ID NO: 612133 - DNA, 33 bp, Homo sapien
ttcttgtataaattcacataagaggtgttacag

SEQ ID NO: 612134 - DNA, 33 bp, Homo sapien
ttcttgtataaattcagataagaggtgttacag

SEQ ID NO: 612135 - DNA, 33 bp, Homo sapien
ttcccaactgaattaactgcagtagtattctga

SEQ ID NO: 612136 - DNA, 33 bp, Homo sapien
ttcccaactgaattaattgcagtagtattctga

SEQ ID NO: 612137 - DNA, 33 bp, Homo sapien
agtttctgatttagtaagttgagatgcagccta

SEQ ID NO: 612138 - DNA, 33 bp, Homo sapien
agtttctgatttagtaggttgagatgcagccta

SEQ ID NO: 612139 - DNA, 33 bp, Homo sapien
tgaacatagcgttttcaagattgatcgatgttg

SEQ ID NO: 612140 - DNA, 33 bp, Homo sapien
tgaacatagcgttttcgagattgatcgatgttg

SEQ ID NO: 612141 - DNA, 33 bp, Homo sapien
gaaaacgctatgttcaatgaaaggagccaggca

SEQ ID NO: 612142 - DNA, 33 bp, Homo sapien
gaaaacgctatgttcagtgaaaggagccaggca

SEQ ID NO: 612143 - DNA, 33 bp, Homo sapien
taattcttctgagtaaccattctgtggccacaa

SEQ ID NO: 612144 - DNA, 33 bp, Homo sapien
taattcttctgagtaatcattctgtggccacaa

SEQ ID NO: 612145 - DNA, 33 bp, Homo sapien
aagcaggtcctatctccagcagtcatgaattgt

SEQ ID NO: 612146 - DNA, 33 bp, Homo sapien
aagcaggtcctatctctagcagtcatgaattgt

SEQ ID NO: 612147 - DNA, 33 bp, Homo sapien
aatgaagtgtgaactaaaagagcctgatattta

SEQ ID NO: 612148 - DNA, 33 bp, Homo sapien
aatgaagtgtgaactacaagagcctgatattta

SEQ ID NO: 612149 - DNA, 33 bp, Homo sapien
ttggatcaaataactaaattgtcattacctatg

SEQ ID NO: 612150 - DNA, 33 bp, Homo sapien
ttggatcaaataactacattgtcattacctatg

SEQ ID NO: 612151 - DNA, 33 bp, Homo sapien
agagcattggcaccaacaatattccatctcttc

SEQ ID NO: 612152 - DNA, 33 bp, Homo sapien
agagcattggcaccaataatattccatctcttc

SEQ ID NO: 612153 - DNA, 33 bp, Homo sapien
ttcagtgaattagaccaaaacaatagaaggatg

SEQ ID NO: 612154 - DNA, 33 bp, Homo sapien
ttcagtgaattagaccgaaacaatagaaggatg

SEQ ID NO: 612155 - DNA, 33 bp, Homo sapien
tgtattaaatttgtggaatacatccctttctga

SEQ ID NO: 612156 - DNA, 33 bp, Homo sapien
tgtattaaatttgtggtatacatccctttctga

SEQ ID NO: 612157 - DNA, 33 bp, Homo sapien
gaaaatgtagggcagcaatagattgtggaggcc

SEQ ID NO: 612158 - DNA, 33 bp, Homo sapien
gaaaatgtagggcagcgatagattgtggaggcc

SEQ ID NO: 612159 - DNA, 33 bp, Homo sapien
tcctattggacactcacatagcacttatgctat

SEQ ID NO: 612160 - DNA, 33 bp, Homo sapien
tcctattggacactcatatagcacttatgctat

SEQ ID NO: 612161 - DNA, 33 bp, Homo sapien
ttcccaaaggcttttgaaagagttgaaattcat

SEQ ID NO: 612162 - DNA, 33 bp, Homo sapien
ttcccaaaggcttttggaagagttgaaattcat

SEQ ID NO: 612163 - DNA, 33 bp, Homo sapien
aacactgaactcaaccaatggaggacaggagat

SEQ ID NO: 612164 - DNA, 33 bp, Homo sapien
aacactgaactcaaccgatggaggacaggagat

SEQ ID NO: 612165 - DNA, 33 bp, Homo sapien
ttggggaaggaaagagaagacagcaatcacagg

SEQ ID NO: 612166 - DNA, 33 bp, Homo sapien
ttggggaaggaaagaggagacagcaatcacagg

SEQ ID NO: 612167 - DNA, 33 bp, Homo sapien
attgctaagaacctgccgagtgttccttctcac

SEQ ID NO: 612168 - DNA, 33 bp, Homo sapien
attgctaagaacctgctgagtgttccttctcac

SEQ ID NO: 612169 - DNA, 33 bp, Homo sapien
ttttgaagagatgtccaaagtctggattatagg

SEQ ID NO: 612170 - DNA, 33 bp, Homo sapien
ttttgaagagatgtccgaagtctggattatagg

SEQ ID NO: 612171 - DNA, 33 bp, Homo sapien
aatgtaaggtctagtacaggacacaaattctaa

SEQ ID NO: 612172 - DNA, 33 bp, Homo sapien
aatgtaaggtctagtataggacacaaattctaa

SEQ ID NO: 612173 - DNA, 33 bp, Homo sapien
attttgggcatcttcaccaacatggttatagca

SEQ ID NO: 612174 - DNA, 33 bp, Homo sapien
attttgggcatcttcatcaacatggttatagca

SEQ ID NO: 612175 - DNA, 33 bp, Homo sapien
gatatcttctcacaccactaagaatgactacta

SEQ ID NO: 612176 - DNA, 33 bp, Homo sapien
gatatcttctcacaccgctaagaatgactacta

SEQ ID NO: 612177 - DNA, 33 bp, Homo sapien
attttgatttgtctaacggatttctaatttagt

SEQ ID NO: 612178 - DNA, 33 bp, Homo sapien
attttgatttgtctaatggatttctaatttagt

SEQ ID NO: 612179 - DNA, 33 bp, Homo sapien
catgagaattcaataaactgagttatgccagtg

SEQ ID NO: 612180 - DNA, 33 bp, Homo sapien
catgagaattcaataatctgagttatgccagtg

SEQ ID NO: 612181 - DNA, 33 bp, Homo sapien
aagaatatagtcctgcaaagtccttttaggtca

SEQ ID NO: 612182 - DNA, 33 bp, Homo sapien
aagaatatagtcctgcgaagtccttttaggtca

SEQ ID NO: 612183 - DNA, 33 bp, Homo sapien
tgaaactaaattcaaacgatcaattgtttatag

SEQ ID NO: 612184 - DNA, 33 bp, Homo sapien
tgaaactaaattcaaatgatcaattgtttatag

SEQ ID NO: 612185 - DNA, 33 bp, Homo sapien
tgtcttgtagtacatcaatgtggccgaaatgga

SEQ ID NO: 612186 - DNA, 33 bp, Homo sapien
tgtcttgtagtacatcgatgtggccgaaatgga

SEQ ID NO: 612187 - DNA, 33 bp, Homo sapien
ataaccacacagttccaaatatgaagaaaaaag

SEQ ID NO: 612188 - DNA, 33 bp, Homo sapien
ataaccacacagttccgaatatgaagaaaaaag

SEQ ID NO: 612189 - DNA, 33 bp, Homo sapien
aatttctaacatcttaaattattggcttatata

SEQ ID NO: 612190 - DNA, 33 bp, Homo sapien
aatttctaacatcttatattattggcttatata

SEQ ID NO: 612191 - DNA, 33 bp, Homo sapien
acacatttctataagcacacagtaaaatgagca

SEQ ID NO: 612192 - DNA, 33 bp, Homo sapien
acacatttctataagcgcacagtaaaatgagca

SEQ ID NO: 612193 - DNA, 33 bp, Homo sapien
ttgtgaggcatcataacgtgttgtaggacttca

SEQ ID NO: 612194 - DNA, 33 bp, Homo sapien
ttgtgaggcatcataatgtgttgtaggacttca

SEQ ID NO: 612195 - DNA, 33 bp, Homo sapien
gatagaaaattggaagcccaagagttagaacta

SEQ ID NO: 612196 - DNA, 33 bp, Homo sapien
gatagaaaattggaagtccaagagttagaacta

SEQ ID NO: 612197 - DNA, 33 bp, Homo sapien
gagtaattatgacagaaactgtgtaattttttt

SEQ ID NO: 612198 - DNA, 33 bp, Homo sapien
gagtaattatgacagagactgtgtaattttttt

SEQ ID NO: 612199 - DNA, 33 bp, Homo sapien
accccagtatccaaacagttgactttagaactt

SEQ ID NO: 612200 - DNA, 33 bp, Homo sapien
accccagtatccaaacggttgactttagaactt

SEQ ID NO: 612201 - DNA, 33 bp, Homo sapien
ttatttgctcaatctacgtggctctcacacatg

SEQ ID NO: 612202 - DNA, 33 bp, Homo sapien
ttatttgctcaatctatgtggctctcacacatg

SEQ ID NO: 612203 - DNA, 33 bp, Homo sapien
aaaaaaaaaaattctacacagtgtgctgagata

SEQ ID NO: 612204 - DNA, 33 bp, Homo sapien
aaaaaaaaaaattctatacagtgtgctgagata

SEQ ID NO: 612205 - DNA, 33 bp, Homo sapien
gaggtccaacctgttacaagaattagaattttc

SEQ ID NO: 612206 - DNA, 33 bp, Homo sapien
gaggtccaacctgttataagaattagaattttc

SEQ ID NO: 612207 - DNA, 33 bp, Homo sapien
tttattctaattgggacaaaagattatatgata

SEQ ID NO: 612208 - DNA, 33 bp, Homo sapien
tttattctaattgggataaaagattatatgata

SEQ ID NO: 612209 - DNA, 33 bp, Homo sapien
tctagcctcaggagaactataagatagaagaca

SEQ ID NO: 612210 - DNA, 33 bp, Homo sapien
tctagcctcaggagaattataagatagaagaca

SEQ ID NO: 612211 - DNA, 33 bp, Homo sapien
tgcaatgttcacttggacaccctggcggtcaat

SEQ ID NO: 612212 - DNA, 33 bp, Homo sapien
tgcaatgttcacttgggcaccctggcggtcaat

SEQ ID NO: 612213 - DNA, 33 bp, Homo sapien
caagtaggttttgccacagtgataagtgaagca

SEQ ID NO: 612214 - DNA, 33 bp, Homo sapien
caagtaggttttgccatagtgataagtgaagca

SEQ ID NO: 612215 - DNA, 33 bp, Homo sapien
aaggctggtgggtacaagtttgatgaccatcag

SEQ ID NO: 612216 - DNA, 33 bp, Homo sapien
aaggctggtgggtacacgtttgatgaccatcag

SEQ ID NO: 612217 - DNA, 33 bp, Homo sapien
aagactgaaacagatcccaggctaaaatgatat

SEQ ID NO: 612218 - DNA, 33 bp, Homo sapien
aagactgaaacagatctcaggctaaaatgatat

SEQ ID NO: 612219 - DNA, 33 bp, Homo sapien
agtgaatcaatatagcagatttttattatgtag

SEQ ID NO: 612220 - DNA, 33 bp, Homo sapien
agtgaatcaatatagcggatttttattatgtag

SEQ ID NO: 612221 - DNA, 33 bp, Homo sapien
aatagctgcttgatgaagagaccaccctagagg

SEQ ID NO: 612222 - DNA, 33 bp, Homo sapien
aatagctgcttgatgaggagaccaccctagagg

SEQ ID NO: 612223 - DNA, 33 bp, Homo sapien
agatgtgttctgaaaacgtcggtgttcccatct

SEQ ID NO: 612224 - DNA, 33 bp, Homo sapien
agatgtgttctgaaaatgtcggtgttcccatct

SEQ ID NO: 612225 - DNA, 33 bp, Homo sapien
cttcatcagaatccctaactgttggtgttcagg

SEQ ID NO: 612226 - DNA, 33 bp, Homo sapien
cttcatcagaatccctgactgttggtgttcagg

SEQ ID NO: 612227 - DNA, 33 bp, Homo sapien
tcctctaggcataatgcaaggggggaaatgtgt

SEQ ID NO: 612228 - DNA, 33 bp, Homo sapien
tcctctaggcataatgtaaggggggaaatgtgt

SEQ ID NO: 612229 - DNA, 33 bp, Homo sapien
cacagagcagtgcaaaattaacagcaatttcct

SEQ ID NO: 612230 - DNA, 33 bp, Homo sapien
cacagagcagtgcaaagttaacagcaatttcct

SEQ ID NO: 612231 - DNA, 33 bp, Homo sapien
tccctgtgacatggcccgatagtatttgggtag

SEQ ID NO: 612232 - DNA, 33 bp, Homo sapien
tccctgtgacatggcctgatagtatttgggtag

SEQ ID NO: 612233 - DNA, 33 bp, Homo sapien
ggaaatcagatttaaacgaaggcttgaaactaa

SEQ ID NO: 612234 - DNA, 33 bp, Homo sapien
ggaaatcagatttaaatgaaggcttgaaactaa

SEQ ID NO: 612235 - DNA, 33 bp, Homo sapien
cttcaaaacatcaaggacatatagcctactttt

SEQ ID NO: 612236 - DNA, 33 bp, Homo sapien
cttcaaaacatcaaggccatatagcctactttt

SEQ ID NO: 612237 - DNA, 33 bp, Homo sapien
gcaccagttagagcaacgtcgacaaccagggta

SEQ ID NO: 612238 - DNA, 33 bp, Homo sapien
gcaccagttagagcaaggtcgacaaccagggta

SEQ ID NO: 612239 - DNA, 33 bp, Homo sapien
atagacgaactccaaaggtaacgaagactgtgt

SEQ ID NO: 612240 - DNA, 33 bp, Homo sapien
atagacgaactccaaatgtaacgaagactgtgt

SEQ ID NO: 612241 - DNA, 33 bp, Homo sapien
acctttccgtataccacgcaaaattcattgctg

SEQ ID NO: 612242 - DNA, 33 bp, Homo sapien
acctttccgtataccatgcaaaattcattgctg

SEQ ID NO: 612243 - DNA, 33 bp, Homo sapien
ggggaatagagaaagcaatggagtggacaggag

SEQ ID NO: 612244 - DNA, 33 bp, Homo sapien
ggggaatagagaaagccatggagtggacaggag

SEQ ID NO: 612245 - DNA, 33 bp, Homo sapien
tgagatgtggagatgtgaagcaattgcccggtc

SEQ ID NO: 612246 - DNA, 33 bp, Homo sapien
tgagatgtggagatgttaagcaattgcccggtc

SEQ ID NO: 612247 - DNA, 33 bp, Homo sapien
tatctttttgtcagggaaaactacagaggatga

SEQ ID NO: 612248 - DNA, 33 bp, Homo sapien
tatctttttgtcaggggaaactacagaggatga

SEQ ID NO: 612249 - DNA, 33 bp, Homo sapien
gaggcaaccattgtcaacctggacatatctgca

SEQ ID NO: 612250 - DNA, 33 bp, Homo sapien
gaggcaaccattgtcaccctggacatatctgca

SEQ ID NO: 612251 - DNA, 33 bp, Homo sapien
tctgatgccaaagcaccgatgtgtaactgagca

SEQ ID NO: 612252 - DNA, 33 bp, Homo sapien
tctgatgccaaagcactgatgtgtaactgagca

SEQ ID NO: 612253 - DNA, 33 bp, Homo sapien
gttttttgcttctttacgaatggcattatacag

SEQ ID NO: 612254 - DNA, 33 bp, Homo sapien
gttttttgcttctttaggaatggcattatacag

SEQ ID NO: 612255 - DNA, 33 bp, Homo sapien
atttcaacatagaagtaaccatatcaaactaag

SEQ ID NO: 612256 - DNA, 33 bp, Homo sapien
atttcaacatagaagtgaccatatcaaactaag

SEQ ID NO: 612257 - DNA, 33 bp, Homo sapien
aatctagttgggaagacaagccatacatacaag

SEQ ID NO: 612258 - DNA, 33 bp, Homo sapien
aatctagttgggaagagaagccatacatacaag

SEQ ID NO: 612259 - DNA, 33 bp, Homo sapien
aggcaactgatgcaaaatgctacttcaaagacc

SEQ ID NO: 612260 - DNA, 33 bp, Homo sapien
aggcaactgatgcaaagtgctacttcaaagacc

SEQ ID NO: 612261 - DNA, 33 bp, Homo sapien
gaaaaaaatctcaagcagcaatatagtcattcc

SEQ ID NO: 612262 - DNA, 33 bp, Homo sapien
gaaaaaaatctcaagcggcaatatagtcattcc

SEQ ID NO: 612263 - DNA, 33 bp, Homo sapien
gtgcaaatcaacctaccgatttagttaccattt

SEQ ID NO: 612264 - DNA, 33 bp, Homo sapien
gtgcaaatcaacctactgatttagttaccattt

SEQ ID NO: 612265 - DNA, 33 bp, Homo sapien
tcaaggacaacgaacacgcaaaaaacaacattt

SEQ ID NO: 612266 - DNA, 33 bp, Homo sapien
tcaaggacaacgaacatgcaaaaaacaacattt

SEQ ID NO: 612267 - DNA, 33 bp, Homo sapien
tgtaaggtaaagtcataatattggctcccatct

SEQ ID NO: 612268 - DNA, 33 bp, Homo sapien
tgtaaggtaaagtcatgatattggctcccatct

SEQ ID NO: 612269 - DNA, 33 bp, Homo sapien
tgccaaatactgttcaatctaacctatatacaa

SEQ ID NO: 612270 - DNA, 33 bp, Homo sapien
tgccaaatactgttcagtctaacctatatacaa

SEQ ID NO: 612271 - DNA, 33 bp, Homo sapien
caaaccacaacccagacagttggcattgtggaa

SEQ ID NO: 612272 - DNA, 33 bp, Homo sapien
caaaccacaacccagagagttggcattgtggaa

SEQ ID NO: 612273 - DNA, 33 bp, Homo sapien
tggcaaaatgtttaaaatgtttggtcactcaaa

SEQ ID NO: 612274 - DNA, 33 bp, Homo sapien
tggcaaaatgtttaaagtgtttggtcactcaaa

SEQ ID NO: 612275 - DNA, 33 bp, Homo sapien
aaccctggacacatacagcatatcataagaact

SEQ ID NO: 612276 - DNA, 33 bp, Homo sapien
aaccctggacacatacggcatatcataagaact

SEQ ID NO: 612277 - DNA, 33 bp, Homo sapien
tcctagagtccacaaacggtccataagtatccc

SEQ ID NO: 612278 - DNA, 33 bp, Homo sapien
tcctagagtccacaaatggtccataagtatccc

SEQ ID NO: 612279 - DNA, 33 bp, Homo sapien
tcagtactcgttatcaactgccctagatcagct

SEQ ID NO: 612280 - DNA, 33 bp, Homo sapien
tcagtactcgttatcacctgccctagatcagct

SEQ ID NO: 612281 - DNA, 33 bp, Homo sapien
aattccctgagactgactaatgcttctcgtatt

SEQ ID NO: 612282 - DNA, 33 bp, Homo sapien
aattccctgagactgattaatgcttctcgtatt

SEQ ID NO: 612283 - DNA, 33 bp, Homo sapien
agcaatttgacattgccatgatatccaaacaca

SEQ ID NO: 612284 - DNA, 33 bp, Homo sapien
agcaatttgacattgcgatgatatccaaacaca

SEQ ID NO: 612285 - DNA, 33 bp, Homo sapien
caagttaaattcacaactgaggttccaggagac

SEQ ID NO: 612286 - DNA, 33 bp, Homo sapien
caagttaaattcacaattgaggttccaggagac

SEQ ID NO: 612287 - DNA, 33 bp, Homo sapien
ttacataggttgctgcacagaagaaatgagttt

SEQ ID NO: 612288 - DNA, 33 bp, Homo sapien
ttacataggttgctgctcagaagaaatgagttt

SEQ ID NO: 612289 - DNA, 33 bp, Homo sapien
gtgacttaaaacagaaacataaagatcttctca

SEQ ID NO: 612290 - DNA, 33 bp, Homo sapien
gtgacttaaaacagaagcataaagatcttctca

SEQ ID NO: 612291 - DNA, 33 bp, Homo sapien
catatcaccagctgaaaagaccatacctcctga

SEQ ID NO: 612292 - DNA, 33 bp, Homo sapien
catatcaccagctgaagagaccatacctcctga

SEQ ID NO: 612293 - DNA, 33 bp, Homo sapien
atgggagagtacttgacaagaacgggtgactga

SEQ ID NO: 612294 - DNA, 33 bp, Homo sapien
atgggagagtacttgagaagaacgggtgactga

SEQ ID NO: 612295 - DNA, 33 bp, Homo sapien
tcctactctcttaccacgtgctccccccagaga

SEQ ID NO: 612296 - DNA, 33 bp, Homo sapien
tcctactctcttaccatgtgctccccccagaga

SEQ ID NO: 612297 - DNA, 33 bp, Homo sapien
cagcgttcttgagaaccggtcaaattctactga

SEQ ID NO: 612298 - DNA, 33 bp, Homo sapien
cagcgttcttgagaactggtcaaattctactga

SEQ ID NO: 612299 - DNA, 33 bp, Homo sapien
tctggtaggcttttaaatatgaagagtttactt

SEQ ID NO: 612300 - DNA, 33 bp, Homo sapien
tctggtaggcttttaagtatgaagagtttactt

SEQ ID NO: 612301 - DNA, 33 bp, Homo sapien
atttacttgagggtaccagacctgctcacaaag

SEQ ID NO: 612302 - DNA, 33 bp, Homo sapien
atttacttgagggtacgagacctgctcacaaag

SEQ ID NO: 612303 - DNA, 33 bp, Homo sapien
cagctgggtggtaaaacggatgtgacgtgagga

SEQ ID NO: 612304 - DNA, 33 bp, Homo sapien
cagctgggtggtaaaatggatgtgacgtgagga

SEQ ID NO: 612305 - DNA, 33 bp, Homo sapien
atttgtcactaatgaaaccttaaaaatacttat

SEQ ID NO: 612306 - DNA, 33 bp, Homo sapien
atttgtcactaatgaagccttaaaaatacttat

SEQ ID NO: 612307 - DNA, 33 bp, Homo sapien
atgcactatgctaggcacggtgaagggtataaa

SEQ ID NO: 612308 - DNA, 33 bp, Homo sapien
atgcactatgctaggcgcggtgaagggtataaa

SEQ ID NO: 612309 - DNA, 33 bp, Homo sapien
tataataaagtgtaaacgtccaaagacagtatg

SEQ ID NO: 612310 - DNA, 33 bp, Homo sapien
tataataaagtgtaaatgtccaaagacagtatg

SEQ ID NO: 612311 - DNA, 33 bp, Homo sapien
acttggaacaaatctgaactcactttgtgatct

SEQ ID NO: 612312 - DNA, 33 bp, Homo sapien
acttggaacaaatctgcactcactttgtgatct

SEQ ID NO: 612313 - DNA, 33 bp, Homo sapien
taaaagctgaaagagccagccagtgcccttaaa

SEQ ID NO: 612314 - DNA, 33 bp, Homo sapien
taaaagctgaaagagcgagccagtgcccttaaa

SEQ ID NO: 612315 - DNA, 33 bp, Homo sapien
agtaggctgtgccttccgaagcagtatctattc

SEQ ID NO: 612316 - DNA, 33 bp, Homo sapien
agtaggctgtgccttctgaagcagtatctattc

SEQ ID NO: 612317 - DNA, 33 bp, Homo sapien
tacttctccatttatacaggtttccaatcaaga

SEQ ID NO: 612318 - DNA, 33 bp, Homo sapien
tacttctccatttatataggtttccaatcaaga

SEQ ID NO: 612319 - DNA, 33 bp, Homo sapien
acattttgacctgttacgtgaaaaaggaaacag

SEQ ID NO: 612320 - DNA, 33 bp, Homo sapien
acattttgacctgttatgtgaaaaaggaaacag

SEQ ID NO: 612321 - DNA, 33 bp, Homo sapien
agttacagaaacacaggcaaagcacttcacatg

SEQ ID NO: 612322 - DNA, 33 bp, Homo sapien
agttacagaaacacagtcaaagcacttcacatg

SEQ ID NO: 612323 - DNA, 33 bp, Homo sapien
actggcagaaagatgcggaacgcagagatctca

SEQ ID NO: 612324 - DNA, 33 bp, Homo sapien
actggcagaaagatgctgaacgcagagatctca

SEQ ID NO: 612325 - DNA, 33 bp, Homo sapien
ggaaaaccttcaaatacgactcatctagttgcg

SEQ ID NO: 612326 - DNA, 33 bp, Homo sapien
ggaaaaccttcaaatatgactcatctagttgcg

SEQ ID NO: 612327 - DNA, 33 bp, Homo sapien
tgaggttgaagatcgcaaaagaggagaaaaacc

SEQ ID NO: 612328 - DNA, 33 bp, Homo sapien
tgaggttgaagatcgcgaaagaggagaaaaacc

SEQ ID NO: 612329 - DNA, 33 bp, Homo sapien
atggcttaagagcataaaagtcatacatattac

SEQ ID NO: 612330 - DNA, 33 bp, Homo sapien
atggcttaagagcatacaagtcatacatattac

SEQ ID NO: 612331 - DNA, 33 bp, Homo sapien
atagggcaatccaagagacatagtcctaacccc

SEQ ID NO: 612332 - DNA, 33 bp, Homo sapien
atagggcaatccaagatacatagtcctaacccc

SEQ ID NO: 612333 - DNA, 33 bp, Homo sapien
cacaccaggtacaataactaccattatatccat

SEQ ID NO: 612334 - DNA, 33 bp, Homo sapien
cacaccaggtacaatagctaccattatatccat

SEQ ID NO: 612335 - DNA, 33 bp, Homo sapien
cagcatcatataaggaatacagccagcgaggcc

SEQ ID NO: 612336 - DNA, 33 bp, Homo sapien
cagcatcatataaggagtacagccagcgaggcc

SEQ ID NO: 612337 - DNA, 33 bp, Homo sapien
ttcagttacaattagaagtgataaataatcggt

SEQ ID NO: 612338 - DNA, 33 bp, Homo sapien
ttcagttacaattagaggtgataaataatcggt

SEQ ID NO: 612339 - DNA, 33 bp, Homo sapien
taaaagcccttaaaaccaatctgttacctggag

SEQ ID NO: 612340 - DNA, 33 bp, Homo sapien
taaaagcccttaaaacgaatctgttacctggag

SEQ ID NO: 612341 - DNA, 33 bp, Homo sapien
taagccatcttggtgccgaagaactattctata

SEQ ID NO: 612342 - DNA, 33 bp, Homo sapien
taagccatcttggtgcggaagaactattctata

SEQ ID NO: 612343 - DNA, 33 bp, Homo sapien
atggcaggactttgcacgatgacgacagctgtc

SEQ ID NO: 612344 - DNA, 33 bp, Homo sapien
atggcaggactttgcatgatgacgacagctgtc

SEQ ID NO: 612345 - DNA, 33 bp, Homo sapien
tgaacaaaaaaaaaaaggcatggaatattgcat

SEQ ID NO: 612346 - DNA, 33 bp, Homo sapien
tgaacaaaaaaaaaaatgcatggaatattgcat

SEQ ID NO: 612347 - DNA, 33 bp, Homo sapien
tttcacacaacatacacgaaaaagaaaaactaa

SEQ ID NO: 612348 - DNA, 33 bp, Homo sapien
tttcacacaacatacaggaaaaagaaaaactaa

SEQ ID NO: 612349 - DNA, 33 bp, Homo sapien
aattcaaatactcaaaataccacacagggcaag

SEQ ID NO: 612350 - DNA, 33 bp, Homo sapien
aattcaaatactcaaattaccacacagggcaag

SEQ ID NO: 612351 - DNA, 33 bp, Homo sapien
gtaattctcaagttccaagtctacagaggctac

SEQ ID NO: 612352 - DNA, 33 bp, Homo sapien
gtaattctcaagttcccagtctacagaggctac

SEQ ID NO: 612353 - DNA, 33 bp, Homo sapien
agcaacagctacaatcagagcaatgagcagttg

SEQ ID NO: 612354 - DNA, 33 bp, Homo sapien
agcaacagctacaatcggagcaatgagcagttg

SEQ ID NO: 612355 - DNA, 33 bp, Homo sapien
tcccctcattgtcttcaaatggagttatcaagt

SEQ ID NO: 612356 - DNA, 33 bp, Homo sapien
tcccctcattgtcttctaatggagttatcaagt

SEQ ID NO: 612357 - DNA, 33 bp, Homo sapien
gttacattcatacaataatgcacaggcaatgaa

SEQ ID NO: 612358 - DNA, 33 bp, Homo sapien
gttacattcatacaatcatgcacaggcaatgaa

SEQ ID NO: 612359 - DNA, 33 bp, Homo sapien
gggttgtttaaaattacgtttactgactgttga

SEQ ID NO: 612360 - DNA, 33 bp, Homo sapien
gggttgtttaaaattatgtttactgactgttga

SEQ ID NO: 612361 - DNA, 33 bp, Homo sapien
agttcatcgacaaacaccgcaagaatgtgcatc

SEQ ID NO: 612362 - DNA, 33 bp, Homo sapien
agttcatcgacaaacagcgcaagaatgtgcatc

SEQ ID NO: 612363 - DNA, 33 bp, Homo sapien
cattatacttttccaccgaatccaaacataacc

SEQ ID NO: 612364 - DNA, 33 bp, Homo sapien
cattatacttttccactgaatccaaacataacc

SEQ ID NO: 612365 - DNA, 33 bp, Homo sapien
tttggagataagtgtcaaaatctaaatttgagg

SEQ ID NO: 612366 - DNA, 33 bp, Homo sapien
tttggagataagtgtcgaaatctaaatttgagg

SEQ ID NO: 612367 - DNA, 33 bp, Homo sapien
tctattgctgttatcacaagtgaccacaaactt

SEQ ID NO: 612368 - DNA, 33 bp, Homo sapien
tctattgctgttatcataagtgaccacaaactt

SEQ ID NO: 612369 - DNA, 33 bp, Homo sapien
caagagtagagaagagaattgtaaagtttccag

SEQ ID NO: 612370 - DNA, 33 bp, Homo sapien
caagagtagagaagaggattgtaaagtttccag

SEQ ID NO: 612371 - DNA, 33 bp, Homo sapien
cattgcatccagaccacgtgctaggggcatttg

SEQ ID NO: 612372 - DNA, 33 bp, Homo sapien
cattgcatccagaccatgtgctaggggcatttg

SEQ ID NO: 612373 - DNA, 33 bp, Homo sapien
aaatgagaacctaccaactgaattgtttttatt

SEQ ID NO: 612374 - DNA, 33 bp, Homo sapien
aaatgagaacctaccagctgaattgtttttatt

SEQ ID NO: 612375 - DNA, 33 bp, Homo sapien
tctagggtattcatgacgagggaaacagaacat

SEQ ID NO: 612376 - DNA, 33 bp, Homo sapien
tctagggtattcatgatgagggaaacagaacat

SEQ ID NO: 612377 - DNA, 33 bp, Homo sapien
aaccatgcctccgtcacaataatacccagtgca

SEQ ID NO: 612378 - DNA, 33 bp, Homo sapien
aaccatgcctccgtcagaataatacccagtgca

SEQ ID NO: 612379 - DNA, 33 bp, Homo sapien
cttgaaactggccatccatactctgtcacacaa

SEQ ID NO: 612380 - DNA, 33 bp, Homo sapien
cttgaaactggccatctatactctgtcacacaa

SEQ ID NO: 612381 - DNA, 33 bp, Homo sapien
gacctgcaaggtcccaagatgtgagaaaaaagt

SEQ ID NO: 612382 - DNA, 33 bp, Homo sapien
gacctgcaaggtcccaggatgtgagaaaaaagt

SEQ ID NO: 612383 - DNA, 33 bp, Homo sapien
cctgcattaagtgactcagaatctagagttcct

SEQ ID NO: 612384 - DNA, 33 bp, Homo sapien
cctgcattaagtgacttagaatctagagttcct

SEQ ID NO: 612385 - DNA, 33 bp, Homo sapien
cccataataaaaaggtaaatgcagctacagcag

SEQ ID NO: 612386 - DNA, 33 bp, Homo sapien
cccataataaaaaggttaatgcagctacagcag

SEQ ID NO: 612387 - DNA, 33 bp, Homo sapien
tgagcaaagatcacaaagaaaaaaagaagtaaa

SEQ ID NO: 612388 - DNA, 33 bp, Homo sapien
tgagcaaagatcacaaggaaaaaaagaagtaaa

SEQ ID NO: 612389 - DNA, 33 bp, Homo sapien
tgtaggatgatgcaaaagacaggagaaagttaa

SEQ ID NO: 612390 - DNA, 33 bp, Homo sapien
tgtaggatgatgcaaaggacaggagaaagttaa

SEQ ID NO: 612391 - DNA, 33 bp, Homo sapien
caaggtagaatgctaaataaatgatcagtctgt

SEQ ID NO: 612392 - DNA, 33 bp, Homo sapien
caaggtagaatgctaagtaaatgatcagtctgt

SEQ ID NO: 612393 - DNA, 33 bp, Homo sapien
tggctttcttcgaggccgagtctctaggctagt

SEQ ID NO: 612394 - DNA, 33 bp, Homo sapien
tggctttcttcgaggctgagtctctaggctagt

SEQ ID NO: 612395 - DNA, 33 bp, Homo sapien
agagctgtctatcacacggtggtaaggaagagc

SEQ ID NO: 612396 - DNA, 33 bp, Homo sapien
agagctgtctatcacatggtggtaaggaagagc

SEQ ID NO: 612397 - DNA, 33 bp, Homo sapien
gtgacttagaatgcgtaaccttatggcaatgca

SEQ ID NO: 612398 - DNA, 33 bp, Homo sapien
gtgacttagaatgcgtgaccttatggcaatgca

SEQ ID NO: 612399 - DNA, 33 bp, Homo sapien
cctagtaccttgtctacatgtttcccttacaag

SEQ ID NO: 612400 - DNA, 33 bp, Homo sapien
cctagtaccttgtctatatgtttcccttacaag

SEQ ID NO: 612401 - DNA, 33 bp, Homo sapien
cattttttgataggcccgagaacatcaagatat

SEQ ID NO: 612402 - DNA, 33 bp, Homo sapien
cattttttgataggcctgagaacatcaagatat

SEQ ID NO: 612403 - DNA, 33 bp, Homo sapien
agtgtacttatcataaatcctacccttaagcaa

SEQ ID NO: 612404 - DNA, 33 bp, Homo sapien
agtgtacttatcataactcctacccttaagcaa

SEQ ID NO: 612405 - DNA, 33 bp, Homo sapien
tattagatgcctcttaagtgaacaatatttttt

SEQ ID NO: 612406 - DNA, 33 bp, Homo sapien
tattagatgcctcttaggtgaacaatatttttt

SEQ ID NO: 612407 - DNA, 33 bp, Homo sapien
ttaagattgatacacaaaaagcagctggacacc

SEQ ID NO: 612408 - DNA, 33 bp, Homo sapien
ttaagattgatacacacaaagcagctggacacc

SEQ ID NO: 612409 - DNA, 33 bp, Homo sapien
tgggggaagctaacaaggttgttaaagcagata

SEQ ID NO: 612410 - DNA, 33 bp, Homo sapien
tgggggaagctaacaatgttgttaaagcagata

SEQ ID NO: 612411 - DNA, 33 bp, Homo sapien
tgtggtaggctgataacggctccccaaaataca

SEQ ID NO: 612412 - DNA, 33 bp, Homo sapien
tgtggtaggctgataatggctccccaaaataca

SEQ ID NO: 612413 - DNA, 33 bp, Homo sapien
aggccagctgctgcggcagtttcacctctgttc

SEQ ID NO: 612414 - DNA, 33 bp, Homo sapien
aggccagctgctgcggtagtttcacctctgttc

SEQ ID NO: 612415 - DNA, 33 bp, Homo sapien
caccgtgcacatgaaacacaaaatgataagttg

SEQ ID NO: 612416 - DNA, 33 bp, Homo sapien
caccgtgcacatgaaatacaaaatgataagttg

SEQ ID NO: 612417 - DNA, 33 bp, Homo sapien
ttgaaccatttttgccgcactttttaggttgaa

SEQ ID NO: 612418 - DNA, 33 bp, Homo sapien
ttgaaccatttttgcctcactttttaggttgaa

SEQ ID NO: 612419 - DNA, 33 bp, Homo sapien
cctgcaagtaaattccaggaaaatactatagta

SEQ ID NO: 612420 - DNA, 33 bp, Homo sapien
cctgcaagtaaattccgggaaaatactatagta

SEQ ID NO: 612421 - DNA, 33 bp, Homo sapien
tttcactctgctgataaatactcgagacttggc

SEQ ID NO: 612422 - DNA, 33 bp, Homo sapien
tttcactctgctgatacatactcgagacttggc

SEQ ID NO: 612423 - DNA, 33 bp, Homo sapien
ctgtgttccagttccactaaggcagggaatatt

SEQ ID NO: 612424 - DNA, 33 bp, Homo sapien
ctgtgttccagttccattaaggcagggaatatt

SEQ ID NO: 612425 - DNA, 33 bp, Homo sapien
gttaaagttgtaaccacaaaacgtgcacaatcc

SEQ ID NO: 612426 - DNA, 33 bp, Homo sapien
gttaaagttgtaaccataaaacgtgcacaatcc

SEQ ID NO: 612427 - DNA, 33 bp, Homo sapien
tttagtgtctgaaagaaaaaagcatggaggtcc

SEQ ID NO: 612428 - DNA, 33 bp, Homo sapien
tttagtgtctgaaagagaaaagcatggaggtcc

SEQ ID NO: 612429 - DNA, 33 bp, Homo sapien
ttggtggtccacagttgaaatttttccctcaaa

SEQ ID NO: 612430 - DNA, 33 bp, Homo sapien
ttggtggtccacagtttaaatttttccctcaaa

SEQ ID NO: 612431 - DNA, 33 bp, Homo sapien
gattacttataacaccgaatacaatatctacac

SEQ ID NO: 612432 - DNA, 33 bp, Homo sapien
gattacttataacacctaatacaatatctacac

SEQ ID NO: 612433 - DNA, 33 bp, Homo sapien
aaaaggtagcattctacggtcttttcagtgtta

SEQ ID NO: 612434 - DNA, 33 bp, Homo sapien
aaaaggtagcattctatggtcttttcagtgtta

SEQ ID NO: 612435 - DNA, 33 bp, Homo sapien
gcctacagactgatgaaaaataagatatgatta

SEQ ID NO: 612436 - DNA, 33 bp, Homo sapien
gcctacagactgatgagaaataagatatgatta

SEQ ID NO: 612437 - DNA, 33 bp, Homo sapien
ccacggtcccttgacaaagtctagatcagggtt

SEQ ID NO: 612438 - DNA, 33 bp, Homo sapien
ccacggtcccttgacagagtctagatcagggtt

SEQ ID NO: 612439 - DNA, 33 bp, Homo sapien
tgatgatgtctcataacattgtgcaggctggtc

SEQ ID NO: 612440 - DNA, 33 bp, Homo sapien
tgatgatgtctcataatattgtgcaggctggtc

SEQ ID NO: 612441 - DNA, 33 bp, Homo sapien
cccagccacatagacaataagaatttccccaaa

SEQ ID NO: 612442 - DNA, 33 bp, Homo sapien
cccagccacatagacactaagaatttccccaaa

SEQ ID NO: 612443 - DNA, 33 bp, Homo sapien
gaaaaaggaacacagacactaccaagctgttgg

SEQ ID NO: 612444 - DNA, 33 bp, Homo sapien
gaaaaaggaacacagatactaccaagctgttgg

SEQ ID NO: 612445 - DNA, 33 bp, Homo sapien
attatttccctagagaagttggtagtaaaataa

SEQ ID NO: 612446 - DNA, 33 bp, Homo sapien
attatttccctagagacgttggtagtaaaataa

SEQ ID NO: 612447 - DNA, 33 bp, Homo sapien
agccagctgcagttgacgggctccttctcttcc

SEQ ID NO: 612448 - DNA, 33 bp, Homo sapien
agccagctgcagttgatgggctccttctcttcc

SEQ ID NO: 612449 - DNA, 33 bp, Homo sapien
tcttctagtcctttcaatatcctgtttcttttt

SEQ ID NO: 612450 - DNA, 33 bp, Homo sapien
tcttctagtcctttcagtatcctgtttcttttt

SEQ ID NO: 612451 - DNA, 33 bp, Homo sapien
ttttgtctttctcagcaaacatgtacccatgac

SEQ ID NO: 612452 - DNA, 33 bp, Homo sapien
ttttgtctttctcagcgaacatgtacccatgac

SEQ ID NO: 612453 - DNA, 33 bp, Homo sapien
agtgcctggtaaacataaagtaccttatattag

SEQ ID NO: 612454 - DNA, 33 bp, Homo sapien
agtgcctggtaaacatgaagtaccttatattag

SEQ ID NO: 612455 - DNA, 33 bp, Homo sapien
aatctaattttagaaaggaagcaactgagaaaa

SEQ ID NO: 612456 - DNA, 33 bp, Homo sapien
aatctaattttagaaatgaagcaactgagaaaa

SEQ ID NO: 612457 - DNA, 33 bp, Homo sapien
gagggtggcttagcaacaagattattttgaaaa

SEQ ID NO: 612458 - DNA, 33 bp, Homo sapien
gagggtggcttagcaagaagattattttgaaaa

SEQ ID NO: 612459 - DNA, 33 bp, Homo sapien
gaaatatgagtagacacgatggggtgccagttt

SEQ ID NO: 612460 - DNA, 33 bp, Homo sapien
gaaatatgagtagacatgatggggtgccagttt

SEQ ID NO: 612461 - DNA, 33 bp, Homo sapien
cagacatagtgctgtaaatagaaatattctgct

SEQ ID NO: 612462 - DNA, 33 bp, Homo sapien
cagacatagtgctgtagatagaaatattctgct

SEQ ID NO: 612463 - DNA, 33 bp, Homo sapien
cttcccaacactattacgatttgtaattactta

SEQ ID NO: 612464 - DNA, 33 bp, Homo sapien
cttcccaacactattaggatttgtaattactta

SEQ ID NO: 612465 - DNA, 33 bp, Homo sapien
atagtaagcatacgagcaatatctatctatcca

SEQ ID NO: 612466 - DNA, 33 bp, Homo sapien
atagtaagcatacgagtaatatctatctatcca

SEQ ID NO: 612467 - DNA, 33 bp, Homo sapien
cagatgctaaccagataatcaaatatccaactc

SEQ ID NO: 612468 - DNA, 33 bp, Homo sapien
cagatgctaaccagatcatcaaatatccaactc

SEQ ID NO: 612469 - DNA, 33 bp, Homo sapien
atgtcctacctgcctcgacatagcagcagatat

SEQ ID NO: 612470 - DNA, 33 bp, Homo sapien
atgtcctacctgcctctacatagcagcagatat

SEQ ID NO: 612471 - DNA, 33 bp, Homo sapien
ccttccttgtcttctcactaagaactaaatcct

SEQ ID NO: 612472 - DNA, 33 bp, Homo sapien
ccttccttgtcttctcgctaagaactaaatcct

SEQ ID NO: 612473 - DNA, 33 bp, Homo sapien
tacagggctatgaaagaaagaaggtatcttgga

SEQ ID NO: 612474 - DNA, 33 bp, Homo sapien
tacagggctatgaaaggaagaaggtatcttgga

SEQ ID NO: 612475 - DNA, 33 bp, Homo sapien
cccaaggactagagtaaagcacactttattgga

SEQ ID NO: 612476 - DNA, 33 bp, Homo sapien
cccaaggactagagtagagcacactttattgga

SEQ ID NO: 612477 - DNA, 33 bp, Homo sapien
aggaaaaccaaagatcaatgcagtccagctgac

SEQ ID NO: 612478 - DNA, 33 bp, Homo sapien
aggaaaaccaaagatcgatgcagtccagctgac

SEQ ID NO: 612479 - DNA, 33 bp, Homo sapien
tatagaaaactataatcaggcaagtggttctgt

SEQ ID NO: 612480 - DNA, 33 bp, Homo sapien
tatagaaaactataatgaggcaagtggttctgt

SEQ ID NO: 612481 - DNA, 33 bp, Homo sapien
gggttaaaatctaaacgctttcttgaggcctag

SEQ ID NO: 612482 - DNA, 33 bp, Homo sapien
gggttaaaatctaaactctttcttgaggcctag

SEQ ID NO: 612483 - DNA, 33 bp, Homo sapien
tgtagtggtggttgcacgcctacacctttgcca

SEQ ID NO: 612484 - DNA, 33 bp, Homo sapien
tgtagtggtggttgcatgcctacacctttgcca

SEQ ID NO: 612485 - DNA, 33 bp, Homo sapien
gttcccgtgataatgacggagttctcactagat

SEQ ID NO: 612486 - DNA, 33 bp, Homo sapien
gttcccgtgataatgagggagttctcactagat

SEQ ID NO: 612487 - DNA, 33 bp, Homo sapien
ctcttctctctgtctcacctaacaccttgtaaa

SEQ ID NO: 612488 - DNA, 33 bp, Homo sapien
ctcttctctctgtctcgcctaacaccttgtaaa

SEQ ID NO: 612489 - DNA, 33 bp, Homo sapien
aacacaaatgaccatcgaccagtgtattattct

SEQ ID NO: 612490 - DNA, 33 bp, Homo sapien
aacacaaatgaccatctaccagtgtattattct

SEQ ID NO: 612491 - DNA, 33 bp, Homo sapien
cccaaagatgtctatagcctaatccctggaacc

SEQ ID NO: 612492 - DNA, 33 bp, Homo sapien
cccaaagatgtctatatcctaatccctggaacc

SEQ ID NO: 612493 - DNA, 33 bp, Homo sapien
caactttctgttcacaaccactgagatattctc

SEQ ID NO: 612494 - DNA, 33 bp, Homo sapien
caactttctgttcacagccactgagatattctc

SEQ ID NO: 612495 - DNA, 33 bp, Homo sapien
ggtaccaagtgagaagaaacttggcccaattgt

SEQ ID NO: 612496 - DNA, 33 bp, Homo sapien
ggtaccaagtgagaaggaacttggcccaattgt

SEQ ID NO: 612497 - DNA, 33 bp, Homo sapien
ttgtcttagtctattcaagctactatcacaaaa

SEQ ID NO: 612498 - DNA, 33 bp, Homo sapien
ttgtcttagtctattccagctactatcacaaaa

SEQ ID NO: 612499 - DNA, 33 bp, Homo sapien
aatcttggactttggaatcaggaatattttagg

SEQ ID NO: 612500 - DNA, 33 bp, Homo sapien
aatcttggactttggagtcaggaatattttagg

SEQ ID NO: 612501 - DNA, 33 bp, Homo sapien
aattaactgcaaattaacaataacctcccatat

SEQ ID NO: 612502 - DNA, 33 bp, Homo sapien
aattaactgcaaattagcaataacctcccatat

SEQ ID NO: 612503 - DNA, 33 bp, Homo sapien
aaagattttgcatgacccagtaaaatattcctt

SEQ ID NO: 612504 - DNA, 33 bp, Homo sapien
aaagattttgcatgactcagtaaaatattcctt

SEQ ID NO: 612505 - DNA, 33 bp, Homo sapien
agaaagtcacacataacagggcctagactccca

SEQ ID NO: 612506 - DNA, 33 bp, Homo sapien
agaaagtcacacataatagggcctagactccca

SEQ ID NO: 612507 - DNA, 33 bp, Homo sapien
ctgcccagcatcaacccaaaagttgtcagcatg

SEQ ID NO: 612508 - DNA, 33 bp, Homo sapien
ctgcccagcatcaaccgaaaagttgtcagcatg

SEQ ID NO: 612509 - DNA, 33 bp, Homo sapien
atagacacaaattgcacaaaggagagatttaga

SEQ ID NO: 612510 - DNA, 33 bp, Homo sapien
atagacacaaattgcagaaaggagagatttaga

SEQ ID NO: 612511 - DNA, 33 bp, Homo sapien
tcttatcagaacatgcacagaaataaaactcat

SEQ ID NO: 612512 - DNA, 33 bp, Homo sapien
tcttatcagaacatgcgcagaaataaaactcat

SEQ ID NO: 612513 - DNA, 33 bp, Homo sapien
gagtcgtggaagtcagaaatggttagccttggt

SEQ ID NO: 612514 - DNA, 33 bp, Homo sapien
gagtcgtggaagtcaggaatggttagccttggt

SEQ ID NO: 612515 - DNA, 33 bp, Homo sapien
ttttaagtaaactaaaatgatcctgattaagct

SEQ ID NO: 612516 - DNA, 33 bp, Homo sapien
ttttaagtaaactaaactgatcctgattaagct

SEQ ID NO: 612517 - DNA, 33 bp, Homo sapien
agattcttttgttccacgaggtgcccataatcc

SEQ ID NO: 612518 - DNA, 33 bp, Homo sapien
agattcttttgttccatgaggtgcccataatcc

SEQ ID NO: 612519 - DNA, 33 bp, Homo sapien
ttagccataatgataaaccatttttgactataa

SEQ ID NO: 612520 - DNA, 33 bp, Homo sapien
ttagccataatgataagccatttttgactataa

SEQ ID NO: 612521 - DNA, 33 bp, Homo sapien
cattttgctaggtgaccgggaatcaggtatcaa

SEQ ID NO: 612522 - DNA, 33 bp, Homo sapien
cattttgctaggtgactgggaatcaggtatcaa

SEQ ID NO: 612523 - DNA, 33 bp, Homo sapien
tctatctcccaagaaacgctcaatgtcataaat

SEQ ID NO: 612524 - DNA, 33 bp, Homo sapien
tctatctcccaagaaatgctcaatgtcataaat

SEQ ID NO: 612525 - DNA, 33 bp, Homo sapien
atgatgtaatgacaaacgtcttcagttatcagt

SEQ ID NO: 612526 - DNA, 33 bp, Homo sapien
atgatgtaatgacaaatgtcttcagttatcagt

SEQ ID NO: 612527 - DNA, 33 bp, Homo sapien
tccaggattggtgggacgaacacctctagcttc

SEQ ID NO: 612528 - DNA, 33 bp, Homo sapien
tccaggattggtgggatgaacacctctagcttc

SEQ ID NO: 612529 - DNA, 33 bp, Homo sapien
gtgataggttcaagtggaaaatctcatcctttt

SEQ ID NO: 612530 - DNA, 33 bp, Homo sapien
gtgataggttcaagtgtaaaatctcatcctttt

SEQ ID NO: 612531 - DNA, 33 bp, Homo sapien
agtggcataagataagaccaaaagagtaggcca

SEQ ID NO: 612532 - DNA, 33 bp, Homo sapien
agtggcataagataaggccaaaagagtaggcca

SEQ ID NO: 612533 - DNA, 33 bp, Homo sapien
gatacggtcagcaatacacatggaccacgtgct

SEQ ID NO: 612534 - DNA, 33 bp, Homo sapien
gatacggtcagcaatatacatggaccacgtgct

SEQ ID NO: 612535 - DNA, 33 bp, Homo sapien
aaatgatgtcgcaggacggaaaaaggaatgcct

SEQ ID NO: 612536 - DNA, 33 bp, Homo sapien
aaatgatgtcgcaggagggaaaaaggaatgcct

SEQ ID NO: 612537 - DNA, 33 bp, Homo sapien
tgcaatgcaggtctgaaatccatgaaagcattg

SEQ ID NO: 612538 - DNA, 33 bp, Homo sapien
tgcaatgcaggtctgacatccatgaaagcattg

SEQ ID NO: 612539 - DNA, 33 bp, Homo sapien
gttactaccagaaaaacgtacttcaaaattaga

SEQ ID NO: 612540 - DNA, 33 bp, Homo sapien
gttactaccagaaaaatgtacttcaaaattaga

SEQ ID NO: 612541 - DNA, 33 bp, Homo sapien
aatgaagaaatagcaacctgttccaaccctgga

SEQ ID NO: 612542 - DNA, 33 bp, Homo sapien
aatgaagaaatagcaatctgttccaaccctgga

SEQ ID NO: 612543 - DNA, 33 bp, Homo sapien
atttccctgcagattcaatttctcatgaaagta

SEQ ID NO: 612544 - DNA, 33 bp, Homo sapien
atttccctgcagattcgatttctcatgaaagta

SEQ ID NO: 612545 - DNA, 33 bp, Homo sapien
ctgtcttcctctttgaagtttattgctttgatt

SEQ ID NO: 612546 - DNA, 33 bp, Homo sapien
ctgtcttcctctttgaggtttattgctttgatt

SEQ ID NO: 612547 - DNA, 33 bp, Homo sapien
aatgagaggcttagaccgcaaagtaataaagaa

SEQ ID NO: 612548 - DNA, 33 bp, Homo sapien
aatgagaggcttagactgcaaagtaataaagaa

SEQ ID NO: 612549 - DNA, 33 bp, Homo sapien
gtccctggcccataaaaatagccccatttctcc

SEQ ID NO: 612550 - DNA, 33 bp, Homo sapien
gtccctggcccataaatatagccccatttctcc

SEQ ID NO: 612551 - DNA, 33 bp, Homo sapien
tgcaaggtcgtttctacccaactttgagaaagt

SEQ ID NO: 612552 - DNA, 33 bp, Homo sapien
tgcaaggtcgtttctatccaactttgagaaagt

SEQ ID NO: 612553 - DNA, 33 bp, Homo sapien
agtcttttcatcataacagtttgttgctgaatt

SEQ ID NO: 612554 - DNA, 33 bp, Homo sapien
agtcttttcatcataatagtttgttgctgaatt

SEQ ID NO: 612555 - DNA, 33 bp, Homo sapien
cacacaattttcagcaatccctaacactcatct

SEQ ID NO: 612556 - DNA, 33 bp, Homo sapien
cacacaattttcagcattccctaacactcatct

SEQ ID NO: 612557 - DNA, 33 bp, Homo sapien
agggctttgctaactcagacattacctgcaagg

SEQ ID NO: 612558 - DNA, 33 bp, Homo sapien
agggctttgctaactcggacattacctgcaagg

SEQ ID NO: 612559 - DNA, 33 bp, Homo sapien
caaagccaatagaataaagaaggttacagatca

SEQ ID NO: 612560 - DNA, 33 bp, Homo sapien
caaagccaatagaatagagaaggttacagatca

SEQ ID NO: 612561 - DNA, 33 bp, Homo sapien
ttgggatgttgatccacattgcctgccaaatgc

SEQ ID NO: 612562 - DNA, 33 bp, Homo sapien
ttgggatgttgatccatattgcctgccaaatgc

SEQ ID NO: 612563 - DNA, 33 bp, Homo sapien
agcgtttcagttgatacggctaaatgtgcatgt

SEQ ID NO: 612564 - DNA, 33 bp, Homo sapien
agcgtttcagttgatatggctaaatgtgcatgt

SEQ ID NO: 612565 - DNA, 33 bp, Homo sapien
tgttctagcatcatgccagatttgtccacaagc

SEQ ID NO: 612566 - DNA, 33 bp, Homo sapien
tgttctagcatcatgcgagatttgtccacaagc

SEQ ID NO: 612567 - DNA, 33 bp, Homo sapien
gtggatttggtaatgacacagtgagaaatttct

SEQ ID NO: 612568 - DNA, 33 bp, Homo sapien
gtggatttggtaatgagacagtgagaaatttct

SEQ ID NO: 612569 - DNA, 33 bp, Homo sapien
ttcccatcaggacatcaacttgctgtaatacct

SEQ ID NO: 612570 - DNA, 33 bp, Homo sapien
ttcccatcaggacatcgacttgctgtaatacct

SEQ ID NO: 612571 - DNA, 33 bp, Homo sapien
aaagtggtggattagcactaaactgttacagca

SEQ ID NO: 612572 - DNA, 33 bp, Homo sapien
aaagtggtggattagccctaaactgttacagca

SEQ ID NO: 612573 - DNA, 33 bp, Homo sapien
tttgagtgaagagtcaacctgattaaggtgagt

SEQ ID NO: 612574 - DNA, 33 bp, Homo sapien
tttgagtgaagagtcatcctgattaaggtgagt

SEQ ID NO: 612575 - DNA, 33 bp, Homo sapien
aacatgaaatctgacaaaggagggaggtagagc

SEQ ID NO: 612576 - DNA, 33 bp, Homo sapien
aacatgaaatctgacagaggagggaggtagagc

SEQ ID NO: 612577 - DNA, 33 bp, Homo sapien
attgattgaagtataacattgagttcctgctga

SEQ ID NO: 612578 - DNA, 33 bp, Homo sapien
attgattgaagtataagattgagttcctgctga

SEQ ID NO: 612579 - DNA, 33 bp, Homo sapien
caactcaattctctgaaagacaagatttaccaa

SEQ ID NO: 612580 - DNA, 33 bp, Homo sapien
caactcaattctctgacagacaagatttaccaa

SEQ ID NO: 612581 - DNA, 33 bp, Homo sapien
actatcttgattggtaggtagggtaaataatta

SEQ ID NO: 612582 - DNA, 33 bp, Homo sapien
actatcttgattggtatgtagggtaaataatta

SEQ ID NO: 612583 - DNA, 33 bp, Homo sapien
tatcatcaaagttactaagattaaagctcactt

SEQ ID NO: 612584 - DNA, 33 bp, Homo sapien
tatcatcaaagttactgagattaaagctcactt

SEQ ID NO: 612585 - DNA, 33 bp, Homo sapien
tatgttcaagaatcagcaataagccataatgga

SEQ ID NO: 612586 - DNA, 33 bp, Homo sapien
tatgttcaagaatcagtaataagccataatgga

SEQ ID NO: 612587 - DNA, 33 bp, Homo sapien
caataactggcctgcaaaaataataactgtact

SEQ ID NO: 612588 - DNA, 33 bp, Homo sapien
caataactggcctgcagaaataataactgtact

SEQ ID NO: 612589 - DNA, 33 bp, Homo sapien
ccaccctgtgaatagacgccttccgccatgaat

SEQ ID NO: 612590 - DNA, 33 bp, Homo sapien
ccaccctgtgaatagatgccttccgccatgaat

SEQ ID NO: 612591 - DNA, 33 bp, Homo sapien
tagtagtctcatgtggaaactgaattaactagc

SEQ ID NO: 612592 - DNA, 33 bp, Homo sapien
tagtagtctcatgtggtaactgaattaactagc

SEQ ID NO: 612593 - DNA, 33 bp, Homo sapien
tactctagcactttgacgcagtatttctccctc

SEQ ID NO: 612594 - DNA, 33 bp, Homo sapien
tactctagcactttgatgcagtatttctccctc

SEQ ID NO: 612595 - DNA, 33 bp, Homo sapien
caccaactaccaaatacgggatgagggagaaat

SEQ ID NO: 612596 - DNA, 33 bp, Homo sapien
caccaactaccaaatatgggatgagggagaaat

SEQ ID NO: 612597 - DNA, 33 bp, Homo sapien
gcttgttttggacacactgaatcagaggcagtg

SEQ ID NO: 612598 - DNA, 33 bp, Homo sapien
gcttgttttggacacattgaatcagaggcagtg

SEQ ID NO: 612599 - DNA, 33 bp, Homo sapien
gacaagcatctgctgacagtttgtcattgtgat

SEQ ID NO: 612600 - DNA, 33 bp, Homo sapien
gacaagcatctgctgagagtttgtcattgtgat

SEQ ID NO: 612601 - DNA, 33 bp, Homo sapien
gggaattattagagaactgttagggaattaatt

SEQ ID NO: 612602 - DNA, 33 bp, Homo sapien
gggaattattagagaattgttagggaattaatt

SEQ ID NO: 612603 - DNA, 33 bp, Homo sapien
aaatattcactcatcacatacttattgggtgcc

SEQ ID NO: 612604 - DNA, 33 bp, Homo sapien
aaatattcactcatcagatacttattgggtgcc

SEQ ID NO: 612605 - DNA, 33 bp, Homo sapien
ctttgtggctgctgataaatatccacagaaata

SEQ ID NO: 612606 - DNA, 33 bp, Homo sapien
ctttgtggctgctgatgaatatccacagaaata

SEQ ID NO: 612607 - DNA, 33 bp, Homo sapien
aacagaagtaacagcaaagtaaacccattaaat

SEQ ID NO: 612608 - DNA, 33 bp, Homo sapien
aacagaagtaacagcagagtaaacccattaaat

SEQ ID NO: 612609 - DNA, 33 bp, Homo sapien
tctaatgtacatcttgaacactgaaatggaaaa

SEQ ID NO: 612610 - DNA, 33 bp, Homo sapien
tctaatgtacatcttgcacactgaaatggaaaa

SEQ ID NO: 612611 - DNA, 33 bp, Homo sapien
agagccgggccttaaacttggatcctgctggct

SEQ ID NO: 612612 - DNA, 33 bp, Homo sapien
agagccgggccttaaatttggatcctgctggct

SEQ ID NO: 612613 - DNA, 33 bp, Homo sapien
acagtggagaagttctcaaatagtggcattcca

SEQ ID NO: 612614 - DNA, 33 bp, Homo sapien
acagtggagaagttctgaaatagtggcattcca

SEQ ID NO: 612615 - DNA, 33 bp, Homo sapien
aagagtgaccacagtacatgaagtcatctacta

SEQ ID NO: 612616 - DNA, 33 bp, Homo sapien
aagagtgaccacagtatatgaagtcatctacta

SEQ ID NO: 612617 - DNA, 33 bp, Homo sapien
ttctccagctggaatacatgtgccccagggaat

SEQ ID NO: 612618 - DNA, 33 bp, Homo sapien
ttctccagctggaatatatgtgccccagggaat

SEQ ID NO: 612619 - DNA, 33 bp, Homo sapien
gggtaagggctgaaaaactgtacggtactgtgt

SEQ ID NO: 612620 - DNA, 33 bp, Homo sapien
gggtaagggctgaaaacctgtacggtactgtgt

SEQ ID NO: 612621 - DNA, 33 bp, Homo sapien
agccccaacagcatatcataatgaacaagacaa

SEQ ID NO: 612622 - DNA, 33 bp, Homo sapien
agccccaacagcatatgataatgaacaagacaa

SEQ ID NO: 612623 - DNA, 33 bp, Homo sapien
atggcatttatccttaccaatttcccaatgcct

SEQ ID NO: 612624 - DNA, 33 bp, Homo sapien
atggcatttatccttatcaatttcccaatgcct

SEQ ID NO: 612625 - DNA, 33 bp, Homo sapien
tattcattcaaccgacaaatagttcagtgctta

SEQ ID NO: 612626 - DNA, 33 bp, Homo sapien
tattcattcaaccgacgaatagttcagtgctta

SEQ ID NO: 612627 - DNA, 33 bp, Homo sapien
gcttctgatatataacacagtggatgttccatt

SEQ ID NO: 612628 - DNA, 33 bp, Homo sapien
gcttctgatatataacgcagtggatgttccatt

SEQ ID NO: 612629 - DNA, 33 bp, Homo sapien
catttattattatcaaataccatgtgctataca

SEQ ID NO: 612630 - DNA, 33 bp, Homo sapien
catttattattatcaagtaccatgtgctataca

SEQ ID NO: 612631 - DNA, 33 bp, Homo sapien
cagctggcttctccacaccgcagagttgaggtg

SEQ ID NO: 612632 - DNA, 33 bp, Homo sapien
cagctggcttctccacgccgcagagttgaggtg

SEQ ID NO: 612633 - DNA, 33 bp, Homo sapien
gggaacaggcttcgccaacaagggaggccctct

SEQ ID NO: 612634 - DNA, 33 bp, Homo sapien
gggaacaggcttcgccgacaagggaggccctct

SEQ ID NO: 612635 - DNA, 33 bp, Homo sapien
ctgatggccacacaaaggtccgtcctgcttgct

SEQ ID NO: 612636 - DNA, 33 bp, Homo sapien
ctgatggccacacaaatgtccgtcctgcttgct

SEQ ID NO: 612637 - DNA, 33 bp, Homo sapien
ttcaaatccagatgccaaaatcaattcctgtca

SEQ ID NO: 612638 - DNA, 33 bp, Homo sapien
ttcaaatccagatgcctaaatcaattcctgtca

SEQ ID NO: 612639 - DNA, 33 bp, Homo sapien
aaactgagcatcatctgaagtcttctttatgaa

SEQ ID NO: 612640 - DNA, 33 bp, Homo sapien
aaactgagcatcatcttaagtcttctttatgaa

SEQ ID NO: 612641 - DNA, 33 bp, Homo sapien
tgaagcaacaacccaccaagaaaaactgagcat

SEQ ID NO: 612642 - DNA, 33 bp, Homo sapien
tgaagcaacaacccacgaagaaaaactgagcat

SEQ ID NO: 612643 - DNA, 33 bp, Homo sapien
tctgttcctatctggaaatcatttactcacagc

SEQ ID NO: 612644 - DNA, 33 bp, Homo sapien
tctgttcctatctggagatcatttactcacagc

SEQ ID NO: 612645 - DNA, 33 bp, Homo sapien
cgcatttgaccaacacaataacaaatgcacaga

SEQ ID NO: 612646 - DNA, 33 bp, Homo sapien
cgcatttgaccaacacgataacaaatgcacaga

SEQ ID NO: 612647 - DNA, 33 bp, Homo sapien
atgaattacttggagaacaagcccaaatttccc

SEQ ID NO: 612648 - DNA, 33 bp, Homo sapien
atgaattacttggagagcaagcccaaatttccc

SEQ ID NO: 612649 - DNA, 33 bp, Homo sapien
ggagctcactcagcagaaaagggggaaaaaaac

SEQ ID NO: 612650 - DNA, 33 bp, Homo sapien
ggagctcactcagcaggaaagggggaaaaaaac

SEQ ID NO: 612651 - DNA, 33 bp, Homo sapien
ttggcaggaagttctcccttatgtgcttcatgc

SEQ ID NO: 612652 - DNA, 33 bp, Homo sapien
ttggcaggaagttctctcttatgtgcttcatgc

SEQ ID NO: 612653 - DNA, 33 bp, Homo sapien
ctcaatcttttcttaccaacaagcatcatcatc

SEQ ID NO: 612654 - DNA, 33 bp, Homo sapien
ctcaatcttttcttacgaacaagcatcatcatc

SEQ ID NO: 612655 - DNA, 33 bp, Homo sapien
actgtagcgggatacaaacagggaagatgagtg

SEQ ID NO: 612656 - DNA, 33 bp, Homo sapien
actgtagcgggatacagacagggaagatgagtg

SEQ ID NO: 612657 - DNA, 33 bp, Homo sapien
agatccttgggttggcccttgagcttgtcaaag

SEQ ID NO: 612658 - DNA, 33 bp, Homo sapien
agatccttgggttggctcttgagcttgtcaaag

SEQ ID NO: 612659 - DNA, 33 bp, Homo sapien
acagcatcaggagctaggtactattattatcct

SEQ ID NO: 612660 - DNA, 33 bp, Homo sapien
acagcatcaggagctatgtactattattatcct

SEQ ID NO: 612661 - DNA, 33 bp, Homo sapien
gttacctagggtcaaccgtggtcttaaaatatt

SEQ ID NO: 612662 - DNA, 33 bp, Homo sapien
gttacctagggtcaacggtggtcttaaaatatt

SEQ ID NO: 612663 - DNA, 33 bp, Homo sapien
cacaatctaaaacttacggattgtatatttctt

SEQ ID NO: 612664 - DNA, 33 bp, Homo sapien
cacaatctaaaacttatggattgtatatttctt

SEQ ID NO: 612665 - DNA, 33 bp, Homo sapien
ttgtgtgccattctgactagcataacaaaatct

SEQ ID NO: 612666 - DNA, 33 bp, Homo sapien
ttgtgtgccattctgagtagcataacaaaatct

SEQ ID NO: 612667 - DNA, 33 bp, Homo sapien
cacatcccaggtgcgacggagcaggacagtatg

SEQ ID NO: 612668 - DNA, 33 bp, Homo sapien
cacatcccaggtgcgatggagcaggacagtatg

SEQ ID NO: 612669 - DNA, 33 bp, Homo sapien
ttactccccattaatccatgaagcccacacaac

SEQ ID NO: 612670 - DNA, 33 bp, Homo sapien
ttactccccattaatctatgaagcccacacaac

SEQ ID NO: 612671 - DNA, 33 bp, Homo sapien
tttttataaggcccagaagctaacagtggtttt

SEQ ID NO: 612672 - DNA, 33 bp, Homo sapien
tttttataaggcccaggagctaacagtggtttt

SEQ ID NO: 612673 - DNA, 33 bp, Homo sapien
gcaacaatttgaaaaacctcgcccagatgaact

SEQ ID NO: 612674 - DNA, 33 bp, Homo sapien
gcaacaatttgaaaaatctcgcccagatgaact

SEQ ID NO: 612675 - DNA, 33 bp, Homo sapien
caacagcataggaaaagaacacactaaagtcca

SEQ ID NO: 612676 - DNA, 33 bp, Homo sapien
caacagcataggaaaataacacactaaagtcca

SEQ ID NO: 612677 - DNA, 33 bp, Homo sapien
cctattttactcattaccccatgacctatttct

SEQ ID NO: 612678 - DNA, 33 bp, Homo sapien
cctattttactcattagcccatgacctatttct

SEQ ID NO: 612679 - DNA, 33 bp, Homo sapien
agagatggtagggataaggataacgataatagt

SEQ ID NO: 612680 - DNA, 33 bp, Homo sapien
agagatggtagggatatggataacgataatagt

SEQ ID NO: 612681 - DNA, 33 bp, Homo sapien
actttctttgcattccactctaaagctttttaa

SEQ ID NO: 612682 - DNA, 33 bp, Homo sapien
actttctttgcattccgctctaaagctttttaa

SEQ ID NO: 612683 - DNA, 33 bp, Homo sapien
acattttagacgtttacacatttatttgccatg

SEQ ID NO: 612684 - DNA, 33 bp, Homo sapien
acattttagacgtttagacatttatttgccatg

SEQ ID NO: 612685 - DNA, 33 bp, Homo sapien
taaaaatggactcaaaagaggcaatgagcaaca

SEQ ID NO: 612686 - DNA, 33 bp, Homo sapien
taaaaatggactcaaacgaggcaatgagcaaca

SEQ ID NO: 612687 - DNA, 33 bp, Homo sapien
tgtattcatccactggaaattgaccatctagga

SEQ ID NO: 612688 - DNA, 33 bp, Homo sapien
tgtattcatccactggcaattgaccatctagga

SEQ ID NO: 612689 - DNA, 33 bp, Homo sapien
tttcacatagatacataacaatactaacaatat

SEQ ID NO: 612690 - DNA, 33 bp, Homo sapien
tttcacatagatacatgacaatactaacaatat

SEQ ID NO: 612691 - DNA, 33 bp, Homo sapien
ccccaaatctgaggataatcattagtcaaaaac

SEQ ID NO: 612692 - DNA, 33 bp, Homo sapien
ccccaaatctgaggatgatcattagtcaaaaac

SEQ ID NO: 612693 - DNA, 33 bp, Homo sapien
caggctcagcatatatcaaaacaaggcagtgtt

SEQ ID NO: 612694 - DNA, 33 bp, Homo sapien
caggctcagcatatattaaaacaaggcagtgtt

SEQ ID NO: 612695 - DNA, 33 bp, Homo sapien
gtatctgaaaaaaggccaatctacaaagtgtat

SEQ ID NO: 612696 - DNA, 33 bp, Homo sapien
gtatctgaaaaaaggctaatctacaaagtgtat

SEQ ID NO: 612697 - DNA, 33 bp, Homo sapien
ctattttatacctgagaacactttcagcttaga

SEQ ID NO: 612698 - DNA, 33 bp, Homo sapien
ctattttatacctgaggacactttcagcttaga

SEQ ID NO: 612699 - DNA, 33 bp, Homo sapien
cttccatgaaactaacaggccaccttgaagtct

SEQ ID NO: 612700 - DNA, 33 bp, Homo sapien
cttccatgaaactaacgggccaccttgaagtct

SEQ ID NO: 612701 - DNA, 33 bp, Homo sapien
acaagttgtatagtgactacctataaagtagct

SEQ ID NO: 612702 - DNA, 33 bp, Homo sapien
acaagttgtatagtgagtacctataaagtagct

SEQ ID NO: 612703 - DNA, 33 bp, Homo sapien
tggggtgagctgtcctcactgaagtactgaagt

SEQ ID NO: 612704 - DNA, 33 bp, Homo sapien
tggggtgagctgtccttactgaagtactgaagt

SEQ ID NO: 612705 - DNA, 33 bp, Homo sapien
ttctgtaccaaggctacactcttcttccttttg

SEQ ID NO: 612706 - DNA, 33 bp, Homo sapien
ttctgtaccaaggctatactcttcttccttttg

SEQ ID NO: 612707 - DNA, 33 bp, Homo sapien
ggtagtttttctctgaagttgtggatagcgagt

SEQ ID NO: 612708 - DNA, 33 bp, Homo sapien
ggtagtttttctctgatgttgtggatagcgagt

SEQ ID NO: 612709 - DNA, 33 bp, Homo sapien
ttatagatctttgcaaatgaaagacactggtaa

SEQ ID NO: 612710 - DNA, 33 bp, Homo sapien
ttatagatctttgcaattgaaagacactggtaa

SEQ ID NO: 612711 - DNA, 33 bp, Homo sapien
aaaagattccaagtaaatggtattgttttaatg

SEQ ID NO: 612712 - DNA, 33 bp, Homo sapien
aaaagattccaagtaagtggtattgttttaatg

SEQ ID NO: 612713 - DNA, 33 bp, Homo sapien
ttttggtctttcgagaaaggttgtggtttgaaa

SEQ ID NO: 612714 - DNA, 33 bp, Homo sapien
ttttggtctttcgagacaggttgtggtttgaaa

SEQ ID NO: 612715 - DNA, 33 bp, Homo sapien
cagaggaaggtagtcaataaagaagggtgctca

SEQ ID NO: 612716 - DNA, 33 bp, Homo sapien
cagaggaaggtagtcactaaagaagggtgctca

SEQ ID NO: 612717 - DNA, 33 bp, Homo sapien
atttgtttttgcttcaagttcctccctactctt

SEQ ID NO: 612718 - DNA, 33 bp, Homo sapien
atttgtttttgcttcaggttcctccctactctt

SEQ ID NO: 612719 - DNA, 33 bp, Homo sapien
ttaaacacgaagagagaaaaatcaaagaaaata

SEQ ID NO: 612720 - DNA, 33 bp, Homo sapien
ttaaacacgaagagaggaaaatcaaagaaaata

SEQ ID NO: 612721 - DNA, 33 bp, Homo sapien
acactaagcaaggagaatacatttaaacacgaa

SEQ ID NO: 612722 - DNA, 33 bp, Homo sapien
acactaagcaaggagagtacatttaaacacgaa

SEQ ID NO: 612723 - DNA, 33 bp, Homo sapien
ttcaataatgtgttcacctaaactctggattct

SEQ ID NO: 612724 - DNA, 33 bp, Homo sapien
ttcaataatgtgttcatctaaactctggattct

SEQ ID NO: 612725 - DNA, 33 bp, Homo sapien
caactagagggtaaaaatgggaactgacatctc

SEQ ID NO: 612726 - DNA, 33 bp, Homo sapien
caactagagggtaaaagtgggaactgacatctc

SEQ ID NO: 612727 - DNA, 33 bp, Homo sapien
aaatgaaaaacaggaacgtgctctgctagtggt

SEQ ID NO: 612728 - DNA, 33 bp, Homo sapien
aaatgaaaaacaggaatgtgctctgctagtggt

SEQ ID NO: 612729 - DNA, 33 bp, Homo sapien
ttctctcacacaacacgggattatttcctttgt

SEQ ID NO: 612730 - DNA, 33 bp, Homo sapien
ttctctcacacaacactggattatttcctttgt

SEQ ID NO: 612731 - DNA, 33 bp, Homo sapien
cctgttcagggtttgacgcatagagcttgggtt

SEQ ID NO: 612732 - DNA, 33 bp, Homo sapien
cctgttcagggtttgatgcatagagcttgggtt

SEQ ID NO: 612733 - DNA, 33 bp, Homo sapien
ttctccacctatgctaccttccttccaatgact

SEQ ID NO: 612734 - DNA, 33 bp, Homo sapien
ttctccacctatgctatcttccttccaatgact

SEQ ID NO: 612735 - DNA, 33 bp, Homo sapien
tagagaactttgaacaaaatcatgtatactttt

SEQ ID NO: 612736 - DNA, 33 bp, Homo sapien
tagagaactttgaacagaatcatgtatactttt

SEQ ID NO: 612737 - DNA, 33 bp, Homo sapien
tgggattcaatgccaccgaggtcttgtgaggaa

SEQ ID NO: 612738 - DNA, 33 bp, Homo sapien
tgggattcaatgccactgaggtcttgtgaggaa

SEQ ID NO: 612739 - DNA, 33 bp, Homo sapien
atgttttgaaggttaaataagttgatacgtgta

SEQ ID NO: 612740 - DNA, 33 bp, Homo sapien
atgttttgaaggttaagtaagttgatacgtgta

SEQ ID NO: 612741 - DNA, 33 bp, Homo sapien
ctaagtttaataggcacaacccctgatttcaag

SEQ ID NO: 612742 - DNA, 33 bp, Homo sapien
ctaagtttaataggcataacccctgatttcaag

SEQ ID NO: 612743 - DNA, 33 bp, Homo sapien
cctaatcacgcttgaaacataatgtgacaagga

SEQ ID NO: 612744 - DNA, 33 bp, Homo sapien
cctaatcacgcttgaagcataatgtgacaagga

SEQ ID NO: 612745 - DNA, 33 bp, Homo sapien
ctgcagtgtgttaaatgaaaccctccaaattat

SEQ ID NO: 612746 - DNA, 33 bp, Homo sapien
ctgcagtgtgttaaattaaaccctccaaattat

SEQ ID NO: 612747 - DNA, 33 bp, Homo sapien
ttagagttggttctccactcagcaacacttcct

SEQ ID NO: 612748 - DNA, 33 bp, Homo sapien
ttagagttggttctccgctcagcaacacttcct

SEQ ID NO: 612749 - DNA, 33 bp, Homo sapien
agaaccaactctaacaaatagataagggaggct

SEQ ID NO: 612750 - DNA, 33 bp, Homo sapien
agaaccaactctaacagatagataagggaggct

SEQ ID NO: 612751 - DNA, 33 bp, Homo sapien
acttgtctcccacacaataactcacaaaagcag

SEQ ID NO: 612752 - DNA, 33 bp, Homo sapien
acttgtctcccacacagtaactcacaaaagcag

SEQ ID NO: 612753 - DNA, 33 bp, Homo sapien
caggaccactgttttaagctttcaaatatccat

SEQ ID NO: 612754 - DNA, 33 bp, Homo sapien
caggaccactgttttaggctttcaaatatccat

SEQ ID NO: 612755 - DNA, 33 bp, Homo sapien
ctccacctacatctagaccaaccattgagaacc

SEQ ID NO: 612756 - DNA, 33 bp, Homo sapien
ctccacctacatctagtccaaccattgagaacc

SEQ ID NO: 612757 - DNA, 33 bp, Homo sapien
actttaaattggttcaatagtcagagttcacat

SEQ ID NO: 612758 - DNA, 33 bp, Homo sapien
actttaaattggttcagtagtcagagttcacat

SEQ ID NO: 612759 - DNA, 33 bp, Homo sapien
ttagtacaagatggacaataaagaacagatagc

SEQ ID NO: 612760 - DNA, 33 bp, Homo sapien
ttagtacaagatggacgataaagaacagatagc

SEQ ID NO: 612761 - DNA, 33 bp, Homo sapien
ggctttaactcatcaaatctttgagctcttcag

SEQ ID NO: 612762 - DNA, 33 bp, Homo sapien
ggctttaactcatcaactctttgagctcttcag

SEQ ID NO: 612763 - DNA, 33 bp, Homo sapien
cttagcatggactaaacacagccatgaactttg

SEQ ID NO: 612764 - DNA, 33 bp, Homo sapien
cttagcatggactaaatacagccatgaactttg

SEQ ID NO: 612765 - DNA, 33 bp, Homo sapien
tttactggaatcggaacatctaggttttcatcc

SEQ ID NO: 612766 - DNA, 33 bp, Homo sapien
tttactggaatcggaagatctaggttttcatcc

SEQ ID NO: 612767 - DNA, 33 bp, Homo sapien
caacaattgttttcacagagaatggctatggac

SEQ ID NO: 612768 - DNA, 33 bp, Homo sapien
caacaattgttttcacggagaatggctatggac

SEQ ID NO: 612769 - DNA, 33 bp, Homo sapien
ggtgatggcagcatgacaatgtgaatgcactta

SEQ ID NO: 612770 - DNA, 33 bp, Homo sapien
ggtgatggcagcatgataatgtgaatgcactta

SEQ ID NO: 612771 - DNA, 33 bp, Homo sapien
gaagaattatacagccgattctagtccatgaat

SEQ ID NO: 612772 - DNA, 33 bp, Homo sapien
gaagaattatacagcctattctagtccatgaat

SEQ ID NO: 612773 - DNA, 33 bp, Homo sapien
tggccttcttcatatacgtcctgatgtcatgtc

SEQ ID NO: 612774 - DNA, 33 bp, Homo sapien
tggccttcttcatatatgtcctgatgtcatgtc

SEQ ID NO: 612775 - DNA, 33 bp, Homo sapien
aatagttcctacctcacggggtggtttgagact

SEQ ID NO: 612776 - DNA, 33 bp, Homo sapien
aatagttcctacctcatggggtggtttgagact

SEQ ID NO: 612777 - DNA, 33 bp, Homo sapien
gatcaaataattttgacaaacattgagttaaac

SEQ ID NO: 612778 - DNA, 33 bp, Homo sapien
gatcaaataattttgagaaacattgagttaaac

SEQ ID NO: 612779 - DNA, 33 bp, Homo sapien
agctctgtttgggaaaccctgaatattaatatc

SEQ ID NO: 612780 - DNA, 33 bp, Homo sapien
agctctgtttgggaaatcctgaatattaatatc

SEQ ID NO: 612781 - DNA, 33 bp, Homo sapien
gaggcaacagttgaaccggctctttgaggatag

SEQ ID NO: 612782 - DNA, 33 bp, Homo sapien
gaggcaacagttgaactggctctttgaggatag

SEQ ID NO: 612783 - DNA, 33 bp, Homo sapien
tattcattgtatctccagaacctagcatactta

SEQ ID NO: 612784 - DNA, 33 bp, Homo sapien
tattcattgtatctccggaacctagcatactta

SEQ ID NO: 612785 - DNA, 33 bp, Homo sapien
caggggcttatcactaccacaccatataataag

SEQ ID NO: 612786 - DNA, 33 bp, Homo sapien
caggggcttatcactatcacaccatataataag

SEQ ID NO: 612787 - DNA, 33 bp, Homo sapien
cgaaagcatttctttaacatcaattatattcca

SEQ ID NO: 612788 - DNA, 33 bp, Homo sapien
cgaaagcatttctttatcatcaattatattcca

SEQ ID NO: 612789 - DNA, 33 bp, Homo sapien
tgaatgcagaggagacagaaacagtgatctttc

SEQ ID NO: 612790 - DNA, 33 bp, Homo sapien
tgaatgcagaggagacggaaacagtgatctttc

SEQ ID NO: 612791 - DNA, 33 bp, Homo sapien
accaataggtaaatgccctgagttctgtagatt

SEQ ID NO: 612792 - DNA, 33 bp, Homo sapien
accaataggtaaatgctctgagttctgtagatt

SEQ ID NO: 612793 - DNA, 33 bp, Homo sapien
tgtttctctcttgggcaatcagaatactcacca

SEQ ID NO: 612794 - DNA, 33 bp, Homo sapien
tgtttctctcttgggcgatcagaatactcacca

SEQ ID NO: 612795 - DNA, 33 bp, Homo sapien
aaaagggaaagtgatacacagaaaatggaagca

SEQ ID NO: 612796 - DNA, 33 bp, Homo sapien
aaaagggaaagtgatatacagaaaatggaagca

SEQ ID NO: 612797 - DNA, 33 bp, Homo sapien
ttgcttgattacatgaccattctagagtctgca

SEQ ID NO: 612798 - DNA, 33 bp, Homo sapien
ttgcttgattacatgagcattctagagtctgca

SEQ ID NO: 612799 - DNA, 33 bp, Homo sapien
aaggtctcctcataccactttgttgaatgcgtc

SEQ ID NO: 612800 - DNA, 33 bp, Homo sapien
aaggtctcctcatacctctttgttgaatgcgtc

SEQ ID NO: 612801 - DNA, 33 bp, Homo sapien
ataaaaaggcattacccgaggaatattcttgtt

SEQ ID NO: 612802 - DNA, 33 bp, Homo sapien
ataaaaaggcattacctgaggaatattcttgtt

SEQ ID NO: 612803 - DNA, 33 bp, Homo sapien
tctcagcctttcagcaagactagacattccact

SEQ ID NO: 612804 - DNA, 33 bp, Homo sapien
tctcagcctttcagcaggactagacattccact

SEQ ID NO: 612805 - DNA, 33 bp, Homo sapien
tgcattacaaaccttcacaggaagcactattta

SEQ ID NO: 612806 - DNA, 33 bp, Homo sapien
tgcattacaaaccttcgcaggaagcactattta

SEQ ID NO: 612807 - DNA, 33 bp, Homo sapien
ataaggcttagttagacggttccattttcttgt

SEQ ID NO: 612808 - DNA, 33 bp, Homo sapien
ataaggcttagttagatggttccattttcttgt

SEQ ID NO: 612809 - DNA, 33 bp, Homo sapien
tgcaaaattaactcaacgcttggcacatggtga

SEQ ID NO: 612810 - DNA, 33 bp, Homo sapien
tgcaaaattaactcaatgcttggcacatggtga

SEQ ID NO: 612811 - DNA, 33 bp, Homo sapien
ggaaaaatcaccaccaaactgacaattcccatt

SEQ ID NO: 612812 - DNA, 33 bp, Homo sapien
ggaaaaatcaccaccacactgacaattcccatt

SEQ ID NO: 612813 - DNA, 33 bp, Homo sapien
acagcctgtaaatggaaacaagcttcaggctgc

SEQ ID NO: 612814 - DNA, 33 bp, Homo sapien
acagcctgtaaatggagacaagcttcaggctgc

SEQ ID NO: 612815 - DNA, 33 bp, Homo sapien
cctgtcaaggtgaagacggataatcaggcagga

SEQ ID NO: 612816 - DNA, 33 bp, Homo sapien
cctgtcaaggtgaagatggataatcaggcagga

SEQ ID NO: 612817 - DNA, 33 bp, Homo sapien
tagagttggatgacaccgtagagaagacacatg

SEQ ID NO: 612818 - DNA, 33 bp, Homo sapien
tagagttggatgacactgtagagaagacacatg

SEQ ID NO: 612819 - DNA, 33 bp, Homo sapien
tccaactctataaacaaagttgagtctatccac

SEQ ID NO: 612820 - DNA, 33 bp, Homo sapien
tccaactctataaacacagttgagtctatccac

SEQ ID NO: 612821 - DNA, 33 bp, Homo sapien
attttaaatataccaaacaaagagcctttcact

SEQ ID NO: 612822 - DNA, 33 bp, Homo sapien
attttaaatataccaagcaaagagcctttcact

SEQ ID NO: 612823 - DNA, 33 bp, Homo sapien
tagaggaatacattcaactttagctaatccttt

SEQ ID NO: 612824 - DNA, 33 bp, Homo sapien
tagaggaatacattcatctttagctaatccttt

SEQ ID NO: 612825 - DNA, 33 bp, Homo sapien
agttgatctactaaaacgaattcacaagttagg

SEQ ID NO: 612826 - DNA, 33 bp, Homo sapien
agttgatctactaaaatgaattcacaagttagg

SEQ ID NO: 612827 - DNA, 33 bp, Homo sapien
ggtcaaggcagtattccaaagagtggtcggcag

SEQ ID NO: 612828 - DNA, 33 bp, Homo sapien
ggtcaaggcagtattctaaagagtggtcggcag

SEQ ID NO: 612829 - DNA, 33 bp, Homo sapien
gaaaagggttgatatcagagattgtttttaatt

SEQ ID NO: 612830 - DNA, 33 bp, Homo sapien
gaaaagggttgatatcggagattgtttttaatt

SEQ ID NO: 612831 - DNA, 33 bp, Homo sapien
gagcagtgatccctaaacagaactttgtgtcac

SEQ ID NO: 612832 - DNA, 33 bp, Homo sapien
gagcagtgatccctaagcagaactttgtgtcac

SEQ ID NO: 612833 - DNA, 33 bp, Homo sapien
tgaacgctctatccatcaaatattgcctgtgtg

SEQ ID NO: 612834 - DNA, 33 bp, Homo sapien
tgaacgctctatccattaaatattgcctgtgtg

SEQ ID NO: 612835 - DNA, 33 bp, Homo sapien
accctgcctctgatgcactctgatgggcttgcc

SEQ ID NO: 612836 - DNA, 33 bp, Homo sapien
accctgcctctgatgcgctctgatgggcttgcc

SEQ ID NO: 612837 - DNA, 33 bp, Homo sapien
gaccagaccatagtggcataggtatcgaatgat

SEQ ID NO: 612838 - DNA, 33 bp, Homo sapien
gaccagaccatagtgggataggtatcgaatgat

SEQ ID NO: 612839 - DNA, 33 bp, Homo sapien
ctgaccattcaatttccgtacttccaccagagc

SEQ ID NO: 612840 - DNA, 33 bp, Homo sapien
ctgaccattcaatttctgtacttccaccagagc

SEQ ID NO: 612841 - DNA, 33 bp, Homo sapien
tggataatctgcatgaaaaggggggaaagagac

SEQ ID NO: 612842 - DNA, 33 bp, Homo sapien
tggataatctgcatgataaggggggaaagagac

SEQ ID NO: 612843 - DNA, 33 bp, Homo sapien
cgagttgggagaataaagctggaaggactaact

SEQ ID NO: 612844 - DNA, 33 bp, Homo sapien
cgagttgggagaataacgctggaaggactaact

SEQ ID NO: 612845 - DNA, 33 bp, Homo sapien
tgctgctgtatcagctgaagacacttagtttta

SEQ ID NO: 612846 - DNA, 33 bp, Homo sapien
tgctgctgtatcagcttaagacacttagtttta

SEQ ID NO: 612847 - DNA, 33 bp, Homo sapien
gcagatattttgtagaactgggagtaaaggaaa

SEQ ID NO: 612848 - DNA, 33 bp, Homo sapien
gcagatattttgtagacctgggagtaaaggaaa

SEQ ID NO: 612849 - DNA, 33 bp, Homo sapien
ccaaaactcgttctgacgtgcaagtcttactaa

SEQ ID NO: 612850 - DNA, 33 bp, Homo sapien
ccaaaactcgttctgatgtgcaagtcttactaa

SEQ ID NO: 612851 - DNA, 33 bp, Homo sapien
tcataggaaaccttacactcattatcccagaga

SEQ ID NO: 612852 - DNA, 33 bp, Homo sapien
tcataggaaaccttacgctcattatcccagaga

SEQ ID NO: 612853 - DNA, 33 bp, Homo sapien
ctccaggttgttattccagctgactgtggttct

SEQ ID NO: 612854 - DNA, 33 bp, Homo sapien
ctccaggttgttattctagctgactgtggttct

SEQ ID NO: 612855 - DNA, 33 bp, Homo sapien
catcctataccgaagacatatgtcaccatgaca

SEQ ID NO: 612856 - DNA, 33 bp, Homo sapien
catcctataccgaagagatatgtcaccatgaca

SEQ ID NO: 612857 - DNA, 33 bp, Homo sapien
aaccctatccaggcaaattataaaacacaaacc

SEQ ID NO: 612858 - DNA, 33 bp, Homo sapien
aaccctatccaggcaatttataaaacacaaacc

SEQ ID NO: 612859 - DNA, 33 bp, Homo sapien
aagacactcactttacggctaaagaagtgtggc

SEQ ID NO: 612860 - DNA, 33 bp, Homo sapien
aagacactcactttactgctaaagaagtgtggc

SEQ ID NO: 612861 - DNA, 33 bp, Homo sapien
gcagacatattcagccaatgcttttctagctca

SEQ ID NO: 612862 - DNA, 33 bp, Homo sapien
gcagacatattcagcccatgcttttctagctca

SEQ ID NO: 612863 - DNA, 33 bp, Homo sapien
aagtgggatatagtaaaaatgtcctacaattta

SEQ ID NO: 612864 - DNA, 33 bp, Homo sapien
aagtgggatatagtaagaatgtcctacaattta

SEQ ID NO: 612865 - DNA, 33 bp, Homo sapien
ccaaaaagctaacatacggttttgaagcagcat

SEQ ID NO: 612866 - DNA, 33 bp, Homo sapien
ccaaaaagctaacatatggttttgaagcagcat

SEQ ID NO: 612867 - DNA, 33 bp, Homo sapien
gccttttcagttagaacatagattcatggttag

SEQ ID NO: 612868 - DNA, 33 bp, Homo sapien
gccttttcagttagaagatagattcatggttag

SEQ ID NO: 612869 - DNA, 33 bp, Homo sapien
tctaaccagtaaagagaaccacctgtaattatg

SEQ ID NO: 612870 - DNA, 33 bp, Homo sapien
tctaaccagtaaagaggaccacctgtaattatg

SEQ ID NO: 612871 - DNA, 33 bp, Homo sapien
aacacgagagatgcccaaaatgagagttctgta

SEQ ID NO: 612872 - DNA, 33 bp, Homo sapien
aacacgagagatgcccgaaatgagagttctgta

SEQ ID NO: 612873 - DNA, 33 bp, Homo sapien
atgaaaactcaaaaaccacctgtaattagaaaa

SEQ ID NO: 612874 - DNA, 33 bp, Homo sapien
atgaaaactcaaaaacgacctgtaattagaaaa

SEQ ID NO: 612875 - DNA, 33 bp, Homo sapien
ggaactggttaggagcactggttaagatgtcaa

SEQ ID NO: 612876 - DNA, 33 bp, Homo sapien
ggaactggttaggagcgctggttaagatgtcaa

SEQ ID NO: 612877 - DNA, 33 bp, Homo sapien
aatttttttctcattgcattctttggagagata

SEQ ID NO: 612878 - DNA, 33 bp, Homo sapien
aatttttttctcattgtattctttggagagata

SEQ ID NO: 612879 - DNA, 33 bp, Homo sapien
gtatacaaagagggaacgatatcaaagtttggt

SEQ ID NO: 612880 - DNA, 33 bp, Homo sapien
gtatacaaagagggaaggatatcaaagtttggt

SEQ ID NO: 612881 - DNA, 33 bp, Homo sapien
acagcaaagagaaaagaaaggtgaactagaaaa

SEQ ID NO: 612882 - DNA, 33 bp, Homo sapien
acagcaaagagaaaaggaaggtgaactagaaaa

SEQ ID NO: 612883 - DNA, 33 bp, Homo sapien
tcaggtcatttgaaacaaagtcaaaggagagaa

SEQ ID NO: 612884 - DNA, 33 bp, Homo sapien
tcaggtcatttgaaacgaagtcaaaggagagaa

SEQ ID NO: 612885 - DNA, 33 bp, Homo sapien
agggggatgatgtatacgactgtggattctaca

SEQ ID NO: 612886 - DNA, 33 bp, Homo sapien
agggggatgatgtatatgactgtggattctaca

SEQ ID NO: 612887 - DNA, 33 bp, Homo sapien
agattctcctttgtcactcagatatcatacata

SEQ ID NO: 612888 - DNA, 33 bp, Homo sapien
agattctcctttgtcattcagatatcatacata

SEQ ID NO: 612889 - DNA, 33 bp, Homo sapien
tatttaccttttctatcagagatactaccactg

SEQ ID NO: 612890 - DNA, 33 bp, Homo sapien
tatttaccttttctatgagagatactaccactg

SEQ ID NO: 612891 - DNA, 33 bp, Homo sapien
tcctctaacaatgaggcccagtaagtggcggat

SEQ ID NO: 612892 - DNA, 33 bp, Homo sapien
tcctctaacaatgaggtccagtaagtggcggat

SEQ ID NO: 612893 - DNA, 33 bp, Homo sapien
cttcctatgccccttaacctcctctaacaatga

SEQ ID NO: 612894 - DNA, 33 bp, Homo sapien
cttcctatgccccttaccctcctctaacaatga

SEQ ID NO: 612895 - DNA, 33 bp, Homo sapien
aggggcataggaagaaaagtactgaagaggaac

SEQ ID NO: 612896 - DNA, 33 bp, Homo sapien
aggggcataggaagaacagtactgaagaggaac

SEQ ID NO: 612897 - DNA, 33 bp, Homo sapien
taatttgtagttttgcagataaagaacactttc

SEQ ID NO: 612898 - DNA, 33 bp, Homo sapien
taatttgtagttttgccgataaagaacactttc

SEQ ID NO: 612899 - DNA, 33 bp, Homo sapien
catttagggagggagcacctctcaatgtgacac

SEQ ID NO: 612900 - DNA, 33 bp, Homo sapien
catttagggagggagcgcctctcaatgtgacac

SEQ ID NO: 612901 - DNA, 33 bp, Homo sapien
ccaccctttgtatgtacggtgtgctattaactt

SEQ ID NO: 612902 - DNA, 33 bp, Homo sapien
ccaccctttgtatgtatggtgtgctattaactt

SEQ ID NO: 612903 - DNA, 33 bp, Homo sapien
aattttggaaatgtcaatatttaatgtcagtcc

SEQ ID NO: 612904 - DNA, 33 bp, Homo sapien
aattttggaaatgtcagtatttaatgtcagtcc

SEQ ID NO: 612905 - DNA, 33 bp, Homo sapien
ttgctacattgttgtacgataatatttctgtta

SEQ ID NO: 612906 - DNA, 33 bp, Homo sapien
ttgctacattgttgtatgataatatttctgtta

SEQ ID NO: 612907 - DNA, 33 bp, Homo sapien
tatattattaacaggaagaaaggtatagagaga

SEQ ID NO: 612908 - DNA, 33 bp, Homo sapien
tatattattaacaggaggaaaggtatagagaga

SEQ ID NO: 612909 - DNA, 33 bp, Homo sapien
ctacttgaacacagcccatatttactgcacagc

SEQ ID NO: 612910 - DNA, 33 bp, Homo sapien
ctacttgaacacagcctatatttactgcacagc

SEQ ID NO: 612911 - DNA, 33 bp, Homo sapien
gcccttgattggataacgcctacccacattaat

SEQ ID NO: 612912 - DNA, 33 bp, Homo sapien
gcccttgattggataatgcctacccacattaat

SEQ ID NO: 612913 - DNA, 33 bp, Homo sapien
ttaatgagggggatcaactatactcaatctacc

SEQ ID NO: 612914 - DNA, 33 bp, Homo sapien
ttaatgagggggatcatctatactcaatctacc

SEQ ID NO: 612915 - DNA, 33 bp, Homo sapien
atataagacagataaaagtaggtctgctctgaa

SEQ ID NO: 612916 - DNA, 33 bp, Homo sapien
atataagacagataaatgtaggtctgctctgaa

SEQ ID NO: 612917 - DNA, 33 bp, Homo sapien
ataactgagaagtcaacggctaatcagggactt

SEQ ID NO: 612918 - DNA, 33 bp, Homo sapien
ataactgagaagtcaatggctaatcagggactt

SEQ ID NO: 612919 - DNA, 33 bp, Homo sapien
gactgacacatagacaagagaaagcccagacaa

SEQ ID NO: 612920 - DNA, 33 bp, Homo sapien
gactgacacatagacaggagaaagcccagacaa

SEQ ID NO: 612921 - DNA, 33 bp, Homo sapien
taattggaagagcagcaaataatctgtggccat

SEQ ID NO: 612922 - DNA, 33 bp, Homo sapien
taattggaagagcagccaataatctgtggccat

SEQ ID NO: 612923 - DNA, 33 bp, Homo sapien
aacaaagaatttttcacaaatgatagaacacat

SEQ ID NO: 612924 - DNA, 33 bp, Homo sapien
aacaaagaatttttcagaaatgatagaacacat

SEQ ID NO: 612925 - DNA, 33 bp, Homo sapien
tatttttttccactagaactcttagcatattaa

SEQ ID NO: 612926 - DNA, 33 bp, Homo sapien
tatttttttccactagcactcttagcatattaa

SEQ ID NO: 612927 - DNA, 33 bp, Homo sapien
cctactcaaactatagcattagcacatattgaa

SEQ ID NO: 612928 - DNA, 33 bp, Homo sapien
cctactcaaactataggattagcacatattgaa

SEQ ID NO: 612929 - DNA, 33 bp, Homo sapien
tctgctgtttttgctaccaccttcttggaatat

SEQ ID NO: 612930 - DNA, 33 bp, Homo sapien
tctgctgtttttgctatcaccttcttggaatat

SEQ ID NO: 612931 - DNA, 33 bp, Homo sapien
ctccctgcttgttctccatctactagatggaac

SEQ ID NO: 612932 - DNA, 33 bp, Homo sapien
ctccctgcttgttctctatctactagatggaac

SEQ ID NO: 612933 - DNA, 33 bp, Homo sapien
cagtgtcagccttgaactggtatcttttcttta

SEQ ID NO: 612934 - DNA, 33 bp, Homo sapien
cagtgtcagccttgaattggtatcttttcttta

SEQ ID NO: 612935 - DNA, 33 bp, Homo sapien
aggagcagaggggtcaaggaagaaggtggcacg

SEQ ID NO: 612936 - DNA, 33 bp, Homo sapien
aggagcagaggggtcacggaagaaggtggcacg

SEQ ID NO: 612937 - DNA, 33 bp, Homo sapien
aaaccgatcttgagaacggtgaaatagaagatt

SEQ ID NO: 612938 - DNA, 33 bp, Homo sapien
aaaccgatcttgagaagggtgaaatagaagatt

SEQ ID NO: 612939 - DNA, 33 bp, Homo sapien
caatactgttgcaaagaaagtttttagaagtat

SEQ ID NO: 612940 - DNA, 33 bp, Homo sapien
caatactgttgcaaaggaagtttttagaagtat

SEQ ID NO: 612941 - DNA, 33 bp, Homo sapien
atcttttgtcagcagaaggcttttattagctaa

SEQ ID NO: 612942 - DNA, 33 bp, Homo sapien
atcttttgtcagcagagggcttttattagctaa

SEQ ID NO: 612943 - DNA, 33 bp, Homo sapien
agtctttcaaaagccacgtgtttcttaagctgg

SEQ ID NO: 612944 - DNA, 33 bp, Homo sapien
agtctttcaaaagccatgtgtttcttaagctgg

SEQ ID NO: 612945 - DNA, 33 bp, Homo sapien
ttcctatgtgaaggaaagatctccagaataaga

SEQ ID NO: 612946 - DNA, 33 bp, Homo sapien
ttcctatgtgaaggaatgatctccagaataaga

SEQ ID NO: 612947 - DNA, 33 bp, Homo sapien
gaacattacgtcataaccacttgttaaaccttt

SEQ ID NO: 612948 - DNA, 33 bp, Homo sapien
gaacattacgtcataagcacttgttaaaccttt

SEQ ID NO: 612949 - DNA, 33 bp, Homo sapien
catcttttcacatataataacaggaactttagt

SEQ ID NO: 612950 - DNA, 33 bp, Homo sapien
catcttttcacatatagtaacaggaactttagt

SEQ ID NO: 612951 - DNA, 33 bp, Homo sapien
atactgagccaacacaaggtttttttggtaact

SEQ ID NO: 612952 - DNA, 33 bp, Homo sapien
atactgagccaacacatggtttttttggtaact

SEQ ID NO: 612953 - DNA, 33 bp, Homo sapien
ccattccctatacatccagtcagtggctgggtg

SEQ ID NO: 612954 - DNA, 33 bp, Homo sapien
ccattccctatacatctagtcagtggctgggtg

SEQ ID NO: 612955 - DNA, 33 bp, Homo sapien
atgataattgcccaaacaatattaatcccacta

SEQ ID NO: 612956 - DNA, 33 bp, Homo sapien
atgataattgcccaaataatattaatcccacta

SEQ ID NO: 612957 - DNA, 33 bp, Homo sapien
accttgccacttgcccaatgaaaaacatttgct

SEQ ID NO: 612958 - DNA, 33 bp, Homo sapien
accttgccacttgcccgatgaaaaacatttgct

SEQ ID NO: 612959 - DNA, 33 bp, Homo sapien
tggcctctggcatgaaaccattagcaaataagc

SEQ ID NO: 612960 - DNA, 33 bp, Homo sapien
tggcctctggcatgaagccattagcaaataagc

SEQ ID NO: 612961 - DNA, 33 bp, Homo sapien
cgtaacagtagaatggcatttaaagaagagaag

SEQ ID NO: 612962 - DNA, 33 bp, Homo sapien
cgtaacagtagaatgggatttaaagaagagaag

SEQ ID NO: 612963 - DNA, 33 bp, Homo sapien
aggcaacctagcgagacgtcatttctaaacaaa

SEQ ID NO: 612964 - DNA, 33 bp, Homo sapien
aggcaacctagcgagatgtcatttctaaacaaa

SEQ ID NO: 612965 - DNA, 33 bp, Homo sapien
ctcaccaattagtttcaaatgaattttactatc

SEQ ID NO: 612966 - DNA, 33 bp, Homo sapien
ctcaccaattagtttcgaatgaattttactatc

SEQ ID NO: 612967 - DNA, 33 bp, Homo sapien
tctgttctgtgaaaagaccacatatgcaaagtg

SEQ ID NO: 612968 - DNA, 33 bp, Homo sapien
tctgttctgtgaaaaggccacatatgcaaagtg

SEQ ID NO: 612969 - DNA, 33 bp, Homo sapien
ctcagcagctacggaaatatgaaatggatttca

SEQ ID NO: 612970 - DNA, 33 bp, Homo sapien
ctcagcagctacggaagtatgaaatggatttca

SEQ ID NO: 612971 - DNA, 33 bp, Homo sapien
agctacaggataaaaacaagttaactgaactca

SEQ ID NO: 612972 - DNA, 33 bp, Homo sapien
agctacaggataaaaataagttaactgaactca

SEQ ID NO: 612973 - DNA, 33 bp, Homo sapien
tttgctggtgcctttacatctttcaagtctcag

SEQ ID NO: 612974 - DNA, 33 bp, Homo sapien
tttgctggtgcctttatatctttcaagtctcag

SEQ ID NO: 612975 - DNA, 33 bp, Homo sapien
cttatgcctccatacaaatgttctacaggcaag

SEQ ID NO: 612976 - DNA, 33 bp, Homo sapien
cttatgcctccatacagatgttctacaggcaag

SEQ ID NO: 612977 - DNA, 33 bp, Homo sapien
tatggttgttagttgacactttcttggtttacg

SEQ ID NO: 612978 - DNA, 33 bp, Homo sapien
tatggttgttagttgatactttcttggtttacg

SEQ ID NO: 612979 - DNA, 33 bp, Homo sapien
tctcttgagggtatcacgagaagaagattatgt

SEQ ID NO: 612980 - DNA, 33 bp, Homo sapien
tctcttgagggtatcatgagaagaagattatgt

SEQ ID NO: 612981 - DNA, 33 bp, Homo sapien
ccacacaaccaatgtacgcccagggtctttcct

SEQ ID NO: 612982 - DNA, 33 bp, Homo sapien
ccacacaaccaatgtatgcccagggtctttcct

SEQ ID NO: 612983 - DNA, 33 bp, Homo sapien
cataaatacaatgaaacggaaaaatgtgaaaag

SEQ ID NO: 612984 - DNA, 33 bp, Homo sapien
cataaatacaatgaaatggaaaaatgtgaaaag

SEQ ID NO: 612985 - DNA, 33 bp, Homo sapien
ttttggtgagttttggccagcttttttactgca

SEQ ID NO: 612986 - DNA, 33 bp, Homo sapien
ttttggtgagttttggtcagcttttttactgca

SEQ ID NO: 612987 - DNA, 33 bp, Homo sapien
gtcctgagaaggagtacgcttcagccatatttt

SEQ ID NO: 612988 - DNA, 33 bp, Homo sapien
gtcctgagaaggagtatgcttcagccatatttt

SEQ ID NO: 612989 - DNA, 33 bp, Homo sapien
tgggacacagcaaaaagtggtgagtttcattaa

SEQ ID NO: 612990 - DNA, 33 bp, Homo sapien
tgggacacagcaaaaattggtgagtttcattaa

SEQ ID NO: 612991 - DNA, 33 bp, Homo sapien
aatcattttaagtgtccatttttcgttgtagtt

SEQ ID NO: 612992 - DNA, 33 bp, Homo sapien
aatcattttaagtgtcgatttttcgttgtagtt

SEQ ID NO: 612993 - DNA, 33 bp, Homo sapien
tatgtttcttatcagacctaaaagcgtatctgg

SEQ ID NO: 612994 - DNA, 33 bp, Homo sapien
tatgtttcttatcagagctaaaagcgtatctgg

SEQ ID NO: 612995 - DNA, 33 bp, Homo sapien
cagcaaacagtgaagcaagactttgatcctagg

SEQ ID NO: 612996 - DNA, 33 bp, Homo sapien
cagcaaacagtgaagcgagactttgatcctagg

SEQ ID NO: 612997 - DNA, 33 bp, Homo sapien
ttgttgaacacatactcaaagccttaacacaat

SEQ ID NO: 612998 - DNA, 33 bp, Homo sapien
ttgttgaacacatactgaaagccttaacacaat

SEQ ID NO: 612999 - DNA, 33 bp, Homo sapien
tatctcttgcaggctaataatttgatggctctt

SEQ ID NO: 613000 - DNA, 33 bp, Homo sapien
tatctcttgcaggctagtaatttgatggctctt

SEQ ID NO: 613001 - DNA, 33 bp, Homo sapien
atgtttctcaatacttcaagactgactatgagt

SEQ ID NO: 613002 - DNA, 33 bp, Homo sapien
atgtttctcaatactttaagactgactatgagt

SEQ ID NO: 613003 - DNA, 33 bp, Homo sapien
ggccaggatacccagcaaggcatttccagtcta

SEQ ID NO: 613004 - DNA, 33 bp, Homo sapien
ggccaggatacccagcgaggcatttccagtcta

SEQ ID NO: 613005 - DNA, 33 bp, Homo sapien
ggacttgaaatcaccaaaagatcccaattctct

SEQ ID NO: 613006 - DNA, 33 bp, Homo sapien
ggacttgaaatcaccagaagatcccaattctct

SEQ ID NO: 613007 - DNA, 33 bp, Homo sapien
ggttaaccaatttgaaagttaatctttgtcaag

SEQ ID NO: 613008 - DNA, 33 bp, Homo sapien
ggttaaccaatttgaaggttaatctttgtcaag

SEQ ID NO: 613009 - DNA, 33 bp, Homo sapien
ctatgttcaaaggagacggatcgtgatgtaggc

SEQ ID NO: 613010 - DNA, 33 bp, Homo sapien
ctatgttcaaaggagagggatcgtgatgtaggc

SEQ ID NO: 613011 - DNA, 33 bp, Homo sapien
gttagcatggcttggaatcagcctacatcacga

SEQ ID NO: 613012 - DNA, 33 bp, Homo sapien
gttagcatggcttggagtcagcctacatcacga

SEQ ID NO: 613013 - DNA, 33 bp, Homo sapien
accaaaattaggaggaaacatgaatctgtaaag

SEQ ID NO: 613014 - DNA, 33 bp, Homo sapien
accaaaattaggaggagacatgaatctgtaaag

SEQ ID NO: 613015 - DNA, 33 bp, Homo sapien
ttgagcaattagatacaattttttcatgaacct

SEQ ID NO: 613016 - DNA, 33 bp, Homo sapien
ttgagcaattagataccattttttcatgaacct

SEQ ID NO: 613017 - DNA, 33 bp, Homo sapien
tcaggtatatctttaccagcagcatgaaaacag

SEQ ID NO: 613018 - DNA, 33 bp, Homo sapien
tcaggtatatctttacgagcagcatgaaaacag

SEQ ID NO: 613019 - DNA, 33 bp, Homo sapien
gctgcttgtccgtgaaactcctccatgcccaac

SEQ ID NO: 613020 - DNA, 33 bp, Homo sapien
gctgcttgtccgtgaagctcctccatgcccaac

SEQ ID NO: 613021 - DNA, 33 bp, Homo sapien
ggcaggatagtactgacaggagaatgatgagtc

SEQ ID NO: 613022 - DNA, 33 bp, Homo sapien
ggcaggatagtactgataggagaatgatgagtc

SEQ ID NO: 613023 - DNA, 33 bp, Homo sapien
ttgctaatggtgagaagaaattgtaaaaagagg

SEQ ID NO: 613024 - DNA, 33 bp, Homo sapien
ttgctaatggtgagaataaattgtaaaaagagg

SEQ ID NO: 613025 - DNA, 33 bp, Homo sapien
agtctcattttggttccacaatttactaactgt

SEQ ID NO: 613026 - DNA, 33 bp, Homo sapien
agtctcattttggttctacaatttactaactgt

SEQ ID NO: 613027 - DNA, 33 bp, Homo sapien
cgagaatgattgagacccctgttgataaataaa

SEQ ID NO: 613028 - DNA, 33 bp, Homo sapien
cgagaatgattgagactcctgttgataaataaa

SEQ ID NO: 613029 - DNA, 33 bp, Homo sapien
gagcgggataggaaaactcatatctatatccgg

SEQ ID NO: 613030 - DNA, 33 bp, Homo sapien
gagcgggataggaaaagtcatatctatatccgg

SEQ ID NO: 613031 - DNA, 33 bp, Homo sapien
ttcactgtctgtggataaagtgccataaaagtg

SEQ ID NO: 613032 - DNA, 33 bp, Homo sapien
ttcactgtctgtggatgaagtgccataaaagtg

SEQ ID NO: 613033 - DNA, 33 bp, Homo sapien
gggttgctgtgtttcactacaatcagcaaacta

SEQ ID NO: 613034 - DNA, 33 bp, Homo sapien
gggttgctgtgtttcattacaatcagcaaacta

SEQ ID NO: 613035 - DNA, 33 bp, Homo sapien
ctttgtatactcgataatacctaacacaaacag

SEQ ID NO: 613036 - DNA, 33 bp, Homo sapien
ctttgtatactcgatagtacctaacacaaacag

SEQ ID NO: 613037 - DNA, 33 bp, Homo sapien
taaggactacaaaatacagataaaggctaatca

SEQ ID NO: 613038 - DNA, 33 bp, Homo sapien
taaggactacaaaatatagataaaggctaatca

SEQ ID NO: 613039 - DNA, 33 bp, Homo sapien
cattcacagttcctaacgctggattctctggag

SEQ ID NO: 613040 - DNA, 33 bp, Homo sapien
cattcacagttcctaatgctggattctctggag

SEQ ID NO: 613041 - DNA, 33 bp, Homo sapien
cacaagcctgtactgaaaatcacctgtgagaag

SEQ ID NO: 613042 - DNA, 33 bp, Homo sapien
cacaagcctgtactgagaatcacctgtgagaag

SEQ ID NO: 613043 - DNA, 33 bp, Homo sapien
aagggtgcaggtcttcaagaatgtgttggtaag

SEQ ID NO: 613044 - DNA, 33 bp, Homo sapien
aagggtgcaggtcttcgagaatgtgttggtaag

SEQ ID NO: 613045 - DNA, 33 bp, Homo sapien
gcacagtgctgaacacacaataagagcttaaca

SEQ ID NO: 613046 - DNA, 33 bp, Homo sapien
gcacagtgctgaacacccaataagagcttaaca

SEQ ID NO: 613047 - DNA, 33 bp, Homo sapien
taatccccagtatctacgaatctgactttacag

SEQ ID NO: 613048 - DNA, 33 bp, Homo sapien
taatccccagtatctatgaatctgactttacag

SEQ ID NO: 613049 - DNA, 33 bp, Homo sapien
ggccatgtgactggaacgaggcatctacaagac

SEQ ID NO: 613050 - DNA, 33 bp, Homo sapien
ggccatgtgactggaatgaggcatctacaagac

SEQ ID NO: 613051 - DNA, 33 bp, Homo sapien
tctatgccattcacccaaactctgcatttgcat

SEQ ID NO: 613052 - DNA, 33 bp, Homo sapien
tctatgccattcacccgaactctgcatttgcat

SEQ ID NO: 613053 - DNA, 33 bp, Homo sapien
cgggtgttgtacaaaccaggaatgaggaaggag

SEQ ID NO: 613054 - DNA, 33 bp, Homo sapien
cgggtgttgtacaaactaggaatgaggaaggag

SEQ ID NO: 613055 - DNA, 33 bp, Homo sapien
ggccttcactttacaaacaaagcaactgagata

SEQ ID NO: 613056 - DNA, 33 bp, Homo sapien
ggccttcactttacaagcaaagcaactgagata

SEQ ID NO: 613057 - DNA, 33 bp, Homo sapien
ttggaagttggatttaacatgcacagattactg

SEQ ID NO: 613058 - DNA, 33 bp, Homo sapien
ttggaagttggatttatcatgcacagattactg

SEQ ID NO: 613059 - DNA, 33 bp, Homo sapien
gctatcggccaactggaaataagaaagtttata

SEQ ID NO: 613060 - DNA, 33 bp, Homo sapien
gctatcggccaactgggaataagaaagtttata

SEQ ID NO: 613061 - DNA, 33 bp, Homo sapien
agaactctgggcactacgttttccacaaaacat

SEQ ID NO: 613062 - DNA, 33 bp, Homo sapien
agaactctgggcactaggttttccacaaaacat

SEQ ID NO: 613063 - DNA, 33 bp, Homo sapien
aaattatccacagtaaatcagcactaaaagatg

SEQ ID NO: 613064 - DNA, 33 bp, Homo sapien
aaattatccacagtaagtcagcactaaaagatg

SEQ ID NO: 613065 - DNA, 33 bp, Homo sapien
tcatggttggtggataaatcaacgtgtcaagag

SEQ ID NO: 613066 - DNA, 33 bp, Homo sapien
tcatggttggtggatagatcaacgtgtcaagag

SEQ ID NO: 613067 - DNA, 33 bp, Homo sapien
tgtacataagccaaggaaagagcaataaaatca

SEQ ID NO: 613068 - DNA, 33 bp, Homo sapien
tgtacataagccaagggaagagcaataaaatca

SEQ ID NO: 613069 - DNA, 33 bp, Homo sapien
aaactgatgatacttacacaatgttggtcaaca

SEQ ID NO: 613070 - DNA, 33 bp, Homo sapien
aaactgatgatacttatacaatgttggtcaaca

SEQ ID NO: 613071 - DNA, 33 bp, Homo sapien
tttcctttttgttaaacggcaagtctggatttt

SEQ ID NO: 613072 - DNA, 33 bp, Homo sapien
tttcctttttgttaaatggcaagtctggatttt

SEQ ID NO: 613073 - DNA, 33 bp, Homo sapien
agcatatcatggagagcagtgctgaatattcaa

SEQ ID NO: 613074 - DNA, 33 bp, Homo sapien
agcatatcatggagagtagtgctgaatattcaa

SEQ ID NO: 613075 - DNA, 33 bp, Homo sapien
catgtttggatagacaatagagtatcttttata

SEQ ID NO: 613076 - DNA, 33 bp, Homo sapien
catgtttggatagacagtagagtatcttttata

SEQ ID NO: 613077 - DNA, 33 bp, Homo sapien
ccttcactgccaatgaataaggaataggagaga

SEQ ID NO: 613078 - DNA, 33 bp, Homo sapien
ccttcactgccaatgagtaaggaataggagaga

SEQ ID NO: 613079 - DNA, 33 bp, Homo sapien
cctgttacttcagtcaaaacattcagtttaata

SEQ ID NO: 613080 - DNA, 33 bp, Homo sapien
cctgttacttcagtcagaacattcagtttaata

SEQ ID NO: 613081 - DNA, 33 bp, Homo sapien
taagcagggaaaaaaccctggtgaagttgtgtc

SEQ ID NO: 613082 - DNA, 33 bp, Homo sapien
taagcagggaaaaaactctggtgaagttgtgtc

SEQ ID NO: 613083 - DNA, 33 bp, Homo sapien
ccaacttgaccagatacaacagcagcttcagtc

SEQ ID NO: 613084 - DNA, 33 bp, Homo sapien
ccaacttgaccagatagaacagcagcttcagtc

SEQ ID NO: 613085 - DNA, 33 bp, Homo sapien
attcaggtcactgagacgtggattgatctgaca

SEQ ID NO: 613086 - DNA, 33 bp, Homo sapien
attcaggtcactgagatgtggattgatctgaca

SEQ ID NO: 613087 - DNA, 33 bp, Homo sapien
agcttcaattctaaaccagacaacctggctcaa

SEQ ID NO: 613088 - DNA, 33 bp, Homo sapien
agcttcaattctaaacgagacaacctggctcaa

SEQ ID NO: 613089 - DNA, 33 bp, Homo sapien
ggatgtgttgtaaccacatcgttatacccaaag

SEQ ID NO: 613090 - DNA, 33 bp, Homo sapien
ggatgtgttgtaaccatatcgttatacccaaag

SEQ ID NO: 613091 - DNA, 33 bp, Homo sapien
gaatggtcaaggaaatgagagtgtgtgaaaagg

SEQ ID NO: 613092 - DNA, 33 bp, Homo sapien
gaatggtcaaggaaattagagtgtgtgaaaagg

SEQ ID NO: 613093 - DNA, 33 bp, Homo sapien
gtgttcatttggttaacacctactgtgtgcttc

SEQ ID NO: 613094 - DNA, 33 bp, Homo sapien
gtgttcatttggttaatacctactgtgtgcttc

SEQ ID NO: 613095 - DNA, 33 bp, Homo sapien
gtgccctctccggatacgccaccttcccagcac

SEQ ID NO: 613096 - DNA, 33 bp, Homo sapien
gtgccctctccggatatgccaccttcccagcac

SEQ ID NO: 613097 - DNA, 33 bp, Homo sapien
gttatgtgacctggctaagattacatagttggt

SEQ ID NO: 613098 - DNA, 33 bp, Homo sapien
gttatgtgacctggctgagattacatagttggt

SEQ ID NO: 613099 - DNA, 33 bp, Homo sapien
caacgaccttagaaagcctaccattgcctgcag

SEQ ID NO: 613100 - DNA, 33 bp, Homo sapien
caacgaccttagaaaggctaccattgcctgcag

SEQ ID NO: 613101 - DNA, 33 bp, Homo sapien
aaggtaaagtttccaactgctgcttgtgcttag

SEQ ID NO: 613102 - DNA, 33 bp, Homo sapien
aaggtaaagtttccaattgctgcttgtgcttag

SEQ ID NO: 613103 - DNA, 33 bp, Homo sapien
ggcatgaggttctctaagaatgtccagagaagg

SEQ ID NO: 613104 - DNA, 33 bp, Homo sapien
ggcatgaggttctctaggaatgtccagagaagg

SEQ ID NO: 613105 - DNA, 33 bp, Homo sapien
tctagctttgaaaatgacagatagcatcttctt

SEQ ID NO: 613106 - DNA, 33 bp, Homo sapien
tctagctttgaaaatgccagatagcatcttctt

SEQ ID NO: 613107 - DNA, 33 bp, Homo sapien
catttgacttagatcacctagctttcaatgcag

SEQ ID NO: 613108 - DNA, 33 bp, Homo sapien
catttgacttagatcatctagctttcaatgcag

SEQ ID NO: 613109 - DNA, 33 bp, Homo sapien
aaggacagcatttaggcaatctgcagttatata

SEQ ID NO: 613110 - DNA, 33 bp, Homo sapien
aaggacagcatttagggaatctgcagttatata

SEQ ID NO: 613111 - DNA, 33 bp, Homo sapien
ttagaaataactgaaacgcaaaggataaaaact

SEQ ID NO: 613112 - DNA, 33 bp, Homo sapien
ttagaaataactgaaatgcaaaggataaaaact

SEQ ID NO: 613113 - DNA, 33 bp, Homo sapien
atgtttaaattgatggaatagaccaggttggct

SEQ ID NO: 613114 - DNA, 33 bp, Homo sapien
atgtttaaattgatggcatagaccaggttggct

SEQ ID NO: 613115 - DNA, 33 bp, Homo sapien
aaaagtccaaatgtcaaacaggcctgatgaagc

SEQ ID NO: 613116 - DNA, 33 bp, Homo sapien
aaaagtccaaatgtcatacaggcctgatgaagc

SEQ ID NO: 613117 - DNA, 33 bp, Homo sapien
gcttttgtcttcttcccgagagaattctgattt

SEQ ID NO: 613118 - DNA, 33 bp, Homo sapien
gcttttgtcttcttcctgagagaattctgattt

SEQ ID NO: 613119 - DNA, 33 bp, Homo sapien
gatagtgatgattagactaccacgtcaatacct

SEQ ID NO: 613120 - DNA, 33 bp, Homo sapien
gatagtgatgattagattaccacgtcaatacct

SEQ ID NO: 613121 - DNA, 33 bp, Homo sapien
gctacaacacaagagaagagtttggtcccaagt

SEQ ID NO: 613122 - DNA, 33 bp, Homo sapien
gctacaacacaagagaggagtttggtcccaagt

SEQ ID NO: 613123 - DNA, 33 bp, Homo sapien
gctgatatttttggcaagtttattttcttaata

SEQ ID NO: 613124 - DNA, 33 bp, Homo sapien
gctgatatttttggcacgtttattttcttaata

SEQ ID NO: 613125 - DNA, 33 bp, Homo sapien
aaaaagatgagcagaaaagaagtatggatgtca

SEQ ID NO: 613126 - DNA, 33 bp, Homo sapien
aaaaagatgagcagaagagaagtatggatgtca

SEQ ID NO: 613127 - DNA, 33 bp, Homo sapien
catttttttcactcccaagaatactggagttct

SEQ ID NO: 613128 - DNA, 33 bp, Homo sapien
catttttttcactcccgagaatactggagttct

SEQ ID NO: 613129 - DNA, 33 bp, Homo sapien
tgaagaggactgtggaaactcctttttactctc

SEQ ID NO: 613130 - DNA, 33 bp, Homo sapien
tgaagaggactgtggagactcctttttactctc

SEQ ID NO: 613131 - DNA, 33 bp, Homo sapien
ctggtagcttcccagccccagttctagcatttg

SEQ ID NO: 613132 - DNA, 33 bp, Homo sapien
ctggtagcttcccagcgccagttctagcatttg

SEQ ID NO: 613133 - DNA, 33 bp, Homo sapien
gaatccttcttagagactatattaattttctgc

SEQ ID NO: 613134 - DNA, 33 bp, Homo sapien
gaatccttcttagagagtatattaattttctgc

SEQ ID NO: 613135 - DNA, 33 bp, Homo sapien
tctacaggataatttcactggataccaccaaat

SEQ ID NO: 613136 - DNA, 33 bp, Homo sapien
tctacaggataatttcgctggataccaccaaat

SEQ ID NO: 613137 - DNA, 33 bp, Homo sapien
aggttaacctgagaaactggttcaggccatgat

SEQ ID NO: 613138 - DNA, 33 bp, Homo sapien
aggttaacctgagaaagtggttcaggccatgat

SEQ ID NO: 613139 - DNA, 33 bp, Homo sapien
catccattatcaacaaggaaccctatctgccct

SEQ ID NO: 613140 - DNA, 33 bp, Homo sapien
catccattatcaacaatgaaccctatctgccct

SEQ ID NO: 613141 - DNA, 33 bp, Homo sapien
ctgtagatacttgtaacgcagtggtgtttgtgt

SEQ ID NO: 613142 - DNA, 33 bp, Homo sapien
ctgtagatacttgtaatgcagtggtgtttgtgt

SEQ ID NO: 613143 - DNA, 33 bp, Homo sapien
gcaaaggtatcttcccaagtgtttcaaccaagg

SEQ ID NO: 613144 - DNA, 33 bp, Homo sapien
gcaaaggtatcttccccagtgtttcaaccaagg

SEQ ID NO: 613145 - DNA, 33 bp, Homo sapien
aaacttgggaatcaagacaccaatacttttttc

SEQ ID NO: 613146 - DNA, 33 bp, Homo sapien
aaacttgggaatcaagccaccaatacttttttc

SEQ ID NO: 613147 - DNA, 33 bp, Homo sapien
tagatttgtttgaaagcacttttctgtatccac

SEQ ID NO: 613148 - DNA, 33 bp, Homo sapien
tagatttgtttgaaaggacttttctgtatccac

SEQ ID NO: 613149 - DNA, 33 bp, Homo sapien
ggaagtagttctggttgaaccaccttgacacca

SEQ ID NO: 613150 - DNA, 33 bp, Homo sapien
ggaagtagttctggtttaaccaccttgacacca

SEQ ID NO: 613151 - DNA, 33 bp, Homo sapien
aaccaccttgacaccaaaacaattcattcattc

SEQ ID NO: 613152 - DNA, 33 bp, Homo sapien
aaccaccttgacaccagaacaattcattcattc

SEQ ID NO: 613153 - DNA, 33 bp, Homo sapien
gagcatggcaattacacacagttaagaggtcac

SEQ ID NO: 613154 - DNA, 33 bp, Homo sapien
gagcatggcaattacagacagttaagaggtcac

SEQ ID NO: 613155 - DNA, 33 bp, Homo sapien
ggatcagacggatgaactgacagtaggcttcaa

SEQ ID NO: 613156 - DNA, 33 bp, Homo sapien
ggatcagacggatgaattgacagtaggcttcaa

SEQ ID NO: 613157 - DNA, 33 bp, Homo sapien
tgtcaatagccaaatacagcaagcggaagaaag

SEQ ID NO: 613158 - DNA, 33 bp, Homo sapien
tgtcaatagccaaatagagcaagcggaagaaag

SEQ ID NO: 613159 - DNA, 33 bp, Homo sapien
ggagaattgctcaaacacggaaggcagaggttg

SEQ ID NO: 613160 - DNA, 33 bp, Homo sapien
ggagaattgctcaaacccggaaggcagaggttg

SEQ ID NO: 613161 - DNA, 33 bp, Homo sapien
cagttttttaatactgcaactggcacatcgacc

SEQ ID NO: 613162 - DNA, 33 bp, Homo sapien
cagttttttaatactggaactggcacatcgacc

SEQ ID NO: 613163 - DNA, 33 bp, Homo sapien
cacctatggcattcaaaccgaacttttcttagt

SEQ ID NO: 613164 - DNA, 33 bp, Homo sapien
cacctatggcattcaatccgaacttttcttagt

SEQ ID NO: 613165 - DNA, 33 bp, Homo sapien
ccctcttccgaaaataatacataagagaactct

SEQ ID NO: 613166 - DNA, 33 bp, Homo sapien
ccctcttccgaaaatactacataagagaactct

SEQ ID NO: 613167 - DNA, 33 bp, Homo sapien
cgttcaaagttctgagaaaagcccaatgtaggt

SEQ ID NO: 613168 - DNA, 33 bp, Homo sapien
cgttcaaagttctgaggaaagcccaatgtaggt

SEQ ID NO: 613169 - DNA, 33 bp, Homo sapien
ccgaccgcctgcccaccatggactgacaaccaa

SEQ ID NO: 613170 - DNA, 33 bp, Homo sapien
ccgaccgcctgcccactatggactgacaaccaa

SEQ ID NO: 613171 - DNA, 33 bp, Homo sapien
atgctttaaaaagggcagcacattcaagaacta

SEQ ID NO: 613172 - DNA, 33 bp, Homo sapien
atgctttaaaaagggcggcacattcaagaacta

SEQ ID NO: 613173 - DNA, 33 bp, Homo sapien
aatacctgctaggtagccagggatatgtgcgtt

SEQ ID NO: 613174 - DNA, 33 bp, Homo sapien
aatacctgctaggtagtcagggatatgtgcgtt

SEQ ID NO: 613175 - DNA, 33 bp, Homo sapien
tcccttttgaatgtcaactccctgataacagct

SEQ ID NO: 613176 - DNA, 33 bp, Homo sapien
tcccttttgaatgtcagctccctgataacagct

SEQ ID NO: 613177 - DNA, 33 bp, Homo sapien
gtgaatgcatttgggccgagagttttaactatt

SEQ ID NO: 613178 - DNA, 33 bp, Homo sapien
gtgaatgcatttgggctgagagttttaactatt

SEQ ID NO: 613179 - DNA, 33 bp, Homo sapien
tcttgccaggaaaccaaacttccatggaaaaca

SEQ ID NO: 613180 - DNA, 33 bp, Homo sapien
tcttgccaggaaaccagacttccatggaaaaca

SEQ ID NO: 613181 - DNA, 33 bp, Homo sapien
cagccattattttgacacgtagcttttcacgtt

SEQ ID NO: 613182 - DNA, 33 bp, Homo sapien
cagccattattttgacccgtagcttttcacgtt

SEQ ID NO: 613183 - DNA, 33 bp, Homo sapien
ctagtcccatagacaccaaaatatcaacatgtc

SEQ ID NO: 613184 - DNA, 33 bp, Homo sapien
ctagtcccatagacacgaaaatatcaacatgtc

SEQ ID NO: 613185 - DNA, 33 bp, Homo sapien
aaatttttaaaaattgaagacatacagaatgtg

SEQ ID NO: 613186 - DNA, 33 bp, Homo sapien
aaatttttaaaaattggagacatacagaatgtg

SEQ ID NO: 613187 - DNA, 33 bp, Homo sapien
tagttgctataaaatacgccaactgtgagtcaa

SEQ ID NO: 613188 - DNA, 33 bp, Homo sapien
tagttgctataaaatatgccaactgtgagtcaa

SEQ ID NO: 613189 - DNA, 33 bp, Homo sapien
gttttgactttggcccagattttgaacttgatt

SEQ ID NO: 613190 - DNA, 33 bp, Homo sapien
gttttgactttggcccggattttgaacttgatt

SEQ ID NO: 613191 - DNA, 33 bp, Homo sapien
atgaatcgagaacagaaatttaggctctcggct

SEQ ID NO: 613192 - DNA, 33 bp, Homo sapien
atgaatcgagaacagacatttaggctctcggct

SEQ ID NO: 613193 - DNA, 33 bp, Homo sapien
ttttcacagtgtatcacgctcctgggaagggag

SEQ ID NO: 613194 - DNA, 33 bp, Homo sapien
ttttcacagtgtatcatgctcctgggaagggag

SEQ ID NO: 613195 - DNA, 33 bp, Homo sapien
ccctagctggtaagctaaaggaaattcttgaaa

SEQ ID NO: 613196 - DNA, 33 bp, Homo sapien
ccctagctggtaagcttaaggaaattcttgaaa

SEQ ID NO: 613197 - DNA, 33 bp, Homo sapien
atcccaagagtagatacagcccgatactacagt

SEQ ID NO: 613198 - DNA, 33 bp, Homo sapien
atcccaagagtagatatagcccgatactacagt

SEQ ID NO: 613199 - DNA, 33 bp, Homo sapien
aactactgtgagtccaagccctaagtcctatca

SEQ ID NO: 613200 - DNA, 33 bp, Homo sapien
aactactgtgagtccatgccctaagtcctatca

SEQ ID NO: 613201 - DNA, 33 bp, Homo sapien
agatgtcattctctaccggcaagatgtgacttg

SEQ ID NO: 613202 - DNA, 33 bp, Homo sapien
agatgtcattctctactggcaagatgtgacttg

SEQ ID NO: 613203 - DNA, 33 bp, Homo sapien
taaaagaaactgaggaaggatgacggcttctaa

SEQ ID NO: 613204 - DNA, 33 bp, Homo sapien
taaaagaaactgaggagggatgacggcttctaa

SEQ ID NO: 613205 - DNA, 33 bp, Homo sapien
ttgctctgtaatcctacattgagaagatattga

SEQ ID NO: 613206 - DNA, 33 bp, Homo sapien
ttgctctgtaatcctatattgagaagatattga

SEQ ID NO: 613207 - DNA, 33 bp, Homo sapien
aaaacttggacaaacacggttgccttctgttcc

SEQ ID NO: 613208 - DNA, 33 bp, Homo sapien
aaaacttggacaaacatggttgccttctgttcc

SEQ ID NO: 613209 - DNA, 33 bp, Homo sapien
gatctctatcttatggaaatcgtttacacgtag

SEQ ID NO: 613210 - DNA, 33 bp, Homo sapien
gatctctatcttatggcaatcgtttacacgtag

SEQ ID NO: 613211 - DNA, 33 bp, Homo sapien
aaagacccaaacactgcaccttgctcataagaa

SEQ ID NO: 613212 - DNA, 33 bp, Homo sapien
aaagacccaaacactgtaccttgctcataagaa

SEQ ID NO: 613213 - DNA, 33 bp, Homo sapien
gcaagagcaaagggtacctattttgcaatggaa

SEQ ID NO: 613214 - DNA, 33 bp, Homo sapien
gcaagagcaaagggtatctattttgcaatggaa

SEQ ID NO: 613215 - DNA, 33 bp, Homo sapien
agagatcaagctgaagcacagaagaaaaaatgg

SEQ ID NO: 613216 - DNA, 33 bp, Homo sapien
agagatcaagctgaagtacagaagaaaaaatgg

SEQ ID NO: 613217 - DNA, 33 bp, Homo sapien
ttttggttaacagaaccataaagtaggagttaa

SEQ ID NO: 613218 - DNA, 33 bp, Homo sapien
ttttggttaacagaactataaagtaggagttaa

SEQ ID NO: 613219 - DNA, 33 bp, Homo sapien
tgttcctaactaaaccactcactaaatgaggac

SEQ ID NO: 613220 - DNA, 33 bp, Homo sapien
tgttcctaactaaaccgctcactaaatgaggac

SEQ ID NO: 613221 - DNA, 33 bp, Homo sapien
agtcataagtcctgtaggcgtattatatttcct

SEQ ID NO: 613222 - DNA, 33 bp, Homo sapien
agtcataagtcctgtatgcgtattatatttcct

SEQ ID NO: 613223 - DNA, 33 bp, Homo sapien
tgagaggaaaaggagactagaagagtatgggct

SEQ ID NO: 613224 - DNA, 33 bp, Homo sapien
tgagaggaaaaggagagtagaagagtatgggct

SEQ ID NO: 613225 - DNA, 33 bp, Homo sapien
gctaatattttcttggcatatgtgggtatgtgg

SEQ ID NO: 613226 - DNA, 33 bp, Homo sapien
gctaatattttcttgggatatgtgggtatgtgg

SEQ ID NO: 613227 - DNA, 33 bp, Homo sapien
gctaaaaatcatttacaaaaatcctcaatatta

SEQ ID NO: 613228 - DNA, 33 bp, Homo sapien
gctaaaaatcatttactaaaatcctcaatatta

SEQ ID NO: 613229 - DNA, 33 bp, Homo sapien
tgaggaattagctctgcagaatgttcagaattt

SEQ ID NO: 613230 - DNA, 33 bp, Homo sapien
tgaggaattagctctgtagaatgttcagaattt

SEQ ID NO: 613231 - DNA, 33 bp, Homo sapien
actagtctataatcacgcatttattttatccca

SEQ ID NO: 613232 - DNA, 33 bp, Homo sapien
actagtctataatcactcatttattttatccca

SEQ ID NO: 613233 - DNA, 33 bp, Homo sapien
ttctttgctccttacaagtttataagtctaata

SEQ ID NO: 613234 - DNA, 33 bp, Homo sapien
ttctttgctccttacaggtttataagtctaata

SEQ ID NO: 613235 - DNA, 33 bp, Homo sapien
tgggatcagagtagcactcaagaaaggagccct

SEQ ID NO: 613236 - DNA, 33 bp, Homo sapien
tgggatcagagtagcattcaagaaaggagccct

SEQ ID NO: 613237 - DNA, 33 bp, Homo sapien
aaagactcaagttcaactggacaagaggaatca

SEQ ID NO: 613238 - DNA, 33 bp, Homo sapien
aaagactcaagttcaattggacaagaggaatca

SEQ ID NO: 613239 - DNA, 33 bp, Homo sapien
tgataagaatgcagacggaacaagattagcttt

SEQ ID NO: 613240 - DNA, 33 bp, Homo sapien
tgataagaatgcagactgaacaagattagcttt

SEQ ID NO: 613241 - DNA, 33 bp, Homo sapien
atgaagaattgagacactaatgttaaataaaat

SEQ ID NO: 613242 - DNA, 33 bp, Homo sapien
atgaagaattgagacagtaatgttaaataaaat

SEQ ID NO: 613243 - DNA, 33 bp, Homo sapien
ttgccctgtctttcacccgcatttccataaacc

SEQ ID NO: 613244 - DNA, 33 bp, Homo sapien
ttgccctgtctttcactcgcatttccataaacc

SEQ ID NO: 613245 - DNA, 33 bp, Homo sapien
tggcccatatagcatccagtcaagacacaaaac

SEQ ID NO: 613246 - DNA, 33 bp, Homo sapien
tggcccatatagcatctagtcaagacacaaaac

SEQ ID NO: 613247 - DNA, 33 bp, Homo sapien
tgcttgcctgtgctaacgtcaaaacgcagcaaa

SEQ ID NO: 613248 - DNA, 33 bp, Homo sapien
tgcttgcctgtgctaaggtcaaaacgcagcaaa

SEQ ID NO: 613249 - DNA, 33 bp, Homo sapien
aatgaagtaacgattagctctttctcttaaggg

SEQ ID NO: 613250 - DNA, 33 bp, Homo sapien
aatgaagtaacgattatctctttctcttaaggg

SEQ ID NO: 613251 - DNA, 33 bp, Homo sapien
aactgcagtggcaccaactttcacagtaaaagc

SEQ ID NO: 613252 - DNA, 33 bp, Homo sapien
aactgcagtggcaccagctttcacagtaaaagc

SEQ ID NO: 613253 - DNA, 33 bp, Homo sapien
gggtctgctcttgcacagcaggagaagacttct

SEQ ID NO: 613254 - DNA, 33 bp, Homo sapien
gggtctgctcttgcacggcaggagaagacttct

SEQ ID NO: 613255 - DNA, 33 bp, Homo sapien
agtgatgatggtggaactgaaatatttggatta

SEQ ID NO: 613256 - DNA, 33 bp, Homo sapien
agtgatgatggtggaagtgaaatatttggatta

SEQ ID NO: 613257 - DNA, 33 bp, Homo sapien
ctctgggtgccttgtacgctacttaagaacttg

SEQ ID NO: 613258 - DNA, 33 bp, Homo sapien
ctctgggtgccttgtatgctacttaagaacttg

SEQ ID NO: 613259 - DNA, 33 bp, Homo sapien
ttatcactttagagacccagaaatatattgact

SEQ ID NO: 613260 - DNA, 33 bp, Homo sapien
ttatcactttagagactcagaaatatattgact

SEQ ID NO: 613261 - DNA, 33 bp, Homo sapien
gccaggcattgcgataagaacccaagaaccaac

SEQ ID NO: 613262 - DNA, 33 bp, Homo sapien
gccaggcattgcgataggaacccaagaaccaac

SEQ ID NO: 613263 - DNA, 33 bp, Homo sapien
atgatctgtttcataaaggattgactcaaattc

SEQ ID NO: 613264 - DNA, 33 bp, Homo sapien
atgatctgtttcataacggattgactcaaattc

SEQ ID NO: 613265 - DNA, 33 bp, Homo sapien
atccaattacactccacaggcaattgaaatctt

SEQ ID NO: 613266 - DNA, 33 bp, Homo sapien
atccaattacactccataggcaattgaaatctt

SEQ ID NO: 613267 - DNA, 33 bp, Homo sapien
gccgcatctgccatataaaggagatgtttctca

SEQ ID NO: 613268 - DNA, 33 bp, Homo sapien
gccgcatctgccatatgaaggagatgtttctca

SEQ ID NO: 613269 - DNA, 33 bp, Homo sapien
aaatgcatggaaaaaacatctgtagaggaaata

SEQ ID NO: 613270 - DNA, 33 bp, Homo sapien
aaatgcatggaaaaaagatctgtagaggaaata

SEQ ID NO: 613271 - DNA, 33 bp, Homo sapien
tctctttctgccttcacgtgaacagcgaataaa

SEQ ID NO: 613272 - DNA, 33 bp, Homo sapien
tctctttctgccttcatgtgaacagcgaataaa

SEQ ID NO: 613273 - DNA, 33 bp, Homo sapien
atgccgaatagattgacgaggaaagacagattc

SEQ ID NO: 613274 - DNA, 33 bp, Homo sapien
atgccgaatagattgaggaggaaagacagattc

SEQ ID NO: 613275 - DNA, 33 bp, Homo sapien
tagcaggggcaagggaactagaagaatcaagag

SEQ ID NO: 613276 - DNA, 33 bp, Homo sapien
tagcaggggcaagggagctagaagaatcaagag

SEQ ID NO: 613277 - DNA, 33 bp, Homo sapien
tgtaaagcttagaactcaaatcatactctgaaa

SEQ ID NO: 613278 - DNA, 33 bp, Homo sapien
tgtaaagcttagaactgaaatcatactctgaaa

SEQ ID NO: 613279 - DNA, 33 bp, Homo sapien
tttatttttaacattccaaccctgtattcaaac

SEQ ID NO: 613280 - DNA, 33 bp, Homo sapien
tttatttttaacattctaaccctgtattcaaac

SEQ ID NO: 613281 - DNA, 33 bp, Homo sapien
cagtcacttcaaatcaaccaccatacatacatc

SEQ ID NO: 613282 - DNA, 33 bp, Homo sapien
cagtcacttcaaatcagccaccatacatacatc

SEQ ID NO: 613283 - DNA, 33 bp, Homo sapien
cgtccccacccacaaacaatttgaagacaaaaa

SEQ ID NO: 613284 - DNA, 33 bp, Homo sapien
cgtccccacccacaaagaatttgaagacaaaaa

SEQ ID NO: 613285 - DNA, 33 bp, Homo sapien
tgatttatatttaaaaagagcagagattctggg

SEQ ID NO: 613286 - DNA, 33 bp, Homo sapien
tgatttatatttaaaacgagcagagattctggg

SEQ ID NO: 613287 - DNA, 33 bp, Homo sapien
atgaacttgaggatcacacttgtggccttttta

SEQ ID NO: 613288 - DNA, 33 bp, Homo sapien
atgaacttgaggatcagacttgtggccttttta

SEQ ID NO: 613289 - DNA, 33 bp, Homo sapien
gccattcttatttgagaacccttcctaagctgc

SEQ ID NO: 613290 - DNA, 33 bp, Homo sapien
gccattcttatttgaggacccttcctaagctgc

SEQ ID NO: 613291 - DNA, 33 bp, Homo sapien
cctccaattgaatcacagtattgcttttgtgac

SEQ ID NO: 613292 - DNA, 33 bp, Homo sapien
cctccaattgaatcactgtattgcttttgtgac

SEQ ID NO: 613293 - DNA, 33 bp, Homo sapien
agtcaatctaacaccagaaatcctcctcttaac

SEQ ID NO: 613294 - DNA, 33 bp, Homo sapien
agtcaatctaacaccataaatcctcctcttaac

SEQ ID NO: 613295 - DNA, 33 bp, Homo sapien
tttccagggagaagacaagtcaactacaagaca

SEQ ID NO: 613296 - DNA, 33 bp, Homo sapien
tttccagggagaagacgagtcaactacaagaca

SEQ ID NO: 613297 - DNA, 33 bp, Homo sapien
gcaagtattctgactgccagaaggaagtcaatc

SEQ ID NO: 613298 - DNA, 33 bp, Homo sapien
gcaagtattctgactgtcagaaggaagtcaatc

SEQ ID NO: 613299 - DNA, 33 bp, Homo sapien
ggctcgtgcgaggagacaaaagccctgatggct

SEQ ID NO: 613300 - DNA, 33 bp, Homo sapien
ggctcgtgcgaggagagaaaagccctgatggct

SEQ ID NO: 613301 - DNA, 33 bp, Homo sapien
aatgttgaatcccagacgagcttttagtcccct

SEQ ID NO: 613302 - DNA, 33 bp, Homo sapien
aatgttgaatcccagatgagcttttagtcccct

SEQ ID NO: 613303 - DNA, 33 bp, Homo sapien
aggaaaaaatgacataaaagcagatgacaggtt

SEQ ID NO: 613304 - DNA, 33 bp, Homo sapien
aggaaaaaatgacatagaagcagatgacaggtt

SEQ ID NO: 613305 - DNA, 33 bp, Homo sapien
gaccttgttcctatacaggctgtcatttactag

SEQ ID NO: 613306 - DNA, 33 bp, Homo sapien
gaccttgttcctatactggctgtcatttactag

SEQ ID NO: 613307 - DNA, 33 bp, Homo sapien
caatcttgaagccaaacagagagtaaagggagc

SEQ ID NO: 613308 - DNA, 33 bp, Homo sapien
caatcttgaagccaaagagagagtaaagggagc

SEQ ID NO: 613309 - DNA, 33 bp, Homo sapien
ctgagtttatgtaatacgcagcagtactgagaa

SEQ ID NO: 613310 - DNA, 33 bp, Homo sapien
ctgagtttatgtaatatgcagcagtactgagaa

SEQ ID NO: 613311 - DNA, 33 bp, Homo sapien
ctctaatctcagtttccacttggagtctagcat

SEQ ID NO: 613312 - DNA, 33 bp, Homo sapien
ctctaatctcagtttcgacttggagtctagcat

SEQ ID NO: 613313 - DNA, 33 bp, Homo sapien
atcaacactcccagtaagtcacgtaattaaggt

SEQ ID NO: 613314 - DNA, 33 bp, Homo sapien
atcaacactcccagtacgtcacgtaattaaggt

SEQ ID NO: 613315 - DNA, 33 bp, Homo sapien
aggagcagagatgaaacaagggtctcaaagtct

SEQ ID NO: 613316 - DNA, 33 bp, Homo sapien
aggagcagagatgaaagaagggtctcaaagtct

SEQ ID NO: 613317 - DNA, 33 bp, Homo sapien
tattgagcgggtccagccctatgacttgaaatg

SEQ ID NO: 613318 - DNA, 33 bp, Homo sapien
tattgagcgggtccagtcctatgacttgaaatg

SEQ ID NO: 613319 - DNA, 33 bp, Homo sapien
cctaattagccagacactaaagatctagtttac

SEQ ID NO: 613320 - DNA, 33 bp, Homo sapien
cctaattagccagacattaaagatctagtttac

SEQ ID NO: 613321 - DNA, 33 bp, Homo sapien
cacacactgaggataaaattcaaagttgtttcc

SEQ ID NO: 613322 - DNA, 33 bp, Homo sapien
cacacactgaggataagattcaaagttgtttcc

SEQ ID NO: 613323 - DNA, 33 bp, Homo sapien
acaaataaatacactacgatgtcagaaagtggc

SEQ ID NO: 613324 - DNA, 33 bp, Homo sapien
acaaataaatacactatgatgtcagaaagtggc

SEQ ID NO: 613325 - DNA, 33 bp, Homo sapien
aaacacattgatgagaaatacacagtcttgtgt

SEQ ID NO: 613326 - DNA, 33 bp, Homo sapien
aaacacattgatgagacatacacagtcttgtgt

SEQ ID NO: 613327 - DNA, 33 bp, Homo sapien
gtggctctatgaacaacggtaactcaaatactg

SEQ ID NO: 613328 - DNA, 33 bp, Homo sapien
gtggctctatgaacaatggtaactcaaatactg

SEQ ID NO: 613329 - DNA, 33 bp, Homo sapien
tttcagaaacctaaatgactcaagggaagtgaa

SEQ ID NO: 613330 - DNA, 33 bp, Homo sapien
tttcagaaacctaaattactcaagggaagtgaa

SEQ ID NO: 613331 - DNA, 33 bp, Homo sapien
gtacaaggactacctacattaaatgcatattgg

SEQ ID NO: 613332 - DNA, 33 bp, Homo sapien
gtacaaggactacctagattaaatgcatattgg

SEQ ID NO: 613333 - DNA, 33 bp, Homo sapien
aggatcaggtactgcagtcagttgccatgtttt

SEQ ID NO: 613334 - DNA, 33 bp, Homo sapien
aggatcaggtactgcattcagttgccatgtttt

SEQ ID NO: 613335 - DNA, 33 bp, Homo sapien
tggaccactctataccaagtcaccttttgctaa

SEQ ID NO: 613336 - DNA, 33 bp, Homo sapien
tggaccactctataccgagtcaccttttgctaa

SEQ ID NO: 613337 - DNA, 33 bp, Homo sapien
acacattaatcaactgcaaacatgaggagaaac

SEQ ID NO: 613338 - DNA, 33 bp, Homo sapien
acacattaatcaactggaaacatgaggagaaac

SEQ ID NO: 613339 - DNA, 33 bp, Homo sapien
cactgctgatgaatgcacacactggggccacta

SEQ ID NO: 613340 - DNA, 33 bp, Homo sapien
cactgctgatgaatgctcacactggggccacta

SEQ ID NO: 613341 - DNA, 33 bp, Homo sapien
cagttttctggctaaactaatattcagtcttaa

SEQ ID NO: 613342 - DNA, 33 bp, Homo sapien
cagttttctggctaaagtaatattcagtcttaa

SEQ ID NO: 613343 - DNA, 33 bp, Homo sapien
caaatataacacagcaatatcttaaaaacactg

SEQ ID NO: 613344 - DNA, 33 bp, Homo sapien
caaatataacacagcagtatcttaaaaacactg

SEQ ID NO: 613345 - DNA, 33 bp, Homo sapien
cttgggcgaaacagagcattgcattgcattaag

SEQ ID NO: 613346 - DNA, 33 bp, Homo sapien
cttgggcgaaacagagtattgcattgcattaag

SEQ ID NO: 613347 - DNA, 33 bp, Homo sapien
aaaggtcattttactcgctatagcttactattg

SEQ ID NO: 613348 - DNA, 33 bp, Homo sapien
aaaggtcattttactctctatagcttactattg

SEQ ID NO: 613349 - DNA, 33 bp, Homo sapien
gcttttcctactcacagattttggaatactcct

SEQ ID NO: 613350 - DNA, 33 bp, Homo sapien
gcttttcctactcacatattttggaatactcct

SEQ ID NO: 613351 - DNA, 33 bp, Homo sapien
cctatgtaattagtaaggtttacatagcaggca

SEQ ID NO: 613352 - DNA, 33 bp, Homo sapien
cctatgtaattagtaatgtttacatagcaggca

SEQ ID NO: 613353 - DNA, 33 bp, Homo sapien
tgaaattcagagtacaagacttcctgatttggt

SEQ ID NO: 613354 - DNA, 33 bp, Homo sapien
tgaaattcagagtacaggacttcctgatttggt

SEQ ID NO: 613355 - DNA, 33 bp, Homo sapien
attatggtgtatccacagcttattctgggacag

SEQ ID NO: 613356 - DNA, 33 bp, Homo sapien
attatggtgtatccactgcttattctgggacag

SEQ ID NO: 613357 - DNA, 33 bp, Homo sapien
tgatatgccatgatgcacttacttcactatgcc

SEQ ID NO: 613358 - DNA, 33 bp, Homo sapien
tgatatgccatgatgcccttacttcactatgcc

SEQ ID NO: 613359 - DNA, 33 bp, Homo sapien
tccatcagcaggtgaacagattagcaaattgtg

SEQ ID NO: 613360 - DNA, 33 bp, Homo sapien
tccatcagcaggtgaatagattagcaaattgtg

SEQ ID NO: 613361 - DNA, 33 bp, Homo sapien
attcaacgtcttcctaagaaattcaggagaaca

SEQ ID NO: 613362 - DNA, 33 bp, Homo sapien
attcaacgtcttcctatgaaattcaggagaaca

SEQ ID NO: 613363 - DNA, 33 bp, Homo sapien
gtcattatgtttatgagtcaaatatttctcctg

SEQ ID NO: 613364 - DNA, 33 bp, Homo sapien
gtcattatgtttatgattcaaatatttctcctg

SEQ ID NO: 613365 - DNA, 33 bp, Homo sapien
agttcagctttcagacaccttgtttttcttcat

SEQ ID NO: 613366 - DNA, 33 bp, Homo sapien
agttcagctttcagactccttgtttttcttcat

SEQ ID NO: 613367 - DNA, 33 bp, Homo sapien
agtctgatgttcagccaaaaactcaagggagcc

SEQ ID NO: 613368 - DNA, 33 bp, Homo sapien
agtctgatgttcagcccaaaactcaagggagcc

SEQ ID NO: 613369 - DNA, 33 bp, Homo sapien
tctgatacattggcccaggctctgagtttcaca

SEQ ID NO: 613370 - DNA, 33 bp, Homo sapien
tctgatacattggccccggctctgagtttcaca

SEQ ID NO: 613371 - DNA, 33 bp, Homo sapien
catgccacgacaatgacacaggtcacatgggta

SEQ ID NO: 613372 - DNA, 33 bp, Homo sapien
catgccacgacaatgatacaggtcacatgggta

SEQ ID NO: 613373 - DNA, 33 bp, Homo sapien
agcctcatgtgttaccgccatagcctcagtaac

SEQ ID NO: 613374 - DNA, 33 bp, Homo sapien
agcctcatgtgttacctccatagcctcagtaac

SEQ ID NO: 613375 - DNA, 33 bp, Homo sapien
tctggctattggattacagtatcaacgcactga

SEQ ID NO: 613376 - DNA, 33 bp, Homo sapien
tctggctattggattatagtatcaacgcactga

SEQ ID NO: 613377 - DNA, 33 bp, Homo sapien
aggctagaataaatcccatggtgttggaatgga

SEQ ID NO: 613378 - DNA, 33 bp, Homo sapien
aggctagaataaatcctatggtgttggaatgga

SEQ ID NO: 613379 - DNA, 33 bp, Homo sapien
tctgttctttcattcacgtgtgatgtacgcatc

SEQ ID NO: 613380 - DNA, 33 bp, Homo sapien
tctgttctttcattcatgtgtgatgtacgcatc

SEQ ID NO: 613381 - DNA, 33 bp, Homo sapien
cagtcacatggcttaacagtagttatgggctta

SEQ ID NO: 613382 - DNA, 33 bp, Homo sapien
cagtcacatggcttaatagtagttatgggctta

SEQ ID NO: 613383 - DNA, 33 bp, Homo sapien
ccaagtctgtcatttccaaactggtcaacatca

SEQ ID NO: 613384 - DNA, 33 bp, Homo sapien
ccaagtctgtcatttctaaactggtcaacatca

SEQ ID NO: 613385 - DNA, 33 bp, Homo sapien
ggatcttagttaatcggagaaggtcagagaagt

SEQ ID NO: 613386 - DNA, 33 bp, Homo sapien
ggatcttagttaatcgtagaaggtcagagaagt

SEQ ID NO: 613387 - DNA, 33 bp, Homo sapien
ctgtgtaaagaaaagcagaaagaacagtacgat

SEQ ID NO: 613388 - DNA, 33 bp, Homo sapien
ctgtgtaaagaaaagcggaaagaacagtacgat

SEQ ID NO: 613389 - DNA, 33 bp, Homo sapien
tggtcctcctttccaaactcacttctgacaact

SEQ ID NO: 613390 - DNA, 33 bp, Homo sapien
tggtcctcctttccaacctcacttctgacaact

SEQ ID NO: 613391 - DNA, 33 bp, Homo sapien
ttcaaggacacctagacagcttgtacaacttta

SEQ ID NO: 613392 - DNA, 33 bp, Homo sapien
ttcaaggacacctagatagcttgtacaacttta

SEQ ID NO: 613393 - DNA, 33 bp, Homo sapien
agaacggaaggaagaacgtgagtgagatcccta

SEQ ID NO: 613394 - DNA, 33 bp, Homo sapien
agaacggaaggaagaatgtgagtgagatcccta

SEQ ID NO: 613395 - DNA, 33 bp, Homo sapien
taggaacaatgaaagaacagattttgctttctt

SEQ ID NO: 613396 - DNA, 33 bp, Homo sapien
taggaacaatgaaagaccagattttgctttctt

SEQ ID NO: 613397 - DNA, 33 bp, Homo sapien
ctaattataagaactacgtgcatatggtgttta

SEQ ID NO: 613398 - DNA, 33 bp, Homo sapien
ctaattataagaactatgtgcatatggtgttta

SEQ ID NO: 613399 - DNA, 33 bp, Homo sapien
ggccttcaaacaggtaactcaggtcacccacgt

SEQ ID NO: 613400 - DNA, 33 bp, Homo sapien
ggccttcaaacaggtagctcaggtcacccacgt

SEQ ID NO: 613401 - DNA, 33 bp, Homo sapien
acatttatacctaaaaccagaagaggatgctcc

SEQ ID NO: 613402 - DNA, 33 bp, Homo sapien
acatttatacctaaaagcagaagaggatgctcc

SEQ ID NO: 613403 - DNA, 33 bp, Homo sapien
ctttatttatagctaccgaaaggcctgacctgc

SEQ ID NO: 613404 - DNA, 33 bp, Homo sapien
ctttatttatagctactgaaaggcctgacctgc

SEQ ID NO: 613405 - DNA, 33 bp, Homo sapien
tagtctaaatgacaggcaaagtttggatgataa

SEQ ID NO: 613406 - DNA, 33 bp, Homo sapien
tagtctaaatgacaggtaaagtttggatgataa

SEQ ID NO: 613407 - DNA, 33 bp, Homo sapien
gatatccaaatggccaataaatgtgacaaagtg

SEQ ID NO: 613408 - DNA, 33 bp, Homo sapien
gatatccaaatggccagtaaatgtgacaaagtg

SEQ ID NO: 613409 - DNA, 33 bp, Homo sapien
atcacaatttagttacagaatattttcatcacc

SEQ ID NO: 613410 - DNA, 33 bp, Homo sapien
atcacaatttagttactgaatattttcatcacc

SEQ ID NO: 613411 - DNA, 33 bp, Homo sapien
atctgcaaggcgtgtaacaatgaagaatgcccc

SEQ ID NO: 613412 - DNA, 33 bp, Homo sapien
atctgcaaggcgtgtaccaatgaagaatgcccc

SEQ ID NO: 613413 - DNA, 33 bp, Homo sapien
catattccaagaatgaaattaataactgatttt

SEQ ID NO: 613414 - DNA, 33 bp, Homo sapien
catattccaagaatgatattaataactgatttt

SEQ ID NO: 613415 - DNA, 33 bp, Homo sapien
aaatcttattctaggcagcagaattaagcagag

SEQ ID NO: 613416 - DNA, 33 bp, Homo sapien
aaatcttattctaggcggcagaattaagcagag

SEQ ID NO: 613417 - DNA, 33 bp, Homo sapien
aataactgactatacacgttttggggtgaggag

SEQ ID NO: 613418 - DNA, 33 bp, Homo sapien
aataactgactatacatgttttggggtgaggag

SEQ ID NO: 613419 - DNA, 33 bp, Homo sapien
atattttcttatactgaatggttctgttaactg

SEQ ID NO: 613420 - DNA, 33 bp, Homo sapien
atattttcttatactggatggttctgttaactg

SEQ ID NO: 613421 - DNA, 33 bp, Homo sapien
gggatgtaaaagaggcagaacaagatcaggagt

SEQ ID NO: 613422 - DNA, 33 bp, Homo sapien
gggatgtaaaagaggcggaacaagatcaggagt

SEQ ID NO: 613423 - DNA, 33 bp, Homo sapien
tggaagagcaaaaggaaacgatggctcaccatc

SEQ ID NO: 613424 - DNA, 33 bp, Homo sapien
tggaagagcaaaaggacacgatggctcaccatc

SEQ ID NO: 613425 - DNA, 33 bp, Homo sapien
gtagccacctgctaaccatccaaacgcaacagg

SEQ ID NO: 613426 - DNA, 33 bp, Homo sapien
gtagccacctgctaactatccaaacgcaacagg

SEQ ID NO: 613427 - DNA, 33 bp, Homo sapien
catctagtcaagagacactgctttctttgagct

SEQ ID NO: 613428 - DNA, 33 bp, Homo sapien
catctagtcaagagacgctgctttctttgagct

SEQ ID NO: 613429 - DNA, 33 bp, Homo sapien
catgaagttcacctggcagccagaatctcattg

SEQ ID NO: 613430 - DNA, 33 bp, Homo sapien
catgaagttcacctgggagccagaatctcattg

SEQ ID NO: 613431 - DNA, 33 bp, Homo sapien
acaattctgtgacttgcaattaccttcccgtca

SEQ ID NO: 613432 - DNA, 33 bp, Homo sapien
acaattctgtgacttggaattaccttcccgtca

SEQ ID NO: 613433 - DNA, 33 bp, Homo sapien
cttacctctttgcacaacattaatagggggtgg

SEQ ID NO: 613434 - DNA, 33 bp, Homo sapien
cttacctctttgcacagcattaatagggggtgg

SEQ ID NO: 613435 - DNA, 33 bp, Homo sapien
gattgcctagtgcagcaaaagttgtaatataag

SEQ ID NO: 613436 - DNA, 33 bp, Homo sapien
gattgcctagtgcagcgaaagttgtaatataag

SEQ ID NO: 613437 - DNA, 33 bp, Homo sapien
ctagcattaagtgagaaggatgtctagatgggg

SEQ ID NO: 613438 - DNA, 33 bp, Homo sapien
ctagcattaagtgagagggatgtctagatgggg

SEQ ID NO: 613439 - DNA, 33 bp, Homo sapien
atcaattgcaatgtaaagttcaaactgtgcaaa

SEQ ID NO: 613440 - DNA, 33 bp, Homo sapien
atcaattgcaatgtaaggttcaaactgtgcaaa

SEQ ID NO: 613441 - DNA, 33 bp, Homo sapien
tgaagagaatattgaccgggtgcttccaaaagg

SEQ ID NO: 613442 - DNA, 33 bp, Homo sapien
tgaagagaatattgactgggtgcttccaaaagg

SEQ ID NO: 613443 - DNA, 33 bp, Homo sapien
tgaatgtaatcactcaataaggtttaagatgca

SEQ ID NO: 613444 - DNA, 33 bp, Homo sapien
tgaatgtaatcactcagtaaggtttaagatgca

SEQ ID NO: 613445 - DNA, 33 bp, Homo sapien
aaacaaagtgaaaacaagtcaactttcccacca

SEQ ID NO: 613446 - DNA, 33 bp, Homo sapien
aaacaaagtgaaaacacgtcaactttcccacca

SEQ ID NO: 613447 - DNA, 33 bp, Homo sapien
gtgaattgctttcctacgctttaaagtgctgca

SEQ ID NO: 613448 - DNA, 33 bp, Homo sapien
gtgaattgctttcctatgctttaaagtgctgca

SEQ ID NO: 613449 - DNA, 33 bp, Homo sapien
aggccaatctcacacaccagcaggcgattcata

SEQ ID NO: 613450 - DNA, 33 bp, Homo sapien
aggccaatctcacacatcagcaggcgattcata

SEQ ID NO: 613451 - DNA, 33 bp, Homo sapien
caattctggacagacgacctttcctgcatgagt

SEQ ID NO: 613452 - DNA, 33 bp, Homo sapien
caattctggacagacggcctttcctgcatgagt

SEQ ID NO: 613453 - DNA, 33 bp, Homo sapien
ctgtaatggctgatgaacattataatttataat

SEQ ID NO: 613454 - DNA, 33 bp, Homo sapien
ctgtaatggctgatgaccattataatttataat

SEQ ID NO: 613455 - DNA, 33 bp, Homo sapien
ttagcatgtgctaggacaaattaagcgtacact

SEQ ID NO: 613456 - DNA, 33 bp, Homo sapien
ttagcatgtgctaggagaaattaagcgtacact

SEQ ID NO: 613457 - DNA, 33 bp, Homo sapien
cctaaataacctgtacccaaggcaatgaaattt

SEQ ID NO: 613458 - DNA, 33 bp, Homo sapien
cctaaataacctgtactcaaggcaatgaaattt

SEQ ID NO: 613459 - DNA, 33 bp, Homo sapien
ttgtgcctcttatcaccaacctggagggactca

SEQ ID NO: 613460 - DNA, 33 bp, Homo sapien
ttgtgcctcttatcactaacctggagggactca

SEQ ID NO: 613461 - DNA, 33 bp, Homo sapien
tggttttactgttgaaaattgctggaaacagtg

SEQ ID NO: 613462 - DNA, 33 bp, Homo sapien
tggttttactgttgaatattgctggaaacagtg

SEQ ID NO: 613463 - DNA, 33 bp, Homo sapien
aaagactagtgtccaaattgcatccagtgataa

SEQ ID NO: 613464 - DNA, 33 bp, Homo sapien
aaagactagtgtccaacttgcatccagtgataa

SEQ ID NO: 613465 - DNA, 33 bp, Homo sapien
agtaaagaatagtggcagaaggtacacatgcat

SEQ ID NO: 613466 - DNA, 33 bp, Homo sapien
agtaaagaatagtggcggaaggtacacatgcat

SEQ ID NO: 613467 - DNA, 33 bp, Homo sapien
atttccatcagcttctaaaagttggtccacctt

SEQ ID NO: 613468 - DNA, 33 bp, Homo sapien
atttccatcagcttctgaaagttggtccacctt

SEQ ID NO: 613469 - DNA, 33 bp, Homo sapien
aaaaatgagggtcttaccatctgccatgtcagc

SEQ ID NO: 613470 - DNA, 33 bp, Homo sapien
aaaaatgagggtcttagcatctgccatgtcagc

SEQ ID NO: 613471 - DNA, 33 bp, Homo sapien
aaatgtgatttggagacgactggagggtgagga

SEQ ID NO: 613472 - DNA, 33 bp, Homo sapien
aaatgtgatttggagatgactggagggtgagga

SEQ ID NO: 613473 - DNA, 33 bp, Homo sapien
gtcatatcgaatcaaaatctacatttaaaatct

SEQ ID NO: 613474 - DNA, 33 bp, Homo sapien
gtcatatcgaatcaaagtctacatttaaaatct

SEQ ID NO: 613475 - DNA, 33 bp, Homo sapien
aaccatccatgaagtacgattattgcccatttt

SEQ ID NO: 613476 - DNA, 33 bp, Homo sapien
aaccatccatgaagtatgattattgcccatttt

SEQ ID NO: 613477 - DNA, 33 bp, Homo sapien
aatgtctctgaaactcaaatcttctcatctgca

SEQ ID NO: 613478 - DNA, 33 bp, Homo sapien
aatgtctctgaaactcgaatcttctcatctgca

SEQ ID NO: 613479 - DNA, 33 bp, Homo sapien
aaggtgatcctgtgagcagctaggacaggagag

SEQ ID NO: 613480 - DNA, 33 bp, Homo sapien
aaggtgatcctgtgaggagctaggacaggagag

SEQ ID NO: 613481 - DNA, 33 bp, Homo sapien
gagaaagggcatgaccaagaagtgcattgtggg

SEQ ID NO: 613482 - DNA, 33 bp, Homo sapien
gagaaagggcatgaccgagaagtgcattgtggg

SEQ ID NO: 613483 - DNA, 33 bp, Homo sapien
tgcttcttccagtgtaccttctgccaatttcaa

SEQ ID NO: 613484 - DNA, 33 bp, Homo sapien
tgcttcttccagtgtatcttctgccaatttcaa

SEQ ID NO: 613485 - DNA, 33 bp, Homo sapien
taaatgaagaagctcaaaatgaacaggtagctc

SEQ ID NO: 613486 - DNA, 33 bp, Homo sapien
taaatgaagaagctcagaatgaacaggtagctc

SEQ ID NO: 613487 - DNA, 33 bp, Homo sapien
aactttctctaacattaaataggaatcacagga

SEQ ID NO: 613488 - DNA, 33 bp, Homo sapien
aactttctctaacattgaataggaatcacagga

SEQ ID NO: 613489 - DNA, 33 bp, Homo sapien
ggctgctgggtttagcactgaccatttgaagcc

SEQ ID NO: 613490 - DNA, 33 bp, Homo sapien
ggctgctgggtttagcgctgaccatttgaagcc

SEQ ID NO: 613491 - DNA, 33 bp, Homo sapien
tgagaaagtggtaagaataaaagacagatgaaa

SEQ ID NO: 613492 - DNA, 33 bp, Homo sapien
tgagaaagtggtaagagtaaaagacagatgaaa

SEQ ID NO: 613493 - DNA, 33 bp, Homo sapien
ggtggattggtattgacggcctgtgccagtgtc

SEQ ID NO: 613494 - DNA, 33 bp, Homo sapien
ggtggattggtattgatggcctgtgccagtgtc

SEQ ID NO: 613495 - DNA, 33 bp, Homo sapien
actgaggaagagttacaaatagatcttaaatgg

SEQ ID NO: 613496 - DNA, 33 bp, Homo sapien
actgaggaagagttacgaatagatcttaaatgg

SEQ ID NO: 613497 - DNA, 33 bp, Homo sapien
tgatacattcattctccataaattgttttatga

SEQ ID NO: 613498 - DNA, 33 bp, Homo sapien
tgatacattcattctctataaattgttttatga

SEQ ID NO: 613499 - DNA, 33 bp, Homo sapien
tctctgctttatttacactagaacacacacata

SEQ ID NO: 613500 - DNA, 33 bp, Homo sapien
tctctgctttatttactctagaacacacacata

SEQ ID NO: 613501 - DNA, 33 bp, Homo sapien
attttattattcgccacgtctgttttcttcacc

SEQ ID NO: 613502 - DNA, 33 bp, Homo sapien
attttattattcgccatgtctgttttcttcacc

SEQ ID NO: 613503 - DNA, 33 bp, Homo sapien
gttttatttctcgaacaagcttttcgtgagtac

SEQ ID NO: 613504 - DNA, 33 bp, Homo sapien
gttttatttctcgaacgagcttttcgtgagtac

SEQ ID NO: 613505 - DNA, 33 bp, Homo sapien
agtgagccttgtaatggatcccttgggcatcag

SEQ ID NO: 613506 - DNA, 33 bp, Homo sapien
agtgagccttgtaatgtatcccttgggcatcag

SEQ ID NO: 613507 - DNA, 33 bp, Homo sapien
ttagaatagcactgcccaatgattgccagctat

SEQ ID NO: 613508 - DNA, 33 bp, Homo sapien
ttagaatagcactgccgaatgattgccagctat

SEQ ID NO: 613509 - DNA, 33 bp, Homo sapien
tgaacacggcaagtaacaacagagagaaaacgt

SEQ ID NO: 613510 - DNA, 33 bp, Homo sapien
tgaacacggcaagtaataacagagagaaaacgt

SEQ ID NO: 613511 - DNA, 33 bp, Homo sapien
ccctgtaatgctgaaacggaattaaaggtatca

SEQ ID NO: 613512 - DNA, 33 bp, Homo sapien
ccctgtaatgctgaaatggaattaaaggtatca

SEQ ID NO: 613513 - DNA, 33 bp, Homo sapien
acagcctgtctagatcagatacttcacctttcc

SEQ ID NO: 613514 - DNA, 33 bp, Homo sapien
acagcctgtctagatcggatacttcacctttcc

SEQ ID NO: 613515 - DNA, 33 bp, Homo sapien
ccaaatcaatgaaagccctacttctgggcagta

SEQ ID NO: 613516 - DNA, 33 bp, Homo sapien
ccaaatcaatgaaagctctacttctgggcagta

SEQ ID NO: 613517 - DNA, 33 bp, Homo sapien
ccggctcatgcataaaccagtaagacaggagtt

SEQ ID NO: 613518 - DNA, 33 bp, Homo sapien
ccggctcatgcataaatcagtaagacaggagtt

SEQ ID NO: 613519 - DNA, 33 bp, Homo sapien
aggtgactcatctgaacgactttaactccctaa

SEQ ID NO: 613520 - DNA, 33 bp, Homo sapien
aggtgactcatctgaatgactttaactccctaa

SEQ ID NO: 613521 - DNA, 33 bp, Homo sapien
cccaggattacaggtacgccatgtagcagcaca

SEQ ID NO: 613522 - DNA, 33 bp, Homo sapien
cccaggattacaggtatgccatgtagcagcaca

SEQ ID NO: 613523 - DNA, 33 bp, Homo sapien
aaaccatgtcctgagcagcactgaaagtagcac

SEQ ID NO: 613524 - DNA, 33 bp, Homo sapien
aaaccatgtcctgagcggcactgaaagtagcac

SEQ ID NO: 613525 - DNA, 33 bp, Homo sapien
tcctttgatgaggctcaatggtttgtaaagtgt

SEQ ID NO: 613526 - DNA, 33 bp, Homo sapien
tcctttgatgaggctcgatggtttgtaaagtgt

SEQ ID NO: 613527 - DNA, 33 bp, Homo sapien
gggaaatcgttagaaaagcagattcatgggacc

SEQ ID NO: 613528 - DNA, 33 bp, Homo sapien
gggaaatcgttagaaacgcagattcatgggacc

SEQ ID NO: 613529 - DNA, 33 bp, Homo sapien
gtgttacacactacaccgtatccacagattcgg

SEQ ID NO: 613530 - DNA, 33 bp, Homo sapien
gtgttacacactacactgtatccacagattcgg

SEQ ID NO: 613531 - DNA, 33 bp, Homo sapien
ttgacttgaatgctcaccctaaaatccaaaact

SEQ ID NO: 613532 - DNA, 33 bp, Homo sapien
ttgacttgaatgctcagcctaaaatccaaaact

SEQ ID NO: 613533 - DNA, 33 bp, Homo sapien
agattttgataacatacgtgcttgttagaagac

SEQ ID NO: 613534 - DNA, 33 bp, Homo sapien
agattttgataacatatgtgcttgttagaagac

SEQ ID NO: 613535 - DNA, 33 bp, Homo sapien
ttgtggcaaagataagcagtgagtgagctcctg

SEQ ID NO: 613536 - DNA, 33 bp, Homo sapien
ttgtggcaaagataaggagtgagtgagctcctg

SEQ ID NO: 613537 - DNA, 33 bp, Homo sapien
agtcattgccgtgaccaatgccatgaaggtttc

SEQ ID NO: 613538 - DNA, 33 bp, Homo sapien
agtcattgccgtgaccgatgccatgaaggtttc

SEQ ID NO: 613539 - DNA, 33 bp, Homo sapien
ctttgagtgtctgtcaagaaatgtgtccatttg

SEQ ID NO: 613540 - DNA, 33 bp, Homo sapien
ctttgagtgtctgtcacgaaatgtgtccatttg

SEQ ID NO: 613541 - DNA, 33 bp, Homo sapien
taacttgtaagtcaaagaggaaggcataaggaa

SEQ ID NO: 613542 - DNA, 33 bp, Homo sapien
taacttgtaagtcaaataggaaggcataaggaa

SEQ ID NO: 613543 - DNA, 33 bp, Homo sapien
acaaatctgtaagaaacctctaggacagggaaa

SEQ ID NO: 613544 - DNA, 33 bp, Homo sapien
acaaatctgtaagaaatctctaggacagggaaa

SEQ ID NO: 613545 - DNA, 33 bp, Homo sapien
acttactattcctttacgtagaacatccacctc

SEQ ID NO: 613546 - DNA, 33 bp, Homo sapien
acttactattcctttatgtagaacatccacctc

SEQ ID NO: 613547 - DNA, 33 bp, Homo sapien
aagttagttaagtgaacgcaggaggaggtggat

SEQ ID NO: 613548 - DNA, 33 bp, Homo sapien
aagttagttaagtgaatgcaggaggaggtggat

SEQ ID NO: 613549 - DNA, 33 bp, Homo sapien
tatgtaaagcttcccaggagaaaggatacctta

SEQ ID NO: 613550 - DNA, 33 bp, Homo sapien
tatgtaaagcttcccatgagaaaggatacctta

SEQ ID NO: 613551 - DNA, 33 bp, Homo sapien
aaactggaaacactgaagttattaaagaggtag

SEQ ID NO: 613552 - DNA, 33 bp, Homo sapien
aaactggaaacactgacgttattaaagaggtag

SEQ ID NO: 613553 - DNA, 33 bp, Homo sapien
acttgagttttattagaacacggccatgttgct

SEQ ID NO: 613554 - DNA, 33 bp, Homo sapien
acttgagttttattaggacacggccatgttgct

SEQ ID NO: 613555 - DNA, 33 bp, Homo sapien
actatctgtccctttgcaggaagtttgcagcct

SEQ ID NO: 613556 - DNA, 33 bp, Homo sapien
actatctgtccctttgtaggaagtttgcagcct

SEQ ID NO: 613557 - DNA, 33 bp, Homo sapien
agctcctgatatggaaacagcggtttgaactgt

SEQ ID NO: 613558 - DNA, 33 bp, Homo sapien
agctcctgatatggaaccagcggtttgaactgt

SEQ ID NO: 613559 - DNA, 33 bp, Homo sapien
cacaattacatttcacagcagttcagaggtttt

SEQ ID NO: 613560 - DNA, 33 bp, Homo sapien
cacaattacatttcacggcagttcagaggtttt

SEQ ID NO: 613561 - DNA, 33 bp, Homo sapien
aagtaagaggttttgacgcccttcatttcattc

SEQ ID NO: 613562 - DNA, 33 bp, Homo sapien
aagtaagaggttttgatgcccttcatttcattc

SEQ ID NO: 613563 - DNA, 33 bp, Homo sapien
aggctacatttgacctaaggatctgaagtttga

SEQ ID NO: 613564 - DNA, 33 bp, Homo sapien
aggctacatttgacctgaggatctgaagtttga

SEQ ID NO: 613565 - DNA, 33 bp, Homo sapien
acataaagtgtagaaaaaatgctaatatgatag

SEQ ID NO: 613566 - DNA, 33 bp, Homo sapien
acataaagtgtagaaagaatgctaatatgatag

SEQ ID NO: 613567 - DNA, 33 bp, Homo sapien
ctgaagtccaaccccacaactacagagtggcta

SEQ ID NO: 613568 - DNA, 33 bp, Homo sapien
ctgaagtccaaccccataactacagagtggcta

SEQ ID NO: 613569 - DNA, 33 bp, Homo sapien
acaggcaattacaatccagcagtgaagtccctg

SEQ ID NO: 613570 - DNA, 33 bp, Homo sapien
acaggcaattacaatctagcagtgaagtccctg

SEQ ID NO: 613571 - DNA, 33 bp, Homo sapien
attttgcttagatccacgtgcttctattaaaac

SEQ ID NO: 613572 - DNA, 33 bp, Homo sapien
attttgcttagatccatgtgcttctattaaaac

SEQ ID NO: 613573 - DNA, 33 bp, Homo sapien
ctctgggttttgaaaacgtgattaccagagttg

SEQ ID NO: 613574 - DNA, 33 bp, Homo sapien
ctctgggttttgaaaatgtgattaccagagttg

SEQ ID NO: 613575 - DNA, 33 bp, Homo sapien
cattatacataacattcaacttctatggtggta

SEQ ID NO: 613576 - DNA, 33 bp, Homo sapien
cattatacataacattgaacttctatggtggta

SEQ ID NO: 613577 - DNA, 33 bp, Homo sapien
actgctgcctactctacgttcaattgagctgga

SEQ ID NO: 613578 - DNA, 33 bp, Homo sapien
actgctgcctactctatgttcaattgagctgga

SEQ ID NO: 613579 - DNA, 33 bp, Homo sapien
atgtccaatcagatgcactttcctctagttaaa

SEQ ID NO: 613580 - DNA, 33 bp, Homo sapien
atgtccaatcagatgcgctttcctctagttaaa

SEQ ID NO: 613581 - DNA, 33 bp, Homo sapien
tgattgttgtacctccagaccaaattaactgct

SEQ ID NO: 613582 - DNA, 33 bp, Homo sapien
tgattgttgtacctccggaccaaattaactgct

SEQ ID NO: 613583 - DNA, 33 bp, Homo sapien
tgtaaaagcacaacacaaacagggaaagcagct

SEQ ID NO: 613584 - DNA, 33 bp, Homo sapien
tgtaaaagcacaacacgaacagggaaagcagct

SEQ ID NO: 613585 - DNA, 33 bp, Homo sapien
atcttatgcgctggtcaaaatgttttgtcatca

SEQ ID NO: 613586 - DNA, 33 bp, Homo sapien
atcttatgcgctggtcgaaatgttttgtcatca

SEQ ID NO: 613587 - DNA, 33 bp, Homo sapien
tgttgttggcataacaccaggtctgtatacaga

SEQ ID NO: 613588 - DNA, 33 bp, Homo sapien
tgttgttggcataacatcaggtctgtatacaga

SEQ ID NO: 613589 - DNA, 33 bp, Homo sapien
tctttatcactgcaaggccatgaagtaggtaaa

SEQ ID NO: 613590 - DNA, 33 bp, Homo sapien
tctttatcactgcaagtccatgaagtaggtaaa

SEQ ID NO: 613591 - DNA, 33 bp, Homo sapien
ggtttcagagctattcaccttaccatcccttct

SEQ ID NO: 613592 - DNA, 33 bp, Homo sapien
ggtttcagagctattcgccttaccatcccttct

SEQ ID NO: 613593 - DNA, 33 bp, Homo sapien
taggaagttctaagtaagggcttcagcagcagt

SEQ ID NO: 613594 - DNA, 33 bp, Homo sapien
taggaagttctaagtaggggcttcagcagcagt

SEQ ID NO: 613595 - DNA, 33 bp, Homo sapien
cttttgaatgtgaaaaaagatatgcacatttag

SEQ ID NO: 613596 - DNA, 33 bp, Homo sapien
cttttgaatgtgaaaagagatatgcacatttag

SEQ ID NO: 613597 - DNA, 33 bp, Homo sapien
aacaacaaagtcagcacaagtatttggaatcat

SEQ ID NO: 613598 - DNA, 33 bp, Homo sapien
aacaacaaagtcagcataagtatttggaatcat

SEQ ID NO: 613599 - DNA, 33 bp, Homo sapien
ccatatggagagagcaaagggcacctatgattc

SEQ ID NO: 613600 - DNA, 33 bp, Homo sapien
ccatatggagagagcagagggcacctatgattc

SEQ ID NO: 613601 - DNA, 33 bp, Homo sapien
tgacaactatggactcaatgctcctgctttctt

SEQ ID NO: 613602 - DNA, 33 bp, Homo sapien
tgacaactatggactcgatgctcctgctttctt

SEQ ID NO: 613603 - DNA, 33 bp, Homo sapien
aagtaatcgaaaaggaaaaagtggtactcctca

SEQ ID NO: 613604 - DNA, 33 bp, Homo sapien
aagtaatcgaaaaggagaaagtggtactcctca

SEQ ID NO: 613605 - DNA, 33 bp, Homo sapien
cttcaaactgatattccaaggctattttctctt

SEQ ID NO: 613606 - DNA, 33 bp, Homo sapien
cttcaaactgatattcgaaggctattttctctt

SEQ ID NO: 613607 - DNA, 33 bp, Homo sapien
ggaaagggagaaggcccagaacagtggctttca

SEQ ID NO: 613608 - DNA, 33 bp, Homo sapien
ggaaagggagaaggcctagaacagtggctttca

SEQ ID NO: 613609 - DNA, 33 bp, Homo sapien
acacattaaatgtccccctatccacttgagccc

SEQ ID NO: 613610 - DNA, 33 bp, Homo sapien
acacattaaatgtccctctatccacttgagccc

SEQ ID NO: 613611 - DNA, 33 bp, Homo sapien
gagtttgggcaagaaacctcgatatgttaccca

SEQ ID NO: 613612 - DNA, 33 bp, Homo sapien
gagtttgggcaagaaatctcgatatgttaccca

SEQ ID NO: 613613 - DNA, 33 bp, Homo sapien
cttctttcatgtgtcacgtagagactgttaggg

SEQ ID NO: 613614 - DNA, 33 bp, Homo sapien
cttctttcatgtgtcatgtagagactgttaggg

SEQ ID NO: 613615 - DNA, 33 bp, Homo sapien
cctgtttcacagataaaaaatgaggcataagac

SEQ ID NO: 613616 - DNA, 33 bp, Homo sapien
cctgtttcacagataagaaatgaggcataagac

SEQ ID NO: 613617 - DNA, 33 bp, Homo sapien
tgtaattgtagttgcgacacagacaggccaaga

SEQ ID NO: 613618 - DNA, 33 bp, Homo sapien
tgtaattgtagttgcggcacagacaggccaaga

SEQ ID NO: 613619 - DNA, 33 bp, Homo sapien
aatctgcaactttatccaggactaaatttacct

SEQ ID NO: 613620 - DNA, 33 bp, Homo sapien
aatctgcaactttatcgaggactaaatttacct

SEQ ID NO: 613621 - DNA, 33 bp, Homo sapien
gaacctagatcctaacacttttttcaatataaa

SEQ ID NO: 613622 - DNA, 33 bp, Homo sapien
gaacctagatcctaactcttttttcaatataaa

SEQ ID NO: 613623 - DNA, 33 bp, Homo sapien
atcagcagtgtctcacagagcccacagtatcac

SEQ ID NO: 613624 - DNA, 33 bp, Homo sapien
atcagcagtgtctcacggagcccacagtatcac

SEQ ID NO: 613625 - DNA, 33 bp, Homo sapien
gcctatgaattcagaaataatactgtatttgtc

SEQ ID NO: 613626 - DNA, 33 bp, Homo sapien
gcctatgaattcagaagtaatactgtatttgtc

SEQ ID NO: 613627 - DNA, 33 bp, Homo sapien
agaggttatcatattacgttttgacccatagta

SEQ ID NO: 613628 - DNA, 33 bp, Homo sapien
agaggttatcatattatgttttgacccatagta

SEQ ID NO: 613629 - DNA, 33 bp, Homo sapien
ctttacctggattatcacatttcatctggacca

SEQ ID NO: 613630 - DNA, 33 bp, Homo sapien
ctttacctggattatcgcatttcatctggacca

SEQ ID NO: 613631 - DNA, 33 bp, Homo sapien
gactccaggagatggccgccaatttccacccac

SEQ ID NO: 613632 - DNA, 33 bp, Homo sapien
gactccaggagatggctgccaatttccacccac

SEQ ID NO: 613633 - DNA, 33 bp, Homo sapien
ataaccttccaaccaacagcagttacaagttca

SEQ ID NO: 613634 - DNA, 33 bp, Homo sapien
ataaccttccaaccaatagcagttacaagttca

SEQ ID NO: 613635 - DNA, 33 bp, Homo sapien
gacccagccaagaccccattagacttaatggat

SEQ ID NO: 613636 - DNA, 33 bp, Homo sapien
gacccagccaagaccctattagacttaatggat

SEQ ID NO: 613637 - DNA, 33 bp, Homo sapien
agctggacttcaggaaatggggtaagagttagg

SEQ ID NO: 613638 - DNA, 33 bp, Homo sapien
agctggacttcaggaactggggtaagagttagg

SEQ ID NO: 613639 - DNA, 33 bp, Homo sapien
caaaaatcgcatttcacgtaaaatgtttcccat

SEQ ID NO: 613640 - DNA, 33 bp, Homo sapien
caaaaatcgcatttcaggtaaaatgtttcccat

SEQ ID NO: 613641 - DNA, 33 bp, Homo sapien
aagaaataccgacacacgacacacgagagagaa

SEQ ID NO: 613642 - DNA, 33 bp, Homo sapien
aagaaataccgacacatgacacacgagagagaa

SEQ ID NO: 613643 - DNA, 33 bp, Homo sapien
ataatgttcagtactacatgctattatgtctca

SEQ ID NO: 613644 - DNA, 33 bp, Homo sapien
ataatgttcagtactatatgctattatgtctca

SEQ ID NO: 613645 - DNA, 33 bp, Homo sapien
gaattcaggaaggcgcccacactggtctcccgc

SEQ ID NO: 613646 - DNA, 33 bp, Homo sapien
gaattcaggaaggcgctcacactggtctcccgc

SEQ ID NO: 613647 - DNA, 33 bp, Homo sapien
acaatgctgtaccccactgctaagaacagtccc

SEQ ID NO: 613648 - DNA, 33 bp, Homo sapien
acaatgctgtaccccattgctaagaacagtccc

SEQ ID NO: 613649 - DNA, 33 bp, Homo sapien
aaaacaaccaggagaactagtttgcagaaaaca

SEQ ID NO: 613650 - DNA, 33 bp, Homo sapien
aaaacaaccaggagaagtagtttgcagaaaaca

SEQ ID NO: 613651 - DNA, 33 bp, Homo sapien
agattgggaccagaacaaactgagaggtcactc

SEQ ID NO: 613652 - DNA, 33 bp, Homo sapien
agattgggaccagaacgaactgagaggtcactc

SEQ ID NO: 613653 - DNA, 33 bp, Homo sapien
aacaaaaatctccaaacgttgaccccaaatggg

SEQ ID NO: 613654 - DNA, 33 bp, Homo sapien
aacaaaaatctccaaatgttgaccccaaatggg

SEQ ID NO: 613655 - DNA, 33 bp, Homo sapien
tgaaatcactcctagaagatgccctcagtttag

SEQ ID NO: 613656 - DNA, 33 bp, Homo sapien
tgaaatcactcctagaggatgccctcagtttag

SEQ ID NO: 613657 - DNA, 33 bp, Homo sapien
ggttgagcattcctaacccaaatgcaaattcct

SEQ ID NO: 613658 - DNA, 33 bp, Homo sapien
ggttgagcattcctaatccaaatgcaaattcct

SEQ ID NO: 613659 - DNA, 33 bp, Homo sapien
gcactgaactcctttccatgttttattgtgctt

SEQ ID NO: 613660 - DNA, 33 bp, Homo sapien
gcactgaactcctttctatgttttattgtgctt

SEQ ID NO: 613661 - DNA, 33 bp, Homo sapien
cactggatgatttccacgtgctacctaagagtt

SEQ ID NO: 613662 - DNA, 33 bp, Homo sapien
cactggatgatttccatgtgctacctaagagtt

SEQ ID NO: 613663 - DNA, 33 bp, Homo sapien
acatgagaatgtaaaaaagaaacaagatgacaa

SEQ ID NO: 613664 - DNA, 33 bp, Homo sapien
acatgagaatgtaaaagagaaacaagatgacaa

SEQ ID NO: 613665 - DNA, 33 bp, Homo sapien
cgctgggcatcttcccaagctttatcttcaacc

SEQ ID NO: 613666 - DNA, 33 bp, Homo sapien
cgctgggcatcttcccgagctttatcttcaacc

SEQ ID NO: 613667 - DNA, 33 bp, Homo sapien
gatacagaatgataaacaaaatttccctttgga

SEQ ID NO: 613668 - DNA, 33 bp, Homo sapien
gatacagaatgataaagaaaatttccctttgga

SEQ ID NO: 613669 - DNA, 33 bp, Homo sapien
agagactggctgagaacgaagttaacaaagcca

SEQ ID NO: 613670 - DNA, 33 bp, Homo sapien
agagactggctgagaatgaagttaacaaagcca

SEQ ID NO: 613671 - DNA, 33 bp, Homo sapien
gtactaatgaattttcccatcaacttgttttgg

SEQ ID NO: 613672 - DNA, 33 bp, Homo sapien
gtactaatgaattttctcatcaacttgttttgg

SEQ ID NO: 613673 - DNA, 33 bp, Homo sapien
tgctgagttaaacaaaatgaaacaagcttcttt

SEQ ID NO: 613674 - DNA, 33 bp, Homo sapien
tgctgagttaaacaaagtgaaacaagcttcttt

SEQ ID NO: 613675 - DNA, 33 bp, Homo sapien
atagtgcacttagcaacggggacaggagagaac

SEQ ID NO: 613676 - DNA, 33 bp, Homo sapien
atagtgcacttagcaatggggacaggagagaac

SEQ ID NO: 613677 - DNA, 33 bp, Homo sapien
gaatctggaaatgtaaaccaataaatgacaata

SEQ ID NO: 613678 - DNA, 33 bp, Homo sapien
gaatctggaaatgtaagccaataaatgacaata

SEQ ID NO: 613679 - DNA, 33 bp, Homo sapien
tggaacaaaactagaactgatttcctgagttca

SEQ ID NO: 613680 - DNA, 33 bp, Homo sapien
tggaacaaaactagaattgatttcctgagttca

SEQ ID NO: 613681 - DNA, 33 bp, Homo sapien
tctatggttccatgaccacagtgttgaatccag

SEQ ID NO: 613682 - DNA, 33 bp, Homo sapien
tctatggttccatgactacagtgttgaatccag

SEQ ID NO: 613683 - DNA, 33 bp, Homo sapien
tttgctggctagaagcacttgcttttttttttt

SEQ ID NO: 613684 - DNA, 33 bp, Homo sapien
tttgctggctagaagcgcttgcttttttttttt

SEQ ID NO: 613685 - DNA, 33 bp, Homo sapien
cttgtggcagagctaccacatacttaataggtt

SEQ ID NO: 613686 - DNA, 33 bp, Homo sapien
cttgtggcagagctactacatacttaataggtt

SEQ ID NO: 613687 - DNA, 33 bp, Homo sapien
tcaaatttggaaacaacgaagaaatagtggggt

SEQ ID NO: 613688 - DNA, 33 bp, Homo sapien
tcaaatttggaaacaatgaagaaatagtggggt

SEQ ID NO: 613689 - DNA, 33 bp, Homo sapien
agggttgaaaactggaatatgtacatggaccag

SEQ ID NO: 613690 - DNA, 33 bp, Homo sapien
agggttgaaaactggagtatgtacatggaccag

SEQ ID NO: 613691 - DNA, 33 bp, Homo sapien
ctgaccatcttttaaactccacagttgtaacaa

SEQ ID NO: 613692 - DNA, 33 bp, Homo sapien
ctgaccatcttttaaattccacagttgtaacaa

SEQ ID NO: 613693 - DNA, 33 bp, Homo sapien
cactgtgacaagttaaaataactctgataaaag

SEQ ID NO: 613694 - DNA, 33 bp, Homo sapien
cactgtgacaagttaacataactctgataaaag

SEQ ID NO: 613695 - DNA, 33 bp, Homo sapien
ttgtgatattagaggtaaagaaaatagacaagg

SEQ ID NO: 613696 - DNA, 33 bp, Homo sapien
ttgtgatattagaggtgaagaaaatagacaagg

SEQ ID NO: 613697 - DNA, 33 bp, Homo sapien
tctatgtttgctaataaagaaagtcctttagaa

SEQ ID NO: 613698 - DNA, 33 bp, Homo sapien
tctatgtttgctaatagagaaagtcctttagaa

SEQ ID NO: 613699 - DNA, 33 bp, Homo sapien
tcaaaaggtggttaaactggaacataatactga

SEQ ID NO: 613700 - DNA, 33 bp, Homo sapien
tcaaaaggtggttaaattggaacataatactga

SEQ ID NO: 613701 - DNA, 33 bp, Homo sapien
aagcagaaaagcaaaaccagtagaaacacagag

SEQ ID NO: 613702 - DNA, 33 bp, Homo sapien
aagcagaaaagcaaaatcagtagaaacacagag

SEQ ID NO: 613703 - DNA, 33 bp, Homo sapien
cctaatccctctacagacctgcttgctttgatc

SEQ ID NO: 613704 - DNA, 33 bp, Homo sapien
cctaatccctctacagccctgcttgctttgatc

SEQ ID NO: 613705 - DNA, 33 bp, Homo sapien
gtgataaaatcaacctaacagggtagaaccttg

SEQ ID NO: 613706 - DNA, 33 bp, Homo sapien
gtgataaaatcaacctgacagggtagaaccttg

SEQ ID NO: 613707 - DNA, 33 bp, Homo sapien
gtttggagctctacccactgtttgaaatgacac

SEQ ID NO: 613708 - DNA, 33 bp, Homo sapien
gtttggagctctacccgctgtttgaaatgacac

SEQ ID NO: 613709 - DNA, 33 bp, Homo sapien
gatgtctgaagtgtaaatgctcttggagagtct

SEQ ID NO: 613710 - DNA, 33 bp, Homo sapien
gatgtctgaagtgtaagtgctcttggagagtct

SEQ ID NO: 613711 - DNA, 33 bp, Homo sapien
tgttggaggaccaagaggttgaatgtgagatag

SEQ ID NO: 613712 - DNA, 33 bp, Homo sapien
tgttggaggaccaagatgttgaatgtgagatag

SEQ ID NO: 613713 - DNA, 33 bp, Homo sapien
tcttgtcaataatggccctgattatttgactat

SEQ ID NO: 613714 - DNA, 33 bp, Homo sapien
tcttgtcaataatggctctgattatttgactat

SEQ ID NO: 613715 - DNA, 33 bp, Homo sapien
acatctttgaacagaacatagcaccatggtggg

SEQ ID NO: 613716 - DNA, 33 bp, Homo sapien
acatctttgaacagaatatagcaccatggtggg

SEQ ID NO: 613717 - DNA, 33 bp, Homo sapien
tataaaaaccaagaacggcatgccaactcactt

SEQ ID NO: 613718 - DNA, 33 bp, Homo sapien
tataaaaaccaagaactgcatgccaactcactt

SEQ ID NO: 613719 - DNA, 33 bp, Homo sapien
aggttacaaatggtcacgaatggttagggcaga

SEQ ID NO: 613720 - DNA, 33 bp, Homo sapien
aggttacaaatggtcatgaatggttagggcaga

SEQ ID NO: 613721 - DNA, 33 bp, Homo sapien
gagtctctgaaattaaaaagtcttggtctggtt

SEQ ID NO: 613722 - DNA, 33 bp, Homo sapien
gagtctctgaaattaagaagtcttggtctggtt

SEQ ID NO: 613723 - DNA, 33 bp, Homo sapien
ggtgctatgatcagcaataaactaaggaagaag

SEQ ID NO: 613724 - DNA, 33 bp, Homo sapien
ggtgctatgatcagcactaaactaaggaagaag

SEQ ID NO: 613725 - DNA, 33 bp, Homo sapien
aagacaggggagtaacagatagccagtcagata

SEQ ID NO: 613726 - DNA, 33 bp, Homo sapien
aagacaggggagtaacggatagccagtcagata

SEQ ID NO: 613727 - DNA, 33 bp, Homo sapien
agagttttaagcaggaataaaatgaagcgagtt

SEQ ID NO: 613728 - DNA, 33 bp, Homo sapien
agagttttaagcaggagtaaaatgaagcgagtt

SEQ ID NO: 613729 - DNA, 33 bp, Homo sapien
ggcaggtgtggttatccagtgatgaaatgatgt

SEQ ID NO: 613730 - DNA, 33 bp, Homo sapien
ggcaggtgtggttatctagtgatgaaatgatgt

SEQ ID NO: 613731 - DNA, 33 bp, Homo sapien
catggatgaggtttgacgagagcagatgcaaat

SEQ ID NO: 613732 - DNA, 33 bp, Homo sapien
catggatgaggtttgatgagagcagatgcaaat

SEQ ID NO: 613733 - DNA, 33 bp, Homo sapien
tttgggggtagtttatcagatagcaacagatga

SEQ ID NO: 613734 - DNA, 33 bp, Homo sapien
tttgggggtagtttattagatagcaacagatga

SEQ ID NO: 613735 - DNA, 33 bp, Homo sapien
acagccactattataaaggagcacacagtaata

SEQ ID NO: 613736 - DNA, 33 bp, Homo sapien
acagccactattataacggagcacacagtaata

SEQ ID NO: 613737 - DNA, 33 bp, Homo sapien
ataaacacagtgcagacgatcttaagggatgca

SEQ ID NO: 613738 - DNA, 33 bp, Homo sapien
ataaacacagtgcagatgatcttaagggatgca

SEQ ID NO: 613739 - DNA, 33 bp, Homo sapien
ttgttagccactccacacatcctggctagtaga

SEQ ID NO: 613740 - DNA, 33 bp, Homo sapien
ttgttagccactccacgcatcctggctagtaga

SEQ ID NO: 613741 - DNA, 33 bp, Homo sapien
ttttgttccaactagaagaaatcgttgttattt

SEQ ID NO: 613742 - DNA, 33 bp, Homo sapien
ttttgttccaactagatgaaatcgttgttattt

SEQ ID NO: 613743 - DNA, 33 bp, Homo sapien
aagtcatcactatctaactggagaatatgatgt

SEQ ID NO: 613744 - DNA, 33 bp, Homo sapien
aagtcatcactatctagctggagaatatgatgt

SEQ ID NO: 613745 - DNA, 33 bp, Homo sapien
gtgtttctattggagacgagaaaagtaaaaatg

SEQ ID NO: 613746 - DNA, 33 bp, Homo sapien
gtgtttctattggagatgagaaaagtaaaaatg

SEQ ID NO: 613747 - DNA, 33 bp, Homo sapien
gcagcaggaacacttacgtgcattgtttgaata

SEQ ID NO: 613748 - DNA, 33 bp, Homo sapien
gcagcaggaacacttatgtgcattgtttgaata

SEQ ID NO: 613749 - DNA, 33 bp, Homo sapien
gttctgaagactaaagaatcatcacaagaataa

SEQ ID NO: 613750 - DNA, 33 bp, Homo sapien
gttctgaagactaaaggatcatcacaagaataa

SEQ ID NO: 613751 - DNA, 33 bp, Homo sapien
atggctgagattaacaacaggctcacaaatttc

SEQ ID NO: 613752 - DNA, 33 bp, Homo sapien
atggctgagattaacagcaggctcacaaatttc

SEQ ID NO: 613753 - DNA, 33 bp, Homo sapien
taaaatgcctctgtacgctataattctggagca

SEQ ID NO: 613754 - DNA, 33 bp, Homo sapien
taaaatgcctctgtactctataattctggagca

SEQ ID NO: 613755 - DNA, 33 bp, Homo sapien
tataaactcataaaaactttaccatctatctgt

SEQ ID NO: 613756 - DNA, 33 bp, Homo sapien
tataaactcataaaaattttaccatctatctgt

SEQ ID NO: 613757 - DNA, 33 bp, Homo sapien
ttatgagtttatattacaggagtgtgactatga

SEQ ID NO: 613758 - DNA, 33 bp, Homo sapien
ttatgagtttatattataggagtgtgactatga

SEQ ID NO: 613759 - DNA, 33 bp, Homo sapien
attagagctgttgagaagatttttaaatagacc

SEQ ID NO: 613760 - DNA, 33 bp, Homo sapien
attagagctgttgagatgatttttaaatagacc

SEQ ID NO: 613761 - DNA, 33 bp, Homo sapien
actgggctcaagccaacctatgtcttccttcta

SEQ ID NO: 613762 - DNA, 33 bp, Homo sapien
actgggctcaagccaagctatgtcttccttcta

SEQ ID NO: 613763 - DNA, 33 bp, Homo sapien
gccttgcctctccgtaagtcctctgttaaaatg

SEQ ID NO: 613764 - DNA, 33 bp, Homo sapien
gccttgcctctccgtacgtcctctgttaaaatg

SEQ ID NO: 613765 - DNA, 33 bp, Homo sapien
gtgtgatagcagacctcaagtgatataatcaac

SEQ ID NO: 613766 - DNA, 33 bp, Homo sapien
gtgtgatagcagacctgaagtgatataatcaac

SEQ ID NO: 613767 - DNA, 33 bp, Homo sapien
aatctgcagaaaaaaactagcaaattcaagagc

SEQ ID NO: 613768 - DNA, 33 bp, Homo sapien
aatctgcagaaaaaaagtagcaaattcaagagc

SEQ ID NO: 613769 - DNA, 33 bp, Homo sapien
cggttatgagttaagcaatgactagaattgggt

SEQ ID NO: 613770 - DNA, 33 bp, Homo sapien
cggttatgagttaagccatgactagaattgggt

SEQ ID NO: 613771 - DNA, 33 bp, Homo sapien
cagatttatgcattcaatgaactgctggaggaa

SEQ ID NO: 613772 - DNA, 33 bp, Homo sapien
cagatttatgcattcagtgaactgctggaggaa

SEQ ID NO: 613773 - DNA, 33 bp, Homo sapien
tattttgagggaggaacttcaaatgcctttagt

SEQ ID NO: 613774 - DNA, 33 bp, Homo sapien
tattttgagggaggaatttcaaatgcctttagt

SEQ ID NO: 613775 - DNA, 33 bp, Homo sapien
aaaaacttatatagtacgaccttccacagaaca

SEQ ID NO: 613776 - DNA, 33 bp, Homo sapien
aaaaacttatatagtatgaccttccacagaaca

SEQ ID NO: 613777 - DNA, 33 bp, Homo sapien
gtctcactccctctaacaagtcccaacttcagt

SEQ ID NO: 613778 - DNA, 33 bp, Homo sapien
gtctcactccctctaataagtcccaacttcagt

SEQ ID NO: 613779 - DNA, 33 bp, Homo sapien
aggaaaaggccagaggaatgggctgttctcaac

SEQ ID NO: 613780 - DNA, 33 bp, Homo sapien
aggaaaaggccagagggatgggctgttctcaac

SEQ ID NO: 613781 - DNA, 33 bp, Homo sapien
aatgacaccttgactacaaaagcgtgttaataa

SEQ ID NO: 613782 - DNA, 33 bp, Homo sapien
aatgacaccttgactataaaagcgtgttaataa

SEQ ID NO: 613783 - DNA, 33 bp, Homo sapien
aactgctggtctatacaatcttggatttgagag

SEQ ID NO: 613784 - DNA, 33 bp, Homo sapien
aactgctggtctatacgatcttggatttgagag

SEQ ID NO: 613785 - DNA, 33 bp, Homo sapien
tttgctcactgctgtaaccacaagaataaaaac

SEQ ID NO: 613786 - DNA, 33 bp, Homo sapien
tttgctcactgctgtatccacaagaataaaaac

SEQ ID NO: 613787 - DNA, 33 bp, Homo sapien
gcttgggcagactgataaaatgtcatgggaata

SEQ ID NO: 613788 - DNA, 33 bp, Homo sapien
gcttgggcagactgattaaatgtcatgggaata

SEQ ID NO: 613789 - DNA, 33 bp, Homo sapien
gcgctgtggtgttgacggattaaaggagcgcgt

SEQ ID NO: 613790 - DNA, 33 bp, Homo sapien
gcgctgtggtgttgactgattaaaggagcgcgt

SEQ ID NO: 613791 - DNA, 33 bp, Homo sapien
gggagctcaccaacagcaagtggcgtaagtggt

SEQ ID NO: 613792 - DNA, 33 bp, Homo sapien
gggagctcaccaacagtaagtggcgtaagtggt

SEQ ID NO: 613793 - DNA, 33 bp, Homo sapien
aggtataactcaggggaatgttaaagcaaaagt

SEQ ID NO: 613794 - DNA, 33 bp, Homo sapien
aggtataactcagggggatgttaaagcaaaagt

SEQ ID NO: 613795 - DNA, 33 bp, Homo sapien
agtttccaccttgctacaacttgctgcagaaaa

SEQ ID NO: 613796 - DNA, 33 bp, Homo sapien
agtttccaccttgctataacttgctgcagaaaa

SEQ ID NO: 613797 - DNA, 33 bp, Homo sapien
tacatttcactcctccaacttattgttgctttt

SEQ ID NO: 613798 - DNA, 33 bp, Homo sapien
tacatttcactcctcctacttattgttgctttt

SEQ ID NO: 613799 - DNA, 33 bp, Homo sapien
ctctgagctcctgtaaaatgtggataaggagtg

SEQ ID NO: 613800 - DNA, 33 bp, Homo sapien
ctctgagctcctgtaatatgtggataaggagtg

SEQ ID NO: 613801 - DNA, 33 bp, Homo sapien
aacaattatttcattaacgtgataggtgttata

SEQ ID NO: 613802 - DNA, 33 bp, Homo sapien
aacaattatttcattagcgtgataggtgttata

SEQ ID NO: 613803 - DNA, 33 bp, Homo sapien
catcgatacatatgcaatcccccagtgggccat

SEQ ID NO: 613804 - DNA, 33 bp, Homo sapien
catcgatacatatgcagtcccccagtgggccat

SEQ ID NO: 613805 - DNA, 33 bp, Homo sapien
tgacataggactttccaatggattctggtgact

SEQ ID NO: 613806 - DNA, 33 bp, Homo sapien
tgacataggactttccgatggattctggtgact

SEQ ID NO: 613807 - DNA, 33 bp, Homo sapien
gtgctcagtggttagcccacaatacattgagtc

SEQ ID NO: 613808 - DNA, 33 bp, Homo sapien
gtgctcagtggttagctcacaatacattgagtc

SEQ ID NO: 613809 - DNA, 33 bp, Homo sapien
gttacggcatgggcaaaagtgctgaggttggaa

SEQ ID NO: 613810 - DNA, 33 bp, Homo sapien
gttacggcatgggcaacagtgctgaggttggaa

SEQ ID NO: 613811 - DNA, 33 bp, Homo sapien
agccattggtcttatgaagcttacagcctcagg

SEQ ID NO: 613812 - DNA, 33 bp, Homo sapien
agccattggtcttatggagcttacagcctcagg

SEQ ID NO: 613813 - DNA, 33 bp, Homo sapien
tctcttttacccttcagtataaaatcaaatgtc

SEQ ID NO: 613814 - DNA, 33 bp, Homo sapien
tctcttttacccttcattataaaatcaaatgtc

SEQ ID NO: 613815 - DNA, 33 bp, Homo sapien
ttactctttgcactcccatccccttcctcccac

SEQ ID NO: 613816 - DNA, 33 bp, Homo sapien
ttactctttgcactccgatccccttcctcccac

SEQ ID NO: 613817 - DNA, 33 bp, Homo sapien
tttggaaaaagagtctcactgtttcaatttatt

SEQ ID NO: 613818 - DNA, 33 bp, Homo sapien
tttggaaaaagagtctgactgtttcaatttatt

SEQ ID NO: 613819 - DNA, 33 bp, Homo sapien
ctttgcagctgggcaaaaatgtatggcaaataa

SEQ ID NO: 613820 - DNA, 33 bp, Homo sapien
ctttgcagctgggcaacaatgtatggcaaataa

SEQ ID NO: 613821 - DNA, 33 bp, Homo sapien
agtggaaaaatgtgaaatatagtttaaggtgtg

SEQ ID NO: 613822 - DNA, 33 bp, Homo sapien
agtggaaaaatgtgaactatagtttaaggtgtg

SEQ ID NO: 613823 - DNA, 33 bp, Homo sapien
taagagtagagaaatacgcaggagccagatcat

SEQ ID NO: 613824 - DNA, 33 bp, Homo sapien
taagagtagagaaatatgcaggagccagatcat

SEQ ID NO: 613825 - DNA, 33 bp, Homo sapien
gattgactaagggtagaaactatggccatatcc

SEQ ID NO: 613826 - DNA, 33 bp, Homo sapien
gattgactaagggtagcaactatggccatatcc

SEQ ID NO: 613827 - DNA, 33 bp, Homo sapien
tcttaaggtgaacaaacaaagcagtattaggag

SEQ ID NO: 613828 - DNA, 33 bp, Homo sapien
tcttaaggtgaacaaagaaagcagtattaggag

SEQ ID NO: 613829 - DNA, 33 bp, Homo sapien
gtgttgacccgtgccaccaaaatactctttcca

SEQ ID NO: 613830 - DNA, 33 bp, Homo sapien
gtgttgacccgtgccatcaaaatactctttcca

SEQ ID NO: 613831 - DNA, 33 bp, Homo sapien
caagaatatatactgcaaagtgactttaaaaag

SEQ ID NO: 613832 - DNA, 33 bp, Homo sapien
caagaatatatactgccaagtgactttaaaaag

SEQ ID NO: 613833 - DNA, 33 bp, Homo sapien
tgatagctgactttaaataactgaaattctaac

SEQ ID NO: 613834 - DNA, 33 bp, Homo sapien
tgatagctgactttaagtaactgaaattctaac

SEQ ID NO: 613835 - DNA, 33 bp, Homo sapien
acaatgttgttgaagtaaagtaccttgcttaaa

SEQ ID NO: 613836 - DNA, 33 bp, Homo sapien
acaatgttgttgaagtcaagtaccttgcttaaa

SEQ ID NO: 613837 - DNA, 33 bp, Homo sapien
ataggaaattataaagccaaactgtctctgttt

SEQ ID NO: 613838 - DNA, 33 bp, Homo sapien
ataggaaattataaagtcaaactgtctctgttt

SEQ ID NO: 613839 - DNA, 33 bp, Homo sapien
gacagaacaccttcaacatcttctgtttacaaa

SEQ ID NO: 613840 - DNA, 33 bp, Homo sapien
gacagaacaccttcaatatcttctgtttacaaa

SEQ ID NO: 613841 - DNA, 33 bp, Homo sapien
gtaaggagtttgaaaccagactgaccaatatgg

SEQ ID NO: 613842 - DNA, 33 bp, Homo sapien
gtaaggagtttgaaacgagactgaccaatatgg

SEQ ID NO: 613843 - DNA, 33 bp, Homo sapien
tcggttgaggcactgaagctggacatctctgca

SEQ ID NO: 613844 - DNA, 33 bp, Homo sapien
tcggttgaggcactgaggctggacatctctgca

SEQ ID NO: 613845 - DNA, 33 bp, Homo sapien
aatccttcatgcctcaaatgcaagtagatgaag

SEQ ID NO: 613846 - DNA, 33 bp, Homo sapien
aatccttcatgcctcagatgcaagtagatgaag

SEQ ID NO: 613847 - DNA, 33 bp, Homo sapien
aataagattttgttatcagctatttgccatcca

SEQ ID NO: 613848 - DNA, 33 bp, Homo sapien
aataagattttgttattagctatttgccatcca

SEQ ID NO: 613849 - DNA, 33 bp, Homo sapien
gaagaaaagagaggtacggtctcatgtttcaaa

SEQ ID NO: 613850 - DNA, 33 bp, Homo sapien
gaagaaaagagaggtagggtctcatgtttcaaa

SEQ ID NO: 613851 - DNA, 33 bp, Homo sapien
cctcaggtgattttcactactgtcaatgtgaga

SEQ ID NO: 613852 - DNA, 33 bp, Homo sapien
cctcaggtgattttcattactgtcaatgtgaga

SEQ ID NO: 613853 - DNA, 33 bp, Homo sapien
gggcacatccaactgcacaagaagttttccagc

SEQ ID NO: 613854 - DNA, 33 bp, Homo sapien
gggcacatccaactgcgcaagaagttttccagc

SEQ ID NO: 613855 - DNA, 33 bp, Homo sapien
gaagggatttattcaggaaaggtatctaacaag

SEQ ID NO: 613856 - DNA, 33 bp, Homo sapien
gaagggatttattcagtaaaggtatctaacaag

SEQ ID NO: 613857 - DNA, 33 bp, Homo sapien
actgatggatacccaacatttacaatttcttac

SEQ ID NO: 613858 - DNA, 33 bp, Homo sapien
actgatggatacccaagatttacaatttcttac

SEQ ID NO: 613859 - DNA, 33 bp, Homo sapien
caaagtcccagtctcacatcgaagtaagcccct

SEQ ID NO: 613860 - DNA, 33 bp, Homo sapien
caaagtcccagtctcagatcgaagtaagcccct

SEQ ID NO: 613861 - DNA, 33 bp, Homo sapien
tgaagatagactctgacatggggagttgcatga

SEQ ID NO: 613862 - DNA, 33 bp, Homo sapien
tgaagatagactctgagatggggagttgcatga

SEQ ID NO: 613863 - DNA, 33 bp, Homo sapien
caggatggattagagacggggaaatgaaggcat

SEQ ID NO: 613864 - DNA, 33 bp, Homo sapien
caggatggattagagagggggaaatgaaggcat

SEQ ID NO: 613865 - DNA, 33 bp, Homo sapien
actagcaccactacagccctcatgacctcagag

SEQ ID NO: 613866 - DNA, 33 bp, Homo sapien
actagcaccactacaggcctcatgacctcagag

SEQ ID NO: 613867 - DNA, 33 bp, Homo sapien
actattttgtgacttacaggcagtgccagagag

SEQ ID NO: 613868 - DNA, 33 bp, Homo sapien
actattttgtgacttataggcagtgccagagag

SEQ ID NO: 613869 - DNA, 33 bp, Homo sapien
aactagaggcaaaagaaactattcagaagcact

SEQ ID NO: 613870 - DNA, 33 bp, Homo sapien
aactagaggcaaaagagactattcagaagcact

SEQ ID NO: 613871 - DNA, 33 bp, Homo sapien
ttttctcttctgctgacagtagctcttctttcc

SEQ ID NO: 613872 - DNA, 33 bp, Homo sapien
ttttctcttctgctgagagtagctcttctttcc

SEQ ID NO: 613873 - DNA, 33 bp, Homo sapien
gtcaaagggcatttggaagtagcctagatatta

SEQ ID NO: 613874 - DNA, 33 bp, Homo sapien
gtcaaagggcatttggcagtagcctagatatta

SEQ ID NO: 613875 - DNA, 33 bp, Homo sapien
ctctaagtattctgcagatgacttactcaattc

SEQ ID NO: 613876 - DNA, 33 bp, Homo sapien
ctctaagtattctgcatatgacttactcaattc

SEQ ID NO: 613877 - DNA, 33 bp, Homo sapien
taatacagtacctcatcatctccatccagatag

SEQ ID NO: 613878 - DNA, 33 bp, Homo sapien
taatacagtacctcattatctccatccagatag

SEQ ID NO: 613879 - DNA, 33 bp, Homo sapien
cctagtggactatttcactgaagtctgtttcct

SEQ ID NO: 613880 - DNA, 33 bp, Homo sapien
cctagtggactatttccctgaagtctgtttcct

SEQ ID NO: 613881 - DNA, 33 bp, Homo sapien
atacaatagaacagacagtagaggcttggtgag

SEQ ID NO: 613882 - DNA, 33 bp, Homo sapien
atacaatagaacagacggtagaggcttggtgag

SEQ ID NO: 613883 - DNA, 33 bp, Homo sapien
agccaagagaagggtacgccagtttgtaatcac

SEQ ID NO: 613884 - DNA, 33 bp, Homo sapien
agccaagagaagggtatgccagtttgtaatcac

SEQ ID NO: 613885 - DNA, 33 bp, Homo sapien
gaaatctcctttacaacctgctttatgcttatc

SEQ ID NO: 613886 - DNA, 33 bp, Homo sapien
gaaatctcctttacaatctgctttatgcttatc

SEQ ID NO: 613887 - DNA, 33 bp, Homo sapien
ttcactctgacttccaagaaatacaaagagttt

SEQ ID NO: 613888 - DNA, 33 bp, Homo sapien
ttcactctgacttccaggaaatacaaagagttt

SEQ ID NO: 613889 - DNA, 33 bp, Homo sapien
ccaacactggggactacgattcgacaggagact

SEQ ID NO: 613890 - DNA, 33 bp, Homo sapien
ccaacactggggactatgattcgacaggagact

SEQ ID NO: 613891 - DNA, 33 bp, Homo sapien
acgaggaagtatgacaccacggctagggttttc

SEQ ID NO: 613892 - DNA, 33 bp, Homo sapien
acgaggaagtatgacagcacggctagggttttc

SEQ ID NO: 613893 - DNA, 33 bp, Homo sapien
gacagaaaggtaattcagaaaatgccaacaata

SEQ ID NO: 613894 - DNA, 33 bp, Homo sapien
gacagaaaggtaattcggaaaatgccaacaata

SEQ ID NO: 613895 - DNA, 33 bp, Homo sapien
aattacctttctgtcacgaatgagttttttaaa

SEQ ID NO: 613896 - DNA, 33 bp, Homo sapien
aattacctttctgtcatgaatgagttttttaaa

SEQ ID NO: 613897 - DNA, 33 bp, Homo sapien
cctttatagtgatgcaaatgaattaacacactg

SEQ ID NO: 613898 - DNA, 33 bp, Homo sapien
cctttatagtgatgcagatgaattaacacactg

SEQ ID NO: 613899 - DNA, 33 bp, Homo sapien
ctccaaggggatggcactaagtaactcatgagg

SEQ ID NO: 613900 - DNA, 33 bp, Homo sapien
ctccaaggggatggcagtaagtaactcatgagg

SEQ ID NO: 613901 - DNA, 33 bp, Homo sapien
caactcagttctggcactagcaggagttagcat

SEQ ID NO: 613902 - DNA, 33 bp, Homo sapien
caactcagttctggcagtagcaggagttagcat

SEQ ID NO: 613903 - DNA, 33 bp, Homo sapien
agcacttgccagatgacgaaagatgtctgatat

SEQ ID NO: 613904 - DNA, 33 bp, Homo sapien
agcacttgccagatgatgaaagatgtctgatat

SEQ ID NO: 613905 - DNA, 33 bp, Homo sapien
cctaaggacttccttaacctcattgtctgccta

SEQ ID NO: 613906 - DNA, 33 bp, Homo sapien
cctaaggacttccttaccctcattgtctgccta

SEQ ID NO: 613907 - DNA, 33 bp, Homo sapien
cccagttcctaacaacaaccagtcaactctcaa

SEQ ID NO: 613908 - DNA, 33 bp, Homo sapien
cccagttcctaacaaccaccagtcaactctcaa

SEQ ID NO: 613909 - DNA, 33 bp, Homo sapien
caggaaggtagaagtgcaaaacctgacacaggg

SEQ ID NO: 613910 - DNA, 33 bp, Homo sapien
caggaaggtagaagtgtaaaacctgacacaggg

SEQ ID NO: 613911 - DNA, 33 bp, Homo sapien
gattttctagtgtaaacaggatttcttcaactt

SEQ ID NO: 613912 - DNA, 33 bp, Homo sapien
gattttctagtgtaaataggatttcttcaactt

SEQ ID NO: 613913 - DNA, 33 bp, Homo sapien
gggcagatacagataaggaaatagtatttgcat

SEQ ID NO: 613914 - DNA, 33 bp, Homo sapien
gggcagatacagataatgaaatagtatttgcat

SEQ ID NO: 613915 - DNA, 33 bp, Homo sapien
ccatagacatatgtaaacaaatggatgttgctg

SEQ ID NO: 613916 - DNA, 33 bp, Homo sapien
ccatagacatatgtaagcaaatggatgttgctg

SEQ ID NO: 613917 - DNA, 33 bp, Homo sapien
ttccaaagtatccacactgattacacagacatg

SEQ ID NO: 613918 - DNA, 33 bp, Homo sapien
ttccaaagtatccacattgattacacagacatg

SEQ ID NO: 613919 - DNA, 33 bp, Homo sapien; identical to SEQ ID NO: 613917

SEQ ID NO: 613920 - DNA, 33 bp, Homo sapien; identical to SEQ ID NO: 613918

SEQ ID NO: 613921 - DNA, 33 bp, Homo sapien
gtttgggttgggacaaatgttatgaaggaaagg

SEQ ID NO: 613922 - DNA, 33 bp, Homo sapien
gtttgggttgggacaattgttatgaaggaaagg

SEQ ID NO: 613923 - DNA, 33 bp, Homo sapien
cttggcaagccatttaaccctttctattagttt

SEQ ID NO: 613924 - DNA, 33 bp, Homo sapien
cttggcaagccatttagccctttctattagttt

SEQ ID NO: 613925 - DNA, 33 bp, Homo sapien
tgttgtcaattcctaacgattttttcctcatat

SEQ ID NO: 613926 - DNA, 33 bp, Homo sapien
tgttgtcaattcctaatgattttttcctcatat

SEQ ID NO: 613927 - DNA, 33 bp, Homo sapien
gaatacatggagagaacgcagataatgtacttg

SEQ ID NO: 613928 - DNA, 33 bp, Homo sapien
gaatacatggagagaatgcagataatgtacttg

SEQ ID NO: 613929 - DNA, 33 bp, Homo sapien
atgtggactatcttgccaattttcctcaaacct

SEQ ID NO: 613930 - DNA, 33 bp, Homo sapien
atgtggactatcttgctaattttcctcaaacct

SEQ ID NO: 613931 - DNA, 33 bp, Homo sapien
agtgtattaaccagacacagaaatatataattc

SEQ ID NO: 613932 - DNA, 33 bp, Homo sapien
agtgtattaaccagactcagaaatatataattc

SEQ ID NO: 613933 - DNA, 33 bp, Homo sapien
cagagactgcactgaacgggtttgtagaggaca

SEQ ID NO: 613934 - DNA, 33 bp, Homo sapien
cagagactgcactgaatgggtttgtagaggaca

SEQ ID NO: 613935 - DNA, 33 bp, Homo sapien
tcacctagctcctgttcaacacgtttgtgtacc

SEQ ID NO: 613936 - DNA, 33 bp, Homo sapien
tcacctagctcctgtttaacacgtttgtgtacc

SEQ ID NO: 613937 - DNA, 33 bp, Homo sapien
atgcccaagaagtgccgggatgactgtgatggt

SEQ ID NO: 613938 - DNA, 33 bp, Homo sapien
atgcccaagaagtgcctggatgactgtgatggt

SEQ ID NO: 613939 - DNA, 33 bp, Homo sapien
gttgaaacaggaaaaaacaagtatcctatctga

SEQ ID NO: 613940 - DNA, 33 bp, Homo sapien
gttgaaacaggaaaaaccaagtatcctatctga

SEQ ID NO: 613941 - DNA, 33 bp, Homo sapien
acacagaatcctcaacactggacatcacaagaa

SEQ ID NO: 613942 - DNA, 33 bp, Homo sapien
acacagaatcctcaacgctggacatcacaagaa

SEQ ID NO: 613943 - DNA, 33 bp, Homo sapien
cgatgctcaaagggcaaatgggattgtaaaggg

SEQ ID NO: 613944 - DNA, 33 bp, Homo sapien
cgatgctcaaagggcagatgggattgtaaaggg

SEQ ID NO: 613945 - DNA, 33 bp, Homo sapien
cctagatttcttctccaaggatttcagaagtga

SEQ ID NO: 613946 - DNA, 33 bp, Homo sapien
cctagatttcttctccgaggatttcagaagtga

SEQ ID NO: 613947 - DNA, 33 bp, Homo sapien
acctttgctactcccactcagtgacacttatct

SEQ ID NO: 613948 - DNA, 33 bp, Homo sapien
acctttgctactcccattcagtgacacttatct

SEQ ID NO: 613949 - DNA, 33 bp, Homo sapien
attattgactctttacaatgggccacttaattt

SEQ ID NO: 613950 - DNA, 33 bp, Homo sapien
attattgactctttactatgggccacttaattt

SEQ ID NO: 613951 - DNA, 33 bp, Homo sapien
tcaccagttgtgtacaagattcgtttttcttca

SEQ ID NO: 613952 - DNA, 33 bp, Homo sapien
tcaccagttgtgtacaggattcgtttttcttca

SEQ ID NO: 613953 - DNA, 33 bp, Homo sapien
agacaccatcatacaagccaagactgagacaga

SEQ ID NO: 613954 - DNA, 33 bp, Homo sapien
agacaccatcatacaatccaagactgagacaga

SEQ ID NO: 613955 - DNA, 33 bp, Homo sapien
aaacagctgtccaaatgagaaccagcaaagtaa

SEQ ID NO: 613956 - DNA, 33 bp, Homo sapien
aaacagctgtccaaattagaaccagcaaagtaa

SEQ ID NO: 613957 - DNA, 33 bp, Homo sapien
acttaaatggccccaacttaatttttgtggctt

SEQ ID NO: 613958 - DNA, 33 bp, Homo sapien
acttaaatggccccaagttaatttttgtggctt

SEQ ID NO: 613959 - DNA, 33 bp, Homo sapien
tgcggaactgaaagcactgacgatttttaacaa

SEQ ID NO: 613960 - DNA, 33 bp, Homo sapien
tgcggaactgaaagcattgacgatttttaacaa

SEQ ID NO: 613961 - DNA, 33 bp, Homo sapien
tagagatagcttttgaaaagtataagaagtcca

SEQ ID NO: 613962 - DNA, 33 bp, Homo sapien
tagagatagcttttgagaagtataagaagtcca

SEQ ID NO: 613963 - DNA, 33 bp, Homo sapien
aagaccctttctcttacgttctatgcttcaaat

SEQ ID NO: 613964 - DNA, 33 bp, Homo sapien
aagaccctttctcttatgttctatgcttcaaat

SEQ ID NO: 613965 - DNA, 33 bp, Homo sapien
ataaaacttgaagttacgaacatctgagcaaaa

SEQ ID NO: 613966 - DNA, 33 bp, Homo sapien
ataaaacttgaagttaggaacatctgagcaaaa

SEQ ID NO: 613967 - DNA, 33 bp, Homo sapien
ggaccaactaactcccagaacaggtctcaaacc

SEQ ID NO: 613968 - DNA, 33 bp, Homo sapien
ggaccaactaactcccggaacaggtctcaaacc

SEQ ID NO: 613969 - DNA, 33 bp, Homo sapien
gcttaggtttgtaccaaaaagaattgaaagcag

SEQ ID NO: 613970 - DNA, 33 bp, Homo sapien
gcttaggtttgtaccagaaagaattgaaagcag

SEQ ID NO: 613971 - DNA, 33 bp, Homo sapien
ttttctgaacctgcaaagtaaccactgggaaaa

SEQ ID NO: 613972 - DNA, 33 bp, Homo sapien
ttttctgaacctgcaatgtaaccactgggaaaa

SEQ ID NO: 613973 - DNA, 33 bp, Homo sapien
agtagaaaatggaaaacctgcttgtgagcaact

SEQ ID NO: 613974 - DNA, 33 bp, Homo sapien
agtagaaaatggaaaagctgcttgtgagcaact

SEQ ID NO: 613975 - DNA, 33 bp, Homo sapien
taaaggcatggtaatacgaatagcctacagacc

SEQ ID NO: 613976 - DNA, 33 bp, Homo sapien
taaaggcatggtaataggaatagcctacagacc

SEQ ID NO: 613977 - DNA, 33 bp, Homo sapien
tttatgttgccaaaacaattagggttcccaaca

SEQ ID NO: 613978 - DNA, 33 bp, Homo sapien
tttatgttgccaaaacgattagggttcccaaca

SEQ ID NO: 613979 - DNA, 33 bp, Homo sapien
ctgtgagagacattataaaccttgacttttcac

SEQ ID NO: 613980 - DNA, 33 bp, Homo sapien
ctgtgagagacattatgaaccttgacttttcac

SEQ ID NO: 613981 - DNA, 33 bp, Homo sapien
tcattcacaggaattacaaaaataggctctact

SEQ ID NO: 613982 - DNA, 33 bp, Homo sapien
tcattcacaggaattagaaaaataggctctact

SEQ ID NO: 613983 - DNA, 33 bp, Homo sapien
tggtcttagtacacagaaagcatgacatttcac

SEQ ID NO: 613984 - DNA, 33 bp, Homo sapien
tggtcttagtacacagcaagcatgacatttcac

SEQ ID NO: 613985 - DNA, 33 bp, Homo sapien
atcaatccttggataagggccagaactactgtt

SEQ ID NO: 613986 - DNA, 33 bp, Homo sapien
atcaatccttggataatggccagaactactgtt

SEQ ID NO: 613987 - DNA, 33 bp, Homo sapien
cttttagctctgtcatcatctgcaatttctaga

SEQ ID NO: 613988 - DNA, 33 bp, Homo sapien
cttttagctctgtcattatctgcaatttctaga

SEQ ID NO: 613989 - DNA, 33 bp, Homo sapien
atgggcagaattggcacagttaaagagaaccac

SEQ ID NO: 613990 - DNA, 33 bp, Homo sapien
atgggcagaattggcagagttaaagagaaccac

SEQ ID NO: 613991 - DNA, 33 bp, Homo sapien
tgcaataacaatgacccgatttgtcagtttgtt

SEQ ID NO: 613992 - DNA, 33 bp, Homo sapien
tgcaataacaatgacctgatttgtcagtttgtt

SEQ ID NO: 613993 - DNA, 33 bp, Homo sapien
attcccactttggagacgacatagctgaagctc

SEQ ID NO: 613994 - DNA, 33 bp, Homo sapien
attcccactttggagatgacatagctgaagctc

SEQ ID NO: 613995 - DNA, 33 bp, Homo sapien
caaatacacagacatagcaggaaccttgttttt

SEQ ID NO: 613996 - DNA, 33 bp, Homo sapien
caaatacacagacatatcaggaaccttgttttt

SEQ ID NO: 613997 - DNA, 33 bp, Homo sapien
ataagcataacctgataaatatatgtcccacag

SEQ ID NO: 613998 - DNA, 33 bp, Homo sapien
ataagcataacctgattaatatatgtcccacag

SEQ ID NO: 613999 - DNA, 33 bp, Homo sapien
atgttaaatttgaaaaagtagggatcacctgtg

SEQ ID NO: 614000 - DNA, 33 bp, Homo sapien
atgttaaatttgaaaaggtagggatcacctgtg

SEQ ID NO: 614001 - DNA, 33 bp, Homo sapien
ctaattttatcctgaaagttgtggaagtcatat

SEQ ID NO: 614002 - DNA, 33 bp, Homo sapien
ctaattttatcctgaacgttgtggaagtcatat

SEQ ID NO: 614003 - DNA, 33 bp, Homo sapien
agcccaaccaagttaactgtctgccaaagcaaa

SEQ ID NO: 614004 - DNA, 33 bp, Homo sapien
agcccaaccaagttaattgtctgccaaagcaaa

SEQ ID NO: 614005 - DNA, 33 bp, Homo sapien
actgggaatattactacagcgtttggaaacatt

SEQ ID NO: 614006 - DNA, 33 bp, Homo sapien
actgggaatattactatagcgtttggaaacatt

SEQ ID NO: 614007 - DNA, 33 bp, Homo sapien
ccacaaaggagtgcccaagccttccagagatga

SEQ ID NO: 614008 - DNA, 33 bp, Homo sapien
ccacaaaggagtgcccgagccttccagagatga

SEQ ID NO: 614009 - DNA, 33 bp, Homo sapien
taaattgtagtcccccaaatttctttccatgtc

SEQ ID NO: 614010 - DNA, 33 bp, Homo sapien
taaattgtagtcccccgaatttctttccatgtc

SEQ ID NO: 614011 - DNA, 33 bp, Homo sapien
gaatctgtgcccttttaaaaactgagcattgtg

SEQ ID NO: 614012 - DNA, 33 bp, Homo sapien
gaatctgtgccctttttaaaactgagcattgtg

SEQ ID NO: 614013 - DNA, 33 bp, Homo sapien
tgtcgcatccctatcgcatttgcatgcatgtca

SEQ ID NO: 614014 - DNA, 33 bp, Homo sapien
tgtcgcatccctatcgtatttgcatgcatgtca

SEQ ID NO: 614015 - DNA, 33 bp, Homo sapien
ttctgtcccagtgcgacaggtgttgtagactcc

SEQ ID NO: 614016 - DNA, 33 bp, Homo sapien
ttctgtcccagtgcgagaggtgttgtagactcc

SEQ ID NO: 614017 - DNA, 33 bp, Homo sapien
tagtctgggtgaaatccactgtactagtgccac

SEQ ID NO: 614018 - DNA, 33 bp, Homo sapien
tagtctgggtgaaatctactgtactagtgccac

SEQ ID NO: 614019 - DNA, 33 bp, Homo sapien
atgtaatggatatataaagccaggtgcaagcca

SEQ ID NO: 614020 - DNA, 33 bp, Homo sapien
atgtaatggatatatacagccaggtgcaagcca

SEQ ID NO: 614021 - DNA, 33 bp, Homo sapien
ctttcatatttctacaaggggtgactgttggtg

SEQ ID NO: 614022 - DNA, 33 bp, Homo sapien
ctttcatatttctacagggggtgactgttggtg

SEQ ID NO: 614023 - DNA, 33 bp, Homo sapien
gggtcagcgacacagacggacttccgtggctac

SEQ ID NO: 614024 - DNA, 33 bp, Homo sapien
gggtcagcgacacagatggacttccgtggctac

SEQ ID NO: 614025 - DNA, 33 bp, Homo sapien
tgtatctgccagaactaaaattctttgttttaa

SEQ ID NO: 614026 - DNA, 33 bp, Homo sapien
tgtatctgccagaactgaaattctttgttttaa

SEQ ID NO: 614027 - DNA, 33 bp, Homo sapien
aagatttgaaacaaccaggaaggttcttaaatg

SEQ ID NO: 614028 - DNA, 33 bp, Homo sapien
aagatttgaaacaacccggaaggttcttaaatg

SEQ ID NO: 614029 - DNA, 33 bp, Homo sapien
tagttccgagtgaattaaagtgcctgaggtctg

SEQ ID NO: 614030 - DNA, 33 bp, Homo sapien
tagttccgagtgaattcaagtgcctgaggtctg

SEQ ID NO: 614031 - DNA, 33 bp, Homo sapien
gcagaagctctgtgaaacttactcagcagatcc

SEQ ID NO: 614032 - DNA, 33 bp, Homo sapien
gcagaagctctgtgaatcttactcagcagatcc

SEQ ID NO: 614033 - DNA, 33 bp, Homo sapien
cccacatgacattaccacttgcctgtgtaacat

SEQ ID NO: 614034 - DNA, 33 bp, Homo sapien
cccacatgacattaccgcttgcctgtgtaacat

SEQ ID NO: 614035 - DNA, 33 bp, Homo sapien
ggtgcactaaagtactcaaaaatccttggttgt

SEQ ID NO: 614036 - DNA, 33 bp, Homo sapien
ggtgcactaaagtactgaaaaatccttggttgt

SEQ ID NO: 614037 - DNA, 33 bp, Homo sapien
ttcaagtgtaaaactcaatttggaggcaaatgt

SEQ ID NO: 614038 - DNA, 33 bp, Homo sapien
ttcaagtgtaaaactcgatttggaggcaaatgt

SEQ ID NO: 614039 - DNA, 33 bp, Homo sapien
ttataattgagccacaagttaacatttttgaat

SEQ ID NO: 614040 - DNA, 33 bp, Homo sapien
ttataattgagccacaggttaacatttttgaat

SEQ ID NO: 614041 - DNA, 33 bp, Homo sapien
caccctaagtgccttacagtggtgccacatttg

SEQ ID NO: 614042 - DNA, 33 bp, Homo sapien
caccctaagtgccttagagtggtgccacatttg

SEQ ID NO: 614043 - DNA, 33 bp, Homo sapien
aataagcaaacacaaacgtaaagcaataaaaaa

SEQ ID NO: 614044 - DNA, 33 bp, Homo sapien
aataagcaaacacaaaggtaaagcaataaaaaa

SEQ ID NO: 614045 - DNA, 33 bp, Homo sapien
agaaaaaaaaagcgtgaaggagagaatctgctg

SEQ ID NO: 614046 - DNA, 33 bp, Homo sapien
agaaaaaaaaagcgtggaggagagaatctgctg

SEQ ID NO: 614047 - DNA, 33 bp, Homo sapien
gcattagacaaataacacaaaaagtctttagtg

SEQ ID NO: 614048 - DNA, 33 bp, Homo sapien
gcattagacaaataacgcaaaaagtctttagtg

SEQ ID NO: 614049 - DNA, 33 bp, Homo sapien
aaatatcttttctgtcgacagttgtaatcagag

SEQ ID NO: 614050 - DNA, 33 bp, Homo sapien
aaatatcttttctgtctacagttgtaatcagag

SEQ ID NO: 614051 - DNA, 33 bp, Homo sapien
ccaagggaaatgctaccgacacctaggcgatac

SEQ ID NO: 614052 - DNA, 33 bp, Homo sapien
ccaagggaaatgctactgacacctaggcgatac

SEQ ID NO: 614053 - DNA, 33 bp, Homo sapien
gaagaatgaaactgtcccctacttttcaccatt

SEQ ID NO: 614054 - DNA, 33 bp, Homo sapien
gaagaatgaaactgtctcctacttttcaccatt

SEQ ID NO: 614055 - DNA, 33 bp, Homo sapien
tgacaaaaataggcaacgcagaaaggactccct

SEQ ID NO: 614056 - DNA, 33 bp, Homo sapien
tgacaaaaataggcaatgcagaaaggactccct

SEQ ID NO: 614057 - DNA, 33 bp, Homo sapien
gctcaatagcagaatgaagtgggacagatttat

SEQ ID NO: 614058 - DNA, 33 bp, Homo sapien
gctcaatagcagaatggagtgggacagatttat

SEQ ID NO: 614059 - DNA, 33 bp, Homo sapien
ctagcagaaacaggaacgtcttattacttcttc

SEQ ID NO: 614060 - DNA, 33 bp, Homo sapien
ctagcagaaacaggaatgtcttattacttcttc

SEQ ID NO: 614061 - DNA, 33 bp, Homo sapien
ttgtcaatggtaacggacccttcataacttttg

SEQ ID NO: 614062 - DNA, 33 bp, Homo sapien
ttgtcaatggtaacggccccttcataacttttg

SEQ ID NO: 614063 - DNA, 33 bp, Homo sapien
acttggaaagagttgaagtctaggatatccctt

SEQ ID NO: 614064 - DNA, 33 bp, Homo sapien
acttggaaagagttgaggtctaggatatccctt

SEQ ID NO: 614065 - DNA, 33 bp, Homo sapien
gcttattgcggatcaactctccggttaagaact

SEQ ID NO: 614066 - DNA, 33 bp, Homo sapien
gcttattgcggatcaattctccggttaagaact

SEQ ID NO: 614067 - DNA, 33 bp, Homo sapien
aggtattctgatcagaaacgaacacatgccctg

SEQ ID NO: 614068 - DNA, 33 bp, Homo sapien
aggtattctgatcagatacgaacacatgccctg

SEQ ID NO: 614069 - DNA, 33 bp, Homo sapien
taaaatgtgatagaaagtataggtattacttcc

SEQ ID NO: 614070 - DNA, 33 bp, Homo sapien
taaaatgtgatagaaattataggtattacttcc

SEQ ID NO: 614071 - DNA, 33 bp, Homo sapien
gtttagacagtaatgacattctgtagaaacaag

SEQ ID NO: 614072 - DNA, 33 bp, Homo sapien
gtttagacagtaatgatattctgtagaaacaag

SEQ ID NO: 614073 - DNA, 33 bp, Homo sapien
ccatctctatgttcaccatgaagtcctttcttc

SEQ ID NO: 614074 - DNA, 33 bp, Homo sapien
ccatctctatgttcacgatgaagtcctttcttc

SEQ ID NO: 614075 - DNA, 33 bp, Homo sapien
cattgtatcactactccacaactatgctatata

SEQ ID NO: 614076 - DNA, 33 bp, Homo sapien
cattgtatcactactctacaactatgctatata

SEQ ID NO: 614077 - DNA, 33 bp, Homo sapien
tgtacatcagggactaacataactggaagttct

SEQ ID NO: 614078 - DNA, 33 bp, Homo sapien
tgtacatcagggactagcataactggaagttct

SEQ ID NO: 614079 - DNA, 33 bp, Homo sapien
taactggaagttctccagctctttcaatgttga

SEQ ID NO: 614080 - DNA, 33 bp, Homo sapien
taactggaagttctccggctctttcaatgttga

SEQ ID NO: 614081 - DNA, 33 bp, Homo sapien
agagatcttcatccacgatggccaaataggaag

SEQ ID NO: 614082 - DNA, 33 bp, Homo sapien
agagatcttcatccactatggccaaataggaag

SEQ ID NO: 614083 - DNA, 33 bp, Homo sapien
aaggggaggcagttatcaccaaagttgattgac

SEQ ID NO: 614084 - DNA, 33 bp, Homo sapien
aaggggaggcagttattaccaaagttgattgac

SEQ ID NO: 614085 - DNA, 33 bp, Homo sapien
tttctttattttataggcaaggaagctaaacct

SEQ ID NO: 614086 - DNA, 33 bp, Homo sapien
tttctttattttatagtcaaggaagctaaacct

SEQ ID NO: 614087 - DNA, 33 bp, Homo sapien
tttccaaatttcctaacacaatctggaagctat

SEQ ID NO: 614088 - DNA, 33 bp, Homo sapien
tttccaaatttcctaagacaatctggaagctat

SEQ ID NO: 614089 - DNA, 33 bp, Homo sapien
ccacctaattcaccctaaaggactatgaaattc

SEQ ID NO: 614090 - DNA, 33 bp, Homo sapien
ccacctaattcacccttaaggactatgaaattc

SEQ ID NO: 614091 - DNA, 33 bp, Homo sapien
tctgtgtttatgataacaccatgctgttttgat

SEQ ID NO: 614092 - DNA, 33 bp, Homo sapien
tctgtgtttatgataataccatgctgttttgat

SEQ ID NO: 614093 - DNA, 33 bp, Homo sapien
gctgttttgattgctacatctctgtaatacagt

SEQ ID NO: 614094 - DNA, 33 bp, Homo sapien
gctgttttgattgctatatctctgtaatacagt

SEQ ID NO: 614095 - DNA, 33 bp, Homo sapien
gacacacaaagatatacagacatcctgcctgtg

SEQ ID NO: 614096 - DNA, 33 bp, Homo sapien
gacacacaaagatatatagacatcctgcctgtg

SEQ ID NO: 614097 - DNA, 33 bp, Homo sapien
tatttcacttctggaccgactgtaaatcttttg

SEQ ID NO: 614098 - DNA, 33 bp, Homo sapien
tatttcacttctggactgactgtaaatcttttg

SEQ ID NO: 614099 - DNA, 33 bp, Homo sapien
catggctttctccccccggctgtacgtctgtac

SEQ ID NO: 614100 - DNA, 33 bp, Homo sapien
catggctttctccccctggctgtacgtctgtac

SEQ ID NO: 614101 - DNA, 33 bp, Homo sapien
ctccatgcctattgtccaacactctcgctggaa

SEQ ID NO: 614102 - DNA, 33 bp, Homo sapien
ctccatgcctattgtctaacactctcgctggaa

SEQ ID NO: 614103 - DNA, 33 bp, Homo sapien
tgtctacactgttcctcaaacatagaaactcat

SEQ ID NO: 614104 - DNA, 33 bp, Homo sapien
tgtctacactgttcctgaaacatagaaactcat

SEQ ID NO: 614105 - DNA, 33 bp, Homo sapien
aatatgtctaatcggacaccagcaagtcaacag

SEQ ID NO: 614106 - DNA, 33 bp, Homo sapien
aatatgtctaatcggagaccagcaagtcaacag

SEQ ID NO: 614107 - DNA, 33 bp, Homo sapien
taaagcaagtcagtcacgagaaagcataaggga

SEQ ID NO: 614108 - DNA, 33 bp, Homo sapien
taaagcaagtcagtcatgagaaagcataaggga

SEQ ID NO: 614109 - DNA, 33 bp, Homo sapien
tgataggccaccagaacgctgtctggagtatgt

SEQ ID NO: 614110 - DNA, 33 bp, Homo sapien
tgataggccaccagaatgctgtctggagtatgt

SEQ ID NO: 614111 - DNA, 33 bp, Homo sapien
taccgcagttttagaaagacaggaatccaggag

SEQ ID NO: 614112 - DNA, 33 bp, Homo sapien
taccgcagttttagaaggacaggaatccaggag

SEQ ID NO: 614113 - DNA, 33 bp, Homo sapien
aaacagaccattgaaccccaaggaactccagaa

SEQ ID NO: 614114 - DNA, 33 bp, Homo sapien
aaacagaccattgaactccaaggaactccagaa

SEQ ID NO: 614115 - DNA, 33 bp, Homo sapien
ctgtctcaaaagtggggattctaagcagactct

SEQ ID NO: 614116 - DNA, 33 bp, Homo sapien
ctgtctcaaaagtgggtattctaagcagactct

SEQ ID NO: 614117 - DNA, 33 bp, Homo sapien
tacactcaatttccaaaaagtaagactcatctc

SEQ ID NO: 614118 - DNA, 33 bp, Homo sapien
tacactcaatttccaacaagtaagactcatctc

SEQ ID NO: 614119 - DNA, 33 bp, Homo sapien
taacctcattaagttgaaaagcatggtggatga

SEQ ID NO: 614120 - DNA, 33 bp, Homo sapien
taacctcattaagttggaaagcatggtggatga

SEQ ID NO: 614121 - DNA, 33 bp, Homo sapien
gatttcaagacacctaaagcaacgttctaccca

SEQ ID NO: 614122 - DNA, 33 bp, Homo sapien
gatttcaagacacctagagcaacgttctaccca

SEQ ID NO: 614123 - DNA, 33 bp, Homo sapien
gtgttgcaaagagaacaattctatcattttacc

SEQ ID NO: 614124 - DNA, 33 bp, Homo sapien
gtgttgcaaagagaacgattctatcattttacc

SEQ ID NO: 614125 - DNA, 33 bp, Homo sapien
tcccataatattttacactcaaggcccaattaa

SEQ ID NO: 614126 - DNA, 33 bp, Homo sapien
tcccataatattttactctcaaggcccaattaa

SEQ ID NO: 614127 - DNA, 33 bp, Homo sapien
tgttcttcactgacaacttcaaagacttgttca

SEQ ID NO: 614128 - DNA, 33 bp, Homo sapien
tgttcttcactgacaatttcaaagacttgttca

SEQ ID NO: 614129 - DNA, 33 bp, Homo sapien
gtacctgcctccaaaacagaaagttcattttca

SEQ ID NO: 614130 - DNA, 33 bp, Homo sapien
gtacctgcctccaaaatagaaagttcattttca

SEQ ID NO: 614131 - DNA, 33 bp, Homo sapien
tttcagataattgaaaaacatttgggagttaaa

SEQ ID NO: 614132 - DNA, 33 bp, Homo sapien
tttcagataattgaaagacatttgggagttaaa

SEQ ID NO: 614133 - DNA, 33 bp, Homo sapien
tttgatcatagccattcaacaaatctctgggaa

SEQ ID NO: 614134 - DNA, 33 bp, Homo sapien
tttgatcatagccatttaacaaatctctgggaa

SEQ ID NO: 614135 - DNA, 33 bp, Homo sapien
attacagaggtgttacaattcaaagtctggaaa

SEQ ID NO: 614136 - DNA, 33 bp, Homo sapien
attacagaggtgttactattcaaagtctggaaa

SEQ ID NO: 614137 - DNA, 33 bp, Homo sapien
gtgagcaagctcatgaggtgctagtctttctgt

SEQ ID NO: 614138 - DNA, 33 bp, Homo sapien
gtgagcaagctcatgatgtgctagtctttctgt

SEQ ID NO: 614139 - DNA, 33 bp, Homo sapien
gaaaaagtttgttctcaaaatgtggataattca

SEQ ID NO: 614140 - DNA, 33 bp, Homo sapien
gaaaaagtttgttctctaaatgtggataattca

SEQ ID NO: 614141 - DNA, 33 bp, Homo sapien
ttagagaaagcaaaatgaaagtgcatctacaat

SEQ ID NO: 614142 - DNA, 33 bp, Homo sapien
ttagagaaagcaaaattaaagtgcatctacaat

SEQ ID NO: 614143 - DNA, 33 bp, Homo sapien
gcactcttttcctcatcagcaaggccccagatg

SEQ ID NO: 614144 - DNA, 33 bp, Homo sapien
gcactcttttcctcattagcaaggccccagatg

SEQ ID NO: 614145 - DNA, 33 bp, Homo sapien
atatagttaatacacgaataagccagaagaatt

SEQ ID NO: 614146 - DNA, 33 bp, Homo sapien
atatagttaatacacgcataagccagaagaatt

SEQ ID NO: 614147 - DNA, 33 bp, Homo sapien
tacatctgcatctttgcaattcttctggcttat

SEQ ID NO: 614148 - DNA, 33 bp, Homo sapien
tacatctgcatctttgtaattcttctggcttat

SEQ ID NO: 614149 - DNA, 33 bp, Homo sapien
gatgcaattagagataagctttaggaagatctt

SEQ ID NO: 614150 - DNA, 33 bp, Homo sapien
gatgcaattagagataggctttaggaagatctt

SEQ ID NO: 614151 - DNA, 33 bp, Homo sapien
ggagtgttgttgaagcacttccaaataacctgt

SEQ ID NO: 614152 - DNA, 33 bp, Homo sapien
ggagtgttgttgaagctcttccaaataacctgt

SEQ ID NO: 614153 - DNA, 33 bp, Homo sapien
cccaagataaagcaccaaaggcagttaatttta

SEQ ID NO: 614154 - DNA, 33 bp, Homo sapien
cccaagataaagcaccgaaggcagttaatttta

SEQ ID NO: 614155 - DNA, 33 bp, Homo sapien
aaccccagaattataaaaggtactgtgaatttg

SEQ ID NO: 614156 - DNA, 33 bp, Homo sapien
aaccccagaattataacaggtactgtgaatttg

SEQ ID NO: 614157 - DNA, 33 bp, Homo sapien
ctcctttctcctcaaaattgtaaatgtgccagt

SEQ ID NO: 614158 - DNA, 33 bp, Homo sapien
ctcctttctcctcaaacttgtaaatgtgccagt

SEQ ID NO: 614159 - DNA, 33 bp, Homo sapien
atgcacgccaataactaaaaagggctagattgg

SEQ ID NO: 614160 - DNA, 33 bp, Homo sapien
atgcacgccaataactgaaaagggctagattgg

SEQ ID NO: 614161 - DNA, 33 bp, Homo sapien
agaaatggaagaggaacattatcacatgtacaa

SEQ ID NO: 614162 - DNA, 33 bp, Homo sapien
agaaatggaagaggaagattatcacatgtacaa

SEQ ID NO: 614163 - DNA, 33 bp, Homo sapien
gacaacctcattgtaacggtaaatcaagtcaaa

SEQ ID NO: 614164 - DNA, 33 bp, Homo sapien
gacaacctcattgtaatggtaaatcaagtcaaa

SEQ ID NO: 614165 - DNA, 33 bp, Homo sapien
ctatttgcaaacacaacggattccagtttttat

SEQ ID NO: 614166 - DNA, 33 bp, Homo sapien
ctatttgcaaacacaatggattccagtttttat

SEQ ID NO: 614167 - DNA, 33 bp, Homo sapien
aactctatgtggtagccgcatttctgtttgtgt

SEQ ID NO: 614168 - DNA, 33 bp, Homo sapien
aactctatgtggtagctgcatttctgtttgtgt

SEQ ID NO: 614169 - DNA, 33 bp, Homo sapien
ttgtctgttcaattcactatgtaatcatttctt

SEQ ID NO: 614170 - DNA, 33 bp, Homo sapien
ttgtctgttcaattcagtatgtaatcatttctt

SEQ ID NO: 614171 - DNA, 33 bp, Homo sapien
gtgctagtcactgtgccgaggattaaatatatt

SEQ ID NO: 614172 - DNA, 33 bp, Homo sapien
gtgctagtcactgtgctgaggattaaatatatt

SEQ ID NO: 614173 - DNA, 33 bp, Homo sapien
acatgagctttgcctactaggaactcacattgt

SEQ ID NO: 614174 - DNA, 33 bp, Homo sapien
acatgagctttgcctagtaggaactcacattgt

SEQ ID NO: 614175 - DNA, 33 bp, Homo sapien
aactcacattgtcttacgaattctgataaggcc

SEQ ID NO: 614176 - DNA, 33 bp, Homo sapien
aactcacattgtcttatgaattctgataaggcc

SEQ ID NO: 614177 - DNA, 33 bp, Homo sapien
gctcacggaattcttaacctatgcactgttatt

SEQ ID NO: 614178 - DNA, 33 bp, Homo sapien
gctcacggaattcttagcctatgcactgttatt

SEQ ID NO: 614179 - DNA, 33 bp, Homo sapien
tcataagtgctctaggacataaccaataagcag

SEQ ID NO: 614180 - DNA, 33 bp, Homo sapien
tcataagtgctctagggcataaccaataagcag

SEQ ID NO: 614181 - DNA, 33 bp, Homo sapien
tccacaaattttcaaaatagcaaccaggataaa

SEQ ID NO: 614182 - DNA, 33 bp, Homo sapien
tccacaaattttcaaagtagcaaccaggataaa

SEQ ID NO: 614183 - DNA, 33 bp, Homo sapien
aatgagttaaaatctacgagcttcattgccatt

SEQ ID NO: 614184 - DNA, 33 bp, Homo sapien
aatgagttaaaatctatgagcttcattgccatt

SEQ ID NO: 614185 - DNA, 33 bp, Homo sapien
atggaatttaagtagacacagtttagtttaact

SEQ ID NO: 614186 - DNA, 33 bp, Homo sapien
atggaatttaagtagagacagtttagtttaact

SEQ ID NO: 614187 - DNA, 33 bp, Homo sapien
tttcccgaattatccaactcatacccttctgag

SEQ ID NO: 614188 - DNA, 33 bp, Homo sapien
tttcccgaattatccacctcatacccttctgag

SEQ ID NO: 614189 - DNA, 33 bp, Homo sapien
tggatgatatcatttgaagagttaatcaaaaca

SEQ ID NO: 614190 - DNA, 33 bp, Homo sapien
tggatgatatcatttggagagttaatcaaaaca

SEQ ID NO: 614191 - DNA, 33 bp, Homo sapien
agctctaatttggtcaccacttcctgcttgtac

SEQ ID NO: 614192 - DNA, 33 bp, Homo sapien
agctctaatttggtcatcacttcctgcttgtac

SEQ ID NO: 614193 - DNA, 33 bp, Homo sapien
taatttacctgttgaagaatgtcagtagtttag

SEQ ID NO: 614194 - DNA, 33 bp, Homo sapien
taatttacctgttgaataatgtcagtagtttag

SEQ ID NO: 614195 - DNA, 33 bp, Homo sapien
cttaaatccaatcctacgtgtctatactctctt

SEQ ID NO: 614196 - DNA, 33 bp, Homo sapien
cttaaatccaatcctatgtgtctatactctctt

SEQ ID NO: 614197 - DNA, 33 bp, Homo sapien
ttactctcatgaggacagccaacctcaagatga

SEQ ID NO: 614198 - DNA, 33 bp, Homo sapien
ttactctcatgaggacggccaacctcaagatga

SEQ ID NO: 614199 - DNA, 33 bp, Homo sapien
agaaacttaaacctgaagtgaaatcacttgctg

SEQ ID NO: 614200 - DNA, 33 bp, Homo sapien
agaaacttaaacctgatgtgaaatcacttgctg

SEQ ID NO: 614201 - DNA, 33 bp, Homo sapien
agttttgagacagtaacggtactactctagctc

SEQ ID NO: 614202 - DNA, 33 bp, Homo sapien
agttttgagacagtaatggtactactctagctc

SEQ ID NO: 614203 - DNA, 33 bp, Homo sapien
ttttgtggaattaagcacaagaaagaactgctt

SEQ ID NO: 614204 - DNA, 33 bp, Homo sapien
ttttgtggaattaagcccaagaaagaactgctt

SEQ ID NO: 614205 - DNA, 33 bp, Homo sapien
ctgggagccacatctaaacactggttaacatac

SEQ ID NO: 614206 - DNA, 33 bp, Homo sapien
ctgggagccacatctagacactggttaacatac

SEQ ID NO: 614207 - DNA, 33 bp, Homo sapien
tcttagttaaatttacaagtccaagagcaaaat

SEQ ID NO: 614208 - DNA, 33 bp, Homo sapien
tcttagttaaatttacgagtccaagagcaaaat

SEQ ID NO: 614209 - DNA, 33 bp, Homo sapien
tgcaatgtgtcagttacagttttaggcactatt

SEQ ID NO: 614210 - DNA, 33 bp, Homo sapien
tgcaatgtgtcagttatagttttaggcactatt

SEQ ID NO: 614211 - DNA, 33 bp, Homo sapien
aagaatagagcgataaaattggacactggtatg

SEQ ID NO: 614212 - DNA, 33 bp, Homo sapien
aagaatagagcgataacattggacactggtatg

SEQ ID NO: 614213 - DNA, 33 bp, Homo sapien
aatctagagaaacaaactgattcaagatgcgat

SEQ ID NO: 614214 - DNA, 33 bp, Homo sapien
aatctagagaaacaaagtgattcaagatgcgat

SEQ ID NO: 614215 - DNA, 33 bp, Homo sapien
agtacaagagcaggtaacacgagtcataaatct

SEQ ID NO: 614216 - DNA, 33 bp, Homo sapien
agtacaagagcaggtaccacgagtcataaatct

SEQ ID NO: 614217 - DNA, 33 bp, Homo sapien
ataaatctacttgcaacataagccaggagtcta

SEQ ID NO: 614218 - DNA, 33 bp, Homo sapien
ataaatctacttgcaatataagccaggagtcta

SEQ ID NO: 614219 - DNA, 33 bp, Homo sapien
ttctgaataaacacaacgttagtttcctttaag

SEQ ID NO: 614220 - DNA, 33 bp, Homo sapien
ttctgaataaacacaatgttagtttcctttaag

SEQ ID NO: 614221 - DNA, 33 bp, Homo sapien
agctgtttttccttaaacaacataggcactcat

SEQ ID NO: 614222 - DNA, 33 bp, Homo sapien
agctgtttttccttaagcaacataggcactcat

SEQ ID NO: 614223 - DNA, 33 bp, Homo sapien
ctacaattcaaccataaatcagtgttaaataca

SEQ ID NO: 614224 - DNA, 33 bp, Homo sapien
ctacaattcaaccatatatcagtgttaaataca

SEQ ID NO: 614225 - DNA, 33 bp, Homo sapien
attagatgtatgagaacgtcccaacaatccttt

SEQ ID NO: 614226 - DNA, 33 bp, Homo sapien
attagatgtatgagaatgtcccaacaatccttt

SEQ ID NO: 614227 - DNA, 33 bp, Homo sapien
tggagttcatctccaagtatagaaaacgagaag

SEQ ID NO: 614228 - DNA, 33 bp, Homo sapien
tggagttcatctccaattatagaaaacgagaag

SEQ ID NO: 614229 - DNA, 33 bp, Homo sapien
ttccaatatcctaaaaatagacaacacagagct

SEQ ID NO: 614230 - DNA, 33 bp, Homo sapien
ttccaatatcctaaaactagacaacacagagct

SEQ ID NO: 614231 - DNA, 33 bp, Homo sapien
cactcctaatacactaccttcagccccattaaa

SEQ ID NO: 614232 - DNA, 33 bp, Homo sapien
cactcctaatacactatcttcagccccattaaa

SEQ ID NO: 614233 - DNA, 33 bp, Homo sapien
agaattttaaaggtggaaatgcaggcctaagtt

SEQ ID NO: 614234 - DNA, 33 bp, Homo sapien
agaattttaaaggtggcaatgcaggcctaagtt

SEQ ID NO: 614235 - DNA, 33 bp, Homo sapien
gaccactaagagaagacgacaggcaggtaattg

SEQ ID NO: 614236 - DNA, 33 bp, Homo sapien
gaccactaagagaagatgacaggcaggtaattg

SEQ ID NO: 614237 - DNA, 33 bp, Homo sapien
taacacagtctgaagaaatggagcaaacaccat

SEQ ID NO: 614238 - DNA, 33 bp, Homo sapien
taacacagtctgaagagatggagcaaacaccat

SEQ ID NO: 614239 - DNA, 33 bp, Homo sapien
ttcttcaacttttacactaccctgcttggaatg

SEQ ID NO: 614240 - DNA, 33 bp, Homo sapien
ttcttcaacttttacattaccctgcttggaatg

SEQ ID NO: 614241 - DNA, 33 bp, Homo sapien
gcttccctgaggtgcacacattaagctctcttg

SEQ ID NO: 614242 - DNA, 33 bp, Homo sapien
gcttccctgaggtgcatacattaagctctcttg

SEQ ID NO: 614243 - DNA, 33 bp, Homo sapien
taatggctaccatgttaaacagcacaatatcta

SEQ ID NO: 614244 - DNA, 33 bp, Homo sapien
taatggctaccatgttgaacagcacaatatcta

SEQ ID NO: 614245 - DNA, 33 bp, Homo sapien
cataccagggctaaatcatattaaaaatttttg

SEQ ID NO: 614246 - DNA, 33 bp, Homo sapien
cataccagggctaaatgatattaaaaatttttg

SEQ ID NO: 614247 - DNA, 33 bp, Homo sapien
tggattaacacaattcactttgaagaggctcat

SEQ ID NO: 614248 - DNA, 33 bp, Homo sapien
tggattaacacaattcgctttgaagaggctcat

SEQ ID NO: 614249 - DNA, 33 bp, Homo sapien
aggccacttctgaggacggttgcattcctcttt

SEQ ID NO: 614250 - DNA, 33 bp, Homo sapien
aggccacttctgaggatggttgcattcctcttt

SEQ ID NO: 614251 - DNA, 33 bp, Homo sapien
agatttcagctcaatcacaatttccataaaagt

SEQ ID NO: 614252 - DNA, 33 bp, Homo sapien
agatttcagctcaatcgcaatttccataaaagt

SEQ ID NO: 614253 - DNA, 33 bp, Homo sapien
aatcaaaaaacaagctaaagtagcaatgtcagt

SEQ ID NO: 614254 - DNA, 33 bp, Homo sapien
aatcaaaaaacaagctgaagtagcaatgtcagt

SEQ ID NO: 614255 - DNA, 33 bp, Homo sapien
gtcagtatcagacaaaatacgcctcagaacaag

SEQ ID NO: 614256 - DNA, 33 bp, Homo sapien
gtcagtatcagacaaagtacgcctcagaacaag

SEQ ID NO: 614257 - DNA, 33 bp, Homo sapien
caacttcataggtgtacaagctggaaaattgcc

SEQ ID NO: 614258 - DNA, 33 bp, Homo sapien
caacttcataggtgtataagctggaaaattgcc

SEQ ID NO: 614259 - DNA, 33 bp, Homo sapien
acagtaggagaaagaaagggaacaacccaacca

SEQ ID NO: 614260 - DNA, 33 bp, Homo sapien
acagtaggagaaagaaggggaacaacccaacca

SEQ ID NO: 614261 - DNA, 33 bp, Homo sapien
taataatctggacacacgaatccactattggag

SEQ ID NO: 614262 - DNA, 33 bp, Homo sapien
taataatctggacacatgaatccactattggag

SEQ ID NO: 614263 - DNA, 33 bp, Homo sapien
ctgtggagaaaaaacacctgattgacttttggg

SEQ ID NO: 614264 - DNA, 33 bp, Homo sapien
ctgtggagaaaaaacatctgattgacttttggg

SEQ ID NO: 614265 - DNA, 33 bp, Homo sapien
atctatgaacagcttacctgtacaagaggcatt

SEQ ID NO: 614266 - DNA, 33 bp, Homo sapien
atctatgaacagcttatctgtacaagaggcatt

SEQ ID NO: 614267 - DNA, 33 bp, Homo sapien
agttgtgaaccaactcaatgtatttgacacgtg

SEQ ID NO: 614268 - DNA, 33 bp, Homo sapien
agttgtgaaccaactcgatgtatttgacacgtg

SEQ ID NO: 614269 - DNA, 33 bp, Homo sapien
atgtctcctacataaacattgcctgtaaatctc

SEQ ID NO: 614270 - DNA, 33 bp, Homo sapien
atgtctcctacataaatattgcctgtaaatctc

SEQ ID NO: 614271 - DNA, 33 bp, Homo sapien
gaagcattctccgctacgtattgctcctcaggt

SEQ ID NO: 614272 - DNA, 33 bp, Homo sapien
gaagcattctccgctatgtattgctcctcaggt

SEQ ID NO: 614273 - DNA, 33 bp, Homo sapien
aagcacattgtcttcacatcacacgttgaacag

SEQ ID NO: 614274 - DNA, 33 bp, Homo sapien
aagcacattgtcttcagatcacacgttgaacag

SEQ ID NO: 614275 - DNA, 33 bp, Homo sapien
tagagtaattgaagcacgattgttttttggaga

SEQ ID NO: 614276 - DNA, 33 bp, Homo sapien
tagagtaattgaagcaggattgttttttggaga

SEQ ID NO: 614277 - DNA, 33 bp, Homo sapien
actatgccagcaccacagacttgaggcaaaaca

SEQ ID NO: 614278 - DNA, 33 bp, Homo sapien
actatgccagcaccacggacttgaggcaaaaca

SEQ ID NO: 614279 - DNA, 33 bp, Homo sapien
ccccaccagaatatcactatgactcccctgtcc

SEQ ID NO: 614280 - DNA, 33 bp, Homo sapien
ccccaccagaatatcagtatgactcccctgtcc

SEQ ID NO: 614281 - DNA, 33 bp, Homo sapien
agtatatgagctccaaattccaagaacttaaaa

SEQ ID NO: 614282 - DNA, 33 bp, Homo sapien
agtatatgagctccaatttccaagaacttaaaa

SEQ ID NO: 614283 - DNA, 33 bp, Homo sapien
agccatgaagatgaataaaattatgtcctttgc

SEQ ID NO: 614284 - DNA, 33 bp, Homo sapien
agccatgaagatgaatgaaattatgtcctttgc

SEQ ID NO: 614285 - DNA, 33 bp, Homo sapien
ggtattagagtaggcaaactggatacctagaca

SEQ ID NO: 614286 - DNA, 33 bp, Homo sapien
ggtattagagtaggcagactggatacctagaca

SEQ ID NO: 614287 - DNA, 33 bp, Homo sapien
aataagtagatgtgaacgaaataaacatatttc

SEQ ID NO: 614288 - DNA, 33 bp, Homo sapien
aataagtagatgtgaatgaaataaacatatttc

SEQ ID NO: 614289 - DNA, 33 bp, Homo sapien
atattcgccaagtttcccttttattattaggaa

SEQ ID NO: 614290 - DNA, 33 bp, Homo sapien
atattcgccaagtttctcttttattattaggaa

SEQ ID NO: 614291 - DNA, 33 bp, Homo sapien
ggggaagacaggtataacataaagtagttcaaa

SEQ ID NO: 614292 - DNA, 33 bp, Homo sapien
ggggaagacaggtatatcataaagtagttcaaa

SEQ ID NO: 614293 - DNA, 33 bp, Homo sapien
gcaattacatgaagtactaaccacattgatctc

SEQ ID NO: 614294 - DNA, 33 bp, Homo sapien
gcaattacatgaagtattaaccacattgatctc

SEQ ID NO: 614295 - DNA, 33 bp, Homo sapien
attgctttaatcccagcccagctaacacattac

SEQ ID NO: 614296 - DNA, 33 bp, Homo sapien
attgctttaatcccaggccagctaacacattac

SEQ ID NO: 614297 - DNA, 33 bp, Homo sapien
gattaaagcaatcatgaagcaagcctgttgcct

SEQ ID NO: 614298 - DNA, 33 bp, Homo sapien
gattaaagcaatcatggagcaagcctgttgcct

SEQ ID NO: 614299 - DNA, 33 bp, Homo sapien
tcagaacagagtcaacaatttttagcaacatgt

SEQ ID NO: 614300 - DNA, 33 bp, Homo sapien
tcagaacagagtcaactatttttagcaacatgt

SEQ ID NO: 614301 - DNA, 33 bp, Homo sapien
caaatggctgaagacaatatcctaatagctttg

SEQ ID NO: 614302 - DNA, 33 bp, Homo sapien
caaatggctgaagacagtatcctaatagctttg

SEQ ID NO: 614303 - DNA, 33 bp, Homo sapien
cataatcataaacaccaaacttggaatctggtt

SEQ ID NO: 614304 - DNA, 33 bp, Homo sapien
cataatcataaacaccgaacttggaatctggtt

SEQ ID NO: 614305 - DNA, 33 bp, Homo sapien
agtggctggtcaagtaagaagaaagtcatcaga

SEQ ID NO: 614306 - DNA, 33 bp, Homo sapien
agtggctggtcaagtaggaagaaagtcatcaga

SEQ ID NO: 614307 - DNA, 33 bp, Homo sapien
tactagcagcatataacagagtgagtccctcca

SEQ ID NO: 614308 - DNA, 33 bp, Homo sapien
tactagcagcatataatagagtgagtccctcca

SEQ ID NO: 614309 - DNA, 33 bp, Homo sapien
cataatataatttagccaccccattcaacaagt

SEQ ID NO: 614310 - DNA, 33 bp, Homo sapien
cataatataatttagctaccccattcaacaagt

SEQ ID NO: 614311 - DNA, 33 bp, Homo sapien
tgtttccttagccccaagggtgtactagccagc

SEQ ID NO: 614312 - DNA, 33 bp, Homo sapien
tgtttccttagccccacgggtgtactagccagc

SEQ ID NO: 614313 - DNA, 33 bp, Homo sapien
tttggaatgtaactaaagcaaggttaagaggaa

SEQ ID NO: 614314 - DNA, 33 bp, Homo sapien
tttggaatgtaactaaggcaaggttaagaggaa

SEQ ID NO: 614315 - DNA, 33 bp, Homo sapien
cacagccaagttctacaagactatataaaaaag

SEQ ID NO: 614316 - DNA, 33 bp, Homo sapien
cacagccaagttctaccagactatataaaaaag

SEQ ID NO: 614317 - DNA, 33 bp, Homo sapien
tttattttttgctcacactatgtctattttggg

SEQ ID NO: 614318 - DNA, 33 bp, Homo sapien
tttattttttgctcacgctatgtctattttggg

SEQ ID NO: 614319 - DNA, 33 bp, Homo sapien
acaaatgcaatatctcaaccaattaaatgtcct

SEQ ID NO: 614320 - DNA, 33 bp, Homo sapien
acaaatgcaatatctccaccaattaaatgtcct

SEQ ID NO: 614321 - DNA, 33 bp, Homo sapien
aaattatccatgccaaatatctctaactcattt

SEQ ID NO: 614322 - DNA, 33 bp, Homo sapien
aaattatccatgccaagtatctctaactcattt

SEQ ID NO: 614323 - DNA, 33 bp, Homo sapien
tttgtacaccaccaaaaggtaaatatagctggt

SEQ ID NO: 614324 - DNA, 33 bp, Homo sapien
tttgtacaccaccaaacggtaaatatagctggt

SEQ ID NO: 614325 - DNA, 33 bp, Homo sapien
atatgtaaacatcttaagaatagagagacagtg

SEQ ID NO: 614326 - DNA, 33 bp, Homo sapien
atatgtaaacatcttaggaatagagagacagtg

SEQ ID NO: 614327 - DNA, 33 bp, Homo sapien
ggatttgcagactgaacaacctcaccctccatg

SEQ ID NO: 614328 - DNA, 33 bp, Homo sapien
ggatttgcagactgaataacctcaccctccatg

SEQ ID NO: 614329 - DNA, 33 bp, Homo sapien
ctaatcaaaggcaacccatcagaactacaagat

SEQ ID NO: 614330 - DNA, 33 bp, Homo sapien
ctaatcaaaggcaacctatcagaactacaagat

SEQ ID NO: 614331 - DNA, 33 bp, Homo sapien
gccaacagcatagagaagtcttgaggaagagga

SEQ ID NO: 614332 - DNA, 33 bp, Homo sapien
gccaacagcatagagaggtcttgaggaagagga

SEQ ID NO: 614333 - DNA, 33 bp, Homo sapien
atgataaaatgaaaaacggcgagagaggttttg

SEQ ID NO: 614334 - DNA, 33 bp, Homo sapien
atgataaaatgaaaaatggcgagagaggttttg

SEQ ID NO: 614335 - DNA, 33 bp, Homo sapien
gtacatatctccaagaacacaacttgtaaaggt

SEQ ID NO: 614336 - DNA, 33 bp, Homo sapien
gtacatatctccaagagcacaacttgtaaaggt

SEQ ID NO: 614337 - DNA, 33 bp, Homo sapien
ggtgctgaactccaacaataaagcctttgcaga

SEQ ID NO: 614338 - DNA, 33 bp, Homo sapien
ggtgctgaactccaacgataaagcctttgcaga

SEQ ID NO: 614339 - DNA, 33 bp, Homo sapien
tgatgaacgactgagtaaactgacaaacagaag

SEQ ID NO: 614340 - DNA, 33 bp, Homo sapien
tgatgaacgactgagtgaactgacaaacagaag

SEQ ID NO: 614341 - DNA, 33 bp, Homo sapien
aaacaaagacaatgaacctcaaaaatttatctc

SEQ ID NO: 614342 - DNA, 33 bp, Homo sapien
aaacaaagacaatgaagctcaaaaatttatctc

SEQ ID NO: 614343 - DNA, 33 bp, Homo sapien
ttcagaacctgagttaagacatgagcgatgatc

SEQ ID NO: 614344 - DNA, 33 bp, Homo sapien
ttcagaacctgagttacgacatgagcgatgatc

SEQ ID NO: 614345 - DNA, 33 bp, Homo sapien
gctgtgtaatgacctgcaaaattagaaagggat

SEQ ID NO: 614346 - DNA, 33 bp, Homo sapien
gctgtgtaatgacctggaaaattagaaagggat

SEQ ID NO: 614347 - DNA, 33 bp, Homo sapien
caaatttatctctagcaagctttagctattttc

SEQ ID NO: 614348 - DNA, 33 bp, Homo sapien
caaatttatctctagcgagctttagctattttc

SEQ ID NO: 614349 - DNA, 33 bp, Homo sapien
aaagaagtagtgtcaacatctgcattatttctc

SEQ ID NO: 614350 - DNA, 33 bp, Homo sapien
aaagaagtagtgtcaatatctgcattatttctc

SEQ ID NO: 614351 - DNA, 33 bp, Homo sapien
atgcatacccatgaacagcaaagaagtagtgtc

SEQ ID NO: 614352 - DNA, 33 bp, Homo sapien
atgcatacccatgaacggcaaagaagtagtgtc

SEQ ID NO: 614353 - DNA, 33 bp, Homo sapien
ctagctgtttattgtacgcatagttgtctagcc

SEQ ID NO: 614354 - DNA, 33 bp, Homo sapien
ctagctgtttattgtatgcatagttgtctagcc

SEQ ID NO: 614355 - DNA, 33 bp, Homo sapien
tggtaaccaatgataaaagatttgcataagtca

SEQ ID NO: 614356 - DNA, 33 bp, Homo sapien
tggtaaccaatgataacagatttgcataagtca

SEQ ID NO: 614357 - DNA, 33 bp, Homo sapien
gacaatagccactaggaatgaatagaagggaga

SEQ ID NO: 614358 - DNA, 33 bp, Homo sapien
gacaatagccactagggatgaatagaagggaga

SEQ ID NO: 614359 - DNA, 33 bp, Homo sapien
ttacaaggttttggacaagaataaactgagggg

SEQ ID NO: 614360 - DNA, 33 bp, Homo sapien
ttacaaggttttggaccagaataaactgagggg

SEQ ID NO: 614361 - DNA, 33 bp, Homo sapien
atttatttggaaatcacgctctcttcaaaacag

SEQ ID NO: 614362 - DNA, 33 bp, Homo sapien
atttatttggaaatcatgctctcttcaaaacag

SEQ ID NO: 614363 - DNA, 33 bp, Homo sapien
aaaattatctgaatgaataacctgccggtttat

SEQ ID NO: 614364 - DNA, 33 bp, Homo sapien
aaaattatctgaatgagtaacctgccggtttat

SEQ ID NO: 614365 - DNA, 33 bp, Homo sapien
aaaggaaaattctgccaagaacctttactcttt

SEQ ID NO: 614366 - DNA, 33 bp, Homo sapien
aaaggaaaattctgccgagaacctttactcttt

SEQ ID NO: 614367 - DNA, 33 bp, Homo sapien
aatgcaggtgattagaaactgggtccatccaac

SEQ ID NO: 614368 - DNA, 33 bp, Homo sapien
aatgcaggtgattagagactgggtccatccaac

SEQ ID NO: 614369 - DNA, 33 bp, Homo sapien
gccaactgcttttccactacatatgggattttc

SEQ ID NO: 614370 - DNA, 33 bp, Homo sapien
gccaactgcttttccattacatatgggattttc

SEQ ID NO: 614371 - DNA, 33 bp, Homo sapien
gcataaaagcacagtaataatcaatatcaaggt

SEQ ID NO: 614372 - DNA, 33 bp, Homo sapien
gcataaaagcacagtattaatcaatatcaaggt

SEQ ID NO: 614373 - DNA, 33 bp, Homo sapien
agtcattcaaggtctcgcttcagcttgcctctc

SEQ ID NO: 614374 - DNA, 33 bp, Homo sapien
agtcattcaaggtctctcttcagcttgcctctc

SEQ ID NO: 614375 - DNA, 33 bp, Homo sapien
gagattcattcggaaaagtttcatgaacacaca

SEQ ID NO: 614376 - DNA, 33 bp, Homo sapien
gagattcattcggaaaggtttcatgaacacaca

SEQ ID NO: 614377 - DNA, 33 bp, Homo sapien
taaaatgtgaaacctacaacatgatctacaagc

SEQ ID NO: 614378 - DNA, 33 bp, Homo sapien
taaaatgtgaaacctataacatgatctacaagc

SEQ ID NO: 614379 - DNA, 33 bp, Homo sapien
gtattagtacaagtgaaatgttccagtcatttg

SEQ ID NO: 614380 - DNA, 33 bp, Homo sapien
gtattagtacaagtgagatgttccagtcatttg

SEQ ID NO: 614381 - DNA, 33 bp, Homo sapien
gccaaaagtgaagttgcataagattatgttaca

SEQ ID NO: 614382 - DNA, 33 bp, Homo sapien
gccaaaagtgaagttggataagattatgttaca

SEQ ID NO: 614383 - DNA, 33 bp, Homo sapien
aaagaagagaaaaaaaataatcaccaaatccta

SEQ ID NO: 614384 - DNA, 33 bp, Homo sapien
aaagaagagaaaaaaattaatcaccaaatccta

SEQ ID NO: 614385 - DNA, 33 bp, Homo sapien
agacacagccctctgcaataggcaccattatta

SEQ ID NO: 614386 - DNA, 33 bp, Homo sapien
agacacagccctctgcgataggcaccattatta

SEQ ID NO: 614387 - DNA, 33 bp, Homo sapien
aactcctaagtccaaaatgacccttcagaaatg

SEQ ID NO: 614388 - DNA, 33 bp, Homo sapien
aactcctaagtccaaagtgacccttcagaaatg

SEQ ID NO: 614389 - DNA, 33 bp, Homo sapien
agagaatcaagaaacacggataatacaaagctt

SEQ ID NO: 614390 - DNA, 33 bp, Homo sapien
agagaatcaagaaacatggataatacaaagctt

SEQ ID NO: 614391 - DNA, 33 bp, Homo sapien
ttcttcttttggcttcacatttattattaatct

SEQ ID NO: 614392 - DNA, 33 bp, Homo sapien
ttcttcttttggcttcgcatttattattaatct

SEQ ID NO: 614393 - DNA, 33 bp, Homo sapien
tcaaaacatgatactccgaagtctggcaactta

SEQ ID NO: 614394 - DNA, 33 bp, Homo sapien
tcaaaacatgatactctgaagtctggcaactta

SEQ ID NO: 614395 - DNA, 33 bp, Homo sapien
gtcttttggtgaacaaatgaattgcatgaattt

SEQ ID NO: 614396 - DNA, 33 bp, Homo sapien
gtcttttggtgaacaagtgaattgcatgaattt

SEQ ID NO: 614397 - DNA, 33 bp, Homo sapien
ggagcagtaatggttacgggaaccacactttga

SEQ ID NO: 614398 - DNA, 33 bp, Homo sapien
ggagcagtaatggttaggggaaccacactttga

SEQ ID NO: 614399 - DNA, 33 bp, Homo sapien
tcaggaagaagaaccaacgagaagataaactag

SEQ ID NO: 614400 - DNA, 33 bp, Homo sapien
tcaggaagaagaaccagcgagaagataaactag

SEQ ID NO: 614401 - DNA, 33 bp, Homo sapien
atgacgaaaaacgacaagattctcaatcatttt

SEQ ID NO: 614402 - DNA, 33 bp, Homo sapien
atgacgaaaaacgacaggattctcaatcatttt

SEQ ID NO: 614403 - DNA, 33 bp, Homo sapien
acttttcagattttctaaaaaatgcatgaggtg

SEQ ID NO: 614404 - DNA, 33 bp, Homo sapien
acttttcagattttctcaaaaatgcatgaggtg

SEQ ID NO: 614405 - DNA, 33 bp, Homo sapien
cctgagaggcaataaaggttgtccaagcatgat

SEQ ID NO: 614406 - DNA, 33 bp, Homo sapien
cctgagaggcaataaatgttgtccaagcatgat

SEQ ID NO: 614407 - DNA, 33 bp, Homo sapien
tagagatttctgtccacccgttcatttgcttct

SEQ ID NO: 614408 - DNA, 33 bp, Homo sapien
tagagatttctgtccatccgttcatttgcttct

SEQ ID NO: 614409 - DNA, 33 bp, Homo sapien
tagatgtgacataaatgactctcaatggcatta

SEQ ID NO: 614410 - DNA, 33 bp, Homo sapien
tagatgtgacataaattactctcaatggcatta

SEQ ID NO: 614411 - DNA, 33 bp, Homo sapien
atcagtatatcttgaaaaacaagccaataatat

SEQ ID NO: 614412 - DNA, 33 bp, Homo sapien
atcagtatatcttgaacaacaagccaataatat

SEQ ID NO: 614413 - DNA, 33 bp, Homo sapien
atatttcaagtaggtaacctcacatcataggca

SEQ ID NO: 614414 - DNA, 33 bp, Homo sapien
atatttcaagtaggtaccctcacatcataggca

SEQ ID NO: 614415 - DNA, 33 bp, Homo sapien
agctggggacaaatgaaacaagctggtagaaga

SEQ ID NO: 614416 - DNA, 33 bp, Homo sapien
agctggggacaaatgagacaagctggtagaaga

SEQ ID NO: 614417 - DNA, 33 bp, Homo sapien
gaagtaaagtagcagcagctgagaagaaagggt

SEQ ID NO: 614418 - DNA, 33 bp, Homo sapien
gaagtaaagtagcagccgctgagaagaaagggt

SEQ ID NO: 614419 - DNA, 33 bp, Homo sapien
agaacaagcccagaaagttgcactcagagagat

SEQ ID NO: 614420 - DNA, 33 bp, Homo sapien
agaacaagcccagaaatttgcactcagagagat

SEQ ID NO: 614421 - DNA, 33 bp, Homo sapien
aaaaacaaaagcaacactctacattattcaatt

SEQ ID NO: 614422 - DNA, 33 bp, Homo sapien
aaaaacaaaagcaacattctacattattcaatt

SEQ ID NO: 614423 - DNA, 33 bp, Homo sapien
gattttgatgagatgccaaataaaaaaaattag

SEQ ID NO: 614424 - DNA, 33 bp, Homo sapien
gattttgatgagatgctaaataaaaaaaattag

SEQ ID NO: 614425 - DNA, 33 bp, Homo sapien
tcatgacatcgtactacgttgaaaagtggccta

SEQ ID NO: 614426 - DNA, 33 bp, Homo sapien
tcatgacatcgtactatgttgaaaagtggccta

SEQ ID NO: 614427 - DNA, 33 bp, Homo sapien
aatatagaaactcaagccacagcaaaatgggaa

SEQ ID NO: 614428 - DNA, 33 bp, Homo sapien
aatatagaaactcaagtcacagcaaaatgggaa

SEQ ID NO: 614429 - DNA, 33 bp, Homo sapien
tggaatcatacatctaactcgtggacccagcca

SEQ ID NO: 614430 - DNA, 33 bp, Homo sapien
tggaatcatacatctagctcgtggacccagcca

SEQ ID NO: 614431 - DNA, 33 bp, Homo sapien
tctattctatgcatccacatttagtgtttgtta

SEQ ID NO: 614432 - DNA, 33 bp, Homo sapien
tctattctatgcatcctcatttagtgtttgtta

SEQ ID NO: 614433 - DNA, 33 bp, Homo sapien
agtccctctgctttaaaccttatcaaaaaagta

SEQ ID NO: 614434 - DNA, 33 bp, Homo sapien
agtccctctgctttaacccttatcaaaaaagta

SEQ ID NO: 614435 - DNA, 33 bp, Homo sapien
ttgtggggagctgtccggcacattgtaggatga

SEQ ID NO: 614436 - DNA, 33 bp, Homo sapien
ttgtggggagctgtcctgcacattgtaggatga

SEQ ID NO: 614437 - DNA, 33 bp, Homo sapien
atgttttaaaatcaaaatagtggacaggattta

SEQ ID NO: 614438 - DNA, 33 bp, Homo sapien
atgttttaaaatcaaagtagtggacaggattta

SEQ ID NO: 614439 - DNA, 33 bp, Homo sapien
cacaaatttgtctgaacaacagaagaggagggg

SEQ ID NO: 614440 - DNA, 33 bp, Homo sapien
cacaaatttgtctgaataacagaagaggagggg

SEQ ID NO: 614441 - DNA, 33 bp, Homo sapien
caaattcctagaaagacacattactgacactga

SEQ ID NO: 614442 - DNA, 33 bp, Homo sapien
caaattcctagaaagatacattactgacactga

SEQ ID NO: 614443 - DNA, 33 bp, Homo sapien
tactggaacaacactacaatccaactagaccta

SEQ ID NO: 614444 - DNA, 33 bp, Homo sapien
tactggaacaacactataatccaactagaccta

SEQ ID NO: 614445 - DNA, 33 bp, Homo sapien
agacagtgagagtgaacaaggcaaagaacaact

SEQ ID NO: 614446 - DNA, 33 bp, Homo sapien
agacagtgagagtgaagaaggcaaagaacaact

SEQ ID NO: 614447 - DNA, 33 bp, Homo sapien
actttggatctacagaaacttcagagatgagaa

SEQ ID NO: 614448 - DNA, 33 bp, Homo sapien
actttggatctacagagacttcagagatgagaa

SEQ ID NO: 614449 - DNA, 33 bp, Homo sapien
tgatggatggataaatcagtcattcatagtcca

SEQ ID NO: 614450 - DNA, 33 bp, Homo sapien
tgatggatggataaatgagtcattcatagtcca

SEQ ID NO: 614451 - DNA, 33 bp, Homo sapien
atttatttagctgtaaaccagataacctcttta

SEQ ID NO: 614452 - DNA, 33 bp, Homo sapien
atttatttagctgtaagccagataacctcttta

SEQ ID NO: 614453 - DNA, 33 bp, Homo sapien
tatggtgataggcacacagacttgcaaacatac

SEQ ID NO: 614454 - DNA, 33 bp, Homo sapien
tatggtgataggcacagagacttgcaaacatac

SEQ ID NO: 614455 - DNA, 33 bp, Homo sapien
tgtaaaacgcaaagaagcatatttagtataagc

SEQ ID NO: 614456 - DNA, 33 bp, Homo sapien
tgtaaaacgcaaagaatcatatttagtataagc

SEQ ID NO: 614457 - DNA, 33 bp, Homo sapien
ataatctgcataaaaacatgacaaatgagaaag

SEQ ID NO: 614458 - DNA, 33 bp, Homo sapien
ataatctgcataaaaagatgacaaatgagaaag

SEQ ID NO: 614459 - DNA, 33 bp, Homo sapien
ttatccctaacattatcactaaagctgttggag

SEQ ID NO: 614460 - DNA, 33 bp, Homo sapien
ttatccctaacattatgactaaagctgttggag

SEQ ID NO: 614461 - DNA, 33 bp, Homo sapien
atgagacccaaaggccaagatatacatgggacc

SEQ ID NO: 614462 - DNA, 33 bp, Homo sapien
atgagacccaaaggccgagatatacatgggacc

SEQ ID NO: 614463 - DNA, 33 bp, Homo sapien
atctgaaaacaataaccgtgacatagtgactaa

SEQ ID NO: 614464 - DNA, 33 bp, Homo sapien
atctgaaaacaataactgtgacatagtgactaa

SEQ ID NO: 614465 - DNA, 33 bp, Homo sapien
ctcaccagatttggtcacttgactgtggacttc

SEQ ID NO: 614466 - DNA, 33 bp, Homo sapien
ctcaccagatttggtcccttgactgtggacttc

SEQ ID NO: 614467 - DNA, 33 bp, Homo sapien
gtgctactatccaacaatgattttaaaatacaa

SEQ ID NO: 614468 - DNA, 33 bp, Homo sapien
gtgctactatccaacagtgattttaaaatacaa

SEQ ID NO: 614469 - DNA, 33 bp, Homo sapien
ttgagtggctcttaggaattagtactgtgtcac

SEQ ID NO: 614470 - DNA, 33 bp, Homo sapien
ttgagtggctcttagggattagtactgtgtcac

SEQ ID NO: 614471 - DNA, 33 bp, Homo sapien
cctagtaagaatgagacctttgatggactgaag

SEQ ID NO: 614472 - DNA, 33 bp, Homo sapien
cctagtaagaatgagatctttgatggactgaag

SEQ ID NO: 614473 - DNA, 33 bp, Homo sapien
aagagccactaaaagcgactctcttagcaaatt

SEQ ID NO: 614474 - DNA, 33 bp, Homo sapien
aagagccactaaaagctactctcttagcaaatt

SEQ ID NO: 614475 - DNA, 33 bp, Homo sapien
tccccttagctttcaacgtcctctggtctgtct

SEQ ID NO: 614476 - DNA, 33 bp, Homo sapien
tccccttagctttcaaggtcctctggtctgtct

SEQ ID NO: 614477 - DNA, 33 bp, Homo sapien
tttttaaatacaggaccggcagaaaagtggtca

SEQ ID NO: 614478 - DNA, 33 bp, Homo sapien
tttttaaatacaggactggcagaaaagtggtca

SEQ ID NO: 614479 - DNA, 33 bp, Homo sapien
cctctgagtgtttgtgcagagagtccagacagc

SEQ ID NO: 614480 - DNA, 33 bp, Homo sapien
cctctgagtgtttgtggagagagtccagacagc

SEQ ID NO: 614481 - DNA, 33 bp, Homo sapien
gcaggacttggtttcaaaatgaggttggatgaa

SEQ ID NO: 614482 - DNA, 33 bp, Homo sapien
gcaggacttggtttcagaatgaggttggatgaa

SEQ ID NO: 614483 - DNA, 33 bp, Homo sapien
tcaagattagacacaacggaatatgataataca

SEQ ID NO: 614484 - DNA, 33 bp, Homo sapien
tcaagattagacacaatggaatatgataataca

SEQ ID NO: 614485 - DNA, 33 bp, Homo sapien
tctgtctccttggctacagagaaaaatatgatg

SEQ ID NO: 614486 - DNA, 33 bp, Homo sapien
tctgtctccttggctatagagaaaaatatgatg

SEQ ID NO: 614487 - DNA, 33 bp, Homo sapien
ccacagaatgtagtgccgagggtactgctatgg

SEQ ID NO: 614488 - DNA, 33 bp, Homo sapien
ccacagaatgtagtgctgagggtactgctatgg

SEQ ID NO: 614489 - DNA, 33 bp, Homo sapien
tagttttactcaatgagaatgtacacataatag

SEQ ID NO: 614490 - DNA, 33 bp, Homo sapien
tagttttactcaatgataatgtacacataatag

SEQ ID NO: 614491 - DNA, 33 bp, Homo sapien
cggaccatttcactcaacacttgtttgaacgtg

SEQ ID NO: 614492 - DNA, 33 bp, Homo sapien
cggaccatttcactcaccacttgtttgaacgtg

SEQ ID NO: 614493 - DNA, 33 bp, Homo sapien
gtgtactaagtcatcaacccctttgaaaagaga

SEQ ID NO: 614494 - DNA, 33 bp, Homo sapien
gtgtactaagtcatcatcccctttgaaaagaga

SEQ ID NO: 614495 - DNA, 33 bp, Homo sapien
gcgagcctttgagaaacgtaatcagtggaattc

SEQ ID NO: 614496 - DNA, 33 bp, Homo sapien
gcgagcctttgagaaatgtaatcagtggaattc

SEQ ID NO: 614497 - DNA, 33 bp, Homo sapien
atatttgatctcctaccagagtgtgtgctctgt

SEQ ID NO: 614498 - DNA, 33 bp, Homo sapien
atatttgatctcctactagagtgtgtgctctgt

SEQ ID NO: 614499 - DNA, 33 bp, Homo sapien
acggaaaggttcagaacatagaaagtcacagag

SEQ ID NO: 614500 - DNA, 33 bp, Homo sapien
acggaaaggttcagaatatagaaagtcacagag

SEQ ID NO: 614501 - DNA, 33 bp, Homo sapien
tttttaaagctgtgaaatattttgagtaggagt

SEQ ID NO: 614502 - DNA, 33 bp, Homo sapien
tttttaaagctgtgaagtattttgagtaggagt

SEQ ID NO: 614503 - DNA, 33 bp, Homo sapien
gtccttagaatccttaagttatgtatggctaag

SEQ ID NO: 614504 - DNA, 33 bp, Homo sapien
gtccttagaatccttaggttatgtatggctaag

SEQ ID NO: 614505 - DNA, 33 bp, Homo sapien
aaaatgagtataagaacactgaacacagcctgc

SEQ ID NO: 614506 - DNA, 33 bp, Homo sapien
aaaatgagtataagaagactgaacacagcctgc

SEQ ID NO: 614507 - DNA, 33 bp, Homo sapien
tcagagataagccccactactacctactactat

SEQ ID NO: 614508 - DNA, 33 bp, Homo sapien
tcagagataagccccagtactacctactactat

SEQ ID NO: 614509 - DNA, 33 bp, Homo sapien
acccatatgtcctacaatattccacgctatatt

SEQ ID NO: 614510 - DNA, 33 bp, Homo sapien
acccatatgtcctacagtattccacgctatatt

SEQ ID NO: 614511 - DNA, 33 bp, Homo sapien
tgaaaagtggtaacataaagataaccttgaagt

SEQ ID NO: 614512 - DNA, 33 bp, Homo sapien
tgaaaagtggtaacattaagataaccttgaagt

SEQ ID NO: 614513 - DNA, 33 bp, Homo sapien
cagttcatgcctatacaagttctaactactgta

SEQ ID NO: 614514 - DNA, 33 bp, Homo sapien
cagttcatgcctataccagttctaactactgta

SEQ ID NO: 614515 - DNA, 33 bp, Homo sapien
atatgtatatgtattacagagagagtagaggga

SEQ ID NO: 614516 - DNA, 33 bp, Homo sapien
atatgtatatgtattagagagagagtagaggga

SEQ ID NO: 614517 - DNA, 33 bp, Homo sapien
tatgaatacacgcatcacatgatctgctccact

SEQ ID NO: 614518 - DNA, 33 bp, Homo sapien
tatgaatacacgcatcgcatgatctgctccact

SEQ ID NO: 614519 - DNA, 33 bp, Homo sapien
atgttcatagatgaaactgtagcacataaaaca

SEQ ID NO: 614520 - DNA, 33 bp, Homo sapien
atgttcatagatgaaattgtagcacataaaaca

SEQ ID NO: 614521 - DNA, 33 bp, Homo sapien
agaacgaactatgaatcaacacttgctcaatgt

SEQ ID NO: 614522 - DNA, 33 bp, Homo sapien
agaacgaactatgaatgaacacttgctcaatgt

SEQ ID NO: 614523 - DNA, 33 bp, Homo sapien
tcagaattgtgtttaaagacttgttgaacatta

SEQ ID NO: 614524 - DNA, 33 bp, Homo sapien
tcagaattgtgtttaatgacttgttgaacatta

SEQ ID NO: 614525 - DNA, 33 bp, Homo sapien
aacttctacaagaccagaagataactgtttctc

SEQ ID NO: 614526 - DNA, 33 bp, Homo sapien
aacttctacaagaccataagataactgtttctc

SEQ ID NO: 614527 - DNA, 33 bp, Homo sapien
atgatgatattgatacacaatggctgggctcct

SEQ ID NO: 614528 - DNA, 33 bp, Homo sapien
atgatgatattgatacccaatggctgggctcct

SEQ ID NO: 614529 - DNA, 33 bp, Homo sapien
tctattaataatgataactgactgtgtataaaa

SEQ ID NO: 614530 - DNA, 33 bp, Homo sapien
tctattaataatgatacctgactgtgtataaaa

SEQ ID NO: 614531 - DNA, 33 bp, Homo sapien
cattattaatagaaacaaagaactatatggatt

SEQ ID NO: 614532 - DNA, 33 bp, Homo sapien
cattattaatagaaacgaagaactatatggatt

SEQ ID NO: 614533 - DNA, 33 bp, Homo sapien
aatttaccagtatgacactcatgtttactgaaa

SEQ ID NO: 614534 - DNA, 33 bp, Homo sapien
aatttaccagtatgacgctcatgtttactgaaa

SEQ ID NO: 614535 - DNA, 33 bp, Homo sapien
acccttttaggttttacggcttgctgtgaggtc

SEQ ID NO: 614536 - DNA, 33 bp, Homo sapien
acccttttaggttttatggcttgctgtgaggtc

SEQ ID NO: 614537 - DNA, 33 bp, Homo sapien
tgaatagttgtggagaaacgtgattcgacaaaa

SEQ ID NO: 614538 - DNA, 33 bp, Homo sapien
tgaatagttgtggagagacgtgattcgacaaaa

SEQ ID NO: 614539 - DNA, 33 bp, Homo sapien
attgctcctatcacaacagtggaaactagaaga

SEQ ID NO: 614540 - DNA, 33 bp, Homo sapien
attgctcctatcacaatagtggaaactagaaga

SEQ ID NO: 614541 - DNA, 33 bp, Homo sapien
aataatatcacctgaaatatgaggaatgctttg

SEQ ID NO: 614542 - DNA, 33 bp, Homo sapien
aataatatcacctgaagtatgaggaatgctttg

SEQ ID NO: 614543 - DNA, 33 bp, Homo sapien
tagtatgtagtagttaggagagtgtattgtaat

SEQ ID NO: 614544 - DNA, 33 bp, Homo sapien
tagtatgtagtagttatgagagtgtattgtaat

SEQ ID NO: 614545 - DNA, 33 bp, Homo sapien
taaggtctacaccttgaaaagcccttgtaaccg

SEQ ID NO: 614546 - DNA, 33 bp, Homo sapien
taaggtctacaccttgcaaagcccttgtaaccg

SEQ ID NO: 614547 - DNA, 33 bp, Homo sapien
tctcttcaaacgctgacataaccaagtccagtc

SEQ ID NO: 614548 - DNA, 33 bp, Homo sapien
tctcttcaaacgctgatataaccaagtccagtc

SEQ ID NO: 614549 - DNA, 33 bp, Homo sapien
acaaaaatttctaggaccttggtacttatttga

SEQ ID NO: 614550 - DNA, 33 bp, Homo sapien
acaaaaatttctaggatcttggtacttatttga

SEQ ID NO: 614551 - DNA, 33 bp, Homo sapien
tgctgtacctgcttgtcacaacttgagttctaa

SEQ ID NO: 614552 - DNA, 33 bp, Homo sapien
tgctgtacctgcttgtgacaacttgagttctaa

SEQ ID NO: 614553 - DNA, 33 bp, Homo sapien
gctccactgtaatcaacgtgtcaatggaccacc

SEQ ID NO: 614554 - DNA, 33 bp, Homo sapien
gctccactgtaatcaatgtgtcaatggaccacc

SEQ ID NO: 614555 - DNA, 33 bp, Homo sapien
ttatgtccagcttaacagatttctaagggcaat

SEQ ID NO: 614556 - DNA, 33 bp, Homo sapien
ttatgtccagcttaacggatttctaagggcaat

SEQ ID NO: 614557 - DNA, 33 bp, Homo sapien
atgataggctgctgcaaggaatcagtttaagtt

SEQ ID NO: 614558 - DNA, 33 bp, Homo sapien
atgataggctgctgcagggaatcagtttaagtt

SEQ ID NO: 614559 - DNA, 33 bp, Homo sapien
acctgatcagaaaaacaaataaatcaaacaatt

SEQ ID NO: 614560 - DNA, 33 bp, Homo sapien
acctgatcagaaaaacgaataaatcaaacaatt

SEQ ID NO: 614561 - DNA, 33 bp, Homo sapien
caatgcaaggcaattaacactcctcttgtgtca

SEQ ID NO: 614562 - DNA, 33 bp, Homo sapien
caatgcaaggcaattagcactcctcttgtgtca

SEQ ID NO: 614563 - DNA, 33 bp, Homo sapien
caatggccatagggacaggtgcacactcctgaa

SEQ ID NO: 614564 - DNA, 33 bp, Homo sapien
caatggccatagggaccggtgcacactcctgaa

SEQ ID NO: 614565 - DNA, 33 bp, Homo sapien
gctattggccaacagaagtagctttgacaacct

SEQ ID NO: 614566 - DNA, 33 bp, Homo sapien
gctattggccaacagatgtagctttgacaacct

SEQ ID NO: 614567 - DNA, 33 bp, Homo sapien
tgtgataaattatacacaatgcaagagcaaagg

SEQ ID NO: 614568 - DNA, 33 bp, Homo sapien
tgtgataaattatacataatgcaagagcaaagg

SEQ ID NO: 614569 - DNA, 33 bp, Homo sapien
tttccagatacagagagagtttgcagaatggtg

SEQ ID NO: 614570 - DNA, 33 bp, Homo sapien
tttccagatacagagatagtttgcagaatggtg

SEQ ID NO: 614571 - DNA, 33 bp, Homo sapien
agtttgcagaatggtggagttttcacttgcagg

SEQ ID NO: 614572 - DNA, 33 bp, Homo sapien
agtttgcagaatggtgtagttttcacttgcagg

SEQ ID NO: 614573 - DNA, 33 bp, Homo sapien
tgttgttgaaaaatacccatgactcaactcagc

SEQ ID NO: 614574 - DNA, 33 bp, Homo sapien
tgttgttgaaaaatacgcatgactcaactcagc

SEQ ID NO: 614575 - DNA, 33 bp, Homo sapien
aagggatggaaaaggaagatttgatgatattgt

SEQ ID NO: 614576 - DNA, 33 bp, Homo sapien
aagggatggaaaaggaggatttgatgatattgt

SEQ ID NO: 614577 - DNA, 33 bp, Homo sapien
tctttattcagtgtgtcaaattctgtgatgggc

SEQ ID NO: 614578 - DNA, 33 bp, Homo sapien
tctttattcagtgtgtgaaattctgtgatgggc

SEQ ID NO: 614579 - DNA, 33 bp, Homo sapien
aggatgaaatgataaacagcagtcaaatacgtt

SEQ ID NO: 614580 - DNA, 33 bp, Homo sapien
aggatgaaatgataaatagcagtcaaatacgtt

SEQ ID NO: 614581 - DNA, 33 bp, Homo sapien
ctttcaatcatggtcccaatttagtcaattctg

SEQ ID NO: 614582 - DNA, 33 bp, Homo sapien
ctttcaatcatggtcctaatttagtcaattctg

SEQ ID NO: 614583 - DNA, 33 bp, Homo sapien
cctatagtggatcttaaaaggaatcagaaaaat

SEQ ID NO: 614584 - DNA, 33 bp, Homo sapien
cctatagtggatcttagaaggaatcagaaaaat

SEQ ID NO: 614585 - DNA, 33 bp, Homo sapien
gactgagaaaactttccatttccccaatgttag

SEQ ID NO: 614586 - DNA, 33 bp, Homo sapien
gactgagaaaactttctatttccccaatgttag

SEQ ID NO: 614587 - DNA, 33 bp, Homo sapien
tacaagtgcctgaaaaatggtaggtagtcactg

SEQ ID NO: 614588 - DNA, 33 bp, Homo sapien
tacaagtgcctgaaaagtggtaggtagtcactg

SEQ ID NO: 614589 - DNA, 33 bp, Homo sapien
cttgaatccattactacgtggaccattgtactt

SEQ ID NO: 614590 - DNA, 33 bp, Homo sapien
cttgaatccattactatgtggaccattgtactt

SEQ ID NO: 614591 - DNA, 33 bp, Homo sapien
cagaatatctatctaccggaacaccttcagaga

SEQ ID NO: 614592 - DNA, 33 bp, Homo sapien
cagaatatctatctactggaacaccttcagaga

SEQ ID NO: 614593 - DNA, 33 bp, Homo sapien
aaagcttgaagcaaatcaactccaatgagatga

SEQ ID NO: 614594 - DNA, 33 bp, Homo sapien
aaagcttgaagcaaatgaactccaatgagatga

SEQ ID NO: 614595 - DNA, 33 bp, Homo sapien
acgaatactgtaaaccaaattaatgcagtcatt

SEQ ID NO: 614596 - DNA, 33 bp, Homo sapien
acgaatactgtaaaccgaattaatgcagtcatt

SEQ ID NO: 614597 - DNA, 33 bp, Homo sapien
agcagtatagtatcaactctgtttgtgttgtgt

SEQ ID NO: 614598 - DNA, 33 bp, Homo sapien
agcagtatagtatcaattctgtttgtgttgtgt

SEQ ID NO: 614599 - DNA, 33 bp, Homo sapien
agatttgggggcctaaccttagtttgcaatatt

SEQ ID NO: 614600 - DNA, 33 bp, Homo sapien
agatttgggggcctaagcttagtttgcaatatt

SEQ ID NO: 614601 - DNA, 33 bp, Homo sapien
tgtggtaccaaaccagaaagctctgtactagct

SEQ ID NO: 614602 - DNA, 33 bp, Homo sapien
tgtggtaccaaaccaggaagctctgtactagct

SEQ ID NO: 614603 - DNA, 33 bp, Homo sapien
tgatctgcagccataactctctaaaagttaggg

SEQ ID NO: 614604 - DNA, 33 bp, Homo sapien
tgatctgcagccataagtctctaaaagttaggg

SEQ ID NO: 614605 - DNA, 33 bp, Homo sapien
aaagttagggataaacagaaggctaaatcaatc

SEQ ID NO: 614606 - DNA, 33 bp, Homo sapien
aaagttagggataaactgaaggctaaatcaatc

SEQ ID NO: 614607 - DNA, 33 bp, Homo sapien
cccccctgtgtcgtgaagaactctgctctgaag

SEQ ID NO: 614608 - DNA, 33 bp, Homo sapien
cccccctgtgtcgtgacgaactctgctctgaag

SEQ ID NO: 614609 - DNA, 33 bp, Homo sapien
agtttgcaacctgtgaacaatagcctatcccat

SEQ ID NO: 614610 - DNA, 33 bp, Homo sapien
agtttgcaacctgtgagcaatagcctatcccat

SEQ ID NO: 614611 - DNA, 33 bp, Homo sapien
atggttaaattttcaggatctatccattttttt

SEQ ID NO: 614612 - DNA, 33 bp, Homo sapien
atggttaaattttcagtatctatccattttttt

SEQ ID NO: 614613 - DNA, 33 bp, Homo sapien
agggtgcagttcaggccagagaatggcgagaga

SEQ ID NO: 614614 - DNA, 33 bp, Homo sapien
agggtgcagttcaggctagagaatggcgagaga

SEQ ID NO: 614615 - DNA, 33 bp, Homo sapien
tggggaaatattatcaagtcaaagtggataatt

SEQ ID NO: 614616 - DNA, 33 bp, Homo sapien
tggggaaatattatcaggtcaaagtggataatt

SEQ ID NO: 614617 - DNA, 33 bp, Homo sapien
tgtgtgctgggttgccccttagatgcttacaag

SEQ ID NO: 614618 - DNA, 33 bp, Homo sapien
tgtgtgctgggttgcctcttagatgcttacaag

SEQ ID NO: 614619 - DNA, 33 bp, Homo sapien
acattttactatacaaaacagttccaattacat

SEQ ID NO: 614620 - DNA, 33 bp, Homo sapien
acattttactatacaagacagttccaattacat

SEQ ID NO: 614621 - DNA, 33 bp, Homo sapien
ggagtgtgtggtttgactacctgaacgacccta

SEQ ID NO: 614622 - DNA, 33 bp, Homo sapien
ggagtgtgtggtttgattacctgaacgacccta

SEQ ID NO: 614623 - DNA, 33 bp, Homo sapien
cctatcagaaaaaaaacgttgatgaagacagac

SEQ ID NO: 614624 - DNA, 33 bp, Homo sapien
cctatcagaaaaaaaatgttgatgaagacagac

SEQ ID NO: 614625 - DNA, 33 bp, Homo sapien
ttagcttgatttaataataccaatgctgaatat

SEQ ID NO: 614626 - DNA, 33 bp, Homo sapien
ttagcttgatttaatattaccaatgctgaatat

SEQ ID NO: 614627 - DNA, 33 bp, Homo sapien
attctggctctcctgcaaagaatattgttggag

SEQ ID NO: 614628 - DNA, 33 bp, Homo sapien
attctggctctcctgcgaagaatattgttggag

SEQ ID NO: 614629 - DNA, 33 bp, Homo sapien
atgatgattgccagtcagaatgaaggacaaaac

SEQ ID NO: 614630 - DNA, 33 bp, Homo sapien
atgatgattgccagtcggaatgaaggacaaaac

SEQ ID NO: 614631 - DNA, 33 bp, Homo sapien
tccttcccattcatcaccagttcagtaatgggc

SEQ ID NO: 614632 - DNA, 33 bp, Homo sapien
tccttcccattcatcatcagttcagtaatgggc

SEQ ID NO: 614633 - DNA, 33 bp, Homo sapien
cctaaataagaaaggactcataatcattgcaat

SEQ ID NO: 614634 - DNA, 33 bp, Homo sapien
cctaaataagaaaggagtcataatcattgcaat

SEQ ID NO: 614635 - DNA, 33 bp, Homo sapien
tgtgtaccttatagaccggggttctgtttttat

SEQ ID NO: 614636 - DNA, 33 bp, Homo sapien
tgtgtaccttatagactggggttctgtttttat

SEQ ID NO: 614637 - DNA, 33 bp, Homo sapien
aagtttaaatacattgaatcttaacagtatata

SEQ ID NO: 614638 - DNA, 33 bp, Homo sapien
aagtttaaatacattggatcttaacagtatata

SEQ ID NO: 614639 - DNA, 33 bp, Homo sapien
aaacattcagcctccaagtcaaagatctcaggt

SEQ ID NO: 614640 - DNA, 33 bp, Homo sapien
aaacattcagcctccacgtcaaagatctcaggt

SEQ ID NO: 614641 - DNA, 33 bp, Homo sapien
acatccagcagattaacggaaaacctctgattg

SEQ ID NO: 614642 - DNA, 33 bp, Homo sapien
acatccagcagattaatggaaaacctctgattg

SEQ ID NO: 614643 - DNA, 33 bp, Homo sapien
tctgaacactattttaaattttacacgaagagc

SEQ ID NO: 614644 - DNA, 33 bp, Homo sapien
tctgaacactattttacattttacacgaagagc

SEQ ID NO: 614645 - DNA, 33 bp, Homo sapien
gaagataaaattagataataggagtgagtaaaa

SEQ ID NO: 614646 - DNA, 33 bp, Homo sapien
gaagataaaattagattataggagtgagtaaaa

SEQ ID NO: 614647 - DNA, 33 bp, Homo sapien
aacacaaagtaagagaaaaatgtggtactaata

SEQ ID NO: 614648 - DNA, 33 bp, Homo sapien
aacacaaagtaagagacaaatgtggtactaata

SEQ ID NO: 614649 - DNA, 33 bp, Homo sapien
actcactttctgagtacggtttccagcaggaag

SEQ ID NO: 614650 - DNA, 33 bp, Homo sapien
actcactttctgagtatggtttccagcaggaag

SEQ ID NO: 614651 - DNA, 33 bp, Homo sapien
caaactcgtaaaatcccgcctatcacaaaccca

SEQ ID NO: 614652 - DNA, 33 bp, Homo sapien
caaactcgtaaaatcctgcctatcacaaaccca

SEQ ID NO: 614653 - DNA, 33 bp, Homo sapien
cgtgacaacttggccacgaaatttatcacccca

SEQ ID NO: 614654 - DNA, 33 bp, Homo sapien
cgtgacaacttggccatgaaatttatcacccca

SEQ ID NO: 614655 - DNA, 33 bp, Homo sapien
cttatgataagtgaaacagatctcaacaaaact

SEQ ID NO: 614656 - DNA, 33 bp, Homo sapien
cttatgataagtgaaatagatctcaacaaaact

SEQ ID NO: 614657 - DNA, 33 bp, Homo sapien
aaacacagctaatactaacctatgcaatgagca

SEQ ID NO: 614658 - DNA, 33 bp, Homo sapien
aaacacagctaatacttacctatgcaatgagca

SEQ ID NO: 614659 - DNA, 33 bp, Homo sapien
acatcaagagggaaaacgggatccacaggctgg

SEQ ID NO: 614660 - DNA, 33 bp, Homo sapien
acatcaagagggaaaatgggatccacaggctgg

SEQ ID NO: 614661 - DNA, 33 bp, Homo sapien
ggcagagattgttataaagactattccaaatgg

SEQ ID NO: 614662 - DNA, 33 bp, Homo sapien
ggcagagattgttatagagactattccaaatgg

SEQ ID NO: 614663 - DNA, 33 bp, Homo sapien
tcattccactgagtaacgtcactaaaatgttct

SEQ ID NO: 614664 - DNA, 33 bp, Homo sapien
tcattccactgagtaatgtcactaaaatgttct

SEQ ID NO: 614665 - DNA, 33 bp, Homo sapien
aataaaaatgcatgaccatgttgtctcaacaca

SEQ ID NO: 614666 - DNA, 33 bp, Homo sapien
aataaaaatgcatgactatgttgtctcaacaca

SEQ ID NO: 614667 - DNA, 33 bp, Homo sapien
ggggaatactatcctaagccttatctcaacact

SEQ ID NO: 614668 - DNA, 33 bp, Homo sapien
ggggaatactatcctaggccttatctcaacact

SEQ ID NO: 614669 - DNA, 33 bp, Homo sapien
tttcctacatttgcaccggacatgggaataaat

SEQ ID NO: 614670 - DNA, 33 bp, Homo sapien
tttcctacatttgcactggacatgggaataaat

SEQ ID NO: 614671 - DNA, 33 bp, Homo sapien
gtattatgaagaccaaccaacttaaagagtttc

SEQ ID NO: 614672 - DNA, 33 bp, Homo sapien
gtattatgaagaccaatcaacttaaagagtttc

SEQ ID NO: 614673 - DNA, 33 bp, Homo sapien
tggcttagaagacacacaattctttcattcata

SEQ ID NO: 614674 - DNA, 33 bp, Homo sapien
tggcttagaagacacataattctttcattcata

SEQ ID NO: 614675 - DNA, 33 bp, Homo sapien
atggagaaagaattcgaaagggctgataggata

SEQ ID NO: 614676 - DNA, 33 bp, Homo sapien
atggagaaagaattcggaagggctgataggata

SEQ ID NO: 614677 - DNA, 33 bp, Homo sapien
ttttgcctttttcctgaaagtaagttaaagcta

SEQ ID NO: 614678 - DNA, 33 bp, Homo sapien
ttttgcctttttcctggaagtaagttaaagcta

SEQ ID NO: 614679 - DNA, 33 bp, Homo sapien
aaaattttaggcaaccacaatgtctgggttaaa

SEQ ID NO: 614680 - DNA, 33 bp, Homo sapien
aaaattttaggcaaccgcaatgtctgggttaaa

SEQ ID NO: 614681 - DNA, 33 bp, Homo sapien
aaattgcaaaagggcaatcttgacttacctagc

SEQ ID NO: 614682 - DNA, 33 bp, Homo sapien
aaattgcaaaagggcattcttgacttacctagc

SEQ ID NO: 614683 - DNA, 33 bp, Homo sapien
tgcataagtcattaaaacctttcatgaattcaa

SEQ ID NO: 614684 - DNA, 33 bp, Homo sapien
tgcataagtcattaaatcctttcatgaattcaa

SEQ ID NO: 614685 - DNA, 33 bp, Homo sapien
tggtatcaagacatgaacaattaacttgatgtg

SEQ ID NO: 614686 - DNA, 33 bp, Homo sapien
tggtatcaagacatgagcaattaacttgatgtg

SEQ ID NO: 614687 - DNA, 33 bp, Homo sapien
gtgaagtacaactcagccaaacccaggcatcca

SEQ ID NO: 614688 - DNA, 33 bp, Homo sapien
gtgaagtacaactcagtcaaacccaggcatcca

SEQ ID NO: 614689 - DNA, 33 bp, Homo sapien
ctgtaatacttcatagaaagttggctgttatat

SEQ ID NO: 614690 - DNA, 33 bp, Homo sapien
ctgtaatacttcatagtaagttggctgttatat

SEQ ID NO: 614691 - DNA, 33 bp, Homo sapien
gtcctggcttttaaaacgttgtgcaggtcttgg

SEQ ID NO: 614692 - DNA, 33 bp, Homo sapien
gtcctggcttttaaaatgttgtgcaggtcttgg

SEQ ID NO: 614693 - DNA, 33 bp, Homo sapien
gttcttttgtaccagcggcccctccagatttct

SEQ ID NO: 614694 - DNA, 33 bp, Homo sapien
gttcttttgtaccagctgcccctccagatttct

SEQ ID NO: 614695 - DNA, 33 bp, Homo sapien
ctgtgcttcagctgcactagttttccatcagtt

SEQ ID NO: 614696 - DNA, 33 bp, Homo sapien
ctgtgcttcagctgcattagttttccatcagtt

SEQ ID NO: 614697 - DNA, 33 bp, Homo sapien
gatgacatttgcttaacaatgttaccttctctc

SEQ ID NO: 614698 - DNA, 33 bp, Homo sapien
gatgacatttgcttaataatgttaccttctctc

SEQ ID NO: 614699 - DNA, 33 bp, Homo sapien
ctcaaagaattagaaaatctgacaaccctgggc

SEQ ID NO: 614700 - DNA, 33 bp, Homo sapien
ctcaaagaattagaaagtctgacaaccctgggc

SEQ ID NO: 614701 - DNA, 33 bp, Homo sapien
gacacatcgtatgttcccagagtacaagagagt

SEQ ID NO: 614702 - DNA, 33 bp, Homo sapien
gacacatcgtatgttctcagagtacaagagagt

SEQ ID NO: 614703 - DNA, 33 bp, Homo sapien
gcttagaaacttagaaacaaacatacccataga

SEQ ID NO: 614704 - DNA, 33 bp, Homo sapien
gcttagaaacttagaagcaaacatacccataga

SEQ ID NO: 614705 - DNA, 33 bp, Homo sapien
caatgttcacagggtacagaaaaaaaggtgatt

SEQ ID NO: 614706 - DNA, 33 bp, Homo sapien
caatgttcacagggtagagaaaaaaaggtgatt

SEQ ID NO: 614707 - DNA, 33 bp, Homo sapien
gccttttagtgacacaaatgtttttctggatct

SEQ ID NO: 614708 - DNA, 33 bp, Homo sapien
gccttttagtgacacagatgtttttctggatct

SEQ ID NO: 614709 - DNA, 33 bp, Homo sapien
gagccttgtttatagaagtaatctcagcctcgg

SEQ ID NO: 614710 - DNA, 33 bp, Homo sapien
gagccttgtttatagaggtaatctcagcctcgg

SEQ ID NO: 614711 - DNA, 33 bp, Homo sapien
tccatacagagagctaaaagggagagaagtaga

SEQ ID NO: 614712 - DNA, 33 bp, Homo sapien
tccatacagagagctagaagggagagaagtaga

SEQ ID NO: 614713 - DNA, 33 bp, Homo sapien
tcagctcatttgagaacgtagatagcccagtca

SEQ ID NO: 614714 - DNA, 33 bp, Homo sapien
tcagctcatttgagaaggtagatagcccagtca

SEQ ID NO: 614715 - DNA, 33 bp, Homo sapien
attttgattctggtgactaagaccctccagctc

SEQ ID NO: 614716 - DNA, 33 bp, Homo sapien
attttgattctggtgagtaagaccctccagctc

SEQ ID NO: 614717 - DNA, 33 bp, Homo sapien
cctatgtatgaagttcaccttaaatgtagcagc

SEQ ID NO: 614718 - DNA, 33 bp, Homo sapien
cctatgtatgaagttccccttaaatgtagcagc

SEQ ID NO: 614719 - DNA, 33 bp, Homo sapien
gggatgaactggaaaaatgtggaagtatacaaa

SEQ ID NO: 614720 - DNA, 33 bp, Homo sapien
gggatgaactggaaaagtgtggaagtatacaaa

SEQ ID NO: 614721 - DNA, 33 bp, Homo sapien
ttgaaacacctgacggcaaaaacatggattgga

SEQ ID NO: 614722 - DNA, 33 bp, Homo sapien
ttgaaacacctgacgggaaaaacatggattgga

SEQ ID NO: 614723 - DNA, 33 bp, Homo sapien
attaactgagaaatcaagaagtacaaagacaaa

SEQ ID NO: 614724 - DNA, 33 bp, Homo sapien
attaactgagaaatcaggaagtacaaagacaaa

SEQ ID NO: 614725 - DNA, 33 bp, Homo sapien
tttttctgagaaactacattgctctcaaaagta

SEQ ID NO: 614726 - DNA, 33 bp, Homo sapien
tttttctgagaaactagattgctctcaaaagta

SEQ ID NO: 614727 - DNA, 33 bp, Homo sapien
tctcctgatgaacttacgtaaacaatctcttgt

SEQ ID NO: 614728 - DNA, 33 bp, Homo sapien
tctcctgatgaacttatgtaaacaatctcttgt

SEQ ID NO: 614729 - DNA, 33 bp, Homo sapien
tagcatcagctaacaacacaaaagaggttgaaa

SEQ ID NO: 614730 - DNA, 33 bp, Homo sapien
tagcatcagctaacaatacaaaagaggttgaaa

SEQ ID NO: 614731 - DNA, 33 bp, Homo sapien
ctaaaagtgtccataaatatttctaagacatgg

SEQ ID NO: 614732 - DNA, 33 bp, Homo sapien
ctaaaagtgtccataattatttctaagacatgg

SEQ ID NO: 614733 - DNA, 33 bp, Homo sapien
tgcagatagtttgtagcataccaagtattttca

SEQ ID NO: 614734 - DNA, 33 bp, Homo sapien
tgcagatagtttgtaggataccaagtattttca

SEQ ID NO: 614735 - DNA, 33 bp, Homo sapien
cagaagtcagggaaacaggttcatttgctagtt

SEQ ID NO: 614736 - DNA, 33 bp, Homo sapien
cagaagtcagggaaacgggttcatttgctagtt

SEQ ID NO: 614737 - DNA, 33 bp, Homo sapien
ctttgagtgatgagctaaagttaatgagatgat

SEQ ID NO: 614738 - DNA, 33 bp, Homo sapien
ctttgagtgatgagctgaagttaatgagatgat

SEQ ID NO: 614739 - DNA, 33 bp, Homo sapien
tggatgggggagaagacggagattacccaaaca

SEQ ID NO: 614740 - DNA, 33 bp, Homo sapien
tggatgggggagaagatggagattacccaaaca

SEQ ID NO: 614741 - DNA, 33 bp, Homo sapien
cttatagggtgtttatcaagttgacactgaaca

SEQ ID NO: 614742 - DNA, 33 bp, Homo sapien
cttatagggtgtttatgaagttgacactgaaca

SEQ ID NO: 614743 - DNA, 33 bp, Homo sapien
aatatagtgcacaagaaattgaattttacaaag

SEQ ID NO: 614744 - DNA, 33 bp, Homo sapien
aatatagtgcacaagagattgaattttacaaag

SEQ ID NO: 614745 - DNA, 33 bp, Homo sapien
aaggttagctcagctgaatgtcatatttttaaa

SEQ ID NO: 614746 - DNA, 33 bp, Homo sapien
aaggttagctcagctggatgtcatatttttaaa

SEQ ID NO: 614747 - DNA, 33 bp, Homo sapien
gcccactgttgcctaacgttaaagatactccct

SEQ ID NO: 614748 - DNA, 33 bp, Homo sapien
gcccactgttgcctaatgttaaagatactccct

SEQ ID NO: 614749 - DNA, 33 bp, Homo sapien
aggcctttattgacctaagcaaaacagtgttta

SEQ ID NO: 614750 - DNA, 33 bp, Homo sapien
aggcctttattgacctgagcaaaacagtgttta

SEQ ID NO: 614751 - DNA, 33 bp, Homo sapien
atcaagtaatagttacacacaaagtacgctaca

SEQ ID NO: 614752 - DNA, 33 bp, Homo sapien
atcaagtaatagttacgcacaaagtacgctaca

SEQ ID NO: 614753 - DNA, 33 bp, Homo sapien
ctaagagttcctgataaagaaacacagtaggtg

SEQ ID NO: 614754 - DNA, 33 bp, Homo sapien
ctaagagttcctgatacagaaacacagtaggtg

SEQ ID NO: 614755 - DNA, 33 bp, Homo sapien
acttggcccagtttgaccatcactagattctca

SEQ ID NO: 614756 - DNA, 33 bp, Homo sapien
acttggcccagtttgatcatcactagattctca

SEQ ID NO: 614757 - DNA, 33 bp, Homo sapien
tctgtgagtgctacgaagaaaatcaaaggcctt

SEQ ID NO: 614758 - DNA, 33 bp, Homo sapien
tctgtgagtgctacgacgaaaatcaaaggcctt

SEQ ID NO: 614759 - DNA, 33 bp, Homo sapien
tgcctgttgcctctaccatttcatatatgtcct

SEQ ID NO: 614760 - DNA, 33 bp, Homo sapien
tgcctgttgcctctactatttcatatatgtcct

SEQ ID NO: 614761 - DNA, 33 bp, Homo sapien
gttctgatgctgatcaaagtttaagaatcatgc

SEQ ID NO: 614762 - DNA, 33 bp, Homo sapien
gttctgatgctgatcacagtttaagaatcatgc

SEQ ID NO: 614763 - DNA, 33 bp, Homo sapien
aatgatagataagatacagaagagagagcagaa

SEQ ID NO: 614764 - DNA, 33 bp, Homo sapien
aatgatagataagatagagaagagagagcagaa

SEQ ID NO: 614765 - DNA, 33 bp, Homo sapien
atatgagacaaccagaaaatggctagtgctgtg

SEQ ID NO: 614766 - DNA, 33 bp, Homo sapien
atatgagacaaccagagaatggctagtgctgtg

SEQ ID NO: 614767 - DNA, 33 bp, Homo sapien
tattaaaaagtaggtgaattgattataaacctt

SEQ ID NO: 614768 - DNA, 33 bp, Homo sapien
tattaaaaagtaggtgtattgattataaacctt

SEQ ID NO: 614769 - DNA, 33 bp, Homo sapien
acaaagttgaatgatcagaagacagaaacagct

SEQ ID NO: 614770 - DNA, 33 bp, Homo sapien
acaaagttgaatgatcggaagacagaaacagct

SEQ ID NO: 614771 - DNA, 33 bp, Homo sapien
tggtattccacagtacactcattaacattaaac

SEQ ID NO: 614772 - DNA, 33 bp, Homo sapien
tggtattccacagtacgctcattaacattaaac

SEQ ID NO: 614773 - DNA, 33 bp, Homo sapien
gtcatctttggaagcaacactaaaatgtgtata

SEQ ID NO: 614774 - DNA, 33 bp, Homo sapien
gtcatctttggaagcaccactaaaatgtgtata

SEQ ID NO: 614775 - DNA, 33 bp, Homo sapien
acaaaaagaccacttacgtgaaagaaacaacca

SEQ ID NO: 614776 - DNA, 33 bp, Homo sapien
acaaaaagaccacttatgtgaaagaaacaacca

SEQ ID NO: 614777 - DNA, 33 bp, Homo sapien
tacaagttgaagtacaagttgtgagccagggga

SEQ ID NO: 614778 - DNA, 33 bp, Homo sapien
tacaagttgaagtacaggttgtgagccagggga

SEQ ID NO: 614779 - DNA, 33 bp, Homo sapien
aacggcaataatcaaacaatgagtctatccaat

SEQ ID NO: 614780 - DNA, 33 bp, Homo sapien
aacggcaataatcaaataatgagtctatccaat

SEQ ID NO: 614781 - DNA, 33 bp, Homo sapien
aggaatacagttttcacagatagtcaatctcag

SEQ ID NO: 614782 - DNA, 33 bp, Homo sapien
aggaatacagttttcatagatagtcaatctcag

SEQ ID NO: 614783 - DNA, 33 bp, Homo sapien
atttatctgatttcaaatgccctaaatacagct

SEQ ID NO: 614784 - DNA, 33 bp, Homo sapien
atttatctgatttcaattgccctaaatacagct

SEQ ID NO: 614785 - DNA, 33 bp, Homo sapien
gatgtgtgacttaatggagataaagcttaacat

SEQ ID NO: 614786 - DNA, 33 bp, Homo sapien
gatgtgtgacttaatgtagataaagcttaacat

SEQ ID NO: 614787 - DNA, 33 bp, Homo sapien
tacatacagttctcataacattttcaatcatta

SEQ ID NO: 614788 - DNA, 33 bp, Homo sapien
tacatacagttctcattacattttcaatcatta

SEQ ID NO: 614789 - DNA, 33 bp, Homo sapien
ttagctcttcaaatggaatgaactaattgtata

SEQ ID NO: 614790 - DNA, 33 bp, Homo sapien
ttagctcttcaaatggtatgaactaattgtata

SEQ ID NO: 614791 - DNA, 33 bp, Homo sapien
actctgcacagaaacactgacttgtaagtagat

SEQ ID NO: 614792 - DNA, 33 bp, Homo sapien
actctgcacagaaacagtgacttgtaagtagat

SEQ ID NO: 614793 - DNA, 33 bp, Homo sapien
acggatgttcatagcacagttggtatgttataa

SEQ ID NO: 614794 - DNA, 33 bp, Homo sapien
acggatgttcatagcagagttggtatgttataa

SEQ ID NO: 614795 - DNA, 33 bp, Homo sapien
agcattgtgaatttaacgctaagactttccctt

SEQ ID NO: 614796 - DNA, 33 bp, Homo sapien
agcattgtgaatttaatgctaagactttccctt

SEQ ID NO: 614797 - DNA, 33 bp, Homo sapien
caaggattcaagtagacgaagtgtcattgattg

SEQ ID NO: 614798 - DNA, 33 bp, Homo sapien
caaggattcaagtagatgaagtgtcattgattg

SEQ ID NO: 614799 - DNA, 33 bp, Homo sapien
tcaagtaaaatgaggacccaagaccataaacac

SEQ ID NO: 614800 - DNA, 33 bp, Homo sapien
tcaagtaaaatgaggatccaagaccataaacac

SEQ ID NO: 614801 - DNA, 33 bp, Homo sapien
gcacttggatgtcttacgaaattcactattaat

SEQ ID NO: 614802 - DNA, 33 bp, Homo sapien
gcacttggatgtcttatgaaattcactattaat

SEQ ID NO: 614803 - DNA, 33 bp, Homo sapien
ttgccaaacaccaccaggtaattttagaccacc

SEQ ID NO: 614804 - DNA, 33 bp, Homo sapien
ttgccaaacaccaccatgtaattttagaccacc

SEQ ID NO: 614805 - DNA, 33 bp, Homo sapien
atccaatacatccatagggggaaacctgaatac

SEQ ID NO: 614806 - DNA, 33 bp, Homo sapien
atccaatacatccatatggggaaacctgaatac

SEQ ID NO: 614807 - DNA, 33 bp, Homo sapien
aaagtttcaaggatagccagatctagagtagct

SEQ ID NO: 614808 - DNA, 33 bp, Homo sapien
aaagtttcaaggatagtcagatctagagtagct

SEQ ID NO: 614809 - DNA, 33 bp, Homo sapien
aattaacctctcccctaaaagtgcaagtgagat

SEQ ID NO: 614810 - DNA, 33 bp, Homo sapien
aattaacctctcccctgaaagtgcaagtgagat

SEQ ID NO: 614811 - DNA, 33 bp, Homo sapien
tatgactatttcctaacggttggtaagcaaaat

SEQ ID NO: 614812 - DNA, 33 bp, Homo sapien
tatgactatttcctaatggttggtaagcaaaat

SEQ ID NO: 614813 - DNA, 33 bp, Homo sapien
tttcccttgtaatgctcagcatccgtatcctgt

SEQ ID NO: 614814 - DNA, 33 bp, Homo sapien
tttcccttgtaatgctgagcatccgtatcctgt

SEQ ID NO: 614815 - DNA, 33 bp, Homo sapien; identical to SEQ ID NO: 614813

SEQ ID NO: 614816 - DNA, 33 bp, Homo sapien; identical to SEQ ID NO: 614814

SEQ ID NO: 614817 - DNA, 33 bp, Homo sapien
aaaatggaaactagataagagtaagtgacccac

SEQ ID NO: 614818 - DNA, 33 bp, Homo sapien
aaaatggaaactagattagagtaagtgacccac

SEQ ID NO: 614819 - DNA, 33 bp, Homo sapien
ccagatgtacaggccacctttcaaagcatgata

SEQ ID NO: 614820 - DNA, 33 bp, Homo sapien
ccagatgtacaggccatctttcaaagcatgata

SEQ ID NO: 614821 - DNA, 33 bp, Homo sapien
ttgtaagtagtaaagacgagagaacttggtgat

SEQ ID NO: 614822 - DNA, 33 bp, Homo sapien
ttgtaagtagtaaagatgagagaacttggtgat

SEQ ID NO: 614823 - DNA, 33 bp, Homo sapien
actgaatgaataaagacgaaaggatgagtttgc

SEQ ID NO: 614824 - DNA, 33 bp, Homo sapien
actgaatgaataaagatgaaaggatgagtttgc

SEQ ID NO: 614825 - DNA, 33 bp, Homo sapien
aaggagaacaacagccaggatttctctctggat

SEQ ID NO: 614826 - DNA, 33 bp, Homo sapien
aaggagaacaacagccgggatttctctctggat

SEQ ID NO: 614827 - DNA, 33 bp, Homo sapien
gcaaaccagtggttgacgtctataatctaaatg

SEQ ID NO: 614828 - DNA, 33 bp, Homo sapien
gcaaaccagtggttgatgtctataatctaaatg

SEQ ID NO: 614829 - DNA, 33 bp, Homo sapien
cttatggagggtgagaaagacaaacaagcgatg

SEQ ID NO: 614830 - DNA, 33 bp, Homo sapien
cttatggagggtgagagagacaaacaagcgatg

SEQ ID NO: 614831 - DNA, 33 bp, Homo sapien
atcacaactacaataaatatatcctagccttgc

SEQ ID NO: 614832 - DNA, 33 bp, Homo sapien
atcacaactacaataagtatatcctagccttgc

SEQ ID NO: 614833 - DNA, 33 bp, Homo sapien
ctacctcagttgtctcaatgcctagtactgtag

SEQ ID NO: 614834 - DNA, 33 bp, Homo sapien
ctacctcagttgtctcgatgcctagtactgtag

SEQ ID NO: 614835 - DNA, 33 bp, Homo sapien
taacacatccattgacactatctgcaaatatcc

SEQ ID NO: 614836 - DNA, 33 bp, Homo sapien
taacacatccattgactctatctgcaaatatcc

SEQ ID NO: 614837 - DNA, 33 bp, Homo sapien
ttaccaaggacccgaagaacatctaatttaggt

SEQ ID NO: 614838 - DNA, 33 bp, Homo sapien
ttaccaaggacccgaataacatctaatttaggt

SEQ ID NO: 614839 - DNA, 33 bp, Homo sapien
aacatggtaaaatggcaaagtgaatgggcatat

SEQ ID NO: 614840 - DNA, 33 bp, Homo sapien
aacatggtaaaatggcgaagtgaatgggcatat

SEQ ID NO: 614841 - DNA, 33 bp, Homo sapien
aaactttgagcctctacatttacctctactttc

SEQ ID NO: 614842 - DNA, 33 bp, Homo sapien
aaactttgagcctctagatttacctctactttc

SEQ ID NO: 614843 - DNA, 33 bp, Homo sapien
ttgtcagacagaaagaaaatggttgtgggaaat

SEQ ID NO: 614844 - DNA, 33 bp, Homo sapien
ttgtcagacagaaagacaatggttgtgggaaat

SEQ ID NO: 614845 - DNA, 33 bp, Homo sapien
gtagctgtgtgcttcaaggagaaccagcctaac

SEQ ID NO: 614846 - DNA, 33 bp, Homo sapien
gtagctgtgtgcttcagggagaaccagcctaac

SEQ ID NO: 614847 - DNA, 33 bp, Homo sapien
agatgcaaagtgttcaacgaaggtagagcagac

SEQ ID NO: 614848 - DNA, 33 bp, Homo sapien
agatgcaaagtgttcagcgaaggtagagcagac

SEQ ID NO: 614849 - DNA, 33 bp, Homo sapien
gccaggtgttacagaacgtatgtgtttttaaga

SEQ ID NO: 614850 - DNA, 33 bp, Homo sapien
gccaggtgttacagaaggtatgtgtttttaaga

SEQ ID NO: 614851 - DNA, 33 bp, Homo sapien
gcagggcagctctggaaatgaacccaacccaga

SEQ ID NO: 614852 - DNA, 33 bp, Homo sapien
gcagggcagctctggagatgaacccaacccaga

SEQ ID NO: 614853 - DNA, 33 bp, Homo sapien
gttcagagtctcactaaggacttttaaaacaga

SEQ ID NO: 614854 - DNA, 33 bp, Homo sapien
gttcagagtctcactacggacttttaaaacaga

SEQ ID NO: 614855 - DNA, 33 bp, Homo sapien
tataatgcatttttaccacttttgcaattagca

SEQ ID NO: 614856 - DNA, 33 bp, Homo sapien
tataatgcatttttactacttttgcaattagca

SEQ ID NO: 614857 - DNA, 33 bp, Homo sapien
tattcagcctgttaaactgtagaagtcttactt

SEQ ID NO: 614858 - DNA, 33 bp, Homo sapien
tattcagcctgttaaattgtagaagtcttactt

SEQ ID NO: 614859 - DNA, 33 bp, Homo sapien
tatgtttattagaggtctagcagaaagtggaat

SEQ ID NO: 614860 - DNA, 33 bp, Homo sapien
tatgtttattagaggtttagcagaaagtggaat

SEQ ID NO: 614861 - DNA, 33 bp, Homo sapien
gaaggcttctctgttcaaaattgagcctagaaa

SEQ ID NO: 614862 - DNA, 33 bp, Homo sapien
gaaggcttctctgttcgaaattgagcctagaaa

SEQ ID NO: 614863 - DNA, 33 bp, Homo sapien
tttgaggaaagacggaactggccttatcagtca

SEQ ID NO: 614864 - DNA, 33 bp, Homo sapien
tttgaggaaagacggagctggccttatcagtca

SEQ ID NO: 614865 - DNA, 33 bp, Homo sapien
aaccatgctaccttcaggtggaagagggggagg

SEQ ID NO: 614866 - DNA, 33 bp, Homo sapien
aaccatgctaccttcatgtggaagagggggagg

SEQ ID NO: 614867 - DNA, 33 bp, Homo sapien
tgacaaaatcccctcacggtacagcactcagaa

SEQ ID NO: 614868 - DNA, 33 bp, Homo sapien
tgacaaaatcccctcatggtacagcactcagaa

SEQ ID NO: 614869 - DNA, 33 bp, Homo sapien
tgggatggaaacaacagctttatctctgaggaa

SEQ ID NO: 614870 - DNA, 33 bp, Homo sapien
tgggatggaaacaacatctttatctctgaggaa

SEQ ID NO: 614871 - DNA, 33 bp, Homo sapien
acttccaatcctgaaactccatttatgttaagt

SEQ ID NO: 614872 - DNA, 33 bp, Homo sapien
acttccaatcctgaaattccatttatgttaagt

SEQ ID NO: 614873 - DNA, 33 bp, Homo sapien
tcagataaaggaagccaaatgcaaaagagaaca

SEQ ID NO: 614874 - DNA, 33 bp, Homo sapien
tcagataaaggaagccgaatgcaaaagagaaca

SEQ ID NO: 614875 - DNA, 33 bp, Homo sapien
tccattttcctctgcaaatatttcatggtaaga

SEQ ID NO: 614876 - DNA, 33 bp, Homo sapien
tccattttcctctgcagatatttcatggtaaga

SEQ ID NO: 614877 - DNA, 33 bp, Homo sapien
ccactctctgcttaaactgctccattaacactt

SEQ ID NO: 614878 - DNA, 33 bp, Homo sapien
ccactctctgcttaaattgctccattaacactt

SEQ ID NO: 614879 - DNA, 33 bp, Homo sapien
cacacaattcaaaagaacaacaaatccaggagt

SEQ ID NO: 614880 - DNA, 33 bp, Homo sapien
cacacaattcaaaagatcaacaaatccaggagt

SEQ ID NO: 614881 - DNA, 33 bp, Homo sapien
gtgcgtttctttctaacggcactaactgggcct

SEQ ID NO: 614882 - DNA, 33 bp, Homo sapien
gtgcgtttctttctaatggcactaactgggcct

SEQ ID NO: 614883 - DNA, 33 bp, Homo sapien
tcaggtcttcactgaacggatagatacaaacta

SEQ ID NO: 614884 - DNA, 33 bp, Homo sapien
tcaggtcttcactgaatggatagatacaaacta

SEQ ID NO: 614885 - DNA, 33 bp, Homo sapien
atagtagaattcaataaatgtgtgcaggtaagc

SEQ ID NO: 614886 - DNA, 33 bp, Homo sapien
atagtagaattcaatagatgtgtgcaggtaagc

SEQ ID NO: 614887 - DNA, 33 bp, Homo sapien
tccagacactggaaataacactggcaagaaaga

SEQ ID NO: 614888 - DNA, 33 bp, Homo sapien
tccagacactggaaatgacactggcaagaaaga

SEQ ID NO: 614889 - DNA, 33 bp, Homo sapien
ccagctcaacatgctaccttttactgagttttg

SEQ ID NO: 614890 - DNA, 33 bp, Homo sapien
ccagctcaacatgctatcttttactgagttttg

SEQ ID NO: 614891 - DNA, 33 bp, Homo sapien
ctctgaaaacagtacacctgagttaaaatatta

SEQ ID NO: 614892 - DNA, 33 bp, Homo sapien
ctctgaaaacagtacagctgagttaaaatatta

SEQ ID NO: 614893 - DNA, 33 bp, Homo sapien
aaattatatgatatccacaaatattcacctctc

SEQ ID NO: 614894 - DNA, 33 bp, Homo sapien
aaattatatgatatccgcaaatattcacctctc

SEQ ID NO: 614895 - DNA, 33 bp, Homo sapien
ctgatcacagtcaaaaggggtcaagtgtgtttc

SEQ ID NO: 614896 - DNA, 33 bp, Homo sapien
ctgatcacagtcaaaatgggtcaagtgtgtttc

SEQ ID NO: 614897 - DNA, 33 bp, Homo sapien
tcaggattcaattacacctgagtgattaagcaa

SEQ ID NO: 614898 - DNA, 33 bp, Homo sapien
tcaggattcaattacagctgagtgattaagcaa

SEQ ID NO: 614899 - DNA, 33 bp, Homo sapien
ttccaattacaaattcacaggctttacacaaac

SEQ ID NO: 614900 - DNA, 33 bp, Homo sapien
ttccaattacaaattcccaggctttacacaaac

SEQ ID NO: 614901 - DNA, 33 bp, Homo sapien
cgtgtactataaagagaatgtcgtgtaatacca

SEQ ID NO: 614902 - DNA, 33 bp, Homo sapien
cgtgtactataaagaggatgtcgtgtaatacca

SEQ ID NO: 614903 - DNA, 33 bp, Homo sapien
atgtggcttggccaacaatacaaggaaccagga

SEQ ID NO: 614904 - DNA, 33 bp, Homo sapien
atgtggcttggccaacgatacaaggaaccagga

SEQ ID NO: 614905 - DNA, 33 bp, Homo sapien
gcagtgtctaggatacacaaagcagggaaagag

SEQ ID NO: 614906 - DNA, 33 bp, Homo sapien
gcagtgtctaggatacgcaaagcagggaaagag

SEQ ID NO: 614907 - DNA, 33 bp, Homo sapien
agagactacatgggaaacattgtaagtacagta

SEQ ID NO: 614908 - DNA, 33 bp, Homo sapien
agagactacatgggaagcattgtaagtacagta

SEQ ID NO: 614909 - DNA, 33 bp, Homo sapien
ctgagtgaacttctaaaccttccaatgccacca

SEQ ID NO: 614910 - DNA, 33 bp, Homo sapien
ctgagtgaacttctaatccttccaatgccacca

SEQ ID NO: 614911 - DNA, 33 bp, Homo sapien
catactcactgaaaagaccataagaggctgttc

SEQ ID NO: 614912 - DNA, 33 bp, Homo sapien
catactcactgaaaaggccataagaggctgttc

SEQ ID NO: 614913 - DNA, 33 bp, Homo sapien
gtgaaggaagaaataaaaatgctcagagtaaaa

SEQ ID NO: 614914 - DNA, 33 bp, Homo sapien
gtgaaggaagaaataacaatgctcagagtaaaa

SEQ ID NO: 614915 - DNA, 33 bp, Homo sapien
ctggagggttttgtgacagacttttccttatac

SEQ ID NO: 614916 - DNA, 33 bp, Homo sapien
ctggagggttttgtgagagacttttccttatac

SEQ ID NO: 614917 - DNA, 33 bp, Homo sapien
gaacagagccgaaccacattaaaaagggaaaga

SEQ ID NO: 614918 - DNA, 33 bp, Homo sapien
gaacagagccgaaccatattaaaaagggaaaga

SEQ ID NO: 614919 - DNA, 33 bp, Homo sapien
tttgttcctactttcacacctagagacaggatg

SEQ ID NO: 614920 - DNA, 33 bp, Homo sapien
tttgttcctactttcagacctagagacaggatg

SEQ ID NO: 614921 - DNA, 33 bp, Homo sapien
tgcttgttgtacttaacgattcatgtaagagga

SEQ ID NO: 614922 - DNA, 33 bp, Homo sapien
tgcttgttgtacttaatgattcatgtaagagga

SEQ ID NO: 614923 - DNA, 33 bp, Homo sapien
catgaaatgctgtttgaacttccagagaaccag

SEQ ID NO: 614924 - DNA, 33 bp, Homo sapien
catgaaatgctgtttggacttccagagaaccag

SEQ ID NO: 614925 - DNA, 33 bp, Homo sapien
taactattgctctaagccaactttaatggaggg

SEQ ID NO: 614926 - DNA, 33 bp, Homo sapien
taactattgctctaagtcaactttaatggaggg

SEQ ID NO: 614927 - DNA, 33 bp, Homo sapien
atgcaatggagtcagaaaaaatatcatctctgg

SEQ ID NO: 614928 - DNA, 33 bp, Homo sapien
atgcaatggagtcagagaaaatatcatctctgg

SEQ ID NO: 614929 - DNA, 33 bp, Homo sapien
atctccagagtacaccaagggaagaacctatcc

SEQ ID NO: 614930 - DNA, 33 bp, Homo sapien
atctccagagtacaccgagggaagaacctatcc

SEQ ID NO: 614931 - DNA, 33 bp, Homo sapien
actcactgggtcctcaaaaggatctcctaagag

SEQ ID NO: 614932 - DNA, 33 bp, Homo sapien
actcactgggtcctcacaaggatctcctaagag

SEQ ID NO: 614933 - DNA, 33 bp, Homo sapien
taaccttctgagcctcaagtatccactattcta

SEQ ID NO: 614934 - DNA, 33 bp, Homo sapien
taaccttctgagcctccagtatccactattcta

SEQ ID NO: 614935 - DNA, 33 bp, Homo sapien
ttttgcttccattaaccaacctcttccctattc

SEQ ID NO: 614936 - DNA, 33 bp, Homo sapien
ttttgcttccattaacgaacctcttccctattc

SEQ ID NO: 614937 - DNA, 33 bp, Homo sapien
tgactggccaagcacactataatcagagagttg

SEQ ID NO: 614938 - DNA, 33 bp, Homo sapien
tgactggccaagcacattataatcagagagttg

SEQ ID NO: 614939 - DNA, 33 bp, Homo sapien
gcttggccagtcactacaatgggtggatattaa

SEQ ID NO: 614940 - DNA, 33 bp, Homo sapien
gcttggccagtcactagaatgggtggatattaa

SEQ ID NO: 614941 - DNA, 33 bp, Homo sapien
taaaatgtttctgtcacaggacccgtgcagatt

SEQ ID NO: 614942 - DNA, 33 bp, Homo sapien
taaaatgtttctgtcataggacccgtgcagatt

SEQ ID NO: 614943 - DNA, 33 bp, Homo sapien
agggacaatgtcaaaaagcactttgaagaccaa

SEQ ID NO: 614944 - DNA, 33 bp, Homo sapien
agggacaatgtcaaaacgcactttgaagaccaa

SEQ ID NO: 614945 - DNA, 33 bp, Homo sapien
ttttagggttttagcaacctcgacaaatgccct

SEQ ID NO: 614946 - DNA, 33 bp, Homo sapien
ttttagggttttagcatcctcgacaaatgccct

SEQ ID NO: 614947 - DNA, 33 bp, Homo sapien
aaggtatttgcgtccacatgaatgttcatcaaa

SEQ ID NO: 614948 - DNA, 33 bp, Homo sapien
aaggtatttgcgtccatatgaatgttcatcaaa

SEQ ID NO: 614949 - DNA, 33 bp, Homo sapien
ttattctctttcaaggacactcagtatgaagtt

SEQ ID NO: 614950 - DNA, 33 bp, Homo sapien
ttattctctttcaagggcactcagtatgaagtt

SEQ ID NO: 614951 - DNA, 33 bp, Homo sapien
agactacttcagaatactaaatcccagagatgc

SEQ ID NO: 614952 - DNA, 33 bp, Homo sapien
agactacttcagaatattaaatcccagagatgc

SEQ ID NO: 614953 - DNA, 33 bp, Homo sapien
caatatcatctactcaataaggctctctgagct

SEQ ID NO: 614954 - DNA, 33 bp, Homo sapien
caatatcatctactcagtaaggctctctgagct

SEQ ID NO: 614955 - DNA, 33 bp, Homo sapien
cgcagccctgttctgcacaatgatgaagagctt

SEQ ID NO: 614956 - DNA, 33 bp, Homo sapien
cgcagccctgttctgcgcaatgatgaagagctt

SEQ ID NO: 614957 - DNA, 33 bp, Homo sapien
tgactcattatgggaacgtaaactctgcaaggc

SEQ ID NO: 614958 - DNA, 33 bp, Homo sapien
tgactcattatgggaatgtaaactctgcaaggc

SEQ ID NO: 614959 - DNA, 33 bp, Homo sapien
tcaaagaaaacgtgaaactgcaccagctactga

SEQ ID NO: 614960 - DNA, 33 bp, Homo sapien
tcaaagaaaacgtgaacctgcaccagctactga

SEQ ID NO: 614961 - DNA, 33 bp, Homo sapien
tttaaatttattatgacaaaaaatgcctatcca

SEQ ID NO: 614962 - DNA, 33 bp, Homo sapien
tttaaatttattatgagaaaaaatgcctatcca

SEQ ID NO: 614963 - DNA, 33 bp, Homo sapien
aggaggagaatattcaatcttctcacgcagata

SEQ ID NO: 614964 - DNA, 33 bp, Homo sapien
aggaggagaatattcagtcttctcacgcagata

SEQ ID NO: 614965 - DNA, 33 bp, Homo sapien
gattccaaatggtaaaacacaatacaagaagaa

SEQ ID NO: 614966 - DNA, 33 bp, Homo sapien
gattccaaatggtaaaccacaatacaagaagaa

SEQ ID NO: 614967 - DNA, 33 bp, Homo sapien
tagaaatagattggaaccaggtacttgaacatt

SEQ ID NO: 614968 - DNA, 33 bp, Homo sapien
tagaaatagattggaatcaggtacttgaacatt

SEQ ID NO: 614969 - DNA, 33 bp, Homo sapien
attgtgcaatttcatcactcatatatccatttt

SEQ ID NO: 614970 - DNA, 33 bp, Homo sapien
attgtgcaatttcatcgctcatatatccatttt

SEQ ID NO: 614971 - DNA, 33 bp, Homo sapien
gtgatggggcattttaaatcaaagctgagacat

SEQ ID NO: 614972 - DNA, 33 bp, Homo sapien
gtgatggggcattttagatcaaagctgagacat

SEQ ID NO: 614973 - DNA, 33 bp, Homo sapien
cagtcgggtggtgaggaaatactgtaagctgaa

SEQ ID NO: 614974 - DNA, 33 bp, Homo sapien
cagtcgggtggtgagggaatactgtaagctgaa

SEQ ID NO: 614975 - DNA, 33 bp, Homo sapien
tggctacaacaagatcgctcttaaaaacttaag

SEQ ID NO: 614976 - DNA, 33 bp, Homo sapien
tggctacaacaagatctctcttaaaaacttaag

SEQ ID NO: 614977 - DNA, 33 bp, Homo sapien
cttgcctcctcttagccgagtcagattctttca

SEQ ID NO: 614978 - DNA, 33 bp, Homo sapien
cttgcctcctcttagctgagtcagattctttca

SEQ ID NO: 614979 - DNA, 33 bp, Homo sapien
aagccagtttcaaaaacggagctcctctcagac

SEQ ID NO: 614980 - DNA, 33 bp, Homo sapien
aagccagtttcaaaaatggagctcctctcagac

SEQ ID NO: 614981 - DNA, 33 bp, Homo sapien
aagagcaaaacaatcacgtgttcaggtattgga

SEQ ID NO: 614982 - DNA, 33 bp, Homo sapien
aagagcaaaacaatcatgtgttcaggtattgga

SEQ ID NO: 614983 - DNA, 33 bp, Homo sapien
gttgataaagaatacacagtccagctcattgag

SEQ ID NO: 614984 - DNA, 33 bp, Homo sapien
gttgataaagaatacagagtccagctcattgag

SEQ ID NO: 614985 - DNA, 33 bp, Homo sapien
tgtgtttaagctcataaaagtcagaggtgtggc

SEQ ID NO: 614986 - DNA, 33 bp, Homo sapien
tgtgtttaagctcatagaagtcagaggtgtggc

SEQ ID NO: 614987 - DNA, 33 bp, Homo sapien
attgtccatttgtttacatatattgtggttgcc

SEQ ID NO: 614988 - DNA, 33 bp, Homo sapien
attgtccatttgtttatatatattgtggttgcc

SEQ ID NO: 614989 - DNA, 33 bp, Homo sapien
gaccagcgttgaccaacggaaccttttacaatg

SEQ ID NO: 614990 - DNA, 33 bp, Homo sapien
gaccagcgttgaccaatggaaccttttacaatg

SEQ ID NO: 614991 - DNA, 33 bp, Homo sapien
ggatcaatcaccactaccaacaaagacaaccac

SEQ ID NO: 614992 - DNA, 33 bp, Homo sapien
ggatcaatcaccactatcaacaaagacaaccac

SEQ ID NO: 614993 - DNA, 33 bp, Homo sapien
ctgatatggggatcaactagaataacgtaaaca

SEQ ID NO: 614994 - DNA, 33 bp, Homo sapien
ctgatatggggatcaagtagaataacgtaaaca

SEQ ID NO: 614995 - DNA, 33 bp, Homo sapien
gcttttattccagtacaggaggcagaaagaaaa

SEQ ID NO: 614996 - DNA, 33 bp, Homo sapien
gcttttattccagtacgggaggcagaaagaaaa

SEQ ID NO: 614997 - DNA, 33 bp, Homo sapien
agtgctttcagaaaacagcttagcaatatattt

SEQ ID NO: 614998 - DNA, 33 bp, Homo sapien
agtgctttcagaaaacggcttagcaatatattt

SEQ ID NO: 614999 - DNA, 33 bp, Homo sapien
gaataaaaccatgcataaaatagatgaataaat

SEQ ID NO: 615000 - DNA, 33 bp, Homo sapien
gaataaaaccatgcatgaaatagatgaataaat

SEQ ID NO: 615001 - DNA, 33 bp, Homo sapien
caggctcagatgattacctttgtgaattctact

SEQ ID NO: 615002 - DNA, 33 bp, Homo sapien
caggctcagatgattatctttgtgaattctact

SEQ ID NO: 615003 - DNA, 33 bp, Homo sapien
catggtgtcacttggcactttttctgtcagcct

SEQ ID NO: 615004 - DNA, 33 bp, Homo sapien
catggtgtcacttggctctttttctgtcagcct

SEQ ID NO: 615005 - DNA, 33 bp, Homo sapien
agagcttagcagatacaggatcagagaggcttg

SEQ ID NO: 615006 - DNA, 33 bp, Homo sapien
agagcttagcagatacgggatcagagaggcttg

SEQ ID NO: 615007 - DNA, 33 bp, Homo sapien
caaagggaggcatgaacgatttatttctgagaa

SEQ ID NO: 615008 - DNA, 33 bp, Homo sapien
caaagggaggcatgaatgatttatttctgagaa

SEQ ID NO: 615009 - DNA, 33 bp, Homo sapien
ttccactctcatgtcaagtcttacagatgctct

SEQ ID NO: 615010 - DNA, 33 bp, Homo sapien
ttccactctcatgtcaggtcttacagatgctct

SEQ ID NO: 615011 - DNA, 33 bp, Homo sapien
tgcagtgaatagatcacgttgacaacactggaa

SEQ ID NO: 615012 - DNA, 33 bp, Homo sapien
tgcagtgaatagatcaggttgacaacactggaa

SEQ ID NO: 615013 - DNA, 33 bp, Homo sapien
tttttacctttactgaacagattggcattaccc

SEQ ID NO: 615014 - DNA, 33 bp, Homo sapien
tttttacctttactgatcagattggcattaccc

SEQ ID NO: 615015 - DNA, 33 bp, Homo sapien
aaggactttatggccaagagcaatttgttgtgg

SEQ ID NO: 615016 - DNA, 33 bp, Homo sapien
aaggactttatggccaggagcaatttgttgtgg

SEQ ID NO: 615017 - DNA, 33 bp, Homo sapien
ctacatggtggcctcaaaatgactccctaggaa

SEQ ID NO: 615018 - DNA, 33 bp, Homo sapien
ctacatggtggcctcagaatgactccctaggaa

SEQ ID NO: 615019 - DNA, 33 bp, Homo sapien
aaactgatgcttgaaaatgaaaatgtaaagtgg

SEQ ID NO: 615020 - DNA, 33 bp, Homo sapien
aaactgatgcttgaaagtgaaaatgtaaagtgg

SEQ ID NO: 615021 - DNA, 33 bp, Homo sapien
aatgtctcttctctctaaactgtagttgcaaag

SEQ ID NO: 615022 - DNA, 33 bp, Homo sapien
aatgtctcttctctctcaactgtagttgcaaag

SEQ ID NO: 615023 - DNA, 33 bp, Homo sapien
agacagcaagaacatacggtttttcaacaggtc

SEQ ID NO: 615024 - DNA, 33 bp, Homo sapien
agacagcaagaacatatggtttttcaacaggtc

SEQ ID NO: 615025 - DNA, 33 bp, Homo sapien
aatttatgttggcccacgtatcaagtagacatt

SEQ ID NO: 615026 - DNA, 33 bp, Homo sapien
aatttatgttggcccatgtatcaagtagacatt

SEQ ID NO: 615027 - DNA, 33 bp, Homo sapien
agtcattagtcaagaacagttagtgaaggtctc

SEQ ID NO: 615028 - DNA, 33 bp, Homo sapien
agtcattagtcaagaagagttagtgaaggtctc

SEQ ID NO: 615029 - DNA, 33 bp, Homo sapien
gtgcttcagtcaacttcaacacagttctaaacc

SEQ ID NO: 615030 - DNA, 33 bp, Homo sapien
gtgcttcagtcaactttaacacagttctaaacc

SEQ ID NO: 615031 - DNA, 33 bp, Homo sapien
tgggatacgtgttgaaatggaagttaccagagc

SEQ ID NO: 615032 - DNA, 33 bp, Homo sapien
tgggatacgtgttgaagtggaagttaccagagc

SEQ ID NO: 615033 - DNA, 33 bp, Homo sapien
ggcatctgtcctcaacaatgcaaactgtcctgc

SEQ ID NO: 615034 - DNA, 33 bp, Homo sapien
ggcatctgtcctcaacgatgcaaactgtcctgc

SEQ ID NO: 615035 - DNA, 33 bp, Homo sapien
tttcttcaggttatgtcagtttatttggaagca

SEQ ID NO: 615036 - DNA, 33 bp, Homo sapien
tttcttcaggttatgtgagtttatttggaagca

SEQ ID NO: 615037 - DNA, 33 bp, Homo sapien
ggacatggttacctacatatcagtttttcctcc

SEQ ID NO: 615038 - DNA, 33 bp, Homo sapien
ggacatggttacctacgtatcagtttttcctcc

SEQ ID NO: 615039 - DNA, 33 bp, Homo sapien
aaaattcaccaaatgacgcaacacagcacatga

SEQ ID NO: 615040 - DNA, 33 bp, Homo sapien
aaaattcaccaaatgatgcaacacagcacatga

SEQ ID NO: 615041 - DNA, 33 bp, Homo sapien
gacatgaggtttctgagcatatggaggataata

SEQ ID NO: 615042 - DNA, 33 bp, Homo sapien
gacatgaggtttctgatcatatggaggataata

SEQ ID NO: 615043 - DNA, 33 bp, Homo sapien
ctcagactagcattacaggctgccaagagctct

SEQ ID NO: 615044 - DNA, 33 bp, Homo sapien
ctcagactagcattacgggctgccaagagctct

SEQ ID NO: 615045 - DNA, 33 bp, Homo sapien
ctacacaacagctgtacgtccgtaggcaaatca

SEQ ID NO: 615046 - DNA, 33 bp, Homo sapien
ctacacaacagctgtatgtccgtaggcaaatca

SEQ ID NO: 615047 - DNA, 33 bp, Homo sapien
gttgccctgttctacccggcaaggacccaggca

SEQ ID NO: 615048 - DNA, 33 bp, Homo sapien
gttgccctgttctacctggcaaggacccaggca

SEQ ID NO: 615049 - DNA, 33 bp, Homo sapien
gctttcactcgaatcactcttgatgccccattc

SEQ ID NO: 615050 - DNA, 33 bp, Homo sapien
gctttcactcgaatcattcttgatgccccattc

SEQ ID NO: 615051 - DNA, 33 bp, Homo sapien
gagaagtcccatgtaaaagcaaaagttctagac

SEQ ID NO: 615052 - DNA, 33 bp, Homo sapien
gagaagtcccatgtaacagcaaaagttctagac

SEQ ID NO: 615053 - DNA, 33 bp, Homo sapien
cctggagcctgattcacactgtgcccttgttta

SEQ ID NO: 615054 - DNA, 33 bp, Homo sapien
cctggagcctgattcatactgtgcccttgttta

SEQ ID NO: 615055 - DNA, 33 bp, Homo sapien
tttttctaagtacaaacgcaatcaactcggggt

SEQ ID NO: 615056 - DNA, 33 bp, Homo sapien
tttttctaagtacaaatgcaatcaactcggggt

SEQ ID NO: 615057 - DNA, 33 bp, Homo sapien
attttctggctgccaaatatatgtgtggatgtg

SEQ ID NO: 615058 - DNA, 33 bp, Homo sapien
attttctggctgccaagtatatgtgtggatgtg

SEQ ID NO: 615059 - DNA, 33 bp, Homo sapien
tatctgtgtctacatcccaagacttccagaaca

SEQ ID NO: 615060 - DNA, 33 bp, Homo sapien
tatctgtgtctacatcgcaagacttccagaaca

SEQ ID NO: 615061 - DNA, 33 bp, Homo sapien
ccaatgggcatcagaagtgatttaagtctttgc

SEQ ID NO: 615062 - DNA, 33 bp, Homo sapien
ccaatgggcatcagaattgatttaagtctttgc

SEQ ID NO: 615063 - DNA, 33 bp, Homo sapien
catacagcaaaccaaccagtgatttatcagttg

SEQ ID NO: 615064 - DNA, 33 bp, Homo sapien
catacagcaaaccaactagtgatttatcagttg

SEQ ID NO: 615065 - DNA, 33 bp, Homo sapien
ttgccaaagatttctcaatagattcaccagctg

SEQ ID NO: 615066 - DNA, 33 bp, Homo sapien
ttgccaaagatttctcgatagattcaccagctg

SEQ ID NO: 615067 - DNA, 33 bp, Homo sapien
ggccgtattttataccacgctttgttagatttt

SEQ ID NO: 615068 - DNA, 33 bp, Homo sapien
ggccgtattttataccgcgctttgttagatttt

SEQ ID NO: 615069 - DNA, 33 bp, Homo sapien
ctctatcagaaactcaaggtagaaatcttcctt

SEQ ID NO: 615070 - DNA, 33 bp, Homo sapien
ctctatcagaaactcacggtagaaatcttcctt

SEQ ID NO: 615071 - DNA, 33 bp, Homo sapien
attgacatcattgacaatcattgacaatgagac

SEQ ID NO: 615072 - DNA, 33 bp, Homo sapien
attgacatcattgacagtcattgacaatgagac

SEQ ID NO: 615073 - DNA, 33 bp, Homo sapien
atctttcccaaaggcacgtgtgatagttctcag

SEQ ID NO: 615074 - DNA, 33 bp, Homo sapien
atctttcccaaaggcatgtgtgatagttctcag

SEQ ID NO: 615075 - DNA, 33 bp, Homo sapien
acaaagctaagagagaagtggcttctaaaccaa

SEQ ID NO: 615076 - DNA, 33 bp, Homo sapien
acaaagctaagagagaggtggcttctaaaccaa

SEQ ID NO: 615077 - DNA, 33 bp, Homo sapien
atgtaaggtgcagaaacattaagaaaaagactg

SEQ ID NO: 615078 - DNA, 33 bp, Homo sapien
atgtaaggtgcagaaagattaagaaaaagactg

SEQ ID NO: 615079 - DNA, 33 bp, Homo sapien
atccccaacattgccaagaagacaggaatcaca

SEQ ID NO: 615080 - DNA, 33 bp, Homo sapien
atccccaacattgccaggaagacaggaatcaca

SEQ ID NO: 615081 - DNA, 33 bp, Homo sapien
tgtcacacttgagaacccctctggcttgctcag

SEQ ID NO: 615082 - DNA, 33 bp, Homo sapien
tgtcacacttgagaactcctctggcttgctcag

SEQ ID NO: 615083 - DNA, 33 bp, Homo sapien
agttctctactcttggaaataccattctgcata

SEQ ID NO: 615084 - DNA, 33 bp, Homo sapien
agttctctactcttgggaataccattctgcata

SEQ ID NO: 615085 - DNA, 33 bp, Homo sapien
aaagcttgagtactaaatgcaatggacagcaat

SEQ ID NO: 615086 - DNA, 33 bp, Homo sapien
aaagcttgagtactaagtgcaatggacagcaat

SEQ ID NO: 615087 - DNA, 33 bp, Homo sapien
cattaatcacatccagaaattcacagtgagatc

SEQ ID NO: 615088 - DNA, 33 bp, Homo sapien
cattaatcacatccagcaattcacagtgagatc

SEQ ID NO: 615089 - DNA, 33 bp, Homo sapien
gttagaactctagatcacagttgtactgacctg

SEQ ID NO: 615090 - DNA, 33 bp, Homo sapien
gttagaactctagatcccagttgtactgacctg

SEQ ID NO: 615091 - DNA, 33 bp, Homo sapien
aaagatgtattttacccaaattgtgtaattcag

SEQ ID NO: 615092 - DNA, 33 bp, Homo sapien
aaagatgtattttacctaaattgtgtaattcag

SEQ ID NO: 615093 - DNA, 33 bp, Homo sapien
cggtcactaaatgaccaaattggggcaactatt

SEQ ID NO: 615094 - DNA, 33 bp, Homo sapien
cggtcactaaatgaccgaattggggcaactatt

SEQ ID NO: 615095 - DNA, 33 bp, Homo sapien
catgaacacaatttgaagaaccactgaggtaag

SEQ ID NO: 615096 - DNA, 33 bp, Homo sapien
catgaacacaatttgaggaaccactgaggtaag

SEQ ID NO: 615097 - DNA, 33 bp, Homo sapien
aaaatgccagtggacacgatgccaaccatactt

SEQ ID NO: 615098 - DNA, 33 bp, Homo sapien
aaaatgccagtggacaggatgccaaccatactt

SEQ ID NO: 615099 - DNA, 33 bp, Homo sapien
tggtgctccccagcggcatttttgtggggctga

SEQ ID NO: 615100 - DNA, 33 bp, Homo sapien
tggtgctccccagcggtatttttgtggggctga

SEQ ID NO: 615101 - DNA, 33 bp, Homo sapien
atgcagaagatcaaaaattcttggtcgatattc

SEQ ID NO: 615102 - DNA, 33 bp, Homo sapien
atgcagaagatcaaaagttcttggtcgatattc

SEQ ID NO: 615103 - DNA, 33 bp, Homo sapien
agcccctcagaatctgaacacaaagtaaaatct

SEQ ID NO: 615104 - DNA, 33 bp, Homo sapien
agcccctcagaatctggacacaaagtaaaatct

SEQ ID NO: 615105 - DNA, 33 bp, Homo sapien
aagcaagggtctaagacggttgagactccaatt

SEQ ID NO: 615106 - DNA, 33 bp, Homo sapien
aagcaagggtctaagatggttgagactccaatt

SEQ ID NO: 615107 - DNA, 33 bp, Homo sapien
aagaagtgaagaccaaataagttaagtgataca

SEQ ID NO: 615108 - DNA, 33 bp, Homo sapien
aagaagtgaagaccaagtaagttaagtgataca

SEQ ID NO: 615109 - DNA, 33 bp, Homo sapien
taaacagtagaggcaaattaatggcacagtcct

SEQ ID NO: 615110 - DNA, 33 bp, Homo sapien
taaacagtagaggcaagttaatggcacagtcct

SEQ ID NO: 615111 - DNA, 33 bp, Homo sapien
acagaaaggaagactacggaatagaaggcactt

SEQ ID NO: 615112 - DNA, 33 bp, Homo sapien
acagaaaggaagactagggaatagaaggcactt

SEQ ID NO: 615113 - DNA, 33 bp, Homo sapien
taggaaatgtaggagagaaagtggaagtaggat

SEQ ID NO: 615114 - DNA, 33 bp, Homo sapien
taggaaatgtaggagataaagtggaagtaggat

SEQ ID NO: 615115 - DNA, 33 bp, Homo sapien
tcattctcaggaagacaaaaggaccaaattcct

SEQ ID NO: 615116 - DNA, 33 bp, Homo sapien
tcattctcaggaagacgaaaggaccaaattcct

SEQ ID NO: 615117 - DNA, 33 bp, Homo sapien
aatgaacacatggcatcaccctggcaactacta

SEQ ID NO: 615118 - DNA, 33 bp, Homo sapien
aatgaacacatggcattaccctggcaactacta

SEQ ID NO: 615119 - DNA, 33 bp, Homo sapien
gaaaaattgtgcaagcgagttaaatttccagaa

SEQ ID NO: 615120 - DNA, 33 bp, Homo sapien
gaaaaattgtgcaagctagttaaatttccagaa

SEQ ID NO: 615121 - DNA, 33 bp, Homo sapien
tgggggtatatgtgaaacttttgtacatacata

SEQ ID NO: 615122 - DNA, 33 bp, Homo sapien
tgggggtatatgtgaagcttttgtacatacata

SEQ ID NO: 615123 - DNA, 33 bp, Homo sapien
ccacaagtgaaacttgaagagctcgtggaacag

SEQ ID NO: 615124 - DNA, 33 bp, Homo sapien
ccacaagtgaaacttgcagagctcgtggaacag

SEQ ID NO: 615125 - DNA, 33 bp, Homo sapien
aaatgtatgctgtggaaagtcgagaatttcatg

SEQ ID NO: 615126 - DNA, 33 bp, Homo sapien
aaatgtatgctgtggagagtcgagaatttcatg

SEQ ID NO: 615127 - DNA, 33 bp, Homo sapien
ccatctgaaaaattgaacccgtgacaacttttt

SEQ ID NO: 615128 - DNA, 33 bp, Homo sapien
ccatctgaaaaattgagcccgtgacaacttttt

SEQ ID NO: 615129 - DNA, 33 bp, Homo sapien
ccaaagaaggcttagccagggttcagtaaggga

SEQ ID NO: 615130 - DNA, 33 bp, Homo sapien
ccaaagaaggcttagctagggttcagtaaggga

SEQ ID NO: 615131 - DNA, 33 bp, Homo sapien
ccatgacataccatcaaggtcagaggaaataac

SEQ ID NO: 615132 - DNA, 33 bp, Homo sapien
ccatgacataccatcagggtcagaggaaataac

SEQ ID NO: 615133 - DNA, 33 bp, Homo sapien
ccaagttctggaagcacattagcattgctatta

SEQ ID NO: 615134 - DNA, 33 bp, Homo sapien
ccaagttctggaagcatattagcattgctatta

SEQ ID NO: 615135 - DNA, 33 bp, Homo sapien
agtcattgcatagtgtaaatattgcctctgcat

SEQ ID NO: 615136 - DNA, 33 bp, Homo sapien
agtcattgcatagtgtgaatattgcctctgcat

SEQ ID NO: 615137 - DNA, 33 bp, Homo sapien
tcgcttgaggaagcagcaatgggaataatttaa

SEQ ID NO: 615138 - DNA, 33 bp, Homo sapien
tcgcttgaggaagcaggaatgggaataatttaa

SEQ ID NO: 615139 - DNA, 33 bp, Homo sapien
tttctcagctataaggacaatctgtaacttgaa

SEQ ID NO: 615140 - DNA, 33 bp, Homo sapien
tttctcagctataaggtcaatctgtaacttgaa

SEQ ID NO: 615141 - DNA, 33 bp, Homo sapien
ttaaagcttcatgaaggcaggtatctcttcact

SEQ ID NO: 615142 - DNA, 33 bp, Homo sapien
ttaaagcttcatgaagtcaggtatctcttcact

SEQ ID NO: 615143 - DNA, 33 bp, Homo sapien
tcttgtgaacaaaaggaaagcataacacacaag

SEQ ID NO: 615144 - DNA, 33 bp, Homo sapien
tcttgtgaacaaaaggcaagcataacacacaag

SEQ ID NO: 615145 - DNA, 33 bp, Homo sapien
gtactcatttttcaaacaatgacagtgtgtgtc

SEQ ID NO: 615146 - DNA, 33 bp, Homo sapien
gtactcatttttcaaataatgacagtgtgtgtc

SEQ ID NO: 615147 - DNA, 33 bp, Homo sapien
ggaattattctcaaccaatgttcttgtaacttt

SEQ ID NO: 615148 - DNA, 33 bp, Homo sapien
ggaattattctcaaccgatgttcttgtaacttt

SEQ ID NO: 615149 - DNA, 33 bp, Homo sapien
aaaagtgcctgtgatcagaggattctctaaagc

SEQ ID NO: 615150 - DNA, 33 bp, Homo sapien
aaaagtgcctgtgatccgaggattctctaaagc

SEQ ID NO: 615151 - DNA, 33 bp, Homo sapien
gacaggtctgcaacacaagatggggcttgtcat

SEQ ID NO: 615152 - DNA, 33 bp, Homo sapien
gacaggtctgcaacacgagatggggcttgtcat

SEQ ID NO: 615153 - DNA, 33 bp, Homo sapien
ctttttgaggaaataactgcatcttatgaaacc

SEQ ID NO: 615154 - DNA, 33 bp, Homo sapien
ctttttgaggaaataattgcatcttatgaaacc

SEQ ID NO: 615155 - DNA, 33 bp, Homo sapien
atgaccatctttcaaacgcttcagggcaatgca

SEQ ID NO: 615156 - DNA, 33 bp, Homo sapien
atgaccatctttcaaatgcttcagggcaatgca

SEQ ID NO: 615157 - DNA, 33 bp, Homo sapien
tatatatactatgacaggattgaatctcaaaaa

SEQ ID NO: 615158 - DNA, 33 bp, Homo sapien
tatatatactatgacatgattgaatctcaaaaa

SEQ ID NO: 615159 - DNA, 33 bp, Homo sapien
ttgtttgtaatgtttaccagaatttcatgttgt

SEQ ID NO: 615160 - DNA, 33 bp, Homo sapien
ttgtttgtaatgtttatcagaatttcatgttgt

SEQ ID NO: 615161 - DNA, 33 bp, Homo sapien
agcgtgcatggaactcacgtggttaatacagtc

SEQ ID NO: 615162 - DNA, 33 bp, Homo sapien
agcgtgcatggaactcgcgtggttaatacagtc

SEQ ID NO: 615163 - DNA, 33 bp, Homo sapien
ataattgaggctaaaaaattttctatggtaatt

SEQ ID NO: 615164 - DNA, 33 bp, Homo sapien
ataattgaggctaaaacattttctatggtaatt

SEQ ID NO: 615165 - DNA, 33 bp, Homo sapien
aggaaaattggggtcacattggggaagatgacc

SEQ ID NO: 615166 - DNA, 33 bp, Homo sapien
aggaaaattggggtcagattggggaagatgacc

SEQ ID NO: 615167 - DNA, 33 bp, Homo sapien
atagcatttcctcagggagccatgtaaagtctg

SEQ ID NO: 615168 - DNA, 33 bp, Homo sapien
atagcatttcctcaggtagccatgtaaagtctg

SEQ ID NO: 615169 - DNA, 33 bp, Homo sapien
cccttgacccagttcaactctacaagtgtacct

SEQ ID NO: 615170 - DNA, 33 bp, Homo sapien
cccttgacccagttcacctctacaagtgtacct

SEQ ID NO: 615171 - DNA, 33 bp, Homo sapien
tcaatccatttgtatccattctgtcctaataat

SEQ ID NO: 615172 - DNA, 33 bp, Homo sapien
tcaatccatttgtatctattctgtcctaataat

SEQ ID NO: 615173 - DNA, 33 bp, Homo sapien
cccagttccttgtgccaagtgggacagctccat

SEQ ID NO: 615174 - DNA, 33 bp, Homo sapien
cccagttccttgtgccgagtgggacagctccat

SEQ ID NO: 615175 - DNA, 33 bp, Homo sapien
cctggcattcttggggaatccaaacttaattcc

SEQ ID NO: 615176 - DNA, 33 bp, Homo sapien
cctggcattcttgggggatccaaacttaattcc

SEQ ID NO: 615177 - DNA, 33 bp, Homo sapien
tctagaagtaatgaaaacaaaggcatgggccat

SEQ ID NO: 615178 - DNA, 33 bp, Homo sapien
tctagaagtaatgaaatcaaaggcatgggccat

SEQ ID NO: 615179 - DNA, 33 bp, Homo sapien
tcttttatacgtgtccccttgctagacttaaca

SEQ ID NO: 615180 - DNA, 33 bp, Homo sapien
tcttttatacgtgtccgcttgctagacttaaca

SEQ ID NO: 615181 - DNA, 33 bp, Homo sapien
ccatcttgttttactcacttataggatgtatta

SEQ ID NO: 615182 - DNA, 33 bp, Homo sapien
ccatcttgttttactcgcttataggatgtatta

SEQ ID NO: 615183 - DNA, 33 bp, Homo sapien
gacttggccaccaagacggtctgcagcttatta

SEQ ID NO: 615184 - DNA, 33 bp, Homo sapien
gacttggccaccaagatggtctgcagcttatta

SEQ ID NO: 615185 - DNA, 33 bp, Homo sapien
taaaactgtggaagaggcaggcttacaggcaga

SEQ ID NO: 615186 - DNA, 33 bp, Homo sapien
taaaactgtggaagagtcaggcttacaggcaga

SEQ ID NO: 615187 - DNA, 33 bp, Homo sapien
ggttgcagagagcggagatcacatcactgcatt

SEQ ID NO: 615188 - DNA, 33 bp, Homo sapien
ggttgcagagagcggatatcacatcactgcatt

SEQ ID NO: 615189 - DNA, 33 bp, Homo sapien
gatttgtgtcagtacactatgatggttgcacaa

SEQ ID NO: 615190 - DNA, 33 bp, Homo sapien
gatttgtgtcagtacattatgatggttgcacaa

SEQ ID NO: 615191 - DNA, 33 bp, Homo sapien
aatagtggacaattagactaaaacagtaggcaa

SEQ ID NO: 615192 - DNA, 33 bp, Homo sapien
aatagtggacaattagtctaaaacagtaggcaa

SEQ ID NO: 615193 - DNA, 33 bp, Homo sapien
tcttcagggcattttgataaataaaggaaagca

SEQ ID NO: 615194 - DNA, 33 bp, Homo sapien
tcttcagggcattttggtaaataaaggaaagca

SEQ ID NO: 615195 - DNA, 33 bp, Homo sapien
agtctttttctcaccaccagctggaaagatttt

SEQ ID NO: 615196 - DNA, 33 bp, Homo sapien
agtctttttctcaccatcagctggaaagatttt

SEQ ID NO: 615197 - DNA, 33 bp, Homo sapien
ggatggataatattaactaagaggcagcatggc

SEQ ID NO: 615198 - DNA, 33 bp, Homo sapien
ggatggataatattaagtaagaggcagcatggc

SEQ ID NO: 615199 - DNA, 33 bp, Homo sapien
ggaccttagctagatacagagagtttactctgg

SEQ ID NO: 615200 - DNA, 33 bp, Homo sapien
ggaccttagctagatatagagagtttactctgg

SEQ ID NO: 615201 - DNA, 33 bp, Homo sapien
agggatcgtcctcaataaagtccaaatgcataa

SEQ ID NO: 615202 - DNA, 33 bp, Homo sapien
agggatcgtcctcaattaagtccaaatgcataa

SEQ ID NO: 615203 - DNA, 33 bp, Homo sapien
catttttagacactaacctccatgacagtggga

SEQ ID NO: 615204 - DNA, 33 bp, Homo sapien
catttttagacactaagctccatgacagtggga

SEQ ID NO: 615205 - DNA, 33 bp, Homo sapien
agccagatagtgaccaggcgatttagggtggtg

SEQ ID NO: 615206 - DNA, 33 bp, Homo sapien
agccagatagtgaccatgcgatttagggtggtg

SEQ ID NO: 615207 - DNA, 33 bp, Homo sapien
cttatactctcatttcaatgcagtattgatttt

SEQ ID NO: 615208 - DNA, 33 bp, Homo sapien
cttatactctcatttccatgcagtattgatttt

SEQ ID NO: 615209 - DNA, 33 bp, Homo sapien
aagtaagttttgcaccgcttagatagaaaacgg

SEQ ID NO: 615210 - DNA, 33 bp, Homo sapien
aagtaagttttgcacctcttagatagaaaacgg

SEQ ID NO: 615211 - DNA, 33 bp, Homo sapien
tcatgctaaacaggaaatcatcctgcctctcag

SEQ ID NO: 615212 - DNA, 33 bp, Homo sapien
tcatgctaaacaggaagtcatcctgcctctcag

SEQ ID NO: 615213 - DNA, 33 bp, Homo sapien
taattaatggcaaagcacacgtgggcagtcatg

SEQ ID NO: 615214 - DNA, 33 bp, Homo sapien
taattaatggcaaagctcacgtgggcagtcatg

SEQ ID NO: 615215 - DNA, 33 bp, Homo sapien
cagtcttgattacgagactccaatggcttccct

SEQ ID NO: 615216 - DNA, 33 bp, Homo sapien
cagtcttgattacgaggctccaatggcttccct

SEQ ID NO: 615217 - DNA, 33 bp, Homo sapien
atgctgcctggaactcagacggcaccaaagctt

SEQ ID NO: 615218 - DNA, 33 bp, Homo sapien
atgctgcctggaactcggacggcaccaaagctt

SEQ ID NO: 615219 - DNA, 33 bp, Homo sapien
tatctgagaaaacccaacatctaattcaaaggt

SEQ ID NO: 615220 - DNA, 33 bp, Homo sapien
tatctgagaaaacccagcatctaattcaaaggt

SEQ ID NO: 615221 - DNA, 33 bp, Homo sapien
gattagagtttgtaaactgaacattatccaata

SEQ ID NO: 615222 - DNA, 33 bp, Homo sapien
gattagagtttgtaaattgaacattatccaata

SEQ ID NO: 615223 - DNA, 33 bp, Homo sapien
tttttctgactgatcaagtttttacccctgcca

SEQ ID NO: 615224 - DNA, 33 bp, Homo sapien
tttttctgactgatcatgtttttacccctgcca

SEQ ID NO: 615225 - DNA, 33 bp, Homo sapien
agatatctcctccataataactaggacacagaa

SEQ ID NO: 615226 - DNA, 33 bp, Homo sapien
agatatctcctccatagtaactaggacacagaa

SEQ ID NO: 615227 - DNA, 33 bp, Homo sapien
ctaagattcagaatgtaacatgaagggatgttc

SEQ ID NO: 615228 - DNA, 33 bp, Homo sapien
ctaagattcagaatgtgacatgaagggatgttc

SEQ ID NO: 615229 - DNA, 33 bp, Homo sapien
agagggagcatgggccagattttagacttctag

SEQ ID NO: 615230 - DNA, 33 bp, Homo sapien
agagggagcatgggccggattttagacttctag

SEQ ID NO: 615231 - DNA, 33 bp, Homo sapien
gaaagaaggatgacagaaggcaagtccaaactt

SEQ ID NO: 615232 - DNA, 33 bp, Homo sapien
gaaagaaggatgacaggaggcaagtccaaactt

SEQ ID NO: 615233 - DNA, 33 bp, Homo sapien
ctcttcatacgcccagaaggtataaatctgagt

SEQ ID NO: 615234 - DNA, 33 bp, Homo sapien
ctcttcatacgcccaggaggtataaatctgagt

SEQ ID NO: 615235 - DNA, 33 bp, Homo sapien
actctggctcttgtggaaagtgtttacaggatc

SEQ ID NO: 615236 - DNA, 33 bp, Homo sapien
actctggctcttgtggtaagtgtttacaggatc

SEQ ID NO: 615237 - DNA, 33 bp, Homo sapien
ctagttagactctaaaatggccatccatccacc

SEQ ID NO: 615238 - DNA, 33 bp, Homo sapien
ctagttagactctaaagtggccatccatccacc

SEQ ID NO: 615239 - DNA, 33 bp, Homo sapien
attccctgaattaaaagaccgagctagaaagtt

SEQ ID NO: 615240 - DNA, 33 bp, Homo sapien
attccctgaattaaaataccgagctagaaagtt

SEQ ID NO: 615241 - DNA, 33 bp, Homo sapien
tcacctccaactaacacatcacaaaccaaactc

SEQ ID NO: 615242 - DNA, 33 bp, Homo sapien
tcacctccaactaacatatcacaaaccaaactc

SEQ ID NO: 615243 - DNA, 33 bp, Homo sapien
cactgcaggaagtcagccctttgcatttctaac

SEQ ID NO: 615244 - DNA, 33 bp, Homo sapien
cactgcaggaagtcagtcctttgcatttctaac

SEQ ID NO: 615245 - DNA, 33 bp, Homo sapien
tggtaaatgtaaggaggctcaaagtcaataggg

SEQ ID NO: 615246 - DNA, 33 bp, Homo sapien
tggtaaatgtaaggagtctcaaagtcaataggg

SEQ ID NO: 615247 - DNA, 33 bp, Homo sapien
ttttaattatgaaaaacgaatccttcgcctttg

SEQ ID NO: 615248 - DNA, 33 bp, Homo sapien
ttttaattatgaaaaatgaatccttcgcctttg

SEQ ID NO: 615249 - DNA, 33 bp, Homo sapien
caatgctgcaggaaaaaagtgccaagtggctaa

SEQ ID NO: 615250 - DNA, 33 bp, Homo sapien
caatgctgcaggaaaacagtgccaagtggctaa

SEQ ID NO: 615251 - DNA, 33 bp, Homo sapien
tatggaatacaaaggaacatgcagcctgtgtgc

SEQ ID NO: 615252 - DNA, 33 bp, Homo sapien
tatggaatacaaaggagcatgcagcctgtgtgc

SEQ ID NO: 615253 - DNA, 33 bp, Homo sapien
ctagagttaatgtcaaatgagaggaatatacaa

SEQ ID NO: 615254 - DNA, 33 bp, Homo sapien
ctagagttaatgtcaagtgagaggaatatacaa

SEQ ID NO: 615255 - DNA, 33 bp, Homo sapien
ttttgttcctttcaccacaggtttattactcac

SEQ ID NO: 615256 - DNA, 33 bp, Homo sapien
ttttgttcctttcaccgcaggtttattactcac

SEQ ID NO: 615257 - DNA, 33 bp, Homo sapien
gtatgaatattgaaaaccatgagttatggaaat

SEQ ID NO: 615258 - DNA, 33 bp, Homo sapien
gtatgaatattgaaaatcatgagttatggaaat

SEQ ID NO: 615259 - DNA, 33 bp, Homo sapien
cccaaagtttcatgagcaagcagcctagaagtg

SEQ ID NO: 615260 - DNA, 33 bp, Homo sapien
cccaaagtttcatgagtaagcagcctagaagtg

SEQ ID NO: 615261 - DNA, 33 bp, Homo sapien
tgaacttatgttaacacatgacatctattgtaa

SEQ ID NO: 615262 - DNA, 33 bp, Homo sapien
tgaacttatgttaacagatgacatctattgtaa

SEQ ID NO: 615263 - DNA, 33 bp, Homo sapien
cacttaagagtagccaataaaggtatctttgag

SEQ ID NO: 615264 - DNA, 33 bp, Homo sapien
cacttaagagtagccagtaaaggtatctttgag

SEQ ID NO: 615265 - DNA, 33 bp, Homo sapien
acaaaggatgccaaaggatgccaaactgccata

SEQ ID NO: 615266 - DNA, 33 bp, Homo sapien
acaaaggatgccaaagtatgccaaactgccata

SEQ ID NO: 615267 - DNA, 33 bp, Homo sapien
ggcaacagagttctacaagtcaggaaaaaagca

SEQ ID NO: 615268 - DNA, 33 bp, Homo sapien
ggcaacagagttctacgagtcaggaaaaaagca

SEQ ID NO: 615269 - DNA, 33 bp, Homo sapien
actactcatttcaccaaaagttacaactttcat

SEQ ID NO: 615270 - DNA, 33 bp, Homo sapien
actactcatttcaccagaagttacaactttcat

SEQ ID NO: 615271 - DNA, 33 bp, Homo sapien
aatgcatgaatggtaccaagaaagaataggaca

SEQ ID NO: 615272 - DNA, 33 bp, Homo sapien
aatgcatgaatggtactaagaaagaataggaca

SEQ ID NO: 615273 - DNA, 33 bp, Homo sapien
tcaaacacacattcgcaaaaaaacagggatata

SEQ ID NO: 615274 - DNA, 33 bp, Homo sapien
tcaaacacacattcgccaaaaaacagggatata

SEQ ID NO: 615275 - DNA, 33 bp, Homo sapien
gccagtttctaagataccgagtggaagcttgta

SEQ ID NO: 615276 - DNA, 33 bp, Homo sapien
gccagtttctaagatatcgagtggaagcttgta

SEQ ID NO: 615277 - DNA, 33 bp, Homo sapien
tataatgctagttgaacgaacaaatctggcggg

SEQ ID NO: 615278 - DNA, 33 bp, Homo sapien
tataatgctagttgaatgaacaaatctggcggg

SEQ ID NO: 615279 - DNA, 33 bp, Homo sapien
tacaatatcttgtgcacagctacctgcctgtag

SEQ ID NO: 615280 - DNA, 33 bp, Homo sapien
tacaatatcttgtgcatagctacctgcctgtag

SEQ ID NO: 615281 - DNA, 33 bp, Homo sapien
tggaaacaaaagctgtaaaataaattctgcccc

SEQ ID NO: 615282 - DNA, 33 bp, Homo sapien
tggaaacaaaagctgtgaaataaattctgcccc

SEQ ID NO: 615283 - DNA, 33 bp, Homo sapien
aaatctcccaaattccccaccttctaatatcat

SEQ ID NO: 615284 - DNA, 33 bp, Homo sapien
aaatctcccaaattcctcaccttctaatatcat

SEQ ID NO: 615285 - DNA, 33 bp, Homo sapien
catgggctgactccaacagacatgatcccaggc

SEQ ID NO: 615286 - DNA, 33 bp, Homo sapien
catgggctgactccaatagacatgatcccaggc

SEQ ID NO: 615287 - DNA, 33 bp, Homo sapien
caggatttgtgttttggatcagagctgatgaag

SEQ ID NO: 615288 - DNA, 33 bp, Homo sapien
caggatttgtgttttgtatcagagctgatgaag

SEQ ID NO: 615289 - DNA, 33 bp, Homo sapien
aactagttgtgtgataaaagatgggtcacttcg

SEQ ID NO: 615290 - DNA, 33 bp, Homo sapien
aactagttgtgtgatacaagatgggtcacttcg

SEQ ID NO: 615291 - DNA, 33 bp, Homo sapien
agtccatgtttaaaaaatgtgatgttgaatagt

SEQ ID NO: 615292 - DNA, 33 bp, Homo sapien
agtccatgtttaaaaagtgtgatgttgaatagt

SEQ ID NO: 615293 - DNA, 33 bp, Homo sapien
actcaattgtcacaagaaactgtcatcccctag

SEQ ID NO: 615294 - DNA, 33 bp, Homo sapien
actcaattgtcacaaggaactgtcatcccctag

SEQ ID NO: 615295 - DNA, 33 bp, Homo sapien
aataggaaacaacaacagttagattttctgtct

SEQ ID NO: 615296 - DNA, 33 bp, Homo sapien
aataggaaacaacaacggttagattttctgtct

SEQ ID NO: 615297 - DNA, 33 bp, Homo sapien
tttttaaggaagaagactagtaggctttaaaga

SEQ ID NO: 615298 - DNA, 33 bp, Homo sapien
tttttaaggaagaagattagtaggctttaaaga

SEQ ID NO: 615299 - DNA, 33 bp, Homo sapien
ctatggaggctgtcaaatgctgctgaggaaatc

SEQ ID NO: 615300 - DNA, 33 bp, Homo sapien
ctatggaggctgtcaactgctgctgaggaaatc

SEQ ID NO: 615301 - DNA, 33 bp, Homo sapien
gacggtaataaaacaaactgctgtacttatgcc

SEQ ID NO: 615302 - DNA, 33 bp, Homo sapien
gacggtaataaaacaagctgctgtacttatgcc

SEQ ID NO: 615303 - DNA, 33 bp, Homo sapien
ctctgatttatccctacgtttgattccagtagc

SEQ ID NO: 615304 - DNA, 33 bp, Homo sapien
ctctgatttatccctatgtttgattccagtagc

SEQ ID NO: 615305 - DNA, 33 bp, Homo sapien
tatgctttaaacagtagggagaaatgtgatgga

SEQ ID NO: 615306 - DNA, 33 bp, Homo sapien
tatgctttaaacagtatggagaaatgtgatgga

SEQ ID NO: 615307 - DNA, 33 bp, Homo sapien
gagaaatgtgatggagaatagtacttcatagct

SEQ ID NO: 615308 - DNA, 33 bp, Homo sapien
gagaaatgtgatggaggatagtacttcatagct

SEQ ID NO: 615309 - DNA, 33 bp, Homo sapien
agcttctcctccctagccctctactttctaggg

SEQ ID NO: 615310 - DNA, 33 bp, Homo sapien
agcttctcctccctagtcctctactttctaggg

SEQ ID NO: 615311 - DNA, 33 bp, Homo sapien
aatttgatgatcactcaaacccagattctggtg

SEQ ID NO: 615312 - DNA, 33 bp, Homo sapien
aatttgatgatcactcgaacccagattctggtg

SEQ ID NO: 615313 - DNA, 33 bp, Homo sapien
ttattttcccagggtaagcaccagaatctgggt

SEQ ID NO: 615314 - DNA, 33 bp, Homo sapien
ttattttcccagggtaggcaccagaatctgggt

SEQ ID NO: 615315 - DNA, 33 bp, Homo sapien
ggagatatggagaatgcattggagaaggaagat

SEQ ID NO: 615316 - DNA, 33 bp, Homo sapien
ggagatatggagaatgtattggagaaggaagat

SEQ ID NO: 615317 - DNA, 33 bp, Homo sapien
tgaaatggtcaggcctaaaaggggtgttagctc

SEQ ID NO: 615318 - DNA, 33 bp, Homo sapien
tgaaatggtcaggcctgaaaggggtgttagctc

SEQ ID NO: 615319 - DNA, 33 bp, Homo sapien
gatgcagcctcaccacacctctcaatataggat

SEQ ID NO: 615320 - DNA, 33 bp, Homo sapien
gatgcagcctcaccacgcctctcaatataggat

SEQ ID NO: 615321 - DNA, 33 bp, Homo sapien
tttgctgctttgcatgacaaccttaaggcaact

SEQ ID NO: 615322 - DNA, 33 bp, Homo sapien
tttgctgctttgcatggcaaccttaaggcaact

SEQ ID NO: 615323 - DNA, 33 bp, Homo sapien
tcctcctgagctggccaattattttctgctact

SEQ ID NO: 615324 - DNA, 33 bp, Homo sapien
tcctcctgagctggccgattattttctgctact

SEQ ID NO: 615325 - DNA, 33 bp, Homo sapien
ggcatcacgggaagaactgtaagaggtggagtg

SEQ ID NO: 615326 - DNA, 33 bp, Homo sapien
ggcatcacgggaagaattgtaagaggtggagtg

SEQ ID NO: 615327 - DNA, 33 bp, Homo sapien
catggtacctgcctacagagtgactttagtgag

SEQ ID NO: 615328 - DNA, 33 bp, Homo sapien
catggtacctgcctacggagtgactttagtgag

SEQ ID NO: 615329 - DNA, 33 bp, Homo sapien
gccatttacaagccagaagaaagaaaaccatca

SEQ ID NO: 615330 - DNA, 33 bp, Homo sapien
gccatttacaagccaggagaaagaaaaccatca

SEQ ID NO: 615331 - DNA, 33 bp, Homo sapien
tcaacagcgattaaaaatagatattctgctctt

SEQ ID NO: 615332 - DNA, 33 bp, Homo sapien
tcaacagcgattaaaagtagatattctgctctt

SEQ ID NO: 615333 - DNA, 33 bp, Homo sapien
tagacaggaagcaggacgaacttgcagctccta

SEQ ID NO: 615334 - DNA, 33 bp, Homo sapien
tagacaggaagcaggatgaacttgcagctccta

SEQ ID NO: 615335 - DNA, 33 bp, Homo sapien
gaatggccggagtcaaaaaatgaaaaaataatt

SEQ ID NO: 615336 - DNA, 33 bp, Homo sapien
gaatggccggagtcaagaaatgaaaaaataatt

SEQ ID NO: 615337 - DNA, 33 bp, Homo sapien
tgataaactgctttccaaatattcatgttgcaa

SEQ ID NO: 615338 - DNA, 33 bp, Homo sapien
tgataaactgctttccgaatattcatgttgcaa

SEQ ID NO: 615339 - DNA, 33 bp, Homo sapien
aaagatcacctcaaaacggattgaccagttaaa

SEQ ID NO: 615340 - DNA, 33 bp, Homo sapien
aaagatcacctcaaaatggattgaccagttaaa

SEQ ID NO: 615341 - DNA, 33 bp, Homo sapien
caaagtaggcaaattggaataaaactaaaaagc

SEQ ID NO: 615342 - DNA, 33 bp, Homo sapien
caaagtaggcaaattgtaataaaactaaaaagc

SEQ ID NO: 615343 - DNA, 33 bp, Homo sapien
cataaaaaatgtgcaacacatcattaatcagag

SEQ ID NO: 615344 - DNA, 33 bp, Homo sapien
cataaaaaatgtgcaatacatcattaatcagag

SEQ ID NO: 615345 - DNA, 33 bp, Homo sapien
tttttaataatagtcactctgaatagtgttcag

SEQ ID NO: 615346 - DNA, 33 bp, Homo sapien
tttttaataatagtcattctgaatagtgttcag

SEQ ID NO: 615347 - DNA, 33 bp, Homo sapien
tcagcaatctcgctaccgggaatatacccaaag

SEQ ID NO: 615348 - DNA, 33 bp, Homo sapien
tcagcaatctcgctactgggaatatacccaaag

SEQ ID NO: 615349 - DNA, 33 bp, Homo sapien
ttttttgattgatcaaatgtctttgtttctacc

SEQ ID NO: 615350 - DNA, 33 bp, Homo sapien
ttttttgattgatcaagtgtctttgtttctacc

SEQ ID NO: 615351 - DNA, 33 bp, Homo sapien
taggtgtccatgcataagtaggaggtagagcta

SEQ ID NO: 615352 - DNA, 33 bp, Homo sapien
taggtgtccatgcataggtaggaggtagagcta

SEQ ID NO: 615353 - DNA, 33 bp, Homo sapien
actcaggcatcagatcaccaatgacaaactcaa

SEQ ID NO: 615354 - DNA, 33 bp, Homo sapien
actcaggcatcagatctccaatgacaaactcaa

SEQ ID NO: 615355 - DNA, 33 bp, Homo sapien
ggttatagtataggcagtgcaactatggtttac

SEQ ID NO: 615356 - DNA, 33 bp, Homo sapien
ggttatagtataggcattgcaactatggtttac

SEQ ID NO: 615357 - DNA, 33 bp, Homo sapien
gcaccattactatccccattttgctaatgagga

SEQ ID NO: 615358 - DNA, 33 bp, Homo sapien
gcaccattactatcccgattttgctaatgagga

SEQ ID NO: 615359 - DNA, 33 bp, Homo sapien
atcaggtatttcagtactaataagtcttgctaa

SEQ ID NO: 615360 - DNA, 33 bp, Homo sapien
atcaggtatttcagtattaataagtcttgctaa

SEQ ID NO: 615361 - DNA, 33 bp, Homo sapien
ccctctgcctttttgcaagggtagggggccagt

SEQ ID NO: 615362 - DNA, 33 bp, Homo sapien
ccctctgcctttttgctagggtagggggccagt

SEQ ID NO: 615363 - DNA, 33 bp, Homo sapien
ggtgcttcagataacaactcaaatattacatga

SEQ ID NO: 615364 - DNA, 33 bp, Homo sapien
ggtgcttcagataacagctcaaatattacatga

SEQ ID NO: 615365 - DNA, 33 bp, Homo sapien
atagagattgaaagaacgattttatgcctacta

SEQ ID NO: 615366 - DNA, 33 bp, Homo sapien
atagagattgaaagaatgattttatgcctacta

SEQ ID NO: 615367 - DNA, 33 bp, Homo sapien
aagcattgagtgtggagaaaacaaacctaattt

SEQ ID NO: 615368 - DNA, 33 bp, Homo sapien
aagcattgagtgtggataaaacaaacctaattt

SEQ ID NO: 615369 - DNA, 33 bp, Homo sapien
agtggttgcctagccacatgtctttgttttttt

SEQ ID NO: 615370 - DNA, 33 bp, Homo sapien
agtggttgcctagccagatgtctttgttttttt

SEQ ID NO: 615371 - DNA, 33 bp, Homo sapien
ggcaaccactttccagaaataactcgccactct

SEQ ID NO: 615372 - DNA, 33 bp, Homo sapien
ggcaaccactttccagcaataactcgccactct

SEQ ID NO: 615373 - DNA, 33 bp, Homo sapien
aatgtaggtccataaaatgtttgcattgatcca

SEQ ID NO: 615374 - DNA, 33 bp, Homo sapien
aatgtaggtccataaactgtttgcattgatcca

SEQ ID NO: 615375 - DNA, 33 bp, Homo sapien
ggagttggatagcaataatatttaacagtcatt

SEQ ID NO: 615376 - DNA, 33 bp, Homo sapien
ggagttggatagcaatgatatttaacagtcatt

SEQ ID NO: 615377 - DNA, 33 bp, Homo sapien
atgacattctgggtacacacaagaaatatatca

SEQ ID NO: 615378 - DNA, 33 bp, Homo sapien
atgacattctgggtacgcacaagaaatatatca

SEQ ID NO: 615379 - DNA, 33 bp, Homo sapien
tagaatatatgagcaaatgaatccaagtatata

SEQ ID NO: 615380 - DNA, 33 bp, Homo sapien
tagaatatatgagcaactgaatccaagtatata

SEQ ID NO: 615381 - DNA, 33 bp, Homo sapien
ggtacatatataccacggaattctatgcagcca

SEQ ID NO: 615382 - DNA, 33 bp, Homo sapien
ggtacatatataccactgaattctatgcagcca

SEQ ID NO: 615383 - DNA, 33 bp, Homo sapien
tccatcacaataaacccctcttggctcccttat

SEQ ID NO: 615384 - DNA, 33 bp, Homo sapien
tccatcacaataaacctctcttggctcccttat

SEQ ID NO: 615385 - DNA, 33 bp, Homo sapien
tcctggtaaccactgaacccacttgtgttccca

SEQ ID NO: 615386 - DNA, 33 bp, Homo sapien
tcctggtaaccactgatcccacttgtgttccca

SEQ ID NO: 615387 - DNA, 33 bp, Homo sapien
agaatgaacatttgaaagtgacctatataccag

SEQ ID NO: 615388 - DNA, 33 bp, Homo sapien
agaatgaacatttgaacgtgacctatataccag

SEQ ID NO: 615389 - DNA, 33 bp, Homo sapien
ttagtgtatatgcaccgaacaatttcaaaacac

SEQ ID NO: 615390 - DNA, 33 bp, Homo sapien
ttagtgtatatgcacctaacaatttcaaaacac

SEQ ID NO: 615391 - DNA, 33 bp, Homo sapien
agagaaactccagccggcctgcacacttggagg

SEQ ID NO: 615392 - DNA, 33 bp, Homo sapien
agagaaactccagccgtcctgcacacttggagg

SEQ ID NO: 615393 - DNA, 33 bp, Homo sapien
ccgttagcaatgtttacgatgggcaagtcttgt

SEQ ID NO: 615394 - DNA, 33 bp, Homo sapien
ccgttagcaatgtttatgatgggcaagtcttgt

SEQ ID NO: 615395 - DNA, 33 bp, Homo sapien
ttttttaccgttcaggaacttatggcacagaaa

SEQ ID NO: 615396 - DNA, 33 bp, Homo sapien
ttttttaccgttcagggacttatggcacagaaa

SEQ ID NO: 615397 - DNA, 33 bp, Homo sapien
ctccttcccccatgcagctaagctaatggactg

SEQ ID NO: 615398 - DNA, 33 bp, Homo sapien
ctccttcccccatgcatctaagctaatggactg

SEQ ID NO: 615399 - DNA, 33 bp, Homo sapien
ttatttcaacttttggaatatcacaataatttg

SEQ ID NO: 615400 - DNA, 33 bp, Homo sapien
ttatttcaacttttggcatatcacaataatttg

SEQ ID NO: 615401 - DNA, 33 bp, Homo sapien
tgcaagccactatagacggttttgttggggata

SEQ ID NO: 615402 - DNA, 33 bp, Homo sapien
tgcaagccactatagatggttttgttggggata

SEQ ID NO: 615403 - DNA, 33 bp, Homo sapien
tagttcaaacttttcaataaaccatgtttgcct

SEQ ID NO: 615404 - DNA, 33 bp, Homo sapien
tagttcaaacttttcagtaaaccatgtttgcct

SEQ ID NO: 615405 - DNA, 33 bp, Homo sapien
agtaaggaaagatcaaacaggagtgcggtattg

SEQ ID NO: 615406 - DNA, 33 bp, Homo sapien
agtaaggaaagatcaagcaggagtgcggtattg

SEQ ID NO: 615407 - DNA, 33 bp, Homo sapien
ctaactcaacaaagtacgacaaagttgagcatt

SEQ ID NO: 615408 - DNA, 33 bp, Homo sapien
ctaactcaacaaagtatgacaaagttgagcatt

SEQ ID NO: 615409 - DNA, 33 bp, Homo sapien
cttgtctgaactcctgaaataggaatgatgagc

SEQ ID NO: 615410 - DNA, 33 bp, Homo sapien
cttgtctgaactcctgcaataggaatgatgagc

SEQ ID NO: 615411 - DNA, 33 bp, Homo sapien
aaagaggatgctcatggattatcattaaggaca

SEQ ID NO: 615412 - DNA, 33 bp, Homo sapien
aaagaggatgctcatgtattatcattaaggaca

SEQ ID NO: 615413 - DNA, 33 bp, Homo sapien
caacaaatatagcaaactgtgcaataatagaag

SEQ ID NO: 615414 - DNA, 33 bp, Homo sapien
caacaaatatagcaaagtgtgcaataatagaag

SEQ ID NO: 615415 - DNA, 33 bp, Homo sapien
gaaattcaatgcctgaagtgatacccagtgtct

SEQ ID NO: 615416 - DNA, 33 bp, Homo sapien
gaaattcaatgcctgaggtgatacccagtgtct

SEQ ID NO: 615417 - DNA, 33 bp, Homo sapien
tgtgttcattgctttacaggtgtatagaaggag

SEQ ID NO: 615418 - DNA, 33 bp, Homo sapien
tgtgttcattgctttataggtgtatagaaggag

SEQ ID NO: 615419 - DNA, 33 bp, Homo sapien
atttcaggaatgacatcaccttctgagatggga

SEQ ID NO: 615420 - DNA, 33 bp, Homo sapien
atttcaggaatgacattaccttctgagatggga

SEQ ID NO: 615421 - DNA, 33 bp, Homo sapien
gccaagaatgaggtacaatgactgtttattcct

SEQ ID NO: 615422 - DNA, 33 bp, Homo sapien
gccaagaatgaggtacgatgactgtttattcct

SEQ ID NO: 615423 - DNA, 33 bp, Homo sapien
cttgattacaaaccccacgatgccccaaataga

SEQ ID NO: 615424 - DNA, 33 bp, Homo sapien
cttgattacaaaccccgcgatgccccaaataga

SEQ ID NO: 615425 - DNA, 33 bp, Homo sapien
tgcatactgggttttgaacagaaatatcgttat

SEQ ID NO: 615426 - DNA, 33 bp, Homo sapien
tgcatactgggttttggacagaaatatcgttat

SEQ ID NO: 615427 - DNA, 33 bp, Homo sapien
ggggtgtagtgaggcaaccttagtccgttctct

SEQ ID NO: 615428 - DNA, 33 bp, Homo sapien
ggggtgtagtgaggcacccttagtccgttctct

SEQ ID NO: 615429 - DNA, 33 bp, Homo sapien
aaaacaaagataaatcaaagttagttaatcact

SEQ ID NO: 615430 - DNA, 33 bp, Homo sapien
aaaacaaagataaatcgaagttagttaatcact

SEQ ID NO: 615431 - DNA, 33 bp, Homo sapien
gaataaagctctcagaaaatgatgatgtttttc

SEQ ID NO: 615432 - DNA, 33 bp, Homo sapien
gaataaagctctcagataatgatgatgtttttc

SEQ ID NO: 615433 - DNA, 33 bp, Homo sapien
tcttccatccttgccagaaattcctatagcact

SEQ ID NO: 615434 - DNA, 33 bp, Homo sapien
tcttccatccttgccataaattcctatagcact

SEQ ID NO: 615435 - DNA, 33 bp, Homo sapien
cagtgggaattgaaaccgggataagcaagagaa

SEQ ID NO: 615436 - DNA, 33 bp, Homo sapien
cagtgggaattgaaactgggataagcaagagaa

SEQ ID NO: 615437 - DNA, 33 bp, Homo sapien
aagctttctatgtagaactatccaaattgtagt

SEQ ID NO: 615438 - DNA, 33 bp, Homo sapien
aagctttctatgtagatctatccaaattgtagt

SEQ ID NO: 615439 - DNA, 33 bp, Homo sapien
tataaaaagtggtcaaaaaatacttgtttaatg

SEQ ID NO: 615440 - DNA, 33 bp, Homo sapien
tataaaaagtggtcaacaaatacttgtttaatg

SEQ ID NO: 615441 - DNA, 33 bp, Homo sapien
ctgcgttccaccaaacactactgttcattaatt

SEQ ID NO: 615442 - DNA, 33 bp, Homo sapien
ctgcgttccaccaaacgctactgttcattaatt

SEQ ID NO: 615443 - DNA, 33 bp, Homo sapien
agttagtggagaactgcaatctattgccaaaca

SEQ ID NO: 615444 - DNA, 33 bp, Homo sapien
agttagtggagaactggaatctattgccaaaca

SEQ ID NO: 615445 - DNA, 33 bp, Homo sapien
tgcctggtataatatacacttgatagataattt

SEQ ID NO: 615446 - DNA, 33 bp, Homo sapien
tgcctggtataatatagacttgatagataattt

SEQ ID NO: 615447 - DNA, 33 bp, Homo sapien
ggggttctcaaactctaacatacatcacaacca

SEQ ID NO: 615448 - DNA, 33 bp, Homo sapien
ggggttctcaaactctgacatacatcacaacca

SEQ ID NO: 615449 - DNA, 33 bp, Homo sapien
ctcttctcaaggtgtaactttgtcacattctct

SEQ ID NO: 615450 - DNA, 33 bp, Homo sapien
ctcttctcaaggtgtatctttgtcacattctct

SEQ ID NO: 615451 - DNA, 33 bp, Homo sapien
tctaacctacacaatcggactctttagccatca

SEQ ID NO: 615452 - DNA, 33 bp, Homo sapien
tctaacctacacaatctgactctttagccatca

SEQ ID NO: 615453 - DNA, 33 bp, Homo sapien
gattatgagttaaataagtaacatgtgcccaga

SEQ ID NO: 615454 - DNA, 33 bp, Homo sapien
gattatgagttaaatatgtaacatgtgcccaga

SEQ ID NO: 615455 - DNA, 33 bp, Homo sapien
gttaaaaggtaatttcacaagcagaatatagtc

SEQ ID NO: 615456 - DNA, 33 bp, Homo sapien
gttaaaaggtaatttcgcaagcagaatatagtc

SEQ ID NO: 615457 - DNA, 33 bp, Homo sapien
tcttgatatgaaaaggcatctgcatctacatga

SEQ ID NO: 615458 - DNA, 33 bp, Homo sapien
tcttgatatgaaaaggtatctgcatctacatga

SEQ ID NO: 615459 - DNA, 33 bp, Homo sapien
aacctaaaaatgtttgcatatgcttttgaggga

SEQ ID NO: 615460 - DNA, 33 bp, Homo sapien
aacctaaaaatgtttgtatatgcttttgaggga

SEQ ID NO: 615461 - DNA, 33 bp, Homo sapien
ggagacagctggcgtaagttctggagtccaaag

SEQ ID NO: 615462 - DNA, 33 bp, Homo sapien
ggagacagctggcgtacgttctggagtccaaag

SEQ ID NO: 615463 - DNA, 33 bp, Homo sapien
atagccatattacagaccattatgtagatgcta

SEQ ID NO: 615464 - DNA, 33 bp, Homo sapien
atagccatattacagagcattatgtagatgcta

SEQ ID NO: 615465 - DNA, 33 bp, Homo sapien
taataaatgtattgaccgaatgaatcaatgaaa

SEQ ID NO: 615466 - DNA, 33 bp, Homo sapien
taataaatgtattgactgaatgaatcaatgaaa

SEQ ID NO: 615467 - DNA, 33 bp, Homo sapien
aatgacatcaagttagcagcataaaaatcagtt

SEQ ID NO: 615468 - DNA, 33 bp, Homo sapien
aatgacatcaagttagtagcataaaaatcagtt

SEQ ID NO: 615469 - DNA, 33 bp, Homo sapien
aaagtgaaagtcagaacaatacttgcaaaccag

SEQ ID NO: 615470 - DNA, 33 bp, Homo sapien
aaagtgaaagtcagaagaatacttgcaaaccag

SEQ ID NO: 615471 - DNA, 33 bp, Homo sapien
actacatctctatctaaacaatgaggtccttga

SEQ ID NO: 615472 - DNA, 33 bp, Homo sapien
actacatctctatctagacaatgaggtccttga

SEQ ID NO: 615473 - DNA, 33 bp, Homo sapien
tattttactgatacaacatacacaaagagcaag

SEQ ID NO: 615474 - DNA, 33 bp, Homo sapien
tattttactgatacaagatacacaaagagcaag

SEQ ID NO: 615475 - DNA, 33 bp, Homo sapien
cactcctgtccctgtaataaagtgagaaacagc

SEQ ID NO: 615476 - DNA, 33 bp, Homo sapien
cactcctgtccctgtattaaagtgagaaacagc

SEQ ID NO: 615477 - DNA, 33 bp, Homo sapien
tcataagattagcacccctcctaagactcatcc

SEQ ID NO: 615478 - DNA, 33 bp, Homo sapien
tcataagattagcacctctcctaagactcatcc

SEQ ID NO: 615479 - DNA, 33 bp, Homo sapien
tgtcacttggcaaggaaccttggggactgtaga

SEQ ID NO: 615480 - DNA, 33 bp, Homo sapien
tgtcacttggcaaggagccttggggactgtaga

SEQ ID NO: 615481 - DNA, 33 bp, Homo sapien
ttctggcagttgctaaacatgaagatgcctccc

SEQ ID NO: 615482 - DNA, 33 bp, Homo sapien
ttctggcagttgctaaccatgaagatgcctccc

SEQ ID NO: 615483 - DNA, 33 bp, Homo sapien
gaagttgatgatatgcaaactggtcaaaagaat

SEQ ID NO: 615484 - DNA, 33 bp, Homo sapien
gaagttgatgatatgccaactggtcaaaagaat

SEQ ID NO: 615485 - DNA, 33 bp, Homo sapien
tgactataaacagggaacatgagccggcaaacc

SEQ ID NO: 615486 - DNA, 33 bp, Homo sapien
tgactataaacagggaccatgagccggcaaacc

SEQ ID NO: 615487 - DNA, 33 bp, Homo sapien
tggagctttaggacataaagatgattgagcaat

SEQ ID NO: 615488 - DNA, 33 bp, Homo sapien
tggagctttaggacattaagatgattgagcaat

SEQ ID NO: 615489 - DNA, 33 bp, Homo sapien
ataaataatgactaaactcgatcttgattatca

SEQ ID NO: 615490 - DNA, 33 bp, Homo sapien
ataaataatgactaaattcgatcttgattatca

SEQ ID NO: 615491 - DNA, 33 bp, Homo sapien
ggaaaaaagactaagacactggcacaggccctg

SEQ ID NO: 615492 - DNA, 33 bp, Homo sapien
ggaaaaaagactaagagactggcacaggccctg

SEQ ID NO: 615493 - DNA, 33 bp, Homo sapien
aaaatatgggaggagacgttatcacatataaga

SEQ ID NO: 615494 - DNA, 33 bp, Homo sapien
aaaatatgggaggagaggttatcacatataaga

SEQ ID NO: 615495 - DNA, 33 bp, Homo sapien
tgttggccgcttcctacaacacatatttatctg

SEQ ID NO: 615496 - DNA, 33 bp, Homo sapien
tgttggccgcttcctataacacatatttatctg

SEQ ID NO: 615497 - DNA, 33 bp, Homo sapien
tcctgagaccatcctcacaccaagcatctcagt

SEQ ID NO: 615498 - DNA, 33 bp, Homo sapien
tcctgagaccatcctcgcaccaagcatctcagt

SEQ ID NO: 615499 - DNA, 33 bp, Homo sapien
aactcatttcatcaccaattcaaaagtccaatg

SEQ ID NO: 615500 - DNA, 33 bp, Homo sapien
aactcatttcatcaccgattcaaaagtccaatg

SEQ ID NO: 615501 - DNA, 33 bp, Homo sapien
aagaaagggggtataacgagtcgtgtctaatct

SEQ ID NO: 615502 - DNA, 33 bp, Homo sapien
aagaaagggggtataatgagtcgtgtctaatct

SEQ ID NO: 615503 - DNA, 33 bp, Homo sapien
tagccataccactgaacattgatttaaccaaga

SEQ ID NO: 615504 - DNA, 33 bp, Homo sapien
tagccataccactgaatattgatttaaccaaga

SEQ ID NO: 615505 - DNA, 33 bp, Homo sapien
ttataaaaggaaggcaatgaatccacagagtac

SEQ ID NO: 615506 - DNA, 33 bp, Homo sapien
ttataaaaggaaggcagtgaatccacagagtac

SEQ ID NO: 615507 - DNA, 33 bp, Homo sapien
agggagggaattacccaaggacgtgactaccag

SEQ ID NO: 615508 - DNA, 33 bp, Homo sapien
agggagggaattaccccaggacgtgactaccag

SEQ ID NO: 615509 - DNA, 33 bp, Homo sapien
tcctcttcctccaatacggcagagtttttcagc

SEQ ID NO: 615510 - DNA, 33 bp, Homo sapien
tcctcttcctccaatatggcagagtttttcagc

SEQ ID NO: 615511 - DNA, 33 bp, Homo sapien
ataagggttttcctacaacgaaatgcacaattc

SEQ ID NO: 615512 - DNA, 33 bp, Homo sapien
ataagggttttcctacgacgaaatgcacaattc

SEQ ID NO: 615513 - DNA, 33 bp, Homo sapien
gagctggcctgaaaaaccaagcagggtgattag

SEQ ID NO: 615514 - DNA, 33 bp, Homo sapien
gagctggcctgaaaaatcaagcagggtgattag

SEQ ID NO: 615515 - DNA, 33 bp, Homo sapien
tatctgaattcagggaaatgttgtgatttgctg

SEQ ID NO: 615516 - DNA, 33 bp, Homo sapien
tatctgaattcagggagatgttgtgatttgctg

SEQ ID NO: 615517 - DNA, 33 bp, Homo sapien
tgctagccttccctccaataatctcagttgact

SEQ ID NO: 615518 - DNA, 33 bp, Homo sapien
tgctagccttccctccgataatctcagttgact

SEQ ID NO: 615519 - DNA, 33 bp, Homo sapien
ggtacttgggtgagtaagtaaatgaatgaataa

SEQ ID NO: 615520 - DNA, 33 bp, Homo sapien
ggtacttgggtgagtaggtaaatgaatgaataa

SEQ ID NO: 615521 - DNA, 33 bp, Homo sapien
atacctacatttctaccacctgggattaaattc

SEQ ID NO: 615522 - DNA, 33 bp, Homo sapien
atacctacatttctactacctgggattaaattc

SEQ ID NO: 615523 - DNA, 33 bp, Homo sapien
gacagtgtcctcaccaactatgttttgggtctg

SEQ ID NO: 615524 - DNA, 33 bp, Homo sapien
gacagtgtcctcaccatctatgttttgggtctg

SEQ ID NO: 615525 - DNA, 33 bp, Homo sapien
tcaatgagcctttttcaacattctcaactctca

SEQ ID NO: 615526 - DNA, 33 bp, Homo sapien
tcaatgagcctttttcgacattctcaactctca

SEQ ID NO: 615527 - DNA, 33 bp, Homo sapien
ggatttcaaagcctgcaagcaaaatatgttggc

SEQ ID NO: 615528 - DNA, 33 bp, Homo sapien
ggatttcaaagcctgcgagcaaaatatgttggc

SEQ ID NO: 615529 - DNA, 33 bp, Homo sapien
aagggaaaagaggagcccttccagcaaaacaac

SEQ ID NO: 615530 - DNA, 33 bp, Homo sapien
aagggaaaagaggagcgcttccagcaaaacaac

SEQ ID NO: 615531 - DNA, 33 bp, Homo sapien
gcaaaacaactgaataaacactgtaaatgttac

SEQ ID NO: 615532 - DNA, 33 bp, Homo sapien
gcaaaacaactgaatagacactgtaaatgttac

SEQ ID NO: 615533 - DNA, 33 bp, Homo sapien
atgtccattttttccaagatcagtttgaagtga

SEQ ID NO: 615534 - DNA, 33 bp, Homo sapien
atgtccattttttccaggatcagtttgaagtga

SEQ ID NO: 615535 - DNA, 33 bp, Homo sapien
aagcctttggggaaccaagactaaatgaattag

SEQ ID NO: 615536 - DNA, 33 bp, Homo sapien
aagcctttggggaaccgagactaaatgaattag

SEQ ID NO: 615537 - DNA, 33 bp, Homo sapien
cccagtaacctgctccagaacaacctgatacaa

SEQ ID NO: 615538 - DNA, 33 bp, Homo sapien
cccagtaacctgctccggaacaacctgatacaa

SEQ ID NO: 615539 - DNA, 33 bp, Homo sapien
gttgttttctgtgcaaatgtggaatgtagacct

SEQ ID NO: 615540 - DNA, 33 bp, Homo sapien
gttgttttctgtgcaagtgtggaatgtagacct

SEQ ID NO: 615541 - DNA, 33 bp, Homo sapien
tgtcatctttagctgaaggaagggtatatgggg

SEQ ID NO: 615542 - DNA, 33 bp, Homo sapien
tgtcatctttagctgagggaagggtatatgggg

SEQ ID NO: 615543 - DNA, 33 bp, Homo sapien
aaatctctctctccagaaagagcccaagtcatc

SEQ ID NO: 615544 - DNA, 33 bp, Homo sapien
aaatctctctctccaggaagagcccaagtcatc

SEQ ID NO: 615545 - DNA, 33 bp, Homo sapien
ctccaaatatttgtggaaaagataccatgagtg

SEQ ID NO: 615546 - DNA, 33 bp, Homo sapien
ctccaaatatttgtgggaaagataccatgagtg

SEQ ID NO: 615547 - DNA, 33 bp, Homo sapien
agagttgctactgttacagtaaaggactccagc

SEQ ID NO: 615548 - DNA, 33 bp, Homo sapien
agagttgctactgttatagtaaaggactccagc

SEQ ID NO: 615549 - DNA, 33 bp, Homo sapien
tgttttgactggattgaatattaccttttgttt

SEQ ID NO: 615550 - DNA, 33 bp, Homo sapien
tgttttgactggattgtatattaccttttgttt

SEQ ID NO: 615551 - DNA, 33 bp, Homo sapien
ctattacttgctatagacattattatccttgct

SEQ ID NO: 615552 - DNA, 33 bp, Homo sapien
ctattacttgctataggcattattatccttgct

SEQ ID NO: 615553 - DNA, 33 bp, Homo sapien
tggccacctttttcaacctgctaagtgttcaat

SEQ ID NO: 615554 - DNA, 33 bp, Homo sapien
tggccacctttttcaatctgctaagtgttcaat

SEQ ID NO: 615555 - DNA, 33 bp, Homo sapien
gcatagctggggagaacgggtatctttcagcta

SEQ ID NO: 615556 - DNA, 33 bp, Homo sapien
gcatagctggggagaatgggtatctttcagcta

SEQ ID NO: 615557 - DNA, 33 bp, Homo sapien
ggcacagacttaaatcaatagaaaggaaaagca

SEQ ID NO: 615558 - DNA, 33 bp, Homo sapien
ggcacagacttaaatccatagaaaggaaaagca

SEQ ID NO: 615559 - DNA, 33 bp, Homo sapien
ccattagtcagtagaaaattttgccccaagcta

SEQ ID NO: 615560 - DNA, 33 bp, Homo sapien
ccattagtcagtagaagattttgccccaagcta

SEQ ID NO: 615561 - DNA, 33 bp, Homo sapien
agcttcacttgagaaacgcctaaactgtcactg

SEQ ID NO: 615562 - DNA, 33 bp, Homo sapien
agcttcacttgagaaatgcctaaactgtcactg

SEQ ID NO: 615563 - DNA, 33 bp, Homo sapien
tctactgcttacttggaaaaataatccttatag

SEQ ID NO: 615564 - DNA, 33 bp, Homo sapien
tctactgcttacttgggaaaataatccttatag

SEQ ID NO: 615565 - DNA, 33 bp, Homo sapien
acacaatgttttgaaccccttaggcaagaaaca

SEQ ID NO: 615566 - DNA, 33 bp, Homo sapien
acacaatgttttgaactccttaggcaagaaaca

SEQ ID NO: 615567 - DNA, 33 bp, Homo sapien
ctgtgtagaagatggcagattctgtttcttgcc

SEQ ID NO: 615568 - DNA, 33 bp, Homo sapien
ctgtgtagaagatggcggattctgtttcttgcc

SEQ ID NO: 615569 - DNA, 33 bp, Homo sapien
tgattgttgttgatggaattcaattaaaataat

SEQ ID NO: 615570 - DNA, 33 bp, Homo sapien
tgattgttgttgatggcattcaattaaaataat

SEQ ID NO: 615571 - DNA, 33 bp, Homo sapien
aagacactgttttgagaaagtggtaggtgatgt

SEQ ID NO: 615572 - DNA, 33 bp, Homo sapien
aagacactgttttgaggaagtggtaggtgatgt

SEQ ID NO: 615573 - DNA, 33 bp, Homo sapien
cctggatgtctataaactcactatgacaaatgg

SEQ ID NO: 615574 - DNA, 33 bp, Homo sapien
cctggatgtctataaagtcactatgacaaatgg

SEQ ID NO: 615575 - DNA, 33 bp, Homo sapien
caagtcatctctctctaaaccaccaatgtccaa

SEQ ID NO: 615576 - DNA, 33 bp, Homo sapien
caagtcatctctctctcaaccaccaatgtccaa

SEQ ID NO: 615577 - DNA, 33 bp, Homo sapien
agcccaggaagggaacaaatcctgaagctaaga

SEQ ID NO: 615578 - DNA, 33 bp, Homo sapien
agcccaggaagggaacgaatcctgaagctaaga

SEQ ID NO: 615579 - DNA, 33 bp, Homo sapien
ggccagagttaggccacgtgcccgtcccaagcc

SEQ ID NO: 615580 - DNA, 33 bp, Homo sapien
ggccagagttaggccatgtgcccgtcccaagcc

SEQ ID NO: 615581 - DNA, 33 bp, Homo sapien
aatgaacaagcagaccgcaaatataaagtgtca

SEQ ID NO: 615582 - DNA, 33 bp, Homo sapien
aatgaacaagcagacctcaaatataaagtgtca

SEQ ID NO: 615583 - DNA, 33 bp, Homo sapien
tactctttcctgtggacgacccttaattctgta

SEQ ID NO: 615584 - DNA, 33 bp, Homo sapien
tactctttcctgtggatgacccttaattctgta

SEQ ID NO: 615585 - DNA, 33 bp, Homo sapien
ttgtgaattctatatccaatgaagctatacttc

SEQ ID NO: 615586 - DNA, 33 bp, Homo sapien
ttgtgaattctatatcgaatgaagctatacttc

SEQ ID NO: 615587 - DNA, 33 bp, Homo sapien
tgagagctctgccaaaaacaagaagctgcttct

SEQ ID NO: 615588 - DNA, 33 bp, Homo sapien
tgagagctctgccaaagacaagaagctgcttct

SEQ ID NO: 615589 - DNA, 33 bp, Homo sapien
aaacattctgccactacgttgttcctccagacc

SEQ ID NO: 615590 - DNA, 33 bp, Homo sapien
aaacattctgccactatgttgttcctccagacc

SEQ ID NO: 615591 - DNA, 33 bp, Homo sapien
catgcagctatctccaacaaggctaagggaaga

SEQ ID NO: 615592 - DNA, 33 bp, Homo sapien
catgcagctatctccaccaaggctaagggaaga

SEQ ID NO: 615593 - DNA, 33 bp, Homo sapien
tccatgaaatacttatgaaatccactgttctat

SEQ ID NO: 615594 - DNA, 33 bp, Homo sapien
tccatgaaatacttattaaatccactgttctat

SEQ ID NO: 615595 - DNA, 33 bp, Homo sapien
cattgcttattccagcgacacatgtatcctaca

SEQ ID NO: 615596 - DNA, 33 bp, Homo sapien
cattgcttattccagctacacatgtatcctaca

SEQ ID NO: 615597 - DNA, 33 bp, Homo sapien
caagttttgaaagttaagattgagtcccatcag

SEQ ID NO: 615598 - DNA, 33 bp, Homo sapien
caagttttgaaagttaggattgagtcccatcag

SEQ ID NO: 615599 - DNA, 33 bp, Homo sapien
ttgaactaggattccacgcccattttgtatttc

SEQ ID NO: 615600 - DNA, 33 bp, Homo sapien
ttgaactaggattccatgcccattttgtatttc

SEQ ID NO: 615601 - DNA, 33 bp, Homo sapien
aaattggcatcagccaagcattaaaattccttc

SEQ ID NO: 615602 - DNA, 33 bp, Homo sapien
aaattggcatcagccaggcattaaaattccttc

SEQ ID NO: 615603 - DNA, 33 bp, Homo sapien
tgggtgtttagcattcaaaatacagctttcagt

SEQ ID NO: 615604 - DNA, 33 bp, Homo sapien
tgggtgtttagcattcgaaatacagctttcagt

SEQ ID NO: 615605 - DNA, 33 bp, Homo sapien
cactgcagtcatgagaaacatggcctcaccatc

SEQ ID NO: 615606 - DNA, 33 bp, Homo sapien
cactgcagtcatgagacacatggcctcaccatc

SEQ ID NO: 615607 - DNA, 33 bp, Homo sapien
aaggaactgagctatacgaagaagaggatggtg

SEQ ID NO: 615608 - DNA, 33 bp, Homo sapien
aaggaactgagctatatgaagaagaggatggtg

SEQ ID NO: 615609 - DNA, 33 bp, Homo sapien
tagctgttgaatgactaactagcatccatttcc

SEQ ID NO: 615610 - DNA, 33 bp, Homo sapien
tagctgttgaatgactgactagcatccatttcc

SEQ ID NO: 615611 - DNA, 33 bp, Homo sapien
gcagagtttttgtatacgattgaaccttcattg

SEQ ID NO: 615612 - DNA, 33 bp, Homo sapien
gcagagtttttgtatatgattgaaccttcattg

SEQ ID NO: 615613 - DNA, 33 bp, Homo sapien
cgtcatatggcttcaaatgagtagtgactagtg

SEQ ID NO: 615614 - DNA, 33 bp, Homo sapien
cgtcatatggcttcaagtgagtagtgactagtg

SEQ ID NO: 615615 - DNA, 33 bp, Homo sapien
tgagatggccagattacattattctttgtccct

SEQ ID NO: 615616 - DNA, 33 bp, Homo sapien
tgagatggccagattagattattctttgtccct

SEQ ID NO: 615617 - DNA, 33 bp, Homo sapien
aggacttgcatgaatacgaaataaatttgtact

SEQ ID NO: 615618 - DNA, 33 bp, Homo sapien
aggacttgcatgaatatgaaataaatttgtact

SEQ ID NO: 615619 - DNA, 33 bp, Homo sapien
ggatatactacgtcaccctgctataacagcttc

SEQ ID NO: 615620 - DNA, 33 bp, Homo sapien
ggatatactacgtcacgctgctataacagcttc

SEQ ID NO: 615621 - DNA, 33 bp, Homo sapien
ggcaaacacacagcccaatctcctatccaatat

SEQ ID NO: 615622 - DNA, 33 bp, Homo sapien
ggcaaacacacagcccgatctcctatccaatat

SEQ ID NO: 615623 - DNA, 33 bp, Homo sapien
attggtgactcttggggaatattaatcacagag

SEQ ID NO: 615624 - DNA, 33 bp, Homo sapien
attggtgactcttgggtaatattaatcacagag

SEQ ID NO: 615625 - DNA, 33 bp, Homo sapien
ataaacattaatctcactctgcaggagccaaat

SEQ ID NO: 615626 - DNA, 33 bp, Homo sapien
ataaacattaatctcattctgcaggagccaaat

SEQ ID NO: 615627 - DNA, 33 bp, Homo sapien
tcagatccagacatcaactctcaggattcaagg

SEQ ID NO: 615628 - DNA, 33 bp, Homo sapien
tcagatccagacatcagctctcaggattcaagg

SEQ ID NO: 615629 - DNA, 33 bp, Homo sapien
tggtctatagagaatacgcatacctggagtcat

SEQ ID NO: 615630 - DNA, 33 bp, Homo sapien
tggtctatagagaatatgcatacctggagtcat

SEQ ID NO: 615631 - DNA, 33 bp, Homo sapien
ggggtgacttccctatcaagactgcagaccctg

SEQ ID NO: 615632 - DNA, 33 bp, Homo sapien
ggggtgacttccctatgaagactgcagaccctg

SEQ ID NO: 615633 - DNA, 33 bp, Homo sapien
taaataataaatcaggacacttgaaaattagag

SEQ ID NO: 615634 - DNA, 33 bp, Homo sapien
taaataataaatcagggcacttgaaaattagag

SEQ ID NO: 615635 - DNA, 33 bp, Homo sapien
cattcatcaggatcagaaaatttggaatatgtt

SEQ ID NO: 615636 - DNA, 33 bp, Homo sapien
cattcatcaggatcaggaaatttggaatatgtt

SEQ ID NO: 615637 - DNA, 33 bp, Homo sapien
aaaactggaatcaaagaatggacagtattaggg

SEQ ID NO: 615638 - DNA, 33 bp, Homo sapien
aaaactggaatcaaaggatggacagtattaggg

SEQ ID NO: 615639 - DNA, 33 bp, Homo sapien
aaaatgatgttaggaaagctagatatttacatg

SEQ ID NO: 615640 - DNA, 33 bp, Homo sapien
aaaatgatgttaggaaggctagatatttacatg

SEQ ID NO: 615641 - DNA, 33 bp, Homo sapien
ctcttgatagataccaacatccaatcagttcca

SEQ ID NO: 615642 - DNA, 33 bp, Homo sapien
ctcttgatagataccagcatccaatcagttcca

SEQ ID NO: 615643 - DNA, 33 bp, Homo sapien
aaaccaatgcttacaactctgaaattgaaaacc

SEQ ID NO: 615644 - DNA, 33 bp, Homo sapien
aaaccaatgcttacaagtctgaaattgaaaacc

SEQ ID NO: 615645 - DNA, 33 bp, Homo sapien
cattaaaaagattgaccacaccaagtgttgatg

SEQ ID NO: 615646 - DNA, 33 bp, Homo sapien
cattaaaaagattgacgacaccaagtgttgatg

SEQ ID NO: 615647 - DNA, 33 bp, Homo sapien
gtattagttagggcagaaagcctcacatttcag

SEQ ID NO: 615648 - DNA, 33 bp, Homo sapien
gtattagttagggcaggaagcctcacatttcag

SEQ ID NO: 615649 - DNA, 33 bp, Homo sapien
tactcagctcttactacgcaccaagcactgtgg

SEQ ID NO: 615650 - DNA, 33 bp, Homo sapien
tactcagctcttactatgcaccaagcactgtgg

SEQ ID NO: 615651 - DNA, 33 bp, Homo sapien
tgtggctctgcagatactaagggactctgtcac

SEQ ID NO: 615652 - DNA, 33 bp, Homo sapien
tgtggctctgcagatattaagggactctgtcac

SEQ ID NO: 615653 - DNA, 33 bp, Homo sapien
attctaatacatgctacctgttgtggcagctaa

SEQ ID NO: 615654 - DNA, 33 bp, Homo sapien
attctaatacatgctatctgttgtggcagctaa

SEQ ID NO: 615655 - DNA, 33 bp, Homo sapien
attgcctctgaaactgaaattgcttatttgcaa

SEQ ID NO: 615656 - DNA, 33 bp, Homo sapien
attgcctctgaaactggaattgcttatttgcaa

SEQ ID NO: 615657 - DNA, 33 bp, Homo sapien
ccagttaatccccaaacaggtcaaaatctatac

SEQ ID NO: 615658 - DNA, 33 bp, Homo sapien
ccagttaatccccaaagaggtcaaaatctatac

SEQ ID NO: 615659 - DNA, 33 bp, Homo sapien
caacttggaagtagcccgaaggaagagaggcac

SEQ ID NO: 615660 - DNA, 33 bp, Homo sapien
caacttggaagtagcctgaaggaagagaggcac

SEQ ID NO: 615661 - DNA, 33 bp, Homo sapien
gtatgagttagcagtcccagaatgttactggac

SEQ ID NO: 615662 - DNA, 33 bp, Homo sapien
gtatgagttagcagtctcagaatgttactggac

SEQ ID NO: 615663 - DNA, 33 bp, Homo sapien
tcccctcttctcttcagaataaacagaatgtat

SEQ ID NO: 615664 - DNA, 33 bp, Homo sapien
tcccctcttctcttcataataaacagaatgtat

SEQ ID NO: 615665 - DNA, 33 bp, Homo sapien
gagttcacaaacctaacattgacaggaagaaaa

SEQ ID NO: 615666 - DNA, 33 bp, Homo sapien
gagttcacaaacctaatattgacaggaagaaaa

SEQ ID NO: 615667 - DNA, 33 bp, Homo sapien
ttgacgtgtgactacaaagggatttgcttaatt

SEQ ID NO: 615668 - DNA, 33 bp, Homo sapien
ttgacgtgtgactacatagggatttgcttaatt

SEQ ID NO: 615669 - DNA, 33 bp, Homo sapien
aaactgaataatgctaagaaggaaaaaacaagc

SEQ ID NO: 615670 - DNA, 33 bp, Homo sapien
aaactgaataatgctatgaaggaaaaaacaagc

SEQ ID NO: 615671 - DNA, 33 bp, Homo sapien
aaagcaactgagacccacagtgataattaccta

SEQ ID NO: 615672 - DNA, 33 bp, Homo sapien
aaagcaactgagacccgcagtgataattaccta

SEQ ID NO: 615673 - DNA, 33 bp, Homo sapien
ctgtctagcatggttcaattccccagtgataca

SEQ ID NO: 615674 - DNA, 33 bp, Homo sapien
ctgtctagcatggttcgattccccagtgataca

SEQ ID NO: 615675 - DNA, 33 bp, Homo sapien
agttattgtgtctgccaaaagagaaagattaaa

SEQ ID NO: 615676 - DNA, 33 bp, Homo sapien
agttattgtgtctgccgaaagagaaagattaaa

SEQ ID NO: 615677 - DNA, 33 bp, Homo sapien
ggcacaaatggacaaacgagagagtaggtccca

SEQ ID NO: 615678 - DNA, 33 bp, Homo sapien
ggcacaaatggacaaaggagagagtaggtccca

SEQ ID NO: 615679 - DNA, 33 bp, Homo sapien
cccaaggtaatcaacaacctaacttctgtcacc

SEQ ID NO: 615680 - DNA, 33 bp, Homo sapien
cccaaggtaatcaacatcctaacttctgtcacc

SEQ ID NO: 615681 - DNA, 33 bp, Homo sapien
tgttgatataaagttcaaagctagggaaaacta

SEQ ID NO: 615682 - DNA, 33 bp, Homo sapien
tgttgatataaagttcgaagctagggaaaacta

SEQ ID NO: 615683 - DNA, 33 bp, Homo sapien
aggaaagtctactcctcagagacacacaagcct

SEQ ID NO: 615684 - DNA, 33 bp, Homo sapien
aggaaagtctactccttagagacacacaagcct

SEQ ID NO: 615685 - DNA, 33 bp, Homo sapien
tcatgagctcatgaaaattccctgccaagacag

SEQ ID NO: 615686 - DNA, 33 bp, Homo sapien
tcatgagctcatgaaacttccctgccaagacag

SEQ ID NO: 615687 - DNA, 33 bp, Homo sapien
ggctatctctacatataaaccaatcacctgcat

SEQ ID NO: 615688 - DNA, 33 bp, Homo sapien
ggctatctctacatatgaaccaatcacctgcat

SEQ ID NO: 615689 - DNA, 33 bp, Homo sapien
cccagaatttgttctacatcagtgtggcaaaca

SEQ ID NO: 615690 - DNA, 33 bp, Homo sapien
cccagaatttgttctatatcagtgtggcaaaca

SEQ ID NO: 615691 - DNA, 33 bp, Homo sapien
atataggcaggctgttaaaaactattgagtttg

SEQ ID NO: 615692 - DNA, 33 bp, Homo sapien
atataggcaggctgtttaaaactattgagtttg

SEQ ID NO: 615693 - DNA, 33 bp, Homo sapien
gccaaactttgaaagaaatgggtgatacttggt

SEQ ID NO: 615694 - DNA, 33 bp, Homo sapien
gccaaactttgaaagacatgggtgatacttggt

SEQ ID NO: 615695 - DNA, 33 bp, Homo sapien
ctgttttggagaacgcaattttctctagtttaa

SEQ ID NO: 615696 - DNA, 33 bp, Homo sapien
ctgttttggagaacgcgattttctctagtttaa

SEQ ID NO: 615697 - DNA, 33 bp, Homo sapien
tctctttacaccattacagatcatctctgattt

SEQ ID NO: 615698 - DNA, 33 bp, Homo sapien
tctctttacaccattatagatcatctctgattt

SEQ ID NO: 615699 - DNA, 33 bp, Homo sapien
agtgatagcttttgcactcaaggtgatgagacc

SEQ ID NO: 615700 - DNA, 33 bp, Homo sapien
agtgatagcttttgcattcaaggtgatgagacc

SEQ ID NO: 615701 - DNA, 33 bp, Homo sapien
tctacaaagtgccccacgtgatcccgatgcagg

SEQ ID NO: 615702 - DNA, 33 bp, Homo sapien
tctacaaagtgccccatgtgatcccgatgcagg

SEQ ID NO: 615703 - DNA, 33 bp, Homo sapien
tccaacctgcttcacactctgtgcgagcaagaa

SEQ ID NO: 615704 - DNA, 33 bp, Homo sapien
tccaacctgcttcacattctgtgcgagcaagaa

SEQ ID NO: 615705 - DNA, 33 bp, Homo sapien
acattttcctctgcaaatcttacaccacttgcc

SEQ ID NO: 615706 - DNA, 33 bp, Homo sapien
acattttcctctgcaagtcttacaccacttgcc

SEQ ID NO: 615707 - DNA, 33 bp, Homo sapien
tgcatttgaattatgaaatcttaaaacatcaat

SEQ ID NO: 615708 - DNA, 33 bp, Homo sapien
tgcatttgaattatgagatcttaaaacatcaat

SEQ ID NO: 615709 - DNA, 33 bp, Homo sapien
gcagaatttcacaaaaaccctgactctgtgatg

SEQ ID NO: 615710 - DNA, 33 bp, Homo sapien
gcagaatttcacaaaacccctgactctgtgatg

SEQ ID NO: 615711 - DNA, 33 bp, Homo sapien
gtgtttgttttacgatcaagtgtatgatgagtt

SEQ ID NO: 615712 - DNA, 33 bp, Homo sapien
gtgtttgttttacgattaagtgtatgatgagtt

SEQ ID NO: 615713 - DNA, 33 bp, Homo sapien
aatatgaagcataataatagagatgacttagaa

SEQ ID NO: 615714 - DNA, 33 bp, Homo sapien
aatatgaagcataatagtagagatgacttagaa

SEQ ID NO: 615715 - DNA, 33 bp, Homo sapien
gtgccaggaaaaatgtaaagcaaatgtatgtga

SEQ ID NO: 615716 - DNA, 33 bp, Homo sapien
gtgccaggaaaaatgtcaagcaaatgtatgtga

SEQ ID NO: 615717 - DNA, 33 bp, Homo sapien
tcagttttccattgagaaaatgcctcttttgtg

SEQ ID NO: 615718 - DNA, 33 bp, Homo sapien
tcagttttccattgaggaaatgcctcttttgtg

SEQ ID NO: 615719 - DNA, 33 bp, Homo sapien
ggaagcagaccctgaacgtttgttagtgatcaa

SEQ ID NO: 615720 - DNA, 33 bp, Homo sapien
ggaagcagaccctgaatgtttgttagtgatcaa

SEQ ID NO: 615721 - DNA, 33 bp, Homo sapien
ttctcagtggttattacgatgacactttgtgcc

SEQ ID NO: 615722 - DNA, 33 bp, Homo sapien
ttctcagtggttattatgatgacactttgtgcc

SEQ ID NO: 615723 - DNA, 33 bp, Homo sapien
gagatgatgtcagtaggaaaaacttccttcaac

SEQ ID NO: 615724 - DNA, 33 bp, Homo sapien
gagatgatgtcagtagtaaaaacttccttcaac

SEQ ID NO: 615725 - DNA, 33 bp, Homo sapien
caagctacagaaagaaagtaacactggccctga

SEQ ID NO: 615726 - DNA, 33 bp, Homo sapien
caagctacagaaagaaggtaacactggccctga

SEQ ID NO: 615727 - DNA, 33 bp, Homo sapien
gttcccacaccaaaccaaattgttttcagtcga

SEQ ID NO: 615728 - DNA, 33 bp, Homo sapien
gttcccacaccaaaccgaattgttttcagtcga

SEQ ID NO: 615729 - DNA, 33 bp, Homo sapien
tgttccattttatagacgaggtaactgaagcac

SEQ ID NO: 615730 - DNA, 33 bp, Homo sapien
tgttccattttatagatgaggtaactgaagcac

SEQ ID NO: 615731 - DNA, 33 bp, Homo sapien
tccacagtgatcctacgacttaggaaaaggact

SEQ ID NO: 615732 - DNA, 33 bp, Homo sapien
tccacagtgatcctactacttaggaaaaggact

SEQ ID NO: 615733 - DNA, 33 bp, Homo sapien
agatgaaagcacagaacatatccacagtgatcc

SEQ ID NO: 615734 - DNA, 33 bp, Homo sapien
agatgaaagcacagaatatatccacagtgatcc

SEQ ID NO: 615735 - DNA, 33 bp, Homo sapien
aaaacagaaagagccacgttctatcatattctc

SEQ ID NO: 615736 - DNA, 33 bp, Homo sapien
aaaacagaaagagccatgttctatcatattctc

SEQ ID NO: 615737 - DNA, 33 bp, Homo sapien
tcagagagatcttccacctgggaaaagacaagc

SEQ ID NO: 615738 - DNA, 33 bp, Homo sapien
tcagagagatcttccatctgggaaaagacaagc

SEQ ID NO: 615739 - DNA, 33 bp, Homo sapien
tctaacctctgctctaagcctgactcattgtac

SEQ ID NO: 615740 - DNA, 33 bp, Homo sapien
tctaacctctgctctatgcctgactcattgtac

SEQ ID NO: 615741 - DNA, 33 bp, Homo sapien
atttttagtatgtgtacaaaccaagaatcctta

SEQ ID NO: 615742 - DNA, 33 bp, Homo sapien
atttttagtatgtgtataaaccaagaatcctta

SEQ ID NO: 615743 - DNA, 33 bp, Homo sapien
gggtaccttgttgacacggctcttctacctggc

SEQ ID NO: 615744 - DNA, 33 bp, Homo sapien
gggtaccttgttgacatggctcttctacctggc

SEQ ID NO: 615745 - DNA, 33 bp, Homo sapien
ctaggtacttggaaaacatttgttgttgagtgg

SEQ ID NO: 615746 - DNA, 33 bp, Homo sapien
ctaggtacttggaaaatatttgttgttgagtgg

SEQ ID NO: 615747 - DNA, 33 bp, Homo sapien
attaaatcctttcgacagccctaaatgaaatgt

SEQ ID NO: 615748 - DNA, 33 bp, Homo sapien
attaaatcctttcgactgccctaaatgaaatgt

SEQ ID NO: 615749 - DNA, 33 bp, Homo sapien
tggtttctgaattcaactgtgagtcctctggcc

SEQ ID NO: 615750 - DNA, 33 bp, Homo sapien
tggtttctgaattcaattgtgagtcctctggcc

SEQ ID NO: 615751 - DNA, 33 bp, Homo sapien
taaaaaaggcattgtaacagcttatacacagaa

SEQ ID NO: 615752 - DNA, 33 bp, Homo sapien
taaaaaaggcattgtatcagcttatacacagaa

SEQ ID NO: 615753 - DNA, 33 bp, Homo sapien
acatggaaaacatccacaatagttcccaaaggc

SEQ ID NO: 615754 - DNA, 33 bp, Homo sapien
acatggaaaacatccagaatagttcccaaaggc

SEQ ID NO: 615755 - DNA, 33 bp, Homo sapien
ggagcccagaaggtcacgggtaaactcctgcac

SEQ ID NO: 615756 - DNA, 33 bp, Homo sapien
ggagcccagaaggtcatgggtaaactcctgcac

SEQ ID NO: 615757 - DNA, 33 bp, Homo sapien
tcacggctaaaggtggaagagttccattgtcct

SEQ ID NO: 615758 - DNA, 33 bp, Homo sapien
tcacggctaaaggtggcagagttccattgtcct

SEQ ID NO: 615759 - DNA, 33 bp, Homo sapien
gatcctctcttcatgcaaactgaccaaaggtga

SEQ ID NO: 615760 - DNA, 33 bp, Homo sapien
gatcctctcttcatgctaactgaccaaaggtga

SEQ ID NO: 615761 - DNA, 33 bp, Homo sapien
caggactccttcaagagcacaacatttccttaa

SEQ ID NO: 615762 - DNA, 33 bp, Homo sapien
caggactccttcaagatcacaacatttccttaa

SEQ ID NO: 615763 - DNA, 33 bp, Homo sapien
cacaccaattgttccacgtggatttaaggaaat

SEQ ID NO: 615764 - DNA, 33 bp, Homo sapien
cacaccaattgttccatgtggatttaaggaaat

SEQ ID NO: 615765 - DNA, 33 bp, Homo sapien
ccaaaccattgttggacgtttacatatagcaat

SEQ ID NO: 615766 - DNA, 33 bp, Homo sapien
ccaaaccattgttggatgtttacatatagcaat

SEQ ID NO: 615767 - DNA, 33 bp, Homo sapien
gactaagagtttgaaacgacttgtctaaggtca

SEQ ID NO: 615768 - DNA, 33 bp, Homo sapien
gactaagagtttgaaatgacttgtctaaggtca

SEQ ID NO: 615769 - DNA, 33 bp, Homo sapien
aaaatgttgctaggcacctgtatctctttgata

SEQ ID NO: 615770 - DNA, 33 bp, Homo sapien
aaaatgttgctaggcatctgtatctctttgata

SEQ ID NO: 615771 - DNA, 33 bp, Homo sapien
ggaactcacattttcacaccaagtcagatattt

SEQ ID NO: 615772 - DNA, 33 bp, Homo sapien
ggaactcacattttcagaccaagtcagatattt

SEQ ID NO: 615773 - DNA, 33 bp, Homo sapien
agatatccaagccatacgtgtttcatttcagtg

SEQ ID NO: 615774 - DNA, 33 bp, Homo sapien
agatatccaagccatatgtgtttcatttcagtg

SEQ ID NO: 615775 - DNA, 33 bp, Homo sapien
ttgctgtcagaataccactgaggaacactcaca

SEQ ID NO: 615776 - DNA, 33 bp, Homo sapien
ttgctgtcagaataccgctgaggaacactcaca

SEQ ID NO: 615777 - DNA, 33 bp, Homo sapien
attaatgtgaggccaaagcatggaaagtgagtt

SEQ ID NO: 615778 - DNA, 33 bp, Homo sapien
attaatgtgaggccaacgcatggaaagtgagtt

SEQ ID NO: 615779 - DNA, 33 bp, Homo sapien
ggacccatcacaaagaaacctggatgccaggct

SEQ ID NO: 615780 - DNA, 33 bp, Homo sapien
ggacccatcacaaagagacctggatgccaggct

SEQ ID NO: 615781 - DNA, 33 bp, Homo sapien
gagtagaggatgactaataacactaaggataaa

SEQ ID NO: 615782 - DNA, 33 bp, Homo sapien
gagtagaggatgactagtaacactaaggataaa

SEQ ID NO: 615783 - DNA, 33 bp, Homo sapien
actagagagagaaaatcagactgctctagaaaa

SEQ ID NO: 615784 - DNA, 33 bp, Homo sapien
actagagagagaaaattagactgctctagaaaa

SEQ ID NO: 615785 - DNA, 33 bp, Homo sapien
tgtataaacgtacagcactattattaaaagtct

SEQ ID NO: 615786 - DNA, 33 bp, Homo sapien
tgtataaacgtacagcgctattattaaaagtct

SEQ ID NO: 615787 - DNA, 33 bp, Homo sapien
tggacaattctgaaacagcggaaaatggttttg

SEQ ID NO: 615788 - DNA, 33 bp, Homo sapien
tggacaattctgaaacggcggaaaatggttttg

SEQ ID NO: 615789 - DNA, 33 bp, Homo sapien
cccctcctcagtaaacaagatcgttctctctgt

SEQ ID NO: 615790 - DNA, 33 bp, Homo sapien
cccctcctcagtaaacgagatcgttctctctgt

SEQ ID NO: 615791 - DNA, 33 bp, Homo sapien
accagggccaactctcacttcctgaacctccat

SEQ ID NO: 615792 - DNA, 33 bp, Homo sapien
accagggccaactctcgcttcctgaacctccat

SEQ ID NO: 615793 - DNA, 33 bp, Homo sapien
tagaagcacaggggaaagtgttaataaattcat

SEQ ID NO: 615794 - DNA, 33 bp, Homo sapien
tagaagcacaggggaaggtgttaataaattcat

SEQ ID NO: 615795 - DNA, 33 bp, Homo sapien
gaaatataaaaggagacgtcctagctgtcttca

SEQ ID NO: 615796 - DNA, 33 bp, Homo sapien
gaaatataaaaggagatgtcctagctgtcttca

SEQ ID NO: 615797 - DNA, 33 bp, Homo sapien
tcaacaccttaagacactctgacttcctccttc

SEQ ID NO: 615798 - DNA, 33 bp, Homo sapien
tcaacaccttaagacagtctgacttcctccttc

SEQ ID NO: 615799 - DNA, 33 bp, Homo sapien
gatgtgtacagcttgacgagctttgacacagat

SEQ ID NO: 615800 - DNA, 33 bp, Homo sapien
gatgtgtacagcttgatgagctttgacacagat

SEQ ID NO: 615801 - DNA, 33 bp, Homo sapien
tctcaggaagaatacacgtcctaaggatgtaaa

SEQ ID NO: 615802 - DNA, 33 bp, Homo sapien
tctcaggaagaatacatgtcctaaggatgtaaa

SEQ ID NO: 615803 - DNA, 33 bp, Homo sapien
tcagtcaagaataaaacacgatgtcagatccac

SEQ ID NO: 615804 - DNA, 33 bp, Homo sapien
tcagtcaagaataaaatacgatgtcagatccac

SEQ ID NO: 615805 - DNA, 33 bp, Homo sapien
ttgatatacatagccactgctcaataaatatgt

SEQ ID NO: 615806 - DNA, 33 bp, Homo sapien
ttgatatacatagccattgctcaataaatatgt

SEQ ID NO: 615807 - DNA, 33 bp, Homo sapien
cttaataaatgtggaactggaatcgcaccgtcc

SEQ ID NO: 615808 - DNA, 33 bp, Homo sapien
cttaataaatgtggaattggaatcgcaccgtcc

SEQ ID NO: 615809 - DNA, 33 bp, Homo sapien
ctaatatgagctaaatgatgacgatgatgatga

SEQ ID NO: 615810 - DNA, 33 bp, Homo sapien
ctaatatgagctaaattatgacgatgatgatga

SEQ ID NO: 615811 - DNA, 33 bp, Homo sapien
caggccctggctcatacgaaatgccttagcctg

SEQ ID NO: 615812 - DNA, 33 bp, Homo sapien
caggccctggctcataggaaatgccttagcctg

SEQ ID NO: 615813 - DNA, 33 bp, Homo sapien
gagccagggcctgccacgatgtgctacagatga

SEQ ID NO: 615814 - DNA, 33 bp, Homo sapien
gagccagggcctgccatgatgtgctacagatga

SEQ ID NO: 615815 - DNA, 33 bp, Homo sapien
tatctttgtcattttacgaaagtggtttaatcc

SEQ ID NO: 615816 - DNA, 33 bp, Homo sapien
tatctttgtcattttaggaaagtggtttaatcc

SEQ ID NO: 615817 - DNA, 33 bp, Homo sapien
ccagcctacttgggtcccatcatcctggccctt

SEQ ID NO: 615818 - DNA, 33 bp, Homo sapien
ccagcctacttgggtctcatcatcctggccctt

SEQ ID NO: 615819 - DNA, 33 bp, Homo sapien
ccagcccctttaagcaaacagtatcattatcac

SEQ ID NO: 615820 - DNA, 33 bp, Homo sapien
ccagcccctttaagcagacagtatcattatcac

SEQ ID NO: 615821 - DNA, 33 bp, Homo sapien
atctccctacagtgcaaattagaaccttgaact

SEQ ID NO: 615822 - DNA, 33 bp, Homo sapien
atctccctacagtgcagattagaaccttgaact

SEQ ID NO: 615823 - DNA, 33 bp, Homo sapien
ggccgtagcttactgacgccggatctcaagtcc

SEQ ID NO: 615824 - DNA, 33 bp, Homo sapien
ggccgtagcttactgatgccggatctcaagtcc

SEQ ID NO: 615825 - DNA, 33 bp, Homo sapien
catcctaagggtccgacgtgacagcaagcaagt

SEQ ID NO: 615826 - DNA, 33 bp, Homo sapien
catcctaagggtccgatgtgacagcaagcaagt

SEQ ID NO: 615827 - DNA, 33 bp, Homo sapien
ggcactttcctgaagcaccagtgaaatattcac

SEQ ID NO: 615828 - DNA, 33 bp, Homo sapien
ggcactttcctgaagcgccagtgaaatattcac

SEQ ID NO: 615829 - DNA, 33 bp, Homo sapien
gacttaggaatatcgacagaggtgcccctggga

SEQ ID NO: 615830 - DNA, 33 bp, Homo sapien
gacttaggaatatcgagagaggtgcccctggga

SEQ ID NO: 615831 - DNA, 33 bp, Homo sapien
gtgtgacccagtggacaaagtcaatcatgcatt

SEQ ID NO: 615832 - DNA, 33 bp, Homo sapien
gtgtgacccagtggaccaagtcaatcatgcatt

SEQ ID NO: 615833 - DNA, 33 bp, Homo sapien
cttcaaatatgaaaaaattacatgaaagatgaa

SEQ ID NO: 615834 - DNA, 33 bp, Homo sapien
cttcaaatatgaaaaagttacatgaaagatgaa

SEQ ID NO: 615835 - DNA, 33 bp, Homo sapien
cttcaacagcgtcatccccattcttggcagaga

SEQ ID NO: 615836 - DNA, 33 bp, Homo sapien
cttcaacagcgtcatctccattcttggcagaga

SEQ ID NO: 615837 - DNA, 33 bp, Homo sapien
ttccaaatgaattcaactcgcttaccaaggcaa

SEQ ID NO: 615838 - DNA, 33 bp, Homo sapien
ttccaaatgaattcaattcgcttaccaaggcaa

SEQ ID NO: 615839 - DNA, 33 bp, Homo sapien
tccttaagcgaagtgacactggtcatatattgt

SEQ ID NO: 615840 - DNA, 33 bp, Homo sapien
tccttaagcgaagtgatactggtcatatattgt

SEQ ID NO: 615841 - DNA, 33 bp, Homo sapien
agaatgagccaggatgcaccagtatattcacat

SEQ ID NO: 615842 - DNA, 33 bp, Homo sapien
agaatgagccaggatgtaccagtatattcacat

SEQ ID NO: 615843 - DNA, 33 bp, Homo sapien
agtttaaatagccccaaagactctcgctattaa

SEQ ID NO: 615844 - DNA, 33 bp, Homo sapien
agtttaaatagccccagagactctcgctattaa

SEQ ID NO: 615845 - DNA, 33 bp, Homo sapien
tcttctcatttttggaccaaagttcacagaatt

SEQ ID NO: 615846 - DNA, 33 bp, Homo sapien
tcttctcatttttggatcaaagttcacagaatt

SEQ ID NO: 615847 - DNA, 33 bp, Homo sapien
agcactcaactaacacacaacaaatatcaaatg

SEQ ID NO: 615848 - DNA, 33 bp, Homo sapien
agcactcaactaacactcaacaaatatcaaatg

SEQ ID NO: 615849 - DNA, 33 bp, Homo sapien
tatctaccattcaagccgaagcgctgactttaa

SEQ ID NO: 615850 - DNA, 33 bp, Homo sapien
tatctaccattcaagctgaagcgctgactttaa

SEQ ID NO: 615851 - DNA, 33 bp, Homo sapien
tgtgtgccttaccccaagtcactgataaacacg

SEQ ID NO: 615852 - DNA, 33 bp, Homo sapien
tgtgtgccttaccccacgtcactgataaacacg

SEQ ID NO: 615853 - DNA, 33 bp, Homo sapien
tgaatcttccctttgtcaagcatatgcacactg

SEQ ID NO: 615854 - DNA, 33 bp, Homo sapien
tgaatcttccctttgttaagcatatgcacactg

SEQ ID NO: 615855 - DNA, 33 bp, Homo sapien
agttcaaacaccaacaatcacaaatacggtggc

SEQ ID NO: 615856 - DNA, 33 bp, Homo sapien
agttcaaacaccaacagtcacaaatacggtggc

SEQ ID NO: 615857 - DNA, 33 bp, Homo sapien
ttgtaggattattgtgaactttatgaattatta

SEQ ID NO: 615858 - DNA, 33 bp, Homo sapien
ttgtaggattattgtggactttatgaattatta

SEQ ID NO: 615859 - DNA, 33 bp, Homo sapien
cagtttccacatcagcaaaatggtcacatcagc

SEQ ID NO: 615860 - DNA, 33 bp, Homo sapien
cagtttccacatcagcgaaatggtcacatcagc

SEQ ID NO: 615861 - DNA, 33 bp, Homo sapien
ggttttgctgccaggactcccctccgcttctgg

SEQ ID NO: 615862 - DNA, 33 bp, Homo sapien
ggttttgctgccaggattcccctccgcttctgg

SEQ ID NO: 615863 - DNA, 33 bp, Homo sapien
agtgagaacagattaacacagtatgtgccgggc

SEQ ID NO: 615864 - DNA, 33 bp, Homo sapien
agtgagaacagattaatacagtatgtgccgggc

SEQ ID NO: 615865 - DNA, 33 bp, Homo sapien
catgtggctgtttcccaagtttggctgaaccac

SEQ ID NO: 615866 - DNA, 33 bp, Homo sapien
catgtggctgtttcccgagtttggctgaaccac

SEQ ID NO: 615867 - DNA, 33 bp, Homo sapien
tgattaaatactagtaactagctcattgccttt

SEQ ID NO: 615868 - DNA, 33 bp, Homo sapien
tgattaaatactagtagctagctcattgccttt

SEQ ID NO: 615869 - DNA, 33 bp, Homo sapien
tgcctgcaagtgattacgtgctcctcagagggt

SEQ ID NO: 615870 - DNA, 33 bp, Homo sapien
tgcctgcaagtgattatgtgctcctcagagggt

SEQ ID NO: 615871 - DNA, 33 bp, Homo sapien
gaaatttaaagaggcaaagtgattttcccaaga

SEQ ID NO: 615872 - DNA, 33 bp, Homo sapien
gaaatttaaagaggcagagtgattttcccaaga

SEQ ID NO: 615873 - DNA, 33 bp, Homo sapien
caaccttagagaggaactgtaccattttataga

SEQ ID NO: 615874 - DNA, 33 bp, Homo sapien
caaccttagagaggaattgtaccattttataga

SEQ ID NO: 615875 - DNA, 33 bp, Homo sapien
aaaaaagtttcatagacgtagagtgcctttgta

SEQ ID NO: 615876 - DNA, 33 bp, Homo sapien
aaaaaagtttcatagatgtagagtgcctttgta

SEQ ID NO: 615877 - DNA, 33 bp, Homo sapien
catgcaaagagcatcaagtgaatgttgagaaga

SEQ ID NO: 615878 - DNA, 33 bp, Homo sapien
catgcaaagagcatcaggtgaatgttgagaaga

SEQ ID NO: 615879 - DNA, 33 bp, Homo sapien
gtgggatgtgccatgacattcctcaatgacaac

SEQ ID NO: 615880 - DNA, 33 bp, Homo sapien
gtgggatgtgccatgatattcctcaatgacaac

SEQ ID NO: 615881 - DNA, 33 bp, Homo sapien
gccatcccagacaggccgacatttaggacactg

SEQ ID NO: 615882 - DNA, 33 bp, Homo sapien
gccatcccagacaggctgacatttaggacactg

SEQ ID NO: 615883 - DNA, 33 bp, Homo sapien
cactgactgcccatcgccgacagcatgcaagtg

SEQ ID NO: 615884 - DNA, 33 bp, Homo sapien
cactgactgcccatcgtcgacagcatgcaagtg

SEQ ID NO: 615885 - DNA, 33 bp, Homo sapien
tgtctgtgcagttagaagtccacgacttgggcc

SEQ ID NO: 615886 - DNA, 33 bp, Homo sapien
tgtctgtgcagttagaggtccacgacttgggcc

SEQ ID NO: 615887 - DNA, 33 bp, Homo sapien
ccagatttttcccaataagacatccacaagtca

SEQ ID NO: 615888 - DNA, 33 bp, Homo sapien
ccagatttttcccaatcagacatccacaagtca

SEQ ID NO: 615889 - DNA, 33 bp, Homo sapien
aaacatgcctcgaatcaattttctgattgacat

SEQ ID NO: 615890 - DNA, 33 bp, Homo sapien
aaacatgcctcgaatccattttctgattgacat

SEQ ID NO: 615891 - DNA, 33 bp, Homo sapien
agcttcctaatccaccaaaatctcattcatctt

SEQ ID NO: 615892 - DNA, 33 bp, Homo sapien
agcttcctaatccaccgaaatctcattcatctt

SEQ ID NO: 615893 - DNA, 33 bp, Homo sapien
ctctaagtcatgaacccggaagctgtcaggaac

SEQ ID NO: 615894 - DNA, 33 bp, Homo sapien
ctctaagtcatgaacctggaagctgtcaggaac

SEQ ID NO: 615895 - DNA, 33 bp, Homo sapien
gagagactcccgaatccgagacaaaggacttta

SEQ ID NO: 615896 - DNA, 33 bp, Homo sapien
gagagactcccgaatctgagacaaaggacttta

SEQ ID NO: 615897 - DNA, 33 bp, Homo sapien
cagaagacaacctaaacaggtcattaagatcaa

SEQ ID NO: 615898 - DNA, 33 bp, Homo sapien
cagaagacaacctaaataggtcattaagatcaa

SEQ ID NO: 615899 - DNA, 33 bp, Homo sapien
ctcagtgtttggacccaaaactcaaaatttaat

SEQ ID NO: 615900 - DNA, 33 bp, Homo sapien
ctcagtgtttggacccgaaactcaaaatttaat

SEQ ID NO: 615901 - DNA, 33 bp, Homo sapien
tttctttttcactgcagcatgcataaacaagca

SEQ ID NO: 615902 - DNA, 33 bp, Homo sapien
tttctttttcactgcatcatgcataaacaagca

SEQ ID NO: 615903 - DNA, 33 bp, Homo sapien
ctgaatggttgtaaaacgtagaatcaggaatct

SEQ ID NO: 615904 - DNA, 33 bp, Homo sapien
ctgaatggttgtaaaatgtagaatcaggaatct

SEQ ID NO: 615905 - DNA, 33 bp, Homo sapien
tcatttgaatgagagactatgctgagactagcc

SEQ ID NO: 615906 - DNA, 33 bp, Homo sapien
tcatttgaatgagagagtatgctgagactagcc

SEQ ID NO: 615907 - DNA, 33 bp, Homo sapien
tagagacagaataaggaaagtagacaaacttta

SEQ ID NO: 615908 - DNA, 33 bp, Homo sapien
tagagacagaataagggaagtagacaaacttta

SEQ ID NO: 615909 - DNA, 33 bp, Homo sapien
agaagagcatcttcacggcattttattttttct

SEQ ID NO: 615910 - DNA, 33 bp, Homo sapien
agaagagcatcttcactgcattttattttttct

SEQ ID NO: 615911 - DNA, 33 bp, Homo sapien
aaaaatgaacacaaaccggatcaaagacctaac

SEQ ID NO: 615912 - DNA, 33 bp, Homo sapien
aaaaatgaacacaaactggatcaaagacctaac

SEQ ID NO: 615913 - DNA, 33 bp, Homo sapien
gatgtgataaacaaacaagcattggtgaaacta

SEQ ID NO: 615914 - DNA, 33 bp, Homo sapien
gatgtgataaacaaacgagcattggtgaaacta

SEQ ID NO: 615915 - DNA, 33 bp, Homo sapien
agtaggaatgctcgaaactgattggagggaatg

SEQ ID NO: 615916 - DNA, 33 bp, Homo sapien
agtaggaatgctcgaatctgattggagggaatg

SEQ ID NO: 615917 - DNA, 33 bp, Homo sapien
tgttactcctaatgtcacaggtgtgttccttct

SEQ ID NO: 615918 - DNA, 33 bp, Homo sapien
tgttactcctaatgtcgcaggtgtgttccttct

SEQ ID NO: 615919 - DNA, 33 bp, Homo sapien
aggttctaccaatgataaaaccaggcccagaat

SEQ ID NO: 615920 - DNA, 33 bp, Homo sapien
aggttctaccaatgatgaaaccaggcccagaat

SEQ ID NO: 615921 - DNA, 33 bp, Homo sapien
tgcaaattgaggtgacagattgggtgtcatgtg

SEQ ID NO: 615922 - DNA, 33 bp, Homo sapien
tgcaaattgaggtgacggattgggtgtcatgtg

SEQ ID NO: 615923 - DNA, 33 bp, Homo sapien
ttcatgcagtcaatcaacaagtatctatagagt

SEQ ID NO: 615924 - DNA, 33 bp, Homo sapien
ttcatgcagtcaatcagcaagtatctatagagt

SEQ ID NO: 615925 - DNA, 33 bp, Homo sapien
tgcagggttagctgccaaggacctgaaatgaaa

SEQ ID NO: 615926 - DNA, 33 bp, Homo sapien
tgcagggttagctgcccaggacctgaaatgaaa

SEQ ID NO: 615927 - DNA, 33 bp, Homo sapien
aatccaggcaagaaaaatttacagaatgtgcat

SEQ ID NO: 615928 - DNA, 33 bp, Homo sapien
aatccaggcaagaaaagtttacagaatgtgcat

SEQ ID NO: 615929 - DNA, 33 bp, Homo sapien
gggactgtggaaaatcagagatcacatgcccag

SEQ ID NO: 615930 - DNA, 33 bp, Homo sapien
gggactgtggaaaatcggagatcacatgcccag

SEQ ID NO: 615931 - DNA, 33 bp, Homo sapien
gtagtctgaccagtgcacagttgagtaggacag

SEQ ID NO: 615932 - DNA, 33 bp, Homo sapien
gtagtctgaccagtgcgcagttgagtaggacag

SEQ ID NO: 615933 - DNA, 33 bp, Homo sapien
tataggtgagtaaaccaaagtttgggagggagt

SEQ ID NO: 615934 - DNA, 33 bp, Homo sapien
tataggtgagtaaaccgaagtttgggagggagt

SEQ ID NO: 615935 - DNA, 33 bp, Homo sapien
ctgcctctctctaaagactcctgtggcaggcct

SEQ ID NO: 615936 - DNA, 33 bp, Homo sapien
ctgcctctctctaaagcctcctgtggcaggcct

SEQ ID NO: 615937 - DNA, 33 bp, Homo sapien
ttacaacttagtgttacgaggactcctgggtat

SEQ ID NO: 615938 - DNA, 33 bp, Homo sapien
ttacaacttagtgttatgaggactcctgggtat

SEQ ID NO: 615939 - DNA, 33 bp, Homo sapien
ttattattctaatccactgcacagctatacttt

SEQ ID NO: 615940 - DNA, 33 bp, Homo sapien
ttattattctaatccattgcacagctatacttt

SEQ ID NO: 615941 - DNA, 33 bp, Homo sapien
ctatacttttgcaaaacgcaacaaaaattaatc

SEQ ID NO: 615942 - DNA, 33 bp, Homo sapien
ctatacttttgcaaaatgcaacaaaaattaatc

SEQ ID NO: 615943 - DNA, 33 bp, Homo sapien
gacagtgagcttgaaaaattggagtcattgtca

SEQ ID NO: 615944 - DNA, 33 bp, Homo sapien
gacagtgagcttgaaatattggagtcattgtca

SEQ ID NO: 615945 - DNA, 33 bp, Homo sapien
gcatctgtgccgtaataaggccaataactctga

SEQ ID NO: 615946 - DNA, 33 bp, Homo sapien
gcatctgtgccgtaatcaggccaataactctga

SEQ ID NO: 615947 - DNA, 33 bp, Homo sapien
tgcactgaaatgtccacgttcaaagtctaagga

SEQ ID NO: 615948 - DNA, 33 bp, Homo sapien
tgcactgaaatgtccatgttcaaagtctaagga

SEQ ID NO: 615949 - DNA, 33 bp, Homo sapien
tttatttgatttgcccggcacatggtcgtgata

SEQ ID NO: 615950 - DNA, 33 bp, Homo sapien
tttatttgatttgccctgcacatggtcgtgata

SEQ ID NO: 615951 - DNA, 33 bp, Homo sapien
tagtgaatcctgtcagccccaaagccaagacag

SEQ ID NO: 615952 - DNA, 33 bp, Homo sapien
tagtgaatcctgtcagtcccaaagccaagacag

SEQ ID NO: 615953 - DNA, 33 bp, Homo sapien
gctgctgacatgcataaatgtgggaccgtgtgg

SEQ ID NO: 615954 - DNA, 33 bp, Homo sapien
gctgctgacatgcatatatgtgggaccgtgtgg

SEQ ID NO: 615955 - DNA, 33 bp, Homo sapien
catggtaggatatttaacagcattcccgtcctc

SEQ ID NO: 615956 - DNA, 33 bp, Homo sapien
catggtaggatatttagcagcattcccgtcctc

SEQ ID NO: 615957 - DNA, 33 bp, Homo sapien
gagaagaatccaaacacagaccggcagggattc

SEQ ID NO: 615958 - DNA, 33 bp, Homo sapien
gagaagaatccaaacagagaccggcagggattc

SEQ ID NO: 615959 - DNA, 33 bp, Homo sapien
cataagaaccctggcacaggaaacgtcagctgt

SEQ ID NO: 615960 - DNA, 33 bp, Homo sapien
cataagaaccctggcataggaaacgtcagctgt

SEQ ID NO: 615961 - DNA, 33 bp, Homo sapien
gttattcaatatttaccgaacacctgtggcccc

SEQ ID NO: 615962 - DNA, 33 bp, Homo sapien
gttattcaatatttactgaacacctgtggcccc

SEQ ID NO: 615963 - DNA, 33 bp, Homo sapien
tgtttttctccctggccgaagctcaaaggtgaa

SEQ ID NO: 615964 - DNA, 33 bp, Homo sapien
tgtttttctccctggctgaagctcaaaggtgaa

SEQ ID NO: 615965 - DNA, 33 bp, Homo sapien
actgaactcacagatacagggatatagagggcc

SEQ ID NO: 615966 - DNA, 33 bp, Homo sapien
actgaactcacagatagagggatatagagggcc

SEQ ID NO: 615967 - DNA, 33 bp, Homo sapien
cattgggatgtatatacgtagagaaagagattc

SEQ ID NO: 615968 - DNA, 33 bp, Homo sapien
cattgggatgtatatatgtagagaaagagattc

SEQ ID NO: 615969 - DNA, 33 bp, Homo sapien
agcgtggctaaggtacagaacttctctgagact

SEQ ID NO: 615970 - DNA, 33 bp, Homo sapien
agcgtggctaaggtactgaacttctctgagact

SEQ ID NO: 615971 - DNA, 33 bp, Homo sapien
tagaaagactttttgaggaagtagaaggaaaga

SEQ ID NO: 615972 - DNA, 33 bp, Homo sapien
tagaaagactttttgatgaagtagaaggaaaga

SEQ ID NO: 615973 - DNA, 33 bp, Homo sapien
gctacagaacagggtacatagaatgatgccatt

SEQ ID NO: 615974 - DNA, 33 bp, Homo sapien
gctacagaacagggtatatagaatgatgccatt

SEQ ID NO: 615975 - DNA, 33 bp, Homo sapien
tctctagatagtaggagtatgtttccagaaagc

SEQ ID NO: 615976 - DNA, 33 bp, Homo sapien
tctctagatagtaggattatgtttccagaaagc

SEQ ID NO: 615977 - DNA, 33 bp, Homo sapien
ctaaggactgggagtacgggtttgtgctgtgtt

SEQ ID NO: 615978 - DNA, 33 bp, Homo sapien
ctaaggactgggagtatgggtttgtgctgtgtt

SEQ ID NO: 615979 - DNA, 33 bp, Homo sapien
aggaatcaaccacttcaaaggaagcagagagaa

SEQ ID NO: 615980 - DNA, 33 bp, Homo sapien
aggaatcaaccacttcgaaggaagcagagagaa

SEQ ID NO: 615981 - DNA, 33 bp, Homo sapien
tgattataccatgtcactcagttgttcaagttg

SEQ ID NO: 615982 - DNA, 33 bp, Homo sapien
tgattataccatgtcagtcagttgttcaagttg

SEQ ID NO: 615983 - DNA, 33 bp, Homo sapien
atgcttggtttaatgcccttcctcccctctagc

SEQ ID NO: 615984 - DNA, 33 bp, Homo sapien
atgcttggtttaatgctcttcctcccctctagc

SEQ ID NO: 615985 - DNA, 33 bp, Homo sapien
attgtgtataaaaagcacttcgcactagagaga

SEQ ID NO: 615986 - DNA, 33 bp, Homo sapien
attgtgtataaaaagcgcttcgcactagagaga

SEQ ID NO: 615987 - DNA, 33 bp, Homo sapien
tctgcttgcctataggaaagagacaggctaatt

SEQ ID NO: 615988 - DNA, 33 bp, Homo sapien
tctgcttgcctatagggaagagacaggctaatt

SEQ ID NO: 615989 - DNA, 33 bp, Homo sapien
aggaagggaaaataacaacagaatccttatcct

SEQ ID NO: 615990 - DNA, 33 bp, Homo sapien
aggaagggaaaataacgacagaatccttatcct

SEQ ID NO: 615991 - DNA, 33 bp, Homo sapien
agagaaaagtgtacaacagatcctgaccctttg

SEQ ID NO: 615992 - DNA, 33 bp, Homo sapien
agagaaaagtgtacaatagatcctgaccctttg

SEQ ID NO: 615993 - DNA, 33 bp, Homo sapien
gagtgcatagacgcacacagccaggtgggaaga

SEQ ID NO: 615994 - DNA, 33 bp, Homo sapien
gagtgcatagacgcacgcagccaggtgggaaga

SEQ ID NO: 615995 - DNA, 33 bp, Homo sapien
tccaaaactgatgaagccatcaatcccacaaag

SEQ ID NO: 615996 - DNA, 33 bp, Homo sapien
tccaaaactgatgaaggcatcaatcccacaaag

SEQ ID NO: 615997 - DNA, 33 bp, Homo sapien
gagtttccaatttacgaacgtgctatatctctc

SEQ ID NO: 615998 - DNA, 33 bp, Homo sapien
gagtttccaatttacggacgtgctatatctctc

SEQ ID NO: 615999 - DNA, 33 bp, Homo sapien
ctagcaagtccggaaaaaggcactatacattac

SEQ ID NO: 616000 - DNA, 33 bp, Homo sapien
ctagcaagtccggaaataggcactatacattac

SEQ ID NO: 616001 - DNA, 33 bp, Homo sapien
agaagaagagcaatcaaccataatctctcactg

SEQ ID NO: 616002 - DNA, 33 bp, Homo sapien
agaagaagagcaatcatccataatctctcactg

SEQ ID NO: 616003 - DNA, 33 bp, Homo sapien
tgtctagagtttaccaagagcactttttagtac

SEQ ID NO: 616004 - DNA, 33 bp, Homo sapien
tgtctagagtttaccaggagcactttttagtac

SEQ ID NO: 616005 - DNA, 33 bp, Homo sapien
taatttgcaggcccagaaagttaatccacccca

SEQ ID NO: 616006 - DNA, 33 bp, Homo sapien
taatttgcaggcccaggaagttaatccacccca

SEQ ID NO: 616007 - DNA, 33 bp, Homo sapien
ccaccatccatgaaaaacaattccaagtggatg

SEQ ID NO: 616008 - DNA, 33 bp, Homo sapien
ccaccatccatgaaaatcaattccaagtggatg

SEQ ID NO: 616009 - DNA, 33 bp, Homo sapien
aggttggagagatcctcacaagtgcttgacaag

SEQ ID NO: 616010 - DNA, 33 bp, Homo sapien
aggttggagagatcctgacaagtgcttgacaag

SEQ ID NO: 616011 - DNA, 33 bp, Homo sapien
ctgagctcctcaatgacgcaaacttagctcctt

SEQ ID NO: 616012 - DNA, 33 bp, Homo sapien
ctgagctcctcaatgatgcaaacttagctcctt

SEQ ID NO: 616013 - DNA, 33 bp, Homo sapien
agaaatatttttgagtaaaaggactgaacagag

SEQ ID NO: 616014 - DNA, 33 bp, Homo sapien
agaaatatttttgagtgaaaggactgaacagag

SEQ ID NO: 616015 - DNA, 33 bp, Homo sapien
ccaggggacaaaatgaaaagccatgtagtccat

SEQ ID NO: 616016 - DNA, 33 bp, Homo sapien
ccaggggacaaaatgacaagccatgtagtccat

SEQ ID NO: 616017 - DNA, 33 bp, Homo sapien
ctggatgcctggagataacggacacccgattca

SEQ ID NO: 616018 - DNA, 33 bp, Homo sapien
ctggatgcctggagattacggacacccgattca

SEQ ID NO: 616019 - DNA, 33 bp, Homo sapien
tgtaatgaaaatccctaaaggtgttgcttttct

SEQ ID NO: 616020 - DNA, 33 bp, Homo sapien
tgtaatgaaaatccctgaaggtgttgcttttct

SEQ ID NO: 616021 - DNA, 33 bp, Homo sapien
ggtatgatcagtaaccagcaggatgttatctaa

SEQ ID NO: 616022 - DNA, 33 bp, Homo sapien
ggtatgatcagtaaccggcaggatgttatctaa

SEQ ID NO: 616023 - DNA, 33 bp, Homo sapien
atccctgctagtgggaaagtcggccatcttctt

SEQ ID NO: 616024 - DNA, 33 bp, Homo sapien
atccctgctagtgggacagtcggccatcttctt

SEQ ID NO: 616025 - DNA, 33 bp, Homo sapien
cacgtctgtgaagctcactgggaactccttcct

SEQ ID NO: 616026 - DNA, 33 bp, Homo sapien
cacgtctgtgaagctcgctgggaactccttcct

SEQ ID NO: 616027 - DNA, 33 bp, Homo sapien
cagctcccgatgcacaagctctgtaaaatctcc

SEQ ID NO: 616028 - DNA, 33 bp, Homo sapien
cagctcccgatgcacatgctctgtaaaatctcc

SEQ ID NO: 616029 - DNA, 33 bp, Homo sapien
ttgtctatggggcagactccctgtattcttgct

SEQ ID NO: 616030 - DNA, 33 bp, Homo sapien
ttgtctatggggcagagtccctgtattcttgct

SEQ ID NO: 616031 - DNA, 33 bp, Homo sapien
tctttgtaaatcctccacaaaaggccttccaca

SEQ ID NO: 616032 - DNA, 33 bp, Homo sapien
tctttgtaaatcctccgcaaaaggccttccaca

SEQ ID NO: 616033 - DNA, 33 bp, Homo sapien
tgtttgagtaataaaaactagtacttactgggc

SEQ ID NO: 616034 - DNA, 33 bp, Homo sapien
tgtttgagtaataaaagctagtacttactgggc

SEQ ID NO: 616035 - DNA, 33 bp, Homo sapien
gactggggaatgactgcaccatgcctggcctga

SEQ ID NO: 616036 - DNA, 33 bp, Homo sapien
gactggggaatgactgtaccatgcctggcctga

SEQ ID NO: 616037 - DNA, 33 bp, Homo sapien
ggcagatgggagaaaacgctaacgataagaagt

SEQ ID NO: 616038 - DNA, 33 bp, Homo sapien
ggcagatgggagaaaatgctaacgataagaagt

SEQ ID NO: 616039 - DNA, 33 bp, Homo sapien
attacattaggttgcacggcaaagaagaattaa

SEQ ID NO: 616040 - DNA, 33 bp, Homo sapien
attacattaggttgcatggcaaagaagaattaa

SEQ ID NO: 616041 - DNA, 33 bp, Homo sapien
ggtggtgatctgatgagaggtggtctgatctcc

SEQ ID NO: 616042 - DNA, 33 bp, Homo sapien
ggtggtgatctgatgataggtggtctgatctcc

SEQ ID NO: 616043 - DNA, 33 bp, Homo sapien
atttagtgttgtgtccaataagcctaaaataaa

SEQ ID NO: 616044 - DNA, 33 bp, Homo sapien
atttagtgttgtgtccgataagcctaaaataaa

SEQ ID NO: 616045 - DNA, 33 bp, Homo sapien
tccagtgctctgaacaacatctgagcgtattag

SEQ ID NO: 616046 - DNA, 33 bp, Homo sapien
tccagtgctctgaacagcatctgagcgtattag

SEQ ID NO: 616047 - DNA, 33 bp, Homo sapien
tttctattgtctataagttacccagactgtggt

SEQ ID NO: 616048 - DNA, 33 bp, Homo sapien
tttctattgtctataatttacccagactgtggt

SEQ ID NO: 616049 - DNA, 33 bp, Homo sapien
catgatggttgttgcccgaggttaatgtagttg

SEQ ID NO: 616050 - DNA, 33 bp, Homo sapien
catgatggttgttgcctgaggttaatgtagttg

SEQ ID NO: 616051 - DNA, 33 bp, Homo sapien
ggccaaaggcgctgaaaaacactgaggcagatt

SEQ ID NO: 616052 - DNA, 33 bp, Homo sapien
ggccaaaggcgctgaagaacactgaggcagatt

SEQ ID NO: 616053 - DNA, 33 bp, Homo sapien
tctttagtattttccactagccagggaggctga

SEQ ID NO: 616054 - DNA, 33 bp, Homo sapien
tctttagtattttccagtagccagggaggctga

SEQ ID NO: 616055 - DNA, 33 bp, Homo sapien
tttcttagctagaatactagagatgctttgtaa

SEQ ID NO: 616056 - DNA, 33 bp, Homo sapien
tttcttagctagaatagtagagatgctttgtaa

SEQ ID NO: 616057 - DNA, 33 bp, Homo sapien
gtaatgtgcttattaccatatctgctcaaaaac

SEQ ID NO: 616058 - DNA, 33 bp, Homo sapien
gtaatgtgcttattactatatctgctcaaaaac

SEQ ID NO: 616059 - DNA, 33 bp, Homo sapien
taactttgtctgacaccgaaatctgagggtttt

SEQ ID NO: 616060 - DNA, 33 bp, Homo sapien
taactttgtctgacactgaaatctgagggtttt

SEQ ID NO: 616061 - DNA, 33 bp, Homo sapien
ggtttatgagtttccccactccactgttttcat

SEQ ID NO: 616062 - DNA, 33 bp, Homo sapien
ggtttatgagtttccctactccactgttttcat

SEQ ID NO: 616063 - DNA, 33 bp, Homo sapien
ttcttcacagtgataacaaggcaggatttggga

SEQ ID NO: 616064 - DNA, 33 bp, Homo sapien
ttcttcacagtgataagaaggcaggatttggga

SEQ ID NO: 616065 - DNA, 33 bp, Homo sapien
tctctctgtataatcaaaccttgacaattgtat

SEQ ID NO: 616066 - DNA, 33 bp, Homo sapien
tctctctgtataatcagaccttgacaattgtat

SEQ ID NO: 616067 - DNA, 33 bp, Homo sapien
tagagtttgcaggacacagtactggaaggagaa

SEQ ID NO: 616068 - DNA, 33 bp, Homo sapien
tagagtttgcaggacatagtactggaaggagaa

SEQ ID NO: 616069 - DNA, 33 bp, Homo sapien
gtagaaacaatgtaaaaaatctctctgtgaaga

SEQ ID NO: 616070 - DNA, 33 bp, Homo sapien
gtagaaacaatgtaaacaatctctctgtgaaga

SEQ ID NO: 616071 - DNA, 33 bp, Homo sapien
ttctctcctttccaaaatgagtcatggaataac

SEQ ID NO: 616072 - DNA, 33 bp, Homo sapien
ttctctcctttccaaactgagtcatggaataac

SEQ ID NO: 616073 - DNA, 33 bp, Homo sapien
tgtatcttatagactaggctctggagaagtcca

SEQ ID NO: 616074 - DNA, 33 bp, Homo sapien
tgtatcttatagactatgctctggagaagtcca

SEQ ID NO: 616075 - DNA, 33 bp, Homo sapien
cccagaaaccttgataatacttgacctacccaa

SEQ ID NO: 616076 - DNA, 33 bp, Homo sapien
cccagaaaccttgatagtacttgacctacccaa

SEQ ID NO: 616077 - DNA, 33 bp, Homo sapien
gagatataattcatacccacctgaagtgtacat

SEQ ID NO: 616078 - DNA, 33 bp, Homo sapien
gagatataattcatactcacctgaagtgtacat

SEQ ID NO: 616079 - DNA, 33 bp, Homo sapien
tcattgtcaaatcctaacggccatgtatatagc

SEQ ID NO: 616080 - DNA, 33 bp, Homo sapien
tcattgtcaaatcctatcggccatgtatatagc

SEQ ID NO: 616081 - DNA, 33 bp, Homo sapien
ctatagtttccttatacccaatggcttgtcgct

SEQ ID NO: 616082 - DNA, 33 bp, Homo sapien
ctatagtttccttatatccaatggcttgtcgct

SEQ ID NO: 616083 - DNA, 33 bp, Homo sapien
attagttgcttgtacacaaaaatacaactggtt

SEQ ID NO: 616084 - DNA, 33 bp, Homo sapien
attagttgcttgtacagaaaaatacaactggtt

SEQ ID NO: 616085 - DNA, 33 bp, Homo sapien
gggatggcatttcaataagtggtgctgcatcaa

SEQ ID NO: 616086 - DNA, 33 bp, Homo sapien
gggatggcatttcaatgagtggtgctgcatcaa

SEQ ID NO: 616087 - DNA, 33 bp, Homo sapien
gatgtatgtacatttccaatttcaccttttcac

SEQ ID NO: 616088 - DNA, 33 bp, Homo sapien
gatgtatgtacatttctaatttcaccttttcac

SEQ ID NO: 616089 - DNA, 33 bp, Homo sapien
taaagaggcacacttacaagacatatatgtaac

SEQ ID NO: 616090 - DNA, 33 bp, Homo sapien
taaagaggcacacttagaagacatatatgtaac

SEQ ID NO: 616091 - DNA, 33 bp, Homo sapien
cataattaaaagcccacaaggaacagaaagaaa

SEQ ID NO: 616092 - DNA, 33 bp, Homo sapien
cataattaaaagcccagaaggaacagaaagaaa

SEQ ID NO: 616093 - DNA, 33 bp, Homo sapien
ttccttttaaacaaaccgtagcatagtatatgt

SEQ ID NO: 616094 - DNA, 33 bp, Homo sapien
ttccttttaaacaaacggtagcatagtatatgt

SEQ ID NO: 616095 - DNA, 33 bp, Homo sapien
tgctaacttaggattcacagaaagactttggag

SEQ ID NO: 616096 - DNA, 33 bp, Homo sapien
tgctaacttaggattcgcagaaagactttggag

SEQ ID NO: 616097 - DNA, 33 bp, Homo sapien
gagtccatggtcgctcccgaggatgctgggggt

SEQ ID NO: 616098 - DNA, 33 bp, Homo sapien
gagtccatggtcgctctcgaggatgctgggggt

SEQ ID NO: 616099 - DNA, 33 bp, Homo sapien
tttcgagtcagattccaaacaggacctctgggc

SEQ ID NO: 616100 - DNA, 33 bp, Homo sapien
tttcgagtcagattccgaacaggacctctgggc

SEQ ID NO: 616101 - DNA, 33 bp, Homo sapien
gaacacatcagatatcaagagtgatcacatatc

SEQ ID NO: 616102 - DNA, 33 bp, Homo sapien
gaacacatcagatatccagagtgatcacatatc

SEQ ID NO: 616103 - DNA, 33 bp, Homo sapien
cctgcctgccatcttacaaatgaccacatgagg

SEQ ID NO: 616104 - DNA, 33 bp, Homo sapien
cctgcctgccatcttataaatgaccacatgagg

SEQ ID NO: 616105 - DNA, 33 bp, Homo sapien
cgctttgagagggaaacgcagataggcgatcat

SEQ ID NO: 616106 - DNA, 33 bp, Homo sapien
cgctttgagagggaaatgcagataggcgatcat

SEQ ID NO: 616107 - DNA, 33 bp, Homo sapien
atgtctgtatctggagaccaaggaagggatggt

SEQ ID NO: 616108 - DNA, 33 bp, Homo sapien
atgtctgtatctggaggccaaggaagggatggt

SEQ ID NO: 616109 - DNA, 33 bp, Homo sapien
tgatcctcagggagttcaaaatgcagggactta

SEQ ID NO: 616110 - DNA, 33 bp, Homo sapien
tgatcctcagggagtttaaaatgcagggactta

SEQ ID NO: 616111 - DNA, 33 bp, Homo sapien
tgaacaggattgacaccagcagggaaaaaatga

SEQ ID NO: 616112 - DNA, 33 bp, Homo sapien
tgaacaggattgacactagcagggaaaaaatga

SEQ ID NO: 616113 - DNA, 33 bp, Homo sapien
tgcatctgtacagtgtaaattgactatatagat

SEQ ID NO: 616114 - DNA, 33 bp, Homo sapien
tgcatctgtacagtgtgaattgactatatagat

SEQ ID NO: 616115 - DNA, 33 bp, Homo sapien
ttgatgggtagagaagcataaatgtccaacctt

SEQ ID NO: 616116 - DNA, 33 bp, Homo sapien
ttgatgggtagagaaggataaatgtccaacctt

SEQ ID NO: 616117 - DNA, 33 bp, Homo sapien
ctagaggccaagtcaccgtatcaaaggctgaga

SEQ ID NO: 616118 - DNA, 33 bp, Homo sapien
ctagaggccaagtcactgtatcaaaggctgaga

SEQ ID NO: 616119 - DNA, 33 bp, Homo sapien
actctcatcacagggaagatgacggagaagaga

SEQ ID NO: 616120 - DNA, 33 bp, Homo sapien
actctcatcacagggaggatgacggagaagaga

SEQ ID NO: 616121 - DNA, 33 bp, Homo sapien
ggagcagtcttggttcaagtaacagagattttc

SEQ ID NO: 616122 - DNA, 33 bp, Homo sapien
ggagcagtcttggttcgagtaacagagattttc

SEQ ID NO: 616123 - DNA, 33 bp, Homo sapien
tcctctccctttaccaccttctagtcacagggc

SEQ ID NO: 616124 - DNA, 33 bp, Homo sapien
tcctctccctttaccatcttctagtcacagggc

SEQ ID NO: 616125 - DNA, 33 bp, Homo sapien
caaatccaaacctcaaaaagatgcaacttcaca

SEQ ID NO: 616126 - DNA, 33 bp, Homo sapien
caaatccaaacctcaataagatgcaacttcaca

SEQ ID NO: 616127 - DNA, 33 bp, Homo sapien
tcaagagaaatgaaaaattctgtctatacaaaa

SEQ ID NO: 616128 - DNA, 33 bp, Homo sapien
tcaagagaaatgaaaacttctgtctatacaaaa

SEQ ID NO: 616129 - DNA, 33 bp, Homo sapien
tgtttgtgcataaatcaactaatgtcattttaa

SEQ ID NO: 616130 - DNA, 33 bp, Homo sapien
tgtttgtgcataaatcgactaatgtcattttaa

SEQ ID NO: 616131 - DNA, 33 bp, Homo sapien
gagagagagcaagctacagggagagataaagag

SEQ ID NO: 616132 - DNA, 33 bp, Homo sapien
gagagagagcaagctagagggagagataaagag

SEQ ID NO: 616133 - DNA, 33 bp, Homo sapien
accggaagatcctacacgagaatgaaaccagca

SEQ ID NO: 616134 - DNA, 33 bp, Homo sapien
accggaagatcctacatgagaatgaaaccagca

SEQ ID NO: 616135 - DNA, 33 bp, Homo sapien
atcaacttaagcttaaaagagagtaagttccta

SEQ ID NO: 616136 - DNA, 33 bp, Homo sapien
atcaacttaagcttaagagagagtaagttccta

SEQ ID NO: 616137 - DNA, 33 bp, Homo sapien
cttttgtgggaccaggacacgttggccaccaca

SEQ ID NO: 616138 - DNA, 33 bp, Homo sapien
cttttgtgggaccaggtcacgttggccaccaca

SEQ ID NO: 616139 - DNA, 33 bp, Homo sapien
tatacattttctcatccgagcttcacagcagct

SEQ ID NO: 616140 - DNA, 33 bp, Homo sapien
tatacattttctcatctgagcttcacagcagct

SEQ ID NO: 616141 - DNA, 33 bp, Homo sapien
tctttttccattcatgcattggtggccacgtag

SEQ ID NO: 616142 - DNA, 33 bp, Homo sapien
tctttttccattcatgtattggtggccacgtag

SEQ ID NO: 616143 - DNA, 33 bp, Homo sapien
atgcaatgctgttgtaagggttaggagagttcg

SEQ ID NO: 616144 - DNA, 33 bp, Homo sapien
atgcaatgctgttgtacgggttaggagagttcg

SEQ ID NO: 616145 - DNA, 33 bp, Homo sapien
aaacagcttaatatggcacagtttttgaattcc

SEQ ID NO: 616146 - DNA, 33 bp, Homo sapien
aaacagcttaatatggtacagtttttgaattcc

SEQ ID NO: 616147 - DNA, 33 bp, Homo sapien
agaaatagtaaatccacgagaccttgagttcat

SEQ ID NO: 616148 - DNA, 33 bp, Homo sapien
agaaatagtaaatccatgagaccttgagttcat

SEQ ID NO: 616149 - DNA, 33 bp, Homo sapien
tctttaagtgacctggaataacagagaggtcaa

SEQ ID NO: 616150 - DNA, 33 bp, Homo sapien
tctttaagtgacctgggataacagagaggtcaa

SEQ ID NO: 616151 - DNA, 33 bp, Homo sapien
gtagtggagcttgggcaattttaaacacaaaag

SEQ ID NO: 616152 - DNA, 33 bp, Homo sapien
gtagtggagcttgggcgattttaaacacaaaag

SEQ ID NO: 616153 - DNA, 33 bp, Homo sapien
tggtttaaatttatcaccaagtctcaactccca

SEQ ID NO: 616154 - DNA, 33 bp, Homo sapien
tggtttaaatttatcatcaagtctcaactccca

SEQ ID NO: 616155 - DNA, 33 bp, Homo sapien
cgaaggagacaggtacaacaagcccagtcagca

SEQ ID NO: 616156 - DNA, 33 bp, Homo sapien
cgaaggagacaggtaccacaagcccagtcagca

SEQ ID NO: 616157 - DNA, 33 bp, Homo sapien
aatagcctcaaaattaccctgcaactaaaggga

SEQ ID NO: 616158 - DNA, 33 bp, Homo sapien
aatagcctcaaaattatcctgcaactaaaggga

SEQ ID NO: 616159 - DNA, 33 bp, Homo sapien
gcaggatcccctcagccaagttgctgttgacct

SEQ ID NO: 616160 - DNA, 33 bp, Homo sapien
gcaggatcccctcagctaagttgctgttgacct

SEQ ID NO: 616161 - DNA, 33 bp, Homo sapien
tatgtctgcaattgaacgcagggtagctgcagt

SEQ ID NO: 616162 - DNA, 33 bp, Homo sapien
tatgtctgcaattgaatgcagggtagctgcagt

SEQ ID NO: 616163 - DNA, 33 bp, Homo sapien
gtgtgcccagctgcgcacaatctgagcctggcc

SEQ ID NO: 616164 - DNA, 33 bp, Homo sapien
gtgtgcccagctgcgcgcaatctgagcctggcc

SEQ ID NO: 616165 - DNA, 33 bp, Homo sapien
ggcaccctccctttgcactggccatcgggtgag

SEQ ID NO: 616166 - DNA, 33 bp, Homo sapien
ggcaccctccctttgcgctggccatcgggtgag

SEQ ID NO: 616167 - DNA, 33 bp, Homo sapien
gttcagtaattttctagaaagtcagatggcctg

SEQ ID NO: 616168 - DNA, 33 bp, Homo sapien
gttcagtaattttctataaagtcagatggcctg

SEQ ID NO: 616169 - DNA, 33 bp, Homo sapien
gtaagacacaaggcacaaggaagttatagattg

SEQ ID NO: 616170 - DNA, 33 bp, Homo sapien
gtaagacacaaggcacgaggaagttatagattg

SEQ ID NO: 616171 - DNA, 33 bp, Homo sapien
ggacacggaagccgaacagagatcacgtcaccc

SEQ ID NO: 616172 - DNA, 33 bp, Homo sapien
ggacacggaagccgaagagagatcacgtcaccc

SEQ ID NO: 616173 - DNA, 33 bp, Homo sapien
ggtacagtaattgcaaaagccctgagaataaag

SEQ ID NO: 616174 - DNA, 33 bp, Homo sapien
ggtacagtaattgcaacagccctgagaataaag

SEQ ID NO: 616175 - DNA, 33 bp, Homo sapien
ggggtaggggctgacacatacacaaataagact

SEQ ID NO: 616176 - DNA, 33 bp, Homo sapien
ggggtaggggctgacatatacacaaataagact

SEQ ID NO: 616177 - DNA, 33 bp, Homo sapien
gtgcatgttgtaaccacaaattctctttgtgaa

SEQ ID NO: 616178 - DNA, 33 bp, Homo sapien
gtgcatgttgtaaccataaattctctttgtgaa

SEQ ID NO: 616179 - DNA, 33 bp, Homo sapien
cttcggcaacataggacgactccatttctacaa

SEQ ID NO: 616180 - DNA, 33 bp, Homo sapien
cttcggcaacataggatgactccatttctacaa

SEQ ID NO: 616181 - DNA, 33 bp, Homo sapien
ccagtccctgtccaaacgaaagataattaacat

SEQ ID NO: 616182 - DNA, 33 bp, Homo sapien
ccagtccctgtccaaatgaaagataattaacat

SEQ ID NO: 616183 - DNA, 33 bp, Homo sapien
tgaaatgcagaaagtgaattcccaatgggtagc

SEQ ID NO: 616184 - DNA, 33 bp, Homo sapien
tgaaatgcagaaagtggattcccaatgggtagc

SEQ ID NO: 616185 - DNA, 33 bp, Homo sapien
cacaacccaaagtttacggtcaccagtggtcac

SEQ ID NO: 616186 - DNA, 33 bp, Homo sapien
cacaacccaaagtttatggtcaccagtggtcac

SEQ ID NO: 616187 - DNA, 33 bp, Homo sapien
ttgccattggatatacaactgcccaagccaact

SEQ ID NO: 616188 - DNA, 33 bp, Homo sapien
ttgccattggatatacgactgcccaagccaact

SEQ ID NO: 616189 - DNA, 33 bp, Homo sapien
atgagctgggttttgaaaatgccacgtttacaa

SEQ ID NO: 616190 - DNA, 33 bp, Homo sapien
atgagctgggttttgagaatgccacgtttacaa

SEQ ID NO: 616191 - DNA, 33 bp, Homo sapien
tgtttttataggcaagaatgaatttattccaga

SEQ ID NO: 616192 - DNA, 33 bp, Homo sapien
tgtttttataggcaaggatgaatttattccaga

SEQ ID NO: 616193 - DNA, 33 bp, Homo sapien
atgcctgctcagaaaacggtaatgaattaaaaa

SEQ ID NO: 616194 - DNA, 33 bp, Homo sapien
atgcctgctcagaaaatggtaatgaattaaaaa

SEQ ID NO: 616195 - DNA, 33 bp, Homo sapien
tcccccaggaatgaaacgtgctcctatctaacc

SEQ ID NO: 616196 - DNA, 33 bp, Homo sapien
tcccccaggaatgaaatgtgctcctatctaacc

SEQ ID NO: 616197 - DNA, 33 bp, Homo sapien
ggtcttggtggaaagacggcttctctgcgttcc

SEQ ID NO: 616198 - DNA, 33 bp, Homo sapien
ggtcttggtggaaagatggcttctctgcgttcc

SEQ ID NO: 616199 - DNA, 33 bp, Homo sapien
gatcatcaaaataggcacctgctttgattatct

SEQ ID NO: 616200 - DNA, 33 bp, Homo sapien
gatcatcaaaataggcgcctgctttgattatct

SEQ ID NO: 616201 - DNA, 33 bp, Homo sapien
aaggacttcgtagggacgtgtcagttaagacca

SEQ ID NO: 616202 - DNA, 33 bp, Homo sapien
aaggacttcgtagggatgtgtcagttaagacca

SEQ ID NO: 616203 - DNA, 33 bp, Homo sapien
tcacattagcagatgaaacacagtttggtataa

SEQ ID NO: 616204 - DNA, 33 bp, Homo sapien
tcacattagcagatgagacacagtttggtataa

SEQ ID NO: 616205 - DNA, 33 bp, Homo sapien
tgaacacatttttagccgaacagtgaaaacaca

SEQ ID NO: 616206 - DNA, 33 bp, Homo sapien
tgaacacatttttagctgaacagtgaaaacaca

SEQ ID NO: 616207 - DNA, 33 bp, Homo sapien
cgactgtgtcaggatccaggcaatggtaagatg

SEQ ID NO: 616208 - DNA, 33 bp, Homo sapien
cgactgtgtcaggatctaggcaatggtaagatg

SEQ ID NO: 616209 - DNA, 33 bp, Homo sapien
ttccccctttgagcctcagctacctcacctatc

SEQ ID NO: 616210 - DNA, 33 bp, Homo sapien
ttccccctttgagccttagctacctcacctatc

SEQ ID NO: 616211 - DNA, 33 bp, Homo sapien
gctacctcacctatcaaataaaaagcttaaact

SEQ ID NO: 616212 - DNA, 33 bp, Homo sapien
gctacctcacctatcagataaaaagcttaaact

SEQ ID NO: 616213 - DNA, 33 bp, Homo sapien
ctaggtatccagttgacaagcccaggaagatac

SEQ ID NO: 616214 - DNA, 33 bp, Homo sapien
ctaggtatccagttgagaagcccaggaagatac

SEQ ID NO: 616215 - DNA, 33 bp, Homo sapien
atggcctcagaggacaaaatgacaccaagtata

SEQ ID NO: 616216 - DNA, 33 bp, Homo sapien
atggcctcagaggacacaatgacaccaagtata

SEQ ID NO: 616217 - DNA, 33 bp, Homo sapien
ttcctcaggcctgttacgtaaagcagttctgaa

SEQ ID NO: 616218 - DNA, 33 bp, Homo sapien
ttcctcaggcctgttatgtaaagcagttctgaa

SEQ ID NO: 616219 - DNA, 33 bp, Homo sapien
ttcacattgatacttgcagatctagctcctctt

SEQ ID NO: 616220 - DNA, 33 bp, Homo sapien
ttcacattgatacttgtagatctagctcctctt

SEQ ID NO: 616221 - DNA, 33 bp, Homo sapien
accatttccctagcgacggacatttaggttatt

SEQ ID NO: 616222 - DNA, 33 bp, Homo sapien
accatttccctagcgatggacatttaggttatt

SEQ ID NO: 616223 - DNA, 33 bp, Homo sapien
aggactaaagccactaccccatgtgctgcacca

SEQ ID NO: 616224 - DNA, 33 bp, Homo sapien
aggactaaagccactatcccatgtgctgcacca

SEQ ID NO: 616225 - DNA, 33 bp, Homo sapien
tatttggccttgtcttcaaacattacctcactg

SEQ ID NO: 616226 - DNA, 33 bp, Homo sapien
tatttggccttgtctttaaacattacctcactg

SEQ ID NO: 616227 - DNA, 33 bp, Homo sapien
ccacactcagcttctggatgtttatatgggtaa

SEQ ID NO: 616228 - DNA, 33 bp, Homo sapien
ccacactcagcttctgtatgtttatatgggtaa

SEQ ID NO: 616229 - DNA, 33 bp, Homo sapien
tgggaattttagagtcaaaagtatgctcatttt

SEQ ID NO: 616230 - DNA, 33 bp, Homo sapien
tgggaattttagagtcgaaagtatgctcatttt

SEQ ID NO: 616231 - DNA, 33 bp, Homo sapien
gcctggtacccagaacacactggaggagaacga

SEQ ID NO: 616232 - DNA, 33 bp, Homo sapien
gcctggtacccagaacgcactggaggagaacga

SEQ ID NO: 616233 - DNA, 33 bp, Homo sapien
ggaaggaaaaagacaactgatctggaactgatg

SEQ ID NO: 616234 - DNA, 33 bp, Homo sapien
ggaaggaaaaagacaagtgatctggaactgatg

SEQ ID NO: 616235 - DNA, 33 bp, Homo sapien
ctgcagtcctcttaaccgctaggcctggagctg

SEQ ID NO: 616236 - DNA, 33 bp, Homo sapien
ctgcagtcctcttaactgctaggcctggagctg

SEQ ID NO: 616237 - DNA, 33 bp, Homo sapien
tggagggggccctctgcacgatgctaatgtgat

SEQ ID NO: 616238 - DNA, 33 bp, Homo sapien
tggagggggccctctgtacgatgctaatgtgat

SEQ ID NO: 616239 - DNA, 33 bp, Homo sapien
atgcaggctgcctgacacactatgaaagtctaa

SEQ ID NO: 616240 - DNA, 33 bp, Homo sapien
atgcaggctgcctgacgcactatgaaagtctaa

SEQ ID NO: 616241 - DNA, 33 bp, Homo sapien
gtagaaaaagaagcaccgtatttgcaaatgtgt

SEQ ID NO: 616242 - DNA, 33 bp, Homo sapien
gtagaaaaagaagcacggtatttgcaaatgtgt

SEQ ID NO: 616243 - DNA, 33 bp, Homo sapien
gtcctgatttctcataccccaagctctgagatc

SEQ ID NO: 616244 - DNA, 33 bp, Homo sapien
gtcctgatttctcatatcccaagctctgagatc

SEQ ID NO: 616245 - DNA, 33 bp, Homo sapien
catggagaaagtcacaatgccgttttcctttgg

SEQ ID NO: 616246 - DNA, 33 bp, Homo sapien
catggagaaagtcacactgccgttttcctttgg

SEQ ID NO: 616247 - DNA, 33 bp, Homo sapien
ttttctgccactcagcgctgtgttatggctgga

SEQ ID NO: 616248 - DNA, 33 bp, Homo sapien
ttttctgccactcagctctgtgttatggctgga

SEQ ID NO: 616249 - DNA, 33 bp, Homo sapien
ggcagtgctgggtgaaatgactggcatctccca

SEQ ID NO: 616250 - DNA, 33 bp, Homo sapien
ggcagtgctgggtgaagtgactggcatctccca

SEQ ID NO: 616251 - DNA, 33 bp, Homo sapien
atttcagagtggcgcaatgcacattatactagt

SEQ ID NO: 616252 - DNA, 33 bp, Homo sapien
atttcagagtggcgcagtgcacattatactagt

SEQ ID NO: 616253 - DNA, 33 bp, Homo sapien
agtgaaaacttggatacggcataactatggagc

SEQ ID NO: 616254 - DNA, 33 bp, Homo sapien
agtgaaaacttggatatggcataactatggagc

SEQ ID NO: 616255 - DNA, 33 bp, Homo sapien
cagttatgataggtacaagccctaaagccacgc

SEQ ID NO: 616256 - DNA, 33 bp, Homo sapien
cagttatgataggtacgagccctaaagccacgc

SEQ ID NO: 616257 - DNA, 33 bp, Homo sapien
gaagcagagacaaacccggcatagcccctgaga

SEQ ID NO: 616258 - DNA, 33 bp, Homo sapien
gaagcagagacaaacctggcatagcccctgaga

SEQ ID NO: 616259 - DNA, 33 bp, Homo sapien
tccatcaccaggaggacaggccgaactttgttc

SEQ ID NO: 616260 - DNA, 33 bp, Homo sapien
tccatcaccaggaggagaggccgaactttgttc

SEQ ID NO: 616261 - DNA, 33 bp, Homo sapien
gggagactcagacccacaagtttctcttttact

SEQ ID NO: 616262 - DNA, 33 bp, Homo sapien
gggagactcagacccagaagtttctcttttact

SEQ ID NO: 616263 - DNA, 33 bp, Homo sapien
cttttacaatttgttacaggcccgagcaggctc

SEQ ID NO: 616264 - DNA, 33 bp, Homo sapien
cttttacaatttgttagaggcccgagcaggctc

SEQ ID NO: 616265 - DNA, 33 bp, Homo sapien
ctctctttgcacagtaaggaaagcacagaatct

SEQ ID NO: 616266 - DNA, 33 bp, Homo sapien
ctctctttgcacagtagggaaagcacagaatct

SEQ ID NO: 616267 - DNA, 33 bp, Homo sapien
catcagggatctacacagactgacaagcaccaa

SEQ ID NO: 616268 - DNA, 33 bp, Homo sapien
catcagggatctacacggactgacaagcaccaa

SEQ ID NO: 616269 - DNA, 33 bp, Homo sapien
cactacctgatctgacagggccttgaatagttt

SEQ ID NO: 616270 - DNA, 33 bp, Homo sapien
cactacctgatctgacggggccttgaatagttt

SEQ ID NO: 616271 - DNA, 33 bp, Homo sapien
tctctatgaacttgacaactctaggtctctcat

SEQ ID NO: 616272 - DNA, 33 bp, Homo sapien
tctctatgaacttgacgactctaggtctctcat

SEQ ID NO: 616273 - DNA, 33 bp, Homo sapien
tctcctgggcacttgaaggaagagccacagata

SEQ ID NO: 616274 - DNA, 33 bp, Homo sapien
tctcctgggcacttgatggaagagccacagata

SEQ ID NO: 616275 - DNA, 33 bp, Homo sapien
agcagaaatctaagcaccaatccctccaacggg

SEQ ID NO: 616276 - DNA, 33 bp, Homo sapien
agcagaaatctaagcatcaatccctccaacggg

SEQ ID NO: 616277 - DNA, 33 bp, Homo sapien
acagaaagaatgtagaactggcacaggctcaac

SEQ ID NO: 616278 - DNA, 33 bp, Homo sapien
acagaaagaatgtagacctggcacaggctcaac

SEQ ID NO: 616279 - DNA, 33 bp, Homo sapien
caactaaaacttcaggaaaaatcgtgtgttcaa

SEQ ID NO: 616280 - DNA, 33 bp, Homo sapien
caactaaaacttcagggaaaatcgtgtgttcaa

SEQ ID NO: 616281 - DNA, 33 bp, Homo sapien
acccacaaggagtaagaatgggaggtggtgatt

SEQ ID NO: 616282 - DNA, 33 bp, Homo sapien
acccacaaggagtaagcatgggaggtggtgatt

SEQ ID NO: 616283 - DNA, 33 bp, Homo sapien
ggcccagggctgggtaagactgctcgatttgtg

SEQ ID NO: 616284 - DNA, 33 bp, Homo sapien
ggcccagggctgggtaggactgctcgatttgtg

SEQ ID NO: 616285 - DNA, 33 bp, Homo sapien
accttatggattagaaacaggtaattagtgtgt

SEQ ID NO: 616286 - DNA, 33 bp, Homo sapien
accttatggattagaagcaggtaattagtgtgt

SEQ ID NO: 616287 - DNA, 33 bp, Homo sapien
tcgccatggtctcgagcatgacaggttggtccc

SEQ ID NO: 616288 - DNA, 33 bp, Homo sapien
tcgccatggtctcgagtatgacaggttggtccc

SEQ ID NO: 616289 - DNA, 33 bp, Homo sapien
cctaattcaggccccaaatagctgaccgactaa

SEQ ID NO: 616290 - DNA, 33 bp, Homo sapien
cctaattcaggccccagatagctgaccgactaa

SEQ ID NO: 616291 - DNA, 33 bp, Homo sapien
acagcaccaaaccaagcactggctactgaatgc

SEQ ID NO: 616292 - DNA, 33 bp, Homo sapien
acagcaccaaaccaaggactggctactgaatgc

SEQ ID NO: 616293 - DNA, 33 bp, Homo sapien
tagcacaggatgaatacgtcaataggtgcaagg

SEQ ID NO: 616294 - DNA, 33 bp, Homo sapien
tagcacaggatgaataggtcaataggtgcaagg

SEQ ID NO: 616295 - DNA, 33 bp, Homo sapien
tgccatcctacaaaagcacctgcaaaatgttat

SEQ ID NO: 616296 - DNA, 33 bp, Homo sapien
tgccatcctacaaaagtacctgcaaaatgttat

SEQ ID NO: 616297 - DNA, 33 bp, Homo sapien
ttctccttattgcttccataacattttgcaggt

SEQ ID NO: 616298 - DNA, 33 bp, Homo sapien
ttctccttattgcttctataacattttgcaggt

SEQ ID NO: 616299 - DNA, 33 bp, Homo sapien
aaatggctttcatacccgggatttcatttgatc

SEQ ID NO: 616300 - DNA, 33 bp, Homo sapien
aaatggctttcatacctgggatttcatttgatc

SEQ ID NO: 616301 - DNA, 33 bp, Homo sapien
tctttgtgctaagacccgaatgaagggtgagct

SEQ ID NO: 616302 - DNA, 33 bp, Homo sapien
tctttgtgctaagacctgaatgaagggtgagct

SEQ ID NO: 616303 - DNA, 33 bp, Homo sapien
acttacactggccaacactcctggattccctgg

SEQ ID NO: 616304 - DNA, 33 bp, Homo sapien
acttacactggccaacgctcctggattccctgg

SEQ ID NO: 616305 - DNA, 33 bp, Homo sapien
tgctgcctttccaataaattgggctgtgagaaa

SEQ ID NO: 616306 - DNA, 33 bp, Homo sapien
tgctgcctttccaatacattgggctgtgagaaa

SEQ ID NO: 616307 - DNA, 33 bp, Homo sapien
aaaatccatgtatttccactaccaccagcttta

SEQ ID NO: 616308 - DNA, 33 bp, Homo sapien
aaaatccatgtatttctactaccaccagcttta

SEQ ID NO: 616309 - DNA, 33 bp, Homo sapien
tgtggttgatggataaattagccagttagaggc

SEQ ID NO: 616310 - DNA, 33 bp, Homo sapien
tgtggttgatggataagttagccagttagaggc

SEQ ID NO: 616311 - DNA, 33 bp, Homo sapien
aggcacttctcctctcaaagtttcaattagctc

SEQ ID NO: 616312 - DNA, 33 bp, Homo sapien
aggcacttctcctctcgaagtttcaattagctc

SEQ ID NO: 616313 - DNA, 33 bp, Homo sapien
ttgactctaaaaatgcaaagtttaatagtatct

SEQ ID NO: 616314 - DNA, 33 bp, Homo sapien
ttgactctaaaaatgcgaagtttaatagtatct

SEQ ID NO: 616315 - DNA, 33 bp, Homo sapien
gttattgagccagttaaatgagataatgtgtgt

SEQ ID NO: 616316 - DNA, 33 bp, Homo sapien
gttattgagccagttagatgagataatgtgtgt

SEQ ID NO: 616317 - DNA, 33 bp, Homo sapien
actcatctaatggtgccacctgattggtctgtg

SEQ ID NO: 616318 - DNA, 33 bp, Homo sapien
actcatctaatggtgctacctgattggtctgtg

SEQ ID NO: 616319 - DNA, 33 bp, Homo sapien
acataacaggcaaagaaagtgtcatgcctgtct

SEQ ID NO: 616320 - DNA, 33 bp, Homo sapien
acataacaggcaaagatagtgtcatgcctgtct

SEQ ID NO: 616321 - DNA, 33 bp, Homo sapien
cctggacagtgattctaaaccaacagctgaagc

SEQ ID NO: 616322 - DNA, 33 bp, Homo sapien
cctggacagtgattctgaaccaacagctgaagc

SEQ ID NO: 616323 - DNA, 33 bp, Homo sapien
tgtccctctttcacataaggaaactggaactca

SEQ ID NO: 616324 - DNA, 33 bp, Homo sapien
tgtccctctttcacatgaggaaactggaactca

SEQ ID NO: 616325 - DNA, 33 bp, Homo sapien
agaatgtgaactggccaagcgacatggctgttc

SEQ ID NO: 616326 - DNA, 33 bp, Homo sapien
agaatgtgaactggcccagcgacatggctgttc

SEQ ID NO: 616327 - DNA, 33 bp, Homo sapien
cagcagagagcaacaacgaggaaaggaaaggta

SEQ ID NO: 616328 - DNA, 33 bp, Homo sapien
cagcagagagcaacaaggaggaaaggaaaggta

SEQ ID NO: 616329 - DNA, 33 bp, Homo sapien
atcactcccggcaaggatcttaaacagatttgt

SEQ ID NO: 616330 - DNA, 33 bp, Homo sapien
atcactcccggcaaggttcttaaacagatttgt

SEQ ID NO: 616331 - DNA, 33 bp, Homo sapien
ggccacatctagagaaccacatttagaactcag

SEQ ID NO: 616332 - DNA, 33 bp, Homo sapien
ggccacatctagagaatcacatttagaactcag

SEQ ID NO: 616333 - DNA, 33 bp, Homo sapien
gtaagtggtagcgaacaatcctattatatgagg

SEQ ID NO: 616334 - DNA, 33 bp, Homo sapien
gtaagtggtagcgaaccatcctattatatgagg

SEQ ID NO: 616335 - DNA, 33 bp, Homo sapien
tactactgcttcataaccaaaaggcttcaagta

SEQ ID NO: 616336 - DNA, 33 bp, Homo sapien
tactactgcttcataatcaaaaggcttcaagta

SEQ ID NO: 616337 - DNA, 33 bp, Homo sapien
gttcttcaacgttggaagtgggatctggtgggc

SEQ ID NO: 616338 - DNA, 33 bp, Homo sapien
gttcttcaacgttggaggtgggatctggtgggc

SEQ ID NO: 616339 - DNA, 33 bp, Homo sapien
ctcaactgcacccacaacatccagaacagaccc

SEQ ID NO: 616340 - DNA, 33 bp, Homo sapien
ctcaactgcacccacagcatccagaacagaccc

SEQ ID NO: 616341 - DNA, 33 bp, Homo sapien
gtcacactgcatttcacgttctcttccttcctt

SEQ ID NO: 616342 - DNA, 33 bp, Homo sapien
gtcacactgcatttcatgttctcttccttcctt

SEQ ID NO: 616343 - DNA, 33 bp, Homo sapien
tgtgttatttgcctggacaaagttcttattcac

SEQ ID NO: 616344 - DNA, 33 bp, Homo sapien
tgtgttatttgcctggtcaaagttcttattcac

SEQ ID NO: 616345 - DNA, 33 bp, Homo sapien
tattatgcagccttcaaaacaactgtgctcaga

SEQ ID NO: 616346 - DNA, 33 bp, Homo sapien
tattatgcagccttcagaacaactgtgctcaga

SEQ ID NO: 616347 - DNA, 33 bp, Homo sapien
cttatcaaaactaatcgacttgtgcatttaata

SEQ ID NO: 616348 - DNA, 33 bp, Homo sapien
cttatcaaaactaatctacttgtgcatttaata

SEQ ID NO: 616349 - DNA, 33 bp, Homo sapien
ttgatagagagaaacagggatattaaatgcaca

SEQ ID NO: 616350 - DNA, 33 bp, Homo sapien
ttgatagagagaaacatggatattaaatgcaca

SEQ ID NO: 616351 - DNA, 33 bp, Homo sapien
actgtgatcagcaaaaaaagtatcacttttata

SEQ ID NO: 616352 - DNA, 33 bp, Homo sapien
actgtgatcagcaaaagaagtatcacttttata

SEQ ID NO: 616353 - DNA, 33 bp, Homo sapien
ggttattggtaccagaagtaaggcatttccggg

SEQ ID NO: 616354 - DNA, 33 bp, Homo sapien
ggttattggtaccagaggtaaggcatttccggg

SEQ ID NO: 616355 - DNA, 33 bp, Homo sapien
gggaggtaataatggtaaaaattcggctggatg

SEQ ID NO: 616356 - DNA, 33 bp, Homo sapien
gggaggtaataatggtcaaaattcggctggatg

SEQ ID NO: 616357 - DNA, 33 bp, Homo sapien
cttacttgttccacaaccatacttgtccgtatc

SEQ ID NO: 616358 - DNA, 33 bp, Homo sapien
cttacttgttccacaatcatacttgtccgtatc

SEQ ID NO: 616359 - DNA, 33 bp, Homo sapien
atagcaacagaccagaacagaaacttcattaga

SEQ ID NO: 616360 - DNA, 33 bp, Homo sapien
atagcaacagaccagagcagaaacttcattaga

SEQ ID NO: 616361 - DNA, 33 bp, Homo sapien
cattgaaggaagactacgtgaagaccaaggaat

SEQ ID NO: 616362 - DNA, 33 bp, Homo sapien
cattgaaggaagactatgtgaagaccaaggaat

SEQ ID NO: 616363 - DNA, 33 bp, Homo sapien
taaatgctcataaaaagatctggcaggccctct

SEQ ID NO: 616364 - DNA, 33 bp, Homo sapien
taaatgctcataaaaatatctggcaggccctct

SEQ ID NO: 616365 - DNA, 33 bp, Homo sapien
gtgtatataggtggaaattacaggcagcagtct

SEQ ID NO: 616366 - DNA, 33 bp, Homo sapien
gtgtatataggtggaacttacaggcagcagtct

SEQ ID NO: 616367 - DNA, 33 bp, Homo sapien
taacagtccatcctcaactgagtagccaaaggt

SEQ ID NO: 616368 - DNA, 33 bp, Homo sapien
taacagtccatcctcagctgagtagccaaaggt

SEQ ID NO: 616369 - DNA, 33 bp, Homo sapien
ttggttgtagaccagcaccaacaaatgacaaac

SEQ ID NO: 616370 - DNA, 33 bp, Homo sapien
ttggttgtagaccagcgccaacaaatgacaaac

SEQ ID NO: 616371 - DNA, 33 bp, Homo sapien
aaagtccaatccacctcaaatccatctcacgta

SEQ ID NO: 616372 - DNA, 33 bp, Homo sapien
aaagtccaatccaccttaaatccatctcacgta

SEQ ID NO: 616373 - DNA, 33 bp, Homo sapien
tgtgctgccacttaacacacttggaaagtccaa

SEQ ID NO: 616374 - DNA, 33 bp, Homo sapien
tgtgctgccacttaacgcacttggaaagtccaa

SEQ ID NO: 616375 - DNA, 33 bp, Homo sapien
aaccttccaaatgaatgaacccatataagtgag

SEQ ID NO: 616376 - DNA, 33 bp, Homo sapien
aaccttccaaatgaattaacccatataagtgag

SEQ ID NO: 616377 - DNA, 33 bp, Homo sapien
gaaagaagatctcaagccattgaggtgcctatg

SEQ ID NO: 616378 - DNA, 33 bp, Homo sapien
gaaagaagatctcaagtcattgaggtgcctatg

SEQ ID NO: 616379 - DNA, 33 bp, Homo sapien
gatatggagagctcacaacttcattaaagggta

SEQ ID NO: 616380 - DNA, 33 bp, Homo sapien
gatatggagagctcacgacttcattaaagggta

SEQ ID NO: 616381 - DNA, 33 bp, Homo sapien
ctctatacaagctaaccccaagaaggcaaggca

SEQ ID NO: 616382 - DNA, 33 bp, Homo sapien
ctctatacaagctaactccaagaaggcaaggca

SEQ ID NO: 616383 - DNA, 33 bp, Homo sapien
ttggtggtactctacacacatggctgcaaatag

SEQ ID NO: 616384 - DNA, 33 bp, Homo sapien
ttggtggtactctacatacatggctgcaaatag

SEQ ID NO: 616385 - DNA, 33 bp, Homo sapien
agaactacattaacaccgctctgtgctcggccc

SEQ ID NO: 616386 - DNA, 33 bp, Homo sapien
agaactacattaacactgctctgtgctcggccc

SEQ ID NO: 616387 - DNA, 33 bp, Homo sapien
cttctcttcctccataagggaatggaaatgtat

SEQ ID NO: 616388 - DNA, 33 bp, Homo sapien
cttctcttcctccatacgggaatggaaatgtat

SEQ ID NO: 616389 - DNA, 33 bp, Homo sapien
acatttctactgccaaaagtagcatggttactc

SEQ ID NO: 616390 - DNA, 33 bp, Homo sapien
acatttctactgccaagagtagcatggttactc

SEQ ID NO: 616391 - DNA, 33 bp, Homo sapien
acagtgctagatgccactgatcagacgtggctg

SEQ ID NO: 616392 - DNA, 33 bp, Homo sapien
acagtgctagatgccattgatcagacgtggctg

SEQ ID NO: 616393 - DNA, 33 bp, Homo sapien; identical to SEQ ID NO: 616391

SEQ ID NO: 616394 - DNA, 33 bp, Homo sapien; identical to SEQ ID NO: 616392

SEQ ID NO: 616395 - DNA, 33 bp, Homo sapien
gaagaaacagttgtcacatcaccatagaggtta

SEQ ID NO: 616396 - DNA, 33 bp, Homo sapien
gaagaaacagttgtcatatcaccatagaggtta

SEQ ID NO: 616397 - DNA, 33 bp, Homo sapien
tcagacactgtcctaaatgctttacgtgcacaa

SEQ ID NO: 616398 - DNA, 33 bp, Homo sapien
tcagacactgtcctaagtgctttacgtgcacaa

SEQ ID NO: 616399 - DNA, 33 bp, Homo sapien
tgggatcccttattgaaggatgcttgtgaattg

SEQ ID NO: 616400 - DNA, 33 bp, Homo sapien
tgggatcccttattgagggatgcttgtgaattg

SEQ ID NO: 616401 - DNA, 33 bp, Homo sapien
atttccaattccaaacaaccaacccacactgcc

SEQ ID NO: 616402 - DNA, 33 bp, Homo sapien
atttccaattccaaacgaccaacccacactgcc

SEQ ID NO: 616403 - DNA, 33 bp, Homo sapien
cctcaacacatggcaacagaatccttggcaacc

SEQ ID NO: 616404 - DNA, 33 bp, Homo sapien
cctcaacacatggcaatagaatccttggcaacc

SEQ ID NO: 616405 - DNA, 33 bp, Homo sapien
cccagggacacaaaaccagtaggtaacagattc

SEQ ID NO: 616406 - DNA, 33 bp, Homo sapien
cccagggacacaaaactagtaggtaacagattc

SEQ ID NO: 616407 - DNA, 33 bp, Homo sapien
aaaaattgctctgtggaactaggtaataaaaaa

SEQ ID NO: 616408 - DNA, 33 bp, Homo sapien
aaaaattgctctgtgggactaggtaataaaaaa

SEQ ID NO: 616409 - DNA, 33 bp, Homo sapien
gcagtttactaactcaacttatttcatagacat

SEQ ID NO: 616410 - DNA, 33 bp, Homo sapien
gcagtttactaactcagcttatttcatagacat

SEQ ID NO: 616411 - DNA, 33 bp, Homo sapien
aaattctgattttgacccaacgtttggatttta

SEQ ID NO: 616412 - DNA, 33 bp, Homo sapien
aaattctgattttgactcaacgtttggatttta

SEQ ID NO: 616413 - DNA, 33 bp, Homo sapien
ctaaagcagagaatacccacgtaatcagaggtt

SEQ ID NO: 616414 - DNA, 33 bp, Homo sapien
ctaaagcagagaatactcacgtaatcagaggtt

SEQ ID NO: 616415 - DNA, 33 bp, Homo sapien
atggcctagggtttaaataagagtggcatctac

SEQ ID NO: 616416 - DNA, 33 bp, Homo sapien
atggcctagggtttaagtaagagtggcatctac

SEQ ID NO: 616417 - DNA, 33 bp, Homo sapien
gggggctgttggtcacaactctttctattagtc

SEQ ID NO: 616418 - DNA, 33 bp, Homo sapien
gggggctgttggtcactactctttctattagtc

SEQ ID NO: 616419 - DNA, 33 bp, Homo sapien
tacacagttagacactgacaggtaactacaaga

SEQ ID NO: 616420 - DNA, 33 bp, Homo sapien
tacacagttagacacttacaggtaactacaaga

SEQ ID NO: 616421 - DNA, 33 bp, Homo sapien
tcaatgtggtgcaatgccaattgagaagtgagg

SEQ ID NO: 616422 - DNA, 33 bp, Homo sapien
tcaatgtggtgcaatgtcaattgagaagtgagg

SEQ ID NO: 616423 - DNA, 33 bp, Homo sapien
tcgcctgtagaggaacactgtggagacagcccg

SEQ ID NO: 616424 - DNA, 33 bp, Homo sapien
tcgcctgtagaggaacgctgtggagacagcccg

SEQ ID NO: 616425 - DNA, 33 bp, Homo sapien
gatcttaatcaatcaacctcattaatccaatcc

SEQ ID NO: 616426 - DNA, 33 bp, Homo sapien
gatcttaatcaatcaatctcattaatccaatcc

SEQ ID NO: 616427 - DNA, 33 bp, Homo sapien
gtgttccagggaacagactctacctcaaaggaa

SEQ ID NO: 616428 - DNA, 33 bp, Homo sapien
gtgttccagggaacaggctctacctcaaaggaa

SEQ ID NO: 616429 - DNA, 33 bp, Homo sapien
gagcaaggaagcaatacaggttttggagtccag

SEQ ID NO: 616430 - DNA, 33 bp, Homo sapien
gagcaaggaagcaatataggttttggagtccag

SEQ ID NO: 616431 - DNA, 33 bp, Homo sapien
atcaaaggctcacgtacgattcatgaaaaaaaa

SEQ ID NO: 616432 - DNA, 33 bp, Homo sapien
atcaaaggctcacgtatgattcatgaaaaaaaa

SEQ ID NO: 616433 - DNA, 33 bp, Homo sapien
tgtgacacattgtgaaatatcaaaaaggtgtca

SEQ ID NO: 616434 - DNA, 33 bp, Homo sapien
tgtgacacattgtgaagtatcaaaaaggtgtca

SEQ ID NO: 616435 - DNA, 33 bp, Homo sapien
cagaagcatgctatcacagttatttgcaacaat

SEQ ID NO: 616436 - DNA, 33 bp, Homo sapien
cagaagcatgctatcatagttatttgcaacaat

SEQ ID NO: 616437 - DNA, 33 bp, Homo sapien
tttagaacatagcccacaattaaccactcattt

SEQ ID NO: 616438 - DNA, 33 bp, Homo sapien
tttagaacatagcccataattaaccactcattt

SEQ ID NO: 616439 - DNA, 33 bp, Homo sapien
cctcctttcctcagaactctaggtcgtcattgc

SEQ ID NO: 616440 - DNA, 33 bp, Homo sapien
cctcctttcctcagaattctaggtcgtcattgc

SEQ ID NO: 616441 - DNA, 33 bp, Homo sapien
acaagcttggtgtaaacagaagctagacaatat

SEQ ID NO: 616442 - DNA, 33 bp, Homo sapien
acaagcttggtgtaaatagaagctagacaatat

SEQ ID NO: 616443 - DNA, 33 bp, Homo sapien
gatggagtttataggaaacatgaagggctctgg

SEQ ID NO: 616444 - DNA, 33 bp, Homo sapien
gatggagtttataggagacatgaagggctctgg

SEQ ID NO: 616445 - DNA, 33 bp, Homo sapien
aaccacagatgaccataatcctacctttcatat

SEQ ID NO: 616446 - DNA, 33 bp, Homo sapien
aaccacagatgaccatcatcctacctttcatat

SEQ ID NO: 616447 - DNA, 33 bp, Homo sapien
cttggcctaggctatcgctactggtccctttct

SEQ ID NO: 616448 - DNA, 33 bp, Homo sapien
cttggcctaggctatctctactggtccctttct

SEQ ID NO: 616449 - DNA, 33 bp, Homo sapien
gagactcgagcttggaacacaaaagcctcagcc

SEQ ID NO: 616450 - DNA, 33 bp, Homo sapien
gagactcgagcttggagcacaaaagcctcagcc

SEQ ID NO: 616451 - DNA, 33 bp, Homo sapien
ctatccagctaccccacggtcctactgactttc

SEQ ID NO: 616452 - DNA, 33 bp, Homo sapien
ctatccagctaccccatggtcctactgactttc

SEQ ID NO: 616453 - DNA, 33 bp, Homo sapien
tggtgacagagcaagaaaaaacaagtgacagag

SEQ ID NO: 616454 - DNA, 33 bp, Homo sapien
tggtgacagagcaagacaaaacaagtgacagag

SEQ ID NO: 616455 - DNA, 33 bp, Homo sapien
tgatttttcccaataaatacacatgatacaaaa

SEQ ID NO: 616456 - DNA, 33 bp, Homo sapien
tgatttttcccaataagtacacatgatacaaaa

SEQ ID NO: 616457 - DNA, 33 bp, Homo sapien
tcacaccccaaaaccaatggagatgtcctacca

SEQ ID NO: 616458 - DNA, 33 bp, Homo sapien
tcacaccccaaaaccagtggagatgtcctacca

SEQ ID NO: 616459 - DNA, 33 bp, Homo sapien
tcttgttttcaattcaactgatgctctaacttt

SEQ ID NO: 616460 - DNA, 33 bp, Homo sapien
tcttgttttcaattcacctgatgctctaacttt

SEQ ID NO: 616461 - DNA, 33 bp, Homo sapien
gcctggcctatgcttagctttttaatagggttt

SEQ ID NO: 616462 - DNA, 33 bp, Homo sapien
gcctggcctatgcttatctttttaatagggttt

SEQ ID NO: 616463 - DNA, 33 bp, Homo sapien
catgggcaagacaagcaccaacagaagttttcc

SEQ ID NO: 616464 - DNA, 33 bp, Homo sapien
catgggcaagacaagcgccaacagaagttttcc

SEQ ID NO: 616465 - DNA, 33 bp, Homo sapien
ttggaccccaagaccactcaatgtaaacatttt

SEQ ID NO: 616466 - DNA, 33 bp, Homo sapien
ttggaccccaagaccattcaatgtaaacatttt

SEQ ID NO: 616467 - DNA, 33 bp, Homo sapien
atgggacctaattagaaacttctgtgcagcaaa

SEQ ID NO: 616468 - DNA, 33 bp, Homo sapien
atgggacctaattagacacttctgtgcagcaaa

SEQ ID NO: 616469 - DNA, 33 bp, Homo sapien
gtctctcctcctgatacggagttaatcttcatg

SEQ ID NO: 616470 - DNA, 33 bp, Homo sapien
gtctctcctcctgatatggagttaatcttcatg

SEQ ID NO: 616471 - DNA, 33 bp, Homo sapien
ggtacttgtggaacggcagattcaggcagaggc

SEQ ID NO: 616472 - DNA, 33 bp, Homo sapien
ggtacttgtggaacggtagattcaggcagaggc

SEQ ID NO: 616473 - DNA, 33 bp, Homo sapien
aatcactgaagtaaaagttcattgacctaggca

SEQ ID NO: 616474 - DNA, 33 bp, Homo sapien
aatcactgaagtaaaatttcattgacctaggca

SEQ ID NO: 616475 - DNA, 33 bp, Homo sapien
cttcagaaagaataaacgcaataagtttatttc

SEQ ID NO: 616476 - DNA, 33 bp, Homo sapien
cttcagaaagaataaatgcaataagtttatttc

SEQ ID NO: 616477 - DNA, 33 bp, Homo sapien
tgcttgtgagtatagaactaatttgtgagtact

SEQ ID NO: 616478 - DNA, 33 bp, Homo sapien
tgcttgtgagtatagagctaatttgtgagtact

SEQ ID NO: 616479 - DNA, 33 bp, Homo sapien
accaaatgcaagtacaaaaagagttgtaacact

SEQ ID NO: 616480 - DNA, 33 bp, Homo sapien
accaaatgcaagtacagaaagagttgtaacact

SEQ ID NO: 616481 - DNA, 33 bp, Homo sapien
ataacccaagaggactcacaaggatggtgttta

SEQ ID NO: 616482 - DNA, 33 bp, Homo sapien
ataacccaagaggactgacaaggatggtgttta

SEQ ID NO: 616483 - DNA, 33 bp, Homo sapien
gacgtgtagtagttaacgcactgggcttggtaa

SEQ ID NO: 616484 - DNA, 33 bp, Homo sapien
gacgtgtagtagttaatgcactgggcttggtaa

SEQ ID NO: 616485 - DNA, 33 bp, Homo sapien
aaatgcttgcttccacaacctaaatgtccatca

SEQ ID NO: 616486 - DNA, 33 bp, Homo sapien
aaatgcttgcttccacgacctaaatgtccatca

SEQ ID NO: 616487 - DNA, 33 bp, Homo sapien
ctcagtagaggttgtgaattaagtactagggat

SEQ ID NO: 616488 - DNA, 33 bp, Homo sapien
ctcagtagaggttgtggattaagtactagggat

SEQ ID NO: 616489 - DNA, 33 bp, Homo sapien
gctcctgggcccgttacgctggcctggaagagt

SEQ ID NO: 616490 - DNA, 33 bp, Homo sapien
gctcctgggcccgttatgctggcctggaagagt

SEQ ID NO: 616491 - DNA, 33 bp, Homo sapien
acatagtatactctcaactaagtaaaggaaaat

SEQ ID NO: 616492 - DNA, 33 bp, Homo sapien
acatagtatactctcatctaagtaaaggaaaat

SEQ ID NO: 616493 - DNA, 33 bp, Homo sapien
gagcctggcacaactcagaaataggtactgcca

SEQ ID NO: 616494 - DNA, 33 bp, Homo sapien
gagcctggcacaactctgaaataggtactgcca

SEQ ID NO: 616495 - DNA, 33 bp, Homo sapien
aaggcagccctctccaagttcgcacgtgctgtt

SEQ ID NO: 616496 - DNA, 33 bp, Homo sapien
aaggcagccctctccaggttcgcacgtgctgtt

SEQ ID NO: 616497 - DNA, 33 bp, Homo sapien
tggactcattctctcacgcttgacaccaggaga

SEQ ID NO: 616498 - DNA, 33 bp, Homo sapien
tggactcattctctcatgcttgacaccaggaga

SEQ ID NO: 616499 - DNA, 33 bp, Homo sapien
gaccaacaggcatccaagtcagaagaagtctgg

SEQ ID NO: 616500 - DNA, 33 bp, Homo sapien
gaccaacaggcatccacgtcagaagaagtctgg

SEQ ID NO: 616501 - DNA, 33 bp, Homo sapien
gtcagccattttgccaccatcagggaagctggc

SEQ ID NO: 616502 - DNA, 33 bp, Homo sapien
gtcagccattttgccatcatcagggaagctggc

SEQ ID NO: 616503 - DNA, 33 bp, Homo sapien
gagtattcttgtacccccttccagaaaggacta

SEQ ID NO: 616504 - DNA, 33 bp, Homo sapien
gagtattcttgtacccgcttccagaaaggacta

SEQ ID NO: 616505 - DNA, 33 bp, Homo sapien
gtagtgggagagcagacggggtggagcttggat

SEQ ID NO: 616506 - DNA, 33 bp, Homo sapien
gtagtgggagagcagagggggtggagcttggat

SEQ ID NO: 616507 - DNA, 33 bp, Homo sapien
ggacacactctcatgacgcaatctactgtaggt

SEQ ID NO: 616508 - DNA, 33 bp, Homo sapien
ggacacactctcatgatgcaatctactgtaggt

SEQ ID NO: 616509 - DNA, 33 bp, Homo sapien
aaaggtggaagtccgccgcaaggccctgttagc

SEQ ID NO: 616510 - DNA, 33 bp, Homo sapien
aaaggtggaagtccgctgcaaggccctgttagc

SEQ ID NO: 616511 - DNA, 33 bp, Homo sapien
aaaatgttagacatccaagtggaggtatcaaat

SEQ ID NO: 616512 - DNA, 33 bp, Homo sapien
aaaatgttagacatccgagtggaggtatcaaat

SEQ ID NO: 616513 - DNA, 33 bp, Homo sapien
cagtggaaacagtacacctatggagtcagaggg

SEQ ID NO: 616514 - DNA, 33 bp, Homo sapien
cagtggaaacagtacagctatggagtcagaggg

SEQ ID NO: 616515 - DNA, 33 bp, Homo sapien
tgggaaatgcatccaaattaacgtgtgttttaa

SEQ ID NO: 616516 - DNA, 33 bp, Homo sapien
tgggaaatgcatccaacttaacgtgtgttttaa

SEQ ID NO: 616517 - DNA, 33 bp, Homo sapien
caatatctaagagacaataagaatggccaaatg

SEQ ID NO: 616518 - DNA, 33 bp, Homo sapien
caatatctaagagacagtaagaatggccaaatg

SEQ ID NO: 616519 - DNA, 33 bp, Homo sapien
gttctgcattgatcacaagggtataggtgacat

SEQ ID NO: 616520 - DNA, 33 bp, Homo sapien
gttctgcattgatcacgagggtataggtgacat

SEQ ID NO: 616521 - DNA, 33 bp, Homo sapien
ctgccgtggaggaaagaagagtatggcattcgg

SEQ ID NO: 616522 - DNA, 33 bp, Homo sapien
ctgccgtggaggaaaggagagtatggcattcgg

SEQ ID NO: 616523 - DNA, 33 bp, Homo sapien
tcgatgtcaccactacggagatgccttctctca

SEQ ID NO: 616524 - DNA, 33 bp, Homo sapien
tcgatgtcaccactactgagatgccttctctca

SEQ ID NO: 616525 - DNA, 33 bp, Homo sapien
gttatttatttgctacactgatgactttattca

SEQ ID NO: 616526 - DNA, 33 bp, Homo sapien
gttatttatttgctactctgatgactttattca

SEQ ID NO: 616527 - DNA, 33 bp, Homo sapien
ccctcagccagtaagaagaggaaccagaatgtg

SEQ ID NO: 616528 - DNA, 33 bp, Homo sapien
ccctcagccagtaagaggaggaaccagaatgtg

SEQ ID NO: 616529 - DNA, 33 bp, Homo sapien
agtggaacatggaaaacgatggggaaagcccca

SEQ ID NO: 616530 - DNA, 33 bp, Homo sapien
agtggaacatggaaaatgatggggaaagcccca

SEQ ID NO: 616531 - DNA, 33 bp, Homo sapien
cccataaggcctcaacgctgggacagtgggaac

SEQ ID NO: 616532 - DNA, 33 bp, Homo sapien
cccataaggcctcaactctgggacagtgggaac

SEQ ID NO: 616533 - DNA, 33 bp, Homo sapien
tcaggtagatgaatgaagagattaacaatgggt

SEQ ID NO: 616534 - DNA, 33 bp, Homo sapien
tcaggtagatgaatgacgagattaacaatgggt

SEQ ID NO: 616535 - DNA, 33 bp, Homo sapien
tccagtgttttccaaacgtgatggaccacaaaa

SEQ ID NO: 616536 - DNA, 33 bp, Homo sapien
tccagtgttttccaaatgtgatggaccacaaaa

SEQ ID NO: 616537 - DNA, 33 bp, Homo sapien
ggcagggccttgagggcattcgtgaaaatatat

SEQ ID NO: 616538 - DNA, 33 bp, Homo sapien
ggcagggccttgaggggattcgtgaaaatatat

SEQ ID NO: 616539 - DNA, 33 bp, Homo sapien
tggcaagcaaacaggcaattacagtgcagggga

SEQ ID NO: 616540 - DNA, 33 bp, Homo sapien
tggcaagcaaacaggcgattacagtgcagggga

SEQ ID NO: 616541 - DNA, 33 bp, Homo sapien
cagaatgacacctaccaggcataggaacgttaa

SEQ ID NO: 616542 - DNA, 33 bp, Homo sapien
cagaatgacacctaccgggcataggaacgttaa

SEQ ID NO: 616543 - DNA, 33 bp, Homo sapien
gtcccatcaaacgttcccttttcagtgttgtct

SEQ ID NO: 616544 - DNA, 33 bp, Homo sapien
gtcccatcaaacgttctcttttcagtgttgtct

SEQ ID NO: 616545 - DNA, 33 bp, Homo sapien
tgaatggcatttatatcaggctttagactaggt

SEQ ID NO: 616546 - DNA, 33 bp, Homo sapien
tgaatggcatttatatgaggctttagactaggt

SEQ ID NO: 616547 - DNA, 33 bp, Homo sapien
ttgaaagtctaaccaaatgtctcaagaagcatg

SEQ ID NO: 616548 - DNA, 33 bp, Homo sapien
ttgaaagtctaaccaagtgtctcaagaagcatg

SEQ ID NO: 616549 - DNA, 33 bp, Homo sapien
ctagaactgggtgaccaacagctatgaaacaaa

SEQ ID NO: 616550 - DNA, 33 bp, Homo sapien
ctagaactgggtgaccgacagctatgaaacaaa

SEQ ID NO: 616551 - DNA, 33 bp, Homo sapien
cagtgttggcttcctcactgagattgggagtct

SEQ ID NO: 616552 - DNA, 33 bp, Homo sapien
cagtgttggcttcctcgctgagattgggagtct

SEQ ID NO: 616553 - DNA, 33 bp, Homo sapien
gggcctctgtgctgaaaccctacaacacacctt

SEQ ID NO: 616554 - DNA, 33 bp, Homo sapien
gggcctctgtgctgaagccctacaacacacctt

SEQ ID NO: 616555 - DNA, 33 bp, Homo sapien
ttctcgcagtcaagcacatgaagtagaactatt

SEQ ID NO: 616556 - DNA, 33 bp, Homo sapien
ttctcgcagtcaagcatatgaagtagaactatt

SEQ ID NO: 616557 - DNA, 33 bp, Homo sapien
tggtaggcactcattaaaagtctgttgaatggg

SEQ ID NO: 616558 - DNA, 33 bp, Homo sapien
tggtaggcactcattagaagtctgttgaatggg

SEQ ID NO: 616559 - DNA, 33 bp, Homo sapien
aagtgcatcatctaggcacaaaggcaacacaag

SEQ ID NO: 616560 - DNA, 33 bp, Homo sapien
aagtgcatcatctaggtacaaaggcaacacaag

SEQ ID NO: 616561 - DNA, 33 bp, Homo sapien
ccagtctcctctttccacaggatcagctttcac

SEQ ID NO: 616562 - DNA, 33 bp, Homo sapien
ccagtctcctctttccgcaggatcagctttcac

SEQ ID NO: 616563 - DNA, 33 bp, Homo sapien
actgagccactccatggcagagctggtataatc

SEQ ID NO: 616564 - DNA, 33 bp, Homo sapien
actgagccactccatgtcagagctggtataatc

SEQ ID NO: 616565 - DNA, 33 bp, Homo sapien
gtctgtaaaactgccactagagatgtaaggaat

SEQ ID NO: 616566 - DNA, 33 bp, Homo sapien
gtctgtaaaactgccattagagatgtaaggaat

SEQ ID NO: 616567 - DNA, 33 bp, Homo sapien
actgtcagctgagatgccaagtaccaaagcgct

SEQ ID NO: 616568 - DNA, 33 bp, Homo sapien
actgtcagctgagatgtcaagtaccaaagcgct

SEQ ID NO: 616569 - DNA, 33 bp, Homo sapien
aagttctagaaatggagagtggtaatggttgta

SEQ ID NO: 616570 - DNA, 33 bp, Homo sapien
aagttctagaaatggatagtggtaatggttgta

SEQ ID NO: 616571 - DNA, 33 bp, Homo sapien
ctcacttagatgatgacagagggtttatccacc

SEQ ID NO: 616572 - DNA, 33 bp, Homo sapien
ctcacttagatgatgagagagggtttatccacc

SEQ ID NO: 616573 - DNA, 33 bp, Homo sapien
tcttaggacaccaaaactgagttattagaccag

SEQ ID NO: 616574 - DNA, 33 bp, Homo sapien
tcttaggacaccaaaattgagttattagaccag

SEQ ID NO: 616575 - DNA, 33 bp, Homo sapien
gttggcaacaaatacacgctggagttggcaagt

SEQ ID NO: 616576 - DNA, 33 bp, Homo sapien
gttggcaacaaatacatgctggagttggcaagt

SEQ ID NO: 616577 - DNA, 33 bp, Homo sapien
ctcaaaaagtagacccaatagtgaatacaaaga

SEQ ID NO: 616578 - DNA, 33 bp, Homo sapien
ctcaaaaagtagacccgatagtgaatacaaaga

SEQ ID NO: 616579 - DNA, 33 bp, Homo sapien
ttgggataggatcaaactgggtttatgttagga

SEQ ID NO: 616580 - DNA, 33 bp, Homo sapien
ttgggataggatcaaattgggtttatgttagga

SEQ ID NO: 616581 - DNA, 33 bp, Homo sapien
gattaagttttatcacaaacggataccagagtg

SEQ ID NO: 616582 - DNA, 33 bp, Homo sapien
gattaagttttatcacgaacggataccagagtg

SEQ ID NO: 616583 - DNA, 33 bp, Homo sapien
tagttgatgtacaataaacttcatgtacttaaa

SEQ ID NO: 616584 - DNA, 33 bp, Homo sapien
tagttgatgtacaatacacttcatgtacttaaa

SEQ ID NO: 616585 - DNA, 33 bp, Homo sapien
caattttagcagaaatcagtcaggttgttctgg

SEQ ID NO: 616586 - DNA, 33 bp, Homo sapien
caattttagcagaaattagtcaggttgttctgg

SEQ ID NO: 616587 - DNA, 33 bp, Homo sapien
ttacaaaaagctgtcacgttcctgatccactgg

SEQ ID NO: 616588 - DNA, 33 bp, Homo sapien
ttacaaaaagctgtcatgttcctgatccactgg

SEQ ID NO: 616589 - DNA, 33 bp, Homo sapien
acatgtgcaggcctcaaaaccatcttgtggatg

SEQ ID NO: 616590 - DNA, 33 bp, Homo sapien
acatgtgcaggcctcagaaccatcttgtggatg

SEQ ID NO: 616591 - DNA, 33 bp, Homo sapien
aagagacgagcaaagaaaaataaactgattcca

SEQ ID NO: 616592 - DNA, 33 bp, Homo sapien
aagagacgagcaaagagaaataaactgattcca

SEQ ID NO: 616593 - DNA, 33 bp, Homo sapien
agcaaacccataactaaaggactgtctgacagc

SEQ ID NO: 616594 - DNA, 33 bp, Homo sapien
agcaaacccataactagaggactgtctgacagc

SEQ ID NO: 616595 - DNA, 33 bp, Homo sapien
taattgcaactatggaaaaatgtatgtttgagg

SEQ ID NO: 616596 - DNA, 33 bp, Homo sapien
taattgcaactatggagaaatgtatgtttgagg

SEQ ID NO: 616597 - DNA, 33 bp, Homo sapien
ttctccaagtgtttaacagaacttggcactggt

SEQ ID NO: 616598 - DNA, 33 bp, Homo sapien
ttctccaagtgtttaagagaacttggcactggt

SEQ ID NO: 616599 - DNA, 33 bp, Homo sapien
aatgaatgattctctaactaaaggactgatggc

SEQ ID NO: 616600 - DNA, 33 bp, Homo sapien
aatgaatgattctctagctaaaggactgatggc

SEQ ID NO: 616601 - DNA, 33 bp, Homo sapien
gaccaaatgattcccaagatgagctagtcagct

SEQ ID NO: 616602 - DNA, 33 bp, Homo sapien
gaccaaatgattcccaggatgagctagtcagct

SEQ ID NO: 616603 - DNA, 33 bp, Homo sapien
aatgctggtatttcaaaagactgtaagcatcat

SEQ ID NO: 616604 - DNA, 33 bp, Homo sapien
aatgctggtatttcaacagactgtaagcatcat

SEQ ID NO: 616605 - DNA, 33 bp, Homo sapien
tgtctgctattaaatcaatgtgtcttttaaact

SEQ ID NO: 616606 - DNA, 33 bp, Homo sapien
tgtctgctattaaatccatgtgtcttttaaact

SEQ ID NO: 616607 - DNA, 33 bp, Homo sapien
acttagataaatgtaacgaacaattgctttttt

SEQ ID NO: 616608 - DNA, 33 bp, Homo sapien
acttagataaatgtaatgaacaattgctttttt

SEQ ID NO: 616609 - DNA, 33 bp, Homo sapien
aacctcaggagttggacatctccacaaaagcac

SEQ ID NO: 616610 - DNA, 33 bp, Homo sapien
aacctcaggagttggatatctccacaaaagcac

SEQ ID NO: 616611 - DNA, 33 bp, Homo sapien
gggcagcactcgactcgaaaggaatggctggga

SEQ ID NO: 616612 - DNA, 33 bp, Homo sapien
gggcagcactcgactctaaaggaatggctggga

SEQ ID NO: 616613 - DNA, 33 bp, Homo sapien
cagcccacttcctacactggatcagagccagcg

SEQ ID NO: 616614 - DNA, 33 bp, Homo sapien
cagcccacttcctacattggatcagagccagcg

SEQ ID NO: 616615 - DNA, 33 bp, Homo sapien
tgtgtgttttcattcaatcattcacttagcata

SEQ ID NO: 616616 - DNA, 33 bp, Homo sapien
tgtgtgttttcattcagtcattcacttagcata

SEQ ID NO: 616617 - DNA, 33 bp, Homo sapien
ttttttttcacctagcaaagaccttggggactt

SEQ ID NO: 616618 - DNA, 33 bp, Homo sapien
ttttttttcacctagcgaagaccttggggactt

SEQ ID NO: 616619 - DNA, 33 bp, Homo sapien
ctgcagtatgagtgctcaaaggataaatgtagg

SEQ ID NO: 616620 - DNA, 33 bp, Homo sapien
ctgcagtatgagtgctgaaaggataaatgtagg

SEQ ID NO: 616621 - DNA, 33 bp, Homo sapien
ccttggtcacttcccaaatcccttcggattcct

SEQ ID NO: 616622 - DNA, 33 bp, Homo sapien
ccttggtcacttcccagatcccttcggattcct

SEQ ID NO: 616623 - DNA, 33 bp, Homo sapien
cagtgggcagggtctgcatgtaggcatgttctg

SEQ ID NO: 616624 - DNA, 33 bp, Homo sapien
cagtgggcagggtctggatgtaggcatgttctg

SEQ ID NO: 616625 - DNA, 33 bp, Homo sapien
tctcatcacagtaaaacggggatgagggtgata

SEQ ID NO: 616626 - DNA, 33 bp, Homo sapien
tctcatcacagtaaaatggggatgagggtgata

SEQ ID NO: 616627 - DNA, 33 bp, Homo sapien
atactgacaatatcggaaggtagaaaagtagaa

SEQ ID NO: 616628 - DNA, 33 bp, Homo sapien
atactgacaatatcgggaggtagaaaagtagaa

SEQ ID NO: 616629 - DNA, 33 bp, Homo sapien
aaatctgaagtggtccaaaaggatttgggatag

SEQ ID NO: 616630 - DNA, 33 bp, Homo sapien
aaatctgaagtggtccgaaaggatttgggatag

SEQ ID NO: 616631 - DNA, 33 bp, Homo sapien
tcctaccaaaatccttcaagataattgatgagt

SEQ ID NO: 616632 - DNA, 33 bp, Homo sapien
tcctaccaaaatcctttaagataattgatgagt

SEQ ID NO: 616633 - DNA, 33 bp, Homo sapien
cagagatggagggatggaggggatcaacttatc

SEQ ID NO: 616634 - DNA, 33 bp, Homo sapien
cagagatggagggatgtaggggatcaacttatc

SEQ ID NO: 616635 - DNA, 33 bp, Homo sapien
cctacctctctgaccactctttcctggcccttt

SEQ ID NO: 616636 - DNA, 33 bp, Homo sapien
cctacctctctgaccagtctttcctggcccttt

SEQ ID NO: 616637 - DNA, 33 bp, Homo sapien
gtgtgaggagtcagacagaaagaatgatctact

SEQ ID NO: 616638 - DNA, 33 bp, Homo sapien
gtgtgaggagtcagacggaaagaatgatctact

SEQ ID NO: 616639 - DNA, 33 bp, Homo sapien
tgctgccaaagtgagcacttaaccagatcttat

SEQ ID NO: 616640 - DNA, 33 bp, Homo sapien
tgctgccaaagtgagcccttaaccagatcttat

SEQ ID NO: 616641 - DNA, 33 bp, Homo sapien
acctccagaaccatgacgaacgaagttagttct

SEQ ID NO: 616642 - DNA, 33 bp, Homo sapien
acctccagaaccatgatgaacgaagttagttct

SEQ ID NO: 616643 - DNA, 33 bp, Homo sapien
ctttttcttgtcctaccgcattggctaacacct

SEQ ID NO: 616644 - DNA, 33 bp, Homo sapien
ctttttcttgtcctactgcattggctaacacct

SEQ ID NO: 616645 - DNA, 33 bp, Homo sapien
atttaaccttcaataaacctgtcagatgccagg

SEQ ID NO: 616646 - DNA, 33 bp, Homo sapien
atttaaccttcaataaccctgtcagatgccagg

SEQ ID NO: 616647 - DNA, 33 bp, Homo sapien
acttactcctcagtgaaattccaagcagcaccg

SEQ ID NO: 616648 - DNA, 33 bp, Homo sapien
acttactcctcagtgatattccaagcagcaccg

SEQ ID NO: 616649 - DNA, 33 bp, Homo sapien
gatttgcctattctgaaaaaattaaaaatggaa

SEQ ID NO: 616650 - DNA, 33 bp, Homo sapien
gatttgcctattctgacaaaattaaaaatggaa

SEQ ID NO: 616651 - DNA, 33 bp, Homo sapien
taagaagtgagaagttctgcctgtggaggagtg

SEQ ID NO: 616652 - DNA, 33 bp, Homo sapien
taagaagtgagaagttttgcctgtggaggagtg

SEQ ID NO: 616653 - DNA, 33 bp, Homo sapien
agtgcacacgtggaacaccaggcttggggctgt

SEQ ID NO: 616654 - DNA, 33 bp, Homo sapien
agtgcacacgtggaacgccaggcttggggctgt

SEQ ID NO: 616655 - DNA, 33 bp, Homo sapien
ggaacgcaggagagcacggatgagagaagggag

SEQ ID NO: 616656 - DNA, 33 bp, Homo sapien
ggaacgcaggagagcatggatgagagaagggag

SEQ ID NO: 616657 - DNA, 33 bp, Homo sapien
gtattttccaaaaccaagttgattatttgaggg

SEQ ID NO: 616658 - DNA, 33 bp, Homo sapien
gtattttccaaaaccaggttgattatttgaggg

SEQ ID NO: 616659 - DNA, 33 bp, Homo sapien
caagcaccatgtaagaagtccggcaacccaaat

SEQ ID NO: 616660 - DNA, 33 bp, Homo sapien
caagcaccatgtaagacgtccggcaacccaaat

SEQ ID NO: 616661 - DNA, 33 bp, Homo sapien
tgggttagccttccgacgtgaagatggcctccc

SEQ ID NO: 616662 - DNA, 33 bp, Homo sapien
tgggttagccttccgatgtgaagatggcctccc

SEQ ID NO: 616663 - DNA, 33 bp, Homo sapien
agtcgaactacaggtgaattttcttaatctgat

SEQ ID NO: 616664 - DNA, 33 bp, Homo sapien
agtcgaactacaggtggattttcttaatctgat

SEQ ID NO: 616665 - DNA, 33 bp, Homo sapien
atcacaagcattattaaccgcctgcctgggtca

SEQ ID NO: 616666 - DNA, 33 bp, Homo sapien
atcacaagcattattacccgcctgcctgggtca

SEQ ID NO: 616667 - DNA, 33 bp, Homo sapien
caggctacttagtaaacggctgatgggaaatgg

SEQ ID NO: 616668 - DNA, 33 bp, Homo sapien
caggctacttagtaaatggctgatgggaaatgg

SEQ ID NO: 616669 - DNA, 33 bp, Homo sapien
cgagccttgactcttacgttccacaacttaatt

SEQ ID NO: 616670 - DNA, 33 bp, Homo sapien
cgagccttgactcttatgttccacaacttaatt

SEQ ID NO: 616671 - DNA, 33 bp, Homo sapien
tggggttgctggtttaaaacaaacgccagtcat

SEQ ID NO: 616672 - DNA, 33 bp, Homo sapien
tggggttgctggtttagaacaaacgccagtcat

SEQ ID NO: 616673 - DNA, 33 bp, Homo sapien
aggaaaatcagtctgcactgaacaggatggaat

SEQ ID NO: 616674 - DNA, 33 bp, Homo sapien
aggaaaatcagtctgcgctgaacaggatggaat

SEQ ID NO: 616675 - DNA, 33 bp, Homo sapien
aaaaagagcttgctaaaccaactaattatcagt

SEQ ID NO: 616676 - DNA, 33 bp, Homo sapien
aaaaagagcttgctaagccaactaattatcagt

SEQ ID NO: 616677 - DNA, 33 bp, Homo sapien
cagactgaagtttagccaaatctatgaaaaaag

SEQ ID NO: 616678 - DNA, 33 bp, Homo sapien
cagactgaagtttagcgaaatctatgaaaaaag

SEQ ID NO: 616679 - DNA, 33 bp, Homo sapien
acatggctagtccaaactgaaatgcactgtaag

SEQ ID NO: 616680 - DNA, 33 bp, Homo sapien
acatggctagtccaaattgaaatgcactgtaag

SEQ ID NO: 616681 - DNA, 33 bp, Homo sapien
tatctggaaattgagacgagatggccctccaag

SEQ ID NO: 616682 - DNA, 33 bp, Homo sapien
tatctggaaattgagatgagatggccctccaag

SEQ ID NO: 616683 - DNA, 33 bp, Homo sapien
ccagctgctcagggacacaaatgtacttcacac

SEQ ID NO: 616684 - DNA, 33 bp, Homo sapien
ccagctgctcagggacccaaatgtacttcacac

SEQ ID NO: 616685 - DNA, 33 bp, Homo sapien
tccacctccgaaacccagatgagaaaaggaatc

SEQ ID NO: 616686 - DNA, 33 bp, Homo sapien
tccacctccgaaacccggatgagaaaaggaatc

SEQ ID NO: 616687 - DNA, 33 bp, Homo sapien
taataacaccactccaatctacagggtcccaat

SEQ ID NO: 616688 - DNA, 33 bp, Homo sapien
taataacaccactccattctacagggtcccaat

SEQ ID NO: 616689 - DNA, 33 bp, Homo sapien
catcaaaatgaaaccaataatgcctcctcagga

SEQ ID NO: 616690 - DNA, 33 bp, Homo sapien
catcaaaatgaaaccagtaatgcctcctcagga

SEQ ID NO: 616691 - DNA, 33 bp, Homo sapien
ttgatcatttgacactcagacagaggggagctt

SEQ ID NO: 616692 - DNA, 33 bp, Homo sapien
ttgatcatttgacactgagacagaggggagctt

SEQ ID NO: 616693 - DNA, 33 bp, Homo sapien
tttgtcaccagtagaagtcacagatattgtcat

SEQ ID NO: 616694 - DNA, 33 bp, Homo sapien
tttgtcaccagtagaattcacagatattgtcat

SEQ ID NO: 616695 - DNA, 33 bp, Homo sapien
tccccaatctcttcaaaatcagtgtctacacaa

SEQ ID NO: 616696 - DNA, 33 bp, Homo sapien
tccccaatctcttcaacatcagtgtctacacaa

SEQ ID NO: 616697 - DNA, 33 bp, Homo sapien
caagccccttagggtcacagtcagtcacattgg

SEQ ID NO: 616698 - DNA, 33 bp, Homo sapien
caagccccttagggtcccagtcagtcacattgg

SEQ ID NO: 616699 - DNA, 33 bp, Homo sapien
tggaagcattgtgagaatcggtggtggtgtgag

SEQ ID NO: 616700 - DNA, 33 bp, Homo sapien
tggaagcattgtgagagtcggtggtggtgtgag

SEQ ID NO: 616701 - DNA, 33 bp, Homo sapien
aactgctcttgagccactcagtttgtgtgactt

SEQ ID NO: 616702 - DNA, 33 bp, Homo sapien
aactgctcttgagccagtcagtttgtgtgactt

SEQ ID NO: 616703 - DNA, 33 bp, Homo sapien
ttgttttttaggtaggccattcctgccccctct

SEQ ID NO: 616704 - DNA, 33 bp, Homo sapien
ttgttttttaggtaggtcattcctgccccctct

SEQ ID NO: 616705 - DNA, 33 bp, Homo sapien
tcagatcatgcatctacgagcaacaagcagagt

SEQ ID NO: 616706 - DNA, 33 bp, Homo sapien
tcagatcatgcatctatgagcaacaagcagagt

SEQ ID NO: 616707 - DNA, 33 bp, Homo sapien
atcatccagctttgtaacatcttaacattatgc

SEQ ID NO: 616708 - DNA, 33 bp, Homo sapien
atcatccagctttgtagcatcttaacattatgc

SEQ ID NO: 616709 - DNA, 33 bp, Homo sapien
cttgtggagagttcaccggctttacatgagctt

SEQ ID NO: 616710 - DNA, 33 bp, Homo sapien
cttgtggagagttcactggctttacatgagctt

SEQ ID NO: 616711 - DNA, 33 bp, Homo sapien
cagtgctttttagcaccggaggcaaagctgaaa

SEQ ID NO: 616712 - DNA, 33 bp, Homo sapien
cagtgctttttagcactggaggcaaagctgaaa

SEQ ID NO: 616713 - DNA, 33 bp, Homo sapien
aggcgctgttgatggcaatggcattgatcagca

SEQ ID NO: 616714 - DNA, 33 bp, Homo sapien
aggcgctgttgatggcgatggcattgatcagca

SEQ ID NO: 616715 - DNA, 33 bp, Homo sapien
ctttatagtggacgtcaccgacataggcctgta

SEQ ID NO: 616716 - DNA, 33 bp, Homo sapien
ctttatagtggacgtcgccgacataggcctgta

SEQ ID NO: 616717 - DNA, 33 bp, Homo sapien
tgatgaaggacaacaacctggtacgccacctgg

SEQ ID NO: 616718 - DNA, 33 bp, Homo sapien
tgatgaaggacaacaatctggtacgccacctgg

SEQ ID NO: 616719 - DNA, 33 bp, Homo sapien
accgtattggatagtaaggacttaaagattctt

SEQ ID NO: 616720 - DNA, 33 bp, Homo sapien
accgtattggatagtacggacttaaagattctt

SEQ ID NO: 616721 - DNA, 33 bp, Homo sapien
tgacagggccgggaacgaagcgatgagaacaac

SEQ ID NO: 616722 - DNA, 33 bp, Homo sapien
tgacagggccgggaactaagcgatgagaacaac

SEQ ID NO: 616723 - DNA, 33 bp, Homo sapien
cccctgcagccaaacaacaggacggggcagccg

SEQ ID NO: 616724 - DNA, 33 bp, Homo sapien
cccctgcagccaaacagcaggacggggcagccg

SEQ ID NO: 616725 - DNA, 33 bp, Homo sapien
ctttgatctgtaacacactcaaggccaaaagta

SEQ ID NO: 616726 - DNA, 33 bp, Homo sapien
ctttgatctgtaacacgctcaaggccaaaagta

SEQ ID NO: 616727 - DNA, 33 bp, Homo sapien
cagtggttctcaaacacctttgaccacagaatc

SEQ ID NO: 616728 - DNA, 33 bp, Homo sapien
cagtggttctcaaacatctttgaccacagaatc

SEQ ID NO: 616729 - DNA, 33 bp, Homo sapien
gctgatatgtaacagcccctcctcctagcaccc

SEQ ID NO: 616730 - DNA, 33 bp, Homo sapien
gctgatatgtaacagctcctcctcctagcaccc

SEQ ID NO: 616731 - DNA, 33 bp, Homo sapien
cacaccctcttcttcccgagatgtagctgtcca

SEQ ID NO: 616732 - DNA, 33 bp, Homo sapien
cacaccctcttcttcctgagatgtagctgtcca

SEQ ID NO: 616733 - DNA, 33 bp, Homo sapien
cactaaacaaagccaaaacgattcccagcccag

SEQ ID NO: 616734 - DNA, 33 bp, Homo sapien
cactaaacaaagccaatacgattcccagcccag

SEQ ID NO: 616735 - DNA, 33 bp, Homo sapien
aacaataataatggaaagactgtgtctgggctg

SEQ ID NO: 616736 - DNA, 33 bp, Homo sapien
aacaataataatggaaggactgtgtctgggctg

SEQ ID NO: 616737 - DNA, 33 bp, Homo sapien
aagttgcaaggatggcacaaagaatacgggcat

SEQ ID NO: 616738 - DNA, 33 bp, Homo sapien
aagttgcaaggatggcgcaaagaatacgggcat

SEQ ID NO: 616739 - DNA, 33 bp, Homo sapien
cagggaggctcaacataagttggttcccttccc

SEQ ID NO: 616740 - DNA, 33 bp, Homo sapien
cagggaggctcaacatgagttggttcccttccc

SEQ ID NO: 616741 - DNA, 33 bp, Homo sapien
cctgcaggtctctatacctcactacaatggtgg

SEQ ID NO: 616742 - DNA, 33 bp, Homo sapien
cctgcaggtctctatatctcactacaatggtgg

SEQ ID NO: 616743 - DNA, 33 bp, Homo sapien
ggtctgaaggagtgtgcaatgtcctggaaatac

SEQ ID NO: 616744 - DNA, 33 bp, Homo sapien
ggtctgaaggagtgtggaatgtcctggaaatac

SEQ ID NO: 616745 - DNA, 33 bp, Homo sapien
accaagatggtgcccaaagaaggcccatgtaca

SEQ ID NO: 616746 - DNA, 33 bp, Homo sapien
accaagatggtgcccatagaaggcccatgtaca

SEQ ID NO: 616747 - DNA, 33 bp, Homo sapien
ccctgcaaccctcgctcaagtgggcatgtactt

SEQ ID NO: 616748 - DNA, 33 bp, Homo sapien
ccctgcaaccctcgcttaagtgggcatgtactt

SEQ ID NO: 616749 - DNA, 33 bp, Homo sapien
tcccctaaaccataacggagactacagaagaac

SEQ ID NO: 616750 - DNA, 33 bp, Homo sapien
tcccctaaaccataactgagactacagaagaac

SEQ ID NO: 616751 - DNA, 33 bp, Homo sapien
acatgcagacaggcccaaagaggccaagcggat

SEQ ID NO: 616752 - DNA, 33 bp, Homo sapien
acatgcagacaggcccgaagaggccaagcggat

SEQ ID NO: 616753 - DNA, 33 bp, Homo sapien
gctcaaccagttttgaagatctttgttggatac

SEQ ID NO: 616754 - DNA, 33 bp, Homo sapien
gctcaaccagttttgaggatctttgttggatac

SEQ ID NO: 616755 - DNA, 33 bp, Homo sapien
aatgttggtatgatgacgaaattgccttagaac

SEQ ID NO: 616756 - DNA, 33 bp, Homo sapien
aatgttggtatgatgatgaaattgccttagaac

SEQ ID NO: 616757 - DNA, 33 bp, Homo sapien
cataggaaagatggacaacttccaccaccggct

SEQ ID NO: 616758 - DNA, 33 bp, Homo sapien
cataggaaagatggacgacttccaccaccggct

SEQ ID NO: 616759 - DNA, 33 bp, Homo sapien
ttcagcagaaaggaaaagagaccacaagattca

SEQ ID NO: 616760 - DNA, 33 bp, Homo sapien
ttcagcagaaaggaaaggagaccacaagattca

SEQ ID NO: 616761 - DNA, 33 bp, Homo sapien
atctaaattgaatctcaaacgccattcatctct

SEQ ID NO: 616762 - DNA, 33 bp, Homo sapien
atctaaattgaatctcgaacgccattcatctct

SEQ ID NO: 616763 - DNA, 33 bp, Homo sapien
ggccctgaaaattcagaaacacaaatgtccaga

SEQ ID NO: 616764 - DNA, 33 bp, Homo sapien
ggccctgaaaattcaggaacacaaatgtccaga

SEQ ID NO: 616765 - DNA, 33 bp, Homo sapien
ctctgacctctgcttacaattacacagaaagaa

SEQ ID NO: 616766 - DNA, 33 bp, Homo sapien
ctctgacctctgcttataattacacagaaagaa

SEQ ID NO: 616767 - DNA, 33 bp, Homo sapien
tgtgtcctaccatgtacgtaaaagaagacagcc

SEQ ID NO: 616768 - DNA, 33 bp, Homo sapien
tgtgtcctaccatgtatgtaaaagaagacagcc

SEQ ID NO: 616769 - DNA, 33 bp, Homo sapien
cagcaagcagccgtgacagcagggagttcctat

SEQ ID NO: 616770 - DNA, 33 bp, Homo sapien
cagcaagcagccgtgatagcagggagttcctat

SEQ ID NO: 616771 - DNA, 33 bp, Homo sapien
atatcccttcatctgaccaaccctcactccttc

SEQ ID NO: 616772 - DNA, 33 bp, Homo sapien
atatcccttcatctgatcaaccctcactccttc

SEQ ID NO: 616773 - DNA, 33 bp, Homo sapien
acttagggcatttaaaatcattttgtatgagac

SEQ ID NO: 616774 - DNA, 33 bp, Homo sapien
acttagggcatttaaagtcattttgtatgagac

SEQ ID NO: 616775 - DNA, 33 bp, Homo sapien
ctgtcactaccaccaccgtacaccactaatgtt

SEQ ID NO: 616776 - DNA, 33 bp, Homo sapien
ctgtcactaccaccactgtacaccactaatgtt

SEQ ID NO: 616777 - DNA, 33 bp, Homo sapien
aggaagtgatagtaaacgttcttctgggtctct

SEQ ID NO: 616778 - DNA, 33 bp, Homo sapien
aggaagtgatagtaaatgttcttctgggtctct

SEQ ID NO: 616779 - DNA, 33 bp, Homo sapien
aggggccccagcttcactagatccccccattct

SEQ ID NO: 616780 - DNA, 33 bp, Homo sapien
aggggccccagcttcagtagatccccccattct

SEQ ID NO: 616781 - DNA, 33 bp, Homo sapien
aactcagcaagtctaacaccaaactaattgttt

SEQ ID NO: 616782 - DNA, 33 bp, Homo sapien
aactcagcaagtctaagaccaaactaattgttt

SEQ ID NO: 616783 - DNA, 33 bp, Homo sapien
gagacagaggagacccagaggatgcaaagtgga

SEQ ID NO: 616784 - DNA, 33 bp, Homo sapien
gagacagaggagacccggaggatgcaaagtgga

SEQ ID NO: 616785 - DNA, 33 bp, Homo sapien
tgtcttatttcctccaaagtccttaagacagtg

SEQ ID NO: 616786 - DNA, 33 bp, Homo sapien
tgtcttatttcctccagagtccttaagacagtg

SEQ ID NO: 616787 - DNA, 33 bp, Homo sapien
ggtacttgttagacaacttaggaaagccctggg

SEQ ID NO: 616788 - DNA, 33 bp, Homo sapien
ggtacttgttagacaatttaggaaagccctggg

SEQ ID NO: 616789 - DNA, 33 bp, Homo sapien
aagttgtgccctgagactatagatgttctgctt

SEQ ID NO: 616790 - DNA, 33 bp, Homo sapien
aagttgtgccctgagagtatagatgttctgctt

SEQ ID NO: 616791 - DNA, 33 bp, Homo sapien
gggatcagtggcacgactcactaagtaaatgtc

SEQ ID NO: 616792 - DNA, 33 bp, Homo sapien
gggatcagtggcacgattcactaagtaaatgtc

SEQ ID NO: 616793 - DNA, 33 bp, Homo sapien
tctgggtgcctgattacgggaagcacctagtga

SEQ ID NO: 616794 - DNA, 33 bp, Homo sapien
tctgggtgcctgattatgggaagcacctagtga

SEQ ID NO: 616795 - DNA, 33 bp, Homo sapien
tgacactagtcatagacccagtcagcctggacg

SEQ ID NO: 616796 - DNA, 33 bp, Homo sapien
tgacactagtcatagatccagtcagcctggacg

SEQ ID NO: 616797 - DNA, 33 bp, Homo sapien
agcaccctggtgtaatcactaacggtgccgtgg

SEQ ID NO: 616798 - DNA, 33 bp, Homo sapien
agcaccctggtgtaattactaacggtgccgtgg

SEQ ID NO: 616799 - DNA, 33 bp, Homo sapien
cctcgtgccagaatcacactatgaggaaaggtt

SEQ ID NO: 616800 - DNA, 33 bp, Homo sapien
cctcgtgccagaatcatactatgaggaaaggtt

SEQ ID NO: 616801 - DNA, 33 bp, Homo sapien
gatacctcaagaagagacacagagacatgagac

SEQ ID NO: 616802 - DNA, 33 bp, Homo sapien
gatacctcaagaagaggcacagagacatgagac

SEQ ID NO: 616803 - DNA, 33 bp, Homo sapien
catatgccttgtacgcccatacaccctacacac

SEQ ID NO: 616804 - DNA, 33 bp, Homo sapien
catatgccttgtacgcgcatacaccctacacac

SEQ ID NO: 616805 - DNA, 33 bp, Homo sapien
acttggcatagtttcaatatgtcttctctgtcc

SEQ ID NO: 616806 - DNA, 33 bp, Homo sapien
acttggcatagtttcagtatgtcttctctgtcc

SEQ ID NO: 616807 - DNA, 33 bp, Homo sapien
gaacaaaaaatgataacagcaacaccaacatca

SEQ ID NO: 616808 - DNA, 33 bp, Homo sapien
gaacaaaaaatgataagagcaacaccaacatca

SEQ ID NO: 616809 - DNA, 33 bp, Homo sapien
agtgtgggctacaagacgaaggaagcctagaga

SEQ ID NO: 616810 - DNA, 33 bp, Homo sapien
agtgtgggctacaagaggaaggaagcctagaga

SEQ ID NO: 616811 - DNA, 33 bp, Homo sapien
gatccctcagccagaacgtttaagagttcaagt

SEQ ID NO: 616812 - DNA, 33 bp, Homo sapien
gatccctcagccagaatgtttaagagttcaagt

SEQ ID NO: 616813 - DNA, 33 bp, Homo sapien
atggcagattttcctgaaagctaaagtcatctg

SEQ ID NO: 616814 - DNA, 33 bp, Homo sapien
atggcagattttcctgcaagctaaagtcatctg

SEQ ID NO: 616815 - DNA, 33 bp, Homo sapien
gttttcttacttgtgaaatggaaatggtcaacg

SEQ ID NO: 616816 - DNA, 33 bp, Homo sapien
gttttcttacttgtgagatggaaatggtcaacg

SEQ ID NO: 616817 - DNA, 33 bp, Homo sapien
ctcagctagcttttgcaatgtgccaactgtgtc

SEQ ID NO: 616818 - DNA, 33 bp, Homo sapien
ctcagctagcttttgccatgtgccaactgtgtc

SEQ ID NO: 616819 - DNA, 33 bp, Homo sapien
tcttgcattctagtagaactgtaaaatggtgcg

SEQ ID NO: 616820 - DNA, 33 bp, Homo sapien
tcttgcattctagtaggactgtaaaatggtgcg

SEQ ID NO: 616821 - DNA, 33 bp, Homo sapien
ggaaatggcgagaacaagatggacttgggagga

SEQ ID NO: 616822 - DNA, 33 bp, Homo sapien
ggaaatggcgagaacaggatggacttgggagga

SEQ ID NO: 616823 - DNA, 33 bp, Homo sapien
cagaaagaaatcttacacaccagaggcccatga

SEQ ID NO: 616824 - DNA, 33 bp, Homo sapien
cagaaagaaatcttacgcaccagaggcccatga

SEQ ID NO: 616825 - DNA, 33 bp, Homo sapien
ggctgagatacaggaactgcttaaacacaggag

SEQ ID NO: 616826 - DNA, 33 bp, Homo sapien
ggctgagatacaggaattgcttaaacacaggag

SEQ ID NO: 616827 - DNA, 33 bp, Homo sapien
ttaaatatcaacaggaacagatagaggcttctt

SEQ ID NO: 616828 - DNA, 33 bp, Homo sapien
ttaaatatcaacaggagcagatagaggcttctt

SEQ ID NO: 616829 - DNA, 33 bp, Homo sapien
tcagacttgttccagacgagcttctgtctgcac

SEQ ID NO: 616830 - DNA, 33 bp, Homo sapien
tcagacttgttccagatgagcttctgtctgcac

SEQ ID NO: 616831 - DNA, 33 bp, Homo sapien
tcctgtcttgcagataccgggtcaagtgtgatg

SEQ ID NO: 616832 - DNA, 33 bp, Homo sapien
tcctgtcttgcagatagcgggtcaagtgtgatg

SEQ ID NO: 616833 - DNA, 33 bp, Homo sapien
tttatccacttggcaacggggagcactgaagac

SEQ ID NO: 616834 - DNA, 33 bp, Homo sapien
tttatccacttggcaatggggagcactgaagac

SEQ ID NO: 616835 - DNA, 33 bp, Homo sapien
ttctagtgcagattaaatgagttacatgtaagg

SEQ ID NO: 616836 - DNA, 33 bp, Homo sapien
ttctagtgcagattaagtgagttacatgtaagg

SEQ ID NO: 616837 - DNA, 33 bp, Homo sapien
gggactctgctggtcacgtaatacacacaaaag

SEQ ID NO: 616838 - DNA, 33 bp, Homo sapien
gggactctgctggtcatgtaatacacacaaaag

SEQ ID NO: 616839 - DNA, 33 bp, Homo sapien
ccataggctccaccaaccccatatgctccacta

SEQ ID NO: 616840 - DNA, 33 bp, Homo sapien
ccataggctccaccaatcccatatgctccacta

SEQ ID NO: 616841 - DNA, 33 bp, Homo sapien
tcacacagcccatcacagtaaagcagggatttg

SEQ ID NO: 616842 - DNA, 33 bp, Homo sapien
tcacacagcccatcacggtaaagcagggatttg

SEQ ID NO: 616843 - DNA, 33 bp, Homo sapien
tcattaaatgagtccacagtgttataggctgaa

SEQ ID NO: 616844 - DNA, 33 bp, Homo sapien
tcattaaatgagtccatagtgttataggctgaa

SEQ ID NO: 616845 - DNA, 33 bp, Homo sapien
tgaataaaagtataacaatgaccgcacatagag

SEQ ID NO: 616846 - DNA, 33 bp, Homo sapien
tgaataaaagtataacgatgaccgcacatagag

SEQ ID NO: 616847 - DNA, 33 bp, Homo sapien
ggtcagatgagatggcaactctaagctctggct

SEQ ID NO: 616848 - DNA, 33 bp, Homo sapien
ggtcagatgagatggcgactctaagctctggct

SEQ ID NO: 616849 - DNA, 33 bp, Homo sapien
aggctgaaggtggtaaagaagtggatatgggga

SEQ ID NO: 616850 - DNA, 33 bp, Homo sapien
aggctgaaggtggtaaggaagtggatatgggga

SEQ ID NO: 616851 - DNA, 33 bp, Homo sapien
ttagtgttgctatgacaattaagtgggttcgtt

SEQ ID NO: 616852 - DNA, 33 bp, Homo sapien
ttagtgttgctatgacgattaagtgggttcgtt

SEQ ID NO: 616853 - DNA, 33 bp, Homo sapien
aatatttctttatacaaaactttgcattgccaa

SEQ ID NO: 616854 - DNA, 33 bp, Homo sapien
aatatttctttatacagaactttgcattgccaa

SEQ ID NO: 616855 - DNA, 33 bp, Homo sapien
tcacatacttaacatcagaaaggcaatccagaa

SEQ ID NO: 616856 - DNA, 33 bp, Homo sapien
tcacatacttaacatcggaaaggcaatccagaa

SEQ ID NO: 616857 - DNA, 33 bp, Homo sapien
tcctaacaactcttccacactaactcctggcaa

SEQ ID NO: 616858 - DNA, 33 bp, Homo sapien
tcctaacaactcttccgcactaactcctggcaa

SEQ ID NO: 616859 - DNA, 33 bp, Homo sapien
caggtgagatggtcagccattgttggtttgggg

SEQ ID NO: 616860 - DNA, 33 bp, Homo sapien
caggtgagatggtcaggcattgttggtttgggg

SEQ ID NO: 616861 - DNA, 33 bp, Homo sapien
cactccaggaacttaccccaagccctggtgaga

SEQ ID NO: 616862 - DNA, 33 bp, Homo sapien
cactccaggaacttactccaagccctggtgaga

SEQ ID NO: 616863 - DNA, 33 bp, Homo sapien
agaaatgtgcataaaaacaccaatacctggaga

SEQ ID NO: 616864 - DNA, 33 bp, Homo sapien
agaaatgtgcataaaagcaccaatacctggaga

SEQ ID NO: 616865 - DNA, 33 bp, Homo sapien
ggacagtttccagaagacagattctccctcaaa

SEQ ID NO: 616866 - DNA, 33 bp, Homo sapien
ggacagtttccagaagtcagattctccctcaaa

SEQ ID NO: 616867 - DNA, 33 bp, Homo sapien
agattccacaagtgcaagagaagagaagttctg

SEQ ID NO: 616868 - DNA, 33 bp, Homo sapien
agattccacaagtgcacgagaagagaagttctg

SEQ ID NO: 616869 - DNA, 33 bp, Homo sapien
aacaaggtcttccctacagccaaaatgttggaa

SEQ ID NO: 616870 - DNA, 33 bp, Homo sapien
aacaaggtcttccctatagccaaaatgttggaa

SEQ ID NO: 616871 - DNA, 33 bp, Homo sapien
ttccactaagaacgacacagagtgaatccaaga

SEQ ID NO: 616872 - DNA, 33 bp, Homo sapien
ttccactaagaacgacgcagagtgaatccaaga

SEQ ID NO: 616873 - DNA, 33 bp, Homo sapien
agctcacatacctacaaggacagggcacgggga

SEQ ID NO: 616874 - DNA, 33 bp, Homo sapien
agctcacatacctacagggacagggcacgggga

SEQ ID NO: 616875 - DNA, 33 bp, Homo sapien
cgtctactggggagggccattcatggtggaaaa

SEQ ID NO: 616876 - DNA, 33 bp, Homo sapien
cgtctactggggagggtcattcatggtggaaaa

SEQ ID NO: 616877 - DNA, 33 bp, Homo sapien
ttataggagaggattacagccattgaggaaaac

SEQ ID NO: 616878 - DNA, 33 bp, Homo sapien
ttataggagaggattatagccattgaggaaaac

SEQ ID NO: 616879 - DNA, 33 bp, Homo sapien
ttggtccgatcccagacgagggagcttaggctt

SEQ ID NO: 616880 - DNA, 33 bp, Homo sapien
ttggtccgatcccagatgagggagcttaggctt

SEQ ID NO: 616881 - DNA, 33 bp, Homo sapien
aggagcaaacgccaagcaattcacaatcctgtc

SEQ ID NO: 616882 - DNA, 33 bp, Homo sapien
aggagcaaacgccaaggaattcacaatcctgtc

SEQ ID NO: 616883 - DNA, 33 bp, Homo sapien
catggcctctggggacaccttcttcttttttgc

SEQ ID NO: 616884 - DNA, 33 bp, Homo sapien
catggcctctggggactccttcttcttttttgc

SEQ ID NO: 616885 - DNA, 33 bp, Homo sapien
gaggcctaaatgagccaatgcctctaaaatgcc

SEQ ID NO: 616886 - DNA, 33 bp, Homo sapien
gaggcctaaatgagccgatgcctctaaaatgcc

SEQ ID NO: 616887 - DNA, 33 bp, Homo sapien
catttgcattccaacaatgagtgtgcaaattat

SEQ ID NO: 616888 - DNA, 33 bp, Homo sapien
catttgcattccaacagtgagtgtgcaaattat

SEQ ID NO: 616889 - DNA, 33 bp, Homo sapien
acttgaagattgaacaaggccaagaacattctt

SEQ ID NO: 616890 - DNA, 33 bp, Homo sapien
acttgaagattgaacagggccaagaacattctt

SEQ ID NO: 616891 - DNA, 33 bp, Homo sapien
ttccaggaaccagggacgaaagcctgtcaaagt

SEQ ID NO: 616892 - DNA, 33 bp, Homo sapien
ttccaggaaccagggatgaaagcctgtcaaagt

SEQ ID NO: 616893 - DNA, 33 bp, Homo sapien
tggcagggaagtgaaactatgaatacattgttt

SEQ ID NO: 616894 - DNA, 33 bp, Homo sapien
tggcagggaagtgaaattatgaatacattgttt

SEQ ID NO: 616895 - DNA, 33 bp, Homo sapien
tgcagaaataacattacgtttgtaaaagactgg

SEQ ID NO: 616896 - DNA, 33 bp, Homo sapien
tgcagaaataacattatgtttgtaaaagactgg

SEQ ID NO: 616897 - DNA, 33 bp, Homo sapien
atttcaaatgtccttccgaaatctgaatccaaa

SEQ ID NO: 616898 - DNA, 33 bp, Homo sapien
atttcaaatgtccttctgaaatctgaatccaaa

SEQ ID NO: 616899 - DNA, 33 bp, Homo sapien
gcatctcttccctgcacgttaatcattcgccag

SEQ ID NO: 616900 - DNA, 33 bp, Homo sapien
gcatctcttccctgcatgttaatcattcgccag

SEQ ID NO: 616901 - DNA, 33 bp, Homo sapien
agccatcaggacaaaccccttatcctcggggac

SEQ ID NO: 616902 - DNA, 33 bp, Homo sapien
agccatcaggacaaactccttatcctcggggac

SEQ ID NO: 616903 - DNA, 33 bp, Homo sapien
gaaagtgagtatcaggcatttcttgtctctgtt

SEQ ID NO: 616904 - DNA, 33 bp, Homo sapien
gaaagtgagtatcaggtatttcttgtctctgtt

SEQ ID NO: 616905 - DNA, 33 bp, Homo sapien
ttctatcacgtaggaacaaccaatcccatacgc

SEQ ID NO: 616906 - DNA, 33 bp, Homo sapien
ttctatcacgtaggaataaccaatcccatacgc

SEQ ID NO: 616907 - DNA, 33 bp, Homo sapien
cacatatcatcaaaataatccatttctatgttt

SEQ ID NO: 616908 - DNA, 33 bp, Homo sapien
cacatatcatcaaaatcatccatttctatgttt

SEQ ID NO: 616909 - DNA, 33 bp, Homo sapien
tgctaggtatatgccaaaaagaattgaaaacag

SEQ ID NO: 616910 - DNA, 33 bp, Homo sapien
tgctaggtatatgccagaaagaattgaaaacag

SEQ ID NO: 616911 - DNA, 33 bp, Homo sapien
cctggaatcagaagatgaagaccattgtgtgtg

SEQ ID NO: 616912 - DNA, 33 bp, Homo sapien
cctggaatcagaagattaagaccattgtgtgtg

SEQ ID NO: 616913 - DNA, 33 bp, Homo sapien
tcccacgtaatgcacccgaaaagatgtcagcaa

SEQ ID NO: 616914 - DNA, 33 bp, Homo sapien
tcccacgtaatgcacctgaaaagatgtcagcaa

SEQ ID NO: 616915 - DNA, 33 bp, Homo sapien
acccaaatttcatatcaaatttccatgtgttgt

SEQ ID NO: 616916 - DNA, 33 bp, Homo sapien
acccaaatttcatatcgaatttccatgtgttgt

SEQ ID NO: 616917 - DNA, 33 bp, Homo sapien; identical to SEQ ID NO: 616915

SEQ ID NO: 616918 - DNA, 33 bp, Homo sapien; identical to SEQ ID NO: 616916

SEQ ID NO: 616919 - DNA, 33 bp, Homo sapien
agggcctacttagaacaggacacataaaaggtc

SEQ ID NO: 616920 - DNA, 33 bp, Homo sapien
agggcctacttagaaccggacacataaaaggtc

SEQ ID NO: 616921 - DNA, 33 bp, Homo sapien
ccagaaacctgggagccatttggacacctcccc

SEQ ID NO: 616922 - DNA, 33 bp, Homo sapien
ccagaaacctgggagctatttggacacctcccc

SEQ ID NO: 616923 - DNA, 33 bp, Homo sapien
atgcacctatctctcaccaagcacaacttgaca

SEQ ID NO: 616924 - DNA, 33 bp, Homo sapien
atgcacctatctctcagcaagcacaacttgaca

SEQ ID NO: 616925 - DNA, 33 bp, Homo sapien
tctgacccaccaaaaccgatagcacttctgagt

SEQ ID NO: 616926 - DNA, 33 bp, Homo sapien
tctgacccaccaaaactgatagcacttctgagt

SEQ ID NO: 616927 - DNA, 33 bp, Homo sapien
tcatgactaagttgtacggcatgagtaagcttt

SEQ ID NO: 616928 - DNA, 33 bp, Homo sapien
tcatgactaagttgtatggcatgagtaagcttt

SEQ ID NO: 616929 - DNA, 33 bp, Homo sapien
gggctgctcaccttaacgttgtccctgtctgag

SEQ ID NO: 616930 - DNA, 33 bp, Homo sapien
gggctgctcaccttaatgttgtccctgtctgag

SEQ ID NO: 616931 - DNA, 33 bp, Homo sapien
gatctgcaccaggtaacgcaaggatttgctcct

SEQ ID NO: 616932 - DNA, 33 bp, Homo sapien
gatctgcaccaggtaatgcaaggatttgctcct

SEQ ID NO: 616933 - DNA, 33 bp, Homo sapien
ccctttcttacactaaagtttctttgggggatg

SEQ ID NO: 616934 - DNA, 33 bp, Homo sapien
ccctttcttacactaaggtttctttgggggatg

SEQ ID NO: 616935 - DNA, 33 bp, Homo sapien
tatagataagtcgatgaatgtgagggtgaggag

SEQ ID NO: 616936 - DNA, 33 bp, Homo sapien
tatagataagtcgatggatgtgagggtgaggag

SEQ ID NO: 616937 - DNA, 33 bp, Homo sapien
attgctatagattgaaagcttatatccctctca

SEQ ID NO: 616938 - DNA, 33 bp, Homo sapien
attgctatagattgaatgcttatatccctctca

SEQ ID NO: 616939 - DNA, 33 bp, Homo sapien
gtcctaagtgccaagggacaaaagagagcaaag

SEQ ID NO: 616940 - DNA, 33 bp, Homo sapien
gtcctaagtgccaaggtacaaaagagagcaaag

SEQ ID NO: 616941 - DNA, 33 bp, Homo sapien
acctttgttaactgacaaatgtataaacaaaat

SEQ ID NO: 616942 - DNA, 33 bp, Homo sapien
acctttgttaactgacgaatgtataaacaaaat

SEQ ID NO: 616943 - DNA, 33 bp, Homo sapien
tgattcctttaaacacagaaagcaggtgcaaga

SEQ ID NO: 616944 - DNA, 33 bp, Homo sapien
tgattcctttaaacaccgaaagcaggtgcaaga

SEQ ID NO: 616945 - DNA, 33 bp, Homo sapien
gaaataaaagtcctgagagttttaggtcaatat

SEQ ID NO: 616946 - DNA, 33 bp, Homo sapien
gaaataaaagtcctgatagttttaggtcaatat

SEQ ID NO: 616947 - DNA, 33 bp, Homo sapien
tcttttgagacagacacaataaatagatgcaca

SEQ ID NO: 616948 - DNA, 33 bp, Homo sapien
tcttttgagacagacataataaatagatgcaca

SEQ ID NO: 616949 - DNA, 33 bp, Homo sapien
tggatacaatggtagacgaagaccagacctggc

SEQ ID NO: 616950 - DNA, 33 bp, Homo sapien
tggatacaatggtagatgaagaccagacctggc

SEQ ID NO: 616951 - DNA, 33 bp, Homo sapien
tgagaaagaaggctgacgtacccaaggtcaccc

SEQ ID NO: 616952 - DNA, 33 bp, Homo sapien
tgagaaagaaggctgatgtacccaaggtcaccc

SEQ ID NO: 616953 - DNA, 33 bp, Homo sapien
ggatcccagtggctcaaaccaaggtggtagttg

SEQ ID NO: 616954 - DNA, 33 bp, Homo sapien
ggatcccagtggctcagaccaaggtggtagttg

SEQ ID NO: 616955 - DNA, 33 bp, Homo sapien
tgtggggttctgaggactcccaaattctggctg

SEQ ID NO: 616956 - DNA, 33 bp, Homo sapien
tgtggggttctgaggattcccaaattctggctg

SEQ ID NO: 616957 - DNA, 33 bp, Homo sapien
tattgttacccagagggcagtttatttgtgcct

SEQ ID NO: 616958 - DNA, 33 bp, Homo sapien
tattgttacccagaggtcagtttatttgtgcct

SEQ ID NO: 616959 - DNA, 33 bp, Homo sapien
ttcagagttaaaaaaacaaagttgttgagagaa

SEQ ID NO: 616960 - DNA, 33 bp, Homo sapien
ttcagagttaaaaaaataaagttgttgagagaa

SEQ ID NO: 616961 - DNA, 33 bp, Homo sapien
aggttgagagctgtgaagtgttccacccttatt

SEQ ID NO: 616962 - DNA, 33 bp, Homo sapien
aggttgagagctgtgacgtgttccacccttatt

SEQ ID NO: 616963 - DNA, 33 bp, Homo sapien
gggagaggctgcctgaagaaggtaagatatgac

SEQ ID NO: 616964 - DNA, 33 bp, Homo sapien
gggagaggctgcctgaggaaggtaagatatgac

SEQ ID NO: 616965 - DNA, 33 bp, Homo sapien
ctactagaacaacacaaggatactcagaagtgc

SEQ ID NO: 616966 - DNA, 33 bp, Homo sapien
ctactagaacaacacagggatactcagaagtgc

SEQ ID NO: 616967 - DNA, 33 bp, Homo sapien
cgtcttccttaatcaacgacactcaagtgccta

SEQ ID NO: 616968 - DNA, 33 bp, Homo sapien
cgtcttccttaatcaatgacactcaagtgccta

SEQ ID NO: 616969 - DNA, 33 bp, Homo sapien
aacgaatagaaactcacgaggtgcctactatgc

SEQ ID NO: 616970 - DNA, 33 bp, Homo sapien
aacgaatagaaactcatgaggtgcctactatgc

SEQ ID NO: 616971 - DNA, 33 bp, Homo sapien
atatactgattgataaagaagaacggacaatgg

SEQ ID NO: 616972 - DNA, 33 bp, Homo sapien
atatactgattgataaggaagaacggacaatgg

SEQ ID NO: 616973 - DNA, 33 bp, Homo sapien
tttcaaaatttaaaaccgttgctcctcaatgga

SEQ ID NO: 616974 - DNA, 33 bp, Homo sapien
tttcaaaatttaaaactgttgctcctcaatgga

SEQ ID NO: 616975 - DNA, 33 bp, Homo sapien
agattggcaaggggcagcattatacaaagtttg

SEQ ID NO: 616976 - DNA, 33 bp, Homo sapien
agattggcaaggggcatcattatacaaagtttg

SEQ ID NO: 616977 - DNA, 33 bp, Homo sapien
gtggggtcgatatacaaggattgggacacaaat

SEQ ID NO: 616978 - DNA, 33 bp, Homo sapien
gtggggtcgatatacagggattgggacacaaat

SEQ ID NO: 616979 - DNA, 33 bp, Homo sapien
gaaagtgctttttgccaaatgaagtctccttaa

SEQ ID NO: 616980 - DNA, 33 bp, Homo sapien
gaaagtgctttttgcccaatgaagtctccttaa

SEQ ID NO: 616981 - DNA, 33 bp, Homo sapien
ggtttattcctccatggactatttgagatttga

SEQ ID NO: 616982 - DNA, 33 bp, Homo sapien
ggtttattcctccatgtactatttgagatttga

SEQ ID NO: 616983 - DNA, 33 bp, Homo sapien
tctgattgactggatcgagtgagggaatgatga

SEQ ID NO: 616984 - DNA, 33 bp, Homo sapien
tctgattgactggatctagtgagggaatgatga

SEQ ID NO: 616985 - DNA, 33 bp, Homo sapien
gaagagtactgtcacacagaaatggaattaggt

SEQ ID NO: 616986 - DNA, 33 bp, Homo sapien
gaagagtactgtcacagagaaatggaattaggt

SEQ ID NO: 616987 - DNA, 33 bp, Homo sapien
acaaagagaggtgaagaaatgtttttgaggaag

SEQ ID NO: 616988 - DNA, 33 bp, Homo sapien
acaaagagaggtgaaggaatgtttttgaggaag

SEQ ID NO: 616989 - DNA, 33 bp, Homo sapien
agtgaataagctgttacgtgtcataatgaaccc

SEQ ID NO: 616990 - DNA, 33 bp, Homo sapien
agtgaataagctgttatgtgtcataatgaaccc

SEQ ID NO: 616991 - DNA, 33 bp, Homo sapien
ctcctgatgctctcgcacctatcctggccacca

SEQ ID NO: 616992 - DNA, 33 bp, Homo sapien
ctcctgatgctctcgcgcctatcctggccacca

SEQ ID NO: 616993 - DNA, 33 bp, Homo sapien
ggaggcaaagtgcataaggggaaggtgagagac

SEQ ID NO: 616994 - DNA, 33 bp, Homo sapien
ggaggcaaagtgcatacggggaaggtgagagac

SEQ ID NO: 616995 - DNA, 33 bp, Homo sapien
ggtaaatttactcaaaactgtacacttaaaagg

SEQ ID NO: 616996 - DNA, 33 bp, Homo sapien
ggtaaatttactcaaagctgtacacttaaaagg

SEQ ID NO: 616997 - DNA, 33 bp, Homo sapien
cctgaatataagcccaagagaataaacatatgt

SEQ ID NO: 616998 - DNA, 33 bp, Homo sapien
cctgaatataagcccaggagaataaacatatgt

SEQ ID NO: 616999 - DNA, 33 bp, Homo sapien
gggtcctggccatctccgacgggatcgagcaca

SEQ ID NO: 617000 - DNA, 33 bp, Homo sapien
gggtcctggccatctctgacgggatcgagcaca

SEQ ID NO: 617001 - DNA, 33 bp, Homo sapien
aaaatcaccttggctgaaggaacatgagagtct

SEQ ID NO: 617002 - DNA, 33 bp, Homo sapien
aaaatcaccttggctgcaggaacatgagagtct

SEQ ID NO: 617003 - DNA, 33 bp, Homo sapien
ccctacccagacaatacatgaaagtgctttgtg

SEQ ID NO: 617004 - DNA, 33 bp, Homo sapien
ccctacccagacaatatatgaaagtgctttgtg

SEQ ID NO: 617005 - DNA, 33 bp, Homo sapien
ttcccacgcacatattcaagaaacattgaacct

SEQ ID NO: 617006 - DNA, 33 bp, Homo sapien
ttcccacgcacatatttaagaaacattgaacct

SEQ ID NO: 617007 - DNA, 33 bp, Homo sapien
gaatgaatgagcgagcaaatgagcaacctctct

SEQ ID NO: 617008 - DNA, 33 bp, Homo sapien
gaatgaatgagcgagcgaatgagcaacctctct

SEQ ID NO: 617009 - DNA, 33 bp, Homo sapien
agacattaatgggtccccaaagaatggtctccc

SEQ ID NO: 617010 - DNA, 33 bp, Homo sapien
agacattaatgggtcctcaaagaatggtctccc

SEQ ID NO: 617011 - DNA, 33 bp, Homo sapien
agctatagtgatgaaacaggaacagctatgccc

SEQ ID NO: 617012 - DNA, 33 bp, Homo sapien
agctatagtgatgaaataggaacagctatgccc

SEQ ID NO: 617013 - DNA, 33 bp, Homo sapien
agataacagatgctaagtgaaggtgattgattg

SEQ ID NO: 617014 - DNA, 33 bp, Homo sapien
agataacagatgctaattgaaggtgattgattg

SEQ ID NO: 617015 - DNA, 33 bp, Homo sapien
gatccctcccagctaacccatgatggttgcaac

SEQ ID NO: 617016 - DNA, 33 bp, Homo sapien
gatccctcccagctaatccatgatggttgcaac

SEQ ID NO: 617017 - DNA, 33 bp, Homo sapien
actagactccctcatccagtgaattttggatat

SEQ ID NO: 617018 - DNA, 33 bp, Homo sapien
actagactccctcatcgagtgaattttggatat

SEQ ID NO: 617019 - DNA, 33 bp, Homo sapien
tgcaacggtgacaagacacttaaatagcaacca

SEQ ID NO: 617020 - DNA, 33 bp, Homo sapien
tgcaacggtgacaagatacttaaatagcaacca

SEQ ID NO: 617021 - DNA, 33 bp, Homo sapien
tatgtctgcaataggccctggtgtgaacagtcc

SEQ ID NO: 617022 - DNA, 33 bp, Homo sapien
tatgtctgcaataggctctggtgtgaacagtcc

SEQ ID NO: 617023 - DNA, 33 bp, Homo sapien
cctcaccaggttcctggcacatccgaaaggttg

SEQ ID NO: 617024 - DNA, 33 bp, Homo sapien
cctcaccaggttcctgtcacatccgaaaggttg

SEQ ID NO: 617025 - DNA, 33 bp, Homo sapien
cagagtctttggctagaatttaatcacatttta

SEQ ID NO: 617026 - DNA, 33 bp, Homo sapien
cagagtctttggctaggatttaatcacatttta

SEQ ID NO: 617027 - DNA, 33 bp, Homo sapien
caaaaataaatgtgacgaaaataaaatgtgatt

SEQ ID NO: 617028 - DNA, 33 bp, Homo sapien
caaaaataaatgtgactaaaataaaatgtgatt

SEQ ID NO: 617029 - DNA, 33 bp, Homo sapien
gatgagattttcagaaaagtcaagtcattccat

SEQ ID NO: 617030 - DNA, 33 bp, Homo sapien
gatgagattttcagaagagtcaagtcattccat

SEQ ID NO: 617031 - DNA, 33 bp, Homo sapien
ccactgagaggacagaaccaagtgattggagga

SEQ ID NO: 617032 - DNA, 33 bp, Homo sapien
ccactgagaggacagagccaagtgattggagga

SEQ ID NO: 617033 - DNA, 33 bp, Homo sapien
ctaatcaggaggtataaagtttcagtagtgaga

SEQ ID NO: 617034 - DNA, 33 bp, Homo sapien
ctaatcaggaggtatacagtttcagtagtgaga

SEQ ID NO: 617035 - DNA, 33 bp, Homo sapien
ggtactcagatgattaccaacaacaatttgcta

SEQ ID NO: 617036 - DNA, 33 bp, Homo sapien
ggtactcagatgattagcaacaacaatttgcta

SEQ ID NO: 617037 - DNA, 33 bp, Homo sapien
gccctcctgactttccaagtggacctttccagg

SEQ ID NO: 617038 - DNA, 33 bp, Homo sapien
gccctcctgactttcccagtggacctttccagg

SEQ ID NO: 617039 - DNA, 33 bp, Homo sapien
tcctggaggttgaaacactgcttgggtactcat

SEQ ID NO: 617040 - DNA, 33 bp, Homo sapien
tcctggaggttgaaacgctgcttgggtactcat

SEQ ID NO: 617041 - DNA, 33 bp, Homo sapien
atcctgtagctacactcaactacagaccatttc

SEQ ID NO: 617042 - DNA, 33 bp, Homo sapien
atcctgtagctacactgaactacagaccatttc

SEQ ID NO: 617043 - DNA, 33 bp, Homo sapien
ttgtctttggaagaaaagactgcaactaaagtc

SEQ ID NO: 617044 - DNA, 33 bp, Homo sapien
ttgtctttggaagaaaggactgcaactaaagtc

SEQ ID NO: 617045 - DNA, 33 bp, Homo sapien
cacacaaattccgctccaaatcccacgctgtca

SEQ ID NO: 617046 - DNA, 33 bp, Homo sapien
cacacaaattccgctctaaatcccacgctgtca

SEQ ID NO: 617047 - DNA, 33 bp, Homo sapien
acatcagtacacttcacccttaagtacgttggc

SEQ ID NO: 617048 - DNA, 33 bp, Homo sapien
acatcagtacacttcagccttaagtacgttggc

SEQ ID NO: 617049 - DNA, 33 bp, Homo sapien
tccatattcacgttgccgataaacacatacccg

SEQ ID NO: 617050 - DNA, 33 bp, Homo sapien
tccatattcacgttgctgataaacacatacccg

SEQ ID NO: 617051 - DNA, 33 bp, Homo sapien
aggatgcaggaagatagtactcaattccatatg

SEQ ID NO: 617052 - DNA, 33 bp, Homo sapien
aggatgcaggaagatattactcaattccatatg

SEQ ID NO: 617053 - DNA, 33 bp, Homo sapien
cctgggagggaatgaacgttgactaagcacctg

SEQ ID NO: 617054 - DNA, 33 bp, Homo sapien
cctgggagggaatgaatgttgactaagcacctg

SEQ ID NO: 617055 - DNA, 33 bp, Homo sapien
aatcacagaaatgatacaggacaaatccaatca

SEQ ID NO: 617056 - DNA, 33 bp, Homo sapien
aatcacagaaatgatataggacaaatccaatca

SEQ ID NO: 617057 - DNA, 33 bp, Homo sapien
taacagttcctgtccaatgaataggtgcccagc

SEQ ID NO: 617058 - DNA, 33 bp, Homo sapien
taacagttcctgtccagtgaataggtgcccagc

SEQ ID NO: 617059 - DNA, 33 bp, Homo sapien
tctttcaatttgaataagaaaaagtccaaaatt

SEQ ID NO: 617060 - DNA, 33 bp, Homo sapien
tctttcaatttgaatatgaaaaagtccaaaatt

SEQ ID NO: 617061 - DNA, 33 bp, Homo sapien
ctcaggcctacccagcaattctgactctgtctg

SEQ ID NO: 617062 - DNA, 33 bp, Homo sapien
ctcaggcctacccagcgattctgactctgtctg

SEQ ID NO: 617063 - DNA, 33 bp, Homo sapien
gctctggagcaagatcacctcgttcaaatccag

SEQ ID NO: 617064 - DNA, 33 bp, Homo sapien
gctctggagcaagatcgcctcgttcaaatccag

SEQ ID NO: 617065 - DNA, 33 bp, Homo sapien
tttttttaattgtgagcccacaaaacatgctat

SEQ ID NO: 617066 - DNA, 33 bp, Homo sapien
tttttttaattgtgagtccacaaaacatgctat

SEQ ID NO: 617067 - DNA, 33 bp, Homo sapien
cttcctctgaaacgtgcaaatccaaccaaacac

SEQ ID NO: 617068 - DNA, 33 bp, Homo sapien
cttcctctgaaacgtgtaaatccaaccaaacac

SEQ ID NO: 617069 - DNA, 33 bp, Homo sapien
gggaggaagtgtaatcaagcagcagcctgcatg

SEQ ID NO: 617070 - DNA, 33 bp, Homo sapien
gggaggaagtgtaatcgagcagcagcctgcatg

SEQ ID NO: 617071 - DNA, 33 bp, Homo sapien
aactttgaaaccagtcccgaggagtaactagaa

SEQ ID NO: 617072 - DNA, 33 bp, Homo sapien
aactttgaaaccagtctcgaggagtaactagaa

SEQ ID NO: 617073 - DNA, 33 bp, Homo sapien
tctacttcgtcctctgcaaaatccttctgggct

SEQ ID NO: 617074 - DNA, 33 bp, Homo sapien
tctacttcgtcctctgtaaaatccttctgggct

SEQ ID NO: 617075 - DNA, 33 bp, Homo sapien
ttcattaattcactaaacaaaatcttattgaac

SEQ ID NO: 617076 - DNA, 33 bp, Homo sapien
ttcattaattcactaagcaaaatcttattgaac

SEQ ID NO: 617077 - DNA, 33 bp, Homo sapien
taaagattccttgcaacggatggagggatcagt

SEQ ID NO: 617078 - DNA, 33 bp, Homo sapien
taaagattccttgcaatggatggagggatcagt

SEQ ID NO: 617079 - DNA, 33 bp, Homo sapien
ggggagctattatgagcccgtgttttctgtcta

SEQ ID NO: 617080 - DNA, 33 bp, Homo sapien
ggggagctattatgagtccgtgttttctgtcta

SEQ ID NO: 617081 - DNA, 33 bp, Homo sapien
caatggttcaatgagagggtgcctacacaaatc

SEQ ID NO: 617082 - DNA, 33 bp, Homo sapien
caatggttcaatgagatggtgcctacacaaatc

SEQ ID NO: 617083 - DNA, 33 bp, Homo sapien
tgcattttacataaaacaacgtctccagaagca

SEQ ID NO: 617084 - DNA, 33 bp, Homo sapien
tgcattttacataaaataacgtctccagaagca

SEQ ID NO: 617085 - DNA, 33 bp, Homo sapien
tattactattctagagaccagcgttataagaaa

SEQ ID NO: 617086 - DNA, 33 bp, Homo sapien
tattactattctagaggccagcgttataagaaa

SEQ ID NO: 617087 - DNA, 33 bp, Homo sapien
ggaaaccaatctatagaccacaggccaaattct

SEQ ID NO: 617088 - DNA, 33 bp, Homo sapien
ggaaaccaatctatagcccacaggccaaattct

SEQ ID NO: 617089 - DNA, 33 bp, Homo sapien
tacctatgactctgcaaccagtagcaatcacgt

SEQ ID NO: 617090 - DNA, 33 bp, Homo sapien
tacctatgactctgcagccagtagcaatcacgt

SEQ ID NO: 617091 - DNA, 33 bp, Homo sapien
aagtggcatcctactaggctatcattgggccac

SEQ ID NO: 617092 - DNA, 33 bp, Homo sapien
aagtggcatcctactatgctatcattgggccac

SEQ ID NO: 617093 - DNA, 33 bp, Homo sapien
acgtatagatgaaatcaagtggaaagaaccaag

SEQ ID NO: 617094 - DNA, 33 bp, Homo sapien
acgtatagatgaaatcgagtggaaagaaccaag

SEQ ID NO: 617095 - DNA, 33 bp, Homo sapien
cgatgattacgtgtgacgatcaaaaacaactgt

SEQ ID NO: 617096 - DNA, 33 bp, Homo sapien
cgatgattacgtgtgatgatcaaaaacaactgt

SEQ ID NO: 617097 - DNA, 33 bp, Homo sapien
gacacagactcgcaaacgtggaaagtgacctcc

SEQ ID NO: 617098 - DNA, 33 bp, Homo sapien
gacacagactcgcaaatgtggaaagtgacctcc

SEQ ID NO: 617099 - DNA, 33 bp, Homo sapien
gcatggctttttatcaagaaatcagtaagtgtg

SEQ ID NO: 617100 - DNA, 33 bp, Homo sapien
gcatggctttttatcatgaaatcagtaagtgtg

SEQ ID NO: 617101 - DNA, 33 bp, Homo sapien
tggagaagaaatcatacgtagttgggaaaaaat

SEQ ID NO: 617102 - DNA, 33 bp, Homo sapien
tggagaagaaatcatatgtagttgggaaaaaat

SEQ ID NO: 617103 - DNA, 33 bp, Homo sapien
ctttatctttggagcacattgggaaggactgac

SEQ ID NO: 617104 - DNA, 33 bp, Homo sapien
ctttatctttggagcatattgggaaggactgac

SEQ ID NO: 617105 - DNA, 33 bp, Homo sapien
tttgctgcctgcctgacgatttatttctgaggc

SEQ ID NO: 617106 - DNA, 33 bp, Homo sapien
tttgctgcctgcctgatgatttatttctgaggc

SEQ ID NO: 617107 - DNA, 33 bp, Homo sapien
gggtaaagatgaggcaaaatcaagtccatcgaa

SEQ ID NO: 617108 - DNA, 33 bp, Homo sapien
gggtaaagatgaggcacaatcaagtccatcgaa

SEQ ID NO: 617109 - DNA, 33 bp, Homo sapien
agcagcagaggctataaatttttttacacgtgg

SEQ ID NO: 617110 - DNA, 33 bp, Homo sapien
agcagcagaggctatacatttttttacacgtgg

SEQ ID NO: 617111 - DNA, 33 bp, Homo sapien
gcaggacctcaataaacctcttagaataaagcc

SEQ ID NO: 617112 - DNA, 33 bp, Homo sapien
gcaggacctcaataaatctcttagaataaagcc

SEQ ID NO: 617113 - DNA, 33 bp, Homo sapien
ctcaggcgacgttgcacgggtgaattgaagggg

SEQ ID NO: 617114 - DNA, 33 bp, Homo sapien
ctcaggcgacgttgcatgggtgaattgaagggg

SEQ ID NO: 617115 - DNA, 33 bp, Homo sapien
caggtctgcaagcccaagcctcggagccctgca

SEQ ID NO: 617116 - DNA, 33 bp, Homo sapien
caggtctgcaagcccaggcctcggagccctgca

SEQ ID NO: 617117 - DNA, 33 bp, Homo sapien
ttctccaaatggcagtaaatgccactaatgaca

SEQ ID NO: 617118 - DNA, 33 bp, Homo sapien
ttctccaaatggcagtgaatgccactaatgaca

SEQ ID NO: 617119 - DNA, 33 bp, Homo sapien
gctcgagttctagacacggtcccctccactctc

SEQ ID NO: 617120 - DNA, 33 bp, Homo sapien
gctcgagttctagacatggtcccctccactctc

SEQ ID NO: 617121 - DNA, 33 bp, Homo sapien
gttggatttaaaaaaccgcagagagactctgct

SEQ ID NO: 617122 - DNA, 33 bp, Homo sapien
gttggatttaaaaaactgcagagagactctgct

SEQ ID NO: 617123 - DNA, 33 bp, Homo sapien
tgtacagtttggaagccctacatcagaagtggc

SEQ ID NO: 617124 - DNA, 33 bp, Homo sapien
tgtacagtttggaagctctacatcagaagtggc

SEQ ID NO: 617125 - DNA, 33 bp, Homo sapien
ccatccttcctcagtggatgctctatgaccaag

SEQ ID NO: 617126 - DNA, 33 bp, Homo sapien
ccatccttcctcagtgtatgctctatgaccaag

SEQ ID NO: 617127 - DNA, 33 bp, Homo sapien
agtgtcttcagcatttaaaaaaatccaatggaa

SEQ ID NO: 617128 - DNA, 33 bp, Homo sapien
agtgtcttcagcattttaaaaaatccaatggaa

SEQ ID NO: 617129 - DNA, 33 bp, Homo sapien
tatggtgatgattaaacgagatcatgtgtgtaa

SEQ ID NO: 617130 - DNA, 33 bp, Homo sapien
tatggtgatgattaaatgagatcatgtgtgtaa

SEQ ID NO: 617131 - DNA, 33 bp, Homo sapien
tataattccctaggagaagccacatgactatat

SEQ ID NO: 617132 - DNA, 33 bp, Homo sapien
tataattccctaggaggagccacatgactatat

SEQ ID NO: 617133 - DNA, 33 bp, Homo sapien
gtttttgagtgactttcgttttcttctttgtgc

SEQ ID NO: 617134 - DNA, 33 bp, Homo sapien
gtttttgagtgacttttgttttcttctttgtgc

SEQ ID NO: 617135 - DNA, 33 bp, Homo sapien
cagagtggtcaaggggaagagtggatcagagag

SEQ ID NO: 617136 - DNA, 33 bp, Homo sapien
cagagtggtcaagggggagagtggatcagagag

SEQ ID NO: 617137 - DNA, 33 bp, Homo sapien
ctgaagatacaatcagcacggccttcactatgg

SEQ ID NO: 617138 - DNA, 33 bp, Homo sapien
ctgaagatacaatcagtacggccttcactatgg

SEQ ID NO: 617139 - DNA, 33 bp, Homo sapien
gctggggactgtgaggcccattatactaatcag

SEQ ID NO: 617140 - DNA, 33 bp, Homo sapien
gctggggactgtgaggtccattatactaatcag

SEQ ID NO: 617141 - DNA, 33 bp, Homo sapien
gtatctcagagtctaacgtgagcctgtttcccg

SEQ ID NO: 617142 - DNA, 33 bp, Homo sapien
gtatctcagagtctaatgtgagcctgtttcccg

SEQ ID NO: 617143 - DNA, 33 bp, Homo sapien
ttttatgtgactctaaataacaccaaattaaac

SEQ ID NO: 617144 - DNA, 33 bp, Homo sapien
ttttatgtgactctaagtaacaccaaattaaac

SEQ ID NO: 617145 - DNA, 33 bp, Homo sapien
tgaggcaataaaacaacgtttagtgaacaaaat

SEQ ID NO: 617146 - DNA, 33 bp, Homo sapien
tgaggcaataaaacaatgtttagtgaacaaaat

SEQ ID NO: 617147 - DNA, 33 bp, Homo sapien
gtttcagaggagcattaaagtaggaacatccct

SEQ ID NO: 617148 - DNA, 33 bp, Homo sapien
gtttcagaggagcattgaagtaggaacatccct

SEQ ID NO: 617149 - DNA, 33 bp, Homo sapien
agccctgttaggatgaagctagaccaagccctg

SEQ ID NO: 617150 - DNA, 33 bp, Homo sapien
agccctgttaggatgaggctagaccaagccctg

SEQ ID NO: 617151 - DNA, 33 bp, Homo sapien
atagcagcacaaaaagcactaatgcacgtttat

SEQ ID NO: 617152 - DNA, 33 bp, Homo sapien
atagcagcacaaaaaggactaatgcacgtttat

SEQ ID NO: 617153 - DNA, 33 bp, Homo sapien
gaaagtaaagaaaaagaacaattgttagagcaa

SEQ ID NO: 617154 - DNA, 33 bp, Homo sapien
gaaagtaaagaaaaaggacaattgttagagcaa

SEQ ID NO: 617155 - DNA, 33 bp, Homo sapien
aaaagttattggtaaaattgaattgttagcata

SEQ ID NO: 617156 - DNA, 33 bp, Homo sapien
aaaagttattggtaaagttgaattgttagcata

SEQ ID NO: 617157 - DNA, 33 bp, Homo sapien
gattttggtggtgaaaattacctaatcagctgt

SEQ ID NO: 617158 - DNA, 33 bp, Homo sapien
gattttggtggtgaaagttacctaatcagctgt

SEQ ID NO: 617159 - DNA, 33 bp, Homo sapien
cagcactaaagacaaacgaaacccttgtcctcg

SEQ ID NO: 617160 - DNA, 33 bp, Homo sapien
cagcactaaagacaaatgaaacccttgtcctcg

SEQ ID NO: 617161 - DNA, 33 bp, Homo sapien
agcctgcagaataagcacacaccaactttgcat

SEQ ID NO: 617162 - DNA, 33 bp, Homo sapien
agcctgcagaataagctcacaccaactttgcat

SEQ ID NO: 617163 - DNA, 33 bp, Homo sapien
agccatcagccagaccagggaaatgacttttcg

SEQ ID NO: 617164 - DNA, 33 bp, Homo sapien
agccatcagccagaccggggaaatgacttttcg

SEQ ID NO: 617165 - DNA, 33 bp, Homo sapien
ctttttattactgagcaatattccatagtatga

SEQ ID NO: 617166 - DNA, 33 bp, Homo sapien
ctttttattactgagcgatattccatagtatga

SEQ ID NO: 617167 - DNA, 33 bp, Homo sapien
gccaaaatagggaatcaaactaagtgtctatca

SEQ ID NO: 617168 - DNA, 33 bp, Homo sapien
gccaaaatagggaatccaactaagtgtctatca

SEQ ID NO: 617169 - DNA, 33 bp, Homo sapien
tcttttccatttctccaccttgaccagttaact

SEQ ID NO: 617170 - DNA, 33 bp, Homo sapien
tcttttccatttctccgccttgaccagttaact

SEQ ID NO: 617171 - DNA, 33 bp, Homo sapien
cgtgtaattcttgttacatctcttctcgattta

SEQ ID NO: 617172 - DNA, 33 bp, Homo sapien
cgtgtaattcttgttatatctcttctcgattta

SEQ ID NO: 617173 - DNA, 33 bp, Homo sapien
tataattggataaataactgttccaggatgttc

SEQ ID NO: 617174 - DNA, 33 bp, Homo sapien
tataattggataaatagctgttccaggatgttc

SEQ ID NO: 617175 - DNA, 33 bp, Homo sapien
aattgtactataagcacctcaaatcctttgtga

SEQ ID NO: 617176 - DNA, 33 bp, Homo sapien
aattgtactataagcatctcaaatcctttgtga

SEQ ID NO: 617177 - DNA, 33 bp, Homo sapien
atggttccttaaaagaaaatcgaggtgctatta

SEQ ID NO: 617178 - DNA, 33 bp, Homo sapien
atggttccttaaaagacaatcgaggtgctatta

SEQ ID NO: 617179 - DNA, 33 bp, Homo sapien
gcatttcaatctgtaacgcggggagcttgttaa

SEQ ID NO: 617180 - DNA, 33 bp, Homo sapien
gcatttcaatctgtaatgcggggagcttgttaa

SEQ ID NO: 617181 - DNA, 33 bp, Homo sapien
tgtgataatccaaaacgccccctcccactattt

SEQ ID NO: 617182 - DNA, 33 bp, Homo sapien
tgtgataatccaaaactccccctcccactattt

SEQ ID NO: 617183 - DNA, 33 bp, Homo sapien
ccagcctcttcaagaaggatcatccataggcta

SEQ ID NO: 617184 - DNA, 33 bp, Homo sapien
ccagcctcttcaagaatgatcatccataggcta

SEQ ID NO: 617185 - DNA, 33 bp, Homo sapien
caggccccttatttccccgttgggtgcctggag

SEQ ID NO: 617186 - DNA, 33 bp, Homo sapien
caggccccttatttcctcgttgggtgcctggag

SEQ ID NO: 617187 - DNA, 33 bp, Homo sapien
taaggatgccagattccaaggccaaggaggttg

SEQ ID NO: 617188 - DNA, 33 bp, Homo sapien
taaggatgccagattcgaaggccaaggaggttg

SEQ ID NO: 617189 - DNA, 33 bp, Homo sapien
acacaaaaatctgcacaagtgtttaaagcagct

SEQ ID NO: 617190 - DNA, 33 bp, Homo sapien
acacaaaaatctgcacgagtgtttaaagcagct

SEQ ID NO: 617191 - DNA, 33 bp, Homo sapien
cagacagtctttccacacaagagcaggatgaag

SEQ ID NO: 617192 - DNA, 33 bp, Homo sapien
cagacagtctttccacgcaagagcaggatgaag

SEQ ID NO: 617193 - DNA, 33 bp, Homo sapien
gcaggatgaagaatttaaaactgtgtttgccaa

SEQ ID NO: 617194 - DNA, 33 bp, Homo sapien
gcaggatgaagaatttgaaactgtgtttgccaa

SEQ ID NO: 617195 - DNA, 33 bp, Homo sapien
ctcgtggtcatggcagaaacttcggttttgact

SEQ ID NO: 617196 - DNA, 33 bp, Homo sapien
ctcgtggtcatggcaggaacttcggttttgact

SEQ ID NO: 617197 - DNA, 33 bp, Homo sapien
gatgtatgtggccaaaaaaaagcccagggaatt

SEQ ID NO: 617198 - DNA, 33 bp, Homo sapien
gatgtatgtggccaaagaaaagcccagggaatt

SEQ ID NO: 617199 - DNA, 33 bp, Homo sapien
cctataggatatttcaaaatgtgcttcattgct

SEQ ID NO: 617200 - DNA, 33 bp, Homo sapien
cctataggatatttcacaatgtgcttcattgct

SEQ ID NO: 617201 - DNA, 33 bp, Homo sapien
aatttggggttaaagacgatgggtgtgcaagct

SEQ ID NO: 617202 - DNA, 33 bp, Homo sapien
aatttggggttaaagatgatgggtgtgcaagct

SEQ ID NO: 617203 - DNA, 33 bp, Homo sapien
aaagtggtggcaaaagacatcctcaaaagaaag

SEQ ID NO: 617204 - DNA, 33 bp, Homo sapien
aaagtggtggcaaaaggcatcctcaaaagaaag

SEQ ID NO: 617205 - DNA, 33 bp, Homo sapien
cagctccacatcatcaactgcagaaacacccca

SEQ ID NO: 617206 - DNA, 33 bp, Homo sapien
cagctccacatcatcagctgcagaaacacccca

SEQ ID NO: 617207 - DNA, 33 bp, Homo sapien
taaagacctgattcctaactgcattacattacc

SEQ ID NO: 617208 - DNA, 33 bp, Homo sapien
taaagacctgattcctgactgcattacattacc

SEQ ID NO: 617209 - DNA, 33 bp, Homo sapien
gcagcaacgtgacaaacagacactgtgtgctat

SEQ ID NO: 617210 - DNA, 33 bp, Homo sapien
gcagcaacgtgacaaagagacactgtgtgctat

SEQ ID NO: 617211 - DNA, 33 bp, Homo sapien
agggagaacagggaacacttttcagacagaggg

SEQ ID NO: 617212 - DNA, 33 bp, Homo sapien
agggagaacagggaacgcttttcagacagaggg

SEQ ID NO: 617213 - DNA, 33 bp, Homo sapien
gtgacccgtgagtataccactgcaagagccgag

SEQ ID NO: 617214 - DNA, 33 bp, Homo sapien
gtgacccgtgagtatatcactgcaagagccgag

SEQ ID NO: 617215 - DNA, 33 bp, Homo sapien
ccactggaacttgctacggacacagtcagttac

SEQ ID NO: 617216 - DNA, 33 bp, Homo sapien
ccactggaacttgctatggacacagtcagttac

SEQ ID NO: 617217 - DNA, 33 bp, Homo sapien
gaggatcttttaaaataaccagtactcaagcca

SEQ ID NO: 617218 - DNA, 33 bp, Homo sapien
gaggatcttttaaaatgaccagtactcaagcca

SEQ ID NO: 617219 - DNA, 33 bp, Homo sapien
tcaatctttcagcgaagtgtgtaaagacatctg

SEQ ID NO: 617220 - DNA, 33 bp, Homo sapien
tcaatctttcagcgaattgtgtaaagacatctg

SEQ ID NO: 617221 - DNA, 33 bp, Homo sapien
ttgaagttaagatgtacgggactgggggaattt

SEQ ID NO: 617222 - DNA, 33 bp, Homo sapien
ttgaagttaagatgtatgggactgggggaattt

SEQ ID NO: 617223 - DNA, 33 bp, Homo sapien
gctggctaaccaataaattaaatagtttcgcaa

SEQ ID NO: 617224 - DNA, 33 bp, Homo sapien
gctggctaaccaataagttaaatagtttcgcaa

SEQ ID NO: 617225 - DNA, 33 bp, Homo sapien
tagcagggggacgtagaacaggcagaaacaatg

SEQ ID NO: 617226 - DNA, 33 bp, Homo sapien
tagcagggggacgtaggacaggcagaaacaatg

SEQ ID NO: 617227 - DNA, 33 bp, Homo sapien
gaagcaacctttccagcacaaaagaaatttaat

SEQ ID NO: 617228 - DNA, 33 bp, Homo sapien
gaagcaacctttccaggacaaaagaaatttaat

SEQ ID NO: 617229 - DNA, 33 bp, Homo sapien
tatataatatcaaaaaaataaatggacaggctg

SEQ ID NO: 617230 - DNA, 33 bp, Homo sapien
tatataatatcaaaaagataaatggacaggctg

SEQ ID NO: 617231 - DNA, 33 bp, Homo sapien
tctctagaatatctaacgactggttaaatcaca

SEQ ID NO: 617232 - DNA, 33 bp, Homo sapien
tctctagaatatctaatgactggttaaatcaca

SEQ ID NO: 617233 - DNA, 33 bp, Homo sapien
tttctatctactcttcaaaggaaaaaaaatcag

SEQ ID NO: 617234 - DNA, 33 bp, Homo sapien
tttctatctactcttcgaaggaaaaaaaatcag

SEQ ID NO: 617235 - DNA, 33 bp, Homo sapien
gggttgaatcccaagacgttgtgctcctgttta

SEQ ID NO: 617236 - DNA, 33 bp, Homo sapien
gggttgaatcccaagatgttgtgctcctgttta

SEQ ID NO: 617237 - DNA, 33 bp, Homo sapien
gcctgtgctctataaccgaaacaacaaaatctg

SEQ ID NO: 617238 - DNA, 33 bp, Homo sapien
gcctgtgctctataactgaaacaacaaaatctg

SEQ ID NO: 617239 - DNA, 33 bp, Homo sapien
cttcttccactagaagacggtttcatctatgtt

SEQ ID NO: 617240 - DNA, 33 bp, Homo sapien
cttcttccactagaaggcggtttcatctatgtt

SEQ ID NO: 617241 - DNA, 33 bp, Homo sapien
caggcaccctttaatccagcaattccactttta

SEQ ID NO: 617242 - DNA, 33 bp, Homo sapien
caggcaccctttaatctagcaattccactttta

SEQ ID NO: 617243 - DNA, 33 bp, Homo sapien
cttaaacttacacaaacagatagcaacgtgctc

SEQ ID NO: 617244 - DNA, 33 bp, Homo sapien
cttaaacttacacaaatagatagcaacgtgctc

SEQ ID NO: 617245 - DNA, 33 bp, Homo sapien
catacttttcaagtgaataactaggtcatccta

SEQ ID NO: 617246 - DNA, 33 bp, Homo sapien
catacttttcaagtgagtaactaggtcatccta

SEQ ID NO: 617247 - DNA, 33 bp, Homo sapien
gattttggaactgcccaagtccatgtttcttgc

SEQ ID NO: 617248 - DNA, 33 bp, Homo sapien
gattttggaactgcccgagtccatgtttcttgc

SEQ ID NO: 617249 - DNA, 33 bp, Homo sapien
tgaggctttgaaaaaactagctgcacagtcttc

SEQ ID NO: 617250 - DNA, 33 bp, Homo sapien
tgaggctttgaaaaaattagctgcacagtcttc

SEQ ID NO: 617251 - DNA, 33 bp, Homo sapien
ttttccatctacaaccacttttttgtcctatca

SEQ ID NO: 617252 - DNA, 33 bp, Homo sapien
ttttccatctacaaccgcttttttgtcctatca

SEQ ID NO: 617253 - DNA, 33 bp, Homo sapien
taaggtagatgaacaacgatgataaaataaaat

SEQ ID NO: 617254 - DNA, 33 bp, Homo sapien
taaggtagatgaacaatgatgataaaataaaat

SEQ ID NO: 617255 - DNA, 33 bp, Homo sapien
agccattccccttctcacagaacatcaatatac

SEQ ID NO: 617256 - DNA, 33 bp, Homo sapien
agccattccccttctcgcagaacatcaatatac

SEQ ID NO: 617257 - DNA, 33 bp, Homo sapien
tgtgctgtttactctccgacactttgtatacct

SEQ ID NO: 617258 - DNA, 33 bp, Homo sapien
tgtgctgtttactctctgacactttgtatacct

SEQ ID NO: 617259 - DNA, 33 bp, Homo sapien
ctgggaggcttcactacaggttttcgagaggaa

SEQ ID NO: 617260 - DNA, 33 bp, Homo sapien
ctgggaggcttcactagaggttttcgagaggaa

SEQ ID NO: 617261 - DNA, 33 bp, Homo sapien
ttatttgcaaaagataccactgtctacgtggaa

SEQ ID NO: 617262 - DNA, 33 bp, Homo sapien
ttatttgcaaaagatatcactgtctacgtggaa

SEQ ID NO: 617263 - DNA, 33 bp, Homo sapien
gggggcaaacatgtgacaccattgtcctcaggg

SEQ ID NO: 617264 - DNA, 33 bp, Homo sapien
gggggcaaacatgtgataccattgtcctcaggg

SEQ ID NO: 617265 - DNA, 33 bp, Homo sapien
aactgcccaagagaaacgacaacgtgtccacat

SEQ ID NO: 617266 - DNA, 33 bp, Homo sapien
aactgcccaagagaaatgacaacgtgtccacat

SEQ ID NO: 617267 - DNA, 33 bp, Homo sapien
atataaagataccttacacactttgaatatata

SEQ ID NO: 617268 - DNA, 33 bp, Homo sapien
atataaagataccttatacactttgaatatata

SEQ ID NO: 617269 - DNA, 33 bp, Homo sapien
atcatgctggactgtacactggaaatttgctaa

SEQ ID NO: 617270 - DNA, 33 bp, Homo sapien
atcatgctggactgtatactggaaatttgctaa

SEQ ID NO: 617271 - DNA, 33 bp, Homo sapien
gaataaacctaacatcagatgtacagaatccat

SEQ ID NO: 617272 - DNA, 33 bp, Homo sapien
gaataaacctaacatcggatgtacagaatccat

SEQ ID NO: 617273 - DNA, 33 bp, Homo sapien
tcagtttcttccactcagaccatcagaacccag

SEQ ID NO: 617274 - DNA, 33 bp, Homo sapien
tcagtttcttccactcggaccatcagaacccag

SEQ ID NO: 617275 - DNA, 33 bp, Homo sapien
gccctgccacaaatccgcagcgtaacttccaac

SEQ ID NO: 617276 - DNA, 33 bp, Homo sapien
gccctgccacaaatcctcagcgtaacttccaac

SEQ ID NO: 617277 - DNA, 33 bp, Homo sapien
tggaatccaggtgagacagtcagcaccacctcc

SEQ ID NO: 617278 - DNA, 33 bp, Homo sapien
tggaatccaggtgagagagtcagcaccacctcc

SEQ ID NO: 617279 - DNA, 33 bp, Homo sapien
cctgccagttctcagaggtcggattctcctgta

SEQ ID NO: 617280 - DNA, 33 bp, Homo sapien
cctgccagttctcagatgtcggattctcctgta

SEQ ID NO: 617281 - DNA, 33 bp, Homo sapien
tctctgaatgctggaactggatatgggaaagtt

SEQ ID NO: 617282 - DNA, 33 bp, Homo sapien
tctctgaatgctggaattggatatgggaaagtt

SEQ ID NO: 617283 - DNA, 33 bp, Homo sapien
ttagttttcggttggcccattcataaaatagtt

SEQ ID NO: 617284 - DNA, 33 bp, Homo sapien
ttagttttcggttggctcattcataaaatagtt

SEQ ID NO: 617285 - DNA, 33 bp, Homo sapien
cctctctcgttcttgcaactggcactgtcatct

SEQ ID NO: 617286 - DNA, 33 bp, Homo sapien
cctctctcgttcttgcgactggcactgtcatct

SEQ ID NO: 617287 - DNA, 33 bp, Homo sapien
agacgctccgaaggcaagatgcatgcaactcca

SEQ ID NO: 617288 - DNA, 33 bp, Homo sapien
agacgctccgaaggcacgatgcatgcaactcca

SEQ ID NO: 617289 - DNA, 33 bp, Homo sapien
ggaatccttcaaactaactgctctttctttctg

SEQ ID NO: 617290 - DNA, 33 bp, Homo sapien
ggaatccttcaaactatctgctctttctttctg

SEQ ID NO: 617291 - DNA, 33 bp, Homo sapien
ggtggaggccccgggacgttagtagttcggcac

SEQ ID NO: 617292 - DNA, 33 bp, Homo sapien
ggtggaggccccgggatgttagtagttcggcac

SEQ ID NO: 617293 - DNA, 33 bp, Homo sapien
tgctcaacaaccacaacgaaataatggaggtta

SEQ ID NO: 617294 - DNA, 33 bp, Homo sapien
tgctcaacaaccacaaggaaataatggaggtta

SEQ ID NO: 617295 - DNA, 33 bp, Homo sapien
tgggttggttccaatacggtgaccctgagaaat

SEQ ID NO: 617296 - DNA, 33 bp, Homo sapien
tgggttggttccaatatggtgaccctgagaaat

SEQ ID NO: 617297 - DNA, 33 bp, Homo sapien
taggttaatggataaacgcagaaattgaccttt

SEQ ID NO: 617298 - DNA, 33 bp, Homo sapien
taggttaatggataaatgcagaaattgaccttt

SEQ ID NO: 617299 - DNA, 33 bp, Homo sapien
gttatgatgatagagaataagaaaatatacata

SEQ ID NO: 617300 - DNA, 33 bp, Homo sapien
gttatgatgatagagagtaagaaaatatacata

SEQ ID NO: 617301 - DNA, 33 bp, Homo sapien
tgaaaatttcagcccaataagttaaactagact

SEQ ID NO: 617302 - DNA, 33 bp, Homo sapien
tgaaaatttcagcccagtaagttaaactagact

SEQ ID NO: 617303 - DNA, 33 bp, Homo sapien
cactccttattctataacatctttgatctttaa

SEQ ID NO: 617304 - DNA, 33 bp, Homo sapien
cactccttattctatagcatctttgatctttaa

SEQ ID NO: 617305 - DNA, 33 bp, Homo sapien
gctgattcttgtgaaaccttaggccaaaatctt

SEQ ID NO: 617306 - DNA, 33 bp, Homo sapien
gctgattcttgtgaaatcttaggccaaaatctt

SEQ ID NO: 617307 - DNA, 33 bp, Homo sapien
cattacccagtgagcaaattttatcaatgagaa

SEQ ID NO: 617308 - DNA, 33 bp, Homo sapien
cattacccagtgagcacattttatcaatgagaa

SEQ ID NO: 617309 - DNA, 33 bp, Homo sapien
gccttgaggcctcttaaaatgtaacatctttgc

SEQ ID NO: 617310 - DNA, 33 bp, Homo sapien
gccttgaggcctcttacaatgtaacatctttgc

SEQ ID NO: 617311 - DNA, 33 bp, Homo sapien
aaactctccttctctaaggaaattccagagcta

SEQ ID NO: 617312 - DNA, 33 bp, Homo sapien
aaactctccttctctatggaaattccagagcta

SEQ ID NO: 617313 - DNA, 33 bp, Homo sapien
ctgggacttacttcgcagaaaatttgggagcca

SEQ ID NO: 617314 - DNA, 33 bp, Homo sapien
ctgggacttacttcgcggaaaatttgggagcca

SEQ ID NO: 617315 - DNA, 33 bp, Homo sapien
gcagagtggactttgagacttgggtatgtgtgg

SEQ ID NO: 617316 - DNA, 33 bp, Homo sapien
gcagagtggactttgatacttgggtatgtgtgg

SEQ ID NO: 617317 - DNA, 33 bp, Homo sapien
tgacatttggttctaaagtctttgaaagtacaa

SEQ ID NO: 617318 - DNA, 33 bp, Homo sapien
tgacatttggttctaaggtctttgaaagtacaa

SEQ ID NO: 617319 - DNA, 33 bp, Homo sapien
catatcacacattgaaagaggacaaagcatctt

SEQ ID NO: 617320 - DNA, 33 bp, Homo sapien
catatcacacattgaaggaggacaaagcatctt

SEQ ID NO: 617321 - DNA, 33 bp, Homo sapien
acatatttatgttgtacaatgatccagtcagtg

SEQ ID NO: 617322 - DNA, 33 bp, Homo sapien
acatatttatgttgtataatgatccagtcagtg

SEQ ID NO: 617323 - DNA, 33 bp, Homo sapien
ttcagtattgtgaaaactggctttggttttgaa

SEQ ID NO: 617324 - DNA, 33 bp, Homo sapien
ttcagtattgtgaaaattggctttggttttgaa

SEQ ID NO: 617325 - DNA, 33 bp, Homo sapien
acagatgagcaacaggaaaataaagaagataat

SEQ ID NO: 617326 - DNA, 33 bp, Homo sapien
acagatgagcaacagggaaataaagaagataat

SEQ ID NO: 617327 - DNA, 33 bp, Homo sapien
atctgtaatcaagcagccaacttcaaatgtttt

SEQ ID NO: 617328 - DNA, 33 bp, Homo sapien
atctgtaatcaagcaggcaacttcaaatgtttt

SEQ ID NO: 617329 - DNA, 33 bp, Homo sapien
catgtacacaaatatacaaaaacagtcggacca

SEQ ID NO: 617330 - DNA, 33 bp, Homo sapien
catgtacacaaatatataaaaacagtcggacca

SEQ ID NO: 617331 - DNA, 33 bp, Homo sapien
atggaagagtgtttaaccaaatagggctataat

SEQ ID NO: 617332 - DNA, 33 bp, Homo sapien
atggaagagtgtttaagcaaatagggctataat

SEQ ID NO: 617333 - DNA, 33 bp, Homo sapien
catggacatttttcataaaacagtctagtgtgt

SEQ ID NO: 617334 - DNA, 33 bp, Homo sapien
catggacatttttcatgaaacagtctagtgtgt

SEQ ID NO: 617335 - DNA, 33 bp, Homo sapien
cattctctgatacagcacaagaggtcaatgtcc

SEQ ID NO: 617336 - DNA, 33 bp, Homo sapien
cattctctgatacagctcaagaggtcaatgtcc

SEQ ID NO: 617337 - DNA, 33 bp, Homo sapien
gttttatagaatacacaacggtaactggtattt

SEQ ID NO: 617338 - DNA, 33 bp, Homo sapien
gttttatagaatacacgacggtaactggtattt

SEQ ID NO: 617339 - DNA, 33 bp, Homo sapien
gtatgtaataacagaaacgtccaaacccttcag

SEQ ID NO: 617340 - DNA, 33 bp, Homo sapien
gtatgtaataacagaaccgtccaaacccttcag

SEQ ID NO: 617341 - DNA, 33 bp, Homo sapien
gtcctacacttaggaacaggtactaccaaattc

SEQ ID NO: 617342 - DNA, 33 bp, Homo sapien
gtcctacacttaggaagaggtactaccaaattc

SEQ ID NO: 617343 - DNA, 33 bp, Homo sapien
agaaaactgaagtctacgttggaaaacctttgt

SEQ ID NO: 617344 - DNA, 33 bp, Homo sapien
agaaaactgaagtctatgttggaaaacctttgt

SEQ ID NO: 617345 - DNA, 33 bp, Homo sapien
tgcattttggttaaaaccgaaaagatggttgga

SEQ ID NO: 617346 - DNA, 33 bp, Homo sapien
tgcattttggttaaaatcgaaaagatggttgga

SEQ ID NO: 617347 - DNA, 33 bp, Homo sapien
gttaaaaactcaggcacaaacacacgcattatc

SEQ ID NO: 617348 - DNA, 33 bp, Homo sapien
gttaaaaactcaggcataaacacacgcattatc

SEQ ID NO: 617349 - DNA, 33 bp, Homo sapien
ctccctgttataaccacgagctgttttccacag

SEQ ID NO: 617350 - DNA, 33 bp, Homo sapien
ctccctgttataaccatgagctgttttccacag

SEQ ID NO: 617351 - DNA, 33 bp, Homo sapien
gggaaatggggagttacgtgttcaaaggatgta

SEQ ID NO: 617352 - DNA, 33 bp, Homo sapien
gggaaatggggagttatgtgttcaaaggatgta

SEQ ID NO: 617353 - DNA, 33 bp, Homo sapien
cggtctggaagatagagagcaaaacattgcaga

SEQ ID NO: 617354 - DNA, 33 bp, Homo sapien
cggtctggaagatagatagcaaaacattgcaga

SEQ ID NO: 617355 - DNA, 33 bp, Homo sapien
gtccctttccccacacaaatcactggtctaata

SEQ ID NO: 617356 - DNA, 33 bp, Homo sapien
gtccctttccccacacgaatcactggtctaata

SEQ ID NO: 617357 - DNA, 33 bp, Homo sapien
tctcacacaagcaataagcagacacattggtat

SEQ ID NO: 617358 - DNA, 33 bp, Homo sapien
tctcacacaagcaataggcagacacattggtat

SEQ ID NO: 617359 - DNA, 33 bp, Homo sapien
ctatgtcctggaaagaggatgatgtctccttat

SEQ ID NO: 617360 - DNA, 33 bp, Homo sapien
ctatgtcctggaaagatgatgatgtctccttat

SEQ ID NO: 617361 - DNA, 33 bp, Homo sapien
cacttgggagccaaacccacaccaatattcact

SEQ ID NO: 617362 - DNA, 33 bp, Homo sapien
cacttgggagccaaactcacaccaatattcact

SEQ ID NO: 617363 - DNA, 33 bp, Homo sapien
aggtgttaaatgaagacgcgtgtcattactgct

SEQ ID NO: 617364 - DNA, 33 bp, Homo sapien
aggtgttaaatgaagatgcgtgtcattactgct

SEQ ID NO: 617365 - DNA, 33 bp, Homo sapien
ttttaagggctgtgagaaactattgagggattt

SEQ ID NO: 617366 - DNA, 33 bp, Homo sapien
ttttaagggctgtgagcaactattgagggattt

SEQ ID NO: 617367 - DNA, 33 bp, Homo sapien
atgtgattgtcaaaagcctttgaactgcacact

SEQ ID NO: 617368 - DNA, 33 bp, Homo sapien
atgtgattgtcaaaagtctttgaactgcacact

SEQ ID NO: 617369 - DNA, 33 bp, Homo sapien
tgcagcagtgaaataaaagagaaggaaaaggga

SEQ ID NO: 617370 - DNA, 33 bp, Homo sapien
tgcagcagtgaaataacagagaaggaaaaggga

SEQ ID NO: 617371 - DNA, 33 bp, Homo sapien
tgctcaactgtaaacacgagtgcaataaaaatc

SEQ ID NO: 617372 - DNA, 33 bp, Homo sapien
tgctcaactgtaaacatgagtgcaataaaaatc

SEQ ID NO: 617373 - DNA, 33 bp, Homo sapien
gccacagtgggtctcactaaccaaagccagctc

SEQ ID NO: 617374 - DNA, 33 bp, Homo sapien
gccacagtgggtctcagtaaccaaagccagctc

SEQ ID NO: 617375 - DNA, 33 bp, Homo sapien
gaaaccttcttagaaacagacactcccgactgg

SEQ ID NO: 617376 - DNA, 33 bp, Homo sapien
gaaaccttcttagaaatagacactcccgactgg

SEQ ID NO: 617377 - DNA, 33 bp, Homo sapien
gaaaacagctcgtgaaagtcaggcacagagtgg

SEQ ID NO: 617378 - DNA, 33 bp, Homo sapien
gaaaacagctcgtgaaggtcaggcacagagtgg

SEQ ID NO: 617379 - DNA, 33 bp, Homo sapien
actgatagagccaagacagaaatccggtcttct

SEQ ID NO: 617380 - DNA, 33 bp, Homo sapien
actgatagagccaagatagaaatccggtcttct

SEQ ID NO: 617381 - DNA, 33 bp, Homo sapien
tttgctctgattctgcaatttagaagcaattct

SEQ ID NO: 617382 - DNA, 33 bp, Homo sapien
tttgctctgattctgcgatttagaagcaattct

SEQ ID NO: 617383 - DNA, 33 bp, Homo sapien
tcttacctagtatgccaatggatgaatacaacc

SEQ ID NO: 617384 - DNA, 33 bp, Homo sapien
tcttacctagtatgccgatggatgaatacaacc

SEQ ID NO: 617385 - DNA, 33 bp, Homo sapien
tgcaggagttgttagacaggctggaccagacac

SEQ ID NO: 617386 - DNA, 33 bp, Homo sapien
tgcaggagttgttagagaggctggaccagacac

SEQ ID NO: 617387 - DNA, 33 bp, Homo sapien
aaaaacatttgcaaacagctggaagacaagtgt

SEQ ID NO: 617388 - DNA, 33 bp, Homo sapien
aaaaacatttgcaaacggctggaagacaagtgt

SEQ ID NO: 617389 - DNA, 33 bp, Homo sapien
accacacagacaaaaacggtaactatgtgagga

SEQ ID NO: 617390 - DNA, 33 bp, Homo sapien
accacacagacaaaaatggtaactatgtgagga

SEQ ID NO: 617391 - DNA, 33 bp, Homo sapien
atttatagagttgtaccgccatcatacagtttt

SEQ ID NO: 617392 - DNA, 33 bp, Homo sapien
atttatagagttgtactgccatcatacagtttt

SEQ ID NO: 617393 - DNA, 33 bp, Homo sapien
atgggtaaaacagaaccgtggcactgggagtca

SEQ ID NO: 617394 - DNA, 33 bp, Homo sapien
atgggtaaaacagaactgtggcactgggagtca

SEQ ID NO: 617395 - DNA, 33 bp, Homo sapien
gctagggatactggtacagataacagctatggt

SEQ ID NO: 617396 - DNA, 33 bp, Homo sapien
gctagggatactggtatagataacagctatggt

SEQ ID NO: 617397 - DNA, 33 bp, Homo sapien
accataagcagatataccgacaaagaaaatctc

SEQ ID NO: 617398 - DNA, 33 bp, Homo sapien
accataagcagatatatcgacaaagaaaatctc

SEQ ID NO: 617399 - DNA, 33 bp, Homo sapien
agttatttcacttatacacgtggcctccagttc

SEQ ID NO: 617400 - DNA, 33 bp, Homo sapien
agttatttcacttatagacgtggcctccagttc

SEQ ID NO: 617401 - DNA, 33 bp, Homo sapien
aaatagcacagaggtaacccaaaaaggggagtg

SEQ ID NO: 617402 - DNA, 33 bp, Homo sapien
aaatagcacagaggtagcccaaaaaggggagtg

SEQ ID NO: 617403 - DNA, 33 bp, Homo sapien
aaattatacgcctctgcaagtcagtatagcatt

SEQ ID NO: 617404 - DNA, 33 bp, Homo sapien
aaattatacgcctctggaagtcagtatagcatt

SEQ ID NO: 617405 - DNA, 33 bp, Homo sapien
aatcaatcaccattacactgtactatattccca

SEQ ID NO: 617406 - DNA, 33 bp, Homo sapien
aatcaatcaccattacgctgtactatattccca

SEQ ID NO: 617407 - DNA, 33 bp, Homo sapien
ccctatggcctataaaagcctgcatgatctagt

SEQ ID NO: 617408 - DNA, 33 bp, Homo sapien
ccctatggcctataaacgcctgcatgatctagt

SEQ ID NO: 617409 - DNA, 33 bp, Homo sapien
ctctggagaaattctacagacactgatatttga

SEQ ID NO: 617410 - DNA, 33 bp, Homo sapien
ctctggagaaattctatagacactgatatttga

SEQ ID NO: 617411 - DNA, 33 bp, Homo sapien
gctaaatttaataaacaaagagacgagagagag

SEQ ID NO: 617412 - DNA, 33 bp, Homo sapien
gctaaatttaataaacgaagagacgagagagag

SEQ ID NO: 617413 - DNA, 33 bp, Homo sapien
gagaattttgaatatgcatgagcccattaatgt

SEQ ID NO: 617414 - DNA, 33 bp, Homo sapien
gagaattttgaatatgtatgagcccattaatgt

SEQ ID NO: 617415 - DNA, 33 bp, Homo sapien
aaaaagtttggtcacaatgctatattaaacact

SEQ ID NO: 617416 - DNA, 33 bp, Homo sapien
aaaaagtttggtcacagtgctatattaaacact

SEQ ID NO: 617417 - DNA, 33 bp, Homo sapien
ggagttattagcactaacgttctgattgaagat

SEQ ID NO: 617418 - DNA, 33 bp, Homo sapien
ggagttattagcactagcgttctgattgaagat

SEQ ID NO: 617419 - DNA, 33 bp, Homo sapien
aagaaatggcacaaaaaggagtaaaataccatg

SEQ ID NO: 617420 - DNA, 33 bp, Homo sapien
aagaaatggcacaaaacggagtaaaataccatg

SEQ ID NO: 617421 - DNA, 33 bp, Homo sapien
tggtgaataggtaagaaataaaataactgactt

SEQ ID NO: 617422 - DNA, 33 bp, Homo sapien
tggtgaataggtaagagataaaataactgactt

SEQ ID NO: 617423 - DNA, 33 bp, Homo sapien
tgcaaaatgtactaaccgcactcagcataggga

SEQ ID NO: 617424 - DNA, 33 bp, Homo sapien
tgcaaaatgtactaactgcactcagcataggga

SEQ ID NO: 617425 - DNA, 33 bp, Homo sapien
cagcaagtctgtttaactcacgtgtccttcaag

SEQ ID NO: 617426 - DNA, 33 bp, Homo sapien
cagcaagtctgtttaattcacgtgtccttcaag

SEQ ID NO: 617427 - DNA, 33 bp, Homo sapien
gccctgagccttgatagcctctgtacttctctc

SEQ ID NO: 617428 - DNA, 33 bp, Homo sapien
gccctgagccttgatatcctctgtacttctctc

SEQ ID NO: 617429 - DNA, 33 bp, Homo sapien
gaaaagccccaaagaaatctaaaaagtgcctgg

SEQ ID NO: 617430 - DNA, 33 bp, Homo sapien
gaaaagccccaaagaagtctaaaaagtgcctgg

SEQ ID NO: 617431 - DNA, 33 bp, Homo sapien
tgttctttggaattccaccattatttattcatt

SEQ ID NO: 617432 - DNA, 33 bp, Homo sapien
tgttctttggaattccgccattatttattcatt

SEQ ID NO: 617433 - DNA, 33 bp, Homo sapien
aatatatcccctcagcaaatacgaaaactcttc

SEQ ID NO: 617434 - DNA, 33 bp, Homo sapien
aatatatcccctcagcgaatacgaaaactcttc

SEQ ID NO: 617435 - DNA, 33 bp, Homo sapien
ttttaacagtagacgtcacaactgtaagagaaa

SEQ ID NO: 617436 - DNA, 33 bp, Homo sapien
ttttaacagtagacgttacaactgtaagagaaa

SEQ ID NO: 617437 - DNA, 33 bp, Homo sapien
cttccctttgctggaaactgacctttctctctg

SEQ ID NO: 617438 - DNA, 33 bp, Homo sapien
cttccctttgctggaacctgacctttctctctg

SEQ ID NO: 617439 - DNA, 33 bp, Homo sapien
tccaggtgtccgcttccaaccccaacaggttct

SEQ ID NO: 617440 - DNA, 33 bp, Homo sapien
tccaggtgtccgcttctaaccccaacaggttct

SEQ ID NO: 617441 - DNA, 33 bp, Homo sapien
catgaatggcattacccggggaattctcaaatg

SEQ ID NO: 617442 - DNA, 33 bp, Homo sapien
catgaatggcattacctggggaattctcaaatg

SEQ ID NO: 617443 - DNA, 33 bp, Homo sapien
aggaaatagctatgacaacactgactggaggca

SEQ ID NO: 617444 - DNA, 33 bp, Homo sapien
aggaaatagctatgacgacactgactggaggca

SEQ ID NO: 617445 - DNA, 33 bp, Homo sapien
cccgattcttctctgacgtttcgtttcctttca

SEQ ID NO: 617446 - DNA, 33 bp, Homo sapien
cccgattcttctctgaggtttcgtttcctttca

SEQ ID NO: 617447 - DNA, 33 bp, Homo sapien
gagctgggtccctcacactcttcttgaggctac

SEQ ID NO: 617448 - DNA, 33 bp, Homo sapien
gagctgggtccctcacgctcttcttgaggctac

SEQ ID NO: 617449 - DNA, 33 bp, Homo sapien
ttattcatttctacggaaaacactagtaaaaca

SEQ ID NO: 617450 - DNA, 33 bp, Homo sapien
ttattcatttctacgggaaacactagtaaaaca

SEQ ID NO: 617451 - DNA, 33 bp, Homo sapien
gcagtgtcttctggccagcattgacccaggggt

SEQ ID NO: 617452 - DNA, 33 bp, Homo sapien
gcagtgtcttctggccggcattgacccaggggt

SEQ ID NO: 617453 - DNA, 33 bp, Homo sapien
aagattcactgtttccaccatcccaggctgccc

SEQ ID NO: 617454 - DNA, 33 bp, Homo sapien
aagattcactgtttccgccatcccaggctgccc

SEQ ID NO: 617455 - DNA, 33 bp, Homo sapien
caaaatactgtcaataaatctaaatccatcaga

SEQ ID NO: 617456 - DNA, 33 bp, Homo sapien
caaaatactgtcaatacatctaaatccatcaga

SEQ ID NO: 617457 - DNA, 33 bp, Homo sapien
acacagaaggatgtaaataaaactaagaaatag

SEQ ID NO: 617458 - DNA, 33 bp, Homo sapien
acacagaaggatgtaagtaaaactaagaaatag

SEQ ID NO: 617459 - DNA, 33 bp, Homo sapien
atcgtgaattacatccaaaaaggtgcaagatac

SEQ ID NO: 617460 - DNA, 33 bp, Homo sapien
atcgtgaattacatccgaaaaggtgcaagatac

SEQ ID NO: 617461 - DNA, 33 bp, Homo sapien
gaagcacatcagagccagcaaaggggagagcag

SEQ ID NO: 617462 - DNA, 33 bp, Homo sapien
gaagcacatcagagccggcaaaggggagagcag

SEQ ID NO: 617463 - DNA, 33 bp, Homo sapien
ggggaaaagtgaatgcacacatattttgaggac

SEQ ID NO: 617464 - DNA, 33 bp, Homo sapien
ggggaaaagtgaatgcgcacatattttgaggac

SEQ ID NO: 617465 - DNA, 33 bp, Homo sapien
cgctctaagaggtggaactatattagccagggt

SEQ ID NO: 617466 - DNA, 33 bp, Homo sapien
cgctctaagaggtggatctatattagccagggt

SEQ ID NO: 617467 - DNA, 33 bp, Homo sapien
aagcctcctgacaggtaaagaatcttcataccc

SEQ ID NO: 617468 - DNA, 33 bp, Homo sapien
aagcctcctgacaggtgaagaatcttcataccc

SEQ ID NO: 617469 - DNA, 33 bp, Homo sapien
cacacaggatgtcagcgcacataagaggaggtt

SEQ ID NO: 617470 - DNA, 33 bp, Homo sapien
cacacaggatgtcagctcacataagaggaggtt

SEQ ID NO: 617471 - DNA, 33 bp, Homo sapien
aagaaactaaaattcaaaaatatcaggccaagc

SEQ ID NO: 617472 - DNA, 33 bp, Homo sapien
aagaaactaaaattcagaaatatcaggccaagc

SEQ ID NO: 617473 - DNA, 33 bp, Homo sapien
tgagtatcattatccccagtctacagataagga

SEQ ID NO: 617474 - DNA, 33 bp, Homo sapien
tgagtatcattatccctagtctacagataagga

SEQ ID NO: 617475 - DNA, 33 bp, Homo sapien
caagagtctgtgcctaacaaacatttgaagata

SEQ ID NO: 617476 - DNA, 33 bp, Homo sapien
caagagtctgtgcctagcaaacatttgaagata

SEQ ID NO: 617477 - DNA, 33 bp, Homo sapien
ttcgggccttttaaggaactgcccataaggaca

SEQ ID NO: 617478 - DNA, 33 bp, Homo sapien
ttcgggccttttaaggtactgcccataaggaca

SEQ ID NO: 617479 - DNA, 33 bp, Homo sapien
tgatgcatctgtccaccgaagagctaaaatcac

SEQ ID NO: 617480 - DNA, 33 bp, Homo sapien
tgatgcatctgtccactgaagagctaaaatcac

SEQ ID NO: 617481 - DNA, 33 bp, Homo sapien
ggtacttgtttaagaacgcaagtttaagaagtg

SEQ ID NO: 617482 - DNA, 33 bp, Homo sapien
ggtacttgtttaagaatgcaagtttaagaagtg

SEQ ID NO: 617483 - DNA, 33 bp, Homo sapien
tctgttacatagggcccgactttctaagcattt

SEQ ID NO: 617484 - DNA, 33 bp, Homo sapien
tctgttacatagggcctgactttctaagcattt

SEQ ID NO: 617485 - DNA, 33 bp, Homo sapien
gttgcctctgcagataaactcccttaaaatgct

SEQ ID NO: 617486 - DNA, 33 bp, Homo sapien
gttgcctctgcagatagactcccttaaaatgct

SEQ ID NO: 617487 - DNA, 33 bp, Homo sapien
tataatctcctggaaacaatgctgtgttttctc

SEQ ID NO: 617488 - DNA, 33 bp, Homo sapien
tataatctcctggaaataatgctgtgttttctc

SEQ ID NO: 617489 - DNA, 33 bp, Homo sapien
cattgaatatgtagtgcaactgctgatccccgg

SEQ ID NO: 617490 - DNA, 33 bp, Homo sapien
cattgaatatgtagtgtaactgctgatccccgg

SEQ ID NO: 617491 - DNA, 33 bp, Homo sapien
gaggtgactggaatgtcacaacagggtctaaac

SEQ ID NO: 617492 - DNA, 33 bp, Homo sapien
gaggtgactggaatgttacaacagggtctaaac

SEQ ID NO: 617493 - DNA, 33 bp, Homo sapien
aatgtcttggttagataagccaataaaccgatt

SEQ ID NO: 617494 - DNA, 33 bp, Homo sapien
aatgtcttggttagatgagccaataaaccgatt

SEQ ID NO: 617495 - DNA, 33 bp, Homo sapien
gagtacctcctgcgacacaagtggttaccagtc

SEQ ID NO: 617496 - DNA, 33 bp, Homo sapien
gagtacctcctgcgacgcaagtggttaccagtc

SEQ ID NO: 617497 - DNA, 33 bp, Homo sapien
gctgacctgaggtggaccactcagattctctct

SEQ ID NO: 617498 - DNA, 33 bp, Homo sapien
gctgacctgaggtggatcactcagattctctct

SEQ ID NO: 617499 - DNA, 33 bp, Homo sapien
gagggaagagcctcaaaattgaaagagcttggg

SEQ ID NO: 617500 - DNA, 33 bp, Homo sapien
gagggaagagcctcaacattgaaagagcttggg

SEQ ID NO: 617501 - DNA, 33 bp, Homo sapien
ccttccatcaagagtcagacagtgaggcatttc

SEQ ID NO: 617502 - DNA, 33 bp, Homo sapien
ccttccatcaagagtcggacagtgaggcatttc

SEQ ID NO: 617503 - DNA, 33 bp, Homo sapien
aactttgcatttctaacaagttatcagttaatg

SEQ ID NO: 617504 - DNA, 33 bp, Homo sapien
aactttgcatttctaataagttatcagttaatg

SEQ ID NO: 617505 - DNA, 33 bp, Homo sapien
cagcatgtatagtgacacctagcacataagtct

SEQ ID NO: 617506 - DNA, 33 bp, Homo sapien
cagcatgtatagtgacccctagcacataagtct

SEQ ID NO: 617507 - DNA, 33 bp, Homo sapien
cttgatgcacaagtaccctttaaattactgcag

SEQ ID NO: 617508 - DNA, 33 bp, Homo sapien
cttgatgcacaagtacgctttaaattactgcag

SEQ ID NO: 617509 - DNA, 33 bp, Homo sapien
ccttttcatccactccaaaatgtccatagcagg

SEQ ID NO: 617510 - DNA, 33 bp, Homo sapien
ccttttcatccactccgaaatgtccatagcagg

SEQ ID NO: 617511 - DNA, 33 bp, Homo sapien
ctacctgaatttcctcaaggtggtcaatggtcg

SEQ ID NO: 617512 - DNA, 33 bp, Homo sapien
ctacctgaatttcctcgaggtggtcaatggtcg

SEQ ID NO: 617513 - DNA, 33 bp, Homo sapien
ctccagacagtactccggccactactgaaccat

SEQ ID NO: 617514 - DNA, 33 bp, Homo sapien
ctccagacagtactcctgccactactgaaccat

SEQ ID NO: 617515 - DNA, 33 bp, Homo sapien
taccttgtataaatgacgtaagaattcaaggca

SEQ ID NO: 617516 - DNA, 33 bp, Homo sapien
taccttgtataaatgatgtaagaattcaaggca

SEQ ID NO: 617517 - DNA, 33 bp, Homo sapien
actaacaagttttccaaccttctttactgcaaa

SEQ ID NO: 617518 - DNA, 33 bp, Homo sapien
actaacaagttttccatccttctttactgcaaa

SEQ ID NO: 617519 - DNA, 33 bp, Homo sapien
gggaaaatgatgcccaagtcatagggctgttgc

SEQ ID NO: 617520 - DNA, 33 bp, Homo sapien
gggaaaatgatgcccacgtcatagggctgttgc

SEQ ID NO: 617521 - DNA, 33 bp, Homo sapien
cttgctatatcaagccgctgatgaccgcaggac

SEQ ID NO: 617522 - DNA, 33 bp, Homo sapien
cttgctatatcaagcctctgatgaccgcaggac

SEQ ID NO: 617523 - DNA, 33 bp, Homo sapien
agggagatggctggaacgcttacaaggaggtca

SEQ ID NO: 617524 - DNA, 33 bp, Homo sapien
agggagatggctggaatgcttacaaggaggtca

SEQ ID NO: 617525 - DNA, 33 bp, Homo sapien
atatgccagtgccatgaaaagctcaagaaagac

SEQ ID NO: 617526 - DNA, 33 bp, Homo sapien
atatgccagtgccatggaaagctcaagaaagac

SEQ ID NO: 617527 - DNA, 33 bp, Homo sapien
gatatgtgaccctggaacaataacccctgtgag

SEQ ID NO: 617528 - DNA, 33 bp, Homo sapien
gatatgtgaccctggatcaataacccctgtgag

SEQ ID NO: 617529 - DNA, 33 bp, Homo sapien
ctaatctcctactccacctagtgaacttctatt

SEQ ID NO: 617530 - DNA, 33 bp, Homo sapien
ctaatctcctactccatctagtgaacttctatt

SEQ ID NO: 617531 - DNA, 33 bp, Homo sapien
attgtgttcttggtgcagatattgtgtgtgatg

SEQ ID NO: 617532 - DNA, 33 bp, Homo sapien
attgtgttcttggtgcggatattgtgtgtgatg

SEQ ID NO: 617533 - DNA, 33 bp, Homo sapien
tgttaagctcctctcaactcaggaccctgatcc

SEQ ID NO: 617534 - DNA, 33 bp, Homo sapien
tgttaagctcctctcatctcaggaccctgatcc

SEQ ID NO: 617535 - DNA, 33 bp, Homo sapien
aactcactcccaggataacagcatttgtccatt

SEQ ID NO: 617536 - DNA, 33 bp, Homo sapien
aactcactcccaggatgacagcatttgtccatt

SEQ ID NO: 617537 - DNA, 33 bp, Homo sapien
cttacctcgggatgaactgtgccttgagtctca

SEQ ID NO: 617538 - DNA, 33 bp, Homo sapien
cttacctcgggatgaattgtgccttgagtctca

SEQ ID NO: 617539 - DNA, 33 bp, Homo sapien
ggagttcaggtattacacattagctgtcaattc

SEQ ID NO: 617540 - DNA, 33 bp, Homo sapien
ggagttcaggtattacgcattagctgtcaattc

SEQ ID NO: 617541 - DNA, 33 bp, Homo sapien
tgatatcttactcttacctctctggttctgaag

SEQ ID NO: 617542 - DNA, 33 bp, Homo sapien
tgatatcttactcttatctctctggttctgaag

SEQ ID NO: 617543 - DNA, 33 bp, Homo sapien
tttagtaagatttctaacctctgaaaagcttcc

SEQ ID NO: 617544 - DNA, 33 bp, Homo sapien
tttagtaagatttctagcctctgaaaagcttcc

SEQ ID NO: 617545 - DNA, 33 bp, Homo sapien
tgatccctttaatgacagtagatgatttctgaa

SEQ ID NO: 617546 - DNA, 33 bp, Homo sapien
tgatccctttaatgacggtagatgatttctgaa

SEQ ID NO: 617547 - DNA, 33 bp, Homo sapien
ataatccaaaataataaatatccataggtccat

SEQ ID NO: 617548 - DNA, 33 bp, Homo sapien
ataatccaaaataatagatatccataggtccat

SEQ ID NO: 617549 - DNA, 33 bp, Homo sapien
agatataactttacaccccataggacaactata

SEQ ID NO: 617550 - DNA, 33 bp, Homo sapien
agatataactttacactccataggacaactata

SEQ ID NO: 617551 - DNA, 33 bp, Homo sapien
gaaacagaatgagtcacatcaaggttttaatcc

SEQ ID NO: 617552 - DNA, 33 bp, Homo sapien
gaaacagaatgagtcatatcaaggttttaatcc

SEQ ID NO: 617553 - DNA, 33 bp, Homo sapien
gcttgtaatatgcagacgaaaatgatttaacag

SEQ ID NO: 617554 - DNA, 33 bp, Homo sapien
gcttgtaatatgcagatgaaaatgatttaacag

SEQ ID NO: 617555 - DNA, 33 bp, Homo sapien
caccacaccttctacaatgagttgcgtgtggcc

SEQ ID NO: 617556 - DNA, 33 bp, Homo sapien
caccacaccttctacagtgagttgcgtgtggcc

SEQ ID NO: 617557 - DNA, 33 bp, Homo sapien
gttatctagtaatgacggataaaaaggtgaata

SEQ ID NO: 617558 - DNA, 33 bp, Homo sapien
gttatctagtaatgactgataaaaaggtgaata

SEQ ID NO: 617559 - DNA, 33 bp, Homo sapien
cagggcaaatgaaaaaagcacagtcgagttcag

SEQ ID NO: 617560 - DNA, 33 bp, Homo sapien
cagggcaaatgaaaaaggcacagtcgagttcag

SEQ ID NO: 617561 - DNA, 33 bp, Homo sapien
agtgtaacactggaaacgatttgttgtattagt

SEQ ID NO: 617562 - DNA, 33 bp, Homo sapien
agtgtaacactggaaatgatttgttgtattagt

SEQ ID NO: 617563 - DNA, 33 bp, Homo sapien
aagatccctgtgtagactactgacctatggaac

SEQ ID NO: 617564 - DNA, 33 bp, Homo sapien
aagatccctgtgtagattactgacctatggaac

SEQ ID NO: 617565 - DNA, 33 bp, Homo sapien
agttgaagtttttccaaaattgataaaagacat

SEQ ID NO: 617566 - DNA, 33 bp, Homo sapien
agttgaagtttttccataattgataaaagacat

SEQ ID NO: 617567 - DNA, 33 bp, Homo sapien
tcagcagttgatgaaaatgcaaaatttcgtgca

SEQ ID NO: 617568 - DNA, 33 bp, Homo sapien
tcagcagttgatgaaagtgcaaaatttcgtgca

SEQ ID NO: 617569 - DNA, 33 bp, Homo sapien
cttaaaagaagagatactagttgcaaacagaag

SEQ ID NO: 617570 - DNA, 33 bp, Homo sapien
cttaaaagaagagatattagttgcaaacagaag

SEQ ID NO: 617571 - DNA, 33 bp, Homo sapien
atcaaaatgtccaagagcctggagctgcaagaa

SEQ ID NO: 617572 - DNA, 33 bp, Homo sapien
atcaaaatgtccaagatcctggagctgcaagaa
